United States Patent Application Publication US 2005/0244851 A1 - sequence listing, part 118

SEQ ID NO: 4603444 - DNA, 25 bp, Homo sapien
agcagagatcgagccacggcactct

SEQ ID NO: 4603445 - DNA, 25 bp, Homo sapien
cagagatcgagccacggcactctag

SEQ ID NO: 4603446 - DNA, 25 bp, Homo sapien
tacatgagtatttgtctaaaccatg

SEQ ID NO: 4603447 - DNA, 25 bp, Homo sapien
tttgcccatatacatgagtatttgt

SEQ ID NO: 4603448 - DNA, 25 bp, Homo sapien
ttattcacaaatacagtcctcgagt

SEQ ID NO: 4603449 - DNA, 25 bp, Homo sapien
taaaccatgtcttctttgtagcagg

SEQ ID NO: 4603450 - DNA, 25 bp, Homo sapien
ttggccaagtattggactccacccc

SEQ ID NO: 4603451 - DNA, 25 bp, Homo sapien
caagtattggactccacccccatag

SEQ ID NO: 4603452 - DNA, 25 bp, Homo sapien
actccacccccataggagccagagc

SEQ ID NO: 4603453 - DNA, 25 bp, Homo sapien
tattggactccacccccataggagc

SEQ ID NO: 4603454 - DNA, 25 bp, Homo sapien
ccacctcctccgcagtggtatagtg

SEQ ID NO: 4603455 - DNA, 25 bp, Homo sapien
gcatccacctcctccgcagtggtat

SEQ ID NO: 4603456 - DNA, 25 bp, Homo sapien
atccacctcctccgcagtggtatag

SEQ ID NO: 4603457 - DNA, 25 bp, Homo sapien
tgcatccacctcctccgcagtggta

SEQ ID NO: 4603458 - DNA, 25 bp, Homo sapien
gcttggtgttgggatctcccatgac

SEQ ID NO: 4603459 - DNA, 25 bp, Homo sapien
gcgtgcttggtgttgggatctccca

SEQ ID NO: 4603460 - DNA, 25 bp, Homo sapien
tggcgtgcttggtgttgggatctcc

SEQ ID NO: 4603461 - DNA, 25 bp, Homo sapien
gttgggatctcccatgaccacacag

SEQ ID NO: 4603462 - DNA, 25 bp, Homo sapien
ggagactgacttagacttgacggca

SEQ ID NO: 4603463 - DNA, 25 bp, Homo sapien
gacttagacttgacggcagggggag

SEQ ID NO: 4603464 - DNA, 25 bp, Homo sapien
acttagacttgacggcagggggagg

SEQ ID NO: 4603465 - DNA, 25 bp, Homo sapien
gactgacttagacttgacggcaggg

SEQ ID NO: 4603466 - DNA, 25 bp, Homo sapien
ccaggcttcaagtgtagtcaaattt

SEQ ID NO: 4603467 - DNA, 25 bp, Homo sapien
catgtgttgttcctaaaacccaggc

SEQ ID NO: 4603468 - DNA, 25 bp, Homo sapien
gcttacatctggcatataaatcagc

SEQ ID NO: 4603469 - DNA, 25 bp, Homo sapien
tgtgtaccacatataaccagcatgt

SEQ ID NO: 4603470 - DNA, 25 bp, Homo sapien
ctttggcctgcctaaatgctgggtt

SEQ ID NO: 4603471 - DNA, 25 bp, Homo sapien
taactttgtaatggatatagtactt

SEQ ID NO: 4603472 - DNA, 25 bp, Homo sapien
cctggccctcaatgactttcctaga

SEQ ID NO: 4603473 - DNA, 25 bp, Homo sapien
tggatatagtactttattagtaaag

SEQ ID NO: 4603474 - DNA, 25 bp, Homo sapien
gggctgctttcctatccactgacat

SEQ ID NO: 4603475 - DNA, 25 bp, Homo sapien
taacacttcaggttggtctgcagca

SEQ ID NO: 4603476 - DNA, 25 bp, Homo sapien
cagtttctttgctgagtgtttgagc

SEQ ID NO: 4603477 - DNA, 25 bp, Homo sapien
tcttgctggtgcgtcttgtctggca

SEQ ID NO: 4603478 - DNA, 25 bp, Homo sapien
tcagccctgaggattagcctgctgc

SEQ ID NO: 4603479 - DNA, 25 bp, Homo sapien
ccctgaggattagcctgctgctttt

SEQ ID NO: 4603480 - DNA, 25 bp, Homo sapien
tttctccttcaagccattacgtgtt

SEQ ID NO: 4603481 - DNA, 25 bp, Homo sapien
tcaagccattacgtgtttcttcagc

SEQ ID NO: 4603482 - DNA, 25 bp, Homo sapien
tgcctctgtgtcaggagcaactttc

SEQ ID NO: 4603483 - DNA, 25 bp, Homo sapien
gccttatggcagttgaagtaaccac

SEQ ID NO: 4603484 - DNA, 25 bp, Homo sapien
cactttgaggaggatgccttatggc

SEQ ID NO: 4603485 - DNA, 25 bp, Homo sapien
tggctcacaaggcttacagccctgg

SEQ ID NO: 4603486 - DNA, 25 bp, Homo sapien
tttctttcattgcataagggttttg

SEQ ID NO: 4603487 - DNA, 25 bp, Homo sapien
ccggcctgttctgctgtcttctgac

SEQ ID NO: 4603488 - DNA, 25 bp, Homo sapien
ctttcattgcataagggttttgctc

SEQ ID NO: 4603489 - DNA, 25 bp, Homo sapien
gcgcccggcctgttctgctgtcttc

SEQ ID NO: 4603490 - DNA, 25 bp, Homo sapien
gccagagccttgaggttataagcaa

SEQ ID NO: 4603491 - DNA, 25 bp, Homo sapien
gcagtagcctgaatacacaggagct

SEQ ID NO: 4603492 - DNA, 25 bp, Homo sapien
catgtggactgtgtatgccagagcc

SEQ ID NO: 4603493 - DNA, 25 bp, Homo sapien
acagaattggagcttgtgcaggact

SEQ ID NO: 4603494 - DNA, 25 bp, Homo sapien
tctgtacaataaagtcatcgggtgc

SEQ ID NO: 4603495 - DNA, 25 bp, Homo sapien
atctgtacaataaagtcatcgggtg

SEQ ID NO: 4603496 - DNA, 25 bp, Homo sapien
tgtacaataaagtcatcgggtgcag

SEQ ID NO: 4603497 - DNA, 25 bp, Homo sapien
tacaataaagtcatcgggtgcagtg

SEQ ID NO: 4603498 - DNA, 25 bp, Homo sapien
ggtgctcccattcaagtttccgagg

SEQ ID NO: 4603499 - DNA, 25 bp, Homo sapien
agtttccgaggtgaagctgctttcc

SEQ ID NO: 4603500 - DNA, 25 bp, Homo sapien
ttttcatcagggcagcgaaccgttt

SEQ ID NO: 4603501 - DNA, 25 bp, Homo sapien
aaggccatagggacggagcatgatc

SEQ ID NO: 4603502 - DNA, 25 bp, Homo sapien
gatcttgtcctcaaagttggatacg

SEQ ID NO: 4603503 - DNA, 25 bp, Homo sapien
tacgtcaatagagcaggtttttgcc

SEQ ID NO: 4603504 - DNA, 25 bp, Homo sapien
tttggttgaagtaaaaggctggcag

SEQ ID NO: 4603505 - DNA, 25 bp, Homo sapien
tcctcgcatctcagcaatatgtaga

SEQ ID NO: 4603506 - DNA, 25 bp, Homo sapien
caatcaggccactttcaagctcaga

SEQ ID NO: 4603507 - DNA, 25 bp, Homo sapien
tttacatagcttggttctttcagga

SEQ ID NO: 4603508 - DNA, 25 bp, Homo sapien
gctcagatttacatagcttggttct

SEQ ID NO: 4603509 - DNA, 25 bp, Homo sapien
ccatgggcttcaatcaggccacttt

SEQ ID NO: 4603510 - DNA, 25 bp, Homo sapien
ctgggccggagtgattctatgagag

SEQ ID NO: 4603511 - DNA, 25 bp, Homo sapien
gccggagtgattctatgagagtgcc

SEQ ID NO: 4603512 - DNA, 25 bp, Homo sapien
ctatgagagtgccacatgtctgagt

SEQ ID NO: 4603513 - DNA, 25 bp, Homo sapien
tgattctatgagagtgccacatgtc

SEQ ID NO: 4603514 - DNA, 25 bp, Homo sapien
cattcagcgatatgcgcaaccctca

SEQ ID NO: 4603515 - DNA, 25 bp, Homo sapien
catacggaaaccctgaacatttagc

SEQ ID NO: 4603516 - DNA, 25 bp, Homo sapien
cagtgtttcttagtacattcagcga

SEQ ID NO: 4603517 - DNA, 25 bp, Homo sapien
cagaacattttctcacccatacgga

SEQ ID NO: 4603518 - DNA, 25 bp, Homo sapien
cacccagtgtctgcagacttttgac

SEQ ID NO: 4603519 - DNA, 25 bp, Homo sapien
gctccacccagtgtctgcagacttt

SEQ ID NO: 4603520 - DNA, 25 bp, Homo sapien
tgctgctccacccagtgtctgcaga

SEQ ID NO: 4603521 - DNA, 25 bp, Homo sapien
tccacccagtgtctgcagacttttg

SEQ ID NO: 4603522 - DNA, 25 bp, Homo sapien
ctgagttgataaacactcaagaacc

SEQ ID NO: 4603523 - DNA, 25 bp, Homo sapien
tcaagaacctcaggagcgctgccag

SEQ ID NO: 4603524 - DNA, 25 bp, Homo sapien
cactcaagaacctcaggagcgctgc

SEQ ID NO: 4603525 - DNA, 25 bp, Homo sapien
ttgataaacactcaagaacctcagg

SEQ ID NO: 4603526 - DNA, 25 bp, Homo sapien
caaacatggactttttcatcctgag

SEQ ID NO: 4603527 - DNA, 25 bp, Homo sapien
aacccgtagctgatatgttgatgca

SEQ ID NO: 4603528 - DNA, 25 bp, Homo sapien
caatcttgtactggaggttgtagcc

SEQ ID NO: 4603529 - DNA, 25 bp, Homo sapien
ggttgtagccaaagcagtaggcaag

SEQ ID NO: 4603530 - DNA, 25 bp, Homo sapien
ggagataatattgctaagatatcaa

SEQ ID NO: 4603531 - DNA, 25 bp, Homo sapien
tgaactcctatttcataccgtaggc

SEQ ID NO: 4603532 - DNA, 25 bp, Homo sapien
ttcgtgttcacagattgggagataa

SEQ ID NO: 4603533 - DNA, 25 bp, Homo sapien
ggcaaaatttgctgcaaatggatga

SEQ ID NO: 4603534 - DNA, 25 bp, Homo sapien
tttggatagaccgacactccttcca

SEQ ID NO: 4603535 - DNA, 25 bp, Homo sapien
ccttccagaagccagggaactgctg

SEQ ID NO: 4603536 - DNA, 25 bp, Homo sapien
catatctgttagtacattttttgga

SEQ ID NO: 4603537 - DNA, 25 bp, Homo sapien
ctgtcgctgtggctgtaaaacagat

SEQ ID NO: 4603538 - DNA, 25 bp, Homo sapien
taatctatcgatcaaacaattacca

SEQ ID NO: 4603539 - DNA, 25 bp, Homo sapien
tgagcgctcctcaaggactgaaacc

SEQ ID NO: 4603540 - DNA, 25 bp, Homo sapien
aaattttcacttggagagtcttcca

SEQ ID NO: 4603541 - DNA, 25 bp, Homo sapien
caattaccatcctagtgagcgctcc

SEQ ID NO: 4603542 - DNA, 25 bp, Homo sapien
gcagggcacaaacgggcttgccagt

SEQ ID NO: 4603543 - DNA, 25 bp, Homo sapien
cattcctgggcacagcgcttggtga

SEQ ID NO: 4603544 - DNA, 25 bp, Homo sapien
tgcggagcagggcacaaacgggctt

SEQ ID NO: 4603545 - DNA, 25 bp, Homo sapien
ttcctgggcacagcgcttggtgaag

SEQ ID NO: 4603546 - DNA, 25 bp, Homo sapien
ctgatgctgactttgtaagggtcca

SEQ ID NO: 4603547 - DNA, 25 bp, Homo sapien
ggtccacatcctccggtaaggcctg

SEQ ID NO: 4603548 - DNA, 25 bp, Homo sapien
gctgactttgtaagggtccacatcc

SEQ ID NO: 4603549 - DNA, 25 bp, Homo sapien
tgtaagggtccacatcctccggtaa

SEQ ID NO: 4603550 - DNA, 25 bp, Homo sapien
tctgacactgataccctgcccaaat

SEQ ID NO: 4603551 - DNA, 25 bp, Homo sapien
caatcaacagacatgaatggaagtc

SEQ ID NO: 4603552 - DNA, 25 bp, Homo sapien
gacactgataccctgcccaaattgg

SEQ ID NO: 4603553 - DNA, 25 bp, Homo sapien
aatcaacagacatgaatggaagtcc

SEQ ID NO: 4603554 - DNA, 25 bp, Homo sapien
ccgtatgctggtttagggctgcaga

SEQ ID NO: 4603555 - DNA, 25 bp, Homo sapien
tgaagctgagagcatattccgtatg

SEQ ID NO: 4603556 - DNA, 25 bp, Homo sapien
catttgcctgatttgaagctgagag

SEQ ID NO: 4603557 - DNA, 25 bp, Homo sapien
ttggtgccagtgacacatacacagc

SEQ ID NO: 4603558 - DNA, 25 bp, Homo sapien
tctgctagcattggccagtcagcgg

SEQ ID NO: 4603559 - DNA, 25 bp, Homo sapien
tcagcggcgggttaagaactcacca

SEQ ID NO: 4603560 - DNA, 25 bp, Homo sapien
tgtcatgagcaaatgcgagcccagg

SEQ ID NO: 4603561 - DNA, 25 bp, Homo sapien
tagatactgtctggctactcaccca

SEQ ID NO: 4603562 - DNA, 25 bp, Homo sapien
aatgggaggcttgggactgtggtct

SEQ ID NO: 4603563 - DNA, 25 bp, Homo sapien
cacagcaggttttgacctgggaggt

SEQ ID NO: 4603564 - DNA, 25 bp, Homo sapien
ggaaagggtctccaatgagagtaac

SEQ ID NO: 4603565 - DNA, 25 bp, Homo sapien
cattcagtctggagtagcctgggaa

SEQ ID NO: 4603566 - DNA, 25 bp, Homo sapien
gtgcatgcctggcacacccagcgtg

SEQ ID NO: 4603567 - DNA, 25 bp, Homo sapien
ggagctgagaggtgcacgcataacc

SEQ ID NO: 4603568 - DNA, 25 bp, Homo sapien
tcccgggaacgcagtgttaagcagg

SEQ ID NO: 4603569 - DNA, 25 bp, Homo sapien
tgcacgcataaccttggcaggctcg

SEQ ID NO: 4603570 - DNA, 25 bp, Homo sapien
ttgggtgtgtcacctcactgccggc

SEQ ID NO: 4603571 - DNA, 25 bp, Homo sapien
gctacctctgctggtggcgtgacct

SEQ ID NO: 4603572 - DNA, 25 bp, Homo sapien
tggtgagggaaacttcagccggcct

SEQ ID NO: 4603573 - DNA, 25 bp, Homo sapien
tggagagaagctgaaaaccgaccct

SEQ ID NO: 4603574 - DNA, 25 bp, Homo sapien
tgggcgcatatgaagagagcccttc

SEQ ID NO: 4603575 - DNA, 25 bp, Homo sapien
tgtgcctagtgacccatgggccagg

SEQ ID NO: 4603576 - DNA, 25 bp, Homo sapien
tctcagcgaccggacattgctgcac

SEQ ID NO: 4603577 - DNA, 25 bp, Homo sapien
agggttccatcagcatttctcagcg

SEQ ID NO: 4603578 - DNA, 25 bp, Homo sapien
tcaaattgcccacaccaaactcaaa

SEQ ID NO: 4603579 - DNA, 25 bp, Homo sapien
cttccggccagtcccagactttgct

SEQ ID NO: 4603580 - DNA, 25 bp, Homo sapien
cagcaggaagctcattccacctgga

SEQ ID NO: 4603581 - DNA, 25 bp, Homo sapien
aatgtttcaaattgcccacaccaaa

SEQ ID NO: 4603582 - DNA, 25 bp, Homo sapien
gataaccgacagtagcctgatttgg

SEQ ID NO: 4603583 - DNA, 25 bp, Homo sapien
ggctgcaagattgtcgataaccgac

SEQ ID NO: 4603584 - DNA, 25 bp, Homo sapien
tattaaacttgtatggctcatcaga

SEQ ID NO: 4603585 - DNA, 25 bp, Homo sapien
gaatgctgcatcctaattggctgca

SEQ ID NO: 4603586 - DNA, 25 bp, Homo sapien
tcttgtgattcgggcccagctgcca

SEQ ID NO: 4603587 - DNA, 25 bp, Homo sapien
tctgtcttgtgattcgggcccagct

SEQ ID NO: 4603588 - DNA, 25 bp, Homo sapien
agtttctgtcttgtgattcgggccc

SEQ ID NO: 4603589 - DNA, 25 bp, Homo sapien
gtttctgtcttgtgattcgggccca

SEQ ID NO: 4603590 - DNA, 25 bp, Homo sapien
aaccagttgcgtgggtctcctccag

SEQ ID NO: 4603591 - DNA, 25 bp, Homo sapien
agcaggaaaccagttgcgtgggtct

SEQ ID NO: 4603592 - DNA, 25 bp, Homo sapien
caggaaaccagttgcgtgggtctcc

SEQ ID NO: 4603593 - DNA, 25 bp, Homo sapien
gaaaccagttgcgtgggtctcctcc

SEQ ID NO: 4603594 - DNA, 25 bp, Homo sapien
ctgacagcgatcaaataataacagc

SEQ ID NO: 4603595 - DNA, 25 bp, Homo sapien
gcatcctcgccccaagcatactgcc

SEQ ID NO: 4603596 - DNA, 25 bp, Homo sapien
agcatactgccacgcccactgacag

SEQ ID NO: 4603597 - DNA, 25 bp, Homo sapien
cacgcccactgacagcgatcaaata

SEQ ID NO: 4603598 - DNA, 25 bp, Homo sapien
ccagcctgcgtttgaactgcatgca

SEQ ID NO: 4603599 - DNA, 25 bp, Homo sapien
aaaggccatccgtcaagattcagct

SEQ ID NO: 4603600 - DNA, 25 bp, Homo sapien
gcatgttctataggctccaaagcca

SEQ ID NO: 4603601 - DNA, 25 bp, Homo sapien
tgtgagtgtagatctaccagcgccc

SEQ ID NO: 4603602 - DNA, 25 bp, Homo sapien
taagatcttcacaatgtgttcctga

SEQ ID NO: 4603603 - DNA, 25 bp, Homo sapien
gaaagtccttccctctacatttcaa

SEQ ID NO: 4603604 - DNA, 25 bp, Homo sapien
cgttgcattgcgtgatgctgtcttc

SEQ ID NO: 4603605 - DNA, 25 bp, Homo sapien
ttttctctatttgttgcagcgttgc

SEQ ID NO: 4603606 - DNA, 25 bp, Homo sapien
cagcaggggacagagcctgagcccc

SEQ ID NO: 4603607 - DNA, 25 bp, Homo sapien
agcaggggacagagcctgagcccca

SEQ ID NO: 4603608 - DNA, 25 bp, Homo sapien
gcaggggacagagcctgagccccat

SEQ ID NO: 4603609 - DNA, 25 bp, Homo sapien
gtagccactgatcatgatatcccgg

SEQ ID NO: 4603610 - DNA, 25 bp, Homo sapien
tatcactttgggtggtgtgctgact

SEQ ID NO: 4603611 - DNA, 25 bp, Homo sapien
gtcctgtgagatacctactgaattc

SEQ ID NO: 4603612 - DNA, 25 bp, Homo sapien
tttaagctgaatacctgccacccct

SEQ ID NO: 4603613 - DNA, 25 bp, Homo sapien
gatggactgttatccacgtggcaaa

SEQ ID NO: 4603614 - DNA, 25 bp, Homo sapien
tctaagtaagttgccaagacgcccg

SEQ ID NO: 4603615 - DNA, 25 bp, Homo sapien
ggccgggtgcctctatgacaaatag

SEQ ID NO: 4603616 - DNA, 25 bp, Homo sapien
tactttgacgcagacacgatggact

SEQ ID NO: 4603617 - DNA, 25 bp, Homo sapien
ggcttgacggccaatatttccacaa

SEQ ID NO: 4603618 - DNA, 25 bp, Homo sapien
caggcgatgtatccagggcagcttc

SEQ ID NO: 4603619 - DNA, 25 bp, Homo sapien
gattcccttgctcctggttatggca

SEQ ID NO: 4603620 - DNA, 25 bp, Homo sapien
gattgcaatgaagggaaggtgtcct

SEQ ID NO: 4603621 - DNA, 25 bp, Homo sapien
ttaatctttgagtttgtcatctgtg

SEQ ID NO: 4603622 - DNA, 25 bp, Homo sapien
gtttgtcatctgtgacacagggaga

SEQ ID NO: 4603623 - DNA, 25 bp, Homo sapien
tctttgagtttgtcatctgtgacac

SEQ ID NO: 4603624 - DNA, 25 bp, Homo sapien
agtttgtcatctgtgacacagggag

SEQ ID NO: 4603625 - DNA, 25 bp, Homo sapien
ctattgatccggtcttccctgttgc

SEQ ID NO: 4603626 - DNA, 25 bp, Homo sapien
taagaagcctattgatccggtcttc

SEQ ID NO: 4603627 - DNA, 25 bp, Homo sapien
gaagcctattgatccggtcttccct

SEQ ID NO: 4603628 - DNA, 25 bp, Homo sapien
ctcctaagaagcctattgatccggt

SEQ ID NO: 4603629 - DNA, 25 bp, Homo sapien
agcaatcaacgtgttatctgccaag

SEQ ID NO: 4603630 - DNA, 25 bp, Homo sapien
tcaacgtgttatctgccaaggcaat

SEQ ID NO: 4603631 - DNA, 25 bp, Homo sapien
cgtgttatctgccaaggcaattcgc

SEQ ID NO: 4603632 - DNA, 25 bp, Homo sapien
aatcaacgtgttatctgccaaggca

SEQ ID NO: 4603633 - DNA, 25 bp, Homo sapien
gtcttgttgtgcttaacaaagattc

SEQ ID NO: 4603634 - DNA, 25 bp, Homo sapien
aattgaagtcttgttgtgcttaaca

SEQ ID NO: 4603635 - DNA, 25 bp, Homo sapien
ttgaagtcttgttgtgcttaacaaa

SEQ ID NO: 4603636 - DNA, 25 bp, Homo sapien
gaagtcttgttgtgcttaacaaaga

SEQ ID NO: 4603637 - DNA, 25 bp, Homo sapien
gtgacaatgcttcgttttttcgtag

SEQ ID NO: 4603638 - DNA, 25 bp, Homo sapien
tttcctgtgacaatgcttcgttttt

SEQ ID NO: 4603639 - DNA, 25 bp, Homo sapien
caatgcttcgttttttcgtagataa

SEQ ID NO: 4603640 - DNA, 25 bp, Homo sapien
cctgtgacaatgcttcgttttttcg

SEQ ID NO: 4603641 - DNA, 25 bp, Homo sapien
gaacactggtgttgtggagctctga

SEQ ID NO: 4603642 - DNA, 25 bp, Homo sapien
caaggagagggccactgatcactgt

SEQ ID NO: 4603643 - DNA, 25 bp, Homo sapien
gcacattgccccgttgtccttgagg

SEQ ID NO: 4603644 - DNA, 25 bp, Homo sapien
taagtgctgcgggattgaatttctc

SEQ ID NO: 4603645 - DNA, 25 bp, Homo sapien
ccaatttttgaatctcgcgatgcaa

SEQ ID NO: 4603646 - DNA, 25 bp, Homo sapien
tcaataggctatacgcacagtacag

SEQ ID NO: 4603647 - DNA, 25 bp, Homo sapien
gcttaatttagacccagttgaggaa

SEQ ID NO: 4603648 - DNA, 25 bp, Homo sapien
tatattttgtctgacgctgctgaaa

SEQ ID NO: 4603649 - DNA, 25 bp, Homo sapien
tgggtaccggatatctgtaaagtaa

SEQ ID NO: 4603650 - DNA, 25 bp, Homo sapien
gatgagggacatcttttgggtaccg

SEQ ID NO: 4603651 - DNA, 25 bp, Homo sapien
gtacaccattgagagctgtggccat

SEQ ID NO: 4603652 - DNA, 25 bp, Homo sapien
tttctttcggtcgatgggtacacca

SEQ ID NO: 4603653 - DNA, 25 bp, Homo sapien
gaaaaagcctatctcctgaggctag

SEQ ID NO: 4603654 - DNA, 25 bp, Homo sapien
tatctcctgaggctagcagaacctg

SEQ ID NO: 4603655 - DNA, 25 bp, Homo sapien
cagtaagaaaaagcctatctcctga

SEQ ID NO: 4603656 - DNA, 25 bp, Homo sapien
aagcctatctcctgaggctagcaga

SEQ ID NO: 4603657 - DNA, 25 bp, Homo sapien
agagccctggatctacagtccctgg

SEQ ID NO: 4603658 - DNA, 25 bp, Homo sapien
cttgattgaaatgactgatgttcac

SEQ ID NO: 4603659 - DNA, 25 bp, Homo sapien
gtttttatgtgttgtcagagtagct

SEQ ID NO: 4603660 - DNA, 25 bp, Homo sapien
aatccagataattgtcatcacagag

SEQ ID NO: 4603661 - DNA, 25 bp, Homo sapien
gagtagctagaaagaatagtatatg

SEQ ID NO: 4603662 - DNA, 25 bp, Homo sapien
aacaaggagttggataagttgagat

SEQ ID NO: 4603663 - DNA, 25 bp, Homo sapien
caaggagttggataagttgagataa

SEQ ID NO: 4603664 - DNA, 25 bp, Homo sapien
gtagaacaaggagttggataagttg

SEQ ID NO: 4603665 - DNA, 25 bp, Homo sapien
agaacaaggagttggataagttgag

SEQ ID NO: 4603666 - DNA, 25 bp, Homo sapien
gaatccagtaaagatgtcatagatg

SEQ ID NO: 4603667 - DNA, 25 bp, Homo sapien
tgaatccagtaaagatgtcatagat

SEQ ID NO: 4603668 - DNA, 25 bp, Homo sapien
aatccagtaaagatgtcatagatgg

SEQ ID NO: 4603669 - DNA, 25 bp, Homo sapien
ctactggtgcaaatagcttaggcaa

SEQ ID NO: 4603670 - DNA, 25 bp, Homo sapien
caaatttgattggagctactggtgc

SEQ ID NO: 4603671 - DNA, 25 bp, Homo sapien
tcttggaatgaacagtaggaaacca

SEQ ID NO: 4603672 - DNA, 25 bp, Homo sapien
taggaaaccagatcttcgagttgtc

SEQ ID NO: 4603673 - DNA, 25 bp, Homo sapien
tttagcctcctcttgactgtgagag

SEQ ID NO: 4603674 - DNA, 25 bp, Homo sapien
caactattgaaccactactgatacg

SEQ ID NO: 4603675 - DNA, 25 bp, Homo sapien
tgagagtttctaagactttccttgc

SEQ ID NO: 4603676 - DNA, 25 bp, Homo sapien
gattgcaaacatagtacaggaagtt

SEQ ID NO: 4603677 - DNA, 25 bp, Homo sapien
gaaaatgacttcaccctcgaagttc

SEQ ID NO: 4603678 - DNA, 25 bp, Homo sapien
aagttcctcagattgtaacacacga

SEQ ID NO: 4603679 - DNA, 25 bp, Homo sapien
catgatacagcctgaaccacaaggg

SEQ ID NO: 4603680 - DNA, 25 bp, Homo sapien
gattacatcatttttggtgaggtca

SEQ ID NO: 4603681 - DNA, 25 bp, Homo sapien
atcagtagttctcaagccactcaac

SEQ ID NO: 4603682 - DNA, 25 bp, Homo sapien
tgtactcagcaatgccgactgccta

SEQ ID NO: 4603683 - DNA, 25 bp, Homo sapien
gacttgtgtactcagcaatgccgac

SEQ ID NO: 4603684 - DNA, 25 bp, Homo sapien
gcttgcctccgcaaggacttgtgta

SEQ ID NO: 4603685 - DNA, 25 bp, Homo sapien
gtcagcccttcaaggcttcaactcg

SEQ ID NO: 4603686 - DNA, 25 bp, Homo sapien
gattattcactgaccagcgctgacc

SEQ ID NO: 4603687 - DNA, 25 bp, Homo sapien
aactcgccaggaatgctgtcgctgg

SEQ ID NO: 4603688 - DNA, 25 bp, Homo sapien
tattcactgaccagcgctgacctgt

SEQ ID NO: 4603689 - DNA, 25 bp, Homo sapien
gcaccacaggctgcaaactggaggt

SEQ ID NO: 4603690 - DNA, 25 bp, Homo sapien
tctcatggcagtttgggcagtaact

SEQ ID NO: 4603691 - DNA, 25 bp, Homo sapien
tgtttgtgacaagtcatcagccaga

SEQ ID NO: 4603692 - DNA, 25 bp, Homo sapien
cacataggtatgatcagtgcaggag

SEQ ID NO: 4603693 - DNA, 25 bp, Homo sapien
catacgtccagtgtggcatggagca

SEQ ID NO: 4603694 - DNA, 25 bp, Homo sapien
catggagcatatggacttgacagac

SEQ ID NO: 4603695 - DNA, 25 bp, Homo sapien
cgtttggcggcacaagctggacttt

SEQ ID NO: 4603696 - DNA, 25 bp, Homo sapien
tcacacaagaagctgtacacggttt

SEQ ID NO: 4603697 - DNA, 25 bp, Homo sapien
tgagacagggtcaaggaaaccgtcc

SEQ ID NO: 4603698 - DNA, 25 bp, Homo sapien
cataggaagcagtgggccacgcagt

SEQ ID NO: 4603699 - DNA, 25 bp, Homo sapien
tcctgtgcgtcgagactctgtcatg

SEQ ID NO: 4603700 - DNA, 25 bp, Homo sapien
gtaaactgtttgtctcccgcactca

SEQ ID NO: 4603701 - DNA, 25 bp, Homo sapien
tggcaccagccaagatgattttcag

SEQ ID NO: 4603702 - DNA, 25 bp, Homo sapien
gattttcagtcggagccctgtgcca

SEQ ID NO: 4603703 - DNA, 25 bp, Homo sapien
taaatttttgcgctggctacggtgg

SEQ ID NO: 4603704 - DNA, 25 bp, Homo sapien
tcagagtgttaggtgtacgtcccag

SEQ ID NO: 4603705 - DNA, 25 bp, Homo sapien
gctttgggctgaggacgagctcttc

SEQ ID NO: 4603706 - DNA, 25 bp, Homo sapien
gattgacagggcatcttactcggct

SEQ ID NO: 4603707 - DNA, 25 bp, Homo sapien
ttactcggcttagacgccagggcct

SEQ ID NO: 4603708 - DNA, 25 bp, Homo sapien
tgtgagaggtaagccctgatcccag

SEQ ID NO: 4603709 - DNA, 25 bp, Homo sapien
cattcctcatgaccgtaaattgtaa

SEQ ID NO: 4603710 - DNA, 25 bp, Homo sapien
ttgtaaatggctctcaacactgccc

SEQ ID NO: 4603711 - DNA, 25 bp, Homo sapien
tagatggaatctgatgagaccgacc

SEQ ID NO: 4603712 - DNA, 25 bp, Homo sapien
gcatgccggcttcctccctttgaga

SEQ ID NO: 4603713 - DNA, 25 bp, Homo sapien
tctcaaggtcttcgcttctgtaact

SEQ ID NO: 4603714 - DNA, 25 bp, Homo sapien
cactgtcgagggaccttggtgccct

SEQ ID NO: 4603715 - DNA, 25 bp, Homo sapien
ttggtgcccttatctaagtccaagc

SEQ ID NO: 4603716 - DNA, 25 bp, Homo sapien
cctccaggcactgtcgagggacctt

SEQ ID NO: 4603717 - DNA, 25 bp, Homo sapien
ccagagcagctgtttcacagtgcat

SEQ ID NO: 4603718 - DNA, 25 bp, Homo sapien
ctccagagcagctgtttcacagtgc

SEQ ID NO: 4603719 - DNA, 25 bp, Homo sapien
tccagagcagctgtttcacagtgca

SEQ ID NO: 4603720 - DNA, 25 bp, Homo sapien
tcagaaggactgaactcattccaag

SEQ ID NO: 4603721 - DNA, 25 bp, Homo sapien
taaaaaggcatcaccacaggagcag

SEQ ID NO: 4603722 - DNA, 25 bp, Homo sapien
tcggtggtgagacctcctaaagcac

SEQ ID NO: 4603723 - DNA, 25 bp, Homo sapien
tcattccaagtaaccatgccccagg

SEQ ID NO: 4603724 - DNA, 25 bp, Homo sapien
aaacacgacgaagcctctggcctga

SEQ ID NO: 4603725 - DNA, 25 bp, Homo sapien
gatccaagaaacaatgagccccaaa

SEQ ID NO: 4603726 - DNA, 25 bp, Homo sapien
aaagcttcttgcgatgacaccagga

SEQ ID NO: 4603727 - DNA, 25 bp, Homo sapien
taaaatcccatgagtaaaaatcgag

SEQ ID NO: 4603728 - DNA, 25 bp, Homo sapien
ctgtctgagtaacctcgggcacagt

SEQ ID NO: 4603729 - DNA, 25 bp, Homo sapien
agtaacctcgggcacagtacaagcc

SEQ ID NO: 4603730 - DNA, 25 bp, Homo sapien
gtaacctcgggcacagtacaagccc

SEQ ID NO: 4603731 - DNA, 25 bp, Homo sapien
tctgagtaacctcgggcacagtaca

SEQ ID NO: 4603732 - DNA, 25 bp, Homo sapien
gcttcagacgccaaccatagtgagg

SEQ ID NO: 4603733 - DNA, 25 bp, Homo sapien
tggccagtccactaaatgtcacagg

SEQ ID NO: 4603734 - DNA, 25 bp, Homo sapien
caagtagtagcaggctctgtcccgc

SEQ ID NO: 4603735 - DNA, 25 bp, Homo sapien
caacagtgccgcagtttgggtccag

SEQ ID NO: 4603736 - DNA, 25 bp, Homo sapien
gtgacggctggcactgcaactgcta

SEQ ID NO: 4603737 - DNA, 25 bp, Homo sapien
gacagttgtgttcaagctattaggg

SEQ ID NO: 4603738 - DNA, 25 bp, Homo sapien
tgtacccattgccatcgagccattg

SEQ ID NO: 4603739 - DNA, 25 bp, Homo sapien
tccccgcttgggtggtctgactgaa

SEQ ID NO: 4603740 - DNA, 25 bp, Homo sapien
tgcaccatccataggcgtcttcgga

SEQ ID NO: 4603741 - DNA, 25 bp, Homo sapien
tcactgtggtctcagaagacgggct

SEQ ID NO: 4603742 - DNA, 25 bp, Homo sapien
taaagaagcccatcagttggccggc

SEQ ID NO: 4603743 - DNA, 25 bp, Homo sapien
ggaggtgtccatgcagtaactttca

SEQ ID NO: 4603744 - DNA, 25 bp, Homo sapien
tgggtgatgattcaagcccacttca

SEQ ID NO: 4603745 - DNA, 25 bp, Homo sapien
gcccacttcactgacgaatctgatg

SEQ ID NO: 4603746 - DNA, 25 bp, Homo sapien
catcataaaatatgcggagctcctt

SEQ ID NO: 4603747 - DNA, 25 bp, Homo sapien
ctaggaaggcacgaagataaacatc

SEQ ID NO: 4603748 - DNA, 25 bp, Homo sapien
gaaacagttgcaatctaggagaaaa

SEQ ID NO: 4603749 - DNA, 25 bp, Homo sapien
tagagaaggccatacaaatctgtag

SEQ ID NO: 4603750 - DNA, 25 bp, Homo sapien
catttggaccttgttagataagaca

SEQ ID NO: 4603751 - DNA, 25 bp, Homo sapien
gtagcttatatacccctagagaagg

SEQ ID NO: 4603752 - DNA, 25 bp, Homo sapien
ttgccattgttaatcactctgaatg

SEQ ID NO: 4603753 - DNA, 25 bp, Homo sapien
tttgccattgttaatcactctgaat

SEQ ID NO: 4603754 - DNA, 25 bp, Homo sapien
gaaaaataagagcagcgagaaaagc

SEQ ID NO: 4603755 - DNA, 25 bp, Homo sapien
taccaaaagtcaagtaagctaccac

SEQ ID NO: 4603756 - DNA, 25 bp, Homo sapien
catgcagttctaaacgagagaaggt

SEQ ID NO: 4603757 - DNA, 25 bp, Homo sapien
gggttatatagatacacagcataca

SEQ ID NO: 4603758 - DNA, 25 bp, Homo sapien
taaattctgcctggtatctccagcc

SEQ ID NO: 4603759 - DNA, 25 bp, Homo sapien
gaaatccggaattaaattctgcctg

SEQ ID NO: 4603760 - DNA, 25 bp, Homo sapien
tgcctggtatctccagccccattag

SEQ ID NO: 4603761 - DNA, 25 bp, Homo sapien
catagaaatccggaattaaattctg

SEQ ID NO: 4603762 - DNA, 25 bp, Homo sapien
agagaaagaaatgcgctaaccctcc

SEQ ID NO: 4603763 - DNA, 25 bp, Homo sapien
aaagaaatgcgctaaccctccctct

SEQ ID NO: 4603764 - DNA, 25 bp, Homo sapien
cagagaaagaaatgcgctaaccctc

SEQ ID NO: 4603765 - DNA, 25 bp, Homo sapien
aatgcgctaaccctccctctttggg

SEQ ID NO: 4603766 - DNA, 25 bp, Homo sapien
gcagtgagttccccgtgttccttga

SEQ ID NO: 4603767 - DNA, 25 bp, Homo sapien
aggcctctcctgacggcctggcagg

SEQ ID NO: 4603768 - DNA, 25 bp, Homo sapien
ctggcagggttaagaagggcggcaa

SEQ ID NO: 4603769 - DNA, 25 bp, Homo sapien
tctggctaaataggggagtccttgg

SEQ ID NO: 4603770 - DNA, 25 bp, Homo sapien
ggaggctggtggacaccgctcttgt

SEQ ID NO: 4603771 - DNA, 25 bp, Homo sapien
gggccgcaaaaccacacggtgagac

SEQ ID NO: 4603772 - DNA, 25 bp, Homo sapien
agcagcaccacgtcacctgctcccg

SEQ ID NO: 4603773 - DNA, 25 bp, Homo sapien
gacaccgctcttgtggcgctccttg

SEQ ID NO: 4603774 - DNA, 25 bp, Homo sapien
tggttaacaattcctcgtgcctcat

SEQ ID NO: 4603775 - DNA, 25 bp, Homo sapien
ctggtcggagtcccacacacaacag

SEQ ID NO: 4603776 - DNA, 25 bp, Homo sapien
acaattcctcgtgcctcattttctt

SEQ ID NO: 4603777 - DNA, 25 bp, Homo sapien
gttaacaattcctcgtgcctcattt

SEQ ID NO: 4603778 - DNA, 25 bp, Homo sapien
gccagccttcgcgtccgagctcagg

SEQ ID NO: 4603779 - DNA, 25 bp, Homo sapien
gggccagccttcgcgtccgagctca

SEQ ID NO: 4603780 - DNA, 25 bp, Homo sapien
gacggggccagccttcgcgtccgag

SEQ ID NO: 4603781 - DNA, 25 bp, Homo sapien
cagccttcgcgtccgagctcagggg

SEQ ID NO: 4603782 - DNA, 25 bp, Homo sapien
gcgaaaagatggggcacctcaacaa

SEQ ID NO: 4603783 - DNA, 25 bp, Homo sapien
ctgcgaaaagatggggcacctcaac

SEQ ID NO: 4603784 - DNA, 25 bp, Homo sapien
gaaaagatggggcacctcaacaaga

SEQ ID NO: 4603785 - DNA, 25 bp, Homo sapien
aaaagatggggcacctcaacaagag

SEQ ID NO: 4603786 - DNA, 25 bp, Homo sapien
gggccagcccacgacagtcgcggtc

SEQ ID NO: 4603787 - DNA, 25 bp, Homo sapien
ctcgagcgaggccaggtcgccgtac

SEQ ID NO: 4603788 - DNA, 25 bp, Homo sapien
cgcgaaccctcgagcgaggccaggt

SEQ ID NO: 4603789 - DNA, 25 bp, Homo sapien
acgacagtcgcggtcaccgcccctc

SEQ ID NO: 4603790 - DNA, 25 bp, Homo sapien
atgagcccgcgcggctccctagcca

SEQ ID NO: 4603791 - DNA, 25 bp, Homo sapien
cgccatgagcccgcgcggctcccta

SEQ ID NO: 4603792 - DNA, 25 bp, Homo sapien
tccctagccagaccgcggccccctc

SEQ ID NO: 4603793 - DNA, 25 bp, Homo sapien
gagcccgcgcggctccctagccaga

SEQ ID NO: 4603794 - DNA, 25 bp, Homo sapien
gattggctacgaacatcagcagggc

SEQ ID NO: 4603795 - DNA, 25 bp, Homo sapien
accgcgcctgcggattggctacgaa

SEQ ID NO: 4603796 - DNA, 25 bp, Homo sapien
cctgcggattggctacgaacatcag

SEQ ID NO: 4603797 - DNA, 25 bp, Homo sapien
tgccaccgcgcctgcggattggcta

SEQ ID NO: 4603798 - DNA, 25 bp, Homo sapien
gctggaggtagtttgcgaggctctt

SEQ ID NO: 4603799 - DNA, 25 bp, Homo sapien
aggtagtttgcgaggctcttctggg

SEQ ID NO: 4603800 - DNA, 25 bp, Homo sapien
tggctggaggtagtttgcgaggctc

SEQ ID NO: 4603801 - DNA, 25 bp, Homo sapien
tggaggtagtttgcgaggctcttct

SEQ ID NO: 4603802 - DNA, 25 bp, Homo sapien
ttggactggaatctagcccccagac

SEQ ID NO: 4603803 - DNA, 25 bp, Homo sapien
ccttaaagacatcgtgttaaagttg

SEQ ID NO: 4603804 - DNA, 25 bp, Homo sapien
ttctgttgccgggtaatgtatgctc

SEQ ID NO: 4603805 - DNA, 25 bp, Homo sapien
ccgggtaatgtatgctcctgtagtt

SEQ ID NO: 4603806 - DNA, 25 bp, Homo sapien
aagacatcgtgttaaagttgtccct

SEQ ID NO: 4603807 - DNA, 25 bp, Homo sapien
tgcagtagtatacaatagtgttcta

SEQ ID NO: 4603808 - DNA, 25 bp, Homo sapien
tattttcaataattgtagggtattc

SEQ ID NO: 4603809 - DNA, 25 bp, Homo sapien
tatacaatagtgttctaggccttca

SEQ ID NO: 4603810 - DNA, 25 bp, Homo sapien
tgtagggtattctaagtgtacagta

SEQ ID NO: 4603811 - DNA, 25 bp, Homo sapien
attattcatctcatacgggatgacc

SEQ ID NO: 4603812 - DNA, 25 bp, Homo sapien
tgactgtgattaataggacttctcc

SEQ ID NO: 4603813 - DNA, 25 bp, Homo sapien
aatttgaagatctattatgactgtg

SEQ ID NO: 4603814 - DNA, 25 bp, Homo sapien
gatgaccttgctcagtaggtcataa

SEQ ID NO: 4603815 - DNA, 25 bp, Homo sapien
tacaaatataggacagactgaagga

SEQ ID NO: 4603816 - DNA, 25 bp, Homo sapien
attagaaaggataggcaaagagggc

SEQ ID NO: 4603817 - DNA, 25 bp, Homo sapien
caaagagggcggtctacaaagcact

SEQ ID NO: 4603818 - DNA, 25 bp, Homo sapien
tagatccaccatactgagacaacac

SEQ ID NO: 4603819 - DNA, 25 bp, Homo sapien
caaaaattggaagagtagccccagg

SEQ ID NO: 4603820 - DNA, 25 bp, Homo sapien
caaaaatgggctggtttccctcaag

SEQ ID NO: 4603821 - DNA, 25 bp, Homo sapien
gattctagcctacatgggatacaca

SEQ ID NO: 4603822 - DNA, 25 bp, Homo sapien
gcagctttatgtagtgcacttccca

SEQ ID NO: 4603823 - DNA, 25 bp, Homo sapien
tctggaggaacacatagatacacac

SEQ ID NO: 4603824 - DNA, 25 bp, Homo sapien
cccgttcgttctgtgtatgccccta

SEQ ID NO: 4603825 - DNA, 25 bp, Homo sapien
tataggccaaaatcgtagaccttgc

SEQ ID NO: 4603826 - DNA, 25 bp, Homo sapien
catcgactggtagtgggactatgcc

SEQ ID NO: 4603827 - DNA, 25 bp, Homo sapien
tcccctcggctgaatagcagaggca

SEQ ID NO: 4603828 - DNA, 25 bp, Homo sapien
gtcccctcggctgaatagcagaggc

SEQ ID NO: 4603829 - DNA, 25 bp, Homo sapien
gggctagtgggggccagccctggta

SEQ ID NO: 4603830 - DNA, 25 bp, Homo sapien
ggctttggggctagtgggggccagc

SEQ ID NO: 4603831 - DNA, 25 bp, Homo sapien
ggctagtgggggccagccctggtac

SEQ ID NO: 4603832 - DNA, 25 bp, Homo sapien
tgggtccagccgggacgctctgtac

SEQ ID NO: 4603833 - DNA, 25 bp, Homo sapien
ctgggtccagccgggacgctctgta

SEQ ID NO: 4603834 - DNA, 25 bp, Homo sapien
gtccacgggcccccgtagctgtgct

SEQ ID NO: 4603835 - DNA, 25 bp, Homo sapien
tccacgggcccccgtagctgtgctg

SEQ ID NO: 4603836 - DNA, 25 bp, Homo sapien
ccacgggcccccgtagctgtgctga

SEQ ID NO: 4603837 - DNA, 25 bp, Homo sapien
tcgtccacgggcccccgtagctgtg

SEQ ID NO: 4603838 - DNA, 25 bp, Homo sapien
ctccaggagtgtcttctcgttccca

SEQ ID NO: 4603839 - DNA, 25 bp, Homo sapien
cctccaggagtgtcttctcgttccc

SEQ ID NO: 4603840 - DNA, 25 bp, Homo sapien
tccaggagtgtcttctcgttcccac

SEQ ID NO: 4603841 - DNA, 25 bp, Homo sapien
ccaggagtgtcttctcgttcccacg

SEQ ID NO: 4603842 - DNA, 25 bp, Homo sapien
cctccaggagtgtcttctcgttccc

SEQ ID NO: 4603843 - DNA, 25 bp, Homo sapien
tccaggagtgtcttctcgttcccac

SEQ ID NO: 4603844 - DNA, 25 bp, Homo sapien
ctccaggagtgtcttctcgttccca

SEQ ID NO: 4603845 - DNA, 25 bp, Homo sapien
ccaggagtgtcttctcgttcccacg

SEQ ID NO: 4603846 - DNA, 25 bp, Homo sapien
agaagcagcatctcgtcgcgccgct

SEQ ID NO: 4603847 - DNA, 25 bp, Homo sapien
agcagcatctcgtcgcgccgctgtg

SEQ ID NO: 4603848 - DNA, 25 bp, Homo sapien
tgagaagcagcatctcgtcgcgccg

SEQ ID NO: 4603849 - DNA, 25 bp, Homo sapien
aagcagcatctcgtcgcgccgctgt

SEQ ID NO: 4603850 - DNA, 25 bp, Homo sapien
ttctcgttcccacgcgagcgcaggt

SEQ ID NO: 4603851 - DNA, 25 bp, Homo sapien
ccatgagtgtcttctcgttcccacg

SEQ ID NO: 4603852 - DNA, 25 bp, Homo sapien
ccacgcgagcgcaggttggacagca

SEQ ID NO: 4603853 - DNA, 25 bp, Homo sapien
agtgtcttctcgttcccacgcgagc

SEQ ID NO: 4603854 - DNA, 25 bp, Homo sapien
catggtggtcttgggcttcgcacca

SEQ ID NO: 4603855 - DNA, 25 bp, Homo sapien
tgtagatcatgatatgcatggtggt

SEQ ID NO: 4603856 - DNA, 25 bp, Homo sapien
attgtagatcatgatatgcatggtg

SEQ ID NO: 4603857 - DNA, 25 bp, Homo sapien
tggtggtcttgggcttcgcaccaac

SEQ ID NO: 4603858 - DNA, 25 bp, Homo sapien
ggagtgcatgaagctgtgggagcca

SEQ ID NO: 4603859 - DNA, 25 bp, Homo sapien
gtgggagccattctcctcagccttg

SEQ ID NO: 4603860 - DNA, 25 bp, Homo sapien
catggagtgcatgaagctgtgggag

SEQ ID NO: 4603861 - DNA, 25 bp, Homo sapien
ggtggtttccatttgccgctccagc

SEQ ID NO: 4603862 - DNA, 25 bp, Homo sapien
cctggccagagcttgcgccaggctg

SEQ ID NO: 4603863 - DNA, 25 bp, Homo sapien
acctggccagagcttgcgccaggct

SEQ ID NO: 4603864 - DNA, 25 bp, Homo sapien
gacctggccagagcttgcgccaggc

SEQ ID NO: 4603865 - DNA, 25 bp, Homo sapien
ttacgtttcttgtctcaacactaac

SEQ ID NO: 4603866 - DNA, 25 bp, Homo sapien
ttttacgtttcttgtctcaacacta

SEQ ID NO: 4603867 - DNA, 25 bp, Homo sapien
acatttctcactcctccacaagttg

SEQ ID NO: 4603868 - DNA, 25 bp, Homo sapien
cgtttcttgtctcaacactaacatt

SEQ ID NO: 4603869 - DNA, 25 bp, Homo sapien
agttagctctcggcacatggtcggt

SEQ ID NO: 4603870 - DNA, 25 bp, Homo sapien
gctcttcttgacacagttagctctc

SEQ ID NO: 4603871 - DNA, 25 bp, Homo sapien
cttcttgacacagttagctctcggc

SEQ ID NO: 4603872 - DNA, 25 bp, Homo sapien
gttagctctcggcacatggtcggtg

SEQ ID NO: 4603873 - DNA, 25 bp, Homo sapien
cctatcggtggcgtcggtcgcaaag

SEQ ID NO: 4603874 - DNA, 25 bp, Homo sapien
ccctcccgccggagatgagggaaga

SEQ ID NO: 4603875 - DNA, 25 bp, Homo sapien
gatgtccctgtcagggttaaggcca

SEQ ID NO: 4603876 - DNA, 25 bp, Homo sapien
gctcccacgaaggttgaggcggcgg

SEQ ID NO: 4603877 - DNA, 25 bp, Homo sapien
accaggagccgcagccgcggctcac

SEQ ID NO: 4603878 - DNA, 25 bp, Homo sapien
cttccacaagaaccaggagccgcag

SEQ ID NO: 4603879 - DNA, 25 bp, Homo sapien
ttccacaagaaccaggagccgcagc

SEQ ID NO: 4603880 - DNA, 25 bp, Homo sapien
aggagccgcagccgcggctcacgct

SEQ ID NO: 4603881 - DNA, 25 bp, Homo sapien
ggagtctcgggaccaacggcagcct

SEQ ID NO: 4603882 - DNA, 25 bp, Homo sapien
gtctcgggaccaacggcagcctaac

SEQ ID NO: 4603883 - DNA, 25 bp, Homo sapien
ctgcaacagacggtggggcgcgcgg

SEQ ID NO: 4603884 - DNA, 25 bp, Homo sapien
cgcagatgggggagtctcgggacca

SEQ ID NO: 4603885 - DNA, 25 bp, Homo sapien
cggccggagccctcttgggacccat

SEQ ID NO: 4603886 - DNA, 25 bp, Homo sapien
gcggcggccggagccctcttgggac

SEQ ID NO: 4603887 - DNA, 25 bp, Homo sapien
ccgcggcggccggagccctcttggg

SEQ ID NO: 4603888 - DNA, 25 bp, Homo sapien
aggtgggagcccgcggcggccggag

SEQ ID NO: 4603889 - DNA, 25 bp, Homo sapien
tgtgacttgaatctagttgttctga

SEQ ID NO: 4603890 - DNA, 25 bp, Homo sapien
ctagttgttctgaagctaatatata

SEQ ID NO: 4603891 - DNA, 25 bp, Homo sapien
cttctgtggcttcaggtataattca

SEQ ID NO: 4603892 - DNA, 25 bp, Homo sapien
cagtgtttcctaaagttgtttgtgc

SEQ ID NO: 4603893 - DNA, 25 bp, Homo sapien
caattgaggaaagctttggcaggag

SEQ ID NO: 4603894 - DNA, 25 bp, Homo sapien
attgaggaaagctttggcaggagca

SEQ ID NO: 4603895 - DNA, 25 bp, Homo sapien
tcaattgaggaaagctttggcagga

SEQ ID NO: 4603896 - DNA, 25 bp, Homo sapien
aattgaggaaagctttggcaggagc

SEQ ID NO: 4603897 - DNA, 25 bp, Homo sapien
agctgaagattagctgggatgccca

SEQ ID NO: 4603898 - DNA, 25 bp, Homo sapien
tggggtgcccgattttctgggcaat

SEQ ID NO: 4603899 - DNA, 25 bp, Homo sapien
ccagttcctgttctcactgtggggt

SEQ ID NO: 4603900 - DNA, 25 bp, Homo sapien
ccagctgaagattagctgggatgcc

SEQ ID NO: 4603901 - DNA, 25 bp, Homo sapien
attgtgtacctgggccctgcccttc

SEQ ID NO: 4603902 - DNA, 25 bp, Homo sapien
ctccattgtgtacctgggccctgcc

SEQ ID NO: 4603903 - DNA, 25 bp, Homo sapien
ctctccattgtgtacctgggccctg

SEQ ID NO: 4603904 - DNA, 25 bp, Homo sapien
tgtgtacctgggccctgcccttcat

SEQ ID NO: 4603905 - DNA, 25 bp, Homo sapien
cttgtcagcgacatctttattaata

SEQ ID NO: 4603906 - DNA, 25 bp, Homo sapien
caacttgtcagcgacatctttatta

SEQ ID NO: 4603907 - DNA, 25 bp, Homo sapien
cagcgacatctttattaatatgtaa

SEQ ID NO: 4603908 - DNA, 25 bp, Homo sapien
attcaacttgtcagcgacatcttta

SEQ ID NO: 4603909 - DNA, 25 bp, Homo sapien
ctctggcagcggctgttggaagtgg

SEQ ID NO: 4603910 - DNA, 25 bp, Homo sapien
gcagcggctgttggaagtggcccgt

SEQ ID NO: 4603911 - DNA, 25 bp, Homo sapien
tggcagcggctgttggaagtggccc

SEQ ID NO: 4603912 - DNA, 25 bp, Homo sapien
gcggctgttggaagtggcccgtggt

SEQ ID NO: 4603913 - DNA, 25 bp, Homo sapien
cacttggagcaatgaaccttctgtt

SEQ ID NO: 4603914 - DNA, 25 bp, Homo sapien
cttcctgctcaatcaattcgtaggc

SEQ ID NO: 4603915 - DNA, 25 bp, Homo sapien
caattcgtaggcctccatatagtcc

SEQ ID NO: 4603916 - DNA, 25 bp, Homo sapien
gcaatgaaccttctgttgagctcct

SEQ ID NO: 4603917 - DNA, 25 bp, Homo sapien
tgcaagcacaaaggtacagtactcg

SEQ ID NO: 4603918 - DNA, 25 bp, Homo sapien
aaatagcaccgtagggtcgtgagac

SEQ ID NO: 4603919 - DNA, 25 bp, Homo sapien
caagataagctaaaaggccgggcgc

SEQ ID NO: 4603920 - DNA, 25 bp, Homo sapien
gagactctggtaacacgtgcgttag

SEQ ID NO: 4603921 - DNA, 25 bp, Homo sapien
caaaaacacagctcgtaagacaggg

SEQ ID NO: 4603922 - DNA, 25 bp, Homo sapien
gacaccctcggttctttccacagag

SEQ ID NO: 4603923 - DNA, 25 bp, Homo sapien
catgcaggagaccaagctaaggctt

SEQ ID NO: 4603924 - DNA, 25 bp, Homo sapien
taaatggccacggtcggtagaaagc

SEQ ID NO: 4603925 - DNA, 25 bp, Homo sapien
tacggaagcactaatggcaaacgcc

SEQ ID NO: 4603926 - DNA, 25 bp, Homo sapien
tatagatttacactccacgcacgag

SEQ ID NO: 4603927 - DNA, 25 bp, Homo sapien
tgagctttgagcgacccttgggact

SEQ ID NO: 4603928 - DNA, 25 bp, Homo sapien
tgtcacagcaccttgaagagaggcc

SEQ ID NO: 4603929 - DNA, 25 bp, Homo sapien
tggctggcgcatcttgtttgcatag

SEQ ID NO: 4603930 - DNA, 25 bp, Homo sapien
ggcgcatcttgtttgcatagaagtc

SEQ ID NO: 4603931 - DNA, 25 bp, Homo sapien
catcttgtttgcatagaagtccctg

SEQ ID NO: 4603932 - DNA, 25 bp, Homo sapien
acgagttcggcggtggctggcgcat

SEQ ID NO: 4603933 - DNA, 25 bp, Homo sapien
tataccgtccactggtctcgtgtgc

SEQ ID NO: 4603934 - DNA, 25 bp, Homo sapien
tcgtgtgcatttgtaggtcagagca

SEQ ID NO: 4603935 - DNA, 25 bp, Homo sapien
cttttctcggatgacccggcaatat

SEQ ID NO: 4603936 - DNA, 25 bp, Homo sapien
ggatgacccggcaatataccgtcca

SEQ ID NO: 4603937 - DNA, 25 bp, Homo sapien
tcgttgcagacctcctggtagcact

SEQ ID NO: 4603938 - DNA, 25 bp, Homo sapien
gccctgtgaccttgtgcatgcactg

SEQ ID NO: 4603939 - DNA, 25 bp, Homo sapien
tgccgtggcgccctgtgaccttgtg

SEQ ID NO: 4603940 - DNA, 25 bp, Homo sapien
atggtgttggcgttgatcctgtcgt

SEQ ID NO: 4603941 - DNA, 25 bp, Homo sapien
gacagcctgagtggggctgacatga

SEQ ID NO: 4603942 - DNA, 25 bp, Homo sapien
caggacagcctgagtggggctgaca

SEQ ID NO: 4603943 - DNA, 25 bp, Homo sapien
tgcagagacaggacagcctgagtgg

SEQ ID NO: 4603944 - DNA, 25 bp, Homo sapien
ctgcagagacaggacagcctgagtg

SEQ ID NO: 4603945 - DNA, 25 bp, Homo sapien
ggtccatgagtatactttggtgtcc

SEQ ID NO: 4603946 - DNA, 25 bp, Homo sapien
catgagtatactttggtgtccacca

SEQ ID NO: 4603947 - DNA, 25 bp, Homo sapien
tccatgagtatactttggtgtccac

SEQ ID NO: 4603948 - DNA, 25 bp, Homo sapien
gagtatactttggtgtccaccagag

SEQ ID NO: 4603949 - DNA, 25 bp, Homo sapien
tagatgaagggaaaagccaacgttc

SEQ ID NO: 4603950 - DNA, 25 bp, Homo sapien
ttcccaatgcggaacaaagccacgg

SEQ ID NO: 4603951 - DNA, 25 bp, Homo sapien
gcaatctggtaagtagttgtaccca

SEQ ID NO: 4603952 - DNA, 25 bp, Homo sapien
taaacgcagagcgaagtcacgccaa

SEQ ID NO: 4603953 - DNA, 25 bp, Homo sapien
agtaagagctacttatataattaaa

SEQ ID NO: 4603954 - DNA, 25 bp, Homo sapien
aagagctacttatataattaaaaat

SEQ ID NO: 4603955 - DNA, 25 bp, Homo sapien
taagagctacttatataattaaaaa

SEQ ID NO: 4603956 - DNA, 25 bp, Homo sapien
gagctacttatataattaaaaataa

SEQ ID NO: 4603957 - DNA, 25 bp, Homo sapien
cagtgcggggtgtcaggcggcaggg

SEQ ID NO: 4603958 - DNA, 25 bp, Homo sapien
tgcagtgcggggtgtcaggcggcag

SEQ ID NO: 4603959 - DNA, 25 bp, Homo sapien
gtggcccaccatcctaaccagctgc

SEQ ID NO: 4603960 - DNA, 25 bp, Homo sapien
ccaccatcctaaccagctgcatttt

SEQ ID NO: 4603961 - DNA, 25 bp, Homo sapien
tcaacagtgaatgcacggccaagcg

SEQ ID NO: 4603962 - DNA, 25 bp, Homo sapien
ggtctcagatagagtggagctccac

SEQ ID NO: 4603963 - DNA, 25 bp, Homo sapien
cctgagttgatcaggcagccagacc

SEQ ID NO: 4603964 - DNA, 25 bp, Homo sapien
cagacctcagggagcacaattagag

SEQ ID NO: 4603965 - DNA, 25 bp, Homo sapien
tcctgatagcatcgaatttgcccca

SEQ ID NO: 4603966 - DNA, 25 bp, Homo sapien
gctgctgttgaacgacaccctcgta

SEQ ID NO: 4603967 - DNA, 25 bp, Homo sapien
cctcgtaacctgagctgggccatgg

SEQ ID NO: 4603968 - DNA, 25 bp, Homo sapien
ggagactgtagtgtctcctgatagc

SEQ ID NO: 4603969 - DNA, 25 bp, Homo sapien
ggtttctccccgagacttggcatga

SEQ ID NO: 4603970 - DNA, 25 bp, Homo sapien
gaaatgtcaaagctcttcaaaagca

SEQ ID NO: 4603971 - DNA, 25 bp, Homo sapien
gtttctactgaaaaggtgcttggct

SEQ ID NO: 4603972 - DNA, 25 bp, Homo sapien
catgagcgaggaaaacctcggaagc

SEQ ID NO: 4603973 - DNA, 25 bp, Homo sapien
ggccgggtcgcctccagagctcttg

SEQ ID NO: 4603974 - DNA, 25 bp, Homo sapien
atgcaggcagtgattagaacctaga

SEQ ID NO: 4603975 - DNA, 25 bp, Homo sapien
gccacatgcaggcagtgattagaac

SEQ ID NO: 4603976 - DNA, 25 bp, Homo sapien
cacatgcaggcagtgattagaacct

SEQ ID NO: 4603977 - DNA, 25 bp, Homo sapien
catgcaggcagtgattagaacctag

SEQ ID NO: 4603978 - DNA, 25 bp, Homo sapien
ctgacaggcattcccggaaggctga

SEQ ID NO: 4603979 - DNA, 25 bp, Homo sapien
tgacaggcattcccggaaggctgaa

SEQ ID NO: 4603980 - DNA, 25 bp, Homo sapien
tagcagcctgagtagtcctcgcagg

SEQ ID NO: 4603981 - DNA, 25 bp, Homo sapien
tcggcctcgtggatgcgtcgcattt

SEQ ID NO: 4603982 - DNA, 25 bp, Homo sapien
ccagttttccactcgtagcagcctg

SEQ ID NO: 4603983 - DNA, 25 bp, Homo sapien
cccttgtgagttggtgcacgccacg

SEQ ID NO: 4603984 - DNA, 25 bp, Homo sapien
ggtgcgagccattgcgcctcgcagc

SEQ ID NO: 4603985 - DNA, 25 bp, Homo sapien
gctctttcttacgaattcaattcag

SEQ ID NO: 4603986 - DNA, 25 bp, Homo sapien
catttatcccaagatatgatctagc

SEQ ID NO: 4603987 - DNA, 25 bp, Homo sapien
tcccaagatatgatctagctttctc

SEQ ID NO: 4603988 - DNA, 25 bp, Homo sapien
ttgcttctctgtgtggcaaggtttc

SEQ ID NO: 4603989 - DNA, 25 bp, Homo sapien
tctctgtgtggcaaggtttcctgac

SEQ ID NO: 4603990 - DNA, 25 bp, Homo sapien
gcttctctgtgtggcaaggtttcct

SEQ ID NO: 4603991 - DNA, 25 bp, Homo sapien
ccttgcttctctgtgtggcaaggtt

SEQ ID NO: 4603992 - DNA, 25 bp, Homo sapien
ctgtctgacttgtgggctacccctg

SEQ ID NO: 4603993 - DNA, 25 bp, Homo sapien
cctcactgtctgacttgtgggctac

SEQ ID NO: 4603994 - DNA, 25 bp, Homo sapien
cactgtctgacttgtgggctacccc

SEQ ID NO: 4603995 - DNA, 25 bp, Homo sapien
tcactgtctgacttgtgggctaccc

SEQ ID NO: 4603996 - DNA, 25 bp, Homo sapien
cttgatgtgagaattttcataggaa

SEQ ID NO: 4603997 - DNA, 25 bp, Homo sapien
catcatcagagacatggtatctatg

SEQ ID NO: 4603998 - DNA, 25 bp, Homo sapien
ctatcttgatgtgagaattttcata

SEQ ID NO: 4603999 - DNA, 25 bp, Homo sapien
catcagagacatggtatctatgttt

SEQ ID NO: 4604000 - DNA, 25 bp, Homo sapien
ctgtgaccactcagacgcctcccag

SEQ ID NO: 4604001 - DNA, 25 bp, Homo sapien
tgaccactcagacgcctcccagatg

SEQ ID NO: 4604002 - DNA, 25 bp, Homo sapien
ccactcagacgcctcccagatggac

SEQ ID NO: 4604003 - DNA, 25 bp, Homo sapien
actcagacgcctcccagatggacag

SEQ ID NO: 4604004 - DNA, 25 bp, Homo sapien
gtgtgtgccgttctgcagctggtac

SEQ ID NO: 4604005 - DNA, 25 bp, Homo sapien
ctttctcacaggtcgccgagcaggg

SEQ ID NO: 4604006 - DNA, 25 bp, Homo sapien
agcctttctcacaggtcgccgagca

SEQ ID NO: 4604007 - DNA, 25 bp, Homo sapien
tcacaggtcgccgagcaggggctcc

SEQ ID NO: 4604008 - DNA, 25 bp, Homo sapien
tctcacaggtcgccgagcaggggct

SEQ ID NO: 4604009 - DNA, 25 bp, Homo sapien
tccggccggatcctggaattgctgc

SEQ ID NO: 4604010 - DNA, 25 bp, Homo sapien
ttccggccggatcctggaattgctg

SEQ ID NO: 4604011 - DNA, 25 bp, Homo sapien
cttccggccggatcctggaattgct

SEQ ID NO: 4604012 - DNA, 25 bp, Homo sapien
gccttccggccggatcctggaattg

SEQ ID NO: 4604013 - DNA, 25 bp, Homo sapien
ctttgagtctgctcccgcctttgct

SEQ ID NO: 4604014 - DNA, 25 bp, Homo sapien
cttgctcatggggatgccacttggc

SEQ ID NO: 4604015 - DNA, 25 bp, Homo sapien
cttggcatgccgtaggccacagggt

SEQ ID NO: 4604016 - DNA, 25 bp, Homo sapien
tttgagtctgctcccgcctttgctt

SEQ ID NO: 4604017 - DNA, 25 bp, Homo sapien
ggagcacaaatgcactcacgaccat

SEQ ID NO: 4604018 - DNA, 25 bp, Homo sapien
aggagcacaaatgcactcacgacca

SEQ ID NO: 4604019 - DNA, 25 bp, Homo sapien
acctcgagtctccccataagagagg

SEQ ID NO: 4604020 - DNA, 25 bp, Homo sapien
gaggagcacaaatgcactcacgacc

SEQ ID NO: 4604021 - DNA, 25 bp, Homo sapien
gcgaagtattcctccattattccct

SEQ ID NO: 4604022 - DNA, 25 bp, Homo sapien
ttgcgatgcatttcccacgtgttcc

SEQ ID NO: 4604023 - DNA, 25 bp, Homo sapien
gcatttcccacgtgttccttgtgct

SEQ ID NO: 4604024 - DNA, 25 bp, Homo sapien
gatgcatttcccacgtgttccttgt

SEQ ID NO: 4604025 - DNA, 25 bp, Homo sapien
aatacacttgatctcaactttgtag

SEQ ID NO: 4604026 - DNA, 25 bp, Homo sapien
ttcttttaaccagtaagctaggcca

SEQ ID NO: 4604027 - DNA, 25 bp, Homo sapien
gctaggccaattccaatacacttga

SEQ ID NO: 4604028 - DNA, 25 bp, Homo sapien
cacttgatctcaactttgtagtagt

SEQ ID NO: 4604029 - DNA, 25 bp, Homo sapien
tctgactcctaccatcacaggtttg

SEQ ID NO: 4604030 - DNA, 25 bp, Homo sapien
gagactgatccaagttttgtagaac

SEQ ID NO: 4604031 - DNA, 25 bp, Homo sapien
tgtatgactagaccacaatccatcc

SEQ ID NO: 4604032 - DNA, 25 bp, Homo sapien
aggttttggcctcttatgactagca

SEQ ID NO: 4604033 - DNA, 25 bp, Homo sapien
atgggtaaagtcgaccacaggctct

SEQ ID NO: 4604034 - DNA, 25 bp, Homo sapien
taggacacagcatgggtaaagtcga

SEQ ID NO: 4604035 - DNA, 25 bp, Homo sapien
gggtaaagtcgaccacaggctctac

SEQ ID NO: 4604036 - DNA, 25 bp, Homo sapien
ctatgggtaggacacagcatgggta

SEQ ID NO: 4604037 - DNA, 25 bp, Homo sapien
tctacaaataagttcctgacaaata

SEQ ID NO: 4604038 - DNA, 25 bp, Homo sapien
tggttctacaaataagttcctgaca

SEQ ID NO: 4604039 - DNA, 25 bp, Homo sapien
cgtgtggcagcttggttctacaaat

SEQ ID NO: 4604040 - DNA, 25 bp, Homo sapien
cagcttggttctacaaataagttcc

SEQ ID NO: 4604041 - DNA, 25 bp, Homo sapien
tttctagtgaaggtatagggtcctc

SEQ ID NO: 4604042 - DNA, 25 bp, Homo sapien
tctagtgaaggtatagggtcctcca

SEQ ID NO: 4604043 - DNA, 25 bp, Homo sapien
agtgaaggtatagggtcctccaagc

SEQ ID NO: 4604044 - DNA, 25 bp, Homo sapien
tagtgaaggtatagggtcctccaag

SEQ ID NO: 4604045 - DNA, 25 bp, Homo sapien
tacaagctactgctcagagacatag

SEQ ID NO: 4604046 - DNA, 25 bp, Homo sapien
tctccaatgtgatgctcgggatggc

SEQ ID NO: 4604047 - DNA, 25 bp, Homo sapien
gggaaagaaaatccttgactctcag

SEQ ID NO: 4604048 - DNA, 25 bp, Homo sapien
tctgcatgttatgagtgtacaagct

SEQ ID NO: 4604049 - DNA, 25 bp, Homo sapien
aagcagtagggcttctttgtcagag

SEQ ID NO: 4604050 - DNA, 25 bp, Homo sapien
agccatggtgggtgcatgacttgca

SEQ ID NO: 4604051 - DNA, 25 bp, Homo sapien
gggcttctttgtcagagtctttggg

SEQ ID NO: 4604052 - DNA, 25 bp, Homo sapien
gggtgcatgacttgcaggaaagccc

SEQ ID NO: 4604053 - DNA, 25 bp, Homo sapien
ctctgtcttaggacagaggcgctgg

SEQ ID NO: 4604054 - DNA, 25 bp, Homo sapien
tgccgaagggcaacggaccacactg

SEQ ID NO: 4604055 - DNA, 25 bp, Homo sapien
gaccacactgggcaaattctctgtc

SEQ ID NO: 4604056 - DNA, 25 bp, Homo sapien
ctgtgaaagggcctgccgaagggca

SEQ ID NO: 4604057 - DNA, 25 bp, Homo sapien
gtcttgttgacaatccgtgtacacg

SEQ ID NO: 4604058 - DNA, 25 bp, Homo sapien
cttgcttgagggcagtcactgtcgt

SEQ ID NO: 4604059 - DNA, 25 bp, Homo sapien
tcactgtcgttcaccagagttgtgg

SEQ ID NO: 4604060 - DNA, 25 bp, Homo sapien
tgcaagttgcaccttcggacctggg

SEQ ID NO: 4604061 - DNA, 25 bp, Homo sapien
gagccattctgacttgtctagccag

SEQ ID NO: 4604062 - DNA, 25 bp, Homo sapien
ccttcttataggtgttcccagagca

SEQ ID NO: 4604063 - DNA, 25 bp, Homo sapien
aagcagcaacacctcagatcagcgg

SEQ ID NO: 4604064 - DNA, 25 bp, Homo sapien
tcgtagggaggagagtacaagacac

SEQ ID NO: 4604065 - DNA, 25 bp, Homo sapien
ggttcgctttgattttccgcagtgc

SEQ ID NO: 4604066 - DNA, 25 bp, Homo sapien
gaattccataatcttggtcgtgaaa

SEQ ID NO: 4604067 - DNA, 25 bp, Homo sapien
cagatgaacaaagagtcctgcggtt

SEQ ID NO: 4604068 - DNA, 25 bp, Homo sapien
tccgcagtgcggtttacaggaacag

SEQ ID NO: 4604069 - DNA, 25 bp, Homo sapien
tgggaatgccgaatctgcacacaca

SEQ ID NO: 4604070 - DNA, 25 bp, Homo sapien
tggatcagccgcaaaacaaaaggcc

SEQ ID NO: 4604071 - DNA, 25 bp, Homo sapien
gcacactgcggctgtttctttatga

SEQ ID NO: 4604072 - DNA, 25 bp, Homo sapien
gaaggcccgtgggaatgccgaatct

SEQ ID NO: 4604073 - DNA, 25 bp, Homo sapien
gagatcacaaattaacggggaagaa

SEQ ID NO: 4604074 - DNA, 25 bp, Homo sapien
gggaagaagaacttccacggagaga

SEQ ID NO: 4604075 - DNA, 25 bp, Homo sapien
gaagaacttccacggagagactctg

SEQ ID NO: 4604076 - DNA, 25 bp, Homo sapien
agaacttccacggagagactctggc

SEQ ID NO: 4604077 - DNA, 25 bp, Homo sapien
cccttctcacatagcgaacagttgt

SEQ ID NO: 4604078 - DNA, 25 bp, Homo sapien
tgcagcggtagtttggttggtccct

SEQ ID NO: 4604079 - DNA, 25 bp, Homo sapien
tccggggagctctatcttccagtca

SEQ ID NO: 4604080 - DNA, 25 bp, Homo sapien
gaacagttgtgcctgcaatctggaa

SEQ ID NO: 4604081 - DNA, 25 bp, Homo sapien
tggttgggggctgagcgtagcaggg

SEQ ID NO: 4604082 - DNA, 25 bp, Homo sapien
ttcaggttctcacgtttgctcaccc

SEQ ID NO: 4604083 - DNA, 25 bp, Homo sapien
tgctcacccacatctctaccaggga

SEQ ID NO: 4604084 - DNA, 25 bp, Homo sapien
ggttctcacgtttgctcacccacat

SEQ ID NO: 4604085 - DNA, 25 bp, Homo sapien
ggcctgctccgtagaacccatttct

SEQ ID NO: 4604086 - DNA, 25 bp, Homo sapien
accagggcctgctccgtagaaccca

SEQ ID NO: 4604087 - DNA, 25 bp, Homo sapien
caccagcacggaccggctgagtccc

SEQ ID NO: 4604088 - DNA, 25 bp, Homo sapien
gggccaccagcacggaccggctgag

SEQ ID NO: 4604089 - DNA, 25 bp, Homo sapien
agtgacagactccaacacgggctgc

SEQ ID NO: 4604090 - DNA, 25 bp, Homo sapien
cagtgacagactccaacacgggctg

SEQ ID NO: 4604091 - DNA, 25 bp, Homo sapien
tgttgcttctgtgaacacccactgt

SEQ ID NO: 4604092 - DNA, 25 bp, Homo sapien
ccaggctcgtccctggtttgttgct

SEQ ID NO: 4604093 - DNA, 25 bp, Homo sapien
gcagcagaagcacgagcggccgtca

SEQ ID NO: 4604094 - DNA, 25 bp, Homo sapien
ggcaggtgaccaagctaggaggagg

SEQ ID NO: 4604095 - DNA, 25 bp, Homo sapien
gcagaagcacgagcggccgtcacag

SEQ ID NO: 4604096 - DNA, 25 bp, Homo sapien
cctggcagcagaagcacgagcggcc

SEQ ID NO: 4604097 - DNA, 25 bp, Homo sapien
ggatcctccgagctccagcaggaat

SEQ ID NO: 4604098 - DNA, 25 bp, Homo sapien
ggaatgacggcagcttcgatataac

SEQ ID NO: 4604099 - DNA, 25 bp, Homo sapien
caggtttatcctccaccacacggat

SEQ ID NO: 4604100 - DNA, 25 bp, Homo sapien
aaagctgtgggcaggtttatcctcc

SEQ ID NO: 4604101 - DNA, 25 bp, Homo sapien
gtagcaacaaacgacacagaagtaa

SEQ ID NO: 4604102 - DNA, 25 bp, Homo sapien
cagaagtaaaccacacctccaccct

SEQ ID NO: 4604103 - DNA, 25 bp, Homo sapien
agcaacaaacgacacagaagtaaac

SEQ ID NO: 4604104 - DNA, 25 bp, Homo sapien
ctgtagcaacaaacgacacagaagt

SEQ ID NO: 4604105 - DNA, 25 bp, Homo sapien
catttggggcggtgcggccgtagtc

SEQ ID NO: 4604106 - DNA, 25 bp, Homo sapien
cacatttggggcggtgcggccgtag

SEQ ID NO: 4604107 - DNA, 25 bp, Homo sapien
tcagacacatttggggcggtgcggc

SEQ ID NO: 4604108 - DNA, 25 bp, Homo sapien
agatcagacacatttggggcggtgc

SEQ ID NO: 4604109 - DNA, 25 bp, Homo sapien
tctgttccatccatagaggaacttc

SEQ ID NO: 4604110 - DNA, 25 bp, Homo sapien
ttctgttccatccatagaggaactt

SEQ ID NO: 4604111 - DNA, 25 bp, Homo sapien
tccaggcatatggaatccaaggcag

SEQ ID NO: 4604112 - DNA, 25 bp, Homo sapien
gttgttcggggtcaaagtgattaga

SEQ ID NO: 4604113 - DNA, 25 bp, Homo sapien
gagtttcaactgtgattggattcca

SEQ ID NO: 4604114 - DNA, 25 bp, Homo sapien
agaggaatctccactcaaactacca

SEQ ID NO: 4604115 - DNA, 25 bp, Homo sapien
ttttctatggaagaaggtgccagcg

SEQ ID NO: 4604116 - DNA, 25 bp, Homo sapien
tgggaaacccgtgaggctagactgt

SEQ ID NO: 4604117 - DNA, 25 bp, Homo sapien
gatggtaatcagtcttcaacgtcag

SEQ ID NO: 4604118 - DNA, 25 bp, Homo sapien
cagtgtagacaaacgaagaccagaa

SEQ ID NO: 4604119 - DNA, 25 bp, Homo sapien
cacatgtggataccttcgtacagag

SEQ ID NO: 4604120 - DNA, 25 bp, Homo sapien
taccttcgtacagagatcattctta

SEQ ID NO: 4604121 - DNA, 25 bp, Homo sapien
agcctctgccatcacacatgtggat

SEQ ID NO: 4604122 - DNA, 25 bp, Homo sapien
gccatcacacatgtggataccttcg

SEQ ID NO: 4604123 - DNA, 25 bp, Homo sapien
ttaaacattgtcctccaggacagga

SEQ ID NO: 4604124 - DNA, 25 bp, Homo sapien
taggtgtcaactacagacgctttct

SEQ ID NO: 4604125 - DNA, 25 bp, Homo sapien
ccatgtaagacaaagcagcctgcag

SEQ ID NO: 4604126 - DNA, 25 bp, Homo sapien
cagaaagttgtgtcccatgtaagac

SEQ ID NO: 4604127 - DNA, 25 bp, Homo sapien
tgcagaccccgcatctgtcctcttt

SEQ ID NO: 4604128 - DNA, 25 bp, Homo sapien
gaagtcgcccttcaccaagtggcag

SEQ ID NO: 4604129 - DNA, 25 bp, Homo sapien
aggtcttgccgtccccgctgcagac

SEQ ID NO: 4604130 - DNA, 25 bp, Homo sapien
cccgggcgtggctgaagtcgccctt

SEQ ID NO: 4604131 - DNA, 25 bp, Homo sapien
cctctgggccagtgtatagggaagc

SEQ ID NO: 4604132 - DNA, 25 bp, Homo sapien
cacaggttaatgagacgtacttcct

SEQ ID NO: 4604133 - DNA, 25 bp, Homo sapien
cagtgtatagggaagcacaggttaa

SEQ ID NO: 4604134 - DNA, 25 bp, Homo sapien
ttaatgagacgtacttccttcactg

SEQ ID NO: 4604135 - DNA, 25 bp, Homo sapien
cacccgggagatggtgctttcgaga

SEQ ID NO: 4604136 - DNA, 25 bp, Homo sapien
gctagtaggcaaaccacggcaatat

SEQ ID NO: 4604137 - DNA, 25 bp, Homo sapien
tgtaaagactggtggtctgcctgga

SEQ ID NO: 4604138 - DNA, 25 bp, Homo sapien
gaatgccgtctgctaccccaaaata

SEQ ID NO: 4604139 - DNA, 25 bp, Homo sapien
ggtgatcctgacactgatctgcctg

SEQ ID NO: 4604140 - DNA, 25 bp, Homo sapien
cagacatcaggagctgccattgtca

SEQ ID NO: 4604141 - DNA, 25 bp, Homo sapien
cacagttctgtgagggcaacgcatg

SEQ ID NO: 4604142 - DNA, 25 bp, Homo sapien
tgtcactagctcttggtgggctccc

SEQ ID NO: 4604143 - DNA, 25 bp, Homo sapien
caaggaccgaaggagaagtacgtca

SEQ ID NO: 4604144 - DNA, 25 bp, Homo sapien
ggcgagcagtagagttcacatggct

SEQ ID NO: 4604145 - DNA, 25 bp, Homo sapien
cagagatcagtctcgtagggcccgc

SEQ ID NO: 4604146 - DNA, 25 bp, Homo sapien
ctggcacttgccgtgcacgcagaga

SEQ ID NO: 4604147 - DNA, 25 bp, Homo sapien
gtgtaccgtccaggaccctgtcggc

SEQ ID NO: 4604148 - DNA, 25 bp, Homo sapien
gctcagccggtcgtgtgcctggcac

SEQ ID NO: 4604149 - DNA, 25 bp, Homo sapien
gcagaccgcatgttctacactggca

SEQ ID NO: 4604150 - DNA, 25 bp, Homo sapien
gcagggcaggttctcgcagaccgca

SEQ ID NO: 4604151 - DNA, 25 bp, Homo sapien
ggcacccgggcagtgtgtgcctcca

SEQ ID NO: 4604152 - DNA, 25 bp, Homo sapien
cttggtcctgagacaacagaaagag

SEQ ID NO: 4604153 - DNA, 25 bp, Homo sapien
gacaacagaaagaggcatcctccat

SEQ ID NO: 4604154 - DNA, 25 bp, Homo sapien
gagacaacagaaagaggcatcctcc

SEQ ID NO: 4604155 - DNA, 25 bp, Homo sapien
cctgagacaacagaaagaggcatcc

SEQ ID NO: 4604156 - DNA, 25 bp, Homo sapien
aggtgatgccgagcactccagactg

SEQ ID NO: 4604157 - DNA, 25 bp, Homo sapien
gcttgttctcaaggtgatgccgagc

SEQ ID NO: 4604158 - DNA, 25 bp, Homo sapien
tgggttctgtgttgaagcttgttct

SEQ ID NO: 4604159 - DNA, 25 bp, Homo sapien
gtgttgaagcttgttctcaaggtga

SEQ ID NO: 4604160 - DNA, 25 bp, Homo sapien
atgggcgtcttgctcacgcactccc

SEQ ID NO: 4604161 - DNA, 25 bp, Homo sapien
gggctccagtctccgtccacatgct

SEQ ID NO: 4604162 - DNA, 25 bp, Homo sapien
tcctctgcctgaagcgggctcccgt

SEQ ID NO: 4604163 - DNA, 25 bp, Homo sapien
tcccgtcccacatgttcggctgcac

SEQ ID NO: 4604164 - DNA, 25 bp, Homo sapien
tgggaggcggcatgccccggttgag

SEQ ID NO: 4604165 - DNA, 25 bp, Homo sapien
tgagtgcgtttctcgctgggaggcg

SEQ ID NO: 4604166 - DNA, 25 bp, Homo sapien
cccggttgaggttgtgaacctgaga

SEQ ID NO: 4604167 - DNA, 25 bp, Homo sapien
gaacctgagagttgtgtttgctgct

SEQ ID NO: 4604168 - DNA, 25 bp, Homo sapien
ttgtctgccccacactcggtgccat

SEQ ID NO: 4604169 - DNA, 25 bp, Homo sapien
ccttctaccaggcaccacagtccag

SEQ ID NO: 4604170 - DNA, 25 bp, Homo sapien
gcttggtcttgcaggatgtgtctcc

SEQ ID NO: 4604171 - DNA, 25 bp, Homo sapien
cagcttggtcttgcaggatgtgtct

SEQ ID NO: 4604172 - DNA, 25 bp, Homo sapien
gttgagttcaacagctccaacaacc

SEQ ID NO: 4604173 - DNA, 25 bp, Homo sapien
ggagttgagttcaacagctccaaca

SEQ ID NO: 4604174 - DNA, 25 bp, Homo sapien
caacagctccaacaaccaccgaggg

SEQ ID NO: 4604175 - DNA, 25 bp, Homo sapien
aacagctccaacaaccaccgagggc

SEQ ID NO: 4604176 - DNA, 25 bp, Homo sapien
ttaggaccatctgctgccaaagtcc

SEQ ID NO: 4604177 - DNA, 25 bp, Homo sapien
aggaccatctgctgccaaagtccaa

SEQ ID NO: 4604178 - DNA, 25 bp, Homo sapien
aaattaggaccatctgctgccaaag

SEQ ID NO: 4604179 - DNA, 25 bp, Homo sapien
ggaaaattaggaccatctgctgcca

SEQ ID NO: 4604180 - DNA, 25 bp, Homo sapien
aatgtaaaaggcacgtgggaagatc

SEQ ID NO: 4604181 - DNA, 25 bp, Homo sapien
agcttcaatgtaaaaggcacgtggg

SEQ ID NO: 4604182 - DNA, 25 bp, Homo sapien
ctctcgaggcaaaagcaaacaggaa

SEQ ID NO: 4604183 - DNA, 25 bp, Homo sapien
ttattgctggtgaaactctcgaggc

SEQ ID NO: 4604184 - DNA, 25 bp, Homo sapien
tgatatgcatttggattttgagctt

SEQ ID NO: 4604185 - DNA, 25 bp, Homo sapien
cttgatatgcatttggattttgagc

SEQ ID NO: 4604186 - DNA, 25 bp, Homo sapien
tcacttgatatgcatttggattttg

SEQ ID NO: 4604187 - DNA, 25 bp, Homo sapien
cacttgatatgcatttggattttga

SEQ ID NO: 4604188 - DNA, 25 bp, Homo sapien
tgcctggctgctgagttccacatac

SEQ ID NO: 4604189 - DNA, 25 bp, Homo sapien
cacctgctgcctggctgctgagttc

SEQ ID NO: 4604190 - DNA, 25 bp, Homo sapien
tgctgcctggctgctgagttccaca

SEQ ID NO: 4604191 - DNA, 25 bp, Homo sapien
cctgctgcctggctgctgagttcca

SEQ ID NO: 4604192 - DNA, 25 bp, Homo sapien
tctccacaggatggtgcaggttctg

SEQ ID NO: 4604193 - DNA, 25 bp, Homo sapien
tcccctagccccgtcactgccaggg

SEQ ID NO: 4604194 - DNA, 25 bp, Homo sapien
ccttctccacaggatggtgcaggtt

SEQ ID NO: 4604195 - DNA, 25 bp, Homo sapien
ctccttctccacaggatggtgcagg

SEQ ID NO: 4604196 - DNA, 25 bp, Homo sapien
cagcttgtgcgggaggcgtactgtg

SEQ ID NO: 4604197 - DNA, 25 bp, Homo sapien
actgctcgttggcactgtagtgcat

SEQ ID NO: 4604198 - DNA, 25 bp, Homo sapien
gggtccgtgactagcaagcaggtgc

SEQ ID NO: 4604199 - DNA, 25 bp, Homo sapien
ggtggcattcatgccaaacaggatc

SEQ ID NO: 4604200 - DNA, 25 bp, Homo sapien
tcctgacatgatgtgggacctgcca

SEQ ID NO: 4604201 - DNA, 25 bp, Homo sapien
gacctgccagcgcaagatgagtggt

SEQ ID NO: 4604202 - DNA, 25 bp, Homo sapien
gatgagtggtcatcgtcgtggttca

SEQ ID NO: 4604203 - DNA, 25 bp, Homo sapien
tttcaaggtcatctcggctgcagga

SEQ ID NO: 4604204 - DNA, 25 bp, Homo sapien
ccattgcatgtggaccaggtcaaat

SEQ ID NO: 4604205 - DNA, 25 bp, Homo sapien
ccaggtcaaattgctatctccagcc

SEQ ID NO: 4604206 - DNA, 25 bp, Homo sapien
ggtgtaaccattgcatgtggaccag

SEQ ID NO: 4604207 - DNA, 25 bp, Homo sapien
aaattgctatctccagccttggcag

SEQ ID NO: 4604208 - DNA, 25 bp, Homo sapien
gattttgatgtcaggtgtaggcgtc

SEQ ID NO: 4604209 - DNA, 25 bp, Homo sapien
gtgtaggcgtcaggtccggcctcac

SEQ ID NO: 4604210 - DNA, 25 bp, Homo sapien
tcaggtccggcctcacctcaaagta

SEQ ID NO: 4604211 - DNA, 25 bp, Homo sapien
ttttgatgtcaggtgtaggcgtcag

SEQ ID NO: 4604212 - DNA, 25 bp, Homo sapien
ctcctggtctgccaagggtgcactg

SEQ ID NO: 4604213 - DNA, 25 bp, Homo sapien
ctggtctgccaagggtgcactgcga

SEQ ID NO: 4604214 - DNA, 25 bp, Homo sapien
tgccaagggtgcactgcgaatgacg

SEQ ID NO: 4604215 - DNA, 25 bp, Homo sapien
tctgccaagggtgcactgcgaatga

SEQ ID NO: 4604216 - DNA, 25 bp, Homo sapien
cagtgcgtagcaaaaatcatgtgta

SEQ ID NO: 4604217 - DNA, 25 bp, Homo sapien
tgtgtacgtggagagcaattcctca

SEQ ID NO: 4604218 - DNA, 25 bp, Homo sapien
tccaggtgtcgaggaggaacttgct

SEQ ID NO: 4604219 - DNA, 25 bp, Homo sapien
cagttttagggaagtctacagccac

SEQ ID NO: 4604220 - DNA, 25 bp, Homo sapien
cagtggcctttcaaggtctttggag

SEQ ID NO: 4604221 - DNA, 25 bp, Homo sapien
ccagtggcctttcaaggtctttgga

SEQ ID NO: 4604222 - DNA, 25 bp, Homo sapien
ctctggcgggcccagcttgcaggtc

SEQ ID NO: 4604223 - DNA, 25 bp, Homo sapien
agacttcccgtagccccctgtcaca

SEQ ID NO: 4604224 - DNA, 25 bp, Homo sapien
tgtggccatcaccagatcagacttc

SEQ ID NO: 4604225 - DNA, 25 bp, Homo sapien
atcagacttcccgtagccccctgtc

SEQ ID NO: 4604226 - DNA, 25 bp, Homo sapien
gctgtggccatcaccagatcagact

SEQ ID NO: 4604227 - DNA, 25 bp, Homo sapien
tggcaggtatgatagggtcctgtcc

SEQ ID NO: 4604228 - DNA, 25 bp, Homo sapien
gcaggtatgatagggtcctgtccca

SEQ ID NO: 4604229 - DNA, 25 bp, Homo sapien
tgtggcctgggctcgccacctctcc

SEQ ID NO: 4604230 - DNA, 25 bp, Homo sapien
ctgtggcctgggctcgccacctctc

SEQ ID NO: 4604231 - DNA, 25 bp, Homo sapien
acagtgtgcactgctcagatcctgg

SEQ ID NO: 4604232 - DNA, 25 bp, Homo sapien
ccacagtgtgcactgctcagatcct

SEQ ID NO: 4604233 - DNA, 25 bp, Homo sapien
agatcctggtctcttttgcccccca

SEQ ID NO: 4604234 - DNA, 25 bp, Homo sapien
tgaacccacagtgtgcactgctcag

SEQ ID NO: 4604235 - DNA, 25 bp, Homo sapien
gacatccctgggtcatcacagagca

SEQ ID NO: 4604236 - DNA, 25 bp, Homo sapien
catgcatgcctttgggtcgtcagca

SEQ ID NO: 4604237 - DNA, 25 bp, Homo sapien
tgtgccacaaagcttcacaggccct

SEQ ID NO: 4604238 - DNA, 25 bp, Homo sapien
ctttattaattcaggtgctccccag

SEQ ID NO: 4604239 - DNA, 25 bp, Homo sapien
tggtccgagtctccactgggccaca

SEQ ID NO: 4604240 - DNA, 25 bp, Homo sapien
acatagcgccgtgggaagggaggtg

SEQ ID NO: 4604241 - DNA, 25 bp, Homo sapien
cgagtctccactgggccacatagcg

SEQ ID NO: 4604242 - DNA, 25 bp, Homo sapien
actgggccacatagcgccgtgggaa

SEQ ID NO: 4604243 - DNA, 25 bp, Homo sapien
gtctgcaaaatgtcgactctggaca

SEQ ID NO: 4604244 - DNA, 25 bp, Homo sapien
cgtctgcaaaatgtcgactctggac

SEQ ID NO: 4604245 - DNA, 25 bp, Homo sapien
cgtgacgctgagctccagccaacag

SEQ ID NO: 4604246 - DNA, 25 bp, Homo sapien
taaaaccaaattgtgatcggcatgt

SEQ ID NO: 4604247 - DNA, 25 bp, Homo sapien
aattgtgatcggcatgttggatgct

SEQ ID NO: 4604248 - DNA, 25 bp, Homo sapien
cggcatgttggatgctgacatccag

SEQ ID NO: 4604249 - DNA, 25 bp, Homo sapien
gatcggcatgttggatgctgacatc

SEQ ID NO: 4604250 - DNA, 25 bp, Homo sapien
tgttaatcgaatgaatccacagctt

SEQ ID NO: 4604251 - DNA, 25 bp, Homo sapien
cagcctgctcctttgtcagggcaca

SEQ ID NO: 4604252 - DNA, 25 bp, Homo sapien
cacagcttcagctcagtggttacac

SEQ ID NO: 4604253 - DNA, 25 bp, Homo sapien
gtggttacacgggagttaatgatga

SEQ ID NO: 4604254 - DNA, 25 bp, Homo sapien
tgcacacacctcctaagtaagcaat

SEQ ID NO: 4604255 - DNA, 25 bp, Homo sapien
ttgtcttcggcaagcacacacttcc

SEQ ID NO: 4604256 - DNA, 25 bp, Homo sapien
caaattgagaccattgtcttcggca

SEQ ID NO: 4604257 - DNA, 25 bp, Homo sapien
cagctcatgggcgatggtaaaggcc

SEQ ID NO: 4604258 - DNA, 25 bp, Homo sapien
tgctgtctctggtaagagaatcaca

SEQ ID NO: 4604259 - DNA, 25 bp, Homo sapien
acagatgactcgagggtccctgggc

SEQ ID NO: 4604260 - DNA, 25 bp, Homo sapien
gagtccccacagatgactcgagggt

SEQ ID NO: 4604261 - DNA, 25 bp, Homo sapien
ggtaagagaatcacacgagtcccca

SEQ ID NO: 4604262 - DNA, 25 bp, Homo sapien
ctacaagataacattttcatgtgtt

SEQ ID NO: 4604263 - DNA, 25 bp, Homo sapien
tgatgctcgtgtcagcaggacccat

SEQ ID NO: 4604264 - DNA, 25 bp, Homo sapien
gccagagaagatgatgctcgtgtca

SEQ ID NO: 4604265 - DNA, 25 bp, Homo sapien
cagagaagatgatgctcgtgtcagc

SEQ ID NO: 4604266 - DNA, 25 bp, Homo sapien
gaagatgatgctcgtgtcagcagga

SEQ ID NO: 4604267 - DNA, 25 bp, Homo sapien
gctgctggttctgcttagcgaatct

SEQ ID NO: 4604268 - DNA, 25 bp, Homo sapien
tggtacacagtaggctcttccaggt

SEQ ID NO: 4604269 - DNA, 25 bp, Homo sapien
caatgaaaaccgagcggcaacaggc

SEQ ID NO: 4604270 - DNA, 25 bp, Homo sapien
tccaggtctgtcaggaacccaggag

SEQ ID NO: 4604271 - DNA, 25 bp, Homo sapien
tacctgtatcactcgtatttctcgg

SEQ ID NO: 4604272 - DNA, 25 bp, Homo sapien
gcaacaccaggctttacctgtatca

SEQ ID NO: 4604273 - DNA, 25 bp, Homo sapien
gtatttctcggaccatatgagccat

SEQ ID NO: 4604274 - DNA, 25 bp, Homo sapien
cactcgtatttctcggaccatatga

SEQ ID NO: 4604275 - DNA, 25 bp, Homo sapien
tcatgtctggatctcgtctggaaca

SEQ ID NO: 4604276 - DNA, 25 bp, Homo sapien
gaggccagcaattaaaccagaagtt

SEQ ID NO: 4604277 - DNA, 25 bp, Homo sapien
gatgagctgacgattttcctggact

SEQ ID NO: 4604278 - DNA, 25 bp, Homo sapien
gaatgtctggcgttcttctgatagc

SEQ ID NO: 4604279 - DNA, 25 bp, Homo sapien
catcagaggccactctctttatctg

SEQ ID NO: 4604280 - DNA, 25 bp, Homo sapien
agaccagatgcagcctgagtaacta

SEQ ID NO: 4604281 - DNA, 25 bp, Homo sapien
aaggggacagccacgccttagctcc

SEQ ID NO: 4604282 - DNA, 25 bp, Homo sapien
aggcaaactggaaactgtctaaagg

SEQ ID NO: 4604283 - DNA, 25 bp, Homo sapien
gccaccaaagagtcagttgtttcct

SEQ ID NO: 4604284 - DNA, 25 bp, Homo sapien
tggagagaagcggctgctgtcttca

SEQ ID NO: 4604285 - DNA, 25 bp, Homo sapien
cttggagagaagcggctgctgtctt

SEQ ID NO: 4604286 - DNA, 25 bp, Homo sapien
ggagagaagcggctgctgtcttcag

SEQ ID NO: 4604287 - DNA, 25 bp, Homo sapien
gcttggagagaagcggctgctgtct

SEQ ID NO: 4604288 - DNA, 25 bp, Homo sapien
cacacggttcatccttgtgtacaca

SEQ ID NO: 4604289 - DNA, 25 bp, Homo sapien
gtgtcacacggttcatccttgtgta

SEQ ID NO: 4604290 - DNA, 25 bp, Homo sapien
cggttcatccttgtgtacacagaaa

SEQ ID NO: 4604291 - DNA, 25 bp, Homo sapien
cagtgtcacacggttcatccttgtg

SEQ ID NO: 4604292 - DNA, 25 bp, Homo sapien
gctcctgctagacatgtcatgctca

SEQ ID NO: 4604293 - DNA, 25 bp, Homo sapien
cgtcttggagaatacactgtccggc

SEQ ID NO: 4604294 - DNA, 25 bp, Homo sapien
ggcagccacctagccacctgtttgt

SEQ ID NO: 4604295 - DNA, 25 bp, Homo sapien
gcttcaaccgcttctggctcagcag

SEQ ID NO: 4604296 - DNA, 25 bp, Homo sapien
tctccagggaccgctcaccatggtg

SEQ ID NO: 4604297 - DNA, 25 bp, Homo sapien
tccatactcctcgttctgccagtga

SEQ ID NO: 4604298 - DNA, 25 bp, Homo sapien
catggtgcccaatggacaacttagc

SEQ ID NO: 4604299 - DNA, 25 bp, Homo sapien
tattgccgaggtatcgcgctcctcc

SEQ ID NO: 4604300 - DNA, 25 bp, Homo sapien
caagcttggtcacttgaatgttaat

SEQ ID NO: 4604301 - DNA, 25 bp, Homo sapien
cgttgtcgtagcaggacaagcttgg

SEQ ID NO: 4604302 - DNA, 25 bp, Homo sapien
ggacgttgtcgtagcaggacaagct

SEQ ID NO: 4604303 - DNA, 25 bp, Homo sapien
ggacaagcttggtcacttgaatgtt

SEQ ID NO: 4604304 - DNA, 25 bp, Homo sapien
ccctggattcccttcggggctctga

SEQ ID NO: 4604305 - DNA, 25 bp, Homo sapien
cctggattcccttcggggctctgat

SEQ ID NO: 4604306 - DNA, 25 bp, Homo sapien
tggattcccttcggggctctgattc

SEQ ID NO: 4604307 - DNA, 25 bp, Homo sapien
ctggattcccttcggggctctgatt

SEQ ID NO: 4604308 - DNA, 25 bp, Homo sapien
tctcctttagccaagatcagcaact

SEQ ID NO: 4604309 - DNA, 25 bp, Homo sapien
ctcctttagccaagatcagcaactt

SEQ ID NO: 4604310 - DNA, 25 bp, Homo sapien
tcctttagccaagatcagcaacttg

SEQ ID NO: 4604311 - DNA, 25 bp, Homo sapien
cctctcctttagccaagatcagcaa

SEQ ID NO: 4604312 - DNA, 25 bp, Homo sapien
atggctccccgttcccgccatgtca

SEQ ID NO: 4604313 - DNA, 25 bp, Homo sapien
ttatggctccccgttcccgccatgt

SEQ ID NO: 4604314 - DNA, 25 bp, Homo sapien
gccctgtccacaacttccacaccct

SEQ ID NO: 4604315 - DNA, 25 bp, Homo sapien
gctccccgttcccgccatgtcaaat

SEQ ID NO: 4604316 - DNA, 25 bp, Homo sapien
cgtggtactgcaccatgtcggcgtc

SEQ ID NO: 4604317 - DNA, 25 bp, Homo sapien
gggtctccaccgtgtgctcgctggt

SEQ ID NO: 4604318 - DNA, 25 bp, Homo sapien
gtcaggatgaacctctgggcggcct

SEQ ID NO: 4604319 - DNA, 25 bp, Homo sapien
gctggtgagccggatagcgttcctc

SEQ ID NO: 4604320 - DNA, 25 bp, Homo sapien
tggtcagtctcgacaggcctagagg

SEQ ID NO: 4604321 - DNA, 25 bp, Homo sapien
aagcctgcccgagagagtggtcagt

SEQ ID NO: 4604322 - DNA, 25 bp, Homo sapien
cccgagagagtggtcagtctcgaca

SEQ ID NO: 4604323 - DNA, 25 bp, Homo sapien
gccttctgtcaagcctgcccgagag

SEQ ID NO: 4604324 - DNA, 25 bp, Homo sapien
catttaacaaaaaccagtcaatagg

SEQ ID NO: 4604325 - DNA, 25 bp, Homo sapien
gaagaagtatgtctgccaccaaggt

SEQ ID NO: 4604326 - DNA, 25 bp, Homo sapien
catacccggtatgctgtctctgaac

SEQ ID NO: 4604327 - DNA, 25 bp, Homo sapien
cagtagccctttgtcactagcggtg

SEQ ID NO: 4604328 - DNA, 25 bp, Homo sapien
caccaaggtatggacgccaagctgc

SEQ ID NO: 4604329 - DNA, 25 bp, Homo sapien
ctggaacacaggctgctagcggctg

SEQ ID NO: 4604330 - DNA, 25 bp, Homo sapien
ggctgctagcggctgcttgccacag

SEQ ID NO: 4604331 - DNA, 25 bp, Homo sapien
ctgctagcggctgcttgccacagac

SEQ ID NO: 4604332 - DNA, 25 bp, Homo sapien
acacaggctgctagcggctgcttgc

SEQ ID NO: 4604333 - DNA, 25 bp, Homo sapien
gcagctgtcccggtgagactttctg

SEQ ID NO: 4604334 - DNA, 25 bp, Homo sapien
gaaagcaggctttgcaaaaggaccc

SEQ ID NO: 4604335 - DNA, 25 bp, Homo sapien
tctggtcgtgcacatgaaattgcct

SEQ ID NO: 4604336 - DNA, 25 bp, Homo sapien
gctggaaaacgctcaacaaaactgg

SEQ ID NO: 4604337 - DNA, 25 bp, Homo sapien
cccaggtatccactgcagggataag

SEQ ID NO: 4604338 - DNA, 25 bp, Homo sapien
cagggataaggagtccaccgtgcag

SEQ ID NO: 4604339 - DNA, 25 bp, Homo sapien
gctgccagcctgctgactcggttca

SEQ ID NO: 4604340 - DNA, 25 bp, Homo sapien
tctgccccaggtatccactgcaggg

SEQ ID NO: 4604341 - DNA, 25 bp, Homo sapien
tctgccatgggtgccttgctgggca

SEQ ID NO: 4604342 - DNA, 25 bp, Homo sapien
tgttatggtgacaaggtagcctttc

SEQ ID NO: 4604343 - DNA, 25 bp, Homo sapien
ccttgctgggcataaagctgggcac

SEQ ID NO: 4604344 - DNA, 25 bp, Homo sapien
tctgaaacctgagctcccaaaagag

SEQ ID NO: 4604345 - DNA, 25 bp, Homo sapien
gggacatttgtagccccatgaaatg

SEQ ID NO: 4604346 - DNA, 25 bp, Homo sapien
tctggggacatttgtagccccatga

SEQ ID NO: 4604347 - DNA, 25 bp, Homo sapien
tggggacatttgtagccccatgaaa

SEQ ID NO: 4604348 - DNA, 25 bp, Homo sapien
ggacatttgtagccccatgaaatgt

SEQ ID NO: 4604349 - DNA, 25 bp, Homo sapien
gcgcctgatcagatgttctcgtcca

SEQ ID NO: 4604350 - DNA, 25 bp, Homo sapien
catttgcgcctgatcagatgttctc

SEQ ID NO: 4604351 - DNA, 25 bp, Homo sapien
gggtcaaggaccatttgcgcctgat

SEQ ID NO: 4604352 - DNA, 25 bp, Homo sapien
ttctcgtccactgaatgggccctgg

SEQ ID NO: 4604353 - DNA, 25 bp, Homo sapien
tgccattgtcagcatgccaccagtg

SEQ ID NO: 4604354 - DNA, 25 bp, Homo sapien
gttccttcaagcctaacactgccat

SEQ ID NO: 4604355 - DNA, 25 bp, Homo sapien
ccttcaagcctaacactgccattgt

SEQ ID NO: 4604356 - DNA, 25 bp, Homo sapien
agcatgccaccagtggtcaaacgtc

SEQ ID NO: 4604357 - DNA, 25 bp, Homo sapien
tgccttgattccatgtggagaggtc

SEQ ID NO: 4604358 - DNA, 25 bp, Homo sapien
gatctgtgtgactcccgtgtcacca

SEQ ID NO: 4604359 - DNA, 25 bp, Homo sapien
ccttgattccatgtggagaggtcct

SEQ ID NO: 4604360 - DNA, 25 bp, Homo sapien
gcttctggcccacgactgcgcgtgg

SEQ ID NO: 4604361 - DNA, 25 bp, Homo sapien
gttctcggcatagcttagaaaatgc

SEQ ID NO: 4604362 - DNA, 25 bp, Homo sapien
tgcagttaagataacagagaacgtc

SEQ ID NO: 4604363 - DNA, 25 bp, Homo sapien
catagaggtttttatcacctaacgt

SEQ ID NO: 4604364 - DNA, 25 bp, Homo sapien
ctaacgttagcacatgttctcggca

SEQ ID NO: 4604365 - DNA, 25 bp, Homo sapien
cggggtggccgagcacacggcccga

SEQ ID NO: 4604366 - DNA, 25 bp, Homo sapien
ccggcggcgccgcaggcgctgagcg

SEQ ID NO: 4604367 - DNA, 25 bp, Homo sapien
gagccggggtggccgagcacacggc

SEQ ID NO: 4604368 - DNA, 25 bp, Homo sapien
ggcgctgagcgagacgagggagccg

SEQ ID NO: 4604369 - DNA, 25 bp, Homo sapien
gggcggccgcggcgccgggccgcgc

SEQ ID NO: 4604370 - DNA, 25 bp, Homo sapien
gccgggccgcgcccgcctcctccac

SEQ ID NO: 4604371 - DNA, 25 bp, Homo sapien
cggccgcggcgccgggccgcgcccg

SEQ ID NO: 4604372 - DNA, 25 bp, Homo sapien
ctcggcggggcggccgcggcgccgg

SEQ ID NO: 4604373 - DNA, 25 bp, Homo sapien
aggtcgcggcgcagctgaaggtaca

SEQ ID NO: 4604374 - DNA, 25 bp, Homo sapien
gctgaaggtacaggtcgcgcccgaa

SEQ ID NO: 4604375 - DNA, 25 bp, Homo sapien
agcgcaggtcgcggcgcagctgaag

SEQ ID NO: 4604376 - DNA, 25 bp, Homo sapien
ctgaaggtacaggtcgcgcccgaag

SEQ ID NO: 4604377 - DNA, 25 bp, Homo sapien
ggcgtgcgggggcgtcgccgccgtc

SEQ ID NO: 4604378 - DNA, 25 bp, Homo sapien
tgggggcgtgcgggggcgtcgccgc

SEQ ID NO: 4604379 - DNA, 25 bp, Homo sapien
gcgtgcgggggcgtcgccgccgtcg

SEQ ID NO: 4604380 - DNA, 25 bp, Homo sapien
cggctgggggcgtgcgggggcgtcg

SEQ ID NO: 4604381 - DNA, 25 bp, Homo sapien
agcaccacctccacgtcggccgccg

SEQ ID NO: 4604382 - DNA, 25 bp, Homo sapien
acctccacgtcggccgccgcgtcgc

SEQ ID NO: 4604383 - DNA, 25 bp, Homo sapien
accacctccacgtcggccgccgcgt

SEQ ID NO: 4604384 - DNA, 25 bp, Homo sapien
ccacctccacgtcggccgccgcgtc

SEQ ID NO: 4604385 - DNA, 25 bp, Homo sapien
agcggaggcagcagggcgccgtcac

SEQ ID NO: 4604386 - DNA, 25 bp, Homo sapien
gaggcagcagggcgccgtcacacat

SEQ ID NO: 4604387 - DNA, 25 bp, Homo sapien
acgggcaggacgagcggaggcagca

SEQ ID NO: 4604388 - DNA, 25 bp, Homo sapien
agcacgggcaggacgagcggaggca

SEQ ID NO: 4604389 - DNA, 25 bp, Homo sapien
tggcggcgaagcaggagcgcgctag

SEQ ID NO: 4604390 - DNA, 25 bp, Homo sapien
ggcggcggcgccagccggagtgaag

SEQ ID NO: 4604391 - DNA, 25 bp, Homo sapien
ggcgaagcaggagcgcgctaggcgg

SEQ ID NO: 4604392 - DNA, 25 bp, Homo sapien
agccggagtgaagccctccagcctt

SEQ ID NO: 4604393 - DNA, 25 bp, Homo sapien
gacatgaaggcaagacggtgttccg

SEQ ID NO: 4604394 - DNA, 25 bp, Homo sapien
cactgtgcccttaagagctgctgct

SEQ ID NO: 4604395 - DNA, 25 bp, Homo sapien
aaggttcaacatctccacaggtagc

SEQ ID NO: 4604396 - DNA, 25 bp, Homo sapien
tactgctgcactgttgaagacactg

SEQ ID NO: 4604397 - DNA, 25 bp, Homo sapien
caaggaacagctactccctgatgct

SEQ ID NO: 4604398 - DNA, 25 bp, Homo sapien
gatgctgaacaaggccaaagccata

SEQ ID NO: 4604399 - DNA, 25 bp, Homo sapien
gggttaaatccaactccatgcatga

SEQ ID NO: 4604400 - DNA, 25 bp, Homo sapien
agctgaaagccagggttaaatccaa

SEQ ID NO: 4604401 - DNA, 25 bp, Homo sapien
ttcatttcgtggacaggcaaggccg

SEQ ID NO: 4604402 - DNA, 25 bp, Homo sapien
tgacagctgcccgacaatgtgaatg

SEQ ID NO: 4604403 - DNA, 25 bp, Homo sapien
tttgcgcagcacctgttcaagatgg

SEQ ID NO: 4604404 - DNA, 25 bp, Homo sapien
cactgactcatcctgtgacgaagaa

SEQ ID NO: 4604405 - DNA, 25 bp, Homo sapien
caaacaagagccttatacaggcagt

SEQ ID NO: 4604406 - DNA, 25 bp, Homo sapien
gagccttatacaggcagtgtctttc

SEQ ID NO: 4604407 - DNA, 25 bp, Homo sapien
acaaacaagagccttatacaggcag

SEQ ID NO: 4604408 - DNA, 25 bp, Homo sapien
aagacaaacaagagccttatacagg

SEQ ID NO: 4604409 - DNA, 25 bp, Homo sapien
aagcagtttgttacccttgagatag

SEQ ID NO: 4604410 - DNA, 25 bp, Homo sapien
cagtttgttacccttgagatagaca

SEQ ID NO: 4604411 - DNA, 25 bp, Homo sapien
ttgttacccttgagatagacaaagc

SEQ ID NO: 4604412 - DNA, 25 bp, Homo sapien
gttacccttgagatagacaaagctc

SEQ ID NO: 4604413 - DNA, 25 bp, Homo sapien
cagctcgattctgatgggcactgac

SEQ ID NO: 4604414 - DNA, 25 bp, Homo sapien
tttttgccgacagctcgattctgat

SEQ ID NO: 4604415 - DNA, 25 bp, Homo sapien
tttgccgacagctcgattctgatgg

SEQ ID NO: 4604416 - DNA, 25 bp, Homo sapien
ccgacagctcgattctgatgggcac

SEQ ID NO: 4604417 - DNA, 25 bp, Homo sapien
ctgttttcaggagccgactcctggc

SEQ ID NO: 4604418 - DNA, 25 bp, Homo sapien
tcttgagtgcttcacacacagcagt

SEQ ID NO: 4604419 - DNA, 25 bp, Homo sapien
gggccctcttgagtgcttcacacac

SEQ ID NO: 4604420 - DNA, 25 bp, Homo sapien
ttccgaccctgttttcaggagccga

SEQ ID NO: 4604421 - DNA, 25 bp, Homo sapien
tgttgtcgtcgttgaaaccacccag

SEQ ID NO: 4604422 - DNA, 25 bp, Homo sapien
gagaccctcttcacgctggttgcag

SEQ ID NO: 4604423 - DNA, 25 bp, Homo sapien
tcttgggccaaacgtgaccctctca

SEQ ID NO: 4604424 - DNA, 25 bp, Homo sapien
ccacgcttagaaatagagggccgaa

SEQ ID NO: 4604425 - DNA, 25 bp, Homo sapien
ttggccggcatcctaatccccgagt

SEQ ID NO: 4604426 - DNA, 25 bp, Homo sapien
taatccccgagtgactcttgccaac

SEQ ID NO: 4604427 - DNA, 25 bp, Homo sapien
tggcggcgtccgcttcaccgggaac

SEQ ID NO: 4604428 - DNA, 25 bp, Homo sapien
ccagcctcaaattccgcgatttggc

SEQ ID NO: 4604429 - DNA, 25 bp, Homo sapien
tcagcattgccgcatcagggttcca

SEQ ID NO: 4604430 - DNA, 25 bp, Homo sapien
aactgaatcggcaggatgagggccc

SEQ ID NO: 4604431 - DNA, 25 bp, Homo sapien
catctgacgaggagacagcactggc

SEQ ID NO: 4604432 - DNA, 25 bp, Homo sapien
cttagtgttaggcaccggcggagct

SEQ ID NO: 4604433 - DNA, 25 bp, Homo sapien
agtttgactacaacatgagtgctgg

SEQ ID NO: 4604434 - DNA, 25 bp, Homo sapien
gtaagtatgttctgagtggtcctca

SEQ ID NO: 4604435 - DNA, 25 bp, Homo sapien
gaatactctcaaagttaggtgcaga

SEQ ID NO: 4604436 - DNA, 25 bp, Homo sapien
tattgtgttgatggtgcggttgcca

SEQ ID NO: 4604437 - DNA, 25 bp, Homo sapien
gacaagctggctactgatctgcccg

SEQ ID NO: 4604438 - DNA, 25 bp, Homo sapien
cattgtgcccaggagatgtgtccct

SEQ ID NO: 4604439 - DNA, 25 bp, Homo sapien
tctgaccgttatgagagactgtgcc

SEQ ID NO: 4604440 - DNA, 25 bp, Homo sapien
gctcagcaagcaacctggcctggat

SEQ ID NO: 4604441 - DNA, 25 bp, Homo sapien
tttgttcaggcccattgcagtgcca

SEQ ID NO: 4604442 - DNA, 25 bp, Homo sapien
gcacctgtgaaagcgtcctgaggac

SEQ ID NO: 4604443 - DNA, 25 bp, Homo sapien
tggttcacgatgaccccacggttga

SEQ ID NO: 4604444 - DNA, 25 bp, Homo sapien
ggtctataacaaagcgagcccctga

SEQ ID NO: 4604445 - DNA, 25 bp, Homo sapien
tcttcataatcctcgtcatcactcc

SEQ ID NO: 4604446 - DNA, 25 bp, Homo sapien
tcgtcatcactcctcacatcctgga

SEQ ID NO: 4604447 - DNA, 25 bp, Homo sapien
tgggaatgaggtgcctctcagccct

SEQ ID NO: 4604448 - DNA, 25 bp, Homo sapien
tctcagccctgaggccgttctttaa

SEQ ID NO: 4604449 - DNA, 25 bp, Homo sapien
aggtttcctaggaaacagaacactg

SEQ ID NO: 4604450 - DNA, 25 bp, Homo sapien
ggaaacagaacactgttcagcttat

SEQ ID NO: 4604451 - DNA, 25 bp, Homo sapien
tcaacatgaacatatagcttcaggt

SEQ ID NO: 4604452 - DNA, 25 bp, Homo sapien
acatatagcttcaggtttcctagga

SEQ ID NO: 4604453 - DNA, 25 bp, Homo sapien
ttcctctggacagccaataccctgg

SEQ ID NO: 4604454 - DNA, 25 bp, Homo sapien
cttcaaagtgggcaaagcttgcctc

SEQ ID NO: 4604455 - DNA, 25 bp, Homo sapien
caaacattaaacaggtagctgccca

SEQ ID NO: 4604456 - DNA, 25 bp, Homo sapien
gatttaggggctaccatccaaacat

SEQ ID NO: 4604457 - DNA, 25 bp, Homo sapien
tacggctttggaggaataagctgat

SEQ ID NO: 4604458 - DNA, 25 bp, Homo sapien
tttacggctttggaggaataagctg

SEQ ID NO: 4604459 - DNA, 25 bp, Homo sapien
gaggctttacggctttggaggaata

SEQ ID NO: 4604460 - DNA, 25 bp, Homo sapien
gctttacggctttggaggaataagc

SEQ ID NO: 4604461 - DNA, 25 bp, Homo sapien
atttcccatacctctgtgaagatct

SEQ ID NO: 4604462 - DNA, 25 bp, Homo sapien
ctaatttcccatacctctgtgaaga

SEQ ID NO: 4604463 - DNA, 25 bp, Homo sapien
cccatacctctgtgaagatctagaa

SEQ ID NO: 4604464 - DNA, 25 bp, Homo sapien
ccatacctctgtgaagatctagaag

SEQ ID NO: 4604465 - DNA, 25 bp, Homo sapien
caattacggcagtttccatttcctt

SEQ ID NO: 4604466 - DNA, 25 bp, Homo sapien
ggtcaattacggcagtttccatttc

SEQ ID NO: 4604467 - DNA, 25 bp, Homo sapien
tcagaggtcaattacggcagtttcc

SEQ ID NO: 4604468 - DNA, 25 bp, Homo sapien
agaggtcaattacggcagtttccat

SEQ ID NO: 4604469 - DNA, 25 bp, Homo sapien
gaggcacatttactaaagttggaaa

SEQ ID NO: 4604470 - DNA, 25 bp, Homo sapien
tttgaggcacatttactaaagttgg

SEQ ID NO: 4604471 - DNA, 25 bp, Homo sapien
ctttgaggcacatttactaaagttg

SEQ ID NO: 4604472 - DNA, 25 bp, Homo sapien
tgaggcacatttactaaagttggaa

SEQ ID NO: 4604473 - DNA, 25 bp, Homo sapien
catagaaggagctcatacgaggtcc

SEQ ID NO: 4604474 - DNA, 25 bp, Homo sapien
gatgaagcttgtgctccctagccaa

SEQ ID NO: 4604475 - DNA, 25 bp, Homo sapien
tgaacattcaacagtccgggcctca

SEQ ID NO: 4604476 - DNA, 25 bp, Homo sapien
tagttgccggtagatgaacattccc

SEQ ID NO: 4604477 - DNA, 25 bp, Homo sapien
gaaaggctcgaggtgatacataggc

SEQ ID NO: 4604478 - DNA, 25 bp, Homo sapien
caagatgtaataaccccagtaaagg

SEQ ID NO: 4604479 - DNA, 25 bp, Homo sapien
gaagatgtatgaaaagaaaggctcg

SEQ ID NO: 4604480 - DNA, 25 bp, Homo sapien
gaaggacctgcaagatcatgagctg

SEQ ID NO: 4604481 - DNA, 25 bp, Homo sapien
cttctggtgatggggctagaggatt

SEQ ID NO: 4604482 - DNA, 25 bp, Homo sapien
tctggtgatggggctagaggatttt

SEQ ID NO: 4604483 - DNA, 25 bp, Homo sapien
tggtgatggggctagaggattttga

SEQ ID NO: 4604484 - DNA, 25 bp, Homo sapien
ctggtgatggggctagaggattttg

SEQ ID NO: 4604485 - DNA, 25 bp, Homo sapien
cagccatgtgttgaggactctagac

SEQ ID NO: 4604486 - DNA, 25 bp, Homo sapien
ggccaatcgactcctagaaccatga

SEQ ID NO: 4604487 - DNA, 25 bp, Homo sapien
cctgtgggtaaaatccggcctgcaa

SEQ ID NO: 4604488 - DNA, 25 bp, Homo sapien
tatgttttcgtacagcccatgagct

SEQ ID NO: 4604489 - DNA, 25 bp, Homo sapien
gaagatgaaaaacagggtgttacag

SEQ ID NO: 4604490 - DNA, 25 bp, Homo sapien
ggaaaaacaatgaggcggctgatga

SEQ ID NO: 4604491 - DNA, 25 bp, Homo sapien
cggctgatgaaaaatatggtggaga

SEQ ID NO: 4604492 - DNA, 25 bp, Homo sapien
ggtctgcgtccatccagcataagaa

SEQ ID NO: 4604493 - DNA, 25 bp, Homo sapien
gggtcccactgcgaatataattagc

SEQ ID NO: 4604494 - DNA, 25 bp, Homo sapien
tataattagcacaccaagagaagct

SEQ ID NO: 4604495 - DNA, 25 bp, Homo sapien
tgtacaatcatcacgagggtcccac

SEQ ID NO: 4604496 - DNA, 25 bp, Homo sapien
ggtggatgatatgagctagaaaatc

SEQ ID NO: 4604497 - DNA, 25 bp, Homo sapien
cagggagatggcaatttttgaagaa

SEQ ID NO: 4604498 - DNA, 25 bp, Homo sapien
gcagggagatggcaatttttgaaga

SEQ ID NO: 4604499 - DNA, 25 bp, Homo sapien
ctttctcttgacatcaaagccaagt

SEQ ID NO: 4604500 - DNA, 25 bp, Homo sapien
catttctaaaatgtagtaccagtac

SEQ ID NO: 4604501 - DNA, 25 bp, Homo sapien
tagtaccagtactgggatggcagca

SEQ ID NO: 4604502 - DNA, 25 bp, Homo sapien
aatgtagtaccagtactgggatggc

SEQ ID NO: 4604503 - DNA, 25 bp, Homo sapien
tctaaaatgtagtaccagtactggg

SEQ ID NO: 4604504 - DNA, 25 bp, Homo sapien
cccataagtcatatagccaaggttt

SEQ ID NO: 4604505 - DNA, 25 bp, Homo sapien
aaacctcccataagtcatatagcca

SEQ ID NO: 4604506 - DNA, 25 bp, Homo sapien
cattccaaacctcccataagtcata

SEQ ID NO: 4604507 - DNA, 25 bp, Homo sapien
gatagccattccaaacctcccataa

SEQ ID NO: 4604508 - DNA, 25 bp, Homo sapien
cataaagaaacgcaattccagcaac

SEQ ID NO: 4604509 - DNA, 25 bp, Homo sapien
gccgactcctaaaccatctttccac

SEQ ID NO: 4604510 - DNA, 25 bp, Homo sapien
ttgattccgccgactcctaaaccat

SEQ ID NO: 4604511 - DNA, 25 bp, Homo sapien
tctcttgattccgccgactcctaaa

SEQ ID NO: 4604512 - DNA, 25 bp, Homo sapien
gaaggcctctcttgattccgccgac

SEQ ID NO: 4604513 - DNA, 25 bp, Homo sapien
acttctttgccagtccataaatatc

SEQ ID NO: 4604514 - DNA, 25 bp, Homo sapien
ccgtcaagttacacttctttgccag

SEQ ID NO: 4604515 - DNA, 25 bp, Homo sapien
gttacacttctttgccagtccataa

SEQ ID NO: 4604516 - DNA, 25 bp, Homo sapien
ctggcgctccgtcaagttacacttc

SEQ ID NO: 4604517 - DNA, 25 bp, Homo sapien
gagccgtatggatacagcaggcaga

SEQ ID NO: 4604518 - DNA, 25 bp, Homo sapien
gaagtgggagccgtatggatacagc

SEQ ID NO: 4604519 - DNA, 25 bp, Homo sapien
aagtgggagccgtatggatacagca

SEQ ID NO: 4604520 - DNA, 25 bp, Homo sapien
tgggagccgtatggatacagcaggc

SEQ ID NO: 4604521 - DNA, 25 bp, Homo sapien
tgcaaacaaaagtgtctaaaagtgt

SEQ ID NO: 4604522 - DNA, 25 bp, Homo sapien
cagtcttgtcaatactggcctcatg

SEQ ID NO: 4604523 - DNA, 25 bp, Homo sapien
gaatctagttggaagtcagtcttgt

SEQ ID NO: 4604524 - DNA, 25 bp, Homo sapien
cagtaactgtttatgagtcgaagct

SEQ ID NO: 4604525 - DNA, 25 bp, Homo sapien
cagatcatttgctggtcaactagaa

SEQ ID NO: 4604526 - DNA, 25 bp, Homo sapien
actagaatagatttcttgcacacac

SEQ ID NO: 4604527 - DNA, 25 bp, Homo sapien
gggatgttctaaacctgtcaacaga

SEQ ID NO: 4604528 - DNA, 25 bp, Homo sapien
cacacacaaggtaagctatagataa

SEQ ID NO: 4604529 - DNA, 25 bp, Homo sapien
ttggtgtaacctttcgaactgtctc

SEQ ID NO: 4604530 - DNA, 25 bp, Homo sapien
tctctaagacagtatttggtgtaac

SEQ ID NO: 4604531 - DNA, 25 bp, Homo sapien
cgaactgtctctttaatgccaaatg

SEQ ID NO: 4604532 - DNA, 25 bp, Homo sapien
tgcaatggttgccttgtggaatgtt

SEQ ID NO: 4604533 - DNA, 25 bp, Homo sapien
tatcaggatatgctgaaacataggg

SEQ ID NO: 4604534 - DNA, 25 bp, Homo sapien
agttcttggctagtactaaaggaca

SEQ ID NO: 4604535 - DNA, 25 bp, Homo sapien
aaatgcagtctagaacaaaagaagg

SEQ ID NO: 4604536 - DNA, 25 bp, Homo sapien
tgaaccagccaaatcacaactcttg

SEQ ID NO: 4604537 - DNA, 25 bp, Homo sapien
gacatttgtgtactctcttctgcca

SEQ ID NO: 4604538 - DNA, 25 bp, Homo sapien
aacaaccctaaacctgagctcatgg

SEQ ID NO: 4604539 - DNA, 25 bp, Homo sapien
tggcattagtgaagcaacacatagt

SEQ ID NO: 4604540 - DNA, 25 bp, Homo sapien
gatccatccccttacatgttaactg

SEQ ID NO: 4604541 - DNA, 25 bp, Homo sapien
gagtcatagactcttctagcacagc

SEQ ID NO: 4604542 - DNA, 25 bp, Homo sapien
gaagagtagatgaactgggttcccg

SEQ ID NO: 4604543 - DNA, 25 bp, Homo sapien
gtcattgataccaataagctctgtg

SEQ ID NO: 4604544 - DNA, 25 bp, Homo sapien
catgcattgtcagacaccgtggaag

SEQ ID NO: 4604545 - DNA, 25 bp, Homo sapien
ttcaaatacacgtctgataatcagc

SEQ ID NO: 4604546 - DNA, 25 bp, Homo sapien
gacgagtccatcgtgatcctcaaga

SEQ ID NO: 4604547 - DNA, 25 bp, Homo sapien
caagatctgaccactttattgttgg

SEQ ID NO: 4604548 - DNA, 25 bp, Homo sapien
gaaaagcatatggaattgtcacgta

SEQ ID NO: 4604549 - DNA, 25 bp, Homo sapien
tggtgtgaagcatgcctcaggagat

SEQ ID NO: 4604550 - DNA, 25 bp, Homo sapien
gctcacagcaatagatgcagtcagc

SEQ ID NO: 4604551 - DNA, 25 bp, Homo sapien
cagtggtgtgaagcatgcctcagga

SEQ ID NO: 4604552 - DNA, 25 bp, Homo sapien
acaatcagctcacagcaatagatgc

SEQ ID NO: 4604553 - DNA, 25 bp, Homo sapien
gatctgggtacaaaggtgcagtaag

SEQ ID NO: 4604554 - DNA, 25 bp, Homo sapien
aaagacttagtgatacttcctcttg

SEQ ID NO: 4604555 - DNA, 25 bp, Homo sapien
tacaaaggtgcagtaagagctgttg

SEQ ID NO: 4604556 - DNA, 25 bp, Homo sapien
tacttcctcttgattaggcttcggg

SEQ ID NO: 4604557 - DNA, 25 bp, Homo sapien
gcctgtgataatccacagccagaac

SEQ ID NO: 4604558 - DNA, 25 bp, Homo sapien
cctgtgataatccacagccagaacc

SEQ ID NO: 4604559 - DNA, 25 bp, Homo sapien
gaacctctgggatctttcagagtca

SEQ ID NO: 4604560 - DNA, 25 bp, Homo sapien
tgaagttggtacgatgcctttccca

SEQ ID NO: 4604561 - DNA, 25 bp, Homo sapien
tcagtgaaaattgccaccaggtgtg

SEQ ID NO: 4604562 - DNA, 25 bp, Homo sapien
cattttggacatgccaccagctcag

SEQ ID NO: 4604563 - DNA, 25 bp, Homo sapien
gatcctagtgtactggacatgtcat

SEQ ID NO: 4604564 - DNA, 25 bp, Homo sapien
tatgatagctttctactgaggaact

SEQ ID NO: 4604565 - DNA, 25 bp, Homo sapien
tatatatgatagctttctactgagg

SEQ ID NO: 4604566 - DNA, 25 bp, Homo sapien
ctgagtatatatgatagctttctac

SEQ ID NO: 4604567 - DNA, 25 bp, Homo sapien
gatagctttctactgaggaactcaa

SEQ ID NO: 4604568 - DNA, 25 bp, Homo sapien
caaccagcttcgttctcctcagaga

SEQ ID NO: 4604569 - DNA, 25 bp, Homo sapien
cagtcagtgacgtgaggcgaagcta

SEQ ID NO: 4604570 - DNA, 25 bp, Homo sapien
tactggatggcaccctcaggttctt

SEQ ID NO: 4604571 - DNA, 25 bp, Homo sapien
aaaggtgccccttgcttgtgaagtg

SEQ ID NO: 4604572 - DNA, 25 bp, Homo sapien
tgggtggggttagcgtccagaggag

SEQ ID NO: 4604573 - DNA, 25 bp, Homo sapien
agcaaccctcttctcaatttgcaac

SEQ ID NO: 4604574 - DNA, 25 bp, Homo sapien
ccagcaaccctcttctcaatttgca

SEQ ID NO: 4604575 - DNA, 25 bp, Homo sapien
ctgggtggggttagcgtccagagga

SEQ ID NO: 4604576 - DNA, 25 bp, Homo sapien
gactctgggccttgacctgcgcggg

SEQ ID NO: 4604577 - DNA, 25 bp, Homo sapien
cgctcctaacggactttgcaaggcc

SEQ ID NO: 4604578 - DNA, 25 bp, Homo sapien
ccatctgtgcgagcacggggactct

SEQ ID NO: 4604579 - DNA, 25 bp, Homo sapien
ttgttaaccgctgggcactgtcgcc

SEQ ID NO: 4604580 - DNA, 25 bp, Homo sapien
gtcctgggccgaggcgggtccgcga

SEQ ID NO: 4604581 - DNA, 25 bp, Homo sapien
ggggggtccccgcagcggtgcatcc

SEQ ID NO: 4604582 - DNA, 25 bp, Homo sapien
gcggggggtccccgcagcggtgcat

SEQ ID NO: 4604583 - DNA, 25 bp, Homo sapien
ctcctcctccgtcctgggccgaggc

SEQ ID NO: 4604584 - DNA, 25 bp, Homo sapien
tgcacagctggtacccgggactgct

SEQ ID NO: 4604585 - DNA, 25 bp, Homo sapien
tgggccttccgtgattccgaaccca

SEQ ID NO: 4604586 - DNA, 25 bp, Homo sapien
tggtacccgggactgctgaggtttg

SEQ ID NO: 4604587 - DNA, 25 bp, Homo sapien
tacccgggactgctgaggtttgcac

SEQ ID NO: 4604588 - DNA, 25 bp, Homo sapien
tagcggtggaacctcaaagcctggc

SEQ ID NO: 4604589 - DNA, 25 bp, Homo sapien
tggccttggattatcccagtgcact

SEQ ID NO: 4604590 - DNA, 25 bp, Homo sapien
taagagtcacataatgtagcggtgg

SEQ ID NO: 4604591 - DNA, 25 bp, Homo sapien
atgagaaggcgagatcaccccacag

SEQ ID NO: 4604592 - DNA, 25 bp, Homo sapien
cagcctgaggtacaccctggctaca

SEQ ID NO: 4604593 - DNA, 25 bp, Homo sapien
tgactgtgcagttgtttgagggcat

SEQ ID NO: 4604594 - DNA, 25 bp, Homo sapien
agaaattcactaacaagtgactgtg

SEQ ID NO: 4604595 - DNA, 25 bp, Homo sapien
tgaagtgcacgatcttaccccactg

SEQ ID NO: 4604596 - DNA, 25 bp, Homo sapien
gtgatcatctatgcggaaattttgg

SEQ ID NO: 4604597 - DNA, 25 bp, Homo sapien
attgtttcacgtgatcatctatgcg

SEQ ID NO: 4604598 - DNA, 25 bp, Homo sapien
ccactatacttcctattgtggcata

SEQ ID NO: 4604599 - DNA, 25 bp, Homo sapien
aagacttgccccactatacttccta

SEQ ID NO: 4604600 - DNA, 25 bp, Homo sapien
cttccttctagctgcacatctcggt

SEQ ID NO: 4604601 - DNA, 25 bp, Homo sapien
aatgcggcatgaatctggatcttcc

SEQ ID NO: 4604602 - DNA, 25 bp, Homo sapien
cggcatgaatctggatcttccttgc

SEQ ID NO: 4604603 - DNA, 25 bp, Homo sapien
tatggaatgcggcatgaatctggat

SEQ ID NO: 4604604 - DNA, 25 bp, Homo sapien
ggaatgcggcatgaatctggatctt

SEQ ID NO: 4604605 - DNA, 25 bp, Homo sapien
ggatggtgactgagacacacaggct

SEQ ID NO: 4604606 - DNA, 25 bp, Homo sapien
acaggatggtgactgagacacacag

SEQ ID NO: 4604607 - DNA, 25 bp, Homo sapien
gatggtgactgagacacacaggctg

SEQ ID NO: 4604608 - DNA, 25 bp, Homo sapien
aagccttaaggtggatgtgtcttca

SEQ ID NO: 4604609 - DNA, 25 bp, Homo sapien
ccttatcacgtgaagaagacattgc

SEQ ID NO: 4604610 - DNA, 25 bp, Homo sapien
agcagctctttgttgcaggcagatt

SEQ ID NO: 4604611 - DNA, 25 bp, Homo sapien
tatatacacacaggcgcgcgcatgc

SEQ ID NO: 4604612 - DNA, 25 bp, Homo sapien
gacattgctactggtctgctcagga

SEQ ID NO: 4604613 - DNA, 25 bp, Homo sapien
ttcttccagatgtgagctcctgtcc

SEQ ID NO: 4604614 - DNA, 25 bp, Homo sapien
cttcctgcttcttccagatgtgagc

SEQ ID NO: 4604615 - DNA, 25 bp, Homo sapien
ctgcttcttccagatgtgagctcct

SEQ ID NO: 4604616 - DNA, 25 bp, Homo sapien
gcttcttccagatgtgagctcctgt

SEQ ID NO: 4604617 - DNA, 25 bp, Homo sapien
gaagttggaggtgtcgccttcgcgg

SEQ ID NO: 4604618 - DNA, 25 bp, Homo sapien
tggaggtgtcgccttcgcgggctat

SEQ ID NO: 4604619 - DNA, 25 bp, Homo sapien
gccttcgcgggctatcttgggcacg

SEQ ID NO: 4604620 - DNA, 25 bp, Homo sapien
aggtgtcgccttcgcgggctatctt

SEQ ID NO: 4604621 - DNA, 25 bp, Homo sapien
tcttcatatttcctaaccaccttgt

SEQ ID NO: 4604622 - DNA, 25 bp, Homo sapien
cttcatatttcctaaccaccttgtt

SEQ ID NO: 4604623 - DNA, 25 bp, Homo sapien
tgtcaaccacgagcagtttcttaat

SEQ ID NO: 4604624 - DNA, 25 bp, Homo sapien
ctgtcaaccacgagcagtttcttaa

SEQ ID NO: 4604625 - DNA, 25 bp, Homo sapien
aggaaatcccgagagcatctcgaat

SEQ ID NO: 4604626 - DNA, 25 bp, Homo sapien
gaaatcccgagagcatctcgaatat

SEQ ID NO: 4604627 - DNA, 25 bp, Homo sapien
aaatcccgagagcatctcgaatatc

SEQ ID NO: 4604628 - DNA, 25 bp, Homo sapien
gggccaggtactcgggtattccgca

SEQ ID NO: 4604629 - DNA, 25 bp, Homo sapien
acagcccttccgtgaccctcgctct

SEQ ID NO: 4604630 - DNA, 25 bp, Homo sapien
tccacagcccttccgtgaccctcgc

SEQ ID NO: 4604631 - DNA, 25 bp, Homo sapien
agcccttccgtgaccctcgctctga

SEQ ID NO: 4604632 - DNA, 25 bp, Homo sapien
agatgatctccttagagtgcaggat

SEQ ID NO: 4604633 - DNA, 25 bp, Homo sapien
gagtagaagagcccccggttgcgca

SEQ ID NO: 4604634 - DNA, 25 bp, Homo sapien
gctcacagcccggaacatactccat

SEQ ID NO: 4604635 - DNA, 25 bp, Homo sapien
tagatgatctccttagagtgcagga

SEQ ID NO: 4604636 - DNA, 25 bp, Homo sapien
gtggatgattccttccggacgcaga

SEQ ID NO: 4604637 - DNA, 25 bp, Homo sapien
gattccttccggacgcagatgaggg

SEQ ID NO: 4604638 - DNA, 25 bp, Homo sapien
gcagatgagggacgggtggatgatt

SEQ ID NO: 4604639 - DNA, 25 bp, Homo sapien
gtggatgattccttcaggacgcaga

SEQ ID NO: 4604640 - DNA, 25 bp, Homo sapien
ggatgattccttccggacgcagatg

SEQ ID NO: 4604641 - DNA, 25 bp, Homo sapien
gatgacttccttccggacgcagatg

SEQ ID NO: 4604642 - DNA, 25 bp, Homo sapien
gatgacttccttcgggacgcagatg

SEQ ID NO: 4604643 - DNA, 25 bp, Homo sapien
gacttccttccggacgcagatgagg

SEQ ID NO: 4604644 - DNA, 25 bp, Homo sapien
ttccttcaggacgcagatgaggaac

SEQ ID NO: 4604645 - DNA, 25 bp, Homo sapien
ttccagacgcagatgaggaacgggc

SEQ ID NO: 4604646 - DNA, 25 bp, Homo sapien
tccttccagacgcagatgagggatg

SEQ ID NO: 4604647 - DNA, 25 bp, Homo sapien
gcagatgagggacgggcggatgact

SEQ ID NO: 4604648 - DNA, 25 bp, Homo sapien
gtggatgattccttcaggacgcaga

SEQ ID NO: 4604649 - DNA, 25 bp, Homo sapien
gcagatgagggacgggtggatgatt

SEQ ID NO: 4604650 - DNA, 25 bp, Homo sapien
gcagatgagggacgggcggatgact

SEQ ID NO: 4604651 - DNA, 25 bp, Homo sapien
gggcggatgacttccttcgggacgc

SEQ ID NO: 4604652 - DNA, 25 bp, Homo sapien
gtggatgattccttcaggacgcaga

SEQ ID NO: 4604653 - DNA, 25 bp, Homo sapien
gcagatgagggacgggcggatgact

SEQ ID NO: 4604654 - DNA, 25 bp, Homo sapien
gatgacttccttccggacgcagatg

SEQ ID NO: 4604655 - DNA, 25 bp, Homo sapien
cttccttccggacgcagatgaggga

SEQ ID NO: 4604656 - DNA, 25 bp, Homo sapien
gggcggatgacttccttccggacgc

SEQ ID NO: 4604657 - DNA, 25 bp, Homo sapien
ggatgacttccttcgggacgccgat

SEQ ID NO: 4604658 - DNA, 25 bp, Homo sapien
gatgacttccttcgggacgccgatg

SEQ ID NO: 4604659 - DNA, 25 bp, Homo sapien
gcggatgacttccttcgggacgccg

SEQ ID NO: 4604660 - DNA, 25 bp, Homo sapien
gggcggatgacttccttcgggacgc

SEQ ID NO: 4604661 - DNA, 25 bp, Homo sapien
cttcaggatgccgatgagggacggg

SEQ ID NO: 4604662 - DNA, 25 bp, Homo sapien
tcaggatgccgatgagggacgggcg

SEQ ID NO: 4604663 - DNA, 25 bp, Homo sapien
ggatgccgatgagggacgggcggat

SEQ ID NO: 4604664 - DNA, 25 bp, Homo sapien
gccgatgagggacgggcggatgact

SEQ ID NO: 4604665 - DNA, 25 bp, Homo sapien
gcagatgagggacgggcggatgact

SEQ ID NO: 4604666 - DNA, 25 bp, Homo sapien
gacgccgatgaggaacgggtggatg

SEQ ID NO: 4604667 - DNA, 25 bp, Homo sapien
gccgatgaggaacgggtggatgatt

SEQ ID NO: 4604668 - DNA, 25 bp, Homo sapien
cttcgggacgccgatgaggaacggg

SEQ ID NO: 4604669 - DNA, 25 bp, Homo sapien
tcgggacgccgatgaggaacgggtg

SEQ ID NO: 4604670 - DNA, 25 bp, Homo sapien
ggatgattccttccggacgcagatg

SEQ ID NO: 4604671 - DNA, 25 bp, Homo sapien
gatgacttccttccggacgcagatg

SEQ ID NO: 4604672 - DNA, 25 bp, Homo sapien
gattccttccggacgcagatgaggg

SEQ ID NO: 4604673 - DNA, 25 bp, Homo sapien
gatgacttccttcggacgcagatga

SEQ ID NO: 4604674 - DNA, 25 bp, Homo sapien
gcagatgagggacgggtggatgact

SEQ ID NO: 4604675 - DNA, 25 bp, Homo sapien
gcagatgaggaacgggcggatgact

SEQ ID NO: 4604676 - DNA, 25 bp, Homo sapien
gggcggatgacttccttcgggacgc

SEQ ID NO: 4604677 - DNA, 25 bp, Homo sapien
tccttccagacgcagatgaggaacg

SEQ ID NO: 4604678 - DNA, 25 bp, Homo sapien
ttcaggacgcagatgaggaacgggc

SEQ ID NO: 4604679 - DNA, 25 bp, Homo sapien
tcaggacgcagatgaggaacgggcg

SEQ ID NO: 4604680 - DNA, 25 bp, Homo sapien
gtggatgattccttcaggacgcaga

SEQ ID NO: 4604681 - DNA, 25 bp, Homo sapien
cttcaggacgcagatgaggaacggg

SEQ ID NO: 4604682 - DNA, 25 bp, Homo sapien
gcagatgagggacgggcggatgatt

SEQ ID NO: 4604683 - DNA, 25 bp, Homo sapien
gcagatgagggacgggcggatgact

SEQ ID NO: 4604684 - DNA, 25 bp, Homo sapien
gcagatgagggacgggtggatgact

SEQ ID NO: 4604685 - DNA, 25 bp, Homo sapien
gtggatgattccttcaggacgcaga

SEQ ID NO: 4604686 - DNA, 25 bp, Homo sapien
gggcggatgattccttcaggacgca

SEQ ID NO: 4604687 - DNA, 25 bp, Homo sapien
gcagatgagggacgggtggatgact

SEQ ID NO: 4604688 - DNA, 25 bp, Homo sapien
tccttccagacgcagatgaggaacg

SEQ ID NO: 4604689 - DNA, 25 bp, Homo sapien
gcggatgattccttcaggacgcaga

SEQ ID NO: 4604690 - DNA, 25 bp, Homo sapien
gggcggatgacttccttcgggacgc

SEQ ID NO: 4604691 - DNA, 25 bp, Homo sapien
gcagatgagggacgggcggatgatt

SEQ ID NO: 4604692 - DNA, 25 bp, Homo sapien
gcagatgagggacgggtggatgact

SEQ ID NO: 4604693 - DNA, 25 bp, Homo sapien
gcagatgagggacgggcggatgact

SEQ ID NO: 4604694 - DNA, 25 bp, Homo sapien
gtggatgattccttcaggacgcaga

SEQ ID NO: 4604695 - DNA, 25 bp, Homo sapien
gattccttccggacgcagatgaggg

SEQ ID NO: 4604696 - DNA, 25 bp, Homo sapien
gtggatgattccttcaggacgcaga

SEQ ID NO: 4604697 - DNA, 25 bp, Homo sapien
gcagatgaggaacgggcggatgact

SEQ ID NO: 4604698 - DNA, 25 bp, Homo sapien
gggcggatgacttccttcgggacgc

SEQ ID NO: 4604699 - DNA, 25 bp, Homo sapien
gatgacttccttccggacgcagatg

SEQ ID NO: 4604700 - DNA, 25 bp, Homo sapien
ggatgacttccttccggacgcagat

SEQ ID NO: 4604701 - DNA, 25 bp, Homo sapien
gacttccttccggacgcagatgagg

SEQ ID NO: 4604702 - DNA, 25 bp, Homo sapien
tccttccggacgcagatgagcgacg

SEQ ID NO: 4604703 - DNA, 25 bp, Homo sapien
gcagatgagggacgggcggatgatt

SEQ ID NO: 4604704 - DNA, 25 bp, Homo sapien
gacttccttccggacgcagatgagc

SEQ ID NO: 4604705 - DNA, 25 bp, Homo sapien
acttccttccggacgcagatgaggg

SEQ ID NO: 4604706 - DNA, 25 bp, Homo sapien
cttccttccggacgcagatgaggga

SEQ ID NO: 4604707 - DNA, 25 bp, Homo sapien
tccttccggacgcagatgagcgacg

SEQ ID NO: 4604708 - DNA, 25 bp, Homo sapien
gatgaggaagggattccttccggac

SEQ ID NO: 4604709 - DNA, 25 bp, Homo sapien
atgaggaagggattccttccggacg

SEQ ID NO: 4604710 - DNA, 25 bp, Homo sapien
tgccaggcggatgacatcaggaatg

SEQ ID NO: 4604711 - DNA, 25 bp, Homo sapien
ccaggcggatgacatcaggaatgct

SEQ ID NO: 4604712 - DNA, 25 bp, Homo sapien
gccaggcggatgacatcaggaatgc

SEQ ID NO: 4604713 - DNA, 25 bp, Homo sapien
gcggctccggcgaccaggccttggg

SEQ ID NO: 4604714 - DNA, 25 bp, Homo sapien
ggcagaatgcgggtgcccagccggg

SEQ ID NO: 4604715 - DNA, 25 bp, Homo sapien
tcctccatgcggacacactcaggtc

SEQ ID NO: 4604716 - DNA, 25 bp, Homo sapien
ccagtgtgtcgaagtcctgcaggcg

SEQ ID NO: 4604717 - DNA, 25 bp, Homo sapien
aatccaggaagtgtagagagctgtt

SEQ ID NO: 4604718 - DNA, 25 bp, Homo sapien
gtagagagctgttgagccctgtttc

SEQ ID NO: 4604719 - DNA, 25 bp, Homo sapien
atccaggaagtgtagagagctgttg

SEQ ID NO: 4604720 - DNA, 25 bp, Homo sapien
caatccaggaagtgtagagagctgt

SEQ ID NO: 4604721 - DNA, 25 bp, Homo sapien
tcagctatttgtgatcacccccaaa

SEQ ID NO: 4604722 - DNA, 25 bp, Homo sapien
ccccaaatgttaccctgattctatt

SEQ ID NO: 4604723 - DNA, 25 bp, Homo sapien
gctatttgtgatcacccccaaatgt

SEQ ID NO: 4604724 - DNA, 25 bp, Homo sapien
aatgttaccctgattctattaccaa

SEQ ID NO: 4604725 - DNA, 25 bp, Homo sapien
ttgtatggtggaaaggctgttgcca

SEQ ID NO: 4604726 - DNA, 25 bp, Homo sapien
ggtggaaaggctgttgccaattaat

SEQ ID NO: 4604727 - DNA, 25 bp, Homo sapien
aaggctgttgccaattaattttatt

SEQ ID NO: 4604728 - DNA, 25 bp, Homo sapien
tggaaaggctgttgccaattaattt

SEQ ID NO: 4604729 - DNA, 25 bp, Homo sapien
tatgaaatgcttcataaatttacat

SEQ ID NO: 4604730 - DNA, 25 bp, Homo sapien
caggggccatgctaatcttctctgt

SEQ ID NO: 4604731 - DNA, 25 bp, Homo sapien
cataaatttacatgtcatccttgag

SEQ ID NO: 4604732 - DNA, 25 bp, Homo sapien
aatatgaaatgcttcataaatttac

SEQ ID NO: 4604733 - DNA, 25 bp, Homo sapien
ctactatactcaactatttaggttt

SEQ ID NO: 4604734 - DNA, 25 bp, Homo sapien
ttatacgattgtagttcactgtaac

SEQ ID NO: 4604735 - DNA, 25 bp, Homo sapien
tcctctttgtttaatctgtttcgtg

SEQ ID NO: 4604736 - DNA, 25 bp, Homo sapien
tataatttctttgagggtattgata

SEQ ID NO: 4604737 - DNA, 25 bp, Homo sapien
tgaatgtgtattactcccgccctgc

SEQ ID NO: 4604738 - DNA, 25 bp, Homo sapien
tctgagaaatgagctgtaaggcaat

SEQ ID NO: 4604739 - DNA, 25 bp, Homo sapien
ttgaaacatcctaatgcagtgctgc

SEQ ID NO: 4604740 - DNA, 25 bp, Homo sapien
tatgtacccttaggaacaagagtcg

SEQ ID NO: 4604741 - DNA, 25 bp, Homo sapien
ccatcaaggacacatgaaagtggcc

SEQ ID NO: 4604742 - DNA, 25 bp, Homo sapien
tcaaagaaacggctaagattttaca

SEQ ID NO: 4604743 - DNA, 25 bp, Homo sapien
catatctgggattagggtctttgca

SEQ ID NO: 4604744 - DNA, 25 bp, Homo sapien
taggccaggtataatcacttctcaa

SEQ ID NO: 4604745 - DNA, 25 bp, Homo sapien
gagtgacgccactacaagacaaggg

SEQ ID NO: 4604746 - DNA, 25 bp, Homo sapien
cacgtggcaagttgttacggcagcc

SEQ ID NO: 4604747 - DNA, 25 bp, Homo sapien
cagccctagctgaggaacgcaatca

SEQ ID NO: 4604748 - DNA, 25 bp, Homo sapien
agaacttgtctagaaaacccagccg

SEQ ID NO: 4604749 - DNA, 25 bp, Homo sapien
attttatactattacctcattgaga

SEQ ID NO: 4604750 - DNA, 25 bp, Homo sapien
tatactattacctcattgagacata

SEQ ID NO: 4604751 - DNA, 25 bp, Homo sapien
cctcattgagacataatttatatta

SEQ ID NO: 4604752 - DNA, 25 bp, Homo sapien
agaaaacccttttatggtgatgatt

SEQ ID NO: 4604753 - DNA, 25 bp, Homo sapien
tgttcatagttttattacttatcac

SEQ ID NO: 4604754 - DNA, 25 bp, Homo sapien
caaagtgttcatagttttattactt

SEQ ID NO: 4604755 - DNA, 25 bp, Homo sapien
agtgttcatagttttattacttatc

SEQ ID NO: 4604756 - DNA, 25 bp, Homo sapien
acaaagtgttcatagttttattact

SEQ ID NO: 4604757 - DNA, 25 bp, Homo sapien
cacttcagagacgacatcatttggg

SEQ ID NO: 4604758 - DNA, 25 bp, Homo sapien
cacaatcaaaggagaaggcagtatc

SEQ ID NO: 4604759 - DNA, 25 bp, Homo sapien
gaatctccttagttgcttgctggtg

SEQ ID NO: 4604760 - DNA, 25 bp, Homo sapien
ttcttttgcaaacggcagatggcat

SEQ ID NO: 4604761 - DNA, 25 bp, Homo sapien
ttgagaggcccggggggaagacaga

SEQ ID NO: 4604762 - DNA, 25 bp, Homo sapien
cacatctctgtgactatgaggagca

SEQ ID NO: 4604763 - DNA, 25 bp, Homo sapien
gaaaatacagtgaggattatagcca

SEQ ID NO: 4604764 - DNA, 25 bp, Homo sapien
ctagaagcacacatggtgtgagccc

SEQ ID NO: 4604765 - DNA, 25 bp, Homo sapien
gttcagagggagcatcggaagccca

SEQ ID NO: 4604766 - DNA, 25 bp, Homo sapien
ggagaatgcagattaatgaccttac

SEQ ID NO: 4604767 - DNA, 25 bp, Homo sapien
cacataccataaattaacctattag

SEQ ID NO: 4604768 - DNA, 25 bp, Homo sapien
aagctctaaagaaatctgactcagt

SEQ ID NO: 4604769 - DNA, 25 bp, Homo sapien
gcagttctagtttttgtctgcccaa

SEQ ID NO: 4604770 - DNA, 25 bp, Homo sapien
caaggctctgtgacccaagtgggtt

SEQ ID NO: 4604771 - DNA, 25 bp, Homo sapien
cctcaacaagggtgggcatgtgacc

SEQ ID NO: 4604772 - DNA, 25 bp, Homo sapien
ttataactgtaaggctgaggtacgc

SEQ ID NO: 4604773 - DNA, 25 bp, Homo sapien
gtacgccttgaactgccggtggcca

SEQ ID NO: 4604774 - DNA, 25 bp, Homo sapien
gacatttgcctcaagaaggtatcag

SEQ ID NO: 4604775 - DNA, 25 bp, Homo sapien
agatacactcttacaggcgtgtgca

SEQ ID NO: 4604776 - DNA, 25 bp, Homo sapien
caagagtctaagagcagccattgcc

SEQ ID NO: 4604777 - DNA, 25 bp, Homo sapien
tacaagtaagtactggcggcacaac

SEQ ID NO: 4604778 - DNA, 25 bp, Homo sapien
atgcccagtgatgccttggcagcct

SEQ ID NO: 4604779 - DNA, 25 bp, Homo sapien
tagatgcccagtgatgccttggcag

SEQ ID NO: 4604780 - DNA, 25 bp, Homo sapien
agtagatgcccagtgatgccttggc

SEQ ID NO: 4604781 - DNA, 25 bp, Homo sapien
gatgcccagtgatgccttggcagcc

SEQ ID NO: 4604782 - DNA, 25 bp, Homo sapien
cacggattgtgtaattgcagagagg

SEQ ID NO: 4604783 - DNA, 25 bp, Homo sapien
ggctttaagaaggtcagtaactcag

SEQ ID NO: 4604784 - DNA, 25 bp, Homo sapien
taactcagacatgaacctctgtaag

SEQ ID NO: 4604785 - DNA, 25 bp, Homo sapien
tatgaaaacccgagacagccatttg

SEQ ID NO: 4604786 - DNA, 25 bp, Homo sapien
taaattcatagtgtctaaagtacct

SEQ ID NO: 4604787 - DNA, 25 bp, Homo sapien
tcaaagtgtaggcaatagtttatga

SEQ ID NO: 4604788 - DNA, 25 bp, Homo sapien
gcaattatcctaattcactttcaaa

SEQ ID NO: 4604789 - DNA, 25 bp, Homo sapien
gtaggcaatagtttatgaatgaatg

SEQ ID NO: 4604790 - DNA, 25 bp, Homo sapien
agctgtctgtccaagaatgcaacca

SEQ ID NO: 4604791 - DNA, 25 bp, Homo sapien
tctgtatgctgcctgtttagagaca

SEQ ID NO: 4604792 - DNA, 25 bp, Homo sapien
aaggatctccatctgttgcaccagg

SEQ ID NO: 4604793 - DNA, 25 bp, Homo sapien
taagatcacttcatcggatgccaga

SEQ ID NO: 4604794 - DNA, 25 bp, Homo sapien
gctttacaaattcattgtaggcaca

SEQ ID NO: 4604795 - DNA, 25 bp, Homo sapien
caaataggataacatacagcttaaa

SEQ ID NO: 4604796 - DNA, 25 bp, Homo sapien
catgtttcttaaaggtaaatccagt

SEQ ID NO: 4604797 - DNA, 25 bp, Homo sapien
tcacttactttgagatgactcaaca

SEQ ID NO: 4604798 - DNA, 25 bp, Homo sapien
ttaaactagtcctgagatttgataa

SEQ ID NO: 4604799 - DNA, 25 bp, Homo sapien
gtaaataattacacactgcatacaa

SEQ ID NO: 4604800 - DNA, 25 bp, Homo sapien
taaataattacacactgcatacaaa

SEQ ID NO: 4604801 - DNA, 25 bp, Homo sapien
ggcacagatccacgacagaggtctt

SEQ ID NO: 4604802 - DNA, 25 bp, Homo sapien
taacttcaggtggattctggaggcg

SEQ ID NO: 4604803 - DNA, 25 bp, Homo sapien
taagcttgctgctctaaggatcaca

SEQ ID NO: 4604804 - DNA, 25 bp, Homo sapien
tactattttagaagtatcccggcag

SEQ ID NO: 4604805 - DNA, 25 bp, Homo sapien
ttcaaaaatggtgtcgaaatgagtc

SEQ ID NO: 4604806 - DNA, 25 bp, Homo sapien
tcgaaatgagtcaggaactgcttta

SEQ ID NO: 4604807 - DNA, 25 bp, Homo sapien
ggtgtcgaaatgagtcaggaactgc

SEQ ID NO: 4604808 - DNA, 25 bp, Homo sapien
aatggtgtcgaaatgagtcaggaac

SEQ ID NO: 4604809 - DNA, 25 bp, Homo sapien
aaaagcaatccaggaattacttaag

SEQ ID NO: 4604810 - DNA, 25 bp, Homo sapien
tattgctttattactctcagagtat

SEQ ID NO: 4604811 - DNA, 25 bp, Homo sapien
aaatatagaagcaatgcaaggcact

SEQ ID NO: 4604812 - DNA, 25 bp, Homo sapien
aatatagaagcaatgcaaggcactg

SEQ ID NO: 4604813 - DNA, 25 bp, Homo sapien
cagccatgtgagataacaatttatc

SEQ ID NO: 4604814 - DNA, 25 bp, Homo sapien
tgcaaggcactgtgcagccatgtga

SEQ ID NO: 4604815 - DNA, 25 bp, Homo sapien
tggtcttcaaacacacaggtgctac

SEQ ID NO: 4604816 - DNA, 25 bp, Homo sapien
tgatgcctgccctggataccacagg

SEQ ID NO: 4604817 - DNA, 25 bp, Homo sapien
caggtgtttgcccattctaaggagg

SEQ ID NO: 4604818 - DNA, 25 bp, Homo sapien
aaggagcattacttctctggaaccg

SEQ ID NO: 4604819 - DNA, 25 bp, Homo sapien
cgacaactccaagttgtaaacatta

SEQ ID NO: 4604820 - DNA, 25 bp, Homo sapien
tgtatcttataagaaggtcgacaac

SEQ ID NO: 4604821 - DNA, 25 bp, Homo sapien
taaatctcagaagtgcaatgaatct

SEQ ID NO: 4604822 - DNA, 25 bp, Homo sapien
gaagtgcaatgaatctctaagaagt

SEQ ID NO: 4604823 - DNA, 25 bp, Homo sapien
tcccagcttaagagttgtcccacct

SEQ ID NO: 4604824 - DNA, 25 bp, Homo sapien
cctcccagcttaagagttgtcccac

SEQ ID NO: 4604825 - DNA, 25 bp, Homo sapien
agccccctcccagcttaagagttgt

SEQ ID NO: 4604826 - DNA, 25 bp, Homo sapien
gccccctcccagcttaagagttgtc

SEQ ID NO: 4604827 - DNA, 25 bp, Homo sapien
aaataataatagtttcccttgtgtg

SEQ ID NO: 4604828 - DNA, 25 bp, Homo sapien
gataattctcaaaccgtagcatcag

SEQ ID NO: 4604829 - DNA, 25 bp, Homo sapien
tctgggagggcccaagaattgaacc

SEQ ID NO: 4604830 - DNA, 25 bp, Homo sapien
tgagaaccactgcacaatctacttg

SEQ ID NO: 4604831 - DNA, 25 bp, Homo sapien
gatgaggaatctcagctccttaggt

SEQ ID NO: 4604832 - DNA, 25 bp, Homo sapien
tgactccttgctgtgtatcttctgg

SEQ ID NO: 4604833 - DNA, 25 bp, Homo sapien
tatcatgctggctcaggtaaatcag

SEQ ID NO: 4604834 - DNA, 25 bp, Homo sapien
gaaacggtgttctgattagctgagc

SEQ ID NO: 4604835 - DNA, 25 bp, Homo sapien
tatgtgacacctagcaccagcaact

SEQ ID NO: 4604836 - DNA, 25 bp, Homo sapien
tggctcaggcgaactctcttcacac

SEQ ID NO: 4604837 - DNA, 25 bp, Homo sapien
gaactctcttcacaccgccatttga

SEQ ID NO: 4604838 - DNA, 25 bp, Homo sapien
gggatctggctcaggcgaactctct

SEQ ID NO: 4604839 - DNA, 25 bp, Homo sapien
cttcacaccgccatttgagggaaca

SEQ ID NO: 4604840 - DNA, 25 bp, Homo sapien
agtgcaaagtgcatcccgaaagccc

SEQ ID NO: 4604841 - DNA, 25 bp, Homo sapien
tgggtccctccgtagctggaagcct

SEQ ID NO: 4604842 - DNA, 25 bp, Homo sapien
tatttcttcaatggagaagttggtg

SEQ ID NO: 4604843 - DNA, 25 bp, Homo sapien
cggctggcacttcgggccccgtatg

SEQ ID NO: 4604844 - DNA, 25 bp, Homo sapien
tgtcgggcagaagtctacatttcaa

SEQ ID NO: 4604845 - DNA, 25 bp, Homo sapien
tgaggtagcctggtacagtttcact

SEQ ID NO: 4604846 - DNA, 25 bp, Homo sapien
ttagccttatcgtttgtgcccttgg

SEQ ID NO: 4604847 - DNA, 25 bp, Homo sapien
tatactgcagggtcattatttgcct

SEQ ID NO: 4604848 - DNA, 25 bp, Homo sapien
caaatagctgaagcaatcctgagca

SEQ ID NO: 4604849 - DNA, 25 bp, Homo sapien
cctgagcaaaagggacaaagctgga

SEQ ID NO: 4604850 - DNA, 25 bp, Homo sapien
aacagcatggtattgacctaaaaac

SEQ ID NO: 4604851 - DNA, 25 bp, Homo sapien
aagagcccaaatagctgaagcaatc

SEQ ID NO: 4604852 - DNA, 25 bp, Homo sapien
gcaagagtacacatctggagcatga

SEQ ID NO: 4604853 - DNA, 25 bp, Homo sapien
tgtagtttaatgaccggcgtggacc

SEQ ID NO: 4604854 - DNA, 25 bp, Homo sapien
ccagaatgtgattgggataaggcca

SEQ ID NO: 4604855 - DNA, 25 bp, Homo sapien
gaatccagcgttctggcagtagcaa

SEQ ID NO: 4604856 - DNA, 25 bp, Homo sapien
gacccgttttggcagaagttggcaa

SEQ ID NO: 4604857 - DNA, 25 bp, Homo sapien
taaaatgtgacccaagagttcagct

SEQ ID NO: 4604858 - DNA, 25 bp, Homo sapien
attggtgtcactcctctcctgctgg

SEQ ID NO: 4604859 - DNA, 25 bp, Homo sapien
attcttacataggaaagccctggcc

SEQ ID NO: 4604860 - DNA, 25 bp, Homo sapien
ggctgcgttgctgccggtccactgt

SEQ ID NO: 4604861 - DNA, 25 bp, Homo sapien
ctcctttgccccgacgacttgcagg

SEQ ID NO: 4604862 - DNA, 25 bp, Homo sapien
gcaggcccctatgttgcaataacca

SEQ ID NO: 4604863 - DNA, 25 bp, Homo sapien
ttgaccctggggctgcgttgctgcc

SEQ ID NO: 4604864 - DNA, 25 bp, Homo sapien
cagcgacgtcgagtgtcttggtgat

SEQ ID NO: 4604865 - DNA, 25 bp, Homo sapien
ggatgcaacagcgacgtcgagtgtc

SEQ ID NO: 4604866 - DNA, 25 bp, Homo sapien
caacagcgacgtcgagtgtcttggt

SEQ ID NO: 4604867 - DNA, 25 bp, Homo sapien
acgtcgagtgtcttggtgatgagct

SEQ ID NO: 4604868 - DNA, 25 bp, Homo sapien
tctggtcaccagggtgtgctcacct

SEQ ID NO: 4604869 - DNA, 25 bp, Homo sapien
tggtcaccagggtgtgctcacctgc

SEQ ID NO: 4604870 - DNA, 25 bp, Homo sapien
ctggtcaccagggtgtgctcacctg

SEQ ID NO: 4604871 - DNA, 25 bp, Homo sapien
cattggaaactctaacgtgctctgc

SEQ ID NO: 4604872 - DNA, 25 bp, Homo sapien
gataacacacatgcattggaaactc

SEQ ID NO: 4604873 - DNA, 25 bp, Homo sapien
aactctaacgtgctctgcagaagta

SEQ ID NO: 4604874 - DNA, 25 bp, Homo sapien
cacatgcattggaaactctaacgtg

SEQ ID NO: 4604875 - DNA, 25 bp, Homo sapien
tttctactcgcagaaaccctttcat

SEQ ID NO: 4604876 - DNA, 25 bp, Homo sapien
tgtttctactcgcagaaaccctttc

SEQ ID NO: 4604877 - DNA, 25 bp, Homo sapien
atgtttctactcgcagaaacccttt

SEQ ID NO: 4604878 - DNA, 25 bp, Homo sapien
gtttctactcgcagaaaccctttca

SEQ ID NO: 4604879 - DNA, 25 bp, Homo sapien
gccttagggaaggacagaggaccaa

SEQ ID NO: 4604880 - DNA, 25 bp, Homo sapien
cagaggaccaatatcatccttcagt

SEQ ID NO: 4604881 - DNA, 25 bp, Homo sapien
gggtcacaagacacatcctgtggaa

SEQ ID NO: 4604882 - DNA, 25 bp, Homo sapien
agggtcacaagacacatcctgtgga

SEQ ID NO: 4604883 - DNA, 25 bp, Homo sapien
gactcgtccatagagacctggatct

SEQ ID NO: 4604884 - DNA, 25 bp, Homo sapien
atgtgcttgggcaacggcgactcgt

SEQ ID NO: 4604885 - DNA, 25 bp, Homo sapien
ctctatggaacagcagtccgaggca

SEQ ID NO: 4604886 - DNA, 25 bp, Homo sapien
cagcggtttcgcatgtaggcctttg

SEQ ID NO: 4604887 - DNA, 25 bp, Homo sapien
caaagacgagggtgaacccgcagtt

SEQ ID NO: 4604888 - DNA, 25 bp, Homo sapien
ggtgagcacgtagccttctcggcag

SEQ ID NO: 4604889 - DNA, 25 bp, Homo sapien
tctcggcagtagcagggtcaaggcc

SEQ ID NO: 4604890 - DNA, 25 bp, Homo sapien
gagggccacatgctggacgacaaag

SEQ ID NO: 4604891 - DNA, 25 bp, Homo sapien
tgcaggcaagatgttctcggaccat

SEQ ID NO: 4604892 - DNA, 25 bp, Homo sapien
cttgcaggcaagatgttctcggacc

SEQ ID NO: 4604893 - DNA, 25 bp, Homo sapien
gccccttgcaggcaagatgttctcg

SEQ ID NO: 4604894 - DNA, 25 bp, Homo sapien
cccttgcaggcaagatgttctcgga

SEQ ID NO: 4604895 - DNA, 25 bp, Homo sapien
gcagctgtatcggaagtctatgtct

SEQ ID NO: 4604896 - DNA, 25 bp, Homo sapien
gctgtatcggaagtctatgtctttt

SEQ ID NO: 4604897 - DNA, 25 bp, Homo sapien
tcttttttgtacagtgtggtaggaa

SEQ ID NO: 4604898 - DNA, 25 bp, Homo sapien
gattgcagctgtatcggaagtctat

SEQ ID NO: 4604899 - DNA, 25 bp, Homo sapien
ggagtctgctggaagagagcacctc

SEQ ID NO: 4604900 - DNA, 25 bp, Homo sapien
cagtggggagtctgctggaagagag

SEQ ID NO: 4604901 - DNA, 25 bp, Homo sapien
tgctggaagagagcacctccagctc

SEQ ID NO: 4604902 - DNA, 25 bp, Homo sapien
caggctttccttgggcccagtgggg

SEQ ID NO: 4604903 - DNA, 25 bp, Homo sapien
ctgcagctccccatggaccccacgc

SEQ ID NO: 4604904 - DNA, 25 bp, Homo sapien
ttgtaaactccattgattcctaaga

SEQ ID NO: 4604905 - DNA, 25 bp, Homo sapien
gctgttcctcaaaccttctgggagg

SEQ ID NO: 4604906 - DNA, 25 bp, Homo sapien
tgacacctgggggaaatcggaacag

SEQ ID NO: 4604907 - DNA, 25 bp, Homo sapien
ggttctcatgttcccaaatcctcct

SEQ ID NO: 4604908 - DNA, 25 bp, Homo sapien
acagctctgtgaaccgggcctggtg

SEQ ID NO: 4604909 - DNA, 25 bp, Homo sapien
tcactgatcatgtagtgggcccaaa

SEQ ID NO: 4604910 - DNA, 25 bp, Homo sapien
cccaaatgttgtgcctgaggttctc

SEQ ID NO: 4604911 - DNA, 25 bp, Homo sapien
gaacttttgggactcttgtgggaga

SEQ ID NO: 4604912 - DNA, 25 bp, Homo sapien
cctgcatgaagatcacctggtatgt

SEQ ID NO: 4604913 - DNA, 25 bp, Homo sapien
tcttggtcgtggaaccaggtgacct

SEQ ID NO: 4604914 - DNA, 25 bp, Homo sapien
tattccatgtgatgggcgctgagct

SEQ ID NO: 4604915 - DNA, 25 bp, Homo sapien
taatggagataaaatgtcaatgtga

SEQ ID NO: 4604916 - DNA, 25 bp, Homo sapien
gaatccctctgccatctttaatgga

SEQ ID NO: 4604917 - DNA, 25 bp, Homo sapien
cctctgccatctttaatggagataa

SEQ ID NO: 4604918 - DNA, 25 bp, Homo sapien
tgccatctttaatggagataaaatg

SEQ ID NO: 4604919 - DNA, 25 bp, Homo sapien
tgcacacctccatgtcaggagaagt

SEQ ID NO: 4604920 - DNA, 25 bp, Homo sapien
tgtcgtaggtgcaccctttgcacac

SEQ ID NO: 4604921 - DNA, 25 bp, Homo sapien
ggagaagttctcttcgcgctgctgc

SEQ ID NO: 4604922 - DNA, 25 bp, Homo sapien
cctggagcagctgtcgtaggtgcac

SEQ ID NO: 4604923 - DNA, 25 bp, Homo sapien
gatgtagcggagatccccgccttct

SEQ ID NO: 4604924 - DNA, 25 bp, Homo sapien
cagagatgtagcggagatccccgcc

SEQ ID NO: 4604925 - DNA, 25 bp, Homo sapien
agagatgtagcggagatccccgcct

SEQ ID NO: 4604926 - DNA, 25 bp, Homo sapien
gagatgtagcggagatccccgcctt

SEQ ID NO: 4604927 - DNA, 25 bp, Homo sapien
gccagcccaggcacgataggattct

SEQ ID NO: 4604928 - DNA, 25 bp, Homo sapien
cccaggcacgataggattctgccag

SEQ ID NO: 4604929 - DNA, 25 bp, Homo sapien
aggtgcctgccggtgccgccagccc

SEQ ID NO: 4604930 - DNA, 25 bp, Homo sapien
gccgccagcccaggcacgataggat

SEQ ID NO: 4604931 - DNA, 25 bp, Homo sapien
tggagaggcagacggaagccaaaga

SEQ ID NO: 4604932 - DNA, 25 bp, Homo sapien
agaggcagacggaagccaaagaggg

SEQ ID NO: 4604933 - DNA, 25 bp, Homo sapien
gagaggcagacggaagccaaagagg

SEQ ID NO: 4604934 - DNA, 25 bp, Homo sapien
ctggagaggcagacggaagccaaag

SEQ ID NO: 4604935 - DNA, 25 bp, Homo sapien
ggtactcctcagacccggcgtctga

SEQ ID NO: 4604936 - DNA, 25 bp, Homo sapien
ctcccgcgggcacggccattcagct

SEQ ID NO: 4604937 - DNA, 25 bp, Homo sapien
cggcgtctgaccagccatgctcccg

SEQ ID NO: 4604938 - DNA, 25 bp, Homo sapien
cgcgggcacggccattcagcttctt

SEQ ID NO: 4604939 - DNA, 25 bp, Homo sapien
ctgtcaatgacagggctggcctggc

SEQ ID NO: 4604940 - DNA, 25 bp, Homo sapien
ctggttaattattctcaggagaccc

SEQ ID NO: 4604941 - DNA, 25 bp, Homo sapien
tctgtcttcgagtggggacctggtt

SEQ ID NO: 4604942 - DNA, 25 bp, Homo sapien
ggacctggttaattattctcaggag

SEQ ID NO: 4604943 - DNA, 25 bp, Homo sapien
gcaggccttcacgttgccctttggg

SEQ ID NO: 4604944 - DNA, 25 bp, Homo sapien
gagacgcaggccttcacgttgccct

SEQ ID NO: 4604945 - DNA, 25 bp, Homo sapien
ctttgggaagcaggacgtgtatgca

SEQ ID NO: 4604946 - DNA, 25 bp, Homo sapien
tgtatgcattgggacagtgctgtag

SEQ ID NO: 4604947 - DNA, 25 bp, Homo sapien
ggagggtcacagtggtcaaatgtaa

SEQ ID NO: 4604948 - DNA, 25 bp, Homo sapien
tggagggtcacagtggtcaaatgta

SEQ ID NO: 4604949 - DNA, 25 bp, Homo sapien
gccagcgctcctgtgcctgtacttt

SEQ ID NO: 4604950 - DNA, 25 bp, Homo sapien
tttcaggtggccctgccgattggag

SEQ ID NO: 4604951 - DNA, 25 bp, Homo sapien
ttgaaatttgggccagcgctcctgt

SEQ ID NO: 4604952 - DNA, 25 bp, Homo sapien
ccgattggagggtttgaggcttgga

SEQ ID NO: 4604953 - DNA, 25 bp, Homo sapien
gacagtcactgcagcacattcaaag

SEQ ID NO: 4604954 - DNA, 25 bp, Homo sapien
cacaggaccaatgagacggagggct

SEQ ID NO: 4604955 - DNA, 25 bp, Homo sapien
ccagctagttttatcagaggacatt

SEQ ID NO: 4604956 - DNA, 25 bp, Homo sapien
cattcaaaggacatattccagctag

SEQ ID NO: 4604957 - DNA, 25 bp, Homo sapien
aaacgttggccaaatccactgggca

SEQ ID NO: 4604958 - DNA, 25 bp, Homo sapien
atccactgggcagggttgccttggt

SEQ ID NO: 4604959 - DNA, 25 bp, Homo sapien
tccaaaacgttggccaaatccactg

SEQ ID NO: 4604960 - DNA, 25 bp, Homo sapien
caaaacgttggccaaatccactggg

SEQ ID NO: 4604961 - DNA, 25 bp, Homo sapien
ttagactgaggtttagatggcttcg

SEQ ID NO: 4604962 - DNA, 25 bp, Homo sapien
gatggcttcgtgtggaagcttccct

SEQ ID NO: 4604963 - DNA, 25 bp, Homo sapien
ctgttgtcccatagagtctggcatc

SEQ ID NO: 4604964 - DNA, 25 bp, Homo sapien
ggcatcattgccagagcctgcaaaa

SEQ ID NO: 4604965 - DNA, 25 bp, Homo sapien
ccatcagatgagttccggagtctct

SEQ ID NO: 4604966 - DNA, 25 bp, Homo sapien
agatgagttccggagtctcttcccc

SEQ ID NO: 4604967 - DNA, 25 bp, Homo sapien
gagtgttgacccatcagatgagttc

SEQ ID NO: 4604968 - DNA, 25 bp, Homo sapien
tgccctttatccctggggaagtcca

SEQ ID NO: 4604969 - DNA, 25 bp, Homo sapien
ctctggaagcttaggggcgtagggg

SEQ ID NO: 4604970 - DNA, 25 bp, Homo sapien
ttcttcacagctgtccctgtgagac

SEQ ID NO: 4604971 - DNA, 25 bp, Homo sapien
cttcacagctgtccctgtgagacca

SEQ ID NO: 4604972 - DNA, 25 bp, Homo sapien
tccagctcctaattcttcacagctg

SEQ ID NO: 4604973 - DNA, 25 bp, Homo sapien
cgtccagctcctaattcttcacagc

SEQ ID NO: 4604974 - DNA, 25 bp, Homo sapien
agataagggacatcctctgagtcct

SEQ ID NO: 4604975 - DNA, 25 bp, Homo sapien
gcctgagggtagaggcagataaggg

SEQ ID NO: 4604976 - DNA, 25 bp, Homo sapien
aagcctgagggtagaggcagataag

SEQ ID NO: 4604977 - DNA, 25 bp, Homo sapien
ggcagataagggacatcctctgagt

SEQ ID NO: 4604978 - DNA, 25 bp, Homo sapien
tttggaagtcacagtgggtatacac

SEQ ID NO: 4604979 - DNA, 25 bp, Homo sapien
gctttggaagtcacagtgggtatac

SEQ ID NO: 4604980 - DNA, 25 bp, Homo sapien
ccagctttggaagtcacagtgggta

SEQ ID NO: 4604981 - DNA, 25 bp, Homo sapien
cagctttggaagtcacagtgggtat

SEQ ID NO: 4604982 - DNA, 25 bp, Homo sapien
tcatccgagggcacaaccagtggtt

SEQ ID NO: 4604983 - DNA, 25 bp, Homo sapien
gcttctggccaaaaggatagtactt

SEQ ID NO: 4604984 - DNA, 25 bp, Homo sapien
ccagtggttgtgtttcccgagaaga

SEQ ID NO: 4604985 - DNA, 25 bp, Homo sapien
tgataagctcggctggagcagccct

SEQ ID NO: 4604986 - DNA, 25 bp, Homo sapien
atctttctcagctccagtgctcctt

SEQ ID NO: 4604987 - DNA, 25 bp, Homo sapien
ttcctcgctgctgacctgtggatct

SEQ ID NO: 4604988 - DNA, 25 bp, Homo sapien
cttgcactctccacctctgcagctc

SEQ ID NO: 4604989 - DNA, 25 bp, Homo sapien
cttcatcatctttctcagctccagt

SEQ ID NO: 4604990 - DNA, 25 bp, Homo sapien
cctggggagatcctgcatcccagag

SEQ ID NO: 4604991 - DNA, 25 bp, Homo sapien
ccagggatcttccagtccctggtgg

SEQ ID NO: 4604992 - DNA, 25 bp, Homo sapien
agaagcaacacctggggagatcctg

SEQ ID NO: 4604993 - DNA, 25 bp, Homo sapien
tccagggatcttccagtccctggtg

SEQ ID NO: 4604994 - DNA, 25 bp, Homo sapien
gcccacagtgcacacatcagtaaca

SEQ ID NO: 4604995 - DNA, 25 bp, Homo sapien
atcagtaacagcatctaccaaataa

SEQ ID NO: 4604996 - DNA, 25 bp, Homo sapien
catcagtaacagcatctaccaaata

SEQ ID NO: 4604997 - DNA, 25 bp, Homo sapien
tggtcagctacacatggacgaggac

SEQ ID NO: 4604998 - DNA, 25 bp, Homo sapien
caggcaatgaaatagaaggatcccc

SEQ ID NO: 4604999 - DNA, 25 bp, Homo sapien
tgtaatgggccatgcacggaactgc

SEQ ID NO: 4605000 - DNA, 25 bp, Homo sapien
tgtcacaaaagtcaacgcaatggtt

SEQ ID NO: 4605001 - DNA, 25 bp, Homo sapien
tcacgaagattttgccccagggagg

SEQ ID NO: 4605002 - DNA, 25 bp, Homo sapien
agggaggagcctcacgggtcacctg

SEQ ID NO: 4605003 - DNA, 25 bp, Homo sapien
acccaggtgaggatcggcctgctcc

SEQ ID NO: 4605004 - DNA, 25 bp, Homo sapien
gggtcacctggccagatcgcctctc

SEQ ID NO: 4605005 - DNA, 25 bp, Homo sapien
ggctttgctctccatacggaaatcg

SEQ ID NO: 4605006 - DNA, 25 bp, Homo sapien
tggttgagcgtgctcctgacgccag

SEQ ID NO: 4605007 - DNA, 25 bp, Homo sapien
cggaaatcgcgtgccatttctgttg

SEQ ID NO: 4605008 - DNA, 25 bp, Homo sapien
tgacgccagcgtgtaggcttccttc

SEQ ID NO: 4605009 - DNA, 25 bp, Homo sapien
ccaggcctcataacaggagggccgc

SEQ ID NO: 4605010 - DNA, 25 bp, Homo sapien
ctcataacaggagggccgcagagct

SEQ ID NO: 4605011 - DNA, 25 bp, Homo sapien
tttccaactgacataggcagaaagg

SEQ ID NO: 4605012 - DNA, 25 bp, Homo sapien
gaatctttgcaattggcctgtgctg

SEQ ID NO: 4605013 - DNA, 25 bp, Homo sapien
ggaaaaggagagcatttctgtcttt

SEQ ID NO: 4605014 - DNA, 25 bp, Homo sapien
agagcatttctgtctttttgctcac

SEQ ID NO: 4605015 - DNA, 25 bp, Homo sapien
aggaaaaggagagcatttctgtctt

SEQ ID NO: 4605016 - DNA, 25 bp, Homo sapien
aaggagagcatttctgtctttttgc

SEQ ID NO: 4605017 - DNA, 25 bp, Homo sapien
catctgcagggtaagatggatggct

SEQ ID NO: 4605018 - DNA, 25 bp, Homo sapien
tcccttgtgtactgcgaccatctgc

SEQ ID NO: 4605019 - DNA, 25 bp, Homo sapien
cacggcctttgtgtctgtgaaggtt

SEQ ID NO: 4605020 - DNA, 25 bp, Homo sapien
aatcagagactccataggagggtag

SEQ ID NO: 4605021 - DNA, 25 bp, Homo sapien
tctgttcagtgagcaagttgggcac

SEQ ID NO: 4605022 - DNA, 25 bp, Homo sapien
acatgcatgccagccctaaaggaga

SEQ ID NO: 4605023 - DNA, 25 bp, Homo sapien
catgctgggagaacggacatgtgca

SEQ ID NO: 4605024 - DNA, 25 bp, Homo sapien
gataaacctggcagctaaaccctgg

SEQ ID NO: 4605025 - DNA, 25 bp, Homo sapien
tgctcggacccacagcagcggtcag

SEQ ID NO: 4605026 - DNA, 25 bp, Homo sapien
gctcggacccacagcagcggtcagg

SEQ ID NO: 4605027 - DNA, 25 bp, Homo sapien
gtgctcggacccacagcagcggtca

SEQ ID NO: 4605028 - DNA, 25 bp, Homo sapien
agcagggcagcatcccagcttgcag

SEQ ID NO: 4605029 - DNA, 25 bp, Homo sapien
gcttgcagaacttttggagaggatc

SEQ ID NO: 4605030 - DNA, 25 bp, Homo sapien
gaggccacacagaaagacgagggat

SEQ ID NO: 4605031 - DNA, 25 bp, Homo sapien
gaggatcttggcctctacagaggcc

SEQ ID NO: 4605032 - DNA, 25 bp, Homo sapien
tgtgccttccaacgagagccgtgtc

SEQ ID NO: 4605033 - DNA, 25 bp, Homo sapien
tgccaggactccaaccagcaaggag

SEQ ID NO: 4605034 - DNA, 25 bp, Homo sapien
ggagcgtttcgcacagagctgcaga

SEQ ID NO: 4605035 - DNA, 25 bp, Homo sapien
acagtgattccggtggtgccaggac

SEQ ID NO: 4605036 - DNA, 25 bp, Homo sapien
cagcctgcgggagagccgaggtctg

SEQ ID NO: 4605037 - DNA, 25 bp, Homo sapien
ccgaggtctgcagccgggccgtcgg

SEQ ID NO: 4605038 - DNA, 25 bp, Homo sapien
cgggccgtcgggctgcctcttcccg

SEQ ID NO: 4605039 - DNA, 25 bp, Homo sapien
gcctgcgggagagccgaggtctgca

SEQ ID NO: 4605040 - DNA, 25 bp, Homo sapien
taacggcccgtgtgatccagttctg

SEQ ID NO: 4605041 - DNA, 25 bp, Homo sapien
gatgggaaaggcttacatggcagta

SEQ ID NO: 4605042 - DNA, 25 bp, Homo sapien
cgtgtccacacctggataaaaagtg

SEQ ID NO: 4605043 - DNA, 25 bp, Homo sapien
gggaaaatactgtctggccacccag

SEQ ID NO: 4605044 - DNA, 25 bp, Homo sapien
gtcggggcagaggccagggtggctc

SEQ ID NO: 4605045 - DNA, 25 bp, Homo sapien
ctagacatgtccagggtcggggcag

SEQ ID NO: 4605046 - DNA, 25 bp, Homo sapien
agggtcggggcagaggccagggtgg

SEQ ID NO: 4605047 - DNA, 25 bp, Homo sapien
tagacatgtccagggtcggggcaga

SEQ ID NO: 4605048 - DNA, 25 bp, Homo sapien
catccacaacgaggctccaggaaga

SEQ ID NO: 4605049 - DNA, 25 bp, Homo sapien
tcatccacaacgaggctccaggaag

SEQ ID NO: 4605050 - DNA, 25 bp, Homo sapien
aatggaaaatgattgggcacccagc

SEQ ID NO: 4605051 - DNA, 25 bp, Homo sapien
gcagatgcgctgaggaatccagcca

SEQ ID NO: 4605052 - DNA, 25 bp, Homo sapien
agctgtgcagctgtgtaggcctctc

SEQ ID NO: 4605053 - DNA, 25 bp, Homo sapien
cagcccacagcagatgcgctgagga

SEQ ID NO: 4605054 - DNA, 25 bp, Homo sapien
cccacgtggacggccccactctgtc

SEQ ID NO: 4605055 - DNA, 25 bp, Homo sapien
ccacgtggacggccccactctgtcc

SEQ ID NO: 4605056 - DNA, 25 bp, Homo sapien
tgtccacacttgtccctttgatgtc

SEQ ID NO: 4605057 - DNA, 25 bp, Homo sapien
gcttggggccgtctctcagttctgc

SEQ ID NO: 4605058 - DNA, 25 bp, Homo sapien
aggcttggggccgtctctcagttct

SEQ ID NO: 4605059 - DNA, 25 bp, Homo sapien
cattgcctgcttcaactgtccactg

SEQ ID NO: 4605060 - DNA, 25 bp, Homo sapien
caggcggactgcttgggacttttat

SEQ ID NO: 4605061 - DNA, 25 bp, Homo sapien
caatcttgctgagtgttgccactga

SEQ ID NO: 4605062 - DNA, 25 bp, Homo sapien
aaactgaagggcgatggtgagatcc

SEQ ID NO: 4605063 - DNA, 25 bp, Homo sapien
gctgatgtgcattggtgaaaactga

SEQ ID NO: 4605064 - DNA, 25 bp, Homo sapien
tattgatggagcataccccatgagg

SEQ ID NO: 4605065 - DNA, 25 bp, Homo sapien
catgaggctgagctgccaaggcatt

SEQ ID NO: 4605066 - DNA, 25 bp, Homo sapien
cctcagaataggaaagacctgggtt

SEQ ID NO: 4605067 - DNA, 25 bp, Homo sapien
gaaaaaattgttcccatgtgaccta

SEQ ID NO: 4605068 - DNA, 25 bp, Homo sapien
caagagaattactggcaaacacggt

SEQ ID NO: 4605069 - DNA, 25 bp, Homo sapien
tcatggagcgtgttctcttgccggc

SEQ ID NO: 4605070 - DNA, 25 bp, Homo sapien
tcagtatcatcttaggagcagaggc

SEQ ID NO: 4605071 - DNA, 25 bp, Homo sapien
gcagcccacgagaaataagatccag

SEQ ID NO: 4605072 - DNA, 25 bp, Homo sapien
tctgctgtgggaacaccatggtcct

SEQ ID NO: 4605073 - DNA, 25 bp, Homo sapien
tcacgagatgggacagtggcagact

SEQ ID NO: 4605074 - DNA, 25 bp, Homo sapien
catcgttgagcacatgggacagggt

SEQ ID NO: 4605075 - DNA, 25 bp, Homo sapien
tgagacccaggttgaacaagcaaag

SEQ ID NO: 4605076 - DNA, 25 bp, Homo sapien
gcagccgtgttcacaaaaaatctcg

SEQ ID NO: 4605077 - DNA, 25 bp, Homo sapien
gataaaaagagcgaatagcaccgac

SEQ ID NO: 4605078 - DNA, 25 bp, Homo sapien
taatcatagattttcgggccagtgc

SEQ ID NO: 4605079 - DNA, 25 bp, Homo sapien
tagcaccgactatggactcacagca

SEQ ID NO: 4605080 - DNA, 25 bp, Homo sapien
gacaaaagttgagagcaccctgtgt

SEQ ID NO: 4605081 - DNA, 25 bp, Homo sapien
agtgacacaggctccaatctgctga

SEQ ID NO: 4605082 - DNA, 25 bp, Homo sapien
tctaggatcaactgctacaacgccc

SEQ ID NO: 4605083 - DNA, 25 bp, Homo sapien
tgccgtgggctgaacactagatcca

SEQ ID NO: 4605084 - DNA, 25 bp, Homo sapien
ctctgtagcccaacatattcacagg

SEQ ID NO: 4605085 - DNA, 25 bp, Homo sapien
ggagatccttattctgcctacgata

SEQ ID NO: 4605086 - DNA, 25 bp, Homo sapien
ggctgctcgcattcctaggctggtg

SEQ ID NO: 4605087 - DNA, 25 bp, Homo sapien
tattgctcctgcaagaagttaccat

SEQ ID NO: 4605088 - DNA, 25 bp, Homo sapien
ggctattattccatgaggtcgtcac

SEQ ID NO: 4605089 - DNA, 25 bp, Homo sapien
ttttgcataagcctccaacggcctg

SEQ ID NO: 4605090 - DNA, 25 bp, Homo sapien
caacggcctgatggaatgatgaagc

SEQ ID NO: 4605091 - DNA, 25 bp, Homo sapien
tgatgaagcctcagaacagtttcta

SEQ ID NO: 4605092 - DNA, 25 bp, Homo sapien
ctgtgatcacagaggtgaatacgct

SEQ ID NO: 4605093 - DNA, 25 bp, Homo sapien
gatgtacccattttgaattttcctc

SEQ ID NO: 4605094 - DNA, 25 bp, Homo sapien
gctttggccgaatacacagaagtga

SEQ ID NO: 4605095 - DNA, 25 bp, Homo sapien
cagaagtgaaaactgtcaccatcaa

SEQ ID NO: 4605096 - DNA, 25 bp, Homo sapien
aatgctttgccgaatctgactccag

SEQ ID NO: 4605097 - DNA, 25 bp, Homo sapien
cctcaaacatcggacggcggaatgt

SEQ ID NO: 4605098 - DNA, 25 bp, Homo sapien
tgtctgtgaaatcgcagtcctgcct

SEQ ID NO: 4605099 - DNA, 25 bp, Homo sapien
tctggaggctttacatctactggag

SEQ ID NO: 4605100 - DNA, 25 bp, Homo sapien
gcgccagggtctttgtggattgcat

SEQ ID NO: 4605101 - DNA, 25 bp, Homo sapien
gagattcggcttcaaaccaatactg

SEQ ID NO: 4605102 - DNA, 25 bp, Homo sapien
ggtctttgtggattgcatgttgaca

SEQ ID NO: 4605103 - DNA, 25 bp, Homo sapien
catgttgacattgaccgtgagattc

SEQ ID NO: 4605104 - DNA, 25 bp, Homo sapien
tgacagaatcaatagcccagagagc

SEQ ID NO: 4605105 - DNA, 25 bp, Homo sapien
gattagtaaagcgtacacaactgga

SEQ ID NO: 4605106 - DNA, 25 bp, Homo sapien
gaggacctcggtcttcatccaagtg

SEQ ID NO: 4605107 - DNA, 25 bp, Homo sapien
tatcacggtctaccttaaccaaggc

SEQ ID NO: 4605108 - DNA, 25 bp, Homo sapien
aaatctataggcctgggaattccga

SEQ ID NO: 4605109 - DNA, 25 bp, Homo sapien
tgagggcccgtaacagaaccagtgt

SEQ ID NO: 4605110 - DNA, 25 bp, Homo sapien
aatgggcctatcacccttgtcagag

SEQ ID NO: 4605111 - DNA, 25 bp, Homo sapien
gaaccagtgtgtgtataacgaaaac

SEQ ID NO: 4605112 - DNA, 25 bp, Homo sapien
tatccgcgtgtcagatgttcctgct

SEQ ID NO: 4605113 - DNA, 25 bp, Homo sapien
taaccttcctatgcgaagttgtggc

SEQ ID NO: 4605114 - DNA, 25 bp, Homo sapien
tgtggctaacgcatgcctaatggct

SEQ ID NO: 4605115 - DNA, 25 bp, Homo sapien
gagctcagcacaggttatccgcgtg

SEQ ID NO: 4605116 - DNA, 25 bp, Homo sapien
gctccctcgcggtggcgccaggtgg

SEQ ID NO: 4605117 - DNA, 25 bp, Homo sapien
cctgcgctccctcgcggtggcgcca

SEQ ID NO: 4605118 - DNA, 25 bp, Homo sapien
ggcctgcgctccctcgcggtggcgc

SEQ ID NO: 4605119 - DNA, 25 bp, Homo sapien
gcgctccctcgcggtggcgccaggt

SEQ ID NO: 4605120 - DNA, 25 bp, Homo sapien
aattgttgggaacttgtcggtggca

SEQ ID NO: 4605121 - DNA, 25 bp, Homo sapien
tgttgggaacttgtcggtggcaatc

SEQ ID NO: 4605122 - DNA, 25 bp, Homo sapien
gggaacttgtcggtggcaatcacac

SEQ ID NO: 4605123 - DNA, 25 bp, Homo sapien
cttgtcggtggcaatcacactgctg

SEQ ID NO: 4605124 - DNA, 25 bp, Homo sapien
aggggtgagaacaggattgcagaac

SEQ ID NO: 4605125 - DNA, 25 bp, Homo sapien
gggtgagaacaggattgcagaactg

SEQ ID NO: 4605126 - DNA, 25 bp, Homo sapien
gccctcaggggtgagaacaggattg

SEQ ID NO: 4605127 - DNA, 25 bp, Homo sapien
cctcaggggtgagaacaggattgca

SEQ ID NO: 4605128 - DNA, 25 bp, Homo sapien
caagaagccgctcaagggaacacgg

SEQ ID NO: 4605129 - DNA, 25 bp, Homo sapien
ccttttggaaagtcgtccagtggca

SEQ ID NO: 4605130 - DNA, 25 bp, Homo sapien
gggacccaagaagccgctcaaggga

SEQ ID NO: 4605131 - DNA, 25 bp, Homo sapien
cagagcgaagctgctcggtggtccc

SEQ ID NO: 4605132 - DNA, 25 bp, Homo sapien
cagggcgtggaaccctctgctcttc

SEQ ID NO: 4605133 - DNA, 25 bp, Homo sapien
ggagatgtgcgctaaatcctgggaa

SEQ ID NO: 4605134 - DNA, 25 bp, Homo sapien
cgagtcataactttccaggagaggg

SEQ ID NO: 4605135 - DNA, 25 bp, Homo sapien
taaatcctgggaacgtgcgagtcat

SEQ ID NO: 4605136 - DNA, 25 bp, Homo sapien
acatttctgtatcgccccgtgaaga

SEQ ID NO: 4605137 - DNA, 25 bp, Homo sapien
cgctttagaacgacacatttctgta

SEQ ID NO: 4605138 - DNA, 25 bp, Homo sapien
ccatgtgttggaggatatgcaaatt

SEQ ID NO: 4605139 - DNA, 25 bp, Homo sapien
tatgcaaattgcaggtcgttaacgc

SEQ ID NO: 4605140 - DNA, 25 bp, Homo sapien
tgaatgttccccgtctgtttaactg

SEQ ID NO: 4605141 - DNA, 25 bp, Homo sapien
taactgttacggccgcagtgtgtgg

SEQ ID NO: 4605142 - DNA, 25 bp, Homo sapien
atgaatgttccccgtctgtttaact

SEQ ID NO: 4605143 - DNA, 25 bp, Homo sapien
ctgtttaactgttacggccgcagtg

SEQ ID NO: 4605144 - DNA, 25 bp, Homo sapien
ctggagcagagggatagcgaaagcg

SEQ ID NO: 4605145 - DNA, 25 bp, Homo sapien
ggagcagagggatagcgaaagcggg

SEQ ID NO: 4605146 - DNA, 25 bp, Homo sapien
ggctgagcgcagcacggaccgatcc

SEQ ID NO: 4605147 - DNA, 25 bp, Homo sapien
cggggctgagcgcagcacggaccga

SEQ ID NO: 4605148 - DNA, 25 bp, Homo sapien
ccgcgctcgccccgcgtggaggcag

SEQ ID NO: 4605149 - DNA, 25 bp, Homo sapien
cgcgctcgccccgcgtggaggcagc

SEQ ID NO: 4605150 - DNA, 25 bp, Homo sapien
cgctcgccccgcgtggaggcagccg

SEQ ID NO: 4605151 - DNA, 25 bp, Homo sapien
gcgctcgccccgcgtggaggcagcc

SEQ ID NO: 4605152 - DNA, 25 bp, Homo sapien
ccccggcgtctcccggggcatcgag

SEQ ID NO: 4605153 - DNA, 25 bp, Homo sapien
gcgtctcccggggcatcgagcgcca

SEQ ID NO: 4605154 - DNA, 25 bp, Homo sapien
cgtctcccggggcatcgagcgccat

SEQ ID NO: 4605155 - DNA, 25 bp, Homo sapien
cggcgtctcccggggcatcgagcgc

SEQ ID NO: 4605156 - DNA, 25 bp, Homo sapien
cgcctcgcgacggttcctgggagag

SEQ ID NO: 4605157 - DNA, 25 bp, Homo sapien
gacgcctcgcgacggttcctgggag

SEQ ID NO: 4605158 - DNA, 25 bp, Homo sapien
acgcctcgcgacggttcctgggaga

SEQ ID NO: 4605159 - DNA, 25 bp, Homo sapien
gcctcgcgacggttcctgggagagc

SEQ ID NO: 4605160 - DNA, 25 bp, Homo sapien
aggcttcaccctcctcgatgtctgg

SEQ ID NO: 4605161 - DNA, 25 bp, Homo sapien
tctgggtcacgcttcttgcccaggt

SEQ ID NO: 4605162 - DNA, 25 bp, Homo sapien
ggcaagagacacgagtcgggagaca

SEQ ID NO: 4605163 - DNA, 25 bp, Homo sapien
cctctgcctttggagcgaacccagt

SEQ ID NO: 4605164 - DNA, 25 bp, Homo sapien
cccacacgtggtttgtgtcgaccat

SEQ ID NO: 4605165 - DNA, 25 bp, Homo sapien
gcccagattgatcgtttttcctttc

SEQ ID NO: 4605166 - DNA, 25 bp, Homo sapien
gtttgtgtcgaccatcccttttgcc

SEQ ID NO: 4605167 - DNA, 25 bp, Homo sapien
ttataaggctttcatcatcccctaa

SEQ ID NO: 4605168 - DNA, 25 bp, Homo sapien
tttccctgccttgacgagtccagtc

SEQ ID NO: 4605169 - DNA, 25 bp, Homo sapien
catgtgcagcttgcacaaggctgct

SEQ ID NO: 4605170 - DNA, 25 bp, Homo sapien
tgaaacatgtgcagcttgcacaagg

SEQ ID NO: 4605171 - DNA, 25 bp, Homo sapien
ctttccctgccttgacgagtccagt

SEQ ID NO: 4605172 - DNA, 25 bp, Homo sapien
ctcgtacttcatcacatgtaggata

SEQ ID NO: 4605173 - DNA, 25 bp, Homo sapien
ttgatggctggcatgtcgcaaagac

SEQ ID NO: 4605174 - DNA, 25 bp, Homo sapien
ttgaagatcggctgctgcaagggtt

SEQ ID NO: 4605175 - DNA, 25 bp, Homo sapien
atggctggcatgtcgcaaagacccc

SEQ ID NO: 4605176 - DNA, 25 bp, Homo sapien
tgcctttgaagatcggctgctgcaa

SEQ ID NO: 4605177 - DNA, 25 bp, Homo sapien
aaggacagggctgtgcttatgcctg

SEQ ID NO: 4605178 - DNA, 25 bp, Homo sapien
gacagggctgtgcttatgcctgcct

SEQ ID NO: 4605179 - DNA, 25 bp, Homo sapien
gtaaggacagggctgtgcttatgcc

SEQ ID NO: 4605180 - DNA, 25 bp, Homo sapien
cagggctgtgcttatgcctgcctgg

SEQ ID NO: 4605181 - DNA, 25 bp, Homo sapien
atttctatgtgtggcctgacatgtt

SEQ ID NO: 4605182 - DNA, 25 bp, Homo sapien
gagtcagtgcccttgcatgctggga

SEQ ID NO: 4605183 - DNA, 25 bp, Homo sapien
tgggacatgggacagtacagttcct

SEQ ID NO: 4605184 - DNA, 25 bp, Homo sapien
ccttccctatgtttttgtagatcca

SEQ ID NO: 4605185 - DNA, 25 bp, Homo sapien
gcttctctttatggcgctgctcttc

SEQ ID NO: 4605186 - DNA, 25 bp, Homo sapien
ttagaggagtttcgtgcttctcttt

SEQ ID NO: 4605187 - DNA, 25 bp, Homo sapien
gagtttcgtgcttctctttatggcg

SEQ ID NO: 4605188 - DNA, 25 bp, Homo sapien
ttcgtgcttctctttatggcgctgc

SEQ ID NO: 4605189 - DNA, 25 bp, Homo sapien
cctgggtggatgctgactgttctgc

SEQ ID NO: 4605190 - DNA, 25 bp, Homo sapien
gactgttctgctcgggattccccgt

SEQ ID NO: 4605191 - DNA, 25 bp, Homo sapien
gattccccgtagctgtctgtgaaca

SEQ ID NO: 4605192 - DNA, 25 bp, Homo sapien
cgggattccccgtagctgtctgtga

SEQ ID NO: 4605193 - DNA, 25 bp, Homo sapien
cgttctttgctctactgaacagtgc

SEQ ID NO: 4605194 - DNA, 25 bp, Homo sapien
tcaaaatcaccgttctttgctctac

SEQ ID NO: 4605195 - DNA, 25 bp, Homo sapien
gtttgtgtagttccagggtctgtgc

SEQ ID NO: 4605196 - DNA, 25 bp, Homo sapien
tttgtgtagttccagggtctgtgca

SEQ ID NO: 4605197 - DNA, 25 bp, Homo sapien
aaagccgagtagcagcgactctgtg

SEQ ID NO: 4605198 - DNA, 25 bp, Homo sapien
ttaacttagaaagccgagtagcagc

SEQ ID NO: 4605199 - DNA, 25 bp, Homo sapien
gaagcaccagcaggtattaacttag

SEQ ID NO: 4605200 - DNA, 25 bp, Homo sapien
gccagcgctgttgttctgtgaacct

SEQ ID NO: 4605201 - DNA, 25 bp, Homo sapien
gcaccgtgtcatttctgtagggaaa

SEQ ID NO: 4605202 - DNA, 25 bp, Homo sapien
gtgcaccgtgtcatttctgtaggga

SEQ ID NO: 4605203 - DNA, 25 bp, Homo sapien
gtcctggctcgggagtagtctttta

SEQ ID NO: 4605204 - DNA, 25 bp, Homo sapien
tcgggagtagtcttttagtgtgcac

SEQ ID NO: 4605205 - DNA, 25 bp, Homo sapien
tcagagacacggttgtcacagccag

SEQ ID NO: 4605206 - DNA, 25 bp, Homo sapien
agctgcctgccgtcagagacacggt

SEQ ID NO: 4605207 - DNA, 25 bp, Homo sapien
tgccgtcagagacacggttgtcaca

SEQ ID NO: 4605208 - DNA, 25 bp, Homo sapien
tgcagaacagtgagctgcctgccgt

SEQ ID NO: 4605209 - DNA, 25 bp, Homo sapien
ccagatgcttgggacccagcagtga

SEQ ID NO: 4605210 - DNA, 25 bp, Homo sapien
gcttgcaagtactgtcacacaccta

SEQ ID NO: 4605211 - DNA, 25 bp, Homo sapien
caaagtttatcgatctcctgccaga

SEQ ID NO: 4605212 - DNA, 25 bp, Homo sapien
cacagtgctcacagattccagcaag

SEQ ID NO: 4605213 - DNA, 25 bp, Homo sapien
ccaccaggctctccgtgtgaaatgg

SEQ ID NO: 4605214 - DNA, 25 bp, Homo sapien
accaggctctccgtgtgaaatggtc

SEQ ID NO: 4605215 - DNA, 25 bp, Homo sapien
ggctctccgtgtgaaatggtcccat

SEQ ID NO: 4605216 - DNA, 25 bp, Homo sapien
caggctctccgtgtgaaatggtccc

SEQ ID NO: 4605217 - DNA, 25 bp, Homo sapien
tagtgggacacgtttcatctcagca

SEQ ID NO: 4605218 - DNA, 25 bp, Homo sapien
tctcagcacaggcataatggttccc

SEQ ID NO: 4605219 - DNA, 25 bp, Homo sapien
gaacagtgtctcttaagctcccaag

SEQ ID NO: 4605220 - DNA, 25 bp, Homo sapien
gaaacagtagcaggcatgtcccagg

SEQ ID NO: 4605221 - DNA, 25 bp, Homo sapien
tctgggaacttccttagggcctcac

SEQ ID NO: 4605222 - DNA, 25 bp, Homo sapien
gtcagcccaacaggtttaacgaatg

SEQ ID NO: 4605223 - DNA, 25 bp, Homo sapien
tgagagcggtagacctaaagtcagc

SEQ ID NO: 4605224 - DNA, 25 bp, Homo sapien
ctttacagagggcttgattggcacc

SEQ ID NO: 4605225 - DNA, 25 bp, Homo sapien
caggctgagcgtccctgactgcaat

SEQ ID NO: 4605226 - DNA, 25 bp, Homo sapien
tgcagggcacagagtctctccaggt

SEQ ID NO: 4605227 - DNA, 25 bp, Homo sapien
ggtagggatatcatcccagggtccc

SEQ ID NO: 4605228 - DNA, 25 bp, Homo sapien
acacgtacatacagggaggagtccc

SEQ ID NO: 4605229 - DNA, 25 bp, Homo sapien
gttggggtccttcacactgttggca

SEQ ID NO: 4605230 - DNA, 25 bp, Homo sapien
agggttggggtccttcacactgttg

SEQ ID NO: 4605231 - DNA, 25 bp, Homo sapien
ggttggggtccttcacactgttggc

SEQ ID NO: 4605232 - DNA, 25 bp, Homo sapien
gacgccactcatggagcagtacgtg

SEQ ID NO: 4605233 - DNA, 25 bp, Homo sapien
tgcagttgccgagtgatctccagga

SEQ ID NO: 4605234 - DNA, 25 bp, Homo sapien
gaactgttcatgaccgacttcccgg

SEQ ID NO: 4605235 - DNA, 25 bp, Homo sapien
aaaaggcacccgaatgtggcagtgg

SEQ ID NO: 4605236 - DNA, 25 bp, Homo sapien
gacggcctccgattcagttctcaag

SEQ ID NO: 4605237 - DNA, 25 bp, Homo sapien
gacagaaggcctagcatacccaaag

SEQ ID NO: 4605238 - DNA, 25 bp, Homo sapien
taggcgccctcactaaatgcacaag

SEQ ID NO: 4605239 - DNA, 25 bp, Homo sapien
tacccaaaggtctaggccggtgtgc

SEQ ID NO: 4605240 - DNA, 25 bp, Homo sapien
aagcctgcattcttgcacgcgcacc

SEQ ID NO: 4605241 - DNA, 25 bp, Homo sapien
cacctcctgcacgaccagagggaat

SEQ ID NO: 4605242 - DNA, 25 bp, Homo sapien
agagggaataaagcctgctctgtgc

SEQ ID NO: 4605243 - DNA, 25 bp, Homo sapien
ccgccagcgcgaagcctgcattctt

SEQ ID NO: 4605244 - DNA, 25 bp, Homo sapien
tctggtacagcaatgggccgggcct

SEQ ID NO: 4605245 - DNA, 25 bp, Homo sapien
catggttacgtcagtcgtgtgcagc

SEQ ID NO: 4605246 - DNA, 25 bp, Homo sapien
caacagcggctctgaggtctggtac

SEQ ID NO: 4605247 - DNA, 25 bp, Homo sapien
tcagcatcgcggatgaagacgcacg

SEQ ID NO: 4605248 - DNA, 25 bp, Homo sapien
catgggtggagacgctgctctgtca

SEQ ID NO: 4605249 - DNA, 25 bp, Homo sapien
tttgagcgcttatgaccacagcacg

SEQ ID NO: 4605250 - DNA, 25 bp, Homo sapien
cacaggcttggaaaaagcgagtccc

SEQ ID NO: 4605251 - DNA, 25 bp, Homo sapien
tctttcaagaacgaagctgtggcct

SEQ ID NO: 4605252 - DNA, 25 bp, Homo sapien
gcgggtgtagaagagctcatgcttc

SEQ ID NO: 4605253 - DNA, 25 bp, Homo sapien
attcagcatggtccctgcaactttg

SEQ ID NO: 4605254 - DNA, 25 bp, Homo sapien
cccagtgacctctggcgggtgtaga

SEQ ID NO: 4605255 - DNA, 25 bp, Homo sapien
agcattcagcatggtccctgcaact

SEQ ID NO: 4605256 - DNA, 25 bp, Homo sapien
cggagacacagtcaagaatctctgt

SEQ ID NO: 4605257 - DNA, 25 bp, Homo sapien
accggagacacagtcaagaatctct

SEQ ID NO: 4605258 - DNA, 25 bp, Homo sapien
tgaccggagacacagtcaagaatct

SEQ ID NO: 4605259 - DNA, 25 bp, Homo sapien
ggagacacagtcaagaatctctgtg

SEQ ID NO: 4605260 - DNA, 25 bp, Homo sapien
gggaggctgccagagcccgtctccc

SEQ ID NO: 4605261 - DNA, 25 bp, Homo sapien
cggggaggctgccagagcccgtctc

SEQ ID NO: 4605262 - DNA, 25 bp, Homo sapien
tgcagggtctttgcaaggagcctgc

SEQ ID NO: 4605263 - DNA, 25 bp, Homo sapien
agggtctttgcaaggagcctgcctg

SEQ ID NO: 4605264 - DNA, 25 bp, Homo sapien
agaaactccccaatgctcaggaaaa

SEQ ID NO: 4605265 - DNA, 25 bp, Homo sapien
ttttccagcatgtcgggcctggggc

SEQ ID NO: 4605266 - DNA, 25 bp, Homo sapien
tttccagcatgtcgggcctggggcc

SEQ ID NO: 4605267 - DNA, 25 bp, Homo sapien
cattttccagcatgtcgggcctggg

SEQ ID NO: 4605268 - DNA, 25 bp, Homo sapien
cacattttccagcatgtcgggcctg

SEQ ID NO: 4605269 - DNA, 25 bp, Homo sapien
ttgccagccacaccgatgtcactca

SEQ ID NO: 4605270 - DNA, 25 bp, Homo sapien
caggcacatcgttcaggtagtggga

SEQ ID NO: 4605271 - DNA, 25 bp, Homo sapien
gacatattagctgtactctgggagg

SEQ ID NO: 4605272 - DNA, 25 bp, Homo sapien
tagtgggacatattagctgtactct

SEQ ID NO: 4605273 - DNA, 25 bp, Homo sapien
gtgctgaggaccccgtccccagaaa

SEQ ID NO: 4605274 - DNA, 25 bp, Homo sapien
ctgtgctgaggaccccgtccccaga

SEQ ID NO: 4605275 - DNA, 25 bp, Homo sapien
ctcttgccatgtccctgataatgca

SEQ ID NO: 4605276 - DNA, 25 bp, Homo sapien
accaccgtcctcttgccatgtccct

SEQ ID NO: 4605277 - DNA, 25 bp, Homo sapien
tactgtacagctctcagatcctcag

SEQ ID NO: 4605278 - DNA, 25 bp, Homo sapien
gggtgtgtcacatccttcactgcaa

SEQ ID NO: 4605279 - DNA, 25 bp, Homo sapien
gaatgaatccgggactcagcacagg

SEQ ID NO: 4605280 - DNA, 25 bp, Homo sapien
tgtagcaggatcaatgcacagcagg

SEQ ID NO: 4605281 - DNA, 25 bp, Homo sapien
ctcctccggcgcctgcgcggctctt

SEQ ID NO: 4605282 - DNA, 25 bp, Homo sapien
gcgcctgcgcggctcttccccagct

SEQ ID NO: 4605283 - DNA, 25 bp, Homo sapien
ggcctcctccggcgcctgcgcggct

SEQ ID NO: 4605284 - DNA, 25 bp, Homo sapien
cctccggcgcctgcgcggctcttcc

SEQ ID NO: 4605285 - DNA, 25 bp, Homo sapien
agaaacctcgttctgccgactcgga

SEQ ID NO: 4605286 - DNA, 25 bp, Homo sapien
gagcgaggatctgccgccgctcagc

SEQ ID NO: 4605287 - DNA, 25 bp, Homo sapien
gccgccgttttggatcctgcattca

SEQ ID NO: 4605288 - DNA, 25 bp, Homo sapien
gttcaaccgcatgcgcgacagcgct

SEQ ID NO: 4605289 - DNA, 25 bp, Homo sapien
tgaggtcgcaccaacagccagcatc

SEQ ID NO: 4605290 - DNA, 25 bp, Homo sapien
tgtggagtctttgcagtggaggcct

SEQ ID NO: 4605291 - DNA, 25 bp, Homo sapien
gatgacatcttcagatggttccagc

SEQ ID NO: 4605292 - DNA, 25 bp, Homo sapien
tggaggcctcagactttacaggatg

SEQ ID NO: 4605293 - DNA, 25 bp, Homo sapien
tcgcagcttcggtgccgggaatcca

SEQ ID NO: 4605294 - DNA, 25 bp, Homo sapien
gtgctggtgaccattgaaggccaga

SEQ ID NO: 4605295 - DNA, 25 bp, Homo sapien
agcataatcgatgcctgtgtggcag

SEQ ID NO: 4605296 - DNA, 25 bp, Homo sapien
cagaggcgagagagtcgcagcttcg

SEQ ID NO: 4605297 - DNA, 25 bp, Homo sapien
ttggccagatcccacgaacaaagct

SEQ ID NO: 4605298 - DNA, 25 bp, Homo sapien
caggcccctccggagatgagtatta

SEQ ID NO: 4605299 - DNA, 25 bp, Homo sapien
gaagtgagacgatgcaaacctctgg

SEQ ID NO: 4605300 - DNA, 25 bp, Homo sapien
gagtattaattacccgaaggcaggc

SEQ ID NO: 4605301 - DNA, 25 bp, Homo sapien
ctactgatggaccttggtccctgag

SEQ ID NO: 4605302 - DNA, 25 bp, Homo sapien
tactgatggaccttggtccctgagt

SEQ ID NO: 4605303 - DNA, 25 bp, Homo sapien
ctctggacacccacgttactcctgc

SEQ ID NO: 4605304 - DNA, 25 bp, Homo sapien
gctctggacacccacgttactcctg

SEQ ID NO: 4605305 - DNA, 25 bp, Homo sapien
cagcctgcagaccgcactctggccg

SEQ ID NO: 4605306 - DNA, 25 bp, Homo sapien
cagagaacaaagacccctttgtggc

SEQ ID NO: 4605307 - DNA, 25 bp, Homo sapien
gaacctcctccttgtaatcgccaat

SEQ ID NO: 4605308 - DNA, 25 bp, Homo sapien
atcgccaataagtttccccttggag

SEQ ID NO: 4605309 - DNA, 25 bp, Homo sapien
cagccagccgttgtaaaactgaacc

SEQ ID NO: 4605310 - DNA, 25 bp, Homo sapien
caggggagccaagtttctccagcct

SEQ ID NO: 4605311 - DNA, 25 bp, Homo sapien
gcatgagccgatttctttccagctg

SEQ ID NO: 4605312 - DNA, 25 bp, Homo sapien
gcatcataaaacatggcatgagccg

SEQ ID NO: 4605313 - DNA, 25 bp, Homo sapien
tctccagcctggacgtggaggcccg

SEQ ID NO: 4605314 - DNA, 25 bp, Homo sapien
ccattggcacgcgtggctttctgat

SEQ ID NO: 4605315 - DNA, 25 bp, Homo sapien
cacctaaaccaagatttgccttcta

SEQ ID NO: 4605316 - DNA, 25 bp, Homo sapien
tcttccaaagagcttcatggagccg

SEQ ID NO: 4605317 - DNA, 25 bp, Homo sapien
tggagccgtagcttccatggagaga

SEQ ID NO: 4605318 - DNA, 25 bp, Homo sapien
gacggagtttgaaagcgtcagagcc

SEQ ID NO: 4605319 - DNA, 25 bp, Homo sapien
ggtgaccagcaggtgtagcctgaga

SEQ ID NO: 4605320 - DNA, 25 bp, Homo sapien
gagtcacatgtgcaactcagagcac

SEQ ID NO: 4605321 - DNA, 25 bp, Homo sapien
gtacagacggagtttgaaagcgtca

SEQ ID NO: 4605322 - DNA, 25 bp, Homo sapien
catgccatttcctcgggtggctggg

SEQ ID NO: 4605323 - DNA, 25 bp, Homo sapien
tcgcacgtccgggagccgcagccct

SEQ ID NO: 4605324 - DNA, 25 bp, Homo sapien
ctgggacaatgacaccctcgcacgt

SEQ ID NO: 4605325 - DNA, 25 bp, Homo sapien
aggcatgccatttcctcgggtggct

SEQ ID NO: 4605326 - DNA, 25 bp, Homo sapien
cagacgtggtctggttgaggacatc

SEQ ID NO: 4605327 - DNA, 25 bp, Homo sapien
caaggaccctggtggaccagacgtg

SEQ ID NO: 4605328 - DNA, 25 bp, Homo sapien
ttccaggtgggactgaagaagctgc

SEQ ID NO: 4605329 - DNA, 25 bp, Homo sapien
gggtgaccagagtcatccagacctt

SEQ ID NO: 4605330 - DNA, 25 bp, Homo sapien
ttcctgaggtagcaccagctttggg

SEQ ID NO: 4605331 - DNA, 25 bp, Homo sapien
ggggacacgtatcaccaaggcccat

SEQ ID NO: 4605332 - DNA, 25 bp, Homo sapien
caaaagccggtagcactgagacact

SEQ ID NO: 4605333 - DNA, 25 bp, Homo sapien
cagctttgggcagcaaaagccggta

SEQ ID NO: 4605334 - DNA, 25 bp, Homo sapien
ttctgagggctgctaacaggcttct

SEQ ID NO: 4605335 - DNA, 25 bp, Homo sapien
tcagcttggaaagaacctggaaatt

SEQ ID NO: 4605336 - DNA, 25 bp, Homo sapien
tgcctttatcaaagagggtgctctt

SEQ ID NO: 4605337 - DNA, 25 bp, Homo sapien
ttcccaagaggtaattgcctttatc

SEQ ID NO: 4605338 - DNA, 25 bp, Homo sapien
ttgaccaccgggcataacccatttc

SEQ ID NO: 4605339 - DNA, 25 bp, Homo sapien
catttcacatttagaactctagcgg

SEQ ID NO: 4605340 - DNA, 25 bp, Homo sapien
tttagaactctagcggcaagggaag

SEQ ID NO: 4605341 - DNA, 25 bp, Homo sapien
ggaagcgggaaaagcagtggctcac

SEQ ID NO: 4605342 - DNA, 25 bp, Homo sapien
tgaaggaacagcgaggagagcacac

SEQ ID NO: 4605343 - DNA, 25 bp, Homo sapien
ctttgaaggaacagcgaggagagca

SEQ ID NO: 4605344 - DNA, 25 bp, Homo sapien
atgctagctgccaagccgtcctcca

SEQ ID NO: 4605345 - DNA, 25 bp, Homo sapien
cagcgaggagagcacacagaatgct

SEQ ID NO: 4605346 - DNA, 25 bp, Homo sapien
tgctcttgagcatatgtgaagttta

SEQ ID NO: 4605347 - DNA, 25 bp, Homo sapien
gaagcaacatttcttaacgcaattg

SEQ ID NO: 4605348 - DNA, 25 bp, Homo sapien
acatgtgtgagggatgaatggctgc

SEQ ID NO: 4605349 - DNA, 25 bp, Homo sapien
gctagtaattacgtggaagcaacat

SEQ ID NO: 4605350 - DNA, 25 bp, Homo sapien
tcatccaagcaccttctcctcaaac

SEQ ID NO: 4605351 - DNA, 25 bp, Homo sapien
ccaagcaccttctcctcaaactccc

SEQ ID NO: 4605352 - DNA, 25 bp, Homo sapien
catccaagcaccttctcctcaaact

SEQ ID NO: 4605353 - DNA, 25 bp, Homo sapien
tccaagcaccttctcctcaaactcc

SEQ ID NO: 4605354 - DNA, 25 bp, Homo sapien
catagggagtgaccattcacattcc

SEQ ID NO: 4605355 - DNA, 25 bp, Homo sapien
acatagggagtgaccattcacattc

SEQ ID NO: 4605356 - DNA, 25 bp, Homo sapien
gacgctcagctccatataagccatg

SEQ ID NO: 4605357 - DNA, 25 bp, Homo sapien
tccatataagccatgaggcgggagg

SEQ ID NO: 4605358 - DNA, 25 bp, Homo sapien
atgttcctaattccctgacgctcag

SEQ ID NO: 4605359 - DNA, 25 bp, Homo sapien
tcagccgtatgttcctaattccctg

SEQ ID NO: 4605360 - DNA, 25 bp, Homo sapien
tatttgtgccaaagatggctatcgg

SEQ ID NO: 4605361 - DNA, 25 bp, Homo sapien
tgcaggcttgatgctcctggaacct

SEQ ID NO: 4605362 - DNA, 25 bp, Homo sapien
ctaaggcccctttaagcaaatccag

SEQ ID NO: 4605363 - DNA, 25 bp, Homo sapien
tcagagacggtactgcctaaggccc

SEQ ID NO: 4605364 - DNA, 25 bp, Homo sapien
acggcgcccccctgcacttccggtg

SEQ ID NO: 4605365 - DNA, 25 bp, Homo sapien
cttgggcggcaagccggacaagcca

SEQ ID NO: 4605366 - DNA, 25 bp, Homo sapien
tgcacttccggtgggtaactcccat

SEQ ID NO: 4605367 - DNA, 25 bp, Homo sapien
ggcaagccggacaagccacggcgcc

SEQ ID NO: 4605368 - DNA, 25 bp, Homo sapien
cacggacgatgagtaatttcgagag

SEQ ID NO: 4605369 - DNA, 25 bp, Homo sapien
tgtggtcagggcctgaaacacggac

SEQ ID NO: 4605370 - DNA, 25 bp, Homo sapien
ttgcatatacttgatctgagccctg

SEQ ID NO: 4605371 - DNA, 25 bp, Homo sapien
tatacttgatctgagccctgtggtc

SEQ ID NO: 4605372 - DNA, 25 bp, Homo sapien
aacctggcaaaggccgccttcacag

SEQ ID NO: 4605373 - DNA, 25 bp, Homo sapien
cctggcaaaggccgccttcacagct

SEQ ID NO: 4605374 - DNA, 25 bp, Homo sapien
tggcaaaggccgccttcacagctcc

SEQ ID NO: 4605375 - DNA, 25 bp, Homo sapien
ggaacctggcaaaggccgccttcac

SEQ ID NO: 4605376 - DNA, 25 bp, Homo sapien
cagaaatggcgtatcccctcaagac

SEQ ID NO: 4605377 - DNA, 25 bp, Homo sapien
tgctggatggaagctgtactgcact

SEQ ID NO: 4605378 - DNA, 25 bp, Homo sapien
tgaataaggagaatagggcagagct

SEQ ID NO: 4605379 - DNA, 25 bp, Homo sapien
cagagcagggtgctagatggtaccc

SEQ ID NO: 4605380 - DNA, 25 bp, Homo sapien
ctccccatggacacccggaggcggc

SEQ ID NO: 4605381 - DNA, 25 bp, Homo sapien
tccccatggacacccggaggcggct

SEQ ID NO: 4605382 - DNA, 25 bp, Homo sapien
ccatggacacccggaggcggcttcc

SEQ ID NO: 4605383 - DNA, 25 bp, Homo sapien
accccaccaagagactgaaccacca

SEQ ID NO: 4605384 - DNA, 25 bp, Homo sapien
gaaggttttcagcagggcggtggct

SEQ ID NO: 4605385 - DNA, 25 bp, Homo sapien
gtgcagaagaggttctaaaactgtc

SEQ ID NO: 4605386 - DNA, 25 bp, Homo sapien
tgagggtgatacgatggtgtgcaga

SEQ ID NO: 4605387 - DNA, 25 bp, Homo sapien
cggtggctggatgcaagttgagggt

SEQ ID NO: 4605388 - DNA, 25 bp, Homo sapien
aaagagctgctcttatctcaggcta

SEQ ID NO: 4605389 - DNA, 25 bp, Homo sapien
gagtggagtgtacctctttcccaaa

SEQ ID NO: 4605390 - DNA, 25 bp, Homo sapien
atctcttggaatgagcgccagcttc

SEQ ID NO: 4605391 - DNA, 25 bp, Homo sapien
ggtcatgtccacatctcgtccagcg

SEQ ID NO: 4605392 - DNA, 25 bp, Homo sapien
aaaacaggaataatgagacaaaatg

SEQ ID NO: 4605393 - DNA, 25 bp, Homo sapien
aatgtaatacaattcttcagctaaa

SEQ ID NO: 4605394 - DNA, 25 bp, Homo sapien
tctccaaatgtaatacaattcttca

SEQ ID NO: 4605395 - DNA, 25 bp, Homo sapien
caaatgtaatacaattcttcagcta

SEQ ID NO: 4605396 - DNA, 25 bp, Homo sapien
tccaatgacgtgtattaaaatggca

SEQ ID NO: 4605397 - DNA, 25 bp, Homo sapien
aaatacgcagccctccaatgacgtg

SEQ ID NO: 4605398 - DNA, 25 bp, Homo sapien
tcaggctatttacaaatacgcagcc

SEQ ID NO: 4605399 - DNA, 25 bp, Homo sapien
ttttccaaatgagcatcaggctatt

SEQ ID NO: 4605400 - DNA, 25 bp, Homo sapien
aaaaacctacgtggccatgctgagc

SEQ ID NO: 4605401 - DNA, 25 bp, Homo sapien
cgttttctgccataggactggagca

SEQ ID NO: 4605402 - DNA, 25 bp, Homo sapien
tatttaggccgaatgaactaccacg

SEQ ID NO: 4605403 - DNA, 25 bp, Homo sapien
tgctttaaaacctacgtggccagct

SEQ ID NO: 4605404 - DNA, 25 bp, Homo sapien
gagccattattattgctgcttttac

SEQ ID NO: 4605405 - DNA, 25 bp, Homo sapien
ttattattgctgcttttactgtaac

SEQ ID NO: 4605406 - DNA, 25 bp, Homo sapien
tgagccattattattgctgctttta

SEQ ID NO: 4605407 - DNA, 25 bp, Homo sapien
ccattattattgctgcttttactgt

SEQ ID NO: 4605408 - DNA, 25 bp, Homo sapien
tagtaaacacgaggtcgacgtcgca

SEQ ID NO: 4605409 - DNA, 25 bp, Homo sapien
tgtgctcactcttcgacccagggag

SEQ ID NO: 4605410 - DNA, 25 bp, Homo sapien
tgaagtcaatgatgcgccctctggt

SEQ ID NO: 4605411 - DNA, 25 bp, Homo sapien
catcaggacaatttcgcggtgcagc

SEQ ID NO: 4605412 - DNA, 25 bp, Homo sapien
cagagtcatgcgtccctggctgaag

SEQ ID NO: 4605413 - DNA, 25 bp, Homo sapien
agagtcatgcgtccctggctgaaga

SEQ ID NO: 4605414 - DNA, 25 bp, Homo sapien
acagagtcatgcgtccctggctgaa

SEQ ID NO: 4605415 - DNA, 25 bp, Homo sapien
ccacagagtcatgcgtccctggctg

SEQ ID NO: 4605416 - DNA, 25 bp, Homo sapien
gccagaagaactccaggcaaacaac

SEQ ID NO: 4605417 - DNA, 25 bp, Homo sapien
gatcctgcggcttctatctgtggga

SEQ ID NO: 4605418 - DNA, 25 bp, Homo sapien
gtgggaataaacttcctcctgagag

SEQ ID NO: 4605419 - DNA, 25 bp, Homo sapien
aacctgagcgaaggagtaccctgct

SEQ ID NO: 4605420 - DNA, 25 bp, Homo sapien
gttttgggacagcataagcttacgg

SEQ ID NO: 4605421 - DNA, 25 bp, Homo sapien
tgcctccgccccgtggcgcaggttt

SEQ ID NO: 4605422 - DNA, 25 bp, Homo sapien
gggacagcataagcttacgggccat

SEQ ID NO: 4605423 - DNA, 25 bp, Homo sapien
ccgtggcgcaggttttgggacagca

SEQ ID NO: 4605424 - DNA, 25 bp, Homo sapien
taaagccaagtctacgcccagactg

SEQ ID NO: 4605425 - DNA, 25 bp, Homo sapien
gacactctgtcgcaggtaaggacga

SEQ ID NO: 4605426 - DNA, 25 bp, Homo sapien
taaactcacgtcaaggaaatagctc

SEQ ID NO: 4605427 - DNA, 25 bp, Homo sapien
gacagactgggtggaacacatacct

SEQ ID NO: 4605428 - DNA, 25 bp, Homo sapien
taaccaagacctgcccaaatgggct

SEQ ID NO: 4605429 - DNA, 25 bp, Homo sapien
accttaaccaagacctgcccaaatg

SEQ ID NO: 4605430 - DNA, 25 bp, Homo sapien
agacctgcccaaatgggcttcgggt

SEQ ID NO: 4605431 - DNA, 25 bp, Homo sapien
caagacctgcccaaatgggcttcgg

SEQ ID NO: 4605432 - DNA, 25 bp, Homo sapien
tcattttgctctaggcacatcaagg

SEQ ID NO: 4605433 - DNA, 25 bp, Homo sapien
catttttctttgaggatgcgtattt

SEQ ID NO: 4605434 - DNA, 25 bp, Homo sapien
ggagaaatgctggtcattaagcgtt

SEQ ID NO: 4605435 - DNA, 25 bp, Homo sapien
tgcgtatttaagaggcatgctgtgg

SEQ ID NO: 4605436 - DNA, 25 bp, Homo sapien
tattcccaggaacttctagcccagc

SEQ ID NO: 4605437 - DNA, 25 bp, Homo sapien
ataccaaggtcacgctattcccagg

SEQ ID NO: 4605438 - DNA, 25 bp, Homo sapien
tcccattcggacttaggcagcgttt

SEQ ID NO: 4605439 - DNA, 25 bp, Homo sapien
gcagcgtttcagttcattacagaga

SEQ ID NO: 4605440 - DNA, 25 bp, Homo sapien
ggatgtaagccagaagggatggagc

SEQ ID NO: 4605441 - DNA, 25 bp, Homo sapien
tgcagccgggtttaaagggaagcta

SEQ ID NO: 4605442 - DNA, 25 bp, Homo sapien
ggagctcggggggaccaggacgtgc

SEQ ID NO: 4605443 - DNA, 25 bp, Homo sapien
agggacaaggtggatgtaagccaga

SEQ ID NO: 4605444 - DNA, 25 bp, Homo sapien
ggacatggaacaagagggactctcg

SEQ ID NO: 4605445 - DNA, 25 bp, Homo sapien
aagcaccttgccgaagttacacaga

SEQ ID NO: 4605446 - DNA, 25 bp, Homo sapien
gatgccacgacacacctagtagaag

SEQ ID NO: 4605447 - DNA, 25 bp, Homo sapien
caaattcaaacaacgagatgccacg

SEQ ID NO: 4605448 - DNA, 25 bp, Homo sapien
taatcacaaatgtattcccaagctc

SEQ ID NO: 4605449 - DNA, 25 bp, Homo sapien
tttaatcacaaatgtattcccaagc

SEQ ID NO: 4605450 - DNA, 25 bp, Homo sapien
ttaatcacaaatgtattcccaagct

SEQ ID NO: 4605451 - DNA, 25 bp, Homo sapien
tacgctaagaattccgcgagtggta

SEQ ID NO: 4605452 - DNA, 25 bp, Homo sapien
attccgcgagtggtatttggacgcc

SEQ ID NO: 4605453 - DNA, 25 bp, Homo sapien
cttggtatacgctaagaattccgcg

SEQ ID NO: 4605454 - DNA, 25 bp, Homo sapien
tatttggacgccttatatctgaaac

SEQ ID NO: 4605455 - DNA, 25 bp, Homo sapien
ttgtttccgtcacgtcgcacagact

SEQ ID NO: 4605456 - DNA, 25 bp, Homo sapien
taaggatttgtttccgtcacgtcgc

SEQ ID NO: 4605457 - DNA, 25 bp, Homo sapien
gtttccgtcacgtcgcacagactgc

SEQ ID NO: 4605458 - DNA, 25 bp, Homo sapien
gatttgtttccgtcacgtcgcacag

SEQ ID NO: 4605459 - DNA, 25 bp, Homo sapien
agaggaaagaaactagaaccagcat

SEQ ID NO: 4605460 - DNA, 25 bp, Homo sapien
gtgcctcccagtcactaaattgcca

SEQ ID NO: 4605461 - DNA, 25 bp, Homo sapien
gctgtgggcatgacatcaatttatt

SEQ ID NO: 4605462 - DNA, 25 bp, Homo sapien
tattataaccaataatttccagtgc

SEQ ID NO: 4605463 - DNA, 25 bp, Homo sapien
catttccactggctatccagtacca

SEQ ID NO: 4605464 - DNA, 25 bp, Homo sapien
gcgtgtcagcacattccaaaattag

SEQ ID NO: 4605465 - DNA, 25 bp, Homo sapien
tttgcaatgatactctaggacaccc

SEQ ID NO: 4605466 - DNA, 25 bp, Homo sapien
taatgttctaggaacgtatgccacg

SEQ ID NO: 4605467 - DNA, 25 bp, Homo sapien
tgtgccatgtgagatgtcgactccc

SEQ ID NO: 4605468 - DNA, 25 bp, Homo sapien
tcatgaatggtttatctgtggtgct

SEQ ID NO: 4605469 - DNA, 25 bp, Homo sapien
gactaacacgccagttctattatgg

SEQ ID NO: 4605470 - DNA, 25 bp, Homo sapien
tcttcaaatgtatacaggaaatgcc

SEQ ID NO: 4605471 - DNA, 25 bp, Homo sapien
tttggtaacagtaagcttggtggca

SEQ ID NO: 4605472 - DNA, 25 bp, Homo sapien
tttaatttgccctatttccagtctg

SEQ ID NO: 4605473 - DNA, 25 bp, Homo sapien
tctacaatcacagcaaaaaccagca

SEQ ID NO: 4605474 - DNA, 25 bp, Homo sapien
tctaccctagccttgaaaaacaaca

SEQ ID NO: 4605475 - DNA, 25 bp, Homo sapien
caaatggtaaccaagagagctggag

SEQ ID NO: 4605476 - DNA, 25 bp, Homo sapien
agaattcaacaataacattagagac

SEQ ID NO: 4605477 - DNA, 25 bp, Homo sapien
taaaagtgtctatccatcaaacagg

SEQ ID NO: 4605478 - DNA, 25 bp, Homo sapien
gagacttctgactaggtacagtggc

SEQ ID NO: 4605479 - DNA, 25 bp, Homo sapien
aacattcaaaaacctctcatgaggt

SEQ ID NO: 4605480 - DNA, 25 bp, Homo sapien
ttcaaaaacctctcatgaggtgatg

SEQ ID NO: 4605481 - DNA, 25 bp, Homo sapien
acattcaaaaacctctcatgaggtg

SEQ ID NO: 4605482 - DNA, 25 bp, Homo sapien
attcaaaaacctctcatgaggtgat

SEQ ID NO: 4605483 - DNA, 25 bp, Homo sapien
gaactggaaatagcccgaacgtcca

SEQ ID NO: 4605484 - DNA, 25 bp, Homo sapien
tgtgtgcccagataacaatccttcc

SEQ ID NO: 4605485 - DNA, 25 bp, Homo sapien
caagtacttactggctaactcagag

SEQ ID NO: 4605486 - DNA, 25 bp, Homo sapien
tccttccaggcctagagtggtatgg

SEQ ID NO: 4605487 - DNA, 25 bp, Homo sapien
ctagtttcctatgatacgctcagaa

SEQ ID NO: 4605488 - DNA, 25 bp, Homo sapien
ccatggtaaagaattctgttcttac

SEQ ID NO: 4605489 - DNA, 25 bp, Homo sapien
ttcccatggtaaagaattctgttct

SEQ ID NO: 4605490 - DNA, 25 bp, Homo sapien
tttcccatggtaaagaattctgttc

SEQ ID NO: 4605491 - DNA, 25 bp, Homo sapien
cccatggtaaagaattctgttctta

SEQ ID NO: 4605492 - DNA, 25 bp, Homo sapien
actgcacccctgcaaacctccggac

SEQ ID NO: 4605493 - DNA, 25 bp, Homo sapien
acactgcacccctgcaaacctccgg

SEQ ID NO: 4605494 - DNA, 25 bp, Homo sapien
gcacccctgcaaacctccggacaca

SEQ ID NO: 4605495 - DNA, 25 bp, Homo sapien
ctgcacccctgcaaacctccggaca

SEQ ID NO: 4605496 - DNA, 25 bp, Homo sapien
tgtgtcagaaccctcacttgagaag

SEQ ID NO: 4605497 - DNA, 25 bp, Homo sapien
tcaggaagttctccagacggtctcc

SEQ ID NO: 4605498 - DNA, 25 bp, Homo sapien
tcctcatgggtggtgtacatctccc

SEQ ID NO: 4605499 - DNA, 25 bp, Homo sapien
aatgtgcggcaccattctccgaagc

SEQ ID NO: 4605500 - DNA, 25 bp, Homo sapien
tgtgctgtctgatggctacacggca

SEQ ID NO: 4605501 - DNA, 25 bp, Homo sapien
aatccacagacgctttagtccctga

SEQ ID NO: 4605502 - DNA, 25 bp, Homo sapien
tacacggcagtcagtttaaaaggac

SEQ ID NO: 4605503 - DNA, 25 bp, Homo sapien
tcatccaagagggaatgatcccagg

SEQ ID NO: 4605504 - DNA, 25 bp, Homo sapien
gtacagtgtgatggagcagcagtcc

SEQ ID NO: 4605505 - DNA, 25 bp, Homo sapien
ggaagtacagtgtgatggagcagca

SEQ ID NO: 4605506 - DNA, 25 bp, Homo sapien
cagtgtgatggagcagcagtccaag

SEQ ID NO: 4605507 - DNA, 25 bp, Homo sapien
agtgtgatggagcagcagtccaagt

SEQ ID NO: 4605508 - DNA, 25 bp, Homo sapien
tatccctggaatcaatccgctattg

SEQ ID NO: 4605509 - DNA, 25 bp, Homo sapien
cacatctatccctggaatcaatccg

SEQ ID NO: 4605510 - DNA, 25 bp, Homo sapien
atcaatccgctattgacagccacag

SEQ ID NO: 4605511 - DNA, 25 bp, Homo sapien
tcaatccgctattgacagccacagc

SEQ ID NO: 4605512 - DNA, 25 bp, Homo sapien
ttacaagactggacactagcgagcc

SEQ ID NO: 4605513 - DNA, 25 bp, Homo sapien
tagtgtcgtccctctgactaaagaa

SEQ ID NO: 4605514 - DNA, 25 bp, Homo sapien
cagcaagccgtgtactgcagtgtcc

SEQ ID NO: 4605515 - DNA, 25 bp, Homo sapien
tatgtgttaacttacagaaccccag

SEQ ID NO: 4605516 - DNA, 25 bp, Homo sapien
tcactgccctgctatatcttggtgg

SEQ ID NO: 4605517 - DNA, 25 bp, Homo sapien
tgccctgctatatcttggtggcccc

SEQ ID NO: 4605518 - DNA, 25 bp, Homo sapien
acattttgagttttgtctcgcctgc

SEQ ID NO: 4605519 - DNA, 25 bp, Homo sapien
tacattttgagttttgtctcgcctg

SEQ ID NO: 4605520 - DNA, 25 bp, Homo sapien
gctggacactatctcctggtaggcg

SEQ ID NO: 4605521 - DNA, 25 bp, Homo sapien
ggctccatgcactctgacttcttaa

SEQ ID NO: 4605522 - DNA, 25 bp, Homo sapien
tgcagtcagtctaaacacagggttg

SEQ ID NO: 4605523 - DNA, 25 bp, Homo sapien
acttctgtgagagagctggagtgac

SEQ ID NO: 4605524 - DNA, 25 bp, Homo sapien
catctccaagtgtgaaacagtagtt

SEQ ID NO: 4605525 - DNA, 25 bp, Homo sapien
gagcgttaagctcgagtttggaaaa

SEQ ID NO: 4605526 - DNA, 25 bp, Homo sapien
gattaagtcttacatccagaaaaag

SEQ ID NO: 4605527 - DNA, 25 bp, Homo sapien
gaggccaaaagtaagagcgttaagc

SEQ ID NO: 4605528 - DNA, 25 bp, Homo sapien
taagcttttcaagccactcaggacc

SEQ ID NO: 4605529 - DNA, 25 bp, Homo sapien
catctagtgcctgaaaaatctgacc

SEQ ID NO: 4605530 - DNA, 25 bp, Homo sapien
tgtgggttctggacttaagcaggac

SEQ ID NO: 4605531 - DNA, 25 bp, Homo sapien
caagggagaccatatatgcttttcc

SEQ ID NO: 4605532 - DNA, 25 bp, Homo sapien
gagaagcttcgatttgcaaaggcta

SEQ ID NO: 4605533 - DNA, 25 bp, Homo sapien
aaggtgcacattttagggaatccag

SEQ ID NO: 4605534 - DNA, 25 bp, Homo sapien
atctgtcgggcccttctaacgagaa

SEQ ID NO: 4605535 - DNA, 25 bp, Homo sapien
tccaacattatgagggagacccgat

SEQ ID NO: 4605536 - DNA, 25 bp, Homo sapien
gagaggcaacccgatcccgccggaa

SEQ ID NO: 4605537 - DNA, 25 bp, Homo sapien
tctcccgagaggcaacccgatcccg

SEQ ID NO: 4605538 - DNA, 25 bp, Homo sapien
gcgtctcccgagaggcaacccgatc

SEQ ID NO: 4605539 - DNA, 25 bp, Homo sapien
cccgagaggcaacccgatcccgccg

SEQ ID NO: 4605540 - DNA, 25 bp, Homo sapien
tatttctgggcggtcatgactccca

SEQ ID NO: 4605541 - DNA, 25 bp, Homo sapien
tctgcaggtatttctgggcggtcat

SEQ ID NO: 4605542 - DNA, 25 bp, Homo sapien
ggcggtcatgactcccacgaagaga

SEQ ID NO: 4605543 - DNA, 25 bp, Homo sapien
ctgtaggcggccacggcccgagtct

SEQ ID NO: 4605544 - DNA, 25 bp, Homo sapien
ctgggtccgagccgggcggccagag

SEQ ID NO: 4605545 - DNA, 25 bp, Homo sapien
gcgccccgccggcctgggaagccgc

SEQ ID NO: 4605546 - DNA, 25 bp, Homo sapien
gcgccccgcgcgcatcgccgcgcgc

SEQ ID NO: 4605547 - DNA, 25 bp, Homo sapien
gccccgcgcgcatcgccgcgcgccc

SEQ ID NO: 4605548 - DNA, 25 bp, Homo sapien
gccggcctgggaagccgccgcctgc

SEQ ID NO: 4605549 - DNA, 25 bp, Homo sapien
aagcccggggcaggacgagccgcga

SEQ ID NO: 4605550 - DNA, 25 bp, Homo sapien
acgagccgcgaggccagcacgaagc

SEQ ID NO: 4605551 - DNA, 25 bp, Homo sapien
cgccgtgggcccgctcgcttcagct

SEQ ID NO: 4605552 - DNA, 25 bp, Homo sapien
ggggcaggacgagccgcgaggccag

SEQ ID NO: 4605553 - DNA, 25 bp, Homo sapien
ctgagccaggcgcgccggccgcgcg

SEQ ID NO: 4605554 - DNA, 25 bp, Homo sapien
gagccaggcgcgccggccgcgcgcg

SEQ ID NO: 4605555 - DNA, 25 bp, Homo sapien
gccaggcgcgccggccgcgcgcggc

SEQ ID NO: 4605556 - DNA, 25 bp, Homo sapien
aggcgcgccggccgcgcgcggccat

SEQ ID NO: 4605557 - DNA, 25 bp, Homo sapien
cccgcgccggcgctttgttccgcac

SEQ ID NO: 4605558 - DNA, 25 bp, Homo sapien
cgccgcggcctgcgcctttaagagg

SEQ ID NO: 4605559 - DNA, 25 bp, Homo sapien
ggccagcccgccctagcgccgcgag

SEQ ID NO: 4605560 - DNA, 25 bp, Homo sapien
gccggcgctttgttccgcacgcccg

SEQ ID NO: 4605561 - DNA, 25 bp, Homo sapien
gcggcggcagacgagtccgggctcc

SEQ ID NO: 4605562 - DNA, 25 bp, Homo sapien
ctgtccccgtcctcttcgtagccgg

SEQ ID NO: 4605563 - DNA, 25 bp, Homo sapien
gctggctgggctcggttcgcacggc

SEQ ID NO: 4605564 - DNA, 25 bp, Homo sapien
cggggccggcacgacggcgacgacg

SEQ ID NO: 4605565 - DNA, 25 bp, Homo sapien
ttcagttaccttgttccctgttgct

SEQ ID NO: 4605566 - DNA, 25 bp, Homo sapien
cgcgcctgcgagtggaccgtgaatt

SEQ ID NO: 4605567 - DNA, 25 bp, Homo sapien
cgcctgcgagtggaccgtgaattca

SEQ ID NO: 4605568 - DNA, 25 bp, Homo sapien
aattcagttaccttgttccctgttg

SEQ ID NO: 4605569 - DNA, 25 bp, Homo sapien
cctggatggtaaaccctactttcat

SEQ ID NO: 4605570 - DNA, 25 bp, Homo sapien
catctttaatacttaaggtccacgc

SEQ ID NO: 4605571 - DNA, 25 bp, Homo sapien
gcatttaatggatctcgaagacaag

SEQ ID NO: 4605572 - DNA, 25 bp, Homo sapien
gcttctcatacagtactagcattta

SEQ ID NO: 4605573 - DNA, 25 bp, Homo sapien
ctgcaggcttaatgggggtctttcg

SEQ ID NO: 4605574 - DNA, 25 bp, Homo sapien
gcaggcttaatgggggtctttcgta

SEQ ID NO: 4605575 - DNA, 25 bp, Homo sapien
tctttcgtaatgtagaaaggatacc

SEQ ID NO: 4605576 - DNA, 25 bp, Homo sapien
taatgggggtctttcgtaatgtaga

SEQ ID NO: 4605577 - DNA, 25 bp, Homo sapien
agtgcatttgctttcgaccccacag

SEQ ID NO: 4605578 - DNA, 25 bp, Homo sapien
gatttgtcctccagccataccagta

SEQ ID NO: 4605579 - DNA, 25 bp, Homo sapien
caaaggcgcacccatcagagaatga

SEQ ID NO: 4605580 - DNA, 25 bp, Homo sapien
ggaggcgctctctctactgaaatgg

SEQ ID NO: 4605581 - DNA, 25 bp, Homo sapien
attatcgcctattccagcattttcc

SEQ ID NO: 4605582 - DNA, 25 bp, Homo sapien
tgataccctggttctggatttgtgg

SEQ ID NO: 4605583 - DNA, 25 bp, Homo sapien
ctaattatcgcctattccagcattt

SEQ ID NO: 4605584 - DNA, 25 bp, Homo sapien
ttccaaggtgataccctggttctgg

SEQ ID NO: 4605585 - DNA, 25 bp, Homo sapien
acagcaaacatcagaaacaagggtg

SEQ ID NO: 4605586 - DNA, 25 bp, Homo sapien
cagcaaacatcagaaacaagggtga

SEQ ID NO: 4605587 - DNA, 25 bp, Homo sapien
agcaaacatcagaaacaagggtgag

SEQ ID NO: 4605588 - DNA, 25 bp, Homo sapien
gatgtcaaggccctcagggcggggc

SEQ ID NO: 4605589 - DNA, 25 bp, Homo sapien
ggcctgtgtttacactgtccacagc

SEQ ID NO: 4605590 - DNA, 25 bp, Homo sapien
tctgtggccatgcagtgctcgtctt

SEQ ID NO: 4605591 - DNA, 25 bp, Homo sapien
gtggccatgcagtgctcgtcttccc

SEQ ID NO: 4605592 - DNA, 25 bp, Homo sapien
tccattatctcctaatcattctccc

SEQ ID NO: 4605593 - DNA, 25 bp, Homo sapien
cagtcacatctaatagtgtacttaa

SEQ ID NO: 4605594 - DNA, 25 bp, Homo sapien
cacccctaccaaaaggtgctagatg

SEQ ID NO: 4605595 - DNA, 25 bp, Homo sapien
tagtgtacttaaacatacccctcta

SEQ ID NO: 4605596 - DNA, 25 bp, Homo sapien
gggttctctctagatgtaaacaaat

SEQ ID NO: 4605597 - DNA, 25 bp, Homo sapien
tataacaaactcttgtgttgagggc

SEQ ID NO: 4605598 - DNA, 25 bp, Homo sapien
catgcgatgtgtagttgacagccac

SEQ ID NO: 4605599 - DNA, 25 bp, Homo sapien
gagggctcttgatggacggcagcaa

SEQ ID NO: 4605600 - DNA, 25 bp, Homo sapien
gtaattacactgctcaaggctcctg

SEQ ID NO: 4605601 - DNA, 25 bp, Homo sapien
cacgtcgtaaatcttctgggctggt

SEQ ID NO: 4605602 - DNA, 25 bp, Homo sapien
tgggagccaatccagttacacactg

SEQ ID NO: 4605603 - DNA, 25 bp, Homo sapien
ccagagcgctcctcaagagatttta

SEQ ID NO: 4605604 - DNA, 25 bp, Homo sapien
tagtacttttgcagcgaattacccc

SEQ ID NO: 4605605 - DNA, 25 bp, Homo sapien
aaactgctgatagtgcctctggaca

SEQ ID NO: 4605606 - DNA, 25 bp, Homo sapien
aacctaagactatgtgacagagatc

SEQ ID NO: 4605607 - DNA, 25 bp, Homo sapien
cctctggacaagagcgtaaaagatg

SEQ ID NO: 4605608 - DNA, 25 bp, Homo sapien
cagagactgtcctagcagcaaggat

SEQ ID NO: 4605609 - DNA, 25 bp, Homo sapien
tcactgtgaaaagcgtgcgtaaggc

SEQ ID NO: 4605610 - DNA, 25 bp, Homo sapien
cattcaacgcaacctgtcacagaga

SEQ ID NO: 4605611 - DNA, 25 bp, Homo sapien
tagaatgtgaccaatgacctcatgc

SEQ ID NO: 4605612 - DNA, 25 bp, Homo sapien
atcttgctaatgtcaaaagtgacac

SEQ ID NO: 4605613 - DNA, 25 bp, Homo sapien
ttaagggttcatcttgctaatgtca

SEQ ID NO: 4605614 - DNA, 25 bp, Homo sapien
aagggttcatcttgctaatgtcaaa

SEQ ID NO: 4605615 - DNA, 25 bp, Homo sapien
tcatcttgctaatgtcaaaagtgac

SEQ ID NO: 4605616 - DNA, 25 bp, Homo sapien
tgacgggcctctgcgtccaggtctc

SEQ ID NO: 4605617 - DNA, 25 bp, Homo sapien
aggtctccaggagcaagctccgcct

SEQ ID NO: 4605618 - DNA, 25 bp, Homo sapien
tcatccgccagatgacgggcctctg

SEQ ID NO: 4605619 - DNA, 25 bp, Homo sapien
gcctccttcaccagacaacgggtta

SEQ ID NO: 4605620 - DNA, 25 bp, Homo sapien
taaaaataagcttccggcaggacca

SEQ ID NO: 4605621 - DNA, 25 bp, Homo sapien
tacagctcagcgtttaaggtcagcc

SEQ ID NO: 4605622 - DNA, 25 bp, Homo sapien
agtgctaaggttctagggccaccca

SEQ ID NO: 4605623 - DNA, 25 bp, Homo sapien
taaagccaggctagtcaaaagtccc

SEQ ID NO: 4605624 - DNA, 25 bp, Homo sapien
gcaaaggctttctgtccgatttccg

SEQ ID NO: 4605625 - DNA, 25 bp, Homo sapien
tccccgcaaaggctttctgtccgat

SEQ ID NO: 4605626 - DNA, 25 bp, Homo sapien
ccgatttccgtttcaggacagatga

SEQ ID NO: 4605627 - DNA, 25 bp, Homo sapien
ggctttctgtccgatttccgtttca

SEQ ID NO: 4605628 - DNA, 25 bp, Homo sapien
ttcttgcatgctgtcccacatttca

SEQ ID NO: 4605629 - DNA, 25 bp, Homo sapien
tttccttcttgcatgctgtcccaca

SEQ ID NO: 4605630 - DNA, 25 bp, Homo sapien
catgctgtcccacatttcaatcttc

SEQ ID NO: 4605631 - DNA, 25 bp, Homo sapien
tgcatgctgtcccacatttcaatct

SEQ ID NO: 4605632 - DNA, 25 bp, Homo sapien
tgagtttaactcacatagagcagct

SEQ ID NO: 4605633 - DNA, 25 bp, Homo sapien
tctgaaactcactcctgtcaggaca

SEQ ID NO: 4605634 - DNA, 25 bp, Homo sapien
tcctagaagcttatagacaacacag

SEQ ID NO: 4605635 - DNA, 25 bp, Homo sapien
gacacaggcatcgttagccactaaa

SEQ ID NO: 4605636 - DNA, 25 bp, Homo sapien
tcttgtcgtttaacaacaacatcag

SEQ ID NO: 4605637 - DNA, 25 bp, Homo sapien
agcttcttgtcgtttaacaacaaca

SEQ ID NO: 4605638 - DNA, 25 bp, Homo sapien
gcttcttgtcgtttaacaacaacat

SEQ ID NO: 4605639 - DNA, 25 bp, Homo sapien
tcttgcattttcagtcgagcagctg

SEQ ID NO: 4605640 - DNA, 25 bp, Homo sapien
gcttctgaaagaccacgtagagaag

SEQ ID NO: 4605641 - DNA, 25 bp, Homo sapien
gaaagaccacgtagagaaggatgca

SEQ ID NO: 4605642 - DNA, 25 bp, Homo sapien
cctcaaggctcttagccgggcggaa

SEQ ID NO: 4605643 - DNA, 25 bp, Homo sapien
tagccgggcggaaagcttctgaaag

SEQ ID NO: 4605644 - DNA, 25 bp, Homo sapien
gatgtaccagccataggtggccagc

SEQ ID NO: 4605645 - DNA, 25 bp, Homo sapien
cgatgtaccagccataggtggccag

SEQ ID NO: 4605646 - DNA, 25 bp, Homo sapien
tggtctaggctgaggaaaaagcctc

SEQ ID NO: 4605647 - DNA, 25 bp, Homo sapien
caagaagtgcgacaattcagggatc

SEQ ID NO: 4605648 - DNA, 25 bp, Homo sapien
gacactactagttgacctttccata

SEQ ID NO: 4605649 - DNA, 25 bp, Homo sapien
aaaggcctttcagagccacatagaa

SEQ ID NO: 4605650 - DNA, 25 bp, Homo sapien
cttgcgcaaacaagggacagccgag

SEQ ID NO: 4605651 - DNA, 25 bp, Homo sapien
ggcttggttcgcaaaaaagacttgc

SEQ ID NO: 4605652 - DNA, 25 bp, Homo sapien
agaagcctccgcgcaaggtccgggc

SEQ ID NO: 4605653 - DNA, 25 bp, Homo sapien
gaagtgcggctcccgagaagcctcc

SEQ ID NO: 4605654 - DNA, 25 bp, Homo sapien
cgtcgcaaaagtggcggcgcgcgcc

SEQ ID NO: 4605655 - DNA, 25 bp, Homo sapien
tcatggctgcgcgtcgcaaaagtgg

SEQ ID NO: 4605656 - DNA, 25 bp, Homo sapien
ccatcatggctgcgcgtcgcaaaag

SEQ ID NO: 4605657 - DNA, 25 bp, Homo sapien
catggctgcgcgtcgcaaaagtggc

SEQ ID NO: 4605658 - DNA, 25 bp, Homo sapien
tggtgtgcaggaagcgcagcccctc

SEQ ID NO: 4605659 - DNA, 25 bp, Homo sapien
gacagagactcctcttggcgttcca

SEQ ID NO: 4605660 - DNA, 25 bp, Homo sapien
agcgcagcccctcggtctccagggc

SEQ ID NO: 4605661 - DNA, 25 bp, Homo sapien
gccggccgcgcggacagagactcct

SEQ ID NO: 4605662 - DNA, 25 bp, Homo sapien
ggcgcttccggtgcgctcctacgca

SEQ ID NO: 4605663 - DNA, 25 bp, Homo sapien
agccgggcgcttccggtgcgctcct

SEQ ID NO: 4605664 - DNA, 25 bp, Homo sapien
ttccggtgcgctcctacgcacacgt

SEQ ID NO: 4605665 - DNA, 25 bp, Homo sapien
ggtgcgctcctacgcacacgtggcg

SEQ ID NO: 4605666 - DNA, 25 bp, Homo sapien
cactttgctaacacaaacaaggcta

SEQ ID NO: 4605667 - DNA, 25 bp, Homo sapien
tttgctaacacaaacaaggctatta

SEQ ID NO: 4605668 - DNA, 25 bp, Homo sapien
ctttgctaacacaaacaaggctatt

SEQ ID NO: 4605669 - DNA, 25 bp, Homo sapien
actttgctaacacaaacaaggctat

SEQ ID NO: 4605670 - DNA, 25 bp, Homo sapien
tcaggacccgtttgtgactgtgtct

SEQ ID NO: 4605671 - DNA, 25 bp, Homo sapien
gcttttcatggcactaccgtaggca

SEQ ID NO: 4605672 - DNA, 25 bp, Homo sapien
tgtggttcaccgacttttgcagatc

SEQ ID NO: 4605673 - DNA, 25 bp, Homo sapien
aatacggcattttgattgacgggca

SEQ ID NO: 4605674 - DNA, 25 bp, Homo sapien
gaatatcaaagagacgtgtgcccga

SEQ ID NO: 4605675 - DNA, 25 bp, Homo sapien
ggcccacaaaccatacagtagagaa

SEQ ID NO: 4605676 - DNA, 25 bp, Homo sapien
agaggcccacaaaccatacagtaga

SEQ ID NO: 4605677 - DNA, 25 bp, Homo sapien
aatcagtcttcaccttacagactcc

SEQ ID NO: 4605678 - DNA, 25 bp, Homo sapien
caacaaaatcagtcttcaccttaca

SEQ ID NO: 4605679 - DNA, 25 bp, Homo sapien
gtcatggcatctaaatggttgtgag

SEQ ID NO: 4605680 - DNA, 25 bp, Homo sapien
tattagatttgatgtaaggaggcac

SEQ ID NO: 4605681 - DNA, 25 bp, Homo sapien
aggaggcactactctggcattccag

SEQ ID NO: 4605682 - DNA, 25 bp, Homo sapien
ggttgtgagttacactctgagtgta

SEQ ID NO: 4605683 - DNA, 25 bp, Homo sapien
ctgcgttctctgccagggatctgac

SEQ ID NO: 4605684 - DNA, 25 bp, Homo sapien
ctgatctgcgttctctgccagggat

SEQ ID NO: 4605685 - DNA, 25 bp, Homo sapien
gatctgcgttctctgccagggatct

SEQ ID NO: 4605686 - DNA, 25 bp, Homo sapien
tctgcgttctctgccagggatctga

SEQ ID NO: 4605687 - DNA, 25 bp, Homo sapien
gagttgaagcatttgctatggcatt

SEQ ID NO: 4605688 - DNA, 25 bp, Homo sapien
gccagagttgaagcatttgctatgg

SEQ ID NO: 4605689 - DNA, 25 bp, Homo sapien
ccacttcagccagagttgaagcatt

SEQ ID NO: 4605690 - DNA, 25 bp, Homo sapien
ttcagccagagttgaagcatttgct

SEQ ID NO: 4605691 - DNA, 25 bp, Homo sapien
gggcaatggagatggatgattaact

SEQ ID NO: 4605692 - DNA, 25 bp, Homo sapien
gatggatgattaacttcaaccaagt

SEQ ID NO: 4605693 - DNA, 25 bp, Homo sapien
ggagatggatgattaacttcaacca

SEQ ID NO: 4605694 - DNA, 25 bp, Homo sapien
agggcaatggagatggatgattaac

SEQ ID NO: 4605695 - DNA, 25 bp, Homo sapien
tctttttgtcagttggcaaaccagc

SEQ ID NO: 4605696 - DNA, 25 bp, Homo sapien
ctttttgtcagttggcaaaccagca

SEQ ID NO: 4605697 - DNA, 25 bp, Homo sapien
ttctttttgtcagttggcaaaccag

SEQ ID NO: 4605698 - DNA, 25 bp, Homo sapien
ttagacctagaccaacagaagttgc

SEQ ID NO: 4605699 - DNA, 25 bp, Homo sapien
cataactgttagacctagaccaaca

SEQ ID NO: 4605700 - DNA, 25 bp, Homo sapien
tagaccaacagaagttgcttctctt

SEQ ID NO: 4605701 - DNA, 25 bp, Homo sapien
actgttagacctagaccaacagaag

SEQ ID NO: 4605702 - DNA, 25 bp, Homo sapien
tctttgttaacaaactgatacaaga

SEQ ID NO: 4605703 - DNA, 25 bp, Homo sapien
aactgatacaagaactctctccttc

SEQ ID NO: 4605704 - DNA, 25 bp, Homo sapien
cagtgtagtatcttatctttgttaa

SEQ ID NO: 4605705 - DNA, 25 bp, Homo sapien
tcagaaacaccatccagttcatctt

SEQ ID NO: 4605706 - DNA, 25 bp, Homo sapien
gatgtacatggactataagcactca

SEQ ID NO: 4605707 - DNA, 25 bp, Homo sapien
aattttgtaggagacgaactgccag

SEQ ID NO: 4605708 - DNA, 25 bp, Homo sapien
ggtatcacatgaagactgactactg

SEQ ID NO: 4605709 - DNA, 25 bp, Homo sapien
gaagtagagttaagttggatatccg

SEQ ID NO: 4605710 - DNA, 25 bp, Homo sapien
tttgcaagctgtgcaccccgtttgc

SEQ ID NO: 4605711 - DNA, 25 bp, Homo sapien
tgcaccccgtttgcccttgaacatt

SEQ ID NO: 4605712 - DNA, 25 bp, Homo sapien
tctcctggcaatatcctttgcaagc

SEQ ID NO: 4605713 - DNA, 25 bp, Homo sapien
ggcaatatcctttgcaagctgtgca

SEQ ID NO: 4605714 - DNA, 25 bp, Homo sapien
actgttaagactgctcaccgtggcc

SEQ ID NO: 4605715 - DNA, 25 bp, Homo sapien
tctccgctgggaacgtatctaggca

SEQ ID NO: 4605716 - DNA, 25 bp, Homo sapien
cacggagctgcacgaaagtaggtta

SEQ ID NO: 4605717 - DNA, 25 bp, Homo sapien
gaagacatggaagcgaactctccta

SEQ ID NO: 4605718 - DNA, 25 bp, Homo sapien
ctcacaagcaacagattactactta

SEQ ID NO: 4605719 - DNA, 25 bp, Homo sapien
aaaacacacaactctataatggctc

SEQ ID NO: 4605720 - DNA, 25 bp, Homo sapien
tggctcacaagcaacagattactac

SEQ ID NO: 4605721 - DNA, 25 bp, Homo sapien
cacacaactctataatggctcacaa

SEQ ID NO: 4605722 - DNA, 25 bp, Homo sapien
atcacatacaatctgtaatgcttct

SEQ ID NO: 4605723 - DNA, 25 bp, Homo sapien
aatcacatacaatctgtaatgcttc

SEQ ID NO: 4605724 - DNA, 25 bp, Homo sapien
taaatcacatacaatctgtaatgct

SEQ ID NO: 4605725 - DNA, 25 bp, Homo sapien
ttataaatcacatacaatctgtaat

SEQ ID NO: 4605726 - DNA, 25 bp, Homo sapien
ggcacagcactcaagaggtctgttt

SEQ ID NO: 4605727 - DNA, 25 bp, Homo sapien
gcacagcactcaagaggtctgtttg

SEQ ID NO: 4605728 - DNA, 25 bp, Homo sapien
agtctaaggaacctataaatcaagg

SEQ ID NO: 4605729 - DNA, 25 bp, Homo sapien
gtttgaatagtctaaggaacctata

SEQ ID NO: 4605730 - DNA, 25 bp, Homo sapien
tcagcgatttgagagatgccagagg

SEQ ID NO: 4605731 - DNA, 25 bp, Homo sapien
aggtaagtcagcgatttgagagatg

SEQ ID NO: 4605732 - DNA, 25 bp, Homo sapien
taagtcagcgatttgagagatgcca

SEQ ID NO: 4605733 - DNA, 25 bp, Homo sapien
agtcagcgatttgagagatgccaga

SEQ ID NO: 4605734 - DNA, 25 bp, Homo sapien
gggactctggagcaacctattcaca

SEQ ID NO: 4605735 - DNA, 25 bp, Homo sapien
tgtcaagcaatagccacaggtaaga

SEQ ID NO: 4605736 - DNA, 25 bp, Homo sapien
taagtgggctttcctgctagcgcca

SEQ ID NO: 4605737 - DNA, 25 bp, Homo sapien
ggtacatttatcctagctgcccctg

SEQ ID NO: 4605738 - DNA, 25 bp, Homo sapien
tcagactggattgtaaaaaattcca

SEQ ID NO: 4605739 - DNA, 25 bp, Homo sapien
gctttcagactggattgtaaaaaat

SEQ ID NO: 4605740 - DNA, 25 bp, Homo sapien
agctttcagactggattgtaaaaaa

SEQ ID NO: 4605741 - DNA, 25 bp, Homo sapien
tttcagactggattgtaaaaaattc

SEQ ID NO: 4605742 - DNA, 25 bp, Homo sapien
cagatgcacgctaccacttttggca

SEQ ID NO: 4605743 - DNA, 25 bp, Homo sapien
aagcatccagtgtttaagtgaagaa

SEQ ID NO: 4605744 - DNA, 25 bp, Homo sapien
tagccactggaatacctgggaccac

SEQ ID NO: 4605745 - DNA, 25 bp, Homo sapien
taaatttaagcatccagtgtttaag

SEQ ID NO: 4605746 - DNA, 25 bp, Homo sapien
tatttgcaacatacggctgcagaac

SEQ ID NO: 4605747 - DNA, 25 bp, Homo sapien
gctgcagaacccaaaaggcccagat

SEQ ID NO: 4605748 - DNA, 25 bp, Homo sapien
cattggactgcacctaaattaggaa

SEQ ID NO: 4605749 - DNA, 25 bp, Homo sapien
tactggtactatattgaacactgca

SEQ ID NO: 4605750 - DNA, 25 bp, Homo sapien
tgagaatgagttctgtcagacaggg

SEQ ID NO: 4605751 - DNA, 25 bp, Homo sapien
ctgatcaagtccctcacctatacgg

SEQ ID NO: 4605752 - DNA, 25 bp, Homo sapien
agggcagagcctgatcaagtccctc

SEQ ID NO: 4605753 - DNA, 25 bp, Homo sapien
aatgagttctgtcagacagggcaga

SEQ ID NO: 4605754 - DNA, 25 bp, Homo sapien
tagagatccttcttccaacaccctg

SEQ ID NO: 4605755 - DNA, 25 bp, Homo sapien
ctgtcataccatctagtggaacctg

SEQ ID NO: 4605756 - DNA, 25 bp, Homo sapien
cttgctcagaggatcacagagagac

SEQ ID NO: 4605757 - DNA, 25 bp, Homo sapien
cagaagtgggattttagacactgcc

SEQ ID NO: 4605758 - DNA, 25 bp, Homo sapien
tgcaacatttactctaggggaaaaa

SEQ ID NO: 4605759 - DNA, 25 bp, Homo sapien
ggtttaaccagtagcacgtgctaca

SEQ ID NO: 4605760 - DNA, 25 bp, Homo sapien
gtaggtttaaccagtagcacgtgct

SEQ ID NO: 4605761 - DNA, 25 bp, Homo sapien
cacgtgctacaacttcttcaggaaa

SEQ ID NO: 4605762 - DNA, 25 bp, Homo sapien
agtttcctgatctcattgtcagaaa

SEQ ID NO: 4605763 - DNA, 25 bp, Homo sapien
caaactggtctaacgtagcacctag

SEQ ID NO: 4605764 - DNA, 25 bp, Homo sapien
ggtctaacgtagcacctagattttc

SEQ ID NO: 4605765 - DNA, 25 bp, Homo sapien
agcacctagattttcaatgacggga

SEQ ID NO: 4605766 - DNA, 25 bp, Homo sapien
gacttgccgctgtttaagatactag

SEQ ID NO: 4605767 - DNA, 25 bp, Homo sapien
tagcacctatgtcgggtcacgcatg

SEQ ID NO: 4605768 - DNA, 25 bp, Homo sapien
gaaaacgctgaacgagtctcaagtc

SEQ ID NO: 4605769 - DNA, 25 bp, Homo sapien
gtctcaagtccccagtgccatgaag

SEQ ID NO: 4605770 - DNA, 25 bp, Homo sapien
gaaatattccgaagaagcaaggtct

SEQ ID NO: 4605771 - DNA, 25 bp, Homo sapien
taaaggacacaattcagagctgtac

SEQ ID NO: 4605772 - DNA, 25 bp, Homo sapien
tgggcataattattgtgttaggcac

SEQ ID NO: 4605773 - DNA, 25 bp, Homo sapien
gctgtactacacgtactgcatcaaa

SEQ ID NO: 4605774 - DNA, 25 bp, Homo sapien
gaggcacggcgctaacagaaggctc

SEQ ID NO: 4605775 - DNA, 25 bp, Homo sapien
tgcctgtcaagaggcacggcgctaa

SEQ ID NO: 4605776 - DNA, 25 bp, Homo sapien
aggaagtaatgaagtcacccgtgcc

SEQ ID NO: 4605777 - DNA, 25 bp, Homo sapien
gaagtcacccgtgcctgtcaagagg

SEQ ID NO: 4605778 - DNA, 25 bp, Homo sapien
tactgcgccgcctgctcgatcagct

SEQ ID NO: 4605779 - DNA, 25 bp, Homo sapien
gtgtactgcgccgcctgctcgatca

SEQ ID NO: 4605780 - DNA, 25 bp, Homo sapien
tgtactgcgccgcctgctcgatcag

SEQ ID NO: 4605781 - DNA, 25 bp, Homo sapien
tggtgtactgcgccgcctgctcgat

SEQ ID NO: 4605782 - DNA, 25 bp, Homo sapien
cagctcgaccgccaggccgaagcaa

SEQ ID NO: 4605783 - DNA, 25 bp, Homo sapien
agcaatcgaagagccacgcctccgg

SEQ ID NO: 4605784 - DNA, 25 bp, Homo sapien
cgccagcgagacgtcccagcgtgcc

SEQ ID NO: 4605785 - DNA, 25 bp, Homo sapien
cgccaggcagcaccaatcgcagccg

SEQ ID NO: 4605786 - DNA, 25 bp, Homo sapien
cggaagtcgtggcgcgcgcacaggg

SEQ ID NO: 4605787 - DNA, 25 bp, Homo sapien
tggcgcgcgcacaggggatgtgtct

SEQ ID NO: 4605788 - DNA, 25 bp, Homo sapien
gatgtgtctcgttctgggttgtttc

SEQ ID NO: 4605789 - DNA, 25 bp, Homo sapien
cgcacaggggatgtgtctcgttctg

SEQ ID NO: 4605790 - DNA, 25 bp, Homo sapien
tgtgtttcggagtctggaggacccc

SEQ ID NO: 4605791 - DNA, 25 bp, Homo sapien
ctagggtgtgtttcggagtctggag

SEQ ID NO: 4605792 - DNA, 25 bp, Homo sapien
gggtgtgtttcggagtctggaggac

SEQ ID NO: 4605793 - DNA, 25 bp, Homo sapien
aaggcgaatgtggaaacacccgagg

SEQ ID NO: 4605794 - DNA, 25 bp, Homo sapien
catatactgatatactcccagggat

SEQ ID NO: 4605795 - DNA, 25 bp, Homo sapien
ccaactagcatcctcgtaagaacag

SEQ ID NO: 4605796 - DNA, 25 bp, Homo sapien
gacattgccacattccagaagccct

SEQ ID NO: 4605797 - DNA, 25 bp, Homo sapien
gaagaatgcaaactgaacacaccca

SEQ ID NO: 4605798 - DNA, 25 bp, Homo sapien
gttaatttcctgagtctgatggctg

SEQ ID NO: 4605799 - DNA, 25 bp, Homo sapien
cggtcatagggtatatcggcaactt

SEQ ID NO: 4605800 - DNA, 25 bp, Homo sapien
gctgtgccggagaatgtcgttgttc

SEQ ID NO: 4605801 - DNA, 25 bp, Homo sapien
gaaatacccactgaagtattggcgg

SEQ ID NO: 4605802 - DNA, 25 bp, Homo sapien
ctattgacattttggtctggacagt

SEQ ID NO: 4605803 - DNA, 25 bp, Homo sapien
tttattcattgagggtatctctatg

SEQ ID NO: 4605804 - DNA, 25 bp, Homo sapien
ttggccggaatttctcaacctcggc

SEQ ID NO: 4605805 - DNA, 25 bp, Homo sapien
gggtatctctatgaagttgcaaaca

SEQ ID NO: 4605806 - DNA, 25 bp, Homo sapien
gtttcaaaagggagtctaagatatc

SEQ ID NO: 4605807 - DNA, 25 bp, Homo sapien
tggtcacccttagtgtggctggtct

SEQ ID NO: 4605808 - DNA, 25 bp, Homo sapien
gagtctaagatatctggtcaccctt

SEQ ID NO: 4605809 - DNA, 25 bp, Homo sapien
taagatatctggtcacccttagtgt

SEQ ID NO: 4605810 - DNA, 25 bp, Homo sapien
caacatactccaagcttttaggcaa

SEQ ID NO: 4605811 - DNA, 25 bp, Homo sapien
tctccagccatagtatcaataatgc

SEQ ID NO: 4605812 - DNA, 25 bp, Homo sapien
ggtctccccaagttcaaggacactc

SEQ ID NO: 4605813 - DNA, 25 bp, Homo sapien
ttttaggcaaaaggccctctccagc

SEQ ID NO: 4605814 - DNA, 25 bp, Homo sapien
cctttgaagagtcgcaagatacaaa

SEQ ID NO: 4605815 - DNA, 25 bp, Homo sapien
tgaagagtcgcaagatacaaagtca

SEQ ID NO: 4605816 - DNA, 25 bp, Homo sapien
gtcctttgaagagtcgcaagataca

SEQ ID NO: 4605817 - DNA, 25 bp, Homo sapien
tttgaagagtcgcaagatacaaagt

SEQ ID NO: 4605818 - DNA, 25 bp, Homo sapien
catttgggcagctgcagaacgacgc

SEQ ID NO: 4605819 - DNA, 25 bp, Homo sapien
gataaggtcaggtaaacatcacccc

SEQ ID NO: 4605820 - DNA, 25 bp, Homo sapien
caactttgccaatgtgcagccccag

SEQ ID NO: 4605821 - DNA, 25 bp, Homo sapien
ggtccactgtgaggtgccaaagaat

SEQ ID NO: 4605822 - DNA, 25 bp, Homo sapien
aattcaaggtcggtctcatgggcgg

SEQ ID NO: 4605823 - DNA, 25 bp, Homo sapien
tagccactcgacgaggctgcctggt

SEQ ID NO: 4605824 - DNA, 25 bp, Homo sapien
tgggctctagggtctaaaaggctgc

SEQ ID NO: 4605825 - DNA, 25 bp, Homo sapien
tctcagtgggcagctcggatttgct

SEQ ID NO: 4605826 - DNA, 25 bp, Homo sapien
tcactgcctcacacgcacaactctg

SEQ ID NO: 4605827 - DNA, 25 bp, Homo sapien
cactgcctcacacgcacaactctgg

SEQ ID NO: 4605828 - DNA, 25 bp, Homo sapien
ccttcactgcctcacacgcacaact

SEQ ID NO: 4605829 - DNA, 25 bp, Homo sapien
ttcactgcctcacacgcacaactct

SEQ ID NO: 4605830 - DNA, 25 bp, Homo sapien
ccttctgagagctgcacactgctcc

SEQ ID NO: 4605831 - DNA, 25 bp, Homo sapien
gctgcacaagcctgtccttgtagcc

SEQ ID NO: 4605832 - DNA, 25 bp, Homo sapien
tcaattggtgcttgtggtggccagc

SEQ ID NO: 4605833 - DNA, 25 bp, Homo sapien
ccagctgttgggttgtgtgacttgc

SEQ ID NO: 4605834 - DNA, 25 bp, Homo sapien
cacagggagagtacccatgtaaggc

SEQ ID NO: 4605835 - DNA, 25 bp, Homo sapien
acagggagagtacccatgtaaggca

SEQ ID NO: 4605836 - DNA, 25 bp, Homo sapien
tgtaaggcaggctgaccaagtcctg

SEQ ID NO: 4605837 - DNA, 25 bp, Homo sapien
catgtaaggcaggctgaccaagtcc

SEQ ID NO: 4605838 - DNA, 25 bp, Homo sapien
agaaacagacccagaaagttggcct

SEQ ID NO: 4605839 - DNA, 25 bp, Homo sapien
acagacccagaaagttggcctgagg

SEQ ID NO: 4605840 - DNA, 25 bp, Homo sapien
cctgaggggttggatttgtaccagt

SEQ ID NO: 4605841 - DNA, 25 bp, Homo sapien
tggcctgaggggttggatttgtacc

SEQ ID NO: 4605842 - DNA, 25 bp, Homo sapien
gaagatgctggaggtcttgtcattt

SEQ ID NO: 4605843 - DNA, 25 bp, Homo sapien
agatgctggaggtcttgtcatttgt

SEQ ID NO: 4605844 - DNA, 25 bp, Homo sapien
aagatgctggaggtcttgtcatttg

SEQ ID NO: 4605845 - DNA, 25 bp, Homo sapien
tgccgtacagagagggtccaggtga

SEQ ID NO: 4605846 - DNA, 25 bp, Homo sapien
gccgtacagagagggtccaggtgac

SEQ ID NO: 4605847 - DNA, 25 bp, Homo sapien
ctgccgtacagagagggtccaggtg

SEQ ID NO: 4605848 - DNA, 25 bp, Homo sapien
tgccgtggaaagaaatacaggctcc

SEQ ID NO: 4605849 - DNA, 25 bp, Homo sapien
tgtgtgccgtggaaagaaatacagg

SEQ ID NO: 4605850 - DNA, 25 bp, Homo sapien
tttgtgtgccgtggaaagaaataca

SEQ ID NO: 4605851 - DNA, 25 bp, Homo sapien
tgtgccgtggaaagaaatacaggct

SEQ ID NO: 4605852 - DNA, 25 bp, Homo sapien
taaaaacgagtcttctgaagggcag

SEQ ID NO: 4605853 - DNA, 25 bp, Homo sapien
ggcaaatgcactgtcgtcaaacagg

SEQ ID NO: 4605854 - DNA, 25 bp, Homo sapien
caatatggagaaagacgaggtcgaa

SEQ ID NO: 4605855 - DNA, 25 bp, Homo sapien
tataaaatgcctacacaggtttggc

SEQ ID NO: 4605856 - DNA, 25 bp, Homo sapien
agaaggctctgcatcaggtcgaggt

SEQ ID NO: 4605857 - DNA, 25 bp, Homo sapien
ctctgcatcaggtcgaggtggtcgt

SEQ ID NO: 4605858 - DNA, 25 bp, Homo sapien
tgcatcaggtcgaggtggtcgttca

SEQ ID NO: 4605859 - DNA, 25 bp, Homo sapien
ctcagaaggctctgcatcaggtcga

SEQ ID NO: 4605860 - DNA, 25 bp, Homo sapien
tagaaatagatactccggccccagt

SEQ ID NO: 4605861 - DNA, 25 bp, Homo sapien
gagtgatgtgtgatgccaagcgcct

SEQ ID NO: 4605862 - DNA, 25 bp, Homo sapien
tagtttgtcggaagactggagccaa

SEQ ID NO: 4605863 - DNA, 25 bp, Homo sapien
tggactttctaagccactgctgcag

SEQ ID NO: 4605864 - DNA, 25 bp, Homo sapien
gcttgggtgctcagagatgctgctc

SEQ ID NO: 4605865 - DNA, 25 bp, Homo sapien
tggcttgggtgctcagagatgctgc

SEQ ID NO: 4605866 - DNA, 25 bp, Homo sapien
ggcttgggtgctcagagatgctgct

SEQ ID NO: 4605867 - DNA, 25 bp, Homo sapien
ctggcttgggtgctcagagatgctg

SEQ ID NO: 4605868 - DNA, 25 bp, Homo sapien
gcagggcgccgctcctgaaacagac

SEQ ID NO: 4605869 - DNA, 25 bp, Homo sapien
cagggcgccgctcctgaaacagact

SEQ ID NO: 4605870 - DNA, 25 bp, Homo sapien
aatgaagagcttccgttcgcacagc

SEQ ID NO: 4605871 - DNA, 25 bp, Homo sapien
gcacagccggttggacttcaccatc

SEQ ID NO: 4605872 - DNA, 25 bp, Homo sapien
accatctcgcagaatgtctcgtcag

SEQ ID NO: 4605873 - DNA, 25 bp, Homo sapien
ggcagcagaactgaatgaagagctt

SEQ ID NO: 4605874 - DNA, 25 bp, Homo sapien
tggcagtggagcttaggaggaagac

SEQ ID NO: 4605875 - DNA, 25 bp, Homo sapien
ctggacaactgctggcagtggagct

SEQ ID NO: 4605876 - DNA, 25 bp, Homo sapien
acaactgctggcagtggagcttagg

SEQ ID NO: 4605877 - DNA, 25 bp, Homo sapien
ggcagtggagcttaggaggaagact

SEQ ID NO: 4605878 - DNA, 25 bp, Homo sapien
cgttgctgcacgtgtggttggtgat

SEQ ID NO: 4605879 - DNA, 25 bp, Homo sapien
cgtcttacacctgctacagttcctg

SEQ ID NO: 4605880 - DNA, 25 bp, Homo sapien
cccagctgtgtgaagcccgtcttac

SEQ ID NO: 4605881 - DNA, 25 bp, Homo sapien
ggtgatgcaggaggtccccagctgt

SEQ ID NO: 4605882 - DNA, 25 bp, Homo sapien
tctaatgcagggtaaacgtgacctc

SEQ ID NO: 4605883 - DNA, 25 bp, Homo sapien
aagcctgaacgactgaccattgtgc

SEQ ID NO: 4605884 - DNA, 25 bp, Homo sapien
gactcgagctgaccagaaggctgct

SEQ ID NO: 4605885 - DNA, 25 bp, Homo sapien
tacagaaagcacttgccgatgcggg

SEQ ID NO: 4605886 - DNA, 25 bp, Homo sapien
agatgtcagtggtctggaggaccca

SEQ ID NO: 4605887 - DNA, 25 bp, Homo sapien
accagggccgagctgagtcatttaa

SEQ ID NO: 4605888 - DNA, 25 bp, Homo sapien
cactggtgagacgagaaccagggcc

SEQ ID NO: 4605889 - DNA, 25 bp, Homo sapien
aatgccactggtgagacgagaacca

SEQ ID NO: 4605890 - DNA, 25 bp, Homo sapien
agcgcgctgcggtggacagccagga

SEQ ID NO: 4605891 - DNA, 25 bp, Homo sapien
tttccattgctctaaccaggttgcc

SEQ ID NO: 4605892 - DNA, 25 bp, Homo sapien
tcaaatacaacctcacccagctcag

SEQ ID NO: 4605893 - DNA, 25 bp, Homo sapien
aggttacggcttgcttgcttcttca

SEQ ID NO: 4605894 - DNA, 25 bp, Homo sapien
ctttgggcagggtggcttttaagat

SEQ ID NO: 4605895 - DNA, 25 bp, Homo sapien
cagcgggtcctcgtgggcagcacca

SEQ ID NO: 4605896 - DNA, 25 bp, Homo sapien
tgcaaccatctatggtacctacttt

SEQ ID NO: 4605897 - DNA, 25 bp, Homo sapien
tctggttctgcaaccatctatggta

SEQ ID NO: 4605898 - DNA, 25 bp, Homo sapien
gcttctccaagacccggtgtgtcag

SEQ ID NO: 4605899 - DNA, 25 bp, Homo sapien
tgcatgttccaacgcagcccgtctg

SEQ ID NO: 4605900 - DNA, 25 bp, Homo sapien
gcttcctttgggaggcgtccacact

SEQ ID NO: 4605901 - DNA, 25 bp, Homo sapien
cagaaccaatcggaccaaggccttg

SEQ ID NO: 4605902 - DNA, 25 bp, Homo sapien
tcctccactgcccaaagagaggttt

SEQ ID NO: 4605903 - DNA, 25 bp, Homo sapien
tgcccaaagagaggtttgcggtggg

SEQ ID NO: 4605904 - DNA, 25 bp, Homo sapien
tccactgcccaaagagaggtttgcg

SEQ ID NO: 4605905 - DNA, 25 bp, Homo sapien
caagtacccaggaaactcctgtcct

SEQ ID NO: 4605906 - DNA, 25 bp, Homo sapien
cgagatacgtaaccgccaccaggtc

SEQ ID NO: 4605907 - DNA, 25 bp, Homo sapien
ctgatgcttgccgagatacgtaacc

SEQ ID NO: 4605908 - DNA, 25 bp, Homo sapien
ttgcaagcgggtggcaagtttcctc

SEQ ID NO: 4605909 - DNA, 25 bp, Homo sapien
ccattacagcaacgcagtagaaggg

SEQ ID NO: 4605910 - DNA, 25 bp, Homo sapien
caaaggatgcatgctgagcgcgaca

SEQ ID NO: 4605911 - DNA, 25 bp, Homo sapien
tggtttctctgattatcgacagtgc

SEQ ID NO: 4605912 - DNA, 25 bp, Homo sapien
tgagcgcgacatgggcagggacgtc

SEQ ID NO: 4605913 - DNA, 25 bp, Homo sapien
acgtcccgcgtagtccaccaatggg

SEQ ID NO: 4605914 - DNA, 25 bp, Homo sapien
gacccaacaaatatgcatccagtga

SEQ ID NO: 4605915 - DNA, 25 bp, Homo sapien
tgaacaaagggacgaaggcccctca

SEQ ID NO: 4605916 - DNA, 25 bp, Homo sapien
ttatcccgctgctgcacggtgtctg

SEQ ID NO: 4605917 - DNA, 25 bp, Homo sapien
cagtggggtgatgcaacatgccctc

SEQ ID NO: 4605918 - DNA, 25 bp, Homo sapien
ttcgcacagtgaatgcactcttctc

SEQ ID NO: 4605919 - DNA, 25 bp, Homo sapien
gcatctcttctgggtagaagccctc

SEQ ID NO: 4605920 - DNA, 25 bp, Homo sapien
gctggcacacacttccagtcgtgga

SEQ ID NO: 4605921 - DNA, 25 bp, Homo sapien
cagtcgtggaagtggaagtttttcg

SEQ ID NO: 4605922 - DNA, 25 bp, Homo sapien
gcaattttcatgtctcaacctcccc

SEQ ID NO: 4605923 - DNA, 25 bp, Homo sapien
cggtttcaagcaattttcatgtctc

SEQ ID NO: 4605924 - DNA, 25 bp, Homo sapien
tttcaagcaattttcatgtctcaac

SEQ ID NO: 4605925 - DNA, 25 bp, Homo sapien
aattttcatgtctcaacctccccag

SEQ ID NO: 4605926 - DNA, 25 bp, Homo sapien
gttatgtaaccattgccagcatcta

SEQ ID NO: 4605927 - DNA, 25 bp, Homo sapien
ttctaatgagaacctcaggctgcgt

SEQ ID NO: 4605928 - DNA, 25 bp, Homo sapien
tcaggctgcgtgttcaaagtgggcc

SEQ ID NO: 4605929 - DNA, 25 bp, Homo sapien
aagtgggcctttgcattgttttggg

SEQ ID NO: 4605930 - DNA, 25 bp, Homo sapien
ttccgcaggtgtgatggcattcccc

SEQ ID NO: 4605931 - DNA, 25 bp, Homo sapien
tccccacatctgatcagctctgagt

SEQ ID NO: 4605932 - DNA, 25 bp, Homo sapien
ccacgcaggttccgcaggtgtgatg

SEQ ID NO: 4605933 - DNA, 25 bp, Homo sapien
ttccccacatctgatcagctctgag

SEQ ID NO: 4605934 - DNA, 25 bp, Homo sapien
gaaagaggcagatttccacatccat

SEQ ID NO: 4605935 - DNA, 25 bp, Homo sapien
gcaagtccgatttatggctggtcac

SEQ ID NO: 4605936 - DNA, 25 bp, Homo sapien
ccctcaatttgtaggatctgacaca

SEQ ID NO: 4605937 - DNA, 25 bp, Homo sapien
taccatgtgggactcgtgattgaca

SEQ ID NO: 4605938 - DNA, 25 bp, Homo sapien
catctagtagcgtcagaattgagct

SEQ ID NO: 4605939 - DNA, 25 bp, Homo sapien
gatattgggcaataaacggaagctc

SEQ ID NO: 4605940 - DNA, 25 bp, Homo sapien
tcacagcttaagaggatattgggca

SEQ ID NO: 4605941 - DNA, 25 bp, Homo sapien
gcaataaacggaagctctctgtggc

SEQ ID NO: 4605942 - DNA, 25 bp, Homo sapien
agtgattagaagtcacagcttaaga

SEQ ID NO: 4605943 - DNA, 25 bp, Homo sapien
tcctacattgagtatccgatttccc

SEQ ID NO: 4605944 - DNA, 25 bp, Homo sapien
ggctaccgacaggaggcgttttctc

SEQ ID NO: 4605945 - DNA, 25 bp, Homo sapien
tcagtgacggaagcactgcctctat

SEQ ID NO: 4605946 - DNA, 25 bp, Homo sapien
acgcctctctgaaagctcgtcagtg

SEQ ID NO: 4605947 - DNA, 25 bp, Homo sapien
ggttgaggatccactcctgggctgc

SEQ ID NO: 4605948 - DNA, 25 bp, Homo sapien
ggatgggacgggatgcataaatgca

SEQ ID NO: 4605949 - DNA, 25 bp, Homo sapien
ctcccaggccgccagcggaatgcct

SEQ ID NO: 4605950 - DNA, 25 bp, Homo sapien
tgcataaatgcattcccggggaccc

SEQ ID NO: 4605951 - DNA, 25 bp, Homo sapien
cgcactttttacagcttgggtggca

SEQ ID NO: 4605952 - DNA, 25 bp, Homo sapien
ttctcaggttcatccacgcactttt

SEQ ID NO: 4605953 - DNA, 25 bp, Homo sapien
gcttgggtggcatttaaggcaattt

SEQ ID NO: 4605954 - DNA, 25 bp, Homo sapien
ttctttacagacagtacatttctca

SEQ ID NO: 4605955 - DNA, 25 bp, Homo sapien
catcatacgccataaagcaggtgct

SEQ ID NO: 4605956 - DNA, 25 bp, Homo sapien
aaggcgcctccgtcctttgcaaagg

SEQ ID NO: 4605957 - DNA, 25 bp, Homo sapien
agaagggcggccaactgtgcccttg

SEQ ID NO: 4605958 - DNA, 25 bp, Homo sapien
tgggagctaacagctgcttgccaca

SEQ ID NO: 4605959 - DNA, 25 bp, Homo sapien
cctggtggtgatagaacccgcggcg

SEQ ID NO: 4605960 - DNA, 25 bp, Homo sapien
gtggcaccggcgacagcgtcttgct

SEQ ID NO: 4605961 - DNA, 25 bp, Homo sapien
tgctggagcaggtctcacacccctt

SEQ ID NO: 4605962 - DNA, 25 bp, Homo sapien
aagacaggcactgcgtcgcagctct

SEQ ID NO: 4605963 - DNA, 25 bp, Homo sapien
tcacagcctttgtcaccacactccg

SEQ ID NO: 4605964 - DNA, 25 bp, Homo sapien
cactggtctgcattggggccatcac

SEQ ID NO: 4605965 - DNA, 25 bp, Homo sapien
ctgctggtcttgacactccccaggc

SEQ ID NO: 4605966 - DNA, 25 bp, Homo sapien
ccaggctgaagtggacgcagttcaa

SEQ ID NO: 4605967 - DNA, 25 bp, Homo sapien
cttccacgtggaggacagagcaaca

SEQ ID NO: 4605968 - DNA, 25 bp, Homo sapien
gagccaggaggaattaggtagcccc

SEQ ID NO: 4605969 - DNA, 25 bp, Homo sapien
ctgatgagccaggaggaattaggta

SEQ ID NO: 4605970 - DNA, 25 bp, Homo sapien
acagagcaacacaagagggggtgct

SEQ ID NO: 4605971 - DNA, 25 bp, Homo sapien
agcaggtctgtcttgcttgataaag

SEQ ID NO: 4605972 - DNA, 25 bp, Homo sapien
tgacttgaggacttctctcctgcct

SEQ ID NO: 4605973 - DNA, 25 bp, Homo sapien
gctgtcgtggtgacttgaggacttc

SEQ ID NO: 4605974 - DNA, 25 bp, Homo sapien
gcagcaggtctgtcttgcttgataa

SEQ ID NO: 4605975 - DNA, 25 bp, Homo sapien
tgcactttggccaccagacggctct

SEQ ID NO: 4605976 - DNA, 25 bp, Homo sapien
ggttggctgtcaccacaaagttgtc

SEQ ID NO: 4605977 - DNA, 25 bp, Homo sapien
caggttggctgtcaccacaaagttg

SEQ ID NO: 4605978 - DNA, 25 bp, Homo sapien
ttgtgccccacgctgcccactgcag

SEQ ID NO: 4605979 - DNA, 25 bp, Homo sapien
tttgcaagtactccctaggcttccc

SEQ ID NO: 4605980 - DNA, 25 bp, Homo sapien
gctcacttcctctatttcttggcaa

SEQ ID NO: 4605981 - DNA, 25 bp, Homo sapien
ctcgctcacttcctctatttcttgg

SEQ ID NO: 4605982 - DNA, 25 bp, Homo sapien
tcacttcctctatttcttggcaact

SEQ ID NO: 4605983 - DNA, 25 bp, Homo sapien
ctgtgtaatcttcctcatcttcagg

SEQ ID NO: 4605984 - DNA, 25 bp, Homo sapien
taatcttcctcatcttcaggaactt

SEQ ID NO: 4605985 - DNA, 25 bp, Homo sapien
tcttcctcatcttcaggaacttcca

SEQ ID NO: 4605986 - DNA, 25 bp, Homo sapien
cttcctcatcttcaggaacttccac

SEQ ID NO: 4605987 - DNA, 25 bp, Homo sapien
gtgtggtacgggtgctctgctgtgc

SEQ ID NO: 4605988 - DNA, 25 bp, Homo sapien
tccagcatccgcgagcgggactgat

SEQ ID NO: 4605989 - DNA, 25 bp, Homo sapien
ctgtgccatacagtatgaggctcca

SEQ ID NO: 4605990 - DNA, 25 bp, Homo sapien
tacagtatgaggctccattctttca

SEQ ID NO: 4605991 - DNA, 25 bp, Homo sapien
tgtggtgacagcgacacaggaagtt

SEQ ID NO: 4605992 - DNA, 25 bp, Homo sapien
gtgtgtggtgacagcgacacaggaa

SEQ ID NO: 4605993 - DNA, 25 bp, Homo sapien
tgtgtggtgacagcgacacaggaag

SEQ ID NO: 4605994 - DNA, 25 bp, Homo sapien
tggtgacagcgacacaggaagttgt

SEQ ID NO: 4605995 - DNA, 25 bp, Homo sapien
gacacaggaagttgttctcaccgct

SEQ ID NO: 4605996 - DNA, 25 bp, Homo sapien
tgacacaggaagttgttctcaccgc

SEQ ID NO: 4605997 - DNA, 25 bp, Homo sapien
acacaggaagttgttctcaccgctg

SEQ ID NO: 4605998 - DNA, 25 bp, Homo sapien
gcagtgacacaggaagttgttctca

SEQ ID NO: 4605999 - DNA, 25 bp, Homo sapien
tgatagcaacactgagcgctctcgc

SEQ ID NO: 4606000 - DNA, 25 bp, Homo sapien
gcgctctcgcgaaagacaaaaggga

SEQ ID NO: 4606001 - DNA, 25 bp, Homo sapien
gaactgcccactcctggtaagacta

SEQ ID NO: 4606002 - DNA, 25 bp, Homo sapien
gccaccacgccagaaagggcaattt

SEQ ID NO: 4606003 - DNA, 25 bp, Homo sapien
catgcagcacagttaggactctgtg

SEQ ID NO: 4606004 - DNA, 25 bp, Homo sapien
aaagaacaagttatacatgcagcac

SEQ ID NO: 4606005 - DNA, 25 bp, Homo sapien
cctgtagagacgtagtttgaacacg

SEQ ID NO: 4606006 - DNA, 25 bp, Homo sapien
gaacacgaagtgtttctggaaatag

SEQ ID NO: 4606007 - DNA, 25 bp, Homo sapien
gaaccatgcaggcaacaggaatgcc

SEQ ID NO: 4606008 - DNA, 25 bp, Homo sapien
aatgccgaaccatgcaggcaacagg

SEQ ID NO: 4606009 - DNA, 25 bp, Homo sapien
caggcaacaggaatgcccaagcgta

SEQ ID NO: 4606010 - DNA, 25 bp, Homo sapien
aacaggaatgcccaagcgtacctca

SEQ ID NO: 4606011 - DNA, 25 bp, Homo sapien
ttagtgacaaacttgaaagccggca

SEQ ID NO: 4606012 - DNA, 25 bp, Homo sapien
cagttggttgcatttctccccgaga

SEQ ID NO: 4606013 - DNA, 25 bp, Homo sapien
taaacaaggttcatgcttgcacgca

SEQ ID NO: 4606014 - DNA, 25 bp, Homo sapien
gattgagccatcgaacacagattgc

SEQ ID NO: 4606015 - DNA, 25 bp, Homo sapien
agctcttgttcaatctgccaccgga

SEQ ID NO: 4606016 - DNA, 25 bp, Homo sapien
ccaaagctcttgttcaatctgccac

SEQ ID NO: 4606017 - DNA, 25 bp, Homo sapien
ttaccaaagctcttgttcaatctgc

SEQ ID NO: 4606018 - DNA, 25 bp, Homo sapien
aaagctcttgttcaatctgccaccg

SEQ ID NO: 4606019 - DNA, 25 bp, Homo sapien
gattatctaacctctacagttgaga

SEQ ID NO: 4606020 - DNA, 25 bp, Homo sapien
caggattttggcctatttagtgata

SEQ ID NO: 4606021 - DNA, 25 bp, Homo sapien
ggctataacacagtatagcactctg

SEQ ID NO: 4606022 - DNA, 25 bp, Homo sapien
tagtgatctgtaagcactctacatt

SEQ ID NO: 4606023 - DNA, 25 bp, Homo sapien
gatgggatgcctcatataacagcca

SEQ ID NO: 4606024 - DNA, 25 bp, Homo sapien
caattcccaatatgcagtggtgcgc

SEQ ID NO: 4606025 - DNA, 25 bp, Homo sapien
gaccagcactggcttaacggaactg

SEQ ID NO: 4606026 - DNA, 25 bp, Homo sapien
caacccatgggctagacagaagtga

SEQ ID NO: 4606027 - DNA, 25 bp, Homo sapien
gctatccttagcatatctctgtggc

SEQ ID NO: 4606028 - DNA, 25 bp, Homo sapien
aaatggttggccaattatcaataac

SEQ ID NO: 4606029 - DNA, 25 bp, Homo sapien
tgttcccttgatcggtctattccag

SEQ ID NO: 4606030 - DNA, 25 bp, Homo sapien
tgtggctttattaacggactatccg

SEQ ID NO: 4606031 - DNA, 25 bp, Homo sapien
taaaatctcgggcattttggatggc

SEQ ID NO: 4606032 - DNA, 25 bp, Homo sapien
aaacttctccgacagatgttctgca

SEQ ID NO: 4606033 - DNA, 25 bp, Homo sapien
cagctccgttcgtagccttgcaggc

SEQ ID NO: 4606034 - DNA, 25 bp, Homo sapien
aatgcagccaaacttctccgacaga

SEQ ID NO: 4606035 - DNA, 25 bp, Homo sapien
tttgcaggagattgaaatgaacacc

SEQ ID NO: 4606036 - DNA, 25 bp, Homo sapien
gactcgatgctgacgatgctgacca

SEQ ID NO: 4606037 - DNA, 25 bp, Homo sapien
gaatgcctgtagagaagtgaggact

SEQ ID NO: 4606038 - DNA, 25 bp, Homo sapien
tttgagatcagttcatacctcggca

SEQ ID NO: 4606039 - DNA, 25 bp, Homo sapien
gagctctgggtagacacggattttc

SEQ ID NO: 4606040 - DNA, 25 bp, Homo sapien
cacggattttcacccttcctcctag

SEQ ID NO: 4606041 - DNA, 25 bp, Homo sapien
gtctttgggcacagcataaccagtg

SEQ ID NO: 4606042 - DNA, 25 bp, Homo sapien
ctggctctctggtggttgatagaga

SEQ ID NO: 4606043 - DNA, 25 bp, Homo sapien
acactgacgccttctgtgggcacca

SEQ ID NO: 4606044 - DNA, 25 bp, Homo sapien
ttctgtgggcaccagagcatcctcc

SEQ ID NO: 4606045 - DNA, 25 bp, Homo sapien
gcaggccctttccttatgtcggcct

SEQ ID NO: 4606046 - DNA, 25 bp, Homo sapien
cttatgtcggcctggccaggaagct

SEQ ID NO: 4606047 - DNA, 25 bp, Homo sapien
tgggaggatccagccgccatgctga

SEQ ID NO: 4606048 - DNA, 25 bp, Homo sapien
gggaggatccagccgccatgctgaa

SEQ ID NO: 4606049 - DNA, 25 bp, Homo sapien
ggaggatccagccgccatgctgaac

SEQ ID NO: 4606050 - DNA, 25 bp, Homo sapien
actcgcactttcttatttcaaaact

SEQ ID NO: 4606051 - DNA, 25 bp, Homo sapien
ggaggactcgcactttcttatttca

SEQ ID NO: 4606052 - DNA, 25 bp, Homo sapien
tcgcactttcttatttcaaaactta

SEQ ID NO: 4606053 - DNA, 25 bp, Homo sapien
ggactcgcactttcttatttcaaaa

SEQ ID NO: 4606054 - DNA, 25 bp, Homo sapien
cagaatcgagagtgtggaaacgaac

SEQ ID NO: 4606055 - DNA, 25 bp, Homo sapien
tactgactccaagatagatatacag

SEQ ID NO: 4606056 - DNA, 25 bp, Homo sapien
atggaacagaatcgagagtgtggaa

SEQ ID NO: 4606057 - DNA, 25 bp, Homo sapien
tggtactgactccaagatagatata

SEQ ID NO: 4606058 - DNA, 25 bp, Homo sapien
tcagttgatttgcaacaggagtctc

SEQ ID NO: 4606059 - DNA, 25 bp, Homo sapien
ctcttctgtggtcagttgatttgca

SEQ ID NO: 4606060 - DNA, 25 bp, Homo sapien
tagtgctgacgtttacatgacatcg

SEQ ID NO: 4606061 - DNA, 25 bp, Homo sapien
caatcttaggtatacgcccacgaga

SEQ ID NO: 4606062 - DNA, 25 bp, Homo sapien
caaaagctgtcatgagattcccaag

SEQ ID NO: 4606063 - DNA, 25 bp, Homo sapien
taatgacgttttgatgcatacgaca

SEQ ID NO: 4606064 - DNA, 25 bp, Homo sapien
tggacagtcatgaattcccagtttg

SEQ ID NO: 4606065 - DNA, 25 bp, Homo sapien
ttgtaaacccttcattggaaagatc

SEQ ID NO: 4606066 - DNA, 25 bp, Homo sapien
cccttcattggaaagatccagcaac

SEQ ID NO: 4606067 - DNA, 25 bp, Homo sapien
ttgcttctccgggttgcggacctgg

SEQ ID NO: 4606068 - DNA, 25 bp, Homo sapien
taagctcttacacagactctctcct

SEQ ID NO: 4606069 - DNA, 25 bp, Homo sapien
cagtgaaatgtgatcgtctttaagc

SEQ ID NO: 4606070 - DNA, 25 bp, Homo sapien
ccagccaacccgagggcaaagggca

SEQ ID NO: 4606071 - DNA, 25 bp, Homo sapien
catcacctccttgaacctccttaac

SEQ ID NO: 4606072 - DNA, 25 bp, Homo sapien
ccagagagtgctcactaaggacgcc

SEQ ID NO: 4606073 - DNA, 25 bp, Homo sapien
cccggatgcacgaaagcagacaggg

SEQ ID NO: 4606074 - DNA, 25 bp, Homo sapien
taaggacgccttttgaaagtgcttg

SEQ ID NO: 4606075 - DNA, 25 bp, Homo sapien
agagaccataactccagtgcccgga

SEQ ID NO: 4606076 - DNA, 25 bp, Homo sapien
ctgggtgccactaggtgtgcggctg

SEQ ID NO: 4606077 - DNA, 25 bp, Homo sapien
ctggagtgaacggagagcccgttgc

SEQ ID NO: 4606078 - DNA, 25 bp, Homo sapien
aacggagagcccgttgctggcctca

SEQ ID NO: 4606079 - DNA, 25 bp, Homo sapien
gtgtgcggctggagtgaacggagag

SEQ ID NO: 4606080 - DNA, 25 bp, Homo sapien
tagatctggaggtctcctcggcgtg

SEQ ID NO: 4606081 - DNA, 25 bp, Homo sapien
tgagacttggttcccgagggagaaa

SEQ ID NO: 4606082 - DNA, 25 bp, Homo sapien
tagaccacccgctggtccgagtgct

SEQ ID NO: 4606083 - DNA, 25 bp, Homo sapien
gaaccaccacgtgctccaagtagac

SEQ ID NO: 4606084 - DNA, 25 bp, Homo sapien
tgcacaacgcacttgctttgttcct

SEQ ID NO: 4606085 - DNA, 25 bp, Homo sapien
tgttctacctgggaagctactccat

SEQ ID NO: 4606086 - DNA, 25 bp, Homo sapien
gaccaacctggatccttgcacaacg

SEQ ID NO: 4606087 - DNA, 25 bp, Homo sapien
atattttcaagtaaccgagtgccag

SEQ ID NO: 4606088 - DNA, 25 bp, Homo sapien
ggccatgttgagagaccctccagaa

SEQ ID NO: 4606089 - DNA, 25 bp, Homo sapien
tgttgagagaccctccagaatcagg

SEQ ID NO: 4606090 - DNA, 25 bp, Homo sapien
gccatgttgagagaccctccagaat

SEQ ID NO: 4606091 - DNA, 25 bp, Homo sapien
catgttgagagaccctccagaatca

SEQ ID NO: 4606092 - DNA, 25 bp, Homo sapien
cacagtgcccgtgtgaaggtggcaa

SEQ ID NO: 4606093 - DNA, 25 bp, Homo sapien
ggatgcacgctctcaacaagactgt

SEQ ID NO: 4606094 - DNA, 25 bp, Homo sapien
aactgaggcccattacagcagaagg

SEQ ID NO: 4606095 - DNA, 25 bp, Homo sapien
taagcaataggaaaacagcaggtcg

SEQ ID NO: 4606096 - DNA, 25 bp, Homo sapien
catttgtgcccaggagtaggtcgac

SEQ ID NO: 4606097 - DNA, 25 bp, Homo sapien
tacggtctgacgatcacaacagagg

SEQ ID NO: 4606098 - DNA, 25 bp, Homo sapien
tgaaagcctatgatgggccctaccc

SEQ ID NO: 4606099 - DNA, 25 bp, Homo sapien
cacgatcccgtggtaccttggagca

SEQ ID NO: 4606100 - DNA, 25 bp, Homo sapien
gatgcaatgctagtttgggagcaca

SEQ ID NO: 4606101 - DNA, 25 bp, Homo sapien
tttccgcgcctttgggcctgagcat

SEQ ID NO: 4606102 - DNA, 25 bp, Homo sapien
agcgttggagacagcagctccgcag

SEQ ID NO: 4606103 - DNA, 25 bp, Homo sapien
ggtgggtctggcatcaccgccccag

SEQ ID NO: 4606104 - DNA, 25 bp, Homo sapien
tttgcctccacaacgagagcttctg

SEQ ID NO: 4606105 - DNA, 25 bp, Homo sapien
aggcggccacacacatgtgctgcga

SEQ ID NO: 4606106 - DNA, 25 bp, Homo sapien
tgggtctcttgtccgaggcggccac

SEQ ID NO: 4606107 - DNA, 25 bp, Homo sapien
cacatgtgctgcgatggcactgctg

SEQ ID NO: 4606108 - DNA, 25 bp, Homo sapien
ttatagagtataggagaccccagac

SEQ ID NO: 4606109 - DNA, 25 bp, Homo sapien
tgtcactgtgagcttccgggatact

SEQ ID NO: 4606110 - DNA, 25 bp, Homo sapien
tataggcacacgtcattgctcctgg

SEQ ID NO: 4606111 - DNA, 25 bp, Homo sapien
gaccccagactcttgtgacctgagg

SEQ ID NO: 4606112 - DNA, 25 bp, Homo sapien
ccaatggtccaccagaacgccactg

SEQ ID NO: 4606113 - DNA, 25 bp, Homo sapien
agggccacccaatggtccaccagaa

SEQ ID NO: 4606114 - DNA, 25 bp, Homo sapien
cccaatggtccaccagaacgccact

SEQ ID NO: 4606115 - DNA, 25 bp, Homo sapien
atggtccaccagaacgccactgccg

SEQ ID NO: 4606116 - DNA, 25 bp, Homo sapien
gtgctggacgtccctccaggttaac

SEQ ID NO: 4606117 - DNA, 25 bp, Homo sapien
tttatgacccgcgccgttcactttc

SEQ ID NO: 4606118 - DNA, 25 bp, Homo sapien
tttccagtcgctcgctttcaggtgg

SEQ ID NO: 4606119 - DNA, 25 bp, Homo sapien
gccggccgggatgtcttcactagca

SEQ ID NO: 4606120 - DNA, 25 bp, Homo sapien
taaacgaacatctctcgagtccaag

SEQ ID NO: 4606121 - DNA, 25 bp, Homo sapien
tacctaggactttctattcaatcag

SEQ ID NO: 4606122 - DNA, 25 bp, Homo sapien
ccagccttgtctcggtgcacgttta

SEQ ID NO: 4606123 - DNA, 25 bp, Homo sapien
accatcttcccagggctcgttggga

SEQ ID NO: 4606124 - DNA, 25 bp, Homo sapien
cgtgctctcggtgcgtgtttactag

SEQ ID NO: 4606125 - DNA, 25 bp, Homo sapien
actaagtaaaatcgggggagctgct

SEQ ID NO: 4606126 - DNA, 25 bp, Homo sapien
gtgtttactaggaacgcacgccgcg

SEQ ID NO: 4606127 - DNA, 25 bp, Homo sapien
gcctcagggaatgtgaccctaggaa

SEQ ID NO: 4606128 - DNA, 25 bp, Homo sapien
ccggcctccccagtggcacctgctg

SEQ ID NO: 4606129 - DNA, 25 bp, Homo sapien
aagagagagagctgaagtacccagc

SEQ ID NO: 4606130 - DNA, 25 bp, Homo sapien
ccccggcctccccagtggcacctgc

SEQ ID NO: 4606131 - DNA, 25 bp, Homo sapien
agagagctgaagtacccagctgccc

SEQ ID NO: 4606132 - DNA, 25 bp, Homo sapien
ccgtccgtgtccagtggctcagtct

SEQ ID NO: 4606133 - DNA, 25 bp, Homo sapien
cgtccgtgtccagtggctcagtctc

SEQ ID NO: 4606134 - DNA, 25 bp, Homo sapien
tccccgtccgtgtccagtggctcag

SEQ ID NO: 4606135 - DNA, 25 bp, Homo sapien
cccgtccgtgtccagtggctcagtc

SEQ ID NO: 4606136 - DNA, 25 bp, Homo sapien
gttctcctcctgcatccactggcct

SEQ ID NO: 4606137 - DNA, 25 bp, Homo sapien
ttctcctcctgcatccactggcctt

SEQ ID NO: 4606138 - DNA, 25 bp, Homo sapien
tctcctcctgcatccactggccttc

SEQ ID NO: 4606139 - DNA, 25 bp, Homo sapien
ctgttctcctcctgcatccactggc

SEQ ID NO: 4606140 - DNA, 25 bp, Homo sapien
agattctgaggcctcgagtagccca

SEQ ID NO: 4606141 - DNA, 25 bp, Homo sapien
ctttggagtttagacaagtgctgac

SEQ ID NO: 4606142 - DNA, 25 bp, Homo sapien
gaggcctcgagtagcccatggccgt

SEQ ID NO: 4606143 - DNA, 25 bp, Homo sapien
gccgtgcaccctggtagagaggtca

SEQ ID NO: 4606144 - DNA, 25 bp, Homo sapien
gaaatcttgaatttaggtgccggga

SEQ ID NO: 4606145 - DNA, 25 bp, Homo sapien
tgtcagcagggcgtactcgaagacg

SEQ ID NO: 4606146 - DNA, 25 bp, Homo sapien
gaagacggctacagccagtcctcct

SEQ ID NO: 4606147 - DNA, 25 bp, Homo sapien
tcttgaatttaggtgccgggatgac

SEQ ID NO: 4606148 - DNA, 25 bp, Homo sapien
tcctgtaagtgtcgagcgctctaga

SEQ ID NO: 4606149 - DNA, 25 bp, Homo sapien
tgatgaggaagatgaccgtctgagc

SEQ ID NO: 4606150 - DNA, 25 bp, Homo sapien
aggctacaggtctgctcaacacagg

SEQ ID NO: 4606151 - DNA, 25 bp, Homo sapien
aatgatgtttgcctgatccgtcccc

SEQ ID NO: 4606152 - DNA, 25 bp, Homo sapien
gtgtggccatcggtacagcgctgac

SEQ ID NO: 4606153 - DNA, 25 bp, Homo sapien
ttctagagccaaggcgatgatgccc

SEQ ID NO: 4606154 - DNA, 25 bp, Homo sapien
agagactgaggtcccagtgtggcca

SEQ ID NO: 4606155 - DNA, 25 bp, Homo sapien
cagcgctgacgcagatccgtggtga

SEQ ID NO: 4606156 - DNA, 25 bp, Homo sapien
ggtgagagatgctttctttaggttt

SEQ ID NO: 4606157 - DNA, 25 bp, Homo sapien
gagagatgctttctttaggttttac

SEQ ID NO: 4606158 - DNA, 25 bp, Homo sapien
cttgttctggtgagagatgctttct

SEQ ID NO: 4606159 - DNA, 25 bp, Homo sapien
tggtgagagatgctttctttaggtt

SEQ ID NO: 4606160 - DNA, 25 bp, Homo sapien
ggattccaagacatgtgaccacaga

SEQ ID NO: 4606161 - DNA, 25 bp, Homo sapien
tactctgttgtacacgctggaactg

SEQ ID NO: 4606162 - DNA, 25 bp, Homo sapien
cctgggatccggaacaatctggcct

SEQ ID NO: 4606163 - DNA, 25 bp, Homo sapien
tagaaagccagtgtccgaggaaggc

SEQ ID NO: 4606164 - DNA, 25 bp, Homo sapien
actccaacttgccaagagaacttac

SEQ ID NO: 4606165 - DNA, 25 bp, Homo sapien
gcactccaacttgccaagagaactt

SEQ ID NO: 4606166 - DNA, 25 bp, Homo sapien
cactccaacttgccaagagaactta

SEQ ID NO: 4606167 - DNA, 25 bp, Homo sapien
tgcccagacgaaaatggagcccagg

SEQ ID NO: 4606168 - DNA, 25 bp, Homo sapien
ttccaggtaccagggcttgtagcca

SEQ ID NO: 4606169 - DNA, 25 bp, Homo sapien
tggtgtagccatcgcacgagcagta

SEQ ID NO: 4606170 - DNA, 25 bp, Homo sapien
cataaaaggccccactgctgtaggt

SEQ ID NO: 4606171 - DNA, 25 bp, Homo sapien
gaggtacccttcttgcagagagagc

SEQ ID NO: 4606172 - DNA, 25 bp, Homo sapien
ggaaagttcttggagctcacgcagc

SEQ ID NO: 4606173 - DNA, 25 bp, Homo sapien
gatttatatcactagccaaggccag

SEQ ID NO: 4606174 - DNA, 25 bp, Homo sapien
tagctgtgcctatagaagtgtgccg

SEQ ID NO: 4606175 - DNA, 25 bp, Homo sapien
cccaatcaaatcgtatttcgatgtc

SEQ ID NO: 4606176 - DNA, 25 bp, Homo sapien
tcaacccaatcaaatcgtatttcga

SEQ ID NO: 4606177 - DNA, 25 bp, Homo sapien
aacccaatcaaatcgtatttcgatg

SEQ ID NO: 4606178 - DNA, 25 bp, Homo sapien
atcaaatcgtatttcgatgtcttcc

SEQ ID NO: 4606179 - DNA, 25 bp, Homo sapien
agatctttgtgccaagttacagctt

SEQ ID NO: 4606180 - DNA, 25 bp, Homo sapien
ctaaggaccaacgttaaacagatct

SEQ ID NO: 4606181 - DNA, 25 bp, Homo sapien
taatggtcccttctgaataactagg

SEQ ID NO: 4606182 - DNA, 25 bp, Homo sapien
acatcatctaccaaagataaagtca

SEQ ID NO: 4606183 - DNA, 25 bp, Homo sapien
ggtcgtgctagcagtggccacctgg

SEQ ID NO: 4606184 - DNA, 25 bp, Homo sapien
gtcgtgctagcagtggccacctggc

SEQ ID NO: 4606185 - DNA, 25 bp, Homo sapien
cgactttgcctcgaccacatctgtg

SEQ ID NO: 4606186 - DNA, 25 bp, Homo sapien
tttaatgccatactcgaaagcctgc

SEQ ID NO: 4606187 - DNA, 25 bp, Homo sapien
agcctgcttagccagtcggccgggc

SEQ ID NO: 4606188 - DNA, 25 bp, Homo sapien
tgtcgatgtagttgggtctgatgcc

SEQ ID NO: 4606189 - DNA, 25 bp, Homo sapien
ccagctctgtgtgtgcgatgaccat

SEQ ID NO: 4606190 - DNA, 25 bp, Homo sapien
ccacggggcccagctctgtgtgtgc

SEQ ID NO: 4606191 - DNA, 25 bp, Homo sapien
gggcccagctctgtgtgtgcgatga

SEQ ID NO: 4606192 - DNA, 25 bp, Homo sapien
cccagctctgtgtgtgcgatgacca

SEQ ID NO: 4606193 - DNA, 25 bp, Homo sapien
tacagggcatttccctgtgccatta

SEQ ID NO: 4606194 - DNA, 25 bp, Homo sapien
ccccactgagctttatacagggcat

SEQ ID NO: 4606195 - DNA, 25 bp, Homo sapien
ttgcctctggcatatactttctttc

SEQ ID NO: 4606196 - DNA, 25 bp, Homo sapien
actcttccaaggcttagtggctgca

SEQ ID NO: 4606197 - DNA, 25 bp, Homo sapien
accaaaggcagttcttgggaggcca

SEQ ID NO: 4606198 - DNA, 25 bp, Homo sapien
gactcatgcagaagagcaacaggaa

SEQ ID NO: 4606199 - DNA, 25 bp, Homo sapien
gagaatacaagagtcaccaaaggca

SEQ ID NO: 4606200 - DNA, 25 bp, Homo sapien
tacgtgagtagaatcctgctgtccc

SEQ ID NO: 4606201 - DNA, 25 bp, Homo sapien
ctgcgggtgtctgcagcagggcggc

SEQ ID NO: 4606202 - DNA, 25 bp, Homo sapien
ccattctctgcgggtgtctgcagca

SEQ ID NO: 4606203 - DNA, 25 bp, Homo sapien
tctctgcgggtgtctgcagcagggc

SEQ ID NO: 4606204 - DNA, 25 bp, Homo sapien
cattctctgcgggtgtctgcagcag

SEQ ID NO: 4606205 - DNA, 25 bp, Homo sapien
ggcagtggaggcagccaagtctgga

SEQ ID NO: 4606206 - DNA, 25 bp, Homo sapien
accaatgccaccctgaagcagaagg

SEQ ID NO: 4606207 - DNA, 25 bp, Homo sapien
ccaagtctggagccccccaccacca

SEQ ID NO: 4606208 - DNA, 25 bp, Homo sapien
caccaccaatgccaccctgaagcag

SEQ ID NO: 4606209 - DNA, 25 bp, Homo sapien
gccggtctcgagctcccgacatcag

SEQ ID NO: 4606210 - DNA, 25 bp, Homo sapien
ccaggccggtctcgagctcccgaca

SEQ ID NO: 4606211 - DNA, 25 bp, Homo sapien
aggccggtctcgagctcccgacatc

SEQ ID NO: 4606212 - DNA, 25 bp, Homo sapien
cggtctcgagctcccgacatcaggt

SEQ ID NO: 4606213 - DNA, 25 bp, Homo sapien
cgaaagagatgagggtcacagttct

SEQ ID NO: 4606214 - DNA, 25 bp, Homo sapien
tggatatgccgctgacagagagacg

SEQ ID NO: 4606215 - DNA, 25 bp, Homo sapien
atgtataatactggatatgccgctg

SEQ ID NO: 4606216 - DNA, 25 bp, Homo sapien
tgccgctgacagagagacgaaagag

SEQ ID NO: 4606217 - DNA, 25 bp, Homo sapien
ggaaccaacaaggaagatggcacag

SEQ ID NO: 4606218 - DNA, 25 bp, Homo sapien
agggaaccaacaaggaagatggcac

SEQ ID NO: 4606219 - DNA, 25 bp, Homo sapien
ttggagggaaccaacaaggaagatg

SEQ ID NO: 4606220 - DNA, 25 bp, Homo sapien
ggagggaaccaacaaggaagatggc

SEQ ID NO: 4606221 - DNA, 25 bp, Homo sapien
caccctcaccaaggctcagtggcag

SEQ ID NO: 4606222 - DNA, 25 bp, Homo sapien
gctcggtggcagaacggcagaaagt

SEQ ID NO: 4606223 - DNA, 25 bp, Homo sapien
ggcagaacggcagaaagcggctgca

SEQ ID NO: 4606224 - DNA, 25 bp, Homo sapien
gctcggtggcagaacggcagaaagc

SEQ ID NO: 4606225 - DNA, 25 bp, Homo sapien
cattgtacgctatgcccacgatgca

SEQ ID NO: 4606226 - DNA, 25 bp, Homo sapien
tcctattttggcattgtacgctatg

SEQ ID NO: 4606227 - DNA, 25 bp, Homo sapien
agcaacttctcccgcacaacgagtg

SEQ ID NO: 4606228 - DNA, 25 bp, Homo sapien
ttctcccgcacaacgagtgccgtgt

SEQ ID NO: 4606229 - DNA, 25 bp, Homo sapien
tcccagcacgtgtaattggcacatg

SEQ ID NO: 4606230 - DNA, 25 bp, Homo sapien
ctcctcccagcacgtgtaattggca

SEQ ID NO: 4606231 - DNA, 25 bp, Homo sapien
cacctcggcctcgtgtctcctgtgg

SEQ ID NO: 4606232 - DNA, 25 bp, Homo sapien
cctcccagcacgtgtaattggcaca

SEQ ID NO: 4606233 - DNA, 25 bp, Homo sapien
catatcgtggagatgggtcataatc

SEQ ID NO: 4606234 - DNA, 25 bp, Homo sapien
taatcattgccgttcacgtcgtagc

SEQ ID NO: 4606235 - DNA, 25 bp, Homo sapien
tcacgtcgtagctggcgtaggaatc

SEQ ID NO: 4606236 - DNA, 25 bp, Homo sapien
tgctggcatcatatcgtggagatgg

SEQ ID NO: 4606237 - DNA, 25 bp, Homo sapien
tgcctggacattcatttccgaccgg

SEQ ID NO: 4606238 - DNA, 25 bp, Homo sapien
cctgtgtagcccctcttccacgctg

SEQ ID NO: 4606239 - DNA, 25 bp, Homo sapien
cttccacgctgcctggacattcatt

SEQ ID NO: 4606240 - DNA, 25 bp, Homo sapien
attcatttccgaccggcagcgactg

SEQ ID NO: 4606241 - DNA, 25 bp, Homo sapien
gggtcacttcgcacctgtctcttca

SEQ ID NO: 4606242 - DNA, 25 bp, Homo sapien
ggcctgcgggtcacttcgcacctgt

SEQ ID NO: 4606243 - DNA, 25 bp, Homo sapien
tgtctcttcacccttcgtttcactt

SEQ ID NO: 4606244 - DNA, 25 bp, Homo sapien
aagggcctgcgggtcacttcgcacc

SEQ ID NO: 4606245 - DNA, 25 bp, Homo sapien
gcatacacagctcaaatttagggct

SEQ ID NO: 4606246 - DNA, 25 bp, Homo sapien
tacagggcaaaatgccggaagagag

SEQ ID NO: 4606247 - DNA, 25 bp, Homo sapien
cggaagagaggcatcccagcctgtc

SEQ ID NO: 4606248 - DNA, 25 bp, Homo sapien
gtgtacagggcaaaatgccggaaga

SEQ ID NO: 4606249 - DNA, 25 bp, Homo sapien
cagttgtagccaacgcaagggagac

SEQ ID NO: 4606250 - DNA, 25 bp, Homo sapien
gccaacgcaagggagacagctcggc

SEQ ID NO: 4606251 - DNA, 25 bp, Homo sapien
tgcacagttgtagccaacgcaaggg

SEQ ID NO: 4606252 - DNA, 25 bp, Homo sapien
tgtagccaacgcaagggagacagct

SEQ ID NO: 4606253 - DNA, 25 bp, Homo sapien
ataaaaatggtagtaatcttccagg

SEQ ID NO: 4606254 - DNA, 25 bp, Homo sapien
ttctgaggaaggtgtgagggcctct

SEQ ID NO: 4606255 - DNA, 25 bp, Homo sapien
ggtccattctgaggaaggtgtgagg

SEQ ID NO: 4606256 - DNA, 25 bp, Homo sapien
tctgctactcaaggttgatctttta

SEQ ID NO: 4606257 - DNA, 25 bp, Homo sapien
atctgactgctagtccacaaggcat

SEQ ID NO: 4606258 - DNA, 25 bp, Homo sapien
atgaatctgactgctagtccacaag

SEQ ID NO: 4606259 - DNA, 25 bp, Homo sapien
gaatctgactgctagtccacaaggc

SEQ ID NO: 4606260 - DNA, 25 bp, Homo sapien
tgaatctgactgctagtccacaagg

SEQ ID NO: 4606261 - DNA, 25 bp, Homo sapien
ctggtaggcagaaaggagggtatcc

SEQ ID NO: 4606262 - DNA, 25 bp, Homo sapien
cagaaaggagggtatccaagaaagg

SEQ ID NO: 4606263 - DNA, 25 bp, Homo sapien
gaaacacagggttctggtaggcaga

SEQ ID NO: 4606264 - DNA, 25 bp, Homo sapien
cttgggatctggttctactgtgttc

SEQ ID NO: 4606265 - DNA, 25 bp, Homo sapien
tcattcctgcatagataagcctttg

SEQ ID NO: 4606266 - DNA, 25 bp, Homo sapien
tcagactcttagactctacatcaag

SEQ ID NO: 4606267 - DNA, 25 bp, Homo sapien
gactctacatcaagaatgttgcctt

SEQ ID NO: 4606268 - DNA, 25 bp, Homo sapien
tgccttcattcctgcatagataagc

SEQ ID NO: 4606269 - DNA, 25 bp, Homo sapien
tactactatagcaggttactcagcc

SEQ ID NO: 4606270 - DNA, 25 bp, Homo sapien
gaaggcctggaatgcaagttgccca

SEQ ID NO: 4606271 - DNA, 25 bp, Homo sapien
ttgctattctaaggacagtcacgtg

SEQ ID NO: 4606272 - DNA, 25 bp, Homo sapien
ggaatccgaggacccagttgctatt

SEQ ID NO: 4606273 - DNA, 25 bp, Homo sapien
gcacagcagcgaagtgtggcaggag

SEQ ID NO: 4606274 - DNA, 25 bp, Homo sapien
cactacgcaaacatgaggaacacct

SEQ ID NO: 4606275 - DNA, 25 bp, Homo sapien
ccaggggcactacgcaaacatgagg

SEQ ID NO: 4606276 - DNA, 25 bp, Homo sapien
ggagccaggggcactacgcaaacat

SEQ ID NO: 4606277 - DNA, 25 bp, Homo sapien
tcagcccggtagctggttgagagag

SEQ ID NO: 4606278 - DNA, 25 bp, Homo sapien
gaggtcctttgagggtaatgccgcc

SEQ ID NO: 4606279 - DNA, 25 bp, Homo sapien
tcactgacagaagaggggacagccg

SEQ ID NO: 4606280 - DNA, 25 bp, Homo sapien
taatgccgcctttgtgcccagggcg

SEQ ID NO: 4606281 - DNA, 25 bp, Homo sapien
cgcggaggcatagcggcgacaggct

SEQ ID NO: 4606282 - DNA, 25 bp, Homo sapien
gtgccgccttttaaagccgctccgc

SEQ ID NO: 4606283 - DNA, 25 bp, Homo sapien
ccagcacttgcaccgcccagtggtt

SEQ ID NO: 4606284 - DNA, 25 bp, Homo sapien
ctggcccaagttgaggtacccgtgc

SEQ ID NO: 4606285 - DNA, 25 bp, Homo sapien
accgcacggagcccatggcggaggc

SEQ ID NO: 4606286 - DNA, 25 bp, Homo sapien
cgcacggagcccatggcggaggccg

SEQ ID NO: 4606287 - DNA, 25 bp, Homo sapien
caccgcacggagcccatggcggagg

SEQ ID NO: 4606288 - DNA, 25 bp, Homo sapien
gcacggagcccatggcggaggccgc

SEQ ID NO: 4606289 - DNA, 25 bp, Homo sapien
ggtcaggggcctttgctcccctgca

SEQ ID NO: 4606290 - DNA, 25 bp, Homo sapien
tgctgcccatagcagtggtgggtca

SEQ ID NO: 4606291 - DNA, 25 bp, Homo sapien
ctgccttctgctcggtgtacacagt

SEQ ID NO: 4606292 - DNA, 25 bp, Homo sapien
tgctcattcatactgagctctactc

SEQ ID NO: 4606293 - DNA, 25 bp, Homo sapien
tatgagagtgcccaactgaaatgag

SEQ ID NO: 4606294 - DNA, 25 bp, Homo sapien
tatatgactgccacagatgggagga

SEQ ID NO: 4606295 - DNA, 25 bp, Homo sapien
cagggcggctcaggttgctttcgat

SEQ ID NO: 4606296 - DNA, 25 bp, Homo sapien
tgctgccaggtaatcgtagacaagg

SEQ ID NO: 4606297 - DNA, 25 bp, Homo sapien
gcaaggatggcgttgcactgtccac

SEQ ID NO: 4606298 - DNA, 25 bp, Homo sapien
cagcgcaaggatggcgttgcactgt

SEQ ID NO: 4606299 - DNA, 25 bp, Homo sapien
gcgcaaggatggcgttgcactgtcc

SEQ ID NO: 4606300 - DNA, 25 bp, Homo sapien
aaggatggcgttgcactgtccacaa

SEQ ID NO: 4606301 - DNA, 25 bp, Homo sapien
tcgattctgagcacctcggtgaccg

SEQ ID NO: 4606302 - DNA, 25 bp, Homo sapien
actctggatctccatcgattctgag

SEQ ID NO: 4606303 - DNA, 25 bp, Homo sapien
tgtaggtatctaggagccggcagca

SEQ ID NO: 4606304 - DNA, 25 bp, Homo sapien
caaacgtagggaggtttcaactctg

SEQ ID NO: 4606305 - DNA, 25 bp, Homo sapien
tcctgacacacgtgcccttggtttg

SEQ ID NO: 4606306 - DNA, 25 bp, Homo sapien
cacacgtgcccttggtttggcagat

SEQ ID NO: 4606307 - DNA, 25 bp, Homo sapien
acagcggacacgtgaaccacgacag

SEQ ID NO: 4606308 - DNA, 25 bp, Homo sapien
caagggttgtggtgacagcggacac

SEQ ID NO: 4606309 - DNA, 25 bp, Homo sapien
cctgaaccctctgtaaggcttttgc

SEQ ID NO: 4606310 - DNA, 25 bp, Homo sapien
taaggcttttgcatgcattcgtgtc

SEQ ID NO: 4606311 - DNA, 25 bp, Homo sapien
tgaaccctctgtaaggcttttgcat

SEQ ID NO: 4606312 - DNA, 25 bp, Homo sapien
aggcttttgcatgcattcgtgtctg

SEQ ID NO: 4606313 - DNA, 25 bp, Homo sapien
caggtgaacagttagggttctggaa

SEQ ID NO: 4606314 - DNA, 25 bp, Homo sapien
tacaaacaagaaagccccgatcctc

SEQ ID NO: 4606315 - DNA, 25 bp, Homo sapien
gcctgaggtcttgtcaggtgaacag

SEQ ID NO: 4606316 - DNA, 25 bp, Homo sapien
cttgtcaggtgaacagttagggttc

SEQ ID NO: 4606317 - DNA, 25 bp, Homo sapien
agagacacggtgcccggactcggca

SEQ ID NO: 4606318 - DNA, 25 bp, Homo sapien
gagagagacacggtgcccggactcg

SEQ ID NO: 4606319 - DNA, 25 bp, Homo sapien
atcagcaggctgcactgttgccccc

SEQ ID NO: 4606320 - DNA, 25 bp, Homo sapien
gcaggctgcactgttgccccctgga

SEQ ID NO: 4606321 - DNA, 25 bp, Homo sapien
ctctccccttgacaggccagcaggc

SEQ ID NO: 4606322 - DNA, 25 bp, Homo sapien
cgggagcaggcagagtcaggaattc

SEQ ID NO: 4606323 - DNA, 25 bp, Homo sapien
tgtgctctccccttgacaggccagc

SEQ ID NO: 4606324 - DNA, 25 bp, Homo sapien
gagcaggcagagtcaggaattccat

SEQ ID NO: 4606325 - DNA, 25 bp, Homo sapien
gtgtttgcacctgcgtccttgctgc

SEQ ID NO: 4606326 - DNA, 25 bp, Homo sapien
ctgggtgtttgcacctgcgtccttg

SEQ ID NO: 4606327 - DNA, 25 bp, Homo sapien
gtttgcacctgcgtccttgctgctt

SEQ ID NO: 4606328 - DNA, 25 bp, Homo sapien
gggtgtttgcacctgcgtccttgct

SEQ ID NO: 4606329 - DNA, 25 bp, Homo sapien
tagtatccttctcccgcaagggtag

SEQ ID NO: 4606330 - DNA, 25 bp, Homo sapien
gtaatacaaaatagtatccttctcc

SEQ ID NO: 4606331 - DNA, 25 bp, Homo sapien
tccgtggaacgttttgctcacaatg

SEQ ID NO: 4606332 - DNA, 25 bp, Homo sapien
gctcacaatgttcataagaagtaat

SEQ ID NO: 4606333 - DNA, 25 bp, Homo sapien
cattcccgtggtattaggagaaggc

SEQ ID NO: 4606334 - DNA, 25 bp, Homo sapien
ccagtgtgtttgagttgcggctgct

SEQ ID NO: 4606335 - DNA, 25 bp, Homo sapien
tgcaggtgacaaggcgctgcttccc

SEQ ID NO: 4606336 - DNA, 25 bp, Homo sapien
tctttcagcattcccgtggtattag

SEQ ID NO: 4606337 - DNA, 25 bp, Homo sapien
tacttgatatgcaaccctgagccaa

SEQ ID NO: 4606338 - DNA, 25 bp, Homo sapien
taatgctcacagcactcaccgagac

SEQ ID NO: 4606339 - DNA, 25 bp, Homo sapien
caggcaccatggatgtgtatctaca

SEQ ID NO: 4606340 - DNA, 25 bp, Homo sapien
tgcattaccaggtcacgcagccagt

SEQ ID NO: 4606341 - DNA, 25 bp, Homo sapien
gacggccagttctgagcggccatat

SEQ ID NO: 4606342 - DNA, 25 bp, Homo sapien
ctgcccacgaagaccgtctggacgg

SEQ ID NO: 4606343 - DNA, 25 bp, Homo sapien
cggccatatgtgtgggtggaaagga

SEQ ID NO: 4606344 - DNA, 25 bp, Homo sapien
aagaccgtctggacggccagttctg

SEQ ID NO: 4606345 - DNA, 25 bp, Homo sapien
tccaagcaggaactcccaattacac

SEQ ID NO: 4606346 - DNA, 25 bp, Homo sapien
acggagactccagtctccaagcagg

SEQ ID NO: 4606347 - DNA, 25 bp, Homo sapien
tacttgataaagatataggcgctac

SEQ ID NO: 4606348 - DNA, 25 bp, Homo sapien
gaagctggtctttaagttcttgtcg

SEQ ID NO: 4606349 - DNA, 25 bp, Homo sapien
gcaacaagcccgagtctgactgtga

SEQ ID NO: 4606350 - DNA, 25 bp, Homo sapien
tttccgggccaatggcccacggagc

SEQ ID NO: 4606351 - DNA, 25 bp, Homo sapien
cgttcttggaggcacgtggtttccg

SEQ ID NO: 4606352 - DNA, 25 bp, Homo sapien
ggtatcaccgtggtgcagacctcac

SEQ ID NO: 4606353 - DNA, 25 bp, Homo sapien
ctgcgagaaagacacagggcggcgg

SEQ ID NO: 4606354 - DNA, 25 bp, Homo sapien
cagggcggcggtgggaaacacaaag

SEQ ID NO: 4606355 - DNA, 25 bp, Homo sapien
cacagggcggcggtgggaaacacaa

SEQ ID NO: 4606356 - DNA, 25 bp, Homo sapien
gagaaagacacagggcggcggtggg

SEQ ID NO: 4606357 - DNA, 25 bp, Homo sapien
ggatgtcacatgccagtgttaccca

SEQ ID NO: 4606358 - DNA, 25 bp, Homo sapien
tcctgagggtgatgccatgggacct

SEQ ID NO: 4606359 - DNA, 25 bp, Homo sapien
gtcacatgccagtgttacccaggcc

SEQ ID NO: 4606360 - DNA, 25 bp, Homo sapien
gatgtcacatgccagtgttacccag

SEQ ID NO: 4606361 - DNA, 25 bp, Homo sapien
caggaggctcagttccgtttgctga

SEQ ID NO: 4606362 - DNA, 25 bp, Homo sapien
ttccgtttgctgaatggcgcggctg

SEQ ID NO: 4606363 - DNA, 25 bp, Homo sapien
ctcagttccgtttgctgaatggcgc

SEQ ID NO: 4606364 - DNA, 25 bp, Homo sapien
ggaggctcagttccgtttgctgaat

SEQ ID NO: 4606365 - DNA, 25 bp, Homo sapien
catctcttccttatttctgctaaac

SEQ ID NO: 4606366 - DNA, 25 bp, Homo sapien
gctcatctcttccttatttctgcta

SEQ ID NO: 4606367 - DNA, 25 bp, Homo sapien
cagctcatctcttccttatttctgc

SEQ ID NO: 4606368 - DNA, 25 bp, Homo sapien
tcatctcttccttatttctgctaaa

SEQ ID NO: 4606369 - DNA, 25 bp, Homo sapien
gaaaagttctgatacggcctgagaa

SEQ ID NO: 4606370 - DNA, 25 bp, Homo sapien
gactgttattgctacagaaaagttc

SEQ ID NO: 4606371 - DNA, 25 bp, Homo sapien
ttctgatacggcctgagaacttctg

SEQ ID NO: 4606372 - DNA, 25 bp, Homo sapien
aggactgttattgctacagaaaagt

SEQ ID NO: 4606373 - DNA, 25 bp, Homo sapien
gcaaatatctgagtccgattctggt

SEQ ID NO: 4606374 - DNA, 25 bp, Homo sapien
tgcatctattttatgctgaacttct

SEQ ID NO: 4606375 - DNA, 25 bp, Homo sapien
cagcaaggatcacctcatgggagtt

SEQ ID NO: 4606376 - DNA, 25 bp, Homo sapien
ttctggtcaaggatgtgccattctt

SEQ ID NO: 4606377 - DNA, 25 bp, Homo sapien
ccacttccatccagacatgttaggg

SEQ ID NO: 4606378 - DNA, 25 bp, Homo sapien
gtaactgatacatgccttgggctca

SEQ ID NO: 4606379 - DNA, 25 bp, Homo sapien
gaattccactttagaaggctttcca

SEQ ID NO: 4606380 - DNA, 25 bp, Homo sapien
cacctgtttggagcattcaccatgt

SEQ ID NO: 4606381 - DNA, 25 bp, Homo sapien
tcggaggtggttgatccagatccat

SEQ ID NO: 4606382 - DNA, 25 bp, Homo sapien
atcctcggaggtggttgatccagat

SEQ ID NO: 4606383 - DNA, 25 bp, Homo sapien
gaggtggttgatccagatccattta

SEQ ID NO: 4606384 - DNA, 25 bp, Homo sapien
cctcggaggtggttgatccagatcc

SEQ ID NO: 4606385 - DNA, 25 bp, Homo sapien
gggcctgatgccactctgaggactg

SEQ ID NO: 4606386 - DNA, 25 bp, Homo sapien
accttaatggcaggcacagtgatgc

SEQ ID NO: 4606387 - DNA, 25 bp, Homo sapien
aggatgaagtcctgcctcacgtcca

SEQ ID NO: 4606388 - DNA, 25 bp, Homo sapien
tgaggactgatgaccctgaggcttc

SEQ ID NO: 4606389 - DNA, 25 bp, Homo sapien
cagccttcaaatttgtgcccgaatc

SEQ ID NO: 4606390 - DNA, 25 bp, Homo sapien
caactcctcaaatacagactggctt

SEQ ID NO: 4606391 - DNA, 25 bp, Homo sapien
cgagggcaaggcgacatgctcattg

SEQ ID NO: 4606392 - DNA, 25 bp, Homo sapien
cacgggtgacggctgccgtttatca

SEQ ID NO: 4606393 - DNA, 25 bp, Homo sapien
cgcttatctgcggaaatgctggcat

SEQ ID NO: 4606394 - DNA, 25 bp, Homo sapien
tgcagcgggcaaccagattttaaac

SEQ ID NO: 4606395 - DNA, 25 bp, Homo sapien
cagctggcgggccacgcttatctgc

SEQ ID NO: 4606396 - DNA, 25 bp, Homo sapien
ttaaacagacggctgcatgtcaggg

SEQ ID NO: 4606397 - DNA, 25 bp, Homo sapien
tgggttagaacagccgacacagctt

SEQ ID NO: 4606398 - DNA, 25 bp, Homo sapien
taatgggctgtggtacgtgtaccgc

SEQ ID NO: 4606399 - DNA, 25 bp, Homo sapien
gataaactgagacttgtgccgcgca

SEQ ID NO: 4606400 - DNA, 25 bp, Homo sapien
aaatcctgactatccaatggcctgc

SEQ ID NO: 4606401 - DNA, 25 bp, Homo sapien
ttaaaacatctcattgctgcttcca

SEQ ID NO: 4606402 - DNA, 25 bp, Homo sapien
gatggtgattttgaaacatctcgtt

SEQ ID NO: 4606403 - DNA, 25 bp, Homo sapien
taatgttcttgatagatggctttgt

SEQ ID NO: 4606404 - DNA, 25 bp, Homo sapien
tagacaaactagagtgagatggtga

SEQ ID NO: 4606405 - DNA, 25 bp, Homo sapien
tgtgcaggacaagatcagctgctgt

SEQ ID NO: 4606406 - DNA, 25 bp, Homo sapien
taaagtccaagtgtggcctaggatg

SEQ ID NO: 4606407 - DNA, 25 bp, Homo sapien
tcaagagacatattaggagtgggca

SEQ ID NO: 4606408 - DNA, 25 bp, Homo sapien
gagacacgagacacatggcgtttct

SEQ ID NO: 4606409 - DNA, 25 bp, Homo sapien
ccctgaagaggcgagagtatagata

SEQ ID NO: 4606410 - DNA, 25 bp, Homo sapien
tatctcaccataagcctagcacaga

SEQ ID NO: 4606411 - DNA, 25 bp, Homo sapien
gatagagtccctctgtggcaaagac

SEQ ID NO: 4606412 - DNA, 25 bp, Homo sapien
taacaagtaaagagagtctatccct

SEQ ID NO: 4606413 - DNA, 25 bp, Homo sapien
gggaatttcaccagcgagaggaaca

SEQ ID NO: 4606414 - DNA, 25 bp, Homo sapien
caacagaaatagacttgatgacccc

SEQ ID NO: 4606415 - DNA, 25 bp, Homo sapien
gcaacaaacgcaaacagatagggaa

SEQ ID NO: 4606416 - DNA, 25 bp, Homo sapien
tagttggaaccattagacagagatt

SEQ ID NO: 4606417 - DNA, 25 bp, Homo sapien
taaccctaaggatagctaatgagct

SEQ ID NO: 4606418 - DNA, 25 bp, Homo sapien
aatatgcaggtccttgtaactggag

SEQ ID NO: 4606419 - DNA, 25 bp, Homo sapien
tgtgagagcagacaaaaattcgggt

SEQ ID NO: 4606420 - DNA, 25 bp, Homo sapien
gaaaaggtcaggtgcaagtcagtat

SEQ ID NO: 4606421 - DNA, 25 bp, Homo sapien
gtgagcgacgcagaagatgggtgat

SEQ ID NO: 4606422 - DNA, 25 bp, Homo sapien
ttctgcatttccatctgaggtaccg

SEQ ID NO: 4606423 - DNA, 25 bp, Homo sapien
gaggagccaagatgtccgaatagga

SEQ ID NO: 4606424 - DNA, 25 bp, Homo sapien
acagctctggtctacagctcccagc

SEQ ID NO: 4606425 - DNA, 25 bp, Homo sapien
tgaaggccagaaggacgtgtcataa

SEQ ID NO: 4606426 - DNA, 25 bp, Homo sapien
aaaactattcaaatgacagcatatt

SEQ ID NO: 4606427 - DNA, 25 bp, Homo sapien
gaaggacgtgtcataagacttttca

SEQ ID NO: 4606428 - DNA, 25 bp, Homo sapien
ggccagaaggacgtgtcataagact

SEQ ID NO: 4606429 - DNA, 25 bp, Homo sapien
aatattttgggcatcgcttagctgg

SEQ ID NO: 4606430 - DNA, 25 bp, Homo sapien
tgaataagcagttcctatcagacca

SEQ ID NO: 4606431 - DNA, 25 bp, Homo sapien
cagggtgatgtcaatgaagtccaac

SEQ ID NO: 4606432 - DNA, 25 bp, Homo sapien
ggttagggacgctcatctgcaacaa

SEQ ID NO: 4606433 - DNA, 25 bp, Homo sapien
tggctttcttcccttagcaccgtgt

SEQ ID NO: 4606434 - DNA, 25 bp, Homo sapien
tcaccttatggtgtgtatcagtact

SEQ ID NO: 4606435 - DNA, 25 bp, Homo sapien
gatacccatgccacaatgaaccaag

SEQ ID NO: 4606436 - DNA, 25 bp, Homo sapien
tagacagataggctctccaaaggag

SEQ ID NO: 4606437 - DNA, 25 bp, Homo sapien
tcacagtgtcgatgaagagtccaac

SEQ ID NO: 4606438 - DNA, 25 bp, Homo sapien
ggtgtatacctagaagattccccaa

SEQ ID NO: 4606439 - DNA, 25 bp, Homo sapien
taagtgaccccattttggtgctgac

SEQ ID NO: 4606440 - DNA, 25 bp, Homo sapien
tcctgggcagctacatcactttaca

SEQ ID NO: 4606441 - DNA, 25 bp, Homo sapien
attccgtagctgatgatatatgccc

SEQ ID NO: 4606442 - DNA, 25 bp, Homo sapien
tgcatcaggtacagctcattttcca

SEQ ID NO: 4606443 - DNA, 25 bp, Homo sapien
cagaaatcagatcaacatggtgtta

SEQ ID NO: 4606444 - DNA, 25 bp, Homo sapien
catggtgttacagacaaatatttac

SEQ ID NO: 4606445 - DNA, 25 bp, Homo sapien
tgcaattttattaatttttcagtac

SEQ ID NO: 4606446 - DNA, 25 bp, Homo sapien
tactcttaccttttatatactacta

SEQ ID NO: 4606447 - DNA, 25 bp, Homo sapien
tcttaccttttatatactactaaga

SEQ ID NO: 4606448 - DNA, 25 bp, Homo sapien
tttcagtactcttaccttttatata

SEQ ID NO: 4606449 - DNA, 25 bp, Homo sapien
catcaactcctacggacaaaagggc

SEQ ID NO: 4606450 - DNA, 25 bp, Homo sapien
cacatgactgaagctgagcctaata

SEQ ID NO: 4606451 - DNA, 25 bp, Homo sapien
aattccagattagcatagttcagcg

SEQ ID NO: 4606452 - DNA, 25 bp, Homo sapien
tcaaggcagactacatttgggctgg

SEQ ID NO: 4606453 - DNA, 25 bp, Homo sapien
tggcccaggtagaaacggtctgctc

SEQ ID NO: 4606454 - DNA, 25 bp, Homo sapien
gccatctgctggtccaacatagcca

SEQ ID NO: 4606455 - DNA, 25 bp, Homo sapien
tctatcagcgtccatattcccaggc

SEQ ID NO: 4606456 - DNA, 25 bp, Homo sapien
aacatagccaactccaatgagcagg

SEQ ID NO: 4606457 - DNA, 25 bp, Homo sapien
gtccaattgcaatatagcattttgg

SEQ ID NO: 4606458 - DNA, 25 bp, Homo sapien
cttagagccagagccgtagaccact

SEQ ID NO: 4606459 - DNA, 25 bp, Homo sapien
acttatagcctccagtccaattgca

SEQ ID NO: 4606460 - DNA, 25 bp, Homo sapien
ccagagccgtagaccacttatagcc

SEQ ID NO: 4606461 - DNA, 25 bp, Homo sapien
tcaggaacagttacatagcgcgggt

SEQ ID NO: 4606462 - DNA, 25 bp, Homo sapien
agaggtcacacacggatcaacaggg

SEQ ID NO: 4606463 - DNA, 25 bp, Homo sapien
gtcacaacagcggaaaacagcactt

SEQ ID NO: 4606464 - DNA, 25 bp, Homo sapien
tgacacacgctggaaagtacatgct

SEQ ID NO: 4606465 - DNA, 25 bp, Homo sapien
aactgcaattttctggatgctttac

SEQ ID NO: 4606466 - DNA, 25 bp, Homo sapien
tgcttggcacatctaaagagctgct

SEQ ID NO: 4606467 - DNA, 25 bp, Homo sapien
ttgactcgcaaatttctggttaaag

SEQ ID NO: 4606468 - DNA, 25 bp, Homo sapien
ggatgctttactttagtacgttgag

SEQ ID NO: 4606469 - DNA, 25 bp, Homo sapien
cagcaaaatctgcaagtcatgttaa

SEQ ID NO: 4606470 - DNA, 25 bp, Homo sapien
tcccgcaccgtgcagttggcagggt

SEQ ID NO: 4606471 - DNA, 25 bp, Homo sapien
gacaggacaccgtcatgcagctggt

SEQ ID NO: 4606472 - DNA, 25 bp, Homo sapien
ggtacactcgtaatctgtttcagga

SEQ ID NO: 4606473 - DNA, 25 bp, Homo sapien
atttttgcagaagagccatcctaat

SEQ ID NO: 4606474 - DNA, 25 bp, Homo sapien
tggcatatgcgctgatgaagcaagt

SEQ ID NO: 4606475 - DNA, 25 bp, Homo sapien
gcatatgcgctgatgaagcaagtac

SEQ ID NO: 4606476 - DNA, 25 bp, Homo sapien
gcagaagagccatcctaattctctc

SEQ ID NO: 4606477 - DNA, 25 bp, Homo sapien
cagtctatacagtctgcaggaagcc

SEQ ID NO: 4606478 - DNA, 25 bp, Homo sapien
caggcttcccataggtacaggagaa

SEQ ID NO: 4606479 - DNA, 25 bp, Homo sapien
ggacacttcatcacataaggtggga

SEQ ID NO: 4606480 - DNA, 25 bp, Homo sapien
gcaggaagcctgctacacaaaccat

SEQ ID NO: 4606481 - DNA, 25 bp, Homo sapien
aatgaagccactgacatcctcaggg

SEQ ID NO: 4606482 - DNA, 25 bp, Homo sapien
cgtggccgtgaaaactaaaggtgct

SEQ ID NO: 4606483 - DNA, 25 bp, Homo sapien
cattagcaagtagacactgcactgg

SEQ ID NO: 4606484 - DNA, 25 bp, Homo sapien
ggtgagcaccacacttgtaaaacat

SEQ ID NO: 4606485 - DNA, 25 bp, Homo sapien
caaccccaccgctttaaagatgagg

SEQ ID NO: 4606486 - DNA, 25 bp, Homo sapien
gaccaaggtccaaagaggataaata

SEQ ID NO: 4606487 - DNA, 25 bp, Homo sapien
taatttgttcaagatcccagtagca

SEQ ID NO: 4606488 - DNA, 25 bp, Homo sapien
gaaatgactttaggtcgtcagacca

SEQ ID NO: 4606489 - DNA, 25 bp, Homo sapien
gaggcagaaacgtcaaaaggtataa

SEQ ID NO: 4606490 - DNA, 25 bp, Homo sapien
tacgaagactatctactgaaaatgg

SEQ ID NO: 4606491 - DNA, 25 bp, Homo sapien
ctgaaaatggctgtgtatctaccct

SEQ ID NO: 4606492 - DNA, 25 bp, Homo sapien
gaaagaagcacggactgaaggttat

SEQ ID NO: 4606493 - DNA, 25 bp, Homo sapien
ctgccctgggaactactgtgaatgt

SEQ ID NO: 4606494 - DNA, 25 bp, Homo sapien
gcccggatcctttattgactgagcc

SEQ ID NO: 4606495 - DNA, 25 bp, Homo sapien
cctgggaactactgtgaatgtgcgt

SEQ ID NO: 4606496 - DNA, 25 bp, Homo sapien
aatgtgcgtgttgggcccggatcct

SEQ ID NO: 4606497 - DNA, 25 bp, Homo sapien
taaggatcgtacaattagagaaaca

SEQ ID NO: 4606498 - DNA, 25 bp, Homo sapien
tagagaaacacgttatcccgggaca

SEQ ID NO: 4606499 - DNA, 25 bp, Homo sapien
caattagagaaacacgttatcccgg

SEQ ID NO: 4606500 - DNA, 25 bp, Homo sapien
tttaaggatcgtacaattagagaaa

SEQ ID NO: 4606501 - DNA, 25 bp, Homo sapien
gggtctacaccaggccaataagctg

SEQ ID NO: 4606502 - DNA, 25 bp, Homo sapien
taagctgctcatgaaaacctcacgg

SEQ ID NO: 4606503 - DNA, 25 bp, Homo sapien
atcagttcaggtcagccggcaacga

SEQ ID NO: 4606504 - DNA, 25 bp, Homo sapien
caacgagggaccgaaggatgacatc

SEQ ID NO: 4606505 - DNA, 25 bp, Homo sapien
atgcagaactgcgagaggaagagca

SEQ ID NO: 4606506 - DNA, 25 bp, Homo sapien
aggaagagcagcacgcgacacaagg

SEQ ID NO: 4606507 - DNA, 25 bp, Homo sapien
caccgcccgacagaatgcagaactg

SEQ ID NO: 4606508 - DNA, 25 bp, Homo sapien
agcagcacgcgacacaaggcgcgga

SEQ ID NO: 4606509 - DNA, 25 bp, Homo sapien
ttcttccggttgagccttctgggag

SEQ ID NO: 4606510 - DNA, 25 bp, Homo sapien
gctttcgctgtcctcgcgcgggtcg

SEQ ID NO: 4606511 - DNA, 25 bp, Homo sapien
gaggttgttccatttccacgcgccc

SEQ ID NO: 4606512 - DNA, 25 bp, Homo sapien
ggttccactgcaggagacctgttaa

SEQ ID NO: 4606513 - DNA, 25 bp, Homo sapien
tgttgtgtgctggatctcgtgcgaa

SEQ ID NO: 4606514 - DNA, 25 bp, Homo sapien
tcggatgttgtgtgctggatctcgt

SEQ ID NO: 4606515 - DNA, 25 bp, Homo sapien
gctggatctcgtgcgaaggttccga

SEQ ID NO: 4606516 - DNA, 25 bp, Homo sapien
tctcgtgcgaaggttccgaggacac

SEQ ID NO: 4606517 - DNA, 25 bp, Homo sapien
caggcctgccgcggctttcacttct

SEQ ID NO: 4606518 - DNA, 25 bp, Homo sapien
ctcaggcctgccgcggctttcactt

SEQ ID NO: 4606519 - DNA, 25 bp, Homo sapien
cgctcaggcctgccgcggctttcac

SEQ ID NO: 4606520 - DNA, 25 bp, Homo sapien
ggcctgccgcggctttcacttctgg

SEQ ID NO: 4606521 - DNA, 25 bp, Homo sapien
cagttctgagcacgtagagcattcc

SEQ ID NO: 4606522 - DNA, 25 bp, Homo sapien
cataaatccatggaatgtcatccca

SEQ ID NO: 4606523 - DNA, 25 bp, Homo sapien
gaagcccacagctgaaacgctggaa

SEQ ID NO: 4606524 - DNA, 25 bp, Homo sapien
aaagtaacaactctaggtgagcggc

SEQ ID NO: 4606525 - DNA, 25 bp, Homo sapien
aatggcaactcttaacctatagtgc

SEQ ID NO: 4606526 - DNA, 25 bp, Homo sapien
actgaattcctttgtcagtaatcca

SEQ ID NO: 4606527 - DNA, 25 bp, Homo sapien
ctttgtcagtaatccaatatttagc

SEQ ID NO: 4606528 - DNA, 25 bp, Homo sapien
ttaacctatagtgcaaacaccagat

SEQ ID NO: 4606529 - DNA, 25 bp, Homo sapien
taagtttctcaaggcattgattgct

SEQ ID NO: 4606530 - DNA, 25 bp, Homo sapien
catgagtggacccatcagtggctcc

SEQ ID NO: 4606531 - DNA, 25 bp, Homo sapien
tgcatgtcagctacacgttcatcgt

SEQ ID NO: 4606532 - DNA, 25 bp, Homo sapien
cccgtggacatgagtaaattaaact

SEQ ID NO: 4606533 - DNA, 25 bp, Homo sapien
gagtgtccgtgtcttcctgagattc

SEQ ID NO: 4606534 - DNA, 25 bp, Homo sapien
caatggcagaagttactaaaatctc

SEQ ID NO: 4606535 - DNA, 25 bp, Homo sapien
tcaaaaggcctcctcagcattgagt

SEQ ID NO: 4606536 - DNA, 25 bp, Homo sapien
tgttgtctcttgttcgcacgtttac

SEQ ID NO: 4606537 - DNA, 25 bp, Homo sapien
tctattgtccacctgagagaacagc

SEQ ID NO: 4606538 - DNA, 25 bp, Homo sapien
tctctattgtccacctgagagaaca

SEQ ID NO: 4606539 - DNA, 25 bp, Homo sapien
ctctattgtccacctgagagaacag

SEQ ID NO: 4606540 - DNA, 25 bp, Homo sapien
ctattgtccacctgagagaacagct

SEQ ID NO: 4606541 - DNA, 25 bp, Homo sapien
tcatgtcatgggatactccaagacc

SEQ ID NO: 4606542 - DNA, 25 bp, Homo sapien
aaccaagttgagatttctgccacca

SEQ ID NO: 4606543 - DNA, 25 bp, Homo sapien
gcctgactgaaacagcacaatacct

SEQ ID NO: 4606544 - DNA, 25 bp, Homo sapien
tctgccaccataagaagcctgactg

SEQ ID NO: 4606545 - DNA, 25 bp, Homo sapien
caagtcaacgtcagccataaatcct

SEQ ID NO: 4606546 - DNA, 25 bp, Homo sapien
aactgtgatccaagtcaacgtcagc

SEQ ID NO: 4606547 - DNA, 25 bp, Homo sapien
tgagccagctgtgcatttcgtattt

SEQ ID NO: 4606548 - DNA, 25 bp, Homo sapien
gccagctgtgcatttcgtattttct

SEQ ID NO: 4606549 - DNA, 25 bp, Homo sapien
tgctcactataccagagcgggtctg

SEQ ID NO: 4606550 - DNA, 25 bp, Homo sapien
tcggcgcatcgtttctgagactagt

SEQ ID NO: 4606551 - DNA, 25 bp, Homo sapien
gaccctgactcgtaggaactgtgag

SEQ ID NO: 4606552 - DNA, 25 bp, Homo sapien
tctgcgtgaccataaagaagtgcgg

SEQ ID NO: 4606553 - DNA, 25 bp, Homo sapien
gatgaccatcacctgacgaggagat

SEQ ID NO: 4606554 - DNA, 25 bp, Homo sapien
ctgacgaggagatagccagaaaggc

SEQ ID NO: 4606555 - DNA, 25 bp, Homo sapien
ttttcacaagttggccccacaggga

SEQ ID NO: 4606556 - DNA, 25 bp, Homo sapien
tatttttcacaagttggccccacag

SEQ ID NO: 4606557 - DNA, 25 bp, Homo sapien
tctggatgtatgaagtgcagggagt

SEQ ID NO: 4606558 - DNA, 25 bp, Homo sapien
tcctctcaaggacccacactttagc

SEQ ID NO: 4606559 - DNA, 25 bp, Homo sapien
ctttacttttggctcctggggagat

SEQ ID NO: 4606560 - DNA, 25 bp, Homo sapien
ggagatttccccacaaggctgactg

SEQ ID NO: 4606561 - DNA, 25 bp, Homo sapien
gaaagaatggctatcattctttcca

SEQ ID NO: 4606562 - DNA, 25 bp, Homo sapien
aaatggctcgatgaatgatcacagg

SEQ ID NO: 4606563 - DNA, 25 bp, Homo sapien
atcccaaaatggctcgatgaatgat

SEQ ID NO: 4606564 - DNA, 25 bp, Homo sapien
ctcgatgaatgatcacaggtctctt

SEQ ID NO: 4606565 - DNA, 25 bp, Homo sapien
ggtgagcggcttgagtccattccta

SEQ ID NO: 4606566 - DNA, 25 bp, Homo sapien
gaagcaaactgatcctttcacagag

SEQ ID NO: 4606567 - DNA, 25 bp, Homo sapien
caaattccctgaaaccctcatgagg

SEQ ID NO: 4606568 - DNA, 25 bp, Homo sapien
tctgtctggaccctacaggaagctt

SEQ ID NO: 4606569 - DNA, 25 bp, Homo sapien
taaatttgaagagaataacttcaca

SEQ ID NO: 4606570 - DNA, 25 bp, Homo sapien
aagtgtggtacgaatcttcatttaa

SEQ ID NO: 4606571 - DNA, 25 bp, Homo sapien
ttccaaagtgtggtacgaatcttca

SEQ ID NO: 4606572 - DNA, 25 bp, Homo sapien
caaagtgtggtacgaatcttcattt

SEQ ID NO: 4606573 - DNA, 25 bp, Homo sapien
taggctatcccatacagcttaagtg

SEQ ID NO: 4606574 - DNA, 25 bp, Homo sapien
tggtcccacgagattataaagaagc

SEQ ID NO: 4606575 - DNA, 25 bp, Homo sapien
tgttacaagtacctagagcattcag

SEQ ID NO: 4606576 - DNA, 25 bp, Homo sapien
gcttaagtgtgtagtggcctatgcc

SEQ ID NO: 4606577 - DNA, 25 bp, Homo sapien
gagattagacttttcggagtcctac

SEQ ID NO: 4606578 - DNA, 25 bp, Homo sapien
ctgatggccctaagcaattttgttg

SEQ ID NO: 4606579 - DNA, 25 bp, Homo sapien
tgctcctccaaaacggagagattag

SEQ ID NO: 4606580 - DNA, 25 bp, Homo sapien
taatagttctgacccttgctcctcc

SEQ ID NO: 4606581 - DNA, 25 bp, Homo sapien
acaagttgatagaactcgggagccc

SEQ ID NO: 4606582 - DNA, 25 bp, Homo sapien
ttgggaagcgttaacatttatgcac

SEQ ID NO: 4606583 - DNA, 25 bp, Homo sapien
gaattcatttcgagatcctcactga

SEQ ID NO: 4606584 - DNA, 25 bp, Homo sapien
tcgggagcccctccaataaatgcaa

SEQ ID NO: 4606585 - DNA, 25 bp, Homo sapien
tctggaactctttacacattgcagg

SEQ ID NO: 4606586 - DNA, 25 bp, Homo sapien
tacagaccagggtaaaatatgtgca

SEQ ID NO: 4606587 - DNA, 25 bp, Homo sapien
gaaaatcttcatggcctgtacttag

SEQ ID NO: 4606588 - DNA, 25 bp, Homo sapien
tcatatattcctccaagggctagta

SEQ ID NO: 4606589 - DNA, 25 bp, Homo sapien
ctggaaagggcaagactatggtgat

SEQ ID NO: 4606590 - DNA, 25 bp, Homo sapien
tggctccgtttacatgacattctgg

SEQ ID NO: 4606591 - DNA, 25 bp, Homo sapien
gcagcacaagagaacaacagaatca

SEQ ID NO: 4606592 - DNA, 25 bp, Homo sapien
gaaggctcgatactgcatggctccg

SEQ ID NO: 4606593 - DNA, 25 bp, Homo sapien
tctaataggcagttggaagtccagc

SEQ ID NO: 4606594 - DNA, 25 bp, Homo sapien
tgtagcacattgatggtatctgcca

SEQ ID NO: 4606595 - DNA, 25 bp, Homo sapien
ctaacatatgtgagattaaatctaa

SEQ ID NO: 4606596 - DNA, 25 bp, Homo sapien
ggaagtccagctgaattgtagcaca

SEQ ID NO: 4606597 - DNA, 25 bp, Homo sapien
ttagggccataaaatgctccatctc

SEQ ID NO: 4606598 - DNA, 25 bp, Homo sapien
tttagggccataaaatgctccatct

SEQ ID NO: 4606599 - DNA, 25 bp, Homo sapien
gggccataaaatgctccatctcctg

SEQ ID NO: 4606600 - DNA, 25 bp, Homo sapien
gcatgaggctccacttttgtcttca

SEQ ID NO: 4606601 - DNA, 25 bp, Homo sapien
cagagtcttccagtattcccgtgaa

SEQ ID NO: 4606602 - DNA, 25 bp, Homo sapien
aaagtactgccaaaacacgagccaa

SEQ ID NO: 4606603 - DNA, 25 bp, Homo sapien
gaattccaggtaagcattagggagg

SEQ ID NO: 4606604 - DNA, 25 bp, Homo sapien
tactgggcacttacacgtgcctggc

SEQ ID NO: 4606605 - DNA, 25 bp, Homo sapien
ccataccctcaggaagtgggtgtca

SEQ ID NO: 4606606 - DNA, 25 bp, Homo sapien
taatgacaacgataccaacacctga

SEQ ID NO: 4606607 - DNA, 25 bp, Homo sapien
ccaggccagggttagttattggaga

SEQ ID NO: 4606608 - DNA, 25 bp, Homo sapien
gttgacaggtttaattgaaaggaga

SEQ ID NO: 4606609 - DNA, 25 bp, Homo sapien
ctcattccacatctcaatctctcct

SEQ ID NO: 4606610 - DNA, 25 bp, Homo sapien
ccggccttgttgacaggtttaattg

SEQ ID NO: 4606611 - DNA, 25 bp, Homo sapien
ctgcaaacacccctttatttcttct

SEQ ID NO: 4606612 - DNA, 25 bp, Homo sapien
ctcttgcctcagcatcctgatagct

SEQ ID NO: 4606613 - DNA, 25 bp, Homo sapien
tgtgtgccaccacacccagctaatt

SEQ ID NO: 4606614 - DNA, 25 bp, Homo sapien
attctcttgcctcagcatcctgata

SEQ ID NO: 4606615 - DNA, 25 bp, Homo sapien
gggattacaggtgtgtgccaccaca

SEQ ID NO: 4606616 - DNA, 25 bp, Homo sapien
gcactaatcgtatcatgagggttcc

SEQ ID NO: 4606617 - DNA, 25 bp, Homo sapien
gccagctgattcagttccctggtga

SEQ ID NO: 4606618 - DNA, 25 bp, Homo sapien
caacatatttgtcagtcttatccca

SEQ ID NO: 4606619 - DNA, 25 bp, Homo sapien
ttcttcctagtttgccaacggctga

SEQ ID NO: 4606620 - DNA, 25 bp, Homo sapien
gagtccccgacagttcatttctatg

SEQ ID NO: 4606621 - DNA, 25 bp, Homo sapien
gatcgtggacgatgggcaaacatta

SEQ ID NO: 4606622 - DNA, 25 bp, Homo sapien
taataggcatttccctccaagatcg

SEQ ID NO: 4606623 - DNA, 25 bp, Homo sapien
tggaagcgcctcactctggtcaagc

SEQ ID NO: 4606624 - DNA, 25 bp, Homo sapien
catattgggagagagcacctccgtg

SEQ ID NO: 4606625 - DNA, 25 bp, Homo sapien
ccgtgaagtcccgtttgtgatattc

SEQ ID NO: 4606626 - DNA, 25 bp, Homo sapien
gagtttactgttgtacatattggga

SEQ ID NO: 4606627 - DNA, 25 bp, Homo sapien
gacaattcatgggtttgagggcaaa

SEQ ID NO: 4606628 - DNA, 25 bp, Homo sapien
agatacatgcattcaacattaaaat

SEQ ID NO: 4606629 - DNA, 25 bp, Homo sapien
caagatacatgcattcaacattaaa

SEQ ID NO: 4606630 - DNA, 25 bp, Homo sapien
tcaagatacatgcattcaacattaa

SEQ ID NO: 4606631 - DNA, 25 bp, Homo sapien
cttcaagatacatgcattcaacatt

SEQ ID NO: 4606632 - DNA, 25 bp, Homo sapien
cagaggatgggaatgacgcttcaac

SEQ ID NO: 4606633 - DNA, 25 bp, Homo sapien
catgggttttagagggaacacagcc

SEQ ID NO: 4606634 - DNA, 25 bp, Homo sapien
tgatgtatcagcttggccctagcgt

SEQ ID NO: 4606635 - DNA, 25 bp, Homo sapien
caaccaacagtagctaggagaaggc

SEQ ID NO: 4606636 - DNA, 25 bp, Homo sapien
tgtgtatgtacctgagctctctcct

SEQ ID NO: 4606637 - DNA, 25 bp, Homo sapien
catgttctgtattagatctctggcc

SEQ ID NO: 4606638 - DNA, 25 bp, Homo sapien
tctggccttgttgatcctagatatc

SEQ ID NO: 4606639 - DNA, 25 bp, Homo sapien
gcactcaggcgagaattacatctcc

SEQ ID NO: 4606640 - DNA, 25 bp, Homo sapien
tctccgcctggccccacccctgacc

SEQ ID NO: 4606641 - DNA, 25 bp, Homo sapien
acccccacgattcaattatctccgc

SEQ ID NO: 4606642 - DNA, 25 bp, Homo sapien
ctgacccttggggattactacaatt

SEQ ID NO: 4606643 - DNA, 25 bp, Homo sapien
cctgacccttggggattactacaat

SEQ ID NO: 4606644 - DNA, 25 bp, Homo sapien
tcaactcggatgcatctccagggtg

SEQ ID NO: 4606645 - DNA, 25 bp, Homo sapien
tgaaagcggtcagtctctaaaggtt

SEQ ID NO: 4606646 - DNA, 25 bp, Homo sapien
tcaactgcaggatggatctgaagca

SEQ ID NO: 4606647 - DNA, 25 bp, Homo sapien
caatagcagttttcataactgccaa

SEQ ID NO: 4606648 - DNA, 25 bp, Homo sapien
ggcgacaagggcaaaactccatctt

SEQ ID NO: 4606649 - DNA, 25 bp, Homo sapien
gcgacaagggcaaaactccatctta

SEQ ID NO: 4606650 - DNA, 25 bp, Homo sapien
caagggcaaaactccatcttaggaa

SEQ ID NO: 4606651 - DNA, 25 bp, Homo sapien
gacaagggcaaaactccatcttagg

SEQ ID NO: 4606652 - DNA, 25 bp, Homo sapien
cctaaggcacatatgggccatttct

SEQ ID NO: 4606653 - DNA, 25 bp, Homo sapien
tggtgactaccatgtgcctcctact

SEQ ID NO: 4606654 - DNA, 25 bp, Homo sapien
aactgcacccgaggagcctcatctg

SEQ ID NO: 4606655 - DNA, 25 bp, Homo sapien
gggcagtgatgaccggtagatacca

SEQ ID NO: 4606656 - DNA, 25 bp, Homo sapien
gagatcactgggtttgtgcatttaa

SEQ ID NO: 4606657 - DNA, 25 bp, Homo sapien
cttagaataagagatcactgggttt

SEQ ID NO: 4606658 - DNA, 25 bp, Homo sapien
ttacagtttggtgaccctcacaatc

SEQ ID NO: 4606659 - DNA, 25 bp, Homo sapien
tgtgcatttaagtgcctttacagtt

SEQ ID NO: 4606660 - DNA, 25 bp, Homo sapien
cagagaataaccagtgcaggccaca

SEQ ID NO: 4606661 - DNA, 25 bp, Homo sapien
gaagtcctaagccatcagtttgcaa

SEQ ID NO: 4606662 - DNA, 25 bp, Homo sapien
taccccaggtgatagaatacagaca

SEQ ID NO: 4606663 - DNA, 25 bp, Homo sapien
gcattggccagtccctactggaaga

SEQ ID NO: 4606664 - DNA, 25 bp, Homo sapien
ctgtaagcgtattataaatgaaggc

SEQ ID NO: 4606665 - DNA, 25 bp, Homo sapien
tccaggactcaaatcgtggaaaaag

SEQ ID NO: 4606666 - DNA, 25 bp, Homo sapien
tgaaatctgtaagcgtattataaat

SEQ ID NO: 4606667 - DNA, 25 bp, Homo sapien
caggactcaaatcgtggaaaaagaa

SEQ ID NO: 4606668 - DNA, 25 bp, Homo sapien
aatgtttccatttccggattgccct

SEQ ID NO: 4606669 - DNA, 25 bp, Homo sapien
ggattgccctcccaatatgttgagg

SEQ ID NO: 4606670 - DNA, 25 bp, Homo sapien
cctgtgatctcggttctttgcttcc

SEQ ID NO: 4606671 - DNA, 25 bp, Homo sapien
catcatcttgttatcaggaaaggat

SEQ ID NO: 4606672 - DNA, 25 bp, Homo sapien
ctttgcaaaggtcaattaatggacc

SEQ ID NO: 4606673 - DNA, 25 bp, Homo sapien
gcaaaggtcaattaatggaccgcac

SEQ ID NO: 4606674 - DNA, 25 bp, Homo sapien
tttttccagtgtgtcttacatgtgg

SEQ ID NO: 4606675 - DNA, 25 bp, Homo sapien
tcttacatgtggacctttgcaaagg

SEQ ID NO: 4606676 - DNA, 25 bp, Homo sapien
agagtggcaaacacgaaaatgtcat

SEQ ID NO: 4606677 - DNA, 25 bp, Homo sapien
tgtacacggtggtagttgcagtgtt

SEQ ID NO: 4606678 - DNA, 25 bp, Homo sapien
cacggtggtagttgcagtgttaact

SEQ ID NO: 4606679 - DNA, 25 bp, Homo sapien
tacacggtggtagttgcagtgttaa

SEQ ID NO: 4606680 - DNA, 25 bp, Homo sapien
ctgtacacggtggtagttgcagtgt

SEQ ID NO: 4606681 - DNA, 25 bp, Homo sapien
cattcagaatgcggcatttaaattt

SEQ ID NO: 4606682 - DNA, 25 bp, Homo sapien
cagaatgcggcatttaaatttattg

SEQ ID NO: 4606683 - DNA, 25 bp, Homo sapien
ctcattcagaatgcggcatttaaat

SEQ ID NO: 4606684 - DNA, 25 bp, Homo sapien
ttcagaatgcggcatttaaatttat

SEQ ID NO: 4606685 - DNA, 25 bp, Homo sapien
tcattctttatactggctaccattg

SEQ ID NO: 4606686 - DNA, 25 bp, Homo sapien
aacacactggactttggaagtataa

SEQ ID NO: 4606687 - DNA, 25 bp, Homo sapien
ggacagtactgttctagaagatcta

SEQ ID NO: 4606688 - DNA, 25 bp, Homo sapien
tagctcagactagtggattccatta

SEQ ID NO: 4606689 - DNA, 25 bp, Homo sapien
gctttacatatattctccagggctg

SEQ ID NO: 4606690 - DNA, 25 bp, Homo sapien
tgacaattctgtgctggacactgct

SEQ ID NO: 4606691 - DNA, 25 bp, Homo sapien
gacttctagtctttcaaaaggttgc

SEQ ID NO: 4606692 - DNA, 25 bp, Homo sapien
tccaggaggatttccttgctgactt

SEQ ID NO: 4606693 - DNA, 25 bp, Homo sapien
attttcaatgggcggaccgtagcac

SEQ ID NO: 4606694 - DNA, 25 bp, Homo sapien
cctccccaagaatgtgagcactgga

SEQ ID NO: 4606695 - DNA, 25 bp, Homo sapien
tcaatgggcggaccgtagcacaggt

SEQ ID NO: 4606696 - DNA, 25 bp, Homo sapien
ggcctccccaagaatgtgagcactg

SEQ ID NO: 4606697 - DNA, 25 bp, Homo sapien
caatatgtggcctcttatataatgt

SEQ ID NO: 4606698 - DNA, 25 bp, Homo sapien
ctcttatataatgtagtttacaaca

SEQ ID NO: 4606699 - DNA, 25 bp, Homo sapien
tcaacattcgtgacttcaatatgtg

SEQ ID NO: 4606700 - DNA, 25 bp, Homo sapien
aactacccaaagtttggctgtctgg

SEQ ID NO: 4606701 - DNA, 25 bp, Homo sapien
ggtccaggtcccacagttcaccatt

SEQ ID NO: 4606702 - DNA, 25 bp, Homo sapien
tcaccattgactttggctattaccg

SEQ ID NO: 4606703 - DNA, 25 bp, Homo sapien
cacagttcaccattgactttggcta

SEQ ID NO: 4606704 - DNA, 25 bp, Homo sapien
ttggctattaccgtgctttcagcca

SEQ ID NO: 4606705 - DNA, 25 bp, Homo sapien
gaggccaacctgagtttaaatactg

SEQ ID NO: 4606706 - DNA, 25 bp, Homo sapien
atttactcagcttctttaggcctca

SEQ ID NO: 4606707 - DNA, 25 bp, Homo sapien
ctacaaaatagggattataggacct

SEQ ID NO: 4606708 - DNA, 25 bp, Homo sapien
tgattaacttgagcagcagtactgc

SEQ ID NO: 4606709 - DNA, 25 bp, Homo sapien
tttcgcaaaccgattctgcccttct

SEQ ID NO: 4606710 - DNA, 25 bp, Homo sapien
tagatggctagtgtttcgcaaaccg

SEQ ID NO: 4606711 - DNA, 25 bp, Homo sapien
tgtcatagatggctagtgtttcgca

SEQ ID NO: 4606712 - DNA, 25 bp, Homo sapien
catttttactggctgtcatagatgg

SEQ ID NO: 4606713 - DNA, 25 bp, Homo sapien
taacctttgtgatagtatatcaaaa

SEQ ID NO: 4606714 - DNA, 25 bp, Homo sapien
tgtgtcacagtgcttgtagcacaca

SEQ ID NO: 4606715 - DNA, 25 bp, Homo sapien
ctggcagtgagtaacaaggaaacag

SEQ ID NO: 4606716 - DNA, 25 bp, Homo sapien
gattctaacatatggagagccaata

SEQ ID NO: 4606717 - DNA, 25 bp, Homo sapien
cctctgcccgtgtcctgtaattcaa

SEQ ID NO: 4606718 - DNA, 25 bp, Homo sapien
agatgggaaagacaatcttctttcc

SEQ ID NO: 4606719 - DNA, 25 bp, Homo sapien
cagaaacgtggagctatgcaagatg

SEQ ID NO: 4606720 - DNA, 25 bp, Homo sapien
gtaattcaactgactaaaagttcag

SEQ ID NO: 4606721 - DNA, 25 bp, Homo sapien
tctagaaaagtcaaagcacttttcc

SEQ ID NO: 4606722 - DNA, 25 bp, Homo sapien
tatttacatggcattaatacaattg

SEQ ID NO: 4606723 - DNA, 25 bp, Homo sapien
gcacttttccaagactgataatagc

SEQ ID NO: 4606724 - DNA, 25 bp, Homo sapien
tatacaatagcttctatacaattgt

SEQ ID NO: 4606725 - DNA, 25 bp, Homo sapien
gttctttgatagtgagtgcattctc

SEQ ID NO: 4606726 - DNA, 25 bp, Homo sapien
gagtaatatattagcggtccctaag

SEQ ID NO: 4606727 - DNA, 25 bp, Homo sapien
tacttatttacatggcccttggaga

SEQ ID NO: 4606728 - DNA, 25 bp, Homo sapien
aaaacattttcaccaggcttcagta

SEQ ID NO: 4606729 - DNA, 25 bp, Homo sapien
tgtttgcccatcagccactcttact

SEQ ID NO: 4606730 - DNA, 25 bp, Homo sapien
ggcaagtaagagctgatggtctttc

SEQ ID NO: 4606731 - DNA, 25 bp, Homo sapien
gcagccacttggtaaggcgttgttt

SEQ ID NO: 4606732 - DNA, 25 bp, Homo sapien
cttcagtatttcaaaaagcttcaat

SEQ ID NO: 4606733 - DNA, 25 bp, Homo sapien
tccttgtcttggctttgactaggag

SEQ ID NO: 4606734 - DNA, 25 bp, Homo sapien
ttgtcttggctttgactaggaggag

SEQ ID NO: 4606735 - DNA, 25 bp, Homo sapien
tttttcatgtccttgtcttggcttt

SEQ ID NO: 4606736 - DNA, 25 bp, Homo sapien
gctgtcagcctcgctttccttcatt

SEQ ID NO: 4606737 - DNA, 25 bp, Homo sapien
ggctccgctcctcggcgaggcacag

SEQ ID NO: 4606738 - DNA, 25 bp, Homo sapien
ccgcgctctccagcgtggcctggcg

SEQ ID NO: 4606739 - DNA, 25 bp, Homo sapien
tggcctggcggctccgctcctcggc

SEQ ID NO: 4606740 - DNA, 25 bp, Homo sapien
ctcctgcgccgcctctagctccgcg

SEQ ID NO: 4606741 - DNA, 25 bp, Homo sapien
gcggtggcgcaggtcgcagttctcg

SEQ ID NO: 4606742 - DNA, 25 bp, Homo sapien
aggtcgcagttctcggcccggagct

SEQ ID NO: 4606743 - DNA, 25 bp, Homo sapien
acctcccgcgtgaggcacggcccct

SEQ ID NO: 4606744 - DNA, 25 bp, Homo sapien
gcctggcagctgtagggcgcgttca

SEQ ID NO: 4606745 - DNA, 25 bp, Homo sapien
cgacgccacggcctccgccgccagg

SEQ ID NO: 4606746 - DNA, 25 bp, Homo sapien
cgctccaggcgcgacgccacggcct

SEQ ID NO: 4606747 - DNA, 25 bp, Homo sapien
tccgaccacagccagcggatgtcct

SEQ ID NO: 4606748 - DNA, 25 bp, Homo sapien
cgaccacagccagcggatgtcctcc

SEQ ID NO: 4606749 - DNA, 25 bp, Homo sapien
tcaggcaccgacgccgagcggggtg

SEQ ID NO: 4606750 - DNA, 25 bp, Homo sapien
ctcaggcaccgacgccgagcggggt

SEQ ID NO: 4606751 - DNA, 25 bp, Homo sapien
cctcaggcaccgacgccgagcgggg

SEQ ID NO: 4606752 - DNA, 25 bp, Homo sapien
aggcaccgacgccgagcggggtgcc

SEQ ID NO: 4606753 - DNA, 25 bp, Homo sapien
tagcattcaggaaaaggagatcttg

SEQ ID NO: 4606754 - DNA, 25 bp, Homo sapien
gcagacttacagacccttgaaagaa

SEQ ID NO: 4606755 - DNA, 25 bp, Homo sapien
gcactagttctggtgtgactctacc

SEQ ID NO: 4606756 - DNA, 25 bp, Homo sapien
gagtccacaaaacatattggtgaga

SEQ ID NO: 4606757 - DNA, 25 bp, Homo sapien
gactgtacaatgagcccttccagaa

SEQ ID NO: 4606758 - DNA, 25 bp, Homo sapien
tgactgtacaatgagcccttccaga

SEQ ID NO: 4606759 - DNA, 25 bp, Homo sapien
cttgtaactacttaaacatattgct

SEQ ID NO: 4606760 - DNA, 25 bp, Homo sapien
cttacagtgacaggctgcaaacgat

SEQ ID NO: 4606761 - DNA, 25 bp, Homo sapien
tgcaaacgatagaaattcaacccaa

SEQ ID NO: 4606762 - DNA, 25 bp, Homo sapien
catcttgcgtgatcatgtttgtgcc

SEQ ID NO: 4606763 - DNA, 25 bp, Homo sapien
aaaagggcaacagcggccgggcgcg

SEQ ID NO: 4606764 - DNA, 25 bp, Homo sapien
ccaccgataggaggggcggctcctg

SEQ ID NO: 4606765 - DNA, 25 bp, Homo sapien
gggcggctcctgtcaagcctcagct

SEQ ID NO: 4606766 - DNA, 25 bp, Homo sapien
ttgcgaccgacgccaccgataggag

SEQ ID NO: 4606767 - DNA, 25 bp, Homo sapien
gcggtgcgacgagatgctgcttctc

SEQ ID NO: 4606768 - DNA, 25 bp, Homo sapien
cacagcggtgcgacgagatgctgct

SEQ ID NO: 4606769 - DNA, 25 bp, Homo sapien
acctgtactcgcgtcggaacctgca

SEQ ID NO: 4606770 - DNA, 25 bp, Homo sapien
cgcgtcggaacctgcagacacttgt

SEQ ID NO: 4606771 - DNA, 25 bp, Homo sapien
gcggtgcgacgagatgctgcttctc

SEQ ID NO: 4606772 - DNA, 25 bp, Homo sapien
cacagcggtgcgacgagatgctgct

SEQ ID NO: 4606773 - DNA, 25 bp, Homo sapien
acctgtactcgcgtcggaacctgca

SEQ ID NO: 4606774 - DNA, 25 bp, Homo sapien
cgcgtcggaacctgcagacacttgt

SEQ ID NO: 4606775 - DNA, 25 bp, Homo sapien
aaagaatggcatacgggagttgctg

SEQ ID NO: 4606776 - DNA, 25 bp, Homo sapien
gcatacgggagttgctgcacaagcc

SEQ ID NO: 4606777 - DNA, 25 bp, Homo sapien
atacgggagttgctgcacaagcctg

SEQ ID NO: 4606778 - DNA, 25 bp, Homo sapien
aatggcatacgggagttgctgcaca

SEQ ID NO: 4606779 - DNA, 25 bp, Homo sapien
tgctgtgtccctcgttgtagtcacc

SEQ ID NO: 4606780 - DNA, 25 bp, Homo sapien
tgtgtccctcgttgtagtcaccaca

SEQ ID NO: 4606781 - DNA, 25 bp, Homo sapien
ctgtgtccctcgttgtagtcaccac

SEQ ID NO: 4606782 - DNA, 25 bp, Homo sapien
gctgtgtccctcgttgtagtcacca

SEQ ID NO: 4606783 - DNA, 25 bp, Homo sapien
agttgccgcatctttggtactgccc

SEQ ID NO: 4606784 - DNA, 25 bp, Homo sapien
ttccttgtcctggaccagcctgatg

SEQ ID NO: 4606785 - DNA, 25 bp, Homo sapien
tcttccttgtcctggaccagcctga

SEQ ID NO: 4606786 - DNA, 25 bp, Homo sapien
tgtcctcctccagttgccgcatctt

SEQ ID NO: 4606787 - DNA, 25 bp, Homo sapien
tttccagtactggatgaatcaaagt

SEQ ID NO: 4606788 - DNA, 25 bp, Homo sapien
ggcttctgtctttccagtactggat

SEQ ID NO: 4606789 - DNA, 25 bp, Homo sapien
cagtactggatgaatcaaagttcta

SEQ ID NO: 4606790 - DNA, 25 bp, Homo sapien
tgtctttccagtactggatgaatca

SEQ ID NO: 4606791 - DNA, 25 bp, Homo sapien
ttctcctccaggaggtccataaggc

SEQ ID NO: 4606792 - DNA, 25 bp, Homo sapien
tcgctccctcaggtccgccttctcc

SEQ ID NO: 4606793 - DNA, 25 bp, Homo sapien
tcctccaggaggtccataaggccac

SEQ ID NO: 4606794 - DNA, 25 bp, Homo sapien
cctccaggaggtccataaggccact

SEQ ID NO: 4606795 - DNA, 25 bp, Homo sapien
aataatgggttcacatctcggcagt

SEQ ID NO: 4606796 - DNA, 25 bp, Homo sapien
gggttcacatctcggcagtgacctg

SEQ ID NO: 4606797 - DNA, 25 bp, Homo sapien
gcccttcttggtccatgccaggact

SEQ ID NO: 4606798 - DNA, 25 bp, Homo sapien
aatgggttcacatctcggcagtgac

SEQ ID NO: 4606799 - DNA, 25 bp, Homo sapien
gacctcctgcatagcctggtgggtc

SEQ ID NO: 4606800 - DNA, 25 bp, Homo sapien
acctcctgcatagcctggtgggtct

SEQ ID NO: 4606801 - DNA, 25 bp, Homo sapien
cactcacagagtcacccccagtcac

SEQ ID NO: 4606802 - DNA, 25 bp, Homo sapien
ccccactcacagagtcacccccagt

SEQ ID NO: 4606803 - DNA, 25 bp, Homo sapien
tgctctcgtaaccgtgcctgctcct

SEQ ID NO: 4606804 - DNA, 25 bp, Homo sapien
gctctcgtaaccgtgcctgctcctc

SEQ ID NO: 4606805 - DNA, 25 bp, Homo sapien
cctgctctcgtaaccgtgcctgctc

SEQ ID NO: 4606806 - DNA, 25 bp, Homo sapien
tctccaggtgctccgggttgctcgg

SEQ ID NO: 4606807 - DNA, 25 bp, Homo sapien
gctctccaggtgctccgggttgctc

SEQ ID NO: 4606808 - DNA, 25 bp, Homo sapien
gctccgggttgctcggcatgggccg

SEQ ID NO: 4606809 - DNA, 25 bp, Homo sapien
gtgctccgggttgctcggcatgggc

SEQ ID NO: 4606810 - DNA, 25 bp, Homo sapien
atcccactacggtcagtgcgggagt

SEQ ID NO: 4606811 - DNA, 25 bp, Homo sapien
gcataatcccactacggtcagtgcg

SEQ ID NO: 4606812 - DNA, 25 bp, Homo sapien
aatcccactacggtcagtgcgggag

SEQ ID NO: 4606813 - DNA, 25 bp, Homo sapien
ataatcccactacggtcagtgcggg

SEQ ID NO: 4606814 - DNA, 25 bp, Homo sapien
gctcaactgggcctgtaggggctgg

SEQ ID NO: 4606815 - DNA, 25 bp, Homo sapien
caactgggcctgtaggggctggttt

SEQ ID NO: 4606816 - DNA, 25 bp, Homo sapien
ggcctgtaggggctggttttgctgg

SEQ ID NO: 4606817 - DNA, 25 bp, Homo sapien
actgggcctgtaggggctggttttg

SEQ ID NO: 4606818 - DNA, 25 bp, Homo sapien
ttagggccccagcctcagcagctcc

SEQ ID NO: 4606819 - DNA, 25 bp, Homo sapien
agggccccagcctcagcagctccct

SEQ ID NO: 4606820 - DNA, 25 bp, Homo sapien
gccccagcctcagcagctccctccc

SEQ ID NO: 4606821 - DNA, 25 bp, Homo sapien
gggccccagcctcagcagctccctc

SEQ ID NO: 4606822 - DNA, 25 bp, Homo sapien
ttttggcgggccaggtcggctatcg

SEQ ID NO: 4606823 - DNA, 25 bp, Homo sapien
ggtcggctatcgctttgcctcgagc

SEQ ID NO: 4606824 - DNA, 25 bp, Homo sapien
tatcgctttgcctcgagcttcctgc

SEQ ID NO: 4606825 - DNA, 25 bp, Homo sapien
ccaggtcggctatcgctttgcctcg

SEQ ID NO: 4606826 - DNA, 25 bp, Homo sapien
ccaggtaataatctgggtgctgctg

SEQ ID NO: 4606827 - DNA, 25 bp, Homo sapien
acccaggtaataatctgggtgctgc

SEQ ID NO: 4606828 - DNA, 25 bp, Homo sapien
tgacccaggtaataatctgggtgct

SEQ ID NO: 4606829 - DNA, 25 bp, Homo sapien
ggtgacccaggtaataatctgggtg

SEQ ID NO: 4606830 - DNA, 25 bp, Homo sapien
ctcccagcccttcttggatggggca

SEQ ID NO: 4606831 - DNA, 25 bp, Homo sapien
cctcccaacaggctggtgcccgcct

SEQ ID NO: 4606832 - DNA, 25 bp, Homo sapien
ccaacaggctggtgcccgcctccca

SEQ ID NO: 4606833 - DNA, 25 bp, Homo sapien
tcccaacaggctggtgcccgcctcc

SEQ ID NO: 4606834 - DNA, 25 bp, Homo sapien
gcttctcctgcagctcctctacttg

SEQ ID NO: 4606835 - DNA, 25 bp, Homo sapien
ctcgccaagcttctcctgcagctcc

SEQ ID NO: 4606836 - DNA, 25 bp, Homo sapien
aagcttctcctgcagctcctctact

SEQ ID NO: 4606837 - DNA, 25 bp, Homo sapien
ccaagcttctcctgcagctcctcta

SEQ ID NO: 4606838 - DNA, 25 bp, Homo sapien
caactgcagtgcacttttgttcttg

SEQ ID NO: 4606839 - DNA, 25 bp, Homo sapien
aactgcagtgcacttttgttcttgt

SEQ ID NO: 4606840 - DNA, 25 bp, Homo sapien
tccaactgcagtgcacttttgttct

SEQ ID NO: 4606841 - DNA, 25 bp, Homo sapien
gctccaactgcagtgcacttttgtt

SEQ ID NO: 4606842 - DNA, 25 bp, Homo sapien
cagcagccacccattgcagctggag

SEQ ID NO: 4606843 - DNA, 25 bp, Homo sapien
agaaaaatcatcccgtctcccacag

SEQ ID NO: 4606844 - DNA, 25 bp, Homo sapien
gaagcaatcagcagccacccattgc

SEQ ID NO: 4606845 - DNA, 25 bp, Homo sapien
gcaggttagaaaaatcatcccgtct

SEQ ID NO: 4606846 - DNA, 25 bp, Homo sapien
gacactcatgcgcttattgttgtcc

SEQ ID NO: 4606847 - DNA, 25 bp, Homo sapien
cactcatgcgcttattgttgtccac

SEQ ID NO: 4606848 - DNA, 25 bp, Homo sapien
cccaatatcaggacactcatgcgct

SEQ ID NO: 4606849 - DNA, 25 bp, Homo sapien
ccttttgccccaatatcaggacact

SEQ ID NO: 4606850 - DNA, 25 bp, Homo sapien
ctgggcttggagttctgctgccact

SEQ ID NO: 4606851 - DNA, 25 bp, Homo sapien
tgctgccactctctcaacctccttc

SEQ ID NO: 4606852 - DNA, 25 bp, Homo sapien
gagggcactcctggaggctccggga

SEQ ID NO: 4606853 - DNA, 25 bp, Homo sapien
cactcctggaggctccgggagcagg

SEQ ID NO: 4606854 - DNA, 25 bp, Homo sapien
agcttctctccccgatgtgtttcat

SEQ ID NO: 4606855 - DNA, 25 bp, Homo sapien
ttctctccccgatgtgtttcatact

SEQ ID NO: 4606856 - DNA, 25 bp, Homo sapien
gcttctctccccgatgtgtttcata

SEQ ID NO: 4606857 - DNA, 25 bp, Homo sapien
cttctctccccgatgtgtttcatac

SEQ ID NO: 4606858 - DNA, 25 bp, Homo sapien
tctctagccggatttgtttaagcaa

SEQ ID NO: 4606859 - DNA, 25 bp, Homo sapien
tctagccggatttgtttaagcaact

SEQ ID NO: 4606860 - DNA, 25 bp, Homo sapien
tagccggatttgtttaagcaactcc

SEQ ID NO: 4606861 - DNA, 25 bp, Homo sapien
tctctctagccggatttgtttaagc

SEQ ID NO: 4606862 - DNA, 25 bp, Homo sapien
catgtagtgtgtgcattcagcagtg

SEQ ID NO: 4606863 - DNA, 25 bp, Homo sapien
ccatgtagtgtgtgcattcagcagt

SEQ ID NO: 4606864 - DNA, 25 bp, Homo sapien
atgtagtgtgtgcattcagcagtgc

SEQ ID NO: 4606865 - DNA, 25 bp, Homo sapien
ctaggaagccaagctgccaggggat

SEQ ID NO: 4606866 - DNA, 25 bp, Homo sapien
tcctccatctaggaagccaagctgc

SEQ ID NO: 4606867 - DNA, 25 bp, Homo sapien
ggggatggggcaagtggctgaactc

SEQ ID NO: 4606868 - DNA, 25 bp, Homo sapien
catctaggaagccaagctgccaggg

SEQ ID NO: 4606869 - DNA, 25 bp, Homo sapien
gcgaatggccagacccttggactca

SEQ ID NO: 4606870 - DNA, 25 bp, Homo sapien
ggcgaatggccagacccttggactc

SEQ ID NO: 4606871 - DNA, 25 bp, Homo sapien
tgaatgttgcaggcgaatggccaga

SEQ ID NO: 4606872 - DNA, 25 bp, Homo sapien
cgaatggccagacccttggactcat

SEQ ID NO: 4606873 - DNA, 25 bp, Homo sapien
gatataggtccatatttagtttccc

SEQ ID NO: 4606874 - DNA, 25 bp, Homo sapien
gaacgtttcgtatgatataggtcca

SEQ ID NO: 4606875 - DNA, 25 bp, Homo sapien
gagagaacgtttcgtatgatatagg

SEQ ID NO: 4606876 - DNA, 25 bp, Homo sapien
cgtttcgtatgatataggtccatat

SEQ ID NO: 4606877 - DNA, 25 bp, Homo sapien
ctttgggagaaaagccaagcaagtg

SEQ ID NO: 4606878 - DNA, 25 bp, Homo sapien
ctctagctccctttcggctttctgt

SEQ ID NO: 4606879 - DNA, 25 bp, Homo sapien
ctagctccctttcggctttctgttt

SEQ ID NO: 4606880 - DNA, 25 bp, Homo sapien
agctccctttcggctttctgtttct

SEQ ID NO: 4606881 - DNA, 25 bp, Homo sapien
ctccctttcggctttctgtttctca

SEQ ID NO: 4606882 - DNA, 25 bp, Homo sapien
agaatgccaccaatgccccaggaca

SEQ ID NO: 4606883 - DNA, 25 bp, Homo sapien
cagaatgccaccaatgccccaggac

SEQ ID NO: 4606884 - DNA, 25 bp, Homo sapien
aatgccaccaatgccccaggacagg

SEQ ID NO: 4606885 - DNA, 25 bp, Homo sapien
gaatgccaccaatgccccaggacag

SEQ ID NO: 4606886 - DNA, 25 bp, Homo sapien
ttcttccagctgatgttccacttgt

SEQ ID NO: 4606887 - DNA, 25 bp, Homo sapien
gttccacttgtttcttctgttgctc

SEQ ID NO: 4606888 - DNA, 25 bp, Homo sapien
tgttccacttgtttcttctgttgct

SEQ ID NO: 4606889 - DNA, 25 bp, Homo sapien
ttccagctgatgttccacttgtttc

SEQ ID NO: 4606890 - DNA, 25 bp, Homo sapien
caaattaaggtgatggagggtggcc

SEQ ID NO: 4606891 - DNA, 25 bp, Homo sapien
gagagtcaaattaaggtgatggagg

SEQ ID NO: 4606892 - DNA, 25 bp, Homo sapien
gagtcaaattaaggtgatggagggt

SEQ ID NO: 4606893 - DNA, 25 bp, Homo sapien
gtcaaattaaggtgatggagggtgg

SEQ ID NO: 4606894 - DNA, 25 bp, Homo sapien
gtccctccaggtgaggcctggatgc

SEQ ID NO: 4606895 - DNA, 25 bp, Homo sapien
tccctccaggtgaggcctggatgcc

SEQ ID NO: 4606896 - DNA, 25 bp, Homo sapien
cagcgtggaattgggggaccccact

SEQ ID NO: 4606897 - DNA, 25 bp, Homo sapien
gcccaggattggcagcgtggaattg

SEQ ID NO: 4606898 - DNA, 25 bp, Homo sapien
gactgatttttacagacctggagtc

SEQ ID NO: 4606899 - DNA, 25 bp, Homo sapien
cagttgactgatttttacagacctg

SEQ ID NO: 4606900 - DNA, 25 bp, Homo sapien
gttgactgatttttacagacctgga

SEQ ID NO: 4606901 - DNA, 25 bp, Homo sapien
ttgactgatttttacagacctggag

SEQ ID NO: 4606902 - DNA, 25 bp, Homo sapien
gaggtgcaggaggagtggagtaggg

SEQ ID NO: 4606903 - DNA, 25 bp, Homo sapien
gaggtgtgtgtggactgtctcagga

SEQ ID NO: 4606904 - DNA, 25 bp, Homo sapien
tggagtaggggaagaggtagagaga

SEQ ID NO: 4606905 - DNA, 25 bp, Homo sapien
cacatgcagcgaggaggaggtgcag

SEQ ID NO: 4606906 - DNA, 25 bp, Homo sapien
tagggccctccccatggacacctgg

SEQ ID NO: 4606907 - DNA, 25 bp, Homo sapien
cctccccatggacacctggtgctga

SEQ ID NO: 4606908 - DNA, 25 bp, Homo sapien
gggccctccccatggacacctggtg

SEQ ID NO: 4606909 - DNA, 25 bp, Homo sapien
gccctccccatggacacctggtgct

SEQ ID NO: 4606910 - DNA, 25 bp, Homo sapien
caccagaggtggctgtctcagggcc

SEQ ID NO: 4606911 - DNA, 25 bp, Homo sapien
aggtggctgtctcagggccactgcc

SEQ ID NO: 4606912 - DNA, 25 bp, Homo sapien
ggtggctgtctcagggccactgcca

SEQ ID NO: 4606913 - DNA, 25 bp, Homo sapien
cagaggtggctgtctcagggccact

SEQ ID NO: 4606914 - DNA, 25 bp, Homo sapien
cgcccaaagtcaacctggggcaatt

SEQ ID NO: 4606915 - DNA, 25 bp, Homo sapien
gttggcgggccgtgatctggtgcgt

SEQ ID NO: 4606916 - DNA, 25 bp, Homo sapien
ctgtggttgggttggcgggccgtga

SEQ ID NO: 4606917 - DNA, 25 bp, Homo sapien
gggccgtgatctggtgcgtttttac

SEQ ID NO: 4606918 - DNA, 25 bp, Homo sapien
ttgctctgttgagtttcttctgcca

SEQ ID NO: 4606919 - DNA, 25 bp, Homo sapien
ttctttgctgcggccaatttgctct

SEQ ID NO: 4606920 - DNA, 25 bp, Homo sapien
tttttctttgctgcggccaatttgc

SEQ ID NO: 4606921 - DNA, 25 bp, Homo sapien
tttgctctgttgagtttcttctgcc

SEQ ID NO: 4606922 - DNA, 25 bp, Homo sapien
gctccagtgtagtgattgaagcctt

SEQ ID NO: 4606923 - DNA, 25 bp, Homo sapien
tcttcagctccagtgtagtgattga

SEQ ID NO: 4606924 - DNA, 25 bp, Homo sapien
tatttatactcggtgacactgtttc

SEQ ID NO: 4606925 - DNA, 25 bp, Homo sapien
tcggtgacactgtttctcttcagct

SEQ ID NO: 4606926 - DNA, 25 bp, Homo sapien
aattctttgagggatagtccatgac

SEQ ID NO: 4606927 - DNA, 25 bp, Homo sapien
ttgagggatagtccatgactcttct

SEQ ID NO: 4606928 - DNA, 25 bp, Homo sapien
ctgtgaattctttgagggatagtcc

SEQ ID NO: 4606929 - DNA, 25 bp, Homo sapien
ttctctcatctgcactgtgaattct

SEQ ID NO: 4606930 - DNA, 25 bp, Homo sapien
ctctagggagacaatgtcgaaggtg

SEQ ID NO: 4606931 - DNA, 25 bp, Homo sapien
ccacggcagtgttggttttggtata

SEQ ID NO: 4606932 - DNA, 25 bp, Homo sapien
gagacaatgtcgaaggtgtccacgg

SEQ ID NO: 4606933 - DNA, 25 bp, Homo sapien
cacggcagtgttggttttggtatag

SEQ ID NO: 4606934 - DNA, 25 bp, Homo sapien
caatagtggactcatttctgtgggc

SEQ ID NO: 4606935 - DNA, 25 bp, Homo sapien
tgtaccaacacccaagaactggagt

SEQ ID NO: 4606936 - DNA, 25 bp, Homo sapien
gaactggagttcatggtcactgtca

SEQ ID NO: 4606937 - DNA, 25 bp, Homo sapien
agtttttactgtgatctccctcggc

SEQ ID NO: 4606938 - DNA, 25 bp, Homo sapien
caagttcaaagagttcagtgtaatt

SEQ ID NO: 4606939 - DNA, 25 bp, Homo sapien
aagttcaaagagttcagtgtaattg

SEQ ID NO: 4606940 - DNA, 25 bp, Homo sapien
agttcaaagagttcagtgtaattgg

SEQ ID NO: 4606941 - DNA, 25 bp, Homo sapien
gttcaaagagttcagtgtaattggt

SEQ ID NO: 4606942 - DNA, 25 bp, Homo sapien
tgaacttatcaaatgaatagggaca

SEQ ID NO: 4606943 - DNA, 25 bp, Homo sapien
tctgaattcgtgttgctgggactct

SEQ ID NO: 4606944 - DNA, 25 bp, Homo sapien
gcaaacctcattgtagtggtcactg

SEQ ID NO: 4606945 - DNA, 25 bp, Homo sapien
tgtgtccggtgtgatggcaaacctc

SEQ ID NO: 4606946 - DNA, 25 bp, Homo sapien
gatatgttgccgtatgtaagcccct

SEQ ID NO: 4606947 - DNA, 25 bp, Homo sapien
gctccattgcagcacgcaagatgat

SEQ ID NO: 4606948 - DNA, 25 bp, Homo sapien
tgtatattttgctggccaacctctc

SEQ ID NO: 4606949 - DNA, 25 bp, Homo sapien
tagctcagatcttctttagccatgc

SEQ ID NO: 4606950 - DNA, 25 bp, Homo sapien
tatttcacccaattaacagtttctg

SEQ ID NO: 4606951 - DNA, 25 bp, Homo sapien
atttcacccaattaacagtttctgg

SEQ ID NO: 4606952 - DNA, 25 bp, Homo sapien
ttcacccaattaacagtttctgggc

SEQ ID NO: 4606953 - DNA, 25 bp, Homo sapien
cacccaattaacagtttctgggctt

SEQ ID NO: 4606954 - DNA, 25 bp, Homo sapien
gggtgcaatgtctgccttctgtgtg

SEQ ID NO: 4606955 - DNA, 25 bp, Homo sapien
ttctgtgtggccatttgctgttgcc

SEQ ID NO: 4606956 - DNA, 25 bp, Homo sapien
tcagttgggtgcaatgtctgccttc

SEQ ID NO: 4606957 - DNA, 25 bp, Homo sapien
tctgtgtggccatttgctgttgcca

SEQ ID NO: 4606958 - DNA, 25 bp, Homo sapien
ccctgatgggcagtacctgtggctg

SEQ ID NO: 4606959 - DNA, 25 bp, Homo sapien
cagtccataggcttctggttgtaaa

SEQ ID NO: 4606960 - DNA, 25 bp, Homo sapien
taccctgatgggcagtacctgtggc

SEQ ID NO: 4606961 - DNA, 25 bp, Homo sapien
ttaccctgatgggcagtacctgtgg

SEQ ID NO: 4606962 - DNA, 25 bp, Homo sapien
gaatggccacaattcaaagaatctt

SEQ ID NO: 4606963 - DNA, 25 bp, Homo sapien
tcatgtgaatagaatggccacaatt

SEQ ID NO: 4606964 - DNA, 25 bp, Homo sapien
ttcacaggaaaacggctcagagctc

SEQ ID NO: 4606965 - DNA, 25 bp, Homo sapien
tcttcacaggaaaacggctcagagc

SEQ ID NO: 4606966 - DNA, 25 bp, Homo sapien
aaaactttacactagaatgtgcatc

SEQ ID NO: 4606967 - DNA, 25 bp, Homo sapien
taaaactttacactagaatgtgcat

SEQ ID NO: 4606968 - DNA, 25 bp, Homo sapien
ctaaaactttacactagaatgtgca

SEQ ID NO: 4606969 - DNA, 25 bp, Homo sapien
taaaaactatcgacctcattgggac

SEQ ID NO: 4606970 - DNA, 25 bp, Homo sapien
tggacagagctttggacgacttatc

SEQ ID NO: 4606971 - DNA, 25 bp, Homo sapien
gattaccctaggaaggtcacaataa

SEQ ID NO: 4606972 - DNA, 25 bp, Homo sapien
caatgaccataatatctagcctgta

SEQ ID NO: 4606973 - DNA, 25 bp, Homo sapien
tttgcgctggctgaaaaagtcagta

SEQ ID NO: 4606974 - DNA, 25 bp, Homo sapien
atattgctatatatctgtcaaagcc

SEQ ID NO: 4606975 - DNA, 25 bp, Homo sapien
gacagccataatgccgacacatgcg

SEQ ID NO: 4606976 - DNA, 25 bp, Homo sapien
acaaggcagcccttgaaagagatga

SEQ ID NO: 4606977 - DNA, 25 bp, Homo sapien
tcaatgagtgagaggttggctagca

SEQ ID NO: 4606978 - DNA, 25 bp, Homo sapien
caacataaataggaaggtctggagt

SEQ ID NO: 4606979 - DNA, 25 bp, Homo sapien
ggtttccaaacacgattcctccata

SEQ ID NO: 4606980 - DNA, 25 bp, Homo sapien
tgaaggtgggagtcagataccactg

SEQ ID NO: 4606981 - DNA, 25 bp, Homo sapien
cattccaggaaatagcctctgcagt

SEQ ID NO: 4606982 - DNA, 25 bp, Homo sapien
ttccaggaaatagcctctgcagtta

SEQ ID NO: 4606983 - DNA, 25 bp, Homo sapien
tccaggaaatagcctctgcagttac

SEQ ID NO: 4606984 - DNA, 25 bp, Homo sapien
tcattccaggaaatagcctctgcag

SEQ ID NO: 4606985 - DNA, 25 bp, Homo sapien
ttaaaatatgttgattcagccttct

SEQ ID NO: 4606986 - DNA, 25 bp, Homo sapien
aatatgttgattcagccttctcatt

SEQ ID NO: 4606987 - DNA, 25 bp, Homo sapien
ttatgtcatctccatagaatttaaa

SEQ ID NO: 4606988 - DNA, 25 bp, Homo sapien
ttgattcagccttctcattgcaaac

SEQ ID NO: 4606989 - DNA, 25 bp, Homo sapien
aaatttatccaatgacttagtaggg

SEQ ID NO: 4606990 - DNA, 25 bp, Homo sapien
gccacacgtagagaaacatgcatgg

SEQ ID NO: 4606991 - DNA, 25 bp, Homo sapien
cttagtagggaaaggccacacgtag

SEQ ID NO: 4606992 - DNA, 25 bp, Homo sapien
gacaggggtgacaacaaagttcatg

SEQ ID NO: 4606993 - DNA, 25 bp, Homo sapien
taaatcatttgaggaatgtcgttgg

SEQ ID NO: 4606994 - DNA, 25 bp, Homo sapien
gataaatcatttgaggaatgtcgtt

SEQ ID NO: 4606995 - DNA, 25 bp, Homo sapien
aaatcatttgaggaatgtcgttgga

SEQ ID NO: 4606996 - DNA, 25 bp, Homo sapien
aatcatttgaggaatgtcgttggac

SEQ ID NO: 4606997 - DNA, 25 bp, Homo sapien
caatgagcgataggttggccagcag

SEQ ID NO: 4606998 - DNA, 25 bp, Homo sapien
taaaagctccccacattattagggc

SEQ ID NO: 4606999 - DNA, 25 bp, Homo sapien
gaaggtgcccatcgatatgaatcca

SEQ ID NO: 4607000 - DNA, 25 bp, Homo sapien
tcgtagatcaacctaggaactgtgg

SEQ ID NO: 4607001 - DNA, 25 bp, Homo sapien
ccacatagaataaagagaagaagag

SEQ ID NO: 4607002 - DNA, 25 bp, Homo sapien
gagtgtaagtgaggatcaaagatca

SEQ ID NO: 4607003 - DNA, 25 bp, Homo sapien
tttcccaggataattcccacataga

SEQ ID NO: 4607004 - DNA, 25 bp, Homo sapien
gcatttccaaggattgtgcaagtcc

SEQ ID NO: 4607005 - DNA, 25 bp, Homo sapien
gggcgattagtctcctgtgaaacaa

SEQ ID NO: 4607006 - DNA, 25 bp, Homo sapien
cacagatgcataagctccagggaat

SEQ ID NO: 4607007 - DNA, 25 bp, Homo sapien
taaacacatatccttgggcgattag

SEQ ID NO: 4607008 - DNA, 25 bp, Homo sapien
gaaattgaatatgcctcaccatgtc

SEQ ID NO: 4607009 - DNA, 25 bp, Homo sapien
tagataccgcagaattatttactct

SEQ ID NO: 4607010 - DNA, 25 bp, Homo sapien
gataattcccatgtagaacacagag

SEQ ID NO: 4607011 - DNA, 25 bp, Homo sapien
aagagcttgaaagtccaatcaatac

SEQ ID NO: 4607012 - DNA, 25 bp, Homo sapien
caatacaaatttagataccgcagaa

SEQ ID NO: 4607013 - DNA, 25 bp, Homo sapien
cgtcgtccacgtaagaaacagtcac

SEQ ID NO: 4607014 - DNA, 25 bp, Homo sapien
tcaacacaacgtcgtccacgtaaga

SEQ ID NO: 4607015 - DNA, 25 bp, Homo sapien
cacaacgtcgtccacgtaagaaaca

SEQ ID NO: 4607016 - DNA, 25 bp, Homo sapien
catgttcaacacaacgtcgtccacg

SEQ ID NO: 4607017 - DNA, 25 bp, Homo sapien
gaaacagtcatagatgttcagccct

SEQ ID NO: 4607018 - DNA, 25 bp, Homo sapien
ttcaattggcaacgtaatggcacat

SEQ ID NO: 4607019 - DNA, 25 bp, Homo sapien
ccctctctacagtggaagaatagca

SEQ ID NO: 4607020 - DNA, 25 bp, Homo sapien
tcattaaggcagttctagctacagc

SEQ ID NO: 4607021 - DNA, 25 bp, Homo sapien
caggaacaaagacggcaggggcaca

SEQ ID NO: 4607022 - DNA, 25 bp, Homo sapien
aggggcacagggcaattcaggggtg

SEQ ID NO: 4607023 - DNA, 25 bp, Homo sapien
ggcacagggcaattcaggggtgcag

SEQ ID NO: 4607024 - DNA, 25 bp, Homo sapien
cagcacaggaacaaagacggcaggg

SEQ ID NO: 4607025 - DNA, 25 bp, Homo sapien
aatggttgcccgaattcacccagac

SEQ ID NO: 4607026 - DNA, 25 bp, Homo sapien
tccacggtccaaatggttgcccgaa

SEQ ID NO: 4607027 - DNA, 25 bp, Homo sapien
ggtcctcagccgcacgcaggcagtt

SEQ ID NO: 4607028 - DNA, 25 bp, Homo sapien
gcacgcaggcagttttctccacggt

SEQ ID NO: 4607029 - DNA, 25 bp, Homo sapien
cacacaacggggtttcggggctgtg

SEQ ID NO: 4607030 - DNA, 25 bp, Homo sapien
cagctcccacacaacggggtttcgg

SEQ ID NO: 4607031 - DNA, 25 bp, Homo sapien
ccagctcccacacaacggggtttcg

SEQ ID NO: 4607032 - DNA, 25 bp, Homo sapien
cctacagagggcaggcccttcagct

SEQ ID NO: 4607033 - DNA, 25 bp, Homo sapien
ctacagagggcaggcccttcagctc

SEQ ID NO: 4607034 - DNA, 25 bp, Homo sapien
actataggtaagtctgagcaaatct

SEQ ID NO: 4607035 - DNA, 25 bp, Homo sapien
aagtctttcctgacccccgatgctg

SEQ ID NO: 4607036 - DNA, 25 bp, Homo sapien
aggtgctgccccgagaaggatgcat

SEQ ID NO: 4607037 - DNA, 25 bp, Homo sapien
cccgatgctgctgactataggtaag

SEQ ID NO: 4607038 - DNA, 25 bp, Homo sapien
tcttccacttaacctaatgcttttg

SEQ ID NO: 4607039 - DNA, 25 bp, Homo sapien
gaattacacaataggtgacctgtgt

SEQ ID NO: 4607040 - DNA, 25 bp, Homo sapien
tgttgtgccaacactatctctatgt

SEQ ID NO: 4607041 - DNA, 25 bp, Homo sapien
cacatggtgccatggatcagctctg

SEQ ID NO: 4607042 - DNA, 25 bp, Homo sapien
tcaaggtggcagctggacgggttcc

SEQ ID NO: 4607043 - DNA, 25 bp, Homo sapien
caaggtggcagctggacgggttcct

SEQ ID NO: 4607044 - DNA, 25 bp, Homo sapien
ttcaaggtggcagctggacgggttc

SEQ ID NO: 4607045 - DNA, 25 bp, Homo sapien
ctgcagccagcgagacagtggcatg

SEQ ID NO: 4607046 - DNA, 25 bp, Homo sapien
gccagcgagacagtggcatgttctt

SEQ ID NO: 4607047 - DNA, 25 bp, Homo sapien
ctcgatctaactcccccagaagagg

SEQ ID NO: 4607048 - DNA, 25 bp, Homo sapien
catgttcttgttacaactcgatcta

SEQ ID NO: 4607049 - DNA, 25 bp, Homo sapien
cgatatctgtagttttgcgtctggc

SEQ ID NO: 4607050 - DNA, 25 bp, Homo sapien
tctaggcacttcacaaaactggact

SEQ ID NO: 4607051 - DNA, 25 bp, Homo sapien
aactggactcatacgatatctgtag

SEQ ID NO: 4607052 - DNA, 25 bp, Homo sapien
aactctacccattgaacacgagctg

SEQ ID NO: 4607053 - DNA, 25 bp, Homo sapien
tcctgggagtgcacggtttacattc

SEQ ID NO: 4607054 - DNA, 25 bp, Homo sapien
agcacttcgaaagtataaaccgcgg

SEQ ID NO: 4607055 - DNA, 25 bp, Homo sapien
tgtaactccgggagagaccctggag

SEQ ID NO: 4607056 - DNA, 25 bp, Homo sapien
cccaaagaggcgtgctgtgtctgca

SEQ ID NO: 4607057 - DNA, 25 bp, Homo sapien
tgtagcataagaaaataccgtctgc

SEQ ID NO: 4607058 - DNA, 25 bp, Homo sapien
aagctaccagatataggaagaaggg

SEQ ID NO: 4607059 - DNA, 25 bp, Homo sapien
aattttgatgcttaggtcagagtcc

SEQ ID NO: 4607060 - DNA, 25 bp, Homo sapien
tttggaatcacaggacgctgagtga

SEQ ID NO: 4607061 - DNA, 25 bp, Homo sapien
tatcccaaatatggttattttagca

SEQ ID NO: 4607062 - DNA, 25 bp, Homo sapien
caagtccaaactcctagctttaatt

SEQ ID NO: 4607063 - DNA, 25 bp, Homo sapien
ccttacacactttttgttcaagctg

SEQ ID NO: 4607064 - DNA, 25 bp, Homo sapien
tcagcactcaagaccgcttgcggtt

SEQ ID NO: 4607065 - DNA, 25 bp, Homo sapien
cggtgctgggtcagggatcgactga

SEQ ID NO: 4607066 - DNA, 25 bp, Homo sapien
ggtgctgggtcagggatcgactgag

SEQ ID NO: 4607067 - DNA, 25 bp, Homo sapien
gtcagggatcgactgaggctctgag

SEQ ID NO: 4607068 - DNA, 25 bp, Homo sapien
cagggatcgactgaggctctgagct

SEQ ID NO: 4607069 - DNA, 25 bp, Homo sapien
tgtggctttcccgttgcagtgagag

SEQ ID NO: 4607070 - DNA, 25 bp, Homo sapien
cggaggagcctttgcccgcgtgtca

SEQ ID NO: 4607071 - DNA, 25 bp, Homo sapien
ggcacttgatgtcggatctcttcaa

SEQ ID NO: 4607072 - DNA, 25 bp, Homo sapien
atctcttcaacaagctggtcatgag

SEQ ID NO: 4607073 - DNA, 25 bp, Homo sapien
aaacgtctcggggtcagtgactgcc

SEQ ID NO: 4607074 - DNA, 25 bp, Homo sapien
ctctaaaaatagtcatgctgagagc

SEQ ID NO: 4607075 - DNA, 25 bp, Homo sapien
tgcaggatgcaaacgtctcggggtc

SEQ ID NO: 4607076 - DNA, 25 bp, Homo sapien
gggtctctaaaaatagtcatgctga

SEQ ID NO: 4607077 - DNA, 25 bp, Homo sapien
ccctgggaagatctcacggatggcc

SEQ ID NO: 4607078 - DNA, 25 bp, Homo sapien
aaaggcaggagtgaacttccacaca

SEQ ID NO: 4607079 - DNA, 25 bp, Homo sapien
ttattatagaaagggcagtagcaga

SEQ ID NO: 4607080 - DNA, 25 bp, Homo sapien
tagtccagggcagctaactttagtt

SEQ ID NO: 4607081 - DNA, 25 bp, Homo sapien
tccaagtcggccgtcgtcttctgca

SEQ ID NO: 4607082 - DNA, 25 bp, Homo sapien
aagtcggccgtcgtcttctgcagct

SEQ ID NO: 4607083 - DNA, 25 bp, Homo sapien
tcggccgtcgtcttctgcagctctg

SEQ ID NO: 4607084 - DNA, 25 bp, Homo sapien
tgtgatccaagtcggccgtcgtctt

SEQ ID NO: 4607085 - DNA, 25 bp, Homo sapien
cacgggaagtctgggctaagagaca

SEQ ID NO: 4607086 - DNA, 25 bp, Homo sapien
acaggggccagaagatgaacaatgg

SEQ ID NO: 4607087 - DNA, 25 bp, Homo sapien
attaagttacatgcagacaacaggg

SEQ ID NO: 4607088 - DNA, 25 bp, Homo sapien
tgcctggttgtggtattaagttaca

SEQ ID NO: 4607089 - DNA, 25 bp, Homo sapien
ggaatgccccagaatccagcagtcg

SEQ ID NO: 4607090 - DNA, 25 bp, Homo sapien
tcctctgggctcagtagttgcaggg

SEQ ID NO: 4607091 - DNA, 25 bp, Homo sapien
ccagcagtcgcttatagtcggtgac

SEQ ID NO: 4607092 - DNA, 25 bp, Homo sapien
actggaggatcttcacggctttctg

SEQ ID NO: 4607093 - DNA, 25 bp, Homo sapien
tcggtgacagaaacacgctcctctg

SEQ ID NO: 4607094 - DNA, 25 bp, Homo sapien
caaatgtttcagagggatgtgtagg

SEQ ID NO: 4607095 - DNA, 25 bp, Homo sapien
ttaaagggtctaactcttgagctgc

SEQ ID NO: 4607096 - DNA, 25 bp, Homo sapien
aggccccccacaacatcccgaactg

SEQ ID NO: 4607097 - DNA, 25 bp, Homo sapien
cacctcagtactgtggaaatgttcc

SEQ ID NO: 4607098 - DNA, 25 bp, Homo sapien
gcctgacgtccagcaacaggtggaa

SEQ ID NO: 4607099 - DNA, 25 bp, Homo sapien
ctcttgagctgctgataaggactgg

SEQ ID NO: 4607100 - DNA, 25 bp, Homo sapien
tgttggctgtatccactggtcatcc

SEQ ID NO: 4607101 - DNA, 25 bp, Homo sapien
acaaatccagagctgtttcctcaat

SEQ ID NO: 4607102 - DNA, 25 bp, Homo sapien
tccagagctgtttcctcaatagatg

SEQ ID NO: 4607103 - DNA, 25 bp, Homo sapien
agatgttggctgtatccactggtca

SEQ ID NO: 4607104 - DNA, 25 bp, Homo sapien
ttgaaaagctgccatcaggcaaagt

SEQ ID NO: 4607105 - DNA, 25 bp, Homo sapien
tgtggctctccaatgttaataagct

SEQ ID NO: 4607106 - DNA, 25 bp, Homo sapien
tttcctcctgtagcaagtttgtgca

SEQ ID NO: 4607107 - DNA, 25 bp, Homo sapien
taagcttgttgtggctgtcaatatc

SEQ ID NO: 4607108 - DNA, 25 bp, Homo sapien
tatcttgttggagcttttggttgag

SEQ ID NO: 4607109 - DNA, 25 bp, Homo sapien
agtgcattcatctccacaacgtgga

SEQ ID NO: 4607110 - DNA, 25 bp, Homo sapien
gagctggcactacatgttttattgc

SEQ ID NO: 4607111 - DNA, 25 bp, Homo sapien
caggtaaagtttgactattatcttg

SEQ ID NO: 4607112 - DNA, 25 bp, Homo sapien
agttgctactggtttcatcaaggca

SEQ ID NO: 4607113 - DNA, 25 bp, Homo sapien
gctactggtttcatcaaggcataac

SEQ ID NO: 4607114 - DNA, 25 bp, Homo sapien
gttgctactggtttcatcaaggcat

SEQ ID NO: 4607115 - DNA, 25 bp, Homo sapien
tgctactggtttcatcaaggcataa

SEQ ID NO: 4607116 - DNA, 25 bp, Homo sapien
cagtgaagatacagacaacgagttc

SEQ ID NO: 4607117 - DNA, 25 bp, Homo sapien
caacgagttccagtattttagcaga

SEQ ID NO: 4607118 - DNA, 25 bp, Homo sapien
tagactggccatgatgctacgcgca

SEQ ID NO: 4607119 - DNA, 25 bp, Homo sapien
caatagcgatataacccaacagtga

SEQ ID NO: 4607120 - DNA, 25 bp, Homo sapien
ctatagcctaaatgcagaggaaaca

SEQ ID NO: 4607121 - DNA, 25 bp, Homo sapien
gcctaaatgcagaggaaacaccagg

SEQ ID NO: 4607122 - DNA, 25 bp, Homo sapien
atagcctaaatgcagaggaaacacc

SEQ ID NO: 4607123 - DNA, 25 bp, Homo sapien
caggagaaataattaagttgcatac

SEQ ID NO: 4607124 - DNA, 25 bp, Homo sapien
gccgaaatccaatgcctgatgttta

SEQ ID NO: 4607125 - DNA, 25 bp, Homo sapien
acttcactttcacctttgccgaaat

SEQ ID NO: 4607126 - DNA, 25 bp, Homo sapien
ctttgccgaaatccaatgcctgatg

SEQ ID NO: 4607127 - DNA, 25 bp, Homo sapien
aatccaatgcctgatgtttagccac

SEQ ID NO: 4607128 - DNA, 25 bp, Homo sapien
ctcgcgcgctctccaaacttgtgtg

SEQ ID NO: 4607129 - DNA, 25 bp, Homo sapien
agctttccagcgtgccctccagggg

SEQ ID NO: 4607130 - DNA, 25 bp, Homo sapien
agctcaggcaaaggacgtttccaaa

SEQ ID NO: 4607131 - DNA, 25 bp, Homo sapien
ggtcccagcgaacagcaggtgtcac

SEQ ID NO: 4607132 - DNA, 25 bp, Homo sapien
tgctgatgatgtcagtagagctgtc

SEQ ID NO: 4607133 - DNA, 25 bp, Homo sapien
tagaatcacgtgctgatgatgtcag

SEQ ID NO: 4607134 - DNA, 25 bp, Homo sapien
cacttttcccaagttagagttaatg

SEQ ID NO: 4607135 - DNA, 25 bp, Homo sapien
ttcccaagttagagttaatgaggct

SEQ ID NO: 4607136 - DNA, 25 bp, Homo sapien
attccaatgtgtagccgggattgag

SEQ ID NO: 4607137 - DNA, 25 bp, Homo sapien
tgagacccactgagatagagtaata

SEQ ID NO: 4607138 - DNA, 25 bp, Homo sapien
tgaacacctatggtggagcccaagc

SEQ ID NO: 4607139 - DNA, 25 bp, Homo sapien
tgtggtgaacacctatggtggagcc

SEQ ID NO: 4607140 - DNA, 25 bp, Homo sapien
tacctccgcaggtgttcaggacaac

SEQ ID NO: 4607141 - DNA, 25 bp, Homo sapien
tgggatgctagaccacagggcaact

SEQ ID NO: 4607142 - DNA, 25 bp, Homo sapien
gaaagtcaggtgaaagcccatcagg

SEQ ID NO: 4607143 - DNA, 25 bp, Homo sapien
gagattctaggcgtcagcagccagc

SEQ ID NO: 4607144 - DNA, 25 bp, Homo sapien
ctgggctgatgcagtgtccgcaaga

SEQ ID NO: 4607145 - DNA, 25 bp, Homo sapien
gttttatggggtgacttctgactgc

SEQ ID NO: 4607146 - DNA, 25 bp, Homo sapien
tccgcaagaagaaaccgctttgctg

SEQ ID NO: 4607147 - DNA, 25 bp, Homo sapien
tcataactgtttgtggatgttcatc

SEQ ID NO: 4607148 - DNA, 25 bp, Homo sapien
ttccacgccgaacacttgcatttta

SEQ ID NO: 4607149 - DNA, 25 bp, Homo sapien
tgtttccacgccgaacacttgcatt

SEQ ID NO: 4607150 - DNA, 25 bp, Homo sapien
aaagtgtttccacgccgaacacttg

SEQ ID NO: 4607151 - DNA, 25 bp, Homo sapien
gagaaagtgtttccacgccgaacac

SEQ ID NO: 4607152 - DNA, 25 bp, Homo sapien
tcactgttacttatccccaattctg

SEQ ID NO: 4607153 - DNA, 25 bp, Homo sapien
aaggcagtgtaactggcacacctca

SEQ ID NO: 4607154 - DNA, 25 bp, Homo sapien
tctgtaggatttggataggtggctg

SEQ ID NO: 4607155 - DNA, 25 bp, Homo sapien
tggatggaccattgccattgaagaa

SEQ ID NO: 4607156 - DNA, 25 bp, Homo sapien
ccacacatcgtactgtcctttctcc

SEQ ID NO: 4607157 - DNA, 25 bp, Homo sapien
gccacacatcgtactgtcctttctc

SEQ ID NO: 4607158 - DNA, 25 bp, Homo sapien
aagttccaaatctgcgtgtgaacaa

SEQ ID NO: 4607159 - DNA, 25 bp, Homo sapien
aagagaagcattgagtcaggaagtt

SEQ ID NO: 4607160 - DNA, 25 bp, Homo sapien
gtgaacaatcttcctgattctctaa

SEQ ID NO: 4607161 - DNA, 25 bp, Homo sapien
caatcttcctgattctctaaaaagg

SEQ ID NO: 4607162 - DNA, 25 bp, Homo sapien
gtaatgaatctaaatgttaccaaat

SEQ ID NO: 4607163 - DNA, 25 bp, Homo sapien
tttggggtttcaaaagagaccatca

SEQ ID NO: 4607164 - DNA, 25 bp, Homo sapien
aatagcattgcccaccaaaagcata

SEQ ID NO: 4607165 - DNA, 25 bp, Homo sapien
caaaagagaccatcaagaatgtgaa

SEQ ID NO: 4607166 - DNA, 25 bp, Homo sapien
caggcagctcgtgcagtgcttcaga

SEQ ID NO: 4607167 - DNA, 25 bp, Homo sapien
caaccagatgcttagtgacctcaac

SEQ ID NO: 4607168 - DNA, 25 bp, Homo sapien
tgcccagactctgcgaagatacacg

SEQ ID NO: 4607169 - DNA, 25 bp, Homo sapien
aattggattgcgttacaggttgccg

SEQ ID NO: 4607170 - DNA, 25 bp, Homo sapien
ttttattctgccagtgatcctccac

SEQ ID NO: 4607171 - DNA, 25 bp, Homo sapien
gtccttttattctgccagtgatcct

SEQ ID NO: 4607172 - DNA, 25 bp, Homo sapien
acaaagcctcttttgtaccaccttg

SEQ ID NO: 4607173 - DNA, 25 bp, Homo sapien
caaagcctcttttgtaccaccttgt

SEQ ID NO: 4607174 - DNA, 25 bp, Homo sapien
gctccagccagtctcgattacttgt

SEQ ID NO: 4607175 - DNA, 25 bp, Homo sapien
aactgcccctaaatgatccctgtgc

SEQ ID NO: 4607176 - DNA, 25 bp, Homo sapien
tctcgattacttgtactagaagcat

SEQ ID NO: 4607177 - DNA, 25 bp, Homo sapien
tggcattatcaactgcccctaaatg

SEQ ID NO: 4607178 - DNA, 25 bp, Homo sapien
ctattccattttcaaatcactgtaa

SEQ ID NO: 4607179 - DNA, 25 bp, Homo sapien
tattccattttcaaatcactgtaac

SEQ ID NO: 4607180 - DNA, 25 bp, Homo sapien
ccattttcaaatcactgtaacagtt

SEQ ID NO: 4607181 - DNA, 25 bp, Homo sapien
ttccattttcaaatcactgtaacag

SEQ ID NO: 4607182 - DNA, 25 bp, Homo sapien
tgcagagctcaaggaacactctgga

SEQ ID NO: 4607183 - DNA, 25 bp, Homo sapien
tgtggcccaatactcactcatatgt

SEQ ID NO: 4607184 - DNA, 25 bp, Homo sapien
cgaagaaggtttccattgactagat

SEQ ID NO: 4607185 - DNA, 25 bp, Homo sapien
ctagatgggaactgatactgtttca

SEQ ID NO: 4607186 - DNA, 25 bp, Homo sapien
tcgaagctgataagatctagaggca

SEQ ID NO: 4607187 - DNA, 25 bp, Homo sapien
cactgctccagcctcgaagctgata

SEQ ID NO: 4607188 - DNA, 25 bp, Homo sapien
gcagtaattttaccattagggctgt

SEQ ID NO: 4607189 - DNA, 25 bp, Homo sapien
ggctgtaagacattccactcctaga

SEQ ID NO: 4607190 - DNA, 25 bp, Homo sapien
tatattagaaggagctgaattgccc

SEQ ID NO: 4607191 - DNA, 25 bp, Homo sapien
tatgactacatcgagacagaaaagc

SEQ ID NO: 4607192 - DNA, 25 bp, Homo sapien
catattagcacacgaagaactccct

SEQ ID NO: 4607193 - DNA, 25 bp, Homo sapien
ttgcccatctatcttaccagaggaa

SEQ ID NO: 4607194 - DNA, 25 bp, Homo sapien
taacatcagaacagatgactagctg

SEQ ID NO: 4607195 - DNA, 25 bp, Homo sapien
aattcgctatttgttactaacatca

SEQ ID NO: 4607196 - DNA, 25 bp, Homo sapien
ttttctggatctcagttcccctatc

SEQ ID NO: 4607197 - DNA, 25 bp, Homo sapien
tctgagcggagagttcctttttgta

SEQ ID NO: 4607198 - DNA, 25 bp, Homo sapien
taaattagtgatttgattaataagc

SEQ ID NO: 4607199 - DNA, 25 bp, Homo sapien
ataagcttcaagtatttggccgggc

SEQ ID NO: 4607200 - DNA, 25 bp, Homo sapien
agcttcaagtatttggccgggcaca

SEQ ID NO: 4607201 - DNA, 25 bp, Homo sapien
ttaataagcttcaagtatttggccg

SEQ ID NO: 4607202 - DNA, 25 bp, Homo sapien
tgttccagtgctatactgctgaatg

SEQ ID NO: 4607203 - DNA, 25 bp, Homo sapien
aaggcagcaggacaacattaatacg

SEQ ID NO: 4607204 - DNA, 25 bp, Homo sapien
cagtgttgaaagcatcgaagttgcg

SEQ ID NO: 4607205 - DNA, 25 bp, Homo sapien
taataagaaataggtgaaggcagca

SEQ ID NO: 4607206 - DNA, 25 bp, Homo sapien
tagtactcagcctgtgtatgagtgc

SEQ ID NO: 4607207 - DNA, 25 bp, Homo sapien
tgactggtgtgcttcagtgcaaaaa

SEQ ID NO: 4607208 - DNA, 25 bp, Homo sapien
aaagctgctgactggtgtgcttcag

SEQ ID NO: 4607209 - DNA, 25 bp, Homo sapien
tgagtgctttcctggccttgatcat

SEQ ID NO: 4607210 - DNA, 25 bp, Homo sapien
gcacagaatggtttttgactctcct

SEQ ID NO: 4607211 - DNA, 25 bp, Homo sapien
cagctgatgtagcaaatggatttgg

SEQ ID NO: 4607212 - DNA, 25 bp, Homo sapien
aaatccctaccaactgcacagaatg

SEQ ID NO: 4607213 - DNA, 25 bp, Homo sapien
tcagaatggacagaggactcatggt

SEQ ID NO: 4607214 - DNA, 25 bp, Homo sapien
tgatgagagtgtcagatagggcgtc

SEQ ID NO: 4607215 - DNA, 25 bp, Homo sapien
gatagggcgtcagcattacccacca

SEQ ID NO: 4607216 - DNA, 25 bp, Homo sapien
gagagtgtcagatagggcgtcagca

SEQ ID NO: 4607217 - DNA, 25 bp, Homo sapien
cttcagtgatgagagtgtcagatag

SEQ ID NO: 4607218 - DNA, 25 bp, Homo sapien
tgctgaaaaccagttacacttgggg

SEQ ID NO: 4607219 - DNA, 25 bp, Homo sapien
aactgcgaataataattgctgaaaa

SEQ ID NO: 4607220 - DNA, 25 bp, Homo sapien
atttacttactgtgtaattcaccaa

SEQ ID NO: 4607221 - DNA, 25 bp, Homo sapien
tatgtgttcaaatctaacaaattgg

SEQ ID NO: 4607222 - DNA, 25 bp, Homo sapien
aatctaacaaattggaactgtttct

SEQ ID NO: 4607223 - DNA, 25 bp, Homo sapien
ttcaaatctaacaaattggaactgt

SEQ ID NO: 4607224 - DNA, 25 bp, Homo sapien
gcaaaagggagcagtgattgacagc

SEQ ID NO: 4607225 - DNA, 25 bp, Homo sapien
ggagctcaaaaagggccagatacat

SEQ ID NO: 4607226 - DNA, 25 bp, Homo sapien
aaagctgcagcacatatttgcgtgg

SEQ ID NO: 4607227 - DNA, 25 bp, Homo sapien
aaatagcagtgttgtggagctcaaa

SEQ ID NO: 4607228 - DNA, 25 bp, Homo sapien
gtgtctatacttaaacctgactggc

SEQ ID NO: 4607229 - DNA, 25 bp, Homo sapien
tgtgtctatacttaaacctgactgg

SEQ ID NO: 4607230 - DNA, 25 bp, Homo sapien
tctgtgtctatacttaaacctgact

SEQ ID NO: 4607231 - DNA, 25 bp, Homo sapien
atgtctgtgtctatacttaaacctg

SEQ ID NO: 4607232 - DNA, 25 bp, Homo sapien
tgtctctcaatcacaatagatacag

SEQ ID NO: 4607233 - DNA, 25 bp, Homo sapien
tctcaatcacaatagatacagattt

SEQ ID NO: 4607234 - DNA, 25 bp, Homo sapien
catcaattgtaaaggatagcaactg

SEQ ID NO: 4607235 - DNA, 25 bp, Homo sapien
attgtaaaggatagcaactgtctct

SEQ ID NO: 4607236 - DNA, 25 bp, Homo sapien
tatatgcatagatgataacatctca

SEQ ID NO: 4607237 - DNA, 25 bp, Homo sapien
taatacttttgtcagttgtactctg

SEQ ID NO: 4607238 - DNA, 25 bp, Homo sapien
gttgtactctgtttatatgcataga

SEQ ID NO: 4607239 - DNA, 25 bp, Homo sapien
ctcctaatacttttgtcagttgtac

SEQ ID NO: 4607240 - DNA, 25 bp, Homo sapien
cctatttcaacagcagtattttgca

SEQ ID NO: 4607241 - DNA, 25 bp, Homo sapien
gctgattggaactgcaagtcttata

SEQ ID NO: 4607242 - DNA, 25 bp, Homo sapien
gagtgaatatacagctcagcagttg

SEQ ID NO: 4607243 - DNA, 25 bp, Homo sapien
gagttttcagtattctgtgggcatc

SEQ ID NO: 4607244 - DNA, 25 bp, Homo sapien
cagtggtactttcatagtctgtatt

SEQ ID NO: 4607245 - DNA, 25 bp, Homo sapien
catagtctgtatttgacaagggatc

SEQ ID NO: 4607246 - DNA, 25 bp, Homo sapien
tgcaaatggtgtaggtaaaggaact

SEQ ID NO: 4607247 - DNA, 25 bp, Homo sapien
ttccttcttgcaaatggtgtaggta

SEQ ID NO: 4607248 - DNA, 25 bp, Homo sapien
tatgaatgaccaccagcaagatgac

SEQ ID NO: 4607249 - DNA, 25 bp, Homo sapien
taagaactgcctagttgagccctgc

SEQ ID NO: 4607250 - DNA, 25 bp, Homo sapien
aatctcaagagatagggttgcctcc

SEQ ID NO: 4607251 - DNA, 25 bp, Homo sapien
tacagcgttcctctaagacaggcag

SEQ ID NO: 4607252 - DNA, 25 bp, Homo sapien
caagattggcactggtatgtatgtc

SEQ ID NO: 4607253 - DNA, 25 bp, Homo sapien
tcttaaactagtgttgccacggcaa

SEQ ID NO: 4607254 - DNA, 25 bp, Homo sapien
gagttgctgccctatattcacctgg

SEQ ID NO: 4607255 - DNA, 25 bp, Homo sapien
tctggcccatagatttagagtaggg

SEQ ID NO: 4607256 - DNA, 25 bp, Homo sapien
ctctcagtgtacttcagctctcctt

SEQ ID NO: 4607257 - DNA, 25 bp, Homo sapien
tttattgttgatttcttggcctttc

SEQ ID NO: 4607258 - DNA, 25 bp, Homo sapien
ctcctttattgttgatttcttggcc

SEQ ID NO: 4607259 - DNA, 25 bp, Homo sapien
tctcagtgtacttcagctctccttt

SEQ ID NO: 4607260 - DNA, 25 bp, Homo sapien
ccattgctctgccttgtatgttgtg

SEQ ID NO: 4607261 - DNA, 25 bp, Homo sapien
tgccagtccattgctctgccttgta

SEQ ID NO: 4607262 - DNA, 25 bp, Homo sapien
gggctaacattcacattgccagtcc

SEQ ID NO: 4607263 - DNA, 25 bp, Homo sapien
ggaaagagaaccgacatagatgact

SEQ ID NO: 4607264 - DNA, 25 bp, Homo sapien
catatattctgctgtaactcaactc

SEQ ID NO: 4607265 - DNA, 25 bp, Homo sapien
catagcaggctaaaagaggaagcat

SEQ ID NO: 4607266 - DNA, 25 bp, Homo sapien
ctggactacattcagatttgcatgc

SEQ ID NO: 4607267 - DNA, 25 bp, Homo sapien
gggagtatattaaagcttagattgt

SEQ ID NO: 4607268 - DNA, 25 bp, Homo sapien
tcttctttcaccatcatcagcttca

SEQ ID NO: 4607269 - DNA, 25 bp, Homo sapien
cctggtgctgaatgggctgctcttc

SEQ ID NO: 4607270 - DNA, 25 bp, Homo sapien
cctctttgcctggtgctgaatgggc

SEQ ID NO: 4607271 - DNA, 25 bp, Homo sapien
tcccttcatttttgcccctctttgc

SEQ ID NO: 4607272 - DNA, 25 bp, Homo sapien
tgctggatctttcccttaggtctgg

SEQ ID NO: 4607273 - DNA, 25 bp, Homo sapien
tccgatgcggatgctggatctttcc

SEQ ID NO: 4607274 - DNA, 25 bp, Homo sapien
ccacagttttccgatgcggatgctg

SEQ ID NO: 4607275 - DNA, 25 bp, Homo sapien
gcgggagagggagccacagttttcc

SEQ ID NO: 4607276 - DNA, 25 bp, Homo sapien
gtgtagtaacgtccctccgagagga

SEQ ID NO: 4607277 - DNA, 25 bp, Homo sapien
caggcagccctcgtttcacagatag

SEQ ID NO: 4607278 - DNA, 25 bp, Homo sapien
ttactctctcgtggctccgggacgt

SEQ ID NO: 4607279 - DNA, 25 bp, Homo sapien
tccgggacgtctctgtacaaagctg

SEQ ID NO: 4607280 - DNA, 25 bp, Homo sapien
cgcggagccctgaagcgtccaggaa

SEQ ID NO: 4607281 - DNA, 25 bp, Homo sapien
cttctctaagatggcggcagaggca

SEQ ID NO: 4607282 - DNA, 25 bp, Homo sapien
ctccacaagtcgtgccctcaggagg

SEQ ID NO: 4607283 - DNA, 25 bp, Homo sapien
gtgacgcggaccctccagtctagcg

SEQ ID NO: 4607284 - DNA, 25 bp, Homo sapien
tatagcttgaactggtatcttggtc

SEQ ID NO: 4607285 - DNA, 25 bp, Homo sapien
tacattcaggaactatgtctgccca

SEQ ID NO: 4607286 - DNA, 25 bp, Homo sapien
tgttagagtggtccaatactgggtc

SEQ ID NO: 4607287 - DNA, 25 bp, Homo sapien
catgactgggaggtctcacggaaac

SEQ ID NO: 4607288 - DNA, 25 bp, Homo sapien
caaatgtgttattccatgtctcttc

SEQ ID NO: 4607289 - DNA, 25 bp, Homo sapien
tgtgttattccatgtctcttccaat

SEQ ID NO: 4607290 - DNA, 25 bp, Homo sapien
aatgtgttattccatgtctcttcca

SEQ ID NO: 4607291 - DNA, 25 bp, Homo sapien
tgttattccatgtctcttccaatca

SEQ ID NO: 4607292 - DNA, 25 bp, Homo sapien
tactccatcgtatgactgtatcaca

SEQ ID NO: 4607293 - DNA, 25 bp, Homo sapien
tttgtccgtgttgtatcagcagtcc

SEQ ID NO: 4607294 - DNA, 25 bp, Homo sapien
gctgagacagtgcagaacattttca

SEQ ID NO: 4607295 - DNA, 25 bp, Homo sapien
gcctctgccataagaagatactaaa

SEQ ID NO: 4607296 - DNA, 25 bp, Homo sapien
acttccaaaaggcttgagtctgaag

SEQ ID NO: 4607297 - DNA, 25 bp, Homo sapien
gagtctgaagtgttacctaccgagc

SEQ ID NO: 4607298 - DNA, 25 bp, Homo sapien
tttgaatcaattcacctggtattcc

SEQ ID NO: 4607299 - DNA, 25 bp, Homo sapien
taaacctagtcatagagctagcacc

SEQ ID NO: 4607300 - DNA, 25 bp, Homo sapien
catattattgacatgaactgctgat

SEQ ID NO: 4607301 - DNA, 25 bp, Homo sapien
tccagcacatattattgacatgaac

SEQ ID NO: 4607302 - DNA, 25 bp, Homo sapien
taattgagaaaatactttccagcac

SEQ ID NO: 4607303 - DNA, 25 bp, Homo sapien
caataattgagaaaatactttccag

SEQ ID NO: 4607304 - DNA, 25 bp, Homo sapien
gaaaaaagttcagtcatatgctgta

SEQ ID NO: 4607305 - DNA, 25 bp, Homo sapien
tccagtgagcagatactattagtat

SEQ ID NO: 4607306 - DNA, 25 bp, Homo sapien
tccaatagggagaatggcccaacag

SEQ ID NO: 4607307 - DNA, 25 bp, Homo sapien
gacatatatggcatgttccagtgag

SEQ ID NO: 4607308 - DNA, 25 bp, Homo sapien
gcttattgtaaccttgaaccactgg

SEQ ID NO: 4607309 - DNA, 25 bp, Homo sapien
tcactctgtggcacagggtcccact

SEQ ID NO: 4607310 - DNA, 25 bp, Homo sapien
ttattgtaaccttgaaccactggat

SEQ ID NO: 4607311 - DNA, 25 bp, Homo sapien
cacagcttattgtaaccttgaacca

SEQ ID NO: 4607312 - DNA, 25 bp, Homo sapien
atcctcctgcatactccctagcctg

SEQ ID NO: 4607313 - DNA, 25 bp, Homo sapien
actgatcttgcaccaccagacaggg

SEQ ID NO: 4607314 - DNA, 25 bp, Homo sapien
gccactgatcttgcaccaccagaca

SEQ ID NO: 4607315 - DNA, 25 bp, Homo sapien
ccatcctcctgcatactccctagcc

SEQ ID NO: 4607316 - DNA, 25 bp, Homo sapien
tgtagcagttgcagcgatggaaagc

SEQ ID NO: 4607317 - DNA, 25 bp, Homo sapien
ttgttggaggctgggtagcagttat

SEQ ID NO: 4607318 - DNA, 25 bp, Homo sapien
tagcagttatgggacgtgtagcagt

SEQ ID NO: 4607319 - DNA, 25 bp, Homo sapien
gccctggagacttgcccctgttgtt

SEQ ID NO: 4607320 - DNA, 25 bp, Homo sapien
ccagctgtgtagtaggttatatcaa

SEQ ID NO: 4607321 - DNA, 25 bp, Homo sapien
tgttcacacaacttggaaatctcca

SEQ ID NO: 4607322 - DNA, 25 bp, Homo sapien
tattgacacttgactgtactctgta

SEQ ID NO: 4607323 - DNA, 25 bp, Homo sapien
tgacccttaatgtaacctatggctt

SEQ ID NO: 4607324 - DNA, 25 bp, Homo sapien
ggcctgacaggatgaagagatatta

SEQ ID NO: 4607325 - DNA, 25 bp, Homo sapien
caaatggatacctttctggatgaga

SEQ ID NO: 4607326 - DNA, 25 bp, Homo sapien
gatacctttctggatgagaggcaaa

SEQ ID NO: 4607327 - DNA, 25 bp, Homo sapien
gaaaggcaaatggatacctttctgg

SEQ ID NO: 4607328 - DNA, 25 bp, Homo sapien
cactaatggttataaagaattcatc

SEQ ID NO: 4607329 - DNA, 25 bp, Homo sapien
caaatacatctatggcaatcattaa

SEQ ID NO: 4607330 - DNA, 25 bp, Homo sapien
ttctctacagactagaattggtaca

SEQ ID NO: 4607331 - DNA, 25 bp, Homo sapien
tgtttggtactttggattatcttga

SEQ ID NO: 4607332 - DNA, 25 bp, Homo sapien
taatcttacctcttacctgaacaag

SEQ ID NO: 4607333 - DNA, 25 bp, Homo sapien
gcgatatcaagagtttactgccaaa

SEQ ID NO: 4607334 - DNA, 25 bp, Homo sapien
catccaatctatctgcaaatcctgt

SEQ ID NO: 4607335 - DNA, 25 bp, Homo sapien
cttagtataaccaaaactactgctt

SEQ ID NO: 4607336 - DNA, 25 bp, Homo sapien
ttgggagacaaatcactatttcttt

SEQ ID NO: 4607337 - DNA, 25 bp, Homo sapien
atttgggagacaaatcactatttct

SEQ ID NO: 4607338 - DNA, 25 bp, Homo sapien
tgggagacaaatcactatttctttt

SEQ ID NO: 4607339 - DNA, 25 bp, Homo sapien
tttgggagacaaatcactatttctt

SEQ ID NO: 4607340 - DNA, 25 bp, Homo sapien
taatcattagtttactcttatccag

SEQ ID NO: 4607341 - DNA, 25 bp, Homo sapien
tcttagttaagccatcctcaagtct

SEQ ID NO: 4607342 - DNA, 25 bp, Homo sapien
ttctttcttagttaagccatcctca

SEQ ID NO: 4607343 - DNA, 25 bp, Homo sapien
cttatccagcaagaggaaaatttcc

SEQ ID NO: 4607344 - DNA, 25 bp, Homo sapien
tacaaagcgcaagtttgtgcaggct

SEQ ID NO: 4607345 - DNA, 25 bp, Homo sapien
cagaataatggcataaggcgaaagg

SEQ ID NO: 4607346 - DNA, 25 bp, Homo sapien
gcaggcttgcaagattactgtatta

SEQ ID NO: 4607347 - DNA, 25 bp, Homo sapien
tattattctaatgggccacctctgc

SEQ ID NO: 4607348 - DNA, 25 bp, Homo sapien
ctaacagccatcagctgccagtgtt

SEQ ID NO: 4607349 - DNA, 25 bp, Homo sapien
cagccatcagctgccagtgttccag

SEQ ID NO: 4607350 - DNA, 25 bp, Homo sapien
ccatcagctgccagtgttccagtag

SEQ ID NO: 4607351 - DNA, 25 bp, Homo sapien
taacagccatcagctgccagtgttc

SEQ ID NO: 4607352 - DNA, 25 bp, Homo sapien
tgacttctttcattgtgtattactt

SEQ ID NO: 4607353 - DNA, 25 bp, Homo sapien
tgtgacttctttcattgtgtattac

SEQ ID NO: 4607354 - DNA, 25 bp, Homo sapien
gtgacttctttcattgtgtattact

SEQ ID NO: 4607355 - DNA, 25 bp, Homo sapien
ccttgcctggatgtgacttctttca

SEQ ID NO: 4607356 - DNA, 25 bp, Homo sapien
ctcagtggtttacacaatgttgtaa

SEQ ID NO: 4607357 - DNA, 25 bp, Homo sapien
gtgaaactgttaaagacgtcgtgat

SEQ ID NO: 4607358 - DNA, 25 bp, Homo sapien
gttaaagacgtcgtgattattgggc

SEQ ID NO: 4607359 - DNA, 25 bp, Homo sapien
gacgtcgtgattattgggctcttta

SEQ ID NO: 4607360 - DNA, 25 bp, Homo sapien
gattattgggctctttactatacat

SEQ ID NO: 4607361 - DNA, 25 bp, Homo sapien
ctcgggtacctctttgagaactgcc

SEQ ID NO: 4607362 - DNA, 25 bp, Homo sapien
ccgtgctcgggtacctctttgagaa

SEQ ID NO: 4607363 - DNA, 25 bp, Homo sapien
tgctcgggtacctctttgagaactg

SEQ ID NO: 4607364 - DNA, 25 bp, Homo sapien
tcccgtgctcgggtacctctttgag

SEQ ID NO: 4607365 - DNA, 25 bp, Homo sapien
gtgggtgcacttccaatgaggatct

SEQ ID NO: 4607366 - DNA, 25 bp, Homo sapien
caatgaggatctgatcagaatctcc

SEQ ID NO: 4607367 - DNA, 25 bp, Homo sapien
cacttccaatgaggatctgatcaga

SEQ ID NO: 4607368 - DNA, 25 bp, Homo sapien
tgatcagaatctccatggtggcctt

SEQ ID NO: 4607369 - DNA, 25 bp, Homo sapien
ctgagtaaaccctccatcgactttc

SEQ ID NO: 4607370 - DNA, 25 bp, Homo sapien
aggtacaatacaggtgagtcgtctc

SEQ ID NO: 4607371 - DNA, 25 bp, Homo sapien
gagaggtacaatacaggtgagtcgt

SEQ ID NO: 4607372 - DNA, 25 bp, Homo sapien
taaaccctccatcgactttccagaa

SEQ ID NO: 4607373 - DNA, 25 bp, Homo sapien
aactcagttctggatagattgaagt

SEQ ID NO: 4607374 - DNA, 25 bp, Homo sapien
aaaactcagttctggatagattgaa

SEQ ID NO: 4607375 - DNA, 25 bp, Homo sapien
actcagttctggatagattgaagtt

SEQ ID NO: 4607376 - DNA, 25 bp, Homo sapien
aaactcagttctggatagattgaag

SEQ ID NO: 4607377 - DNA, 25 bp, Homo sapien
tcaattgtacttctgtatgccagca

SEQ ID NO: 4607378 - DNA, 25 bp, Homo sapien
tggagtcctagacagtaaaactggg

SEQ ID NO: 4607379 - DNA, 25 bp, Homo sapien
tgtggtcctagctaactaatactca

SEQ ID NO: 4607380 - DNA, 25 bp, Homo sapien
gcaagattgcttcattcaaggtcaa

SEQ ID NO: 4607381 - DNA, 25 bp, Homo sapien
acagtacagccagtgaaaatatcca

SEQ ID NO: 4607382 - DNA, 25 bp, Homo sapien
gatttaacaagactacctcaagaca

SEQ ID NO: 4607383 - DNA, 25 bp, Homo sapien
catctccagtgcatctagcagcaga

SEQ ID NO: 4607384 - DNA, 25 bp, Homo sapien
ttttaacctagaacagtacagccag

SEQ ID NO: 4607385 - DNA, 25 bp, Homo sapien
caactacattagcaagtgtgcaaaa

SEQ ID NO: 4607386 - DNA, 25 bp, Homo sapien
ttagacaggtggtacagcccacaga

SEQ ID NO: 4607387 - DNA, 25 bp, Homo sapien
cactatgaagcaactacattagcaa

SEQ ID NO: 4607388 - DNA, 25 bp, Homo sapien
ggaaaacctgttaccagccactata

SEQ ID NO: 4607389 - DNA, 25 bp, Homo sapien
tgcggtccaaggcacttacagagag

SEQ ID NO: 4607390 - DNA, 25 bp, Homo sapien
caagacggccgattagatgcaactg

SEQ ID NO: 4607391 - DNA, 25 bp, Homo sapien
agtaagtgattgtatgaccctgccc

SEQ ID NO: 4607392 - DNA, 25 bp, Homo sapien
tgactaggcaaacaacccacgaaga

SEQ ID NO: 4607393 - DNA, 25 bp, Homo sapien
gctccttattgttagagatacatca

SEQ ID NO: 4607394 - DNA, 25 bp, Homo sapien
tggcagggaagaatttgaacagtct

SEQ ID NO: 4607395 - DNA, 25 bp, Homo sapien
aaatcctacctcaattcctatgtgg

SEQ ID NO: 4607396 - DNA, 25 bp, Homo sapien
gaacagtctattgtcatagcaccaa

SEQ ID NO: 4607397 - DNA, 25 bp, Homo sapien
ctgcattacggtagcagttgattat

SEQ ID NO: 4607398 - DNA, 25 bp, Homo sapien
ctcagatctgcattacggtagcagt

SEQ ID NO: 4607399 - DNA, 25 bp, Homo sapien
tctgcattacggtagcagttgatta

SEQ ID NO: 4607400 - DNA, 25 bp, Homo sapien
agatctgcattacggtagcagttga

SEQ ID NO: 4607401 - DNA, 25 bp, Homo sapien
tctaggcagctatttagttgctgac

SEQ ID NO: 4607402 - DNA, 25 bp, Homo sapien
tatttagttgctgacctaatgaccc

SEQ ID NO: 4607403 - DNA, 25 bp, Homo sapien
gttgctgacctaatgaccctcttat

SEQ ID NO: 4607404 - DNA, 25 bp, Homo sapien
ggcagctatttagttgctgacctaa

SEQ ID NO: 4607405 - DNA, 25 bp, Homo sapien
tcgttagtaaaaaagcaaagcgcta

SEQ ID NO: 4607406 - DNA, 25 bp, Homo sapien
acccacagccactaacttcgttagt

SEQ ID NO: 4607407 - DNA, 25 bp, Homo sapien
ttgagaatcatgcagccatcctcca

SEQ ID NO: 4607408 - DNA, 25 bp, Homo sapien
gagaatcatgcagccatcctccaca

SEQ ID NO: 4607409 - DNA, 25 bp, Homo sapien
caatcttcatattgggatcgataga

SEQ ID NO: 4607410 - DNA, 25 bp, Homo sapien
ttgcaatcttcatattgggatcgat

SEQ ID NO: 4607411 - DNA, 25 bp, Homo sapien
tcttcatattgggatcgatagaaat

SEQ ID NO: 4607412 - DNA, 25 bp, Homo sapien
catattgggatcgatagaaatacct

SEQ ID NO: 4607413 - DNA, 25 bp, Homo sapien
tgagtattagaaccataggcccaca

SEQ ID NO: 4607414 - DNA, 25 bp, Homo sapien
caaccagtgccaaacagaggagcct

SEQ ID NO: 4607415 - DNA, 25 bp, Homo sapien
gattgccactcagatattccttagg

SEQ ID NO: 4607416 - DNA, 25 bp, Homo sapien
taagttcccaattgtattcaccgag

SEQ ID NO: 4607417 - DNA, 25 bp, Homo sapien
tcgttcactttcataacaaaagcta

SEQ ID NO: 4607418 - DNA, 25 bp, Homo sapien
taatgtgaacgacctcaggacagtc

SEQ ID NO: 4607419 - DNA, 25 bp, Homo sapien
agctgcaggtacatgcggcctgctg

SEQ ID NO: 4607420 - DNA, 25 bp, Homo sapien
tcatggagctgcaggtacatgcggc

SEQ ID NO: 4607421 - DNA, 25 bp, Homo sapien
catgtgaaagccgttgtgggaaata

SEQ ID NO: 4607422 - DNA, 25 bp, Homo sapien
tgtacaaggttgtgcgtgtctcctc

SEQ ID NO: 4607423 - DNA, 25 bp, Homo sapien
tcatgtgacagcagatggcatgtga

SEQ ID NO: 4607424 - DNA, 25 bp, Homo sapien
cggcccctgctaaataggctgtgaa

SEQ ID NO: 4607425 - DNA, 25 bp, Homo sapien
gtgagaaactgggtgatcgaataca

SEQ ID NO: 4607426 - DNA, 25 bp, Homo sapien
caggagaaatggtatccaacaggag

SEQ ID NO: 4607427 - DNA, 25 bp, Homo sapien
accagaaaatgccttggactcctct

SEQ ID NO: 4607428 - DNA, 25 bp, Homo sapien
aatgtggcacttcattaccactgag

SEQ ID NO: 4607429 - DNA, 25 bp, Homo sapien
catttgttccctggtacgctttgta

SEQ ID NO: 4607430 - DNA, 25 bp, Homo sapien
acaggtgtactaattcatttgttcc

SEQ ID NO: 4607431 - DNA, 25 bp, Homo sapien
caagagtgagacgtgacaggtgtac

SEQ ID NO: 4607432 - DNA, 25 bp, Homo sapien
ttaacaaagaaggtgccatccttca

SEQ ID NO: 4607433 - DNA, 25 bp, Homo sapien
gaaagccctggttagactggtacat

SEQ ID NO: 4607434 - DNA, 25 bp, Homo sapien
ggtggagctcctattccctcagcag

SEQ ID NO: 4607435 - DNA, 25 bp, Homo sapien
ccctaagagtcgtggtggcaacaat

SEQ ID NO: 4607436 - DNA, 25 bp, Homo sapien
caaaacacacatgggcgagtggcgc

SEQ ID NO: 4607437 - DNA, 25 bp, Homo sapien
caaacaactttgctggtggcggtgg

SEQ ID NO: 4607438 - DNA, 25 bp, Homo sapien
gatagtcctagaccaacttgaaaag

SEQ ID NO: 4607439 - DNA, 25 bp, Homo sapien
gacagtatagccagggatagtccta

SEQ ID NO: 4607440 - DNA, 25 bp, Homo sapien
gattaattactacatgtcctggaca

SEQ ID NO: 4607441 - DNA, 25 bp, Homo sapien
tagtttagctttgcagctgcttccc

SEQ ID NO: 4607442 - DNA, 25 bp, Homo sapien
ccatgttagccttatagaaggtaga

SEQ ID NO: 4607443 - DNA, 25 bp, Homo sapien
tcactatcttggacgtctttgatgc

SEQ ID NO: 4607444 - DNA, 25 bp, Homo sapien
tgtccggctctgaggaatcatcaaa

SEQ ID NO: 4607445 - DNA, 25 bp, Homo sapien
tttctgggctacaacttgtcactga

SEQ ID NO: 4607446 - DNA, 25 bp, Homo sapien
aaacccttccattgctcgctggctt

SEQ ID NO: 4607447 - DNA, 25 bp, Homo sapien
gaagttttgctgcaatgtctgggtg

SEQ ID NO: 4607448 - DNA, 25 bp, Homo sapien
tattttgtgctacttatcccaactg

SEQ ID NO: 4607449 - DNA, 25 bp, Homo sapien
ttttggtcttagtggttctagttgc

SEQ ID NO: 4607450 - DNA, 25 bp, Homo sapien
tttggtcttagtggttctagttgct

SEQ ID NO: 4607451 - DNA, 25 bp, Homo sapien
tgcacacacaaaaagtgactggcag

SEQ ID NO: 4607452 - DNA, 25 bp, Homo sapien
caaattacagttaagtaggccacta

SEQ ID NO: 4607453 - DNA, 25 bp, Homo sapien
agtctgctttgcttacatgctgagg

SEQ ID NO: 4607454 - DNA, 25 bp, Homo sapien
ggtccttagattttcaggccacaga

SEQ ID NO: 4607455 - DNA, 25 bp, Homo sapien
cagattcctgatagctcctccgaaa

SEQ ID NO: 4607456 - DNA, 25 bp, Homo sapien
caagattcttgtccttgagtcatct

SEQ ID NO: 4607457 - DNA, 25 bp, Homo sapien
tcttggccttgttcaaagaaatggt

SEQ ID NO: 4607458 - DNA, 25 bp, Homo sapien
gggatgtagacttctatctcaagat

SEQ ID NO: 4607459 - DNA, 25 bp, Homo sapien
tgttgacaacacgaaaatacattgc

SEQ ID NO: 4607460 - DNA, 25 bp, Homo sapien
cagtgattttggtcctactcaggcc

SEQ ID NO: 4607461 - DNA, 25 bp, Homo sapien
ttaaatgttagtctccgctcttccg

SEQ ID NO: 4607462 - DNA, 25 bp, Homo sapien
gaatgggccaggaatgtaaaagatg

SEQ ID NO: 4607463 - DNA, 25 bp, Homo sapien
ctggaggagtggatgcattctgttc

SEQ ID NO: 4607464 - DNA, 25 bp, Homo sapien
gtgtcctggaatcccaatccaattt

SEQ ID NO: 4607465 - DNA, 25 bp, Homo sapien
gctttagatccagtgtttcctgtag

SEQ ID NO: 4607466 - DNA, 25 bp, Homo sapien
tttcctgtaggttgagaggtgtcct

SEQ ID NO: 4607467 - DNA, 25 bp, Homo sapien
ctgttaatggcaatgtgcaagacta

SEQ ID NO: 4607468 - DNA, 25 bp, Homo sapien
taatggcaatgtgcaagactatacc

SEQ ID NO: 4607469 - DNA, 25 bp, Homo sapien
tggcaatgtgcaagactatacctga

SEQ ID NO: 4607470 - DNA, 25 bp, Homo sapien
caatgtgcaagactatacctgaaat

SEQ ID NO: 4607471 - DNA, 25 bp, Homo sapien
ctagtcactacactggcgttcatct

SEQ ID NO: 4607472 - DNA, 25 bp, Homo sapien
tggcgttcatctccatccataccac

SEQ ID NO: 4607473 - DNA, 25 bp, Homo sapien
tgcataaaccgattcaaataccatg

SEQ ID NO: 4607474 - DNA, 25 bp, Homo sapien
caagtttagacagatcagaagagta

SEQ ID NO: 4607475 - DNA, 25 bp, Homo sapien
caaatgagcgaggtatagatcatga

SEQ ID NO: 4607476 - DNA, 25 bp, Homo sapien
taaacactgtagagtgaagctacat

SEQ ID NO: 4607477 - DNA, 25 bp, Homo sapien
gaactctaacctgttccttcattgc

SEQ ID NO: 4607478 - DNA, 25 bp, Homo sapien
tatgaaggatgtattgtgcaaatct

SEQ ID NO: 4607479 - DNA, 25 bp, Homo sapien
gttcttcaccgccttcaacagtgag

SEQ ID NO: 4607480 - DNA, 25 bp, Homo sapien
gcaaagtaacatctgatgctcttgt

SEQ ID NO: 4607481 - DNA, 25 bp, Homo sapien
ctgaaatctttcctttgtgtggaac

SEQ ID NO: 4607482 - DNA, 25 bp, Homo sapien
atctttcctttgtgtggaacgtact

SEQ ID NO: 4607483 - DNA, 25 bp, Homo sapien
tgaaatctttcctttgtgtggaacg

SEQ ID NO: 4607484 - DNA, 25 bp, Homo sapien
gggtacagcctcatcaaatctcttg

SEQ ID NO: 4607485 - DNA, 25 bp, Homo sapien
tacatagtcctgtccacatagagtc

SEQ ID NO: 4607486 - DNA, 25 bp, Homo sapien
tctgaaatggttatagggtacagcc

SEQ ID NO: 4607487 - DNA, 25 bp, Homo sapien
tcagttgtgtgccagcattatgccc

SEQ ID NO: 4607488 - DNA, 25 bp, Homo sapien
aaatgctcacaatataacgttgaga

SEQ ID NO: 4607489 - DNA, 25 bp, Homo sapien
tacataatgacatagaaaaatgctc

SEQ ID NO: 4607490 - DNA, 25 bp, Homo sapien
taataacgcttggatcaaatgataa

SEQ ID NO: 4607491 - DNA, 25 bp, Homo sapien
caaacgttatatatctaagagtggt

SEQ ID NO: 4607492 - DNA, 25 bp, Homo sapien
tccacatttgctggtaaactattaa

SEQ ID NO: 4607493 - DNA, 25 bp, Homo sapien
taaactattaaaggctccatgatgg

SEQ ID NO: 4607494 - DNA, 25 bp, Homo sapien
gctggtaaactattaaaggctccat

SEQ ID NO: 4607495 - DNA, 25 bp, Homo sapien
catttgctggtaaactattaaaggc

SEQ ID NO: 4607496 - DNA, 25 bp, Homo sapien
taaccttgtctacactccgtgatgg

SEQ ID NO: 4607497 - DNA, 25 bp, Homo sapien
ccaaaagtaagagtgcatagagcct

SEQ ID NO: 4607498 - DNA, 25 bp, Homo sapien
tattggccgcacaatattgcaagga

SEQ ID NO: 4607499 - DNA, 25 bp, Homo sapien
gagtcaacctccacagaaatgtttg

SEQ ID NO: 4607500 - DNA, 25 bp, Homo sapien
aaataaaggtgtttcggctgggcat

SEQ ID NO: 4607501 - DNA, 25 bp, Homo sapien
cggatcccatcactactggcaggct

SEQ ID NO: 4607502 - DNA, 25 bp, Homo sapien
tgtggatttcaagtctcaggaacct

SEQ ID NO: 4607503 - DNA, 25 bp, Homo sapien
gtttgaaggacagaaccaattgcct

SEQ ID NO: 4607504 - DNA, 25 bp, Homo sapien
tattggtgtgcttttagtaaccagg

SEQ ID NO: 4607505 - DNA, 25 bp, Homo sapien
cccctccgatgttgcttggtaaaga

SEQ ID NO: 4607506 - DNA, 25 bp, Homo sapien
agatgctcttcctagggctacacag

SEQ ID NO: 4607507 - DNA, 25 bp, Homo sapien
tatttgctcctggtaaagtccgcat

SEQ ID NO: 4607508 - DNA, 25 bp, Homo sapien
ggtaagtagcaccaaaaatcgagga

SEQ ID NO: 4607509 - DNA, 25 bp, Homo sapien
tacaatagtggagaagaagcaggac

SEQ ID NO: 4607510 - DNA, 25 bp, Homo sapien
gcaggactaccataataagcgccca

SEQ ID NO: 4607511 - DNA, 25 bp, Homo sapien
tatgggtctgctagcctataaacca

SEQ ID NO: 4607512 - DNA, 25 bp, Homo sapien
agaatttcaaggctgcgtgagccat

SEQ ID NO: 4607513 - DNA, 25 bp, Homo sapien
cccagaatttcaaggctgcgtgagc

SEQ ID NO: 4607514 - DNA, 25 bp, Homo sapien
ccagaatttcaaggctgcgtgagcc

SEQ ID NO: 4607515 - DNA, 25 bp, Homo sapien
gcccagaatttcaaggctgcgtgag

SEQ ID NO: 4607516 - DNA, 25 bp, Homo sapien
gtagtcatgacaactggcagcccat

SEQ ID NO: 4607517 - DNA, 25 bp, Homo sapien
aagtcgtatgtggatcagagctgcc

SEQ ID NO: 4607518 - DNA, 25 bp, Homo sapien
ccggcccatcctgtagtgagacata

SEQ ID NO: 4607519 - DNA, 25 bp, Homo sapien
tacataatgaaggtacactcccggc

SEQ ID NO: 4607520 - DNA, 25 bp, Homo sapien
aaggctatgtgttggttgtgtaccc

SEQ ID NO: 4607521 - DNA, 25 bp, Homo sapien
taccagttgtaggtttgtggcaatc

SEQ ID NO: 4607522 - DNA, 25 bp, Homo sapien
gaatgtgtgtctttcgcttggacaa

SEQ ID NO: 4607523 - DNA, 25 bp, Homo sapien
tccaagtaactagaaccagaggcag

SEQ ID NO: 4607524 - DNA, 25 bp, Homo sapien
tgctgttttggttaggccctgagaa

SEQ ID NO: 4607525 - DNA, 25 bp, Homo sapien
tgttcggagtaggaggagtccctat

SEQ ID NO: 4607526 - DNA, 25 bp, Homo sapien
gccctgagaatgatgcagccagtcc

SEQ ID NO: 4607527 - DNA, 25 bp, Homo sapien
cctgtttactggtgtatcccggata

SEQ ID NO: 4607528 - DNA, 25 bp, Homo sapien
gctactccggcaagagctctgaaag

SEQ ID NO: 4607529 - DNA, 25 bp, Homo sapien
cgatcccatgctcagatgcttttga

SEQ ID NO: 4607530 - DNA, 25 bp, Homo sapien
gattccgtagtcctttagcccagca

SEQ ID NO: 4607531 - DNA, 25 bp, Homo sapien
tgacactctttttaggacactctgg

SEQ ID NO: 4607532 - DNA, 25 bp, Homo sapien
tctttttgaactaggcacataggta

SEQ ID NO: 4607533 - DNA, 25 bp, Homo sapien
tatgttctatcctagagaataatcc

SEQ ID NO: 4607534 - DNA, 25 bp, Homo sapien
cttcctcgagccactggtaattcag

SEQ ID NO: 4607535 - DNA, 25 bp, Homo sapien
tctggtcagggaacatgcttggtgt

SEQ ID NO: 4607536 - DNA, 25 bp, Homo sapien
tctgtgtatccgcttttatggcaaa

SEQ ID NO: 4607537 - DNA, 25 bp, Homo sapien
tatctgtggtattatctgaagtcag

SEQ ID NO: 4607538 - DNA, 25 bp, Homo sapien
accacagctctgtagttattatctg

SEQ ID NO: 4607539 - DNA, 25 bp, Homo sapien
caatgtaggtgtgtgaatttcttcc

SEQ ID NO: 4607540 - DNA, 25 bp, Homo sapien
tctaaaaggaatacagagctaaggc

SEQ ID NO: 4607541 - DNA, 25 bp, Homo sapien
ggcttccaccggaacaacagggctg

SEQ ID NO: 4607542 - DNA, 25 bp, Homo sapien
ttccacacagcgaaggaagacctga

SEQ ID NO: 4607543 - DNA, 25 bp, Homo sapien
tactgggtccagaattggtgtgttc

SEQ ID NO: 4607544 - DNA, 25 bp, Homo sapien
catatgcaaatagatcatgttccca

SEQ ID NO: 4607545 - DNA, 25 bp, Homo sapien
catgttcccaatagtttctcctgaa

SEQ ID NO: 4607546 - DNA, 25 bp, Homo sapien
gcaacttgcggtgtttcccaatcat

SEQ ID NO: 4607547 - DNA, 25 bp, Homo sapien
tcctcttggtcctgggattaaatct

SEQ ID NO: 4607548 - DNA, 25 bp, Homo sapien
gagtgtgacccaaagacaagaggac

SEQ ID NO: 4607549 - DNA, 25 bp, Homo sapien
agacaagaggacagaatatacttaa

SEQ ID NO: 4607550 - DNA, 25 bp, Homo sapien
gccaagcgtgatggcgtactcctgt

SEQ ID NO: 4607551 - DNA, 25 bp, Homo sapien
taaagtttaacctggctaggcacag

SEQ ID NO: 4607552 - DNA, 25 bp, Homo sapien
tgctcctctcaaaaatagggttctc

SEQ ID NO: 4607553 - DNA, 25 bp, Homo sapien
tgacagtttcttgccaatcattaaa

SEQ ID NO: 4607554 - DNA, 25 bp, Homo sapien
ctgacagtttcttgccaatcattaa

SEQ ID NO: 4607555 - DNA, 25 bp, Homo sapien
ttgctcctctcaaaaatagggttct

SEQ ID NO: 4607556 - DNA, 25 bp, Homo sapien
gcagtaatggtgaaagcaagatcaa

SEQ ID NO: 4607557 - DNA, 25 bp, Homo sapien
tgcaaactgtccattgagtgggtgg

SEQ ID NO: 4607558 - DNA, 25 bp, Homo sapien
tctttggaagccttagcagtaatgg

SEQ ID NO: 4607559 - DNA, 25 bp, Homo sapien
tgtttctggcagcttaacctcaagt

SEQ ID NO: 4607560 - DNA, 25 bp, Homo sapien
caccaagtcgaagtccatgctcttc

SEQ ID NO: 4607561 - DNA, 25 bp, Homo sapien
tgagtcaccaagtcgaagtccatgc

SEQ ID NO: 4607562 - DNA, 25 bp, Homo sapien
ctgagtcaccaagtcgaagtccatg

SEQ ID NO: 4607563 - DNA, 25 bp, Homo sapien
caagtcgaagtccatgctcttctaa

SEQ ID NO: 4607564 - DNA, 25 bp, Homo sapien
taaccaggtaacatgaggataccag

SEQ ID NO: 4607565 - DNA, 25 bp, Homo sapien
acttgacatcccatgtaggtttgca

SEQ ID NO: 4607566 - DNA, 25 bp, Homo sapien
ctctctcgtatgtggtaaccaggta

SEQ ID NO: 4607567 - DNA, 25 bp, Homo sapien
gctctacaactatgctcaccaaata

SEQ ID NO: 4607568 - DNA, 25 bp, Homo sapien
gaaaatgccaccgaaccttcataaa

SEQ ID NO: 4607569 - DNA, 25 bp, Homo sapien
tttggaaaatgccaccgaaccttca

SEQ ID NO: 4607570 - DNA, 25 bp, Homo sapien
tgccaccgaaccttcataaaataca

SEQ ID NO: 4607571 - DNA, 25 bp, Homo sapien
ataaaatacagcttgcactgaagca

SEQ ID NO: 4607572 - DNA, 25 bp, Homo sapien
ggcgattcccttggacactgtggtt

SEQ ID NO: 4607573 - DNA, 25 bp, Homo sapien
agaggcgattcccttggacactgtg

SEQ ID NO: 4607574 - DNA, 25 bp, Homo sapien
ccacagagaggcgattcccttggac

SEQ ID NO: 4607575 - DNA, 25 bp, Homo sapien
cagagaggcgattcccttggacact

SEQ ID NO: 4607576 - DNA, 25 bp, Homo sapien
ggtgtctgcttcttgattcaggtgt

SEQ ID NO: 4607577 - DNA, 25 bp, Homo sapien
gccttgctgttggtgcagtcaatat

SEQ ID NO: 4607578 - DNA, 25 bp, Homo sapien
tatctttgtcatcatgccgtttggt

SEQ ID NO: 4607579 - DNA, 25 bp, Homo sapien
catgccgtttggtttgtactgtggt

SEQ ID NO: 4607580 - DNA, 25 bp, Homo sapien
tctgtaagatgtttcaggcttacac

SEQ ID NO: 4607581 - DNA, 25 bp, Homo sapien
taagatgtttcaggcttacactgct

SEQ ID NO: 4607582 - DNA, 25 bp, Homo sapien
tgtttcaggcttacactgctgcata

SEQ ID NO: 4607583 - DNA, 25 bp, Homo sapien
tcaggcttacactgctgcatatttt

SEQ ID NO: 4607584 - DNA, 25 bp, Homo sapien
cactgaatatggttccaggccagaa

SEQ ID NO: 4607585 - DNA, 25 bp, Homo sapien
actgctgttagcctaccgttgagga

SEQ ID NO: 4607586 - DNA, 25 bp, Homo sapien
aaaagcttgcagttgtcatctagtc

SEQ ID NO: 4607587 - DNA, 25 bp, Homo sapien
tttgcttctcccagtttaccgatga

SEQ ID NO: 4607588 - DNA, 25 bp, Homo sapien
gaccagcggaaatcatagtgtcact

SEQ ID NO: 4607589 - DNA, 25 bp, Homo sapien
caaagcttgtgtatattggaccagc

SEQ ID NO: 4607590 - DNA, 25 bp, Homo sapien
ggctgactctcaattgatatgctac

SEQ ID NO: 4607591 - DNA, 25 bp, Homo sapien
cctgtatgagctgttaaacaatgct

SEQ ID NO: 4607592 - DNA, 25 bp, Homo sapien
gtgacttgtattctgtctagaagct

SEQ ID NO: 4607593 - DNA, 25 bp, Homo sapien
tgacttgtattctgtctagaagctg

SEQ ID NO: 4607594 - DNA, 25 bp, Homo sapien
cagggttctcatagaaaagagagtc

SEQ ID NO: 4607595 - DNA, 25 bp, Homo sapien
gaactgggcatagagaaatctgtga

SEQ ID NO: 4607596 - DNA, 25 bp, Homo sapien
gacttcatttttctcgggccacagc

SEQ ID NO: 4607597 - DNA, 25 bp, Homo sapien
tagagcctgcagtgccattcgactg

SEQ ID NO: 4607598 - DNA, 25 bp, Homo sapien
ttaccacagccccaaacgagaaatg

SEQ ID NO: 4607599 - DNA, 25 bp, Homo sapien
tcagagagcaggcaccattaggtcc

SEQ ID NO: 4607600 - DNA, 25 bp, Homo sapien
gatacaaactggaagggacgatggt

SEQ ID NO: 4607601 - DNA, 25 bp, Homo sapien
caggtggtagagttgaaagtccgca

SEQ ID NO: 4607602 - DNA, 25 bp, Homo sapien
caagcatcagcttcccatgatctga

SEQ ID NO: 4607603 - DNA, 25 bp, Homo sapien
tgatgccctgatcatataatctgat

SEQ ID NO: 4607604 - DNA, 25 bp, Homo sapien
acaagcatcagcttcccatgatctg

SEQ ID NO: 4607605 - DNA, 25 bp, Homo sapien
cctgatcatataatctgattccctg

SEQ ID NO: 4607606 - DNA, 25 bp, Homo sapien
gtagcgctacatcatgcttcagaaa

SEQ ID NO: 4607607 - DNA, 25 bp, Homo sapien
tagtgcttggtactcccagtgctgg

SEQ ID NO: 4607608 - DNA, 25 bp, Homo sapien
gtgctggggtttcagcaagctgaca

SEQ ID NO: 4607609 - DNA, 25 bp, Homo sapien
gaaatgcctctagtgcttggtactc

SEQ ID NO: 4607610 - DNA, 25 bp, Homo sapien
tggaacactgtctacctagccagga

SEQ ID NO: 4607611 - DNA, 25 bp, Homo sapien
tagaagagcttcagcccaacagtgc

SEQ ID NO: 4607612 - DNA, 25 bp, Homo sapien
tgcttggaagattctacaggtggcc

SEQ ID NO: 4607613 - DNA, 25 bp, Homo sapien
catttaaatgccgacgggagagtct

SEQ ID NO: 4607614 - DNA, 25 bp, Homo sapien
tgtccatggtaagcaagaagctggc

SEQ ID NO: 4607615 - DNA, 25 bp, Homo sapien
tacaccaggcttaggctttcatgac

SEQ ID NO: 4607616 - DNA, 25 bp, Homo sapien
gctggcagtcccttgagttttgaaa

SEQ ID NO: 4607617 - DNA, 25 bp, Homo sapien
tcagatgctctgttctacaccaggc

SEQ ID NO: 4607618 - DNA, 25 bp, Homo sapien
gtttatcacactctgcgatttttag

SEQ ID NO: 4607619 - DNA, 25 bp, Homo sapien
cacactctgcgatttttagtgggaa

SEQ ID NO: 4607620 - DNA, 25 bp, Homo sapien
gaaataggtttatcacactctgcga

SEQ ID NO: 4607621 - DNA, 25 bp, Homo sapien
atttttagtgggaaactggcatctt

SEQ ID NO: 4607622 - DNA, 25 bp, Homo sapien
tctcctaataggtgtcgccgccaaa

SEQ ID NO: 4607623 - DNA, 25 bp, Homo sapien
tattaataatccgttggtgggttga

SEQ ID NO: 4607624 - DNA, 25 bp, Homo sapien
cagacaagtgccttgacagttgctg

SEQ ID NO: 4607625 - DNA, 25 bp, Homo sapien
catacacaaagcacgtggaccaaat

SEQ ID NO: 4607626 - DNA, 25 bp, Homo sapien
ctcacttgatttagactcgaaggaa

SEQ ID NO: 4607627 - DNA, 25 bp, Homo sapien
agaaattcagtgtacccaaccctcg

SEQ ID NO: 4607628 - DNA, 25 bp, Homo sapien
tttcctccttaagcaggtagcaggc

SEQ ID NO: 4607629 - DNA, 25 bp, Homo sapien
tagcaggctgcgtgtggatttctta

SEQ ID NO: 4607630 - DNA, 25 bp, Homo sapien
tggacccgggcctgacctctattca

SEQ ID NO: 4607631 - DNA, 25 bp, Homo sapien
gcagagccaaccacaactacccttt

SEQ ID NO: 4607632 - DNA, 25 bp, Homo sapien
tcacagattgcctcaccgtgcagtc

SEQ ID NO: 4607633 - DNA, 25 bp, Homo sapien
caggtaaagacagcaaaggcagagc

SEQ ID NO: 4607634 - DNA, 25 bp, Homo sapien
tatcgatgtctcttccgttttgtcc

SEQ ID NO: 4607635 - DNA, 25 bp, Homo sapien
tgatagagcatgatgccttcccagg

SEQ ID NO: 4607636 - DNA, 25 bp, Homo sapien
ttgtcctcttagttgcggtccagca

SEQ ID NO: 4607637 - DNA, 25 bp, Homo sapien
aaatattccaaggaccggctctcct

SEQ ID NO: 4607638 - DNA, 25 bp, Homo sapien
accgtggtgtggcccgttcagagga

SEQ ID NO: 4607639 - DNA, 25 bp, Homo sapien
ccgtggtgtggcccgttcagaggac

SEQ ID NO: 4607640 - DNA, 25 bp, Homo sapien
ttattcactccggtgcgagcgggct

SEQ ID NO: 4607641 - DNA, 25 bp, Homo sapien
gaatgtcacaaggtgcgtagtcacg

SEQ ID NO: 4607642 - DNA, 25 bp, Homo sapien
caaggccgattgattatttagggta

SEQ ID NO: 4607643 - DNA, 25 bp, Homo sapien
cacatggcaggatatcacaaggccg

SEQ ID NO: 4607644 - DNA, 25 bp, Homo sapien
cacaaggcactgaagaagggtacat

SEQ ID NO: 4607645 - DNA, 25 bp, Homo sapien
catccttaatgccagatgatgtttt

SEQ ID NO: 4607646 - DNA, 25 bp, Homo sapien
catcatccttaatgccagatgatgt

SEQ ID NO: 4607647 - DNA, 25 bp, Homo sapien
tttaatcaagttttcacaaggcact

SEQ ID NO: 4607648 - DNA, 25 bp, Homo sapien
gagatggaatctgtataccgtgagc

SEQ ID NO: 4607649 - DNA, 25 bp, Homo sapien
caagactaatgcaatcctggacagt

SEQ ID NO: 4607650 - DNA, 25 bp, Homo sapien
tgatgcctcctcttgacccggtctt

SEQ ID NO: 4607651 - DNA, 25 bp, Homo sapien
cctggacagtgcttgtgagatggaa

SEQ ID NO: 4607652 - DNA, 25 bp, Homo sapien
tttgcattgtacatctttagactcc

SEQ ID NO: 4607653 - DNA, 25 bp, Homo sapien
gtacatctttagactccctgtgctg

SEQ ID NO: 4607654 - DNA, 25 bp, Homo sapien
catctttagactccctgtgctgtct

SEQ ID NO: 4607655 - DNA, 25 bp, Homo sapien
tttgtgcccttgctgaataattctg

SEQ ID NO: 4607656 - DNA, 25 bp, Homo sapien
ataatcaaaacttgagctccaattt

SEQ ID NO: 4607657 - DNA, 25 bp, Homo sapien
gacaccactgtgcataatcaaaact

SEQ ID NO: 4607658 - DNA, 25 bp, Homo sapien
tcagtgacaaccatactgcgaagtc

SEQ ID NO: 4607659 - DNA, 25 bp, Homo sapien
agtcccgtagggttgtgatgcaaga

SEQ ID NO: 4607660 - DNA, 25 bp, Homo sapien
accacgcttgtctaaaagttcagtc

SEQ ID NO: 4607661 - DNA, 25 bp, Homo sapien
tcaccacgcttgtctaaaagttcag

SEQ ID NO: 4607662 - DNA, 25 bp, Homo sapien
tctctcaccacgcttgtctaaaagt

SEQ ID NO: 4607663 - DNA, 25 bp, Homo sapien
tctctctctcaccacgcttgtctaa

SEQ ID NO: 4607664 - DNA, 25 bp, Homo sapien
taggaaatacttatgggagcagtct

SEQ ID NO: 4607665 - DNA, 25 bp, Homo sapien
cactaggtgaacagtctatccttaa

SEQ ID NO: 4607666 - DNA, 25 bp, Homo sapien
actacttcattcaggttccccatag

SEQ ID NO: 4607667 - DNA, 25 bp, Homo sapien
gcagtctatggtatggtcctagcca

SEQ ID NO: 4607668 - DNA, 25 bp, Homo sapien
ctgtaagtgtagattgttcttgtta

SEQ ID NO: 4607669 - DNA, 25 bp, Homo sapien
gggagctctcatcatgtcagtgaag

SEQ ID NO: 4607670 - DNA, 25 bp, Homo sapien
taagtgtagattgttcttgttattg

SEQ ID NO: 4607671 - DNA, 25 bp, Homo sapien
ttggggagctctcatcatgtcagtg

SEQ ID NO: 4607672 - DNA, 25 bp, Homo sapien
gaacatgcatggcagcatgaagcag

SEQ ID NO: 4607673 - DNA, 25 bp, Homo sapien
gtttactcagaacatgcatggcagc

SEQ ID NO: 4607674 - DNA, 25 bp, Homo sapien
cagcatgaagcagtgcgtgcaccat

SEQ ID NO: 4607675 - DNA, 25 bp, Homo sapien
tgcggggacgcagttgtttactcag

SEQ ID NO: 4607676 - DNA, 25 bp, Homo sapien
ctactttgagtggaaacattgggcc

SEQ ID NO: 4607677 - DNA, 25 bp, Homo sapien
aaatcctttccgcagacctcttctt

SEQ ID NO: 4607678 - DNA, 25 bp, Homo sapien
tggaaacattgggccttagtaaatc

SEQ ID NO: 4607679 - DNA, 25 bp, Homo sapien
agtaaatcctttccgcagacctctt

SEQ ID NO: 4607680 - DNA, 25 bp, Homo sapien
tcaccaagtggctatgtatctgata

SEQ ID NO: 4607681 - DNA, 25 bp, Homo sapien
tggctatgtatctgatatgtgcaag

SEQ ID NO: 4607682 - DNA, 25 bp, Homo sapien
caagtggctatgtatctgatatgtg

SEQ ID NO: 4607683 - DNA, 25 bp, Homo sapien
tatgtatctgatatgtgcaagacca

SEQ ID NO: 4607684 - DNA, 25 bp, Homo sapien
gccctgcaacaaaagagcgcttcag

SEQ ID NO: 4607685 - DNA, 25 bp, Homo sapien
gtagagcttgcacgcatgctgagca

SEQ ID NO: 4607686 - DNA, 25 bp, Homo sapien
agaagttagggaatctgctgacccc

SEQ ID NO: 4607687 - DNA, 25 bp, Homo sapien
gttcagcagagcagcgtagagcttg

SEQ ID NO: 4607688 - DNA, 25 bp, Homo sapien
catttttatcatcgtcttgagtatc

SEQ ID NO: 4607689 - DNA, 25 bp, Homo sapien
tttatcatcgtcttgagtatcaagt

SEQ ID NO: 4607690 - DNA, 25 bp, Homo sapien
tcccatttttatcatcgtcttgagt

SEQ ID NO: 4607691 - DNA, 25 bp, Homo sapien
tttcccatttttatcatcgtcttga

SEQ ID NO: 4607692 - DNA, 25 bp, Homo sapien
ttttcaaaattgagggcatgcttga

SEQ ID NO: 4607693 - DNA, 25 bp, Homo sapien
tagacattccgtatttcaaagaacc

SEQ ID NO: 4607694 - DNA, 25 bp, Homo sapien
aattgagggcatgcttgatgtcagg

SEQ ID NO: 4607695 - DNA, 25 bp, Homo sapien
tcacttagacattccgtatttcaaa

SEQ ID NO: 4607696 - DNA, 25 bp, Homo sapien
ggcctggccctggatatgccataga

SEQ ID NO: 4607697 - DNA, 25 bp, Homo sapien
cctggatatgccatagagatgctca

SEQ ID NO: 4607698 - DNA, 25 bp, Homo sapien
ggccctggatatgccatagagatgc

SEQ ID NO: 4607699 - DNA, 25 bp, Homo sapien
cctggccctggatatgccatagaga

SEQ ID NO: 4607700 - DNA, 25 bp, Homo sapien
ttgtagcattgctgagtacagcagc

SEQ ID NO: 4607701 - DNA, 25 bp, Homo sapien
agcaccgtaggagtttttgatagaa

SEQ ID NO: 4607702 - DNA, 25 bp, Homo sapien
gatagaaccgttccttcatccttac

SEQ ID NO: 4607703 - DNA, 25 bp, Homo sapien
tgagtacagcagcaccgtaggagtt

SEQ ID NO: 4607704 - DNA, 25 bp, Homo sapien
ccaccttgtgtctgcagcacagctg

SEQ ID NO: 4607705 - DNA, 25 bp, Homo sapien
taaacaataagcatgaaccaccttg

SEQ ID NO: 4607706 - DNA, 25 bp, Homo sapien
catgctccgtgtgagcaattttcat

SEQ ID NO: 4607707 - DNA, 25 bp, Homo sapien
ggtgggcagcctcctcatgctccgt

SEQ ID NO: 4607708 - DNA, 25 bp, Homo sapien
ctgttacacgtgtcctggtggtgtc

SEQ ID NO: 4607709 - DNA, 25 bp, Homo sapien
tggcgcctgttacacgtgtcctggt

SEQ ID NO: 4607710 - DNA, 25 bp, Homo sapien
tgagtggcagctggcgcctgttaca

SEQ ID NO: 4607711 - DNA, 25 bp, Homo sapien
gaaatgaggagtgatctgtgccagc

SEQ ID NO: 4607712 - DNA, 25 bp, Homo sapien
ccagtccccagcacgaaactggtcc

SEQ ID NO: 4607713 - DNA, 25 bp, Homo sapien
cccagtccccagcacgaaactggtc

SEQ ID NO: 4607714 - DNA, 25 bp, Homo sapien
gccaaacgtaacacagagtcttggg

SEQ ID NO: 4607715 - DNA, 25 bp, Homo sapien
agtcttggggagcattagaacaacc

SEQ ID NO: 4607716 - DNA, 25 bp, Homo sapien
acaacctttggctctaaccatggcc

SEQ ID NO: 4607717 - DNA, 25 bp, Homo sapien
cattcttctgccaaacgtaacacag

SEQ ID NO: 4607718 - DNA, 25 bp, Homo sapien
tgcacttggctttcagaagcaatgc

SEQ ID NO: 4607719 - DNA, 25 bp, Homo sapien
gctctgtgttgacaccttctttccc

SEQ ID NO: 4607720 - DNA, 25 bp, Homo sapien
tatcctttgtcttgtagaaaacctg

SEQ ID NO: 4607721 - DNA, 25 bp, Homo sapien
ttggctttcagaagcaatgctcgct

SEQ ID NO: 4607722 - DNA, 25 bp, Homo sapien
gatgacagccgtatttgcagctcgt

SEQ ID NO: 4607723 - DNA, 25 bp, Homo sapien
ttttgattcttgatgtgatgacagc

SEQ ID NO: 4607724 - DNA, 25 bp, Homo sapien
gatgtgatgacagccgtatttgcag

SEQ ID NO: 4607725 - DNA, 25 bp, Homo sapien
tatttgcagctcgtacagccgtgat

SEQ ID NO: 4607726 - DNA, 25 bp, Homo sapien
cagaaataatggactggttaggagg

SEQ ID NO: 4607727 - DNA, 25 bp, Homo sapien
actggcagaaataatggactggtta

SEQ ID NO: 4607728 - DNA, 25 bp, Homo sapien
tgaatgcctcgtctgcctggaaact

SEQ ID NO: 4607729 - DNA, 25 bp, Homo sapien
gttctcatttagagacaggtgtctg

SEQ ID NO: 4607730 - DNA, 25 bp, Homo sapien
tgtagtgaacgtctgtggtttcagg

SEQ ID NO: 4607731 - DNA, 25 bp, Homo sapien
cctgtgtgtagtgaacgtctgtggt

SEQ ID NO: 4607732 - DNA, 25 bp, Homo sapien
tagtgaacgtctgtggtttcagggt

SEQ ID NO: 4607733 - DNA, 25 bp, Homo sapien
ctcctcctgtgtgtagtgaacgtct

SEQ ID NO: 4607734 - DNA, 25 bp, Homo sapien
aaagagagttcctgtgatcccggtg

SEQ ID NO: 4607735 - DNA, 25 bp, Homo sapien
caactgggaaaaattgtgataccgc

SEQ ID NO: 4607736 - DNA, 25 bp, Homo sapien
gataccgctttctgtgaatccccga

SEQ ID NO: 4607737 - DNA, 25 bp, Homo sapien
ggacagccaacacgaccaaaggatc

SEQ ID NO: 4607738 - DNA, 25 bp, Homo sapien
caagattccatactctggggtgtga

SEQ ID NO: 4607739 - DNA, 25 bp, Homo sapien
ttcaggttctgaaggcaagattcca

SEQ ID NO: 4607740 - DNA, 25 bp, Homo sapien
gaagaagaaggtcattctaagacac

SEQ ID NO: 4607741 - DNA, 25 bp, Homo sapien
taagacaccaagtgacattcaggtt

SEQ ID NO: 4607742 - DNA, 25 bp, Homo sapien
tactcaaacgcaaggagtagggagg

SEQ ID NO: 4607743 - DNA, 25 bp, Homo sapien
gagtcctccaaacggctttcctgaa

SEQ ID NO: 4607744 - DNA, 25 bp, Homo sapien
tttggcatcaagaatgagtcctcca

SEQ ID NO: 4607745 - DNA, 25 bp, Homo sapien
gaagttcctcctggtatatcaccca

SEQ ID NO: 4607746 - DNA, 25 bp, Homo sapien
tccagaactacaagtgaactctgaa

SEQ ID NO: 4607747 - DNA, 25 bp, Homo sapien
cagaactacaagtgaactctgaagc

SEQ ID NO: 4607748 - DNA, 25 bp, Homo sapien
tctccagaactacaagtgaactctg

SEQ ID NO: 4607749 - DNA, 25 bp, Homo sapien
tgtgttctccagaactacaagtgaa

SEQ ID NO: 4607750 - DNA, 25 bp, Homo sapien
tcttgcagctgatatatctgggagc

SEQ ID NO: 4607751 - DNA, 25 bp, Homo sapien
tgcagctgatatatctgggagcccc

SEQ ID NO: 4607752 - DNA, 25 bp, Homo sapien
ctgtgctcttgacaaggcccatcat

SEQ ID NO: 4607753 - DNA, 25 bp, Homo sapien
caaggcccatcatattgccttccat

SEQ ID NO: 4607754 - DNA, 25 bp, Homo sapien
ctgacccaaagacagtcactccatg

SEQ ID NO: 4607755 - DNA, 25 bp, Homo sapien
gctctttcccacataggataagatg

SEQ ID NO: 4607756 - DNA, 25 bp, Homo sapien
gatggacccattggattccttctct

SEQ ID NO: 4607757 - DNA, 25 bp, Homo sapien
cccaaagacagtcactccatgtgct

SEQ ID NO: 4607758 - DNA, 25 bp, Homo sapien
ccttcatttgcaaggggaccgtctt

SEQ ID NO: 4607759 - DNA, 25 bp, Homo sapien
gaccgtcttcaagtaatagggctta

SEQ ID NO: 4607760 - DNA, 25 bp, Homo sapien
aggtccagtgtgtacatcagtttcc

SEQ ID NO: 4607761 - DNA, 25 bp, Homo sapien
taaggatgcaatatcaatatggcca

SEQ ID NO: 4607762 - DNA, 25 bp, Homo sapien
caggggtcggataaattcagtgtga

SEQ ID NO: 4607763 - DNA, 25 bp, Homo sapien
cttcaggggtcggataaattcagtg

SEQ ID NO: 4607764 - DNA, 25 bp, Homo sapien
gggtcggataaattcagtgtgaaca

SEQ ID NO: 4607765 - DNA, 25 bp, Homo sapien
tcttcttcaggggtcggataaattc

SEQ ID NO: 4607766 - DNA, 25 bp, Homo sapien
ctgctgacttggttggatccccaaa

SEQ ID NO: 4607767 - DNA, 25 bp, Homo sapien
ccatggtgttcagtccagattgagg

SEQ ID NO: 4607768 - DNA, 25 bp, Homo sapien
tcttagccctctctgtatgtccatg

SEQ ID NO: 4607769 - DNA, 25 bp, Homo sapien
catttgttcttagccctctctgtat

SEQ ID NO: 4607770 - DNA, 25 bp, Homo sapien
cacattccacattcgaaataagcaa

SEQ ID NO: 4607771 - DNA, 25 bp, Homo sapien
aacacacacgtgagagaagagaggc

SEQ ID NO: 4607772 - DNA, 25 bp, Homo sapien
tgtttgaggctcattgtctgcttcc

SEQ ID NO: 4607773 - DNA, 25 bp, Homo sapien
caattgaatgtcttgttaagccatg

SEQ ID NO: 4607774 - DNA, 25 bp, Homo sapien
gctgagaatagagcagtgaccgtga

SEQ ID NO: 4607775 - DNA, 25 bp, Homo sapien
ggtgagtgtggacaggcttcctgct

SEQ ID NO: 4607776 - DNA, 25 bp, Homo sapien
tacgttgtttgcaggctctggtctg

SEQ ID NO: 4607777 - DNA, 25 bp, Homo sapien
cttgtggagttgtggaaacatctgt

SEQ ID NO: 4607778 - DNA, 25 bp, Homo sapien
ttttgagagcttggaaaggtggagg

SEQ ID NO: 4607779 - DNA, 25 bp, Homo sapien
cttttgagagcttggaaaggtggag

SEQ ID NO: 4607780 - DNA, 25 bp, Homo sapien
tttgagagcttggaaaggtggaggt

SEQ ID NO: 4607781 - DNA, 25 bp, Homo sapien
ggaaaatacgttttattgctctgtg

SEQ ID NO: 4607782 - DNA, 25 bp, Homo sapien
gaaaatacgttttattgctctgtgc

SEQ ID NO: 4607783 - DNA, 25 bp, Homo sapien
tgggaaaatacgttttattgctctg

SEQ ID NO: 4607784 - DNA, 25 bp, Homo sapien
gtagactgccatttctgtacctgca

SEQ ID NO: 4607785 - DNA, 25 bp, Homo sapien
ccgtaggccctgactgaagaattca

SEQ ID NO: 4607786 - DNA, 25 bp, Homo sapien
ggtgtgacttgtgacctgctccgca

SEQ ID NO: 4607787 - DNA, 25 bp, Homo sapien
tgtgactctcgccaaagtgtttgta

SEQ ID NO: 4607788 - DNA, 25 bp, Homo sapien
aaacagcacagttttataggagaaa

SEQ ID NO: 4607789 - DNA, 25 bp, Homo sapien
acagcacagttttataggagaaata

SEQ ID NO: 4607790 - DNA, 25 bp, Homo sapien
attaggtcaagtttcaggaagaatg

SEQ ID NO: 4607791 - DNA, 25 bp, Homo sapien
ttcaggaagaatgacaattagatct

SEQ ID NO: 4607792 - DNA, 25 bp, Homo sapien
tcatcttggaactcccatggtcagg

SEQ ID NO: 4607793 - DNA, 25 bp, Homo sapien
gcttttgtgcatctcaagagtgcaa

SEQ ID NO: 4607794 - DNA, 25 bp, Homo sapien
aacttggcatatggaaagagttcag

SEQ ID NO: 4607795 - DNA, 25 bp, Homo sapien
tcagtaaaggggcttgccagtgata

SEQ ID NO: 4607796 - DNA, 25 bp, Homo sapien
gaaagtcaaagagatcagtaggcaa

SEQ ID NO: 4607797 - DNA, 25 bp, Homo sapien
caatcagtgacccaagaagctaggc

SEQ ID NO: 4607798 - DNA, 25 bp, Homo sapien
tgtctcgggagtctggaaagtcaaa

SEQ ID NO: 4607799 - DNA, 25 bp, Homo sapien
gctaggctcatagctaaatcctgga

SEQ ID NO: 4607800 - DNA, 25 bp, Homo sapien
ctttgttcggtttctctaatgctcc

SEQ ID NO: 4607801 - DNA, 25 bp, Homo sapien
tcctttgttcggtttctctaatgct

SEQ ID NO: 4607802 - DNA, 25 bp, Homo sapien
atcctttgttcggtttctctaatgc

SEQ ID NO: 4607803 - DNA, 25 bp, Homo sapien
cctttgttcggtttctctaatgctc

SEQ ID NO: 4607804 - DNA, 25 bp, Homo sapien
tattttaaccaccatccttcggctg

SEQ ID NO: 4607805 - DNA, 25 bp, Homo sapien
aagaacactctgttaccacgagtta

SEQ ID NO: 4607806 - DNA, 25 bp, Homo sapien
tactgtacggcatgcttctgttgtt

SEQ ID NO: 4607807 - DNA, 25 bp, Homo sapien
tcctcgtctccttgtgtgaagtcct

SEQ ID NO: 4607808 - DNA, 25 bp, Homo sapien
caagcgaggagcagagttctggaca

SEQ ID NO: 4607809 - DNA, 25 bp, Homo sapien
gcagaagggagcaagcgaggagcag

SEQ ID NO: 4607810 - DNA, 25 bp, Homo sapien
cacagggcagaagggagcaagcgag

SEQ ID NO: 4607811 - DNA, 25 bp, Homo sapien
aagcgaggagcagagttctggacat

SEQ ID NO: 4607812 - DNA, 25 bp, Homo sapien
aatgccagtcacctgtgtcacaact

SEQ ID NO: 4607813 - DNA, 25 bp, Homo sapien
gagccaggaccgcagtttgaatctg

SEQ ID NO: 4607814 - DNA, 25 bp, Homo sapien
caaagctggtatgggaataggaatc

SEQ ID NO: 4607815 - DNA, 25 bp, Homo sapien
tctgggacaagtgctttgacaaagc

SEQ ID NO: 4607816 - DNA, 25 bp, Homo sapien
ccgagggaggaagtaccgagtctct

SEQ ID NO: 4607817 - DNA, 25 bp, Homo sapien
cgagtctctgagtctgctctcctct

SEQ ID NO: 4607818 - DNA, 25 bp, Homo sapien
caagagggggccttactcagtgcaa

SEQ ID NO: 4607819 - DNA, 25 bp, Homo sapien
ttcaggccacccttctgttcaggct

SEQ ID NO: 4607820 - DNA, 25 bp, Homo sapien
tgcaggtgcccatgcctcttattcc

SEQ ID NO: 4607821 - DNA, 25 bp, Homo sapien
aggtgcccatgcctcttattccttc

SEQ ID NO: 4607822 - DNA, 25 bp, Homo sapien
gctgcaggtgcccatgcctcttatt

SEQ ID NO: 4607823 - DNA, 25 bp, Homo sapien
tgctgcaggtgcccatgcctcttat

SEQ ID NO: 4607824 - DNA, 25 bp, Homo sapien
gcaagcattgctgccgctggatcga

SEQ ID NO: 4607825 - DNA, 25 bp, Homo sapien
tataaactgctgatccacatgagag

SEQ ID NO: 4607826 - DNA, 25 bp, Homo sapien
ggccggttgccctcgaagatacaag

SEQ ID NO: 4607827 - DNA, 25 bp, Homo sapien
tcgtgcggcacatcgagaaggtcca

SEQ ID NO: 4607828 - DNA, 25 bp, Homo sapien
gaggagttcccgggcagcaccgtag

SEQ ID NO: 4607829 - DNA, 25 bp, Homo sapien
ctggaggagttcccgggcagcaccg

SEQ ID NO: 4607830 - DNA, 25 bp, Homo sapien
tggaggagttcccgggcagcaccgt

SEQ ID NO: 4607831 - DNA, 25 bp, Homo sapien
ggagttcccgggcagcaccgtagac

SEQ ID NO: 4607832 - DNA, 25 bp, Homo sapien
tggtggcctacatcaacgggtcgag

SEQ ID NO: 4607833 - DNA, 25 bp, Homo sapien
cagccggaggtctacgggcatttcc

SEQ ID NO: 4607834 - DNA, 25 bp, Homo sapien
agcacgagcgcatgcaacagctgga

SEQ ID NO: 4607835 - DNA, 25 bp, Homo sapien
tttcaataccatcatccgcacgtcg

SEQ ID NO: 4607836 - DNA, 25 bp, Homo sapien
gttttgcacagttttgagcatttgt

SEQ ID NO: 4607837 - DNA, 25 bp, Homo sapien
ttttgcacagttttgagcatttgtc

SEQ ID NO: 4607838 - DNA, 25 bp, Homo sapien
ccaagtattgttcgcgctggccagc

SEQ ID NO: 4607839 - DNA, 25 bp, Homo sapien
ttgaagggagtcattgtttcttact

SEQ ID NO: 4607840 - DNA, 25 bp, Homo sapien
ctgcccaagtattgttcgcgctggc

SEQ ID NO: 4607841 - DNA, 25 bp, Homo sapien
gcccaagtattgttcgcgctggcca

SEQ ID NO: 4607842 - DNA, 25 bp, Homo sapien
ctgctctgacccaggcaagttaatg

SEQ ID NO: 4607843 - DNA, 25 bp, Homo sapien
tgctctgacccaggcaagttaatga

SEQ ID NO: 4607844 - DNA, 25 bp, Homo sapien
gctctgacccaggcaagttaatgac

SEQ ID NO: 4607845 - DNA, 25 bp, Homo sapien
cagggtttgcagagttagctatttt

SEQ ID NO: 4607846 - DNA, 25 bp, Homo sapien
gcagggtttgcagagttagctattt

SEQ ID NO: 4607847 - DNA, 25 bp, Homo sapien
tgcagggtttgcagagttagctatt

SEQ ID NO: 4607848 - DNA, 25 bp, Homo sapien
aaaaggttctgttgatagggacgag

SEQ ID NO: 4607849 - DNA, 25 bp, Homo sapien
ctgttgatagggacgagctttgtgt

SEQ ID NO: 4607850 - DNA, 25 bp, Homo sapien
ttgatagggacgagctttgtgtgca

SEQ ID NO: 4607851 - DNA, 25 bp, Homo sapien
ttctgttgatagggacgagctttgt

SEQ ID NO: 4607852 - DNA, 25 bp, Homo sapien
gctgtgcgggagatgtactttctga

SEQ ID NO: 4607853 - DNA, 25 bp, Homo sapien
aattctgtcatcaggcagtaaggcc

SEQ ID NO: 4607854 - DNA, 25 bp, Homo sapien
tatgtggttcaagctatgccaggcc

SEQ ID NO: 4607855 - DNA, 25 bp, Homo sapien
cagtaaggcctgtatcgcatgtcac

SEQ ID NO: 4607856 - DNA, 25 bp, Homo sapien
cagaaccattcagatgtagtctgtt

SEQ ID NO: 4607857 - DNA, 25 bp, Homo sapien
tggatggaacaaatagagtcccgtt

SEQ ID NO: 4607858 - DNA, 25 bp, Homo sapien
tctttgcatatgatacacagaacca

SEQ ID NO: 4607859 - DNA, 25 bp, Homo sapien
ttgttgtgggaacatttctttgcat

SEQ ID NO: 4607860 - DNA, 25 bp, Homo sapien
catgaggcgagtgctgtccatggtc

SEQ ID NO: 4607861 - DNA, 25 bp, Homo sapien
ggtcagccctagtgtccagcagatg

SEQ ID NO: 4607862 - DNA, 25 bp, Homo sapien
tgaagcccttctcattaccatcagg

SEQ ID NO: 4607863 - DNA, 25 bp, Homo sapien
tcctgtgaacgacggaagaccagaa

SEQ ID NO: 4607864 - DNA, 25 bp, Homo sapien
gtgtcagctacccataaccatcctt

SEQ ID NO: 4607865 - DNA, 25 bp, Homo sapien
tctgtgtcagctacccataaccatc

SEQ ID NO: 4607866 - DNA, 25 bp, Homo sapien
ctatctgtgtcagctacccataacc

SEQ ID NO: 4607867 - DNA, 25 bp, Homo sapien
cactatctgtgtcagctacccataa

SEQ ID NO: 4607868 - DNA, 25 bp, Homo sapien
aagagccagccacccattgagttcc

SEQ ID NO: 4607869 - DNA, 25 bp, Homo sapien
tctgaagggcacacaaggtgttggt

SEQ ID NO: 4607870 - DNA, 25 bp, Homo sapien
gagccagccacccattgagttccat

SEQ ID NO: 4607871 - DNA, 25 bp, Homo sapien
aagggcacacaaggtgttggtcact

SEQ ID NO: 4607872 - DNA, 25 bp, Homo sapien
tgcatcgaagcgtacagccagtggg

SEQ ID NO: 4607873 - DNA, 25 bp, Homo sapien
gaccataaggagactggctctagca

SEQ ID NO: 4607874 - DNA, 25 bp, Homo sapien
gagactggctctagcaggtgaagct

SEQ ID NO: 4607875 - DNA, 25 bp, Homo sapien
catgacttgcttattggtgagacca

SEQ ID NO: 4607876 - DNA, 25 bp, Homo sapien
tggatggtgcagatgctcaaggaat

SEQ ID NO: 4607877 - DNA, 25 bp, Homo sapien
tgcagatgctcaaggaatttagcct

SEQ ID NO: 4607878 - DNA, 25 bp, Homo sapien
tgttgagggcgcctgtttaatccgt

SEQ ID NO: 4607879 - DNA, 25 bp, Homo sapien
tgtttaatccgtaggaaatcacagc

SEQ ID NO: 4607880 - DNA, 25 bp, Homo sapien
ccactctttgtgaatctctgcacca

SEQ ID NO: 4607881 - DNA, 25 bp, Homo sapien
cactctttgtgaatctctgcaccat

SEQ ID NO: 4607882 - DNA, 25 bp, Homo sapien
tctttgtgaatctctgcaccatcaa

SEQ ID NO: 4607883 - DNA, 25 bp, Homo sapien
ctctttgtgaatctctgcaccatca

SEQ ID NO: 4607884 - DNA, 25 bp, Homo sapien
gaaggcataggcatattgggataga

SEQ ID NO: 4607885 - DNA, 25 bp, Homo sapien
ctggaaggcataggcatattgggat

SEQ ID NO: 4607886 - DNA, 25 bp, Homo sapien
aaggcataggcatattgggatagag

SEQ ID NO: 4607887 - DNA, 25 bp, Homo sapien
tggaaggcataggcatattgggata

SEQ ID NO: 4607888 - DNA, 25 bp, Homo sapien
cagctatggtaagaataagtttact

SEQ ID NO: 4607889 - DNA, 25 bp, Homo sapien
gttcttcaggtggagaatgaacagc

SEQ ID NO: 4607890 - DNA, 25 bp, Homo sapien
taggccacattggactttgagtgca

SEQ ID NO: 4607891 - DNA, 25 bp, Homo sapien
tcttgggagtttcgaaacctgaatc

SEQ ID NO: 4607892 - DNA, 25 bp, Homo sapien
gagaaatttcgaagcctcttgcttc

SEQ ID NO: 4607893 - DNA, 25 bp, Homo sapien
agagaaatttcgaagcctcttgctt

SEQ ID NO: 4607894 - DNA, 25 bp, Homo sapien
ctagagaaatttcgaagcctcttgc

SEQ ID NO: 4607895 - DNA, 25 bp, Homo sapien
tagagaaatttcgaagcctcttgct

SEQ ID NO: 4607896 - DNA, 25 bp, Homo sapien
tatcacagatgcatcgagtaagcag

SEQ ID NO: 4607897 - DNA, 25 bp, Homo sapien
ctggttccccatgcgcagtccataa

SEQ ID NO: 4607898 - DNA, 25 bp, Homo sapien
gtccacagctgctgatacccctggg

SEQ ID NO: 4607899 - DNA, 25 bp, Homo sapien
tgctctgtgatgacttgggcagtat

SEQ ID NO: 4607900 - DNA, 25 bp, Homo sapien
ttttattctccctctttgacggatg

SEQ ID NO: 4607901 - DNA, 25 bp, Homo sapien
ccctctttgacggatgcttttgtag

SEQ ID NO: 4607902 - DNA, 25 bp, Homo sapien
tattctccctctttgacggatgctt

SEQ ID NO: 4607903 - DNA, 25 bp, Homo sapien
tctttgacggatgcttttgtagttt

SEQ ID NO: 4607904 - DNA, 25 bp, Homo sapien
ttaaggatcttcttggggtctacat

SEQ ID NO: 4607905 - DNA, 25 bp, Homo sapien
attaaggatcttcttggggtctaca

SEQ ID NO: 4607906 - DNA, 25 bp, Homo sapien
acttgatcccgtgtggaatgctgag

SEQ ID NO: 4607907 - DNA, 25 bp, Homo sapien
tttgtaaaacacttgatcccgtgtg

SEQ ID NO: 4607908 - DNA, 25 bp, Homo sapien
taaaacacttgatcccgtgtggaat

SEQ ID NO: 4607909 - DNA, 25 bp, Homo sapien
gctgagggctgtggaccacaacagt

SEQ ID NO: 4607910 - DNA, 25 bp, Homo sapien
tggggtcgctcatctgttccagtgt

SEQ ID NO: 4607911 - DNA, 25 bp, Homo sapien
ctggggtcgctcatctgttccagtg

SEQ ID NO: 4607912 - DNA, 25 bp, Homo sapien
agagatattcttccctacctctgtt

SEQ ID NO: 4607913 - DNA, 25 bp, Homo sapien
ctgagcagtaagaaaaaggcctggt

SEQ ID NO: 4607914 - DNA, 25 bp, Homo sapien
aaggcctggttttattctaccatag

SEQ ID NO: 4607915 - DNA, 25 bp, Homo sapien
tacctctgtttcttcctaatctcca

SEQ ID NO: 4607916 - DNA, 25 bp, Homo sapien
tgctgagtagagtaaccctcttgag

SEQ ID NO: 4607917 - DNA, 25 bp, Homo sapien
tagagtaaccctcttgagttctctc

SEQ ID NO: 4607918 - DNA, 25 bp, Homo sapien
actggccttctcagttttagccttc

SEQ ID NO: 4607919 - DNA, 25 bp, Homo sapien
gttactggccttctcagttttagcc

SEQ ID NO: 4607920 - DNA, 25 bp, Homo sapien
aaattgcgggtttatggccattgac

SEQ ID NO: 4607921 - DNA, 25 bp, Homo sapien
gccgcttgctttaaagactctctga

SEQ ID NO: 4607922 - DNA, 25 bp, Homo sapien
gaattgcgtttagtgaaattgcggg

SEQ ID NO: 4607923 - DNA, 25 bp, Homo sapien
aatgtggctccatccattcgctcag

SEQ ID NO: 4607924 - DNA, 25 bp, Homo sapien
gaacctccgatttagcctcttgggc

SEQ ID NO: 4607925 - DNA, 25 bp, Homo sapien
tgtcagctaccatgtgaactacggg

SEQ ID NO: 4607926 - DNA, 25 bp, Homo sapien
tagaaaagctgcatagtgcccagca

SEQ ID NO: 4607927 - DNA, 25 bp, Homo sapien
aaatacctgagacgccagagtgaca

SEQ ID NO: 4607928 - DNA, 25 bp, Homo sapien
tgtgaatagtaaggcaaagtaactg

SEQ ID NO: 4607929 - DNA, 25 bp, Homo sapien
tcagtgagtaaatacctatgatgta

SEQ ID NO: 4607930 - DNA, 25 bp, Homo sapien
gggttaataagtgctatagggagaa

SEQ ID NO: 4607931 - DNA, 25 bp, Homo sapien
tgcactcaccttatgttctaatgaa

SEQ ID NO: 4607932 - DNA, 25 bp, Homo sapien
tctgggtcggccattgcactgagct

SEQ ID NO: 4607933 - DNA, 25 bp, Homo sapien
tgcactgagctcagttgcttggccg

SEQ ID NO: 4607934 - DNA, 25 bp, Homo sapien
gcatgacgagggcacaatctgcaag

SEQ ID NO: 4607935 - DNA, 25 bp, Homo sapien
ttgcttggccgcatgacgagggcac

SEQ ID NO: 4607936 - DNA, 25 bp, Homo sapien
gcccaatctcattctttatgtgctg

SEQ ID NO: 4607937 - DNA, 25 bp, Homo sapien
gctgtgtggttttacactgaatagg

SEQ ID NO: 4607938 - DNA, 25 bp, Homo sapien
cacggtcttagatcttttgctatag

SEQ ID NO: 4607939 - DNA, 25 bp, Homo sapien
gaatacagggtgctgccattcctga

SEQ ID NO: 4607940 - DNA, 25 bp, Homo sapien
tcatttcaagtagagcgggcagagg

SEQ ID NO: 4607941 - DNA, 25 bp, Homo sapien
taagagcgcccagtgtagaagacag

SEQ ID NO: 4607942 - DNA, 25 bp, Homo sapien
taaagctcagagacgcaaactaggg

SEQ ID NO: 4607943 - DNA, 25 bp, Homo sapien
cacaatcagggcacgttacaggacg

SEQ ID NO: 4607944 - DNA, 25 bp, Homo sapien
ccgcacgccgggctttgttgtggaa

SEQ ID NO: 4607945 - DNA, 25 bp, Homo sapien
ggctggagccccaagttactcctcg

SEQ ID NO: 4607946 - DNA, 25 bp, Homo sapien
cacgccgggctttgttgtggaaatc

SEQ ID NO: 4607947 - DNA, 25 bp, Homo sapien
cccgctgtcactcgcgctggccggc

SEQ ID NO: 4607948 - DNA, 25 bp, Homo sapien
ggttttcatttccgaaggaggcaca

SEQ ID NO: 4607949 - DNA, 25 bp, Homo sapien
gttttcatttccgaaggaggcacag

SEQ ID NO: 4607950 - DNA, 25 bp, Homo sapien
ttttcatttccgaaggaggcacagc

SEQ ID NO: 4607951 - DNA, 25 bp, Homo sapien
cgcgctccgtccccccgtttggatg

SEQ ID NO: 4607952 - DNA, 25 bp, Homo sapien
gggagaatgagctgatgccgagggt

SEQ ID NO: 4607953 - DNA, 25 bp, Homo sapien
tgccctcgcagacgcgcgcgcacac

SEQ ID NO: 4607954 - DNA, 25 bp, Homo sapien
agaatgagctgatgccgagggtcca

SEQ ID NO: 4607955 - DNA, 25 bp, Homo sapien
cgctgccctcgcagacgcgcgcgca

SEQ ID NO: 4607956 - DNA, 25 bp, Homo sapien
cctgagtcagcggttgaggcacata

SEQ ID NO: 4607957 - DNA, 25 bp, Homo sapien
catacaacactggtctctagagagg

SEQ ID NO: 4607958 - DNA, 25 bp, Homo sapien
tgcagttcccacctatctggctgaa

SEQ ID NO: 4607959 - DNA, 25 bp, Homo sapien
gggctgccagagtatgattcctaag

SEQ ID NO: 4607960 - DNA, 25 bp, Homo sapien
tttactgtcagagcactcagggtga

SEQ ID NO: 4607961 - DNA, 25 bp, Homo sapien
tatgcaggacttatgccttctgtgc

SEQ ID NO: 4607962 - DNA, 25 bp, Homo sapien
tagctaggcatactatcactggtgc

SEQ ID NO: 4607963 - DNA, 25 bp, Homo sapien
ctcagggtgactcaaatagcagttc

SEQ ID NO: 4607964 - DNA, 25 bp, Homo sapien
tcttgcacggattgacttaggccca

SEQ ID NO: 4607965 - DNA, 25 bp, Homo sapien
caaggtctctcggttagcggtgaag

SEQ ID NO: 4607966 - DNA, 25 bp, Homo sapien
aaatcaggtgtggttccatcagggc

SEQ ID NO: 4607967 - DNA, 25 bp, Homo sapien
ggatgcccctggtttcacacgtgtg

SEQ ID NO: 4607968 - DNA, 25 bp, Homo sapien
tcataacttgccaccttcactttct

SEQ ID NO: 4607969 - DNA, 25 bp, Homo sapien
tcactcataacttgccaccttcact

SEQ ID NO: 4607970 - DNA, 25 bp, Homo sapien
gccaccttcactttctccttaatgt

SEQ ID NO: 4607971 - DNA, 25 bp, Homo sapien
ctttctccttaatgtccacttcttg

SEQ ID NO: 4607972 - DNA, 25 bp, Homo sapien
gtgttacagctaagagtgtgtgccc

SEQ ID NO: 4607973 - DNA, 25 bp, Homo sapien
tgctcagcctgatacataataagcc

SEQ ID NO: 4607974 - DNA, 25 bp, Homo sapien
tatggaggcaatagagtgttacagc

SEQ ID NO: 4607975 - DNA, 25 bp, Homo sapien
gaatcttacgtactttgctcagcct

SEQ ID NO: 4607976 - DNA, 25 bp, Homo sapien
caggactcttccttatgccacacaa

SEQ ID NO: 4607977 - DNA, 25 bp, Homo sapien
tcttgtctcacatgtctctttcgga

SEQ ID NO: 4607978 - DNA, 25 bp, Homo sapien
tcggagttatcccagcgcttctaag

SEQ ID NO: 4607979 - DNA, 25 bp, Homo sapien
gaaatgtagactgggcctgacttag

SEQ ID NO: 4607980 - DNA, 25 bp, Homo sapien
gtcattggcaggcttcccgcttcct

SEQ ID NO: 4607981 - DNA, 25 bp, Homo sapien
aaatggtgcttgctgagtcattggc

SEQ ID NO: 4607982 - DNA, 25 bp, Homo sapien
ctgagtcattggcaggcttcccgct

SEQ ID NO: 4607983 - DNA, 25 bp, Homo sapien
gaaaatggtgcttgctgagtcattg

SEQ ID NO: 4607984 - DNA, 25 bp, Homo sapien
cagaagaccatatgtgctgggctct

SEQ ID NO: 4607985 - DNA, 25 bp, Homo sapien
gaccagaagaccatatgtgctgggc

SEQ ID NO: 4607986 - DNA, 25 bp, Homo sapien
ggccacgtgaccagaagaccatatg

SEQ ID NO: 4607987 - DNA, 25 bp, Homo sapien
cacgtgaccagaagaccatatgtgc

SEQ ID NO: 4607988 - DNA, 25 bp, Homo sapien
ctaaaggaggcatggagatggttct

SEQ ID NO: 4607989 - DNA, 25 bp, Homo sapien
gttctcttgttcctgccctctgaag

SEQ ID NO: 4607990 - DNA, 25 bp, Homo sapien
gatggttctcttgttcctgccctct

SEQ ID NO: 4607991 - DNA, 25 bp, Homo sapien
taaaggaggcatggagatggttctc

SEQ ID NO: 4607992 - DNA, 25 bp, Homo sapien
ctggttagtgggttgagtgggttct

SEQ ID NO: 4607993 - DNA, 25 bp, Homo sapien
catgatccaagctaccttgaaatcc

SEQ ID NO: 4607994 - DNA, 25 bp, Homo sapien
ggccacagcatgatccaagctacct

SEQ ID NO: 4607995 - DNA, 25 bp, Homo sapien
cacagcatgatccaagctaccttga

SEQ ID NO: 4607996 - DNA, 25 bp, Homo sapien
gattccacttagtgctccctgtttt

SEQ ID NO: 4607997 - DNA, 25 bp, Homo sapien
agcagaatggggtgttgagcatcca

SEQ ID NO: 4607998 - DNA, 25 bp, Homo sapien
cagaatggggtgttgagcatccatg

SEQ ID NO: 4607999 - DNA, 25 bp, Homo sapien
ccatggattccacttagtgctccct

SEQ ID NO: 4608000 - DNA, 25 bp, Homo sapien
ggtgctggtggtggatgattctgaa

SEQ ID NO: 4608001 - DNA, 25 bp, Homo sapien
gtggtggatgattctgaaaagtctc

SEQ ID NO: 4608002 - DNA, 25 bp, Homo sapien
gatgattctgaaaagtctctcagca

SEQ ID NO: 4608003 - DNA, 25 bp, Homo sapien
tcctggctcgcctggtgctggtggt

SEQ ID NO: 4608004 - DNA, 25 bp, Homo sapien
tgtcgctcaagtacaggctccatag

SEQ ID NO: 4608005 - DNA, 25 bp, Homo sapien
ggttgtcaagaactgcaacttctgc

SEQ ID NO: 4608006 - DNA, 25 bp, Homo sapien
ggctccatagatttccctgcagctt

SEQ ID NO: 4608007 - DNA, 25 bp, Homo sapien
gcttcaacggaccaatcagtgtcat

SEQ ID NO: 4608008 - DNA, 25 bp, Homo sapien
ctatcatcattgtgtaattgggtga

SEQ ID NO: 4608009 - DNA, 25 bp, Homo sapien
catcatactctatcatcattgtgta

SEQ ID NO: 4608010 - DNA, 25 bp, Homo sapien
tcataacccatcatactctatcatc

SEQ ID NO: 4608011 - DNA, 25 bp, Homo sapien
tcattgtgtaattgggtgaatttac

SEQ ID NO: 4608012 - DNA, 25 bp, Homo sapien
actgacaacacctatcataaactgt

SEQ ID NO: 4608013 - DNA, 25 bp, Homo sapien
aaaggagagattgctatcaactggg

SEQ ID NO: 4608014 - DNA, 25 bp, Homo sapien
tatcataaactgttgtggaaaggag

SEQ ID NO: 4608015 - DNA, 25 bp, Homo sapien
acacctatcataaactgttgtggaa

SEQ ID NO: 4608016 - DNA, 25 bp, Homo sapien
cactgggccttgtgatagctctcgg

SEQ ID NO: 4608017 - DNA, 25 bp, Homo sapien
tgggccttgtgatagctctcggtct

SEQ ID NO: 4608018 - DNA, 25 bp, Homo sapien
ccttgtgatagctctcggtcttctc

SEQ ID NO: 4608019 - DNA, 25 bp, Homo sapien
gatagctctcggtcttctctgacct

SEQ ID NO: 4608020 - DNA, 25 bp, Homo sapien
gccttgcgggtatagcaaacatggc

SEQ ID NO: 4608021 - DNA, 25 bp, Homo sapien
gctggtgaataggtgccttgcgggt

SEQ ID NO: 4608022 - DNA, 25 bp, Homo sapien
atagcaaacatggccatgcggtggt

SEQ ID NO: 4608023 - DNA, 25 bp, Homo sapien
tttccgcctattccctctttgctct

SEQ ID NO: 4608024 - DNA, 25 bp, Homo sapien
agtcttttgatttaaacgtgcccag

SEQ ID NO: 4608025 - DNA, 25 bp, Homo sapien
gatttaaacgtgcccagttcctcac

SEQ ID NO: 4608026 - DNA, 25 bp, Homo sapien
ttgatttaaacgtgcccagttcctc

SEQ ID NO: 4608027 - DNA, 25 bp, Homo sapien
tcagtcttttgatttaaacgtgccc

SEQ ID NO: 4608028 - DNA, 25 bp, Homo sapien
gctgaactcagtgtgaatacaatag

SEQ ID NO: 4608029 - DNA, 25 bp, Homo sapien
cctcctaaattgtgggccagtctct

SEQ ID NO: 4608030 - DNA, 25 bp, Homo sapien
gaactcagtgtgaatacaatagcga

SEQ ID NO: 4608031 - DNA, 25 bp, Homo sapien
gtcctcctaaattgtgggccagtct

SEQ ID NO: 4608032 - DNA, 25 bp, Homo sapien
tgtagctggagagttagtgatgcaa

SEQ ID NO: 4608033 - DNA, 25 bp, Homo sapien
agctggagagttagtgatgcaaaag

SEQ ID NO: 4608034 - DNA, 25 bp, Homo sapien
tcatgctctttaaagtgtagctgga

SEQ ID NO: 4608035 - DNA, 25 bp, Homo sapien
catgctctttaaagtgtagctggag

SEQ ID NO: 4608036 - DNA, 25 bp, Homo sapien
tcaatcatattgctttgtcggatcc

SEQ ID NO: 4608037 - DNA, 25 bp, Homo sapien
ggctcaatcatattgctttgtcgga

SEQ ID NO: 4608038 - DNA, 25 bp, Homo sapien
gctcaatcatattgctttgtcggat

SEQ ID NO: 4608039 - DNA, 25 bp, Homo sapien
ctcaatcatattgctttgtcggatc

SEQ ID NO: 4608040 - DNA, 25 bp, Homo sapien
ctccatgtgaaagttgttatctctg

SEQ ID NO: 4608041 - DNA, 25 bp, Homo sapien
acatgaccatgagcaactttgaggg

SEQ ID NO: 4608042 - DNA, 25 bp, Homo sapien
gaataatatccaggcattgccgcat

SEQ ID NO: 4608043 - DNA, 25 bp, Homo sapien
ggtaagattcctttgccactggagt

SEQ ID NO: 4608044 - DNA, 25 bp, Homo sapien
aaattcatcataaaatgcctgtttt

SEQ ID NO: 4608045 - DNA, 25 bp, Homo sapien
tgcgtggaatggaacgttccttctc

SEQ ID NO: 4608046 - DNA, 25 bp, Homo sapien
gtgtctttatgacccccaagctgtg

SEQ ID NO: 4608047 - DNA, 25 bp, Homo sapien
taaaattcatgaattgcgtggaatg

SEQ ID NO: 4608048 - DNA, 25 bp, Homo sapien
tggaacgttccttctctgaatacag

SEQ ID NO: 4608049 - DNA, 25 bp, Homo sapien
ttactggcactcctaggcctggagc

SEQ ID NO: 4608050 - DNA, 25 bp, Homo sapien
ccaaccatatgtccagaacttactg

SEQ ID NO: 4608051 - DNA, 25 bp, Homo sapien
gctcagaacaaagacagtctgaaaa

SEQ ID NO: 4608052 - DNA, 25 bp, Homo sapien
ttttccagtgacaagaccgttatgg

SEQ ID NO: 4608053 - DNA, 25 bp, Homo sapien
acccaagttattggtactgctgaag

SEQ ID NO: 4608054 - DNA, 25 bp, Homo sapien
ccaagttattggtactgctgaagtt

SEQ ID NO: 4608055 - DNA, 25 bp, Homo sapien
aagttattggtactgctgaagtttt

SEQ ID NO: 4608056 - DNA, 25 bp, Homo sapien
cccaagttattggtactgctgaagt

SEQ ID NO: 4608057 - DNA, 25 bp, Homo sapien
taagaaggggccgattgactcaagg

SEQ ID NO: 4608058 - DNA, 25 bp, Homo sapien
tctgcatcagaatgagaggggcatc

SEQ ID NO: 4608059 - DNA, 25 bp, Homo sapien
cattgaaatagtaactgaagatctt

SEQ ID NO: 4608060 - DNA, 25 bp, Homo sapien
ccgattgactcaaggtctttttgtc

SEQ ID NO: 4608061 - DNA, 25 bp, Homo sapien
tttgaatgatgaaacgccgctaaac

SEQ ID NO: 4608062 - DNA, 25 bp, Homo sapien
gtgaaatccattgagtgcctcaccc

SEQ ID NO: 4608063 - DNA, 25 bp, Homo sapien
tgacaactgtatcttgggtgaggtc

SEQ ID NO: 4608064 - DNA, 25 bp, Homo sapien
ccctgccggttccagtgacaactgt

SEQ ID NO: 4608065 - DNA, 25 bp, Homo sapien
ataagtgatgtcctgtaggctgctg

SEQ ID NO: 4608066 - DNA, 25 bp, Homo sapien
gccagataggagctttggtgtcatt

SEQ ID NO: 4608067 - DNA, 25 bp, Homo sapien
taaggtataagtgatgtcctgtagg

SEQ ID NO: 4608068 - DNA, 25 bp, Homo sapien
ggtataagtgatgtcctgtaggctg

SEQ ID NO: 4608069 - DNA, 25 bp, Homo sapien
gacgaaataaaaccatgtgcttaga

SEQ ID NO: 4608070 - DNA, 25 bp, Homo sapien
taataatctggccatgatggcacat

SEQ ID NO: 4608071 - DNA, 25 bp, Homo sapien
tccaaagtgtctaccatagagctgg

SEQ ID NO: 4608072 - DNA, 25 bp, Homo sapien
cgtgttggctcacaattatattccc

SEQ ID NO: 4608073 - DNA, 25 bp, Homo sapien
ggaactgccaagcaacagtacctta

SEQ ID NO: 4608074 - DNA, 25 bp, Homo sapien
cgtgcgcgagagaacagatttgtcc

SEQ ID NO: 4608075 - DNA, 25 bp, Homo sapien
tatgcagcctacataaaggaagttt

SEQ ID NO: 4608076 - DNA, 25 bp, Homo sapien
gtttttaacagcatgggatggcaca

SEQ ID NO: 4608077 - DNA, 25 bp, Homo sapien
tcgccgctattgtgcgctgggctcg

SEQ ID NO: 4608078 - DNA, 25 bp, Homo sapien
agggagcaggcgtggtagggcgccc

SEQ ID NO: 4608079 - DNA, 25 bp, Homo sapien
cggcgcggcgagatgcgggtgcaca

SEQ ID NO: 4608080 - DNA, 25 bp, Homo sapien
ccagcccggtagttttgcgtggcag

SEQ ID NO: 4608081 - DNA, 25 bp, Homo sapien
accgcggccacggtggacagcaaca

SEQ ID NO: 4608082 - DNA, 25 bp, Homo sapien
ggaagcgcttccactcgcatccttt

SEQ ID NO: 4608083 - DNA, 25 bp, Homo sapien
tcgcatcctttcctcgccggtttcc

SEQ ID NO: 4608084 - DNA, 25 bp, Homo sapien
gcaacacccagttattcttcaggaa

SEQ ID NO: 4608085 - DNA, 25 bp, Homo sapien
gaattcaggcacgaatctggcagct

SEQ ID NO: 4608086 - DNA, 25 bp, Homo sapien
tatggcgctaatcccaaggaagtgc

SEQ ID NO: 4608087 - DNA, 25 bp, Homo sapien
gcaatggctcagacatccacctggt

SEQ ID NO: 4608088 - DNA, 25 bp, Homo sapien
tacaaaaacaacgtggagagcaagg

SEQ ID NO: 4608089 - DNA, 25 bp, Homo sapien
tccagtgaatcgcatgctgacgagt

SEQ ID NO: 4608090 - DNA, 25 bp, Homo sapien
caaaagggaggctgcattagagctc

SEQ ID NO: 4608091 - DNA, 25 bp, Homo sapien
aagtgagtatctctggagagcccca

SEQ ID NO: 4608092 - DNA, 25 bp, Homo sapien
gaaagtgcccatctgagaccaaagg

SEQ ID NO: 4608093 - DNA, 25 bp, Homo sapien
agacttgagtcatatataccttgca

SEQ ID NO: 4608094 - DNA, 25 bp, Homo sapien
ggcattaagattgtatataccaacc

SEQ ID NO: 4608095 - DNA, 25 bp, Homo sapien
gattgtatataccaacctgcatgtg

SEQ ID NO: 4608096 - DNA, 25 bp, Homo sapien
cagtcttcctcataggaggcattaa

SEQ ID NO: 4608097 - DNA, 25 bp, Homo sapien
tttcccagttgcaccttctttgaag

SEQ ID NO: 4608098 - DNA, 25 bp, Homo sapien
cattccaattatggcctcctccagg

SEQ ID NO: 4608099 - DNA, 25 bp, Homo sapien
ctgctcaaggccattccaattatgg

SEQ ID NO: 4608100 - DNA, 25 bp, Homo sapien
actttcccagttgcaccttctttga

SEQ ID NO: 4608101 - DNA, 25 bp, Homo sapien
tattttccgactctttggtgaccac

SEQ ID NO: 4608102 - DNA, 25 bp, Homo sapien
tgtttacccacgcagttgttcaaag

SEQ ID NO: 4608103 - DNA, 25 bp, Homo sapien
aagaaatccaagaagcggcagcaga

SEQ ID NO: 4608104 - DNA, 25 bp, Homo sapien
gcagaaatggagcaagcctgttaca

SEQ ID NO: 4608105 - DNA, 25 bp, Homo sapien
tatggtttctgaattggcaacaaga

SEQ ID NO: 4608106 - DNA, 25 bp, Homo sapien
caatattcaatgcagatgttaaacc

SEQ ID NO: 4608107 - DNA, 25 bp, Homo sapien
acaaagcccaaacacaaccatatag

SEQ ID NO: 4608108 - DNA, 25 bp, Homo sapien
caggcatgctatttaaggttatggt

SEQ ID NO: 4608109 - DNA, 25 bp, Homo sapien
tccttaggtctgcttacaaaacttg

SEQ ID NO: 4608110 - DNA, 25 bp, Homo sapien
acaaaacttgtgtcatcttgaatgc

SEQ ID NO: 4608111 - DNA, 25 bp, Homo sapien
aaaacttgtgtcatcttgaatgctc

SEQ ID NO: 4608112 - DNA, 25 bp, Homo sapien
caacattcttcagcccgttccttag

SEQ ID NO: 4608113 - DNA, 25 bp, Homo sapien
tcacatggccagcttcgatatccag

SEQ ID NO: 4608114 - DNA, 25 bp, Homo sapien
ttaacgtgtcaggtgcctaaggccc

SEQ ID NO: 4608115 - DNA, 25 bp, Homo sapien
tatccagttctgttggacaccaaag

SEQ ID NO: 4608116 - DNA, 25 bp, Homo sapien
ccccaaagttgtaggagttcagagc

SEQ ID NO: 4608117 - DNA, 25 bp, Homo sapien
gaagcctcccgtggtcttgagtcaa

SEQ ID NO: 4608118 - DNA, 25 bp, Homo sapien
gaggtcaaagagaggacgctgctcc

SEQ ID NO: 4608119 - DNA, 25 bp, Homo sapien
tcaggaaatcagcacgtggaacaca

SEQ ID NO: 4608120 - DNA, 25 bp, Homo sapien
ggatgacttcttcgtgccagcacca

SEQ ID NO: 4608121 - DNA, 25 bp, Homo sapien
tccatgtgaaagaagctacagacac

SEQ ID NO: 4608122 - DNA, 25 bp, Homo sapien
gacactacattgacaggcagctgga

SEQ ID NO: 4608123 - DNA, 25 bp, Homo sapien
tgggatggagcataaaggacagcct

SEQ ID NO: 4608124 - DNA, 25 bp, Homo sapien
cagaatgggactgatagcttctcca

SEQ ID NO: 4608125 - DNA, 25 bp, Homo sapien
gaggacatgtggtccgggtccccat

SEQ ID NO: 4608126 - DNA, 25 bp, Homo sapien
gacatgtggtccgggtccccatgtg

SEQ ID NO: 4608127 - DNA, 25 bp, Homo sapien
atgtggtccgggtccccatgtggtt

SEQ ID NO: 4608128 - DNA, 25 bp, Homo sapien
catgtggtccgggtccccatgtggt

SEQ ID NO: 4608129 - DNA, 25 bp, Homo sapien
gtgcatacaaccactttgctaagct

SEQ ID NO: 4608130 - DNA, 25 bp, Homo sapien
ctgtgcatacaaccactttgctaag

SEQ ID NO: 4608131 - DNA, 25 bp, Homo sapien
tgtgcatacaaccactttgctaagc

SEQ ID NO: 4608132 - DNA, 25 bp, Homo sapien
ccaaagccccagcaatggacacagg

SEQ ID NO: 4608133 - DNA, 25 bp, Homo sapien
ccccaaagccccagcaatggacaca

SEQ ID NO: 4608134 - DNA, 25 bp, Homo sapien
aaagccccagcaatggacacaggac

SEQ ID NO: 4608135 - DNA, 25 bp, Homo sapien
cccagcaatggacacaggacaccat

SEQ ID NO: 4608136 - DNA, 25 bp, Homo sapien
tgccttgatctctattttgtgcatg

SEQ ID NO: 4608137 - DNA, 25 bp, Homo sapien
tctattttgtgcatgcactactgga

SEQ ID NO: 4608138 - DNA, 25 bp, Homo sapien
ttttgtgcatgcactactggatgca

SEQ ID NO: 4608139 - DNA, 25 bp, Homo sapien
gatctctattttgtgcatgcactac

SEQ ID NO: 4608140 - DNA, 25 bp, Homo sapien
ctgtaatcatgctggatataattaa

SEQ ID NO: 4608141 - DNA, 25 bp, Homo sapien
tgagaggttgctgtgttctcgaacc

SEQ ID NO: 4608142 - DNA, 25 bp, Homo sapien
caaagtagaatttctctagagttga

SEQ ID NO: 4608143 - DNA, 25 bp, Homo sapien
gcatccgcattagaatttctccagg

SEQ ID NO: 4608144 - DNA, 25 bp, Homo sapien
gtgggtaaggagtgcagagaccctg

SEQ ID NO: 4608145 - DNA, 25 bp, Homo sapien
tgagtagaaagtgggtaaggagtgc

SEQ ID NO: 4608146 - DNA, 25 bp, Homo sapien
agacacatagcaagttctggctttg

SEQ ID NO: 4608147 - DNA, 25 bp, Homo sapien
cccacagcaaatatgcagggcagac

SEQ ID NO: 4608148 - DNA, 25 bp, Homo sapien
catttaaggacaaagctcccaaggg

SEQ ID NO: 4608149 - DNA, 25 bp, Homo sapien
caatcaggttgctagggttaaaagg

SEQ ID NO: 4608150 - DNA, 25 bp, Homo sapien
tcataagccgagaacatcaagacca

SEQ ID NO: 4608151 - DNA, 25 bp, Homo sapien
caaataattggtctgcggctgtgtc

SEQ ID NO: 4608152 - DNA, 25 bp, Homo sapien
catgagggcatttgcaatgtgaaat

SEQ ID NO: 4608153 - DNA, 25 bp, Homo sapien
ctgctggattcatgagggcatttgc

SEQ ID NO: 4608154 - DNA, 25 bp, Homo sapien
tgtgaaatggcccttcctgtgtgtt

SEQ ID NO: 4608155 - DNA, 25 bp, Homo sapien
ggaaggagctgtgtaccaggtaaag

SEQ ID NO: 4608156 - DNA, 25 bp, Homo sapien
tattgataccatctaacagccagtc

SEQ ID NO: 4608157 - DNA, 25 bp, Homo sapien
gagtttcctttatgcaggagcacag

SEQ ID NO: 4608158 - DNA, 25 bp, Homo sapien
taatctcaccagaggctttgatggc

SEQ ID NO: 4608159 - DNA, 25 bp, Homo sapien
tctacctgttaatttggcaagagag

SEQ ID NO: 4608160 - DNA, 25 bp, Homo sapien
tatggagtctatggaaggctcctga

SEQ ID NO: 4608161 - DNA, 25 bp, Homo sapien
tccacaatggcaagcatcccaggaa

SEQ ID NO: 4608162 - DNA, 25 bp, Homo sapien
ctctgaagtggatattccacaatgg

SEQ ID NO: 4608163 - DNA, 25 bp, Homo sapien
tcaggacaggatggcctgtgtgata

SEQ ID NO: 4608164 - DNA, 25 bp, Homo sapien
ttgcataggagttaaaactcgccat

SEQ ID NO: 4608165 - DNA, 25 bp, Homo sapien
gttgcataggagttaaaactcgcca

SEQ ID NO: 4608166 - DNA, 25 bp, Homo sapien
tgttgcataggagttaaaactcgcc

SEQ ID NO: 4608167 - DNA, 25 bp, Homo sapien
gacaatctctccacattgctgttaa

SEQ ID NO: 4608168 - DNA, 25 bp, Homo sapien
gaacaaagctttcgtgacaatctct

SEQ ID NO: 4608169 - DNA, 25 bp, Homo sapien
gacatttggtggtgttatgccatta

SEQ ID NO: 4608170 - DNA, 25 bp, Homo sapien
tggacaccacatccaagaaactcat

SEQ ID NO: 4608171 - DNA, 25 bp, Homo sapien
tagtcatcaacatgggggcagagct

SEQ ID NO: 4608172 - DNA, 25 bp, Homo sapien
tctagtcatcaacatgggggcagag

SEQ ID NO: 4608173 - DNA, 25 bp, Homo sapien
ctacctctctagtcatcaacatggg

SEQ ID NO: 4608174 - DNA, 25 bp, Homo sapien
ctctctagtcatcaacatgggggca

SEQ ID NO: 4608175 - DNA, 25 bp, Homo sapien
caaagatgctcatataaacggagtc

SEQ ID NO: 4608176 - DNA, 25 bp, Homo sapien
ggaatgggccaagttgagaaacaac

SEQ ID NO: 4608177 - DNA, 25 bp, Homo sapien
gatctcacttcaaatggtccttggc

SEQ ID NO: 4608178 - DNA, 25 bp, Homo sapien
cagtaagatgactaagtgttgccca

SEQ ID NO: 4608179 - DNA, 25 bp, Homo sapien
gacagcgcgcagaccaatttttccg

SEQ ID NO: 4608180 - DNA, 25 bp, Homo sapien
tacagaaataatacacgacagcgcg

SEQ ID NO: 4608181 - DNA, 25 bp, Homo sapien
tacgttggaatccagtgcagcaaca

SEQ ID NO: 4608182 - DNA, 25 bp, Homo sapien
cagcaatgagagtggtacagaaata

SEQ ID NO: 4608183 - DNA, 25 bp, Homo sapien
ggcatccaccgtactgacttcaggg

SEQ ID NO: 4608184 - DNA, 25 bp, Homo sapien
tgggtgacaccaggcttgatgctca

SEQ ID NO: 4608185 - DNA, 25 bp, Homo sapien
ctgatgagatctaacatggcatcca

SEQ ID NO: 4608186 - DNA, 25 bp, Homo sapien
ggtgctgcctgtcctcgcaatttca

SEQ ID NO: 4608187 - DNA, 25 bp, Homo sapien
tgctgagcttcacccaagtatagaa

SEQ ID NO: 4608188 - DNA, 25 bp, Homo sapien
tggcccctgctttgcgtaatacttc

SEQ ID NO: 4608189 - DNA, 25 bp, Homo sapien
gacatgcttacgctccttggtgaaa

SEQ ID NO: 4608190 - DNA, 25 bp, Homo sapien
gaaagctctgtaatcaaccatcact

SEQ ID NO: 4608191 - DNA, 25 bp, Homo sapien
ggacaagattctcagggaacatatt

SEQ ID NO: 4608192 - DNA, 25 bp, Homo sapien
ctggacaagattctcagggaacata

SEQ ID NO: 4608193 - DNA, 25 bp, Homo sapien
gacaagattctcagggaacatattc

SEQ ID NO: 4608194 - DNA, 25 bp, Homo sapien
tggacaagattctcagggaacatat

SEQ ID NO: 4608195 - DNA, 25 bp, Homo sapien
tcatctctggatcgctgggaggctt

SEQ ID NO: 4608196 - DNA, 25 bp, Homo sapien
tgttcatctctggatcgctgggagg

SEQ ID NO: 4608197 - DNA, 25 bp, Homo sapien
ggcttcacttcttcacgcttagttt

SEQ ID NO: 4608198 - DNA, 25 bp, Homo sapien
tggatcgctgggaggcttcacttct

SEQ ID NO: 4608199 - DNA, 25 bp, Homo sapien
gcccaggacgtttatgccatctgaa

SEQ ID NO: 4608200 - DNA, 25 bp, Homo sapien
catggttgcatcactcaaagcattg

SEQ ID NO: 4608201 - DNA, 25 bp, Homo sapien
gaagaaatccaccagaatttgtccc

SEQ ID NO: 4608202 - DNA, 25 bp, Homo sapien
cacatgatgatctgaacgattttca

SEQ ID NO: 4608203 - DNA, 25 bp, Homo sapien
ccagcttgcggaatatttcccagtc

SEQ ID NO: 4608204 - DNA, 25 bp, Homo sapien
cagcaatcaggaacaaaatacctag

SEQ ID NO: 4608205 - DNA, 25 bp, Homo sapien
tgcggaatatttcccagtcttcaac

SEQ ID NO: 4608206 - DNA, 25 bp, Homo sapien
aatatttcccagtcttcaacttcta

SEQ ID NO: 4608207 - DNA, 25 bp, Homo sapien
aattacaatggagtggattgcaagc

SEQ ID NO: 4608208 - DNA, 25 bp, Homo sapien
tatcagcgggagaattacaatggag

SEQ ID NO: 4608209 - DNA, 25 bp, Homo sapien
tacgactatgaaatatatcagcggg

SEQ ID NO: 4608210 - DNA, 25 bp, Homo sapien
cccatggcaaatcggaaagggttct

SEQ ID NO: 4608211 - DNA, 25 bp, Homo sapien
tcagcacagcggaaggtgacaggca

SEQ ID NO: 4608212 - DNA, 25 bp, Homo sapien
ttgcaccaacgggtaacacgaatcg

SEQ ID NO: 4608213 - DNA, 25 bp, Homo sapien
tgatgatctgcccaatgcccaagtc

SEQ ID NO: 4608214 - DNA, 25 bp, Homo sapien
tcaactgtgcaataaacaccgctgc

SEQ ID NO: 4608215 - DNA, 25 bp, Homo sapien
agtgatgacaatgaatgtgacacca

SEQ ID NO: 4608216 - DNA, 25 bp, Homo sapien
gtgatgacaatgaatgtgacaccat

SEQ ID NO: 4608217 - DNA, 25 bp, Homo sapien
cagtgatgacaatgaatgtgacacc

SEQ ID NO: 4608218 - DNA, 25 bp, Homo sapien
tgatgacaatgaatgtgacaccatg

SEQ ID NO: 4608219 - DNA, 25 bp, Homo sapien
gatagtttgaaagcagggactggcc

SEQ ID NO: 4608220 - DNA, 25 bp, Homo sapien
gagtctttgtgctagcctgtgccta

SEQ ID NO: 4608221 - DNA, 25 bp, Homo sapien
tatgctgtaactagcccatggctgc

SEQ ID NO: 4608222 - DNA, 25 bp, Homo sapien
tatgtgcatgcccatctagcaggga

SEQ ID NO: 4608223 - DNA, 25 bp, Homo sapien
caatgattactttgggcctcacagt

SEQ ID NO: 4608224 - DNA, 25 bp, Homo sapien
cacagttgttattggctctgggcca

SEQ ID NO: 4608225 - DNA, 25 bp, Homo sapien
tttaagaatataccagaggtagccg

SEQ ID NO: 4608226 - DNA, 25 bp, Homo sapien
ttgactatttagcttctaggcccag

SEQ ID NO: 4608227 - DNA, 25 bp, Homo sapien
cagactactgctgtttgactggcat

SEQ ID NO: 4608228 - DNA, 25 bp, Homo sapien
tgctgtttgactggcattggtctga

SEQ ID NO: 4608229 - DNA, 25 bp, Homo sapien
gactactgctgtttgactggcattg

SEQ ID NO: 4608230 - DNA, 25 bp, Homo sapien
tactgctgtttgactggcattggtc

SEQ ID NO: 4608231 - DNA, 25 bp, Homo sapien
gggcacgccagcagctccgatgctg

SEQ ID NO: 4608232 - DNA, 25 bp, Homo sapien
gacagcaatgatcagggtgacatcc

SEQ ID NO: 4608233 - DNA, 25 bp, Homo sapien
agctccgatgctggcagatgtggcc

SEQ ID NO: 4608234 - DNA, 25 bp, Homo sapien
aggcccacggcactcagcacaatca

SEQ ID NO: 4608235 - DNA, 25 bp, Homo sapien
caaacgctgttctagatgctccact

SEQ ID NO: 4608236 - DNA, 25 bp, Homo sapien
taaggaaacttgctcgaggtcaaga

SEQ ID NO: 4608237 - DNA, 25 bp, Homo sapien
gcaactgggcctcaggttaaggaaa

SEQ ID NO: 4608238 - DNA, 25 bp, Homo sapien
gacacaggacggagattcaaaccca

SEQ ID NO: 4608239 - DNA, 25 bp, Homo sapien
tgtctgagtcttcgttgtcaaggat

SEQ ID NO: 4608240 - DNA, 25 bp, Homo sapien
gcctccattgacataagacttcttg

SEQ ID NO: 4608241 - DNA, 25 bp, Homo sapien
gatggtgtcagacttgtctactgca

SEQ ID NO: 4608242 - DNA, 25 bp, Homo sapien
gcatcaccaaggacgttgaccatgg

SEQ ID NO: 4608243 - DNA, 25 bp, Homo sapien
gaaaggagttctgataagccccaaa

SEQ ID NO: 4608244 - DNA, 25 bp, Homo sapien
caacgtggcttgttcaacccatgga

SEQ ID NO: 4608245 - DNA, 25 bp, Homo sapien
gatgtaggtcgtcaatactgagcac

SEQ ID NO: 4608246 - DNA, 25 bp, Homo sapien
tactctgcaacaacccaggttaggg

SEQ ID NO: 4608247 - DNA, 25 bp, Homo sapien
acagctctgccaactagtgccacta

SEQ ID NO: 4608248 - DNA, 25 bp, Homo sapien
atgataactggcagctcatgaacag

SEQ ID NO: 4608249 - DNA, 25 bp, Homo sapien
cactaattggggcaacctagtaagg

SEQ ID NO: 4608250 - DNA, 25 bp, Homo sapien
actggcagctcatgaacagctctgc

SEQ ID NO: 4608251 - DNA, 25 bp, Homo sapien
attctactttcattccgccacaaaa

SEQ ID NO: 4608252 - DNA, 25 bp, Homo sapien
ctttcattccgccacaaaatatgcg

SEQ ID NO: 4608253 - DNA, 25 bp, Homo sapien
tccgccacaaaatatgcgtgcagct

SEQ ID NO: 4608254 - DNA, 25 bp, Homo sapien
cacaaaatatgcgtgcagctgttca

SEQ ID NO: 4608255 - DNA, 25 bp, Homo sapien
tcaagtgccccgaagcgaaagaaga

SEQ ID NO: 4608256 - DNA, 25 bp, Homo sapien
gaagatgatgcgacattgtgctaac

SEQ ID NO: 4608257 - DNA, 25 bp, Homo sapien
actctgcatcgcattccctcaagtg

SEQ ID NO: 4608258 - DNA, 25 bp, Homo sapien
aatggcagctaccagagcctgcagt

SEQ ID NO: 4608259 - DNA, 25 bp, Homo sapien
cttttctccagcgactgcccttcca

SEQ ID NO: 4608260 - DNA, 25 bp, Homo sapien
tttctccagcgactgcccttccagg

SEQ ID NO: 4608261 - DNA, 25 bp, Homo sapien
tctccagcgactgcccttccaggat

SEQ ID NO: 4608262 - DNA, 25 bp, Homo sapien
ttttctccagcgactgcccttccag

SEQ ID NO: 4608263 - DNA, 25 bp, Homo sapien
gctggtctgaagctgggtcttgccc

SEQ ID NO: 4608264 - DNA, 25 bp, Homo sapien
tctgtggcccacataaagctggtct

SEQ ID NO: 4608265 - DNA, 25 bp, Homo sapien
tttaggaccaggcaggatttgtgac

SEQ ID NO: 4608266 - DNA, 25 bp, Homo sapien
tgtgattcccaaaaggtgttgcaaa

SEQ ID NO: 4608267 - DNA, 25 bp, Homo sapien
tggctccccagcgatctcgagatct

SEQ ID NO: 4608268 - DNA, 25 bp, Homo sapien
cattgtctgaccacgtagagggaga

SEQ ID NO: 4608269 - DNA, 25 bp, Homo sapien
gagcatccatctcagtgagtccagg

SEQ ID NO: 4608270 - DNA, 25 bp, Homo sapien
ccagtagtttggcatacgcttagaa

SEQ ID NO: 4608271 - DNA, 25 bp, Homo sapien
catgccagtagtgaaggtcatgtcg

SEQ ID NO: 4608272 - DNA, 25 bp, Homo sapien
ccttgtaggcttttgactgaaatcc

SEQ ID NO: 4608273 - DNA, 25 bp, Homo sapien
ggtcatgtcggtgaagatcagtcat

SEQ ID NO: 4608274 - DNA, 25 bp, Homo sapien
aaatccatgaatcatgccagtagtg

SEQ ID NO: 4608275 - DNA, 25 bp, Homo sapien
ctggatggcaaaaaacaggagattg

SEQ ID NO: 4608276 - DNA, 25 bp, Homo sapien
aacaggagattgatggtgatcagga

SEQ ID NO: 4608277 - DNA, 25 bp, Homo sapien
gattgatggtgatcaggagatgtaa

SEQ ID NO: 4608278 - DNA, 25 bp, Homo sapien
tgatggtgatcaggagatgtaacat

SEQ ID NO: 4608279 - DNA, 25 bp, Homo sapien
gaaccccttgcaaagtcaccattga

SEQ ID NO: 4608280 - DNA, 25 bp, Homo sapien
catgaagcagcgtcagctgagaagc

SEQ ID NO: 4608281 - DNA, 25 bp, Homo sapien
gagcattcccctcgccgttgaaggg

SEQ ID NO: 4608282 - DNA, 25 bp, Homo sapien
aacttgtcctgctgtgaaccccttg

SEQ ID NO: 4608283 - DNA, 25 bp, Homo sapien
ccatgtgtactacctcaattttact

SEQ ID NO: 4608284 - DNA, 25 bp, Homo sapien
tgcttttaccttattgcatataatg

SEQ ID NO: 4608285 - DNA, 25 bp, Homo sapien
tcatggtccgtctttggtaagcgtg

SEQ ID NO: 4608286 - DNA, 25 bp, Homo sapien
taagcgtgaagcgtcttagggcatc

SEQ ID NO: 4608287 - DNA, 25 bp, Homo sapien
tggaggagttagagtgagatcagac

SEQ ID NO: 4608288 - DNA, 25 bp, Homo sapien
ggaggagttagagtgagatcagaca

SEQ ID NO: 4608289 - DNA, 25 bp, Homo sapien
gacgaggtttcctcatgttggctag

SEQ ID NO: 4608290 - DNA, 25 bp, Homo sapien
ccactgtgcccggccttcagcttca

SEQ ID NO: 4608291 - DNA, 25 bp, Homo sapien
agacgaggtttcctcatgttggcta

SEQ ID NO: 4608292 - DNA, 25 bp, Homo sapien
gccactgtgcccggccttcagcttc

SEQ ID NO: 4608293 - DNA, 25 bp, Homo sapien
tatgaagtttgctttcatcatccac

SEQ ID NO: 4608294 - DNA, 25 bp, Homo sapien
ttcatcatccacttcaattaatttc

SEQ ID NO: 4608295 - DNA, 25 bp, Homo sapien
tgaagtttgctttcatcatccactt

SEQ ID NO: 4608296 - DNA, 25 bp, Homo sapien
atccacttcaattaatttctggcag

SEQ ID NO: 4608297 - DNA, 25 bp, Homo sapien
ttacccagagcatctcagtagtaac

SEQ ID NO: 4608298 - DNA, 25 bp, Homo sapien
ccacataagcctcccaatctttacc

SEQ ID NO: 4608299 - DNA, 25 bp, Homo sapien
taagcctcccaatctttacccagag

SEQ ID NO: 4608300 - DNA, 25 bp, Homo sapien
tttacccagagcatctcagtagtaa

SEQ ID NO: 4608301 - DNA, 25 bp, Homo sapien
cttctcagtagcaggtagacttggc

SEQ ID NO: 4608302 - DNA, 25 bp, Homo sapien
aattcttcttggtctataacaggaa

SEQ ID NO: 4608303 - DNA, 25 bp, Homo sapien
cagatatcatcttttttagagtgat

SEQ ID NO: 4608304 - DNA, 25 bp, Homo sapien
acatgtggagtaacgagacactgaa

SEQ ID NO: 4608305 - DNA, 25 bp, Homo sapien
atatcatcttttttagagtgattga

SEQ ID NO: 4608306 - DNA, 25 bp, Homo sapien
gacatgtggagtaacgagacactga

SEQ ID NO: 4608307 - DNA, 25 bp, Homo sapien
atgggcacctgccaatgcgtccagc

SEQ ID NO: 4608308 - DNA, 25 bp, Homo sapien
ggcctacatcattattttgatagct

SEQ ID NO: 4608309 - DNA, 25 bp, Homo sapien
tataggtctataaatagtatttcca

SEQ ID NO: 4608310 - DNA, 25 bp, Homo sapien
tgcccccggcctacatcattatttt

SEQ ID NO: 4608311 - DNA, 25 bp, Homo sapien
cgggacctggccggaccaaacagag

SEQ ID NO: 4608312 - DNA, 25 bp, Homo sapien
gacctggccggaccaaacagaggct

SEQ ID NO: 4608313 - DNA, 25 bp, Homo sapien
ggacctggccggaccaaacagaggc

SEQ ID NO: 4608314 - DNA, 25 bp, Homo sapien
agcatgaccctggataggcccaaga

SEQ ID NO: 4608315 - DNA, 25 bp, Homo sapien
acatgtccatctggttgtgggccgg

SEQ ID NO: 4608316 - DNA, 25 bp, Homo sapien
ggatgaacctcgacatcagggcggc

SEQ ID NO: 4608317 - DNA, 25 bp, Homo sapien
aaagccaaaagctacgtcggtgaca

SEQ ID NO: 4608318 - DNA, 25 bp, Homo sapien
tgtgcctggtatagcagcagactcc

SEQ ID NO: 4608319 - DNA, 25 bp, Homo sapien
tattgctgcagttaaaggatctcgc

SEQ ID NO: 4608320 - DNA, 25 bp, Homo sapien
caaagaataatgagcagagtccacc

SEQ ID NO: 4608321 - DNA, 25 bp, Homo sapien
gcacatcaagatcatgggacacctg

SEQ ID NO: 4608322 - DNA, 25 bp, Homo sapien
actgtacttaggatgcttcaaaaac

SEQ ID NO: 4608323 - DNA, 25 bp, Homo sapien
tttctactctactgtacttaggatg

SEQ ID NO: 4608324 - DNA, 25 bp, Homo sapien
taattacaaatcagatggtaagcct

SEQ ID NO: 4608325 - DNA, 25 bp, Homo sapien
tgaaatgatctatgctttaagagcc

SEQ ID NO: 4608326 - DNA, 25 bp, Homo sapien
gacttcctaacctttaattcagctc

SEQ ID NO: 4608327 - DNA, 25 bp, Homo sapien
gggacagatcgcacctttgtctttt

SEQ ID NO: 4608328 - DNA, 25 bp, Homo sapien
tcttctgggacagatcgcacctttg

SEQ ID NO: 4608329 - DNA, 25 bp, Homo sapien
ccatattggttttccctgacttcct

SEQ ID NO: 4608330 - DNA, 25 bp, Homo sapien
agcatttctctatccgtctagcacg

SEQ ID NO: 4608331 - DNA, 25 bp, Homo sapien
tccagcttcgagtgtgagagacccg

SEQ ID NO: 4608332 - DNA, 25 bp, Homo sapien
tcgcgcgcgttccacgatgaagact

SEQ ID NO: 4608333 - DNA, 25 bp, Homo sapien
tgaagactgcgcgtttgagtgtccc

SEQ ID NO: 4608334 - DNA, 25 bp, Homo sapien
tctttttgctgtagatggggaaccg

SEQ ID NO: 4608335 - DNA, 25 bp, Homo sapien
ttttgctgtagatggggaaccgctg

SEQ ID NO: 4608336 - DNA, 25 bp, Homo sapien
gtagatggggaaccgctggcaggaa

SEQ ID NO: 4608337 - DNA, 25 bp, Homo sapien
gtctgacaacccaggtagcctttct

SEQ ID NO: 4608338 - DNA, 25 bp, Homo sapien
aactcaatctgctggtgttattcat

SEQ ID NO: 4608339 - DNA, 25 bp, Homo sapien
ggaaactcaatctgctggtgttatt

SEQ ID NO: 4608340 - DNA, 25 bp, Homo sapien
tttggaaactcaatctgctggtgtt

SEQ ID NO: 4608341 - DNA, 25 bp, Homo sapien
gaaactcaatctgctggtgttattc

SEQ ID NO: 4608342 - DNA, 25 bp, Homo sapien
cgtcccgggccctttgcgtgtagtg

SEQ ID NO: 4608343 - DNA, 25 bp, Homo sapien
ttcggcactgcaaacctaaccgcta

SEQ ID NO: 4608344 - DNA, 25 bp, Homo sapien
ttcaagccccgttttcttgcagctc

SEQ ID NO: 4608345 - DNA, 25 bp, Homo sapien
tgtagtgggtggatctgcaattgta

SEQ ID NO: 4608346 - DNA, 25 bp, Homo sapien
gccgttacccagaatccctctactg

SEQ ID NO: 4608347 - DNA, 25 bp, Homo sapien
cccagaatccctctactggccgcga

SEQ ID NO: 4608348 - DNA, 25 bp, Homo sapien
aatccctctactggccgcgacgccg

SEQ ID NO: 4608349 - DNA, 25 bp, Homo sapien
ctgcgccgagccagaagcccagccg

SEQ ID NO: 4608350 - DNA, 25 bp, Homo sapien
ctgctccgggtcctacaaccgccct

SEQ ID NO: 4608351 - DNA, 25 bp, Homo sapien
aacagacttggcgtgaatggaacct

SEQ ID NO: 4608352 - DNA, 25 bp, Homo sapien
ccttggccctacaactgccactgcc

SEQ ID NO: 4608353 - DNA, 25 bp, Homo sapien
tgccactgccaacagacttggcgtg

SEQ ID NO: 4608354 - DNA, 25 bp, Homo sapien
ccggaggcggccacggttgttccat

SEQ ID NO: 4608355 - DNA, 25 bp, Homo sapien
cctcggcccgagggaggctccaggg

SEQ ID NO: 4608356 - DNA, 25 bp, Homo sapien
gaactggggaacacgtcgaagtcac

SEQ ID NO: 4608357 - DNA, 25 bp, Homo sapien
ggaacacgtcgaagtcactctcttc

SEQ ID NO: 4608358 - DNA, 25 bp, Homo sapien
gagaactggggaacacgtcgaagtc

SEQ ID NO: 4608359 - DNA, 25 bp, Homo sapien
tggggaacacgtcgaagtcactctc

SEQ ID NO: 4608360 - DNA, 25 bp, Homo sapien
tgctcctgatccaaggactcagaat

SEQ ID NO: 4608361 - DNA, 25 bp, Homo sapien
catccttgctaatggcatccgtgct

SEQ ID NO: 4608362 - DNA, 25 bp, Homo sapien
gaattatgcagtgctaagctaccaa

SEQ ID NO: 4608363 - DNA, 25 bp, Homo sapien
tcttcccgttgcctcagttctgata

SEQ ID NO: 4608364 - DNA, 25 bp, Homo sapien
gtatttcagtctggtcacttaactg

SEQ ID NO: 4608365 - DNA, 25 bp, Homo sapien
tttgctaccaaatacgcacaactgg

SEQ ID NO: 4608366 - DNA, 25 bp, Homo sapien
gcaagagctttgagactttttgact

SEQ ID NO: 4608367 - DNA, 25 bp, Homo sapien
cattatggcccagtaaaagctcata

SEQ ID NO: 4608368 - DNA, 25 bp, Homo sapien
cttatctctcaatcccagagtcagg

SEQ ID NO: 4608369 - DNA, 25 bp, Homo sapien
gaaggtagttgcattaaaggaactc

SEQ ID NO: 4608370 - DNA, 25 bp, Homo sapien
caccactaagttatcaagtcactct

SEQ ID NO: 4608371 - DNA, 25 bp, Homo sapien
tgtggacaactaagcctggcctatt

SEQ ID NO: 4608372 - DNA, 25 bp, Homo sapien
tgctgtagcagaactagagctggtc

SEQ ID NO: 4608373 - DNA, 25 bp, Homo sapien
ctcaagctcccagacaaaaccagtg

SEQ ID NO: 4608374 - DNA, 25 bp, Homo sapien
taaagtactgatagggctagtggcg

SEQ ID NO: 4608375 - DNA, 25 bp, Homo sapien
gatagtgcagatctagaccagtcct

SEQ ID NO: 4608376 - DNA, 25 bp, Homo sapien
ctgatttatcttcatcttctgtgtc

SEQ ID NO: 4608377 - DNA, 25 bp, Homo sapien
tgctcatatttttgcataaatgatt

SEQ ID NO: 4608378 - DNA, 25 bp, Homo sapien
tatttttgcataaatgattctgatt

SEQ ID NO: 4608379 - DNA, 25 bp, Homo sapien
aaaatgtctgattttttgctcatat

SEQ ID NO: 4608380 - DNA, 25 bp, Homo sapien
aaaatctctggctatcatcccatcg

SEQ ID NO: 4608381 - DNA, 25 bp, Homo sapien
ggctatcatcccatcgactcaacat

SEQ ID NO: 4608382 - DNA, 25 bp, Homo sapien
aaggtatggatggtcagacaaaaat

SEQ ID NO: 4608383 - DNA, 25 bp, Homo sapien
tatggatggtcagacaaaaatctct

SEQ ID NO: 4608384 - DNA, 25 bp, Homo sapien
gatatttagcagtttcttcacatac

SEQ ID NO: 4608385 - DNA, 25 bp, Homo sapien
ttctcagcttccaggtgaaaacacc

SEQ ID NO: 4608386 - DNA, 25 bp, Homo sapien
tgaaaacaccataaaataagatatt

SEQ ID NO: 4608387 - DNA, 25 bp, Homo sapien
cttctcagcttccaggtgaaaacac

SEQ ID NO: 4608388 - DNA, 25 bp, Homo sapien
aactgcattacaacagcttgatgtg

SEQ ID NO: 4608389 - DNA, 25 bp, Homo sapien
cgaaaacaccctcttggatccacat

SEQ ID NO: 4608390 - DNA, 25 bp, Homo sapien
gatgtgctatttgttccattaaagc

SEQ ID NO: 4608391 - DNA, 25 bp, Homo sapien
tggccatttccataataaactgcat

SEQ ID NO: 4608392 - DNA, 25 bp, Homo sapien
tattgccctacttcttgggcagctt

SEQ ID NO: 4608393 - DNA, 25 bp, Homo sapien
caaatcttgtgagtgtgaaaggtac

SEQ ID NO: 4608394 - DNA, 25 bp, Homo sapien
tgtgaattcatagcgtaagcatttc

SEQ ID NO: 4608395 - DNA, 25 bp, Homo sapien
cagtgaacgcaaattcttattgccc

SEQ ID NO: 4608396 - DNA, 25 bp, Homo sapien
gaacaaagtaagcataccatgaaag

SEQ ID NO: 4608397 - DNA, 25 bp, Homo sapien
cataagatagcaacagtaatcctca

SEQ ID NO: 4608398 - DNA, 25 bp, Homo sapien
tacaatgttaagattgaagaccagt

SEQ ID NO: 4608399 - DNA, 25 bp, Homo sapien
taaacaccagtttaaacacatccat

SEQ ID NO: 4608400 - DNA, 25 bp, Homo sapien
catgcttaaggtttagggatttaga

SEQ ID NO: 4608401 - DNA, 25 bp, Homo sapien
gctgtcctcattgcatgcttaaggt

SEQ ID NO: 4608402 - DNA, 25 bp, Homo sapien
cttgtgtggacacagagtatgtaat

SEQ ID NO: 4608403 - DNA, 25 bp, Homo sapien
ggatttagatatagagtgatgacag

SEQ ID NO: 4608404 - DNA, 25 bp, Homo sapien
ggttgaaaactttgtgattgagaat

SEQ ID NO: 4608405 - DNA, 25 bp, Homo sapien
aacctatagatccaacaccagaatg

SEQ ID NO: 4608406 - DNA, 25 bp, Homo sapien
ctgtggtaaggattctaataaacct

SEQ ID NO: 4608407 - DNA, 25 bp, Homo sapien
gggaacatgattctgaactgtcata

SEQ ID NO: 4608408 - DNA, 25 bp, Homo sapien
aaatgttatatctggtagacccaac

SEQ ID NO: 4608409 - DNA, 25 bp, Homo sapien
catgtgcatgtccactttgaagcta

SEQ ID NO: 4608410 - DNA, 25 bp, Homo sapien
caaacagttggccagtattaccaga

SEQ ID NO: 4608411 - DNA, 25 bp, Homo sapien
taaggaagctcctgagggagccatc

SEQ ID NO: 4608412 - DNA, 25 bp, Homo sapien
ccatgaggagattagcccagcttaa

SEQ ID NO: 4608413 - DNA, 25 bp, Homo sapien
ttcagaaggaccacatcaggatgct

SEQ ID NO: 4608414 - DNA, 25 bp, Homo sapien
ttacagtgagataaggtcaagccac

SEQ ID NO: 4608415 - DNA, 25 bp, Homo sapien
gatgcctagcacctgatatcagttg

SEQ ID NO: 4608416 - DNA, 25 bp, Homo sapien
aatatggtttgaagttagcaatgca

SEQ ID NO: 4608417 - DNA, 25 bp, Homo sapien
cctatgagatgtgataaaagaatga

SEQ ID NO: 4608418 - DNA, 25 bp, Homo sapien
tggatatcttcagggtctattgtgg

SEQ ID NO: 4608419 - DNA, 25 bp, Homo sapien
ggcaaggctacaacctccatgtgat

SEQ ID NO: 4608420 - DNA, 25 bp, Homo sapien
tataaccagttttatgacagtacat

SEQ ID NO: 4608421 - DNA, 25 bp, Homo sapien
gtcctatttctctgcagtgtagtag

SEQ ID NO: 4608422 - DNA, 25 bp, Homo sapien
catatatattcagtttcaccgtcct

SEQ ID NO: 4608423 - DNA, 25 bp, Homo sapien
agaaaaagaacgcattataaccagt

SEQ ID NO: 4608424 - DNA, 25 bp, Homo sapien
taccaccgagtttaagctgcagaga

SEQ ID NO: 4608425 - DNA, 25 bp, Homo sapien
tacagtgtccatcattttgggttca

SEQ ID NO: 4608426 - DNA, 25 bp, Homo sapien
cagagagctgtactgatagaatact

SEQ ID NO: 4608427 - DNA, 25 bp, Homo sapien
gatagaatactgaagataatctgga

SEQ ID NO: 4608428 - DNA, 25 bp, Homo sapien
acttggcctcagcagtcttaaccaa

SEQ ID NO: 4608429 - DNA, 25 bp, Homo sapien
aatttgacagctaaagtagcagtgg

SEQ ID NO: 4608430 - DNA, 25 bp, Homo sapien
ttcctgcaacatatggtaccactct

SEQ ID NO: 4608431 - DNA, 25 bp, Homo sapien
caaaaagtccagtttgacttcctgc

SEQ ID NO: 4608432 - DNA, 25 bp, Homo sapien
caaggatttaactgatggtgccgaa

SEQ ID NO: 4608433 - DNA, 25 bp, Homo sapien
gagatcccagactatgttaagaaag

SEQ ID NO: 4608434 - DNA, 25 bp, Homo sapien
taattggcagctcaaggcagttagc

SEQ ID NO: 4608435 - DNA, 25 bp, Homo sapien
gacacgtattcccagtcccagttag

SEQ ID NO: 4608436 - DNA, 25 bp, Homo sapien
tcagtgcccctcaagaatagtttac

SEQ ID NO: 4608437 - DNA, 25 bp, Homo sapien
tggcatcagtcagtggttcccacaa

SEQ ID NO: 4608438 - DNA, 25 bp, Homo sapien
tagcctttaagtgcaaattatggca

SEQ ID NO: 4608439 - DNA, 25 bp, Homo sapien
tgaatgcttacaggcaaatcctggg

SEQ ID NO: 4608440 - DNA, 25 bp, Homo sapien
taaggatgtgccaaatgattcggat

SEQ ID NO: 4608441 - DNA, 25 bp, Homo sapien
tctattggtgtcgtctgagcagcca

SEQ ID NO: 4608442 - DNA, 25 bp, Homo sapien
aagagaaacccgtggcactatgtaa

SEQ ID NO: 4608443 - DNA, 25 bp, Homo sapien
tgaaacaagccgtcttacaagtcgt

SEQ ID NO: 4608444 - DNA, 25 bp, Homo sapien
gctaggcccttggtccacatggaca

SEQ ID NO: 4608445 - DNA, 25 bp, Homo sapien
caattagatccagtccctgtcaggc

SEQ ID NO: 4608446 - DNA, 25 bp, Homo sapien
aacagccctggtgtctattaaatca

SEQ ID NO: 4608447 - DNA, 25 bp, Homo sapien
tggagcataaaattacaaggttggc

SEQ ID NO: 4608448 - DNA, 25 bp, Homo sapien
tatgggtaactcttagaactgggcc

SEQ ID NO: 4608449 - DNA, 25 bp, Homo sapien
ttgtctgcaacacgtataggaaccg

SEQ ID NO: 4608450 - DNA, 25 bp, Homo sapien
gatggcagctaatccctcagactat

SEQ ID NO: 4608451 - DNA, 25 bp, Homo sapien
gaactgggcctgacgcatagaaagc

SEQ ID NO: 4608452 - DNA, 25 bp, Homo sapien
ggattccactgattacactgactag

SEQ ID NO: 4608453 - DNA, 25 bp, Homo sapien
cacttctagagttggcagtgcgaca

SEQ ID NO: 4608454 - DNA, 25 bp, Homo sapien
gcaccactcggatggagccaacttg

SEQ ID NO: 4608455 - DNA, 25 bp, Homo sapien
tttcctccagtgaatagaagcccag

SEQ ID NO: 4608456 - DNA, 25 bp, Homo sapien
cagaacttctcttgcgtagtggtgc

SEQ ID NO: 4608457 - DNA, 25 bp, Homo sapien
cattcagcgtgaggatgataaacca

SEQ ID NO: 4608458 - DNA, 25 bp, Homo sapien
tgccaaaagacccagttcacatggg

SEQ ID NO: 4608459 - DNA, 25 bp, Homo sapien
taacagaagtccagaaggtaggttg

SEQ ID NO: 4608460 - DNA, 25 bp, Homo sapien
tacttagaggctgcttagaaaacct

SEQ ID NO: 4608461 - DNA, 25 bp, Homo sapien
taggagttgcgctgatagagattca

SEQ ID NO: 4608462 - DNA, 25 bp, Homo sapien
cctgctctgccaaggagtgtgttag

SEQ ID NO: 4608463 - DNA, 25 bp, Homo sapien
tagaaatgaaactggcgtaccctgt

SEQ ID NO: 4608464 - DNA, 25 bp, Homo sapien
ggaaggaaggaaaccttgttgcaca

SEQ ID NO: 4608465 - DNA, 25 bp, Homo sapien
aaagagaaacagagaaagaagaaga

SEQ ID NO: 4608466 - DNA, 25 bp, Homo sapien
agaaacagagaaagaagaagagaga

SEQ ID NO: 4608467 - DNA, 25 bp, Homo sapien
gaaggaaggaaaccttgttgcacaa

SEQ ID NO: 4608468 - DNA, 25 bp, Homo sapien
cctcccatttcagcctcctgagtag

SEQ ID NO: 4608469 - DNA, 25 bp, Homo sapien
atcctcccatttcagcctcctgagt

SEQ ID NO: 4608470 - DNA, 25 bp, Homo sapien
tgacctcctaggctcaagtgatcct

SEQ ID NO: 4608471 - DNA, 25 bp, Homo sapien
agtggtgtgatcactgcagccttga

SEQ ID NO: 4608472 - DNA, 25 bp, Homo sapien
ccctggtggggtccgagcctcaggc

SEQ ID NO: 4608473 - DNA, 25 bp, Homo sapien
cctggtggggtccgagcctcaggca

SEQ ID NO: 4608474 - DNA, 25 bp, Homo sapien
ctggtggggtccgagcctcaggcat

SEQ ID NO: 4608475 - DNA, 25 bp, Homo sapien
gaatggcgcccccttctgtgcggcg

SEQ ID NO: 4608476 - DNA, 25 bp, Homo sapien
gagttaggtcgggagaaataatgca

SEQ ID NO: 4608477 - DNA, 25 bp, Homo sapien
tctgtgcggcgcaggaactgcaaca

SEQ ID NO: 4608478 - DNA, 25 bp, Homo sapien
gaactgcaacacacgctggcggcag

SEQ ID NO: 4608479 - DNA, 25 bp, Homo sapien
tgggtaatttcacaacaggcagtgc

SEQ ID NO: 4608480 - DNA, 25 bp, Homo sapien
caccctcgcgaaatgacatattcat

SEQ ID NO: 4608481 - DNA, 25 bp, Homo sapien
gcttgggtaatttcacaacaggcag

SEQ ID NO: 4608482 - DNA, 25 bp, Homo sapien
gatggctccaccctcgcgaaatgac

SEQ ID NO: 4608483 - DNA, 25 bp, Homo sapien
taggtctgactcacatctggaggag

SEQ ID NO: 4608484 - DNA, 25 bp, Homo sapien
tccatccaatactctgtcgaacagg

SEQ ID NO: 4608485 - DNA, 25 bp, Homo sapien
atttcatccagaaggaagcattgcc

SEQ ID NO: 4608486 - DNA, 25 bp, Homo sapien
agaattctaagaagtcccttggaag

SEQ ID NO: 4608487 - DNA, 25 bp, Homo sapien
ccactgcatggcatgaatcaggcca

SEQ ID NO: 4608488 - DNA, 25 bp, Homo sapien
actgcatggcatgaatcaggccatc

SEQ ID NO: 4608489 - DNA, 25 bp, Homo sapien
cactgcatggcatgaatcaggccat

SEQ ID NO: 4608490 - DNA, 25 bp, Homo sapien
ctgcatggcatgaatcaggccatct

SEQ ID NO: 4608491 - DNA, 25 bp, Homo sapien
gatgcatggccacaataatggcaag

SEQ ID NO: 4608492 - DNA, 25 bp, Homo sapien
gcacattgtcaagcatgcctttgag

SEQ ID NO: 4608493 - DNA, 25 bp, Homo sapien
catgaatgagaacactcttcgagtc

SEQ ID NO: 4608494 - DNA, 25 bp, Homo sapien
gcagggtggtatgccctccaagcat

SEQ ID NO: 4608495 - DNA, 25 bp, Homo sapien
tgcaaggtagagccatcctgtccta

SEQ ID NO: 4608496 - DNA, 25 bp, Homo sapien
gcaaggtagagccatcctgtcctac

SEQ ID NO: 4608497 - DNA, 25 bp, Homo sapien
caaggtagagccatcctgtcctact

SEQ ID NO: 4608498 - DNA, 25 bp, Homo sapien
ctgcaaggtagagccatcctgtcct

SEQ ID NO: 4608499 - DNA, 25 bp, Homo sapien
tgccgctcagcgcactgccggcgca

SEQ ID NO: 4608500 - DNA, 25 bp, Homo sapien
cctatcgcagggatgccgctcagcg

SEQ ID NO: 4608501 - DNA, 25 bp, Homo sapien
gctcagcgcactgccggcgcagtcc

SEQ ID NO: 4608502 - DNA, 25 bp, Homo sapien
gcagggatgccgctcagcgcactgc

SEQ ID NO: 4608503 - DNA, 25 bp, Homo sapien
gcctccattggcttccgctgaagct

SEQ ID NO: 4608504 - DNA, 25 bp, Homo sapien
gggccacgccgctattggcccgcgc

SEQ ID NO: 4608505 - DNA, 25 bp, Homo sapien
aagccgcgctgccattggtccgtag

SEQ ID NO: 4608506 - DNA, 25 bp, Homo sapien
ctattggcccgcgccggatcagggc

SEQ ID NO: 4608507 - DNA, 25 bp, Homo sapien
ccacgtggtttggaacaggaagacg

SEQ ID NO: 4608508 - DNA, 25 bp, Homo sapien
agcccagacgcgtccacgtggtttg

SEQ ID NO: 4608509 - DNA, 25 bp, Homo sapien
acgcgggactcgtgactccgatggt

SEQ ID NO: 4608510 - DNA, 25 bp, Homo sapien
ccgagagcggcgacttcggacagac

SEQ ID NO: 4608511 - DNA, 25 bp, Homo sapien
gttggcgcaagaagttgcaccctgc

SEQ ID NO: 4608512 - DNA, 25 bp, Homo sapien
ggttgtcgtctctggcccgaatctt

SEQ ID NO: 4608513 - DNA, 25 bp, Homo sapien
tagacaggaccagacgttggcgcaa

SEQ ID NO: 4608514 - DNA, 25 bp, Homo sapien
ttgcaccctgcgtagctgagggagt

SEQ ID NO: 4608515 - DNA, 25 bp, Homo sapien
ctcctgtcctgcgcacatcaatcac

SEQ ID NO: 4608516 - DNA, 25 bp, Homo sapien
tcctgtcctgcgcacatcaatcaca

SEQ ID NO: 4608517 - DNA, 25 bp, Homo sapien
gctcctgtcctgcgcacatcaatca

SEQ ID NO: 4608518 - DNA, 25 bp, Homo sapien
ttcctaacctatctccgtcaatagc

SEQ ID NO: 4608519 - DNA, 25 bp, Homo sapien
taacctatctccgtcaatagcatgg

SEQ ID NO: 4608520 - DNA, 25 bp, Homo sapien
tttccttcctaacctatctccgtca

SEQ ID NO: 4608521 - DNA, 25 bp, Homo sapien
tctccgtcaatagcatggcatcttc

SEQ ID NO: 4608522 - DNA, 25 bp, Homo sapien
gaggcactttggacagctgctttat

SEQ ID NO: 4608523 - DNA, 25 bp, Homo sapien
tgaaccctgcaggacacagtcctca

SEQ ID NO: 4608524 - DNA, 25 bp, Homo sapien
aatccagagatagaggcactttgga

SEQ ID NO: 4608525 - DNA, 25 bp, Homo sapien
cagagatagaggcactttggacagc

SEQ ID NO: 4608526 - DNA, 25 bp, Homo sapien
gttaccaagagctcgtggcaccctg

SEQ ID NO: 4608527 - DNA, 25 bp, Homo sapien
cacttgggattacataggcagcggc

SEQ ID NO: 4608528 - DNA, 25 bp, Homo sapien
gatggccgtgagtggaaatctgtcc

SEQ ID NO: 4608529 - DNA, 25 bp, Homo sapien
gatgagaaaccttaccactgggcct

SEQ ID NO: 4608530 - DNA, 25 bp, Homo sapien
cgggcaacaccggcggaggcctcct

SEQ ID NO: 4608531 - DNA, 25 bp, Homo sapien
tggaccgggcaacaccggcggaggc

SEQ ID NO: 4608532 - DNA, 25 bp, Homo sapien
ccttccaattcgctgctccggcagg

SEQ ID NO: 4608533 - DNA, 25 bp, Homo sapien
gtcctcgctggcgtcagccgatcgt

SEQ ID NO: 4608534 - DNA, 25 bp, Homo sapien
gccaccggccgctttgactagccat

SEQ ID NO: 4608535 - DNA, 25 bp, Homo sapien
cttcatcccttccaattcgctgctc

SEQ ID NO: 4608536 - DNA, 25 bp, Homo sapien
tgggagagcggctgagttggcgtag

SEQ ID NO: 4608537 - DNA, 25 bp, Homo sapien
cttgggagagcggctgagttggcgt

SEQ ID NO: 4608538 - DNA, 25 bp, Homo sapien
ttgggagagcggctgagttggcgta

SEQ ID NO: 4608539 - DNA, 25 bp, Homo sapien
gcagttgaaggtgctctccacataa

SEQ ID NO: 4608540 - DNA, 25 bp, Homo sapien
agaagacaccgtccggcagttgaag

SEQ ID NO: 4608541 - DNA, 25 bp, Homo sapien
tccacccaacgggaagcagaagaca

SEQ ID NO: 4608542 - DNA, 25 bp, Homo sapien
tgacatggctgtcagtgacccactg

SEQ ID NO: 4608543 - DNA, 25 bp, Homo sapien
tcagggccccacattaatgaggcag

SEQ ID NO: 4608544 - DNA, 25 bp, Homo sapien
cagggccccacattaatgaggcagc

SEQ ID NO: 4608545 - DNA, 25 bp, Homo sapien
ggccccacattaatgaggcagccac

SEQ ID NO: 4608546 - DNA, 25 bp, Homo sapien
gggccccacattaatgaggcagcca

SEQ ID NO: 4608547 - DNA, 25 bp, Homo sapien
tgatttaatttaaactagcgctacc

SEQ ID NO: 4608548 - DNA, 25 bp, Homo sapien
gcaatattgctcacgaacatacaaa

SEQ ID NO: 4608549 - DNA, 25 bp, Homo sapien
tcaacaagttagatgaaacggacca

SEQ ID NO: 4608550 - DNA, 25 bp, Homo sapien
aaactagcgctaccctgataccaaa

SEQ ID NO: 4608551 - DNA, 25 bp, Homo sapien
gagaatgttttctgaccgtaatgga

SEQ ID NO: 4608552 - DNA, 25 bp, Homo sapien
gacttataaatgacccatagctgcc

SEQ ID NO: 4608553 - DNA, 25 bp, Homo sapien
ccataggtcaaaggataggagtttc

SEQ ID NO: 4608554 - DNA, 25 bp, Homo sapien
tttatgggatacaactaaggcaatg

SEQ ID NO: 4608555 - DNA, 25 bp, Homo sapien
aacaaaaccagaaacgcccagcaga

SEQ ID NO: 4608556 - DNA, 25 bp, Homo sapien
aaccagaaacgcccagcagaacaaa

SEQ ID NO: 4608557 - DNA, 25 bp, Homo sapien
gagaatgggcataaagagaactcca

SEQ ID NO: 4608558 - DNA, 25 bp, Homo sapien
aagagaatgggcataaagagaactc

SEQ ID NO: 4608559 - DNA, 25 bp, Homo sapien
ttttgtccaatagccttatgaagct

SEQ ID NO: 4608560 - DNA, 25 bp, Homo sapien
gagaaccattcgttattttgtccaa

SEQ ID NO: 4608561 - DNA, 25 bp, Homo sapien
caatagccttatgaagctggcttca

SEQ ID NO: 4608562 - DNA, 25 bp, Homo sapien
gtttatttcaattcgagaaccattc

SEQ ID NO: 4608563 - DNA, 25 bp, Homo sapien
cccaagcttgccttaagagagccaa

SEQ ID NO: 4608564 - DNA, 25 bp, Homo sapien
tcatgcatcaatacactggaatact

SEQ ID NO: 4608565 - DNA, 25 bp, Homo sapien
tcagccaacggatgtttgccacagt

SEQ ID NO: 4608566 - DNA, 25 bp, Homo sapien
ggaatactatactacaacccacaga

SEQ ID NO: 4608567 - DNA, 25 bp, Homo sapien
gaagactctccaggtaatacccaat

SEQ ID NO: 4608568 - DNA, 25 bp, Homo sapien
ggacgctacagtcatgttccacaga

SEQ ID NO: 4608569 - DNA, 25 bp, Homo sapien
gatcattggtcactcctcgtagaac

SEQ ID NO: 4608570 - DNA, 25 bp, Homo sapien
ttccacagatccaccatacaggagg

SEQ ID NO: 4608571 - DNA, 25 bp, Homo sapien
caagttgggttgtgacaagagacaa

SEQ ID NO: 4608572 - DNA, 25 bp, Homo sapien
ggtaactgttaacaatagtcctgaa

SEQ ID NO: 4608573 - DNA, 25 bp, Homo sapien
cctcctggagtgattaacctctaaa

SEQ ID NO: 4608574 - DNA, 25 bp, Homo sapien
tcatgtcaactatgatgagacggag

SEQ ID NO: 4608575 - DNA, 25 bp, Homo sapien
gggaggcctggacaggacttctcta

SEQ ID NO: 4608576 - DNA, 25 bp, Homo sapien
caggacttctctagacttctctaat

SEQ ID NO: 4608577 - DNA, 25 bp, Homo sapien
ggacaggacttctctagacttctct

SEQ ID NO: 4608578 - DNA, 25 bp, Homo sapien
ggacttctctagacttctctaatct

SEQ ID NO: 4608579 - DNA, 25 bp, Homo sapien
ttaagatatcttctctgacagcaga

SEQ ID NO: 4608580 - DNA, 25 bp, Homo sapien
gcatccaaaagcagggaatccaccc

SEQ ID NO: 4608581 - DNA, 25 bp, Homo sapien
cagcagagcatccaaaagcagggaa

SEQ ID NO: 4608582 - DNA, 25 bp, Homo sapien
tctgacagcagagcatccaaaagca

SEQ ID NO: 4608583 - DNA, 25 bp, Homo sapien
cactgcgcccggccggccatcagct

SEQ ID NO: 4608584 - DNA, 25 bp, Homo sapien
acatggaagacaggcaacttggtgc

SEQ ID NO: 4608585 - DNA, 25 bp, Homo sapien
tgagggcttgggacctactctgcct

SEQ ID NO: 4608586 - DNA, 25 bp, Homo sapien
tagttcagcaagaagcccaagggta

SEQ ID NO: 4608587 - DNA, 25 bp, Homo sapien
tgttagaccctagacaattccctgt

SEQ ID NO: 4608588 - DNA, 25 bp, Homo sapien
tgattcaccatcaatcccaaattgt

SEQ ID NO: 4608589 - DNA, 25 bp, Homo sapien
caaagggagtgctgttgccttaaga

SEQ ID NO: 4608590 - DNA, 25 bp, Homo sapien
gggagtgctgttgccttaagaacat

SEQ ID NO: 4608591 - DNA, 25 bp, Homo sapien
ttcaacaaagggagtgctgttgcct

SEQ ID NO: 4608592 - DNA, 25 bp, Homo sapien
gttgaatgggcttcaagaccttcct

SEQ ID NO: 4608593 - DNA, 25 bp, Homo sapien
cctcacaggacatgagaaaaccact

SEQ ID NO: 4608594 - DNA, 25 bp, Homo sapien
cgggaggcattccccgtcgcacaat

SEQ ID NO: 4608595 - DNA, 25 bp, Homo sapien
gccattcctctaatacgtttgattt

SEQ ID NO: 4608596 - DNA, 25 bp, Homo sapien
caactgccactggatatagccacat

SEQ ID NO: 4608597 - DNA, 25 bp, Homo sapien
actcctccctctaggctgccaactg

SEQ ID NO: 4608598 - DNA, 25 bp, Homo sapien
tgaaattggtcctcccacgttctct

SEQ ID NO: 4608599 - DNA, 25 bp, Homo sapien
aattggtcctcccacgttctctact

SEQ ID NO: 4608600 - DNA, 25 bp, Homo sapien
tccaagtaataccattgccaaacct

SEQ ID NO: 4608601 - DNA, 25 bp, Homo sapien
tgttcaagctattcgaggcctctga

SEQ ID NO: 4608602 - DNA, 25 bp, Homo sapien
agacagtccacgctacacctttctt

SEQ ID NO: 4608603 - DNA, 25 bp, Homo sapien
cctctgaaaagacagtccacgctac

SEQ ID NO: 4608604 - DNA, 25 bp, Homo sapien
gtccagaatgtacttttgaccacag

SEQ ID NO: 4608605 - DNA, 25 bp, Homo sapien
cataccctttggaccaagcaggtgc

SEQ ID NO: 4608606 - DNA, 25 bp, Homo sapien
caaacagtcctgaatctcataccct

SEQ ID NO: 4608607 - DNA, 25 bp, Homo sapien
gagcaaagagggatttttcaataca

SEQ ID NO: 4608608 - DNA, 25 bp, Homo sapien
ttgctcttcaatgagaccacacact

SEQ ID NO: 4608609 - DNA, 25 bp, Homo sapien
tgctcttcaatgagaccacacactc

SEQ ID NO: 4608610 - DNA, 25 bp, Homo sapien
cttgctcttcaatgagaccacacac

SEQ ID NO: 4608611 - DNA, 25 bp, Homo sapien
tcttgctcttcaatgagaccacaca

SEQ ID NO: 4608612 - DNA, 25 bp, Homo sapien
catacatctctcttcacatatgcac

SEQ ID NO: 4608613 - DNA, 25 bp, Homo sapien
tacatctctcttcacatatgcacat

SEQ ID NO: 4608614 - DNA, 25 bp, Homo sapien
tgaccaaattcctcaacctgagctg

SEQ ID NO: 4608615 - DNA, 25 bp, Homo sapien
agccggcacccaagtgttagctcca

SEQ ID NO: 4608616 - DNA, 25 bp, Homo sapien
tcccatatcttgttgttagagcccc

SEQ ID NO: 4608617 - DNA, 25 bp, Homo sapien
ctggtgacagtctctcggtggctcc

SEQ ID NO: 4608618 - DNA, 25 bp, Homo sapien
tctctgcgggtcatgatccaggctc

SEQ ID NO: 4608619 - DNA, 25 bp, Homo sapien
tgtaaagacacctgcctctctgcgg

SEQ ID NO: 4608620 - DNA, 25 bp, Homo sapien
ggcaaaaacacccaaacaatagaga

SEQ ID NO: 4608621 - DNA, 25 bp, Homo sapien
tggaactgtagtaacaaactgggac

SEQ ID NO: 4608622 - DNA, 25 bp, Homo sapien
tccaggacagagaaaaatcagttat

SEQ ID NO: 4608623 - DNA, 25 bp, Homo sapien
caggacagagaaaaatcagttataa

SEQ ID NO: 4608624 - DNA, 25 bp, Homo sapien
cttgaattccaggacagagaaaaat

SEQ ID NO: 4608625 - DNA, 25 bp, Homo sapien
ggacagagaaaaatcagttataaag

SEQ ID NO: 4608626 - DNA, 25 bp, Homo sapien
ctgaggtgacacacgtacagagtac

SEQ ID NO: 4608627 - DNA, 25 bp, Homo sapien
aatatagatatcaggtatgaacttg

SEQ ID NO: 4608628 - DNA, 25 bp, Homo sapien
cagaatccacaatccggttcgccat

SEQ ID NO: 4608629 - DNA, 25 bp, Homo sapien
ctttcatgtgatctgtgtaaatata

SEQ ID NO: 4608630 - DNA, 25 bp, Homo sapien
tatagatatcaggtatgaacttgtt

SEQ ID NO: 4608631 - DNA, 25 bp, Homo sapien
caacctcagagctggcagttttaac

SEQ ID NO: 4608632 - DNA, 25 bp, Homo sapien
ttttaacttcaactagaacaggcat

SEQ ID NO: 4608633 - DNA, 25 bp, Homo sapien
taacttcaactagaacaggcatgtg

SEQ ID NO: 4608634 - DNA, 25 bp, Homo sapien
ctctggctgcgcaacctcagagctg

SEQ ID NO: 4608635 - DNA, 25 bp, Homo sapien
caccagcaaacggaaagagaagaca

SEQ ID NO: 4608636 - DNA, 25 bp, Homo sapien
taagtagacacatcaacaggaaagg

SEQ ID NO: 4608637 - DNA, 25 bp, Homo sapien
ttgacggcactgtgttcaaaggctt

SEQ ID NO: 4608638 - DNA, 25 bp, Homo sapien
ggccttcccagcagtacaatccgta

SEQ ID NO: 4608639 - DNA, 25 bp, Homo sapien
gccctgggggttggaggccagttca

SEQ ID NO: 4608640 - DNA, 25 bp, Homo sapien
gcacagttcctgccaaggtcctctg

SEQ ID NO: 4608641 - DNA, 25 bp, Homo sapien
tcagcaaccagtgacaacccaaagc

SEQ ID NO: 4608642 - DNA, 25 bp, Homo sapien
gttggaggccagttcagcactgagg

SEQ ID NO: 4608643 - DNA, 25 bp, Homo sapien
tgttaaaacttacctgccctgtgtc

SEQ ID NO: 4608644 - DNA, 25 bp, Homo sapien
gagcccttggaagaggacgaaagct

SEQ ID NO: 4608645 - DNA, 25 bp, Homo sapien
taatgcacaggaacagattatctcc

SEQ ID NO: 4608646 - DNA, 25 bp, Homo sapien
gatggtactctctttggctagggca

SEQ ID NO: 4608647 - DNA, 25 bp, Homo sapien
atatgtgcccgttgcaatgaaagga

SEQ ID NO: 4608648 - DNA, 25 bp, Homo sapien
tggtctcagctgtgtcccaccagca

SEQ ID NO: 4608649 - DNA, 25 bp, Homo sapien
agagaaagactgtggcaactgagag

SEQ ID NO: 4608650 - DNA, 25 bp, Homo sapien
tgcatgcatatgtgcccgttgcaat

SEQ ID NO: 4608651 - DNA, 25 bp, Homo sapien
gtgcacatgagtgaagagatcagat

SEQ ID NO: 4608652 - DNA, 25 bp, Homo sapien
ctgtgcacatgagtgaagagatcag

SEQ ID NO: 4608653 - DNA, 25 bp, Homo sapien
tgcacatgagtgaagagatcagatc

SEQ ID NO: 4608654 - DNA, 25 bp, Homo sapien
tgtgcacatgagtgaagagatcaga

SEQ ID NO: 4608655 - DNA, 25 bp, Homo sapien
aggcaagcctttccgaaatgggtcg

SEQ ID NO: 4608656 - DNA, 25 bp, Homo sapien
ttctgactttgtcccaggaaagtga

SEQ ID NO: 4608657 - DNA, 25 bp, Homo sapien
aattctgactttgtcccaggaaagt

SEQ ID NO: 4608658 - DNA, 25 bp, Homo sapien
ccgaaatgggtcgagaattctgact

SEQ ID NO: 4608659 - DNA, 25 bp, Homo sapien
tgccagatacctgaggagggcttta

SEQ ID NO: 4608660 - DNA, 25 bp, Homo sapien
caggactacttgagccagcccttga

SEQ ID NO: 4608661 - DNA, 25 bp, Homo sapien
cctgccagatacctgaggagggctt

SEQ ID NO: 4608662 - DNA, 25 bp, Homo sapien
gactacttgagccagcccttgagag

SEQ ID NO: 4608663 - DNA, 25 bp, Homo sapien
gagggcctagcaggactttggaaac

SEQ ID NO: 4608664 - DNA, 25 bp, Homo sapien
tcatgagtagtagcgccaggctttg

SEQ ID NO: 4608665 - DNA, 25 bp, Homo sapien
aggctttggttggtcgagtctacgc

SEQ ID NO: 4608666 - DNA, 25 bp, Homo sapien
tgctgtccaagggtcatgagtagta

SEQ ID NO: 4608667 - DNA, 25 bp, Homo sapien
ccacccagctcaccaacctcagatg

SEQ ID NO: 4608668 - DNA, 25 bp, Homo sapien
tatctacctgaatattccctgccac

SEQ ID NO: 4608669 - DNA, 25 bp, Homo sapien
tcatatctacctgaatattccctgc

SEQ ID NO: 4608670 - DNA, 25 bp, Homo sapien
cagtctcatatctacctgaatattc

SEQ ID NO: 4608671 - DNA, 25 bp, Homo sapien
gcatcggtaccatgataaccgaaaa

SEQ ID NO: 4608672 - DNA, 25 bp, Homo sapien
gtaccatgataaccgaaaaaggaca

SEQ ID NO: 4608673 - DNA, 25 bp, Homo sapien
gatatacagcatcggtaccatgata

SEQ ID NO: 4608674 - DNA, 25 bp, Homo sapien
ctttcagatatacagcatcggtacc

SEQ ID NO: 4608675 - DNA, 25 bp, Homo sapien
caccattcttcagttatcacagtac

SEQ ID NO: 4608676 - DNA, 25 bp, Homo sapien
ttcttcagttatcacagtactgtac

SEQ ID NO: 4608677 - DNA, 25 bp, Homo sapien
accaccattcttcagttatcacagt

SEQ ID NO: 4608678 - DNA, 25 bp, Homo sapien
ccattcttcagttatcacagtactg

SEQ ID NO: 4608679 - DNA, 25 bp, Homo sapien
ccaccgcagtcctcaaccctttctc

SEQ ID NO: 4608680 - DNA, 25 bp, Homo sapien
caccgcagtcctcaaccctttctca

SEQ ID NO: 4608681 - DNA, 25 bp, Homo sapien
catggcccaagggtgcatagcccca

SEQ ID NO: 4608682 - DNA, 25 bp, Homo sapien
caagggtgcatagccccaccgcagt

SEQ ID NO: 4608683 - DNA, 25 bp, Homo sapien
gcagctacgagcccagctacaaagc

SEQ ID NO: 4608684 - DNA, 25 bp, Homo sapien
tacgagcccagctacaaagccggtg

SEQ ID NO: 4608685 - DNA, 25 bp, Homo sapien
tgtgtgcaagcaggacttccccagg

SEQ ID NO: 4608686 - DNA, 25 bp, Homo sapien
cgtgtgtgcaagcaggacttcccca

SEQ ID NO: 4608687 - DNA, 25 bp, Homo sapien
gcagcagaatatctctaagccccag

SEQ ID NO: 4608688 - DNA, 25 bp, Homo sapien
taagccccagcctcaagatacatca

SEQ ID NO: 4608689 - DNA, 25 bp, Homo sapien
gaaagagtatgaaacagatccagct

SEQ ID NO: 4608690 - DNA, 25 bp, Homo sapien
tgttgaagaggacacaggaactttc

SEQ ID NO: 4608691 - DNA, 25 bp, Homo sapien
ttttatcctcaactgtactcacaaa

SEQ ID NO: 4608692 - DNA, 25 bp, Homo sapien
attcccccaccatgatggtcctcac

SEQ ID NO: 4608693 - DNA, 25 bp, Homo sapien
tattcccccaccatgatggtcctca

SEQ ID NO: 4608694 - DNA, 25 bp, Homo sapien
ctattcccccaccatgatggtcctc

SEQ ID NO: 4608695 - DNA, 25 bp, Homo sapien
aaatgtgttagtttggtctccaaag

SEQ ID NO: 4608696 - DNA, 25 bp, Homo sapien
gtttctatgactttaactacacata

SEQ ID NO: 4608697 - DNA, 25 bp, Homo sapien
aatgtgttagtttggtctccaaagc

SEQ ID NO: 4608698 - DNA, 25 bp, Homo sapien
ctatgactttaactacacataaaaa

SEQ ID NO: 4608699 - DNA, 25 bp, Homo sapien
ggaagccccactcagttggtgttta

SEQ ID NO: 4608700 - DNA, 25 bp, Homo sapien
ccccactcagttggtgtttaacaag

SEQ ID NO: 4608701 - DNA, 25 bp, Homo sapien
agccccactcagttggtgtttaaca

SEQ ID NO: 4608702 - DNA, 25 bp, Homo sapien
tcctctagctcctcagcacttccac

SEQ ID NO: 4608703 - DNA, 25 bp, Homo sapien
tgccactgctggtcaacaggaaagg

SEQ ID NO: 4608704 - DNA, 25 bp, Homo sapien
gatctgctcaatggagtccctatag

SEQ ID NO: 4608705 - DNA, 25 bp, Homo sapien
gatttgacaggctgccagatcccac

SEQ ID NO: 4608706 - DNA, 25 bp, Homo sapien
catctcaggtgtaaggacatgctct

SEQ ID NO: 4608707 - DNA, 25 bp, Homo sapien
gctctatgcaactcctgtgtaaagg

SEQ ID NO: 4608708 - DNA, 25 bp, Homo sapien
ggagattcacacttcctagacacaa

SEQ ID NO: 4608709 - DNA, 25 bp, Homo sapien
tagtccatctgacaagcaggtttca

SEQ ID NO: 4608710 - DNA, 25 bp, Homo sapien
cagaagaaccattctaggcagtagg

SEQ ID NO: 4608711 - DNA, 25 bp, Homo sapien
cgttgttgctttctatccatcccac

SEQ ID NO: 4608712 - DNA, 25 bp, Homo sapien
tcgttgttgctttctatccatccca

SEQ ID NO: 4608713 - DNA, 25 bp, Homo sapien
gtcgttgttgctttctatccatccc

SEQ ID NO: 4608714 - DNA, 25 bp, Homo sapien
gttgttgctttctatccatcccacc

SEQ ID NO: 4608715 - DNA, 25 bp, Homo sapien
aggatacggtaattctactcttagg

SEQ ID NO: 4608716 - DNA, 25 bp, Homo sapien
ggctgtggttacacaagtctgtgaa

SEQ ID NO: 4608717 - DNA, 25 bp, Homo sapien
aaggaccagatagtgtatgattcta

SEQ ID NO: 4608718 - DNA, 25 bp, Homo sapien
gaggaggcagaaccactagaaccct

SEQ ID NO: 4608719 - DNA, 25 bp, Homo sapien
gagcaattctgtggatgaaccgcag

SEQ ID NO: 4608720 - DNA, 25 bp, Homo sapien
gaaatgtccatatggaagagcccag

SEQ ID NO: 4608721 - DNA, 25 bp, Homo sapien
caaggacaatggcatcacagggcga

SEQ ID NO: 4608722 - DNA, 25 bp, Homo sapien
gcttctaatggtctcgcctggcaga

SEQ ID NO: 4608723 - DNA, 25 bp, Homo sapien
aataccctcgcatttacttaatatg

SEQ ID NO: 4608724 - DNA, 25 bp, Homo sapien
tgggtgtcccaatgtacctggctta

SEQ ID NO: 4608725 - DNA, 25 bp, Homo sapien
tgatttttgagtggcctatacaaag

SEQ ID NO: 4608726 - DNA, 25 bp, Homo sapien
tgctgaaacagacaagtccctccct

SEQ ID NO: 4608727 - DNA, 25 bp, Homo sapien
cacctagaatccaaggttttaatct

SEQ ID NO: 4608728 - DNA, 25 bp, Homo sapien
gacctagagggctgaagttaagacc

SEQ ID NO: 4608729 - DNA, 25 bp, Homo sapien
aaaattatcctctaccacctagaat

SEQ ID NO: 4608730 - DNA, 25 bp, Homo sapien
ttaaatagtacttcctttcagccag

SEQ ID NO: 4608731 - DNA, 25 bp, Homo sapien
tcagcactttatccccacccttgag

SEQ ID NO: 4608732 - DNA, 25 bp, Homo sapien
aaagctcttcaaatgccgcaaaaat

SEQ ID NO: 4608733 - DNA, 25 bp, Homo sapien
cacttgagggtcttgctaaggttgg

SEQ ID NO: 4608734 - DNA, 25 bp, Homo sapien
tggagaaaccaatgccaacacaggt

SEQ ID NO: 4608735 - DNA, 25 bp, Homo sapien
aagcaagtggctattctgtcctgga

SEQ ID NO: 4608736 - DNA, 25 bp, Homo sapien
ttggtcccattggtgtccgtggcag

SEQ ID NO: 4608737 - DNA, 25 bp, Homo sapien
catttggacttggtcccattggtgt

SEQ ID NO: 4608738 - DNA, 25 bp, Homo sapien
gcattggggccttatcttgtgatgg

SEQ ID NO: 4608739 - DNA, 25 bp, Homo sapien
catttgcttagcactgcaggactca

SEQ ID NO: 4608740 - DNA, 25 bp, Homo sapien
tgaaccagatgaagatccgtgtccg

SEQ ID NO: 4608741 - DNA, 25 bp, Homo sapien
gctgaactgcagctacgagactgtt

SEQ ID NO: 4608742 - DNA, 25 bp, Homo sapien
tgttctagcagcacgactgtggcct

SEQ ID NO: 4608743 - DNA, 25 bp, Homo sapien
aatgaggagatttaatgtctttaca

SEQ ID NO: 4608744 - DNA, 25 bp, Homo sapien
tctcatggagatagcacttacatca

SEQ ID NO: 4608745 - DNA, 25 bp, Homo sapien
aataagaatgtacagcacacctgga

SEQ ID NO: 4608746 - DNA, 25 bp, Homo sapien
cctggaatataaaaacatcccaata

SEQ ID NO: 4608747 - DNA, 25 bp, Homo sapien
caagccctgcctggatatctgacct

SEQ ID NO: 4608748 - DNA, 25 bp, Homo sapien
gctctcagtagaatgtcatagtcca

SEQ ID NO: 4608749 - DNA, 25 bp, Homo sapien
cctgatatcagccttatgagactct

SEQ ID NO: 4608750 - DNA, 25 bp, Homo sapien
taagcagagaatccaaccaagccct

SEQ ID NO: 4608751 - DNA, 25 bp, Homo sapien
tagtctctaagatgtcccagcaaac

SEQ ID NO: 4608752 - DNA, 25 bp, Homo sapien
tggaccgaccaggagctaagctaga

SEQ ID NO: 4608753 - DNA, 25 bp, Homo sapien
caaagaatgatactgccatgacccc

SEQ ID NO: 4608754 - DNA, 25 bp, Homo sapien
tatcagcagaaaggaacagacagac

SEQ ID NO: 4608755 - DNA, 25 bp, Homo sapien
cagtgagtactacgataaggacggg

SEQ ID NO: 4608756 - DNA, 25 bp, Homo sapien
gatagagggtttcctcacgagcagc

SEQ ID NO: 4608757 - DNA, 25 bp, Homo sapien
gaggcgtctatgagaacatgtagca

SEQ ID NO: 4608758 - DNA, 25 bp, Homo sapien
ggaaaattaagcaacgacagggtgc

SEQ ID NO: 4608759 - DNA, 25 bp, Homo sapien
ggcactccacgttggaacacggtga

SEQ ID NO: 4608760 - DNA, 25 bp, Homo sapien
tcatgggacagtttgacctcaaccc

SEQ ID NO: 4608761 - DNA, 25 bp, Homo sapien
gcacaatgctactaacacagctggg

SEQ ID NO: 4608762 - DNA, 25 bp, Homo sapien
ggtcttctagctgagtacacccaag

SEQ ID NO: 4608763 - DNA, 25 bp, Homo sapien
catgatgtttcatgcagccccaggc

SEQ ID NO: 4608764 - DNA, 25 bp, Homo sapien
gctacaggaaacgtaggctgacaca

SEQ ID NO: 4608765 - DNA, 25 bp, Homo sapien
tgtacacagtggcttcaggacctgc

SEQ ID NO: 4608766 - DNA, 25 bp, Homo sapien
gtgtgccttaggcagaagacccaag

SEQ ID NO: 4608767 - DNA, 25 bp, Homo sapien
ttgtttgaacccctagatccagctt

SEQ ID NO: 4608768 - DNA, 25 bp, Homo sapien
gacacagctaggattcagtattggg

SEQ ID NO: 4608769 - DNA, 25 bp, Homo sapien
ttagggctcacccaagttaaactga

SEQ ID NO: 4608770 - DNA, 25 bp, Homo sapien
tctttcgctctaccaccagtcaagg

SEQ ID NO: 4608771 - DNA, 25 bp, Homo sapien
tgggttaccacccagagtactgctc

SEQ ID NO: 4608772 - DNA, 25 bp, Homo sapien
gattctataccataatgctggagga

SEQ ID NO: 4608773 - DNA, 25 bp, Homo sapien
ggctgacatcattaccactccaggg

SEQ ID NO: 4608774 - DNA, 25 bp, Homo sapien
ccgtacaatttaggtgaggctgaca

SEQ ID NO: 4608775 - DNA, 25 bp, Homo sapien
caattcatgatcttggcaatgggca

SEQ ID NO: 4608776 - DNA, 25 bp, Homo sapien
caggacaggcccttcggcttatcat

SEQ ID NO: 4608777 - DNA, 25 bp, Homo sapien
ctggacaggacaggcccttcggctt

SEQ ID NO: 4608778 - DNA, 25 bp, Homo sapien
ctgccaacctggacaggacaggccc

SEQ ID NO: 4608779 - DNA, 25 bp, Homo sapien
acctggacaggacaggcccttcggc

SEQ ID NO: 4608780 - DNA, 25 bp, Homo sapien
gcaactccatccctaggagagacac

SEQ ID NO: 4608781 - DNA, 25 bp, Homo sapien
gaccccagcttggatgactgtcctc

SEQ ID NO: 4608782 - DNA, 25 bp, Homo sapien
agaggagaccccagcttggatgact

SEQ ID NO: 4608783 - DNA, 25 bp, Homo sapien
ctccatccctaggagagacacacag

SEQ ID NO: 4608784 - DNA, 25 bp, Homo sapien
gcatttatgactggctgtgaagcag

SEQ ID NO: 4608785 - DNA, 25 bp, Homo sapien
tgcggcagccgtgttgaagaacatg

SEQ ID NO: 4608786 - DNA, 25 bp, Homo sapien
acagctggcattcaagtccccattc

SEQ ID NO: 4608787 - DNA, 25 bp, Homo sapien
tttctgggtagtgtttgcggcagcc

SEQ ID NO: 4608788 - DNA, 25 bp, Homo sapien
gaaattctgatagcatagcccatgg

SEQ ID NO: 4608789 - DNA, 25 bp, Homo sapien
tagcccatggttaaccccagtggaa

SEQ ID NO: 4608790 - DNA, 25 bp, Homo sapien
tctaaggaaactggaggcctaggtg

SEQ ID NO: 4608791 - DNA, 25 bp, Homo sapien
tattactcaggtcagaacagctgtc

SEQ ID NO: 4608792 - DNA, 25 bp, Homo sapien
catcgtttgcaacctaaacttattt

SEQ ID NO: 4608793 - DNA, 25 bp, Homo sapien
gccaccgaagtcttcaccaatacaa

SEQ ID NO: 4608794 - DNA, 25 bp, Homo sapien
gagtttccatcgtttgcaacctaaa

SEQ ID NO: 4608795 - DNA, 25 bp, Homo sapien
catgacttgccaccgaagtcttcac

SEQ ID NO: 4608796 - DNA, 25 bp, Homo sapien
caagggaccagtcatttgtcaggat

SEQ ID NO: 4608797 - DNA, 25 bp, Homo sapien
tagtctccggccaagtgcaaagaat

SEQ ID NO: 4608798 - DNA, 25 bp, Homo sapien
tgaggttctagcttcctgcaagggc

SEQ ID NO: 4608799 - DNA, 25 bp, Homo sapien
catagaaggagatctgaacaccacc

SEQ ID NO: 4608800 - DNA, 25 bp, Homo sapien
catggtatctctggtgcctggctca

SEQ ID NO: 4608801 - DNA, 25 bp, Homo sapien
taggtcctagccgttgagatgggcc

SEQ ID NO: 4608802 - DNA, 25 bp, Homo sapien
gctcagtgttgtggctcctcgggaa

SEQ ID NO: 4608803 - DNA, 25 bp, Homo sapien
aaatgggaaccactctctgcgagag

SEQ ID NO: 4608804 - DNA, 25 bp, Homo sapien
gcccggctaaggactgaactattga

SEQ ID NO: 4608805 - DNA, 25 bp, Homo sapien
taaagtcctagaagaggcaatactg

SEQ ID NO: 4608806 - DNA, 25 bp, Homo sapien
cagaacatcgcctctgagcaggaga

SEQ ID NO: 4608807 - DNA, 25 bp, Homo sapien
gaaggaacttgctagcatgatggaa

SEQ ID NO: 4608808 - DNA, 25 bp, Homo sapien
gcgcctatggctgtgctcactcaga

SEQ ID NO: 4608809 - DNA, 25 bp, Homo sapien
aaatagccgttagacatccatgtgg

SEQ ID NO: 4608810 - DNA, 25 bp, Homo sapien
gaatcagtgagagtacttgccccaa

SEQ ID NO: 4608811 - DNA, 25 bp, Homo sapien
tcaaccaggcttatggcggtagttg

SEQ ID NO: 4608812 - DNA, 25 bp, Homo sapien
gctagctcaggccaatagaagaata

SEQ ID NO: 4608813 - DNA, 25 bp, Homo sapien
tacgaagcattacgtttttatcaaa

SEQ ID NO: 4608814 - DNA, 25 bp, Homo sapien
gatgagctctcttctaactagctgt

SEQ ID NO: 4608815 - DNA, 25 bp, Homo sapien
tcaggccaatagaagaatactgcag

SEQ ID NO: 4608816 - DNA, 25 bp, Homo sapien
tcaacaccgtgaaaatgtcattggc

SEQ ID NO: 4608817 - DNA, 25 bp, Homo sapien
cagcatgcatatcctcaacttagag

SEQ ID NO: 4608818 - DNA, 25 bp, Homo sapien
tcatctgcccaaaatctagaccgta

SEQ ID NO: 4608819 - DNA, 25 bp, Homo sapien
cccaagaggcaaccgctgttgtgat

SEQ ID NO: 4608820 - DNA, 25 bp, Homo sapien
ggagatcttccctaaactagcaaga

SEQ ID NO: 4608821 - DNA, 25 bp, Homo sapien
gagatcttccctaaactagcaagac

SEQ ID NO: 4608822 - DNA, 25 bp, Homo sapien
aggagatcttccctaaactagcaag

SEQ ID NO: 4608823 - DNA, 25 bp, Homo sapien
ccaggagatcttccctaaactagca

SEQ ID NO: 4608824 - DNA, 25 bp, Homo sapien
tctttttgtggtcagtaatcccaaa

SEQ ID NO: 4608825 - DNA, 25 bp, Homo sapien
gggagccactcataactcctgatta

SEQ ID NO: 4608826 - DNA, 25 bp, Homo sapien
tacccactggaatgtagcagatttg

SEQ ID NO: 4608827 - DNA, 25 bp, Homo sapien
gaaattatgtgtctttaccatgcca

SEQ ID NO: 4608828 - DNA, 25 bp, Homo sapien
gcatcctcatcatcgcttaatattc

SEQ ID NO: 4608829 - DNA, 25 bp, Homo sapien
ctgctggttcacgtggtaagggtat

SEQ ID NO: 4608830 - DNA, 25 bp, Homo sapien
cactaccagattgtcttccaaaggg

SEQ ID NO: 4608831 - DNA, 25 bp, Homo sapien
gaaaaaatactcaggagtgagactg

SEQ ID NO: 4608832 - DNA, 25 bp, Homo sapien
gtttcattgcctaaaaatcccatgc

SEQ ID NO: 4608833 - DNA, 25 bp, Homo sapien
tgaagatcttacagagagttccaca

SEQ ID NO: 4608834 - DNA, 25 bp, Homo sapien
tctttatcgcccactgacagttgcc

SEQ ID NO: 4608835 - DNA, 25 bp, Homo sapien
aatcccatgcttcagccgggtgcag

SEQ ID NO: 4608836 - DNA, 25 bp, Homo sapien
cctagtaactatatttctgggaacg

SEQ ID NO: 4608837 - DNA, 25 bp, Homo sapien
tacagtacatctgctagttagaatg

SEQ ID NO: 4608838 - DNA, 25 bp, Homo sapien
tcattgtagccttatctaaaaaagc

SEQ ID NO: 4608839 - DNA, 25 bp, Homo sapien
gggaacgcatcctaaagaatctggg

SEQ ID NO: 4608840 - DNA, 25 bp, Homo sapien
tatgttgcctccctagataaaagag

SEQ ID NO: 4608841 - DNA, 25 bp, Homo sapien
gagaggaactctctacactgggtat

SEQ ID NO: 4608842 - DNA, 25 bp, Homo sapien
gatgacgaaatttgctagtaccttg

SEQ ID NO: 4608843 - DNA, 25 bp, Homo sapien
tatttcagtcaaaaccccaggcagt

SEQ ID NO: 4608844 - DNA, 25 bp, Homo sapien
ctcatggcaaattctcttaagcaga

SEQ ID NO: 4608845 - DNA, 25 bp, Homo sapien
attctcttaagcagagcacctccat

SEQ ID NO: 4608846 - DNA, 25 bp, Homo sapien
gcaaattctcttaagcagagcacct

SEQ ID NO: 4608847 - DNA, 25 bp, Homo sapien
caaattctcttaagcagagcacctc

SEQ ID NO: 4608848 - DNA, 25 bp, Homo sapien
cctcgagagcctgactcccatcagc

SEQ ID NO: 4608849 - DNA, 25 bp, Homo sapien
gcaatgcgccctcgagagcctgact

SEQ ID NO: 4608850 - DNA, 25 bp, Homo sapien
tggcaatgcgccctcgagagcctga

SEQ ID NO: 4608851 - DNA, 25 bp, Homo sapien
tcgtggcaatgcgccctcgagagcc

SEQ ID NO: 4608852 - DNA, 25 bp, Homo sapien
cgcgcggagactcccctcccgcaca

SEQ ID NO: 4608853 - DNA, 25 bp, Homo sapien
gcacacttctccgctttcggctttt

SEQ ID NO: 4608854 - DNA, 25 bp, Homo sapien
ctcccgggtacagcagacccgtcct

SEQ ID NO: 4608855 - DNA, 25 bp, Homo sapien
gccgggctgcctccgcgcggagact

SEQ ID NO: 4608856 - DNA, 25 bp, Homo sapien
agcttcgaactcagcctcccggttg

SEQ ID NO: 4608857 - DNA, 25 bp, Homo sapien
aacgccgcgggcgacactggcttcg

SEQ ID NO: 4608858 - DNA, 25 bp, Homo sapien
tccccgaatggcaggagaccgggcc

SEQ ID NO: 4608859 - DNA, 25 bp, Homo sapien
gcttcgccgccctgctagcttcgaa

SEQ ID NO: 4608860 - DNA, 25 bp, Homo sapien
ggacgggcacggctctgaacgacct

SEQ ID NO: 4608861 - DNA, 25 bp, Homo sapien
tgtcagcgccgagggaggccgttag

SEQ ID NO: 4608862 - DNA, 25 bp, Homo sapien
gacgcgaacacccaagcgagccggg

SEQ ID NO: 4608863 - DNA, 25 bp, Homo sapien
agaagccgaagtggcgacgcgaaca

SEQ ID NO: 4608864 - DNA, 25 bp, Homo sapien
acagatcgggcgaccagagcgcgcc

SEQ ID NO: 4608865 - DNA, 25 bp, Homo sapien
cagagcgcgccctcgagcccgcagg

SEQ ID NO: 4608866 - DNA, 25 bp, Homo sapien
gctacacagatcgggcgaccagagc

SEQ ID NO: 4608867 - DNA, 25 bp, Homo sapien
agatcgggcgaccagagcgcgccct

SEQ ID NO: 4608868 - DNA, 25 bp, Homo sapien
ttgttcctgttgcctgcttctgaaa

SEQ ID NO: 4608869 - DNA, 25 bp, Homo sapien
aggaggaagagcctctttttctgca

SEQ ID NO: 4608870 - DNA, 25 bp, Homo sapien
agaaacagttcacatcttgttcctg

SEQ ID NO: 4608871 - DNA, 25 bp, Homo sapien
gcagaagagaaacagttcacatctt

SEQ ID NO: 4608872 - DNA, 25 bp, Homo sapien
ccagctccagacaccttcgccttta

SEQ ID NO: 4608873 - DNA, 25 bp, Homo sapien
ttactgcagcgataaaggacagcac

SEQ ID NO: 4608874 - DNA, 25 bp, Homo sapien
cttcgcctttactgcagcgataaag

SEQ ID NO: 4608875 - DNA, 25 bp, Homo sapien
agacaccttcgcctttactgcagcg

SEQ ID NO: 4608876 - DNA, 25 bp, Homo sapien
tcaccagtttaagaccttgaagtcc

SEQ ID NO: 4608877 - DNA, 25 bp, Homo sapien
caccagtttaagaccttgaagtcct

SEQ ID NO: 4608878 - DNA, 25 bp, Homo sapien
aggatcactttagctcaggagttca

SEQ ID NO: 4608879 - DNA, 25 bp, Homo sapien
caggagttcaagtccagcctgggca

SEQ ID NO: 4608880 - DNA, 25 bp, Homo sapien
ctgcactctgggaagccaaggtgag

SEQ ID NO: 4608881 - DNA, 25 bp, Homo sapien
cctgcactctgggaagccaaggtga

SEQ ID NO: 4608882 - DNA, 25 bp, Homo sapien
gctaaggtgccagccgtttaactca

SEQ ID NO: 4608883 - DNA, 25 bp, Homo sapien
tcctggaagtacatgacgagaaaga

SEQ ID NO: 4608884 - DNA, 25 bp, Homo sapien
tcccagaattccataggcactcagt

SEQ ID NO: 4608885 - DNA, 25 bp, Homo sapien
ggcatcctctagagaccacgttctg

SEQ ID NO: 4608886 - DNA, 25 bp, Homo sapien
gcagagtctttttcagaacatttgc

SEQ ID NO: 4608887 - DNA, 25 bp, Homo sapien
ctgatatatagaagaggtggatgtt

SEQ ID NO: 4608888 - DNA, 25 bp, Homo sapien
gggaatggtaaagatacacctgaag

SEQ ID NO: 4608889 - DNA, 25 bp, Homo sapien
gaactggatctatttgcttcataga

SEQ ID NO: 4608890 - DNA, 25 bp, Homo sapien
caacatactccccagatggaaaggt

SEQ ID NO: 4608891 - DNA, 25 bp, Homo sapien
tctgcctcagatttcccaagggaat

SEQ ID NO: 4608892 - DNA, 25 bp, Homo sapien
tctatatggaagacatggttgggtg

SEQ ID NO: 4608893 - DNA, 25 bp, Homo sapien
gcaaacatattatgatacacaggtg

SEQ ID NO: 4608894 - DNA, 25 bp, Homo sapien
gggtggataccagatcctttctgtt

SEQ ID NO: 4608895 - DNA, 25 bp, Homo sapien
agagtacattatgcctggttgactc

SEQ ID NO: 4608896 - DNA, 25 bp, Homo sapien
tgagagagcaccaagtgataggcac

SEQ ID NO: 4608897 - DNA, 25 bp, Homo sapien
tgactcccaattcctacctgtgtga

SEQ ID NO: 4608898 - DNA, 25 bp, Homo sapien
cacatgaggtgattaagaggcaagc

SEQ ID NO: 4608899 - DNA, 25 bp, Homo sapien
gcaagcttatgaagcaaaccaggct

SEQ ID NO: 4608900 - DNA, 25 bp, Homo sapien
ctgccggcagcgtctgggtggccgg

SEQ ID NO: 4608901 - DNA, 25 bp, Homo sapien
tgccggcagcgtctgggtggccggc

SEQ ID NO: 4608902 - DNA, 25 bp, Homo sapien
ccggaacttgatcagctccaatttg

SEQ ID NO: 4608903 - DNA, 25 bp, Homo sapien
cacatatttgtttgtatagagattc

SEQ ID NO: 4608904 - DNA, 25 bp, Homo sapien
tgcggggtccggaacttgatcagct

SEQ ID NO: 4608905 - DNA, 25 bp, Homo sapien
tagccacatatttgtttgtatagag

SEQ ID NO: 4608906 - DNA, 25 bp, Homo sapien
cttgggcgtgaaggtcgaacaggtc

SEQ ID NO: 4608907 - DNA, 25 bp, Homo sapien
tcagccggatggcgatcaggagcac

SEQ ID NO: 4608908 - DNA, 25 bp, Homo sapien
gatcagccggatggcgatcaggagc

SEQ ID NO: 4608909 - DNA, 25 bp, Homo sapien
cgtgatcagccggatggcgatcagg

SEQ ID NO: 4608910 - DNA, 25 bp, Homo sapien
cagccggatggcgatcaggagcacc

SEQ ID NO: 4608911 - DNA, 25 bp, Homo sapien
gcttcacgtcctggtaaatgaggtt

SEQ ID NO: 4608912 - DNA, 25 bp, Homo sapien
ttcacgtcctggtaaatgaggttct

SEQ ID NO: 4608913 - DNA, 25 bp, Homo sapien
cttcacgtcctggtaaatgaggttc

SEQ ID NO: 4608914 - DNA, 25 bp, Homo sapien
gtcgatgatgtggatggcgtgctgc

SEQ ID NO: 4608915 - DNA, 25 bp, Homo sapien
gccagcccgaggtcgatgatgtgga

SEQ ID NO: 4608916 - DNA, 25 bp, Homo sapien
ccttggccagcccgaggtcgatgat

SEQ ID NO: 4608917 - DNA, 25 bp, Homo sapien
cgatgatgtggatggcgtgctgccg

SEQ ID NO: 4608918 - DNA, 25 bp, Homo sapien
cttcttggtcctgagaccagtgtac

SEQ ID NO: 4608919 - DNA, 25 bp, Homo sapien
gcttcttggtcctgagaccagtgta

SEQ ID NO: 4608920 - DNA, 25 bp, Homo sapien
cccaggtgcatgttgatgctcatgt

SEQ ID NO: 4608921 - DNA, 25 bp, Homo sapien
ttgatgctcatgtagcacgccgtac

SEQ ID NO: 4608922 - DNA, 25 bp, Homo sapien
gtgcatgttgatgctcatgtagcac

SEQ ID NO: 4608923 - DNA, 25 bp, Homo sapien
catgttgatgctcatgtagcacgcc

SEQ ID NO: 4608924 - DNA, 25 bp, Homo sapien
gcacctccaggttgttgcagtggct

SEQ ID NO: 4608925 - DNA, 25 bp, Homo sapien
agcacctccaggttgttgcagtggc

SEQ ID NO: 4608926 - DNA, 25 bp, Homo sapien
tgatcgtgtcagccttgagcccctg

SEQ ID NO: 4608927 - DNA, 25 bp, Homo sapien
atgatcgtgtcagccttgagcccct

SEQ ID NO: 4608928 - DNA, 25 bp, Homo sapien
cgctcatgatcgtgtcagccttgag

SEQ ID NO: 4608929 - DNA, 25 bp, Homo sapien
tcatgatcgtgtcagccttgagccc

SEQ ID NO: 4608930 - DNA, 25 bp, Homo sapien
tcctctgggaagttctcgcagagca

SEQ ID NO: 4608931 - DNA, 25 bp, Homo sapien
ctcctctgggaagttctcgcagagc

SEQ ID NO: 4608932 - DNA, 25 bp, Homo sapien
gtccaggcgccgcatgtagtcacag

SEQ ID NO: 4608933 - DNA, 25 bp, Homo sapien
gccgcatgtagtcacagtcgggctt

SEQ ID NO: 4608934 - DNA, 25 bp, Homo sapien
caggcgccgcatgtagtcacagtcg

SEQ ID NO: 4608935 - DNA, 25 bp, Homo sapien
tgtagtcacagtcgggcttctcaaa

SEQ ID NO: 4608936 - DNA, 25 bp, Homo sapien
gagcccctcgtactcagagtcgaac

SEQ ID NO: 4608937 - DNA, 25 bp, Homo sapien
aagccgcttcggtcgaagaggtagc

SEQ ID NO: 4608938 - DNA, 25 bp, Homo sapien
ttcccgagcccctcgtactcagagt

SEQ ID NO: 4608939 - DNA, 25 bp, Homo sapien
tgctgatgggggtcgccaagggctt

SEQ ID NO: 4608940 - DNA, 25 bp, Homo sapien
tttgctgtgcggctgatctttgtcc

SEQ ID NO: 4608941 - DNA, 25 bp, Homo sapien
caggcgccctgatgggcgctggagt

SEQ ID NO: 4608942 - DNA, 25 bp, Homo sapien
ctccatctctgcaggcgccctgatg

SEQ ID NO: 4608943 - DNA, 25 bp, Homo sapien
tctgcaggcgccctgatgggcgctg

SEQ ID NO: 4608944 - DNA, 25 bp, Homo sapien
cacacaagctcgctccccaaggggc

SEQ ID NO: 4608945 - DNA, 25 bp, Homo sapien
cacaagctcgctccccaaggggccg

SEQ ID NO: 4608946 - DNA, 25 bp, Homo sapien
ctcacacaagctcgctccccaaggg

SEQ ID NO: 4608947 - DNA, 25 bp, Homo sapien
acacaagctcgctccccaaggggcc

SEQ ID NO: 4608948 - DNA, 25 bp, Homo sapien
ggcttccagccagcgtctggccctg

SEQ ID NO: 4608949 - DNA, 25 bp, Homo sapien
gggccgccggccaagaccctgcagt

SEQ ID NO: 4608950 - DNA, 25 bp, Homo sapien
gatggggccgccggccaagaccctg

SEQ ID NO: 4608951 - DNA, 25 bp, Homo sapien
agaccctgcagtctgtgtcctggct

SEQ ID NO: 4608952 - DNA, 25 bp, Homo sapien
tagaaattttggccagtcttggccg

SEQ ID NO: 4608953 - DNA, 25 bp, Homo sapien
ggctggcttcagccgcggccccacc

SEQ ID NO: 4608954 - DNA, 25 bp, Homo sapien
cttcagcaaagtaatggaggggtgg

SEQ ID NO: 4608955 - DNA, 25 bp, Homo sapien
attttggccagtcttggccgggcgc

SEQ ID NO: 4608956 - DNA, 25 bp, Homo sapien
gctgcggtggccgtgcctgtggcga

SEQ ID NO: 4608957 - DNA, 25 bp, Homo sapien
gccgtgcctgtggcgaccgagcttt

SEQ ID NO: 4608958 - DNA, 25 bp, Homo sapien
ggtggccgtgcctgtggcgaccgag

SEQ ID NO: 4608959 - DNA, 25 bp, Homo sapien
cctgtggcgaccgagctttggtgca

SEQ ID NO: 4608960 - DNA, 25 bp, Homo sapien
ttctgagggtcggagcacagcctcg

SEQ ID NO: 4608961 - DNA, 25 bp, Homo sapien
tcgagaagcaccctcctagcagggc

SEQ ID NO: 4608962 - DNA, 25 bp, Homo sapien
gagacaggaagccacgagcccgcgc

SEQ ID NO: 4608963 - DNA, 25 bp, Homo sapien
cccgcgcgcctccacacagcagggc

SEQ ID NO: 4608964 - DNA, 25 bp, Homo sapien
ctgggagtccgccagccagtccagg

SEQ ID NO: 4608965 - DNA, 25 bp, Homo sapien
gcctcaagctgacccgctgggagtc

SEQ ID NO: 4608966 - DNA, 25 bp, Homo sapien
gcagacccccctgcacatacacctg

SEQ ID NO: 4608967 - DNA, 25 bp, Homo sapien
acccccctgcacatacacctgcggg

SEQ ID NO: 4608968 - DNA, 25 bp, Homo sapien
agcatcagagaaacgtaaacgccat

SEQ ID NO: 4608969 - DNA, 25 bp, Homo sapien
gttgtatggcttcaaaagagcatca

SEQ ID NO: 4608970 - DNA, 25 bp, Homo sapien
cgtaaacgccatttccgtacacttg

SEQ ID NO: 4608971 - DNA, 25 bp, Homo sapien
catttccgtacacttggtaaagcaa

SEQ ID NO: 4608972 - DNA, 25 bp, Homo sapien
acaagataataaaaacatttggtca

SEQ ID NO: 4608973 - DNA, 25 bp, Homo sapien
ctacaagataataaaaacatttggt

SEQ ID NO: 4608974 - DNA, 25 bp, Homo sapien
caagataataaaaacatttggtcag

SEQ ID NO: 4608975 - DNA, 25 bp, Homo sapien
tacaagataataaaaacatttggtc

SEQ ID NO: 4608976 - DNA, 25 bp, Homo sapien
tgcaataccaacgaggaaagtaaaa

SEQ ID NO: 4608977 - DNA, 25 bp, Homo sapien
atgccgataggctctgttgctgcca

SEQ ID NO: 4608978 - DNA, 25 bp, Homo sapien
ggagcttcagcacctcgagatattc

SEQ ID NO: 4608979 - DNA, 25 bp, Homo sapien
ctgagcaaagaggtaagacatgaca

SEQ ID NO: 4608980 - DNA, 25 bp, Homo sapien
ggtaagacatgacaaagtcatcaag

SEQ ID NO: 4608981 - DNA, 25 bp, Homo sapien
atccgtgcacaaaatcatgccgcca

SEQ ID NO: 4608982 - DNA, 25 bp, Homo sapien
tgatagagttatagatggccagtgg

SEQ ID NO: 4608983 - DNA, 25 bp, Homo sapien
tattctcatcatatctaacactgcc

SEQ ID NO: 4608984 - DNA, 25 bp, Homo sapien
tggccagtggggtttgatcgttttc

SEQ ID NO: 4608985 - DNA, 25 bp, Homo sapien
ccccacgtgagtctaatgcaaataa

SEQ ID NO: 4608986 - DNA, 25 bp, Homo sapien
tagccaactggaggatcttctatca

SEQ ID NO: 4608987 - DNA, 25 bp, Homo sapien
tgtgggcttcaactcagatttactg

SEQ ID NO: 4608988 - DNA, 25 bp, Homo sapien
tatcaaaaagtatgcctccaggtgt

SEQ ID NO: 4608989 - DNA, 25 bp, Homo sapien
cagtggctttgcattggctgaattg

SEQ ID NO: 4608990 - DNA, 25 bp, Homo sapien
ggatctttgctcgaatacattttgg

SEQ ID NO: 4608991 - DNA, 25 bp, Homo sapien
tctctgtgtagaaggcagactgcag

SEQ ID NO: 4608992 - DNA, 25 bp, Homo sapien
taaatctgcgaaatctgtaccttat

SEQ ID NO: 4608993 - DNA, 25 bp, Homo sapien
ataatggttgcaaaaatctcctcac

SEQ ID NO: 4608994 - DNA, 25 bp, Homo sapien
ctgaattccaccgtttccagttatt

SEQ ID NO: 4608995 - DNA, 25 bp, Homo sapien
tccagttattataatggttgcaaaa

SEQ ID NO: 4608996 - DNA, 25 bp, Homo sapien
tgaattccaccgtttccagttatta

SEQ ID NO: 4608997 - DNA, 25 bp, Homo sapien
tcggctttcatttgaaccctcttgg

SEQ ID NO: 4608998 - DNA, 25 bp, Homo sapien
taggaaaatcgcaatataactgtaa

SEQ ID NO: 4608999 - DNA, 25 bp, Homo sapien
tgcttatggatagttacaactcggc

SEQ ID NO: 4609000 - DNA, 25 bp, Homo sapien
cttggtttgcttgcttaatactgac

SEQ ID NO: 4609001 - DNA, 25 bp, Homo sapien
taaggagctttacggatacttagca

SEQ ID NO: 4609002 - DNA, 25 bp, Homo sapien
ttaagccaagtccaaatacagtccc

SEQ ID NO: 4609003 - DNA, 25 bp, Homo sapien
cactgtgcccttggaaagttactta

SEQ ID NO: 4609004 - DNA, 25 bp, Homo sapien
gccctgagtactgtgcaaggtgtag

SEQ ID NO: 4609005 - DNA, 25 bp, Homo sapien
ccctacacatatgcaggttttgcat

SEQ ID NO: 4609006 - DNA, 25 bp, Homo sapien
tggagcaagtacaagtctatcagtg

SEQ ID NO: 4609007 - DNA, 25 bp, Homo sapien
gggattagttacaggacccctgcat

SEQ ID NO: 4609008 - DNA, 25 bp, Homo sapien
tctgacaaacttaagtggagcaagt

SEQ ID NO: 4609009 - DNA, 25 bp, Homo sapien
agaacacagaatagagtcctcaacc

SEQ ID NO: 4609010 - DNA, 25 bp, Homo sapien
acagcatatttcttggcccagcaat

SEQ ID NO: 4609011 - DNA, 25 bp, Homo sapien
gagaagtccactactttacagagtt

SEQ ID NO: 4609012 - DNA, 25 bp, Homo sapien
gatgctgtgatcgaagaggtacttc

SEQ ID NO: 4609013 - DNA, 25 bp, Homo sapien
gcttcccttaatgagctaagttcaa

SEQ ID NO: 4609014 - DNA, 25 bp, Homo sapien
gacacgaaagacaaagcttccctta

SEQ ID NO: 4609015 - DNA, 25 bp, Homo sapien
tatccatcaattaatgacacgaaag

SEQ ID NO: 4609016 - DNA, 25 bp, Homo sapien
tatattttcaagcacggctggaggt

SEQ ID NO: 4609017 - DNA, 25 bp, Homo sapien
caggagtgaatcacacataggcatg

SEQ ID NO: 4609018 - DNA, 25 bp, Homo sapien
cttttttagtaacatgcaggagtga

SEQ ID NO: 4609019 - DNA, 25 bp, Homo sapien
ttatgtaatctgattgcaaatagcc

SEQ ID NO: 4609020 - DNA, 25 bp, Homo sapien
tttcaaattttgcactgtggcttcc

SEQ ID NO: 4609021 - DNA, 25 bp, Homo sapien
tctgaagctgcacaccctgaaagaa

SEQ ID NO: 4609022 - DNA, 25 bp, Homo sapien
ccaagctattttgcagtaagttcaa

SEQ ID NO: 4609023 - DNA, 25 bp, Homo sapien
catggcaactgacaaagactactgg

SEQ ID NO: 4609024 - DNA, 25 bp, Homo sapien
tctactaccatagcagttactgaca

SEQ ID NO: 4609025 - DNA, 25 bp, Homo sapien
tacagtccagtctgattacctgctt

SEQ ID NO: 4609026 - DNA, 25 bp, Homo sapien
tgcatcgaagtacatacagtccagt

SEQ ID NO: 4609027 - DNA, 25 bp, Homo sapien
tttcttcagtttactaatggcaaaa

SEQ ID NO: 4609028 - DNA, 25 bp, Homo sapien
tattaaagtccttaggactgcatcg

SEQ ID NO: 4609029 - DNA, 25 bp, Homo sapien
gatggcataacctcccttctgtaag

SEQ ID NO: 4609030 - DNA, 25 bp, Homo sapien
gatagattaccagttttacacaaag

SEQ ID NO: 4609031 - DNA, 25 bp, Homo sapien
taggcttggcacatacagtgaacat

SEQ ID NO: 4609032 - DNA, 25 bp, Homo sapien
tgaaggtagggctgtagcataaact

SEQ ID NO: 4609033 - DNA, 25 bp, Homo sapien
tatattgtctgagcgaacagtttcc

SEQ ID NO: 4609034 - DNA, 25 bp, Homo sapien
tttccatctggtaacaattcaaaag

SEQ ID NO: 4609035 - DNA, 25 bp, Homo sapien
gactgctgaagttcttctttgtccc

SEQ ID NO: 4609036 - DNA, 25 bp, Homo sapien
tgtcccactgaggttgtactcttca

SEQ ID NO: 4609037 - DNA, 25 bp, Homo sapien
ggttggtacatcagaaacaccattc

SEQ ID NO: 4609038 - DNA, 25 bp, Homo sapien
cgttctgaagactagaaggtttgat

SEQ ID NO: 4609039 - DNA, 25 bp, Homo sapien
ccatttggttcatatgagtaggcct

SEQ ID NO: 4609040 - DNA, 25 bp, Homo sapien
ggttcatatgagtaggcctctgtaa

SEQ ID NO: 4609041 - DNA, 25 bp, Homo sapien
gataaatgtggctgatcatcaaccc

SEQ ID NO: 4609042 - DNA, 25 bp, Homo sapien
tgacaaattcttaggagagactcct

SEQ ID NO: 4609043 - DNA, 25 bp, Homo sapien
cttttcctcaccagaagcgcagtta

SEQ ID NO: 4609044 - DNA, 25 bp, Homo sapien
taactcgtggccttgcacaggtctg

SEQ ID NO: 4609045 - DNA, 25 bp, Homo sapien
tgtgtgctttatccagaacttttaa

SEQ ID NO: 4609046 - DNA, 25 bp, Homo sapien
tgaccgtagtctcctacttctcttc

SEQ ID NO: 4609047 - DNA, 25 bp, Homo sapien
tcctacttctcttcgtacgccttta

SEQ ID NO: 4609048 - DNA, 25 bp, Homo sapien
tctgtttcatgcagttgaccgtagt

SEQ ID NO: 4609049 - DNA, 25 bp, Homo sapien
tcatcatacttgctgcttcaaagaa

SEQ ID NO: 4609050 - DNA, 25 bp, Homo sapien
gcttgctcatcatacttgctgcttc

SEQ ID NO: 4609051 - DNA, 25 bp, Homo sapien
tgagaaagcttgctcatcatacttg

SEQ ID NO: 4609052 - DNA, 25 bp, Homo sapien
gcttgtgagaaagcttgctcatcat

SEQ ID NO: 4609053 - DNA, 25 bp, Homo sapien
caaattttacaaactcctgaaccag

SEQ ID NO: 4609054 - DNA, 25 bp, Homo sapien
tgcatggcccatgccaactgtttag

SEQ ID NO: 4609055 - DNA, 25 bp, Homo sapien
tcagatatgtatctagtgatccaaa

SEQ ID NO: 4609056 - DNA, 25 bp, Homo sapien
tgccaactgtttagcaacttcaagt

SEQ ID NO: 4609057 - DNA, 25 bp, Homo sapien
gaggcatgcattgagaaaaaaggaa

SEQ ID NO: 4609058 - DNA, 25 bp, Homo sapien
gatgggagctgacattaagaaatac

SEQ ID NO: 4609059 - DNA, 25 bp, Homo sapien
ccatttcacatgagttctaaggctg

SEQ ID NO: 4609060 - DNA, 25 bp, Homo sapien
tgcagcaggacataggtgcaccctg

SEQ ID NO: 4609061 - DNA, 25 bp, Homo sapien
aatactaatgccaggatcactaagt

SEQ ID NO: 4609062 - DNA, 25 bp, Homo sapien
ggatcactaagtttgatgaaaggag

SEQ ID NO: 4609063 - DNA, 25 bp, Homo sapien
gtcctttggcaaaactgtaatacta

SEQ ID NO: 4609064 - DNA, 25 bp, Homo sapien
cattcccatgaataagggtgttttc

SEQ ID NO: 4609065 - DNA, 25 bp, Homo sapien
cacagtccatggttatatgcttata

SEQ ID NO: 4609066 - DNA, 25 bp, Homo sapien
cccaagtaaagcttagtaacattat

SEQ ID NO: 4609067 - DNA, 25 bp, Homo sapien
cctatccttcatacataattagaga

SEQ ID NO: 4609068 - DNA, 25 bp, Homo sapien
tacaaaacttcatactaaaaatgga

SEQ ID NO: 4609069 - DNA, 25 bp, Homo sapien
cacacaatttgttagcagcagagac

SEQ ID NO: 4609070 - DNA, 25 bp, Homo sapien
gatttaatagccatggcaattccca

SEQ ID NO: 4609071 - DNA, 25 bp, Homo sapien
gctttaggaagcaatcagcctccca

SEQ ID NO: 4609072 - DNA, 25 bp, Homo sapien
aagtgatccacccaagcgctttagg

SEQ ID NO: 4609073 - DNA, 25 bp, Homo sapien
cacaaagtggtaccaaaactccatt

SEQ ID NO: 4609074 - DNA, 25 bp, Homo sapien
ttcaatgcattcaggtggtacccat

SEQ ID NO: 4609075 - DNA, 25 bp, Homo sapien
ggtttatctcctccactgcagattt

SEQ ID NO: 4609076 - DNA, 25 bp, Homo sapien
ctttgagaatccagagcacttagag

SEQ ID NO: 4609077 - DNA, 25 bp, Homo sapien
gaagctgatgcctatcttcataaaa

SEQ ID NO: 4609078 - DNA, 25 bp, Homo sapien
tacaattatttataaggtttgctaa

SEQ ID NO: 4609079 - DNA, 25 bp, Homo sapien
tggtgcaggaagctgatgcctatct

SEQ ID NO: 4609080 - DNA, 25 bp, Homo sapien
aagatctcgtatgatggctctgaaa

SEQ ID NO: 4609081 - DNA, 25 bp, Homo sapien
ccagggcacctatcctcatatttgg

SEQ ID NO: 4609082 - DNA, 25 bp, Homo sapien
ctcttcaaactgtgtaggatcccgg

SEQ ID NO: 4609083 - DNA, 25 bp, Homo sapien
ctatcctcatatttggtaacatgtc

SEQ ID NO: 4609084 - DNA, 25 bp, Homo sapien
taggatcccggtcttcaaaggcacc

SEQ ID NO: 4609085 - DNA, 25 bp, Homo sapien
ctatttgaaaaaattctgacaattt

SEQ ID NO: 4609086 - DNA, 25 bp, Homo sapien
tatttgaaaaaattctgacaattta

SEQ ID NO: 4609087 - DNA, 25 bp, Homo sapien
tgaagcttttttacagcgaccacct

SEQ ID NO: 4609088 - DNA, 25 bp, Homo sapien
taggtgctcttcagtactatgctga

SEQ ID NO: 4609089 - DNA, 25 bp, Homo sapien
caatgttgtcatgctgtagggattt

SEQ ID NO: 4609090 - DNA, 25 bp, Homo sapien
tgtagagggtcataccggcacatct

SEQ ID NO: 4609091 - DNA, 25 bp, Homo sapien
tccagatcgttaagacattgtacat

SEQ ID NO: 4609092 - DNA, 25 bp, Homo sapien
tagtcattatagaatgcctctccct

SEQ ID NO: 4609093 - DNA, 25 bp, Homo sapien
ccctctgggcattggcataagtcca

SEQ ID NO: 4609094 - DNA, 25 bp, Homo sapien
tatattacacaggatgccaaacaca

SEQ ID NO: 4609095 - DNA, 25 bp, Homo sapien
tactgcagaagttttatgtgatcta

SEQ ID NO: 4609096 - DNA, 25 bp, Homo sapien
agtctcgtaaacttccatatggtaa

SEQ ID NO: 4609097 - DNA, 25 bp, Homo sapien
gcagaagttttatgtgatctatccg

SEQ ID NO: 4609098 - DNA, 25 bp, Homo sapien
tttgaagatagtctcgtaaacttcc

SEQ ID NO: 4609099 - DNA, 25 bp, Homo sapien
tttaactctgttctcgttctccacc

SEQ ID NO: 4609100 - DNA, 25 bp, Homo sapien
ttgtggcaagactttggttaaccca

SEQ ID NO: 4609101 - DNA, 25 bp, Homo sapien
aatatatttctcgttgccagatccc

SEQ ID NO: 4609102 - DNA, 25 bp, Homo sapien
cctttttgtaccaagatactccata

SEQ ID NO: 4609103 - DNA, 25 bp, Homo sapien
aagtgaccaggttgtgatgaaatct

SEQ ID NO: 4609104 - DNA, 25 bp, Homo sapien
gctggatgctttgggttaagcgaca

SEQ ID NO: 4609105 - DNA, 25 bp, Homo sapien
tgctttgggttaagcgacactttgt

SEQ ID NO: 4609106 - DNA, 25 bp, Homo sapien
tcaaagtgaccaggttgtgatgaaa

SEQ ID NO: 4609107 - DNA, 25 bp, Homo sapien
aaggtcaggatatggtggtcgttga

SEQ ID NO: 4609108 - DNA, 25 bp, Homo sapien
tatggtggtcgttgaacatatgtca

SEQ ID NO: 4609109 - DNA, 25 bp, Homo sapien
caggatatggtggtcgttgaacata

SEQ ID NO: 4609110 - DNA, 25 bp, Homo sapien
gtcaggatatggtggtcgttgaaca

SEQ ID NO: 4609111 - DNA, 25 bp, Homo sapien
tgaaccctcatgacagctgaaccct

SEQ ID NO: 4609112 - DNA, 25 bp, Homo sapien
tactgattaaacgtaagagacagct

SEQ ID NO: 4609113 - DNA, 25 bp, Homo sapien
gctgaaccctcatgtggccattctt

SEQ ID NO: 4609114 - DNA, 25 bp, Homo sapien
gacagctgaaccctcatgacagctg

SEQ ID NO: 4609115 - DNA, 25 bp, Homo sapien
tatgctattgccaggctccgccatc

SEQ ID NO: 4609116 - DNA, 25 bp, Homo sapien
agttttacgttttatgctattgcca

SEQ ID NO: 4609117 - DNA, 25 bp, Homo sapien
tacgttttatgctattgccaggctc

SEQ ID NO: 4609118 - DNA, 25 bp, Homo sapien
gttttatgctattgccaggctccgc

SEQ ID NO: 4609119 - DNA, 25 bp, Homo sapien
gcctacggtatcaggtcctttgcgt

SEQ ID NO: 4609120 - DNA, 25 bp, Homo sapien
tggaggcaatgatataaagggtaac

SEQ ID NO: 4609121 - DNA, 25 bp, Homo sapien
aagcagtccacaggggcctacggta

SEQ ID NO: 4609122 - DNA, 25 bp, Homo sapien
taacagtagacgttgagggtcgtaa

SEQ ID NO: 4609123 - DNA, 25 bp, Homo sapien
aagtaattcttttgtcagacatatt

SEQ ID NO: 4609124 - DNA, 25 bp, Homo sapien
tttaacctctcttgtttactctatc

SEQ ID NO: 4609125 - DNA, 25 bp, Homo sapien
taattcttttgtcagacatatttcc

SEQ ID NO: 4609126 - DNA, 25 bp, Homo sapien
aataagaggattttaacctctcttg

SEQ ID NO: 4609127 - DNA, 25 bp, Homo sapien
tttcaggagaatgggcccaatagct

SEQ ID NO: 4609128 - DNA, 25 bp, Homo sapien
acattttcaggagaatgggcccaat

SEQ ID NO: 4609129 - DNA, 25 bp, Homo sapien
aaatcagtgtgagcgtagcattgtg

SEQ ID NO: 4609130 - DNA, 25 bp, Homo sapien
gagcgtagcattgtgatgagggttc

SEQ ID NO: 4609131 - DNA, 25 bp, Homo sapien
cagtgtgagcgtagcattgtgatga

SEQ ID NO: 4609132 - DNA, 25 bp, Homo sapien
agataagaaatcagtgtgagcgtag

SEQ ID NO: 4609133 - DNA, 25 bp, Homo sapien
gaaattaagtataattcatttacta

SEQ ID NO: 4609134 - DNA, 25 bp, Homo sapien
cagaaattaagtataattcatttac

SEQ ID NO: 4609135 - DNA, 25 bp, Homo sapien
aattaagtataattcatttactaag

SEQ ID NO: 4609136 - DNA, 25 bp, Homo sapien
attaagtataattcatttactaagg

SEQ ID NO: 4609137 - DNA, 25 bp, Homo sapien
cagttaatattgtggtaatgccagc

SEQ ID NO: 4609138 - DNA, 25 bp, Homo sapien
ttgctgtaatgaggaatggttggac

SEQ ID NO: 4609139 - DNA, 25 bp, Homo sapien
ctgtaatgaggaatggttggacgaa

SEQ ID NO: 4609140 - DNA, 25 bp, Homo sapien
tattgtggtaatgccagcggctagg

SEQ ID NO: 4609141 - DNA, 25 bp, Homo sapien
tgatggcgaacaccgctcctggtga

SEQ ID NO: 4609142 - DNA, 25 bp, Homo sapien
ccgctcctggtgataggacgtagtg

SEQ ID NO: 4609143 - DNA, 25 bp, Homo sapien
gaacaccgctcctggtgataggacg

SEQ ID NO: 4609144 - DNA, 25 bp, Homo sapien
gcctcctatgatggcgaacaccgct

SEQ ID NO: 4609145 - DNA, 25 bp, Homo sapien
tcttttcgaaacaaaggcttctcag

SEQ ID NO: 4609146 - DNA, 25 bp, Homo sapien
ataacgttgcggcataccggatagg

SEQ ID NO: 4609147 - DNA, 25 bp, Homo sapien
tcaggataatcggaataacgttgcg

SEQ ID NO: 4609148 - DNA, 25 bp, Homo sapien
aatcggaataacgttgcggcatacc

SEQ ID NO: 4609149 - DNA, 25 bp, Homo sapien
ttgacaaagttacgtaatgaatttg

SEQ ID NO: 4609150 - DNA, 25 bp, Homo sapien
ctgttttgaggcctaataaggggat

SEQ ID NO: 4609151 - DNA, 25 bp, Homo sapien
aagacctggtcgcccagtggttaag

SEQ ID NO: 4609152 - DNA, 25 bp, Homo sapien
cgcccagtggttaaggtagtttgat

SEQ ID NO: 4609153 - DNA, 25 bp, Homo sapien
gcctaataaggggatagttcatgag

SEQ ID NO: 4609154 - DNA, 25 bp, Homo sapien
cagagaggtgtagactccgtcaatc

SEQ ID NO: 4609155 - DNA, 25 bp, Homo sapien
gtagactccgtcaatctttaactta

SEQ ID NO: 4609156 - DNA, 25 bp, Homo sapien
ggtgtagactccgtcaatctttaac

SEQ ID NO: 4609157 - DNA, 25 bp, Homo sapien
gaggtgtagactccgtcaatcttta

SEQ ID NO: 4609158 - DNA, 25 bp, Homo sapien
gcaactgaagctgtgggaaaactaa

SEQ ID NO: 4609159 - DNA, 25 bp, Homo sapien
tgtgccttgtggtaaaaagccagcc

SEQ ID NO: 4609160 - DNA, 25 bp, Homo sapien
gatgactgactataatgttggctgt

SEQ ID NO: 4609161 - DNA, 25 bp, Homo sapien
taagcctgaataaggtctatggcga

SEQ ID NO: 4609162 - DNA, 25 bp, Homo sapien
ctcacgggtggatcttaggctgctg

SEQ ID NO: 4609163 - DNA, 25 bp, Homo sapien
tcgatttccttctatcaggctgtga

SEQ ID NO: 4609164 - DNA, 25 bp, Homo sapien
gatcccatcagagatagtaaaaggg

SEQ ID NO: 4609165 - DNA, 25 bp, Homo sapien
tgtgatgagccgaagtaactgaaac

SEQ ID NO: 4609166 - DNA, 25 bp, Homo sapien
ggctttatcttgttgctttttactc

SEQ ID NO: 4609167 - DNA, 25 bp, Homo sapien
tcctgtatttcttgtaggctttatc

SEQ ID NO: 4609168 - DNA, 25 bp, Homo sapien
cagcacagtgatgggtcttcaatct

SEQ ID NO: 4609169 - DNA, 25 bp, Homo sapien
tcttgtaggctttatcttgttgctt

SEQ ID NO: 4609170 - DNA, 25 bp, Homo sapien
taatatctttcagatattatcgaaa

SEQ ID NO: 4609171 - DNA, 25 bp, Homo sapien
atctttcagatattatcgaaactag

SEQ ID NO: 4609172 - DNA, 25 bp, Homo sapien
atatctttcagatattatcgaaact

SEQ ID NO: 4609173 - DNA, 25 bp, Homo sapien
ctttcagatattatcgaaactagtt

SEQ ID NO: 4609174 - DNA, 25 bp, Homo sapien
atatggtttattataatctaatgaa

SEQ ID NO: 4609175 - DNA, 25 bp, Homo sapien
tgaatcgaaatcatttcttttgact

SEQ ID NO: 4609176 - DNA, 25 bp, Homo sapien
ttattataatctaatgaatcgaaat

SEQ ID NO: 4609177 - DNA, 25 bp, Homo sapien
taatctaatgaatcgaaatcatttc

SEQ ID NO: 4609178 - DNA, 25 bp, Homo sapien
taagccgtattataccgcagccgcc

SEQ ID NO: 4609179 - DNA, 25 bp, Homo sapien
catgggtaattataagggtgacggc

SEQ ID NO: 4609180 - DNA, 25 bp, Homo sapien
taacagggatgaagtgactccatgg

SEQ ID NO: 4609181 - DNA, 25 bp, Homo sapien
tatatggcttacagaggagtaggca

SEQ ID NO: 4609182 - DNA, 25 bp, Homo sapien
gtatatgattccgttttggactcac

SEQ ID NO: 4609183 - DNA, 25 bp, Homo sapien
gtaagtatatgattccgttttggac

SEQ ID NO: 4609184 - DNA, 25 bp, Homo sapien
aagtatatgattccgttttggactc

SEQ ID NO: 4609185 - DNA, 25 bp, Homo sapien
tcaggtaagtatatgattccgtttt

SEQ ID NO: 4609186 - DNA, 25 bp, Homo sapien
ggtagataagaagttgcaggcttct

SEQ ID NO: 4609187 - DNA, 25 bp, Homo sapien
ctattattagatccacaatttaatg

SEQ ID NO: 4609188 - DNA, 25 bp, Homo sapien
atgttttggttaaactatagctaca

SEQ ID NO: 4609189 - DNA, 25 bp, Homo sapien
gcttctattattagatccacaattt

SEQ ID NO: 4609190 - DNA, 25 bp, Homo sapien
gccatattgttaggcatgggggcat

SEQ ID NO: 4609191 - DNA, 25 bp, Homo sapien
gagaaagccatattgttaggcatgg

SEQ ID NO: 4609192 - DNA, 25 bp, Homo sapien
aaagccatattgttaggcatggggg

SEQ ID NO: 4609193 - DNA, 25 bp, Homo sapien
agaaagccatattgttaggcatggg

SEQ ID NO: 4609194 - DNA, 25 bp, Homo sapien
gttcctaaggccaacggatgactcc

SEQ ID NO: 4609195 - DNA, 25 bp, Homo sapien
tttggttcctaaggccaacggatga

SEQ ID NO: 4609196 - DNA, 25 bp, Homo sapien
tggttcctaaggccaacggatgact

SEQ ID NO: 4609197 - DNA, 25 bp, Homo sapien
ttcctaaggccaacggatgactcca

SEQ ID NO: 4609198 - DNA, 25 bp, Homo sapien
ttaaggcgattagggctattatagt

SEQ ID NO: 4609199 - DNA, 25 bp, Homo sapien
gtaataattggtgtgattaaggcga

SEQ ID NO: 4609200 - DNA, 25 bp, Homo sapien
taattggtgtgattaaggcgattag

SEQ ID NO: 4609201 - DNA, 25 bp, Homo sapien
tgtgattaaggcgattagggctatt

SEQ ID NO: 4609202 - DNA, 25 bp, Homo sapien
catccgataaagagttgaaagagtt

SEQ ID NO: 4609203 - DNA, 25 bp, Homo sapien
gttgaaagagtttgttggtggaata

SEQ ID NO: 4609204 - DNA, 25 bp, Homo sapien
ttctcatccgataaagagttgaaag

SEQ ID NO: 4609205 - DNA, 25 bp, Homo sapien
ccgataaagagttgaaagagtttgt

SEQ ID NO: 4609206 - DNA, 25 bp, Homo sapien
ccttgtccgtgtccacggatgccat

SEQ ID NO: 4609207 - DNA, 25 bp, Homo sapien
ttgtccgtgtccacggatgccatcc

SEQ ID NO: 4609208 - DNA, 25 bp, Homo sapien
tgtccgtgtccacggatgccatcct

SEQ ID NO: 4609209 - DNA, 25 bp, Homo sapien
cttgtccgtgtccacggatgccatc

SEQ ID NO: 4609210 - DNA, 25 bp, Homo sapien
gcccttcccgttggcaacgggcagc

SEQ ID NO: 4609211 - DNA, 25 bp, Homo sapien
tctgaattgcgccccggccagggag

SEQ ID NO: 4609212 - DNA, 25 bp, Homo sapien
aacgggcagcgggaacatcatgctg

SEQ ID NO: 4609213 - DNA, 25 bp, Homo sapien
aacatcatgctgaagtccaggttac

SEQ ID NO: 4609214 - DNA, 25 bp, Homo sapien
caaaggaggagctgttctggtcgcc

SEQ ID NO: 4609215 - DNA, 25 bp, Homo sapien
ctggggtcaaaggaggagctgttct

SEQ ID NO: 4609216 - DNA, 25 bp, Homo sapien
ggagctgttctggtcgccgctgccc

SEQ ID NO: 4609217 - DNA, 25 bp, Homo sapien
ggaggagctgttctggtcgccgctg

SEQ ID NO: 4609218 - DNA, 25 bp, Homo sapien
aataggcccgcgctagctgctcttg

SEQ ID NO: 4609219 - DNA, 25 bp, Homo sapien
agagtggctgccgtgcgactcagca

SEQ ID NO: 4609220 - DNA, 25 bp, Homo sapien
tcagcaagttgagcgccttcgctga

SEQ ID NO: 4609221 - DNA, 25 bp, Homo sapien
caaaggaggaataggcccgcgctag

SEQ ID NO: 4609222 - DNA, 25 bp, Homo sapien
gctgtccgcctctgtccgccagagc

SEQ ID NO: 4609223 - DNA, 25 bp, Homo sapien
agagctgctggcgtaggaggggtag

SEQ ID NO: 4609224 - DNA, 25 bp, Homo sapien
ctgtccgcctctgtccgccagagct

SEQ ID NO: 4609225 - DNA, 25 bp, Homo sapien
ccgctgtccgcctctgtccgccaga

SEQ ID NO: 4609226 - DNA, 25 bp, Homo sapien
tgatccggagagtagattgaggcca

SEQ ID NO: 4609227 - DNA, 25 bp, Homo sapien
tcctgctccaggctagtgcgacgtc

SEQ ID NO: 4609228 - DNA, 25 bp, Homo sapien
aaggtggatgcagccggaagcccac

SEQ ID NO: 4609229 - DNA, 25 bp, Homo sapien
gtagcccacgcgctcgtgctggtgc

SEQ ID NO: 4609230 - DNA, 25 bp, Homo sapien
ggccgggtagcagcgtgtgcacgtt

SEQ ID NO: 4609231 - DNA, 25 bp, Homo sapien
tgtgcacgttgctagccgtgcccat

SEQ ID NO: 4609232 - DNA, 25 bp, Homo sapien
gccagcgcccggtggccgggtagca

SEQ ID NO: 4609233 - DNA, 25 bp, Homo sapien
gcgtgtgcacgttgctagccgtgcc

SEQ ID NO: 4609234 - DNA, 25 bp, Homo sapien
agtcggaaggccaagagaggtcggg

SEQ ID NO: 4609235 - DNA, 25 bp, Homo sapien
ggagtcggaaggccaagagaggtcg

SEQ ID NO: 4609236 - DNA, 25 bp, Homo sapien
caggagtcggaaggccaagagaggt

SEQ ID NO: 4609237 - DNA, 25 bp, Homo sapien
gaggtcggggagggcgcctggctag

SEQ ID NO: 4609238 - DNA, 25 bp, Homo sapien
tcctcccgcttgatttccccagtgg

SEQ ID NO: 4609239 - DNA, 25 bp, Homo sapien
tcccgcttgatttccccagtggcct

SEQ ID NO: 4609240 - DNA, 25 bp, Homo sapien
tctcctcttgagtggtcagccgccg

SEQ ID NO: 4609241 - DNA, 25 bp, Homo sapien
cttgagtggtcagccgccgacgtgt

SEQ ID NO: 4609242 - DNA, 25 bp, Homo sapien
cttctgctctggggggaaaaggtca

SEQ ID NO: 4609243 - DNA, 25 bp, Homo sapien
ctgcttctcccactcggccttctgc

SEQ ID NO: 4609244 - DNA, 25 bp, Homo sapien
gctctggggggaaaaggtcatcttc

SEQ ID NO: 4609245 - DNA, 25 bp, Homo sapien
tgcttctcccactcggccttctgct

SEQ ID NO: 4609246 - DNA, 25 bp, Homo sapien
gcagccgctccctggcgttattggc

SEQ ID NO: 4609247 - DNA, 25 bp, Homo sapien
gccgctccctggcgttattggccac

SEQ ID NO: 4609248 - DNA, 25 bp, Homo sapien
cagccgctccctggcgttattggcc

SEQ ID NO: 4609249 - DNA, 25 bp, Homo sapien
ccgcagccgctccctggcgttattg

SEQ ID NO: 4609250 - DNA, 25 bp, Homo sapien
ggggcttctcgctgttgaggtgcag

SEQ ID NO: 4609251 - DNA, 25 bp, Homo sapien
ggcttctcgctgttgaggtgcagtt

SEQ ID NO: 4609252 - DNA, 25 bp, Homo sapien
gcttctcgctgttgaggtgcagttg

SEQ ID NO: 4609253 - DNA, 25 bp, Homo sapien
gggcttctcgctgttgaggtgcagt

SEQ ID NO: 4609254 - DNA, 25 bp, Homo sapien
ctcttctcgccgtttcaaacaggct

SEQ ID NO: 4609255 - DNA, 25 bp, Homo sapien
tcttctcgccgtttcaaacaggctg

SEQ ID NO: 4609256 - DNA, 25 bp, Homo sapien
ccatctgggggcctccgaacacgcg

SEQ ID NO: 4609257 - DNA, 25 bp, Homo sapien
cttcactcaagcccaggtgggcagc

SEQ ID NO: 4609258 - DNA, 25 bp, Homo sapien
gcttcactcaagcccaggtgggcag

SEQ ID NO: 4609259 - DNA, 25 bp, Homo sapien
tgggggcctccgaacacgcgcgaca

SEQ ID NO: 4609260 - DNA, 25 bp, Homo sapien
gctggctggtgatggcgtaatggcc

SEQ ID NO: 4609261 - DNA, 25 bp, Homo sapien
atgtctttgcagcaggggatcaagg

SEQ ID NO: 4609262 - DNA, 25 bp, Homo sapien
aggtggcatcagaggcaatgtcttt

SEQ ID NO: 4609263 - DNA, 25 bp, Homo sapien
tgatggcgtaatggccagagggcgt

SEQ ID NO: 4609264 - DNA, 25 bp, Homo sapien
ctgcaggtgagcgtttggcccacgc

SEQ ID NO: 4609265 - DNA, 25 bp, Homo sapien
gtactgacctggtctgcggaccaca

SEQ ID NO: 4609266 - DNA, 25 bp, Homo sapien
gtgaagtccctggagtagatgctga

SEQ ID NO: 4609267 - DNA, 25 bp, Homo sapien
tctgcggaccacagagtgtgtgcca

SEQ ID NO: 4609268 - DNA, 25 bp, Homo sapien
tgccttaggatgacctgagccacag

SEQ ID NO: 4609269 - DNA, 25 bp, Homo sapien
tgtctcatggaccacagagcagatg

SEQ ID NO: 4609270 - DNA, 25 bp, Homo sapien
cacatgggccgctgatcttggtcgt

SEQ ID NO: 4609271 - DNA, 25 bp, Homo sapien
cgttgcaaacacgtagacctgtggg

SEQ ID NO: 4609272 - DNA, 25 bp, Homo sapien
ccaggcggagagtgcctaattttgc

SEQ ID NO: 4609273 - DNA, 25 bp, Homo sapien
tcttcctagcaaatcgtcaacctgg

SEQ ID NO: 4609274 - DNA, 25 bp, Homo sapien
aaagggcctttttgcctggcacctg

SEQ ID NO: 4609275 - DNA, 25 bp, Homo sapien
aacaatacggtttatgctgacatct

SEQ ID NO: 4609276 - DNA, 25 bp, Homo sapien
tactcttctcaatgtatgtgaaaag

SEQ ID NO: 4609277 - DNA, 25 bp, Homo sapien
caaagctccaaacatctgaggccac

SEQ ID NO: 4609278 - DNA, 25 bp, Homo sapien
gaaccactccaaagctccaaacatc

SEQ ID NO: 4609279 - DNA, 25 bp, Homo sapien
tctcaatgtatgtgaaaagttcata

SEQ ID NO: 4609280 - DNA, 25 bp, Homo sapien
tcagccataacaacgaatgaaatta

SEQ ID NO: 4609281 - DNA, 25 bp, Homo sapien
cattataaagatttctcagagacct

SEQ ID NO: 4609282 - DNA, 25 bp, Homo sapien
cagtgagatatgtctgactccagtc

SEQ ID NO: 4609283 - DNA, 25 bp, Homo sapien
gagatatgccttattccagtcagaa

SEQ ID NO: 4609284 - DNA, 25 bp, Homo sapien
caagctagtttaggaataggtttgg

SEQ ID NO: 4609285 - DNA, 25 bp, Homo sapien
aattcctagaatgaattagcttact

SEQ ID NO: 4609286 - DNA, 25 bp, Homo sapien
ttttaacttatgcaataattcctag

SEQ ID NO: 4609287 - DNA, 25 bp, Homo sapien
tattaagagactgtactaactagct

SEQ ID NO: 4609288 - DNA, 25 bp, Homo sapien
cataaggctgttaaatatggaactt

SEQ ID NO: 4609289 - DNA, 25 bp, Homo sapien
cctgaggagggctcaaaacacatga

SEQ ID NO: 4609290 - DNA, 25 bp, Homo sapien
tcaaaacaaactacttttaggatca

SEQ ID NO: 4609291 - DNA, 25 bp, Homo sapien
atagctgtaataaactcaacacaaa

SEQ ID NO: 4609292 - DNA, 25 bp, Homo sapien
ctgtccttgtttgtcattgccaatc

SEQ ID NO: 4609293 - DNA, 25 bp, Homo sapien
gtccttgtttgtcattgccaatcat

SEQ ID NO: 4609294 - DNA, 25 bp, Homo sapien
tgtccttgtttgtcattgccaatca

SEQ ID NO: 4609295 - DNA, 25 bp, Homo sapien
ttcttcaaaagttctatcaaatgga

SEQ ID NO: 4609296 - DNA, 25 bp, Homo sapien
tggtaatcttccattattcttcaaa

SEQ ID NO: 4609297 - DNA, 25 bp, Homo sapien
ctcatctgggcatccatctggtctt

SEQ ID NO: 4609298 - DNA, 25 bp, Homo sapien
aaaagttctatcaaatggaacacga

SEQ ID NO: 4609299 - DNA, 25 bp, Homo sapien
tgttatcccttatttgatccactcg

SEQ ID NO: 4609300 - DNA, 25 bp, Homo sapien
ggcgttgatttacattattgttcca

SEQ ID NO: 4609301 - DNA, 25 bp, Homo sapien
ccactcgaagagctagatccctaaa

SEQ ID NO: 4609302 - DNA, 25 bp, Homo sapien
tcatccagccatgttatcccttatt

SEQ ID NO: 4609303 - DNA, 25 bp, Homo sapien
tacagtacatggaactacaagctaa

SEQ ID NO: 4609304 - DNA, 25 bp, Homo sapien
taatgaacaccagccctcatgtgtg

SEQ ID NO: 4609305 - DNA, 25 bp, Homo sapien
gtcttttactggtggcctcatgaag

SEQ ID NO: 4609306 - DNA, 25 bp, Homo sapien
tggccagcgatataaatgaacaagg

SEQ ID NO: 4609307 - DNA, 25 bp, Homo sapien
taacctgctgcacttcttaatgagc

SEQ ID NO: 4609308 - DNA, 25 bp, Homo sapien
cattcaccacaaatagatacaaggg

SEQ ID NO: 4609309 - DNA, 25 bp, Homo sapien
tcagcagctcaaaggatgacaatat

SEQ ID NO: 4609310 - DNA, 25 bp, Homo sapien
ctatggtgtctaaagtggagtagca

SEQ ID NO: 4609311 - DNA, 25 bp, Homo sapien
tggaaaactttacgaagcctcaatg

SEQ ID NO: 4609312 - DNA, 25 bp, Homo sapien
gcaaattatagtgttactggcagca

SEQ ID NO: 4609313 - DNA, 25 bp, Homo sapien
caacatccctaaaccaaggtgtgtg

SEQ ID NO: 4609314 - DNA, 25 bp, Homo sapien
tagagacccttgataagaacctact

SEQ ID NO: 4609315 - DNA, 25 bp, Homo sapien
taagaatctgattaatgtaaaaagt

SEQ ID NO: 4609316 - DNA, 25 bp, Homo sapien
tgagaattatgaaacgcttagcagc

SEQ ID NO: 4609317 - DNA, 25 bp, Homo sapien
tttaggtatacagtctgcattttac

SEQ ID NO: 4609318 - DNA, 25 bp, Homo sapien
gtaaaaagttaaaggctatatgata

SEQ ID NO: 4609319 - DNA, 25 bp, Homo sapien
agctcactgtaataacagccttcaa

SEQ ID NO: 4609320 - DNA, 25 bp, Homo sapien
caatcttatactacatgctcttaga

SEQ ID NO: 4609321 - DNA, 25 bp, Homo sapien
gaaaattcatactcgggctgggcgc

SEQ ID NO: 4609322 - DNA, 25 bp, Homo sapien
tcattattgagtgccttgttaggtt

SEQ ID NO: 4609323 - DNA, 25 bp, Homo sapien
agttctcgtgctgttttttagctcc

SEQ ID NO: 4609324 - DNA, 25 bp, Homo sapien
ggaaaagaggcattctggcatttgg

SEQ ID NO: 4609325 - DNA, 25 bp, Homo sapien
tgcctgaccgattcagctgttgata

SEQ ID NO: 4609326 - DNA, 25 bp, Homo sapien
ggtatcctttcttctgcctgaccga

SEQ ID NO: 4609327 - DNA, 25 bp, Homo sapien
cagcatttgcttcttcgtgagggat

SEQ ID NO: 4609328 - DNA, 25 bp, Homo sapien
tttgcttcttcgtgagggattttat

SEQ ID NO: 4609329 - DNA, 25 bp, Homo sapien
gcttcttcgtgagggattttatttc

SEQ ID NO: 4609330 - DNA, 25 bp, Homo sapien
gcatttgcttcttcgtgagggattt

SEQ ID NO: 4609331 - DNA, 25 bp, Homo sapien
ctgttattatgtgggagtgtaagtc

SEQ ID NO: 4609332 - DNA, 25 bp, Homo sapien
taatttgattgcactctgatatgag

SEQ ID NO: 4609333 - DNA, 25 bp, Homo sapien
ccaattatgtggtgcagagttctgt

SEQ ID NO: 4609334 - DNA, 25 bp, Homo sapien
cactctgatatgagagactgttatg

SEQ ID NO: 4609335 - DNA, 25 bp, Homo sapien
caagctcagagctagggacctttga

SEQ ID NO: 4609336 - DNA, 25 bp, Homo sapien
taagtgcctactcctcaaggctgcc

SEQ ID NO: 4609337 - DNA, 25 bp, Homo sapien
ggcactctcgccatgtacctctagg

SEQ ID NO: 4609338 - DNA, 25 bp, Homo sapien
tacctctaggatcttagctgctaca

SEQ ID NO: 4609339 - DNA, 25 bp, Homo sapien
gccatgaggtaaatgcgaatcaaaa

SEQ ID NO: 4609340 - DNA, 25 bp, Homo sapien
gttccatccctaggttacatcccaa

SEQ ID NO: 4609341 - DNA, 25 bp, Homo sapien
gagctaccactgtgcatccatggtg

SEQ ID NO: 4609342 - DNA, 25 bp, Homo sapien
gaaaattggaactctactgtaccga

SEQ ID NO: 4609343 - DNA, 25 bp, Homo sapien
aacatggctgcctaagagctggctc

SEQ ID NO: 4609344 - DNA, 25 bp, Homo sapien
tactgtagatgagcaagggccataa

SEQ ID NO: 4609345 - DNA, 25 bp, Homo sapien
tttcacatgacgtggattgctagcc

SEQ ID NO: 4609346 - DNA, 25 bp, Homo sapien
tatatcctcctagaaggtactgtag

SEQ ID NO: 4609347 - DNA, 25 bp, Homo sapien
ctattacatggtaatgtttaatgaa

SEQ ID NO: 4609348 - DNA, 25 bp, Homo sapien
actattacatggtaatgtttaatga

SEQ ID NO: 4609349 - DNA, 25 bp, Homo sapien
attactattacatggtaatgtttaa

SEQ ID NO: 4609350 - DNA, 25 bp, Homo sapien
tactattacatggtaatgtttaatg

SEQ ID NO: 4609351 - DNA, 25 bp, Homo sapien
cgccattgcacaacgcggaggacta

SEQ ID NO: 4609352 - DNA, 25 bp, Homo sapien
ccaggaagctgtgcggcaggtactt

SEQ ID NO: 4609353 - DNA, 25 bp, Homo sapien
tgagcgacatcagcagtgccaggaa

SEQ ID NO: 4609354 - DNA, 25 bp, Homo sapien
cggttttctcgtgaactgagcgaca

SEQ ID NO: 4609355 - DNA, 25 bp, Homo sapien
tcagtgcaatcccacatggtcctct

SEQ ID NO: 4609356 - DNA, 25 bp, Homo sapien
actgtcctcaatggctaccgctgca

SEQ ID NO: 4609357 - DNA, 25 bp, Homo sapien
agtgcaatcccacatggtcctctca

SEQ ID NO: 4609358 - DNA, 25 bp, Homo sapien
tggctaccgctgcaacactcagtgc

SEQ ID NO: 4609359 - DNA, 25 bp, Homo sapien
tttctgtccccagagatagaagcag

SEQ ID NO: 4609360 - DNA, 25 bp, Homo sapien
gtacccatggcctaaagaggcaaag

SEQ ID NO: 4609361 - DNA, 25 bp, Homo sapien
taagatcctgggtttagtgcacact

SEQ ID NO: 4609362 - DNA, 25 bp, Homo sapien
tgtgcccaagggaagagatatcatc

SEQ ID NO: 4609363 - DNA, 25 bp, Homo sapien
ctgggctccagactgctttctgcat

SEQ ID NO: 4609364 - DNA, 25 bp, Homo sapien
gcctttctttagagacttgctgctg

SEQ ID NO: 4609365 - DNA, 25 bp, Homo sapien
tttgggacgtccagattccagcagc

SEQ ID NO: 4609366 - DNA, 25 bp, Homo sapien
gacagcaagtgttttccaaatcggg

SEQ ID NO: 4609367 - DNA, 25 bp, Homo sapien
cagcagccagattgctggcagatag

SEQ ID NO: 4609368 - DNA, 25 bp, Homo sapien
tgctgctaggctttctctaaggagt

SEQ ID NO: 4609369 - DNA, 25 bp, Homo sapien
ttgtaggcactagccacagtagagt

SEQ ID NO: 4609370 - DNA, 25 bp, Homo sapien
cacaaacttgtaggcactagccaca

SEQ ID NO: 4609371 - DNA, 25 bp, Homo sapien
aaaaccacaaacttgtaggcactag

SEQ ID NO: 4609372 - DNA, 25 bp, Homo sapien
aacttgtaggcactagccacagtag

SEQ ID NO: 4609373 - DNA, 25 bp, Homo sapien
tctacccccaacttcccatgagatt

SEQ ID NO: 4609374 - DNA, 25 bp, Homo sapien
tccctgttttctccaccctgtatct

SEQ ID NO: 4609375 - DNA, 25 bp, Homo sapien
caccctgtatctctggctgccaggt

SEQ ID NO: 4609376 - DNA, 25 bp, Homo sapien
accaagagcctccaaggtgaggctg

SEQ ID NO: 4609377 - DNA, 25 bp, Homo sapien
ctcctgctggtgtttgagaatagtc

SEQ ID NO: 4609378 - DNA, 25 bp, Homo sapien
tcctgctggtgtttgagaatagtca

SEQ ID NO: 4609379 - DNA, 25 bp, Homo sapien
cctgctggtgtttgagaatagtcac

SEQ ID NO: 4609380 - DNA, 25 bp, Homo sapien
aacactaatcaaatcagctatgatg

SEQ ID NO: 4609381 - DNA, 25 bp, Homo sapien
tcaaatcagctatgatggtctgaac

SEQ ID NO: 4609382 - DNA, 25 bp, Homo sapien
aaatcagctatgatggtctgaacag

SEQ ID NO: 4609383 - DNA, 25 bp, Homo sapien
taatcaaatcagctatgatggtctg

SEQ ID NO: 4609384 - DNA, 25 bp, Homo sapien
agaatggatcaaatctgtgacgtcc

SEQ ID NO: 4609385 - DNA, 25 bp, Homo sapien
gaattctgatgtcgtacctaaggct

SEQ ID NO: 4609386 - DNA, 25 bp, Homo sapien
tgacgtccacttctctttttgcggg

SEQ ID NO: 4609387 - DNA, 25 bp, Homo sapien
taactgaagttccatcgtcacaaat

SEQ ID NO: 4609388 - DNA, 25 bp, Homo sapien
gagatgtccagtccatgattactct

SEQ ID NO: 4609389 - DNA, 25 bp, Homo sapien
tcattgagaatacatatgagaatgg

SEQ ID NO: 4609390 - DNA, 25 bp, Homo sapien
catatgagaatggatgagatgtcca

SEQ ID NO: 4609391 - DNA, 25 bp, Homo sapien
caatcatttaattgggcatcagtga

SEQ ID NO: 4609392 - DNA, 25 bp, Homo sapien
tatttccagtaagtttgtagttcac

SEQ ID NO: 4609393 - DNA, 25 bp, Homo sapien
taatttccccattgtactatcaact

SEQ ID NO: 4609394 - DNA, 25 bp, Homo sapien
ccatttggagagactatattagtac

SEQ ID NO: 4609395 - DNA, 25 bp, Homo sapien
gggatatgcatccaaactaacattc

SEQ ID NO: 4609396 - DNA, 25 bp, Homo sapien
tgaagagacttgagtgagtgtgtgt

SEQ ID NO: 4609397 - DNA, 25 bp, Homo sapien
tctcctggatattgaagatcctcca

SEQ ID NO: 4609398 - DNA, 25 bp, Homo sapien
ttctcctggatattgaagatcctcc

SEQ ID NO: 4609399 - DNA, 25 bp, Homo sapien
tctttcattagagcacatttgcaaa

SEQ ID NO: 4609400 - DNA, 25 bp, Homo sapien
ttacctactgttggtgaatcaaaat

SEQ ID NO: 4609401 - DNA, 25 bp, Homo sapien
ccattagtttacctactgttggtga

SEQ ID NO: 4609402 - DNA, 25 bp, Homo sapien
gagcacatttgcaaaccattagttt

SEQ ID NO: 4609403 - DNA, 25 bp, Homo sapien
taaccacagtccaaacactctgttg

SEQ ID NO: 4609404 - DNA, 25 bp, Homo sapien
taagatcaactctagaggcccctgt

SEQ ID NO: 4609405 - DNA, 25 bp, Homo sapien
tctgttggagatcccattggctgct

SEQ ID NO: 4609406 - DNA, 25 bp, Homo sapien
ctcaaccttgtcaggatctttggag

SEQ ID NO: 4609407 - DNA, 25 bp, Homo sapien
gaagagtgctgtctgatatggagat

SEQ ID NO: 4609408 - DNA, 25 bp, Homo sapien
agagtgctgtctgatatggagattc

SEQ ID NO: 4609409 - DNA, 25 bp, Homo sapien
taatccacctcagatgaagcaagga

SEQ ID NO: 4609410 - DNA, 25 bp, Homo sapien
agatcataatccacctcagatgaag

SEQ ID NO: 4609411 - DNA, 25 bp, Homo sapien
aagacaaagatgcacccccagatgc

SEQ ID NO: 4609412 - DNA, 25 bp, Homo sapien
agacaaagatgcacccccagatgca

SEQ ID NO: 4609413 - DNA, 25 bp, Homo sapien
agatgcagaaagcagctcggcagag

SEQ ID NO: 4609414 - DNA, 25 bp, Homo sapien
ggaaagcataaacatctggagcagt

SEQ ID NO: 4609415 - DNA, 25 bp, Homo sapien
aagatcacgatggcccttcatttct

SEQ ID NO: 4609416 - DNA, 25 bp, Homo sapien
gatcacgatggcccttcatttcttg

SEQ ID NO: 4609417 - DNA, 25 bp, Homo sapien
ttcttctggataaagcagcatgata

SEQ ID NO: 4609418 - DNA, 25 bp, Homo sapien
attcttctggataaagcagcatgat

SEQ ID NO: 4609419 - DNA, 25 bp, Homo sapien
tcatccttcatcgtgactttatctc

SEQ ID NO: 4609420 - DNA, 25 bp, Homo sapien
tccttcatcgtgactttatctcctt

SEQ ID NO: 4609421 - DNA, 25 bp, Homo sapien
catccttcatcgtgactttatctcc

SEQ ID NO: 4609422 - DNA, 25 bp, Homo sapien
ttcatccttcatcgtgactttatct

SEQ ID NO: 4609423 - DNA, 25 bp, Homo sapien
cctgtctttgcatgggcgtttttag

SEQ ID NO: 4609424 - DNA, 25 bp, Homo sapien
tttgcatgggcgtttttaggcttga

SEQ ID NO: 4609425 - DNA, 25 bp, Homo sapien
ttctctcctgtctttgcatgggcgt

SEQ ID NO: 4609426 - DNA, 25 bp, Homo sapien
tgggcgtttttaggcttgagctctg

SEQ ID NO: 4609427 - DNA, 25 bp, Homo sapien
tgtttaacaacttttcacaagccga

SEQ ID NO: 4609428 - DNA, 25 bp, Homo sapien
aacttttcacaagccgaccctgact

SEQ ID NO: 4609429 - DNA, 25 bp, Homo sapien
aagtgagggttgacatttcacattt

SEQ ID NO: 4609430 - DNA, 25 bp, Homo sapien
ttaaagtgagggttgacatttcaca

SEQ ID NO: 4609431 - DNA, 25 bp, Homo sapien
tgccctatcagctttcccagagtca

SEQ ID NO: 4609432 - DNA, 25 bp, Homo sapien
ggggttgctgagtggtaagggtgca

SEQ ID NO: 4609433 - DNA, 25 bp, Homo sapien
cctttgggggttgctgagtggtaag

SEQ ID NO: 4609434 - DNA, 25 bp, Homo sapien
tctcctttgggggttgctgagtggt

SEQ ID NO: 4609435 - DNA, 25 bp, Homo sapien
tgcttccacaatagaattgatgttc

SEQ ID NO: 4609436 - DNA, 25 bp, Homo sapien
gcttccacaatagaattgatgttcc

SEQ ID NO: 4609437 - DNA, 25 bp, Homo sapien
tcttctctgtttagggattcccaaa

SEQ ID NO: 4609438 - DNA, 25 bp, Homo sapien
tcccagaattctccgcaggaagcaa

SEQ ID NO: 4609439 - DNA, 25 bp, Homo sapien
gatggaagcggcctctcttaggtgt

SEQ ID NO: 4609440 - DNA, 25 bp, Homo sapien
taggtgtgctctctgcaaggtctgc

SEQ ID NO: 4609441 - DNA, 25 bp, Homo sapien
ggaaggcacatctagccagatgcat

SEQ ID NO: 4609442 - DNA, 25 bp, Homo sapien
aaggcacatctagccagatgcatct

SEQ ID NO: 4609443 - DNA, 25 bp, Homo sapien
gcacatctagccagatgcatctggg

SEQ ID NO: 4609444 - DNA, 25 bp, Homo sapien
ggcacatctagccagatgcatctgg

SEQ ID NO: 4609445 - DNA, 25 bp, Homo sapien
ctggttcacctcctcagatacatcc

SEQ ID NO: 4609446 - DNA, 25 bp, Homo sapien
cctggttcacctcctcagatacatc

SEQ ID NO: 4609447 - DNA, 25 bp, Homo sapien
tgccctatcagctttcccagagtca

SEQ ID NO: 4609448 - DNA, 25 bp, Homo sapien
taaagcactgctggagggtaaccca

SEQ ID NO: 4609449 - DNA, 25 bp, Homo sapien
caaagagaagctcccacttggaagg

SEQ ID NO: 4609450 - DNA, 25 bp, Homo sapien
ccacccctgatgtttctcctttggg

SEQ ID NO: 4609451 - DNA, 25 bp, Homo sapien
cagcgccgcccagtgagtgaacacc

SEQ ID NO: 4609452 - DNA, 25 bp, Homo sapien
gcgccgcccagtgagtgaacaccgg

SEQ ID NO: 4609453 - DNA, 25 bp, Homo sapien
agtgagtgaacaccggccgcaggcg

SEQ ID NO: 4609454 - DNA, 25 bp, Homo sapien
ccagtgagtgaacaccggccgcagg

SEQ ID NO: 4609455 - DNA, 25 bp, Homo sapien
tattcaagatagaaattgctggtga

SEQ ID NO: 4609456 - DNA, 25 bp, Homo sapien
tgaggttgaggcgagaccgacatct

SEQ ID NO: 4609457 - DNA, 25 bp, Homo sapien
caagatagaaattgctggtgaggtt

SEQ ID NO: 4609458 - DNA, 25 bp, Homo sapien
gaccgacatctctctgagcagcagg

SEQ ID NO: 4609459 - DNA, 25 bp, Homo sapien
agagcagctcatcccttacatatga

SEQ ID NO: 4609460 - DNA, 25 bp, Homo sapien
gattagatattgaccttgggctgca

SEQ ID NO: 4609461 - DNA, 25 bp, Homo sapien
agagtctgacaagatttctcctcga

SEQ ID NO: 4609462 - DNA, 25 bp, Homo sapien
caagagctgcaattgtggagaaaca

SEQ ID NO: 4609463 - DNA, 25 bp, Homo sapien
tcaaatgagttgaggattttacatc

SEQ ID NO: 4609464 - DNA, 25 bp, Homo sapien
aggtccaaggaaatattgggcaatt

SEQ ID NO: 4609465 - DNA, 25 bp, Homo sapien
tttttactgtcctgggatagggagc

SEQ ID NO: 4609466 - DNA, 25 bp, Homo sapien
tcctgggatagggagcatcaaatga

SEQ ID NO: 4609467 - DNA, 25 bp, Homo sapien
aggtgaactggatcaagaacccatt

SEQ ID NO: 4609468 - DNA, 25 bp, Homo sapien
aacccatttatttttgtaggctcat

SEQ ID NO: 4609469 - DNA, 25 bp, Homo sapien
gaatcatttcctttggtaaccacac

SEQ ID NO: 4609470 - DNA, 25 bp, Homo sapien
tggtaaccacacttaaggtgaactg

SEQ ID NO: 4609471 - DNA, 25 bp, Homo sapien
aattgatcaactacccggagattga

SEQ ID NO: 4609472 - DNA, 25 bp, Homo sapien
tcattttcccatacaattgatcaac

SEQ ID NO: 4609473 - DNA, 25 bp, Homo sapien
tcccatacaattgatcaactacccg

SEQ ID NO: 4609474 - DNA, 25 bp, Homo sapien
caactacccggagattgaaaaacag

SEQ ID NO: 4609475 - DNA, 25 bp, Homo sapien
ttgccgggcgttggactttcctgac

SEQ ID NO: 4609476 - DNA, 25 bp, Homo sapien
gcggctggtgcggagcctcgggaag

SEQ ID NO: 4609477 - DNA, 25 bp, Homo sapien
gccagctgctcagcgttgcgccagg

SEQ ID NO: 4609478 - DNA, 25 bp, Homo sapien
gcagcaaatccagtttgccgggcgt

SEQ ID NO: 4609479 - DNA, 25 bp, Homo sapien
agcaaatgccagtaggtcatgaata

SEQ ID NO: 4609480 - DNA, 25 bp, Homo sapien
gcaaatgccagtaggtcatgaatat

SEQ ID NO: 4609481 - DNA, 25 bp, Homo sapien
caaatgccagtaggtcatgaatata

SEQ ID NO: 4609482 - DNA, 25 bp, Homo sapien
tagtcggcaccaccatagctgatca

SEQ ID NO: 4609483 - DNA, 25 bp, Homo sapien
gtagctactatgctgaaccttcagg

SEQ ID NO: 4609484 - DNA, 25 bp, Homo sapien
cacagtaattcgcttgtagtcggca

SEQ ID NO: 4609485 - DNA, 25 bp, Homo sapien
catataggtccttgggaaccgtgac

SEQ ID NO: 4609486 - DNA, 25 bp, Homo sapien
gatggtcactgcttgtccagatgac

SEQ ID NO: 4609487 - DNA, 25 bp, Homo sapien
tcctaaaagtgcagtagaaaatctc

SEQ ID NO: 4609488 - DNA, 25 bp, Homo sapien
tgggatgaccaattcagctgtatgg

SEQ ID NO: 4609489 - DNA, 25 bp, Homo sapien
tggtcttaccactcaggacttgatg

SEQ ID NO: 4609490 - DNA, 25 bp, Homo sapien
ggtgctaggggacagtgttagacat

SEQ ID NO: 4609491 - DNA, 25 bp, Homo sapien
tgctaggtgctaggggacagtgtta

SEQ ID NO: 4609492 - DNA, 25 bp, Homo sapien
tgctaggggacagtgttagacatat

SEQ ID NO: 4609493 - DNA, 25 bp, Homo sapien
taggtgctaggggacagtgttagac

SEQ ID NO: 4609494 - DNA, 25 bp, Homo sapien
ttattcaacaatcactgaatgacta

SEQ ID NO: 4609495 - DNA, 25 bp, Homo sapien
tcatttattcaacaatcactgaatg

SEQ ID NO: 4609496 - DNA, 25 bp, Homo sapien
acaatcactgaatgactatgatagg

SEQ ID NO: 4609497 - DNA, 25 bp, Homo sapien
ttcaacaatcactgaatgactatga

SEQ ID NO: 4609498 - DNA, 25 bp, Homo sapien
ttttgctgaagtacgtggcattttc

SEQ ID NO: 4609499 - DNA, 25 bp, Homo sapien
gtttttgctgaagtacgtggcattt

SEQ ID NO: 4609500 - DNA, 25 bp, Homo sapien
tttttgctgaagtacgtggcatttt

SEQ ID NO: 4609501 - DNA, 25 bp, Homo sapien
catggcagagatggcccacagtaga

SEQ ID NO: 4609502 - DNA, 25 bp, Homo sapien
gaaggccaaccagcactgctaagga

SEQ ID NO: 4609503 - DNA, 25 bp, Homo sapien
tgatccatctttgactacccaggtg

SEQ ID NO: 4609504 - DNA, 25 bp, Homo sapien
gatgttcagaggctgctaactccca

SEQ ID NO: 4609505 - DNA, 25 bp, Homo sapien
ttcttaaacggaagatgaatgtcag

SEQ ID NO: 4609506 - DNA, 25 bp, Homo sapien
taagatggctcccagaattaccaag

SEQ ID NO: 4609507 - DNA, 25 bp, Homo sapien
caaggcataataagatggctcccag

SEQ ID NO: 4609508 - DNA, 25 bp, Homo sapien
tgtcagtgctacaccaaggcataat

SEQ ID NO: 4609509 - DNA, 25 bp, Homo sapien
cagtggagaccactgcaattaagga

SEQ ID NO: 4609510 - DNA, 25 bp, Homo sapien
tcacccccagtggagaccactgcaa

SEQ ID NO: 4609511 - DNA, 25 bp, Homo sapien
acccccagtggagaccactgcaatt

SEQ ID NO: 4609512 - DNA, 25 bp, Homo sapien
cccagtggagaccactgcaattaag

SEQ ID NO: 4609513 - DNA, 25 bp, Homo sapien
taagtcgggtttccttgcagccatg

SEQ ID NO: 4609514 - DNA, 25 bp, Homo sapien
ctgtatgacactgcatcttctacct

SEQ ID NO: 4609515 - DNA, 25 bp, Homo sapien
tcaccccttacgcttcatcttcacc

SEQ ID NO: 4609516 - DNA, 25 bp, Homo sapien
gtgatcccactcagcttcaatataa

SEQ ID NO: 4609517 - DNA, 25 bp, Homo sapien
tgagtttgtatcttggatgccacat

SEQ ID NO: 4609518 - DNA, 25 bp, Homo sapien
gagtttgtatcttggatgccacatt

SEQ ID NO: 4609519 - DNA, 25 bp, Homo sapien
acattatcttcttgaccctctgttt

SEQ ID NO: 4609520 - DNA, 25 bp, Homo sapien
tttacattatcttcttgaccctctg

SEQ ID NO: 4609521 - DNA, 25 bp, Homo sapien
tcttgaccctctgttttctctactg

SEQ ID NO: 4609522 - DNA, 25 bp, Homo sapien
cttgaccctctgttttctctactgt

SEQ ID NO: 4609523 - DNA, 25 bp, Homo sapien
cacagatgatgctatgggccacaga

SEQ ID NO: 4609524 - DNA, 25 bp, Homo sapien
gcttgtccaggttaattagactgct

SEQ ID NO: 4609525 - DNA, 25 bp, Homo sapien
tgagcaaattgggatggcttgtccc

SEQ ID NO: 4609526 - DNA, 25 bp, Homo sapien
aatttgaaatgagagaaagcagcag

SEQ ID NO: 4609527 - DNA, 25 bp, Homo sapien
gcttgaagatcagaagttccaatgc

SEQ ID NO: 4609528 - DNA, 25 bp, Homo sapien
gaagatcagaagttccaatgctgga

SEQ ID NO: 4609529 - DNA, 25 bp, Homo sapien
tagttatagaggagaccaagcacct

SEQ ID NO: 4609530 - DNA, 25 bp, Homo sapien
caacccgtcttcctaggatgagcaa

SEQ ID NO: 4609531 - DNA, 25 bp, Homo sapien
cacagcgattgatattgcaagggca

SEQ ID NO: 4609532 - DNA, 25 bp, Homo sapien
cacaacagggtggttacagcgatga

SEQ ID NO: 4609533 - DNA, 25 bp, Homo sapien
gggttcaagcacaacgaatgaggct

SEQ ID NO: 4609534 - DNA, 25 bp, Homo sapien
cacagggtagctagcagtcaaggta

SEQ ID NO: 4609535 - DNA, 25 bp, Homo sapien
tcaaggtacactgccggaatttcca

SEQ ID NO: 4609536 - DNA, 25 bp, Homo sapien
tagattgactcagtgcaccctggag

SEQ ID NO: 4609537 - DNA, 25 bp, Homo sapien
taaacaagaaaatggacatgctggt

SEQ ID NO: 4609538 - DNA, 25 bp, Homo sapien
caagaaaatggacatgctggtgtac

SEQ ID NO: 4609539 - DNA, 25 bp, Homo sapien
aaaatggacatgctggtgtaccaag

SEQ ID NO: 4609540 - DNA, 25 bp, Homo sapien
ggatgttaaactgaacattttatta

SEQ ID NO: 4609541 - DNA, 25 bp, Homo sapien
catgcgtgtatttgtagttattcat

SEQ ID NO: 4609542 - DNA, 25 bp, Homo sapien
acatgcgtgtatttgtagttattca

SEQ ID NO: 4609543 - DNA, 25 bp, Homo sapien
aacatgcgtgtatttgtagttattc

SEQ ID NO: 4609544 - DNA, 25 bp, Homo sapien
tttgggcagttcagctctgctttgc

SEQ ID NO: 4609545 - DNA, 25 bp, Homo sapien
ccttctttaggagtgaggtgcactc

SEQ ID NO: 4609546 - DNA, 25 bp, Homo sapien
cctgtccttctttaggagtgaggtg

SEQ ID NO: 4609547 - DNA, 25 bp, Homo sapien
tccttctttaggagtgaggtgcact

SEQ ID NO: 4609548 - DNA, 25 bp, Homo sapien
tgtccttctttaggagtgaggtgca

SEQ ID NO: 4609549 - DNA, 25 bp, Homo sapien
gccaccaaaatgaacagccaaaagg

SEQ ID NO: 4609550 - DNA, 25 bp, Homo sapien
tgcagtagctccaacccaggattct

SEQ ID NO: 4609551 - DNA, 25 bp, Homo sapien
ttctagctgggacatatgaggatgg

SEQ ID NO: 4609552 - DNA, 25 bp, Homo sapien
gttgttcattcagcttaaggtttgc

SEQ ID NO: 4609553 - DNA, 25 bp, Homo sapien
cacagctccacaagtaaagatgcaa

SEQ ID NO: 4609554 - DNA, 25 bp, Homo sapien
gctccacaagtaaagatgcaaaagt

SEQ ID NO: 4609555 - DNA, 25 bp, Homo sapien
gccacagctccacaagtaaagatgc

SEQ ID NO: 4609556 - DNA, 25 bp, Homo sapien
cagctccacaagtaaagatgcaaaa

SEQ ID NO: 4609557 - DNA, 25 bp, Homo sapien
caggagaaatctggggagaagacac

SEQ ID NO: 4609558 - DNA, 25 bp, Homo sapien
aggagaaatctggggagaagacacc

SEQ ID NO: 4609559 - DNA, 25 bp, Homo sapien
aacaggagaaatctggggagaagac

SEQ ID NO: 4609560 - DNA, 25 bp, Homo sapien
caacaggagaaatctggggagaaga

SEQ ID NO: 4609561 - DNA, 25 bp, Homo sapien
aagaactggaagtcagcccacaggt

SEQ ID NO: 4609562 - DNA, 25 bp, Homo sapien
ccacaggtgtgttagagacagctgg

SEQ ID NO: 4609563 - DNA, 25 bp, Homo sapien
ggagccgtgaagactaagaactgga

SEQ ID NO: 4609564 - DNA, 25 bp, Homo sapien
gggctagataacctttcagatgctc

SEQ ID NO: 4609565 - DNA, 25 bp, Homo sapien
ggggaaatctgttggagccatacat

SEQ ID NO: 4609566 - DNA, 25 bp, Homo sapien
caggggaaatctgttggagccatac

SEQ ID NO: 4609567 - DNA, 25 bp, Homo sapien
tcaggggaaatctgttggagccata

SEQ ID NO: 4609568 - DNA, 25 bp, Homo sapien
ttcaggggaaatctgttggagccat

SEQ ID NO: 4609569 - DNA, 25 bp, Homo sapien
ctgataatggtctgaaactgaggag

SEQ ID NO: 4609570 - DNA, 25 bp, Homo sapien
tgctgtacctcccatgctttctcct

SEQ ID NO: 4609571 - DNA, 25 bp, Homo sapien
catggacttcttatggttgaggaaa

SEQ ID NO: 4609572 - DNA, 25 bp, Homo sapien
gtcctgctgtacctcccatgctttc

SEQ ID NO: 4609573 - DNA, 25 bp, Homo sapien
tatctggtgaagctgcaattccagg

SEQ ID NO: 4609574 - DNA, 25 bp, Homo sapien
tccaggctcaacattagcaggagga

SEQ ID NO: 4609575 - DNA, 25 bp, Homo sapien
tgcaattccaggctcaacattagca

SEQ ID NO: 4609576 - DNA, 25 bp, Homo sapien
ctgctatctggtgaagctgcaattc

SEQ ID NO: 4609577 - DNA, 25 bp, Homo sapien
cagtaaaccacattaaggtatgaat

SEQ ID NO: 4609578 - DNA, 25 bp, Homo sapien
tttaggaagactcagtaaaccacat

SEQ ID NO: 4609579 - DNA, 25 bp, Homo sapien
ttttaggaagactcagtaaaccaca

SEQ ID NO: 4609580 - DNA, 25 bp, Homo sapien
aaccacattaaggtatgaatgacca

SEQ ID NO: 4609581 - DNA, 25 bp, Homo sapien
ccaaagggatagccttaaggttcat

SEQ ID NO: 4609582 - DNA, 25 bp, Homo sapien
cttcaagtccaaagggatagcctta

SEQ ID NO: 4609583 - DNA, 25 bp, Homo sapien
tccaaagggatagccttaaggttca

SEQ ID NO: 4609584 - DNA, 25 bp, Homo sapien
caagtccaaagggatagccttaagg

SEQ ID NO: 4609585 - DNA, 25 bp, Homo sapien
catccaaaatagtgcactcatggtt

SEQ ID NO: 4609586 - DNA, 25 bp, Homo sapien
gtctgaactaccttccccaggagaa

SEQ ID NO: 4609587 - DNA, 25 bp, Homo sapien
taactacaccctcgaatggtctgaa

SEQ ID NO: 4609588 - DNA, 25 bp, Homo sapien
tcttagctcctggtgttcatccaaa

SEQ ID NO: 4609589 - DNA, 25 bp, Homo sapien
gacttgccacgtaatgtacttgaga

SEQ ID NO: 4609590 - DNA, 25 bp, Homo sapien
tagccacattcttcagaaaactctg

SEQ ID NO: 4609591 - DNA, 25 bp, Homo sapien
gctttacatagccacattcttcaga

SEQ ID NO: 4609592 - DNA, 25 bp, Homo sapien
acaaaatcctgctctaagcacctga

SEQ ID NO: 4609593 - DNA, 25 bp, Homo sapien
tggacattcccgtggcgaatccttt

SEQ ID NO: 4609594 - DNA, 25 bp, Homo sapien
cattcccgtggcgaatcctttttct

SEQ ID NO: 4609595 - DNA, 25 bp, Homo sapien
tatctggacattcccgtggcgaatc

SEQ ID NO: 4609596 - DNA, 25 bp, Homo sapien
cttatctggacattcccgtggcgaa

SEQ ID NO: 4609597 - DNA, 25 bp, Homo sapien
caaactggctgttattgctccaagg

SEQ ID NO: 4609598 - DNA, 25 bp, Homo sapien
caaagtggctctttcacggtgtggg

SEQ ID NO: 4609599 - DNA, 25 bp, Homo sapien
gaggtatgtggaacgaggccttccc

SEQ ID NO: 4609600 - DNA, 25 bp, Homo sapien
ttcagagtcaggtacttgtagtccc

SEQ ID NO: 4609601 - DNA, 25 bp, Homo sapien
tctgaaatagctgtctccttaaaag

SEQ ID NO: 4609602 - DNA, 25 bp, Homo sapien
ggattctagtccttgacaccactca

SEQ ID NO: 4609603 - DNA, 25 bp, Homo sapien
gctacctttaatgggtttctgtgac

SEQ ID NO: 4609604 - DNA, 25 bp, Homo sapien
ttatttccgagcagatgctttcatt

SEQ ID NO: 4609605 - DNA, 25 bp, Homo sapien
tggagagatccctgaatccagagga

SEQ ID NO: 4609606 - DNA, 25 bp, Homo sapien
tactcagtcctactctgtgatgtcg

SEQ ID NO: 4609607 - DNA, 25 bp, Homo sapien
cttcatctgcaataaatagggcttg

SEQ ID NO: 4609608 - DNA, 25 bp, Homo sapien
gacttcatgggactctcttgggcta

SEQ ID NO: 4609609 - DNA, 25 bp, Homo sapien
taagatggatatggctctcttttcc

SEQ ID NO: 4609610 - DNA, 25 bp, Homo sapien
gaatccgaagaaccatatgacatgg

SEQ ID NO: 4609611 - DNA, 25 bp, Homo sapien
gaagcagtttcgttacagcaatgcc

SEQ ID NO: 4609612 - DNA, 25 bp, Homo sapien
gaatcttgttcgtatgagtaaatca

SEQ ID NO: 4609613 - DNA, 25 bp, Homo sapien
tattgatctgtttatagttcctata

SEQ ID NO: 4609614 - DNA, 25 bp, Homo sapien
tctggtttaatcgaagggttgtata

SEQ ID NO: 4609615 - DNA, 25 bp, Homo sapien
gatctgtttatagttcctatatctt

SEQ ID NO: 4609616 - DNA, 25 bp, Homo sapien
ctctatcccatggaatagtgtcaat

SEQ ID NO: 4609617 - DNA, 25 bp, Homo sapien
gctttcaagatgaatccttagggtt

SEQ ID NO: 4609618 - DNA, 25 bp, Homo sapien
ctttcaagatgaatccttagggttt

SEQ ID NO: 4609619 - DNA, 25 bp, Homo sapien
gcaatctacaaagtatggtcatttt

SEQ ID NO: 4609620 - DNA, 25 bp, Homo sapien
ttttgcaatctacaaagtatggtca

SEQ ID NO: 4609621 - DNA, 25 bp, Homo sapien
tccatatgctcgttggtcatttgtg

SEQ ID NO: 4609622 - DNA, 25 bp, Homo sapien
tatttgcataccttgtagattctgg

SEQ ID NO: 4609623 - DNA, 25 bp, Homo sapien
gctgatttatttgcataccttgtag

SEQ ID NO: 4609624 - DNA, 25 bp, Homo sapien
ttgctgatttatttgcataccttgt

SEQ ID NO: 4609625 - DNA, 25 bp, Homo sapien
acgcctggcccaaatgtggagtttt

SEQ ID NO: 4609626 - DNA, 25 bp, Homo sapien
tctctcacccccaaccatcctttcc

SEQ ID NO: 4609627 - DNA, 25 bp, Homo sapien
atgtggagttttttatctctcaccc

SEQ ID NO: 4609628 - DNA, 25 bp, Homo sapien
cccctaagtcctgaaagtccattgt

SEQ ID NO: 4609629 - DNA, 25 bp, Homo sapien
gaagttctcgtctccatgtggtcag

SEQ ID NO: 4609630 - DNA, 25 bp, Homo sapien
tggtatgtcccaaaaagctctgaca

SEQ ID NO: 4609631 - DNA, 25 bp, Homo sapien
cttgaagttctcgtctccatgtggt

SEQ ID NO: 4609632 - DNA, 25 bp, Homo sapien
gctgggcctcctggtatgtcccaaa

SEQ ID NO: 4609633 - DNA, 25 bp, Homo sapien
ggaacctttaggatgtgagtgttta

SEQ ID NO: 4609634 - DNA, 25 bp, Homo sapien
tgagtgtttattttcctgtaggaag

SEQ ID NO: 4609635 - DNA, 25 bp, Homo sapien
aacctttaggatgtgagtgtttatt

SEQ ID NO: 4609636 - DNA, 25 bp, Homo sapien
ctggaacctttaggatgtgagtgtt

SEQ ID NO: 4609637 - DNA, 25 bp, Homo sapien
gctttaggcgcagaacactggtgac

SEQ ID NO: 4609638 - DNA, 25 bp, Homo sapien
cactggtgacctggtagaggccttc

SEQ ID NO: 4609639 - DNA, 25 bp, Homo sapien
gccaaagtaagttccctcacgtgag

SEQ ID NO: 4609640 - DNA, 25 bp, Homo sapien
gaacgctgacgtttggccaggatac

SEQ ID NO: 4609641 - DNA, 25 bp, Homo sapien
agttggatgggtcctgggttccatc

SEQ ID NO: 4609642 - DNA, 25 bp, Homo sapien
aaaatgtgaagcagccaagttggat

SEQ ID NO: 4609643 - DNA, 25 bp, Homo sapien
tttcttagggctatcactgtggcta

SEQ ID NO: 4609644 - DNA, 25 bp, Homo sapien
cactctatctttgagtgtgactcca

SEQ ID NO: 4609645 - DNA, 25 bp, Homo sapien
tctttgagtgtgactccattccatt

SEQ ID NO: 4609646 - DNA, 25 bp, Homo sapien
agctggaacggaacactcagctgct

SEQ ID NO: 4609647 - DNA, 25 bp, Homo sapien
cattccattctcccaaagacagctg

SEQ ID NO: 4609648 - DNA, 25 bp, Homo sapien
gcaaggttacctttgcacagtggat

SEQ ID NO: 4609649 - DNA, 25 bp, Homo sapien
gaactgtaatcttgtagcactgtgg

SEQ ID NO: 4609650 - DNA, 25 bp, Homo sapien
gggaaccataagaactgtaatcttg

SEQ ID NO: 4609651 - DNA, 25 bp, Homo sapien
gctttgggaccaatgacagagcatg

SEQ ID NO: 4609652 - DNA, 25 bp, Homo sapien
agcactgttcacttccctctttgtt

SEQ ID NO: 4609653 - DNA, 25 bp, Homo sapien
gcactgttcacttccctctttgttg

SEQ ID NO: 4609654 - DNA, 25 bp, Homo sapien
tcacttccctctttgttgtggtgac

SEQ ID NO: 4609655 - DNA, 25 bp, Homo sapien
ctgttcacttccctctttgttgtgg

SEQ ID NO: 4609656 - DNA, 25 bp, Homo sapien
aaactctgggaaggatttgatatga

SEQ ID NO: 4609657 - DNA, 25 bp, Homo sapien
ttaaagtgctgggtcatccaaaggc

SEQ ID NO: 4609658 - DNA, 25 bp, Homo sapien
taaggagcttgctttaggcccacct

SEQ ID NO: 4609659 - DNA, 25 bp, Homo sapien
tagatgtcatatcaggtcaccctgg

SEQ ID NO: 4609660 - DNA, 25 bp, Homo sapien
gatttgagtttgtgcgaagccctgt

SEQ ID NO: 4609661 - DNA, 25 bp, Homo sapien
cactatattgaagtaaactgatgcg

SEQ ID NO: 4609662 - DNA, 25 bp, Homo sapien
tattgaagtaaactgatgcgtagag

SEQ ID NO: 4609663 - DNA, 25 bp, Homo sapien
tatattgaagtaaactgatgcgtag

SEQ ID NO: 4609664 - DNA, 25 bp, Homo sapien
gtatcactatatcactatatctatt

SEQ ID NO: 4609665 - DNA, 25 bp, Homo sapien
tacccaaaggctagcaggaacaggt

SEQ ID NO: 4609666 - DNA, 25 bp, Homo sapien
gatgcactggtaccaatgccaacag

SEQ ID NO: 4609667 - DNA, 25 bp, Homo sapien
taaggaatagtgcagtacccaaagg

SEQ ID NO: 4609668 - DNA, 25 bp, Homo sapien
gccaggtgtagggaactctaaggaa

SEQ ID NO: 4609669 - DNA, 25 bp, Homo sapien
ctgctctgatgtgccagggctggaa

SEQ ID NO: 4609670 - DNA, 25 bp, Homo sapien
ccttgttacagggtcagatgccaca

SEQ ID NO: 4609671 - DNA, 25 bp, Homo sapien
cctgaatgtgtcatgcctgtagcaa

SEQ ID NO: 4609672 - DNA, 25 bp, Homo sapien
tatttttatgactggactctggctg

SEQ ID NO: 4609673 - DNA, 25 bp, Homo sapien
tgttttcatccaagttacccataag

SEQ ID NO: 4609674 - DNA, 25 bp, Homo sapien
gaaactcttctatccaactgactct

SEQ ID NO: 4609675 - DNA, 25 bp, Homo sapien
ccactgtggcaacctgggattttga

SEQ ID NO: 4609676 - DNA, 25 bp, Homo sapien
tatgtctatggcaactccatgagct

SEQ ID NO: 4609677 - DNA, 25 bp, Homo sapien
tactagggttaaggccctgtcatgg

SEQ ID NO: 4609678 - DNA, 25 bp, Homo sapien
actagggttaaggccctgtcatggg

SEQ ID NO: 4609679 - DNA, 25 bp, Homo sapien
cagtgactaaagctgtcagcgtcat

SEQ ID NO: 4609680 - DNA, 25 bp, Homo sapien
tcagtgactaaagctgtcagcgtca

SEQ ID NO: 4609681 - DNA, 25 bp, Homo sapien
ttctggccactcccctcagtgacta

SEQ ID NO: 4609682 - DNA, 25 bp, Homo sapien
ggccactcccctcagtgactaaagc

SEQ ID NO: 4609683 - DNA, 25 bp, Homo sapien
gaacatcccctacctttatctcata

SEQ ID NO: 4609684 - DNA, 25 bp, Homo sapien
ccttgtggtagggatcaatattcct

SEQ ID NO: 4609685 - DNA, 25 bp, Homo sapien
taacaagagtccattgaccatggct

SEQ ID NO: 4609686 - DNA, 25 bp, Homo sapien
tatctcataggaggactatctcccc

SEQ ID NO: 4609687 - DNA, 25 bp, Homo sapien
aaccacagttgcatcttcagaaact

SEQ ID NO: 4609688 - DNA, 25 bp, Homo sapien
cttcattggcaaatagccagcttct

SEQ ID NO: 4609689 - DNA, 25 bp, Homo sapien
tccagatggggagtgaacaaggctt

SEQ ID NO: 4609690 - DNA, 25 bp, Homo sapien
cattggcaaatagccagcttcttcc

SEQ ID NO: 4609691 - DNA, 25 bp, Homo sapien
tttccagatggggagtgaacaaggc

SEQ ID NO: 4609692 - DNA, 25 bp, Homo sapien
gttcaggataacaggaatctctgtt

SEQ ID NO: 4609693 - DNA, 25 bp, Homo sapien
tggttcaggataacaggaatctctg

SEQ ID NO: 4609694 - DNA, 25 bp, Homo sapien
attggttcaggataacaggaatctc

SEQ ID NO: 4609695 - DNA, 25 bp, Homo sapien
caggataacaggaatctctgttttc

SEQ ID NO: 4609696 - DNA, 25 bp, Homo sapien
tttgaatatggtctggaatctctgt

SEQ ID NO: 4609697 - DNA, 25 bp, Homo sapien
tctgttagtttgtaaacaagtcaaa

SEQ ID NO: 4609698 - DNA, 25 bp, Homo sapien
tcaaccttctgttagtttgtaaaca

SEQ ID NO: 4609699 - DNA, 25 bp, Homo sapien
tggaatctctgtactcaaccttctg

SEQ ID NO: 4609700 - DNA, 25 bp, Homo sapien
cctgttgcgatcagattgtctcctt

SEQ ID NO: 4609701 - DNA, 25 bp, Homo sapien
cagcctgttgcgatcagattgtctc

SEQ ID NO: 4609702 - DNA, 25 bp, Homo sapien
tgttgcgatcagattgtctccttgg

SEQ ID NO: 4609703 - DNA, 25 bp, Homo sapien
gattgtctccttggcgtctaccctc

SEQ ID NO: 4609704 - DNA, 25 bp, Homo sapien
ccataactttagatgagaggaggct

SEQ ID NO: 4609705 - DNA, 25 bp, Homo sapien
tgatagcgtaggtccatatttagct

SEQ ID NO: 4609706 - DNA, 25 bp, Homo sapien
tttcgtgctgcaaaaggcttggact

SEQ ID NO: 4609707 - DNA, 25 bp, Homo sapien
tcaacggattgacccagtggtaacg

SEQ ID NO: 4609708 - DNA, 25 bp, Homo sapien
tccatttccattcgtctcagcctta

SEQ ID NO: 4609709 - DNA, 25 bp, Homo sapien
gagttctaaatctatgtctttgaaa

SEQ ID NO: 4609710 - DNA, 25 bp, Homo sapien
ttcaggagttctaaatctatgtctt

SEQ ID NO: 4609711 - DNA, 25 bp, Homo sapien
catgaaagtattgagttctgtctcc

SEQ ID NO: 4609712 - DNA, 25 bp, Homo sapien
ctggccgggccgggccgacgcaagg

SEQ ID NO: 4609713 - DNA, 25 bp, Homo sapien
acaccgccaccggccgagtcggcgg

SEQ ID NO: 4609714 - DNA, 25 bp, Homo sapien
cagctcggggcatctgcccgctggc

SEQ ID NO: 4609715 - DNA, 25 bp, Homo sapien
tcccacaccgccaccggccgagtcg

SEQ ID NO: 4609716 - DNA, 25 bp, Homo sapien
ggcagctcggggcatctgcccgctg

SEQ ID NO: 4609717 - DNA, 25 bp, Homo sapien
cggcgcccccagttgcgtccgtcac

SEQ ID NO: 4609718 - DNA, 25 bp, Homo sapien
ccggcgcccccagttgcgtccgtca

SEQ ID NO: 4609719 - DNA, 25 bp, Homo sapien
ggccagcacggcgaagaaagccctc

SEQ ID NO: 4609720 - DNA, 25 bp, Homo sapien
aagaaagccctctgcgggtcggact

SEQ ID NO: 4609721 - DNA, 25 bp, Homo sapien
actgaacgtggaaaggcgcctcggc

SEQ ID NO: 4609722 - DNA, 25 bp, Homo sapien
ccctctgcgggtcggactgaacgtg

SEQ ID NO: 4609723 - DNA, 25 bp, Homo sapien
aggcaggtgggtctggcacgaaggg

SEQ ID NO: 4609724 - DNA, 25 bp, Homo sapien
ctgcgaaggcaggtgggtctggcac

SEQ ID NO: 4609725 - DNA, 25 bp, Homo sapien
cacgaaggggcaggagtcctaggct

SEQ ID NO: 4609726 - DNA, 25 bp, Homo sapien
gcgaaggcaggtgggtctggcacga

SEQ ID NO: 4609727 - DNA, 25 bp, Homo sapien
caattcggtggaacgaggacgcgga

SEQ ID NO: 4609728 - DNA, 25 bp, Homo sapien
ctgcggccaattcggtggaacgagg

SEQ ID NO: 4609729 - DNA, 25 bp, Homo sapien
ggccaattcggtggaacgaggacgc

SEQ ID NO: 4609730 - DNA, 25 bp, Homo sapien
gcggccaattcggtggaacgaggac

SEQ ID NO: 4609731 - DNA, 25 bp, Homo sapien
tcagggattttcggcagcagcgact

SEQ ID NO: 4609732 - DNA, 25 bp, Homo sapien
ttttcggcagcagcgacttcatcca

SEQ ID NO: 4609733 - DNA, 25 bp, Homo sapien
ggaccgccggctggaggacgtgcct

SEQ ID NO: 4609734 - DNA, 25 bp, Homo sapien
gccggctggaggacgtgcctgcagc

SEQ ID NO: 4609735 - DNA, 25 bp, Homo sapien
agaagaacaagtctgggctcggccg

SEQ ID NO: 4609736 - DNA, 25 bp, Homo sapien
ttggggcaccacagcggccggattt

SEQ ID NO: 4609737 - DNA, 25 bp, Homo sapien
acgccgcggccgtcggtccaacgcg

SEQ ID NO: 4609738 - DNA, 25 bp, Homo sapien
cagcggccggatttctaattgtgga

SEQ ID NO: 4609739 - DNA, 25 bp, Homo sapien
tctggcgctgggtaaagcccaagag

SEQ ID NO: 4609740 - DNA, 25 bp, Homo sapien
aagaattcaggctgtagtttgtaga

SEQ ID NO: 4609741 - DNA, 25 bp, Homo sapien
ttacaggcctgtaaagtctggcgct

SEQ ID NO: 4609742 - DNA, 25 bp, Homo sapien
agaaataagttattacaggcctgta

SEQ ID NO: 4609743 - DNA, 25 bp, Homo sapien
ctgatccaaagcttggttcttttga

SEQ ID NO: 4609744 - DNA, 25 bp, Homo sapien
aagcttggttcttttgacatatcat

SEQ ID NO: 4609745 - DNA, 25 bp, Homo sapien
ccaaagcttggttcttttgacatat

SEQ ID NO: 4609746 - DNA, 25 bp, Homo sapien
gatccaaagcttggttcttttgaca

SEQ ID NO: 4609747 - DNA, 25 bp, Homo sapien
catctgacaagaaactaaaaaccag

SEQ ID NO: 4609748 - DNA, 25 bp, Homo sapien
tgcatctgacaagaaactaaaaacc

SEQ ID NO: 4609749 - DNA, 25 bp, Homo sapien
tgaatggtagacaatagttgcaaac

SEQ ID NO: 4609750 - DNA, 25 bp, Homo sapien
ccttccttttgaatggtagacaata

SEQ ID NO: 4609751 - DNA, 25 bp, Homo sapien
tgtaggatccaaactgagtagatga

SEQ ID NO: 4609752 - DNA, 25 bp, Homo sapien
gcaggctccttgtaggttacaatta

SEQ ID NO: 4609753 - DNA, 25 bp, Homo sapien
ctccattcagcttgcttgtaggatc

SEQ ID NO: 4609754 - DNA, 25 bp, Homo sapien
gctccttgtaggttacaattaacac

SEQ ID NO: 4609755 - DNA, 25 bp, Homo sapien
ggtacttgtcccctcttgtagatgt

SEQ ID NO: 4609756 - DNA, 25 bp, Homo sapien
tgtcccctcttgtagatgtaatatg

SEQ ID NO: 4609757 - DNA, 25 bp, Homo sapien
cccctcttgtagatgtaatatgaaa

SEQ ID NO: 4609758 - DNA, 25 bp, Homo sapien
tacttgtcccctcttgtagatgtaa

SEQ ID NO: 4609759 - DNA, 25 bp, Homo sapien
ttcaaaagttaaggcctgctataag

SEQ ID NO: 4609760 - DNA, 25 bp, Homo sapien
ctggctttatggcttgattaaaaaa

SEQ ID NO: 4609761 - DNA, 25 bp, Homo sapien
gctcttatatttttatctggcttta

SEQ ID NO: 4609762 - DNA, 25 bp, Homo sapien
atttcaaaagttaaggcctgctata

SEQ ID NO: 4609763 - DNA, 25 bp, Homo sapien
aatgtccagacaaccttcaactagt

SEQ ID NO: 4609764 - DNA, 25 bp, Homo sapien
tgctctcaacaaagtatacatgatg

SEQ ID NO: 4609765 - DNA, 25 bp, Homo sapien
ggtccactggtctgtgtaactaata

SEQ ID NO: 4609766 - DNA, 25 bp, Homo sapien
taatagtagcagtgaaaagacagga

SEQ ID NO: 4609767 - DNA, 25 bp, Homo sapien
ggctctctgatttgggcagtcctac

SEQ ID NO: 4609768 - DNA, 25 bp, Homo sapien
gacagaaacaatgtgcagggctctc

SEQ ID NO: 4609769 - DNA, 25 bp, Homo sapien
tcaccagacttttcatagaaccaaa

SEQ ID NO: 4609770 - DNA, 25 bp, Homo sapien
tgagacagcctccagtctgacagaa

SEQ ID NO: 4609771 - DNA, 25 bp, Homo sapien
aagtaggttctaaatgccaggccag

SEQ ID NO: 4609772 - DNA, 25 bp, Homo sapien
gatgtctgacctgagcttgaaaacc

SEQ ID NO: 4609773 - DNA, 25 bp, Homo sapien
tgagggcccctaaaaagaccaatga

SEQ ID NO: 4609774 - DNA, 25 bp, Homo sapien
gatcagtaagatctccaagcagctt

SEQ ID NO: 4609775 - DNA, 25 bp, Homo sapien
tctattccaatgaatgataaggcat

SEQ ID NO: 4609776 - DNA, 25 bp, Homo sapien
ggcaacctagacaacaataccagtt

SEQ ID NO: 4609777 - DNA, 25 bp, Homo sapien
tatctgaggtatcaatagcaagtct

SEQ ID NO: 4609778 - DNA, 25 bp, Homo sapien
cataaatatgcaatggaggcacatt

SEQ ID NO: 4609779 - DNA, 25 bp, Homo sapien
aatctctatgttgatggcccctgcc

SEQ ID NO: 4609780 - DNA, 25 bp, Homo sapien
cctgcctgggatatcaaagcgtgaa

SEQ ID NO: 4609781 - DNA, 25 bp, Homo sapien
aaaaggtgactacgtgtctgcaggc

SEQ ID NO: 4609782 - DNA, 25 bp, Homo sapien
tgtcaactggtggacttcagcaggg

SEQ ID NO: 4609783 - DNA, 25 bp, Homo sapien
gatttactgagatgtcttcgatgta

SEQ ID NO: 4609784 - DNA, 25 bp, Homo sapien
caaatagggctagaaagcttaagac

SEQ ID NO: 4609785 - DNA, 25 bp, Homo sapien
tataggagtcacatttaaactgctg

SEQ ID NO: 4609786 - DNA, 25 bp, Homo sapien
cagaggtagactcctttcagtggaa

SEQ ID NO: 4609787 - DNA, 25 bp, Homo sapien
cagtagagtgctgggtcaatgccaa

SEQ ID NO: 4609788 - DNA, 25 bp, Homo sapien
tctgtcccagtgatccaaatcgtgt

SEQ ID NO: 4609789 - DNA, 25 bp, Homo sapien
cacttgtggcaacaattagcctgct

SEQ ID NO: 4609790 - DNA, 25 bp, Homo sapien
tgagggccctttctaaggtggacaa

SEQ ID NO: 4609791 - DNA, 25 bp, Homo sapien
tccaaatttaatgctggagcacact

SEQ ID NO: 4609792 - DNA, 25 bp, Homo sapien
ctccaaatttaatgctggagcacac

SEQ ID NO: 4609793 - DNA, 25 bp, Homo sapien
tgggtgcttgtaaatccagtatttt

SEQ ID NO: 4609794 - DNA, 25 bp, Homo sapien
gcttgtaaatccagtattttcctca

SEQ ID NO: 4609795 - DNA, 25 bp, Homo sapien
ggtgcttgtaaatccagtattttcc

SEQ ID NO: 4609796 - DNA, 25 bp, Homo sapien
gatgggtgcttgtaaatccagtatt

SEQ ID NO: 4609797 - DNA, 25 bp, Homo sapien
acacaatgtcaaatttaaccaaagt

SEQ ID NO: 4609798 - DNA, 25 bp, Homo sapien
cacacaatgtcaaatttaaccaaag

SEQ ID NO: 4609799 - DNA, 25 bp, Homo sapien
cacaatgtcaaatttaaccaaagta

SEQ ID NO: 4609800 - DNA, 25 bp, Homo sapien
tcacacaatgtcaaatttaaccaaa

SEQ ID NO: 4609801 - DNA, 25 bp, Homo sapien
ctgcaggtctactgaaaagggtact

SEQ ID NO: 4609802 - DNA, 25 bp, Homo sapien
catcagaagtagcaaccaggagatc

SEQ ID NO: 4609803 - DNA, 25 bp, Homo sapien
ctgtgcaaagattaatggctttcct

SEQ ID NO: 4609804 - DNA, 25 bp, Homo sapien
ctctagatgactgcaggtctactga

SEQ ID NO: 4609805 - DNA, 25 bp, Homo sapien
aataagcacatgaaataggattaag

SEQ ID NO: 4609806 - DNA, 25 bp, Homo sapien
tataataaattactctctcactttt

SEQ ID NO: 4609807 - DNA, 25 bp, Homo sapien
aaattactctctcactttttgccag

SEQ ID NO: 4609808 - DNA, 25 bp, Homo sapien
tctctcactttttgccagaaaaacc

SEQ ID NO: 4609809 - DNA, 25 bp, Homo sapien
agcaaacccatcaagtgtggcacag

SEQ ID NO: 4609810 - DNA, 25 bp, Homo sapien
gcagtaaatctacttgacactggtg

SEQ ID NO: 4609811 - DNA, 25 bp, Homo sapien
gtctctgatgtgtacgtctgtgaag

SEQ ID NO: 4609812 - DNA, 25 bp, Homo sapien
tgacactggtgtaataaatccaact

SEQ ID NO: 4609813 - DNA, 25 bp, Homo sapien
acgttccgtcaacaacatcttgtgg

SEQ ID NO: 4609814 - DNA, 25 bp, Homo sapien
aatgccattagtcgatacttgttat

SEQ ID NO: 4609815 - DNA, 25 bp, Homo sapien
tgttatttactgctacacacgttcc

SEQ ID NO: 4609816 - DNA, 25 bp, Homo sapien
ccattagtcgatacttgttatttac

SEQ ID NO: 4609817 - DNA, 25 bp, Homo sapien
taaggacaccagctatcacctagtg

SEQ ID NO: 4609818 - DNA, 25 bp, Homo sapien
aaatactgatctgctgcaaactggc

SEQ ID NO: 4609819 - DNA, 25 bp, Homo sapien
actggcatcctaaaaggaagctggc

SEQ ID NO: 4609820 - DNA, 25 bp, Homo sapien
gaagctggcttcttacacaactcta

SEQ ID NO: 4609821 - DNA, 25 bp, Homo sapien
catgtgcttatctcagctcaggatg

SEQ ID NO: 4609822 - DNA, 25 bp, Homo sapien
tgtcattcaatcatacccagaagcc

SEQ ID NO: 4609823 - DNA, 25 bp, Homo sapien
gagaccctctacagctctctgaagt

SEQ ID NO: 4609824 - DNA, 25 bp, Homo sapien
tattatgaactctagctgccttggt

SEQ ID NO: 4609825 - DNA, 25 bp, Homo sapien
ccagtgctgttatctattgtataga

SEQ ID NO: 4609826 - DNA, 25 bp, Homo sapien
tattgtatagacctgcacagaacca

SEQ ID NO: 4609827 - DNA, 25 bp, Homo sapien
gcagcatggctccagtgctgttatc

SEQ ID NO: 4609828 - DNA, 25 bp, Homo sapien
tagctctaatttatgagatagcagc

SEQ ID NO: 4609829 - DNA, 25 bp, Homo sapien
actcttatcatttgagtggctgatc

SEQ ID NO: 4609830 - DNA, 25 bp, Homo sapien
aaagtgaaggcactgattggaaaaa

SEQ ID NO: 4609831 - DNA, 25 bp, Homo sapien
cttatcatttgagtggctgatctgc

SEQ ID NO: 4609832 - DNA, 25 bp, Homo sapien
aagtgaaggcactgattggaaaaaa

SEQ ID NO: 4609833 - DNA, 25 bp, Homo sapien
acactattgtcaggagaccatctca

SEQ ID NO: 4609834 - DNA, 25 bp, Homo sapien
ccaggtcactattacaacactattg

SEQ ID NO: 4609835 - DNA, 25 bp, Homo sapien
tctcatcaatttaacagctcctgtt

SEQ ID NO: 4609836 - DNA, 25 bp, Homo sapien
tccgtattcccaggtcactattaca

SEQ ID NO: 4609837 - DNA, 25 bp, Homo sapien
tagagttgatcttaaggggatcttt

SEQ ID NO: 4609838 - DNA, 25 bp, Homo sapien
agagttgatcttaaggggatctttt

SEQ ID NO: 4609839 - DNA, 25 bp, Homo sapien
atagagttgatcttaaggggatctt

SEQ ID NO: 4609840 - DNA, 25 bp, Homo sapien
catagagttgatcttaaggggatct

SEQ ID NO: 4609841 - DNA, 25 bp, Homo sapien
gtgttttgagaaccaaatccgctga

SEQ ID NO: 4609842 - DNA, 25 bp, Homo sapien
tgtttaactacactcctgaggtcag

SEQ ID NO: 4609843 - DNA, 25 bp, Homo sapien
ctgaggtcagactcaatttcagtgt

SEQ ID NO: 4609844 - DNA, 25 bp, Homo sapien
tacccataggtgatagccttctgca

SEQ ID NO: 4609845 - DNA, 25 bp, Homo sapien
tgagactctaaacctccatctgcaa

SEQ ID NO: 4609846 - DNA, 25 bp, Homo sapien
cacagttcaagtacaagcgatcctc

SEQ ID NO: 4609847 - DNA, 25 bp, Homo sapien
tgtacaacatgccaatgccgatgtc

SEQ ID NO: 4609848 - DNA, 25 bp, Homo sapien
gccgatgtccaagtaaagtgcttaa

SEQ ID NO: 4609849 - DNA, 25 bp, Homo sapien
cagaactggcattgatgctaggtca

SEQ ID NO: 4609850 - DNA, 25 bp, Homo sapien
acacagacctggctaggcagaactg

SEQ ID NO: 4609851 - DNA, 25 bp, Homo sapien
cctggctaggcagaactggcattga

SEQ ID NO: 4609852 - DNA, 25 bp, Homo sapien
tgatgctaggtcagtgtagaatgaa

SEQ ID NO: 4609853 - DNA, 25 bp, Homo sapien
aagtcctaaaatcagtgttaaaatg

SEQ ID NO: 4609854 - DNA, 25 bp, Homo sapien
gaatcttgctagtacccaaagtcct

SEQ ID NO: 4609855 - DNA, 25 bp, Homo sapien
aacagaataacagtggaatcttgct

SEQ ID NO: 4609856 - DNA, 25 bp, Homo sapien
tatctttagctatctaaagaacaga

SEQ ID NO: 4609857 - DNA, 25 bp, Homo sapien
tgctctctagataggtgctggaaat

SEQ ID NO: 4609858 - DNA, 25 bp, Homo sapien
gagtaaagagtaatgtgcaaaacca

SEQ ID NO: 4609859 - DNA, 25 bp, Homo sapien
gcaatattctgtccaagcttatcaa

SEQ ID NO: 4609860 - DNA, 25 bp, Homo sapien
aaccaaacttgccaaccacagcaat

SEQ ID NO: 4609861 - DNA, 25 bp, Homo sapien
tttggtgagtaaagagtaatgtgca

SEQ ID NO: 4609862 - DNA, 25 bp, Homo sapien
ctcttcttgacggtcatttatgtta

SEQ ID NO: 4609863 - DNA, 25 bp, Homo sapien
ataaaatcattccaccaggctaagc

SEQ ID NO: 4609864 - DNA, 25 bp, Homo sapien
ggtcatttatgttataacacgcaag

SEQ ID NO: 4609865 - DNA, 25 bp, Homo sapien
tataacacgcaaggaccataaaatc

SEQ ID NO: 4609866 - DNA, 25 bp, Homo sapien
gcaaaggcattgtccagatttgatg

SEQ ID NO: 4609867 - DNA, 25 bp, Homo sapien
cctggaagacactaagcagtaatgt

SEQ ID NO: 4609868 - DNA, 25 bp, Homo sapien
ttgatgttcgcaagtatactctaag

SEQ ID NO: 4609869 - DNA, 25 bp, Homo sapien
gctctaaatactattaccatgtcct

SEQ ID NO: 4609870 - DNA, 25 bp, Homo sapien
aatgtagcgtgacatggaaacctcc

SEQ ID NO: 4609871 - DNA, 25 bp, Homo sapien
ggcattttcaaggtgattccattct

SEQ ID NO: 4609872 - DNA, 25 bp, Homo sapien
gagtgacagataccaccaggaaagg

SEQ ID NO: 4609873 - DNA, 25 bp, Homo sapien
acctcctgaagaacttgaataccag

SEQ ID NO: 4609874 - DNA, 25 bp, Homo sapien
cctatagaagggagaccaaggccga

SEQ ID NO: 4609875 - DNA, 25 bp, Homo sapien
gctcccttgtggtagggaagatgac

SEQ ID NO: 4609876 - DNA, 25 bp, Homo sapien
tcatgttatatcacctcaagaagca

SEQ ID NO: 4609877 - DNA, 25 bp, Homo sapien
gactgattagttcctcaggactgca

SEQ ID NO: 4609878 - DNA, 25 bp, Homo sapien
gatacaaatgagcttactgacttgg

SEQ ID NO: 4609879 - DNA, 25 bp, Homo sapien
tatgggcatctgctaacatagctac

SEQ ID NO: 4609880 - DNA, 25 bp, Homo sapien
gctacaatgctagtatcacatccaa

SEQ ID NO: 4609881 - DNA, 25 bp, Homo sapien
tctgcagggtagtgattatcacatt

SEQ ID NO: 4609882 - DNA, 25 bp, Homo sapien
caaaacttgtgggattgtgtcccag

SEQ ID NO: 4609883 - DNA, 25 bp, Homo sapien
ggccatcacctgagcttttggaaga

SEQ ID NO: 4609884 - DNA, 25 bp, Homo sapien
tgtgtggcaactagaagagtcagac

SEQ ID NO: 4609885 - DNA, 25 bp, Homo sapien
cagggtaaaaagagcagcgggccat

SEQ ID NO: 4609886 - DNA, 25 bp, Homo sapien
ctgtccctctgcatcatgatgagct

SEQ ID NO: 4609887 - DNA, 25 bp, Homo sapien
tgccaggtttaacataatgctctct

SEQ ID NO: 4609888 - DNA, 25 bp, Homo sapien
aacataatgctctctgcaccacgag

SEQ ID NO: 4609889 - DNA, 25 bp, Homo sapien
gctgtcctgccaggtttaacataat

SEQ ID NO: 4609890 - DNA, 25 bp, Homo sapien
tcttcaaacagaacagctagcgggt

SEQ ID NO: 4609891 - DNA, 25 bp, Homo sapien
cattttcaacagactgggctagtac

SEQ ID NO: 4609892 - DNA, 25 bp, Homo sapien
taataaggtaagaggcagctgtgtc

SEQ ID NO: 4609893 - DNA, 25 bp, Homo sapien
ggcatattcggtcttcctggcacaa

SEQ ID NO: 4609894 - DNA, 25 bp, Homo sapien
gaagggtagcatgttgcctacttac

SEQ ID NO: 4609895 - DNA, 25 bp, Homo sapien
taagaaatcgaatcatgtgtcgaca

SEQ ID NO: 4609896 - DNA, 25 bp, Homo sapien
ccacttgccttgttctagtgctgtg

SEQ ID NO: 4609897 - DNA, 25 bp, Homo sapien
tgtgtcgacaaaggtcccacttgcc

SEQ ID NO: 4609898 - DNA, 25 bp, Homo sapien
taaactgaatttactggcaggaaca

SEQ ID NO: 4609899 - DNA, 25 bp, Homo sapien
gatgcttcgattcctgaagaactca

SEQ ID NO: 4609900 - DNA, 25 bp, Homo sapien
gactgggataaactgatgcttcgat

SEQ ID NO: 4609901 - DNA, 25 bp, Homo sapien
gagggaccagatggcatacttagtg

SEQ ID NO: 4609902 - DNA, 25 bp, Homo sapien
tgcctggattcggatcttggctctg

SEQ ID NO: 4609903 - DNA, 25 bp, Homo sapien
cctgacttacatgagctaatgtggg

SEQ ID NO: 4609904 - DNA, 25 bp, Homo sapien
caacttgcctaagtatagtctctca

SEQ ID NO: 4609905 - DNA, 25 bp, Homo sapien
ggtaaagagcctagtctctggtgca

SEQ ID NO: 4609906 - DNA, 25 bp, Homo sapien
gacatatgaaaagaataccaacttt

SEQ ID NO: 4609907 - DNA, 25 bp, Homo sapien
cagtgtgagtcatgcagacatatga

SEQ ID NO: 4609908 - DNA, 25 bp, Homo sapien
tgaaaagcccaatgaaaagagggaa

SEQ ID NO: 4609909 - DNA, 25 bp, Homo sapien
ggaaggagagcacatcaaagaaact

SEQ ID NO: 4609910 - DNA, 25 bp, Homo sapien
gcaaagcagccaaggtcctttaacc

SEQ ID NO: 4609911 - DNA, 25 bp, Homo sapien
tccagagcatcatgtcaatatacat

SEQ ID NO: 4609912 - DNA, 25 bp, Homo sapien
tctcagcacagtcactgtctttgct

SEQ ID NO: 4609913 - DNA, 25 bp, Homo sapien
ctaagaggcgccgagcatgtctcca

SEQ ID NO: 4609914 - DNA, 25 bp, Homo sapien
cagggctattacaaagttgtctacc

SEQ ID NO: 4609915 - DNA, 25 bp, Homo sapien
caaagttgtctacccgggcggctcg

SEQ ID NO: 4609916 - DNA, 25 bp, Homo sapien
ggcggctcgggtacgttccttgcat

SEQ ID NO: 4609917 - DNA, 25 bp, Homo sapien
tcgggtacgttccttgcatagccaa

SEQ ID NO: 4609918 - DNA, 25 bp, Homo sapien
aatagcaaaatgtgtaaatacacgg

SEQ ID NO: 4609919 - DNA, 25 bp, Homo sapien
tacacggagtaaaatacaattctcc

SEQ ID NO: 4609920 - DNA, 25 bp, Homo sapien
tacaagtgacatgaagtctacatta

SEQ ID NO: 4609921 - DNA, 25 bp, Homo sapien
tacaattctccttgtacaagtgaca

SEQ ID NO: 4609922 - DNA, 25 bp, Homo sapien
agagacataggttctactttattta

SEQ ID NO: 4609923 - DNA, 25 bp, Homo sapien
tcaaacagtgggcattccaactcat

SEQ ID NO: 4609924 - DNA, 25 bp, Homo sapien
tggcttttatccattcctaagtttg

SEQ ID NO: 4609925 - DNA, 25 bp, Homo sapien
tccaactcatgtacaaaaagttggc

SEQ ID NO: 4609926 - DNA, 25 bp, Homo sapien
gggccaatgttgctgagccagctct

SEQ ID NO: 4609927 - DNA, 25 bp, Homo sapien
gaagctgtgtctatctcatgatggg

SEQ ID NO: 4609928 - DNA, 25 bp, Homo sapien
tttgtggtccatgggatgaagctgt

SEQ ID NO: 4609929 - DNA, 25 bp, Homo sapien
tctgacttcgctggatgttggagat

SEQ ID NO: 4609930 - DNA, 25 bp, Homo sapien
tctgtggctgaaccaatactgcatt

SEQ ID NO: 4609931 - DNA, 25 bp, Homo sapien
gtctgtggctgaaccaatactgcat

SEQ ID NO: 4609932 - DNA, 25 bp, Homo sapien
ccatggagctactttcagtcaagtc

SEQ ID NO: 4609933 - DNA, 25 bp, Homo sapien
atggagctactttcagtcaagtctg

SEQ ID NO: 4609934 - DNA, 25 bp, Homo sapien
tggacctgggatttatgaggccctt

SEQ ID NO: 4609935 - DNA, 25 bp, Homo sapien
tatgaggccctttactggccaactc

SEQ ID NO: 4609936 - DNA, 25 bp, Homo sapien
atttatgaggccctttactggccaa

SEQ ID NO: 4609937 - DNA, 25 bp, Homo sapien
cctgggatttatgaggccctttact

SEQ ID NO: 4609938 - DNA, 25 bp, Homo sapien
taacgatgcaccagtctaggcaccc

SEQ ID NO: 4609939 - DNA, 25 bp, Homo sapien
taagaatcaggcctataacgatgca

SEQ ID NO: 4609940 - DNA, 25 bp, Homo sapien
tcggtccactgcatggagccctgtc

SEQ ID NO: 4609941 - DNA, 25 bp, Homo sapien
tctccatctacctctgaagactgtg

SEQ ID NO: 4609942 - DNA, 25 bp, Homo sapien
gaacagtcgtaagtcccatcctgaa

SEQ ID NO: 4609943 - DNA, 25 bp, Homo sapien
ttattggttggaaggcatctggctg

SEQ ID NO: 4609944 - DNA, 25 bp, Homo sapien
tctgttctggagtcttacccatagt

SEQ ID NO: 4609945 - DNA, 25 bp, Homo sapien
tctttccggctgaccatattgctgc

SEQ ID NO: 4609946 - DNA, 25 bp, Homo sapien
tacctgacagactatagcaagcacc

SEQ ID NO: 4609947 - DNA, 25 bp, Homo sapien
tgttacaacgtactgagctgcacgc

SEQ ID NO: 4609948 - DNA, 25 bp, Homo sapien
gccccagggtagcaatctattcagg

SEQ ID NO: 4609949 - DNA, 25 bp, Homo sapien
cataatgcagaaccgggaaatgtga

SEQ ID NO: 4609950 - DNA, 25 bp, Homo sapien
tagaattacatacagtggatgggtg

SEQ ID NO: 4609951 - DNA, 25 bp, Homo sapien
ttagatagtggtacgaatttggtcc

SEQ ID NO: 4609952 - DNA, 25 bp, Homo sapien
cacccattcgggagtttcattttgt

SEQ ID NO: 4609953 - DNA, 25 bp, Homo sapien
tagtagccgtggtaatacaggattc

SEQ ID NO: 4609954 - DNA, 25 bp, Homo sapien
cagttgatatgtgaaccaaacacca

SEQ ID NO: 4609955 - DNA, 25 bp, Homo sapien
gaaatgattcattcacggcctaacc

SEQ ID NO: 4609956 - DNA, 25 bp, Homo sapien
tactggtgccctgctttcaagaatg

SEQ ID NO: 4609957 - DNA, 25 bp, Homo sapien
ggcctaacccacaggaatacagtta

SEQ ID NO: 4609958 - DNA, 25 bp, Homo sapien
ttattcccacacccccaatgacttg

SEQ ID NO: 4609959 - DNA, 25 bp, Homo sapien
gcaaaggttgattttattcccacac

SEQ ID NO: 4609960 - DNA, 25 bp, Homo sapien
tgattttattcccacacccccaatg

SEQ ID NO: 4609961 - DNA, 25 bp, Homo sapien
agcaaaggttgattttattcccaca

SEQ ID NO: 4609962 - DNA, 25 bp, Homo sapien
aaatacacattacagaaatagcagc

SEQ ID NO: 4609963 - DNA, 25 bp, Homo sapien
catctaggatgttgcgaactcttga

SEQ ID NO: 4609964 - DNA, 25 bp, Homo sapien
tgattttcgtggctgttaacctgag

SEQ ID NO: 4609965 - DNA, 25 bp, Homo sapien
gtattttactgtcaggcatctagga

SEQ ID NO: 4609966 - DNA, 25 bp, Homo sapien
catgtcatcgacatgggctgtttcc

SEQ ID NO: 4609967 - DNA, 25 bp, Homo sapien
gacaattgaatagccacgttagaag

SEQ ID NO: 4609968 - DNA, 25 bp, Homo sapien
cgttagaagaacgaagtcagatctc

SEQ ID NO: 4609969 - DNA, 25 bp, Homo sapien
taaccctggattaggcacaagcaac

SEQ ID NO: 4609970 - DNA, 25 bp, Homo sapien
cgcttatgaaaatcccaactgcctt

SEQ ID NO: 4609971 - DNA, 25 bp, Homo sapien
tgtttcactggtctatatatcttgt

SEQ ID NO: 4609972 - DNA, 25 bp, Homo sapien
cagtgtcagctttctgcacatggct

SEQ ID NO: 4609973 - DNA, 25 bp, Homo sapien
tccagtgtcagctttctgcacatgg

SEQ ID NO: 4609974 - DNA, 25 bp, Homo sapien
tctgtttcactggtctatatatctt

SEQ ID NO: 4609975 - DNA, 25 bp, Homo sapien
tttagccaagatgcagttacgactc

SEQ ID NO: 4609976 - DNA, 25 bp, Homo sapien
ctcagaacagttcaatgcaaggtga

SEQ ID NO: 4609977 - DNA, 25 bp, Homo sapien
gggcaccaccactcaccaaaataga

SEQ ID NO: 4609978 - DNA, 25 bp, Homo sapien
caagatgcagttatggctatttaca

SEQ ID NO: 4609979 - DNA, 25 bp, Homo sapien
cagtactgcatattcagggaaaaag

SEQ ID NO: 4609980 - DNA, 25 bp, Homo sapien
gattccttaagatgttaccacccag

SEQ ID NO: 4609981 - DNA, 25 bp, Homo sapien
gacctaagaatgattgtcgcatgaa

SEQ ID NO: 4609982 - DNA, 25 bp, Homo sapien
cactggtttgctgacttactgagga

SEQ ID NO: 4609983 - DNA, 25 bp, Homo sapien
tatgcattgccggagaaaacgtcct

SEQ ID NO: 4609984 - DNA, 25 bp, Homo sapien
aaaagggtggctagatttatcttgg

SEQ ID NO: 4609985 - DNA, 25 bp, Homo sapien
tgtgaaacgttggacaaattttgag

SEQ ID NO: 4609986 - DNA, 25 bp, Homo sapien
atgctcttgaaaggtggtctgtgga

SEQ ID NO: 4609987 - DNA, 25 bp, Homo sapien
taaggtgttacatgatcaactctga

SEQ ID NO: 4609988 - DNA, 25 bp, Homo sapien
cataatggcagtcctattcagtact

SEQ ID NO: 4609989 - DNA, 25 bp, Homo sapien
gttacagcacttcgcagttttgcca

SEQ ID NO: 4609990 - DNA, 25 bp, Homo sapien
tgataggaccaacttaacacaggct

SEQ ID NO: 4609991 - DNA, 25 bp, Homo sapien
ttctgtcagtgtaagaaagtccaga

SEQ ID NO: 4609992 - DNA, 25 bp, Homo sapien
tatacttttaagtccctgccctgta

SEQ ID NO: 4609993 - DNA, 25 bp, Homo sapien
aataactgtatggatctgtttatcc

SEQ ID NO: 4609994 - DNA, 25 bp, Homo sapien
tctttgactggacactatagtagta

SEQ ID NO: 4609995 - DNA, 25 bp, Homo sapien
tcttttctgagtctagtcggtcctt

SEQ ID NO: 4609996 - DNA, 25 bp, Homo sapien
taatattctaaggtgcctggtagtc

SEQ ID NO: 4609997 - DNA, 25 bp, Homo sapien
tcctttgaatctattctgttgggca

SEQ ID NO: 4609998 - DNA, 25 bp, Homo sapien
gttgggcatcttgtaattgtcttca

SEQ ID NO: 4609999 - DNA, 25 bp, Homo sapien
actgcttatgttccatgccacaaat

SEQ ID NO: 4610000 - DNA, 25 bp, Homo sapien
cttttttgacccatttgttatgtag

SEQ ID NO: 4610001 - DNA, 25 bp, Homo sapien
tctctattgagttctgttctagtta

SEQ ID NO: 4610002 - DNA, 25 bp, Homo sapien
cattgctataagtttccttctaagc

SEQ ID NO: 4610003 - DNA, 25 bp, Homo sapien
taagattctatgaatagacaatctt

SEQ ID NO: 4610004 - DNA, 25 bp, Homo sapien
ctctagaaacctgagtggttagaaa

SEQ ID NO: 4610005 - DNA, 25 bp, Homo sapien
catctatctcaaaaattgtggccgg

SEQ ID NO: 4610006 - DNA, 25 bp, Homo sapien
cactcagaagagtagttttgttttt

SEQ ID NO: 4610007 - DNA, 25 bp, Homo sapien
gtggcccttctaactaatataatag

SEQ ID NO: 4610008 - DNA, 25 bp, Homo sapien
gcgctctacctgatcgcgctgcgga

SEQ ID NO: 4610009 - DNA, 25 bp, Homo sapien
ccgagcgcaggagcctctggtggat

SEQ ID NO: 4610010 - DNA, 25 bp, Homo sapien
ctgccggaccgctgggactcgctga

SEQ ID NO: 4610011 - DNA, 25 bp, Homo sapien
agttcgacgcgctccaagccaggta

SEQ ID NO: 4610012 - DNA, 25 bp, Homo sapien
agcagagagggtgccagaggttggg

SEQ ID NO: 4610013 - DNA, 25 bp, Homo sapien
gtcgtcttggctgcgcctttggcca

SEQ ID NO: 4610014 - DNA, 25 bp, Homo sapien
ccggccgctcctcttggcccagaag

SEQ ID NO: 4610015 - DNA, 25 bp, Homo sapien
cacatggtcatcctccggccgctcc

SEQ ID NO: 4610016 - DNA, 25 bp, Homo sapien
ccttccctgagtaggagagtaacca

SEQ ID NO: 4610017 - DNA, 25 bp, Homo sapien
ctgagtaggagagtaaccagagtac

SEQ ID NO: 4610018 - DNA, 25 bp, Homo sapien
ttccctgagtaggagagtaaccaga

SEQ ID NO: 4610019 - DNA, 25 bp, Homo sapien
tctccttccctgagtaggagagtaa

SEQ ID NO: 4610020 - DNA, 25 bp, Homo sapien
tgtccctctctttggaacttctcag

SEQ ID NO: 4610021 - DNA, 25 bp, Homo sapien
ctgtccctctctttggaacttctca

SEQ ID NO: 4610022 - DNA, 25 bp, Homo sapien
ggaacttctcagcactgggactagt

SEQ ID NO: 4610023 - DNA, 25 bp, Homo sapien
tctcagcactgggactagtaatata

SEQ ID NO: 4610024 - DNA, 25 bp, Homo sapien
gaggcccggttttctgccacgatat

SEQ ID NO: 4610025 - DNA, 25 bp, Homo sapien
tctgaatccctggaatgctgggcca

SEQ ID NO: 4610026 - DNA, 25 bp, Homo sapien
cgatattccctccagagtacgtgct

SEQ ID NO: 4610027 - DNA, 25 bp, Homo sapien
agtacgtgctctcgggttgtctgaa

SEQ ID NO: 4610028 - DNA, 25 bp, Homo sapien
tcttcctatggaaaaatcagatttc

SEQ ID NO: 4610029 - DNA, 25 bp, Homo sapien
tctgctgtttgcgcttagcctttac

SEQ ID NO: 4610030 - DNA, 25 bp, Homo sapien
ttctctgctgtttgcgcttagcctt

SEQ ID NO: 4610031 - DNA, 25 bp, Homo sapien
ttcctatggaaaaatcagatttcct

SEQ ID NO: 4610032 - DNA, 25 bp, Homo sapien
accatgtcctgagaatgattttgca

SEQ ID NO: 4610033 - DNA, 25 bp, Homo sapien
tttgcatctgttccattaacttcac

SEQ ID NO: 4610034 - DNA, 25 bp, Homo sapien
cttttaccaccatgtcctgagaatg

SEQ ID NO: 4610035 - DNA, 25 bp, Homo sapien
atctgttccattaacttcactcctt

SEQ ID NO: 4610036 - DNA, 25 bp, Homo sapien
tccccaaggtccatacttgaatctc

SEQ ID NO: 4610037 - DNA, 25 bp, Homo sapien
aatctctttgtcctagaggactcac

SEQ ID NO: 4610038 - DNA, 25 bp, Homo sapien
ttgtccccaaggtccatacttgaat

SEQ ID NO: 4610039 - DNA, 25 bp, Homo sapien
acttgaatctctttgtcctagagga

SEQ ID NO: 4610040 - DNA, 25 bp, Homo sapien
ctgccacagactcgctgctcccttg

SEQ ID NO: 4610041 - DNA, 25 bp, Homo sapien
ttgctgccacagactcgctgctccc

SEQ ID NO: 4610042 - DNA, 25 bp, Homo sapien
tgcttgctgccacagactcgctgct

SEQ ID NO: 4610043 - DNA, 25 bp, Homo sapien
gagcagccactgcttgctgccacag

SEQ ID NO: 4610044 - DNA, 25 bp, Homo sapien
ccatgagaaagatcccacacccagg

SEQ ID NO: 4610045 - DNA, 25 bp, Homo sapien
gccatgagaaagatcccacacccag

SEQ ID NO: 4610046 - DNA, 25 bp, Homo sapien
agccatgagaaagatcccacaccca

SEQ ID NO: 4610047 - DNA, 25 bp, Homo sapien
agtgaatcccaactggggagcccac

SEQ ID NO: 4610048 - DNA, 25 bp, Homo sapien
acagaagtacaagctgatagagaaa

SEQ ID NO: 4610049 - DNA, 25 bp, Homo sapien
ctggacagaagtacaagctgataga

SEQ ID NO: 4610050 - DNA, 25 bp, Homo sapien
ggacagaagtacaagctgatagaga

SEQ ID NO: 4610051 - DNA, 25 bp, Homo sapien
tgggttgatcatgggtcaaccagcc

SEQ ID NO: 4610052 - DNA, 25 bp, Homo sapien
tcaagggcccaagcatatcttaaag

SEQ ID NO: 4610053 - DNA, 25 bp, Homo sapien
aaagagccagcggtggccaccagac

SEQ ID NO: 4610054 - DNA, 25 bp, Homo sapien
tcaggttcctttggggccgctggca

SEQ ID NO: 4610055 - DNA, 25 bp, Homo sapien
ctgccaccagaatgaaattagcttt

SEQ ID NO: 4610056 - DNA, 25 bp, Homo sapien
gccaccagaatgaaattagctttgt

SEQ ID NO: 4610057 - DNA, 25 bp, Homo sapien
tgaaattagctttgttcatgttcat

SEQ ID NO: 4610058 - DNA, 25 bp, Homo sapien
caccagaatgaaattagctttgttc

SEQ ID NO: 4610059 - DNA, 25 bp, Homo sapien
tacaaacgagggttgatagccggct

SEQ ID NO: 4610060 - DNA, 25 bp, Homo sapien
gaaaatcccagaaagtcctgttgcc

SEQ ID NO: 4610061 - DNA, 25 bp, Homo sapien
gctagccatgcgtccactgtgttcc

SEQ ID NO: 4610062 - DNA, 25 bp, Homo sapien
cttttgggaaggctacaagcccctg

SEQ ID NO: 4610063 - DNA, 25 bp, Homo sapien
tgcctctttggcatctgcttacagt

SEQ ID NO: 4610064 - DNA, 25 bp, Homo sapien
gtgctcaggagccagaatcctcttg

SEQ ID NO: 4610065 - DNA, 25 bp, Homo sapien
aatcctcttgactcatcctgcttgg

SEQ ID NO: 4610066 - DNA, 25 bp, Homo sapien
tcagtgctccccacaatattgtgag

SEQ ID NO: 4610067 - DNA, 25 bp, Homo sapien
ctgctagaccttgctggccactgac

SEQ ID NO: 4610068 - DNA, 25 bp, Homo sapien
cctgtgtaagggcagtaccaaccca

SEQ ID NO: 4610069 - DNA, 25 bp, Homo sapien
ttccatcgtgagctatggacaaagg

SEQ ID NO: 4610070 - DNA, 25 bp, Homo sapien
ctgtgtaagggcagtaccaacccac

SEQ ID NO: 4610071 - DNA, 25 bp, Homo sapien
aaggtgcccatgtcattgtaacaag

SEQ ID NO: 4610072 - DNA, 25 bp, Homo sapien
ggtgcccatgtcattgtaacaaggt

SEQ ID NO: 4610073 - DNA, 25 bp, Homo sapien
aggtaaggtgcccatgtcattgtaa

SEQ ID NO: 4610074 - DNA, 25 bp, Homo sapien
cagataggtaaggtgcccatgtcat

SEQ ID NO: 4610075 - DNA, 25 bp, Homo sapien
ttcctggttttgagtcccatgatag

SEQ ID NO: 4610076 - DNA, 25 bp, Homo sapien
gtcccatgatagtcacgggtttaga

SEQ ID NO: 4610077 - DNA, 25 bp, Homo sapien
tctggctcttaatcgttttgactta

SEQ ID NO: 4610078 - DNA, 25 bp, Homo sapien
cttctctggctcttaatcgttttga

SEQ ID NO: 4610079 - DNA, 25 bp, Homo sapien
tatgattatggcgagaaggcaacgc

SEQ ID NO: 4610080 - DNA, 25 bp, Homo sapien
gaggacttagccagaatttcccaaa

SEQ ID NO: 4610081 - DNA, 25 bp, Homo sapien
gaagaggactatgattatggcgaga

SEQ ID NO: 4610082 - DNA, 25 bp, Homo sapien
gcaatgagggtaggcagaggactta

SEQ ID NO: 4610083 - DNA, 25 bp, Homo sapien
tcttcttggtagtgttggaggactg

SEQ ID NO: 4610084 - DNA, 25 bp, Homo sapien
gactgacaaacgttgcggagaaatt

SEQ ID NO: 4610085 - DNA, 25 bp, Homo sapien
gatgccatcctgaataattgctttt

SEQ ID NO: 4610086 - DNA, 25 bp, Homo sapien
gctttgtgagccctctgaggttgga

SEQ ID NO: 4610087 - DNA, 25 bp, Homo sapien
gcaaatggtgcagcaacagcaaatg

SEQ ID NO: 4610088 - DNA, 25 bp, Homo sapien
ttaagtgacaggagaacacatctac

SEQ ID NO: 4610089 - DNA, 25 bp, Homo sapien
ttactactcagaccaggagaagtgg

SEQ ID NO: 4610090 - DNA, 25 bp, Homo sapien
gagaagtggttctttaagtgacagg

SEQ ID NO: 4610091 - DNA, 25 bp, Homo sapien
cttgtagggtcagggcacaggacac

SEQ ID NO: 4610092 - DNA, 25 bp, Homo sapien
agatgaagtgagcatcttctcttgg

SEQ ID NO: 4610093 - DNA, 25 bp, Homo sapien
cttcagccgtggtgtaagagtggcc

SEQ ID NO: 4610094 - DNA, 25 bp, Homo sapien
tcttcagccgtggtgtaagagtggc

SEQ ID NO: 4610095 - DNA, 25 bp, Homo sapien
ccccttcttggggtaaccatagatg

SEQ ID NO: 4610096 - DNA, 25 bp, Homo sapien
tggctccttggcaactcacttttat

SEQ ID NO: 4610097 - DNA, 25 bp, Homo sapien
ggagagaggcattgtgatcctgaac

SEQ ID NO: 4610098 - DNA, 25 bp, Homo sapien
gagacagaacaaggattgaggagag

SEQ ID NO: 4610099 - DNA, 25 bp, Homo sapien
ccaccttcaggaatttgagtggagg

SEQ ID NO: 4610100 - DNA, 25 bp, Homo sapien
agaaagagcaggttcacagggagtt

SEQ ID NO: 4610101 - DNA, 25 bp, Homo sapien
ccaaagaaagagcaggttcacaggg

SEQ ID NO: 4610102 - DNA, 25 bp, Homo sapien
tccaaagaaagagcaggttcacagg

SEQ ID NO: 4610103 - DNA, 25 bp, Homo sapien
ctttccaaagaaagagcaggttcac

SEQ ID NO: 4610104 - DNA, 25 bp, Homo sapien
tgcctttgttgggctttacatcttg

SEQ ID NO: 4610105 - DNA, 25 bp, Homo sapien
ggaaatgctgtctgcctgaactctt

SEQ ID NO: 4610106 - DNA, 25 bp, Homo sapien
gggctttacatcttgctggtccctg

SEQ ID NO: 4610107 - DNA, 25 bp, Homo sapien
cagtgcctttgttgggctttacatc

SEQ ID NO: 4610108 - DNA, 25 bp, Homo sapien
tctgccctagcctctcgtcggatgg

SEQ ID NO: 4610109 - DNA, 25 bp, Homo sapien
gattgtgcaaatatttgcctctgct

SEQ ID NO: 4610110 - DNA, 25 bp, Homo sapien
ctcgtcggatgggattgtgcaaata

SEQ ID NO: 4610111 - DNA, 25 bp, Homo sapien
cctagcctctcgtcggatgggattg

SEQ ID NO: 4610112 - DNA, 25 bp, Homo sapien
ccaagagatagacaaatccactttg

SEQ ID NO: 4610113 - DNA, 25 bp, Homo sapien
ctggcccaagagatagacaaatcca

SEQ ID NO: 4610114 - DNA, 25 bp, Homo sapien
gacaaatccactttgtcattgaaac

SEQ ID NO: 4610115 - DNA, 25 bp, Homo sapien
ccactttgtcattgaaacattgttc

SEQ ID NO: 4610116 - DNA, 25 bp, Homo sapien
caaggctctgtatccatttcgtctt

SEQ ID NO: 4610117 - DNA, 25 bp, Homo sapien
tgagcagtaagactcccaggatcac

SEQ ID NO: 4610118 - DNA, 25 bp, Homo sapien
tcgtcttctacaataccaacagccg

SEQ ID NO: 4610119 - DNA, 25 bp, Homo sapien
tcactgtcaggatgccgatcccagc

SEQ ID NO: 4610120 - DNA, 25 bp, Homo sapien
gactcatgttcaccactgcgctcca

SEQ ID NO: 4610121 - DNA, 25 bp, Homo sapien
tgactcatgttcaccactgcgctcc

SEQ ID NO: 4610122 - DNA, 25 bp, Homo sapien
ctacagtgactcatgttcaccactg

SEQ ID NO: 4610123 - DNA, 25 bp, Homo sapien
ggctacagtgactcatgttcaccac

SEQ ID NO: 4610124 - DNA, 25 bp, Homo sapien
catgagacatgagactgcccaagtt

SEQ ID NO: 4610125 - DNA, 25 bp, Homo sapien
ccccagacttgacttgcctttgatg

SEQ ID NO: 4610126 - DNA, 25 bp, Homo sapien
tatgctcggtgggtgtgtcagcccc

SEQ ID NO: 4610127 - DNA, 25 bp, Homo sapien
tagatgtcagcacactagagggcta

SEQ ID NO: 4610128 - DNA, 25 bp, Homo sapien
gtgaccactgaccatgcattgaaaa

SEQ ID NO: 4610129 - DNA, 25 bp, Homo sapien
gtaaactgagctgagagcaagggcc

SEQ ID NO: 4610130 - DNA, 25 bp, Homo sapien
gaaccccaaagtattccagtgcagg

SEQ ID NO: 4610131 - DNA, 25 bp, Homo sapien
tatgatccactctaccggttcactg

SEQ ID NO: 4610132 - DNA, 25 bp, Homo sapien
gacactttgctgtcccgatgatcaa

SEQ ID NO: 4610133 - DNA, 25 bp, Homo sapien
ggcatcttcttgttaaggcacattg

SEQ ID NO: 4610134 - DNA, 25 bp, Homo sapien
cacaggttcacagtttttctcttga

SEQ ID NO: 4610135 - DNA, 25 bp, Homo sapien
cccgatgatcaaacccttcttgtgg

SEQ ID NO: 4610136 - DNA, 25 bp, Homo sapien
aaaaacagccattcatgaaaatacc

SEQ ID NO: 4610137 - DNA, 25 bp, Homo sapien
taaaaacagccattcatgaaaatac

SEQ ID NO: 4610138 - DNA, 25 bp, Homo sapien
gaaaatacccttatgaaggatctta

SEQ ID NO: 4610139 - DNA, 25 bp, Homo sapien
tcatgaaaatacccttatgaaggat

SEQ ID NO: 4610140 - DNA, 25 bp, Homo sapien
gtggtgactgttctgcagagagttt

SEQ ID NO: 4610141 - DNA, 25 bp, Homo sapien
tggtggtgactgttctgcagagagt

SEQ ID NO: 4610142 - DNA, 25 bp, Homo sapien
ttaaggtgaataaggtggtggtgac

SEQ ID NO: 4610143 - DNA, 25 bp, Homo sapien
aataaggtggtggtgactgttctgc

SEQ ID NO: 4610144 - DNA, 25 bp, Homo sapien
ttttcctacaccattccaaaggaga

SEQ ID NO: 4610145 - DNA, 25 bp, Homo sapien
tagagatggcttgcatttttcctac

SEQ ID NO: 4610146 - DNA, 25 bp, Homo sapien
ataatttcagcatgtctcaggtgtc

SEQ ID NO: 4610147 - DNA, 25 bp, Homo sapien
cacatgattagtactgctagcggac

SEQ ID NO: 4610148 - DNA, 25 bp, Homo sapien
tcttgatcagataaataggccagtc

SEQ ID NO: 4610149 - DNA, 25 bp, Homo sapien
tacagttcatgtcggtcaaggttcg

SEQ ID NO: 4610150 - DNA, 25 bp, Homo sapien
tacaggattgaggttcagcagagac

SEQ ID NO: 4610151 - DNA, 25 bp, Homo sapien
tgtagggttcaagccacaggttcct

SEQ ID NO: 4610152 - DNA, 25 bp, Homo sapien
catagcacaggcatccaaagccaaa

SEQ ID NO: 4610153 - DNA, 25 bp, Homo sapien
gaaagcgttggagaaactctccagg

SEQ ID NO: 4610154 - DNA, 25 bp, Homo sapien
gcaattggtttccaatccaaggagt

SEQ ID NO: 4610155 - DNA, 25 bp, Homo sapien
tggaaaaactagatacctgtatgca

SEQ ID NO: 4610156 - DNA, 25 bp, Homo sapien
gatagcccacaaaagacctacaggc

SEQ ID NO: 4610157 - DNA, 25 bp, Homo sapien
tagccaaagaggatagcccacaaaa

SEQ ID NO: 4610158 - DNA, 25 bp, Homo sapien
tctaagaattaagaagtgaaagatc

SEQ ID NO: 4610159 - DNA, 25 bp, Homo sapien
ccagaatagccaaagaggatagccc

SEQ ID NO: 4610160 - DNA, 25 bp, Homo sapien
aggctgttacagaacactgaagggt

SEQ ID NO: 4610161 - DNA, 25 bp, Homo sapien
taagtcagtccaggctgttacagaa

SEQ ID NO: 4610162 - DNA, 25 bp, Homo sapien
ccaggctgttacagaacactgaagg

SEQ ID NO: 4610163 - DNA, 25 bp, Homo sapien
gtcagtccaggctgttacagaacac

SEQ ID NO: 4610164 - DNA, 25 bp, Homo sapien
gcgccggttacttgagattgacaga

SEQ ID NO: 4610165 - DNA, 25 bp, Homo sapien
gacttcagaggactggtctccacca

SEQ ID NO: 4610166 - DNA, 25 bp, Homo sapien
tattctcaagtgacaagtgaacctg

SEQ ID NO: 4610167 - DNA, 25 bp, Homo sapien
agatgcttactcaggtgggagacca

SEQ ID NO: 4610168 - DNA, 25 bp, Homo sapien
aatatcatgaacaaagtgttacctc

SEQ ID NO: 4610169 - DNA, 25 bp, Homo sapien
acagttcatagcatatataaatggc

SEQ ID NO: 4610170 - DNA, 25 bp, Homo sapien
gggagtctcatggaatgatctaaaa

SEQ ID NO: 4610171 - DNA, 25 bp, Homo sapien
gtctctccatgatcgtacaaaattc

SEQ ID NO: 4610172 - DNA, 25 bp, Homo sapien
tgaataccatttttaacgtgtgttc

SEQ ID NO: 4610173 - DNA, 25 bp, Homo sapien
gaatacaggatgtaattgaagacag

SEQ ID NO: 4610174 - DNA, 25 bp, Homo sapien
gaccagtgaactgttagcaacaatg

SEQ ID NO: 4610175 - DNA, 25 bp, Homo sapien
gaagaatctgcatgtaataaactga

SEQ ID NO: 4610176 - DNA, 25 bp, Homo sapien
gttggatacctagggtcaactgtac

SEQ ID NO: 4610177 - DNA, 25 bp, Homo sapien
ttatattagacccaagataaggcag

SEQ ID NO: 4610178 - DNA, 25 bp, Homo sapien
cattgtataccatgcaactctgaga

SEQ ID NO: 4610179 - DNA, 25 bp, Homo sapien
tcccttgtccgtgtatatgaataaa

SEQ ID NO: 4610180 - DNA, 25 bp, Homo sapien
tatagagaaagagtcttaagaacct

SEQ ID NO: 4610181 - DNA, 25 bp, Homo sapien
tataggtacttacacaagataatct

SEQ ID NO: 4610182 - DNA, 25 bp, Homo sapien
acagcattgtatagtggaaggagat

SEQ ID NO: 4610183 - DNA, 25 bp, Homo sapien
aattctagtctaatggctgcttctg

SEQ ID NO: 4610184 - DNA, 25 bp, Homo sapien
ccaaatacatgtaaatggaagtcac

SEQ ID NO: 4610185 - DNA, 25 bp, Homo sapien
taagggatattctattagagcagtc

SEQ ID NO: 4610186 - DNA, 25 bp, Homo sapien
tacagagaaagcgtgaaggtcttca

SEQ ID NO: 4610187 - DNA, 25 bp, Homo sapien
gagcagtcactacagagccacaaga

SEQ ID NO: 4610188 - DNA, 25 bp, Homo sapien
tatggtaccctctgaataataatag

SEQ ID NO: 4610189 - DNA, 25 bp, Homo sapien
tggagaccatgtgggaaattccagc

SEQ ID NO: 4610190 - DNA, 25 bp, Homo sapien
ttctttaggcttcgggagcaggaaa

SEQ ID NO: 4610191 - DNA, 25 bp, Homo sapien
aaagaaaacttctagctcaagcagc

SEQ ID NO: 4610192 - DNA, 25 bp, Homo sapien
ttgatgctggagacgtgctaccgcc

SEQ ID NO: 4610193 - DNA, 25 bp, Homo sapien
tgacctacgagctacagcagggcta

SEQ ID NO: 4610194 - DNA, 25 bp, Homo sapien
tggatctccaaacagggccagaagc

SEQ ID NO: 4610195 - DNA, 25 bp, Homo sapien
tcaccgagttcgtggcggacttcag

SEQ ID NO: 4610196 - DNA, 25 bp, Homo sapien
ttgtactttgcatcccgttcccaca

SEQ ID NO: 4610197 - DNA, 25 bp, Homo sapien
actttgcatcccgttcccacaccag

SEQ ID NO: 4610198 - DNA, 25 bp, Homo sapien
gcatcccgttcccacaccagggaca

SEQ ID NO: 4610199 - DNA, 25 bp, Homo sapien
ttgcatcccgttcccacaccaggga

SEQ ID NO: 4610200 - DNA, 25 bp, Homo sapien
tcagtaaaagcgtgtccattttttc

SEQ ID NO: 4610201 - DNA, 25 bp, Homo sapien
tccttctcagtaaaagcgtgtccat

SEQ ID NO: 4610202 - DNA, 25 bp, Homo sapien
gccagttaggtgagaggagctattg

SEQ ID NO: 4610203 - DNA, 25 bp, Homo sapien
gtgagaggagctattggacggcggc

SEQ ID NO: 4610204 - DNA, 25 bp, Homo sapien
agaggagctattggacggcggcccc

SEQ ID NO: 4610205 - DNA, 25 bp, Homo sapien
taggtgagaggagctattggacggc

SEQ ID NO: 4610206 - DNA, 25 bp, Homo sapien
tcaaagcagggattgctctcactgg

SEQ ID NO: 4610207 - DNA, 25 bp, Homo sapien
gatgccaatcacaggtaaaccatgg

SEQ ID NO: 4610208 - DNA, 25 bp, Homo sapien
cacagaccagtcaggatggatgcca

SEQ ID NO: 4610209 - DNA, 25 bp, Homo sapien
tatacattagcagcatcttggtcct

SEQ ID NO: 4610210 - DNA, 25 bp, Homo sapien
gaaggctatgagcaccatttccatc

SEQ ID NO: 4610211 - DNA, 25 bp, Homo sapien
agtagatattggactgcacagcagc

SEQ ID NO: 4610212 - DNA, 25 bp, Homo sapien
ccagcctcaacagcgtgagtagata

SEQ ID NO: 4610213 - DNA, 25 bp, Homo sapien
gagccccagccgaaaactccatctg

SEQ ID NO: 4610214 - DNA, 25 bp, Homo sapien
ctgcaccccacaatccactgtaact

SEQ ID NO: 4610215 - DNA, 25 bp, Homo sapien
ctggggttttcagttgatctgcttt

SEQ ID NO: 4610216 - DNA, 25 bp, Homo sapien
ctgtaactggggttttcagttgatc

SEQ ID NO: 4610217 - DNA, 25 bp, Homo sapien
gcaccccacaatccactgtaactgg

SEQ ID NO: 4610218 - DNA, 25 bp, Homo sapien
cctcctgtgagaaaatcgattgtcc

SEQ ID NO: 4610219 - DNA, 25 bp, Homo sapien
ttagctagatcgtgttcctccatgc

SEQ ID NO: 4610220 - DNA, 25 bp, Homo sapien
tcttacacctcctgtgagaaaatcg

SEQ ID NO: 4610221 - DNA, 25 bp, Homo sapien
tcagaagaactttgcttcttacacc

SEQ ID NO: 4610222 - DNA, 25 bp, Homo sapien
accaatttccctctagccaacagtt

SEQ ID NO: 4610223 - DNA, 25 bp, Homo sapien
tctctaccaatttccctctagccaa

SEQ ID NO: 4610224 - DNA, 25 bp, Homo sapien
ctaccaatttccctctagccaacag

SEQ ID NO: 4610225 - DNA, 25 bp, Homo sapien
cttctctaccaatttccctctagcc

SEQ ID NO: 4610226 - DNA, 25 bp, Homo sapien
aggataagattccttcaggataagg

SEQ ID NO: 4610227 - DNA, 25 bp, Homo sapien
ggataagattccttcaggataagga

SEQ ID NO: 4610228 - DNA, 25 bp, Homo sapien
gataagattccttcaggataaggag

SEQ ID NO: 4610229 - DNA, 25 bp, Homo sapien
caatagactggtatggacccaagac

SEQ ID NO: 4610230 - DNA, 25 bp, Homo sapien
ctggtatggacccaagacaatgctc

SEQ ID NO: 4610231 - DNA, 25 bp, Homo sapien
gttttagaccaatagactggtatgg

SEQ ID NO: 4610232 - DNA, 25 bp, Homo sapien
tagaccaatagactggtatggaccc

SEQ ID NO: 4610233 - DNA, 25 bp, Homo sapien
taggtttggtcaaccatggctcgag

SEQ ID NO: 4610234 - DNA, 25 bp, Homo sapien
cgaggagcaaggtcatagtttggtt

SEQ ID NO: 4610235 - DNA, 25 bp, Homo sapien
ccatggctcgaggagcaaggtcata

SEQ ID NO: 4610236 - DNA, 25 bp, Homo sapien
aggtttggtcaaccatggctcgagg

SEQ ID NO: 4610237 - DNA, 25 bp, Homo sapien
gaatggtctcttcctcgtgtgcttg

SEQ ID NO: 4610238 - DNA, 25 bp, Homo sapien
tgttgtgactcaggtggtagaccct

SEQ ID NO: 4610239 - DNA, 25 bp, Homo sapien
cccatatgaatcaggatgttgtgac

SEQ ID NO: 4610240 - DNA, 25 bp, Homo sapien
gtgtgcttgcataggtgctcttcaa

SEQ ID NO: 4610241 - DNA, 25 bp, Homo sapien
tcatctattgttagggtggttactt

SEQ ID NO: 4610242 - DNA, 25 bp, Homo sapien
catctattgttagggtggttacttt

SEQ ID NO: 4610243 - DNA, 25 bp, Homo sapien
atctattgttagggtggttactttg

SEQ ID NO: 4610244 - DNA, 25 bp, Homo sapien
ggacagatcccaacgcgctgtattg

SEQ ID NO: 4610245 - DNA, 25 bp, Homo sapien
cgctgtattgtggatttatgggtga

SEQ ID NO: 4610246 - DNA, 25 bp, Homo sapien
gccaatgtttgattttactctcaac

SEQ ID NO: 4610247 - DNA, 25 bp, Homo sapien
tgcccttcctgggagatcatcaagc

SEQ ID NO: 4610248 - DNA, 25 bp, Homo sapien
gtgatcttgttttgatttcttccct

SEQ ID NO: 4610249 - DNA, 25 bp, Homo sapien
ttttgatttcttccctgaagagctg

SEQ ID NO: 4610250 - DNA, 25 bp, Homo sapien
cttgttttgatttcttccctgaaga

SEQ ID NO: 4610251 - DNA, 25 bp, Homo sapien
tgatcttgttttgatttcttccctg

SEQ ID NO: 4610252 - DNA, 25 bp, Homo sapien
ggaagcaataccagtggaatcagtg

SEQ ID NO: 4610253 - DNA, 25 bp, Homo sapien
tctatgaggatatagtgggatgaat

SEQ ID NO: 4610254 - DNA, 25 bp, Homo sapien
tgggaagaggatctatgaggatata

SEQ ID NO: 4610255 - DNA, 25 bp, Homo sapien
gatgaatgaacatattgctgggtac

SEQ ID NO: 4610256 - DNA, 25 bp, Homo sapien
gaggactatgaatgctacaataagg

SEQ ID NO: 4610257 - DNA, 25 bp, Homo sapien
tcctgtggacaacacgaatcttttg

SEQ ID NO: 4610258 - DNA, 25 bp, Homo sapien
aaagttgtagtaagctctgatagca

SEQ ID NO: 4610259 - DNA, 25 bp, Homo sapien
tgttgggaccagtatgcagaggact

SEQ ID NO: 4610260 - DNA, 25 bp, Homo sapien
tattgattttaaggactctacctaa

SEQ ID NO: 4610261 - DNA, 25 bp, Homo sapien
tctttctagcaacaatgagtgtcat

SEQ ID NO: 4610262 - DNA, 25 bp, Homo sapien
attagacccttgtctgtgatttgtg

SEQ ID NO: 4610263 - DNA, 25 bp, Homo sapien
gatttcactaatggcattttttggc

SEQ ID NO: 4610264 - DNA, 25 bp, Homo sapien
aatttataaagtgctggtctcagat

SEQ ID NO: 4610265 - DNA, 25 bp, Homo sapien
tttataaagtgctggtctcagatga

SEQ ID NO: 4610266 - DNA, 25 bp, Homo sapien
atttataaagtgctggtctcagatg

SEQ ID NO: 4610267 - DNA, 25 bp, Homo sapien
caattcattacttgcgtgtttgtgg

SEQ ID NO: 4610268 - DNA, 25 bp, Homo sapien
tatagtggagctgataaattcttat

SEQ ID NO: 4610269 - DNA, 25 bp, Homo sapien
ggatatggtactctgcactgcataa

SEQ ID NO: 4610270 - DNA, 25 bp, Homo sapien
tcaatggattgcacatatacaatgg

SEQ ID NO: 4610271 - DNA, 25 bp, Homo sapien
cactttgctgtggaaattttgttgg

SEQ ID NO: 4610272 - DNA, 25 bp, Homo sapien
taaataagcgctggcagcaagctgc

SEQ ID NO: 4610273 - DNA, 25 bp, Homo sapien
gtagtcgcaagttaagaccacatgc

SEQ ID NO: 4610274 - DNA, 25 bp, Homo sapien
tggtaacacaaattgactaagatga

SEQ ID NO: 4610275 - DNA, 25 bp, Homo sapien
tctgaaatagacaatgctgatggta

SEQ ID NO: 4610276 - DNA, 25 bp, Homo sapien
tatatctgaaatctagtccgtcctc

SEQ ID NO: 4610277 - DNA, 25 bp, Homo sapien
ggcgtctacccaattcttaaatcaa

SEQ ID NO: 4610278 - DNA, 25 bp, Homo sapien
tcattcaatctgtcattaagtcttt

SEQ ID NO: 4610279 - DNA, 25 bp, Homo sapien
taggtcacaccttcatcattagtcc

SEQ ID NO: 4610280 - DNA, 25 bp, Homo sapien
ccatgttggcaaagatggtcttaat

SEQ ID NO: 4610281 - DNA, 25 bp, Homo sapien
catgttggcaaagatggtcttaatc

SEQ ID NO: 4610282 - DNA, 25 bp, Homo sapien
gttggcaaagatggtcttaatctct

SEQ ID NO: 4610283 - DNA, 25 bp, Homo sapien
ggcaaagatggtcttaatctcttga

SEQ ID NO: 4610284 - DNA, 25 bp, Homo sapien
aacttgtgagactgtttcattccat

SEQ ID NO: 4610285 - DNA, 25 bp, Homo sapien
ttgtgagactgtttcattccattca

SEQ ID NO: 4610286 - DNA, 25 bp, Homo sapien
ctaaacaattgaaaaacttgtgaga

SEQ ID NO: 4610287 - DNA, 25 bp, Homo sapien
ttgaaaaacttgtgagactgtttca

SEQ ID NO: 4610288 - DNA, 25 bp, Homo sapien
acttctttggccttctgttgggatt

SEQ ID NO: 4610289 - DNA, 25 bp, Homo sapien
caaacttctttggccttctgttggg

SEQ ID NO: 4610290 - DNA, 25 bp, Homo sapien
ggcaaacttctttggccttctgttg

SEQ ID NO: 4610291 - DNA, 25 bp, Homo sapien
aacttctttggccttctgttgggat

SEQ ID NO: 4610292 - DNA, 25 bp, Homo sapien
tcataaggccagagcggagcttcat

SEQ ID NO: 4610293 - DNA, 25 bp, Homo sapien
tatcataaggccagagcggagcttc

SEQ ID NO: 4610294 - DNA, 25 bp, Homo sapien
tctctcctaaagtaacaggcctcct

SEQ ID NO: 4610295 - DNA, 25 bp, Homo sapien
tggtttctctcctaaagtaacaggc

SEQ ID NO: 4610296 - DNA, 25 bp, Homo sapien
tgctctagtatatttctggacccct

SEQ ID NO: 4610297 - DNA, 25 bp, Homo sapien
gcagcgagtaccagatgtcttttgt

SEQ ID NO: 4610298 - DNA, 25 bp, Homo sapien
agtagactgctgttgacaggcagcg

SEQ ID NO: 4610299 - DNA, 25 bp, Homo sapien
aggcaaagcactccacagtagactg

SEQ ID NO: 4610300 - DNA, 25 bp, Homo sapien
tatagcctgctgaggtaaactggag

SEQ ID NO: 4610301 - DNA, 25 bp, Homo sapien
gacttgggactgctacctggagtag

SEQ ID NO: 4610302 - DNA, 25 bp, Homo sapien
cagatttagggactactcagatggg

SEQ ID NO: 4610303 - DNA, 25 bp, Homo sapien
caaaactaatgaccatgggattcca

SEQ ID NO: 4610304 - DNA, 25 bp, Homo sapien
tcattgtatgtgcttagagaagcaa

SEQ ID NO: 4610305 - DNA, 25 bp, Homo sapien
ttcatcctccaaagcaaaagtaatg

SEQ ID NO: 4610306 - DNA, 25 bp, Homo sapien
tcaagtcttcaacatatatctcata

SEQ ID NO: 4610307 - DNA, 25 bp, Homo sapien
taatggattgatcattgtatgtgct

SEQ ID NO: 4610308 - DNA, 25 bp, Homo sapien
tgttgagactcatagtaactcagta

SEQ ID NO: 4610309 - DNA, 25 bp, Homo sapien
tcatagtaactcagtaacaccttat

SEQ ID NO: 4610310 - DNA, 25 bp, Homo sapien
ggtgttgagactcatagtaactcag

SEQ ID NO: 4610311 - DNA, 25 bp, Homo sapien
actcatagtaactcagtaacacctt

SEQ ID NO: 4610312 - DNA, 25 bp, Homo sapien
taacatcttaccatcaacaccgtca

SEQ ID NO: 4610313 - DNA, 25 bp, Homo sapien
tcttttgtaggactcagggttacca

SEQ ID NO: 4610314 - DNA, 25 bp, Homo sapien
cagggttaccattaacatcttacca

SEQ ID NO: 4610315 - DNA, 25 bp, Homo sapien
tgttgttggcatgcaaccagaagtc

SEQ ID NO: 4610316 - DNA, 25 bp, Homo sapien
cacagttggagtgcatattatgaag

SEQ ID NO: 4610317 - DNA, 25 bp, Homo sapien
tctcagaagagtctactttaatcag

SEQ ID NO: 4610318 - DNA, 25 bp, Homo sapien
taaacactccaggatcagtcttgca

SEQ ID NO: 4610319 - DNA, 25 bp, Homo sapien
gagcaagatgattatcctttacacc

SEQ ID NO: 4610320 - DNA, 25 bp, Homo sapien
ggtactcaacccaagactcacaggt

SEQ ID NO: 4610321 - DNA, 25 bp, Homo sapien
aaatggatccctgtctacatagaga

SEQ ID NO: 4610322 - DNA, 25 bp, Homo sapien
tgccatgtgggcctttgaagttcca

SEQ ID NO: 4610323 - DNA, 25 bp, Homo sapien
aattcggtgtctcatctaggctctg

SEQ ID NO: 4610324 - DNA, 25 bp, Homo sapien
ttgtacagatgcacatgtcaataat

SEQ ID NO: 4610325 - DNA, 25 bp, Homo sapien
tacagatgcacatgtcaataattag

SEQ ID NO: 4610326 - DNA, 25 bp, Homo sapien
gatgcacatgtcaataattagtgtt

SEQ ID NO: 4610327 - DNA, 25 bp, Homo sapien
tttattgtacagatgcacatgtcaa

SEQ ID NO: 4610328 - DNA, 25 bp, Homo sapien
tgtcctaacaaactcattatcttcc

SEQ ID NO: 4610329 - DNA, 25 bp, Homo sapien
tcatttctgtttctgacagcgtcat

SEQ ID NO: 4610330 - DNA, 25 bp, Homo sapien
ttatcttccttcatactaatttctg

SEQ ID NO: 4610331 - DNA, 25 bp, Homo sapien
taatttctgtttcccacctcctcat

SEQ ID NO: 4610332 - DNA, 25 bp, Homo sapien
cagttgagtccataaaaatgccaca

SEQ ID NO: 4610333 - DNA, 25 bp, Homo sapien
ggcagttgagtccataaaaatgcca

SEQ ID NO: 4610334 - DNA, 25 bp, Homo sapien
aatccgtggctgctttattgattag

SEQ ID NO: 4610335 - DNA, 25 bp, Homo sapien
ggtttctggaatggtcctactcaaa

SEQ ID NO: 4610336 - DNA, 25 bp, Homo sapien
tgcatttatcagttcatctagttct

SEQ ID NO: 4610337 - DNA, 25 bp, Homo sapien
tcataacaagatttactgacaagtc

SEQ ID NO: 4610338 - DNA, 25 bp, Homo sapien
tatttctcatatgcctctgcattta

SEQ ID NO: 4610339 - DNA, 25 bp, Homo sapien
agatttactgacaagtcctggattt

SEQ ID NO: 4610340 - DNA, 25 bp, Homo sapien
gcatctttaatctcgctgggcacgc

SEQ ID NO: 4610341 - DNA, 25 bp, Homo sapien
gccccgtggcgtactgcatctttaa

SEQ ID NO: 4610342 - DNA, 25 bp, Homo sapien
cacaaatctggaacttgagcagtgg

SEQ ID NO: 4610343 - DNA, 25 bp, Homo sapien
atctcgctgggcacgccacccagat

SEQ ID NO: 4610344 - DNA, 25 bp, Homo sapien
gatcgatggtgtgggattgaatcca

SEQ ID NO: 4610345 - DNA, 25 bp, Homo sapien
gattccagcttagaccacacaggta

SEQ ID NO: 4610346 - DNA, 25 bp, Homo sapien
tggttctcaatcatgttgctcaaga

SEQ ID NO: 4610347 - DNA, 25 bp, Homo sapien
ccccactgccagatgctaggagctt

SEQ ID NO: 4610348 - DNA, 25 bp, Homo sapien
cacggaaaagctatcttgcattgag

SEQ ID NO: 4610349 - DNA, 25 bp, Homo sapien
aaaatatgccagcacggaaaagcta

SEQ ID NO: 4610350 - DNA, 25 bp, Homo sapien
ccagcacggaaaagctatcttgcat

SEQ ID NO: 4610351 - DNA, 25 bp, Homo sapien
tatgccagcacggaaaagctatctt

SEQ ID NO: 4610352 - DNA, 25 bp, Homo sapien
tacacagccacagtaatttacaagt

SEQ ID NO: 4610353 - DNA, 25 bp, Homo sapien
tagcattagccaacctgctggcatg

SEQ ID NO: 4610354 - DNA, 25 bp, Homo sapien
gctggcatgttctatggtcttctaa

SEQ ID NO: 4610355 - DNA, 25 bp, Homo sapien
tcaacccaaggcaaacagagaaagt

SEQ ID NO: 4610356 - DNA, 25 bp, Homo sapien
caagcttcgagaggtaaaatgacgt

SEQ ID NO: 4610357 - DNA, 25 bp, Homo sapien
gaaacaccagtctagtgcagtcact

SEQ ID NO: 4610358 - DNA, 25 bp, Homo sapien
agtcacatctgaggcttttagtcca

SEQ ID NO: 4610359 - DNA, 25 bp, Homo sapien
ggactgttcaattgagccaaggtga

SEQ ID NO: 4610360 - DNA, 25 bp, Homo sapien
gaagatggtggcagtccaatcagta

SEQ ID NO: 4610361 - DNA, 25 bp, Homo sapien
ggcagtccaatcagtaacaccagca

SEQ ID NO: 4610362 - DNA, 25 bp, Homo sapien
gagctcaggctgcataggtaatctc

SEQ ID NO: 4610363 - DNA, 25 bp, Homo sapien
caccagcaacctgatgcatgctttc

SEQ ID NO: 4610364 - DNA, 25 bp, Homo sapien
gaaagagtcgaattattgggctgca

SEQ ID NO: 4610365 - DNA, 25 bp, Homo sapien
agctggtacaatggacaccttgaca

SEQ ID NO: 4610366 - DNA, 25 bp, Homo sapien
tcttggccagcagagtcgaaatcta

SEQ ID NO: 4610367 - DNA, 25 bp, Homo sapien
caccttgacagttgagttgacgacc

SEQ ID NO: 4610368 - DNA, 25 bp, Homo sapien
gatcttcgttaagagagtccaggtc

SEQ ID NO: 4610369 - DNA, 25 bp, Homo sapien
gaagatcttcgttaagagagtccag

SEQ ID NO: 4610370 - DNA, 25 bp, Homo sapien
aagatcttcgttaagagagtccagg

SEQ ID NO: 4610371 - DNA, 25 bp, Homo sapien
ggaaagaagatcttcgttaagagag

SEQ ID NO: 4610372 - DNA, 25 bp, Homo sapien
gtcagatcctccagttcagaagtcg

SEQ ID NO: 4610373 - DNA, 25 bp, Homo sapien
tcaaaagatctgaatgtggccgact

SEQ ID NO: 4610374 - DNA, 25 bp, Homo sapien
tctctttggctgctagtacgtggcg

SEQ ID NO: 4610375 - DNA, 25 bp, Homo sapien
cacataggtgttggagacctgaaca

SEQ ID NO: 4610376 - DNA, 25 bp, Homo sapien
agggccaagctcttttgccccctga

SEQ ID NO: 4610377 - DNA, 25 bp, Homo sapien
ggccaagctcttttgccccctgaga

SEQ ID NO: 4610378 - DNA, 25 bp, Homo sapien
agctcttttgccccctgagactttg

SEQ ID NO: 4610379 - DNA, 25 bp, Homo sapien
tcagggccaagctcttttgccccct

SEQ ID NO: 4610380 - DNA, 25 bp, Homo sapien
caaggtgactttgagactgagggaa

SEQ ID NO: 4610381 - DNA, 25 bp, Homo sapien
cattagatacagtctcaggaaagct

SEQ ID NO: 4610382 - DNA, 25 bp, Homo sapien
ggtaactaactaggaattgctgcca

SEQ ID NO: 4610383 - DNA, 25 bp, Homo sapien
tgggctttggcctaagacccctctg

SEQ ID NO: 4610384 - DNA, 25 bp, Homo sapien
ttatattctgcttccttctccttta

SEQ ID NO: 4610385 - DNA, 25 bp, Homo sapien
tatattctgcttccttctcctttag

SEQ ID NO: 4610386 - DNA, 25 bp, Homo sapien
attctgcttccttctcctttagggt

SEQ ID NO: 4610387 - DNA, 25 bp, Homo sapien
tattctgcttccttctcctttaggg

SEQ ID NO: 4610388 - DNA, 25 bp, Homo sapien
acagaatcatcctcttaggctggag

SEQ ID NO: 4610389 - DNA, 25 bp, Homo sapien
gatgcaaacttctatctcaggcagt

SEQ ID NO: 4610390 - DNA, 25 bp, Homo sapien
gaaagaggctcccagatcttggcat

SEQ ID NO: 4610391 - DNA, 25 bp, Homo sapien
tacccataagggtcctagtctctgc

SEQ ID NO: 4610392 - DNA, 25 bp, Homo sapien
caaattaaaaatcgaacatgcaaaa

SEQ ID NO: 4610393 - DNA, 25 bp, Homo sapien
tcttgttctccagcatacaaagcca

SEQ ID NO: 4610394 - DNA, 25 bp, Homo sapien
cattttggttgataaacacaacaaa

SEQ ID NO: 4610395 - DNA, 25 bp, Homo sapien
gttctccagcatacaaagccatttt

SEQ ID NO: 4610396 - DNA, 25 bp, Homo sapien
agcctttgcctgttggactactttc

SEQ ID NO: 4610397 - DNA, 25 bp, Homo sapien
taacatctctcaggtttggcccatg

SEQ ID NO: 4610398 - DNA, 25 bp, Homo sapien
attgtccctaacacaagccttcctg

SEQ ID NO: 4610399 - DNA, 25 bp, Homo sapien
catgataatagtctgagattgtccc

SEQ ID NO: 4610400 - DNA, 25 bp, Homo sapien
aacgtgtatttattgaagatcaatc

SEQ ID NO: 4610401 - DNA, 25 bp, Homo sapien
taacgtgtatttattgaagatcaat

SEQ ID NO: 4610402 - DNA, 25 bp, Homo sapien
tatttggtgcccatgaccactgata

SEQ ID NO: 4610403 - DNA, 25 bp, Homo sapien
taccaagacagagttgaacacccct

SEQ ID NO: 4610404 - DNA, 25 bp, Homo sapien
gttcttgatacagagtagggtctca

SEQ ID NO: 4610405 - DNA, 25 bp, Homo sapien
gtttctagagggcacatacgatgtc

SEQ ID NO: 4610406 - DNA, 25 bp, Homo sapien
taagggccacaggtaggctcaaaat

SEQ ID NO: 4610407 - DNA, 25 bp, Homo sapien
gggccacaggtaggctcaaaatttg

SEQ ID NO: 4610408 - DNA, 25 bp, Homo sapien
gccacaggtaggctcaaaatttggg

SEQ ID NO: 4610409 - DNA, 25 bp, Homo sapien
gttttaagggccacaggtaggctca

SEQ ID NO: 4610410 - DNA, 25 bp, Homo sapien
cttccaactgaggttgaccaacggg

SEQ ID NO: 4610411 - DNA, 25 bp, Homo sapien
cctagagtccaagagtaggaagaat

SEQ ID NO: 4610412 - DNA, 25 bp, Homo sapien
tgtttgcagtcctagagtccaagag

SEQ ID NO: 4610413 - DNA, 25 bp, Homo sapien
taggaagaatatagaggcagtaccc

SEQ ID NO: 4610414 - DNA, 25 bp, Homo sapien
gggcagctgcccgaaaggccgctct

SEQ ID NO: 4610415 - DNA, 25 bp, Homo sapien
tgggatcgccctctctggcttgcag

SEQ ID NO: 4610416 - DNA, 25 bp, Homo sapien
ctctaactccggacatttccgttcg

SEQ ID NO: 4610417 - DNA, 25 bp, Homo sapien
agccggccctccggccttggagaag

SEQ ID NO: 4610418 - DNA, 25 bp, Homo sapien
cggatctcgcgagatccacgccggg

SEQ ID NO: 4610419 - DNA, 25 bp, Homo sapien
acatggaggtcacggcgccaagccg

SEQ ID NO: 4610420 - DNA, 25 bp, Homo sapien
catggaggtcacggcgccaagccgg

SEQ ID NO: 4610421 - DNA, 25 bp, Homo sapien
agccggatctcgcgagatccacgcc

SEQ ID NO: 4610422 - DNA, 25 bp, Homo sapien
gccatgtctgcgccgcgcagagtgt

SEQ ID NO: 4610423 - DNA, 25 bp, Homo sapien
aggccatgtctgcgccgcgcagagt

SEQ ID NO: 4610424 - DNA, 25 bp, Homo sapien
ggccatgtctgcgccgcgcagagtg

SEQ ID NO: 4610425 - DNA, 25 bp, Homo sapien
gcgcgcccgactagccgacttgagg

SEQ ID NO: 4610426 - DNA, 25 bp, Homo sapien
gctcgggccctcagcggcaggcggg

SEQ ID NO: 4610427 - DNA, 25 bp, Homo sapien
acaggcggcgacgactctcagcgcg

SEQ ID NO: 4610428 - DNA, 25 bp, Homo sapien
accggaaccactctgaggcgctgcc

SEQ ID NO: 4610429 - DNA, 25 bp, Homo sapien
tttgcgagacacgtcctcaatggtg

SEQ ID NO: 4610430 - DNA, 25 bp, Homo sapien
tcaatggtgcgaacctgtatccaca

SEQ ID NO: 4610431 - DNA, 25 bp, Homo sapien
gcacgtcttggagccatcaatggtg

SEQ ID NO: 4610432 - DNA, 25 bp, Homo sapien
ggctttgcgagacacgtcctcaatg

SEQ ID NO: 4610433 - DNA, 25 bp, Homo sapien
cccgcgcggcgcacctccagttggg

SEQ ID NO: 4610434 - DNA, 25 bp, Homo sapien
cactccccaccattcggcgggactg

SEQ ID NO: 4610435 - DNA, 25 bp, Homo sapien
gagatatttgcgctccggacgccct

SEQ ID NO: 4610436 - DNA, 25 bp, Homo sapien
tacaaacggcgagatatttgcgctc

SEQ ID NO: 4610437 - DNA, 25 bp, Homo sapien
gagactagtgggagactatctatca

SEQ ID NO: 4610438 - DNA, 25 bp, Homo sapien
gatttcaggtaaagctaatgctgct

SEQ ID NO: 4610439 - DNA, 25 bp, Homo sapien
tctgcttcagtaggtcagcttcagt

SEQ ID NO: 4610440 - DNA, 25 bp, Homo sapien
tcacctacatacagatcacctggag

SEQ ID NO: 4610441 - DNA, 25 bp, Homo sapien
cataatcaaataaggtatatccatt

SEQ ID NO: 4610442 - DNA, 25 bp, Homo sapien
attggaaggtcctaccctcggagct

SEQ ID NO: 4610443 - DNA, 25 bp, Homo sapien
caggatcaataagacgggcacgagc

SEQ ID NO: 4610444 - DNA, 25 bp, Homo sapien
tgtagatggctgattggaaggtcct

SEQ ID NO: 4610445 - DNA, 25 bp, Homo sapien
taccctgtgggtgaacaactagcac

SEQ ID NO: 4610446 - DNA, 25 bp, Homo sapien
cagaccaatggaaccaagtatagta

SEQ ID NO: 4610447 - DNA, 25 bp, Homo sapien
gaaattcttgaacatatgcaccagg

SEQ ID NO: 4610448 - DNA, 25 bp, Homo sapien
gaacacagatagacaaacagaccaa

SEQ ID NO: 4610449 - DNA, 25 bp, Homo sapien
gaagataaccatatataataattgc

SEQ ID NO: 4610450 - DNA, 25 bp, Homo sapien
tgctggttacaaaagccaaataaat

SEQ ID NO: 4610451 - DNA, 25 bp, Homo sapien
tcaaagatctaagttagccgggcat

SEQ ID NO: 4610452 - DNA, 25 bp, Homo sapien
aaacaaagctaccagaaataaagca

SEQ ID NO: 4610453 - DNA, 25 bp, Homo sapien
tagagggtacactgtccaatttatt

SEQ ID NO: 4610454 - DNA, 25 bp, Homo sapien
gacgtagagggtacactgtccaatt

SEQ ID NO: 4610455 - DNA, 25 bp, Homo sapien
aacacagtctgaattagacgtagag

SEQ ID NO: 4610456 - DNA, 25 bp, Homo sapien
cagtctgaattagacgtagagggta

SEQ ID NO: 4610457 - DNA, 25 bp, Homo sapien
tacaccctaaattaagccagtattg

SEQ ID NO: 4610458 - DNA, 25 bp, Homo sapien
aataaagtcctcaatagcttgagca

SEQ ID NO: 4610459 - DNA, 25 bp, Homo sapien
gtaacaaatgaacataacctctaaa

SEQ ID NO: 4610460 - DNA, 25 bp, Homo sapien
gataatcgagagctaaaaggacctt

SEQ ID NO: 4610461 - DNA, 25 bp, Homo sapien
tactccagtatgtgcaacaaagtgg

SEQ ID NO: 4610462 - DNA, 25 bp, Homo sapien
aaaactagccaaacatggtaataca

SEQ ID NO: 4610463 - DNA, 25 bp, Homo sapien
ccaaacatggtaatacatatgccta

SEQ ID NO: 4610464 - DNA, 25 bp, Homo sapien
catggtaatacatatgcctatattc

SEQ ID NO: 4610465 - DNA, 25 bp, Homo sapien
gacacaattgtgcacaggtttgcca

SEQ ID NO: 4610466 - DNA, 25 bp, Homo sapien
gacaaacattgcataccccagaata

SEQ ID NO: 4610467 - DNA, 25 bp, Homo sapien
tatcttggcctaattcagcaacgaa

SEQ ID NO: 4610468 - DNA, 25 bp, Homo sapien
gcttgttcaaactacactgctacac

SEQ ID NO: 4610469 - DNA, 25 bp, Homo sapien
gaggtagttctcacagccaagttgt

SEQ ID NO: 4610470 - DNA, 25 bp, Homo sapien
tgtcaaagttctccctgagtactga

SEQ ID NO: 4610471 - DNA, 25 bp, Homo sapien
gtctctctccagtaaccagggtttg

SEQ ID NO: 4610472 - DNA, 25 bp, Homo sapien
caagttgtatgtgcccactaaagga

SEQ ID NO: 4610473 - DNA, 25 bp, Homo sapien
attaactggtcacagtggtgtgcac

SEQ ID NO: 4610474 - DNA, 25 bp, Homo sapien
caggcctgtacttccaggactttag

SEQ ID NO: 4610475 - DNA, 25 bp, Homo sapien
ggcctgtacttccaggactttagga

SEQ ID NO: 4610476 - DNA, 25 bp, Homo sapien
aatcaaaaattaactggtcacagtg

SEQ ID NO: 4610477 - DNA, 25 bp, Homo sapien
tgcaacttgcctagccaaaggtagc

SEQ ID NO: 4610478 - DNA, 25 bp, Homo sapien
tggcgatcatttgcccacagttaaa

SEQ ID NO: 4610479 - DNA, 25 bp, Homo sapien
taactgaactgtaagactgaccgac

SEQ ID NO: 4610480 - DNA, 25 bp, Homo sapien
ttcactatgaaaaggctcctggcga

SEQ ID NO: 4610481 - DNA, 25 bp, Homo sapien
gtgcctaaactatgtagcctgtgac

SEQ ID NO: 4610482 - DNA, 25 bp, Homo sapien
ccagcgtggtacctctttgaaaagc

SEQ ID NO: 4610483 - DNA, 25 bp, Homo sapien
tccgtatacttaatggccagcgtgg

SEQ ID NO: 4610484 - DNA, 25 bp, Homo sapien
caccttacatgggtgaaaatgcagt

SEQ ID NO: 4610485 - DNA, 25 bp, Homo sapien
tgtcaggcaagtaagtgttcagccc

SEQ ID NO: 4610486 - DNA, 25 bp, Homo sapien
cttgcaggttgtcaggcaagtaagt

SEQ ID NO: 4610487 - DNA, 25 bp, Homo sapien
tcagcccgcattcaagaaccacaat

SEQ ID NO: 4610488 - DNA, 25 bp, Homo sapien
caagtaagtgttcagcccgcattca

SEQ ID NO: 4610489 - DNA, 25 bp, Homo sapien
agtttctatatcagcatgaactgtc

SEQ ID NO: 4610490 - DNA, 25 bp, Homo sapien
gtagtttctatatcagcatgaactg

SEQ ID NO: 4610491 - DNA, 25 bp, Homo sapien
agggtagtttctatatcagcatgaa

SEQ ID NO: 4610492 - DNA, 25 bp, Homo sapien
catgaactgtctccccattcccact

SEQ ID NO: 4610493 - DNA, 25 bp, Homo sapien
tctagctcgtggtctaagatccttg

SEQ ID NO: 4610494 - DNA, 25 bp, Homo sapien
tgtccaggactttctacattataat

SEQ ID NO: 4610495 - DNA, 25 bp, Homo sapien
tcaaaccagaatcctctttgtccag

SEQ ID NO: 4610496 - DNA, 25 bp, Homo sapien
gtggtaatttctgcatcaaaccaga

SEQ ID NO: 4610497 - DNA, 25 bp, Homo sapien
gaagtccagtattcaaccaaagccc

SEQ ID NO: 4610498 - DNA, 25 bp, Homo sapien
gcctcttgtccagcagaagtccagt

SEQ ID NO: 4610499 - DNA, 25 bp, Homo sapien
gcccaaaggtgaaagcaggccatat

SEQ ID NO: 4610500 - DNA, 25 bp, Homo sapien
caggccatatgcttgaggcatccca

SEQ ID NO: 4610501 - DNA, 25 bp, Homo sapien
tctaatgaaaacttggtcatcttca

SEQ ID NO: 4610502 - DNA, 25 bp, Homo sapien
tgcactaccacgtatggctaaattt

SEQ ID NO: 4610503 - DNA, 25 bp, Homo sapien
cctgcttagaatttacagaacttct

SEQ ID NO: 4610504 - DNA, 25 bp, Homo sapien
tccactgtctcctagcttaaattgc

SEQ ID NO: 4610505 - DNA, 25 bp, Homo sapien
tctcctggtcctacttagtttggaa

SEQ ID NO: 4610506 - DNA, 25 bp, Homo sapien
atatagagctttagtcctggaatgg

SEQ ID NO: 4610507 - DNA, 25 bp, Homo sapien
tattctcctggtcctacttagtttg

SEQ ID NO: 4610508 - DNA, 25 bp, Homo sapien
tcttctcaatatagagctttagtcc

SEQ ID NO: 4610509 - DNA, 25 bp, Homo sapien
ctgcaaatgaaaggggatgggctcc

SEQ ID NO: 4610510 - DNA, 25 bp, Homo sapien
cagatattatcttgcagtcatttaa

SEQ ID NO: 4610511 - DNA, 25 bp, Homo sapien
attatcttgcagtcatttaatgttc

SEQ ID NO: 4610512 - DNA, 25 bp, Homo sapien
gatattatcttgcagtcatttaatg

SEQ ID NO: 4610513 - DNA, 25 bp, Homo sapien
cacgacaggagcaagaatgacattt

SEQ ID NO: 4610514 - DNA, 25 bp, Homo sapien
cacatacacgacaggagcaagaatg

SEQ ID NO: 4610515 - DNA, 25 bp, Homo sapien
caggtcacattcagggtcatttcgc

SEQ ID NO: 4610516 - DNA, 25 bp, Homo sapien
acacaggtcacattcagggtcattt

SEQ ID NO: 4610517 - DNA, 25 bp, Homo sapien
aggtggattcagacagtaaatatga

SEQ ID NO: 4610518 - DNA, 25 bp, Homo sapien
tatccaaaggtggattcagacagta

SEQ ID NO: 4610519 - DNA, 25 bp, Homo sapien
ccagcctttacaacttcactggaat

SEQ ID NO: 4610520 - DNA, 25 bp, Homo sapien
caccagcctttacaacttcactgga

SEQ ID NO: 4610521 - DNA, 25 bp, Homo sapien
accagcctttacaacttcactggaa

SEQ ID NO: 4610522 - DNA, 25 bp, Homo sapien
taccaggaatgggtccataatgatt

SEQ ID NO: 4610523 - DNA, 25 bp, Homo sapien
ttagaagggacaatagtacattctc

SEQ ID NO: 4610524 - DNA, 25 bp, Homo sapien
cattctctcgtacgaccaacacaag

SEQ ID NO: 4610525 - DNA, 25 bp, Homo sapien
ggaataccaggaatgggtccataat

SEQ ID NO: 4610526 - DNA, 25 bp, Homo sapien
ctttacatctttagtcctagctagg

SEQ ID NO: 4610527 - DNA, 25 bp, Homo sapien
tacatctttagtcctagctaggtgg

SEQ ID NO: 4610528 - DNA, 25 bp, Homo sapien
catctttagtcctagctaggtggaa

SEQ ID NO: 4610529 - DNA, 25 bp, Homo sapien
ttagtcctagctaggtggaatgatc

SEQ ID NO: 4610530 - DNA, 25 bp, Homo sapien
gaaattgaccccagggattcaagat

SEQ ID NO: 4610531 - DNA, 25 bp, Homo sapien
aaattgaccccagggattcaagatc

SEQ ID NO: 4610532 - DNA, 25 bp, Homo sapien
gagaaattgaccccagggattcaag

SEQ ID NO: 4610533 - DNA, 25 bp, Homo sapien
aggagaaattgaccccagggattca

SEQ ID NO: 4610534 - DNA, 25 bp, Homo sapien
aaatccaccagccagtacaagagaa

SEQ ID NO: 4610535 - DNA, 25 bp, Homo sapien
gacttcatccgcaaatccaccagcc

SEQ ID NO: 4610536 - DNA, 25 bp, Homo sapien
accagccagtacaagagaataagcc

SEQ ID NO: 4610537 - DNA, 25 bp, Homo sapien
tccaccagccagtacaagagaataa

SEQ ID NO: 4610538 - DNA, 25 bp, Homo sapien
ggagtgctgcgctggcatgatcatg

SEQ ID NO: 4610539 - DNA, 25 bp, Homo sapien
ccagctaatttctctgtttttttgg

SEQ ID NO: 4610540 - DNA, 25 bp, Homo sapien
gagctcaagagattcacccacttca

SEQ ID NO: 4610541 - DNA, 25 bp, Homo sapien
tttggtagggacagggctttgccac

SEQ ID NO: 4610542 - DNA, 25 bp, Homo sapien
tagaacagtttagaatacttcttaa

SEQ ID NO: 4610543 - DNA, 25 bp, Homo sapien
ctagaacagtttagaatacttctta

SEQ ID NO: 4610544 - DNA, 25 bp, Homo sapien
tctagaacagtttagaatacttctt

SEQ ID NO: 4610545 - DNA, 25 bp, Homo sapien
atctagaacagtttagaatacttct

SEQ ID NO: 4610546 - DNA, 25 bp, Homo sapien
cagtgtatgtgaactcatcacctcg

SEQ ID NO: 4610547 - DNA, 25 bp, Homo sapien
ccgcttccagtgtatgtgaactcat

SEQ ID NO: 4610548 - DNA, 25 bp, Homo sapien
agctgaaggtgcaccaattcttttg

SEQ ID NO: 4610549 - DNA, 25 bp, Homo sapien
tttttaccaccgcttccagtgtatg

SEQ ID NO: 4610550 - DNA, 25 bp, Homo sapien
gaataaagatcagcacacggtggct

SEQ ID NO: 4610551 - DNA, 25 bp, Homo sapien
tagctaagctcctgtctcaagaatg

SEQ ID NO: 4610552 - DNA, 25 bp, Homo sapien
tgtagcggtacttatcagattgtcc

SEQ ID NO: 4610553 - DNA, 25 bp, Homo sapien
tacccacgggagctgagatgtcatt

SEQ ID NO: 4610554 - DNA, 25 bp, Homo sapien
cactgaattggaagtagtacctgac

SEQ ID NO: 4610555 - DNA, 25 bp, Homo sapien
aagatggccaggttactttgctgcc

SEQ ID NO: 4610556 - DNA, 25 bp, Homo sapien
tgctaatgacaatgaagacttctgg

SEQ ID NO: 4610557 - DNA, 25 bp, Homo sapien
tactcttgggagaacctagttgtac

SEQ ID NO: 4610558 - DNA, 25 bp, Homo sapien
tacacaatcgagtcattagctcaat

SEQ ID NO: 4610559 - DNA, 25 bp, Homo sapien
ttcttcaagtacacaatcgagtcat

SEQ ID NO: 4610560 - DNA, 25 bp, Homo sapien
caatcgagtcattagctcaattaaa

SEQ ID NO: 4610561 - DNA, 25 bp, Homo sapien
caagtacacaatcgagtcattagct

SEQ ID NO: 4610562 - DNA, 25 bp, Homo sapien
agcatcacagtttagggccaatgcc

SEQ ID NO: 4610563 - DNA, 25 bp, Homo sapien
cttataaatgccatcatatctgttg

SEQ ID NO: 4610564 - DNA, 25 bp, Homo sapien
catcatatctgttgccttcttcagg

SEQ ID NO: 4610565 - DNA, 25 bp, Homo sapien
tctgttgccttcttcaggagcatat

SEQ ID NO: 4610566 - DNA, 25 bp, Homo sapien
cttcaggagcatatttgctgatctt

SEQ ID NO: 4610567 - DNA, 25 bp, Homo sapien
gaaaaagtagcaatataagatggct

SEQ ID NO: 4610568 - DNA, 25 bp, Homo sapien
aacaaccctgccttgaaagcccagg

SEQ ID NO: 4610569 - DNA, 25 bp, Homo sapien
tgcccctaggaactcgaaataagcc

SEQ ID NO: 4610570 - DNA, 25 bp, Homo sapien
gatggctactgtttcctcgagccca

SEQ ID NO: 4610571 - DNA, 25 bp, Homo sapien
aatccatggcttgatgaaatctctg

SEQ ID NO: 4610572 - DNA, 25 bp, Homo sapien
aaagatagcgccaaaccaagaatcc

SEQ ID NO: 4610573 - DNA, 25 bp, Homo sapien
taatctccttgaccgttctattcct

SEQ ID NO: 4610574 - DNA, 25 bp, Homo sapien
tgtaaacgtagacataatctccttg

SEQ ID NO: 4610575 - DNA, 25 bp, Homo sapien
tggcagtttttacgggaagcacaac

SEQ ID NO: 4610576 - DNA, 25 bp, Homo sapien
caaattctagggtatacaggcagtg

SEQ ID NO: 4610577 - DNA, 25 bp, Homo sapien
tatgggttaacagctgagcatgggc

SEQ ID NO: 4610578 - DNA, 25 bp, Homo sapien
ggtggtcagacacttgcccatagtt

SEQ ID NO: 4610579 - DNA, 25 bp, Homo sapien
ttctttatctgaagggtaacctgct

SEQ ID NO: 4610580 - DNA, 25 bp, Homo sapien
tctttatctgaagggtaacctgctg

SEQ ID NO: 4610581 - DNA, 25 bp, Homo sapien
tatctgaagggtaacctgctggata

SEQ ID NO: 4610582 - DNA, 25 bp, Homo sapien
tttatctgaagggtaacctgctgga

SEQ ID NO: 4610583 - DNA, 25 bp, Homo sapien
tgctgttgaggagttagttgaaaag

SEQ ID NO: 4610584 - DNA, 25 bp, Homo sapien
tgttgaggagttagttgaaaagcct

SEQ ID NO: 4610585 - DNA, 25 bp, Homo sapien
gaggagttagttgaaaagcctcaat

SEQ ID NO: 4610586 - DNA, 25 bp, Homo sapien
gagttagttgaaaagcctcaattgc

SEQ ID NO: 4610587 - DNA, 25 bp, Homo sapien
ctatttctcacaaaggaaactctgt

SEQ ID NO: 4610588 - DNA, 25 bp, Homo sapien
ctcacaaaggaaactctgtagagtt

SEQ ID NO: 4610589 - DNA, 25 bp, Homo sapien
aactctgtagagtttttgtgttgct

SEQ ID NO: 4610590 - DNA, 25 bp, Homo sapien
aggaaactctgtagagtttttgtgt

SEQ ID NO: 4610591 - DNA, 25 bp, Homo sapien
tagaacagtatccaaggataaggaa

SEQ ID NO: 4610592 - DNA, 25 bp, Homo sapien
gaacagtatccaaggataaggaaag

SEQ ID NO: 4610593 - DNA, 25 bp, Homo sapien
agaacagtatccaaggataaggaaa

SEQ ID NO: 4610594 - DNA, 25 bp, Homo sapien
tacagacattgtggaagcactcagt

SEQ ID NO: 4610595 - DNA, 25 bp, Homo sapien
ttacagacattgtggaagcactcag

SEQ ID NO: 4610596 - DNA, 25 bp, Homo sapien
cagcaaacgcacataaaagattgtt

SEQ ID NO: 4610597 - DNA, 25 bp, Homo sapien
agcaaacgcacataaaagattgttc

SEQ ID NO: 4610598 - DNA, 25 bp, Homo sapien
tcctttctaaacagagccctagagg

SEQ ID NO: 4610599 - DNA, 25 bp, Homo sapien
gaatctgcactatggaaaagactac

SEQ ID NO: 4610600 - DNA, 25 bp, Homo sapien
tctctggcagatattgggagccttc

SEQ ID NO: 4610601 - DNA, 25 bp, Homo sapien
tatggttgccactagcctaatcttc

SEQ ID NO: 4610602 - DNA, 25 bp, Homo sapien
tcatcgtcctttgctgtagccaggg

SEQ ID NO: 4610603 - DNA, 25 bp, Homo sapien
tgccttaaaggagcgctgtaggcaa

SEQ ID NO: 4610604 - DNA, 25 bp, Homo sapien
tcaagtagagtctgcagaatctcat

SEQ ID NO: 4610605 - DNA, 25 bp, Homo sapien
tgtaattctggccaagatcatgccg

SEQ ID NO: 4610606 - DNA, 25 bp, Homo sapien
gaaatgggcctcttactacacacac

SEQ ID NO: 4610607 - DNA, 25 bp, Homo sapien
ttcagaacgtgagagatacagtcca

SEQ ID NO: 4610608 - DNA, 25 bp, Homo sapien
tattgtccaaaaagccaccatgaac

SEQ ID NO: 4610609 - DNA, 25 bp, Homo sapien
aaatcctctcaaaggtcagcacagc

SEQ ID NO: 4610610 - DNA, 25 bp, Homo sapien
agtgtaagctcaaggtgaacgggcc

SEQ ID NO: 4610611 - DNA, 25 bp, Homo sapien
gcaagggtaactctttccagtgtaa

SEQ ID NO: 4610612 - DNA, 25 bp, Homo sapien
tacttgtagggaccagacagagtgg

SEQ ID NO: 4610613 - DNA, 25 bp, Homo sapien
tgaacgggccaccaagctcaattct

SEQ ID NO: 4610614 - DNA, 25 bp, Homo sapien
tgaaagagtaagaaagatcatcttc

SEQ ID NO: 4610615 - DNA, 25 bp, Homo sapien
ctgtcaacacaatgcaatttcatac

SEQ ID NO: 4610616 - DNA, 25 bp, Homo sapien
tattctgtcaacacaatgcaatttc

SEQ ID NO: 4610617 - DNA, 25 bp, Homo sapien
ttattctgtcaacacaatgcaattt

SEQ ID NO: 4610618 - DNA, 25 bp, Homo sapien
ttctgtcaacacaatgcaatttcat

SEQ ID NO: 4610619 - DNA, 25 bp, Homo sapien
ccagaaaacatcaatggatacagac

SEQ ID NO: 4610620 - DNA, 25 bp, Homo sapien
ttttgctttcttttggcttgggtgc

SEQ ID NO: 4610621 - DNA, 25 bp, Homo sapien
gctttcttttggcttgggtgcaatg

SEQ ID NO: 4610622 - DNA, 25 bp, Homo sapien
tttcttttggcttgggtgcaatggt

SEQ ID NO: 4610623 - DNA, 25 bp, Homo sapien
ttgctttcttttggcttgggtgcaa

SEQ ID NO: 4610624 - DNA, 25 bp, Homo sapien
taaataaaatctaggcactctcgga

SEQ ID NO: 4610625 - DNA, 25 bp, Homo sapien
aatatcctgggagtaagcttcctgg

SEQ ID NO: 4610626 - DNA, 25 bp, Homo sapien
ccacacaagatggagccaagtatat

SEQ ID NO: 4610627 - DNA, 25 bp, Homo sapien
ggcactctcggatatgtggaatatc

SEQ ID NO: 4610628 - DNA, 25 bp, Homo sapien
cctgccttggtctcttggatgcctg

SEQ ID NO: 4610629 - DNA, 25 bp, Homo sapien
tggtctcttggatgcctgccacgat

SEQ ID NO: 4610630 - DNA, 25 bp, Homo sapien
gtctcttggatgcctgccacgatgc

SEQ ID NO: 4610631 - DNA, 25 bp, Homo sapien
gccttggtctcttggatgcctgcca

SEQ ID NO: 4610632 - DNA, 25 bp, Homo sapien
ccagcactgagtcaaagaagtctct

SEQ ID NO: 4610633 - DNA, 25 bp, Homo sapien
ttggccagggatcctacagttagtc

SEQ ID NO: 4610634 - DNA, 25 bp, Homo sapien
cagactggcgctttggccttgagct

SEQ ID NO: 4610635 - DNA, 25 bp, Homo sapien
agctctgatctgcttggctccttgc

SEQ ID NO: 4610636 - DNA, 25 bp, Homo sapien
tttggtattctgcttccacatgtgc

SEQ ID NO: 4610637 - DNA, 25 bp, Homo sapien
ccatctgtgggaaatcccagggcaa

SEQ ID NO: 4610638 - DNA, 25 bp, Homo sapien
tctgtaatcacatttctgagtgttc

SEQ ID NO: 4610639 - DNA, 25 bp, Homo sapien
tacattttgtataccctgaagaact

SEQ ID NO: 4610640 - DNA, 25 bp, Homo sapien
ttcccactgggacacatcgtcagtt

SEQ ID NO: 4610641 - DNA, 25 bp, Homo sapien
tttcccactgggacacatcgtcagt

SEQ ID NO: 4610642 - DNA, 25 bp, Homo sapien
tcccactgggacacatcgtcagttc

SEQ ID NO: 4610643 - DNA, 25 bp, Homo sapien
cccactgggacacatcgtcagttct

SEQ ID NO: 4610644 - DNA, 25 bp, Homo sapien
ggagggagaggggctgggtgctgtg

SEQ ID NO: 4610645 - DNA, 25 bp, Homo sapien
caggagggagaggggctgggtgctg

SEQ ID NO: 4610646 - DNA, 25 bp, Homo sapien
tgcaggagggagaggggctgggtgc

SEQ ID NO: 4610647 - DNA, 25 bp, Homo sapien
ctgcaggagggagaggggctgggtg

SEQ ID NO: 4610648 - DNA, 25 bp, Homo sapien
tagtatctttcaccacgaggtgccc

SEQ ID NO: 4610649 - DNA, 25 bp, Homo sapien
gcaaagggccagctaaaatccagat

SEQ ID NO: 4610650 - DNA, 25 bp, Homo sapien
caggtgactagctaatggcaaaggg

SEQ ID NO: 4610651 - DNA, 25 bp, Homo sapien
gaagtgtcatgagaggccatttcac

SEQ ID NO: 4610652 - DNA, 25 bp, Homo sapien
tcctgcacagggtactgggaacatg

SEQ ID NO: 4610653 - DNA, 25 bp, Homo sapien
gagtcagcattgctcaccggaatgt

SEQ ID NO: 4610654 - DNA, 25 bp, Homo sapien
taacagtctacgattgagtcagcat

SEQ ID NO: 4610655 - DNA, 25 bp, Homo sapien
gaatgttagtcatggcatatgccct

SEQ ID NO: 4610656 - DNA, 25 bp, Homo sapien
ggcatgtagcactcagacctcagtt

SEQ ID NO: 4610657 - DNA, 25 bp, Homo sapien
cactgcttgcaaagggagcccgtag

SEQ ID NO: 4610658 - DNA, 25 bp, Homo sapien
cactgttggccatttggcatgtagc

SEQ ID NO: 4610659 - DNA, 25 bp, Homo sapien
tgatggcatggagaacatacacatt

SEQ ID NO: 4610660 - DNA, 25 bp, Homo sapien
ggtggccatccgtgcacaaactatg

SEQ ID NO: 4610661 - DNA, 25 bp, Homo sapien
taagaagtaaaataggtccactgct

SEQ ID NO: 4610662 - DNA, 25 bp, Homo sapien
caaactatgatggtgtgttaaaaac

SEQ ID NO: 4610663 - DNA, 25 bp, Homo sapien
tacagtgacccatgtccaaatattc

SEQ ID NO: 4610664 - DNA, 25 bp, Homo sapien
tcgtacttttaagcacattgacagc

SEQ ID NO: 4610665 - DNA, 25 bp, Homo sapien
ccagttgattttcaacatcctaatg

SEQ ID NO: 4610666 - DNA, 25 bp, Homo sapien
ccctccttcgtacttttaagcacat

SEQ ID NO: 4610667 - DNA, 25 bp, Homo sapien
tcaacatcctaatgtaaccctcctt

SEQ ID NO: 4610668 - DNA, 25 bp, Homo sapien
ccattcctttggtctgtccatccag

SEQ ID NO: 4610669 - DNA, 25 bp, Homo sapien
cccattcctttggtctgtccatcca

SEQ ID NO: 4610670 - DNA, 25 bp, Homo sapien
gtcccattcctttggtctgtccatc

SEQ ID NO: 4610671 - DNA, 25 bp, Homo sapien
tgtcccattcctttggtctgtccat

SEQ ID NO: 4610672 - DNA, 25 bp, Homo sapien
aacccttacgtatcacaagcaactg

SEQ ID NO: 4610673 - DNA, 25 bp, Homo sapien
gacatcaaagatgtccaacaccaaa

SEQ ID NO: 4610674 - DNA, 25 bp, Homo sapien
acaccaaacccttacgtatcacaag

SEQ ID NO: 4610675 - DNA, 25 bp, Homo sapien
agatgtccaacaccaaacccttacg

SEQ ID NO: 4610676 - DNA, 25 bp, Homo sapien
tctggatttctctgcgtgtggcgct

SEQ ID NO: 4610677 - DNA, 25 bp, Homo sapien
tgtgcctttccgcgctgtcttctca

SEQ ID NO: 4610678 - DNA, 25 bp, Homo sapien
gaaatgtaactttcaggcctgcatc

SEQ ID NO: 4610679 - DNA, 25 bp, Homo sapien
tacaactctctggttctcaaatgac

SEQ ID NO: 4610680 - DNA, 25 bp, Homo sapien
tagctgtaggcaaggatccggaaga

SEQ ID NO: 4610681 - DNA, 25 bp, Homo sapien
tgtaggttcctgaaggattgcctga

SEQ ID NO: 4610682 - DNA, 25 bp, Homo sapien
ggaagatgccatcttgtctccaagt

SEQ ID NO: 4610683 - DNA, 25 bp, Homo sapien
gagtgcaaaataatgcacagctgct

SEQ ID NO: 4610684 - DNA, 25 bp, Homo sapien
cttggcctttaaagcattctctttg

SEQ ID NO: 4610685 - DNA, 25 bp, Homo sapien
ctttaaagcattctctttggcttcg

SEQ ID NO: 4610686 - DNA, 25 bp, Homo sapien
tcttggcctttaaagcattctcttt

SEQ ID NO: 4610687 - DNA, 25 bp, Homo sapien
taaagcattctctttggcttcggct

SEQ ID NO: 4610688 - DNA, 25 bp, Homo sapien
ttttttgtggctgtggacacctttc

SEQ ID NO: 4610689 - DNA, 25 bp, Homo sapien
ttttgtggctgtggacacctttcaa

SEQ ID NO: 4610690 - DNA, 25 bp, Homo sapien
ttgtggctgtggacacctttcaaca

SEQ ID NO: 4610691 - DNA, 25 bp, Homo sapien
tgtggctgtggacacctttcaacac

SEQ ID NO: 4610692 - DNA, 25 bp, Homo sapien
tctctggagtcgcagggtcttggac

SEQ ID NO: 4610693 - DNA, 25 bp, Homo sapien
tcaggccgaatcagggtgttgccct

SEQ ID NO: 4610694 - DNA, 25 bp, Homo sapien
gccgaatcagggtgttgcccttggc

SEQ ID NO: 4610695 - DNA, 25 bp, Homo sapien
ggtgttgcccttggccacatcattg

SEQ ID NO: 4610696 - DNA, 25 bp, Homo sapien
ttgcccttggccacatcattgtcat

SEQ ID NO: 4610697 - DNA, 25 bp, Homo sapien
catcataatcaggagccagtcgaac

SEQ ID NO: 4610698 - DNA, 25 bp, Homo sapien
gttggcaacatccaaagcatcataa

SEQ ID NO: 4610699 - DNA, 25 bp, Homo sapien
tttgttggcaacatccaaagcatca

SEQ ID NO: 4610700 - DNA, 25 bp, Homo sapien
atcataatcaggagccagtcgaaca

SEQ ID NO: 4610701 - DNA, 25 bp, Homo sapien
tatatatttagaattaggcagctgg

SEQ ID NO: 4610702 - DNA, 25 bp, Homo sapien
tatatatatttagaattaggcagct

SEQ ID NO: 4610703 - DNA, 25 bp, Homo sapien
tatatatatatttagaattaggcag

SEQ ID NO: 4610704 - DNA, 25 bp, Homo sapien
ttagaattaggcagctggactcagt

SEQ ID NO: 4610705 - DNA, 25 bp, Homo sapien
gaatgagcagtgatgctctgctaga

SEQ ID NO: 4610706 - DNA, 25 bp, Homo sapien
ctgaagaatgagcagtgatgctctg

SEQ ID NO: 4610707 - DNA, 25 bp, Homo sapien
gagcagtgatgctctgctagataaa

SEQ ID NO: 4610708 - DNA, 25 bp, Homo sapien
tgatgctctgctagataaatctggg

SEQ ID NO: 4610709 - DNA, 25 bp, Homo sapien
gaatcaccctgccatatgccaactg

SEQ ID NO: 4610710 - DNA, 25 bp, Homo sapien
tacagatgtgcacaaacccagttgc

SEQ ID NO: 4610711 - DNA, 25 bp, Homo sapien
acgtgggaacactcaagcctgctgc

SEQ ID NO: 4610712 - DNA, 25 bp, Homo sapien
cacaaacccagttgcactagaatca

SEQ ID NO: 4610713 - DNA, 25 bp, Homo sapien
gtgccttgggtggagccacaacttt

SEQ ID NO: 4610714 - DNA, 25 bp, Homo sapien
tggttgagcgcagcgcccattcatt

SEQ ID NO: 4610715 - DNA, 25 bp, Homo sapien
gagccacaactttgcgcgagtgtct

SEQ ID NO: 4610716 - DNA, 25 bp, Homo sapien
tccagggcgccgcttaaagtgtgcg

SEQ ID NO: 4610717 - DNA, 25 bp, Homo sapien
ctggcgggcggcgtacggagcgtcc

SEQ ID NO: 4610718 - DNA, 25 bp, Homo sapien
ggagatggcagcctccggtccaggg

SEQ ID NO: 4610719 - DNA, 25 bp, Homo sapien
cgtcggagtgggtaggactggagat

SEQ ID NO: 4610720 - DNA, 25 bp, Homo sapien
cggcaccagccagcgtcggagtggg

SEQ ID NO: 4610721 - DNA, 25 bp, Homo sapien
aaggaaatggagagcttcgagaatc

SEQ ID NO: 4610722 - DNA, 25 bp, Homo sapien
atcatcttccatctccgccgagtcc

SEQ ID NO: 4610723 - DNA, 25 bp, Homo sapien
gaaatggagagcttcgagaatcatc

SEQ ID NO: 4610724 - DNA, 25 bp, Homo sapien
tggagagcttcgagaatcatcttcc

SEQ ID NO: 4610725 - DNA, 25 bp, Homo sapien
ccagttaagagctgagtggattttc

SEQ ID NO: 4610726 - DNA, 25 bp, Homo sapien
ctgtgaccacagttatcttttcgaa

SEQ ID NO: 4610727 - DNA, 25 bp, Homo sapien
gataaatccaaggactctagctgga

SEQ ID NO: 4610728 - DNA, 25 bp, Homo sapien
cttcataaatttgctcttcgataaa

SEQ ID NO: 4610729 - DNA, 25 bp, Homo sapien
agagggcagggtgtgccatctatgt

SEQ ID NO: 4610730 - DNA, 25 bp, Homo sapien
tgtgacctctcatgtaatatcttca

SEQ ID NO: 4610731 - DNA, 25 bp, Homo sapien
tctatgtgacctctcatgtaatatc

SEQ ID NO: 4610732 - DNA, 25 bp, Homo sapien
ccatctatgtgacctctcatgtaat

SEQ ID NO: 4610733 - DNA, 25 bp, Homo sapien
tgcaactcatatgagaatttaggca

SEQ ID NO: 4610734 - DNA, 25 bp, Homo sapien
aatgcaactcatatgagaatttagg

SEQ ID NO: 4610735 - DNA, 25 bp, Homo sapien
ggtggaaatgcaactcatatgagaa

SEQ ID NO: 4610736 - DNA, 25 bp, Homo sapien
gaaaggtggaaatgcaactcatatg

SEQ ID NO: 4610737 - DNA, 25 bp, Homo sapien
gaagatggatcgaataccttcttct

SEQ ID NO: 4610738 - DNA, 25 bp, Homo sapien
gatggatcgaataccttcttcttgg

SEQ ID NO: 4610739 - DNA, 25 bp, Homo sapien
agtctttcttagaagatggatcgaa

SEQ ID NO: 4610740 - DNA, 25 bp, Homo sapien
tcttagaagatggatcgaatacctt

SEQ ID NO: 4610741 - DNA, 25 bp, Homo sapien
cacatctcaggaatgacctttgatc

SEQ ID NO: 4610742 - DNA, 25 bp, Homo sapien
cccatttgttagactcacatctcag

SEQ ID NO: 4610743 - DNA, 25 bp, Homo sapien
tcagcttcctacaccctggacccac

SEQ ID NO: 4610744 - DNA, 25 bp, Homo sapien
cactcttcacggacagccctgtttc

SEQ ID NO: 4610745 - DNA, 25 bp, Homo sapien
tatggatgagttgttcgtcttcttg

SEQ ID NO: 4610746 - DNA, 25 bp, Homo sapien
tattttcaaatgtatggatgagttg

SEQ ID NO: 4610747 - DNA, 25 bp, Homo sapien
gagttgttcgtcttcttgcagtatc

SEQ ID NO: 4610748 - DNA, 25 bp, Homo sapien
caaatgtatggatgagttgttcgtc

SEQ ID NO: 4610749 - DNA, 25 bp, Homo sapien
cccctggagtcttgtatattcatag

SEQ ID NO: 4610750 - DNA, 25 bp, Homo sapien
tctgagccagactcgtttacgctat

SEQ ID NO: 4610751 - DNA, 25 bp, Homo sapien
ggaagggactgcaattattcagtac

SEQ ID NO: 4610752 - DNA, 25 bp, Homo sapien
tataaactgtggtaccatcatgaag

SEQ ID NO: 4610753 - DNA, 25 bp, Homo sapien
caagcactcagtcacagcattgaag

SEQ ID NO: 4610754 - DNA, 25 bp, Homo sapien
tagtttccaaaagatcaccaaggcc

SEQ ID NO: 4610755 - DNA, 25 bp, Homo sapien
tattagtcaggatcagcaagcacaa

SEQ ID NO: 4610756 - DNA, 25 bp, Homo sapien
ccaagtcgtgatgaatatgaagctc

SEQ ID NO: 4610757 - DNA, 25 bp, Homo sapien
aataacctagagatttagaatattt

SEQ ID NO: 4610758 - DNA, 25 bp, Homo sapien
aaataacctagagatttagaatatt

SEQ ID NO: 4610759 - DNA, 25 bp, Homo sapien
tgaattagagtatgcccatggagca

SEQ ID NO: 4610760 - DNA, 25 bp, Homo sapien
aactggtgaatggaaggtgctcaag

SEQ ID NO: 4610761 - DNA, 25 bp, Homo sapien
gcagtttacatcctagatccaacca

SEQ ID NO: 4610762 - DNA, 25 bp, Homo sapien
ggtgctcaagtccacaggtgtgttc

SEQ ID NO: 4610763 - DNA, 25 bp, Homo sapien
ccgactacacctagtatctactgtt

SEQ ID NO: 4610764 - DNA, 25 bp, Homo sapien
tgcaccgactacacctagtatctac

SEQ ID NO: 4610765 - DNA, 25 bp, Homo sapien
aattacttttgcaccgactacacct

SEQ ID NO: 4610766 - DNA, 25 bp, Homo sapien
tagtatctactgtttctaacttaca

SEQ ID NO: 4610767 - DNA, 25 bp, Homo sapien
tatgtgttaggtttatgtatgcagc

SEQ ID NO: 4610768 - DNA, 25 bp, Homo sapien
taattggaacatttagggcaagagg

SEQ ID NO: 4610769 - DNA, 25 bp, Homo sapien
caagaccgttttgattaaagccact

SEQ ID NO: 4610770 - DNA, 25 bp, Homo sapien
tattgggcaactttactgcttagtc

SEQ ID NO: 4610771 - DNA, 25 bp, Homo sapien
agaatttgccacgaatcaggccact

SEQ ID NO: 4610772 - DNA, 25 bp, Homo sapien
cagaatttgccacgaatcaggccac

SEQ ID NO: 4610773 - DNA, 25 bp, Homo sapien
taatacacttaaaaatacaagagca

SEQ ID NO: 4610774 - DNA, 25 bp, Homo sapien
aatacacttaaaaatacaagagcac

SEQ ID NO: 4610775 - DNA, 25 bp, Homo sapien
ttaatacacttaaaaatacaagagc

SEQ ID NO: 4610776 - DNA, 25 bp, Homo sapien
cctttagttattatcaatgggcaca

SEQ ID NO: 4610777 - DNA, 25 bp, Homo sapien
tgcccggcctgttcagcacctttag

SEQ ID NO: 4610778 - DNA, 25 bp, Homo sapien
tatgctgcctctgtgtcccgagtag

SEQ ID NO: 4610779 - DNA, 25 bp, Homo sapien
aatgggcacattggttgaataaacc

SEQ ID NO: 4610780 - DNA, 25 bp, Homo sapien
cacgatgcgctgagacctgagctta

SEQ ID NO: 4610781 - DNA, 25 bp, Homo sapien
cgcaatggagacgtcctaggaggtc

SEQ ID NO: 4610782 - DNA, 25 bp, Homo sapien
tttaactccgcctagtagtgaccgc

SEQ ID NO: 4610783 - DNA, 25 bp, Homo sapien
tcagattccatttctccagcggcac

SEQ ID NO: 4610784 - DNA, 25 bp, Homo sapien
gagggcgaaaacctcttgtgctgcc

SEQ ID NO: 4610785 - DNA, 25 bp, Homo sapien
tgactgccagttcccggaccacgtt

SEQ ID NO: 4610786 - DNA, 25 bp, Homo sapien
cagttctcagggtgatggtcgcgat

SEQ ID NO: 4610787 - DNA, 25 bp, Homo sapien
gttgcaccagcacatgagggcgaaa

SEQ ID NO: 4610788 - DNA, 25 bp, Homo sapien
caggcgcgccactctttgcctgcgg

SEQ ID NO: 4610789 - DNA, 25 bp, Homo sapien
actccagcgccgggtctcgcgagag

SEQ ID NO: 4610790 - DNA, 25 bp, Homo sapien
agaggcaccggcgacgtgtctgcac

SEQ ID NO: 4610791 - DNA, 25 bp, Homo sapien
aagcgcggaaccgaatctgcaggcg

SEQ ID NO: 4610792 - DNA, 25 bp, Homo sapien
tagcaggaactaaactagaaagtga

SEQ ID NO: 4610793 - DNA, 25 bp, Homo sapien
aaactagaaagtgaagcacctatgg

SEQ ID NO: 4610794 - DNA, 25 bp, Homo sapien
attagcaggaactaaactagaaagt

SEQ ID NO: 4610795 - DNA, 25 bp, Homo sapien
tagaaagtgaagcacctatggaggt

SEQ ID NO: 4610796 - DNA, 25 bp, Homo sapien
cacttccgcagggctctcccactga

SEQ ID NO: 4610797 - DNA, 25 bp, Homo sapien
actccacttccgcagggctctccca

SEQ ID NO: 4610798 - DNA, 25 bp, Homo sapien
tccacttccgcagggctctcccact

SEQ ID NO: 4610799 - DNA, 25 bp, Homo sapien
ctccacttccgcagggctctcccac

SEQ ID NO: 4610800 - DNA, 25 bp, Homo sapien
agccaagtcttttctgaatgtagaa

SEQ ID NO: 4610801 - DNA, 25 bp, Homo sapien
tcttttctgaatgtagaaactttcc

SEQ ID NO: 4610802 - DNA, 25 bp, Homo sapien
acccaagccaagtcttttctgaatg

SEQ ID NO: 4610803 - DNA, 25 bp, Homo sapien
tttctgaatgtagaaactttcctcc

SEQ ID NO: 4610804 - DNA, 25 bp, Homo sapien
gaaaaagaccactcacacctatata

SEQ ID NO: 4610805 - DNA, 25 bp, Homo sapien
tgtttggggtggcttctactcccag

SEQ ID NO: 4610806 - DNA, 25 bp, Homo sapien
ctgagaaatgaggacggacataaat

SEQ ID NO: 4610807 - DNA, 25 bp, Homo sapien
tttgtgataatgtttgcatgtctcc

SEQ ID NO: 4610808 - DNA, 25 bp, Homo sapien
aaagggaacaattgtctgtttgcca

SEQ ID NO: 4610809 - DNA, 25 bp, Homo sapien
acaattgtcttatgacacagtgaca

SEQ ID NO: 4610810 - DNA, 25 bp, Homo sapien
aaatacatactgctggccgggcatg

SEQ ID NO: 4610811 - DNA, 25 bp, Homo sapien
cagaacactggagttagtataaaga

SEQ ID NO: 4610812 - DNA, 25 bp, Homo sapien
gatcttcccggcggctcagtgcagt

SEQ ID NO: 4610813 - DNA, 25 bp, Homo sapien
ctccgcaacgcatgtgggtcagctg

SEQ ID NO: 4610814 - DNA, 25 bp, Homo sapien
tgagctaacgccacagtctggaagt

SEQ ID NO: 4610815 - DNA, 25 bp, Homo sapien
gctggctgacgggaccaggatcttc

SEQ ID NO: 4610816 - DNA, 25 bp, Homo sapien
agtagtctgtctccgcgtttcttgg

SEQ ID NO: 4610817 - DNA, 25 bp, Homo sapien
tctggtcctctagagagctgcgagg

SEQ ID NO: 4610818 - DNA, 25 bp, Homo sapien
catatcgcagcgaacaggagaggag

SEQ ID NO: 4610819 - DNA, 25 bp, Homo sapien
gagaggagacgtcgcagtcccagta

SEQ ID NO: 4610820 - DNA, 25 bp, Homo sapien
cagccgagaaatcccagaaagcagc

SEQ ID NO: 4610821 - DNA, 25 bp, Homo sapien
tcctcaggggccacaagacttgctg

SEQ ID NO: 4610822 - DNA, 25 bp, Homo sapien
tgtgtgtactccacttgaaccacag

SEQ ID NO: 4610823 - DNA, 25 bp, Homo sapien
tattgcttatggataggcagcaagg

SEQ ID NO: 4610824 - DNA, 25 bp, Homo sapien
gcgacgttctctgtgcgccacgtaa

SEQ ID NO: 4610825 - DNA, 25 bp, Homo sapien
tcaaccgccagattactactgccag

SEQ ID NO: 4610826 - DNA, 25 bp, Homo sapien
aacggtcctctggaagcgacgttct

SEQ ID NO: 4610827 - DNA, 25 bp, Homo sapien
tacaggcaacgagagtgtcaaccgc

SEQ ID NO: 4610828 - DNA, 25 bp, Homo sapien
gtgccagcagatccattcagtaggg

SEQ ID NO: 4610829 - DNA, 25 bp, Homo sapien
caggattgtagatgtgatccctcca

SEQ ID NO: 4610830 - DNA, 25 bp, Homo sapien
cttctctgaggtctaggtgccagca

SEQ ID NO: 4610831 - DNA, 25 bp, Homo sapien
cacagctgaaggcatctatttgcaa

SEQ ID NO: 4610832 - DNA, 25 bp, Homo sapien
caaaaaccagctggatccagagatg

SEQ ID NO: 4610833 - DNA, 25 bp, Homo sapien
ttgagacccttgagtgttgtttcaa

SEQ ID NO: 4610834 - DNA, 25 bp, Homo sapien
ttcaaaaagttccaggaagaagctg

SEQ ID NO: 4610835 - DNA, 25 bp, Homo sapien
agaagctgagcctcagcaaaacaaa

SEQ ID NO: 4610836 - DNA, 25 bp, Homo sapien
ttgggtatacgacgtggaaatactg

SEQ ID NO: 4610837 - DNA, 25 bp, Homo sapien
tgtttaggccctcataggtggttga

SEQ ID NO: 4610838 - DNA, 25 bp, Homo sapien
caggtttttgggtatacaacatgaa

SEQ ID NO: 4610839 - DNA, 25 bp, Homo sapien
taagatcgccaggaaatactggaac

SEQ ID NO: 4610840 - DNA, 25 bp, Homo sapien
gaaaataatccgggagtggtagcac

SEQ ID NO: 4610841 - DNA, 25 bp, Homo sapien
aaaataatccgggagtggtagcaca

SEQ ID NO: 4610842 - DNA, 25 bp, Homo sapien
aaataatccgggagtggtagcacat

SEQ ID NO: 4610843 - DNA, 25 bp, Homo sapien
agaaaataatccgggagtggtagca

SEQ ID NO: 4610844 - DNA, 25 bp, Homo sapien
ctcagtagtacagggttacacttct

SEQ ID NO: 4610845 - DNA, 25 bp, Homo sapien
cttctcagtagtacagggttacact

SEQ ID NO: 4610846 - DNA, 25 bp, Homo sapien
ccttgattaagcttctcagtagtac

SEQ ID NO: 4610847 - DNA, 25 bp, Homo sapien
ggattgtatttgtccttgattaagc

SEQ ID NO: 4610848 - DNA, 25 bp, Homo sapien
gtgcttcatcaaacatcctttagcc

SEQ ID NO: 4610849 - DNA, 25 bp, Homo sapien
ttccacatgaatgcagaacactcca

SEQ ID NO: 4610850 - DNA, 25 bp, Homo sapien
ggtcacagaccatcatgtcagccat

SEQ ID NO: 4610851 - DNA, 25 bp, Homo sapien
gaacactccaactattcaacaactt

SEQ ID NO: 4610852 - DNA, 25 bp, Homo sapien
tctagcctgggcaacagagaccttg

SEQ ID NO: 4610853 - DNA, 25 bp, Homo sapien
aggtgtgattgcaccactgccctct

SEQ ID NO: 4610854 - DNA, 25 bp, Homo sapien
agcctgggcaacagagaccttgatt

SEQ ID NO: 4610855 - DNA, 25 bp, Homo sapien
agtgaggtgtgattgcaccactgcc

SEQ ID NO: 4610856 - DNA, 25 bp, Homo sapien
ccaataagcacagttttggacttac

SEQ ID NO: 4610857 - DNA, 25 bp, Homo sapien
gcacagttttggacttactttcaga

SEQ ID NO: 4610858 - DNA, 25 bp, Homo sapien
gacttactttcagatttaagttgcc

SEQ ID NO: 4610859 - DNA, 25 bp, Homo sapien
aggagcagttccacaccaataagca

SEQ ID NO: 4610860 - DNA, 25 bp, Homo sapien
gactggagcagagtggacgtttctt

SEQ ID NO: 4610861 - DNA, 25 bp, Homo sapien
tcatacagtaagtttcaagggccac

SEQ ID NO: 4610862 - DNA, 25 bp, Homo sapien
ccatttgggtatgtgaactgttcac

SEQ ID NO: 4610863 - DNA, 25 bp, Homo sapien
ggtaggtcatggtagcttcatcaga

SEQ ID NO: 4610864 - DNA, 25 bp, Homo sapien
tattgccacaggctccaatcagtgt

SEQ ID NO: 4610865 - DNA, 25 bp, Homo sapien
taaatggagtataccaggcagcggt

SEQ ID NO: 4610866 - DNA, 25 bp, Homo sapien
tgttccaaatgagaggtcagtctga

SEQ ID NO: 4610867 - DNA, 25 bp, Homo sapien
gaatataacaatacctgctgatgct

SEQ ID NO: 4610868 - DNA, 25 bp, Homo sapien
agtgtggagggtgaccatggtagcc

SEQ ID NO: 4610869 - DNA, 25 bp, Homo sapien
cagtgtggagggtgaccatggtagc

SEQ ID NO: 4610870 - DNA, 25 bp, Homo sapien
tgaatatattgaagtacagtacgct

SEQ ID NO: 4610871 - DNA, 25 bp, Homo sapien
aaatataaagaatcgggccagatgc

SEQ ID NO: 4610872 - DNA, 25 bp, Homo sapien
cactgccctggctgcaaattgatat

SEQ ID NO: 4610873 - DNA, 25 bp, Homo sapien
tgtgcccggccgtgtattaccatct

SEQ ID NO: 4610874 - DNA, 25 bp, Homo sapien
gtttactgggtgaatagcactttcc

SEQ ID NO: 4610875 - DNA, 25 bp, Homo sapien
ggtttactgggtgaatagcactttc

SEQ ID NO: 4610876 - DNA, 25 bp, Homo sapien
ttactgggtgaatagcactttcctt

SEQ ID NO: 4610877 - DNA, 25 bp, Homo sapien
ctgggtgaatagcactttccttaca

SEQ ID NO: 4610878 - DNA, 25 bp, Homo sapien
gagaaactcttacaatagctgcaat

SEQ ID NO: 4610879 - DNA, 25 bp, Homo sapien
cagtcattgcataggctgctggaac

SEQ ID NO: 4610880 - DNA, 25 bp, Homo sapien
tctttgaccacccatgagaaactct

SEQ ID NO: 4610881 - DNA, 25 bp, Homo sapien
gaaaagttgcacagccacagactta

SEQ ID NO: 4610882 - DNA, 25 bp, Homo sapien
tgagaactgtagattggagggaaca

SEQ ID NO: 4610883 - DNA, 25 bp, Homo sapien
caacattaagaaggtttgagaccag

SEQ ID NO: 4610884 - DNA, 25 bp, Homo sapien
tactgatggaaatacccatgaagac

SEQ ID NO: 4610885 - DNA, 25 bp, Homo sapien
ccttccttgggatgtttgacccaga

SEQ ID NO: 4610886 - DNA, 25 bp, Homo sapien
tcacacctcctctgtgatcctgagc

SEQ ID NO: 4610887 - DNA, 25 bp, Homo sapien
tgcgcagaggtgccatcacacctcc

SEQ ID NO: 4610888 - DNA, 25 bp, Homo sapien
ttgcgcagaggtgccatcacacctc

SEQ ID NO: 4610889 - DNA, 25 bp, Homo sapien
catcacacctcctctgtgatcctga

SEQ ID NO: 4610890 - DNA, 25 bp, Homo sapien
gcgcttgaactcgtttctcactggg

SEQ ID NO: 4610891 - DNA, 25 bp, Homo sapien
aactcgtttctcactggggtgaaca

SEQ ID NO: 4610892 - DNA, 25 bp, Homo sapien
gaactcgtttctcactggggtgaac

SEQ ID NO: 4610893 - DNA, 25 bp, Homo sapien
cacgcgcttgaactcgtttctcact

SEQ ID NO: 4610894 - DNA, 25 bp, Homo sapien
gttaacttaggcttgctggcgcgca

SEQ ID NO: 4610895 - DNA, 25 bp, Homo sapien
caaacagcttaaaggtgcccggcac

SEQ ID NO: 4610896 - DNA, 25 bp, Homo sapien
ggtgagtcacgtgggcttacaaaca

SEQ ID NO: 4610897 - DNA, 25 bp, Homo sapien
tttgggctcaacttccgcgctgtgg

SEQ ID NO: 4610898 - DNA, 25 bp, Homo sapien
cctccccagcttgacagtcgctgca

SEQ ID NO: 4610899 - DNA, 25 bp, Homo sapien
tcgctgcagtcacggacggagcgtc

SEQ ID NO: 4610900 - DNA, 25 bp, Homo sapien
agtcacggacggagcgtctctgccc

SEQ ID NO: 4610901 - DNA, 25 bp, Homo sapien
tgacagtcgctgcagtcacggacgg

SEQ ID NO: 4610902 - DNA, 25 bp, Homo sapien
gagtatcaccaagccaggcacggtg

SEQ ID NO: 4610903 - DNA, 25 bp, Homo sapien
caggccccttcaaggcttgaaagag

SEQ ID NO: 4610904 - DNA, 25 bp, Homo sapien
tcaaggcttgaaagagtatcaccaa

SEQ ID NO: 4610905 - DNA, 25 bp, Homo sapien
ttgaaagagtatcaccaagccaggc

SEQ ID NO: 4610906 - DNA, 25 bp, Homo sapien
cagagagggtttcctcatgtaggcc

SEQ ID NO: 4610907 - DNA, 25 bp, Homo sapien
cagtaggagaagcctttaaaaggtg

SEQ ID NO: 4610908 - DNA, 25 bp, Homo sapien
cctaagtgctataggaattcctggg

SEQ ID NO: 4610909 - DNA, 25 bp, Homo sapien
gggtcaaactcaatatacaaaccta

SEQ ID NO: 4610910 - DNA, 25 bp, Homo sapien
gaaaagataagactacaaatgggca

SEQ ID NO: 4610911 - DNA, 25 bp, Homo sapien
gctttgggtgcttaaggtctgcttc

SEQ ID NO: 4610912 - DNA, 25 bp, Homo sapien
gaattcttcccagatagctgcctaa

SEQ ID NO: 4610913 - DNA, 25 bp, Homo sapien
ggttaacaaactcactcaaaagcag

SEQ ID NO: 4610914 - DNA, 25 bp, Homo sapien
cacaggcattcactactgaaagagc

SEQ ID NO: 4610915 - DNA, 25 bp, Homo sapien
gttacatttgattagccaaacatgg

SEQ ID NO: 4610916 - DNA, 25 bp, Homo sapien
aacactcagcacactgggtgtggcc

SEQ ID NO: 4610917 - DNA, 25 bp, Homo sapien
cccaacactcagcacactgggtgtg

SEQ ID NO: 4610918 - DNA, 25 bp, Homo sapien
ggagtctggcctttcaatcccaaca

SEQ ID NO: 4610919 - DNA, 25 bp, Homo sapien
ctgaggtgatggagtctggcctttc

SEQ ID NO: 4610920 - DNA, 25 bp, Homo sapien
gtatgcaaggtatttgttgaactcc

SEQ ID NO: 4610921 - DNA, 25 bp, Homo sapien
tcattatcttacagctggggttcag

SEQ ID NO: 4610922 - DNA, 25 bp, Homo sapien
gctcctttagactccatgtatgcaa

SEQ ID NO: 4610923 - DNA, 25 bp, Homo sapien
ccgcacgatgggctcctttagactc

SEQ ID NO: 4610924 - DNA, 25 bp, Homo sapien
tcagtttgtggttgcctatgggctg

SEQ ID NO: 4610925 - DNA, 25 bp, Homo sapien
atgttacagaattctatagcggtaa

SEQ ID NO: 4610926 - DNA, 25 bp, Homo sapien
attctatagcggtaatgattgcaca

SEQ ID NO: 4610927 - DNA, 25 bp, Homo sapien
gtcagtttgtggttgcctatgggct

SEQ ID NO: 4610928 - DNA, 25 bp, Homo sapien
gctggaatgagcaaattatcaatgt

SEQ ID NO: 4610929 - DNA, 25 bp, Homo sapien
ctggatgttgtactgagtgaacagt

SEQ ID NO: 4610930 - DNA, 25 bp, Homo sapien
gttgtactgagtgaacagtcctgac

SEQ ID NO: 4610931 - DNA, 25 bp, Homo sapien
tgagtgaacagtcctgactgccctg

SEQ ID NO: 4610932 - DNA, 25 bp, Homo sapien
taaataactaatgcaatggtggcct

SEQ ID NO: 4610933 - DNA, 25 bp, Homo sapien
gaagttccacttataactgctagga

SEQ ID NO: 4610934 - DNA, 25 bp, Homo sapien
gaaaactcatggcaactataggata

SEQ ID NO: 4610935 - DNA, 25 bp, Homo sapien
tgaaaaattgcatgggagactcctg

SEQ ID NO: 4610936 - DNA, 25 bp, Homo sapien
caaaatccatctcaatagtgcctac

SEQ ID NO: 4610937 - DNA, 25 bp, Homo sapien
caatcacgactcacggtagcatcaa

SEQ ID NO: 4610938 - DNA, 25 bp, Homo sapien
tgaagtagaaaaccgataccatgct

SEQ ID NO: 4610939 - DNA, 25 bp, Homo sapien
gtacctttcctatggcagttatgac

SEQ ID NO: 4610940 - DNA, 25 bp, Homo sapien
taagttcttccagtacttgcgctcc

SEQ ID NO: 4610941 - DNA, 25 bp, Homo sapien
gcaccatagataggtgccacaaaag

SEQ ID NO: 4610942 - DNA, 25 bp, Homo sapien
cgtaatccaagtatcttggagtaca

SEQ ID NO: 4610943 - DNA, 25 bp, Homo sapien
cattaatatctgcaccatagatagg

SEQ ID NO: 4610944 - DNA, 25 bp, Homo sapien
tactgatgaatatttcctgttgtcc

SEQ ID NO: 4610945 - DNA, 25 bp, Homo sapien
tacgattatctagcttcagtttgaa

SEQ ID NO: 4610946 - DNA, 25 bp, Homo sapien
gaacacttctaaactgcttaaatgg

SEQ ID NO: 4610947 - DNA, 25 bp, Homo sapien
cctgttgtcctttgaggaattatgg

SEQ ID NO: 4610948 - DNA, 25 bp, Homo sapien
cataccatgttactactgaacaatt

SEQ ID NO: 4610949 - DNA, 25 bp, Homo sapien
ctgctttaaggtgtcagtatgatgc

SEQ ID NO: 4610950 - DNA, 25 bp, Homo sapien
taatgattgagggaaagtactggaa

SEQ ID NO: 4610951 - DNA, 25 bp, Homo sapien
gatcagccagataaccacataccat

SEQ ID NO: 4610952 - DNA, 25 bp, Homo sapien
ttcaggccaggatctggatgaccca

SEQ ID NO: 4610953 - DNA, 25 bp, Homo sapien
catttgccaggttacaacgcacagg

SEQ ID NO: 4610954 - DNA, 25 bp, Homo sapien
ggccaggatctggatgacccatcag

SEQ ID NO: 4610955 - DNA, 25 bp, Homo sapien
tcagacatgcaactttcaggccagg

SEQ ID NO: 4610956 - DNA, 25 bp, Homo sapien
tagccattctcagggtaggagacca

SEQ ID NO: 4610957 - DNA, 25 bp, Homo sapien
ggaggcccatcagatattaacttga

SEQ ID NO: 4610958 - DNA, 25 bp, Homo sapien
caacgaaggagcaacgtgattcagt

SEQ ID NO: 4610959 - DNA, 25 bp, Homo sapien
caatgattatctggctggtacagga

SEQ ID NO: 4610960 - DNA, 25 bp, Homo sapien
tcagaccctatgctagagactggag

SEQ ID NO: 4610961 - DNA, 25 bp, Homo sapien
gctgtaactagaccatcttgctgca

SEQ ID NO: 4610962 - DNA, 25 bp, Homo sapien
ttacaattgtaacagggccttaaga

SEQ ID NO: 4610963 - DNA, 25 bp, Homo sapien
gactggagctagagaatacatgaga

SEQ ID NO: 4610964 - DNA, 25 bp, Homo sapien
ggtcatcgtcacctgcgaagccagc

SEQ ID NO: 4610965 - DNA, 25 bp, Homo sapien
agacggccgggggtcatcgtcacct

SEQ ID NO: 4610966 - DNA, 25 bp, Homo sapien
ccgttgtcgacgacgggcgtagcaa

SEQ ID NO: 4610967 - DNA, 25 bp, Homo sapien
gacgggcgtagcaatatcatcatct

SEQ ID NO: 4610968 - DNA, 25 bp, Homo sapien
tcgatgaggcacttcagggtcagga

SEQ ID NO: 4610969 - DNA, 25 bp, Homo sapien
tggtaatgatgccatgctcgatgag

SEQ ID NO: 4610970 - DNA, 25 bp, Homo sapien
atgccatgctcgatgaggcacttca

SEQ ID NO: 4610971 - DNA, 25 bp, Homo sapien
catgctcgatgaggcacttcagggt

SEQ ID NO: 4610972 - DNA, 25 bp, Homo sapien
catgggatgctcctcgggaaccaca

SEQ ID NO: 4610973 - DNA, 25 bp, Homo sapien
tgggatgctcctcgggaaccacatg

SEQ ID NO: 4610974 - DNA, 25 bp, Homo sapien
atgggatgctcctcgggaaccacat

SEQ ID NO: 4610975 - DNA, 25 bp, Homo sapien
gggggagggcatatccctcgcagat

SEQ ID NO: 4610976 - DNA, 25 bp, Homo sapien
gagggcatatccctcgcagatgggc

SEQ ID NO: 4610977 - DNA, 25 bp, Homo sapien
tgtgggggagggcatatccctcgca

SEQ ID NO: 4610978 - DNA, 25 bp, Homo sapien
gggcatatccctcgcagatgggcac

SEQ ID NO: 4610979 - DNA, 25 bp, Homo sapien
cgatatcccactcagccgtggtggt

SEQ ID NO: 4610980 - DNA, 25 bp, Homo sapien
gatgtcacgcacgatatcccactca

SEQ ID NO: 4610981 - DNA, 25 bp, Homo sapien
gcacgatatcccactcagccgtggt

SEQ ID NO: 4610982 - DNA, 25 bp, Homo sapien
gatgacctggccgtcagtcagctca

SEQ ID NO: 4610983 - DNA, 25 bp, Homo sapien
aaggaaagctggaagagtgcctcag

SEQ ID NO: 4610984 - DNA, 25 bp, Homo sapien
aaagctggaagagtgcctcagggca

SEQ ID NO: 4610985 - DNA, 25 bp, Homo sapien
gaaggaaagctggaagagtgcctca

SEQ ID NO: 4610986 - DNA, 25 bp, Homo sapien
ggaaagctggaagagtgcctcaggg

SEQ ID NO: 4610987 - DNA, 25 bp, Homo sapien
catcacacttcataatggagttcaa

SEQ ID NO: 4610988 - DNA, 25 bp, Homo sapien
gccagacagcaatgtgttggcgtaa

SEQ ID NO: 4610989 - DNA, 25 bp, Homo sapien
gtaaaggtctttgtggatgtccaca

SEQ ID NO: 4610990 - DNA, 25 bp, Homo sapien
agacagcaatgtgttggcgtaaagg

SEQ ID NO: 4610991 - DNA, 25 bp, Homo sapien
catcctgttggcaacgctagggtac

SEQ ID NO: 4610992 - DNA, 25 bp, Homo sapien
ctgcatcctgttggcaacgctaggg

SEQ ID NO: 4610993 - DNA, 25 bp, Homo sapien
atggagccgccaatccacacagagt

SEQ ID NO: 4610994 - DNA, 25 bp, Homo sapien
ggatggagccgccaatccacacaga

SEQ ID NO: 4610995 - DNA, 25 bp, Homo sapien
tggagccgccaatccacacagagtg

SEQ ID NO: 4610996 - DNA, 25 bp, Homo sapien
caggatggagccgccaatccacaca

SEQ ID NO: 4610997 - DNA, 25 bp, Homo sapien
agaagcatttgaaggatggatgatg

SEQ ID NO: 4610998 - DNA, 25 bp, Homo sapien
agtccgcctagaagcatttgaagga

SEQ ID NO: 4610999 - DNA, 25 bp, Homo sapien
gcctagaagcatttgaaggatggat

SEQ ID NO: 4611000 - DNA, 25 bp, Homo sapien
catttgaaggatggatgatggagcc

SEQ ID NO: 4611001 - DNA, 25 bp, Homo sapien
ctgtctccctcgaacaaaactctcc

SEQ ID NO: 4611002 - DNA, 25 bp, Homo sapien
cctcgaacaaaactctcccacacat

SEQ ID NO: 4611003 - DNA, 25 bp, Homo sapien
ctccctcgaacaaaactctcccaca

SEQ ID NO: 4611004 - DNA, 25 bp, Homo sapien
gtctccctcgaacaaaactctccca

SEQ ID NO: 4611005 - DNA, 25 bp, Homo sapien
tattgaggcgagctatgttccattc

SEQ ID NO: 4611006 - DNA, 25 bp, Homo sapien
accacatccaagactgtattgaggc

SEQ ID NO: 4611007 - DNA, 25 bp, Homo sapien
aattaatgctatagaggtccatgtc

SEQ ID NO: 4611008 - DNA, 25 bp, Homo sapien
catgtcttcggtgtgccatgcaaac

SEQ ID NO: 4611009 - DNA, 25 bp, Homo sapien
gatagtggatctactacagacctag

SEQ ID NO: 4611010 - DNA, 25 bp, Homo sapien
tatggtttccaagcacaatcccaga

SEQ ID NO: 4611011 - DNA, 25 bp, Homo sapien
taaactcaggatgaccgttgtatct

SEQ ID NO: 4611012 - DNA, 25 bp, Homo sapien
tgcctgatgcccaaatttcaaaact

SEQ ID NO: 4611013 - DNA, 25 bp, Homo sapien
gagacaacatcaacctgttcccagg

SEQ ID NO: 4611014 - DNA, 25 bp, Homo sapien
tgtacaaacacaacagagatccctg

SEQ ID NO: 4611015 - DNA, 25 bp, Homo sapien
aactcaaattaacgtcccaggcatc

SEQ ID NO: 4611016 - DNA, 25 bp, Homo sapien
tccaggagcctaaccattgttgaaa

SEQ ID NO: 4611017 - DNA, 25 bp, Homo sapien
tccagacaagcagagttatttgccc

SEQ ID NO: 4611018 - DNA, 25 bp, Homo sapien
tgactggaggtcattctggctaacc

SEQ ID NO: 4611019 - DNA, 25 bp, Homo sapien
ttactgggccctcgtgtcctaagct

SEQ ID NO: 4611020 - DNA, 25 bp, Homo sapien
tgcataataaagactacagccctga

SEQ ID NO: 4611021 - DNA, 25 bp, Homo sapien
gcgtgagccactatgaccggctaat

SEQ ID NO: 4611022 - DNA, 25 bp, Homo sapien
gccttccgatcagctggggctacag

SEQ ID NO: 4611023 - DNA, 25 bp, Homo sapien
cagccttccgatcagctggggctac

SEQ ID NO: 4611024 - DNA, 25 bp, Homo sapien
gtggcaccacctcggatcactgcag

SEQ ID NO: 4611025 - DNA, 25 bp, Homo sapien
ggatggtccaggcttgagtataaag

SEQ ID NO: 4611026 - DNA, 25 bp, Homo sapien
gaacgtgaggaacagaaagcatggc

SEQ ID NO: 4611027 - DNA, 25 bp, Homo sapien
gctgccttcatgagttcaggttccc

SEQ ID NO: 4611028 - DNA, 25 bp, Homo sapien
taactgtggaaagtagaacattgca

SEQ ID NO: 4611029 - DNA, 25 bp, Homo sapien
cagaggggagaattccttccaggcc

SEQ ID NO: 4611030 - DNA, 25 bp, Homo sapien
cttgtgacatccaggaccacagagg

SEQ ID NO: 4611031 - DNA, 25 bp, Homo sapien
agaattccttccaggcccacgtcat

SEQ ID NO: 4611032 - DNA, 25 bp, Homo sapien
ttgtgacatccaggaccacagaggg

SEQ ID NO: 4611033 - DNA, 25 bp, Homo sapien
caacatgtgctcaagatagattggg

SEQ ID NO: 4611034 - DNA, 25 bp, Homo sapien
ggctccgaaattccacataaaccac

SEQ ID NO: 4611035 - DNA, 25 bp, Homo sapien
ccagagctatgttgcctacgaagtc

SEQ ID NO: 4611036 - DNA, 25 bp, Homo sapien
cctacgaagtccacaggctgtgaca

SEQ ID NO: 4611037 - DNA, 25 bp, Homo sapien
ttcctgctcctccaagatggaagtc

SEQ ID NO: 4611038 - DNA, 25 bp, Homo sapien
catattcctgctcctccaagatgga

SEQ ID NO: 4611039 - DNA, 25 bp, Homo sapien
atattcctgctcctccaagatggaa

SEQ ID NO: 4611040 - DNA, 25 bp, Homo sapien
tattcctgctcctccaagatggaag

SEQ ID NO: 4611041 - DNA, 25 bp, Homo sapien
ctatggctttctcccggaatacagc

SEQ ID NO: 4611042 - DNA, 25 bp, Homo sapien
gtatttgctgacttatatcactctc

SEQ ID NO: 4611043 - DNA, 25 bp, Homo sapien
ttctcccggaatacagcaccagaag

SEQ ID NO: 4611044 - DNA, 25 bp, Homo sapien
ctaagaggaagggtctatggctttc

SEQ ID NO: 4611045 - DNA, 25 bp, Homo sapien
tgttgtatcaacaatctcacatgca

SEQ ID NO: 4611046 - DNA, 25 bp, Homo sapien
cactccctctcttgttgtatcaaca

SEQ ID NO: 4611047 - DNA, 25 bp, Homo sapien
tcagctcaagacccgcccaggagaa

SEQ ID NO: 4611048 - DNA, 25 bp, Homo sapien
atgcaggtgtccaccctggcactca

SEQ ID NO: 4611049 - DNA, 25 bp, Homo sapien
ctaacatcaagggtcagacaggcac

SEQ ID NO: 4611050 - DNA, 25 bp, Homo sapien
cagtacctttttgcaacccatcgga

SEQ ID NO: 4611051 - DNA, 25 bp, Homo sapien
cataaaaggctgattacaatttgaa

SEQ ID NO: 4611052 - DNA, 25 bp, Homo sapien
gttcaaacaatcctaacatcaaggg

SEQ ID NO: 4611053 - DNA, 25 bp, Homo sapien
ctttcaagtcgttttccatgctccg

SEQ ID NO: 4611054 - DNA, 25 bp, Homo sapien
cttgagctagtctttcaagtcgttt

SEQ ID NO: 4611055 - DNA, 25 bp, Homo sapien
ttgagctagtctttcaagtcgtttt

SEQ ID NO: 4611056 - DNA, 25 bp, Homo sapien
tcaagtcgttttccatgctccggag

SEQ ID NO: 4611057 - DNA, 25 bp, Homo sapien
cagtttacgtcaaagcattagaagt

SEQ ID NO: 4611058 - DNA, 25 bp, Homo sapien
tcactatcttgcagggtcttttccc

SEQ ID NO: 4611059 - DNA, 25 bp, Homo sapien
tattgtaaggtttacatcggcttca

SEQ ID NO: 4611060 - DNA, 25 bp, Homo sapien
cttcctacgtagttaagtgttacag

SEQ ID NO: 4611061 - DNA, 25 bp, Homo sapien
cattctcggttaagagaagggaact

SEQ ID NO: 4611062 - DNA, 25 bp, Homo sapien
aaatcccactaggaacatggctgga

SEQ ID NO: 4611063 - DNA, 25 bp, Homo sapien
aggactccccaagccaagaacattg

SEQ ID NO: 4611064 - DNA, 25 bp, Homo sapien
catggataatctacgcacaagtcac

SEQ ID NO: 4611065 - DNA, 25 bp, Homo sapien
catattacatttggcctcttggtgc

SEQ ID NO: 4611066 - DNA, 25 bp, Homo sapien
gaacttcatactgatcctggaatgg

SEQ ID NO: 4611067 - DNA, 25 bp, Homo sapien
ggtgcttgctaacgttcacggagtg

SEQ ID NO: 4611068 - DNA, 25 bp, Homo sapien
cttgagaggttgacatgagaggcac

SEQ ID NO: 4611069 - DNA, 25 bp, Homo sapien
tctcaaggatcacgtgctataccca

SEQ ID NO: 4611070 - DNA, 25 bp, Homo sapien
caggatcaagcaagcaaagatggtc

SEQ ID NO: 4611071 - DNA, 25 bp, Homo sapien
gtgtgtaggatctcataagctctct

SEQ ID NO: 4611072 - DNA, 25 bp, Homo sapien
taagtacaaagaggtgtgagggaac

SEQ ID NO: 4611073 - DNA, 25 bp, Homo sapien
tcctcactcagagggaaggcagcca

SEQ ID NO: 4611074 - DNA, 25 bp, Homo sapien
cctcactcagagggaaggcagccat

SEQ ID NO: 4611075 - DNA, 25 bp, Homo sapien
ttcctcactcagagggaaggcagcc

SEQ ID NO: 4611076 - DNA, 25 bp, Homo sapien
cttcctcactcagagggaaggcagc

SEQ ID NO: 4611077 - DNA, 25 bp, Homo sapien
aatgtcatcttgtggcgaagaaatg

SEQ ID NO: 4611078 - DNA, 25 bp, Homo sapien
gaaatgcatcacacccttgggagct

SEQ ID NO: 4611079 - DNA, 25 bp, Homo sapien
cttgtggcgaagaaatgcatcacac

SEQ ID NO: 4611080 - DNA, 25 bp, Homo sapien
atactgatggagaaatcaatgtcat

SEQ ID NO: 4611081 - DNA, 25 bp, Homo sapien
taacccagcagcacccaataggata

SEQ ID NO: 4611082 - DNA, 25 bp, Homo sapien
tgtatgttcacattcagagcctgta

SEQ ID NO: 4611083 - DNA, 25 bp, Homo sapien
tgaagcaatgtttctccttgacaca

SEQ ID NO: 4611084 - DNA, 25 bp, Homo sapien
gcctgtattctctgctagctctgat

SEQ ID NO: 4611085 - DNA, 25 bp, Homo sapien
gattctgcacagttgaaaccatgat

SEQ ID NO: 4611086 - DNA, 25 bp, Homo sapien
tagtcaatccatctgacagtagcaa

SEQ ID NO: 4611087 - DNA, 25 bp, Homo sapien
gcaaaatttgtagattctgcacagt

SEQ ID NO: 4611088 - DNA, 25 bp, Homo sapien
tatgggaaagtgatcatgaattctc

SEQ ID NO: 4611089 - DNA, 25 bp, Homo sapien
cacaggatcgtagggttcctactaa

SEQ ID NO: 4611090 - DNA, 25 bp, Homo sapien
tgcacaggatcgtagggttcctact

SEQ ID NO: 4611091 - DNA, 25 bp, Homo sapien
aatgctgcacaggatcgtagggttc

SEQ ID NO: 4611092 - DNA, 25 bp, Homo sapien
gctgcacaggatcgtagggttccta

SEQ ID NO: 4611093 - DNA, 25 bp, Homo sapien
tgcaaaacaccaactggaggcctca

SEQ ID NO: 4611094 - DNA, 25 bp, Homo sapien
tgagtctacctaacatggagccaca

SEQ ID NO: 4611095 - DNA, 25 bp, Homo sapien
gccacaaactgatcgcaaacaggga

SEQ ID NO: 4611096 - DNA, 25 bp, Homo sapien
aaacagggagagatctgagtctacc

SEQ ID NO: 4611097 - DNA, 25 bp, Homo sapien
tgctagacaatttaatagttgaaac

SEQ ID NO: 4611098 - DNA, 25 bp, Homo sapien
atgctagacaatttaatagttgaaa

SEQ ID NO: 4611099 - DNA, 25 bp, Homo sapien
gctagacaatttaatagttgaaacc

SEQ ID NO: 4611100 - DNA, 25 bp, Homo sapien
gcctgctgttgacacttaccctgca

SEQ ID NO: 4611101 - DNA, 25 bp, Homo sapien
tgaacgccctctttacaggtaggaa

SEQ ID NO: 4611102 - DNA, 25 bp, Homo sapien
acacctgaatgcgagtgagaagtca

SEQ ID NO: 4611103 - DNA, 25 bp, Homo sapien
ctggtccacaaaaacccactgttag

SEQ ID NO: 4611104 - DNA, 25 bp, Homo sapien
agacatggcaaaataatctatagga

SEQ ID NO: 4611105 - DNA, 25 bp, Homo sapien
taacattgtgtagattttcgaaaag

SEQ ID NO: 4611106 - DNA, 25 bp, Homo sapien
taatctataggatcttgaataacat

SEQ ID NO: 4611107 - DNA, 25 bp, Homo sapien
tatattaaagacatggcaaaataat

SEQ ID NO: 4611108 - DNA, 25 bp, Homo sapien
tctacgtcacccatataaataaaca

SEQ ID NO: 4611109 - DNA, 25 bp, Homo sapien
ctacaactgtgcacaaataactaca

SEQ ID NO: 4611110 - DNA, 25 bp, Homo sapien
gaatagtttctagaatccttgatcc

SEQ ID NO: 4611111 - DNA, 25 bp, Homo sapien
taaaattcacttgagtctacaactg

SEQ ID NO: 4611112 - DNA, 25 bp, Homo sapien
ggtccagagctctacatgtacagat

SEQ ID NO: 4611113 - DNA, 25 bp, Homo sapien
ctctgctatgtgtctataagatgca

SEQ ID NO: 4611114 - DNA, 25 bp, Homo sapien
cataaaagatgagggtttgcctgtc

SEQ ID NO: 4611115 - DNA, 25 bp, Homo sapien
cacagaagtagaccgcataaaagat

SEQ ID NO: 4611116 - DNA, 25 bp, Homo sapien
gccacatcgtgaactccaggacatg

SEQ ID NO: 4611117 - DNA, 25 bp, Homo sapien
aatgcactcatggtaactgtcacag

SEQ ID NO: 4611118 - DNA, 25 bp, Homo sapien
tgcttccactagcacagagctacag

SEQ ID NO: 4611119 - DNA, 25 bp, Homo sapien
cttgagagccttttgggtccagtaa

SEQ ID NO: 4611120 - DNA, 25 bp, Homo sapien
cagacagtggcaaagacccacctac

SEQ ID NO: 4611121 - DNA, 25 bp, Homo sapien
tcagacagtggcaaagacccaccta

SEQ ID NO: 4611122 - DNA, 25 bp, Homo sapien
actggagagtattctataattttgg

SEQ ID NO: 4611123 - DNA, 25 bp, Homo sapien
aatacaaactggagagtattctata

SEQ ID NO: 4611124 - DNA, 25 bp, Homo sapien
ttggcactgggtttccaccttcctc

SEQ ID NO: 4611125 - DNA, 25 bp, Homo sapien
tggcactgggtttccaccttcctca

SEQ ID NO: 4611126 - DNA, 25 bp, Homo sapien
ccatctagttttggcactgggtttc

SEQ ID NO: 4611127 - DNA, 25 bp, Homo sapien
tctagttttggcactgggtttccac

SEQ ID NO: 4611128 - DNA, 25 bp, Homo sapien
tctcacaaatcccaatggagaagcg

SEQ ID NO: 4611129 - DNA, 25 bp, Homo sapien
gagaagcgcactgtacatgaaacgt

SEQ ID NO: 4611130 - DNA, 25 bp, Homo sapien
tattcttcaccagctggcgcaaggt

SEQ ID NO: 4611131 - DNA, 25 bp, Homo sapien
cagagaagaggtataggtaacagcc

SEQ ID NO: 4611132 - DNA, 25 bp, Homo sapien
aaatgactccccttgggctctgcca

SEQ ID NO: 4611133 - DNA, 25 bp, Homo sapien
ggctctgccacacccaccaacaggg

SEQ ID NO: 4611134 - DNA, 25 bp, Homo sapien
ctgaaatgactccccttgggctctg

SEQ ID NO: 4611135 - DNA, 25 bp, Homo sapien
caggaggacaagtgaagtccactga

SEQ ID NO: 4611136 - DNA, 25 bp, Homo sapien
gagtcatggcacaactgatcctgag

SEQ ID NO: 4611137 - DNA, 25 bp, Homo sapien
tggactcagcacatgaggactgctt

SEQ ID NO: 4611138 - DNA, 25 bp, Homo sapien
cagttctgatagcatggagtaggta

SEQ ID NO: 4611139 - DNA, 25 bp, Homo sapien
gaatgaccactgactttgacaaaag

SEQ ID NO: 4611140 - DNA, 25 bp, Homo sapien
tccctctgtgcaagaccaagaatgt

SEQ ID NO: 4611141 - DNA, 25 bp, Homo sapien
ccaataacctattttgtcaggatga

SEQ ID NO: 4611142 - DNA, 25 bp, Homo sapien
aagaatgtaagcacaccttcagacc

SEQ ID NO: 4611143 - DNA, 25 bp, Homo sapien
tctccctggtaatttcctcaaaaga

SEQ ID NO: 4611144 - DNA, 25 bp, Homo sapien
tattccgtctgaagctctgccacag

SEQ ID NO: 4611145 - DNA, 25 bp, Homo sapien
tgaagacgcccaactgatgaaagct

SEQ ID NO: 4611146 - DNA, 25 bp, Homo sapien
tcctaatatcccaagctaagctgcg

SEQ ID NO: 4611147 - DNA, 25 bp, Homo sapien
ccctggatgtttacgcacgatgata

SEQ ID NO: 4611148 - DNA, 25 bp, Homo sapien
ctctgatgaatcactgacacttttt

SEQ ID NO: 4611149 - DNA, 25 bp, Homo sapien
tctgcagataacaagtgactcacaa

SEQ ID NO: 4611150 - DNA, 25 bp, Homo sapien
atagtcacggcccaaatgagctcac

SEQ ID NO: 4611151 - DNA, 25 bp, Homo sapien
catagcatttgtactctgcagataa

SEQ ID NO: 4611152 - DNA, 25 bp, Homo sapien
ctttcatgaagtacatgcctgatga

SEQ ID NO: 4611153 - DNA, 25 bp, Homo sapien
tatggcgttcaacctaaaccaggaa

SEQ ID NO: 4611154 - DNA, 25 bp, Homo sapien
gataagttacttagctaagggcaca

SEQ ID NO: 4611155 - DNA, 25 bp, Homo sapien
cagaatagccatgggaaggctcatt

SEQ ID NO: 4611156 - DNA, 25 bp, Homo sapien
tactggaccatcaaaagtgactaag

SEQ ID NO: 4611157 - DNA, 25 bp, Homo sapien
atttcaaactttaaatgtgaatgac

SEQ ID NO: 4611158 - DNA, 25 bp, Homo sapien
ttctgtcttcagaatttcaaacttt

SEQ ID NO: 4611159 - DNA, 25 bp, Homo sapien
tttcaaactttaaatgtgaatgaca

SEQ ID NO: 4611160 - DNA, 25 bp, Homo sapien
gctttttctgtcttcagaatttcaa

SEQ ID NO: 4611161 - DNA, 25 bp, Homo sapien
tggccctgaaatgtaatatggtttt

SEQ ID NO: 4611162 - DNA, 25 bp, Homo sapien
aaaatatatgctctctgataaagtc

SEQ ID NO: 4611163 - DNA, 25 bp, Homo sapien
taatttaggataatgcacacttgat

SEQ ID NO: 4611164 - DNA, 25 bp, Homo sapien
gcaaaattagatcattggccctgaa

SEQ ID NO: 4611165 - DNA, 25 bp, Homo sapien
tagattcagctgagaatgaccgtgg

SEQ ID NO: 4611166 - DNA, 25 bp, Homo sapien
gtacagattactcccaggcttccgg

SEQ ID NO: 4611167 - DNA, 25 bp, Homo sapien
tggtcatgccctacagactcctagg

SEQ ID NO: 4611168 - DNA, 25 bp, Homo sapien
aacgtcaagcatgagggcagtggca

SEQ ID NO: 4611169 - DNA, 25 bp, Homo sapien
gggaaagcacacatggaacagccta

SEQ ID NO: 4611170 - DNA, 25 bp, Homo sapien
agatgagccctatctcatatcaaag

SEQ ID NO: 4611171 - DNA, 25 bp, Homo sapien
gaacagcctatattgcattcaagcc

SEQ ID NO: 4611172 - DNA, 25 bp, Homo sapien
cagtgacatgccactacacgtaaca

SEQ ID NO: 4611173 - DNA, 25 bp, Homo sapien
ccactaggcgtcctgaagtgccagg

SEQ ID NO: 4611174 - DNA, 25 bp, Homo sapien
cttaacatctatgctctaaaaatga

SEQ ID NO: 4611175 - DNA, 25 bp, Homo sapien
catgctcagctaacgttacccaggc

SEQ ID NO: 4611176 - DNA, 25 bp, Homo sapien
tatttgtgcaattttaaagtggtgt

SEQ ID NO: 4611177 - DNA, 25 bp, Homo sapien
atatcaaataggtgattatctcttc

SEQ ID NO: 4611178 - DNA, 25 bp, Homo sapien
agactgattctacagttaatatcaa

SEQ ID NO: 4611179 - DNA, 25 bp, Homo sapien
caaagactgattctacagttaatat

SEQ ID NO: 4611180 - DNA, 25 bp, Homo sapien
tgattatctcttcagatgtaaccat

SEQ ID NO: 4611181 - DNA, 25 bp, Homo sapien
tctttctcctatcactgaccaaaaa

SEQ ID NO: 4611182 - DNA, 25 bp, Homo sapien
tagagaggcattcagatcttggctc

SEQ ID NO: 4611183 - DNA, 25 bp, Homo sapien
tctgtgccttaccccacctaaggaa

SEQ ID NO: 4611184 - DNA, 25 bp, Homo sapien
taaggaactgattacctctttctcc

SEQ ID NO: 4611185 - DNA, 25 bp, Homo sapien
gggcctctatactcagctctgcagg

SEQ ID NO: 4611186 - DNA, 25 bp, Homo sapien
caacacaataagagggctgaatgat

SEQ ID NO: 4611187 - DNA, 25 bp, Homo sapien
gattatgtgaatccagatcaaaggc

SEQ ID NO: 4611188 - DNA, 25 bp, Homo sapien
taaagctgcggcacagattccatgc

SEQ ID NO: 4611189 - DNA, 25 bp, Homo sapien
tgaaccccatgtcgctcataagtag

SEQ ID NO: 4611190 - DNA, 25 bp, Homo sapien
gtccgtttcccacactagactgtag

SEQ ID NO: 4611191 - DNA, 25 bp, Homo sapien
tgtttgcaaactcacaatgctgaca

SEQ ID NO: 4611192 - DNA, 25 bp, Homo sapien
tggctattcaagaggcactacatgg

SEQ ID NO: 4611193 - DNA, 25 bp, Homo sapien
gtttatacaaccacgactatctctg

SEQ ID NO: 4611194 - DNA, 25 bp, Homo sapien
tcagtacctgcatctagtaaggcag

SEQ ID NO: 4611195 - DNA, 25 bp, Homo sapien
tatatgcatgcaagccatctggatg

SEQ ID NO: 4611196 - DNA, 25 bp, Homo sapien
gggccacagacccttaccttgtata

SEQ ID NO: 4611197 - DNA, 25 bp, Homo sapien
aatccaaatgtccatcaatgataga

SEQ ID NO: 4611198 - DNA, 25 bp, Homo sapien
cacatgtatgtttactgtggcacta

SEQ ID NO: 4611199 - DNA, 25 bp, Homo sapien
ctggattaagaaaatgtggcacata

SEQ ID NO: 4611200 - DNA, 25 bp, Homo sapien
ttcacaatagcaaagacttggaacc

SEQ ID NO: 4611201 - DNA, 25 bp, Homo sapien
cagccttgtctccatttacggcatc

SEQ ID NO: 4611202 - DNA, 25 bp, Homo sapien
tctccatttacggcatctcctgtct

SEQ ID NO: 4611203 - DNA, 25 bp, Homo sapien
tgtctccatttacggcatctcctgt

SEQ ID NO: 4611204 - DNA, 25 bp, Homo sapien
cttgtctccatttacggcatctcct

SEQ ID NO: 4611205 - DNA, 25 bp, Homo sapien
ttggagagtgttaaacgtttcgcta

SEQ ID NO: 4611206 - DNA, 25 bp, Homo sapien
ctgaaacacaaccgggttggagagt

SEQ ID NO: 4611207 - DNA, 25 bp, Homo sapien
tgaaacacaaccgggttggagagtg

SEQ ID NO: 4611208 - DNA, 25 bp, Homo sapien
tggagagtgttaaacgtttcgctaa

SEQ ID NO: 4611209 - DNA, 25 bp, Homo sapien
agtaggcttcgtgtgatcaatggtg

SEQ ID NO: 4611210 - DNA, 25 bp, Homo sapien
gctgaaatttcctcacaaagatatc

SEQ ID NO: 4611211 - DNA, 25 bp, Homo sapien
tctgcagccatgcttttacttcagg

SEQ ID NO: 4611212 - DNA, 25 bp, Homo sapien
tgtttccaaagctgatatctgtctg

SEQ ID NO: 4611213 - DNA, 25 bp, Homo sapien
tcttgaatgtaacccacagtgagtt

SEQ ID NO: 4611214 - DNA, 25 bp, Homo sapien
tataagatgccgaagtttgactcca

SEQ ID NO: 4611215 - DNA, 25 bp, Homo sapien
gaatatttgcccttaccacagagga

SEQ ID NO: 4611216 - DNA, 25 bp, Homo sapien
gagttagttctgcacctcaggtcta

SEQ ID NO: 4611217 - DNA, 25 bp, Homo sapien
ctgtcaacaagagaagcagtggtca

SEQ ID NO: 4611218 - DNA, 25 bp, Homo sapien
aacaagagaagcagtggtcagagcg

SEQ ID NO: 4611219 - DNA, 25 bp, Homo sapien
tcaacaagagaagcagtggtcagag

SEQ ID NO: 4611220 - DNA, 25 bp, Homo sapien
agaagcagtggtcagagcgggatgt

SEQ ID NO: 4611221 - DNA, 25 bp, Homo sapien
agaggtagacctagcacactggaag

SEQ ID NO: 4611222 - DNA, 25 bp, Homo sapien
tcctcatcagccttaggccttttag

SEQ ID NO: 4611223 - DNA, 25 bp, Homo sapien
tgacttttcactgaccttgaggtca

SEQ ID NO: 4611224 - DNA, 25 bp, Homo sapien
tgcatcctgctagcagatgactctt

SEQ ID NO: 4611225 - DNA, 25 bp, Homo sapien
tgatatgatctgataaattctgctc

SEQ ID NO: 4611226 - DNA, 25 bp, Homo sapien
ttgatatgatctgataaattctgct

SEQ ID NO: 4611227 - DNA, 25 bp, Homo sapien
gagtttgatatgatctgataaattc

SEQ ID NO: 4611228 - DNA, 25 bp, Homo sapien
ctgagagtttgatatgatctgataa

SEQ ID NO: 4611229 - DNA, 25 bp, Homo sapien
tcatagccactagacaatggaatgg

SEQ ID NO: 4611230 - DNA, 25 bp, Homo sapien
tctgccactgatgagcatgactcag

SEQ ID NO: 4611231 - DNA, 25 bp, Homo sapien
gactttggccatgaaagctcggatg

SEQ ID NO: 4611232 - DNA, 25 bp, Homo sapien
catcagcctcactggatatagaagg

SEQ ID NO: 4611233 - DNA, 25 bp, Homo sapien
caggaggcttacctcccagttattg

SEQ ID NO: 4611234 - DNA, 25 bp, Homo sapien
tgattaagacccataaatgtaaaat

SEQ ID NO: 4611235 - DNA, 25 bp, Homo sapien
gaatgaatatgattaagacccataa

SEQ ID NO: 4611236 - DNA, 25 bp, Homo sapien
gccctaaaggaggatttcagtgcac

SEQ ID NO: 4611237 - DNA, 25 bp, Homo sapien
agacacagggtgtgaccatgttgtc

SEQ ID NO: 4611238 - DNA, 25 bp, Homo sapien
cgaacctctgggctcgaggggatcc

SEQ ID NO: 4611239 - DNA, 25 bp, Homo sapien
tactcttaggcaccttttcaaagaa

SEQ ID NO: 4611240 - DNA, 25 bp, Homo sapien
tcaatgagatatacaattctacata

SEQ ID NO: 4611241 - DNA, 25 bp, Homo sapien
gcctgctaagtggatggcgccaact

SEQ ID NO: 4611242 - DNA, 25 bp, Homo sapien
atcacttggcgcctgctgcttcaca

SEQ ID NO: 4611243 - DNA, 25 bp, Homo sapien
agagtcatcggagatcttgctggag

SEQ ID NO: 4611244 - DNA, 25 bp, Homo sapien
tggatggcgccaactcttagaggtt

SEQ ID NO: 4611245 - DNA, 25 bp, Homo sapien
tgcagacattacagagatagggatc

SEQ ID NO: 4611246 - DNA, 25 bp, Homo sapien
tatatatacagacgtcccaagaaat

SEQ ID NO: 4611247 - DNA, 25 bp, Homo sapien
gcttaacagctcattacagtagtgc

SEQ ID NO: 4611248 - DNA, 25 bp, Homo sapien
taatctaatcctcaaggcatgcaga

SEQ ID NO: 4611249 - DNA, 25 bp, Homo sapien
ctcttgctcagctgcgaagttaggg

SEQ ID NO: 4611250 - DNA, 25 bp, Homo sapien
tcatcctggccactgttgcattata

SEQ ID NO: 4611251 - DNA, 25 bp, Homo sapien
tggatgagaggtttcgcccaagact

SEQ ID NO: 4611252 - DNA, 25 bp, Homo sapien
gacttcgtctgccaaaggtggatga

SEQ ID NO: 4611253 - DNA, 25 bp, Homo sapien
caaaattagttcgtggaaagcatca

SEQ ID NO: 4611254 - DNA, 25 bp, Homo sapien
taatgtttgtcactcaccagtgcca

SEQ ID NO: 4611255 - DNA, 25 bp, Homo sapien
gaatcataccttgctacacttgaag

SEQ ID NO: 4611256 - DNA, 25 bp, Homo sapien
tgagagagaactggcacatgtcact

SEQ ID NO: 4611257 - DNA, 25 bp, Homo sapien
ttagtctttccctccgatgtaacga

SEQ ID NO: 4611258 - DNA, 25 bp, Homo sapien
catcctcttcaaggaaggcattggg

SEQ ID NO: 4611259 - DNA, 25 bp, Homo sapien
aataaggagacttgttccatcctct

SEQ ID NO: 4611260 - DNA, 25 bp, Homo sapien
tgtctcccatctagcatcattttct

SEQ ID NO: 4611261 - DNA, 25 bp, Homo sapien
catgcaacagatctgacaggttcca

SEQ ID NO: 4611262 - DNA, 25 bp, Homo sapien
tctccacggatactacatgaaagtg

SEQ ID NO: 4611263 - DNA, 25 bp, Homo sapien
taagaatgccaatagtccatgcaac

SEQ ID NO: 4611264 - DNA, 25 bp, Homo sapien
aaaagcagtcatcaatcagtatcag

SEQ ID NO: 4611265 - DNA, 25 bp, Homo sapien
tgctgtccacgcatttcttttgcac

SEQ ID NO: 4611266 - DNA, 25 bp, Homo sapien
atttcttttgcaccgggcacacagc

SEQ ID NO: 4611267 - DNA, 25 bp, Homo sapien
tctcatgagaaggaataccataaca

SEQ ID NO: 4611268 - DNA, 25 bp, Homo sapien
agatctcatgagaaggaataccata

SEQ ID NO: 4611269 - DNA, 25 bp, Homo sapien
gaaatcatcgagctgagcacctgct

SEQ ID NO: 4611270 - DNA, 25 bp, Homo sapien
cacctgctctgagatcatgagtgag

SEQ ID NO: 4611271 - DNA, 25 bp, Homo sapien
tacactgctgaggtctgattgttcg

SEQ ID NO: 4611272 - DNA, 25 bp, Homo sapien
gtaaatgctgctattacagctgaaa

SEQ ID NO: 4611273 - DNA, 25 bp, Homo sapien
gcagggactcaaagcgatgatatct

SEQ ID NO: 4611274 - DNA, 25 bp, Homo sapien
agggtttcaatcaaacagagctgaa

SEQ ID NO: 4611275 - DNA, 25 bp, Homo sapien
ggtaatgtttggaacgtgctctaaa

SEQ ID NO: 4611276 - DNA, 25 bp, Homo sapien
gctatagctgtcagatagttgtgcc

SEQ ID NO: 4611277 - DNA, 25 bp, Homo sapien
gacccaattatctgttgtctacaag

SEQ ID NO: 4611278 - DNA, 25 bp, Homo sapien
gctacacttgtatcagtcaaaatag

SEQ ID NO: 4611279 - DNA, 25 bp, Homo sapien
taacaatggaaacgcactaaactct

SEQ ID NO: 4611280 - DNA, 25 bp, Homo sapien
caatggcagaacatatccttacttc

SEQ ID NO: 4611281 - DNA, 25 bp, Homo sapien
agaaatcaactgaaggtccaaaact

SEQ ID NO: 4611282 - DNA, 25 bp, Homo sapien
gaaaaggaagttgatgagtaataag

SEQ ID NO: 4611283 - DNA, 25 bp, Homo sapien
tataaaatactctgatcttaaggag

SEQ ID NO: 4611284 - DNA, 25 bp, Homo sapien
aatcaactgaaggtccaaaactcac

SEQ ID NO: 4611285 - DNA, 25 bp, Homo sapien
aacttcccaattatctcttgcctgc

SEQ ID NO: 4611286 - DNA, 25 bp, Homo sapien
ccacagtttagtttaggattcactc

SEQ ID NO: 4611287 - DNA, 25 bp, Homo sapien
catctggtcagtatttatcagtgtc

SEQ ID NO: 4611288 - DNA, 25 bp, Homo sapien
gcctgcacacatacatagcttccat

SEQ ID NO: 4611289 - DNA, 25 bp, Homo sapien
ttgttcttcgtttgcttaagagcac

SEQ ID NO: 4611290 - DNA, 25 bp, Homo sapien
tcctctcaaattgcagagacagcat

SEQ ID NO: 4611291 - DNA, 25 bp, Homo sapien
cttcgtttgcttaagagcacctcct

SEQ ID NO: 4611292 - DNA, 25 bp, Homo sapien
ctcctctcaaattgcagagacagca

SEQ ID NO: 4611293 - DNA, 25 bp, Homo sapien
tggcacctggatgatatgggctaac

SEQ ID NO: 4611294 - DNA, 25 bp, Homo sapien
gatatgggctaactccattttcaaa

SEQ ID NO: 4611295 - DNA, 25 bp, Homo sapien
aaacaccaggattctaatggcacct

SEQ ID NO: 4611296 - DNA, 25 bp, Homo sapien
gcattcatcatattaaacaccagga

SEQ ID NO: 4611297 - DNA, 25 bp, Homo sapien
aggagacattaaacataaacaaaag

SEQ ID NO: 4611298 - DNA, 25 bp, Homo sapien
ggaaaggagacattaaacataaaca

SEQ ID NO: 4611299 - DNA, 25 bp, Homo sapien
gaaaggagacattaaacataaacaa

SEQ ID NO: 4611300 - DNA, 25 bp, Homo sapien
caggaaaggagacattaaacataaa

SEQ ID NO: 4611301 - DNA, 25 bp, Homo sapien
tcctttctgggacattagtgaatcg

SEQ ID NO: 4611302 - DNA, 25 bp, Homo sapien
tagtgaatcgaacttctgggaccgc

SEQ ID NO: 4611303 - DNA, 25 bp, Homo sapien
attctgcctacatctatttgtgtcc

SEQ ID NO: 4611304 - DNA, 25 bp, Homo sapien
taacctctgtaaaggtattctgcct

SEQ ID NO: 4611305 - DNA, 25 bp, Homo sapien
tgaaattaacactaatttatgaggt

SEQ ID NO: 4611306 - DNA, 25 bp, Homo sapien
gtaaaaaagaagctttgccactcac

SEQ ID NO: 4611307 - DNA, 25 bp, Homo sapien
aaaatataccttgggaatgtgtgca

SEQ ID NO: 4611308 - DNA, 25 bp, Homo sapien
gaaattaacactaatttatgaggta

SEQ ID NO: 4611309 - DNA, 25 bp, Homo sapien
tgagttcctataagagagccccaga

SEQ ID NO: 4611310 - DNA, 25 bp, Homo sapien
cagtcactgtgacctttagagggcc

SEQ ID NO: 4611311 - DNA, 25 bp, Homo sapien
taagggcctaaactaaggatctgct

SEQ ID NO: 4611312 - DNA, 25 bp, Homo sapien
tgctgtacagtggaaagaccttcag

SEQ ID NO: 4611313 - DNA, 25 bp, Homo sapien
ccaacaagatgagtactgcatgcat

SEQ ID NO: 4611314 - DNA, 25 bp, Homo sapien
ctcgtgggtactgaagagatgcagc

SEQ ID NO: 4611315 - DNA, 25 bp, Homo sapien
gcttcagggatgaaccacttgtcca

SEQ ID NO: 4611316 - DNA, 25 bp, Homo sapien
cattttcaatccccagctgaccaga

SEQ ID NO: 4611317 - DNA, 25 bp, Homo sapien
caaccgtgtcatctgtagtatagta

SEQ ID NO: 4611318 - DNA, 25 bp, Homo sapien
cctgagcctatgaataaatcggtac

SEQ ID NO: 4611319 - DNA, 25 bp, Homo sapien
tactggccgtgttaaataataagac

SEQ ID NO: 4611320 - DNA, 25 bp, Homo sapien
tctgattgcctttacgacactactt

SEQ ID NO: 4611321 - DNA, 25 bp, Homo sapien
tacaggagacaacctcaggatgcat

SEQ ID NO: 4611322 - DNA, 25 bp, Homo sapien
gagctcaggctattgtatccccatc

SEQ ID NO: 4611323 - DNA, 25 bp, Homo sapien
tattataatgcctccatgctacagg

SEQ ID NO: 4611324 - DNA, 25 bp, Homo sapien
gaagtcattttaccccacataggaa

SEQ ID NO: 4611325 - DNA, 25 bp, Homo sapien
gatagacatctttctctgtagactg

SEQ ID NO: 4611326 - DNA, 25 bp, Homo sapien
cctttaattgtgctggagatcctca

SEQ ID NO: 4611327 - DNA, 25 bp, Homo sapien
gactcaggattgatgaggcagctta

SEQ ID NO: 4611328 - DNA, 25 bp, Homo sapien
ctgctggccaaaacacctgagaaac

SEQ ID NO: 4611329 - DNA, 25 bp, Homo sapien
aaaaaagagccacgtaagttgcaat

SEQ ID NO: 4611330 - DNA, 25 bp, Homo sapien
ggtcagaacccatcactgtgtatca

SEQ ID NO: 4611331 - DNA, 25 bp, Homo sapien
tgtgtatcagctgacatcatttggg

SEQ ID NO: 4611332 - DNA, 25 bp, Homo sapien
tatatgcctaaacgcacgctggtca

SEQ ID NO: 4611333 - DNA, 25 bp, Homo sapien
acagagaagaacatcaattcacatt

SEQ ID NO: 4611334 - DNA, 25 bp, Homo sapien
gaaggttaaaacagagaagaacatc

SEQ ID NO: 4611335 - DNA, 25 bp, Homo sapien
tggaaggttaaaacagagaagaaca

SEQ ID NO: 4611336 - DNA, 25 bp, Homo sapien
aaaacagagaagaacatcaattcac

SEQ ID NO: 4611337 - DNA, 25 bp, Homo sapien
ggcagcgaccgtaggaacactggat

SEQ ID NO: 4611338 - DNA, 25 bp, Homo sapien
gggttgaccttatgtcgaaagcatg

SEQ ID NO: 4611339 - DNA, 25 bp, Homo sapien
taatgttcaccacataaggccagtc

SEQ ID NO: 4611340 - DNA, 25 bp, Homo sapien
catcagtaccccagcagcatgggca

SEQ ID NO: 4611341 - DNA, 25 bp, Homo sapien
agttcacataagattgtagcaccag

SEQ ID NO: 4611342 - DNA, 25 bp, Homo sapien
tggcccagttcacataagattgtag

SEQ ID NO: 4611343 - DNA, 25 bp, Homo sapien
tcacataagattgtagcaccagcag

SEQ ID NO: 4611344 - DNA, 25 bp, Homo sapien
gcccagttcacataagattgtagca

SEQ ID NO: 4611345 - DNA, 25 bp, Homo sapien
gaaatacctaacacacacttgacat

SEQ ID NO: 4611346 - DNA, 25 bp, Homo sapien
gatgagagttagaagacacatggaa

SEQ ID NO: 4611347 - DNA, 25 bp, Homo sapien
tggatcgctcgagtccaaaagttca

SEQ ID NO: 4611348 - DNA, 25 bp, Homo sapien
acaagtttctagaacgggagctgcc

SEQ ID NO: 4611349 - DNA, 25 bp, Homo sapien
aagtgtcctcataatcaagaccctt

SEQ ID NO: 4611350 - DNA, 25 bp, Homo sapien
tgtcctcataatcaagacccttctc

SEQ ID NO: 4611351 - DNA, 25 bp, Homo sapien
cctcataatcaagacccttctcctc

SEQ ID NO: 4611352 - DNA, 25 bp, Homo sapien
gtgtcctcataatcaagacccttct

SEQ ID NO: 4611353 - DNA, 25 bp, Homo sapien
tgggccactgctaagctaaaacctg

SEQ ID NO: 4611354 - DNA, 25 bp, Homo sapien
cagtgagttcccagatgctagaccc

SEQ ID NO: 4611355 - DNA, 25 bp, Homo sapien
gaatcatgagctcacctcggaggta

SEQ ID NO: 4611356 - DNA, 25 bp, Homo sapien
aaatggtggtaagcagtttcccagc

SEQ ID NO: 4611357 - DNA, 25 bp, Homo sapien
aaaaactgttaatgcagtctctgcc

SEQ ID NO: 4611358 - DNA, 25 bp, Homo sapien
cctatgctcaagattgacagaactg

SEQ ID NO: 4611359 - DNA, 25 bp, Homo sapien
tcacctgggatatttaatgacgcag

SEQ ID NO: 4611360 - DNA, 25 bp, Homo sapien
tgacgcagcagccaatcttttaaca

SEQ ID NO: 4611361 - DNA, 25 bp, Homo sapien
gcatagcttagaccagaagaacccc

SEQ ID NO: 4611362 - DNA, 25 bp, Homo sapien
ccataaacctgtgagagaacccagc

SEQ ID NO: 4611363 - DNA, 25 bp, Homo sapien
ttcatagtccttcgttcaagagggc

SEQ ID NO: 4611364 - DNA, 25 bp, Homo sapien
tctagatacttgttgaggcacttcc

SEQ ID NO: 4611365 - DNA, 25 bp, Homo sapien
tacctactaggaagagactgcagcc

SEQ ID NO: 4611366 - DNA, 25 bp, Homo sapien
caaagtctgctctcaagactggatc

SEQ ID NO: 4611367 - DNA, 25 bp, Homo sapien
gactgcagccaacatctaatgccaa

SEQ ID NO: 4611368 - DNA, 25 bp, Homo sapien
gaaccaagctcatgggaaggtccag

SEQ ID NO: 4611369 - DNA, 25 bp, Homo sapien
tgatatccctattcatccctgcagg

SEQ ID NO: 4611370 - DNA, 25 bp, Homo sapien
gaaactcagatacaggtgcttaggt

SEQ ID NO: 4611371 - DNA, 25 bp, Homo sapien
cattccaggagtatggttcagttta

SEQ ID NO: 4611372 - DNA, 25 bp, Homo sapien
ggatcatcttgcaccagtcctgaaa

SEQ ID NO: 4611373 - DNA, 25 bp, Homo sapien
aaacaatcatttatttggccaagat

SEQ ID NO: 4611374 - DNA, 25 bp, Homo sapien
caatcatttatttggccaagattta

SEQ ID NO: 4611375 - DNA, 25 bp, Homo sapien
gaagaaaagaagtaagagaacagga

SEQ ID NO: 4611376 - DNA, 25 bp, Homo sapien
ttgaaaaacaatcatttatttggcc

SEQ ID NO: 4611377 - DNA, 25 bp, Homo sapien
cactctgcaactgtaataccgggtg

SEQ ID NO: 4611378 - DNA, 25 bp, Homo sapien
ccgatgcttcgtgatgaccgtttga

SEQ ID NO: 4611379 - DNA, 25 bp, Homo sapien
ttgacccacggaaatgaccttctcg

SEQ ID NO: 4611380 - DNA, 25 bp, Homo sapien
aaatgaccttctcgcaagccttgga

SEQ ID NO: 4611381 - DNA, 25 bp, Homo sapien
acgatatcctcaggaaatgtgtctc

SEQ ID NO: 4611382 - DNA, 25 bp, Homo sapien
cgatatcctcaggaaatgtgtctct

SEQ ID NO: 4611383 - DNA, 25 bp, Homo sapien
tgacctcatagaaggtctgcgatgt

SEQ ID NO: 4611384 - DNA, 25 bp, Homo sapien
aacatgacctcatagaaggtctgcg

SEQ ID NO: 4611385 - DNA, 25 bp, Homo sapien
tcaagatagaaaagcgagagaaccc

SEQ ID NO: 4611386 - DNA, 25 bp, Homo sapien
tgggccatgcctgcagacctctaaa

SEQ ID NO: 4611387 - DNA, 25 bp, Homo sapien
gagaaccctaaagagtgaaaggcca

SEQ ID NO: 4611388 - DNA, 25 bp, Homo sapien
tgcagacctctaaaccaaagaaagt

SEQ ID NO: 4611389 - DNA, 25 bp, Homo sapien
gagcacctcaaagtgtagacaccga

SEQ ID NO: 4611390 - DNA, 25 bp, Homo sapien
agacaccgacgaagatccaaaattg

SEQ ID NO: 4611391 - DNA, 25 bp, Homo sapien
cctcaaagtgtagacaccgacgaag

SEQ ID NO: 4611392 - DNA, 25 bp, Homo sapien
aaagtgtagacaccgacgaagatcc

SEQ ID NO: 4611393 - DNA, 25 bp, Homo sapien
ggatgggatgtgacttcccaaagct

SEQ ID NO: 4611394 - DNA, 25 bp, Homo sapien
tggtgagggagtataactgcatcag

SEQ ID NO: 4611395 - DNA, 25 bp, Homo sapien
ggagcagcataatacatcagtgggc

SEQ ID NO: 4611396 - DNA, 25 bp, Homo sapien
tactgtcaataacctccactgggtg

SEQ ID NO: 4611397 - DNA, 25 bp, Homo sapien
ctgttgacaactcgcctcaggaagc

SEQ ID NO: 4611398 - DNA, 25 bp, Homo sapien
gaagctcttgccattcgccatatat

SEQ ID NO: 4611399 - DNA, 25 bp, Homo sapien
taatggcttgtaaacaggcagctcc

SEQ ID NO: 4611400 - DNA, 25 bp, Homo sapien
caaatgcgctacaggaaaggtcagc

SEQ ID NO: 4611401 - DNA, 25 bp, Homo sapien
gcatcctttgaggatcaacacccga

SEQ ID NO: 4611402 - DNA, 25 bp, Homo sapien
gaggaggcctgttaatgcagcacca

SEQ ID NO: 4611403 - DNA, 25 bp, Homo sapien
aggaggaggcctgttaatgcagcac

SEQ ID NO: 4611404 - DNA, 25 bp, Homo sapien
tttgaggatcaacacccgaggagga

SEQ ID NO: 4611405 - DNA, 25 bp, Homo sapien
gctgtttgccgtttgctgtactgcc

SEQ ID NO: 4611406 - DNA, 25 bp, Homo sapien
taaactcgcctgaaatctaccagag

SEQ ID NO: 4611407 - DNA, 25 bp, Homo sapien
tggagctgccagtaagcccgtagct

SEQ ID NO: 4611408 - DNA, 25 bp, Homo sapien
gcctctagggatgtgtaaactcgcc

SEQ ID NO: 4611409 - DNA, 25 bp, Homo sapien
gatgtactcaatgtattcccatggg

SEQ ID NO: 4611410 - DNA, 25 bp, Homo sapien
gtggagatgtactcaatgtattccc

SEQ ID NO: 4611411 - DNA, 25 bp, Homo sapien
gcatgtggaattgaaagggtaggct

SEQ ID NO: 4611412 - DNA, 25 bp, Homo sapien
tgaaagggtaggctgtggagatgta

SEQ ID NO: 4611413 - DNA, 25 bp, Homo sapien
ctccatagagtttgccatcgggcca

SEQ ID NO: 4611414 - DNA, 25 bp, Homo sapien
gtgggcccagcttcagacagtctcg

SEQ ID NO: 4611415 - DNA, 25 bp, Homo sapien
tacatgtgggcaatatttgatccaa

SEQ ID NO: 4611416 - DNA, 25 bp, Homo sapien
catcgggccacttgacttggacgac

SEQ ID NO: 4611417 - DNA, 25 bp, Homo sapien
tctgacttatcatgtcaatcttagc

SEQ ID NO: 4611418 - DNA, 25 bp, Homo sapien
ctccttctgacttatcatgtcaatc

SEQ ID NO: 4611419 - DNA, 25 bp, Homo sapien
acttatcatgtcaatcttagcaagc

SEQ ID NO: 4611420 - DNA, 25 bp, Homo sapien
tccttctgacttatcatgtcaatct

SEQ ID NO: 4611421 - DNA, 25 bp, Homo sapien
gctaacagaaacctagagcacctag

SEQ ID NO: 4611422 - DNA, 25 bp, Homo sapien
ggtaagttaaaccacacagctgtgc

SEQ ID NO: 4611423 - DNA, 25 bp, Homo sapien
tgttctaactctgaaccacatggta

SEQ ID NO: 4611424 - DNA, 25 bp, Homo sapien
cttttctcgcactaaccaaatggaa

SEQ ID NO: 4611425 - DNA, 25 bp, Homo sapien
taaagtgtagatgtcctctctcttc

SEQ ID NO: 4611426 - DNA, 25 bp, Homo sapien
tcttcattgctatctgggatccatc

SEQ ID NO: 4611427 - DNA, 25 bp, Homo sapien
cttgggtaactcttcatctaaagtg

SEQ ID NO: 4611428 - DNA, 25 bp, Homo sapien
gctttcactctcttgggtaactctt

SEQ ID NO: 4611429 - DNA, 25 bp, Homo sapien
tagaattaatccaaaagcccaagta

SEQ ID NO: 4611430 - DNA, 25 bp, Homo sapien
caaaagcccaagtatgtttcctgct

SEQ ID NO: 4611431 - DNA, 25 bp, Homo sapien
cttgggaaacatgaggtgaggacaa

SEQ ID NO: 4611432 - DNA, 25 bp, Homo sapien
aggtccccaagtggcatctgccagc

SEQ ID NO: 4611433 - DNA, 25 bp, Homo sapien
catgcattaatttccccgattttgg

SEQ ID NO: 4611434 - DNA, 25 bp, Homo sapien
tctactaacaagattgcaaatgcct

SEQ ID NO: 4611435 - DNA, 25 bp, Homo sapien
cctttgatctactcctgaatacttt

SEQ ID NO: 4611436 - DNA, 25 bp, Homo sapien
tagacagacattcaattatgccgag

SEQ ID NO: 4611437 - DNA, 25 bp, Homo sapien
actgacacaaacatcagtaactttc

SEQ ID NO: 4611438 - DNA, 25 bp, Homo sapien
atcagtaactttctgagacagaagg

SEQ ID NO: 4611439 - DNA, 25 bp, Homo sapien
acagaaggtagtcaatccatgaaaa

SEQ ID NO: 4611440 - DNA, 25 bp, Homo sapien
tcaagtatggcccagggatgcaaaa

SEQ ID NO: 4611441 - DNA, 25 bp, Homo sapien
tagtgactctatcactgcagacaag

SEQ ID NO: 4611442 - DNA, 25 bp, Homo sapien
agtattcccacaactagcatttagg

SEQ ID NO: 4611443 - DNA, 25 bp, Homo sapien
catcttttaatggtatgtgagggca

SEQ ID NO: 4611444 - DNA, 25 bp, Homo sapien
aataccaccactcctcttgacgatt

SEQ ID NO: 4611445 - DNA, 25 bp, Homo sapien
tcctcttgacgatttcactttgaag

SEQ ID NO: 4611446 - DNA, 25 bp, Homo sapien
tcgagtgggcagcaataccaccact

SEQ ID NO: 4611447 - DNA, 25 bp, Homo sapien
gccacatttcccatcgagtgggcag

SEQ ID NO: 4611448 - DNA, 25 bp, Homo sapien
ggtatacagggtcggccacatattc

SEQ ID NO: 4611449 - DNA, 25 bp, Homo sapien
tccccttggataatgtctgctccat

SEQ ID NO: 4611450 - DNA, 25 bp, Homo sapien
tcttcaaatcgcatgtcagaggctg

SEQ ID NO: 4611451 - DNA, 25 bp, Homo sapien
tcttcaaaaaagtgcggtatacagg

SEQ ID NO: 4611452 - DNA, 25 bp, Homo sapien
gaaacccgatttaccactgtcagag

SEQ ID NO: 4611453 - DNA, 25 bp, Homo sapien
caagggaaatacagatagcacacgg

SEQ ID NO: 4611454 - DNA, 25 bp, Homo sapien
gaggtccccgtgtgtttcctgacag

SEQ ID NO: 4611455 - DNA, 25 bp, Homo sapien
tgggatcatagaagacaactgctca

SEQ ID NO: 4611456 - DNA, 25 bp, Homo sapien
ccaaagaaggtagccgatgccagcc

SEQ ID NO: 4611457 - DNA, 25 bp, Homo sapien
tggaacataaaagagtgcagtggca

SEQ ID NO: 4611458 - DNA, 25 bp, Homo sapien
tagtcacagctgtacataaaaacag

SEQ ID NO: 4611459 - DNA, 25 bp, Homo sapien
ccctagcccagtgtattagtcacag

SEQ ID NO: 4611460 - DNA, 25 bp, Homo sapien
gctgttcacgcaagtcttcatgttt

SEQ ID NO: 4611461 - DNA, 25 bp, Homo sapien
tatctttgatactagccagacatcc

SEQ ID NO: 4611462 - DNA, 25 bp, Homo sapien
tcctggcagccttgagatattccgg

SEQ ID NO: 4611463 - DNA, 25 bp, Homo sapien
ttaaaacgttcccaatatctgcttc

SEQ ID NO: 4611464 - DNA, 25 bp, Homo sapien
ccagctctgtgtgagggtatgtcct

SEQ ID NO: 4611465 - DNA, 25 bp, Homo sapien
gtcccagggcgcttcttcaggctaa

SEQ ID NO: 4611466 - DNA, 25 bp, Homo sapien
ccccaggactgcttctatagaggcc

SEQ ID NO: 4611467 - DNA, 25 bp, Homo sapien
aatggtgcctgccaagagccccagg

SEQ ID NO: 4611468 - DNA, 25 bp, Homo sapien
gccactctggagcaccattgccact

SEQ ID NO: 4611469 - DNA, 25 bp, Homo sapien
ttcacagtgactgacagcagggata

SEQ ID NO: 4611470 - DNA, 25 bp, Homo sapien
cacagtgactgacagcagggatata

SEQ ID NO: 4611471 - DNA, 25 bp, Homo sapien
tgtggcaggctctatctttaacccc

SEQ ID NO: 4611472 - DNA, 25 bp, Homo sapien
gcatcttatgaactctattcagccg

SEQ ID NO: 4611473 - DNA, 25 bp, Homo sapien
cccattcgtctctctggaaatccaa

SEQ ID NO: 4611474 - DNA, 25 bp, Homo sapien
tgcagctccctgcatgcgtttgcat

SEQ ID NO: 4611475 - DNA, 25 bp, Homo sapien
tcacatcaaactgcatattactcat

SEQ ID NO: 4611476 - DNA, 25 bp, Homo sapien
aaaggcaagcgagagtgtgggacct

SEQ ID NO: 4611477 - DNA, 25 bp, Homo sapien
gtgggataacggctgttttattcga

SEQ ID NO: 4611478 - DNA, 25 bp, Homo sapien
aaaaaggcaagcgagagtgtgggac

SEQ ID NO: 4611479 - DNA, 25 bp, Homo sapien
aagaaaaaaggcaagcgagagtgtg

SEQ ID NO: 4611480 - DNA, 25 bp, Homo sapien
gatttgctgtcggccaagctgtctc

SEQ ID NO: 4611481 - DNA, 25 bp, Homo sapien
tgcccagatttgctgtcggccaagc

SEQ ID NO: 4611482 - DNA, 25 bp, Homo sapien
cagatttgctgtcggccaagctgtc

SEQ ID NO: 4611483 - DNA, 25 bp, Homo sapien
ccagatttgctgtcggccaagctgt

SEQ ID NO: 4611484 - DNA, 25 bp, Homo sapien
gttttcaagagaagaggagttgccc

SEQ ID NO: 4611485 - DNA, 25 bp, Homo sapien
ttgcccagtcacagtagcagaacca

SEQ ID NO: 4611486 - DNA, 25 bp, Homo sapien
gagggaccagggtataggcagcagg

SEQ ID NO: 4611487 - DNA, 25 bp, Homo sapien
cagggtataggcagcaggtttctct

SEQ ID NO: 4611488 - DNA, 25 bp, Homo sapien
tctccatggcccctacaactgttcc

SEQ ID NO: 4611489 - DNA, 25 bp, Homo sapien
tccccatgcttctacagctgctggt

SEQ ID NO: 4611490 - DNA, 25 bp, Homo sapien
acaactgttccccatgcttctacag

SEQ ID NO: 4611491 - DNA, 25 bp, Homo sapien
agctgctggtccagtttcatcttct

SEQ ID NO: 4611492 - DNA, 25 bp, Homo sapien
tcccttttcagctgtgcatatttca

SEQ ID NO: 4611493 - DNA, 25 bp, Homo sapien
agtcccttttcagctgtgcatattt

SEQ ID NO: 4611494 - DNA, 25 bp, Homo sapien
tctccacttttattgtgagtccctt

SEQ ID NO: 4611495 - DNA, 25 bp, Homo sapien
cttctccacttttattgtgagtccc

SEQ ID NO: 4611496 - DNA, 25 bp, Homo sapien
cagactcatcgttcagatgaatgat

SEQ ID NO: 4611497 - DNA, 25 bp, Homo sapien
gcctcagactcatcgttcagatgaa

SEQ ID NO: 4611498 - DNA, 25 bp, Homo sapien
gactcatcgttcagatgaatgatgc

SEQ ID NO: 4611499 - DNA, 25 bp, Homo sapien
tcatcgttcagatgaatgatgcaga

SEQ ID NO: 4611500 - DNA, 25 bp, Homo sapien
aagtgcctgcaactctcaagccctg

SEQ ID NO: 4611501 - DNA, 25 bp, Homo sapien
tttgatgcagcggtttctccaggtc

SEQ ID NO: 4611502 - DNA, 25 bp, Homo sapien
ttcctaaaggaggttgtgaaagtgc

SEQ ID NO: 4611503 - DNA, 25 bp, Homo sapien
actcaacacctggcttcctaaagga

SEQ ID NO: 4611504 - DNA, 25 bp, Homo sapien
agccatggcttgtctgccagagcct

SEQ ID NO: 4611505 - DNA, 25 bp, Homo sapien
caaggcagcttctacacagccatgg

SEQ ID NO: 4611506 - DNA, 25 bp, Homo sapien
tgcctacagccagagcagcaaaagc

SEQ ID NO: 4611507 - DNA, 25 bp, Homo sapien
tgcattgattgaaaggtggttgacc

SEQ ID NO: 4611508 - DNA, 25 bp, Homo sapien
gtttgaaacaagaccaaagcctgtg

SEQ ID NO: 4611509 - DNA, 25 bp, Homo sapien
aagtagagacaggatagtacaggat

SEQ ID NO: 4611510 - DNA, 25 bp, Homo sapien
gtacaggataggtccaaagctggct

SEQ ID NO: 4611511 - DNA, 25 bp, Homo sapien
atagtacaggataggtccaaagctg

SEQ ID NO: 4611512 - DNA, 25 bp, Homo sapien
aggccggttctcatgtgtgtccagg

SEQ ID NO: 4611513 - DNA, 25 bp, Homo sapien
ggccggttctcatgtgtgtccaggt

SEQ ID NO: 4611514 - DNA, 25 bp, Homo sapien
cttattatgatgagttttgcccaga

SEQ ID NO: 4611515 - DNA, 25 bp, Homo sapien
ggaatggcagggtacttcaaaccac

SEQ ID NO: 4611516 - DNA, 25 bp, Homo sapien
ggcagggtacttcaaaccactcaca

SEQ ID NO: 4611517 - DNA, 25 bp, Homo sapien
tattatgatgagttttgcccagatg

SEQ ID NO: 4611518 - DNA, 25 bp, Homo sapien
tagccgaaaacagaatcagggctcc

SEQ ID NO: 4611519 - DNA, 25 bp, Homo sapien
tttcataaaatgtcccatcctgtgg

SEQ ID NO: 4611520 - DNA, 25 bp, Homo sapien
ctgtggatagccgaaaacagaatca

SEQ ID NO: 4611521 - DNA, 25 bp, Homo sapien
cctccttcagcctccgtctcaattt

SEQ ID NO: 4611522 - DNA, 25 bp, Homo sapien
cttgcgcagctctctaatcctcgaa

SEQ ID NO: 4611523 - DNA, 25 bp, Homo sapien
caatacctcttgaatgcaactcttt

SEQ ID NO: 4611524 - DNA, 25 bp, Homo sapien
cgaaacaattgtttgagctccccaa

SEQ ID NO: 4611525 - DNA, 25 bp, Homo sapien
gtttgagctccccaatacctcttga

SEQ ID NO: 4611526 - DNA, 25 bp, Homo sapien
tcctcatcatcttcacattgagatg

SEQ ID NO: 4611527 - DNA, 25 bp, Homo sapien
gttcattaggtggaagtggatcaac

SEQ ID NO: 4611528 - DNA, 25 bp, Homo sapien
cctcatcatcttcacattgagatgg

SEQ ID NO: 4611529 - DNA, 25 bp, Homo sapien
catcctcatcatcttcacattgaga

SEQ ID NO: 4611530 - DNA, 25 bp, Homo sapien
actctttaagttcagagccaccttc

SEQ ID NO: 4611531 - DNA, 25 bp, Homo sapien
aactctttaagttcagagccacctt

SEQ ID NO: 4611532 - DNA, 25 bp, Homo sapien
aaggagagcagctcacgagctgggc

SEQ ID NO: 4611533 - DNA, 25 bp, Homo sapien
ggaatgtagttctcaagaaaaggag

SEQ ID NO: 4611534 - DNA, 25 bp, Homo sapien
tgtgagcaagccagaagaagtgcct

SEQ ID NO: 4611535 - DNA, 25 bp, Homo sapien
ccactgggaataggaacgggcactg

SEQ ID NO: 4611536 - DNA, 25 bp, Homo sapien
ccttcacggccaatgttgacactag

SEQ ID NO: 4611537 - DNA, 25 bp, Homo sapien
tagtaccaaatcaggaaggtgccac

SEQ ID NO: 4611538 - DNA, 25 bp, Homo sapien
gactaactttatagcctcgtagggc

SEQ ID NO: 4611539 - DNA, 25 bp, Homo sapien
tggctgtagcacatagactaacttt

SEQ ID NO: 4611540 - DNA, 25 bp, Homo sapien
tgagccagccagattttcagcgcag

SEQ ID NO: 4611541 - DNA, 25 bp, Homo sapien
cagccagattttcagcgcagctggc

SEQ ID NO: 4611542 - DNA, 25 bp, Homo sapien
aacaactcaggtgaagctgtttgag

SEQ ID NO: 4611543 - DNA, 25 bp, Homo sapien
gaattagcattggtgtcaaaaggca

SEQ ID NO: 4611544 - DNA, 25 bp, Homo sapien
gctgaatttcccattatgcaccctg

SEQ ID NO: 4611545 - DNA, 25 bp, Homo sapien
ggatagcaacttcttaacgccaagc

SEQ ID NO: 4611546 - DNA, 25 bp, Homo sapien
caatgacaacctgatacatgccaca

SEQ ID NO: 4611547 - DNA, 25 bp, Homo sapien
gtgtgacaagtgagcagaacctctc

SEQ ID NO: 4611548 - DNA, 25 bp, Homo sapien
agcatagtcatcattagcagcacat

SEQ ID NO: 4611549 - DNA, 25 bp, Homo sapien
cagctggtgtgacaagtgagcagaa

SEQ ID NO: 4611550 - DNA, 25 bp, Homo sapien
aggtaatcctaaactccacatctgt

SEQ ID NO: 4611551 - DNA, 25 bp, Homo sapien
gatgcagtactcaggtgcaccacat

SEQ ID NO: 4611552 - DNA, 25 bp, Homo sapien
agtactcaggtgcaccacatccaag

SEQ ID NO: 4611553 - DNA, 25 bp, Homo sapien
tactcaggtgcaccacatccaagat

SEQ ID NO: 4611554 - DNA, 25 bp, Homo sapien
gtctccaggtggcaatgaacgtgtc

SEQ ID NO: 4611555 - DNA, 25 bp, Homo sapien
tccaggtggcaatgaacgtgtcttc

SEQ ID NO: 4611556 - DNA, 25 bp, Homo sapien
caggtggcaatgaacgtgtcttcag

SEQ ID NO: 4611557 - DNA, 25 bp, Homo sapien
ggtggcaatgaacgtgtcttcagca

SEQ ID NO: 4611558 - DNA, 25 bp, Homo sapien
tgaatgatgctagccagacacatgc

SEQ ID NO: 4611559 - DNA, 25 bp, Homo sapien
gagaaagcccaggcattgagcagga

SEQ ID NO: 4611560 - DNA, 25 bp, Homo sapien
catgctgtggaaaatgttctcctca

SEQ ID NO: 4611561 - DNA, 25 bp, Homo sapien
aaacgcctgcacgagctctcttggg

SEQ ID NO: 4611562 - DNA, 25 bp, Homo sapien
ttctggagagcccacattggctaga

SEQ ID NO: 4611563 - DNA, 25 bp, Homo sapien
catcccaggaagaggatagcgtgct

SEQ ID NO: 4611564 - DNA, 25 bp, Homo sapien
gggtcctctctggacactatttcca

SEQ ID NO: 4611565 - DNA, 25 bp, Homo sapien
gaagggaatgttgtgtaactgagga

SEQ ID NO: 4611566 - DNA, 25 bp, Homo sapien
ccattgctcgttttctggacttcca

SEQ ID NO: 4611567 - DNA, 25 bp, Homo sapien
atttttgataatcaggagaagaatc

SEQ ID NO: 4611568 - DNA, 25 bp, Homo sapien
tttctggacttccacccacgacagc

SEQ ID NO: 4611569 - DNA, 25 bp, Homo sapien
tctctcccagactggaggcgtccag

SEQ ID NO: 4611570 - DNA, 25 bp, Homo sapien
ggagagtcataggtgtaaattgcta

SEQ ID NO: 4611571 - DNA, 25 bp, Homo sapien
gctttctgaagccccttgttagcac

SEQ ID NO: 4611572 - DNA, 25 bp, Homo sapien
ggctttctgaagccccttgttagca

SEQ ID NO: 4611573 - DNA, 25 bp, Homo sapien
gtaaattgctatagccttgggggct

SEQ ID NO: 4611574 - DNA, 25 bp, Homo sapien
tacacctccagagatacagaaaaat

SEQ ID NO: 4611575 - DNA, 25 bp, Homo sapien
cttcagaatggacgtttcttttcca

SEQ ID NO: 4611576 - DNA, 25 bp, Homo sapien
cctcaaaggtgaattcaagtctaca

SEQ ID NO: 4611577 - DNA, 25 bp, Homo sapien
caagtctacacctccagagatacag

SEQ ID NO: 4611578 - DNA, 25 bp, Homo sapien
gggcttcctgtacttccagggtgaa

SEQ ID NO: 4611579 - DNA, 25 bp, Homo sapien
aaattccaaaggaccaacaatggag

SEQ ID NO: 4611580 - DNA, 25 bp, Homo sapien
cagggtgaataacagtggggtgctc

SEQ ID NO: 4611581 - DNA, 25 bp, Homo sapien
tggaaattccaaaggaccaacaatg

SEQ ID NO: 4611582 - DNA, 25 bp, Homo sapien
ttcctttcaggatcctccagcccat

SEQ ID NO: 4611583 - DNA, 25 bp, Homo sapien
aattcctttcaggatcctccagccc

SEQ ID NO: 4611584 - DNA, 25 bp, Homo sapien
attcctttcaggatcctccagccca

SEQ ID NO: 4611585 - DNA, 25 bp, Homo sapien
gttgtcttgttagcatgcaaggaca

SEQ ID NO: 4611586 - DNA, 25 bp, Homo sapien
tgatccaagaaaaatgttgtcttgt

SEQ ID NO: 4611587 - DNA, 25 bp, Homo sapien
gtcttgttagcatgcaaggacagct

SEQ ID NO: 4611588 - DNA, 25 bp, Homo sapien
aatgttgtcttgttagcatgcaagg

SEQ ID NO: 4611589 - DNA, 25 bp, Homo sapien
cctcatctgattgcagttctgacac

SEQ ID NO: 4611590 - DNA, 25 bp, Homo sapien
caaattggtaaacagtgttggcttc

SEQ ID NO: 4611591 - DNA, 25 bp, Homo sapien
cagctgtgagaattgttgcttgacc

SEQ ID NO: 4611592 - DNA, 25 bp, Homo sapien
cagaggccctttcagagtttgtagg

SEQ ID NO: 4611593 - DNA, 25 bp, Homo sapien
atggaattcctttcatgttccccag

SEQ ID NO: 4611594 - DNA, 25 bp, Homo sapien
tgatcatacaggttgactatttcct

SEQ ID NO: 4611595 - DNA, 25 bp, Homo sapien
tcatacaggttgactatttcctctg

SEQ ID NO: 4611596 - DNA, 25 bp, Homo sapien
catggaattcctttcatgttcccca

SEQ ID NO: 4611597 - DNA, 25 bp, Homo sapien
agcctttcgggcaccaagcaagaag

SEQ ID NO: 4611598 - DNA, 25 bp, Homo sapien
gagcctttcgggcaccaagcaagaa

SEQ ID NO: 4611599 - DNA, 25 bp, Homo sapien
caaagagcctttcgggcaccaagca

SEQ ID NO: 4611600 - DNA, 25 bp, Homo sapien
aagagcctttcgggcaccaagcaag

SEQ ID NO: 4611601 - DNA, 25 bp, Homo sapien
ctggccagtattttctctccacggg

SEQ ID NO: 4611602 - DNA, 25 bp, Homo sapien
cagtattttctctccacgggcaaag

SEQ ID NO: 4611603 - DNA, 25 bp, Homo sapien
gtattttctctccacgggcaaagta

SEQ ID NO: 4611604 - DNA, 25 bp, Homo sapien
ggccagtattttctctccacgggca

SEQ ID NO: 4611605 - DNA, 25 bp, Homo sapien
ggcacagctgccataaatcaaacat

SEQ ID NO: 4611606 - DNA, 25 bp, Homo sapien
tgtctgcaccccttaatttcagaag

SEQ ID NO: 4611607 - DNA, 25 bp, Homo sapien
cagcaaagccctttcgaggttcaca

SEQ ID NO: 4611608 - DNA, 25 bp, Homo sapien
ggaatagtgctgcaagtaacatttt

SEQ ID NO: 4611609 - DNA, 25 bp, Homo sapien
ttcccacatgaagaattaggcagga

SEQ ID NO: 4611610 - DNA, 25 bp, Homo sapien
tcccacatgaagaattaggcaggac

SEQ ID NO: 4611611 - DNA, 25 bp, Homo sapien
ctgtctgctggttgcagagggagct

SEQ ID NO: 4611612 - DNA, 25 bp, Homo sapien
tgtctgctggttgcagagggagctg

SEQ ID NO: 4611613 - DNA, 25 bp, Homo sapien
gtggtcttcatgaacatactcttgc

SEQ ID NO: 4611614 - DNA, 25 bp, Homo sapien
caatggtgatctaatattacaatac

SEQ ID NO: 4611615 - DNA, 25 bp, Homo sapien
aacatactcttgcaatggtgatcta

SEQ ID NO: 4611616 - DNA, 25 bp, Homo sapien
gaataagaaggctgcttctggaact

SEQ ID NO: 4611617 - DNA, 25 bp, Homo sapien
gtaagaactaatcactgatccttgc

SEQ ID NO: 4611618 - DNA, 25 bp, Homo sapien
tttctgctcagccaagaaatattct

SEQ ID NO: 4611619 - DNA, 25 bp, Homo sapien
tctgctcagccaagaaatattcttt

SEQ ID NO: 4611620 - DNA, 25 bp, Homo sapien
ttccaaagtaagaactaatcactga

SEQ ID NO: 4611621 - DNA, 25 bp, Homo sapien
tctccatgatgcttctgagtgttca

SEQ ID NO: 4611622 - DNA, 25 bp, Homo sapien
agtctccatgatgcttctgagtgtt

SEQ ID NO: 4611623 - DNA, 25 bp, Homo sapien
gtctccatgatgcttctgagtgttc

SEQ ID NO: 4611624 - DNA, 25 bp, Homo sapien
acatcctgccccatgtaataaggct

SEQ ID NO: 4611625 - DNA, 25 bp, Homo sapien
tggcacatattccatccagcaatat

SEQ ID NO: 4611626 - DNA, 25 bp, Homo sapien
catgtaataaggctctcctgcttct

SEQ ID NO: 4611627 - DNA, 25 bp, Homo sapien
cttttcgcttgggtgacatcctgcc

SEQ ID NO: 4611628 - DNA, 25 bp, Homo sapien
actggtggactatttacttgagcca

SEQ ID NO: 4611629 - DNA, 25 bp, Homo sapien
caactggtggactatttacttgagc

SEQ ID NO: 4611630 - DNA, 25 bp, Homo sapien
ctggtggactatttacttgagccat

SEQ ID NO: 4611631 - DNA, 25 bp, Homo sapien
aactggtggactatttacttgagcc

SEQ ID NO: 4611632 - DNA, 25 bp, Homo sapien
cacccgatagcagaggcgtctgcaa

SEQ ID NO: 4611633 - DNA, 25 bp, Homo sapien
atagcagaggcgtctgcaaagctgg

SEQ ID NO: 4611634 - DNA, 25 bp, Homo sapien
tacagggcacccgatagcagaggcg

SEQ ID NO: 4611635 - DNA, 25 bp, Homo sapien
agggcacccgatagcagaggcgtct

SEQ ID NO: 4611636 - DNA, 25 bp, Homo sapien
gacgcggtccaagggcccgccatcc

SEQ ID NO: 4611637 - DNA, 25 bp, Homo sapien
gcccgccatccacggcgatgtcgaa

SEQ ID NO: 4611638 - DNA, 25 bp, Homo sapien
gggcccgccatccacggcgatgtcg

SEQ ID NO: 4611639 - DNA, 25 bp, Homo sapien
acgcggtccaagggcccgccatcca

SEQ ID NO: 4611640 - DNA, 25 bp, Homo sapien
ttgtgttgggttcagcatttgccat

SEQ ID NO: 4611641 - DNA, 25 bp, Homo sapien
gttgggttcagcatttgccatgggc

SEQ ID NO: 4611642 - DNA, 25 bp, Homo sapien
tgttgggttcagcatttgccatggg

SEQ ID NO: 4611643 - DNA, 25 bp, Homo sapien
cgtttgtgttgggttcagcatttgc

SEQ ID NO: 4611644 - DNA, 25 bp, Homo sapien
ttggcagtgcagatgaaaaaactgg

SEQ ID NO: 4611645 - DNA, 25 bp, Homo sapien
agtcttggcagtgcagatgaaaaaa

SEQ ID NO: 4611646 - DNA, 25 bp, Homo sapien
tcttggcagtgcagatgaaaaaact

SEQ ID NO: 4611647 - DNA, 25 bp, Homo sapien
tggcagtgcagatgaaaaaactggg

SEQ ID NO: 4611648 - DNA, 25 bp, Homo sapien
tgtctgcagtcagcaatgctgatct

SEQ ID NO: 4611649 - DNA, 25 bp, Homo sapien
catgcctactttcaccttgctgaag

SEQ ID NO: 4611650 - DNA, 25 bp, Homo sapien
agttgtctgcagtcagcaatgctga

SEQ ID NO: 4611651 - DNA, 25 bp, Homo sapien
gtcttgccactcctggaccaaagcg

SEQ ID NO: 4611652 - DNA, 25 bp, Homo sapien
tgtgatgtgaacactattatttgat

SEQ ID NO: 4611653 - DNA, 25 bp, Homo sapien
ctgccaagtcactttttatcgccat

SEQ ID NO: 4611654 - DNA, 25 bp, Homo sapien
tagtgatttccgctttcccctgaat

SEQ ID NO: 4611655 - DNA, 25 bp, Homo sapien
cctgaatcccaatggccttctaata

SEQ ID NO: 4611656 - DNA, 25 bp, Homo sapien
ttctaatattgcagccttcgtagag

SEQ ID NO: 4611657 - DNA, 25 bp, Homo sapien
gagcaccatatctttaggatttcct

SEQ ID NO: 4611658 - DNA, 25 bp, Homo sapien
gccttggtctgtcactacctgtgcc

SEQ ID NO: 4611659 - DNA, 25 bp, Homo sapien
ccttggtctgtcactacctgtgcca

SEQ ID NO: 4611660 - DNA, 25 bp, Homo sapien
acgttccaactttaggcagcaatgc

SEQ ID NO: 4611661 - DNA, 25 bp, Homo sapien
gcaacgttccaactttaggcagcaa

SEQ ID NO: 4611662 - DNA, 25 bp, Homo sapien
gaagcagcaacgttccaactttagg

SEQ ID NO: 4611663 - DNA, 25 bp, Homo sapien
gaaggaagcagcaacgttccaactt

SEQ ID NO: 4611664 - DNA, 25 bp, Homo sapien
cattttctacgtctgtgccaaaaga

SEQ ID NO: 4611665 - DNA, 25 bp, Homo sapien
gatctccagagcaacgacagtggca

SEQ ID NO: 4611666 - DNA, 25 bp, Homo sapien
actgaggcattttctacgtctgtgc

SEQ ID NO: 4611667 - DNA, 25 bp, Homo sapien
taagagaagataacaacatggcaag

SEQ ID NO: 4611668 - DNA, 25 bp, Homo sapien
gacatacaccttctaggattaggac

SEQ ID NO: 4611669 - DNA, 25 bp, Homo sapien
tcacatcttcataatcagttacgct

SEQ ID NO: 4611670 - DNA, 25 bp, Homo sapien
cctatgtgtattgcatatgacatac

SEQ ID NO: 4611671 - DNA, 25 bp, Homo sapien
atcagttacgctgcctatgtgtatt

SEQ ID NO: 4611672 - DNA, 25 bp, Homo sapien
ctgtcctgaagtacacttccgtgaa

SEQ ID NO: 4611673 - DNA, 25 bp, Homo sapien
acttccgtgaagagttgttcctttg

SEQ ID NO: 4611674 - DNA, 25 bp, Homo sapien
tgaagtacacttccgtgaagagttg

SEQ ID NO: 4611675 - DNA, 25 bp, Homo sapien
tcctttgtctgttcttccgaaacat

SEQ ID NO: 4611676 - DNA, 25 bp, Homo sapien
aatgttcttccacgctcatcttcta

SEQ ID NO: 4611677 - DNA, 25 bp, Homo sapien
tgactcctggcctcccctaaatgtt

SEQ ID NO: 4611678 - DNA, 25 bp, Homo sapien
gcagttcgggcaaatggaattcctg

SEQ ID NO: 4611679 - DNA, 25 bp, Homo sapien
tcctgtggcaactgtgactcctggc

SEQ ID NO: 4611680 - DNA, 25 bp, Homo sapien
gcactattttgacaagacaagcctt

SEQ ID NO: 4611681 - DNA, 25 bp, Homo sapien
tcatttagaccgcactattttgaca

SEQ ID NO: 4611682 - DNA, 25 bp, Homo sapien
caagacaagcctttttaatcttcaa

SEQ ID NO: 4611683 - DNA, 25 bp, Homo sapien
gaccgcactattttgacaagacaag

SEQ ID NO: 4611684 - DNA, 25 bp, Homo sapien
gttcctcatgacctgaaggataagg

SEQ ID NO: 4611685 - DNA, 25 bp, Homo sapien
catgacctgaaggataaggacatga

SEQ ID NO: 4611686 - DNA, 25 bp, Homo sapien
tggctgttcctcatgacctgaagga

SEQ ID NO: 4611687 - DNA, 25 bp, Homo sapien
ctcatgacctgaaggataaggacat

SEQ ID NO: 4611688 - DNA, 25 bp, Homo sapien
tctacatttagggtaatgttggcca

SEQ ID NO: 4611689 - DNA, 25 bp, Homo sapien
ctacatttagggtaatgttggccat

SEQ ID NO: 4611690 - DNA, 25 bp, Homo sapien
ttgttctacatttagggtaatgttg

SEQ ID NO: 4611691 - DNA, 25 bp, Homo sapien
gttctacatttagggtaatgttggc

SEQ ID NO: 4611692 - DNA, 25 bp, Homo sapien
attgcagacaagattggtgatcctt

SEQ ID NO: 4611693 - DNA, 25 bp, Homo sapien
tcctactggaacattgcagacaaga

SEQ ID NO: 4611694 - DNA, 25 bp, Homo sapien
tctactcattcctactggaacattg

SEQ ID NO: 4611695 - DNA, 25 bp, Homo sapien
agacaagattggtgatcctttctac

SEQ ID NO: 4611696 - DNA, 25 bp, Homo sapien
actctgtgagcctctgacgccagaa

SEQ ID NO: 4611697 - DNA, 25 bp, Homo sapien
ttcaagtcctgagcctgaaagcaaa

SEQ ID NO: 4611698 - DNA, 25 bp, Homo sapien
tgttggcagcatctaatacattggc

SEQ ID NO: 4611699 - DNA, 25 bp, Homo sapien
catggtgtcagttcaagtcctgagc

SEQ ID NO: 4611700 - DNA, 25 bp, Homo sapien
gatacactttatagcgtccacagag

SEQ ID NO: 4611701 - DNA, 25 bp, Homo sapien
tgcagccaagtctgtaacggataca

SEQ ID NO: 4611702 - DNA, 25 bp, Homo sapien
catgtctgctaacgggaaaagtact

SEQ ID NO: 4611703 - DNA, 25 bp, Homo sapien
tagattcatgtctgctaacgggaaa

SEQ ID NO: 4611704 - DNA, 25 bp, Homo sapien
cacattactctccagatgcgcttct

SEQ ID NO: 4611705 - DNA, 25 bp, Homo sapien
tattaacctgtaaacctgaaagtca

SEQ ID NO: 4611706 - DNA, 25 bp, Homo sapien
gcatgctaccatgatagatctaatc

SEQ ID NO: 4611707 - DNA, 25 bp, Homo sapien
ccttctgcttgttggtcacaagttt

SEQ ID NO: 4611708 - DNA, 25 bp, Homo sapien
tgtcatcttataatcaccacaacag

SEQ ID NO: 4611709 - DNA, 25 bp, Homo sapien
acatttcaggatgcctacttgcaga

SEQ ID NO: 4611710 - DNA, 25 bp, Homo sapien
ccaaacaggcatagatgagcctgtg

SEQ ID NO: 4611711 - DNA, 25 bp, Homo sapien
actcttgcagcccaaacaggcatag

SEQ ID NO: 4611712 - DNA, 25 bp, Homo sapien
ttcatcctttgacatcatggttgac

SEQ ID NO: 4611713 - DNA, 25 bp, Homo sapien
tcatggttgacaaaactgtagccat

SEQ ID NO: 4611714 - DNA, 25 bp, Homo sapien
ttttcatcctttgacatcatggttg

SEQ ID NO: 4611715 - DNA, 25 bp, Homo sapien
tttcatcctttgacatcatggttga

SEQ ID NO: 4611716 - DNA, 25 bp, Homo sapien
tatttatccactcagaagacctttg

SEQ ID NO: 4611717 - DNA, 25 bp, Homo sapien
cctttgtaaagcacctcttctgttc

SEQ ID NO: 4611718 - DNA, 25 bp, Homo sapien
caaaacagcattcagccatccattt

SEQ ID NO: 4611719 - DNA, 25 bp, Homo sapien
tgttccaggtcctgtctacaaagac

SEQ ID NO: 4611720 - DNA, 25 bp, Homo sapien
tgactaccccaaaacgtccactgta

SEQ ID NO: 4611721 - DNA, 25 bp, Homo sapien
agtagcagctaggatagccatgccc

SEQ ID NO: 4611722 - DNA, 25 bp, Homo sapien
tacacaggctgtactttgactaccc

SEQ ID NO: 4611723 - DNA, 25 bp, Homo sapien
tattatggaatgaaaggcagcttca

SEQ ID NO: 4611724 - DNA, 25 bp, Homo sapien
gagcttcatgtccagtgctctgatt

SEQ ID NO: 4611725 - DNA, 25 bp, Homo sapien
aagctccttgttgagcttcatgtcc

SEQ ID NO: 4611726 - DNA, 25 bp, Homo sapien
tttcatagttcctgcctgctcaagc

SEQ ID NO: 4611727 - DNA, 25 bp, Homo sapien
catgtccagtgctctgattatacca

SEQ ID NO: 4611728 - DNA, 25 bp, Homo sapien
cttgcagggtggactgttggaacct

SEQ ID NO: 4611729 - DNA, 25 bp, Homo sapien
gtccccaaatgcaccagtgacagtg

SEQ ID NO: 4611730 - DNA, 25 bp, Homo sapien
gacagtgtcagaacaatagtactgc

SEQ ID NO: 4611731 - DNA, 25 bp, Homo sapien
agagaaaggattccccgcttgcagg

SEQ ID NO: 4611732 - DNA, 25 bp, Homo sapien
tcactctctcacaagacatggaggg

SEQ ID NO: 4611733 - DNA, 25 bp, Homo sapien
caagacatggagggtaaaaggcgga

SEQ ID NO: 4611734 - DNA, 25 bp, Homo sapien
cacaagacatggagggtaaaaggcg

SEQ ID NO: 4611735 - DNA, 25 bp, Homo sapien
tctctcacaagacatggagggtaaa

SEQ ID NO: 4611736 - DNA, 25 bp, Homo sapien
taccctgaatgacttgtaaccaatt

SEQ ID NO: 4611737 - DNA, 25 bp, Homo sapien
gaacaatgatcaactgcagtgtcat

SEQ ID NO: 4611738 - DNA, 25 bp, Homo sapien
aacgtcctcaactctaccctgaatg

SEQ ID NO: 4611739 - DNA, 25 bp, Homo sapien
cacaggaggttgaaggacctttgta

SEQ ID NO: 4611740 - DNA, 25 bp, Homo sapien
cattccatgggtgtagacaagtcat

SEQ ID NO: 4611741 - DNA, 25 bp, Homo sapien
caagtcataaattatctgaacttca

SEQ ID NO: 4611742 - DNA, 25 bp, Homo sapien
ctattgagaggatcaatggagttaa

SEQ ID NO: 4611743 - DNA, 25 bp, Homo sapien
aatagcttcatgcaaaaattgacct

SEQ ID NO: 4611744 - DNA, 25 bp, Homo sapien
ttcacgctgagtagtctgaggagca

SEQ ID NO: 4611745 - DNA, 25 bp, Homo sapien
tggagaatctgcatataacctgact

SEQ ID NO: 4611746 - DNA, 25 bp, Homo sapien
ccacagatacgtggacctgcgcagt

SEQ ID NO: 4611747 - DNA, 25 bp, Homo sapien
gacttttacgagtatgaatctgagc

SEQ ID NO: 4611748 - DNA, 25 bp, Homo sapien
gtcttccctttcatggaggcaagaa

SEQ ID NO: 4611749 - DNA, 25 bp, Homo sapien
gcctagggtcattcagtaagtccgt

SEQ ID NO: 4611750 - DNA, 25 bp, Homo sapien
ccctgggtgggcatcatgcaatata

SEQ ID NO: 4611751 - DNA, 25 bp, Homo sapien
catcaccttatgagagcttcacagc

SEQ ID NO: 4611752 - DNA, 25 bp, Homo sapien
ggtatcgttgtcatggcagacccca

SEQ ID NO: 4611753 - DNA, 25 bp, Homo sapien
ccgcgttgtttgaaagtaccaccag

SEQ ID NO: 4611754 - DNA, 25 bp, Homo sapien
aagtaccaccagtgaatctgtcttc

SEQ ID NO: 4611755 - DNA, 25 bp, Homo sapien
tgccacctggggtatcgttgtcatg

SEQ ID NO: 4611756 - DNA, 25 bp, Homo sapien
ggtatatcagatctcaaagcccata

SEQ ID NO: 4611757 - DNA, 25 bp, Homo sapien
agctcacctacttggtacacctggg

SEQ ID NO: 4611758 - DNA, 25 bp, Homo sapien
tgacagtcacttgatcccaggtata

SEQ ID NO: 4611759 - DNA, 25 bp, Homo sapien
actgtggagcaaaccgaggcaacga

SEQ ID NO: 4611760 - DNA, 25 bp, Homo sapien
cccgagtccatggaccattacgcag

SEQ ID NO: 4611761 - DNA, 25 bp, Homo sapien
cccagcagaacaccgcctgttgaag

SEQ ID NO: 4611762 - DNA, 25 bp, Homo sapien
gcagatggtcatcggcctcagtgag

SEQ ID NO: 4611763 - DNA, 25 bp, Homo sapien
cctcagtgagaatcaaggcacagca

SEQ ID NO: 4611764 - DNA, 25 bp, Homo sapien
tcccagccttttgagtcctatatca

SEQ ID NO: 4611765 - DNA, 25 bp, Homo sapien
ttttgagtcctatatcactgcgcct

SEQ ID NO: 4611766 - DNA, 25 bp, Homo sapien
gccttttgagtcctatatcactgcg

SEQ ID NO: 4611767 - DNA, 25 bp, Homo sapien
ttgagtcctatatcactgcgcctcc

SEQ ID NO: 4611768 - DNA, 25 bp, Homo sapien
tctgccttccggtgcgtcgtttacg

SEQ ID NO: 4611769 - DNA, 25 bp, Homo sapien
attctgctttccggcgctctgcctt

SEQ ID NO: 4611770 - DNA, 25 bp, Homo sapien
actgcgctagcgtcccggcattctg

SEQ ID NO: 4611771 - DNA, 25 bp, Homo sapien
cgccagtttgaaccaaagacgccca

SEQ ID NO: 4611772 - DNA, 25 bp, Homo sapien
gaattgtcctccagcgcatacaagg

SEQ ID NO: 4611773 - DNA, 25 bp, Homo sapien
aagcggaggagaacttcatttccca

SEQ ID NO: 4611774 - DNA, 25 bp, Homo sapien
ccttttccgcctctgaagcggagga

SEQ ID NO: 4611775 - DNA, 25 bp, Homo sapien
catttagtgagtagcgattacagaa

SEQ ID NO: 4611776 - DNA, 25 bp, Homo sapien
ggaaagttgatcctccacgagagac

SEQ ID NO: 4611777 - DNA, 25 bp, Homo sapien
tcttttttcctgctaccaatgggta

SEQ ID NO: 4611778 - DNA, 25 bp, Homo sapien
caatgggtagatttgaaagacactc

SEQ ID NO: 4611779 - DNA, 25 bp, Homo sapien
gaggcaacgatgcttcccactgttc

SEQ ID NO: 4611780 - DNA, 25 bp, Homo sapien
tgccagaagctgatgggctcagatt

SEQ ID NO: 4611781 - DNA, 25 bp, Homo sapien
gaagctgatgggctcagatttggct

SEQ ID NO: 4611782 - DNA, 25 bp, Homo sapien
gcttgccagaagctgatgggctcag

SEQ ID NO: 4611783 - DNA, 25 bp, Homo sapien
tggcttgccagaagctgatgggctc

SEQ ID NO: 4611784 - DNA, 25 bp, Homo sapien
cttggctctaaaatctcgattacat

SEQ ID NO: 4611785 - DNA, 25 bp, Homo sapien
caggacctgtggtttgatattgctt

SEQ ID NO: 4611786 - DNA, 25 bp, Homo sapien
ggacctgtggtttgatattgcttac

SEQ ID NO: 4611787 - DNA, 25 bp, Homo sapien
ctaaaatctcgattacattttgcaa

SEQ ID NO: 4611788 - DNA, 25 bp, Homo sapien
ctgcgctcttcatggcctttgaatt

SEQ ID NO: 4611789 - DNA, 25 bp, Homo sapien
agctgcgctcttcatggcctttgaa

SEQ ID NO: 4611790 - DNA, 25 bp, Homo sapien
gctgcgctcttcatggcctttgaat

SEQ ID NO: 4611791 - DNA, 25 bp, Homo sapien
catcccatttacaacaaacaccctg

SEQ ID NO: 4611792 - DNA, 25 bp, Homo sapien
tcaaaggaataccccctccatccca

SEQ ID NO: 4611793 - DNA, 25 bp, Homo sapien
catttacaacaaacaccctggtatg

SEQ ID NO: 4611794 - DNA, 25 bp, Homo sapien
taccccctccatcccatttacaaca

SEQ ID NO: 4611795 - DNA, 25 bp, Homo sapien
cttctgttttctggagttttgctgg

SEQ ID NO: 4611796 - DNA, 25 bp, Homo sapien
tcccatctgtcctcaatcccatcct

SEQ ID NO: 4611797 - DNA, 25 bp, Homo sapien
gagttttgctggttcccatctgtcc

SEQ ID NO: 4611798 - DNA, 25 bp, Homo sapien
ttttctggagttttgctggttccca

SEQ ID NO: 4611799 - DNA, 25 bp, Homo sapien
tatctcatggtgttcatagcaagtc

SEQ ID NO: 4611800 - DNA, 25 bp, Homo sapien
tcttaggaccctggaaaatcttctg

SEQ ID NO: 4611801 - DNA, 25 bp, Homo sapien
catggtgttcatagcaagtcatggc

SEQ ID NO: 4611802 - DNA, 25 bp, Homo sapien
caagtcatggctagaatcttaggac

SEQ ID NO: 4611803 - DNA, 25 bp, Homo sapien
agtgcaagcccccttcacactgctt

SEQ ID NO: 4611804 - DNA, 25 bp, Homo sapien
ctgctttctgagcaagttgggcagg

SEQ ID NO: 4611805 - DNA, 25 bp, Homo sapien
aaactgctttctgagcaagttgggc

SEQ ID NO: 4611806 - DNA, 25 bp, Homo sapien
tctgtcctcaagtgcaagccccctt

SEQ ID NO: 4611807 - DNA, 25 bp, Homo sapien
tccttccctgtggatggagtaaggc

SEQ ID NO: 4611808 - DNA, 25 bp, Homo sapien
tccctgtggatggagtaaggccttg

SEQ ID NO: 4611809 - DNA, 25 bp, Homo sapien
gccttgagggtgtctttggaactga

SEQ ID NO: 4611810 - DNA, 25 bp, Homo sapien
tgagggtgtctttggaactgaagtt

SEQ ID NO: 4611811 - DNA, 25 bp, Homo sapien
catcagggtcctctattctttcatt

SEQ ID NO: 4611812 - DNA, 25 bp, Homo sapien
tcagggtcctctattctttcattca

SEQ ID NO: 4611813 - DNA, 25 bp, Homo sapien
atcagggtcctctattctttcattc

SEQ ID NO: 4611814 - DNA, 25 bp, Homo sapien
tgtagagcttgacttgggagccaag

SEQ ID NO: 4611815 - DNA, 25 bp, Homo sapien
tcagatgtagagcttgacttgggag

SEQ ID NO: 4611816 - DNA, 25 bp, Homo sapien
gccaagttgagccactgaatgtttt

SEQ ID NO: 4611817 - DNA, 25 bp, Homo sapien
caagttgagccactgaatgtttttg

SEQ ID NO: 4611818 - DNA, 25 bp, Homo sapien
tcttatcttcagatgcggatgacgc

SEQ ID NO: 4611819 - DNA, 25 bp, Homo sapien
cttatcttcagatgcggatgacgca

SEQ ID NO: 4611820 - DNA, 25 bp, Homo sapien
ttggaatccttgcaatggtgtaaag

SEQ ID NO: 4611821 - DNA, 25 bp, Homo sapien
aatttggaatccttgcaatggtgta

SEQ ID NO: 4611822 - DNA, 25 bp, Homo sapien
tgcacatccaaatggttcccagtgt

SEQ ID NO: 4611823 - DNA, 25 bp, Homo sapien
tgcttcccggtcaagtcggattgcc

SEQ ID NO: 4611824 - DNA, 25 bp, Homo sapien
ttaccgaatgtaatgtgcttcccgg

SEQ ID NO: 4611825 - DNA, 25 bp, Homo sapien
tgctacgtgagaactgatacctgct

SEQ ID NO: 4611826 - DNA, 25 bp, Homo sapien
gtcctgggcccaaggctaccatggc

SEQ ID NO: 4611827 - DNA, 25 bp, Homo sapien
tcccaagacattggagagagtcctg

SEQ ID NO: 4611828 - DNA, 25 bp, Homo sapien
atgtcccaagacattggagagagtc

SEQ ID NO: 4611829 - DNA, 25 bp, Homo sapien
cctgggcccaaggctaccatggcca

SEQ ID NO: 4611830 - DNA, 25 bp, Homo sapien
tgttatttcatgtgtcccacataag

SEQ ID NO: 4611831 - DNA, 25 bp, Homo sapien
ggtcattaactctcatcaccagaat

SEQ ID NO: 4611832 - DNA, 25 bp, Homo sapien
ggatgggaagactgctgtacaggag

SEQ ID NO: 4611833 - DNA, 25 bp, Homo sapien
tgtgtcccacataagcggtcattaa

SEQ ID NO: 4611834 - DNA, 25 bp, Homo sapien
tgttcagatgcatggcacgctttga

SEQ ID NO: 4611835 - DNA, 25 bp, Homo sapien
ctgttcagatgcatggcacgctttg

SEQ ID NO: 4611836 - DNA, 25 bp, Homo sapien
cagatgcatggcacgctttgataac

SEQ ID NO: 4611837 - DNA, 25 bp, Homo sapien
gcatggcacgctttgataactttta

SEQ ID NO: 4611838 - DNA, 25 bp, Homo sapien
actgggagagtatcagggctgtcat

SEQ ID NO: 4611839 - DNA, 25 bp, Homo sapien
tagtgactgggagagtatcagggct

SEQ ID NO: 4611840 - DNA, 25 bp, Homo sapien
tgtctagtgactgggagagtatcag

SEQ ID NO: 4611841 - DNA, 25 bp, Homo sapien
ttgtctagtgactgggagagtatca

SEQ ID NO: 4611842 - DNA, 25 bp, Homo sapien
actttaacaagcgcagggtgacttg

SEQ ID NO: 4611843 - DNA, 25 bp, Homo sapien
tttaacaagcgcagggtgacttggc

SEQ ID NO: 4611844 - DNA, 25 bp, Homo sapien
aacaagcgcagggtgacttggccca

SEQ ID NO: 4611845 - DNA, 25 bp, Homo sapien
ttaacaagcgcagggtgacttggcc

SEQ ID NO: 4611846 - DNA, 25 bp, Homo sapien
taatcttctccctaatgaaataagg

SEQ ID NO: 4611847 - DNA, 25 bp, Homo sapien
tcccagttcatagtacgtcttaaaa

SEQ ID NO: 4611848 - DNA, 25 bp, Homo sapien
tactgttgtttacttccactgaaca

SEQ ID NO: 4611849 - DNA, 25 bp, Homo sapien
cccagtactgttgtttacttccact

SEQ ID NO: 4611850 - DNA, 25 bp, Homo sapien
caacttggcacaggcctgcctgcat

SEQ ID NO: 4611851 - DNA, 25 bp, Homo sapien
gggcaacttggcacaggcctgcctg

SEQ ID NO: 4611852 - DNA, 25 bp, Homo sapien
cttttcctctaccttctgtcttaag

SEQ ID NO: 4611853 - DNA, 25 bp, Homo sapien
tttaaagactgaggggcaacttggc

SEQ ID NO: 4611854 - DNA, 25 bp, Homo sapien
tgaaaaagagcctttctgtttccaa

SEQ ID NO: 4611855 - DNA, 25 bp, Homo sapien
gtttctcactaatatcaggtatgcg

SEQ ID NO: 4611856 - DNA, 25 bp, Homo sapien
gtttatccaatccacatttctcttc

SEQ ID NO: 4611857 - DNA, 25 bp, Homo sapien
cgggtctggcgatgttgccatctca

SEQ ID NO: 4611858 - DNA, 25 bp, Homo sapien
tctatagcacatccttgaattgtgt

SEQ ID NO: 4611859 - DNA, 25 bp, Homo sapien
tcaaggaagcagctccttaatcagc

SEQ ID NO: 4611860 - DNA, 25 bp, Homo sapien
cacatgcgtgacttagagccttggg

SEQ ID NO: 4611861 - DNA, 25 bp, Homo sapien
tttcaggtaactccaaatcctacca

SEQ ID NO: 4611862 - DNA, 25 bp, Homo sapien
aaataggaaagcataaaaggaagca

SEQ ID NO: 4611863 - DNA, 25 bp, Homo sapien
catttgtagaaaggttcactcccct

SEQ ID NO: 4611864 - DNA, 25 bp, Homo sapien
agggaagaaagcgaatctatactcc

SEQ ID NO: 4611865 - DNA, 25 bp, Homo sapien
ggaagaaagcgaatctatactccat

SEQ ID NO: 4611866 - DNA, 25 bp, Homo sapien
ttagggaagaaagcgaatctatact

SEQ ID NO: 4611867 - DNA, 25 bp, Homo sapien
cttagggaagaaagcgaatctatac

SEQ ID NO: 4611868 - DNA, 25 bp, Homo sapien
catgtagccagccagcactattaaa

SEQ ID NO: 4611869 - DNA, 25 bp, Homo sapien
caaacacaaatgctagttgggattg

SEQ ID NO: 4611870 - DNA, 25 bp, Homo sapien
tgggcatggctgaagaagtacttcc

SEQ ID NO: 4611871 - DNA, 25 bp, Homo sapien
tgcctaggtgagttgtcaatgagct

SEQ ID NO: 4611872 - DNA, 25 bp, Homo sapien
tcttgtgattttgcatgatgtctta

SEQ ID NO: 4611873 - DNA, 25 bp, Homo sapien
gatgtcttactacttttgggccaat

SEQ ID NO: 4611874 - DNA, 25 bp, Homo sapien
tgcatgatgtcttactacttttggg

SEQ ID NO: 4611875 - DNA, 25 bp, Homo sapien
tttgggccaatctcagtgtcagcca

SEQ ID NO: 4611876 - DNA, 25 bp, Homo sapien
tcttccgaactgaacttcagggtct

SEQ ID NO: 4611877 - DNA, 25 bp, Homo sapien
tcagttcttccgaactgaacttcag

SEQ ID NO: 4611878 - DNA, 25 bp, Homo sapien
gaacttcagttcttccgaactgaac

SEQ ID NO: 4611879 - DNA, 25 bp, Homo sapien
agttcttccgaactgaacttcaggg

SEQ ID NO: 4611880 - DNA, 25 bp, Homo sapien
ggggtgggccgacaccagttgtcat

SEQ ID NO: 4611881 - DNA, 25 bp, Homo sapien
caggggtgggccgacaccagttgtc

SEQ ID NO: 4611882 - DNA, 25 bp, Homo sapien
cttgtggggccaatcagcaggggtg

SEQ ID NO: 4611883 - DNA, 25 bp, Homo sapien
ccccttcttgtggggccaatcagca

SEQ ID NO: 4611884 - DNA, 25 bp, Homo sapien
tactcaagctttacatcatccatat

SEQ ID NO: 4611885 - DNA, 25 bp, Homo sapien
caagctttacatcatccatattacc

SEQ ID NO: 4611886 - DNA, 25 bp, Homo sapien
ctcaagctttacatcatccatatta

SEQ ID NO: 4611887 - DNA, 25 bp, Homo sapien
ctactcaagctttacatcatccata

SEQ ID NO: 4611888 - DNA, 25 bp, Homo sapien
tgttgcattcactttgccctggact

SEQ ID NO: 4611889 - DNA, 25 bp, Homo sapien
tttgttttgtgatatcgcagaggaa

SEQ ID NO: 4611890 - DNA, 25 bp, Homo sapien
ctttgactccttttgtctttggcat

SEQ ID NO: 4611891 - DNA, 25 bp, Homo sapien
tcaaaagctgagctttgactccttt

SEQ ID NO: 4611892 - DNA, 25 bp, Homo sapien
tttgtgatatcgcagaggaagaaat

SEQ ID NO: 4611893 - DNA, 25 bp, Homo sapien
tgtgaaatagccatagggcaggcag

SEQ ID NO: 4611894 - DNA, 25 bp, Homo sapien
caatcttgccatgttcattagtttc

SEQ ID NO: 4611895 - DNA, 25 bp, Homo sapien
tagacctctgatggagctattaatg

SEQ ID NO: 4611896 - DNA, 25 bp, Homo sapien
tcctccagataagatctaataaggg

SEQ ID NO: 4611897 - DNA, 25 bp, Homo sapien
gatttctctcatcccagaatccgat

SEQ ID NO: 4611898 - DNA, 25 bp, Homo sapien
aagatttctctcatcccagaatccg

SEQ ID NO: 4611899 - DNA, 25 bp, Homo sapien
ttacaagatttctctcatcccagaa

SEQ ID NO: 4611900 - DNA, 25 bp, Homo sapien
tctctcatcccagaatccgatggca

SEQ ID NO: 4611901 - DNA, 25 bp, Homo sapien
ccctaatgcaatcattggcagccaa

SEQ ID NO: 4611902 - DNA, 25 bp, Homo sapien
cctaatgcaatcattggcagccaag

SEQ ID NO: 4611903 - DNA, 25 bp, Homo sapien
aatggctgtgtcattcagaagcagt

SEQ ID NO: 4611904 - DNA, 25 bp, Homo sapien
aatcttccatattaatggagtcaga

SEQ ID NO: 4611905 - DNA, 25 bp, Homo sapien
gctatcgtttaagagcatttggctg

SEQ ID NO: 4611906 - DNA, 25 bp, Homo sapien
taaagagaagctatcgtttaagagc

SEQ ID NO: 4611907 - DNA, 25 bp, Homo sapien
tttccatacctctaggtcaactgag

SEQ ID NO: 4611908 - DNA, 25 bp, Homo sapien
aatccagaagactcctctttccata

SEQ ID NO: 4611909 - DNA, 25 bp, Homo sapien
tctaggtcaactgagattcccattc

SEQ ID NO: 4611910 - DNA, 25 bp, Homo sapien
gacttactttctgttactccataaa

SEQ ID NO: 4611911 - DNA, 25 bp, Homo sapien
tctgctttgcggttatcaggacttg

SEQ ID NO: 4611912 - DNA, 25 bp, Homo sapien
tgggaacattccaaacttttctgct

SEQ ID NO: 4611913 - DNA, 25 bp, Homo sapien
tttttacttcatcgccctttagagc

SEQ ID NO: 4611914 - DNA, 25 bp, Homo sapien
gacttgatgatctagaattgttcca

SEQ ID NO: 4611915 - DNA, 25 bp, Homo sapien
cttaggccctatatgccgcagctcc

SEQ ID NO: 4611916 - DNA, 25 bp, Homo sapien
ttaggccctatatgccgcagctcca

SEQ ID NO: 4611917 - DNA, 25 bp, Homo sapien
taggccctatatgccgcagctccat

SEQ ID NO: 4611918 - DNA, 25 bp, Homo sapien
ttcctcttgtctctgttgtatcctg

SEQ ID NO: 4611919 - DNA, 25 bp, Homo sapien
tctctgttgtatcctgagctattct

SEQ ID NO: 4611920 - DNA, 25 bp, Homo sapien
ttatatccagtgaatttaagactgc

SEQ ID NO: 4611921 - DNA, 25 bp, Homo sapien
tatcctgagctattcttatatccag

SEQ ID NO: 4611922 - DNA, 25 bp, Homo sapien
aggtcagtttctcttttccaagacg

SEQ ID NO: 4611923 - DNA, 25 bp, Homo sapien
caaggtcagtttctcttttccaaga

SEQ ID NO: 4611924 - DNA, 25 bp, Homo sapien
cttcaaggtcagtttctcttttcca

SEQ ID NO: 4611925 - DNA, 25 bp, Homo sapien
tcaaggtcagtttctcttttccaag

SEQ ID NO: 4611926 - DNA, 25 bp, Homo sapien
cagtgactggcagtttccgcatgca

SEQ ID NO: 4611927 - DNA, 25 bp, Homo sapien
gtggcagtgactggcagtttccgca

SEQ ID NO: 4611928 - DNA, 25 bp, Homo sapien
ctgtggcagtgactggcagtttccg

SEQ ID NO: 4611929 - DNA, 25 bp, Homo sapien
ggcagtgactggcagtttccgcatg

SEQ ID NO: 4611930 - DNA, 25 bp, Homo sapien
gatttttcctatcagctgatgttcc

SEQ ID NO: 4611931 - DNA, 25 bp, Homo sapien
caaaagcatggcgaggaaggtcgca

SEQ ID NO: 4611932 - DNA, 25 bp, Homo sapien
tgatgttccaggaaaccattcctac

SEQ ID NO: 4611933 - DNA, 25 bp, Homo sapien
gcttgggtcagtgcttaaaataata

SEQ ID NO: 4611934 - DNA, 25 bp, Homo sapien
catggacttgaaggcagtcttttca

SEQ ID NO: 4611935 - DNA, 25 bp, Homo sapien
caggagctgaaagcagtttacatgc

SEQ ID NO: 4611936 - DNA, 25 bp, Homo sapien
tccattagtgaactcctcaaccagg

SEQ ID NO: 4611937 - DNA, 25 bp, Homo sapien
gtctgtacaggtattagcgcctcca

SEQ ID NO: 4611938 - DNA, 25 bp, Homo sapien
aaaactgtagcacttgtacctgggt

SEQ ID NO: 4611939 - DNA, 25 bp, Homo sapien
agcacttgtacctgggtggccctgg

SEQ ID NO: 4611940 - DNA, 25 bp, Homo sapien
tgtatgcaaggaaaactgtagcact

SEQ ID NO: 4611941 - DNA, 25 bp, Homo sapien
tgggtggacttcgtggctggaagag

SEQ ID NO: 4611942 - DNA, 25 bp, Homo sapien
tgtgcagcactttgtgtggtcactg

SEQ ID NO: 4611943 - DNA, 25 bp, Homo sapien
cactttgtgtggtcactgaggtgag

SEQ ID NO: 4611944 - DNA, 25 bp, Homo sapien
agcactttgtgtggtcactgaggtg

SEQ ID NO: 4611945 - DNA, 25 bp, Homo sapien
tgcagcactttgtgtggtcactgag

SEQ ID NO: 4611946 - DNA, 25 bp, Homo sapien
aaagctgggtaacctgggctggcaa

SEQ ID NO: 4611947 - DNA, 25 bp, Homo sapien
cctgggctggcaaataaggaggatg

SEQ ID NO: 4611948 - DNA, 25 bp, Homo sapien
ctgggctggcaaataaggaggatgg

SEQ ID NO: 4611949 - DNA, 25 bp, Homo sapien
ctaaagctgggtaacctgggctggc

SEQ ID NO: 4611950 - DNA, 25 bp, Homo sapien
tgagtagtaccagtttagaaccagg

SEQ ID NO: 4611951 - DNA, 25 bp, Homo sapien
gagtaccagtggtatcagaaccagt

SEQ ID NO: 4611952 - DNA, 25 bp, Homo sapien
cagaaccagtggtataaagcgggtc

SEQ ID NO: 4611953 - DNA, 25 bp, Homo sapien
tctgtctaggagtatctctgctggc

SEQ ID NO: 4611954 - DNA, 25 bp, Homo sapien
tgccctttctgtagcaagtacagcc

SEQ ID NO: 4611955 - DNA, 25 bp, Homo sapien
aacgattcttataaggctgatcttc

SEQ ID NO: 4611956 - DNA, 25 bp, Homo sapien
gccctttctgtagcaagtacagcca

SEQ ID NO: 4611957 - DNA, 25 bp, Homo sapien
tattagtcagaaaacgattcttata

SEQ ID NO: 4611958 - DNA, 25 bp, Homo sapien
gatttccggatttttggagatattc

SEQ ID NO: 4611959 - DNA, 25 bp, Homo sapien
taagatttccggatttttggagata

SEQ ID NO: 4611960 - DNA, 25 bp, Homo sapien
ctactgcttgcgtggaaaagtaaga

SEQ ID NO: 4611961 - DNA, 25 bp, Homo sapien
tactgcttgcgtggaaaagtaagat

SEQ ID NO: 4611962 - DNA, 25 bp, Homo sapien
tatgacaggaaaatggatgaagaga

SEQ ID NO: 4611963 - DNA, 25 bp, Homo sapien
tgacaggaaaatggatgaagagaaa

SEQ ID NO: 4611964 - DNA, 25 bp, Homo sapien
ctatgacaggaaaatggatgaagag

SEQ ID NO: 4611965 - DNA, 25 bp, Homo sapien
gacaggaaaatggatgaagagaaac

SEQ ID NO: 4611966 - DNA, 25 bp, Homo sapien
caccccaattaattcttcgaaacat

SEQ ID NO: 4611967 - DNA, 25 bp, Homo sapien
taattcttcgaaacataaattcaaa

SEQ ID NO: 4611968 - DNA, 25 bp, Homo sapien
agccattaggaactgttgtggtggt

SEQ ID NO: 4611969 - DNA, 25 bp, Homo sapien
aaggcgggacatggagccattagga

SEQ ID NO: 4611970 - DNA, 25 bp, Homo sapien
gagccattaggaactgttgtggtgg

SEQ ID NO: 4611971 - DNA, 25 bp, Homo sapien
ggagccattaggaactgttgtggtg

SEQ ID NO: 4611972 - DNA, 25 bp, Homo sapien
ctctctgtcaccccttcccatatca

SEQ ID NO: 4611973 - DNA, 25 bp, Homo sapien
tctctgtcaccccttcccatatcat

SEQ ID NO: 4611974 - DNA, 25 bp, Homo sapien
tcactctctgtcaccccttcccata

SEQ ID NO: 4611975 - DNA, 25 bp, Homo sapien
cactctctgtcaccccttcccatat

SEQ ID NO: 4611976 - DNA, 25 bp, Homo sapien
tcaaaacacatatcaggctgcaagc

SEQ ID NO: 4611977 - DNA, 25 bp, Homo sapien
ggctgcaagctcaaattggcatctg

SEQ ID NO: 4611978 - DNA, 25 bp, Homo sapien
gcagttgtcattcacgtgggtgtga

SEQ ID NO: 4611979 - DNA, 25 bp, Homo sapien
caagctgcgagctttctgctgtgcg

SEQ ID NO: 4611980 - DNA, 25 bp, Homo sapien
tgaatatttaactgataaagctgcc

SEQ ID NO: 4611981 - DNA, 25 bp, Homo sapien
gggacattgacaaatgatcactata

SEQ ID NO: 4611982 - DNA, 25 bp, Homo sapien
gatcactatattcacccagccattt

SEQ ID NO: 4611983 - DNA, 25 bp, Homo sapien
gagttgctatcatgcaaaaatcctt

SEQ ID NO: 4611984 - DNA, 25 bp, Homo sapien
ccagtctgccacagaaaatgctggg

SEQ ID NO: 4611985 - DNA, 25 bp, Homo sapien
gacagcaggacttcccacagttctc

SEQ ID NO: 4611986 - DNA, 25 bp, Homo sapien
ccagatggtctggacagcaggactt

SEQ ID NO: 4611987 - DNA, 25 bp, Homo sapien
gtctggacagcaggacttcccacag

SEQ ID NO: 4611988 - DNA, 25 bp, Homo sapien
gatggcttggcccaactttgctcag

SEQ ID NO: 4611989 - DNA, 25 bp, Homo sapien
tgggcgattatgttctcatttccac

SEQ ID NO: 4611990 - DNA, 25 bp, Homo sapien
gcttggcccaactttgctcagccag

SEQ ID NO: 4611991 - DNA, 25 bp, Homo sapien
cagctcatcatgggcgattatgttc

SEQ ID NO: 4611992 - DNA, 25 bp, Homo sapien
tgaaagcctgccatactttggatgg

SEQ ID NO: 4611993 - DNA, 25 bp, Homo sapien
gaagtatgtccagttgatgataagt

SEQ ID NO: 4611994 - DNA, 25 bp, Homo sapien
gaattgctaacaaggctatagacca

SEQ ID NO: 4611995 - DNA, 25 bp, Homo sapien
tgattaggagaacaaaaagcacatt

SEQ ID NO: 4611996 - DNA, 25 bp, Homo sapien
gaaattggaccataaagcaagtctc

SEQ ID NO: 4611997 - DNA, 25 bp, Homo sapien
cctaagtgagctatgtagacgacta

SEQ ID NO: 4611998 - DNA, 25 bp, Homo sapien
cttttaaaagccaatagctcacaga

SEQ ID NO: 4611999 - DNA, 25 bp, Homo sapien
gaaaagccctctatgtagtaattaa

SEQ ID NO: 4612000 - DNA, 25 bp, Homo sapien
gctgacacaagttccatttgttaca

SEQ ID NO: 4612001 - DNA, 25 bp, Homo sapien
tttgctgacacaagttccatttgtt

SEQ ID NO: 4612002 - DNA, 25 bp, Homo sapien
gcgaaagaagtctgtatgaaaatca

SEQ ID NO: 4612003 - DNA, 25 bp, Homo sapien
ttcgttacattggtggcgaaagaag

SEQ ID NO: 4612004 - DNA, 25 bp, Homo sapien
gctctcgttttggatgcatagactg

SEQ ID NO: 4612005 - DNA, 25 bp, Homo sapien
ttgccatcccagcttggagtgtctt

SEQ ID NO: 4612006 - DNA, 25 bp, Homo sapien
tatccatccgttatgtggctttgcc

SEQ ID NO: 4612007 - DNA, 25 bp, Homo sapien
ttttacagaatgaaaggcgtgcttt

SEQ ID NO: 4612008 - DNA, 25 bp, Homo sapien
tctgccattaccacaagctttcaag

SEQ ID NO: 4612009 - DNA, 25 bp, Homo sapien
taaccagtacggtgctattatttac

SEQ ID NO: 4612010 - DNA, 25 bp, Homo sapien
catcatcataaccagtacggtgcta

SEQ ID NO: 4612011 - DNA, 25 bp, Homo sapien
taccacaagctttcaagtttccagt

SEQ ID NO: 4612012 - DNA, 25 bp, Homo sapien
tccaagtgccagattactcagtgct

SEQ ID NO: 4612013 - DNA, 25 bp, Homo sapien
tgtagaatccgatggagcactgcac

SEQ ID NO: 4612014 - DNA, 25 bp, Homo sapien
tgattggccaatgagcagcttctct

SEQ ID NO: 4612015 - DNA, 25 bp, Homo sapien
tgcataccatagacgaacgaggcgg

SEQ ID NO: 4612016 - DNA, 25 bp, Homo sapien
ttttgtggcatacagcattcctggg

SEQ ID NO: 4612017 - DNA, 25 bp, Homo sapien
tagtcaggcttccaacaaagttcaa

SEQ ID NO: 4612018 - DNA, 25 bp, Homo sapien
tttttggaatcaacagggaggcgca

SEQ ID NO: 4612019 - DNA, 25 bp, Homo sapien
ggtcagtgcatatccctttaggagg

SEQ ID NO: 4612020 - DNA, 25 bp, Homo sapien
gtagaaacccctgacccattctgga

SEQ ID NO: 4612021 - DNA, 25 bp, Homo sapien
gcagctttgaccactatgcaacgta

SEQ ID NO: 4612022 - DNA, 25 bp, Homo sapien
tatcgtgccgcactagagtacctgg

SEQ ID NO: 4612023 - DNA, 25 bp, Homo sapien
caatatcagttttcctatcgtgccg

SEQ ID NO: 4612024 - DNA, 25 bp, Homo sapien
ggctgtaactttcaaccgttagaga

SEQ ID NO: 4612025 - DNA, 25 bp, Homo sapien
tcccttagaactatgccatgtgtga

SEQ ID NO: 4612026 - DNA, 25 bp, Homo sapien
gtgtctatgaggtcacattgcatcc

SEQ ID NO: 4612027 - DNA, 25 bp, Homo sapien
ccgttagagatacgtggttggagat

SEQ ID NO: 4612028 - DNA, 25 bp, Homo sapien
cctaaggcttatctttctaacagat

SEQ ID NO: 4612029 - DNA, 25 bp, Homo sapien
tctgttcagaatctaacctttccct

SEQ ID NO: 4612030 - DNA, 25 bp, Homo sapien
gggcatcaacaactctaattaaacc

SEQ ID NO: 4612031 - DNA, 25 bp, Homo sapien
ccctcagagtccctatgttgcatat

SEQ ID NO: 4612032 - DNA, 25 bp, Homo sapien
ctgggtataaacctgttttatcatt

SEQ ID NO: 4612033 - DNA, 25 bp, Homo sapien
ttttatcattcttgaaaacttgatt

SEQ ID NO: 4612034 - DNA, 25 bp, Homo sapien
tgggtataaacctgttttatcattc

SEQ ID NO: 4612035 - DNA, 25 bp, Homo sapien
tgaaaacttgattttgatcgtttaa

SEQ ID NO: 4612036 - DNA, 25 bp, Homo sapien
taattaatttctgcaagggagatga

SEQ ID NO: 4612037 - DNA, 25 bp, Homo sapien
cttcggctcatagcatgcttggaga

SEQ ID NO: 4612038 - DNA, 25 bp, Homo sapien
ggctcatagcatgcttggagataat

SEQ ID NO: 4612039 - DNA, 25 bp, Homo sapien
gcatgcttggagataattaatttct

SEQ ID NO: 4612040 - DNA, 25 bp, Homo sapien
gattttgttcaccactggactttcc

SEQ ID NO: 4612041 - DNA, 25 bp, Homo sapien
gacttccagattttgttcaccactg

SEQ ID NO: 4612042 - DNA, 25 bp, Homo sapien
ggcagccagaaagctaacaccctgt

SEQ ID NO: 4612043 - DNA, 25 bp, Homo sapien
caccctgttctctgacttccagatt

SEQ ID NO: 4612044 - DNA, 25 bp, Homo sapien
tctcttttcccgcagaatttatggt

SEQ ID NO: 4612045 - DNA, 25 bp, Homo sapien
ctcttttcccgcagaatttatggtg

SEQ ID NO: 4612046 - DNA, 25 bp, Homo sapien
tatggctattcagttctaaggaatg

SEQ ID NO: 4612047 - DNA, 25 bp, Homo sapien
tctaccctttgctgcattatggcta

SEQ ID NO: 4612048 - DNA, 25 bp, Homo sapien
ttatggctattcagttctaaggaat

SEQ ID NO: 4612049 - DNA, 25 bp, Homo sapien
cctttgctgcattatggctattcag

SEQ ID NO: 4612050 - DNA, 25 bp, Homo sapien
atcaagctccctgacagtgatcctg

SEQ ID NO: 4612051 - DNA, 25 bp, Homo sapien
cagtgatcctgtacacagatgagga

SEQ ID NO: 4612052 - DNA, 25 bp, Homo sapien
caggacagtgcaggacatcaagctc

SEQ ID NO: 4612053 - DNA, 25 bp, Homo sapien
ttgggcaacatattgccaggacagt

SEQ ID NO: 4612054 - DNA, 25 bp, Homo sapien
agtacgtctatgtttatgtcactgc

SEQ ID NO: 4612055 - DNA, 25 bp, Homo sapien
ccaaatgagtacgtctatgtttatg

SEQ ID NO: 4612056 - DNA, 25 bp, Homo sapien
tgctgggaacagctttcggggaaaa

SEQ ID NO: 4612057 - DNA, 25 bp, Homo sapien
ctgagggaccaaatgagtacgtcta

SEQ ID NO: 4612058 - DNA, 25 bp, Homo sapien
ggctctcaggaaacaactctgtctc

SEQ ID NO: 4612059 - DNA, 25 bp, Homo sapien
tcagtcgttgttctcatacaagttc

SEQ ID NO: 4612060 - DNA, 25 bp, Homo sapien
gaccatcactggacattctccaaaa

SEQ ID NO: 4612061 - DNA, 25 bp, Homo sapien
aactaattggcccttgaccatcact

SEQ ID NO: 4612062 - DNA, 25 bp, Homo sapien
acatcgtggagtatagcaaacctag

SEQ ID NO: 4612063 - DNA, 25 bp, Homo sapien
gctacaatcctttacagcaagttac

SEQ ID NO: 4612064 - DNA, 25 bp, Homo sapien
tctattatacacttaagctatatgg

SEQ ID NO: 4612065 - DNA, 25 bp, Homo sapien
gttactatacccaactatttgtgtg

SEQ ID NO: 4612066 - DNA, 25 bp, Homo sapien
tcgtctacaatctgacagcaatgct

SEQ ID NO: 4612067 - DNA, 25 bp, Homo sapien
gggttttgtgacaccacactgctaa

SEQ ID NO: 4612068 - DNA, 25 bp, Homo sapien
gattactcgtctccggatttttgga

SEQ ID NO: 4612069 - DNA, 25 bp, Homo sapien
catacttcgactcagtgtgcatttc

SEQ ID NO: 4612070 - DNA, 25 bp, Homo sapien
gtttcccatactcttctcactgtaa

SEQ ID NO: 4612071 - DNA, 25 bp, Homo sapien
catactcttctcactgtaaattctt

SEQ ID NO: 4612072 - DNA, 25 bp, Homo sapien
acccctgtttcccatactcttctca

SEQ ID NO: 4612073 - DNA, 25 bp, Homo sapien
ctgtttcccatactcttctcactgt

SEQ ID NO: 4612074 - DNA, 25 bp, Homo sapien
gtgaccatcgcctgaaaaaagcaag

SEQ ID NO: 4612075 - DNA, 25 bp, Homo sapien
tgtcttctgttagaaaccgtgcaag

SEQ ID NO: 4612076 - DNA, 25 bp, Homo sapien
tattggtaataggtcagttctgtct

SEQ ID NO: 4612077 - DNA, 25 bp, Homo sapien
tctggtccaggtcattgatagcttc

SEQ ID NO: 4612078 - DNA, 25 bp, Homo sapien
tacaatgatttttcccagagagaaa

SEQ ID NO: 4612079 - DNA, 25 bp, Homo sapien
ggcaccgccaaaccatacaatgatt

SEQ ID NO: 4612080 - DNA, 25 bp, Homo sapien
tttttgacaggcaccgccaaaccat

SEQ ID NO: 4612081 - DNA, 25 bp, Homo sapien
ttccctttttgacaggcaccgccaa

SEQ ID NO: 4612082 - DNA, 25 bp, Homo sapien
agctgcgagaagtctcccagggctg

SEQ ID NO: 4612083 - DNA, 25 bp, Homo sapien
tccgttcatcatgaatcttctcctg

SEQ ID NO: 4612084 - DNA, 25 bp, Homo sapien
tctcctgaagctgcgagaagtctcc

SEQ ID NO: 4612085 - DNA, 25 bp, Homo sapien
tggcctccgttcatcatgaatcttc

SEQ ID NO: 4612086 - DNA, 25 bp, Homo sapien
ctgatctggtcgctggttggatttc

SEQ ID NO: 4612087 - DNA, 25 bp, Homo sapien
aatccaaggttaggatgtggcacgt

SEQ ID NO: 4612088 - DNA, 25 bp, Homo sapien
agatgtccaggctatttcagctctc

SEQ ID NO: 4612089 - DNA, 25 bp, Homo sapien
actgttaatacgtttcagagagatg

SEQ ID NO: 4612090 - DNA, 25 bp, Homo sapien
gagacttgccttgttggtaccacat

SEQ ID NO: 4612091 - DNA, 25 bp, Homo sapien
ttaataggtttgcacaggagttgag

SEQ ID NO: 4612092 - DNA, 25 bp, Homo sapien
atggttttgtactgaggaggaacca

SEQ ID NO: 4612093 - DNA, 25 bp, Homo sapien
taaatggttttgtactgaggaggaa

SEQ ID NO: 4612094 - DNA, 25 bp, Homo sapien
gttttgtactgaggaggaaccagaa

SEQ ID NO: 4612095 - DNA, 25 bp, Homo sapien
tcacacctctgatgattcacttttg

SEQ ID NO: 4612096 - DNA, 25 bp, Homo sapien
cacacctctgatgattcacttttgc

SEQ ID NO: 4612097 - DNA, 25 bp, Homo sapien
caatgtatggtggttggtatggtac

SEQ ID NO: 4612098 - DNA, 25 bp, Homo sapien
taggactactttgcaatgtatggtg

SEQ ID NO: 4612099 - DNA, 25 bp, Homo sapien
tacatatagagttaggactactttg

SEQ ID NO: 4612100 - DNA, 25 bp, Homo sapien
ggtatggtacagagttgtcatgttc

SEQ ID NO: 4612101 - DNA, 25 bp, Homo sapien
cactggttctgtaggcattaaaact

SEQ ID NO: 4612102 - DNA, 25 bp, Homo sapien
actggttctgtaggcattaaaactg

SEQ ID NO: 4612103 - DNA, 25 bp, Homo sapien
tggttctgtaggcattaaaactgaa

SEQ ID NO: 4612104 - DNA, 25 bp, Homo sapien
ttctgtaggcattaaaactgaatgg

SEQ ID NO: 4612105 - DNA, 25 bp, Homo sapien
tatgaggaagtaggagtttacaaaa

SEQ ID NO: 4612106 - DNA, 25 bp, Homo sapien
ctatgaggaagtaggagtttacaaa

SEQ ID NO: 4612107 - DNA, 25 bp, Homo sapien
gaaaatctaccactcctcttaagga

SEQ ID NO: 4612108 - DNA, 25 bp, Homo sapien
tggttctctggaggccatttgccaa

SEQ ID NO: 4612109 - DNA, 25 bp, Homo sapien
tgccaagggtgctatgatcatcatc

SEQ ID NO: 4612110 - DNA, 25 bp, Homo sapien
ggatatggcctcgaaaccttttatg

SEQ ID NO: 4612111 - DNA, 25 bp, Homo sapien
aatgtacttcatgctcttgtcaggc

SEQ ID NO: 4612112 - DNA, 25 bp, Homo sapien
tcttgtcaggctgaactttccactc

SEQ ID NO: 4612113 - DNA, 25 bp, Homo sapien
caggctgaactttccactcaaaaaa

SEQ ID NO: 4612114 - DNA, 25 bp, Homo sapien
tgtaatgtacttcatgctcttgtca

SEQ ID NO: 4612115 - DNA, 25 bp, Homo sapien
tgcacagtttgataggccagaggtt

SEQ ID NO: 4612116 - DNA, 25 bp, Homo sapien
aagagtttatttgtggcagttgggt

SEQ ID NO: 4612117 - DNA, 25 bp, Homo sapien
ctgaagaggttgatagaagaagagt

SEQ ID NO: 4612118 - DNA, 25 bp, Homo sapien
ccagaggttaccaagagtgattcaa

SEQ ID NO: 4612119 - DNA, 25 bp, Homo sapien
cttccgatttgcttctaacacctta

SEQ ID NO: 4612120 - DNA, 25 bp, Homo sapien
ttccgatttgcttctaacaccttaa

SEQ ID NO: 4612121 - DNA, 25 bp, Homo sapien
tgcttctaacaccttaattgaacag

SEQ ID NO: 4612122 - DNA, 25 bp, Homo sapien
ttctaacaccttaattgaacagctt

SEQ ID NO: 4612123 - DNA, 25 bp, Homo sapien
tcccttccccttcctgctctctctt

SEQ ID NO: 4612124 - DNA, 25 bp, Homo sapien
tttcccttccccttcctgctctctc

SEQ ID NO: 4612125 - DNA, 25 bp, Homo sapien
ttcccttccccttcctgctctctct

SEQ ID NO: 4612126 - DNA, 25 bp, Homo sapien
ctttcccttccccttcctgctctct

SEQ ID NO: 4612127 - DNA, 25 bp, Homo sapien
gctgtaggattctacattgtagggc

SEQ ID NO: 4612128 - DNA, 25 bp, Homo sapien
tgtgccagatcccttatatgccctc

SEQ ID NO: 4612129 - DNA, 25 bp, Homo sapien
ttgcaaagatatgagaagctgtagg

SEQ ID NO: 4612130 - DNA, 25 bp, Homo sapien
tcatgtctaaaggtccaagatccca

SEQ ID NO: 4612131 - DNA, 25 bp, Homo sapien
ggtgtacttactatgccctccttga

SEQ ID NO: 4612132 - DNA, 25 bp, Homo sapien
caaacagacttggaggtatattctc

SEQ ID NO: 4612133 - DNA, 25 bp, Homo sapien
cattaacgctaatgggagttacaca

SEQ ID NO: 4612134 - DNA, 25 bp, Homo sapien
tatattctctgagccgtgggctccc

SEQ ID NO: 4612135 - DNA, 25 bp, Homo sapien
catcgtccttgagtttctgtgtaac

SEQ ID NO: 4612136 - DNA, 25 bp, Homo sapien
ttagtcatcgtccttgagtttctgt

SEQ ID NO: 4612137 - DNA, 25 bp, Homo sapien
gtcatcgtccttgagtttctgtgta

SEQ ID NO: 4612138 - DNA, 25 bp, Homo sapien
tagtcatcgtccttgagtttctgtg

SEQ ID NO: 4612139 - DNA, 25 bp, Homo sapien
tataaagtggtctcggctggagatc

SEQ ID NO: 4612140 - DNA, 25 bp, Homo sapien
ttttgaagatgaacacagttgtccc

SEQ ID NO: 4612141 - DNA, 25 bp, Homo sapien
gttgtccccgctgtgaaaatggtac

SEQ ID NO: 4612142 - DNA, 25 bp, Homo sapien
tgaaaatggtactttgccgtttatg

SEQ ID NO: 4612143 - DNA, 25 bp, Homo sapien
tccagatacacaaccctagagaagg

SEQ ID NO: 4612144 - DNA, 25 bp, Homo sapien
aatcaagtcagctaccaccagcaag

SEQ ID NO: 4612145 - DNA, 25 bp, Homo sapien
gaaggttgttcatacccagatgggc

SEQ ID NO: 4612146 - DNA, 25 bp, Homo sapien
cagtaagcccaaccatcaagggtgg

SEQ ID NO: 4612147 - DNA, 25 bp, Homo sapien
ggtttacacgaacacccgttgatca

SEQ ID NO: 4612148 - DNA, 25 bp, Homo sapien
ccaagctacgggagacccaagacct

SEQ ID NO: 4612149 - DNA, 25 bp, Homo sapien
tctggcggagttgcctctttcatct

SEQ ID NO: 4612150 - DNA, 25 bp, Homo sapien
ttcatctgccaagctacgggagacc

SEQ ID NO: 4612151 - DNA, 25 bp, Homo sapien
tacactgagatgctacaggttatga

SEQ ID NO: 4612152 - DNA, 25 bp, Homo sapien
caggttatgatctctagcagggttg

SEQ ID NO: 4612153 - DNA, 25 bp, Homo sapien
ctaggaaaccttgaaactggaagca

SEQ ID NO: 4612154 - DNA, 25 bp, Homo sapien
tccaggaccagcattgcaaatatgc

SEQ ID NO: 4612155 - DNA, 25 bp, Homo sapien
atgtattttccttcccggttgacag

SEQ ID NO: 4612156 - DNA, 25 bp, Homo sapien
ataatcccaggtgagatcagagatg

SEQ ID NO: 4612157 - DNA, 25 bp, Homo sapien
taatcccaggtgagatcagagatgt

SEQ ID NO: 4612158 - DNA, 25 bp, Homo sapien
gtgtattgtcctgttgtaatgcgtg

SEQ ID NO: 4612159 - DNA, 25 bp, Homo sapien
gttgtaatgcgtgtgcttgtgttgt

SEQ ID NO: 4612160 - DNA, 25 bp, Homo sapien
cttgtgttgtgaatagcagaagctg

SEQ ID NO: 4612161 - DNA, 25 bp, Homo sapien
tgttgtgaatagcagaagctgggat

SEQ ID NO: 4612162 - DNA, 25 bp, Homo sapien
tctgacccacgttatggtcttcatg

SEQ ID NO: 4612163 - DNA, 25 bp, Homo sapien
tgacccacgttatggtcttcatgca

SEQ ID NO: 4612164 - DNA, 25 bp, Homo sapien
gacccacgttatggtcttcatgcat

SEQ ID NO: 4612165 - DNA, 25 bp, Homo sapien
gctctgacccacgttatggtcttca

SEQ ID NO: 4612166 - DNA, 25 bp, Homo sapien
tgaaatgagctgctaccagggtctg

SEQ ID NO: 4612167 - DNA, 25 bp, Homo sapien
cataatcggcactgaaatgagctgc

SEQ ID NO: 4612168 - DNA, 25 bp, Homo sapien
atgtgtttctctagaaaagcgtgca

SEQ ID NO: 4612169 - DNA, 25 bp, Homo sapien
cctggggctcagataatgtgtttct

SEQ ID NO: 4612170 - DNA, 25 bp, Homo sapien
gcagctctgttggatgaaaagcatt

SEQ ID NO: 4612171 - DNA, 25 bp, Homo sapien
ctgttggatgaaaagcattgctaca

SEQ ID NO: 4612172 - DNA, 25 bp, Homo sapien
ttgctacagcatgtcttagtctggc

SEQ ID NO: 4612173 - DNA, 25 bp, Homo sapien
gaggcttgggtatctgcaaatgtgt

SEQ ID NO: 4612174 - DNA, 25 bp, Homo sapien
tgtttaaaatttgaagttcagatgt

SEQ ID NO: 4612175 - DNA, 25 bp, Homo sapien
cttcatattcatattgttgtttaaa

SEQ ID NO: 4612176 - DNA, 25 bp, Homo sapien
ttaaaatttgaagttcagatgttaa

SEQ ID NO: 4612177 - DNA, 25 bp, Homo sapien
aatttgaagttcagatgttaaagat

SEQ ID NO: 4612178 - DNA, 25 bp, Homo sapien
ggacaactgtcaggttgtggaaggt

SEQ ID NO: 4612179 - DNA, 25 bp, Homo sapien
aggacaactgtcaggttgtggaagg

SEQ ID NO: 4612180 - DNA, 25 bp, Homo sapien
gacaactgtcaggttgtggaaggtc

SEQ ID NO: 4612181 - DNA, 25 bp, Homo sapien
ccttgtctcttgatcccaagattgg

SEQ ID NO: 4612182 - DNA, 25 bp, Homo sapien
catgaacataaccagcagcagagat

SEQ ID NO: 4612183 - DNA, 25 bp, Homo sapien
caagattggtgttcttcctcaagca

SEQ ID NO: 4612184 - DNA, 25 bp, Homo sapien
tcttcctcaagcattctcttgtcat

SEQ ID NO: 4612185 - DNA, 25 bp, Homo sapien
gttcagtgctcctctttgatcctct

SEQ ID NO: 4612186 - DNA, 25 bp, Homo sapien
tctctctccgctgaactccccacaa

SEQ ID NO: 4612187 - DNA, 25 bp, Homo sapien
gctgttcagtgctcctctttgatcc

SEQ ID NO: 4612188 - DNA, 25 bp, Homo sapien
acaaagctgttcagtgctcctcttt

SEQ ID NO: 4612189 - DNA, 25 bp, Homo sapien
tctgagggttggagttgatcccgaa

SEQ ID NO: 4612190 - DNA, 25 bp, Homo sapien
gagttgatcccgaaggtcagggacc

SEQ ID NO: 4612191 - DNA, 25 bp, Homo sapien
atcccgaaggtcagggaccaggagc

SEQ ID NO: 4612192 - DNA, 25 bp, Homo sapien
tgatcccgaaggtcagggaccagga

SEQ ID NO: 4612193 - DNA, 25 bp, Homo sapien
aggaggtacagattgagggacaaaa

SEQ ID NO: 4612194 - DNA, 25 bp, Homo sapien
tacgtgtgtgtatggagatggggag

SEQ ID NO: 4612195 - DNA, 25 bp, Homo sapien
aggtacagattgagggacaaaagct

SEQ ID NO: 4612196 - DNA, 25 bp, Homo sapien
gggaggaggtacagattgagggaca

SEQ ID NO: 4612197 - DNA, 25 bp, Homo sapien
taacctgatcttggttggagaagct

SEQ ID NO: 4612198 - DNA, 25 bp, Homo sapien
cttctgctgctaacctgatcttggt

SEQ ID NO: 4612199 - DNA, 25 bp, Homo sapien
ttgtctatatgacgcatgcacatcg

SEQ ID NO: 4612200 - DNA, 25 bp, Homo sapien
ggcggctttgcaccaccactttctt

SEQ ID NO: 4612201 - DNA, 25 bp, Homo sapien
aatgaatttatattcaaggatggga

SEQ ID NO: 4612202 - DNA, 25 bp, Homo sapien
caaggatgggaattttcaggtcatc

SEQ ID NO: 4612203 - DNA, 25 bp, Homo sapien
tgctagaaacaataatgacagtgga

SEQ ID NO: 4612204 - DNA, 25 bp, Homo sapien
tgcagtggggtatctctacaaaagc

SEQ ID NO: 4612205 - DNA, 25 bp, Homo sapien
tatcttctttcttaattttaacatc

SEQ ID NO: 4612206 - DNA, 25 bp, Homo sapien
atcttctttcttaattttaacatcg

SEQ ID NO: 4612207 - DNA, 25 bp, Homo sapien
tacatttcctcgtaaccagagagcg

SEQ ID NO: 4612208 - DNA, 25 bp, Homo sapien
cacttacatcgaatatggacagttg

SEQ ID NO: 4612209 - DNA, 25 bp, Homo sapien
tggacagttgattgatgtacacccc

SEQ ID NO: 4612210 - DNA, 25 bp, Homo sapien
cgtagaatatgagctcctggaggaa

SEQ ID NO: 4612211 - DNA, 25 bp, Homo sapien
gataagggaaagagccttgccacag

SEQ ID NO: 4612212 - DNA, 25 bp, Homo sapien
tcttggtttcccatcccgtgtcctc

SEQ ID NO: 4612213 - DNA, 25 bp, Homo sapien
gaaaatctgttggaaagcaagaatg

SEQ ID NO: 4612214 - DNA, 25 bp, Homo sapien
tactccttcatctgcaagataaggg

SEQ ID NO: 4612215 - DNA, 25 bp, Homo sapien
cacttcatcggaatttcatcacttg

SEQ ID NO: 4612216 - DNA, 25 bp, Homo sapien
tctggtagggtatgagaaatccatc

SEQ ID NO: 4612217 - DNA, 25 bp, Homo sapien
tttactcaaaggatcataaattctg

SEQ ID NO: 4612218 - DNA, 25 bp, Homo sapien
caaagagttgaactgatagatttca

SEQ ID NO: 4612219 - DNA, 25 bp, Homo sapien
cctttgcttggactaagtgagtctg

SEQ ID NO: 4612220 - DNA, 25 bp, Homo sapien
tcaagatcccttggaaacgaggcag

SEQ ID NO: 4612221 - DNA, 25 bp, Homo sapien
ggataaatatcaaacctccctgaaa

SEQ ID NO: 4612222 - DNA, 25 bp, Homo sapien
tcagaagaacttccgtagtaagctt

SEQ ID NO: 4612223 - DNA, 25 bp, Homo sapien
ctctcttagtgtgcccgaggccttc

SEQ ID NO: 4612224 - DNA, 25 bp, Homo sapien
tactctcttagtgtgcccgaggcct

SEQ ID NO: 4612225 - DNA, 25 bp, Homo sapien
tactttgtactctcttagtgtgccc

SEQ ID NO: 4612226 - DNA, 25 bp, Homo sapien
ctcttagtgtgcccgaggccttcat

SEQ ID NO: 4612227 - DNA, 25 bp, Homo sapien
ggcatttgggagtgggcaggcggcg

SEQ ID NO: 4612228 - DNA, 25 bp, Homo sapien
tttgggagtgggcaggcggcgaccc

SEQ ID NO: 4612229 - DNA, 25 bp, Homo sapien
tgggagtgggcaggcggcgacccac

SEQ ID NO: 4612230 - DNA, 25 bp, Homo sapien
gcatttgggagtgggcaggcggcga

SEQ ID NO: 4612231 - DNA, 25 bp, Homo sapien
gatctcttccaccatcatgatctga

SEQ ID NO: 4612232 - DNA, 25 bp, Homo sapien
ttccaccatcatgatctgaatggag

SEQ ID NO: 4612233 - DNA, 25 bp, Homo sapien
ggcgacgacacgattaggtgcaaag

SEQ ID NO: 4612234 - DNA, 25 bp, Homo sapien
ttgctggccgcgatctcttccacca

SEQ ID NO: 4612235 - DNA, 25 bp, Homo sapien
aatcgtggcttgtgctgaaggcgca

SEQ ID NO: 4612236 - DNA, 25 bp, Homo sapien
tggtgaatcgtggcttgtgctgaag

SEQ ID NO: 4612237 - DNA, 25 bp, Homo sapien
gcagcgggaacttgatcttgcagtc

SEQ ID NO: 4612238 - DNA, 25 bp, Homo sapien
gaacttgatcttgcagtcgtggaac

SEQ ID NO: 4612239 - DNA, 25 bp, Homo sapien
cctgagtttatttggggcgcacccg

SEQ ID NO: 4612240 - DNA, 25 bp, Homo sapien
ttcctgagtttatttggggcgcacc

SEQ ID NO: 4612241 - DNA, 25 bp, Homo sapien
gcgcacccgggcgagggccctgcac

SEQ ID NO: 4612242 - DNA, 25 bp, Homo sapien
gcgttcctgagtttatttggggcgc

SEQ ID NO: 4612243 - DNA, 25 bp, Homo sapien
tgagcctggctaagtggtggagact

SEQ ID NO: 4612244 - DNA, 25 bp, Homo sapien
ataaatgagcctggctaagtggtgg

SEQ ID NO: 4612245 - DNA, 25 bp, Homo sapien
aatgagcctggctaagtggtggaga

SEQ ID NO: 4612246 - DNA, 25 bp, Homo sapien
aaataaatgagcctggctaagtggt

SEQ ID NO: 4612247 - DNA, 25 bp, Homo sapien
tcaagtaaccttgacttggttggga

SEQ ID NO: 4612248 - DNA, 25 bp, Homo sapien
cttcatcacacttcttatgctgtgt

SEQ ID NO: 4612249 - DNA, 25 bp, Homo sapien
ttcttcatcacacttcttatgctgt

SEQ ID NO: 4612250 - DNA, 25 bp, Homo sapien
tcatcacacttcttatgctgtgtag

SEQ ID NO: 4612251 - DNA, 25 bp, Homo sapien
catcacacttcttatgctgtgtagt

SEQ ID NO: 4612252 - DNA, 25 bp, Homo sapien
gctcagggcctctgaatacatttcc

SEQ ID NO: 4612253 - DNA, 25 bp, Homo sapien
ttcagatcggacagactcgctgcgg

SEQ ID NO: 4612254 - DNA, 25 bp, Homo sapien
agtgattccaagctgctcgcgcacg

SEQ ID NO: 4612255 - DNA, 25 bp, Homo sapien
tcctccgcacggatgctgagagtaa

SEQ ID NO: 4612256 - DNA, 25 bp, Homo sapien
tcacacggagtcattatgtagcagt

SEQ ID NO: 4612257 - DNA, 25 bp, Homo sapien
ttgagtccgacaggactgatgtctc

SEQ ID NO: 4612258 - DNA, 25 bp, Homo sapien
gatacgcttgcacagacacaaattg

SEQ ID NO: 4612259 - DNA, 25 bp, Homo sapien
tgtagcagttggctctgatacgctt

SEQ ID NO: 4612260 - DNA, 25 bp, Homo sapien
tgaaaaataaccattgtgtatcttc

SEQ ID NO: 4612261 - DNA, 25 bp, Homo sapien
ttttgcagttgcaggatttaataga

SEQ ID NO: 4612262 - DNA, 25 bp, Homo sapien
aagggggttgctgttgccggctcga

SEQ ID NO: 4612263 - DNA, 25 bp, Homo sapien
tttaatagagtgaaatagaatgaaa

SEQ ID NO: 4612264 - DNA, 25 bp, Homo sapien
taatagagtgaaatagaatgaaaac

SEQ ID NO: 4612265 - DNA, 25 bp, Homo sapien
ggtgaaatcagttgacatctcagat

SEQ ID NO: 4612266 - DNA, 25 bp, Homo sapien
ttggtgaaatcagttgacatctcag

SEQ ID NO: 4612267 - DNA, 25 bp, Homo sapien
tctcagatacatacgtcacttccat

SEQ ID NO: 4612268 - DNA, 25 bp, Homo sapien
catctcagatacatacgtcacttcc

SEQ ID NO: 4612269 - DNA, 25 bp, Homo sapien
tgtccttcttgccccaaattataaa

SEQ ID NO: 4612270 - DNA, 25 bp, Homo sapien
catctgctgacacatgagatgtaaa

SEQ ID NO: 4612271 - DNA, 25 bp, Homo sapien
tcatctgctgacacatgagatgtaa

SEQ ID NO: 4612272 - DNA, 25 bp, Homo sapien
atgaaatcagcttctgtctttttaa

SEQ ID NO: 4612273 - DNA, 25 bp, Homo sapien
ataaatgaaatcagcttctgtcttt

SEQ ID NO: 4612274 - DNA, 25 bp, Homo sapien
tatatttaggcaaataaatgaaatc

SEQ ID NO: 4612275 - DNA, 25 bp, Homo sapien
catttatatttaggcaaataaatga

SEQ ID NO: 4612276 - DNA, 25 bp, Homo sapien
ttcttctgttgtatagaggatgttt

SEQ ID NO: 4612277 - DNA, 25 bp, Homo sapien
aaaggaaagcttgaaatggctgagg

SEQ ID NO: 4612278 - DNA, 25 bp, Homo sapien
tgtggaacgccagcctgaggcatag

SEQ ID NO: 4612279 - DNA, 25 bp, Homo sapien
aaatggctgaggagatagtggcatc

SEQ ID NO: 4612280 - DNA, 25 bp, Homo sapien
ttaccgtgctgattaaaaggaaagc

SEQ ID NO: 4612281 - DNA, 25 bp, Homo sapien
gaccttatcatggaagttgtttctg

SEQ ID NO: 4612282 - DNA, 25 bp, Homo sapien
cagggtgcagcatgttggtacaaga

SEQ ID NO: 4612283 - DNA, 25 bp, Homo sapien
cagctgttgtaatggtgctctcgga

SEQ ID NO: 4612284 - DNA, 25 bp, Homo sapien
gagtccctgatcatttgaaacttga

SEQ ID NO: 4612285 - DNA, 25 bp, Homo sapien
cctgatgtaatcttgatattcacca

SEQ ID NO: 4612286 - DNA, 25 bp, Homo sapien
tcctgatgtaatcttgatattcacc

SEQ ID NO: 4612287 - DNA, 25 bp, Homo sapien
tgatgtaatcttgatattcaccagc

SEQ ID NO: 4612288 - DNA, 25 bp, Homo sapien
aaatcctgatgtaatcttgatattc

SEQ ID NO: 4612289 - DNA, 25 bp, Homo sapien
ggggtagactatggcacccacattc

SEQ ID NO: 4612290 - DNA, 25 bp, Homo sapien
cgtggggtagactatggcacccaca

SEQ ID NO: 4612291 - DNA, 25 bp, Homo sapien
acccacattcagcacagcaggtaac

SEQ ID NO: 4612292 - DNA, 25 bp, Homo sapien
tgaattcctaggggttgtagaagga

SEQ ID NO: 4612293 - DNA, 25 bp, Homo sapien
cttcattgtttttctcaaagcagtt

SEQ ID NO: 4612294 - DNA, 25 bp, Homo sapien
tcagtcttcactgttttcttcattg

SEQ ID NO: 4612295 - DNA, 25 bp, Homo sapien
ttttcttcattgtttttctcaaagc

SEQ ID NO: 4612296 - DNA, 25 bp, Homo sapien
ttcttcattgtttttctcaaagcag

SEQ ID NO: 4612297 - DNA, 25 bp, Homo sapien
tgctgtggcctgtgtatgaactgga

SEQ ID NO: 4612298 - DNA, 25 bp, Homo sapien
tattaagatttctgggtcgcacaca

SEQ ID NO: 4612299 - DNA, 25 bp, Homo sapien
tctttctctctgtaagcactgttgc

SEQ ID NO: 4612300 - DNA, 25 bp, Homo sapien
cacacagaagatatcaagtcagttg

SEQ ID NO: 4612301 - DNA, 25 bp, Homo sapien
ggcagccgagttgctatttgtggcc

SEQ ID NO: 4612302 - DNA, 25 bp, Homo sapien
cagccgagttgctatttgtggccaa

SEQ ID NO: 4612303 - DNA, 25 bp, Homo sapien
atttgtggccaaagaatccgcttta

SEQ ID NO: 4612304 - DNA, 25 bp, Homo sapien
caaagaatccgctttaaaagaagag

SEQ ID NO: 4612305 - DNA, 25 bp, Homo sapien
gctgcagcattaggacactcttttg

SEQ ID NO: 4612306 - DNA, 25 bp, Homo sapien
tattaacatgagtgtagcaggctgc

SEQ ID NO: 4612307 - DNA, 25 bp, Homo sapien
tgttcccagatagcagtcagattta

SEQ ID NO: 4612308 - DNA, 25 bp, Homo sapien
gattcgcaacccacataaggtcatg

SEQ ID NO: 4612309 - DNA, 25 bp, Homo sapien
ggagtaatgacacctaagcatgcaa

SEQ ID NO: 4612310 - DNA, 25 bp, Homo sapien
aatttgaatgatagggttgtctggc

SEQ ID NO: 4612311 - DNA, 25 bp, Homo sapien
gtcaaaaaatttagcatggcacctt

SEQ ID NO: 4612312 - DNA, 25 bp, Homo sapien
gaatccatagaactacatgggtcaa

SEQ ID NO: 4612313 - DNA, 25 bp, Homo sapien
tgaagtgcagcagctgaacagagca

SEQ ID NO: 4612314 - DNA, 25 bp, Homo sapien
gcaggtgagggtgaagtgcagcagc

SEQ ID NO: 4612315 - DNA, 25 bp, Homo sapien
gggtgaagtgcagcagctgaacaga

SEQ ID NO: 4612316 - DNA, 25 bp, Homo sapien
caggtgagggtgaagtgcagcagct

SEQ ID NO: 4612317 - DNA, 25 bp, Homo sapien
gcagagccagtagcaaatagcattg

SEQ ID NO: 4612318 - DNA, 25 bp, Homo sapien
gcattgtaccataacgtcctctaca

SEQ ID NO: 4612319 - DNA, 25 bp, Homo sapien
tcacagtcgcatgctgtaatctcca

SEQ ID NO: 4612320 - DNA, 25 bp, Homo sapien
gtattgtcacagtcgcatgctgtaa

SEQ ID NO: 4612321 - DNA, 25 bp, Homo sapien
tgtaaagataggtggcctcaaaatg

SEQ ID NO: 4612322 - DNA, 25 bp, Homo sapien
ccagtgtttcacttgggttgggata

SEQ ID NO: 4612323 - DNA, 25 bp, Homo sapien
tgccaatggttaatggaatgcccca

SEQ ID NO: 4612324 - DNA, 25 bp, Homo sapien
taatgtatgcattaatgggccttct

SEQ ID NO: 4612325 - DNA, 25 bp, Homo sapien
gattcagcaccctctagagtagtgg

SEQ ID NO: 4612326 - DNA, 25 bp, Homo sapien
tccctgaactgcataggaatgcgct

SEQ ID NO: 4612327 - DNA, 25 bp, Homo sapien
gatacaatgaccaacttgccactgg

SEQ ID NO: 4612328 - DNA, 25 bp, Homo sapien
gaatgcgctccctgcaacgtgaaaa

SEQ ID NO: 4612329 - DNA, 25 bp, Homo sapien
taagaggcaatattaacgtgacatc

SEQ ID NO: 4612330 - DNA, 25 bp, Homo sapien
caggccacagtggtatctaagcaca

SEQ ID NO: 4612331 - DNA, 25 bp, Homo sapien
gtgacatctaaccaggccacagtgg

SEQ ID NO: 4612332 - DNA, 25 bp, Homo sapien
tttcagcacagtctcaataagaggc

SEQ ID NO: 4612333 - DNA, 25 bp, Homo sapien
gagaccacgatgagctattgatcac

SEQ ID NO: 4612334 - DNA, 25 bp, Homo sapien
tgctgcactcgaggctagtctacac

SEQ ID NO: 4612335 - DNA, 25 bp, Homo sapien
cactcgaggctagtctacacagtga

SEQ ID NO: 4612336 - DNA, 25 bp, Homo sapien
cacactgctgcactcgaggctagtc

SEQ ID NO: 4612337 - DNA, 25 bp, Homo sapien
taagatgatctcacttgtaagttcc

SEQ ID NO: 4612338 - DNA, 25 bp, Homo sapien
tttcagaagtaagatgatctcactt

SEQ ID NO: 4612339 - DNA, 25 bp, Homo sapien
tcacttgtaagttccattgtatgct

SEQ ID NO: 4612340 - DNA, 25 bp, Homo sapien
gtaagttccattgtatgcttgtcat

SEQ ID NO: 4612341 - DNA, 25 bp, Homo sapien
tcgaatgatgattttgaagactgaa

SEQ ID NO: 4612342 - DNA, 25 bp, Homo sapien
ttcgaatgatgattttgaagactga

SEQ ID NO: 4612343 - DNA, 25 bp, Homo sapien
cttcgaatgatgattttgaagactg

SEQ ID NO: 4612344 - DNA, 25 bp, Homo sapien
cgaatgatgattttgaagactgaaa

SEQ ID NO: 4612345 - DNA, 25 bp, Homo sapien
atatcccaagcctcggcgtcatgca

SEQ ID NO: 4612346 - DNA, 25 bp, Homo sapien
gcctcggcgtcatgcagtatgccca

SEQ ID NO: 4612347 - DNA, 25 bp, Homo sapien
ccaagcctcggcgtcatgcagtatg

SEQ ID NO: 4612348 - DNA, 25 bp, Homo sapien
ggcgtcatgcagtatgcccaggtaa

SEQ ID NO: 4612349 - DNA, 25 bp, Homo sapien
atctccctgttaaacgtctggatag

SEQ ID NO: 4612350 - DNA, 25 bp, Homo sapien
ggtgctctcatttttcggatctccc

SEQ ID NO: 4612351 - DNA, 25 bp, Homo sapien
tccctgttaaacgtctggatagtca

SEQ ID NO: 4612352 - DNA, 25 bp, Homo sapien
gttaaacgtctggatagtcatatag

SEQ ID NO: 4612353 - DNA, 25 bp, Homo sapien
tgtagagtttagcaagaccttccat

SEQ ID NO: 4612354 - DNA, 25 bp, Homo sapien
gggatgtgtagagtttagcaagacc

SEQ ID NO: 4612355 - DNA, 25 bp, Homo sapien
tgtgtagagtttagcaagaccttcc

SEQ ID NO: 4612356 - DNA, 25 bp, Homo sapien
gatggaaagtttgggccctctcaag

SEQ ID NO: 4612357 - DNA, 25 bp, Homo sapien
ttccaggttccccttgcatatgcac

SEQ ID NO: 4612358 - DNA, 25 bp, Homo sapien
ggttccccttgcatatgcacagctt

SEQ ID NO: 4612359 - DNA, 25 bp, Homo sapien
cccttgcatatgcacagctttccag

SEQ ID NO: 4612360 - DNA, 25 bp, Homo sapien
ccttgcatatgcacagctttccagg

SEQ ID NO: 4612361 - DNA, 25 bp, Homo sapien
aagcatctgaagttttagagcccaa

SEQ ID NO: 4612362 - DNA, 25 bp, Homo sapien
tgaagttttagagcccaatctttca

SEQ ID NO: 4612363 - DNA, 25 bp, Homo sapien
ttaagcatctgaagttttagagccc

SEQ ID NO: 4612364 - DNA, 25 bp, Homo sapien
catctgaagttttagagcccaatct

SEQ ID NO: 4612365 - DNA, 25 bp, Homo sapien
gatgcagagagtacgatggtggttg

SEQ ID NO: 4612366 - DNA, 25 bp, Homo sapien
aaaaagctgaacatacagatgcaga

SEQ ID NO: 4612367 - DNA, 25 bp, Homo sapien
tccaaaaagctgaacatacagatgc

SEQ ID NO: 4612368 - DNA, 25 bp, Homo sapien
atgcagagagtacgatggtggttgc

SEQ ID NO: 4612369 - DNA, 25 bp, Homo sapien
caatcttccatcaattgatttgaag

SEQ ID NO: 4612370 - DNA, 25 bp, Homo sapien
tcaatcttccatcaattgatttgaa

SEQ ID NO: 4612371 - DNA, 25 bp, Homo sapien
tctcaatcttccatcaattgatttg

SEQ ID NO: 4612372 - DNA, 25 bp, Homo sapien
aatcttccatcaattgatttgaaga

SEQ ID NO: 4612373 - DNA, 25 bp, Homo sapien
ctaactgcaagtccagttgctgatg

SEQ ID NO: 4612374 - DNA, 25 bp, Homo sapien
cagtgaagtgtttgatctcatcact

SEQ ID NO: 4612375 - DNA, 25 bp, Homo sapien
gtgtttgatctcatcactaactgca

SEQ ID NO: 4612376 - DNA, 25 bp, Homo sapien
tcatcactaactgcaagtccagttg

SEQ ID NO: 4612377 - DNA, 25 bp, Homo sapien
ctctcagacaatatctccagtcctt

SEQ ID NO: 4612378 - DNA, 25 bp, Homo sapien
aattaagactacatgcttcttcagg

SEQ ID NO: 4612379 - DNA, 25 bp, Homo sapien
tgggatgatgtcagtagcaattaag

SEQ ID NO: 4612380 - DNA, 25 bp, Homo sapien
gtccttttccattgtggttatggga

SEQ ID NO: 4612381 - DNA, 25 bp, Homo sapien
ccttgaaggagtctcatatctttgt

SEQ ID NO: 4612382 - DNA, 25 bp, Homo sapien
ccattgtccaacaggatggttagca

SEQ ID NO: 4612383 - DNA, 25 bp, Homo sapien
tcccattgtccaacaggatggttag

SEQ ID NO: 4612384 - DNA, 25 bp, Homo sapien
ttccttgaaggagtctcatatcttt

SEQ ID NO: 4612385 - DNA, 25 bp, Homo sapien
agctcaaggctattacaaacagtgc

SEQ ID NO: 4612386 - DNA, 25 bp, Homo sapien
gtgcatgcccatcagttcctaagag

SEQ ID NO: 4612387 - DNA, 25 bp, Homo sapien
tgtgtatatcctgatgtgcatgccc

SEQ ID NO: 4612388 - DNA, 25 bp, Homo sapien
taagagccacattgccggttaaagg

SEQ ID NO: 4612389 - DNA, 25 bp, Homo sapien
gactccatgtggcaactactatttc

SEQ ID NO: 4612390 - DNA, 25 bp, Homo sapien
cctccaaagcagtattgccgtccaa

SEQ ID NO: 4612391 - DNA, 25 bp, Homo sapien
aaggctatgtaggttatacttgtgc

SEQ ID NO: 4612392 - DNA, 25 bp, Homo sapien
catgtggcaactactatttcctcca

SEQ ID NO: 4612393 - DNA, 25 bp, Homo sapien
taactattgccttcaaactgaggat

SEQ ID NO: 4612394 - DNA, 25 bp, Homo sapien
tccacagtactctttacaagggtca

SEQ ID NO: 4612395 - DNA, 25 bp, Homo sapien
taaaggctgatgtggtgctacccgt

SEQ ID NO: 4612396 - DNA, 25 bp, Homo sapien
gaggattcccaaattagaccttcag

SEQ ID NO: 4612397 - DNA, 25 bp, Homo sapien
gggagaaggcctgtgttacctaaca

SEQ ID NO: 4612398 - DNA, 25 bp, Homo sapien
tagaacataggataagtaaacatcc

SEQ ID NO: 4612399 - DNA, 25 bp, Homo sapien
tggctttcttggctagaacatagga

SEQ ID NO: 4612400 - DNA, 25 bp, Homo sapien
taacagactctcatggactgtggct

SEQ ID NO: 4612401 - DNA, 25 bp, Homo sapien
tacataactccctttcatgcatgga

SEQ ID NO: 4612402 - DNA, 25 bp, Homo sapien
gaatttgcctacataactccctttc

SEQ ID NO: 4612403 - DNA, 25 bp, Homo sapien
ttttagacacttataccgcctatgg

SEQ ID NO: 4612404 - DNA, 25 bp, Homo sapien
tataccgcctatggaatttgcctac

SEQ ID NO: 4612405 - DNA, 25 bp, Homo sapien
tgcacgttgatactttcaggccagt

SEQ ID NO: 4612406 - DNA, 25 bp, Homo sapien
cttgcacgttgatactttcaggcca

SEQ ID NO: 4612407 - DNA, 25 bp, Homo sapien
gcacgttgatactttcaggccagta

SEQ ID NO: 4612408 - DNA, 25 bp, Homo sapien
ttgcacgttgatactttcaggccag

SEQ ID NO: 4612409 - DNA, 25 bp, Homo sapien
caaagtttgtgcccctgattttctg

SEQ ID NO: 4612410 - DNA, 25 bp, Homo sapien
tctgtttatggtcaaaaattggtgg

SEQ ID NO: 4612411 - DNA, 25 bp, Homo sapien
tgattttctgtttatggtcaaaaat

SEQ ID NO: 4612412 - DNA, 25 bp, Homo sapien
tggtcaaaaattggtggttgatcta

SEQ ID NO: 4612413 - DNA, 25 bp, Homo sapien
gcagctatttgcaatcctcgtttca

SEQ ID NO: 4612414 - DNA, 25 bp, Homo sapien
tcactttcagaatgtggcgttgggt

SEQ ID NO: 4612415 - DNA, 25 bp, Homo sapien
tgccacaccatgaaaagcaattgca

SEQ ID NO: 4612416 - DNA, 25 bp, Homo sapien
gcatgaagacagcaatgccacacca

SEQ ID NO: 4612417 - DNA, 25 bp, Homo sapien
gtttccaggacccaacagctggtgc

SEQ ID NO: 4612418 - DNA, 25 bp, Homo sapien
gttcacaggattatggaacagtctg

SEQ ID NO: 4612419 - DNA, 25 bp, Homo sapien
tgagaggagaatttatgcagagttt

SEQ ID NO: 4612420 - DNA, 25 bp, Homo sapien
agttttataagcttagtcaggcaga

SEQ ID NO: 4612421 - DNA, 25 bp, Homo sapien
attctgtgtgaacatggtctacaga

SEQ ID NO: 4612422 - DNA, 25 bp, Homo sapien
aattctgtgtgaacatggtctacag

SEQ ID NO: 4612423 - DNA, 25 bp, Homo sapien
tctgtgtgaacatggtctacagaag

SEQ ID NO: 4612424 - DNA, 25 bp, Homo sapien
tgtgtgaacatggtctacagaagct

SEQ ID NO: 4612425 - DNA, 25 bp, Homo sapien
catttctgaacttcactgccttctt

SEQ ID NO: 4612426 - DNA, 25 bp, Homo sapien
ttcactgccttcttcattttccttc

SEQ ID NO: 4612427 - DNA, 25 bp, Homo sapien
acttcactgccttcttcattttcct

SEQ ID NO: 4612428 - DNA, 25 bp, Homo sapien
cactgccttcttcattttccttcat

SEQ ID NO: 4612429 - DNA, 25 bp, Homo sapien
aacatcaacaattgcctttgattgt

SEQ ID NO: 4612430 - DNA, 25 bp, Homo sapien
ttatgtggacagtataatccagtga

SEQ ID NO: 4612431 - DNA, 25 bp, Homo sapien
tccagtgaattggaacatcaacaat

SEQ ID NO: 4612432 - DNA, 25 bp, Homo sapien
acaattgcctttgattgttgagacg

SEQ ID NO: 4612433 - DNA, 25 bp, Homo sapien
cgcagccctttttggcacgaccatt

SEQ ID NO: 4612434 - DNA, 25 bp, Homo sapien
tcggtccttgcggacttcacgagat

SEQ ID NO: 4612435 - DNA, 25 bp, Homo sapien
cgtggccgcagccctttttggcacg

SEQ ID NO: 4612436 - DNA, 25 bp, Homo sapien
cggtccttgcggacttcacgagatc

SEQ ID NO: 4612437 - DNA, 25 bp, Homo sapien
agagaatagcctgtcttcagtcttt

SEQ ID NO: 4612438 - DNA, 25 bp, Homo sapien
ctccagagaatagcctgtcttcagt

SEQ ID NO: 4612439 - DNA, 25 bp, Homo sapien
gagaatagcctgtcttcagtcttta

SEQ ID NO: 4612440 - DNA, 25 bp, Homo sapien
ttttctccagagaatagcctgtctt

SEQ ID NO: 4612441 - DNA, 25 bp, Homo sapien
ttcagatccattgtctatttcagtc

SEQ ID NO: 4612442 - DNA, 25 bp, Homo sapien
atatattcagaatcaccttccatcc

SEQ ID NO: 4612443 - DNA, 25 bp, Homo sapien
gagagccacaaatgacgataatttc

SEQ ID NO: 4612444 - DNA, 25 bp, Homo sapien
cagtcacctctaatcttgtgagagc

SEQ ID NO: 4612445 - DNA, 25 bp, Homo sapien
cgataatttcaatttatggagtaac

SEQ ID NO: 4612446 - DNA, 25 bp, Homo sapien
ttagttgatgaagtactcagtcacc

SEQ ID NO: 4612447 - DNA, 25 bp, Homo sapien
acttcgtttgaaagcaccacagtca

SEQ ID NO: 4612448 - DNA, 25 bp, Homo sapien
tgatgtagaggagcctgtaacccac

SEQ ID NO: 4612449 - DNA, 25 bp, Homo sapien
cacacttgcatctggacttaattcc

SEQ ID NO: 4612450 - DNA, 25 bp, Homo sapien
caatgtggcaggtgtttcttaagct

SEQ ID NO: 4612451 - DNA, 25 bp, Homo sapien
gaacatggtactgctgccctggtgg

SEQ ID NO: 4612452 - DNA, 25 bp, Homo sapien
agaacatggtactgctgccctggtg

SEQ ID NO: 4612453 - DNA, 25 bp, Homo sapien
atatttttctgagaacatggtactg

SEQ ID NO: 4612454 - DNA, 25 bp, Homo sapien
catggtactgctgccctggtggtac

SEQ ID NO: 4612455 - DNA, 25 bp, Homo sapien
catttacgcctctcagttaatgagt

SEQ ID NO: 4612456 - DNA, 25 bp, Homo sapien
taccaataactgtgcacgaataaca

SEQ ID NO: 4612457 - DNA, 25 bp, Homo sapien
taagagcaccttgagaagctacgag

SEQ ID NO: 4612458 - DNA, 25 bp, Homo sapien
gatgtaaagtcaattctctgcaaca

SEQ ID NO: 4612459 - DNA, 25 bp, Homo sapien
cagctccacaatctggtgcccagtt

SEQ ID NO: 4612460 - DNA, 25 bp, Homo sapien
ggaagatgacggctgtgtagttaat

SEQ ID NO: 4612461 - DNA, 25 bp, Homo sapien
ctctaacttcactctgaacctggaa

SEQ ID NO: 4612462 - DNA, 25 bp, Homo sapien
tgtagttaatcaggcttagtctttg

SEQ ID NO: 4612463 - DNA, 25 bp, Homo sapien
tgccttgagctttcactctaacttc

SEQ ID NO: 4612464 - DNA, 25 bp, Homo sapien
gcaaaactgggaacatgcagctgcc

SEQ ID NO: 4612465 - DNA, 25 bp, Homo sapien
aaaactgggaacatgcagctgccag

SEQ ID NO: 4612466 - DNA, 25 bp, Homo sapien
caaaactgggaacatgcagctgcca

SEQ ID NO: 4612467 - DNA, 25 bp, Homo sapien
aaactgggaacatgcagctgccaga

SEQ ID NO: 4612468 - DNA, 25 bp, Homo sapien
taaacaggccttgtgaacagattgc

SEQ ID NO: 4612469 - DNA, 25 bp, Homo sapien
gtcttttatgagaaaataccagatg

SEQ ID NO: 4612470 - DNA, 25 bp, Homo sapien
cagattgcatccttgttggtggtat

SEQ ID NO: 4612471 - DNA, 25 bp, Homo sapien
aaacagccattacccaaagcagcca

SEQ ID NO: 4612472 - DNA, 25 bp, Homo sapien
taaagtttagtttgagagcccacaa

SEQ ID NO: 4612473 - DNA, 25 bp, Homo sapien
tgtaaagtaatcaaacatgcctgga

SEQ ID NO: 4612474 - DNA, 25 bp, Homo sapien
taatgtaaagtaatcaaacatgcct

SEQ ID NO: 4612475 - DNA, 25 bp, Homo sapien
aagtttagtttgagagcccacaatg

SEQ ID NO: 4612476 - DNA, 25 bp, Homo sapien
tgctcgtaagctgatcagttctgga

SEQ ID NO: 4612477 - DNA, 25 bp, Homo sapien
gggtagcgaatttcagtagttaata

SEQ ID NO: 4612478 - DNA, 25 bp, Homo sapien
catggaatggacctgagacatttcc

SEQ ID NO: 4612479 - DNA, 25 bp, Homo sapien
aatattgttttgcttgtgctcgtaa

SEQ ID NO: 4612480 - DNA, 25 bp, Homo sapien
tcttcaaggacatgaaagcctgaca

SEQ ID NO: 4612481 - DNA, 25 bp, Homo sapien
gcagtctctcaaatttccggtttaa

SEQ ID NO: 4612482 - DNA, 25 bp, Homo sapien
gaaagcagtctctcaaatttccggt

SEQ ID NO: 4612483 - DNA, 25 bp, Homo sapien
caaggacatgaaagcctgacatttc

SEQ ID NO: 4612484 - DNA, 25 bp, Homo sapien
catgtggttaaatcttcactggaaa

SEQ ID NO: 4612485 - DNA, 25 bp, Homo sapien
aaagtgcaaatatgtacatgtggtt

SEQ ID NO: 4612486 - DNA, 25 bp, Homo sapien
tattcaagagtttctgccagatagc

SEQ ID NO: 4612487 - DNA, 25 bp, Homo sapien
atcagcccttaaatattcaagagtt

SEQ ID NO: 4612488 - DNA, 25 bp, Homo sapien
caacacaataagcttggtgaaattc

SEQ ID NO: 4612489 - DNA, 25 bp, Homo sapien
tacaacacaataagcttggtgaaat

SEQ ID NO: 4612490 - DNA, 25 bp, Homo sapien
acacaataagcttggtgaaattcag

SEQ ID NO: 4612491 - DNA, 25 bp, Homo sapien
ttacaacacaataagcttggtgaaa

SEQ ID NO: 4612492 - DNA, 25 bp, Homo sapien
tggcaaagtcatcacaggacaagtc

SEQ ID NO: 4612493 - DNA, 25 bp, Homo sapien
gccttttgccgttgaggaaagccaa

SEQ ID NO: 4612494 - DNA, 25 bp, Homo sapien
caagtcttggccttcaaatttgcag

SEQ ID NO: 4612495 - DNA, 25 bp, Homo sapien
gggtcattgtccagcaagccttttg

SEQ ID NO: 4612496 - DNA, 25 bp, Homo sapien
cactatgatgtgtctgaaaaggaca

SEQ ID NO: 4612497 - DNA, 25 bp, Homo sapien
cactttataggcagtaatggctact

SEQ ID NO: 4612498 - DNA, 25 bp, Homo sapien
cataagcaatgacataggacgcttt

SEQ ID NO: 4612499 - DNA, 25 bp, Homo sapien
gccacagtagtgatgatttgaattc

SEQ ID NO: 4612500 - DNA, 25 bp, Homo sapien
aggatttgtcttaaagcttgcttgc

SEQ ID NO: 4612501 - DNA, 25 bp, Homo sapien
gatttgtcttaaagcttgcttgcag

SEQ ID NO: 4612502 - DNA, 25 bp, Homo sapien
gtcttaaagcttgcttgcagtgttt

SEQ ID NO: 4612503 - DNA, 25 bp, Homo sapien
tttgtcttaaagcttgcttgcagtg

SEQ ID NO: 4612504 - DNA, 25 bp, Homo sapien
agctgtttgtagtcaatgtctgaag

SEQ ID NO: 4612505 - DNA, 25 bp, Homo sapien
catttttccgcttaactgggccact

SEQ ID NO: 4612506 - DNA, 25 bp, Homo sapien
tttccgcttaactgggccactgtta

SEQ ID NO: 4612507 - DNA, 25 bp, Homo sapien
cactgttaagctgtttgtagtcaat

SEQ ID NO: 4612508 - DNA, 25 bp, Homo sapien
catgcacatagccatgccacagagt

SEQ ID NO: 4612509 - DNA, 25 bp, Homo sapien
cactttcactaaggtttgtccagtc

SEQ ID NO: 4612510 - DNA, 25 bp, Homo sapien
caagcatgcacatagccatgccaca

SEQ ID NO: 4612511 - DNA, 25 bp, Homo sapien
tgcacatagccatgccacagagtag

SEQ ID NO: 4612512 - DNA, 25 bp, Homo sapien
gaagttgttttctcagtgccgtacc

SEQ ID NO: 4612513 - DNA, 25 bp, Homo sapien
tttctcagtgccgtacctcattggt

SEQ ID NO: 4612514 - DNA, 25 bp, Homo sapien
ctcagtgccgtacctcattggttca

SEQ ID NO: 4612515 - DNA, 25 bp, Homo sapien
gttgttttctcagtgccgtacctca

SEQ ID NO: 4612516 - DNA, 25 bp, Homo sapien
tgtcctctgtaaagcgatattctgg

SEQ ID NO: 4612517 - DNA, 25 bp, Homo sapien
gagatctaggcactgtttgtacaaa

SEQ ID NO: 4612518 - DNA, 25 bp, Homo sapien
gctgtggtcttacatgcaatggcca

SEQ ID NO: 4612519 - DNA, 25 bp, Homo sapien
tagtatatgcaaaaccgcagactga

SEQ ID NO: 4612520 - DNA, 25 bp, Homo sapien
actacagcccagaactcctggactc

SEQ ID NO: 4612521 - DNA, 25 bp, Homo sapien
gtgcggacacccgatcggcatagcg

SEQ ID NO: 4612522 - DNA, 25 bp, Homo sapien
ccagaactcctggactcaagcgatc

SEQ ID NO: 4612523 - DNA, 25 bp, Homo sapien
tgcggacacccgatcggcatagcgc

SEQ ID NO: 4612524 - DNA, 25 bp, Homo sapien
ttaataacatggtccataaagggac

SEQ ID NO: 4612525 - DNA, 25 bp, Homo sapien
tttcagacaacagtaggctttcttg

SEQ ID NO: 4612526 - DNA, 25 bp, Homo sapien
ccataaagggacatgctttgcgaag

SEQ ID NO: 4612527 - DNA, 25 bp, Homo sapien
ggagaagagacagttattgccagcg

SEQ ID NO: 4612528 - DNA, 25 bp, Homo sapien
gacttctggtgaatcatttattgcc

SEQ ID NO: 4612529 - DNA, 25 bp, Homo sapien
catataattttatgacaatgacttc

SEQ ID NO: 4612530 - DNA, 25 bp, Homo sapien
gcaaaatcttttagttacaaataca

SEQ ID NO: 4612531 - DNA, 25 bp, Homo sapien
tcttttagttacaaatacatgaata

SEQ ID NO: 4612532 - DNA, 25 bp, Homo sapien
ctccaacagagcagaattctgagga

SEQ ID NO: 4612533 - DNA, 25 bp, Homo sapien
tctgaggattaaactcgagcagcat

SEQ ID NO: 4612534 - DNA, 25 bp, Homo sapien
ccttgaactacctccaacagagcag

SEQ ID NO: 4612535 - DNA, 25 bp, Homo sapien
aattctgaggattaaactcgagcag

SEQ ID NO: 4612536 - DNA, 25 bp, Homo sapien
atgaaagtgaaacattgaaatatac

SEQ ID NO: 4612537 - DNA, 25 bp, Homo sapien
gatgaaagtgaaacattgaaatata

SEQ ID NO: 4612538 - DNA, 25 bp, Homo sapien
gctccccagagactgttaagaacat

SEQ ID NO: 4612539 - DNA, 25 bp, Homo sapien
gggaactgctagggccagatacaga

SEQ ID NO: 4612540 - DNA, 25 bp, Homo sapien
aactgctagggccagatacagatgc

SEQ ID NO: 4612541 - DNA, 25 bp, Homo sapien
tcggggaactgctagggccagatac

SEQ ID NO: 4612542 - DNA, 25 bp, Homo sapien
ttctcggggaactgctagggccaga

SEQ ID NO: 4612543 - DNA, 25 bp, Homo sapien
gccagactcccctcttctcaagtat

SEQ ID NO: 4612544 - DNA, 25 bp, Homo sapien
ttgtgccagactcccctcttctcaa

SEQ ID NO: 4612545 - DNA, 25 bp, Homo sapien
catccttgtgccagactcccctctt

SEQ ID NO: 4612546 - DNA, 25 bp, Homo sapien
tccttgtgccagactcccctcttct

SEQ ID NO: 4612547 - DNA, 25 bp, Homo sapien
tcctgaaacgacagctgtttgacac

SEQ ID NO: 4612548 - DNA, 25 bp, Homo sapien
caaaaactgcaagaggcaaatggct

SEQ ID NO: 4612549 - DNA, 25 bp, Homo sapien
gacacatttgaacatccattgatct

SEQ ID NO: 4612550 - DNA, 25 bp, Homo sapien
cgacagctgtttgacacatttgaac

SEQ ID NO: 4612551 - DNA, 25 bp, Homo sapien
aatctgggccacttttgcaagagga

SEQ ID NO: 4612552 - DNA, 25 bp, Homo sapien
ggcaaagtagaccaacacgattgaa

SEQ ID NO: 4612553 - DNA, 25 bp, Homo sapien
tacatcctatattgagcaatgaatc

SEQ ID NO: 4612554 - DNA, 25 bp, Homo sapien
cacgattgaaaaatgacgtgacgat

SEQ ID NO: 4612555 - DNA, 25 bp, Homo sapien
gtaaggcactgaggaggaccttcat

SEQ ID NO: 4612556 - DNA, 25 bp, Homo sapien
agtaaggcactgaggaggaccttca

SEQ ID NO: 4612557 - DNA, 25 bp, Homo sapien
cagtaaggcactgaggaggaccttc

SEQ ID NO: 4612558 - DNA, 25 bp, Homo sapien
gcaaaggtgctgacatattgctctg

SEQ ID NO: 4612559 - DNA, 25 bp, Homo sapien
agcccagtgagtttgataatctacc

SEQ ID NO: 4612560 - DNA, 25 bp, Homo sapien
cagtgagtttgataatctaccaatc

SEQ ID NO: 4612561 - DNA, 25 bp, Homo sapien
gctgacatattgctctgtccagccc

SEQ ID NO: 4612562 - DNA, 25 bp, Homo sapien
ctgtgtgtgagtagcattcctggaa

SEQ ID NO: 4612563 - DNA, 25 bp, Homo sapien
tactcatagtagctggcacatagca

SEQ ID NO: 4612564 - DNA, 25 bp, Homo sapien
gaaggactttcagcaacatgagtca

SEQ ID NO: 4612565 - DNA, 25 bp, Homo sapien
tatagcaactggactaacgacatgg

SEQ ID NO: 4612566 - DNA, 25 bp, Homo sapien
tgactgaacacaaagggtaaaagct

SEQ ID NO: 4612567 - DNA, 25 bp, Homo sapien
tgtgagaaacatctgtcttagggct

SEQ ID NO: 4612568 - DNA, 25 bp, Homo sapien
tgaaacaccactgcgaaatatgagg

SEQ ID NO: 4612569 - DNA, 25 bp, Homo sapien
tagaaagtgtaccaagaagtctggc

SEQ ID NO: 4612570 - DNA, 25 bp, Homo sapien
taatttcttcaggtgccaaacaacg

SEQ ID NO: 4612571 - DNA, 25 bp, Homo sapien
tacagtatttgcttgacatggaccc

SEQ ID NO: 4612572 - DNA, 25 bp, Homo sapien
tcattttctcttggatggtgccaga

SEQ ID NO: 4612573 - DNA, 25 bp, Homo sapien
gaccaatatcttcaggtgccagagg

SEQ ID NO: 4612574 - DNA, 25 bp, Homo sapien
aactcagccctgatgtgggactgtg

SEQ ID NO: 4612575 - DNA, 25 bp, Homo sapien
gtttcttctaccatatacagtagtt

SEQ ID NO: 4612576 - DNA, 25 bp, Homo sapien
gtagttaaggcatcttgtccaaggg

SEQ ID NO: 4612577 - DNA, 25 bp, Homo sapien
tttctcattggcaacccctttactc

SEQ ID NO: 4612578 - DNA, 25 bp, Homo sapien
tgaagctcttttggggcaagccttc

SEQ ID NO: 4612579 - DNA, 25 bp, Homo sapien
cttggttacccttgaagctcttttg

SEQ ID NO: 4612580 - DNA, 25 bp, Homo sapien
gggcaagccttcggaatctatcagg

SEQ ID NO: 4612581 - DNA, 25 bp, Homo sapien
tcttttggggcaagccttcggaatc

SEQ ID NO: 4612582 - DNA, 25 bp, Homo sapien
tccatcacaccatcactatccacac

SEQ ID NO: 4612583 - DNA, 25 bp, Homo sapien
aggcagcacactccgtgtttccatc

SEQ ID NO: 4612584 - DNA, 25 bp, Homo sapien
caccatcactatccacacagagctg

SEQ ID NO: 4612585 - DNA, 25 bp, Homo sapien
acaggcagcacactccgtgtttcca

SEQ ID NO: 4612586 - DNA, 25 bp, Homo sapien
ccaactttagaaggagatgtcatag

SEQ ID NO: 4612587 - DNA, 25 bp, Homo sapien
actgtgacatacctccaactttaga

SEQ ID NO: 4612588 - DNA, 25 bp, Homo sapien
atgtcatagaatggaaacaatcctg

SEQ ID NO: 4612589 - DNA, 25 bp, Homo sapien
tccccactgtgacatacctccaact

SEQ ID NO: 4612590 - DNA, 25 bp, Homo sapien
acactcttctggccttgtgtgtact

SEQ ID NO: 4612591 - DNA, 25 bp, Homo sapien
cttctggccttgtgtgtactgtcca

SEQ ID NO: 4612592 - DNA, 25 bp, Homo sapien
ctcttctggccttgtgtgtactgtc

SEQ ID NO: 4612593 - DNA, 25 bp, Homo sapien
cactcttctggccttgtgtgtactg

SEQ ID NO: 4612594 - DNA, 25 bp, Homo sapien
catgtgcttctgctcccttgcccat

SEQ ID NO: 4612595 - DNA, 25 bp, Homo sapien
cagcatgtgcttctgctcccttgcc

SEQ ID NO: 4612596 - DNA, 25 bp, Homo sapien
gggatctgtgcactccagcatgtgc

SEQ ID NO: 4612597 - DNA, 25 bp, Homo sapien
ctgggatctgtgcactccagcatgt

SEQ ID NO: 4612598 - DNA, 25 bp, Homo sapien
ttgtgtttttggatatgctgatttt

SEQ ID NO: 4612599 - DNA, 25 bp, Homo sapien
attgtgtttttggatatgctgattt

SEQ ID NO: 4612600 - DNA, 25 bp, Homo sapien
agctgctggtaggatatggaataag

SEQ ID NO: 4612601 - DNA, 25 bp, Homo sapien
atcctttttcttgtggtggtcccag

SEQ ID NO: 4612602 - DNA, 25 bp, Homo sapien
catttgtaagtcctgtaaaagacct

SEQ ID NO: 4612603 - DNA, 25 bp, Homo sapien
tctggctgaacttgtgctggcacat

SEQ ID NO: 4612604 - DNA, 25 bp, Homo sapien
cactcagcaagcttcagcatttgta

SEQ ID NO: 4612605 - DNA, 25 bp, Homo sapien
cattgccaatatgaggtatcactac

SEQ ID NO: 4612606 - DNA, 25 bp, Homo sapien
ggagcttgttggctgccaaaatcat

SEQ ID NO: 4612607 - DNA, 25 bp, Homo sapien
tcatggagcttgttggctgccaaaa

SEQ ID NO: 4612608 - DNA, 25 bp, Homo sapien
taatttctgctgatccagcattgcc

SEQ ID NO: 4612609 - DNA, 25 bp, Homo sapien
ttttatgtgctttttcagttttcat

SEQ ID NO: 4612610 - DNA, 25 bp, Homo sapien
tttttatgtgctttttcagttttca

SEQ ID NO: 4612611 - DNA, 25 bp, Homo sapien
tatcacagtggtctcaggtagtcag

SEQ ID NO: 4612612 - DNA, 25 bp, Homo sapien
tttgccttagctagagatgctgagc

SEQ ID NO: 4612613 - DNA, 25 bp, Homo sapien
ggactgtcaacaagagcacttcatg

SEQ ID NO: 4612614 - DNA, 25 bp, Homo sapien
tagcctaggcacagcagggactgtc

SEQ ID NO: 4612615 - DNA, 25 bp, Homo sapien
ctgtgaccagcatgatcagtgtgtc

SEQ ID NO: 4612616 - DNA, 25 bp, Homo sapien
cactatttctgcttctgtgaccagc

SEQ ID NO: 4612617 - DNA, 25 bp, Homo sapien
tcagtgtgtctgctcgtatccccat

SEQ ID NO: 4612618 - DNA, 25 bp, Homo sapien
tgatcagtgtgtctgctcgtatccc

SEQ ID NO: 4612619 - DNA, 25 bp, Homo sapien
cactaagaaagccactgaatgatgc

SEQ ID NO: 4612620 - DNA, 25 bp, Homo sapien
catcagtgcaccatgaaccactggg

SEQ ID NO: 4612621 - DNA, 25 bp, Homo sapien
tcccatagagatgtatgctttgtct

SEQ ID NO: 4612622 - DNA, 25 bp, Homo sapien
tcccagaagaatacactttgacata

SEQ ID NO: 4612623 - DNA, 25 bp, Homo sapien
ctttttacatgctcttggaatgcgc

SEQ ID NO: 4612624 - DNA, 25 bp, Homo sapien
cgctgaagaacattccatcttgctg

SEQ ID NO: 4612625 - DNA, 25 bp, Homo sapien
tctctacgaaaggtgaaagtgaagg

SEQ ID NO: 4612626 - DNA, 25 bp, Homo sapien
atttctctacgaaaggtgaaagtga

SEQ ID NO: 4612627 - DNA, 25 bp, Homo sapien
tctccagcagtggagcatgacccca

SEQ ID NO: 4612628 - DNA, 25 bp, Homo sapien
gatagtcctgaaatgtgcatcccca

SEQ ID NO: 4612629 - DNA, 25 bp, Homo sapien
tatcggaaatcatgagcctgaacag

SEQ ID NO: 4612630 - DNA, 25 bp, Homo sapien
gctaagcccaatacctctgtcagtg

SEQ ID NO: 4612631 - DNA, 25 bp, Homo sapien
tggtgcagctgaacaaccaaatgcc

SEQ ID NO: 4612632 - DNA, 25 bp, Homo sapien
cacatgacagcatagaaattgactg

SEQ ID NO: 4612633 - DNA, 25 bp, Homo sapien
gctgaacaaccaaatgcctcccaaa

SEQ ID NO: 4612634 - DNA, 25 bp, Homo sapien
tgatcatcacatgacagcatagaaa

SEQ ID NO: 4612635 - DNA, 25 bp, Homo sapien
gattgtgaaccttaagcagatcagc

SEQ ID NO: 4612636 - DNA, 25 bp, Homo sapien
tataaaactgattgtgaaccttaag

SEQ ID NO: 4612637 - DNA, 25 bp, Homo sapien
tcttcatagttgctggaagcacaaa

SEQ ID NO: 4612638 - DNA, 25 bp, Homo sapien
caatttttcttcatagttgctggaa

SEQ ID NO: 4612639 - DNA, 25 bp, Homo sapien
cactgtgacctggaactcttgattc

SEQ ID NO: 4612640 - DNA, 25 bp, Homo sapien
tcatcatttctagctgcggggcaca

SEQ ID NO: 4612641 - DNA, 25 bp, Homo sapien
gaactcttgattccgatatccttag

SEQ ID NO: 4612642 - DNA, 25 bp, Homo sapien
tatccttagcattgtcagtataact

SEQ ID NO: 4612643 - DNA, 25 bp, Homo sapien
cccatactttgtgccatagcctgga

SEQ ID NO: 4612644 - DNA, 25 bp, Homo sapien
tcggtcaccaggagtgtatgaacgt

SEQ ID NO: 4612645 - DNA, 25 bp, Homo sapien
gatctgatgtaattctcggtcacca

SEQ ID NO: 4612646 - DNA, 25 bp, Homo sapien
tcttttccatgtggctagcagtatc

SEQ ID NO: 4612647 - DNA, 25 bp, Homo sapien
caccaaagttagagcctggtttctg

SEQ ID NO: 4612648 - DNA, 25 bp, Homo sapien
cttggatgtatattaatgctttctc

SEQ ID NO: 4612649 - DNA, 25 bp, Homo sapien
tggatgtatattaatgctttctcca

SEQ ID NO: 4612650 - DNA, 25 bp, Homo sapien
ttggatgtatattaatgctttctcc

SEQ ID NO: 4612651 - DNA, 25 bp, Homo sapien
gaagggtggtcatcttgctgccaca

SEQ ID NO: 4612652 - DNA, 25 bp, Homo sapien
ggtcatcttgctgccacactgaaaa

SEQ ID NO: 4612653 - DNA, 25 bp, Homo sapien
gggtggtcatcttgctgccacactg

SEQ ID NO: 4612654 - DNA, 25 bp, Homo sapien
ggaagggtggtcatcttgctgccac

SEQ ID NO: 4612655 - DNA, 25 bp, Homo sapien
ttcaaaacgtttctcagatatccca

SEQ ID NO: 4612656 - DNA, 25 bp, Homo sapien
agtttatcttcaaaacgtttctcag

SEQ ID NO: 4612657 - DNA, 25 bp, Homo sapien
atcttcaaaacgtttctcagatatc

SEQ ID NO: 4612658 - DNA, 25 bp, Homo sapien
gtttatcttcaaaacgtttctcaga

SEQ ID NO: 4612659 - DNA, 25 bp, Homo sapien
caacacttaggttatgactcttcct

SEQ ID NO: 4612660 - DNA, 25 bp, Homo sapien
gcctggcctttagagtccctttcta

SEQ ID NO: 4612661 - DNA, 25 bp, Homo sapien
catttttagaagtatttggcctggc

SEQ ID NO: 4612662 - DNA, 25 bp, Homo sapien
cattagtgtttatggaatattgaac

SEQ ID NO: 4612663 - DNA, 25 bp, Homo sapien
caaagtatcaaacaagtggtttctg

SEQ ID NO: 4612664 - DNA, 25 bp, Homo sapien
tatagacaatgatccttcctttgtt

SEQ ID NO: 4612665 - DNA, 25 bp, Homo sapien
caagacctcatggtctatagacaat

SEQ ID NO: 4612666 - DNA, 25 bp, Homo sapien
catgtgctgacagagctacaaagta

SEQ ID NO: 4612667 - DNA, 25 bp, Homo sapien
ataatcacatgtattagttttacag

SEQ ID NO: 4612668 - DNA, 25 bp, Homo sapien
cacatgtattagttttacaggaaaa

SEQ ID NO: 4612669 - DNA, 25 bp, Homo sapien
atcacatgtattagttttacaggaa

SEQ ID NO: 4612670 - DNA, 25 bp, Homo sapien
taatcacatgtattagttttacagg

SEQ ID NO: 4612671 - DNA, 25 bp, Homo sapien
taagcaagacgctgataaacaaacg

SEQ ID NO: 4612672 - DNA, 25 bp, Homo sapien
cacttgagggttaggatcaccattc

SEQ ID NO: 4612673 - DNA, 25 bp, Homo sapien
gcaacctttaaataagacccgtgca

SEQ ID NO: 4612674 - DNA, 25 bp, Homo sapien
ggcttttgcatggtaaaccacttga

SEQ ID NO: 4612675 - DNA, 25 bp, Homo sapien
cacagcaccatactagagttttcct

SEQ ID NO: 4612676 - DNA, 25 bp, Homo sapien
gctttggttaatagctatcaatatt

SEQ ID NO: 4612677 - DNA, 25 bp, Homo sapien
cctacagtgttactacacagcacca

SEQ ID NO: 4612678 - DNA, 25 bp, Homo sapien
caatattatcatggatttaatccca

SEQ ID NO: 4612679 - DNA, 25 bp, Homo sapien
caaggtaaagccaatgaagcaatga

SEQ ID NO: 4612680 - DNA, 25 bp, Homo sapien
tcctgtccaaggtaaagccaatgaa

SEQ ID NO: 4612681 - DNA, 25 bp, Homo sapien
tggtgtatgaagcacaacactgatg

SEQ ID NO: 4612682 - DNA, 25 bp, Homo sapien
aacactgatgaatcctgtccaaggt

SEQ ID NO: 4612683 - DNA, 25 bp, Homo sapien
catcatgtggactgtgtgggccacc

SEQ ID NO: 4612684 - DNA, 25 bp, Homo sapien
cacatcatgtggactgtgtgggcca

SEQ ID NO: 4612685 - DNA, 25 bp, Homo sapien
ttcttccacatcatgtggactgtgt

SEQ ID NO: 4612686 - DNA, 25 bp, Homo sapien
tccacatcatgtggactgtgtgggc

SEQ ID NO: 4612687 - DNA, 25 bp, Homo sapien
ttttcgggtaactggacgtgctcag

SEQ ID NO: 4612688 - DNA, 25 bp, Homo sapien
tttttcgggtaactggacgtgctca

SEQ ID NO: 4612689 - DNA, 25 bp, Homo sapien
tcttgttaatcttgaggaatgaaga

SEQ ID NO: 4612690 - DNA, 25 bp, Homo sapien
ttcttgttaatcttgaggaatgaag

SEQ ID NO: 4612691 - DNA, 25 bp, Homo sapien
gcagttagttacagcagttagttcc

SEQ ID NO: 4612692 - DNA, 25 bp, Homo sapien
gatatacggcagttagttacagcag

SEQ ID NO: 4612693 - DNA, 25 bp, Homo sapien
ttagttacagcagttagttcctgtg

SEQ ID NO: 4612694 - DNA, 25 bp, Homo sapien
caggtttggatatacggcagttagt

SEQ ID NO: 4612695 - DNA, 25 bp, Homo sapien
actggttgccatgcttttataccat

SEQ ID NO: 4612696 - DNA, 25 bp, Homo sapien
gagcttaaacctacttgcctgccaa

SEQ ID NO: 4612697 - DNA, 25 bp, Homo sapien
cttttataccatggaggaggaagtt

SEQ ID NO: 4612698 - DNA, 25 bp, Homo sapien
tgcctgccaactccataatttcttg

SEQ ID NO: 4612699 - DNA, 25 bp, Homo sapien
attacatttatttgcccctcctgga

SEQ ID NO: 4612700 - DNA, 25 bp, Homo sapien
tattacatttatttgcccctcctgg

SEQ ID NO: 4612701 - DNA, 25 bp, Homo sapien
cccctcctggataatgcctattcat

SEQ ID NO: 4612702 - DNA, 25 bp, Homo sapien
ttgcccctcctggataatgcctatt

SEQ ID NO: 4612703 - DNA, 25 bp, Homo sapien
gcaatactgacccaactggcagtga

SEQ ID NO: 4612704 - DNA, 25 bp, Homo sapien
gacgaactggaaattcaagctgttc

SEQ ID NO: 4612705 - DNA, 25 bp, Homo sapien
gcagtgattattcttatctccaggc

SEQ ID NO: 4612706 - DNA, 25 bp, Homo sapien
tccaggctctctgaagcaagacgaa

SEQ ID NO: 4612707 - DNA, 25 bp, Homo sapien
gctttcgcagaatgatacttctgtg

SEQ ID NO: 4612708 - DNA, 25 bp, Homo sapien
cagctttcgcagaatgatacttctg

SEQ ID NO: 4612709 - DNA, 25 bp, Homo sapien
cacagctttcgcagaatgatacttc

SEQ ID NO: 4612710 - DNA, 25 bp, Homo sapien
tcacagctttcgcagaatgatactt

SEQ ID NO: 4612711 - DNA, 25 bp, Homo sapien
agaaactcaagttttgtatcaaatg

SEQ ID NO: 4612712 - DNA, 25 bp, Homo sapien
tcatccgatattttaagaaactcaa

SEQ ID NO: 4612713 - DNA, 25 bp, Homo sapien
ataatttcatccgatattttaagaa

SEQ ID NO: 4612714 - DNA, 25 bp, Homo sapien
tttcatccgatattttaagaaactc

SEQ ID NO: 4612715 - DNA, 25 bp, Homo sapien
tttgaataattatccgaatgcggca

SEQ ID NO: 4612716 - DNA, 25 bp, Homo sapien
gaatgcggcacatgcaggactccac

SEQ ID NO: 4612717 - DNA, 25 bp, Homo sapien
aattatccgaatgcggcacatgcag

SEQ ID NO: 4612718 - DNA, 25 bp, Homo sapien
tccgaatgcggcacatgcaggactc

SEQ ID NO: 4612719 - DNA, 25 bp, Homo sapien
gaagccagtgtcgatgcaggagggt

SEQ ID NO: 4612720 - DNA, 25 bp, Homo sapien
tagatgtctgttactacattagagg

SEQ ID NO: 4612721 - DNA, 25 bp, Homo sapien
agtttttcctctgatcaagctgttc

SEQ ID NO: 4612722 - DNA, 25 bp, Homo sapien
ttagagggtctctgtattgtgcgag

SEQ ID NO: 4612723 - DNA, 25 bp, Homo sapien
tccaccagttttgtaattgaacaac

SEQ ID NO: 4612724 - DNA, 25 bp, Homo sapien
caggaacaccatttcccggttgttg

SEQ ID NO: 4612725 - DNA, 25 bp, Homo sapien
ccagttttgtaattgaacaacatcc

SEQ ID NO: 4612726 - DNA, 25 bp, Homo sapien
tgtttgttatacctacatcttgccc

SEQ ID NO: 4612727 - DNA, 25 bp, Homo sapien
tttgattgttctctttttagtttca

SEQ ID NO: 4612728 - DNA, 25 bp, Homo sapien
cttgtttttgtttgattgttctctt

SEQ ID NO: 4612729 - DNA, 25 bp, Homo sapien
ccttgtttttgtttgattgttctct

SEQ ID NO: 4612730 - DNA, 25 bp, Homo sapien
gattgttctctttttagtttcacca

SEQ ID NO: 4612731 - DNA, 25 bp, Homo sapien
catcgagtggtagcatgttttaagg

SEQ ID NO: 4612732 - DNA, 25 bp, Homo sapien
tagaaacaccaaggttagctttgtg

SEQ ID NO: 4612733 - DNA, 25 bp, Homo sapien
tcatcgagtggtagcatgttttaag

SEQ ID NO: 4612734 - DNA, 25 bp, Homo sapien
accaaggttagctttgtgccttatc

SEQ ID NO: 4612735 - DNA, 25 bp, Homo sapien
ttcaccaacactaatgtgttagtag

SEQ ID NO: 4612736 - DNA, 25 bp, Homo sapien
cactaatgtgttagtagtcctgcta

SEQ ID NO: 4612737 - DNA, 25 bp, Homo sapien
cctgctagtagctctgcttgttacc

SEQ ID NO: 4612738 - DNA, 25 bp, Homo sapien
tgttagtagtcctgctagtagctct

SEQ ID NO: 4612739 - DNA, 25 bp, Homo sapien
cctcatctggtggtcctccaatttt

SEQ ID NO: 4612740 - DNA, 25 bp, Homo sapien
ctatttgcatctccctcatctggtg

SEQ ID NO: 4612741 - DNA, 25 bp, Homo sapien
tctggtggtcctccaattttctcag

SEQ ID NO: 4612742 - DNA, 25 bp, Homo sapien
ggtggtcctccaattttctcagttc

SEQ ID NO: 4612743 - DNA, 25 bp, Homo sapien
cagaaatgaggattatttggtaatc

SEQ ID NO: 4612744 - DNA, 25 bp, Homo sapien
tcagaaatgaggattatttggtaat

SEQ ID NO: 4612745 - DNA, 25 bp, Homo sapien
tcagtaagcagacctgaagtactgg

SEQ ID NO: 4612746 - DNA, 25 bp, Homo sapien
gctagtgagtcttgagtacttattg

SEQ ID NO: 4612747 - DNA, 25 bp, Homo sapien
tactgggggctagtgagtcttgagt

SEQ ID NO: 4612748 - DNA, 25 bp, Homo sapien
cagtaagcagacctgaagtactggg

SEQ ID NO: 4612749 - DNA, 25 bp, Homo sapien
ttgcagtccttctatctgaaccttc

SEQ ID NO: 4612750 - DNA, 25 bp, Homo sapien
actggattttgcagtccttctatct

SEQ ID NO: 4612751 - DNA, 25 bp, Homo sapien
tggattttgcagtccttctatctga

SEQ ID NO: 4612752 - DNA, 25 bp, Homo sapien
gattttgcagtccttctatctgaac

SEQ ID NO: 4612753 - DNA, 25 bp, Homo sapien
tcaccctcataagcacggccaaatg

SEQ ID NO: 4612754 - DNA, 25 bp, Homo sapien
agagaatagtgccaccaacatcacc

SEQ ID NO: 4612755 - DNA, 25 bp, Homo sapien
taagcacggccaaatgcccaagttt

SEQ ID NO: 4612756 - DNA, 25 bp, Homo sapien
aacatcaccctcataagcacggcca

SEQ ID NO: 4612757 - DNA, 25 bp, Homo sapien
ctacatttgccgaactgaagtaaca

SEQ ID NO: 4612758 - DNA, 25 bp, Homo sapien
gataaatggtactgctctcctccaa

SEQ ID NO: 4612759 - DNA, 25 bp, Homo sapien
tttgccgaactgaagtaacaggaga

SEQ ID NO: 4612760 - DNA, 25 bp, Homo sapien
taacaggagataaatggtactgctc

SEQ ID NO: 4612761 - DNA, 25 bp, Homo sapien
gtttgttgtctcttaagttatgttc

SEQ ID NO: 4612762 - DNA, 25 bp, Homo sapien
catttgacagtgacatgtgttggga

SEQ ID NO: 4612763 - DNA, 25 bp, Homo sapien
tccttgtttattctgtccacacatt

SEQ ID NO: 4612764 - DNA, 25 bp, Homo sapien
caaaattccttgtttattctgtcca

SEQ ID NO: 4612765 - DNA, 25 bp, Homo sapien
catgcaggtatgttgtggataatgc

SEQ ID NO: 4612766 - DNA, 25 bp, Homo sapien
cagtatcagagatgacatgcaggta

SEQ ID NO: 4612767 - DNA, 25 bp, Homo sapien
gataatgcattcatagattctgaag

SEQ ID NO: 4612768 - DNA, 25 bp, Homo sapien
aacaactatggattcctgacaggca

SEQ ID NO: 4612769 - DNA, 25 bp, Homo sapien
cgtttccatctgccaagtccacttt

SEQ ID NO: 4612770 - DNA, 25 bp, Homo sapien
tttccatctgccaagtccactttca

SEQ ID NO: 4612771 - DNA, 25 bp, Homo sapien
gtttccatctgccaagtccactttc

SEQ ID NO: 4612772 - DNA, 25 bp, Homo sapien
ttccatctgccaagtccactttcat

SEQ ID NO: 4612773 - DNA, 25 bp, Homo sapien
tactgactgtaacatcactcatcag

SEQ ID NO: 4612774 - DNA, 25 bp, Homo sapien
catcactcatcagctttaataccag

SEQ ID NO: 4612775 - DNA, 25 bp, Homo sapien
catccgtatgagaatacagtagtca

SEQ ID NO: 4612776 - DNA, 25 bp, Homo sapien
taacatcaaccgtttctttactgac

SEQ ID NO: 4612777 - DNA, 25 bp, Homo sapien
tagaatctgggtccaacaaattaac

SEQ ID NO: 4612778 - DNA, 25 bp, Homo sapien
tttagaatctgggtccaacaaatta

SEQ ID NO: 4612779 - DNA, 25 bp, Homo sapien
aattaactttatctgagaagtctgc

SEQ ID NO: 4612780 - DNA, 25 bp, Homo sapien
acaaattaactttatctgagaagtc

SEQ ID NO: 4612781 - DNA, 25 bp, Homo sapien
tcagctgccaggtgatggttaagtc

SEQ ID NO: 4612782 - DNA, 25 bp, Homo sapien
ttaagtcagggtggaaggtgtcaat

SEQ ID NO: 4612783 - DNA, 25 bp, Homo sapien
tttaggtccctttcgtgagtatggc

SEQ ID NO: 4612784 - DNA, 25 bp, Homo sapien
actgctgtataatcactgtggttag

SEQ ID NO: 4612785 - DNA, 25 bp, Homo sapien
ctatgatctttagcttcttggcaca

SEQ ID NO: 4612786 - DNA, 25 bp, Homo sapien
gatctttagcttcttggcacaacct

SEQ ID NO: 4612787 - DNA, 25 bp, Homo sapien
tgatctttagcttcttggcacaacc

SEQ ID NO: 4612788 - DNA, 25 bp, Homo sapien
tctttagcttcttggcacaacctgc

SEQ ID NO: 4612789 - DNA, 25 bp, Homo sapien
caaatctccactctccccaaacctc

SEQ ID NO: 4612790 - DNA, 25 bp, Homo sapien
atctccactctccccaaacctcttt

SEQ ID NO: 4612791 - DNA, 25 bp, Homo sapien
catctcaaatctccactctccccaa

SEQ ID NO: 4612792 - DNA, 25 bp, Homo sapien
atctcaaatctccactctccccaaa

SEQ ID NO: 4612793 - DNA, 25 bp, Homo sapien
catggtcataatatggagagagctc

SEQ ID NO: 4612794 - DNA, 25 bp, Homo sapien
tctacatggtcataatatggagaga

SEQ ID NO: 4612795 - DNA, 25 bp, Homo sapien
tacatggtcataatatggagagagc

SEQ ID NO: 4612796 - DNA, 25 bp, Homo sapien
gtttctacatggtcataatatggag

SEQ ID NO: 4612797 - DNA, 25 bp, Homo sapien
taatacatcttgcttacattttttc

SEQ ID NO: 4612798 - DNA, 25 bp, Homo sapien
ctagttgttgacattaagtaataca

SEQ ID NO: 4612799 - DNA, 25 bp, Homo sapien
gttgacattaagtaatacatcttgc

SEQ ID NO: 4612800 - DNA, 25 bp, Homo sapien
acattaagtaatacatcttgcttac

SEQ ID NO: 4612801 - DNA, 25 bp, Homo sapien
ggtacaatgagctctgtccatacag

SEQ ID NO: 4612802 - DNA, 25 bp, Homo sapien
ctcaagttgcaatgcactgcaggct

SEQ ID NO: 4612803 - DNA, 25 bp, Homo sapien
gaaactcaagttgcaatgcactgca

SEQ ID NO: 4612804 - DNA, 25 bp, Homo sapien
tggtcactgaggtacaatgagctct

SEQ ID NO: 4612805 - DNA, 25 bp, Homo sapien
catctacagcaccttttactggcaa

SEQ ID NO: 4612806 - DNA, 25 bp, Homo sapien
tgtaccaaagtttctctatcattct

SEQ ID NO: 4612807 - DNA, 25 bp, Homo sapien
cagattctgagctactgcttccaga

SEQ ID NO: 4612808 - DNA, 25 bp, Homo sapien
atgcattggcatatttgatgtacca

SEQ ID NO: 4612809 - DNA, 25 bp, Homo sapien
ggcatatttgatgtaccaaagtttc

SEQ ID NO: 4612810 - DNA, 25 bp, Homo sapien
aacatctttgtgctttaggtcttcc

SEQ ID NO: 4612811 - DNA, 25 bp, Homo sapien
tgtgtgtattatagatgatgtaagg

SEQ ID NO: 4612812 - DNA, 25 bp, Homo sapien
tattgtatatcttttggaactgtat

SEQ ID NO: 4612813 - DNA, 25 bp, Homo sapien
gaagttgcagatcatgtgggctgtt

SEQ ID NO: 4612814 - DNA, 25 bp, Homo sapien
ttttgttgtcaatgtagatttttct

SEQ ID NO: 4612815 - DNA, 25 bp, Homo sapien
gagttccaaacatagtatcttatac

SEQ ID NO: 4612816 - DNA, 25 bp, Homo sapien
tgtctcagagttccaaacatagtat

SEQ ID NO: 4612817 - DNA, 25 bp, Homo sapien
cttttctgtctcagagttccaaaca

SEQ ID NO: 4612818 - DNA, 25 bp, Homo sapien
gccttcaggcatcaaatgtcctgtg

SEQ ID NO: 4612819 - DNA, 25 bp, Homo sapien
tttttgacccgcctcttcaggcaat

SEQ ID NO: 4612820 - DNA, 25 bp, Homo sapien
taacagtcctgtaatggatcctgct

SEQ ID NO: 4612821 - DNA, 25 bp, Homo sapien
tgcccataatgctaatgccttcagg

SEQ ID NO: 4612822 - DNA, 25 bp, Homo sapien
tttagcatcagctctgaacttgcaa

SEQ ID NO: 4612823 - DNA, 25 bp, Homo sapien
tagcatcagctctgaacttgcaaac

SEQ ID NO: 4612824 - DNA, 25 bp, Homo sapien
ttagcatcagctctgaacttgcaaa

SEQ ID NO: 4612825 - DNA, 25 bp, Homo sapien
cagatttggcttttgaagcttttcc

SEQ ID NO: 4612826 - DNA, 25 bp, Homo sapien
agatttggcttttgaagcttttcca

SEQ ID NO: 4612827 - DNA, 25 bp, Homo sapien
gatttggcttttgaagcttttccat

SEQ ID NO: 4612828 - DNA, 25 bp, Homo sapien
ttgttttcaggttttcctcttcaca

SEQ ID NO: 4612829 - DNA, 25 bp, Homo sapien
tttcaggttttcctcttcacaggtc

SEQ ID NO: 4612830 - DNA, 25 bp, Homo sapien
tgttttcaggttttcctcttcacag

SEQ ID NO: 4612831 - DNA, 25 bp, Homo sapien
tcaggttttcctcttcacaggtcat

SEQ ID NO: 4612832 - DNA, 25 bp, Homo sapien
cccacatctggcagtcaaaaggatc

SEQ ID NO: 4612833 - DNA, 25 bp, Homo sapien
gaaggatatcctctaatctcattct

SEQ ID NO: 4612834 - DNA, 25 bp, Homo sapien
ggtatgtgtttagaaggatatcctc

SEQ ID NO: 4612835 - DNA, 25 bp, Homo sapien
tggcagtcaaaaggatccccttcct

SEQ ID NO: 4612836 - DNA, 25 bp, Homo sapien
ggtagcataaaacagacggtagccg

SEQ ID NO: 4612837 - DNA, 25 bp, Homo sapien
tagcgttgaaaaggtagcataaaac

SEQ ID NO: 4612838 - DNA, 25 bp, Homo sapien
ttgtttctatcacttagcgttgaaa

SEQ ID NO: 4612839 - DNA, 25 bp, Homo sapien
aaacagacggtagccgttgagagag

SEQ ID NO: 4612840 - DNA, 25 bp, Homo sapien
cattattcctgagggcacatttcca

SEQ ID NO: 4612841 - DNA, 25 bp, Homo sapien
ctattccaccgtcattattcctgag

SEQ ID NO: 4612842 - DNA, 25 bp, Homo sapien
tattccaccgtcattattcctgagg

SEQ ID NO: 4612843 - DNA, 25 bp, Homo sapien
tatgggttgataccaacattaacaa

SEQ ID NO: 4612844 - DNA, 25 bp, Homo sapien
gggttgataccaacattaacaacaa

SEQ ID NO: 4612845 - DNA, 25 bp, Homo sapien
tgtgtatgggttgataccaacatta

SEQ ID NO: 4612846 - DNA, 25 bp, Homo sapien
taagacatcagtttttgtgtatggg

SEQ ID NO: 4612847 - DNA, 25 bp, Homo sapien
tcaccagtaagttagtcgcctgagt

SEQ ID NO: 4612848 - DNA, 25 bp, Homo sapien
ttttgcattttcaagttcgctaacc

SEQ ID NO: 4612849 - DNA, 25 bp, Homo sapien
accttacattctagtttctctacca

SEQ ID NO: 4612850 - DNA, 25 bp, Homo sapien
tactagctctaactttacttttgca

SEQ ID NO: 4612851 - DNA, 25 bp, Homo sapien
gcagccttttgcgtttaacaactat

SEQ ID NO: 4612852 - DNA, 25 bp, Homo sapien
cgtaagtgtgtctattcaggaatgc

SEQ ID NO: 4612853 - DNA, 25 bp, Homo sapien
gtccattgggattcgtgtaaacact

SEQ ID NO: 4612854 - DNA, 25 bp, Homo sapien
tagaagacagtgttacacgtaagtg

SEQ ID NO: 4612855 - DNA, 25 bp, Homo sapien
aaatttctgttccaatctggtcttc

SEQ ID NO: 4612856 - DNA, 25 bp, Homo sapien
ttttgcctatggagattgctaacag

SEQ ID NO: 4612857 - DNA, 25 bp, Homo sapien
aaggttttgcctatggagattgcta

SEQ ID NO: 4612858 - DNA, 25 bp, Homo sapien
cctatggagattgctaacagtaaag

SEQ ID NO: 4612859 - DNA, 25 bp, Homo sapien
gatctagcctagacccctggtaatt

SEQ ID NO: 4612860 - DNA, 25 bp, Homo sapien
gtaactatattatggtcataaggat

SEQ ID NO: 4612861 - DNA, 25 bp, Homo sapien
taaagttaagaatcaaagatacaca

SEQ ID NO: 4612862 - DNA, 25 bp, Homo sapien
caaagatacacaagaggacacttga

SEQ ID NO: 4612863 - DNA, 25 bp, Homo sapien
ctaagaggcacgggtaaggcctgac

SEQ ID NO: 4612864 - DNA, 25 bp, Homo sapien
cctttaatatgtcctctgttttact

SEQ ID NO: 4612865 - DNA, 25 bp, Homo sapien
taaggcctgacgggaacctgaggcc

SEQ ID NO: 4612866 - DNA, 25 bp, Homo sapien
gaacctgaggccctttaatatgtcc

SEQ ID NO: 4612867 - DNA, 25 bp, Homo sapien
ctttccagtgtctagtgctgaacaa

SEQ ID NO: 4612868 - DNA, 25 bp, Homo sapien
aaataatatgaacggtacagctact

SEQ ID NO: 4612869 - DNA, 25 bp, Homo sapien
tttccagtgtctagtgctgaacaag

SEQ ID NO: 4612870 - DNA, 25 bp, Homo sapien
agaaaataatatgaacggtacagct

SEQ ID NO: 4612871 - DNA, 25 bp, Homo sapien
agccaattaaatggctgagggtatc

SEQ ID NO: 4612872 - DNA, 25 bp, Homo sapien
cttcagggcagccaattaaatggct

SEQ ID NO: 4612873 - DNA, 25 bp, Homo sapien
aatggctgagggtatctgtttctgt

SEQ ID NO: 4612874 - DNA, 25 bp, Homo sapien
ttctgtgtcgttttcagaaacaatt

SEQ ID NO: 4612875 - DNA, 25 bp, Homo sapien
gcactgtttcctaacataactttga

SEQ ID NO: 4612876 - DNA, 25 bp, Homo sapien
tgactcctggtagccaattgtgctg

SEQ ID NO: 4612877 - DNA, 25 bp, Homo sapien
tgatactgctagcaagacccagtgg

SEQ ID NO: 4612878 - DNA, 25 bp, Homo sapien
gaactggcaatgaacatggtttctc

SEQ ID NO: 4612879 - DNA, 25 bp, Homo sapien
ataaattccctttctatcttgccga

SEQ ID NO: 4612880 - DNA, 25 bp, Homo sapien
tcttcataagtattggtagaatgaa

SEQ ID NO: 4612881 - DNA, 25 bp, Homo sapien
ttctatcttgccgatccatcttgaa

SEQ ID NO: 4612882 - DNA, 25 bp, Homo sapien
gaggaggtcccaatatccattttca

SEQ ID NO: 4612883 - DNA, 25 bp, Homo sapien
cattagaactgtcagatgcatttcc

SEQ ID NO: 4612884 - DNA, 25 bp, Homo sapien
caataattcttcatagacgaggtaa

SEQ ID NO: 4612885 - DNA, 25 bp, Homo sapien
tatatgtcatatgggacagtagaca

SEQ ID NO: 4612886 - DNA, 25 bp, Homo sapien
gacagagtcagctattacgtattag

SEQ ID NO: 4612887 - DNA, 25 bp, Homo sapien
gatagtgaacctgtcataatctcta

SEQ ID NO: 4612888 - DNA, 25 bp, Homo sapien
tccatccgaatggtcctccaatcct

SEQ ID NO: 4612889 - DNA, 25 bp, Homo sapien
tccttccatccgaatggtcctccaa

SEQ ID NO: 4612890 - DNA, 25 bp, Homo sapien
cttccatccgaatggtcctccaatc

SEQ ID NO: 4612891 - DNA, 25 bp, Homo sapien
tcttccttccatccgaatggtcctc

SEQ ID NO: 4612892 - DNA, 25 bp, Homo sapien
cagcaaatgtctgtacttccaaaat

SEQ ID NO: 4612893 - DNA, 25 bp, Homo sapien
tattccagcaaatgtctgtacttcc

SEQ ID NO: 4612894 - DNA, 25 bp, Homo sapien
tctattccagcaaatgtctgtactt

SEQ ID NO: 4612895 - DNA, 25 bp, Homo sapien
ttctttctattccagcaaatgtctg

SEQ ID NO: 4612896 - DNA, 25 bp, Homo sapien
gggatgaaattacatcagtctgaag

SEQ ID NO: 4612897 - DNA, 25 bp, Homo sapien
cacagtatttagtggcgttcacaca

SEQ ID NO: 4612898 - DNA, 25 bp, Homo sapien
tgttggttaatccaagcatgtgatg

SEQ ID NO: 4612899 - DNA, 25 bp, Homo sapien
gcatgtgatgagattgctcttctga

SEQ ID NO: 4612900 - DNA, 25 bp, Homo sapien
caaaccaagatgcatggtagctttc

SEQ ID NO: 4612901 - DNA, 25 bp, Homo sapien
agctttcgaaggctttagattcctg

SEQ ID NO: 4612902 - DNA, 25 bp, Homo sapien
gttataatgccataatcaaaccaag

SEQ ID NO: 4612903 - DNA, 25 bp, Homo sapien
aagatgcatggtagctttcgaaggc

SEQ ID NO: 4612904 - DNA, 25 bp, Homo sapien
tggtgaatctgccaagtttaagaca

SEQ ID NO: 4612905 - DNA, 25 bp, Homo sapien
tgccaagtttaagacacaggtttcc

SEQ ID NO: 4612906 - DNA, 25 bp, Homo sapien
taatttaggaacataggatgatggt

SEQ ID NO: 4612907 - DNA, 25 bp, Homo sapien
ttaggaacataggatgatggtgaat

SEQ ID NO: 4612908 - DNA, 25 bp, Homo sapien
cactttgagccgtgaagtgtggctc

SEQ ID NO: 4612909 - DNA, 25 bp, Homo sapien
tcttccacactttgagccgtgaagt

SEQ ID NO: 4612910 - DNA, 25 bp, Homo sapien
accttcttgattagactgctggttt

SEQ ID NO: 4612911 - DNA, 25 bp, Homo sapien
ctgctggtttaatgacatcttccac

SEQ ID NO: 4612912 - DNA, 25 bp, Homo sapien
ggattgttgattctgcagttgtttc

SEQ ID NO: 4612913 - DNA, 25 bp, Homo sapien
tggattgttgattctgcagttgttt

SEQ ID NO: 4612914 - DNA, 25 bp, Homo sapien
tttggattgttgattctgcagttgt

SEQ ID NO: 4612915 - DNA, 25 bp, Homo sapien
ctgcagttgtttctgcagtcagagg

SEQ ID NO: 4612916 - DNA, 25 bp, Homo sapien
tgaaatttataacattggaagattc

SEQ ID NO: 4612917 - DNA, 25 bp, Homo sapien
aatttataacattggaagattcaga

SEQ ID NO: 4612918 - DNA, 25 bp, Homo sapien
agaaacagtgacagacgtcctttgc

SEQ ID NO: 4612919 - DNA, 25 bp, Homo sapien
acagtgacagacgtcctttgccaac

SEQ ID NO: 4612920 - DNA, 25 bp, Homo sapien
aattatcaaccatcagtggaccata

SEQ ID NO: 4612921 - DNA, 25 bp, Homo sapien
cagtggtgggtagaattgctgtcag

SEQ ID NO: 4612922 - DNA, 25 bp, Homo sapien
caattatcaaccatcagtggaccat

SEQ ID NO: 4612923 - DNA, 25 bp, Homo sapien
ttgctgtcagctgccgatgggccat

SEQ ID NO: 4612924 - DNA, 25 bp, Homo sapien
tcagatgagttattgcatgacagct

SEQ ID NO: 4612925 - DNA, 25 bp, Homo sapien
taaggtctctttccatatgggtctt

SEQ ID NO: 4612926 - DNA, 25 bp, Homo sapien
tatgggtcttcagatgagttattgc

SEQ ID NO: 4612927 - DNA, 25 bp, Homo sapien
gacagctgcttttgatctagtaaca

SEQ ID NO: 4612928 - DNA, 25 bp, Homo sapien
tgctcaataacagatattaaaaagt

SEQ ID NO: 4612929 - DNA, 25 bp, Homo sapien
gcttctcagcacaaggtcttacact

SEQ ID NO: 4612930 - DNA, 25 bp, Homo sapien
caaggtcttacactgtaggtttgct

SEQ ID NO: 4612931 - DNA, 25 bp, Homo sapien
tacactgtaggtttgctcaataaca

SEQ ID NO: 4612932 - DNA, 25 bp, Homo sapien
gaagtaatccagatgtagggttttg

SEQ ID NO: 4612933 - DNA, 25 bp, Homo sapien
tgctctagacttagtagtgacaatg

SEQ ID NO: 4612934 - DNA, 25 bp, Homo sapien
agctggccatgacgatagcattagt

SEQ ID NO: 4612935 - DNA, 25 bp, Homo sapien
gcattagttgccagcattgctctag

SEQ ID NO: 4612936 - DNA, 25 bp, Homo sapien
taaatcaaacatcaagtcccatggc

SEQ ID NO: 4612937 - DNA, 25 bp, Homo sapien
taactggaggtatataagcatgggc

SEQ ID NO: 4612938 - DNA, 25 bp, Homo sapien
catgggcagtatgctgtggcacaaa

SEQ ID NO: 4612939 - DNA, 25 bp, Homo sapien
tatatggagttctgtaaacgtgtcc

SEQ ID NO: 4612940 - DNA, 25 bp, Homo sapien
aacctccaatatccaatagtacctg

SEQ ID NO: 4612941 - DNA, 25 bp, Homo sapien
tagtacctgccaaagtagtctctca

SEQ ID NO: 4612942 - DNA, 25 bp, Homo sapien
tgtaatctccaggaggtaagatagt

SEQ ID NO: 4612943 - DNA, 25 bp, Homo sapien
ctccaggaggtaagatagttttgtc

SEQ ID NO: 4612944 - DNA, 25 bp, Homo sapien
aaagtcctgtactctccacccacaa

SEQ ID NO: 4612945 - DNA, 25 bp, Homo sapien
tccctctcaacaaattgacctattt

SEQ ID NO: 4612946 - DNA, 25 bp, Homo sapien
gaaggtacttgtgcgttcaactttg

SEQ ID NO: 4612947 - DNA, 25 bp, Homo sapien
taaaatagaaacctgactcaccatg

SEQ ID NO: 4612948 - DNA, 25 bp, Homo sapien
tccttaaacttgatggaatgaaaca

SEQ ID NO: 4612949 - DNA, 25 bp, Homo sapien
ttaattccttaaacttgatggaatg

SEQ ID NO: 4612950 - DNA, 25 bp, Homo sapien
tgaaacatctttatttcacactcaa

SEQ ID NO: 4612951 - DNA, 25 bp, Homo sapien
gaaacatctttatttcacactcaat

SEQ ID NO: 4612952 - DNA, 25 bp, Homo sapien
tctacccttcccagtaggtcacagt

SEQ ID NO: 4612953 - DNA, 25 bp, Homo sapien
ttgagtctacccttcccagtaggtc

SEQ ID NO: 4612954 - DNA, 25 bp, Homo sapien
ttcagagttataagcttctctcagt

SEQ ID NO: 4612955 - DNA, 25 bp, Homo sapien
gcttctctcagtacatcagtccttt

SEQ ID NO: 4612956 - DNA, 25 bp, Homo sapien
gaagtcagacttattgtcagaagga

SEQ ID NO: 4612957 - DNA, 25 bp, Homo sapien
tgtcagaaggatgaatgccttcatt

SEQ ID NO: 4612958 - DNA, 25 bp, Homo sapien
tatattaaagggttgaagtcagact

SEQ ID NO: 4612959 - DNA, 25 bp, Homo sapien
ccttcattatgattgcagggcatgg

SEQ ID NO: 4612960 - DNA, 25 bp, Homo sapien
ctgctacagagtggatgaatttgtg

SEQ ID NO: 4612961 - DNA, 25 bp, Homo sapien
ccagtccactgttggtacctgccat

SEQ ID NO: 4612962 - DNA, 25 bp, Homo sapien
gaatttgtgataaatggtcccttgg

SEQ ID NO: 4612963 - DNA, 25 bp, Homo sapien
cattaaagcagcaatctgctacaga

SEQ ID NO: 4612964 - DNA, 25 bp, Homo sapien
taacagtgtcctaaagatcatttcc

SEQ ID NO: 4612965 - DNA, 25 bp, Homo sapien
gaaaccttttgtctgtgacattggc

SEQ ID NO: 4612966 - DNA, 25 bp, Homo sapien
tctcccagcattctaagatgttgct

SEQ ID NO: 4612967 - DNA, 25 bp, Homo sapien
tgttcacagttggttgctatccaga

SEQ ID NO: 4612968 - DNA, 25 bp, Homo sapien
tattgtccttctcctttgctgtcat

SEQ ID NO: 4612969 - DNA, 25 bp, Homo sapien
ttattgtccttctcctttgctgtca

SEQ ID NO: 4612970 - DNA, 25 bp, Homo sapien
cttattgtccttctcctttgctgtc

SEQ ID NO: 4612971 - DNA, 25 bp, Homo sapien
caccatgtcagtagctgtagcattt

SEQ ID NO: 4612972 - DNA, 25 bp, Homo sapien
agtattcctcttggggctaacatca

SEQ ID NO: 4612973 - DNA, 25 bp, Homo sapien
atatctctgcatcaaaaacttttgc

SEQ ID NO: 4612974 - DNA, 25 bp, Homo sapien
aaggtgtctcctaaggctgaatatc

SEQ ID NO: 4612975 - DNA, 25 bp, Homo sapien
tggaccagtcctctgtggctatagt

SEQ ID NO: 4612976 - DNA, 25 bp, Homo sapien
gggaatagcctgtgcctgacatatc

SEQ ID NO: 4612977 - DNA, 25 bp, Homo sapien
cctggatccctggaatcgtgcctag

SEQ ID NO: 4612978 - DNA, 25 bp, Homo sapien
gaagaagcacagatcgggatccgca

SEQ ID NO: 4612979 - DNA, 25 bp, Homo sapien
attgtgttgtaaggtttcctgagca

SEQ ID NO: 4612980 - DNA, 25 bp, Homo sapien
cattgtgttgtaaggtttcctgagc

SEQ ID NO: 4612981 - DNA, 25 bp, Homo sapien
taatacacctgaaaaagttaggcca

SEQ ID NO: 4612982 - DNA, 25 bp, Homo sapien
gataattgcttgacttcgagaggtg

SEQ ID NO: 4612983 - DNA, 25 bp, Homo sapien
gcttcatgcaactatggaggccaag

SEQ ID NO: 4612984 - DNA, 25 bp, Homo sapien
tattggttaagcacagagactcagg

SEQ ID NO: 4612985 - DNA, 25 bp, Homo sapien
ggggctgaattctgacaagatgatg

SEQ ID NO: 4612986 - DNA, 25 bp, Homo sapien
gggctgaattctgacaagatgatgt

SEQ ID NO: 4612987 - DNA, 25 bp, Homo sapien
ggctgaattctgacaagatgatgtc

SEQ ID NO: 4612988 - DNA, 25 bp, Homo sapien
ttatttagctttatctctgttactt

SEQ ID NO: 4612989 - DNA, 25 bp, Homo sapien
ttagctttatctctgttacttttga

SEQ ID NO: 4612990 - DNA, 25 bp, Homo sapien
tatttagctttatctctgttacttt

SEQ ID NO: 4612991 - DNA, 25 bp, Homo sapien
tttagctttatctctgttacttttg

SEQ ID NO: 4612992 - DNA, 25 bp, Homo sapien
tgaatctaaaagatttcctttacta

SEQ ID NO: 4612993 - DNA, 25 bp, Homo sapien
tcagataaatgaatctaaaagattt

SEQ ID NO: 4612994 - DNA, 25 bp, Homo sapien
atgaatctaaaagatttcctttact

SEQ ID NO: 4612995 - DNA, 25 bp, Homo sapien
gataaatgaatctaaaagatttcct

SEQ ID NO: 4612996 - DNA, 25 bp, Homo sapien
ccctgtgtacaatagcaagttcatt

SEQ ID NO: 4612997 - DNA, 25 bp, Homo sapien
aaaaatccccctgtgtacaatagca

SEQ ID NO: 4612998 - DNA, 25 bp, Homo sapien
caagttcattgttaagcatcctttt

SEQ ID NO: 4612999 - DNA, 25 bp, Homo sapien
aattaactccgagatatttgagaag

SEQ ID NO: 4613000 - DNA, 25 bp, Homo sapien
ctcaattgtacgtacagaggaacat

SEQ ID NO: 4613001 - DNA, 25 bp, Homo sapien
tttcaaatcaatatattatccagtc

SEQ ID NO: 4613002 - DNA, 25 bp, Homo sapien
tatttccgggtatatggagtcataa

SEQ ID NO: 4613003 - DNA, 25 bp, Homo sapien
agtccattcgtttttgtgctttcaa

SEQ ID NO: 4613004 - DNA, 25 bp, Homo sapien
gaacatctgagatgactcttctttc

SEQ ID NO: 4613005 - DNA, 25 bp, Homo sapien
gggccagttgagcttcctgaacatc

SEQ ID NO: 4613006 - DNA, 25 bp, Homo sapien
tcacttgttaatatacccaaacgtg

SEQ ID NO: 4613007 - DNA, 25 bp, Homo sapien
tgttaatatacccaaacgtgaacgc

SEQ ID NO: 4613008 - DNA, 25 bp, Homo sapien
gctgaacaatgtaatactgccacat

SEQ ID NO: 4613009 - DNA, 25 bp, Homo sapien
tggtttgcgatgctgctgaacaatg

SEQ ID NO: 4613010 - DNA, 25 bp, Homo sapien
gatggtttgcgatgctgctgaacaa

SEQ ID NO: 4613011 - DNA, 25 bp, Homo sapien
agatggtttgcgatgctgctgaaca

SEQ ID NO: 4613012 - DNA, 25 bp, Homo sapien
ctacagaagtttcttttctttgcct

SEQ ID NO: 4613013 - DNA, 25 bp, Homo sapien
aattccaactgtgctctagattcac

SEQ ID NO: 4613014 - DNA, 25 bp, Homo sapien
aaccaattgccctaaactcagacca

SEQ ID NO: 4613015 - DNA, 25 bp, Homo sapien
gattagggtgtggacttcttgcaag

SEQ ID NO: 4613016 - DNA, 25 bp, Homo sapien
ggtgaagatatttgctctcctttgg

SEQ ID NO: 4613017 - DNA, 25 bp, Homo sapien
tcggaaattctggagcagcttagct

SEQ ID NO: 4613018 - DNA, 25 bp, Homo sapien
gcttcagggctgcagtacacacttc

SEQ ID NO: 4613019 - DNA, 25 bp, Homo sapien
tcttattcggtaggaggcttcagct

SEQ ID NO: 4613020 - DNA, 25 bp, Homo sapien
gagaacaaatgagagggtgcccaaa

SEQ ID NO: 4613021 - DNA, 25 bp, Homo sapien
gatgctccatgaattttctcaatcc

SEQ ID NO: 4613022 - DNA, 25 bp, Homo sapien
tgctccatgaattttctcaatccaa

SEQ ID NO: 4613023 - DNA, 25 bp, Homo sapien
gctccatgaattttctcaatccaaa

SEQ ID NO: 4613024 - DNA, 25 bp, Homo sapien
atgctccatgaattttctcaatcca

SEQ ID NO: 4613025 - DNA, 25 bp, Homo sapien
cttatctccagtagcttttccagaa

SEQ ID NO: 4613026 - DNA, 25 bp, Homo sapien
gtcttatctccagtagcttttccag

SEQ ID NO: 4613027 - DNA, 25 bp, Homo sapien
tatctccagtagcttttccagaact

SEQ ID NO: 4613028 - DNA, 25 bp, Homo sapien
tgtcttatctccagtagcttttcca

SEQ ID NO: 4613029 - DNA, 25 bp, Homo sapien
cccatcagctggttcagctttagta

SEQ ID NO: 4613030 - DNA, 25 bp, Homo sapien
gattcttggaatagtggttcgtacc

SEQ ID NO: 4613031 - DNA, 25 bp, Homo sapien
gaatagtggttcgtacccatcagct

SEQ ID NO: 4613032 - DNA, 25 bp, Homo sapien
ggttcgtacccatcagctggttcag

SEQ ID NO: 4613033 - DNA, 25 bp, Homo sapien
tcttcaagattgcagaaataatagg

SEQ ID NO: 4613034 - DNA, 25 bp, Homo sapien
catttttggtaaaattgtagagata

SEQ ID NO: 4613035 - DNA, 25 bp, Homo sapien
aattcaaagtcttcaagattgcaga

SEQ ID NO: 4613036 - DNA, 25 bp, Homo sapien
tgtagagataagggttaaattcaaa

SEQ ID NO: 4613037 - DNA, 25 bp, Homo sapien
tctgggtttcatctgagcgtattct

SEQ ID NO: 4613038 - DNA, 25 bp, Homo sapien
aaatagccatattctaaatttcctc

SEQ ID NO: 4613039 - DNA, 25 bp, Homo sapien
gggtttcatctgagcgtattctctt

SEQ ID NO: 4613040 - DNA, 25 bp, Homo sapien
aaaatagccatattctaaatttcct

SEQ ID NO: 4613041 - DNA, 25 bp, Homo sapien
aaatggtttgtgttctagctggctc

SEQ ID NO: 4613042 - DNA, 25 bp, Homo sapien
tcaaatggtttgtgttctagctggc

SEQ ID NO: 4613043 - DNA, 25 bp, Homo sapien
tggtttgtgttctagctggctctgg

SEQ ID NO: 4613044 - DNA, 25 bp, Homo sapien
gtttgtgttctagctggctctggct

SEQ ID NO: 4613045 - DNA, 25 bp, Homo sapien
tgagcgtgacccattctgcatgtgt

SEQ ID NO: 4613046 - DNA, 25 bp, Homo sapien
cagcctggtgcctacacgtggctca

SEQ ID NO: 4613047 - DNA, 25 bp, Homo sapien
gcgtgacccattctgcatgtgtgtt

SEQ ID NO: 4613048 - DNA, 25 bp, Homo sapien
ggtgcctacacgtggctcagtcaag

SEQ ID NO: 4613049 - DNA, 25 bp, Homo sapien
cttcttcctgcttgtatttaagtgt

SEQ ID NO: 4613050 - DNA, 25 bp, Homo sapien
gcttgtatttaagtgttctttgctg

SEQ ID NO: 4613051 - DNA, 25 bp, Homo sapien
ctgcttgtatttaagtgttctttgc

SEQ ID NO: 4613052 - DNA, 25 bp, Homo sapien
cctgcttgtatttaagtgttctttg

SEQ ID NO: 4613053 - DNA, 25 bp, Homo sapien
tgtagtctgcatgtaaaagattccc

SEQ ID NO: 4613054 - DNA, 25 bp, Homo sapien
tttaagcgtaaaaactgtagtctgc

SEQ ID NO: 4613055 - DNA, 25 bp, Homo sapien
tcagtgcatcatttggaatatgtgg

SEQ ID NO: 4613056 - DNA, 25 bp, Homo sapien
cttgtgcaagcaggccttgatttcc

SEQ ID NO: 4613057 - DNA, 25 bp, Homo sapien
cagagacttgcagctttgcatagtt

SEQ ID NO: 4613058 - DNA, 25 bp, Homo sapien
gagacttgcagctttgcatagttac

SEQ ID NO: 4613059 - DNA, 25 bp, Homo sapien
ctttgcatagttactatatcatgac

SEQ ID NO: 4613060 - DNA, 25 bp, Homo sapien
agagacttgcagctttgcatagtta

SEQ ID NO: 4613061 - DNA, 25 bp, Homo sapien
cacagagaatactcgattggcacat

SEQ ID NO: 4613062 - DNA, 25 bp, Homo sapien
actccacagagaatactcgattggc

SEQ ID NO: 4613063 - DNA, 25 bp, Homo sapien
tttttctctaagactccacagagaa

SEQ ID NO: 4613064 - DNA, 25 bp, Homo sapien
gaatactcgattggcacatttccaa

SEQ ID NO: 4613065 - DNA, 25 bp, Homo sapien
cagtggaactcggaacaccaaaact

SEQ ID NO: 4613066 - DNA, 25 bp, Homo sapien
tcaaacctgtttctgaggggtaaca

SEQ ID NO: 4613067 - DNA, 25 bp, Homo sapien
caaaacttccatctctggtataaga

SEQ ID NO: 4613068 - DNA, 25 bp, Homo sapien
tttctgaggggtaacacagtggaac

SEQ ID NO: 4613069 - DNA, 25 bp, Homo sapien
agcaagaagtggattccacggagac

SEQ ID NO: 4613070 - DNA, 25 bp, Homo sapien
caagaagtggattccacggagacat

SEQ ID NO: 4613071 - DNA, 25 bp, Homo sapien
gcaagaagtggattccacggagaca

SEQ ID NO: 4613072 - DNA, 25 bp, Homo sapien
aggaaatttattgaatccgaatggg

SEQ ID NO: 4613073 - DNA, 25 bp, Homo sapien
tgtccaaagatagtgcgccaaaaaa

SEQ ID NO: 4613074 - DNA, 25 bp, Homo sapien
ccgaatggggatacgctttggcaat

SEQ ID NO: 4613075 - DNA, 25 bp, Homo sapien
aaaaatccatcaagaatcaggaaat

SEQ ID NO: 4613076 - DNA, 25 bp, Homo sapien
gaatatcttcggatcgcctgaagcc

SEQ ID NO: 4613077 - DNA, 25 bp, Homo sapien
ttcggatcgcctgaagcccatccat

SEQ ID NO: 4613078 - DNA, 25 bp, Homo sapien
tttcagaatatcttcggatcgcctg

SEQ ID NO: 4613079 - DNA, 25 bp, Homo sapien
atatcttcggatcgcctgaagccca

SEQ ID NO: 4613080 - DNA, 25 bp, Homo sapien
catcgtagcgcttccctggtagttt

SEQ ID NO: 4613081 - DNA, 25 bp, Homo sapien
gaggaaacatcgtagcgcttccctg

SEQ ID NO: 4613082 - DNA, 25 bp, Homo sapien
agcgcttccctggtagtttgccttg

SEQ ID NO: 4613083 - DNA, 25 bp, Homo sapien
tgaacatgagaggaaacatcgtagc

SEQ ID NO: 4613084 - DNA, 25 bp, Homo sapien
attccttcctgccagtacaatgcag

SEQ ID NO: 4613085 - DNA, 25 bp, Homo sapien
ttccttcctgccagtacaatgcagt

SEQ ID NO: 4613086 - DNA, 25 bp, Homo sapien
taattccttcctgccagtacaatgc

SEQ ID NO: 4613087 - DNA, 25 bp, Homo sapien
aactaattccttcctgccagtacaa

SEQ ID NO: 4613088 - DNA, 25 bp, Homo sapien
ttctccagcactgtgttcccaggtt

SEQ ID NO: 4613089 - DNA, 25 bp, Homo sapien
ttgttgttttttcctccgatatggc

SEQ ID NO: 4613090 - DNA, 25 bp, Homo sapien
tgttgttttttcctccgatatggca

SEQ ID NO: 4613091 - DNA, 25 bp, Homo sapien
cactgtgttcccaggttgttgtttt

SEQ ID NO: 4613092 - DNA, 25 bp, Homo sapien
cagcagtgggttaaaagttgcaaga

SEQ ID NO: 4613093 - DNA, 25 bp, Homo sapien
tcgcatttgtcgttgcagcagtggg

SEQ ID NO: 4613094 - DNA, 25 bp, Homo sapien
gggtgcttagaagcgaagcatcctg

SEQ ID NO: 4613095 - DNA, 25 bp, Homo sapien
tcagaaaacttgtggtggaagaatg

SEQ ID NO: 4613096 - DNA, 25 bp, Homo sapien
caggagattacaacagcagtgaggg

SEQ ID NO: 4613097 - DNA, 25 bp, Homo sapien
gccgacaacagtagtgatcctcaag

SEQ ID NO: 4613098 - DNA, 25 bp, Homo sapien
ccatggaagtcgaagtgaaacaagc

SEQ ID NO: 4613099 - DNA, 25 bp, Homo sapien
taatccgaagatgctgttcgcacag

SEQ ID NO: 4613100 - DNA, 25 bp, Homo sapien
atggcaatttaggaggtgaggatac

SEQ ID NO: 4613101 - DNA, 25 bp, Homo sapien
ggaggtgaggatacagaagagacac

SEQ ID NO: 4613102 - DNA, 25 bp, Homo sapien
gaggagatggcaatttaggaggtga

SEQ ID NO: 4613103 - DNA, 25 bp, Homo sapien
caatttaggaggtgaggatacagaa

SEQ ID NO: 4613104 - DNA, 25 bp, Homo sapien
gccaccaggccacctttgcttgcct

SEQ ID NO: 4613105 - DNA, 25 bp, Homo sapien
cacctttgcttgccttggtggcctc

SEQ ID NO: 4613106 - DNA, 25 bp, Homo sapien
caggccacctttgcttgccttggtg

SEQ ID NO: 4613107 - DNA, 25 bp, Homo sapien
ggccacctttgcttgccttggtggc

SEQ ID NO: 4613108 - DNA, 25 bp, Homo sapien
ctgggccataagaggccatgtgcat

SEQ ID NO: 4613109 - DNA, 25 bp, Homo sapien
agctctcctggtcctgcatgccctc

SEQ ID NO: 4613110 - DNA, 25 bp, Homo sapien
caggactccaaggtctgcaagtgga

SEQ ID NO: 4613111 - DNA, 25 bp, Homo sapien
gagttgcaattgtaggtgccccgct

SEQ ID NO: 4613112 - DNA, 25 bp, Homo sapien
tggaaccccaggtcgaagtcatagt

SEQ ID NO: 4613113 - DNA, 25 bp, Homo sapien
ttctggccctgcgagtgaccacatc

SEQ ID NO: 4613114 - DNA, 25 bp, Homo sapien
cttctggccctgcgagtgaccacat

SEQ ID NO: 4613115 - DNA, 25 bp, Homo sapien
gcttctggccctgcgagtgaccaca

SEQ ID NO: 4613116 - DNA, 25 bp, Homo sapien
tgcttctggccctgcgagtgaccac

SEQ ID NO: 4613117 - DNA, 25 bp, Homo sapien
ggctccttacaattctggaactgct

SEQ ID NO: 4613118 - DNA, 25 bp, Homo sapien
tcttctgagtggaagtcaccagctt

SEQ ID NO: 4613119 - DNA, 25 bp, Homo sapien
tagtttggcatctggctccttacaa

SEQ ID NO: 4613120 - DNA, 25 bp, Homo sapien
ccaggctagtttggcatctggctcc

SEQ ID NO: 4613121 - DNA, 25 bp, Homo sapien
cagcctggatcttcttaaagtgctc

SEQ ID NO: 4613122 - DNA, 25 bp, Homo sapien
atgtattcccggatgaattccattg

SEQ ID NO: 4613123 - DNA, 25 bp, Homo sapien
attccattgtcttgttgggcagctt

SEQ ID NO: 4613124 - DNA, 25 bp, Homo sapien
taaactgcagcgtctctttgtgaaa

SEQ ID NO: 4613125 - DNA, 25 bp, Homo sapien
actggtctggcaatgcacggctttg

SEQ ID NO: 4613126 - DNA, 25 bp, Homo sapien
ggactggtctggcaatgcacggctt

SEQ ID NO: 4613127 - DNA, 25 bp, Homo sapien
ggcaatgcacggctttgctccttct

SEQ ID NO: 4613128 - DNA, 25 bp, Homo sapien
gtctggcaatgcacggctttgctcc

SEQ ID NO: 4613129 - DNA, 25 bp, Homo sapien
tgatccatatgttcctctcccattg

SEQ ID NO: 4613130 - DNA, 25 bp, Homo sapien
gctttgatccatatgttcctctccc

SEQ ID NO: 4613131 - DNA, 25 bp, Homo sapien
gaagattgtgctttgatccatatgt

SEQ ID NO: 4613132 - DNA, 25 bp, Homo sapien
catatgttcctctcccattgtaggt

SEQ ID NO: 4613133 - DNA, 25 bp, Homo sapien
gatcttagcctcgttttatccagcc

SEQ ID NO: 4613134 - DNA, 25 bp, Homo sapien
tgaacgtttcatgattgtatccaag

SEQ ID NO: 4613135 - DNA, 25 bp, Homo sapien
tcttctttagaacctgaaatcccta

SEQ ID NO: 4613136 - DNA, 25 bp, Homo sapien
tcattcaaacgcctgtgacatttgc

SEQ ID NO: 4613137 - DNA, 25 bp, Homo sapien
caatgatcacgtggatcgagtggga

SEQ ID NO: 4613138 - DNA, 25 bp, Homo sapien
gagcgtcccatctttgaacagattg

SEQ ID NO: 4613139 - DNA, 25 bp, Homo sapien
tcggcacacttggttgagcgtccca

SEQ ID NO: 4613140 - DNA, 25 bp, Homo sapien
tgaacagaagattgctagcagacat

SEQ ID NO: 4613141 - DNA, 25 bp, Homo sapien
ttttcaccagatacactattccagg

SEQ ID NO: 4613142 - DNA, 25 bp, Homo sapien
gaagtactctccttagcatttatca

SEQ ID NO: 4613143 - DNA, 25 bp, Homo sapien
catttatcataggatgggtctggtg

SEQ ID NO: 4613144 - DNA, 25 bp, Homo sapien
ccttattccatcttcatgtttaaag

SEQ ID NO: 4613145 - DNA, 25 bp, Homo sapien
tagacagtggcaatcttgacagact

SEQ ID NO: 4613146 - DNA, 25 bp, Homo sapien
tccttagagtatggagggcaatcat

SEQ ID NO: 4613147 - DNA, 25 bp, Homo sapien
gatgttagactaaaggcatcttcag

SEQ ID NO: 4613148 - DNA, 25 bp, Homo sapien
taatgtttggaacagtctataaacc

SEQ ID NO: 4613149 - DNA, 25 bp, Homo sapien
caagggttgcacactcaagatgagt

SEQ ID NO: 4613150 - DNA, 25 bp, Homo sapien
cacagacctcaacacaggtggccgt

SEQ ID NO: 4613151 - DNA, 25 bp, Homo sapien
ataatgagctattcccaggtggcac

SEQ ID NO: 4613152 - DNA, 25 bp, Homo sapien
cacaaaaagctatccgaaatctgac

SEQ ID NO: 4613153 - DNA, 25 bp, Homo sapien
gcacctgatttcgtccaggtctcat

SEQ ID NO: 4613154 - DNA, 25 bp, Homo sapien
cagcacctgatttcgtccaggtctc

SEQ ID NO: 4613155 - DNA, 25 bp, Homo sapien
tccagcacctgatttcgtccaggtc

SEQ ID NO: 4613156 - DNA, 25 bp, Homo sapien
agcacctgatttcgtccaggtctca

SEQ ID NO: 4613157 - DNA, 25 bp, Homo sapien
tggtggtctagcataatttctctac

SEQ ID NO: 4613158 - DNA, 25 bp, Homo sapien
aaatgttctagggtcatatttttct

SEQ ID NO: 4613159 - DNA, 25 bp, Homo sapien
tcagtagccagtaggaatattgttt

SEQ ID NO: 4613160 - DNA, 25 bp, Homo sapien
tctgagtatggaagaccagtatcag

SEQ ID NO: 4613161 - DNA, 25 bp, Homo sapien
cccataaatgtcaagcatagctttc

SEQ ID NO: 4613162 - DNA, 25 bp, Homo sapien
ccataaatgtcaagcatagctttct

SEQ ID NO: 4613163 - DNA, 25 bp, Homo sapien
cataaatgtcaagcatagctttctc

SEQ ID NO: 4613164 - DNA, 25 bp, Homo sapien
tagttcttagatacaggcgttagga

SEQ ID NO: 4613165 - DNA, 25 bp, Homo sapien
ggattagtgtcccactctactccag

SEQ ID NO: 4613166 - DNA, 25 bp, Homo sapien
catttcgggagagatctgagatcaa

SEQ ID NO: 4613167 - DNA, 25 bp, Homo sapien
atattaatttgagggatgggaagcc

SEQ ID NO: 4613168 - DNA, 25 bp, Homo sapien
ctggaatacagggtgaggagacatg

SEQ ID NO: 4613169 - DNA, 25 bp, Homo sapien
gattgttgcataggccatagaagca

SEQ ID NO: 4613170 - DNA, 25 bp, Homo sapien
tttgcaggattgttgcataggccat

SEQ ID NO: 4613171 - DNA, 25 bp, Homo sapien
atagaagcactgcttctggaataca

SEQ ID NO: 4613172 - DNA, 25 bp, Homo sapien
cagatgaaagtatgatgggaaggat

SEQ ID NO: 4613173 - DNA, 25 bp, Homo sapien
gaaagtaatgtctcacagatgaaag

SEQ ID NO: 4613174 - DNA, 25 bp, Homo sapien
tctcacagatgaaagtatgatggga

SEQ ID NO: 4613175 - DNA, 25 bp, Homo sapien
taatgtctcacagatgaaagtatga

SEQ ID NO: 4613176 - DNA, 25 bp, Homo sapien
tgcttttatccttcgaatagccaag

SEQ ID NO: 4613177 - DNA, 25 bp, Homo sapien
gagccattgtttcaatgttcttcta

SEQ ID NO: 4613178 - DNA, 25 bp, Homo sapien
cttcgaatagccaagtaagtgtcac

SEQ ID NO: 4613179 - DNA, 25 bp, Homo sapien
acttttctctgtatagcacctgaca

SEQ ID NO: 4613180 - DNA, 25 bp, Homo sapien
gctttaatagaagtatcaagctttc

SEQ ID NO: 4613181 - DNA, 25 bp, Homo sapien
ttcgaagcaggtgtcctaaaggtgc

SEQ ID NO: 4613182 - DNA, 25 bp, Homo sapien
tgttgtaaacagaccagacggatat

SEQ ID NO: 4613183 - DNA, 25 bp, Homo sapien
tcttttgaagtagatcggtcttcga

SEQ ID NO: 4613184 - DNA, 25 bp, Homo sapien
caacagagatgtgctgaattgccat

SEQ ID NO: 4613185 - DNA, 25 bp, Homo sapien
atttggagcaacagagatgtgctga

SEQ ID NO: 4613186 - DNA, 25 bp, Homo sapien
caacaacttgtttccaatttggagc

SEQ ID NO: 4613187 - DNA, 25 bp, Homo sapien
ccaatttggagcaacagagatgtgc

SEQ ID NO: 4613188 - DNA, 25 bp, Homo sapien
tcagttattctccaagatattcatt

SEQ ID NO: 4613189 - DNA, 25 bp, Homo sapien
cactgatgtttcaggactaatggga

SEQ ID NO: 4613190 - DNA, 25 bp, Homo sapien
aaataggtccttctgtgctactgga

SEQ ID NO: 4613191 - DNA, 25 bp, Homo sapien
tgaaagcaatctgttcccaaggttt

SEQ ID NO: 4613192 - DNA, 25 bp, Homo sapien
tatgaggtcagtccttgtcctgagc

SEQ ID NO: 4613193 - DNA, 25 bp, Homo sapien
gcaagagagtgtcttgaagacaaga

SEQ ID NO: 4613194 - DNA, 25 bp, Homo sapien
caagagagtgtcttgaagacaagaa

SEQ ID NO: 4613195 - DNA, 25 bp, Homo sapien
aagcaagagagtgtcttgaagacaa

SEQ ID NO: 4613196 - DNA, 25 bp, Homo sapien
agcaagagagtgtcttgaagacaag

SEQ ID NO: 4613197 - DNA, 25 bp, Homo sapien
tctaaacagtgttagcttatagcta

SEQ ID NO: 4613198 - DNA, 25 bp, Homo sapien
tctgccttggagataccgaattcat

SEQ ID NO: 4613199 - DNA, 25 bp, Homo sapien
gcttttcgggttcatgaatgctcat

SEQ ID NO: 4613200 - DNA, 25 bp, Homo sapien
cataatgaacatctataaaggtagt

SEQ ID NO: 4613201 - DNA, 25 bp, Homo sapien
tcactaaagtttgatcagattcctg

SEQ ID NO: 4613202 - DNA, 25 bp, Homo sapien
tgactgaatgcatcacctgtttctc

SEQ ID NO: 4613203 - DNA, 25 bp, Homo sapien
accatcattagagttgtttagaaaa

SEQ ID NO: 4613204 - DNA, 25 bp, Homo sapien
gtttagaaaatacaccagaactctg

SEQ ID NO: 4613205 - DNA, 25 bp, Homo sapien
ccaaaagcttcggacaagatctata

SEQ ID NO: 4613206 - DNA, 25 bp, Homo sapien
ggctgtctggagcataagacaacca

SEQ ID NO: 4613207 - DNA, 25 bp, Homo sapien
cataagacaaccactgaagcaggca

SEQ ID NO: 4613208 - DNA, 25 bp, Homo sapien
gacaagatctatagatctactttcc

SEQ ID NO: 4613209 - DNA, 25 bp, Homo sapien
cccttagccctggaataaacaatga

SEQ ID NO: 4613210 - DNA, 25 bp, Homo sapien
ctccaagtgagcttttgtgggacac

SEQ ID NO: 4613211 - DNA, 25 bp, Homo sapien
taagctcagaggtccaactatagtc

SEQ ID NO: 4613212 - DNA, 25 bp, Homo sapien
taccagccctatggagaaaatttgc

SEQ ID NO: 4613213 - DNA, 25 bp, Homo sapien
tggctttcggagcttgataaaaact

SEQ ID NO: 4613214 - DNA, 25 bp, Homo sapien
ggctttcggagcttgataaaaactc

SEQ ID NO: 4613215 - DNA, 25 bp, Homo sapien
ctgtgatgatatcattccaaagtac

SEQ ID NO: 4613216 - DNA, 25 bp, Homo sapien
cctcctgtgatgatatcattccaaa

SEQ ID NO: 4613217 - DNA, 25 bp, Homo sapien
tgtagaacttccatgttcctcctgt

SEQ ID NO: 4613218 - DNA, 25 bp, Homo sapien
ctgtagaacttccatgttcctcctg

SEQ ID NO: 4613219 - DNA, 25 bp, Homo sapien
ctggtaaccatgacagtctgttcat

SEQ ID NO: 4613220 - DNA, 25 bp, Homo sapien
tgtactggctagaagtaatttctcc

SEQ ID NO: 4613221 - DNA, 25 bp, Homo sapien
aaagtgatgacaacgtagcttgtga

SEQ ID NO: 4613222 - DNA, 25 bp, Homo sapien
caattagtagtattgctgtactggc

SEQ ID NO: 4613223 - DNA, 25 bp, Homo sapien
caacgtagcttgtgaataaactgac

SEQ ID NO: 4613224 - DNA, 25 bp, Homo sapien
gccacttggtatgtgatgtctccag

SEQ ID NO: 4613225 - DNA, 25 bp, Homo sapien
catgcctgcaagtgttgagcaatac

SEQ ID NO: 4613226 - DNA, 25 bp, Homo sapien
cattgatcaagcaaagccacttggt

SEQ ID NO: 4613227 - DNA, 25 bp, Homo sapien
tactggttggcatgtcctggtttca

SEQ ID NO: 4613228 - DNA, 25 bp, Homo sapien
tgagggctaatggaatgccaacaaa

SEQ ID NO: 4613229 - DNA, 25 bp, Homo sapien
tctgaaatcccttacactgccctgt

SEQ ID NO: 4613230 - DNA, 25 bp, Homo sapien
tctgctgttaatcaacacagccacc

SEQ ID NO: 4613231 - DNA, 25 bp, Homo sapien
tggcacacagggcattgaccatact

SEQ ID NO: 4613232 - DNA, 25 bp, Homo sapien
tagccttggaatcaacatggtgcca

SEQ ID NO: 4613233 - DNA, 25 bp, Homo sapien
tattcataggttagatagccttgga

SEQ ID NO: 4613234 - DNA, 25 bp, Homo sapien
catggtgccaatgttgaggtgaaga

SEQ ID NO: 4613235 - DNA, 25 bp, Homo sapien
tgaaaccagaacatataggcagtct

SEQ ID NO: 4613236 - DNA, 25 bp, Homo sapien
taatgtagtcttttgaaggaaatca

SEQ ID NO: 4613237 - DNA, 25 bp, Homo sapien
gtgaattatgattactcttcttgag

SEQ ID NO: 4613238 - DNA, 25 bp, Homo sapien
cttgagtatagtacatctgcatgaa

SEQ ID NO: 4613239 - DNA, 25 bp, Homo sapien
tcttttgaaggaaatcaccatgaac

SEQ ID NO: 4613240 - DNA, 25 bp, Homo sapien
gcaatacttaggcacaacatgagac

SEQ ID NO: 4613241 - DNA, 25 bp, Homo sapien
taggcacaacatgagacgttttcat

SEQ ID NO: 4613242 - DNA, 25 bp, Homo sapien
caatttggttgggtgggcaatactt

SEQ ID NO: 4613243 - DNA, 25 bp, Homo sapien
tgtcaatttggttgggtgggcaata

SEQ ID NO: 4613244 - DNA, 25 bp, Homo sapien
gctgttaaagccgtgaatggtctcc

SEQ ID NO: 4613245 - DNA, 25 bp, Homo sapien
gaatgtgcccatttaacaagccgta

SEQ ID NO: 4613246 - DNA, 25 bp, Homo sapien
tggccagaacagagactggatgctg

SEQ ID NO: 4613247 - DNA, 25 bp, Homo sapien
ggcagagcacaagaattatcagtca

SEQ ID NO: 4613248 - DNA, 25 bp, Homo sapien
taatccagtcttacactgggctgag

SEQ ID NO: 4613249 - DNA, 25 bp, Homo sapien
ttacactgggctgaggaactaattc

SEQ ID NO: 4613250 - DNA, 25 bp, Homo sapien
cacatccatgcacgatttttaatcc

SEQ ID NO: 4613251 - DNA, 25 bp, Homo sapien
ccctgcacatccatgcacgattttt

SEQ ID NO: 4613252 - DNA, 25 bp, Homo sapien
catattatccagactaagaaagcca

SEQ ID NO: 4613253 - DNA, 25 bp, Homo sapien
tgtctgcctcctcatacatattatc

SEQ ID NO: 4613254 - DNA, 25 bp, Homo sapien
tatccagactaagaaagccaccaaa

SEQ ID NO: 4613255 - DNA, 25 bp, Homo sapien
gaaagccaccaaatctccatggcag

SEQ ID NO: 4613256 - DNA, 25 bp, Homo sapien
taagacaatccattcttgacatcca

SEQ ID NO: 4613257 - DNA, 25 bp, Homo sapien
caaacctaagacaatccattcttga

SEQ ID NO: 4613258 - DNA, 25 bp, Homo sapien
aacctaagacaatccattcttgaca

SEQ ID NO: 4613259 - DNA, 25 bp, Homo sapien
caatccattcttgacatccatcaaa

SEQ ID NO: 4613260 - DNA, 25 bp, Homo sapien
gttaagcaatttgcaagtcgtatat

SEQ ID NO: 4613261 - DNA, 25 bp, Homo sapien
gaatcatcaggatccataactttaa

SEQ ID NO: 4613262 - DNA, 25 bp, Homo sapien
gcaatttgcaagtcgtatatttccc

SEQ ID NO: 4613263 - DNA, 25 bp, Homo sapien
gcaagtcgtatatttccctgctgtg

SEQ ID NO: 4613264 - DNA, 25 bp, Homo sapien
agaccccgcgccagcggtccgtatt

SEQ ID NO: 4613265 - DNA, 25 bp, Homo sapien
tccgtattggccacggtgagttgag

SEQ ID NO: 4613266 - DNA, 25 bp, Homo sapien
cgccagcggtccgtattggccacgg

SEQ ID NO: 4613267 - DNA, 25 bp, Homo sapien
ctcgccgcttcgctccctcagagac

SEQ ID NO: 4613268 - DNA, 25 bp, Homo sapien
ccagaacatacagcctttgaaaagt

SEQ ID NO: 4613269 - DNA, 25 bp, Homo sapien
tgaaatatgttgatacactaagagg

SEQ ID NO: 4613270 - DNA, 25 bp, Homo sapien
tgtagaaaatgaggcacgcacttgg

SEQ ID NO: 4613271 - DNA, 25 bp, Homo sapien
gaagttggcagagctctctaacccc

SEQ ID NO: 4613272 - DNA, 25 bp, Homo sapien
ttaatgttggaagagtgtactccca

SEQ ID NO: 4613273 - DNA, 25 bp, Homo sapien
taatgttggaagagtgtactcccat

SEQ ID NO: 4613274 - DNA, 25 bp, Homo sapien
aacaggcgacagcaataaacagtcc

SEQ ID NO: 4613275 - DNA, 25 bp, Homo sapien
gaacaggcgacagcaataaacagtc

SEQ ID NO: 4613276 - DNA, 25 bp, Homo sapien
aggcgacagcaataaacagtcccat

SEQ ID NO: 4613277 - DNA, 25 bp, Homo sapien
caggcgacagcaataaacagtccca

SEQ ID NO: 4613278 - DNA, 25 bp, Homo sapien
aaccttgacctgaactaagtttatg

SEQ ID NO: 4613279 - DNA, 25 bp, Homo sapien
gacctgaactaagtttatgcttcct

SEQ ID NO: 4613280 - DNA, 25 bp, Homo sapien
ctttgtaaccttgacctgaactaag

SEQ ID NO: 4613281 - DNA, 25 bp, Homo sapien
ccttgacctgaactaagtttatgct

SEQ ID NO: 4613282 - DNA, 25 bp, Homo sapien
ttctgcagggagattatcttttaag

SEQ ID NO: 4613283 - DNA, 25 bp, Homo sapien
gattatcttttaagggattccatag

SEQ ID NO: 4613284 - DNA, 25 bp, Homo sapien
taagggattccatagtgaaataaca

SEQ ID NO: 4613285 - DNA, 25 bp, Homo sapien
ttttctgcagggagattatctttta

SEQ ID NO: 4613286 - DNA, 25 bp, Homo sapien
attatacggccactgaatctctgtg

SEQ ID NO: 4613287 - DNA, 25 bp, Homo sapien
ctattatacggccactgaatctctg

SEQ ID NO: 4613288 - DNA, 25 bp, Homo sapien
taatctattatacggccactgaatc

SEQ ID NO: 4613289 - DNA, 25 bp, Homo sapien
aataatctattatacggccactgaa

SEQ ID NO: 4613290 - DNA, 25 bp, Homo sapien
ttaagcaggcgaatacacaaaagtc

SEQ ID NO: 4613291 - DNA, 25 bp, Homo sapien
tacgtactcattctgcaacaatccc

SEQ ID NO: 4613292 - DNA, 25 bp, Homo sapien
gagaaatctgcttgtacgtactcat

SEQ ID NO: 4613293 - DNA, 25 bp, Homo sapien
gtcttgtgctagagcatttcttcca

SEQ ID NO: 4613294 - DNA, 25 bp, Homo sapien
gaagatgcaggaatatatgatcaca

SEQ ID NO: 4613295 - DNA, 25 bp, Homo sapien
cctactttggcataataacctcttc

SEQ ID NO: 4613296 - DNA, 25 bp, Homo sapien
gacaacgcattttcctagagaatgg

SEQ ID NO: 4613297 - DNA, 25 bp, Homo sapien
gagaatggagcactcttagctttag

SEQ ID NO: 4613298 - DNA, 25 bp, Homo sapien
ggtgtttgcacccacgtgcctgctg

SEQ ID NO: 4613299 - DNA, 25 bp, Homo sapien
tggtctgaaccgcttgggtggtcca

SEQ ID NO: 4613300 - DNA, 25 bp, Homo sapien
tgtttgcacccacgtgcctgctgct

SEQ ID NO: 4613301 - DNA, 25 bp, Homo sapien
ggtctgaaccgcttgggtggtccat

SEQ ID NO: 4613302 - DNA, 25 bp, Homo sapien
gtaggctttgatgtacaaggcagtc

SEQ ID NO: 4613303 - DNA, 25 bp, Homo sapien
tgggaagtgctctaccacaagtagc

SEQ ID NO: 4613304 - DNA, 25 bp, Homo sapien
gatgtacaaggcagtcactttgcac

SEQ ID NO: 4613305 - DNA, 25 bp, Homo sapien
catggccacttgtgggaagtgctct

SEQ ID NO: 4613306 - DNA, 25 bp, Homo sapien
tgcttctgtatgacaatcctcttgt

SEQ ID NO: 4613307 - DNA, 25 bp, Homo sapien
caccgcaatgtgctgtagttctcaa

SEQ ID NO: 4613308 - DNA, 25 bp, Homo sapien
gcatttttgtgtgctagcatagact

SEQ ID NO: 4613309 - DNA, 25 bp, Homo sapien
gagtccctaactacgttctctgagg

SEQ ID NO: 4613310 - DNA, 25 bp, Homo sapien
taatttgaaagatgttaagggcggc

SEQ ID NO: 4613311 - DNA, 25 bp, Homo sapien
ttttatacattggagtgcctcccca

SEQ ID NO: 4613312 - DNA, 25 bp, Homo sapien
gacccactgtgatgcaggaagcttt

SEQ ID NO: 4613313 - DNA, 25 bp, Homo sapien
atgcaggaagctttctctctactac

SEQ ID NO: 4613314 - DNA, 25 bp, Homo sapien
atacattggagtgcctccccaccag

SEQ ID NO: 4613315 - DNA, 25 bp, Homo sapien
tatgttcaagtatatgcaataatgc

SEQ ID NO: 4613316 - DNA, 25 bp, Homo sapien
tagtcctgtgtactactgtgacaaa

SEQ ID NO: 4613317 - DNA, 25 bp, Homo sapien
tatattctgttgactggcctttgag

SEQ ID NO: 4613318 - DNA, 25 bp, Homo sapien
ttaagtggtccagataatatctacc

SEQ ID NO: 4613319 - DNA, 25 bp, Homo sapien
atttctaccctcagcattagctagg

SEQ ID NO: 4613320 - DNA, 25 bp, Homo sapien
ccaacgtggatgtaatcataagcga

SEQ ID NO: 4613321 - DNA, 25 bp, Homo sapien
gagaaattcactgttagctgacaca

SEQ ID NO: 4613322 - DNA, 25 bp, Homo sapien
gcgaagtgaaagcaatcagctggct

SEQ ID NO: 4613323 - DNA, 25 bp, Homo sapien
tcttgaagtcagtgagaccaggagc

SEQ ID NO: 4613324 - DNA, 25 bp, Homo sapien
tgtgagggtccgcggcttcattctt

SEQ ID NO: 4613325 - DNA, 25 bp, Homo sapien
ttgaagtcagtgagaccaggagccc

SEQ ID NO: 4613326 - DNA, 25 bp, Homo sapien
attcttgaagtcagtgagaccagga

SEQ ID NO: 4613327 - DNA, 25 bp, Homo sapien
catgttcttgaagaaacctccaaaa

SEQ ID NO: 4613328 - DNA, 25 bp, Homo sapien
cgtggggaacaccaatatctttcct

SEQ ID NO: 4613329 - DNA, 25 bp, Homo sapien
aatatctttccttctaaagccctca

SEQ ID NO: 4613330 - DNA, 25 bp, Homo sapien
tcccttccatgttcttgaagaaacc

SEQ ID NO: 4613331 - DNA, 25 bp, Homo sapien
cggctgctggctgtatcagccacag

SEQ ID NO: 4613332 - DNA, 25 bp, Homo sapien
ccagaagtaggaggattaggagacc

SEQ ID NO: 4613333 - DNA, 25 bp, Homo sapien
tcttcatggactacaaagcactgtt

SEQ ID NO: 4613334 - DNA, 25 bp, Homo sapien
tatcagccacagcactatagaattt

SEQ ID NO: 4613335 - DNA, 25 bp, Homo sapien
ctttgacagtttctctcttgtccat

SEQ ID NO: 4613336 - DNA, 25 bp, Homo sapien
ctgcctttctcctaagactcaatgc

SEQ ID NO: 4613337 - DNA, 25 bp, Homo sapien
ctttctcctaagactcaatgctttg

SEQ ID NO: 4613338 - DNA, 25 bp, Homo sapien
tctcctaagactcaatgctttgttg

SEQ ID NO: 4613339 - DNA, 25 bp, Homo sapien
tgtttttactagttgatctaaatgt

SEQ ID NO: 4613340 - DNA, 25 bp, Homo sapien
taagcatcatcagagggagatggca

SEQ ID NO: 4613341 - DNA, 25 bp, Homo sapien
ctaagcatcatcagagggagatggc

SEQ ID NO: 4613342 - DNA, 25 bp, Homo sapien
acttcagtggcccacgaatactctt

SEQ ID NO: 4613343 - DNA, 25 bp, Homo sapien
gcccacgaatactctttctggatga

SEQ ID NO: 4613344 - DNA, 25 bp, Homo sapien
agtggcccacgaatactctttctgg

SEQ ID NO: 4613345 - DNA, 25 bp, Homo sapien
cctttcacttcagtggcccacgaat

SEQ ID NO: 4613346 - DNA, 25 bp, Homo sapien
cctacagtgctacaaggcaaaataa

SEQ ID NO: 4613347 - DNA, 25 bp, Homo sapien
cattgttacttattgtcaccctaca

SEQ ID NO: 4613348 - DNA, 25 bp, Homo sapien
cctaacctttcctgatatccagtaa

SEQ ID NO: 4613349 - DNA, 25 bp, Homo sapien
gagtaattagcataactatcatttc

SEQ ID NO: 4613350 - DNA, 25 bp, Homo sapien
tttcttgctagtattgctgaaatag

SEQ ID NO: 4613351 - DNA, 25 bp, Homo sapien
aaatctatcccattttgtcagtctc

SEQ ID NO: 4613352 - DNA, 25 bp, Homo sapien
aaattagtcataatacttctgtatc

SEQ ID NO: 4613353 - DNA, 25 bp, Homo sapien
gaaatagacctctaataggttccta

SEQ ID NO: 4613354 - DNA, 25 bp, Homo sapien
ccgataatccgcattgtctgttggg

SEQ ID NO: 4613355 - DNA, 25 bp, Homo sapien
gaacaattcatcacacgtggctctt

SEQ ID NO: 4613356 - DNA, 25 bp, Homo sapien
cacgtggctctttaagtaaccgata

SEQ ID NO: 4613357 - DNA, 25 bp, Homo sapien
taagtaaccgataatccgcattgtc

SEQ ID NO: 4613358 - DNA, 25 bp, Homo sapien
cttcagagagtctatattgagttgg

SEQ ID NO: 4613359 - DNA, 25 bp, Homo sapien
tgaatgcctcatatacttgggcagt

SEQ ID NO: 4613360 - DNA, 25 bp, Homo sapien
ttcagagagtctatattgagttggg

SEQ ID NO: 4613361 - DNA, 25 bp, Homo sapien
ttgtactgggatgaatgcctcatat

SEQ ID NO: 4613362 - DNA, 25 bp, Homo sapien
ttagaagctgatactaaatgccagt

SEQ ID NO: 4613363 - DNA, 25 bp, Homo sapien
cctgccactacttgtgggctgtata

SEQ ID NO: 4613364 - DNA, 25 bp, Homo sapien
gaagctgatactaaatgccagttct

SEQ ID NO: 4613365 - DNA, 25 bp, Homo sapien
actacttgtgggctgtatataatta

SEQ ID NO: 4613366 - DNA, 25 bp, Homo sapien
acttgcatcagccagcttgcgacca

SEQ ID NO: 4613367 - DNA, 25 bp, Homo sapien
ttctgtcccctttgatcacaaaact

SEQ ID NO: 4613368 - DNA, 25 bp, Homo sapien
cctttgatcacaaaacttgacttct

SEQ ID NO: 4613369 - DNA, 25 bp, Homo sapien
ttgcgaccactgtagcttggctgac

SEQ ID NO: 4613370 - DNA, 25 bp, Homo sapien
taagtcatcatatgtgacgtggtct

SEQ ID NO: 4613371 - DNA, 25 bp, Homo sapien
ttaggaggaacatacaccccagcct

SEQ ID NO: 4613372 - DNA, 25 bp, Homo sapien
gctaaagccaataggtaagtcatca

SEQ ID NO: 4613373 - DNA, 25 bp, Homo sapien
gttctcatagagtaacacagtctct

SEQ ID NO: 4613374 - DNA, 25 bp, Homo sapien
ctgtccagattgtattttgttaaaa

SEQ ID NO: 4613375 - DNA, 25 bp, Homo sapien
tccagattgtattttgttaaaaatg

SEQ ID NO: 4613376 - DNA, 25 bp, Homo sapien
aaaatgtttccttggctttatgcat

SEQ ID NO: 4613377 - DNA, 25 bp, Homo sapien
taaaaatgtttccttggctttatgc

SEQ ID NO: 4613378 - DNA, 25 bp, Homo sapien
ttgttcctctgagccttcgtgtcca

SEQ ID NO: 4613379 - DNA, 25 bp, Homo sapien
tatgatctgccttctgagttactgt

SEQ ID NO: 4613380 - DNA, 25 bp, Homo sapien
tgctaacatttgttttcccgacttg

SEQ ID NO: 4613381 - DNA, 25 bp, Homo sapien
tttggccacttcatgaaatgggtct

SEQ ID NO: 4613382 - DNA, 25 bp, Homo sapien
ttgggcatgattctggcttctcaac

SEQ ID NO: 4613383 - DNA, 25 bp, Homo sapien
ggtgaatggctctctacaatggtct

SEQ ID NO: 4613384 - DNA, 25 bp, Homo sapien
caactgttgtgcatatgttccctga

SEQ ID NO: 4613385 - DNA, 25 bp, Homo sapien
tactccagaaactccggtgaatggc

SEQ ID NO: 4613386 - DNA, 25 bp, Homo sapien
aactttcctcattgtaactgcagac

SEQ ID NO: 4613387 - DNA, 25 bp, Homo sapien
agactttcctaatgaatccttgtag

SEQ ID NO: 4613388 - DNA, 25 bp, Homo sapien
cctaatgaatccttgtagtatttcc

SEQ ID NO: 4613389 - DNA, 25 bp, Homo sapien
tgtaactgcagactttcctaatgaa

SEQ ID NO: 4613390 - DNA, 25 bp, Homo sapien
aatgctttatggttggcacggcggc

SEQ ID NO: 4613391 - DNA, 25 bp, Homo sapien
cttctaccttctttgatcacagtgg

SEQ ID NO: 4613392 - DNA, 25 bp, Homo sapien
cacagtggtactatgagttgttttc

SEQ ID NO: 4613393 - DNA, 25 bp, Homo sapien
tctccatcttatttagctcctgtag

SEQ ID NO: 4613394 - DNA, 25 bp, Homo sapien
caaggatgacagcagtgatagaggt

SEQ ID NO: 4613395 - DNA, 25 bp, Homo sapien
tactcaaaacgaatctaggttgaca

SEQ ID NO: 4613396 - DNA, 25 bp, Homo sapien
acaaggagactccaggtaagagatg

SEQ ID NO: 4613397 - DNA, 25 bp, Homo sapien
ttatgttgagaataaacccaatggg

SEQ ID NO: 4613398 - DNA, 25 bp, Homo sapien
gaagatttaagtgaagactctataa

SEQ ID NO: 4613399 - DNA, 25 bp, Homo sapien
gttaatcaattttatctaaggcact

SEQ ID NO: 4613400 - DNA, 25 bp, Homo sapien
tcctatcctagtcgttcgggtcagt

SEQ ID NO: 4613401 - DNA, 25 bp, Homo sapien
gaattgcttttgattgtatacactg

SEQ ID NO: 4613402 - DNA, 25 bp, Homo sapien
catgctggtgggtgtcaattgcgca

SEQ ID NO: 4613403 - DNA, 25 bp, Homo sapien
atgctggtgggtgtcaattgcgcag

SEQ ID NO: 4613404 - DNA, 25 bp, Homo sapien
tgcctccagcaagtggagtcttttt

SEQ ID NO: 4613405 - DNA, 25 bp, Homo sapien
tttgccaatgcctccagcaagtgga

SEQ ID NO: 4613406 - DNA, 25 bp, Homo sapien
ctccagcaagtggagtctttttcct

SEQ ID NO: 4613407 - DNA, 25 bp, Homo sapien
cagcaagtggagtctttttcctaaa

SEQ ID NO: 4613408 - DNA, 25 bp, Homo sapien
tcttcttgttcctcatctgcatgag

SEQ ID NO: 4613409 - DNA, 25 bp, Homo sapien
ttcttcttgttcctcatctgcatga

SEQ ID NO: 4613410 - DNA, 25 bp, Homo sapien
ttcctcatctgcatgagttgcaagc

SEQ ID NO: 4613411 - DNA, 25 bp, Homo sapien
ttgttcctcatctgcatgagttgca

SEQ ID NO: 4613412 - DNA, 25 bp, Homo sapien
ggcacaactagctggagaggcctca

SEQ ID NO: 4613413 - DNA, 25 bp, Homo sapien
attgtggggcacaactagctggaga

SEQ ID NO: 4613414 - DNA, 25 bp, Homo sapien
tgggatgcccaaattgtggggcaca

SEQ ID NO: 4613415 - DNA, 25 bp, Homo sapien
tgcccaaattgtggggcacaactag

SEQ ID NO: 4613416 - DNA, 25 bp, Homo sapien
gaacaatgtccggagcacaggactc

SEQ ID NO: 4613417 - DNA, 25 bp, Homo sapien
acaatgtccggagcacaggactcag

SEQ ID NO: 4613418 - DNA, 25 bp, Homo sapien
catgaacaatgtccggagcacagga

SEQ ID NO: 4613419 - DNA, 25 bp, Homo sapien
gtcatgaacaatgtccggagcacag

SEQ ID NO: 4613420 - DNA, 25 bp, Homo sapien
catgtaagcctcaggactgttctga

SEQ ID NO: 4613421 - DNA, 25 bp, Homo sapien
tgttctgacttttttgatagtccat

SEQ ID NO: 4613422 - DNA, 25 bp, Homo sapien
ctgcatgtaagcctcaggactgttc

SEQ ID NO: 4613423 - DNA, 25 bp, Homo sapien
ctagtaagttgttcctcctatggct

SEQ ID NO: 4613424 - DNA, 25 bp, Homo sapien
gtttgtgagggaccaccagtcagcc

SEQ ID NO: 4613425 - DNA, 25 bp, Homo sapien
taaccaggcaacaaggattgagaca

SEQ ID NO: 4613426 - DNA, 25 bp, Homo sapien
aaagtgggtacagaatatgcagtcc

SEQ ID NO: 4613427 - DNA, 25 bp, Homo sapien
ggtatttgcaggtacagtgcctcca

SEQ ID NO: 4613428 - DNA, 25 bp, Homo sapien
tagtgggtagccagcttcctgagta

SEQ ID NO: 4613429 - DNA, 25 bp, Homo sapien
tgggttgcaaagcatcgtgtaccga

SEQ ID NO: 4613430 - DNA, 25 bp, Homo sapien
tactcacaagtagggtgataacagc

SEQ ID NO: 4613431 - DNA, 25 bp, Homo sapien
tgcgcactgcggtaacacaatctgg

SEQ ID NO: 4613432 - DNA, 25 bp, Homo sapien
ccttttctggaattactagatgctt

SEQ ID NO: 4613433 - DNA, 25 bp, Homo sapien
aaactccataatctgtatggctagt

SEQ ID NO: 4613434 - DNA, 25 bp, Homo sapien
tggctagtggctacacttgttgaca

SEQ ID NO: 4613435 - DNA, 25 bp, Homo sapien
tccataatctgtatggctagtggct

SEQ ID NO: 4613436 - DNA, 25 bp, Homo sapien
cacttgttgacagtacagcttctac

SEQ ID NO: 4613437 - DNA, 25 bp, Homo sapien
cacatttattgtctctatggaggtg

SEQ ID NO: 4613438 - DNA, 25 bp, Homo sapien
gacacaattttgtgcacgggcataa

SEQ ID NO: 4613439 - DNA, 25 bp, Homo sapien
ttttctaaactcctctaatgaagag

SEQ ID NO: 4613440 - DNA, 25 bp, Homo sapien
gaggcagccctttccatgcctcgga

SEQ ID NO: 4613441 - DNA, 25 bp, Homo sapien
gattccgcaaggatttcttctgtag

SEQ ID NO: 4613442 - DNA, 25 bp, Homo sapien
gcaggctcatcacagagttacagga

SEQ ID NO: 4613443 - DNA, 25 bp, Homo sapien
cccatggctcacaggacagtttgaa

SEQ ID NO: 4613444 - DNA, 25 bp, Homo sapien
agccatttgtactgtagcccctgca

SEQ ID NO: 4613445 - DNA, 25 bp, Homo sapien
cagtttgaaatgtaggcagtgcttc

SEQ ID NO: 4613446 - DNA, 25 bp, Homo sapien
catggatgaaggtcacttcacattt

SEQ ID NO: 4613447 - DNA, 25 bp, Homo sapien
ctggaaagtatgtttataatattct

SEQ ID NO: 4613448 - DNA, 25 bp, Homo sapien
gatgaaggtcacttcacatttactt

SEQ ID NO: 4613449 - DNA, 25 bp, Homo sapien
taatttgctttgtgtaacttcaact

SEQ ID NO: 4613450 - DNA, 25 bp, Homo sapien
gatactggttcacgggtagtcagca

SEQ ID NO: 4613451 - DNA, 25 bp, Homo sapien
aatctgatactggttcacgggtagt

SEQ ID NO: 4613452 - DNA, 25 bp, Homo sapien
tctgatactggttcacgggtagtca

SEQ ID NO: 4613453 - DNA, 25 bp, Homo sapien
tgatactggttcacgggtagtcagc

SEQ ID NO: 4613454 - DNA, 25 bp, Homo sapien
tgcttcatctgggtccttaacatcc

SEQ ID NO: 4613455 - DNA, 25 bp, Homo sapien
tatgctatagtactgattagctgga

SEQ ID NO: 4613456 - DNA, 25 bp, Homo sapien
ttcatctgggtccttaacatcccaa

SEQ ID NO: 4613457 - DNA, 25 bp, Homo sapien
taacacgacatgtgatgcttctact

SEQ ID NO: 4613458 - DNA, 25 bp, Homo sapien
catcaagctgactggcaacggccat

SEQ ID NO: 4613459 - DNA, 25 bp, Homo sapien
gcagaggcaattccaagatccacag

SEQ ID NO: 4613460 - DNA, 25 bp, Homo sapien
tcagggtacccagaccgatgatcag

SEQ ID NO: 4613461 - DNA, 25 bp, Homo sapien
gacaagagccccaatgaaacatgag

SEQ ID NO: 4613462 - DNA, 25 bp, Homo sapien
tggatgtaagtggccaataattaac

SEQ ID NO: 4613463 - DNA, 25 bp, Homo sapien
tgttggatgtaagtggccaataatt

SEQ ID NO: 4613464 - DNA, 25 bp, Homo sapien
aagtggccaataattaacttcttca

SEQ ID NO: 4613465 - DNA, 25 bp, Homo sapien
agtggccaataattaacttcttcat

SEQ ID NO: 4613466 - DNA, 25 bp, Homo sapien
tcattctcagctggtgacatgccga

SEQ ID NO: 4613467 - DNA, 25 bp, Homo sapien
tgtcagtaatgtcggcaaaattggg

SEQ ID NO: 4613468 - DNA, 25 bp, Homo sapien
gggaagaagattgacatagtatgcc

SEQ ID NO: 4613469 - DNA, 25 bp, Homo sapien
gacatgccgatcacttctaagcttt

SEQ ID NO: 4613470 - DNA, 25 bp, Homo sapien
tttccaaaacttgtcttggatattg

SEQ ID NO: 4613471 - DNA, 25 bp, Homo sapien
cattttccaaaacttgtcttggata

SEQ ID NO: 4613472 - DNA, 25 bp, Homo sapien
ccaaaacttgtcttggatattgaac

SEQ ID NO: 4613473 - DNA, 25 bp, Homo sapien
acattttccaaaacttgtcttggat

SEQ ID NO: 4613474 - DNA, 25 bp, Homo sapien
cttattataggagcagcagccattg

SEQ ID NO: 4613475 - DNA, 25 bp, Homo sapien
ctctctccctgtctctccactccat

SEQ ID NO: 4613476 - DNA, 25 bp, Homo sapien
agccattgctgctttctctctctcc

SEQ ID NO: 4613477 - DNA, 25 bp, Homo sapien
tattataggagcagcagccattgct

SEQ ID NO: 4613478 - DNA, 25 bp, Homo sapien
tccagttcttttctggtagggataa

SEQ ID NO: 4613479 - DNA, 25 bp, Homo sapien
cctagtgcctcttggtccagttctt

SEQ ID NO: 4613480 - DNA, 25 bp, Homo sapien
cttgggacacaagaaagacatgctt

SEQ ID NO: 4613481 - DNA, 25 bp, Homo sapien
catgcttggccagcacccctagtgc

SEQ ID NO: 4613482 - DNA, 25 bp, Homo sapien
ccagtgttgatagaacagttactca

SEQ ID NO: 4613483 - DNA, 25 bp, Homo sapien
tgggcccaattcagtttcagatgat

SEQ ID NO: 4613484 - DNA, 25 bp, Homo sapien
cagatgattcagcaacaccagtgtt

SEQ ID NO: 4613485 - DNA, 25 bp, Homo sapien
ctgggcccaattcagtttcagatga

SEQ ID NO: 4613486 - DNA, 25 bp, Homo sapien
ttaaatgaggagagcagcaccagcc

SEQ ID NO: 4613487 - DNA, 25 bp, Homo sapien
taaatgaggagagcagcaccagcct

SEQ ID NO: 4613488 - DNA, 25 bp, Homo sapien
tgtgccattagttttgtttatcacc

SEQ ID NO: 4613489 - DNA, 25 bp, Homo sapien
aaattggtcaactggcagttaaatg

SEQ ID NO: 4613490 - DNA, 25 bp, Homo sapien
tcaactggcagttaaatggtccaaa

SEQ ID NO: 4613491 - DNA, 25 bp, Homo sapien
ttctacttgtgccattagttttgtt

SEQ ID NO: 4613492 - DNA, 25 bp, Homo sapien
aaggatttcctcgactacatataga

SEQ ID NO: 4613493 - DNA, 25 bp, Homo sapien
tatatcttgctcaaacactgcttgg

SEQ ID NO: 4613494 - DNA, 25 bp, Homo sapien
taccaatgacataaacctctgcagg

SEQ ID NO: 4613495 - DNA, 25 bp, Homo sapien
cctctgcaggagacattgtgaagac

SEQ ID NO: 4613496 - DNA, 25 bp, Homo sapien
ccacagcagtcagtgattgggtaca

SEQ ID NO: 4613497 - DNA, 25 bp, Homo sapien
cagtcagtgattgggtacaggctac

SEQ ID NO: 4613498 - DNA, 25 bp, Homo sapien
cagcagtcagtgattgggtacaggc

SEQ ID NO: 4613499 - DNA, 25 bp, Homo sapien
tcagtgattgggtacaggctaccat

SEQ ID NO: 4613500 - DNA, 25 bp, Homo sapien
tatataggatgttctgttaagaatg

SEQ ID NO: 4613501 - DNA, 25 bp, Homo sapien
ctcgtactgagttagaaattgtcat

SEQ ID NO: 4613502 - DNA, 25 bp, Homo sapien
ttctcgtactgagttagaaattgtc

SEQ ID NO: 4613503 - DNA, 25 bp, Homo sapien
ctgttaagaatgactccaaattttg

SEQ ID NO: 4613504 - DNA, 25 bp, Homo sapien
ccagagcaaaggattagtcctggaa

SEQ ID NO: 4613505 - DNA, 25 bp, Homo sapien
caaaggattagtcctggaatgaacc

SEQ ID NO: 4613506 - DNA, 25 bp, Homo sapien
gaatgaacctgtagttatatgcaga

SEQ ID NO: 4613507 - DNA, 25 bp, Homo sapien
tagtcctggaatgaacctgtagtta

SEQ ID NO: 4613508 - DNA, 25 bp, Homo sapien
ttcaaaggcttgtgtcaggccagct

SEQ ID NO: 4613509 - DNA, 25 bp, Homo sapien
ggcaagagcaatgtagatgtcagac

SEQ ID NO: 4613510 - DNA, 25 bp, Homo sapien
ccacagagtggctagacctaaaaag

SEQ ID NO: 4613511 - DNA, 25 bp, Homo sapien
tttcaaatgggtcaatagaatgggc

SEQ ID NO: 4613512 - DNA, 25 bp, Homo sapien
ctttgaacctttgaacataccccat

SEQ ID NO: 4613513 - DNA, 25 bp, Homo sapien
tctttgaacctttgaacatacccca

SEQ ID NO: 4613514 - DNA, 25 bp, Homo sapien
cagcttttttgaaactaccagattt

SEQ ID NO: 4613515 - DNA, 25 bp, Homo sapien
aatacaagggccactattgaaaaat

SEQ ID NO: 4613516 - DNA, 25 bp, Homo sapien
tatgatatccgacttttacaaacag

SEQ ID NO: 4613517 - DNA, 25 bp, Homo sapien
catttggtttaaatcgaaatacaag

SEQ ID NO: 4613518 - DNA, 25 bp, Homo sapien
gccatgttatctgtgctatttgtaa

SEQ ID NO: 4613519 - DNA, 25 bp, Homo sapien
gtaattcatattcatgcaaatcccc

SEQ ID NO: 4613520 - DNA, 25 bp, Homo sapien
tctgtccatgcaatttagaccaacc

SEQ ID NO: 4613521 - DNA, 25 bp, Homo sapien
tgtccctccaaatgtcagctaaatg

SEQ ID NO: 4613522 - DNA, 25 bp, Homo sapien
ctctgatgaacttctcttagaattg

SEQ ID NO: 4613523 - DNA, 25 bp, Homo sapien
gatgaacttctcttagaattgaatg

SEQ ID NO: 4613524 - DNA, 25 bp, Homo sapien
acttctcttagaattgaatgtttta

SEQ ID NO: 4613525 - DNA, 25 bp, Homo sapien
ctgatgaacttctcttagaattgaa

SEQ ID NO: 4613526 - DNA, 25 bp, Homo sapien
caaaacaaagacctggtttgcagct

SEQ ID NO: 4613527 - DNA, 25 bp, Homo sapien
aacaaagacctggtttgcagctctt

SEQ ID NO: 4613528 - DNA, 25 bp, Homo sapien
gactgaagcacgtagaggaaaatcc

SEQ ID NO: 4613529 - DNA, 25 bp, Homo sapien
cagctctttgtgtagagaagactga

SEQ ID NO: 4613530 - DNA, 25 bp, Homo sapien
ctgggcaacacataccacttctcaa

SEQ ID NO: 4613531 - DNA, 25 bp, Homo sapien
ctgtcttgggaattgagcccgggcc

SEQ ID NO: 4613532 - DNA, 25 bp, Homo sapien
cttgggaattgagcccgggcctgct

SEQ ID NO: 4613533 - DNA, 25 bp, Homo sapien
gctgaaaaagtagcaaggggaagaa

SEQ ID NO: 4613534 - DNA, 25 bp, Homo sapien
ctgtggggccgggagtctgcagtca

SEQ ID NO: 4613535 - DNA, 25 bp, Homo sapien
tgatgagccacagcggtctgtccca

SEQ ID NO: 4613536 - DNA, 25 bp, Homo sapien
tgatgatgagccacagcggtctgtc

SEQ ID NO: 4613537 - DNA, 25 bp, Homo sapien
cctgatgatgagccacagcggtctg

SEQ ID NO: 4613538 - DNA, 25 bp, Homo sapien
tgtgtcctgagaaattgccgttgca

SEQ ID NO: 4613539 - DNA, 25 bp, Homo sapien
attgaagaagcgcaagggccagacc

SEQ ID NO: 4613540 - DNA, 25 bp, Homo sapien
ggcacgtcccacagttgtgtcctga

SEQ ID NO: 4613541 - DNA, 25 bp, Homo sapien
tgccgttgcagtgacatgtcctatt

SEQ ID NO: 4613542 - DNA, 25 bp, Homo sapien
gctggtccctcatgagagaaatcca

SEQ ID NO: 4613543 - DNA, 25 bp, Homo sapien
aattgtggcgtgttgccatctggcc

SEQ ID NO: 4613544 - DNA, 25 bp, Homo sapien
taaagggtgagttgtgcgctttgcc

SEQ ID NO: 4613545 - DNA, 25 bp, Homo sapien
tttgccatatccagggcccggacaa

SEQ ID NO: 4613546 - DNA, 25 bp, Homo sapien
tcttgtctgtaaagagtctgcaaac

SEQ ID NO: 4613547 - DNA, 25 bp, Homo sapien
gcatcttgtctgtaaagagtctgca

SEQ ID NO: 4613548 - DNA, 25 bp, Homo sapien
catcttgtctgtaaagagtctgcaa

SEQ ID NO: 4613549 - DNA, 25 bp, Homo sapien
ggcatcttgtctgtaaagagtctgc

SEQ ID NO: 4613550 - DNA, 25 bp, Homo sapien
tattttcacttcaccaagataaaga

SEQ ID NO: 4613551 - DNA, 25 bp, Homo sapien
caaagacaggttagtaacataaaat

SEQ ID NO: 4613552 - DNA, 25 bp, Homo sapien
ttattttcacttcaccaagataaag

SEQ ID NO: 4613553 - DNA, 25 bp, Homo sapien
tgaaaactagtgaattaaaatcact

SEQ ID NO: 4613554 - DNA, 25 bp, Homo sapien
gagttgaggttcactttgtgccaaa

SEQ ID NO: 4613555 - DNA, 25 bp, Homo sapien
tgagaagtctctaacccacatcact

SEQ ID NO: 4613556 - DNA, 25 bp, Homo sapien
catcgctggaatgatgagatataca

SEQ ID NO: 4613557 - DNA, 25 bp, Homo sapien
tataccatgttggagggaatcatcg

SEQ ID NO: 4613558 - DNA, 25 bp, Homo sapien
caagttatccccagttattggtctc

SEQ ID NO: 4613559 - DNA, 25 bp, Homo sapien
taagaatcggtttgtggttcagcaa

SEQ ID NO: 4613560 - DNA, 25 bp, Homo sapien
tgggagccagagcatattcatgtgg

SEQ ID NO: 4613561 - DNA, 25 bp, Homo sapien
gtttgtagtcctcctttagaagcca

SEQ ID NO: 4613562 - DNA, 25 bp, Homo sapien
ctttcacactgagcacggaaggtgt

SEQ ID NO: 4613563 - DNA, 25 bp, Homo sapien
acaggccaatggactctttcacact

SEQ ID NO: 4613564 - DNA, 25 bp, Homo sapien
tagattctggtttggcaacaggcca

SEQ ID NO: 4613565 - DNA, 25 bp, Homo sapien
ttagggaaccctgccttagaatcta

SEQ ID NO: 4613566 - DNA, 25 bp, Homo sapien
gttacaaagtgttcccagggtatca

SEQ ID NO: 4613567 - DNA, 25 bp, Homo sapien
ggagtcacagaccactcgccattga

SEQ ID NO: 4613568 - DNA, 25 bp, Homo sapien
caagtcatccgtgcagatatcacag

SEQ ID NO: 4613569 - DNA, 25 bp, Homo sapien
cacagacatttttccccgttgcaaa

SEQ ID NO: 4613570 - DNA, 25 bp, Homo sapien
tattgaccaaactactcaagaaagg

SEQ ID NO: 4613571 - DNA, 25 bp, Homo sapien
ttcccctggagcaacttctagagta

SEQ ID NO: 4613572 - DNA, 25 bp, Homo sapien
tgtttaatgaatgcctggtacactg

SEQ ID NO: 4613573 - DNA, 25 bp, Homo sapien
tctctagtagaatgaagggcctttc

SEQ ID NO: 4613574 - DNA, 25 bp, Homo sapien
ttaggcgtactcttactgtgttcac

SEQ ID NO: 4613575 - DNA, 25 bp, Homo sapien
gctgggacaactgattaggcgtact

SEQ ID NO: 4613576 - DNA, 25 bp, Homo sapien
ctgattaggcgtactcttactgtgt

SEQ ID NO: 4613577 - DNA, 25 bp, Homo sapien
gacaactgattaggcgtactcttac

SEQ ID NO: 4613578 - DNA, 25 bp, Homo sapien
ggaaagtgatacatatgtcaaccaa

SEQ ID NO: 4613579 - DNA, 25 bp, Homo sapien
gataatatgataggagccttaaaga

SEQ ID NO: 4613580 - DNA, 25 bp, Homo sapien
caactttttcagcaattaatgtgag

SEQ ID NO: 4613581 - DNA, 25 bp, Homo sapien
gtgatactagggatagataatatga

SEQ ID NO: 4613582 - DNA, 25 bp, Homo sapien
gttcaggaagacgttgcaccattgg

SEQ ID NO: 4613583 - DNA, 25 bp, Homo sapien
gcaccattggtctggccacatttcc

SEQ ID NO: 4613584 - DNA, 25 bp, Homo sapien
aaaccaacttccaagcactgagcga

SEQ ID NO: 4613585 - DNA, 25 bp, Homo sapien
cactgagcgacatcctgtggttcag

SEQ ID NO: 4613586 - DNA, 25 bp, Homo sapien
tcaaagactgcatctgtgaaggtgt

SEQ ID NO: 4613587 - DNA, 25 bp, Homo sapien
cagcagggtcatactttcccgtggg

SEQ ID NO: 4613588 - DNA, 25 bp, Homo sapien
tgtgaagacttcgaacagcagggtc

SEQ ID NO: 4613589 - DNA, 25 bp, Homo sapien
tccattcaggaatagatgagccaaa

SEQ ID NO: 4613590 - DNA, 25 bp, Homo sapien
gaagtttcactacagcaggatgaga

SEQ ID NO: 4613591 - DNA, 25 bp, Homo sapien
ccaaagacaacgtattaataaacat

SEQ ID NO: 4613592 - DNA, 25 bp, Homo sapien
tcattattgagttctaaaggcatcc

SEQ ID NO: 4613593 - DNA, 25 bp, Homo sapien
gctttgaatacagtaccaatatacc

SEQ ID NO: 4613594 - DNA, 25 bp, Homo sapien
tattatgtccaataggggcattttc

SEQ ID NO: 4613595 - DNA, 25 bp, Homo sapien
tgtctattatgtccaataggggcat

SEQ ID NO: 4613596 - DNA, 25 bp, Homo sapien
ttatgtccaataggggcattttcca

SEQ ID NO: 4613597 - DNA, 25 bp, Homo sapien
tctattatgtccaataggggcattt

SEQ ID NO: 4613598 - DNA, 25 bp, Homo sapien
gtctggagcagtaacaaacatttct

SEQ ID NO: 4613599 - DNA, 25 bp, Homo sapien
ccaggttgtctggagcagtaacaaa

SEQ ID NO: 4613600 - DNA, 25 bp, Homo sapien
gaatttcataagtgtatcccaggtt

SEQ ID NO: 4613601 - DNA, 25 bp, Homo sapien
agtgtatcccaggttgtctggagca

SEQ ID NO: 4613602 - DNA, 25 bp, Homo sapien
gaaaacatagcttcagaataccgtg

SEQ ID NO: 4613603 - DNA, 25 bp, Homo sapien
gatagggtgctgtacaataagatca

SEQ ID NO: 4613604 - DNA, 25 bp, Homo sapien
tatcagcttagtgtggactctcaac

SEQ ID NO: 4613605 - DNA, 25 bp, Homo sapien
tgggcctaagctcaaactcattctc

SEQ ID NO: 4613606 - DNA, 25 bp, Homo sapien
ccatactgcgtctggcacgaatcag

SEQ ID NO: 4613607 - DNA, 25 bp, Homo sapien
tatctcaggtacactaaactcccga

SEQ ID NO: 4613608 - DNA, 25 bp, Homo sapien
cacgaatcagataagaagcagtccc

SEQ ID NO: 4613609 - DNA, 25 bp, Homo sapien
tgagtgcaaccagtaacaaagcgcc

SEQ ID NO: 4613610 - DNA, 25 bp, Homo sapien
caaccaggtggttttgtgatactaa

SEQ ID NO: 4613611 - DNA, 25 bp, Homo sapien
gccttgaacctgagactaaatagta

SEQ ID NO: 4613612 - DNA, 25 bp, Homo sapien
cctttttcagcgaattgagaggcag

SEQ ID NO: 4613613 - DNA, 25 bp, Homo sapien
tgaaagggtcttcccagctttgaaa

SEQ ID NO: 4613614 - DNA, 25 bp, Homo sapien
tatacagcttgattatgactctccc

SEQ ID NO: 4613615 - DNA, 25 bp, Homo sapien
gaattgcatataggacactctggtt

SEQ ID NO: 4613616 - DNA, 25 bp, Homo sapien
ggtaaatccattggcagtccttgaa

SEQ ID NO: 4613617 - DNA, 25 bp, Homo sapien
tcaacgttatttgtgaacagcacca

SEQ ID NO: 4613618 - DNA, 25 bp, Homo sapien
gattgctgaggacttactaactgcc

SEQ ID NO: 4613619 - DNA, 25 bp, Homo sapien
tataatgaacttcacctctagagga

SEQ ID NO: 4613620 - DNA, 25 bp, Homo sapien
ttacttccagcctatatgtattttt

SEQ ID NO: 4613621 - DNA, 25 bp, Homo sapien
attttgtctgataggatagcctccc

SEQ ID NO: 4613622 - DNA, 25 bp, Homo sapien
tagtacttttgctggatcttgtaag

SEQ ID NO: 4613623 - DNA, 25 bp, Homo sapien
gagatccttagatttcaacgtaggc

SEQ ID NO: 4613624 - DNA, 25 bp, Homo sapien
atatgtccctaaagtccaactggtg

SEQ ID NO: 4613625 - DNA, 25 bp, Homo sapien
tctgctgctgttgagtggtatgtaa

SEQ ID NO: 4613626 - DNA, 25 bp, Homo sapien
cacttgtcacggcagggactaggta

SEQ ID NO: 4613627 - DNA, 25 bp, Homo sapien
tccctttatcggttgcattgcacta

SEQ ID NO: 4613628 - DNA, 25 bp, Homo sapien
gccatcatgctttttaactaccgga

SEQ ID NO: 4613629 - DNA, 25 bp, Homo sapien
taggccaggtgtgattccaacttta

SEQ ID NO: 4613630 - DNA, 25 bp, Homo sapien
agtagcctcgttattctgatcttca

SEQ ID NO: 4613631 - DNA, 25 bp, Homo sapien
cactgcactagaaattggtgaaaca

SEQ ID NO: 4613632 - DNA, 25 bp, Homo sapien
tgattatgagacaaccacatcttct

SEQ ID NO: 4613633 - DNA, 25 bp, Homo sapien
tatctaggaacttatcaatctcatc

SEQ ID NO: 4613634 - DNA, 25 bp, Homo sapien
cattcccagaatattgctctctaga

SEQ ID NO: 4613635 - DNA, 25 bp, Homo sapien
tagaattctttaaggccataggaac

SEQ ID NO: 4613636 - DNA, 25 bp, Homo sapien
tcctttatttgcattgacgtcattc

SEQ ID NO: 4613637 - DNA, 25 bp, Homo sapien
ggaactattgacctacttttcttga

SEQ ID NO: 4613638 - DNA, 25 bp, Homo sapien
tcaaggctgataaagaatgatcaag

SEQ ID NO: 4613639 - DNA, 25 bp, Homo sapien
tgaggactcagcttttatcatagcc

SEQ ID NO: 4613640 - DNA, 25 bp, Homo sapien
tatcatagccttgctcaccaacata

SEQ ID NO: 4613641 - DNA, 25 bp, Homo sapien
tgttgtttacagcatactacatagt

SEQ ID NO: 4613642 - DNA, 25 bp, Homo sapien
ggtttgaaccgttctgcctctgagc

SEQ ID NO: 4613643 - DNA, 25 bp, Homo sapien
gatagtcctgtgctccccgtaggga

SEQ ID NO: 4613644 - DNA, 25 bp, Homo sapien
ccctattcatgctaacctagtgcag

SEQ ID NO: 4613645 - DNA, 25 bp, Homo sapien
tactgatcaacataggaggtttgaa

SEQ ID NO: 4613646 - DNA, 25 bp, Homo sapien
gatgaactggatttcggaaagtgag

SEQ ID NO: 4613647 - DNA, 25 bp, Homo sapien
cctctgatgaactggatttcggaaa

SEQ ID NO: 4613648 - DNA, 25 bp, Homo sapien
gatttcggaaagtgagaataaggca

SEQ ID NO: 4613649 - DNA, 25 bp, Homo sapien
actggatttcggaaagtgagaataa

SEQ ID NO: 4613650 - DNA, 25 bp, Homo sapien
gcttctccttatccttggttctata

SEQ ID NO: 4613651 - DNA, 25 bp, Homo sapien
tggaaggatgagtagaacttctttt

SEQ ID NO: 4613652 - DNA, 25 bp, Homo sapien
ttaggctcctagcttctccttatcc

SEQ ID NO: 4613653 - DNA, 25 bp, Homo sapien
tggttctataggcttggaaggatga

SEQ ID NO: 4613654 - DNA, 25 bp, Homo sapien
gagttcggtcgtgtgcatggaccca

SEQ ID NO: 4613655 - DNA, 25 bp, Homo sapien
ttcccatttaggctgtttgatccaa

SEQ ID NO: 4613656 - DNA, 25 bp, Homo sapien
taacggcttccttgatgcagcaaaa

SEQ ID NO: 4613657 - DNA, 25 bp, Homo sapien
tagttagcttagcaggagtttaacg

SEQ ID NO: 4613658 - DNA, 25 bp, Homo sapien
ggtactacgcgacacaaaataatga

SEQ ID NO: 4613659 - DNA, 25 bp, Homo sapien
tgcccatctggtactacgcgacaca

SEQ ID NO: 4613660 - DNA, 25 bp, Homo sapien
gccatatgcctccaagctttcggga

SEQ ID NO: 4613661 - DNA, 25 bp, Homo sapien
tatgcctccaagctttcgggatatc

SEQ ID NO: 4613662 - DNA, 25 bp, Homo sapien
ctgcaaagttgagttcactgatatt

SEQ ID NO: 4613663 - DNA, 25 bp, Homo sapien
ataaaaccgtccgttcacatccctg

SEQ ID NO: 4613664 - DNA, 25 bp, Homo sapien
ttcacattataaaaccgtccgttca

SEQ ID NO: 4613665 - DNA, 25 bp, Homo sapien
ctgatattgcagacagagggggaat

SEQ ID NO: 4613666 - DNA, 25 bp, Homo sapien
tccggaacggcgataatagtaataa

SEQ ID NO: 4613667 - DNA, 25 bp, Homo sapien
gcgactcctccgacactaagatgat

SEQ ID NO: 4613668 - DNA, 25 bp, Homo sapien
gcttcgaaggctgctgcgaaatcag

SEQ ID NO: 4613669 - DNA, 25 bp, Homo sapien
gcctatgcggtatcagccctgaaat

SEQ ID NO: 4613670 - DNA, 25 bp, Homo sapien
tagactctcgggtactttgcgcccc

SEQ ID NO: 4613671 - DNA, 25 bp, Homo sapien
actctcgggtactttgcgccccagc

SEQ ID NO: 4613672 - DNA, 25 bp, Homo sapien
agactctcgggtactttgcgcccca

SEQ ID NO: 4613673 - DNA, 25 bp, Homo sapien
tctcgggtactttgcgccccagctt

SEQ ID NO: 4613674 - DNA, 25 bp, Homo sapien
cgccaccaccaccgctccccccgca

SEQ ID NO: 4613675 - DNA, 25 bp, Homo sapien
ccaccaccaccgctccccccgcagg

SEQ ID NO: 4613676 - DNA, 25 bp, Homo sapien
gccaccaccaccgctccccccgcag

SEQ ID NO: 4613677 - DNA, 25 bp, Homo sapien
caccaccaccgctccccccgcaggg

SEQ ID NO: 4613678 - DNA, 25 bp, Homo sapien
cgaagaggaggacgacaaggaggga

SEQ ID NO: 4613679 - DNA, 25 bp, Homo sapien
acgaagaggaggacgacaaggaggg

SEQ ID NO: 4613680 - DNA, 25 bp, Homo sapien
aagaggaggacgacaaggagggagg

SEQ ID NO: 4613681 - DNA, 25 bp, Homo sapien
aggacgaagaggaggacgacaagga

SEQ ID NO: 4613682 - DNA, 25 bp, Homo sapien
ttctagcctctccagggcgctagag

SEQ ID NO: 4613683 - DNA, 25 bp, Homo sapien
gcctctccagggcgctagagtggct

SEQ ID NO: 4613684 - DNA, 25 bp, Homo sapien
ctagcctctccagggcgctagagtg

SEQ ID NO: 4613685 - DNA, 25 bp, Homo sapien
ctctccagggcgctagagtggctac

SEQ ID NO: 4613686 - DNA, 25 bp, Homo sapien
taactgcaaactctcaacgggctgg

SEQ ID NO: 4613687 - DNA, 25 bp, Homo sapien
gaagtgttaacagcgcacagcaggc

SEQ ID NO: 4613688 - DNA, 25 bp, Homo sapien
gtaagtgcattggactgagccacct

SEQ ID NO: 4613689 - DNA, 25 bp, Homo sapien
tgagccaccttttgaacctacccga

SEQ ID NO: 4613690 - DNA, 25 bp, Homo sapien
caaggacgagtaggccattgttttc

SEQ ID NO: 4613691 - DNA, 25 bp, Homo sapien
gaatctgctcgacagtggccttgga

SEQ ID NO: 4613692 - DNA, 25 bp, Homo sapien
tattcataagtacatcaaggacgag

SEQ ID NO: 4613693 - DNA, 25 bp, Homo sapien
cattgttttcagaaccagctgtgga

SEQ ID NO: 4613694 - DNA, 25 bp, Homo sapien
ttcaaaggacttagggagggatcat

SEQ ID NO: 4613695 - DNA, 25 bp, Homo sapien
ccagcattcctgtcggagtgataga

SEQ ID NO: 4613696 - DNA, 25 bp, Homo sapien
gagatggtccttagcagatccctgg

SEQ ID NO: 4613697 - DNA, 25 bp, Homo sapien
tgtcctatgctcaggcaaacgtttg

SEQ ID NO: 4613698 - DNA, 25 bp, Homo sapien
tgttagtctccacacgtatgtctga

SEQ ID NO: 4613699 - DNA, 25 bp, Homo sapien
tgatgtcttcgtccctcatattaag

SEQ ID NO: 4613700 - DNA, 25 bp, Homo sapien
tccattatgtacctaagggttgtcc

SEQ ID NO: 4613701 - DNA, 25 bp, Homo sapien
gtgatacggtatcaggcatcccctg

SEQ ID NO: 4613702 - DNA, 25 bp, Homo sapien
taaatgaacacaagatggtgtcagg

SEQ ID NO: 4613703 - DNA, 25 bp, Homo sapien
tggcaagtcaccacacagtgctgtg

SEQ ID NO: 4613704 - DNA, 25 bp, Homo sapien
tcatttgagaagaagaggataactg

SEQ ID NO: 4613705 - DNA, 25 bp, Homo sapien
gctgtgcaactgatatcatttgaga

SEQ ID NO: 4613706 - DNA, 25 bp, Homo sapien
gaactggacctggttctagccacga

SEQ ID NO: 4613707 - DNA, 25 bp, Homo sapien
ccatgggacctctgagattaaacaa

SEQ ID NO: 4613708 - DNA, 25 bp, Homo sapien
caagaatgcacagggcaagtctgag

SEQ ID NO: 4613709 - DNA, 25 bp, Homo sapien
caagagttttctataccatggaggt

SEQ ID NO: 4613710 - DNA, 25 bp, Homo sapien
gggattcaggcctagatttacttgg

SEQ ID NO: 4613711 - DNA, 25 bp, Homo sapien
agtcatacaactagaaagtgaaggg

SEQ ID NO: 4613712 - DNA, 25 bp, Homo sapien
ccaggtacaatgacaggtactttaa

SEQ ID NO: 4613713 - DNA, 25 bp, Homo sapien
aaggaatgaggtatattcctccagc

SEQ ID NO: 4613714 - DNA, 25 bp, Homo sapien
tatttgcaagcaagggtcactcgca

SEQ ID NO: 4613715 - DNA, 25 bp, Homo sapien
gcatatggcaacagatgggtcacca

SEQ ID NO: 4613716 - DNA, 25 bp, Homo sapien
catagtgttgtccatagccaggtag

SEQ ID NO: 4613717 - DNA, 25 bp, Homo sapien
taaacagagactgacctgcatgagc

SEQ ID NO: 4613718 - DNA, 25 bp, Homo sapien
ttatgtacatgacaaggcaatgcag

SEQ ID NO: 4613719 - DNA, 25 bp, Homo sapien
aaatagttctaggaatctaatgcac

SEQ ID NO: 4613720 - DNA, 25 bp, Homo sapien
cagttggacaccctataaaaagaca

SEQ ID NO: 4613721 - DNA, 25 bp, Homo sapien
tagcataaagcttcactagacagtg

SEQ ID NO: 4613722 - DNA, 25 bp, Homo sapien
ggccaggaagttccacatttgttta

SEQ ID NO: 4613723 - DNA, 25 bp, Homo sapien
gagaataaccattgagactgtgtgt

SEQ ID NO: 4613724 - DNA, 25 bp, Homo sapien
tatgtaatcaagagaaccctcatgt

SEQ ID NO: 4613725 - DNA, 25 bp, Homo sapien
ggtgtataaaacagccgattccaga

SEQ ID NO: 4613726 - DNA, 25 bp, Homo sapien
gaactgtgggctattagaaaaggta

SEQ ID NO: 4613727 - DNA, 25 bp, Homo sapien
gcttagtgccctcctcatgataatg

SEQ ID NO: 4613728 - DNA, 25 bp, Homo sapien
gatgcatcagggatggcttagtgcc

SEQ ID NO: 4613729 - DNA, 25 bp, Homo sapien
aatgagttatcattctacgttcatg

SEQ ID NO: 4613730 - DNA, 25 bp, Homo sapien
caggcctgctcgtgagatctgtaca

SEQ ID NO: 4613731 - DNA, 25 bp, Homo sapien
cataagcataaattccggccaccag

SEQ ID NO: 4613732 - DNA, 25 bp, Homo sapien
catgtgactcctgtgaatcataagc

SEQ ID NO: 4613733 - DNA, 25 bp, Homo sapien
taggtccaattgatacttagatgcc

SEQ ID NO: 4613734 - DNA, 25 bp, Homo sapien
aatagagtagccttgcccttgcagc

SEQ ID NO: 4613735 - DNA, 25 bp, Homo sapien
tatgctaccgatgacccttgaaagt

SEQ ID NO: 4613736 - DNA, 25 bp, Homo sapien
tcagttcacacgctggcaggtccat

SEQ ID NO: 4613737 - DNA, 25 bp, Homo sapien
gagtaaacagcttcccaccgtggga

SEQ ID NO: 4613738 - DNA, 25 bp, Homo sapien
caatttaggacgcttgtgtagtgcc

SEQ ID NO: 4613739 - DNA, 25 bp, Homo sapien
gactctccaacaaactgcacaggct

SEQ ID NO: 4613740 - DNA, 25 bp, Homo sapien
ccaaagcagtagtattcagaatcca

SEQ ID NO: 4613741 - DNA, 25 bp, Homo sapien
gattacaagcaactggcgcatgagc

SEQ ID NO: 4613742 - DNA, 25 bp, Homo sapien
tgtaatccctgacccattgctctga

SEQ ID NO: 4613743 - DNA, 25 bp, Homo sapien
aagttcattgcacaccagtcccatg

SEQ ID NO: 4613744 - DNA, 25 bp, Homo sapien
gatgagaagtattaggagcaacagc

SEQ ID NO: 4613745 - DNA, 25 bp, Homo sapien
caccaaaaatatagcagcggagaag

SEQ ID NO: 4613746 - DNA, 25 bp, Homo sapien
tcatgtgggcgtgtgtgactaacag

SEQ ID NO: 4613747 - DNA, 25 bp, Homo sapien
taagtcatttaaggacgcaagcagc

SEQ ID NO: 4613748 - DNA, 25 bp, Homo sapien
atccatcggcttgtatgcatctaag

SEQ ID NO: 4613749 - DNA, 25 bp, Homo sapien
tctaaagtaccaacacaagggtgag

SEQ ID NO: 4613750 - DNA, 25 bp, Homo sapien
gcatcgtgtgatcattctgaagacc

SEQ ID NO: 4613751 - DNA, 25 bp, Homo sapien
tatgcaccttcgtaggtttccagaa

SEQ ID NO: 4613752 - DNA, 25 bp, Homo sapien
gcaaaactttgtcctatggccatgg

SEQ ID NO: 4613753 - DNA, 25 bp, Homo sapien
gctccaagtgaaatttgagagggca

SEQ ID NO: 4613754 - DNA, 25 bp, Homo sapien
tttgcttgtttgtgcaactatgaaa

SEQ ID NO: 4613755 - DNA, 25 bp, Homo sapien
tgcttgtttgtgcaactatgaaaat

SEQ ID NO: 4613756 - DNA, 25 bp, Homo sapien
gcttgtttgtgcaactatgaaaatt

SEQ ID NO: 4613757 - DNA, 25 bp, Homo sapien
cttgtttgtgcaactatgaaaattt

SEQ ID NO: 4613758 - DNA, 25 bp, Homo sapien
acatattgtaattccctcaacagag

SEQ ID NO: 4613759 - DNA, 25 bp, Homo sapien
ctgctctcatgatcgaataattttc

SEQ ID NO: 4613760 - DNA, 25 bp, Homo sapien
caacagagatgtagctagaaagcca

SEQ ID NO: 4613761 - DNA, 25 bp, Homo sapien
ggtgctattaccatttatcaggact

SEQ ID NO: 4613762 - DNA, 25 bp, Homo sapien
ttgagatagggtctggttccatcac

SEQ ID NO: 4613763 - DNA, 25 bp, Homo sapien
agatagggtctggttccatcaccca

SEQ ID NO: 4613764 - DNA, 25 bp, Homo sapien
ggctggacgggagtagcacaatctc

SEQ ID NO: 4613765 - DNA, 25 bp, Homo sapien
gctggacgggagtagcacaatctcg

SEQ ID NO: 4613766 - DNA, 25 bp, Homo sapien
tgactggtgtagtttgttatttcag

SEQ ID NO: 4613767 - DNA, 25 bp, Homo sapien
actggtgtagtttgttatttcagta

SEQ ID NO: 4613768 - DNA, 25 bp, Homo sapien
ctgtgactggtgtagtttgttattt

SEQ ID NO: 4613769 - DNA, 25 bp, Homo sapien
tttcagtagcagttccctgatattc

SEQ ID NO: 4613770 - DNA, 25 bp, Homo sapien
ctcctgtgacagcccacaggccctc

SEQ ID NO: 4613771 - DNA, 25 bp, Homo sapien
cctgtgacagcccacaggccctctt

SEQ ID NO: 4613772 - DNA, 25 bp, Homo sapien
tgtgacagcccacaggccctctttc

SEQ ID NO: 4613773 - DNA, 25 bp, Homo sapien
tgacagcccacaggccctctttcat

SEQ ID NO: 4613774 - DNA, 25 bp, Homo sapien
taagggcttaccaatatggcttcta

SEQ ID NO: 4613775 - DNA, 25 bp, Homo sapien
gaataactgattatgacaaagcgct

SEQ ID NO: 4613776 - DNA, 25 bp, Homo sapien
aaatgtcttagctgtgaataactga

SEQ ID NO: 4613777 - DNA, 25 bp, Homo sapien
gcttgctttgcagctaacacttgaa

SEQ ID NO: 4613778 - DNA, 25 bp, Homo sapien
tgtttgcaggtagattctagtgcac

SEQ ID NO: 4613779 - DNA, 25 bp, Homo sapien
tctagtgcacaatcctcacagaggt

SEQ ID NO: 4613780 - DNA, 25 bp, Homo sapien
tcctaaaaagtgtgaggtgatgtct

SEQ ID NO: 4613781 - DNA, 25 bp, Homo sapien
tgccaagaccaatgtaatgaaggtt

SEQ ID NO: 4613782 - DNA, 25 bp, Homo sapien
tcttttgctttgtaatacatgcagt

SEQ ID NO: 4613783 - DNA, 25 bp, Homo sapien
ttacacagttacatctttatccaag

SEQ ID NO: 4613784 - DNA, 25 bp, Homo sapien
gggcaaggaatctcaaatctctcaa

SEQ ID NO: 4613785 - DNA, 25 bp, Homo sapien
gcagtttatgtctttaaatcacctt

SEQ ID NO: 4613786 - DNA, 25 bp, Homo sapien
ggacttgtctcagggtggtactgct

SEQ ID NO: 4613787 - DNA, 25 bp, Homo sapien
tcaggacttgtctcagggtggtact

SEQ ID NO: 4613788 - DNA, 25 bp, Homo sapien
cttgtctcagggtggtactgctcct

SEQ ID NO: 4613789 - DNA, 25 bp, Homo sapien
acttgtctcagggtggtactgctcc

SEQ ID NO: 4613790 - DNA, 25 bp, Homo sapien
caataggtgttagaataatgcagtc

SEQ ID NO: 4613791 - DNA, 25 bp, Homo sapien
ggctatttaatatactgcagagaat

SEQ ID NO: 4613792 - DNA, 25 bp, Homo sapien
gacacaacttctgaggtgattgaac

SEQ ID NO: 4613793 - DNA, 25 bp, Homo sapien
tattctgaccctgatacaataggtg

SEQ ID NO: 4613794 - DNA, 25 bp, Homo sapien
gacattgaggagttcacaattccag

SEQ ID NO: 4613795 - DNA, 25 bp, Homo sapien
aaaaggtggaaagaggagtacagca

SEQ ID NO: 4613796 - DNA, 25 bp, Homo sapien
tgtccacctgttcccatccaaaagg

SEQ ID NO: 4613797 - DNA, 25 bp, Homo sapien
tgctctagagttcccttagtcactg

SEQ ID NO: 4613798 - DNA, 25 bp, Homo sapien
tttatcagtgatggggttgtatact

SEQ ID NO: 4613799 - DNA, 25 bp, Homo sapien
agtgatggggttgtatactgacttc

SEQ ID NO: 4613800 - DNA, 25 bp, Homo sapien
tggggttgtatactgacttcagcga

SEQ ID NO: 4613801 - DNA, 25 bp, Homo sapien
gatggggttgtatactgacttcagc

SEQ ID NO: 4613802 - DNA, 25 bp, Homo sapien
ccagtgaggtggatatgcacaggaa

SEQ ID NO: 4613803 - DNA, 25 bp, Homo sapien
aatgaagaaaaggtctacgagtggg

SEQ ID NO: 4613804 - DNA, 25 bp, Homo sapien
aggaagatgtcctggtgtatgaagc

SEQ ID NO: 4613805 - DNA, 25 bp, Homo sapien
agatgtcctggtgtatgaagcctga

SEQ ID NO: 4613806 - DNA, 25 bp, Homo sapien
taagttgacctacatattggacgtc

SEQ ID NO: 4613807 - DNA, 25 bp, Homo sapien
cagaatcctgctgaatgcgagaaca

SEQ ID NO: 4613808 - DNA, 25 bp, Homo sapien
aagataccaagccagcagaatcctg

SEQ ID NO: 4613809 - DNA, 25 bp, Homo sapien
ttgaaagccctgtgtttgccaatgc

SEQ ID NO: 4613810 - DNA, 25 bp, Homo sapien
ggccacctcggctgcttttcaattc

SEQ ID NO: 4613811 - DNA, 25 bp, Homo sapien
tctggccacctcggctgcttttcaa

SEQ ID NO: 4613812 - DNA, 25 bp, Homo sapien
ccacctcggctgcttttcaattctg

SEQ ID NO: 4613813 - DNA, 25 bp, Homo sapien
ctgaaaatactatctataatataac

SEQ ID NO: 4613814 - DNA, 25 bp, Homo sapien
attaagttcagggaatgtgatatca

SEQ ID NO: 4613815 - DNA, 25 bp, Homo sapien
ccttctaggccctgtattaagttca

SEQ ID NO: 4613816 - DNA, 25 bp, Homo sapien
gttcagggaatgtgatatcactttc

SEQ ID NO: 4613817 - DNA, 25 bp, Homo sapien
cttctaggccctgtattaagttcag

SEQ ID NO: 4613818 - DNA, 25 bp, Homo sapien
ttggagccatgtaggcaagggtttt

SEQ ID NO: 4613819 - DNA, 25 bp, Homo sapien
ggattgtaggtgtcaagagtatgct

SEQ ID NO: 4613820 - DNA, 25 bp, Homo sapien
gcacatctcgttggccctgaggatg

SEQ ID NO: 4613821 - DNA, 25 bp, Homo sapien
caagagtatgctttggaagggtaat

SEQ ID NO: 4613822 - DNA, 25 bp, Homo sapien
ctgctactgctctagctgatgacat

SEQ ID NO: 4613823 - DNA, 25 bp, Homo sapien
cccatgaccattctccttagcccac

SEQ ID NO: 4613824 - DNA, 25 bp, Homo sapien
gatctgttatttcccccttccgctg

SEQ ID NO: 4613825 - DNA, 25 bp, Homo sapien
gttatttcccccttccgctgtgaga

SEQ ID NO: 4613826 - DNA, 25 bp, Homo sapien
ctttttgcttagatctgttatttcc

SEQ ID NO: 4613827 - DNA, 25 bp, Homo sapien
ttaaaaactcagaccgtgcaaaatg

SEQ ID NO: 4613828 - DNA, 25 bp, Homo sapien
aaaactcagaccgtgcaaaatgcat

SEQ ID NO: 4613829 - DNA, 25 bp, Homo sapien
aaaaactcagaccgtgcaaaatgca

SEQ ID NO: 4613830 - DNA, 25 bp, Homo sapien
gcaggtacaaagcttcacataggaa

SEQ ID NO: 4613831 - DNA, 25 bp, Homo sapien
aaggcatctggattgcaggtacaaa

SEQ ID NO: 4613832 - DNA, 25 bp, Homo sapien
tacaaagcttcacataggaaagcat

SEQ ID NO: 4613833 - DNA, 25 bp, Homo sapien
tctggattgcaggtacaaagcttca

SEQ ID NO: 4613834 - DNA, 25 bp, Homo sapien
caggggctgcagttttgaccactac

SEQ ID NO: 4613835 - DNA, 25 bp, Homo sapien
gacggtagtgccatctccattgcct

SEQ ID NO: 4613836 - DNA, 25 bp, Homo sapien
tgtggacggtagtgccatctccatt

SEQ ID NO: 4613837 - DNA, 25 bp, Homo sapien
acttgtggacggtagtgccatctcc

SEQ ID NO: 4613838 - DNA, 25 bp, Homo sapien
gtcattgctacatttgggcaacccc

SEQ ID NO: 4613839 - DNA, 25 bp, Homo sapien
cctctttcaacccagtccctctatc

SEQ ID NO: 4613840 - DNA, 25 bp, Homo sapien
tatcctccccctaagaagtacacag

SEQ ID NO: 4613841 - DNA, 25 bp, Homo sapien
cttaaattttaggagtcattgctac

SEQ ID NO: 4613842 - DNA, 25 bp, Homo sapien
tctgtcataagtcctactgccttac

SEQ ID NO: 4613843 - DNA, 25 bp, Homo sapien
agtcctactgccttactgggacttc

SEQ ID NO: 4613844 - DNA, 25 bp, Homo sapien
cataagtcctactgccttactggga

SEQ ID NO: 4613845 - DNA, 25 bp, Homo sapien
tcctactgccttactgggacttcca

SEQ ID NO: 4613846 - DNA, 25 bp, Homo sapien
cgcgcccggctgatgatgtttaatt

SEQ ID NO: 4613847 - DNA, 25 bp, Homo sapien
ttttcagctgcagtcaaacctggga

SEQ ID NO: 4613848 - DNA, 25 bp, Homo sapien
aatgatagccctgaacttgctggca

SEQ ID NO: 4613849 - DNA, 25 bp, Homo sapien
gcttcaagggacaatcaggtggctc

SEQ ID NO: 4613850 - DNA, 25 bp, Homo sapien
tgcttgactcgtaggcagctctgaa

SEQ ID NO: 4613851 - DNA, 25 bp, Homo sapien
tctgaactgcctttattgctcccac

SEQ ID NO: 4613852 - DNA, 25 bp, Homo sapien
aacattgccactctactgccagtgt

SEQ ID NO: 4613853 - DNA, 25 bp, Homo sapien
ccgtgatgggacctgaaaagtctgt

SEQ ID NO: 4613854 - DNA, 25 bp, Homo sapien
ccttgagtgaattcttaatttcatc

SEQ ID NO: 4613855 - DNA, 25 bp, Homo sapien
cctttgacccttgagtgaattctta

SEQ ID NO: 4613856 - DNA, 25 bp, Homo sapien
gagtgaattcttaatttcatctctc

SEQ ID NO: 4613857 - DNA, 25 bp, Homo sapien
tgagtgaattcttaatttcatctct

SEQ ID NO: 4613858 - DNA, 25 bp, Homo sapien
gatttgcgtctcttagtggcttttc

SEQ ID NO: 4613859 - DNA, 25 bp, Homo sapien
ctgcatctgttccttgatgttcatc

SEQ ID NO: 4613860 - DNA, 25 bp, Homo sapien
tgttcatctgatttgcgtctcttag

SEQ ID NO: 4613861 - DNA, 25 bp, Homo sapien
catctgatttgcgtctcttagtggc

SEQ ID NO: 4613862 - DNA, 25 bp, Homo sapien
gcatcataaatagcagtttcatcgc

SEQ ID NO: 4613863 - DNA, 25 bp, Homo sapien
gtttcatcgccttagaaatatccca

SEQ ID NO: 4613864 - DNA, 25 bp, Homo sapien
gacaaacgtataatgcatttaccca

SEQ ID NO: 4613865 - DNA, 25 bp, Homo sapien
cacccggccgcattaatattgttca

SEQ ID NO: 4613866 - DNA, 25 bp, Homo sapien
aatcaaacaaagagtcacctctttc

SEQ ID NO: 4613867 - DNA, 25 bp, Homo sapien
tcaaacaaagagtcacctctttcat

SEQ ID NO: 4613868 - DNA, 25 bp, Homo sapien
tgaatcaaacaaagagtcacctctt

SEQ ID NO: 4613869 - DNA, 25 bp, Homo sapien
cttgaatcaaacaaagagtcacctc

SEQ ID NO: 4613870 - DNA, 25 bp, Homo sapien
tcccactggactagtgacctgtaag

SEQ ID NO: 4613871 - DNA, 25 bp, Homo sapien
tgcctgtggataacctgccatccca

SEQ ID NO: 4613872 - DNA, 25 bp, Homo sapien
gttgaaccatagtgccctgactctg

SEQ ID NO: 4613873 - DNA, 25 bp, Homo sapien
gactgagtgccaaattgtcctcgaa

SEQ ID NO: 4613874 - DNA, 25 bp, Homo sapien
ggtaccctctagtgagctttctgtg

SEQ ID NO: 4613875 - DNA, 25 bp, Homo sapien
tactagttactcaacccagcattcg

SEQ ID NO: 4613876 - DNA, 25 bp, Homo sapien
gagatagaatcgtagaggtaccctc

SEQ ID NO: 4613877 - DNA, 25 bp, Homo sapien
cctttgtaccgagggaattgtcatc

SEQ ID NO: 4613878 - DNA, 25 bp, Homo sapien
tgtctcaaaaagttgccctgaaggt

SEQ ID NO: 4613879 - DNA, 25 bp, Homo sapien
tgatttactcacatcgcccatggct

SEQ ID NO: 4613880 - DNA, 25 bp, Homo sapien
gaatcagacttgacactagctgtgg

SEQ ID NO: 4613881 - DNA, 25 bp, Homo sapien
gtaagtcatgatgcttgtctcaaaa

SEQ ID NO: 4613882 - DNA, 25 bp, Homo sapien
tcaaggtctggtagggttctgcttc

SEQ ID NO: 4613883 - DNA, 25 bp, Homo sapien
catgatagcatagtccttggaggag

SEQ ID NO: 4613884 - DNA, 25 bp, Homo sapien
ttttcatgtcagcacttagattggc

SEQ ID NO: 4613885 - DNA, 25 bp, Homo sapien
tcccttgaattagggagcccagccc

SEQ ID NO: 4613886 - DNA, 25 bp, Homo sapien
aaaggctgggctattcttgcctgca

SEQ ID NO: 4613887 - DNA, 25 bp, Homo sapien
catggaaatcaagcggagactgcgg

SEQ ID NO: 4613888 - DNA, 25 bp, Homo sapien
aagaccccggcaatgggcactgact

SEQ ID NO: 4613889 - DNA, 25 bp, Homo sapien
tgtctgcgatttggcagccccagga

SEQ ID NO: 4613890 - DNA, 25 bp, Homo sapien
tctgtagtaacatctcccagcatgg

SEQ ID NO: 4613891 - DNA, 25 bp, Homo sapien
aaccataaagtcagtcagccagtag

SEQ ID NO: 4613892 - DNA, 25 bp, Homo sapien
ttgagtagataacccgggcctttca

SEQ ID NO: 4613893 - DNA, 25 bp, Homo sapien
gagttctaaccctgcagttctgtag

SEQ ID NO: 4613894 - DNA, 25 bp, Homo sapien
tacccttgcccacattcccaaacat

SEQ ID NO: 4613895 - DNA, 25 bp, Homo sapien
tgcccacattcccaaacatcaataa

SEQ ID NO: 4613896 - DNA, 25 bp, Homo sapien
ccagtgtgtctcagataaatccccc

SEQ ID NO: 4613897 - DNA, 25 bp, Homo sapien
tcaataacacaagttctacaaatgt

SEQ ID NO: 4613898 - DNA, 25 bp, Homo sapien
atgaaatgataggaagatggacaca

SEQ ID NO: 4613899 - DNA, 25 bp, Homo sapien
tcaacctccttttccaacatcgact

SEQ ID NO: 4613900 - DNA, 25 bp, Homo sapien
ttttccaacatcgactatttctcca

SEQ ID NO: 4613901 - DNA, 25 bp, Homo sapien
ccagtttctatagtgatgaaatgat

SEQ ID NO: 4613902 - DNA, 25 bp, Homo sapien
attttctgctgtttctctattctgc

SEQ ID NO: 4613903 - DNA, 25 bp, Homo sapien
tctgctgtttctctattctgctttc

SEQ ID NO: 4613904 - DNA, 25 bp, Homo sapien
tttctgctgtttctctattctgctt

SEQ ID NO: 4613905 - DNA, 25 bp, Homo sapien
tattttctgctgtttctctattctg

SEQ ID NO: 4613906 - DNA, 25 bp, Homo sapien
gctaagatcatagtccttctgagta

SEQ ID NO: 4613907 - DNA, 25 bp, Homo sapien
cagagggagtcaggaagttcaaagc

SEQ ID NO: 4613908 - DNA, 25 bp, Homo sapien
gaaggaaggcactacccttgctcag

SEQ ID NO: 4613909 - DNA, 25 bp, Homo sapien
cttctgagtagtgatgcccaaacca

SEQ ID NO: 4613910 - DNA, 25 bp, Homo sapien
caacgatgagaatcgagaggatgca

SEQ ID NO: 4613911 - DNA, 25 bp, Homo sapien
acgccggataacaaagtgttctccg

SEQ ID NO: 4613912 - DNA, 25 bp, Homo sapien
tgataatcacgcagggagaaacgcc

SEQ ID NO: 4613913 - DNA, 25 bp, Homo sapien
tccgcgacagtgcaacgatgagaat

SEQ ID NO: 4613914 - DNA, 25 bp, Homo sapien
cagactgagtccgacgaaggagctg

SEQ ID NO: 4613915 - DNA, 25 bp, Homo sapien
agctgggcgttgagaagatccagac

SEQ ID NO: 4613916 - DNA, 25 bp, Homo sapien
ggtctcgccgagctccttgggcagc

SEQ ID NO: 4613917 - DNA, 25 bp, Homo sapien
gaccggacagatgggcggtctcgcc

SEQ ID NO: 4613918 - DNA, 25 bp, Homo sapien
gacgacattggaacttgcaactgaa

SEQ ID NO: 4613919 - DNA, 25 bp, Homo sapien
taaaagacagcagcgtagaagacga

SEQ ID NO: 4613920 - DNA, 25 bp, Homo sapien
gaggtgtccacacggaaagttctct

SEQ ID NO: 4613921 - DNA, 25 bp, Homo sapien
tgcaactgaaatggcagcagacatg

SEQ ID NO: 4613922 - DNA, 25 bp, Homo sapien
tatactccctgttcataatgtggtc

SEQ ID NO: 4613923 - DNA, 25 bp, Homo sapien
gtcttttctcagcatacttgctcat

SEQ ID NO: 4613924 - DNA, 25 bp, Homo sapien
cctcctggatatgttctgtatactc

SEQ ID NO: 4613925 - DNA, 25 bp, Homo sapien
gttcataatgtggtcttttctcagc

SEQ ID NO: 4613926 - DNA, 25 bp, Homo sapien
ccaagattggttgtctttaagcaga

SEQ ID NO: 4613927 - DNA, 25 bp, Homo sapien
tacccttcaggagtacactgtatga

SEQ ID NO: 4613928 - DNA, 25 bp, Homo sapien
gaattcagaccctaggcaacacagc

SEQ ID NO: 4613929 - DNA, 25 bp, Homo sapien
taatctgcaccaagatacatggcta

SEQ ID NO: 4613930 - DNA, 25 bp, Homo sapien
cccatgaaccagcacaaatcccaga

SEQ ID NO: 4613931 - DNA, 25 bp, Homo sapien
ccatgaaccagcacaaatcccagag

SEQ ID NO: 4613932 - DNA, 25 bp, Homo sapien
catgaaccagcacaaatcccagagc

SEQ ID NO: 4613933 - DNA, 25 bp, Homo sapien
ccccatgaaccagcacaaatcccag

SEQ ID NO: 4613934 - DNA, 25 bp, Homo sapien
ttcctcattgccttcctcgaatatt

SEQ ID NO: 4613935 - DNA, 25 bp, Homo sapien
cttaaattggatcccttttcctcat

SEQ ID NO: 4613936 - DNA, 25 bp, Homo sapien
cattgccttcctcgaatatttgctc

SEQ ID NO: 4613937 - DNA, 25 bp, Homo sapien
cttcctcgaatatttgctcatctct

SEQ ID NO: 4613938 - DNA, 25 bp, Homo sapien
caaagcagagccaatgcaagacctc

SEQ ID NO: 4613939 - DNA, 25 bp, Homo sapien
aaagcagagccaatgcaagacctct

SEQ ID NO: 4613940 - DNA, 25 bp, Homo sapien
gctctgggtctgaggatggccagga

SEQ ID NO: 4613941 - DNA, 25 bp, Homo sapien
aagcagagccaatgcaagacctctg

SEQ ID NO: 4613942 - DNA, 25 bp, Homo sapien
aatgcgtagactgcaatggtcatgt

SEQ ID NO: 4613943 - DNA, 25 bp, Homo sapien
ctcaatgcgtagactgcaatggtca

SEQ ID NO: 4613944 - DNA, 25 bp, Homo sapien
tcaatgcgtagactgcaatggtcat

SEQ ID NO: 4613945 - DNA, 25 bp, Homo sapien
caatgcgtagactgcaatggtcatg

SEQ ID NO: 4613946 - DNA, 25 bp, Homo sapien
tgagtgatactgtcagctctgttaa

SEQ ID NO: 4613947 - DNA, 25 bp, Homo sapien
gtgatactgtcagctctgttaatca

SEQ ID NO: 4613948 - DNA, 25 bp, Homo sapien
tgaatctgagtgatactgtcagctc

SEQ ID NO: 4613949 - DNA, 25 bp, Homo sapien
caacaaattgaatctgagtgatact

SEQ ID NO: 4613950 - DNA, 25 bp, Homo sapien
ggttctcctgactgccatacttcaa

SEQ ID NO: 4613951 - DNA, 25 bp, Homo sapien
gaaaggttctcctgactgccatact

SEQ ID NO: 4613952 - DNA, 25 bp, Homo sapien
gccatacttcaaaaattggagcaag

SEQ ID NO: 4613953 - DNA, 25 bp, Homo sapien
ttcacttttgaaaggttctcctgac

SEQ ID NO: 4613954 - DNA, 25 bp, Homo sapien
cacacacacaaacaactcccaggcc

SEQ ID NO: 4613955 - DNA, 25 bp, Homo sapien
cacacacaaacaactcccaggccgt

SEQ ID NO: 4613956 - DNA, 25 bp, Homo sapien
acacacaaacaactcccaggccgtg

SEQ ID NO: 4613957 - DNA, 25 bp, Homo sapien
acacaaacaactcccaggccgtgca

SEQ ID NO: 4613958 - DNA, 25 bp, Homo sapien
cagccgtgtgctctcgagttactgg

SEQ ID NO: 4613959 - DNA, 25 bp, Homo sapien
tttgcccaccgtctgcgatggcaga

SEQ ID NO: 4613960 - DNA, 25 bp, Homo sapien
tctcgagttactggagcagcgcaag

SEQ ID NO: 4613961 - DNA, 25 bp, Homo sapien
tgtgtggtaggcttccccctaacag

SEQ ID NO: 4613962 - DNA, 25 bp, Homo sapien
ttgctgcaggcacagtgctctgtgc

SEQ ID NO: 4613963 - DNA, 25 bp, Homo sapien
gctgcaggcacagtgctctgtgcca

SEQ ID NO: 4613964 - DNA, 25 bp, Homo sapien
tgcaggcacagtgctctgtgccatc

SEQ ID NO: 4613965 - DNA, 25 bp, Homo sapien
tttgctgcaggcacagtgctctgtg

SEQ ID NO: 4613966 - DNA, 25 bp, Homo sapien
aaggtagggagactgcgaggagata

SEQ ID NO: 4613967 - DNA, 25 bp, Homo sapien
aaaggtagggagactgcgaggagat

SEQ ID NO: 4613968 - DNA, 25 bp, Homo sapien
cactccagcatgtaattggcagatc

SEQ ID NO: 4613969 - DNA, 25 bp, Homo sapien
ttctttcagcacaatcaacgtgcct

SEQ ID NO: 4613970 - DNA, 25 bp, Homo sapien
tcaacgtgccttttccctgattttc

SEQ ID NO: 4613971 - DNA, 25 bp, Homo sapien
cagattgtgggaggtttatggatac

SEQ ID NO: 4613972 - DNA, 25 bp, Homo sapien
gttgacccaggatctagaagtcctg

SEQ ID NO: 4613973 - DNA, 25 bp, Homo sapien
ttgacccaggatctagaagtcctgg

SEQ ID NO: 4613974 - DNA, 25 bp, Homo sapien
cagttgacccaggatctagaagtcc

SEQ ID NO: 4613975 - DNA, 25 bp, Homo sapien
gacccaggatctagaagtcctggat

SEQ ID NO: 4613976 - DNA, 25 bp, Homo sapien
ttttctacgtcctctggttgctctt

SEQ ID NO: 4613977 - DNA, 25 bp, Homo sapien
tctggttgctcttcgggtgacaaga

SEQ ID NO: 4613978 - DNA, 25 bp, Homo sapien
ctctggttgctcttcgggtgacaag

SEQ ID NO: 4613979 - DNA, 25 bp, Homo sapien
tcatctgagatcaggtccattttct

SEQ ID NO: 4613980 - DNA, 25 bp, Homo sapien
cttctataacaacgaaggagctggc

SEQ ID NO: 4613981 - DNA, 25 bp, Homo sapien
tctataacaacgaaggagctggcgc

SEQ ID NO: 4613982 - DNA, 25 bp, Homo sapien
ctataacaacgaaggagctggcgca

SEQ ID NO: 4613983 - DNA, 25 bp, Homo sapien
aacttctataacaacgaaggagctg

SEQ ID NO: 4613984 - DNA, 25 bp, Homo sapien
ctaaggttctctaagctgtgatcca

SEQ ID NO: 4613985 - DNA, 25 bp, Homo sapien
taaggttctctaagctgtgatccat

SEQ ID NO: 4613986 - DNA, 25 bp, Homo sapien
tctaaggttctctaagctgtgatcc

SEQ ID NO: 4613987 - DNA, 25 bp, Homo sapien
tctctaaggttctctaagctgtgat

SEQ ID NO: 4613988 - DNA, 25 bp, Homo sapien
caaatatcaagtgcctatttctagc

SEQ ID NO: 4613989 - DNA, 25 bp, Homo sapien
tgttggttcccatgatgacaaatat

SEQ ID NO: 4613990 - DNA, 25 bp, Homo sapien
cccatgatgacaaatatcaagtgcc

SEQ ID NO: 4613991 - DNA, 25 bp, Homo sapien
aatatcaagtgcctatttctagcac

SEQ ID NO: 4613992 - DNA, 25 bp, Homo sapien
cacagaaaggtctcccggtgggaag

SEQ ID NO: 4613993 - DNA, 25 bp, Homo sapien
tcccaataagaaacgaggctgctca

SEQ ID NO: 4613994 - DNA, 25 bp, Homo sapien
gcaggaaataactagccagcacaga

SEQ ID NO: 4613995 - DNA, 25 bp, Homo sapien
tgtctgctgcacacagtgtaatcgt

SEQ ID NO: 4613996 - DNA, 25 bp, Homo sapien
ggtgtgggtgagtctcctctaacag

SEQ ID NO: 4613997 - DNA, 25 bp, Homo sapien
cttcttctctacctcagtgtggcca

SEQ ID NO: 4613998 - DNA, 25 bp, Homo sapien
atctggtccagagggcctcatagcc

SEQ ID NO: 4613999 - DNA, 25 bp, Homo sapien
tgtggccaggactctttggtgtggg

SEQ ID NO: 4614000 - DNA, 25 bp, Homo sapien
gggaaatcgacccacattgcaaata

SEQ ID NO: 4614001 - DNA, 25 bp, Homo sapien
cccaatgtgggaaatcgacccacat

SEQ ID NO: 4614002 - DNA, 25 bp, Homo sapien
aaatgcagggcactaccttgaccca

SEQ ID NO: 4614003 - DNA, 25 bp, Homo sapien
cttgacccaccaggtgagtcaccat

SEQ ID NO: 4614004 - DNA, 25 bp, Homo sapien
aacttctttggttagaggtcttgct

SEQ ID NO: 4614005 - DNA, 25 bp, Homo sapien
tataagtgggcacctcttagtatcc

SEQ ID NO: 4614006 - DNA, 25 bp, Homo sapien
ctataagtgggcacctcttagtatc

SEQ ID NO: 4614007 - DNA, 25 bp, Homo sapien
gaacttctttggttagaggtcttgc

SEQ ID NO: 4614008 - DNA, 25 bp, Homo sapien
actacgcttcacgtgtttctggtca

SEQ ID NO: 4614009 - DNA, 25 bp, Homo sapien
tttctggtcattctggctcatagcc

SEQ ID NO: 4614010 - DNA, 25 bp, Homo sapien
gctcactacgttcttcaggcctgaa

SEQ ID NO: 4614011 - DNA, 25 bp, Homo sapien
gctttctgactggtttgggttcttc

SEQ ID NO: 4614012 - DNA, 25 bp, Homo sapien
ctcgaagactattccctgatgtcat

SEQ ID NO: 4614013 - DNA, 25 bp, Homo sapien
gagccctttttgtagtagcaagttc

SEQ ID NO: 4614014 - DNA, 25 bp, Homo sapien
agtagcaagttcttcactcgaagac

SEQ ID NO: 4614015 - DNA, 25 bp, Homo sapien
atgaaggccagattggagccctttt

SEQ ID NO: 4614016 - DNA, 25 bp, Homo sapien
gctttatgagtcaacattggtggag

SEQ ID NO: 4614017 - DNA, 25 bp, Homo sapien
gaagatgctccagagtagtggaaca

SEQ ID NO: 4614018 - DNA, 25 bp, Homo sapien
caaagtggaattgtggctctcttgg

SEQ ID NO: 4614019 - DNA, 25 bp, Homo sapien
agctatcccacagcatatgaagatg

SEQ ID NO: 4614020 - DNA, 25 bp, Homo sapien
tctcattctgaaggtcagacgtcct

SEQ ID NO: 4614021 - DNA, 25 bp, Homo sapien
tcttctagagactcgagtgaatcca

SEQ ID NO: 4614022 - DNA, 25 bp, Homo sapien
ttcctgcctgcctgttatctgtacg

SEQ ID NO: 4614023 - DNA, 25 bp, Homo sapien
tcagacgtcctcaaatcaaggtgtt

SEQ ID NO: 4614024 - DNA, 25 bp, Homo sapien
gattgagtatttgactatgtactag

SEQ ID NO: 4614025 - DNA, 25 bp, Homo sapien
gagattgaaaatgataagctaaaaa

SEQ ID NO: 4614026 - DNA, 25 bp, Homo sapien
ttaatttatttatgatgcatgtggt

SEQ ID NO: 4614027 - DNA, 25 bp, Homo sapien
actatgtactagttttcaattgttg

SEQ ID NO: 4614028 - DNA, 25 bp, Homo sapien
aaagtttttccacctcgagaggcag

SEQ ID NO: 4614029 - DNA, 25 bp, Homo sapien
cgtgtaatccacataatcaaaagtt

SEQ ID NO: 4614030 - DNA, 25 bp, Homo sapien
tttccacctcgagaggcagcccatt

SEQ ID NO: 4614031 - DNA, 25 bp, Homo sapien
tgtttctgatcgtgtaatccacata

SEQ ID NO: 4614032 - DNA, 25 bp, Homo sapien
gacccagataatgtcaaaatgtctg

SEQ ID NO: 4614033 - DNA, 25 bp, Homo sapien
tgtaatgcaaatgcacattgtaggg

SEQ ID NO: 4614034 - DNA, 25 bp, Homo sapien
gtctgaatgcacgtgatcctctttt

SEQ ID NO: 4614035 - DNA, 25 bp, Homo sapien
gagagctttggtacttgtagggcta

SEQ ID NO: 4614036 - DNA, 25 bp, Homo sapien
agactcagagtatttctcagtattg

SEQ ID NO: 4614037 - DNA, 25 bp, Homo sapien
tatttctcagtattgtccaagggca

SEQ ID NO: 4614038 - DNA, 25 bp, Homo sapien
cagagtatttctcagtattgtccaa

SEQ ID NO: 4614039 - DNA, 25 bp, Homo sapien
taagactcagagtatttctcagtat

SEQ ID NO: 4614040 - DNA, 25 bp, Homo sapien
tccatccaccctcaattttacagag

SEQ ID NO: 4614041 - DNA, 25 bp, Homo sapien
tagagttggataaggatgtctcatt

SEQ ID NO: 4614042 - DNA, 25 bp, Homo sapien
taaacgatttacctctctcattgaa

SEQ ID NO: 4614043 - DNA, 25 bp, Homo sapien
tctcattgaatcagctagaataaag

SEQ ID NO: 4614044 - DNA, 25 bp, Homo sapien
caaagaagttaaatggctgccagtg

SEQ ID NO: 4614045 - DNA, 25 bp, Homo sapien
gtttgtagaattgacacctgcatgg

SEQ ID NO: 4614046 - DNA, 25 bp, Homo sapien
tgggctgagctgcagtcacaaggcc

SEQ ID NO: 4614047 - DNA, 25 bp, Homo sapien
cacagattgggttccccaggaatca

SEQ ID NO: 4614048 - DNA, 25 bp, Homo sapien
cattttccagttcatggcatgcctg

SEQ ID NO: 4614049 - DNA, 25 bp, Homo sapien
tcaagaccatcaagaacaaagattt

SEQ ID NO: 4614050 - DNA, 25 bp, Homo sapien
cacccaggcaggtgggatcaagacc

SEQ ID NO: 4614051 - DNA, 25 bp, Homo sapien
tctcagttaagtagtaacgccttcc

SEQ ID NO: 4614052 - DNA, 25 bp, Homo sapien
tttggatgggtgaatattgagtttc

SEQ ID NO: 4614053 - DNA, 25 bp, Homo sapien
ctcttcatagtcaacccaaagcacc

SEQ ID NO: 4614054 - DNA, 25 bp, Homo sapien
tcttagacgttgtgcatatgcaggt

SEQ ID NO: 4614055 - DNA, 25 bp, Homo sapien
gcacctgatacctggtagtcttctg

SEQ ID NO: 4614056 - DNA, 25 bp, Homo sapien
tcacaattgcatgttaccagctcaa

SEQ ID NO: 4614057 - DNA, 25 bp, Homo sapien
gaagctaaaccaagtgaagtaagag

SEQ ID NO: 4614058 - DNA, 25 bp, Homo sapien
tactgtactgtaggcaatcgtgaca

SEQ ID NO: 4614059 - DNA, 25 bp, Homo sapien
taaggatttagggaatcacaattgc

SEQ ID NO: 4614060 - DNA, 25 bp, Homo sapien
aagcccagcctcctcgcaaatccat

SEQ ID NO: 4614061 - DNA, 25 bp, Homo sapien
ggagctgtctcggcaggcctaggct

SEQ ID NO: 4614062 - DNA, 25 bp, Homo sapien
ggcaggcctaggctgagaaaagccc

SEQ ID NO: 4614063 - DNA, 25 bp, Homo sapien
taaaaaccagatgagtccagagggc

SEQ ID NO: 4614064 - DNA, 25 bp, Homo sapien
tgacaaagcactaacaggaagggag

SEQ ID NO: 4614065 - DNA, 25 bp, Homo sapien
gctaataacttcaggcctgtgtgag

SEQ ID NO: 4614066 - DNA, 25 bp, Homo sapien
gagttggtaacacgctgactgagca

SEQ ID NO: 4614067 - DNA, 25 bp, Homo sapien
tcagtaataattggtcagaagacac

SEQ ID NO: 4614068 - DNA, 25 bp, Homo sapien
acaccacaatagtgagcagagttgg

SEQ ID NO: 4614069 - DNA, 25 bp, Homo sapien
ggtcagaagacaccacaatagtgag

SEQ ID NO: 4614070 - DNA, 25 bp, Homo sapien
gaaaacttctcagtaataattggtc

SEQ ID NO: 4614071 - DNA, 25 bp, Homo sapien
tgaggtacaggtcagcaagccagtc

SEQ ID NO: 4614072 - DNA, 25 bp, Homo sapien
cctttctctgaggtacaggtcagca

SEQ ID NO: 4614073 - DNA, 25 bp, Homo sapien
tcagcaagccagtcctggatacaga

SEQ ID NO: 4614074 - DNA, 25 bp, Homo sapien
tttctctgaggtacaggtcagcaag

SEQ ID NO: 4614075 - DNA, 25 bp, Homo sapien
taacttttgctggcagttgaagatc

SEQ ID NO: 4614076 - DNA, 25 bp, Homo sapien
cttcacctatctctgccctgtgttc

SEQ ID NO: 4614077 - DNA, 25 bp, Homo sapien
ggaagatcccaagaagtgctccctt

SEQ ID NO: 4614078 - DNA, 25 bp, Homo sapien
taatatggaagatcccaagaagtgc

SEQ ID NO: 4614079 - DNA, 25 bp, Homo sapien
ccctgtgttctaatatggaagatcc

SEQ ID NO: 4614080 - DNA, 25 bp, Homo sapien
gctgatctgtacagagacttcttgg

SEQ ID NO: 4614081 - DNA, 25 bp, Homo sapien
ctgttgctgatctgtacagagactt

SEQ ID NO: 4614082 - DNA, 25 bp, Homo sapien
tgatcagtgctggaaaagttatcac

SEQ ID NO: 4614083 - DNA, 25 bp, Homo sapien
gaaaagttatcactcagccactctg

SEQ ID NO: 4614084 - DNA, 25 bp, Homo sapien
gggcgctggaatgcagacaatacct

SEQ ID NO: 4614085 - DNA, 25 bp, Homo sapien
cagagacactgtagccttaattggg

SEQ ID NO: 4614086 - DNA, 25 bp, Homo sapien
tattacttttgtgtgggcgctggaa

SEQ ID NO: 4614087 - DNA, 25 bp, Homo sapien
ggagatattacttttgtgtgggcgc

SEQ ID NO: 4614088 - DNA, 25 bp, Homo sapien
gaagtcattcttaaactcaacgtgg

SEQ ID NO: 4614089 - DNA, 25 bp, Homo sapien
cacaatataccaggcaatcttgctg

SEQ ID NO: 4614090 - DNA, 25 bp, Homo sapien
ggatatgttcaactataataactga

SEQ ID NO: 4614091 - DNA, 25 bp, Homo sapien
ttgctgccattgatgaagtcattct

SEQ ID NO: 4614092 - DNA, 25 bp, Homo sapien
ccattagcaaaacatcccagtgcat

SEQ ID NO: 4614093 - DNA, 25 bp, Homo sapien
tccattagcaaaacatcccagtgca

SEQ ID NO: 4614094 - DNA, 25 bp, Homo sapien
cttcccgtcttgtgattgctttctg

SEQ ID NO: 4614095 - DNA, 25 bp, Homo sapien
ctcttcccgtcttgtgattgctttc

SEQ ID NO: 4614096 - DNA, 25 bp, Homo sapien
cctcttcccgtcttgtgattgcttt

SEQ ID NO: 4614097 - DNA, 25 bp, Homo sapien
cagtgccaagatgcctttgagctca

SEQ ID NO: 4614098 - DNA, 25 bp, Homo sapien
gagctcatgaagtctcaagaccaac

SEQ ID NO: 4614099 - DNA, 25 bp, Homo sapien
caaaatgtagattagctctgatgat

SEQ ID NO: 4614100 - DNA, 25 bp, Homo sapien
caagaccaacattatcagagaattg

SEQ ID NO: 4614101 - DNA, 25 bp, Homo sapien
aatctacgagggctggctttaatct

SEQ ID NO: 4614102 - DNA, 25 bp, Homo sapien
taataacactgtgatgtccaaggcc

SEQ ID NO: 4614103 - DNA, 25 bp, Homo sapien
ttcttgaccagaatataattggtaa

SEQ ID NO: 4614104 - DNA, 25 bp, Homo sapien
ctgtaatgtataagtctcttcttgt

SEQ ID NO: 4614105 - DNA, 25 bp, Homo sapien
aaagtatgtgccagatcaccagagt

SEQ ID NO: 4614106 - DNA, 25 bp, Homo sapien
cagagtaaccatccagttcatgtcc

SEQ ID NO: 4614107 - DNA, 25 bp, Homo sapien
tatgtgccagatcaccagagtaacc

SEQ ID NO: 4614108 - DNA, 25 bp, Homo sapien
tgccagatcaccagagtaaccatcc

SEQ ID NO: 4614109 - DNA, 25 bp, Homo sapien
ttgcgattgggaggctatgccagcc

SEQ ID NO: 4614110 - DNA, 25 bp, Homo sapien
ggtcctgatcaacaacgaaatttta

SEQ ID NO: 4614111 - DNA, 25 bp, Homo sapien
ctttaagatctacaaaacaggcaga

SEQ ID NO: 4614112 - DNA, 25 bp, Homo sapien
gacgcaggctgccaaaaggccatta

SEQ ID NO: 4614113 - DNA, 25 bp, Homo sapien
cagtagttatactggcaagaaggtt

SEQ ID NO: 4614114 - DNA, 25 bp, Homo sapien
tatcaattagtctttctgaaagatc

SEQ ID NO: 4614115 - DNA, 25 bp, Homo sapien
ttcttccagtagttatactggcaag

SEQ ID NO: 4614116 - DNA, 25 bp, Homo sapien
ccacattgcgttggcctttgatttg

SEQ ID NO: 4614117 - DNA, 25 bp, Homo sapien
ttaaagtgcatttattgtactcagg

SEQ ID NO: 4614118 - DNA, 25 bp, Homo sapien
gggaccatgggctgtgccacaatgc

SEQ ID NO: 4614119 - DNA, 25 bp, Homo sapien
gtgagccccgcatctggcctttatc

SEQ ID NO: 4614120 - DNA, 25 bp, Homo sapien
gcatctggcctttatctctatttta

SEQ ID NO: 4614121 - DNA, 25 bp, Homo sapien
cgattctgcagatcacaaattatca

SEQ ID NO: 4614122 - DNA, 25 bp, Homo sapien
tctagctttagcttgcgattctgca

SEQ ID NO: 4614123 - DNA, 25 bp, Homo sapien
tctctctctagctttagcttgcgat

SEQ ID NO: 4614124 - DNA, 25 bp, Homo sapien
caagtttctgggacacaagtttctc

SEQ ID NO: 4614125 - DNA, 25 bp, Homo sapien
gattgctttagtgtatgctgtgtac

SEQ ID NO: 4614126 - DNA, 25 bp, Homo sapien
gaatctttcggacacagattgcttt

SEQ ID NO: 4614127 - DNA, 25 bp, Homo sapien
cagaatttaacctgaagtgaatctt

SEQ ID NO: 4614128 - DNA, 25 bp, Homo sapien
tgataattgacccttctcagaattt

SEQ ID NO: 4614129 - DNA, 25 bp, Homo sapien
tctatattctgaacaatgggtgctg

SEQ ID NO: 4614130 - DNA, 25 bp, Homo sapien
ggaaaatatcatcaactgcgtcaat

SEQ ID NO: 4614131 - DNA, 25 bp, Homo sapien
caatcctgtgagagtctatattctg

SEQ ID NO: 4614132 - DNA, 25 bp, Homo sapien
gtgctgttaacgtaggttgtaggaa

SEQ ID NO: 4614133 - DNA, 25 bp, Homo sapien
ggcaagacacagggctgcccacact

SEQ ID NO: 4614134 - DNA, 25 bp, Homo sapien
ctggcaagacacagggctgcccaca

SEQ ID NO: 4614135 - DNA, 25 bp, Homo sapien
aagacacagggctgcccacactcat

SEQ ID NO: 4614136 - DNA, 25 bp, Homo sapien
caagacacagggctgcccacactca

SEQ ID NO: 4614137 - DNA, 25 bp, Homo sapien
gagccctgggtagttgatatcttcc

SEQ ID NO: 4614138 - DNA, 25 bp, Homo sapien
tccctttgccaggtcgagccctggg

SEQ ID NO: 4614139 - DNA, 25 bp, Homo sapien
cccgcagaatcacaggaatgttccc

SEQ ID NO: 4614140 - DNA, 25 bp, Homo sapien
ctgcagcgcctgcatgggtcatcgc

SEQ ID NO: 4614141 - DNA, 25 bp, Homo sapien
gaggcgatgacccatgcagatgctg

SEQ ID NO: 4614142 - DNA, 25 bp, Homo sapien
tagagcaacaagatcagtgtgggca

SEQ ID NO: 4614143 - DNA, 25 bp, Homo sapien
actggcagctcaattagagcaacaa

SEQ ID NO: 4614144 - DNA, 25 bp, Homo sapien
ggcagccctgtgtcttgccaggtca

SEQ ID NO: 4614145 - DNA, 25 bp, Homo sapien
gtagatacctgtgtaagcaccacct

SEQ ID NO: 4614146 - DNA, 25 bp, Homo sapien
tgtagcccaccacaagtaacaagtg

SEQ ID NO: 4614147 - DNA, 25 bp, Homo sapien
tcttttcatagactcagagccagaa

SEQ ID NO: 4614148 - DNA, 25 bp, Homo sapien
cggtgcttgggtgcagtaatagcat

SEQ ID NO: 4614149 - DNA, 25 bp, Homo sapien
tataaaccagcctggatgacttatt

SEQ ID NO: 4614150 - DNA, 25 bp, Homo sapien
tatcttccgatgtttgttcaaggtc

SEQ ID NO: 4614151 - DNA, 25 bp, Homo sapien
tccacctcttggttgcacctgtccc

SEQ ID NO: 4614152 - DNA, 25 bp, Homo sapien
cctgtccctctttgagtgacctctt

SEQ ID NO: 4614153 - DNA, 25 bp, Homo sapien
gattccattgacctagcggctttgc

SEQ ID NO: 4614154 - DNA, 25 bp, Homo sapien
tagcggctttgcactcccaatacaa

SEQ ID NO: 4614155 - DNA, 25 bp, Homo sapien
caaagaaatgattccattgacctag

SEQ ID NO: 4614156 - DNA, 25 bp, Homo sapien
actcccaatacaacatgttcttcag

SEQ ID NO: 4614157 - DNA, 25 bp, Homo sapien
gagcagctgatgcaattctcctcag

SEQ ID NO: 4614158 - DNA, 25 bp, Homo sapien
ccatgcagggcattgcttaaataga

SEQ ID NO: 4614159 - DNA, 25 bp, Homo sapien
tgtcgtactgagatctggtatcccg

SEQ ID NO: 4614160 - DNA, 25 bp, Homo sapien
gtgcatccagtaactgcactctgac

SEQ ID NO: 4614161 - DNA, 25 bp, Homo sapien
gtctctgaaacctaaacacttcata

SEQ ID NO: 4614162 - DNA, 25 bp, Homo sapien
cacttcatagggagagggaattgaa

SEQ ID NO: 4614163 - DNA, 25 bp, Homo sapien
gaaacctaaacacttcatagggaga

SEQ ID NO: 4614164 - DNA, 25 bp, Homo sapien
tggtttgtctctgaaacctaaacac

SEQ ID NO: 4614165 - DNA, 25 bp, Homo sapien
gatctctggtggacatcatattcag

SEQ ID NO: 4614166 - DNA, 25 bp, Homo sapien
taatttgcaccacaggaaagccatc

SEQ ID NO: 4614167 - DNA, 25 bp, Homo sapien
tctcaatgagacagctgactggctc

SEQ ID NO: 4614168 - DNA, 25 bp, Homo sapien
tcagcagacaagttgccttgccaag

SEQ ID NO: 4614169 - DNA, 25 bp, Homo sapien
gaaagctgcttaactgggcggaacg

SEQ ID NO: 4614170 - DNA, 25 bp, Homo sapien
tggatgactcatctctgcctttaga

SEQ ID NO: 4614171 - DNA, 25 bp, Homo sapien
agagtttccttgacaccctctctca

SEQ ID NO: 4614172 - DNA, 25 bp, Homo sapien
tcaccaaactcctgcgtaagcatag

SEQ ID NO: 4614173 - DNA, 25 bp, Homo sapien
attttccaggtggatgttggacatt

SEQ ID NO: 4614174 - DNA, 25 bp, Homo sapien
ttttactccagctgtactccacttt

SEQ ID NO: 4614175 - DNA, 25 bp, Homo sapien
tcccatgatgcagacaattcatttt

SEQ ID NO: 4614176 - DNA, 25 bp, Homo sapien
agccaaaatgtgatggaacatccca

SEQ ID NO: 4614177 - DNA, 25 bp, Homo sapien
ggagtgtctctatctgagtcccctg

SEQ ID NO: 4614178 - DNA, 25 bp, Homo sapien
catttttctgcggagaagctgccac

SEQ ID NO: 4614179 - DNA, 25 bp, Homo sapien
tctttctccccggagggtgctgtca

SEQ ID NO: 4614180 - DNA, 25 bp, Homo sapien
tctccccggagggtgctgtcacatt

SEQ ID NO: 4614181 - DNA, 25 bp, Homo sapien
ccccggagggtgctgtcacattttt

SEQ ID NO: 4614182 - DNA, 25 bp, Homo sapien
gcccccctggcaaatcctgatcttc

SEQ ID NO: 4614183 - DNA, 25 bp, Homo sapien
tggcccccctggcaaatcctgatct

SEQ ID NO: 4614184 - DNA, 25 bp, Homo sapien
ggcccccctggcaaatcctgatctt

SEQ ID NO: 4614185 - DNA, 25 bp, Homo sapien
gacaaaaggcagaagcgctaaataa

SEQ ID NO: 4614186 - DNA, 25 bp, Homo sapien
caaatggagccattagacaaaaggc

SEQ ID NO: 4614187 - DNA, 25 bp, Homo sapien
ctcccatggcagagtggttcacaaa

SEQ ID NO: 4614188 - DNA, 25 bp, Homo sapien
agaatccgtgtctgggctcccatgg

SEQ ID NO: 4614189 - DNA, 25 bp, Homo sapien
cctgcagtgcggtagcgaattattc

SEQ ID NO: 4614190 - DNA, 25 bp, Homo sapien
gaattattcccaggtgcgtgggtct

SEQ ID NO: 4614191 - DNA, 25 bp, Homo sapien
ttctgcggtgaagtccccattttcc

SEQ ID NO: 4614192 - DNA, 25 bp, Homo sapien
tgggcaaggtagcaatctttctgcg

SEQ ID NO: 4614193 - DNA, 25 bp, Homo sapien
cagaaatggtctgctgcaggcccat

SEQ ID NO: 4614194 - DNA, 25 bp, Homo sapien
ggcttaaactttgctgtgaggtaga

SEQ ID NO: 4614195 - DNA, 25 bp, Homo sapien
gcttaaactttgctgtgaggtagaa

SEQ ID NO: 4614196 - DNA, 25 bp, Homo sapien
cttaaactttgctgtgaggtagaag

SEQ ID NO: 4614197 - DNA, 25 bp, Homo sapien
tgccatctctcatggccaaatcgaa

SEQ ID NO: 4614198 - DNA, 25 bp, Homo sapien
ctctcatggccaaatcgaacatctg

SEQ ID NO: 4614199 - DNA, 25 bp, Homo sapien
atctctcatggccaaatcgaacatc

SEQ ID NO: 4614200 - DNA, 25 bp, Homo sapien
ctcatggccaaatcgaacatctgca

SEQ ID NO: 4614201 - DNA, 25 bp, Homo sapien
tacctagccctttatgttgtttgtc

SEQ ID NO: 4614202 - DNA, 25 bp, Homo sapien
ccctttatgttgtttgtcaaacatg

SEQ ID NO: 4614203 - DNA, 25 bp, Homo sapien
gtggtttctgggcactacctagccc

SEQ ID NO: 4614204 - DNA, 25 bp, Homo sapien
tggtttctgggcactacctagccct

SEQ ID NO: 4614205 - DNA, 25 bp, Homo sapien
gctgccatgactatctctggggaac

SEQ ID NO: 4614206 - DNA, 25 bp, Homo sapien
tcagtcttccctggcgagtgctcag

SEQ ID NO: 4614207 - DNA, 25 bp, Homo sapien
ctgccatgactatctctggggaaca

SEQ ID NO: 4614208 - DNA, 25 bp, Homo sapien
ttccctggcgagtgctcagctccga

SEQ ID NO: 4614209 - DNA, 25 bp, Homo sapien
tttggtctatactaacaggactatg

SEQ ID NO: 4614210 - DNA, 25 bp, Homo sapien
aggactatggaagccattccaatgg

SEQ ID NO: 4614211 - DNA, 25 bp, Homo sapien
tatactaacaggactatggaagcca

SEQ ID NO: 4614212 - DNA, 25 bp, Homo sapien
tagagaggggagttcttagaccaaa

SEQ ID NO: 4614213 - DNA, 25 bp, Homo sapien
aggtacaggcccctgaacagttaca

SEQ ID NO: 4614214 - DNA, 25 bp, Homo sapien
ctaacagaagcacccaggtacaggc

SEQ ID NO: 4614215 - DNA, 25 bp, Homo sapien
ggcccacaagtatgagggacattga

SEQ ID NO: 4614216 - DNA, 25 bp, Homo sapien
ccaaagtatgggagctctttctcat

SEQ ID NO: 4614217 - DNA, 25 bp, Homo sapien
ctcttagcttccaacactgattgct

SEQ ID NO: 4614218 - DNA, 25 bp, Homo sapien
actgattgctattcagggactggga

SEQ ID NO: 4614219 - DNA, 25 bp, Homo sapien
atgatagtggatgccggctcttagc

SEQ ID NO: 4614220 - DNA, 25 bp, Homo sapien
taacagctgtataggatttgccgtt

SEQ ID NO: 4614221 - DNA, 25 bp, Homo sapien
ctgccaagagccagttagaggtggt

SEQ ID NO: 4614222 - DNA, 25 bp, Homo sapien
gtagcgcttagcttcagaggcagca

SEQ ID NO: 4614223 - DNA, 25 bp, Homo sapien
caaagaaaatgagacggtagcgctt

SEQ ID NO: 4614224 - DNA, 25 bp, Homo sapien
atccccagagggtaagcactgctcc

SEQ ID NO: 4614225 - DNA, 25 bp, Homo sapien
ataggtaactcctgaacagcctcat

SEQ ID NO: 4614226 - DNA, 25 bp, Homo sapien
tccctttgaggaaatgtcatacgac

SEQ ID NO: 4614227 - DNA, 25 bp, Homo sapien
cacttccctttgaggaaatgtcata

SEQ ID NO: 4614228 - DNA, 25 bp, Homo sapien
ttaacttgccttgatcatggcagga

SEQ ID NO: 4614229 - DNA, 25 bp, Homo sapien
aggcaggctcagaacttcagtgaca

SEQ ID NO: 4614230 - DNA, 25 bp, Homo sapien
aggggttcttggcttaataacatct

SEQ ID NO: 4614231 - DNA, 25 bp, Homo sapien
tcttggcttaataacatctgagaag

SEQ ID NO: 4614232 - DNA, 25 bp, Homo sapien
cttggcttaataacatctgagaagt

SEQ ID NO: 4614233 - DNA, 25 bp, Homo sapien
ggttcttggcttaataacatctgag

SEQ ID NO: 4614234 - DNA, 25 bp, Homo sapien
tgcctgtccccttggaaatatgatt

SEQ ID NO: 4614235 - DNA, 25 bp, Homo sapien
attgcttttcctttctctcttcctc

SEQ ID NO: 4614236 - DNA, 25 bp, Homo sapien
ttgcttttcctttctctcttcctct

SEQ ID NO: 4614237 - DNA, 25 bp, Homo sapien
tcagggtttcagacgatcacaaaca

SEQ ID NO: 4614238 - DNA, 25 bp, Homo sapien
acataattatttgccattgcagagg

SEQ ID NO: 4614239 - DNA, 25 bp, Homo sapien
tccaccatgaagtccgtagctctca

SEQ ID NO: 4614240 - DNA, 25 bp, Homo sapien
gcagaggctgttacggtatctagaa

SEQ ID NO: 4614241 - DNA, 25 bp, Homo sapien
ttttgttttatgtctattaggcatt

SEQ ID NO: 4614242 - DNA, 25 bp, Homo sapien
gcaacgcattaactaccgcagcaat

SEQ ID NO: 4614243 - DNA, 25 bp, Homo sapien
gagatactgaaacattggtcttcgc

SEQ ID NO: 4614244 - DNA, 25 bp, Homo sapien
cgcagcaatgttaatgaagaccagg

SEQ ID NO: 4614245 - DNA, 25 bp, Homo sapien
tgctgtttgctacctgacgtctacc

SEQ ID NO: 4614246 - DNA, 25 bp, Homo sapien
agccatatgtactgctgagcaggca

SEQ ID NO: 4614247 - DNA, 25 bp, Homo sapien
gccatatgtactgctgagcaggcag

SEQ ID NO: 4614248 - DNA, 25 bp, Homo sapien
ggaacaggggctgtcatttgagtgt

SEQ ID NO: 4614249 - DNA, 25 bp, Homo sapien
caatattgatttgttagtcatagat

SEQ ID NO: 4614250 - DNA, 25 bp, Homo sapien
tgtaagacaaatgagtatccaagta

SEQ ID NO: 4614251 - DNA, 25 bp, Homo sapien
ttgaattttacaccctataagcagg

SEQ ID NO: 4614252 - DNA, 25 bp, Homo sapien
agactgtttattaagattctcctct

SEQ ID NO: 4614253 - DNA, 25 bp, Homo sapien
tgaacaatttcttcaacgcattagt

SEQ ID NO: 4614254 - DNA, 25 bp, Homo sapien
acaatttcttcaacgcattagtcat

SEQ ID NO: 4614255 - DNA, 25 bp, Homo sapien
caggatgaactgtgttgaacaattt

SEQ ID NO: 4614256 - DNA, 25 bp, Homo sapien
taatatttttaccaggatgaactgt

SEQ ID NO: 4614257 - DNA, 25 bp, Homo sapien
ggtgcagctcacctacgaaaagcaa

SEQ ID NO: 4614258 - DNA, 25 bp, Homo sapien
tagctggctcaacgacgagtgtcaa

SEQ ID NO: 4614259 - DNA, 25 bp, Homo sapien
tatatgggagatactggtgcagctc

SEQ ID NO: 4614260 - DNA, 25 bp, Homo sapien
cctagcaggttggagaaaaacagta

SEQ ID NO: 4614261 - DNA, 25 bp, Homo sapien
cagcgctccggtggagtctgtgtct

SEQ ID NO: 4614262 - DNA, 25 bp, Homo sapien
cctgttggcaatgggcgactctgga

SEQ ID NO: 4614263 - DNA, 25 bp, Homo sapien
gcggcgaagtttgcttttctaagga

SEQ ID NO: 4614264 - DNA, 25 bp, Homo sapien
tgcaggaactttccttcccacattt

SEQ ID NO: 4614265 - DNA, 25 bp, Homo sapien
aaagcgggccattagttggagacac

SEQ ID NO: 4614266 - DNA, 25 bp, Homo sapien
gagaggaatgaaagcgggccattag

SEQ ID NO: 4614267 - DNA, 25 bp, Homo sapien
agaggaatgaaagcgggccattagt

SEQ ID NO: 4614268 - DNA, 25 bp, Homo sapien
atgaaagcgggccattagttggaga

SEQ ID NO: 4614269 - DNA, 25 bp, Homo sapien
cttttaatactataatggtctttct

SEQ ID NO: 4614270 - DNA, 25 bp, Homo sapien
tggtagatagattaaatgactccat

SEQ ID NO: 4614271 - DNA, 25 bp, Homo sapien
cctggtagatagattaaatgactcc

SEQ ID NO: 4614272 - DNA, 25 bp, Homo sapien
ctggtagatagattaaatgactcca

SEQ ID NO: 4614273 - DNA, 25 bp, Homo sapien
tcctggtagatagattaaatgactc

SEQ ID NO: 4614274 - DNA, 25 bp, Homo sapien
ggtggctgagcctcgttcataattc

SEQ ID NO: 4614275 - DNA, 25 bp, Homo sapien
tggtggctgagcctcgttcataatt

SEQ ID NO: 4614276 - DNA, 25 bp, Homo sapien
gctgagcctcgttcataattcttct

SEQ ID NO: 4614277 - DNA, 25 bp, Homo sapien
tggctgagcctcgttcataattctt

SEQ ID NO: 4614278 - DNA, 25 bp, Homo sapien
ttgctcttcctataggccttcagga

SEQ ID NO: 4614279 - DNA, 25 bp, Homo sapien
tgggctgctgtagaacgtttgttaa

SEQ ID NO: 4614280 - DNA, 25 bp, Homo sapien
tccggattaacaccttgtattccca

SEQ ID NO: 4614281 - DNA, 25 bp, Homo sapien
taaatgcgcttcagaatgcacaact

SEQ ID NO: 4614282 - DNA, 25 bp, Homo sapien
tgatgatgcggtcaagtttgtagtt

SEQ ID NO: 4614283 - DNA, 25 bp, Homo sapien
atgatgcggtcaagtttgtagttgg

SEQ ID NO: 4614284 - DNA, 25 bp, Homo sapien
gatgcggtcaagtttgtagttgggc

SEQ ID NO: 4614285 - DNA, 25 bp, Homo sapien
cttgatgatgcggtcaagtttgtag

SEQ ID NO: 4614286 - DNA, 25 bp, Homo sapien
catcagtgaacgtagggtaccattc

SEQ ID NO: 4614287 - DNA, 25 bp, Homo sapien
gagagggcgttgtccaggtctcgca

SEQ ID NO: 4614288 - DNA, 25 bp, Homo sapien
cagggcatcagtgaacgtagggtac

SEQ ID NO: 4614289 - DNA, 25 bp, Homo sapien
atggagagggcgttgtccaggtctc

SEQ ID NO: 4614290 - DNA, 25 bp, Homo sapien
cttgtggcagggcactagcagcgat

SEQ ID NO: 4614291 - DNA, 25 bp, Homo sapien
cactagcagcgatgatgtagtgcat

SEQ ID NO: 4614292 - DNA, 25 bp, Homo sapien
gcagggcactagcagcgatgatgta

SEQ ID NO: 4614293 - DNA, 25 bp, Homo sapien
tccatggtgaatggtctgcacatgg

SEQ ID NO: 4614294 - DNA, 25 bp, Homo sapien
tgggtagtggaggttgagccactgg

SEQ ID NO: 4614295 - DNA, 25 bp, Homo sapien
gtgctgtagaactcggtgaaggtgg

SEQ ID NO: 4614296 - DNA, 25 bp, Homo sapien
aggtggaagttgatgaagcccagca

SEQ ID NO: 4614297 - DNA, 25 bp, Homo sapien
cagcagggtgctgtagaactcggtg

SEQ ID NO: 4614298 - DNA, 25 bp, Homo sapien
atggagctctcagagtccaatgcat

SEQ ID NO: 4614299 - DNA, 25 bp, Homo sapien
agagtccaatgcatgggtgccctca

SEQ ID NO: 4614300 - DNA, 25 bp, Homo sapien
tggcagtgagggcagccattttctc

SEQ ID NO: 4614301 - DNA, 25 bp, Homo sapien
gcagtgagggcagccattttctcca

SEQ ID NO: 4614302 - DNA, 25 bp, Homo sapien
gcaggaaactcatccacctcgggct

SEQ ID NO: 4614303 - DNA, 25 bp, Homo sapien
tcgggctcctcctctgtggcaggca

SEQ ID NO: 4614304 - DNA, 25 bp, Homo sapien
gacatctccccattggcaggaaact

SEQ ID NO: 4614305 - DNA, 25 bp, Homo sapien
ctgacatctccccattggcaggaaa

SEQ ID NO: 4614306 - DNA, 25 bp, Homo sapien
gtccgtgatgtcataggtggccccg

SEQ ID NO: 4614307 - DNA, 25 bp, Homo sapien
cacttccccccaaaaactgatgacg

SEQ ID NO: 4614308 - DNA, 25 bp, Homo sapien
gacacttccccccaaaaactgatga

SEQ ID NO: 4614309 - DNA, 25 bp, Homo sapien
cgtgatgtcataggtggccccgatg

SEQ ID NO: 4614310 - DNA, 25 bp, Homo sapien
gggctgcatgtagcacctgccaatg

SEQ ID NO: 4614311 - DNA, 25 bp, Homo sapien
gctgcatgtagcacctgccaatgat

SEQ ID NO: 4614312 - DNA, 25 bp, Homo sapien
tggggctgcatgtagcacctgccaa

SEQ ID NO: 4614313 - DNA, 25 bp, Homo sapien
tgcatgtagcacctgccaatgatgg

SEQ ID NO: 4614314 - DNA, 25 bp, Homo sapien
tagcgttcaccgagtcaatcaccca

SEQ ID NO: 4614315 - DNA, 25 bp, Homo sapien
agcgttcaccgagtcaatcacccac

SEQ ID NO: 4614316 - DNA, 25 bp, Homo sapien
ctagcgttcaccgagtcaatcaccc

SEQ ID NO: 4614317 - DNA, 25 bp, Homo sapien
gaagtactctgccatgaggaggaga

SEQ ID NO: 4614318 - DNA, 25 bp, Homo sapien
gggaagtactctgccatgaggagga

SEQ ID NO: 4614319 - DNA, 25 bp, Homo sapien
agggaagtactctgccatgaggagg

SEQ ID NO: 4614320 - DNA, 25 bp, Homo sapien
aagtactctgccatgaggaggagaa

SEQ ID NO: 4614321 - DNA, 25 bp, Homo sapien
agcttgttggcctctcggatttttc

SEQ ID NO: 4614322 - DNA, 25 bp, Homo sapien
cagcttgttggcctctcggattttt

SEQ ID NO: 4614323 - DNA, 25 bp, Homo sapien
tcatgcagaagacatggtgaagtgt

SEQ ID NO: 4614324 - DNA, 25 bp, Homo sapien
tttgttctcagtaggcagagattcc

SEQ ID NO: 4614325 - DNA, 25 bp, Homo sapien
cagagagaaaatgaaccgctgcaga

SEQ ID NO: 4614326 - DNA, 25 bp, Homo sapien
tcgattgcagtatcagtcatgcaga

SEQ ID NO: 4614327 - DNA, 25 bp, Homo sapien
tttgattgattgaagttttcccatt

SEQ ID NO: 4614328 - DNA, 25 bp, Homo sapien
gattgattgaagttttcccattatg

SEQ ID NO: 4614329 - DNA, 25 bp, Homo sapien
atttgattgattgaagttttcccat

SEQ ID NO: 4614330 - DNA, 25 bp, Homo sapien
gattgaagttttcccattatgttcc

SEQ ID NO: 4614331 - DNA, 25 bp, Homo sapien
gggcagagacattggaggaacagtg

SEQ ID NO: 4614332 - DNA, 25 bp, Homo sapien
gcagagacattggaggaacagtgga

SEQ ID NO: 4614333 - DNA, 25 bp, Homo sapien
ggcagagacattggaggaacagtgg

SEQ ID NO: 4614334 - DNA, 25 bp, Homo sapien
ggagccatccaaagctaaagccaac

SEQ ID NO: 4614335 - DNA, 25 bp, Homo sapien
tttcgataatgcttcaacttgaggg

SEQ ID NO: 4614336 - DNA, 25 bp, Homo sapien
taaagccaacactggtcaccttgtg

SEQ ID NO: 4614337 - DNA, 25 bp, Homo sapien
gaagatacagctatgcagagatctg

SEQ ID NO: 4614338 - DNA, 25 bp, Homo sapien
gactaagaatgtattgtgatttctg

SEQ ID NO: 4614339 - DNA, 25 bp, Homo sapien
tttgcagctgcgaagaagtctatct

SEQ ID NO: 4614340 - DNA, 25 bp, Homo sapien
tatggcttttaggacactttgcagt

SEQ ID NO: 4614341 - DNA, 25 bp, Homo sapien
actttgcagtatgctcagatcaagc

SEQ ID NO: 4614342 - DNA, 25 bp, Homo sapien
gccttgctctctggaaaccatgatg

SEQ ID NO: 4614343 - DNA, 25 bp, Homo sapien
tggagactgcgtagttgaaacatga

SEQ ID NO: 4614344 - DNA, 25 bp, Homo sapien
tgatatatgatacggtccccagccc

SEQ ID NO: 4614345 - DNA, 25 bp, Homo sapien
ggcttttccgagagaacatacagta

SEQ ID NO: 4614346 - DNA, 25 bp, Homo sapien
gcggttagaaagaccttttgtcaca

SEQ ID NO: 4614347 - DNA, 25 bp, Homo sapien
tgaccacctgagtctaggttgagat

SEQ ID NO: 4614348 - DNA, 25 bp, Homo sapien
cacagttggatgaacggggagacat

SEQ ID NO: 4614349 - DNA, 25 bp, Homo sapien
gagacatcggcctgaccacctgagt

SEQ ID NO: 4614350 - DNA, 25 bp, Homo sapien
tctgtgatatgcaccgggcagaaag

SEQ ID NO: 4614351 - DNA, 25 bp, Homo sapien
taagggctgcacaaggttgcctgtg

SEQ ID NO: 4614352 - DNA, 25 bp, Homo sapien
caagtgtttgggcagtatgcaatga

SEQ ID NO: 4614353 - DNA, 25 bp, Homo sapien
tgtcctggaagacccactaagggct

SEQ ID NO: 4614354 - DNA, 25 bp, Homo sapien
gcgggattcgatgacaacatgtctc

SEQ ID NO: 4614355 - DNA, 25 bp, Homo sapien
ctattggcgggattcgatgacaaca

SEQ ID NO: 4614356 - DNA, 25 bp, Homo sapien
tattggcgggattcgatgacaacat

SEQ ID NO: 4614357 - DNA, 25 bp, Homo sapien
tggcgggattcgatgacaacatgtc

SEQ ID NO: 4614358 - DNA, 25 bp, Homo sapien
actgcttgtgtaacactgtttggca

SEQ ID NO: 4614359 - DNA, 25 bp, Homo sapien
cgtagatgtgtattgacttgagtat

SEQ ID NO: 4614360 - DNA, 25 bp, Homo sapien
tgtaacactgtttggcattccgtag

SEQ ID NO: 4614361 - DNA, 25 bp, Homo sapien
aacactgtttggcattccgtagatg

SEQ ID NO: 4614362 - DNA, 25 bp, Homo sapien
tcagagattctgctttaaacacaga

SEQ ID NO: 4614363 - DNA, 25 bp, Homo sapien
aaggaggtaattgctcttcagagat

SEQ ID NO: 4614364 - DNA, 25 bp, Homo sapien
gctcttcagagattctgctttaaac

SEQ ID NO: 4614365 - DNA, 25 bp, Homo sapien
ttggtgaaaaggaggtaattgctct

SEQ ID NO: 4614366 - DNA, 25 bp, Homo sapien
tagagtcgcacagtgacctgcagat

SEQ ID NO: 4614367 - DNA, 25 bp, Homo sapien
gctgctgttagagtcgcacagtgac

SEQ ID NO: 4614368 - DNA, 25 bp, Homo sapien
tgctgggctgctgttagagtcgcac

SEQ ID NO: 4614369 - DNA, 25 bp, Homo sapien
gccagccattgtgctcggtttctcc

SEQ ID NO: 4614370 - DNA, 25 bp, Homo sapien
cattggttgagcactgggcctcttt

SEQ ID NO: 4614371 - DNA, 25 bp, Homo sapien
atagccagatggtgggccctcattg

SEQ ID NO: 4614372 - DNA, 25 bp, Homo sapien
acttggcgtattgtaggcactttca

SEQ ID NO: 4614373 - DNA, 25 bp, Homo sapien
tgtatacttggcgtattgtaggcac

SEQ ID NO: 4614374 - DNA, 25 bp, Homo sapien
ggatatgctctcccaagaagttacc

SEQ ID NO: 4614375 - DNA, 25 bp, Homo sapien
caagaagttacccagtcaatgattt

SEQ ID NO: 4614376 - DNA, 25 bp, Homo sapien
taaaatagccagtctggaggtaaga

SEQ ID NO: 4614377 - DNA, 25 bp, Homo sapien
agccagtctggaggtaagaatctca

SEQ ID NO: 4614378 - DNA, 25 bp, Homo sapien
tatcctctggtacaggaaacttcag

SEQ ID NO: 4614379 - DNA, 25 bp, Homo sapien
gccacactggccttgtagtaagtcc

SEQ ID NO: 4614380 - DNA, 25 bp, Homo sapien
aagtccagtcaatagatggtttatt

SEQ ID NO: 4614381 - DNA, 25 bp, Homo sapien
atttatcctctggtacaggaaactt

SEQ ID NO: 4614382 - DNA, 25 bp, Homo sapien
ggtcctcagtggtcgtctgatcaaa

SEQ ID NO: 4614383 - DNA, 25 bp, Homo sapien
gaggccaatagggatactttctctt

SEQ ID NO: 4614384 - DNA, 25 bp, Homo sapien
tccagctgtttctcatattgtccaa

SEQ ID NO: 4614385 - DNA, 25 bp, Homo sapien
tattgtccaatcctggcctttgaga

SEQ ID NO: 4614386 - DNA, 25 bp, Homo sapien
cacatcacactgcattagttttctc

SEQ ID NO: 4614387 - DNA, 25 bp, Homo sapien
tccacatcacactgcattagttttc

SEQ ID NO: 4614388 - DNA, 25 bp, Homo sapien
tttctctttctttgcgcaacaggga

SEQ ID NO: 4614389 - DNA, 25 bp, Homo sapien
ttctttgcgcaacagggatagaggg

SEQ ID NO: 4614390 - DNA, 25 bp, Homo sapien
cctccagtgcaccttcatcaggcat

SEQ ID NO: 4614391 - DNA, 25 bp, Homo sapien
ttagcaccatattccagccttcctt

SEQ ID NO: 4614392 - DNA, 25 bp, Homo sapien
ctgattagcaccatattccagcctt

SEQ ID NO: 4614393 - DNA, 25 bp, Homo sapien
tcctccagtgcaccttcatcaggca

SEQ ID NO: 4614394 - DNA, 25 bp, Homo sapien
agtgccatccatgtgggccgccctg

SEQ ID NO: 4614395 - DNA, 25 bp, Homo sapien
tttggtgcgtctccccttcttgctc

SEQ ID NO: 4614396 - DNA, 25 bp, Homo sapien
gtgccatccatgtgggccgccctgg

SEQ ID NO: 4614397 - DNA, 25 bp, Homo sapien
cgccctggctttggtgcgtctcccc

SEQ ID NO: 4614398 - DNA, 25 bp, Homo sapien
attggattgaaatcactcacactag

SEQ ID NO: 4614399 - DNA, 25 bp, Homo sapien
ttggattgaaatcactcacactagg

SEQ ID NO: 4614400 - DNA, 25 bp, Homo sapien
gaatcctggaagtatgagacagtaa

SEQ ID NO: 4614401 - DNA, 25 bp, Homo sapien
gatggactataatatcctggaaaaa

SEQ ID NO: 4614402 - DNA, 25 bp, Homo sapien
gacagtaattggatttcttagaaaa

SEQ ID NO: 4614403 - DNA, 25 bp, Homo sapien
cactgtgtgtggagtcgtatggaaa

SEQ ID NO: 4614404 - DNA, 25 bp, Homo sapien
tacgttgaagacgatgtgtgccatg

SEQ ID NO: 4614405 - DNA, 25 bp, Homo sapien
gaaaggcctttgagcaatacgttga

SEQ ID NO: 4614406 - DNA, 25 bp, Homo sapien
ggcctttgagcaatacgttgaagac

SEQ ID NO: 4614407 - DNA, 25 bp, Homo sapien
tgtgtgccatgatgactggactgtg

SEQ ID NO: 4614408 - DNA, 25 bp, Homo sapien
tattgtgcccggttggaggataacg

SEQ ID NO: 4614409 - DNA, 25 bp, Homo sapien
tactgcagtcaattactggaagcgg

SEQ ID NO: 4614410 - DNA, 25 bp, Homo sapien
cagactgggccagaatgttagtgaa

SEQ ID NO: 4614411 - DNA, 25 bp, Homo sapien
tatatccagcctatactgctagcag

SEQ ID NO: 4614412 - DNA, 25 bp, Homo sapien
gagaacaacttttgtaggactgtgt

SEQ ID NO: 4614413 - DNA, 25 bp, Homo sapien
taacatggaccactgattttgccct

SEQ ID NO: 4614414 - DNA, 25 bp, Homo sapien
tcagtgccactagcttaccggtaca

SEQ ID NO: 4614415 - DNA, 25 bp, Homo sapien
gaaaactgtgctacagggactgatg

SEQ ID NO: 4614416 - DNA, 25 bp, Homo sapien
aactctttgtactgtgtccgtgcca

SEQ ID NO: 4614417 - DNA, 25 bp, Homo sapien
tagggagtggtgtctccaaccatca

SEQ ID NO: 4614418 - DNA, 25 bp, Homo sapien
tgcctctgaagcgtgttacccctgg

SEQ ID NO: 4614419 - DNA, 25 bp, Homo sapien
ttcaggatggcgaaggtcacccaag

SEQ ID NO: 4614420 - DNA, 25 bp, Homo sapien
tacccctggagtgacgtgagcattt

SEQ ID NO: 4614421 - DNA, 25 bp, Homo sapien
cagtgcaagttcaaaagtaagtcca

SEQ ID NO: 4614422 - DNA, 25 bp, Homo sapien
tgctgaacagcacagcgggatccta

SEQ ID NO: 4614423 - DNA, 25 bp, Homo sapien
aaagtaagtccaatcatttctgtga

SEQ ID NO: 4614424 - DNA, 25 bp, Homo sapien
tgattagcccattcagtttgatagc

SEQ ID NO: 4614425 - DNA, 25 bp, Homo sapien
tcactgatggtagatcgcagcccct

SEQ ID NO: 4614426 - DNA, 25 bp, Homo sapien
tgattataagtccttcagcccttgg

SEQ ID NO: 4614427 - DNA, 25 bp, Homo sapien
ctcaccaacgaaggctaggaggcgg

SEQ ID NO: 4614428 - DNA, 25 bp, Homo sapien
ctttgttacatgaagtccgctggga

SEQ ID NO: 4614429 - DNA, 25 bp, Homo sapien
gataatagaccagcaattgcagcac

SEQ ID NO: 4614430 - DNA, 25 bp, Homo sapien
taatagaccagcaattgcagcactt

SEQ ID NO: 4614431 - DNA, 25 bp, Homo sapien
aagaagataatagaccagcaattgc

SEQ ID NO: 4614432 - DNA, 25 bp, Homo sapien
agactggacaaaacaacacaaaggc

SEQ ID NO: 4614433 - DNA, 25 bp, Homo sapien
acataattggagaacctttccttca

SEQ ID NO: 4614434 - DNA, 25 bp, Homo sapien
tggagaacctttccttcaagcagaa

SEQ ID NO: 4614435 - DNA, 25 bp, Homo sapien
attacggtttgaacataattggaga

SEQ ID NO: 4614436 - DNA, 25 bp, Homo sapien
gccaatgtccaaaattacggtttga

SEQ ID NO: 4614437 - DNA, 25 bp, Homo sapien
gaggatcattccgacggcaataatg

SEQ ID NO: 4614438 - DNA, 25 bp, Homo sapien
gcaaagaggatcattccgacggcaa

SEQ ID NO: 4614439 - DNA, 25 bp, Homo sapien
ggatcattccgacggcaataatgat

SEQ ID NO: 4614440 - DNA, 25 bp, Homo sapien
aagaggatcattccgacggcaataa

SEQ ID NO: 4614441 - DNA, 25 bp, Homo sapien
ctgttagtagggatatgatgatttt

SEQ ID NO: 4614442 - DNA, 25 bp, Homo sapien
tgctgttagtagggatatgatgatt

SEQ ID NO: 4614443 - DNA, 25 bp, Homo sapien
gctgttagtagggatatgatgattt

SEQ ID NO: 4614444 - DNA, 25 bp, Homo sapien
gttagtagggatatgatgatttttt

SEQ ID NO: 4614445 - DNA, 25 bp, Homo sapien
acttgaacttcagggacttaggttg

SEQ ID NO: 4614446 - DNA, 25 bp, Homo sapien
caagccgtctggtaaccaggagaaa

SEQ ID NO: 4614447 - DNA, 25 bp, Homo sapien
ccagacatgatgtaattccagattg

SEQ ID NO: 4614448 - DNA, 25 bp, Homo sapien
ggaacaatggaccataggaatcaat

SEQ ID NO: 4614449 - DNA, 25 bp, Homo sapien
ggagccgaagcgtgaagaaggctgt

SEQ ID NO: 4614450 - DNA, 25 bp, Homo sapien
agccgaagcgtgaagaaggctgttt

SEQ ID NO: 4614451 - DNA, 25 bp, Homo sapien
tttgaatcgataggggagccgaagc

SEQ ID NO: 4614452 - DNA, 25 bp, Homo sapien
tttacgtttgaatcgataggggagc

SEQ ID NO: 4614453 - DNA, 25 bp, Homo sapien
tagggcagtattgttgctgtcacaa

SEQ ID NO: 4614454 - DNA, 25 bp, Homo sapien
cagtttcaggtcatagtaagtcaga

SEQ ID NO: 4614455 - DNA, 25 bp, Homo sapien
gatgagtgggcaataaatctcagaa

SEQ ID NO: 4614456 - DNA, 25 bp, Homo sapien
tgatagcccatggaaagagaagatg

SEQ ID NO: 4614457 - DNA, 25 bp, Homo sapien
catatttataacaattgcaaaccag

SEQ ID NO: 4614458 - DNA, 25 bp, Homo sapien
tttataacaattgcaaaccagatga

SEQ ID NO: 4614459 - DNA, 25 bp, Homo sapien
tgcaaaccagatgacgtgtactcat

SEQ ID NO: 4614460 - DNA, 25 bp, Homo sapien
caattgcaaaccagatgacgtgtac

SEQ ID NO: 4614461 - DNA, 25 bp, Homo sapien
taattgacagcttgacgtaaaacgc

SEQ ID NO: 4614462 - DNA, 25 bp, Homo sapien
acttgggctgttcttattgtgtctg

SEQ ID NO: 4614463 - DNA, 25 bp, Homo sapien
ggaagcaggctatcaacacttgggc

SEQ ID NO: 4614464 - DNA, 25 bp, Homo sapien
gctatcacatgacttctgggtaggt

SEQ ID NO: 4614465 - DNA, 25 bp, Homo sapien
tattactaccaaccattgactggcc

SEQ ID NO: 4614466 - DNA, 25 bp, Homo sapien
actccgactcgagagggcctgtgtg

SEQ ID NO: 4614467 - DNA, 25 bp, Homo sapien
tatgcgcagtgtgctggatccacac

SEQ ID NO: 4614468 - DNA, 25 bp, Homo sapien
cacagtcgtgtgtgctgagtggact

SEQ ID NO: 4614469 - DNA, 25 bp, Homo sapien
gttcagaaagatcgtttctgtcctt

SEQ ID NO: 4614470 - DNA, 25 bp, Homo sapien
cgtttctgtccttaaagagttcagg

SEQ ID NO: 4614471 - DNA, 25 bp, Homo sapien
ttggctgggcatctaatctgaacat

SEQ ID NO: 4614472 - DNA, 25 bp, Homo sapien
gggcatctaatctgaacatgactag

SEQ ID NO: 4614473 - DNA, 25 bp, Homo sapien
ctgtatctgtatattagggtctgtg

SEQ ID NO: 4614474 - DNA, 25 bp, Homo sapien
ccttcacccgatatttgttctgtat

SEQ ID NO: 4614475 - DNA, 25 bp, Homo sapien
gtatattagggtctgtgttaggcat

SEQ ID NO: 4614476 - DNA, 25 bp, Homo sapien
cttggtccttcacccgatatttgtt

SEQ ID NO: 4614477 - DNA, 25 bp, Homo sapien
ctctgtttctcgcagatatgtcttc

SEQ ID NO: 4614478 - DNA, 25 bp, Homo sapien
tatgaagaagcctgaaaagccattg

SEQ ID NO: 4614479 - DNA, 25 bp, Homo sapien
ccgactactatgaagaagcctgaaa

SEQ ID NO: 4614480 - DNA, 25 bp, Homo sapien
gatatgtcttctccgactactatga

SEQ ID NO: 4614481 - DNA, 25 bp, Homo sapien
tcgaaagacaatcttctgaatcata

SEQ ID NO: 4614482 - DNA, 25 bp, Homo sapien
gcagcagttatcctctgtcgaaaga

SEQ ID NO: 4614483 - DNA, 25 bp, Homo sapien
tcctctgtcgaaagacaatcttctg

SEQ ID NO: 4614484 - DNA, 25 bp, Homo sapien
cccatttgcagcagttatcctctgt

SEQ ID NO: 4614485 - DNA, 25 bp, Homo sapien
attttccagttataaatgtaaacat

SEQ ID NO: 4614486 - DNA, 25 bp, Homo sapien
agctaattttccagttataaatgta

SEQ ID NO: 4614487 - DNA, 25 bp, Homo sapien
tcaactacacgatgagtttctaaag

SEQ ID NO: 4614488 - DNA, 25 bp, Homo sapien
ttccatattcaactacacgatgagt

SEQ ID NO: 4614489 - DNA, 25 bp, Homo sapien
gatcttttattccatattcaactac

SEQ ID NO: 4614490 - DNA, 25 bp, Homo sapien
actacacgatgagtttctaaagtca

SEQ ID NO: 4614491 - DNA, 25 bp, Homo sapien
tgccttgggctgacttgaacagata

SEQ ID NO: 4614492 - DNA, 25 bp, Homo sapien
caagctgccgatgagtcgagtacat

SEQ ID NO: 4614493 - DNA, 25 bp, Homo sapien
gaacagatatacatctggagcgcaa

SEQ ID NO: 4614494 - DNA, 25 bp, Homo sapien
aagggctgacgtaaacacgtttctg

SEQ ID NO: 4614495 - DNA, 25 bp, Homo sapien
acagaggcagagaaattgtggtctt

SEQ ID NO: 4614496 - DNA, 25 bp, Homo sapien
agaggcagagaaattgtggtctttt

SEQ ID NO: 4614497 - DNA, 25 bp, Homo sapien
gtctttttagctttcagttggcagt

SEQ ID NO: 4614498 - DNA, 25 bp, Homo sapien
cttgtctcaggactgactctggatt

SEQ ID NO: 4614499 - DNA, 25 bp, Homo sapien
gcgttagccgtgtgctgcttctttg

SEQ ID NO: 4614500 - DNA, 25 bp, Homo sapien
tccgttgcacacatggactatgcct

SEQ ID NO: 4614501 - DNA, 25 bp, Homo sapien
ccttcatgatttgtccgttgcacac

SEQ ID NO: 4614502 - DNA, 25 bp, Homo sapien
catggactatgcctttagcgttagc

SEQ ID NO: 4614503 - DNA, 25 bp, Homo sapien
ctgctctttagggaccttggcatct

SEQ ID NO: 4614504 - DNA, 25 bp, Homo sapien
ggcatctttcataccaaactcctgt

SEQ ID NO: 4614505 - DNA, 25 bp, Homo sapien
cttgcgcagtgctctataccttgca

SEQ ID NO: 4614506 - DNA, 25 bp, Homo sapien
tagacatatcttccccttgcgcagt

SEQ ID NO: 4614507 - DNA, 25 bp, Homo sapien
tagagtcagcgtgctagtgcttggc

SEQ ID NO: 4614508 - DNA, 25 bp, Homo sapien
tggcagttgccggatagagcccaga

SEQ ID NO: 4614509 - DNA, 25 bp, Homo sapien
ctgattcgtgcgtgaaatggtttgc

SEQ ID NO: 4614510 - DNA, 25 bp, Homo sapien
tgccactgggcaagatgaaaactga

SEQ ID NO: 4614511 - DNA, 25 bp, Homo sapien
gcattgctgtacgagtcccagtcat

SEQ ID NO: 4614512 - DNA, 25 bp, Homo sapien
cccagcattgctgtacgagtcccag

SEQ ID NO: 4614513 - DNA, 25 bp, Homo sapien
tgcttgttgagagcgctttcttggc

SEQ ID NO: 4614514 - DNA, 25 bp, Homo sapien
gggtgcttgttgagagcgctttctt

SEQ ID NO: 4614515 - DNA, 25 bp, Homo sapien
ggggcaaaattatgctccaggctcc

SEQ ID NO: 4614516 - DNA, 25 bp, Homo sapien
ggcaaaattatgctccaggctccag

SEQ ID NO: 4614517 - DNA, 25 bp, Homo sapien
taggggcaaaattatgctccaggct

SEQ ID NO: 4614518 - DNA, 25 bp, Homo sapien
ctaggggcaaaattatgctccaggc

SEQ ID NO: 4614519 - DNA, 25 bp, Homo sapien
cttggcagtggagataaactttgta

SEQ ID NO: 4614520 - DNA, 25 bp, Homo sapien
aaactttgtagagatacacagtcca

SEQ ID NO: 4614521 - DNA, 25 bp, Homo sapien
ggcagtggagataaactttgtagag

SEQ ID NO: 4614522 - DNA, 25 bp, Homo sapien
ctttgtagagatacacagtccagaa

SEQ ID NO: 4614523 - DNA, 25 bp, Homo sapien
ccttggccttctttcctttccacat

SEQ ID NO: 4614524 - DNA, 25 bp, Homo sapien
gacagcaggggccggagccaccttc

SEQ ID NO: 4614525 - DNA, 25 bp, Homo sapien
cagcaggggccggagccaccttctt

SEQ ID NO: 4614526 - DNA, 25 bp, Homo sapien
agcaggggccggagccaccttcttc

SEQ ID NO: 4614527 - DNA, 25 bp, Homo sapien
gatgtcctgtctaatgccaaaattc

SEQ ID NO: 4614528 - DNA, 25 bp, Homo sapien
ccatttcacaaagcgggcgaggtct

SEQ ID NO: 4614529 - DNA, 25 bp, Homo sapien
gctggatgtcctgtctaatgccaaa

SEQ ID NO: 4614530 - DNA, 25 bp, Homo sapien
ggccatttcacaaagcgggcgaggt

SEQ ID NO: 4614531 - DNA, 25 bp, Homo sapien
ttttcagtcgcttatagaggatgac

SEQ ID NO: 4614532 - DNA, 25 bp, Homo sapien
attttcagtcgcttatagaggatga

SEQ ID NO: 4614533 - DNA, 25 bp, Homo sapien
ggcgctttcttctccgcccgggcca

SEQ ID NO: 4614534 - DNA, 25 bp, Homo sapien
gcgctttcttctccgcccgggccaa

SEQ ID NO: 4614535 - DNA, 25 bp, Homo sapien
tgccggcgctttcttctccgcccgg

SEQ ID NO: 4614536 - DNA, 25 bp, Homo sapien
ctttgccggcgctttcttctccgcc

SEQ ID NO: 4614537 - DNA, 25 bp, Homo sapien
cgatgggatccatgttgtatgcaat

SEQ ID NO: 4614538 - DNA, 25 bp, Homo sapien
gatccatgttgtatgcaatcaccac

SEQ ID NO: 4614539 - DNA, 25 bp, Homo sapien
ctcgatgggatccatgttgtatgca

SEQ ID NO: 4614540 - DNA, 25 bp, Homo sapien
ccatgttgtatgcaatcaccaccaa

SEQ ID NO: 4614541 - DNA, 25 bp, Homo sapien
tctcattggctctgtcgttgtaatt

SEQ ID NO: 4614542 - DNA, 25 bp, Homo sapien
gttctgatagctaccaccagcttaa

SEQ ID NO: 4614543 - DNA, 25 bp, Homo sapien
ccagtgatgacggatctcattggct

SEQ ID NO: 4614544 - DNA, 25 bp, Homo sapien
gacggatctcattggctctgtcgtt

SEQ ID NO: 4614545 - DNA, 25 bp, Homo sapien
aattcctcagatgttttttgaaggg

SEQ ID NO: 4614546 - DNA, 25 bp, Homo sapien
taattcctcagatgttttttgaagg

SEQ ID NO: 4614547 - DNA, 25 bp, Homo sapien
tcaaaatatacgattaaagagacat

SEQ ID NO: 4614548 - DNA, 25 bp, Homo sapien
tcaggtgactactggagaatagaca

SEQ ID NO: 4614549 - DNA, 25 bp, Homo sapien
cttttacgcagaaacataattaata

SEQ ID NO: 4614550 - DNA, 25 bp, Homo sapien
cctgtctgttaagagtggcccatta

SEQ ID NO: 4614551 - DNA, 25 bp, Homo sapien
taccaataccatatccaaagtgacg

SEQ ID NO: 4614552 - DNA, 25 bp, Homo sapien
gcagcaaagcgtccattaccaatac

SEQ ID NO: 4614553 - DNA, 25 bp, Homo sapien
aaagtgacgtttccatacaggctgc

SEQ ID NO: 4614554 - DNA, 25 bp, Homo sapien
cacactgttctgattgcgcagcaaa

SEQ ID NO: 4614555 - DNA, 25 bp, Homo sapien
tagagcacgaatcaatagtaagttg

SEQ ID NO: 4614556 - DNA, 25 bp, Homo sapien
agcacgaatcaatagtaagttggag

SEQ ID NO: 4614557 - DNA, 25 bp, Homo sapien
cgatgagcttttagagcacgaatca

SEQ ID NO: 4614558 - DNA, 25 bp, Homo sapien
gcttttagagcacgaatcaatagta

SEQ ID NO: 4614559 - DNA, 25 bp, Homo sapien
tgttggcgaagaccttgtttctttc

SEQ ID NO: 4614560 - DNA, 25 bp, Homo sapien
tgttgttggcgaagaccttgtttct

SEQ ID NO: 4614561 - DNA, 25 bp, Homo sapien
gagtgtggtgttgttggcgaagacc

SEQ ID NO: 4614562 - DNA, 25 bp, Homo sapien
gatcttttgagtgtggtgttgttgg

SEQ ID NO: 4614563 - DNA, 25 bp, Homo sapien
gaagacaggcacacacggagttaag

SEQ ID NO: 4614564 - DNA, 25 bp, Homo sapien
tttagaagaatccaggaccactgtg

SEQ ID NO: 4614565 - DNA, 25 bp, Homo sapien
gcatttggtgcgttttgcagcagga

SEQ ID NO: 4614566 - DNA, 25 bp, Homo sapien
ggacttccagacttcgtttctcaca

SEQ ID NO: 4614567 - DNA, 25 bp, Homo sapien
ctatcaagagcaagtgcagcatgtg

SEQ ID NO: 4614568 - DNA, 25 bp, Homo sapien
cgccctcttgacctgtcccactgag

SEQ ID NO: 4614569 - DNA, 25 bp, Homo sapien
caacacaacgtactatctttatggc

SEQ ID NO: 4614570 - DNA, 25 bp, Homo sapien
tctgtaagagatcttttgaagagca

SEQ ID NO: 4614571 - DNA, 25 bp, Homo sapien
caaaagagctaaatactgggtgtca

SEQ ID NO: 4614572 - DNA, 25 bp, Homo sapien
tatttcagctcagactactagttaa

SEQ ID NO: 4614573 - DNA, 25 bp, Homo sapien
ccttttgaatattggaatgagtgct

SEQ ID NO: 4614574 - DNA, 25 bp, Homo sapien
gataggtgctttctataagtaaagc

SEQ ID NO: 4614575 - DNA, 25 bp, Homo sapien
tatgctgtttaggagacaccaggga

SEQ ID NO: 4614576 - DNA, 25 bp, Homo sapien
tcagttgaccttatgctgtttagga

SEQ ID NO: 4614577 - DNA, 25 bp, Homo sapien
gctgtttaggagacaccagggagtc

SEQ ID NO: 4614578 - DNA, 25 bp, Homo sapien
gaccttatgctgtttaggagacacc

SEQ ID NO: 4614579 - DNA, 25 bp, Homo sapien
tttggataaagtttgaagcagtctt

SEQ ID NO: 4614580 - DNA, 25 bp, Homo sapien
taatgcgatgcacattttgaaggca

SEQ ID NO: 4614581 - DNA, 25 bp, Homo sapien
tctataaacaagtgaagctgttgag

SEQ ID NO: 4614582 - DNA, 25 bp, Homo sapien
aagttgagagctgaatagtaagatc

SEQ ID NO: 4614583 - DNA, 25 bp, Homo sapien
tcatatacccatgcatgataagata

SEQ ID NO: 4614584 - DNA, 25 bp, Homo sapien
tatacccatgcatgataagatatgc

SEQ ID NO: 4614585 - DNA, 25 bp, Homo sapien
ctttaagccagcatctgtcatctgc

SEQ ID NO: 4614586 - DNA, 25 bp, Homo sapien
atacttatctttaagccagcatctg

SEQ ID NO: 4614587 - DNA, 25 bp, Homo sapien
tttgtttagtgcttctatgtggagt

SEQ ID NO: 4614588 - DNA, 25 bp, Homo sapien
gtggagttgcatgcttaaaagagac

SEQ ID NO: 4614589 - DNA, 25 bp, Homo sapien
agtgcttctatgtggagttgcatgc

SEQ ID NO: 4614590 - DNA, 25 bp, Homo sapien
tggagttgcatgcttaaaagagaca

SEQ ID NO: 4614591 - DNA, 25 bp, Homo sapien
ctgagtttaatacgggtgaccgtca

SEQ ID NO: 4614592 - DNA, 25 bp, Homo sapien
tgagtttaatacgggtgaccgtcat

SEQ ID NO: 4614593 - DNA, 25 bp, Homo sapien
gctttaaggtacttgtctgaagttc

SEQ ID NO: 4614594 - DNA, 25 bp, Homo sapien
ctttaaggtacttgtctgaagttca

SEQ ID NO: 4614595 - DNA, 25 bp, Homo sapien
taatactttaaagcttgtagcttta

SEQ ID NO: 4614596 - DNA, 25 bp, Homo sapien
ctaatactttaaagcttgtagcttt

SEQ ID NO: 4614597 - DNA, 25 bp, Homo sapien
gacaaagccaggtcaaactaggcca

SEQ ID NO: 4614598 - DNA, 25 bp, Homo sapien
tcagaactggggtagtgacaaagcc

SEQ ID NO: 4614599 - DNA, 25 bp, Homo sapien
tcaggaagttaacggcctcaggatg

SEQ ID NO: 4614600 - DNA, 25 bp, Homo sapien
gttcctggttctatttcaaaggcag

SEQ ID NO: 4614601 - DNA, 25 bp, Homo sapien
atcttttctttctccgctgtcggtt

SEQ ID NO: 4614602 - DNA, 25 bp, Homo sapien
tctttctccgctgtcggttctgtct

SEQ ID NO: 4614603 - DNA, 25 bp, Homo sapien
gtgactcttgacgcgtatgaacatc

SEQ ID NO: 4614604 - DNA, 25 bp, Homo sapien
tcttgacgcgtatgaacatcttttc

SEQ ID NO: 4614605 - DNA, 25 bp, Homo sapien
caaagtgtcccaaacagaatttcat

SEQ ID NO: 4614606 - DNA, 25 bp, Homo sapien
agatgtcaaagtgtcccaaacagaa

SEQ ID NO: 4614607 - DNA, 25 bp, Homo sapien
gtcaaagtgtcccaaacagaatttc

SEQ ID NO: 4614608 - DNA, 25 bp, Homo sapien
atgtcaaagtgtcccaaacagaatt

SEQ ID NO: 4614609 - DNA, 25 bp, Homo sapien
actgaatagtaatagttatgggcaa

SEQ ID NO: 4614610 - DNA, 25 bp, Homo sapien
tattacagcaaatgtatgtatcaag

SEQ ID NO: 4614611 - DNA, 25 bp, Homo sapien
tagttatgggcaatattttggaaaa

SEQ ID NO: 4614612 - DNA, 25 bp, Homo sapien
gtatcaagtccccagatttcattgt

SEQ ID NO: 4614613 - DNA, 25 bp, Homo sapien
cgtgtccaacattcgtataatataa

SEQ ID NO: 4614614 - DNA, 25 bp, Homo sapien
aatcccttttggaacatttggaatg

SEQ ID NO: 4614615 - DNA, 25 bp, Homo sapien
caattaatctgcttttcgtgtccaa

SEQ ID NO: 4614616 - DNA, 25 bp, Homo sapien
gcattagggcctacaattaatctgc

SEQ ID NO: 4614617 - DNA, 25 bp, Homo sapien
aaggcgtccgtctgcagtagctacg

SEQ ID NO: 4614618 - DNA, 25 bp, Homo sapien
cagtggattcaaggcgtccgtctgc

SEQ ID NO: 4614619 - DNA, 25 bp, Homo sapien
ttgacatggtctggctgtagaagtg

SEQ ID NO: 4614620 - DNA, 25 bp, Homo sapien
cagtagctacgtcttctgtttgaca

SEQ ID NO: 4614621 - DNA, 25 bp, Homo sapien
aggaagtctggcctatgggaggcct

SEQ ID NO: 4614622 - DNA, 25 bp, Homo sapien
tctggcctatgggaggccttgagtt

SEQ ID NO: 4614623 - DNA, 25 bp, Homo sapien
tatgggaggccttgagttgccagac

SEQ ID NO: 4614624 - DNA, 25 bp, Homo sapien
cctatgggaggccttgagttgccag

SEQ ID NO: 4614625 - DNA, 25 bp, Homo sapien
gcatccgcattgcagtgggcacact

SEQ ID NO: 4614626 - DNA, 25 bp, Homo sapien
cgttgctacaagaaccgccattttg

SEQ ID NO: 4614627 - DNA, 25 bp, Homo sapien
tttgattcgttggttggcatccgca

SEQ ID NO: 4614628 - DNA, 25 bp, Homo sapien
cagtggcaccgaggttggcatcaga

SEQ ID NO: 4614629 - DNA, 25 bp, Homo sapien
cagggccgggacctgtaagtgcgag

SEQ ID NO: 4614630 - DNA, 25 bp, Homo sapien
acctgtaagtgcgaggccccgtgcg

SEQ ID NO: 4614631 - DNA, 25 bp, Homo sapien
gaagtggcccggagttgcagcgggc

SEQ ID NO: 4614632 - DNA, 25 bp, Homo sapien
tcaagtgcccgttgtggtgcggcat

SEQ ID NO: 4614633 - DNA, 25 bp, Homo sapien
aattagcggcttgagttaacctccg

SEQ ID NO: 4614634 - DNA, 25 bp, Homo sapien
ggcttgagttaacctccgcacatcc

SEQ ID NO: 4614635 - DNA, 25 bp, Homo sapien
tgttgcggacaattagcggcttgag

SEQ ID NO: 4614636 - DNA, 25 bp, Homo sapien
tgttttgttgcggacaattagcggc

SEQ ID NO: 4614637 - DNA, 25 bp, Homo sapien
agagccccgtcctgattgatcgcat

SEQ ID NO: 4614638 - DNA, 25 bp, Homo sapien
tgaagttgcggtgatccagcgcaga

SEQ ID NO: 4614639 - DNA, 25 bp, Homo sapien
tgtctcactcaggtacatgtctcgg

SEQ ID NO: 4614640 - DNA, 25 bp, Homo sapien
tcttgggcatctcccggaaagtgcg

SEQ ID NO: 4614641 - DNA, 25 bp, Homo sapien
tgtggggagggcagcggaaagaaga

SEQ ID NO: 4614642 - DNA, 25 bp, Homo sapien
gtggggagggcagcggaaagaagag

SEQ ID NO: 4614643 - DNA, 25 bp, Homo sapien
cactcggatgttcccgcggcttaaa

SEQ ID NO: 4614644 - DNA, 25 bp, Homo sapien
ctcagacggtttcggtgcttctccc

SEQ ID NO: 4614645 - DNA, 25 bp, Homo sapien
tcgttcctttctcgggctcagacgg

SEQ ID NO: 4614646 - DNA, 25 bp, Homo sapien
gcgagcaccgaaatacctcttccag

SEQ ID NO: 4614647 - DNA, 25 bp, Homo sapien
gaggggacggtggacagaaaccaga

SEQ ID NO: 4614648 - DNA, 25 bp, Homo sapien
ggacagaaaccagagggagtgagag

SEQ ID NO: 4614649 - DNA, 25 bp, Homo sapien
agaggggacggtggacagaaaccag

SEQ ID NO: 4614650 - DNA, 25 bp, Homo sapien
aaatgcttgatgtggataactccca

SEQ ID NO: 4614651 - DNA, 25 bp, Homo sapien
gataactcccacttggtgaaggaaa

SEQ ID NO: 4614652 - DNA, 25 bp, Homo sapien
gatgtggataactcccacttggtga

SEQ ID NO: 4614653 - DNA, 25 bp, Homo sapien
tttcttgatgtgtcgttgtgaaatg

SEQ ID NO: 4614654 - DNA, 25 bp, Homo sapien
cattaagagcgctctttgaaaacgg

SEQ ID NO: 4614655 - DNA, 25 bp, Homo sapien
cagctggtaaacttggcaagctcgc

SEQ ID NO: 4614656 - DNA, 25 bp, Homo sapien
ctcgcctcattaagagcgctctttg

SEQ ID NO: 4614657 - DNA, 25 bp, Homo sapien
tggcaagctcgcctcattaagagcg

SEQ ID NO: 4614658 - DNA, 25 bp, Homo sapien
cgatgtcgggagacacttgcccagg

SEQ ID NO: 4614659 - DNA, 25 bp, Homo sapien
tagcgatgtcgggagacacttgccc

SEQ ID NO: 4614660 - DNA, 25 bp, Homo sapien
tgtcgggagacacttgcccagggct

SEQ ID NO: 4614661 - DNA, 25 bp, Homo sapien
gggtagcgatgtcgggagacacttg

SEQ ID NO: 4614662 - DNA, 25 bp, Homo sapien
gatgcaacctagttttggtggcaga

SEQ ID NO: 4614663 - DNA, 25 bp, Homo sapien
gacgctgcttcttcgcccttggtgt

SEQ ID NO: 4614664 - DNA, 25 bp, Homo sapien
aacttttggatgcaacctagttttg

SEQ ID NO: 4614665 - DNA, 25 bp, Homo sapien
ctgacgctgcttcttcgcccttggt

SEQ ID NO: 4614666 - DNA, 25 bp, Homo sapien
accatactcctatctcattttcctt

SEQ ID NO: 4614667 - DNA, 25 bp, Homo sapien
catactcctatctcattttcctttt

SEQ ID NO: 4614668 - DNA, 25 bp, Homo sapien
atactcctatctcattttccttttt

SEQ ID NO: 4614669 - DNA, 25 bp, Homo sapien
tcaccatactcctatctcattttcc

SEQ ID NO: 4614670 - DNA, 25 bp, Homo sapien
gggatttaaaagattgagattttca

SEQ ID NO: 4614671 - DNA, 25 bp, Homo sapien
tgcaccgaaatccaccagtccctct

SEQ ID NO: 4614672 - DNA, 25 bp, Homo sapien
ctggacaagaagaagtgttttgggg

SEQ ID NO: 4614673 - DNA, 25 bp, Homo sapien
agccaggcatcccatgcaccgaaat

SEQ ID NO: 4614674 - DNA, 25 bp, Homo sapien
gattagctgagtgttccatacaaga

SEQ ID NO: 4614675 - DNA, 25 bp, Homo sapien
gactacttagccattttggacagag

SEQ ID NO: 4614676 - DNA, 25 bp, Homo sapien
aacgtttttactggccctgatgaat

SEQ ID NO: 4614677 - DNA, 25 bp, Homo sapien
ggtcagactgaacagcagcataatt

SEQ ID NO: 4614678 - DNA, 25 bp, Homo sapien
gacacactcttatgacgggaatcag

SEQ ID NO: 4614679 - DNA, 25 bp, Homo sapien
tggtccaaacggtgcagaatctagc

SEQ ID NO: 4614680 - DNA, 25 bp, Homo sapien
tacctgagacacgtcaagtcagcgg

SEQ ID NO: 4614681 - DNA, 25 bp, Homo sapien
gaatcagtgagtaacattgtggtcc

SEQ ID NO: 4614682 - DNA, 25 bp, Homo sapien
tgggcagcagcccccgagacggtca

SEQ ID NO: 4614683 - DNA, 25 bp, Homo sapien
gacggtcacgccctcgccgctctcc

SEQ ID NO: 4614684 - DNA, 25 bp, Homo sapien
gcagcccccgagacggtcacgccct

SEQ ID NO: 4614685 - DNA, 25 bp, Homo sapien
ccccgagacggtcacgccctcgccg

SEQ ID NO: 4614686 - DNA, 25 bp, Homo sapien
caacgtggcgggaagtgaggaagta

SEQ ID NO: 4614687 - DNA, 25 bp, Homo sapien
tacacggaaacaaacgtggcctggc

SEQ ID NO: 4614688 - DNA, 25 bp, Homo sapien
cgaagttgaagccagcaacgtggcg

SEQ ID NO: 4614689 - DNA, 25 bp, Homo sapien
tgttgttttagagtctttccgcggc

SEQ ID NO: 4614690 - DNA, 25 bp, Homo sapien
gctttaatgataacgctgcgcagcc

SEQ ID NO: 4614691 - DNA, 25 bp, Homo sapien
taattcatcgggagctattctagtc

SEQ ID NO: 4614692 - DNA, 25 bp, Homo sapien
tatcaatataagtcaaagtgcgctc

SEQ ID NO: 4614693 - DNA, 25 bp, Homo sapien
gaatacctgaagctatcgtcgtctg

SEQ ID NO: 4614694 - DNA, 25 bp, Homo sapien
tttttatttagctgcatagaatctt

SEQ ID NO: 4614695 - DNA, 25 bp, Homo sapien
attttttatttagctgcatagaatc

SEQ ID NO: 4614696 - DNA, 25 bp, Homo sapien
tttatttagctgcatagaatcttta

SEQ ID NO: 4614697 - DNA, 25 bp, Homo sapien
tatttagctgcatagaatctttata

SEQ ID NO: 4614698 - DNA, 25 bp, Homo sapien
ttctatatccatcattcttctgttg

SEQ ID NO: 4614699 - DNA, 25 bp, Homo sapien
tttctatatccatcattcttctgtt

SEQ ID NO: 4614700 - DNA, 25 bp, Homo sapien
aaagttttagtatttgataacactg

SEQ ID NO: 4614701 - DNA, 25 bp, Homo sapien
tacataaaagttttagtatttgata

SEQ ID NO: 4614702 - DNA, 25 bp, Homo sapien
aagttttagtatttgataacactgc

SEQ ID NO: 4614703 - DNA, 25 bp, Homo sapien
agttttagtatttgataacactgcc

SEQ ID NO: 4614704 - DNA, 25 bp, Homo sapien
gaggcccaaaatgcttaactagtgt

SEQ ID NO: 4614705 - DNA, 25 bp, Homo sapien
gaagcaacaacacgttgaggtaact

SEQ ID NO: 4614706 - DNA, 25 bp, Homo sapien
tgaaagcctgaacatgacacacaat

SEQ ID NO: 4614707 - DNA, 25 bp, Homo sapien
gaaaagcaggcgacgttgtagatta

SEQ ID NO: 4614708 - DNA, 25 bp, Homo sapien
taactgcaagtgtatttgtgaagct

SEQ ID NO: 4614709 - DNA, 25 bp, Homo sapien
tagtattgcatcctaaatatgccac

SEQ ID NO: 4614710 - DNA, 25 bp, Homo sapien
gaagcttctggtaagttctatggaa

SEQ ID NO: 4614711 - DNA, 25 bp, Homo sapien
aatctaataaaccagtgtgtaccct

SEQ ID NO: 4614712 - DNA, 25 bp, Homo sapien
aattctaaaaatagttatccaattg

SEQ ID NO: 4614713 - DNA, 25 bp, Homo sapien
attctaaaaatagttatccaattgt

SEQ ID NO: 4614714 - DNA, 25 bp, Homo sapien
ctataaccaatgaataatacaaatt

SEQ ID NO: 4614715 - DNA, 25 bp, Homo sapien
gaataatacaaattattaccatgac

SEQ ID NO: 4614716 - DNA, 25 bp, Homo sapien
caatgaataatacaaattattacca

SEQ ID NO: 4614717 - DNA, 25 bp, Homo sapien
taatacaaattattaccatgacttg

SEQ ID NO: 4614718 - DNA, 25 bp, Homo sapien
gaatggtatcgcatttgtttttacc

SEQ ID NO: 4614719 - DNA, 25 bp, Homo sapien
gcgactatgtcttgtaggaatggta

SEQ ID NO: 4614720 - DNA, 25 bp, Homo sapien
tatgatgggcgactatgtcttgtag

SEQ ID NO: 4614721 - DNA, 25 bp, Homo sapien
tcaatatctaaagaagaggcataat

SEQ ID NO: 4614722 - DNA, 25 bp, Homo sapien
aaatgacccagtgtgcctgtcctgg

SEQ ID NO: 4614723 - DNA, 25 bp, Homo sapien
tttttgtacccatactctcaatggt

SEQ ID NO: 4614724 - DNA, 25 bp, Homo sapien
ggtgtttcaactccactgcagatgc

SEQ ID NO: 4614725 - DNA, 25 bp, Homo sapien
tgcagatgcctatcttgtaatttct

SEQ ID NO: 4614726 - DNA, 25 bp, Homo sapien
ccaaggtggttccagatcagctgcc

SEQ ID NO: 4614727 - DNA, 25 bp, Homo sapien
gatacccctgaatacccctgattga

SEQ ID NO: 4614728 - DNA, 25 bp, Homo sapien
gctgccaaagctctacaatagcgtt

SEQ ID NO: 4614729 - DNA, 25 bp, Homo sapien
ccctgattgactgtaggctgtagaa

SEQ ID NO: 4614730 - DNA, 25 bp, Homo sapien
gaaatcgataatactggtgaactag

SEQ ID NO: 4614731 - DNA, 25 bp, Homo sapien
gaactggttaggactgagaaatcga

SEQ ID NO: 4614732 - DNA, 25 bp, Homo sapien
tcttggcaaccctgtaggaggaggt

SEQ ID NO: 4614733 - DNA, 25 bp, Homo sapien
caatagactagacacagcaagtgca

SEQ ID NO: 4614734 - DNA, 25 bp, Homo sapien
ccgcgatttcgctggcctagtttcg

SEQ ID NO: 4614735 - DNA, 25 bp, Homo sapien
taattcgtgcgggagctcggcctca

SEQ ID NO: 4614736 - DNA, 25 bp, Homo sapien
tctccctaggagacctaggtcctgt

SEQ ID NO: 4614737 - DNA, 25 bp, Homo sapien
cctgttgtgaggctaattcgtgcgg

SEQ ID NO: 4614738 - DNA, 25 bp, Homo sapien
ggcatcggcggccagtcggacacca

SEQ ID NO: 4614739 - DNA, 25 bp, Homo sapien
acgtcagctcgcaggcatcggcggc

SEQ ID NO: 4614740 - DNA, 25 bp, Homo sapien
tgcgggtctccacgtcagctcgcag

SEQ ID NO: 4614741 - DNA, 25 bp, Homo sapien
agctcgcaggcatcggcggccagtc

SEQ ID NO: 4614742 - DNA, 25 bp, Homo sapien
gaatattgggtcactacctccaacc

SEQ ID NO: 4614743 - DNA, 25 bp, Homo sapien
taaggtccatccttgttaacgcatg

SEQ ID NO: 4614744 - DNA, 25 bp, Homo sapien
gacaggcttctcttacttagcatga

SEQ ID NO: 4614745 - DNA, 25 bp, Homo sapien
aaataaaaccttagtctctgacctg

SEQ ID NO: 4614746 - DNA, 25 bp, Homo sapien
aatcttttggtgttccaagcattcc

SEQ ID NO: 4614747 - DNA, 25 bp, Homo sapien
ttcttgattgtcattgtccctgacc

SEQ ID NO: 4614748 - DNA, 25 bp, Homo sapien
tgaatcttttggtgttccaagcatt

SEQ ID NO: 4614749 - DNA, 25 bp, Homo sapien
attgtccctgaccttcctaacagga

SEQ ID NO: 4614750 - DNA, 25 bp, Homo sapien
catcgcataattgcttgaaatccac

SEQ ID NO: 4614751 - DNA, 25 bp, Homo sapien
ttcagtgtacaaccccaggacatgg

SEQ ID NO: 4614752 - DNA, 25 bp, Homo sapien
tgacattcgaagttgaacagggctc

SEQ ID NO: 4614753 - DNA, 25 bp, Homo sapien
gaacagtattccaactaacgcatac

SEQ ID NO: 4614754 - DNA, 25 bp, Homo sapien
tcaggattgcgacttctggttgcag

SEQ ID NO: 4614755 - DNA, 25 bp, Homo sapien
cctctagaggagagagccaaatatg

SEQ ID NO: 4614756 - DNA, 25 bp, Homo sapien
gagatttcgggagctgtcatcagga

SEQ ID NO: 4614757 - DNA, 25 bp, Homo sapien
tctatttggagcacaacttgggtgg

SEQ ID NO: 4614758 - DNA, 25 bp, Homo sapien
ggcttcaaaccattaggtccaaaga

SEQ ID NO: 4614759 - DNA, 25 bp, Homo sapien
cccaaagccatcttggtgggacttg

SEQ ID NO: 4614760 - DNA, 25 bp, Homo sapien
ctgaattaggcctgtaccatacggg

SEQ ID NO: 4614761 - DNA, 25 bp, Homo sapien
taaggagctattgttggacaccgac

SEQ ID NO: 4614762 - DNA, 25 bp, Homo sapien
cagtcgcagaagtggtcactggatt

SEQ ID NO: 4614763 - DNA, 25 bp, Homo sapien
cttcctcagtcgcagaagtggtcac

SEQ ID NO: 4614764 - DNA, 25 bp, Homo sapien
tcctcagtcgcagaagtggtcactg

SEQ ID NO: 4614765 - DNA, 25 bp, Homo sapien
tcgcagaagtggtcactggattctg

SEQ ID NO: 4614766 - DNA, 25 bp, Homo sapien
catagagcctgtttcgcctgcctgt

SEQ ID NO: 4614767 - DNA, 25 bp, Homo sapien
aaatgtcaagaacccgccctcggag

SEQ ID NO: 4614768 - DNA, 25 bp, Homo sapien
gagtcaataagacccatggctccag

SEQ ID NO: 4614769 - DNA, 25 bp, Homo sapien
gcctgcctgttgtctcactcaaaat

SEQ ID NO: 4614770 - DNA, 25 bp, Homo sapien
tatttgaatgtcaacgttcaaaggc

SEQ ID NO: 4614771 - DNA, 25 bp, Homo sapien
atgtcaacgttcaaaggctttgagg

SEQ ID NO: 4614772 - DNA, 25 bp, Homo sapien
ctgtatttgaatgtcaacgttcaaa

SEQ ID NO: 4614773 - DNA, 25 bp, Homo sapien
ttgaatgtcaacgttcaaaggcttt

SEQ ID NO: 4614774 - DNA, 25 bp, Homo sapien
gggcatattataagtagacaatggg

SEQ ID NO: 4614775 - DNA, 25 bp, Homo sapien
gataatgtaagaagccagttgttgc

SEQ ID NO: 4614776 - DNA, 25 bp, Homo sapien
tgttgctcaaaacgaaaatctctga

SEQ ID NO: 4614777 - DNA, 25 bp, Homo sapien
tgtgagaaacacagctttaatgggc

SEQ ID NO: 4614778 - DNA, 25 bp, Homo sapien
gtaattctgtctccataccatatgt

SEQ ID NO: 4614779 - DNA, 25 bp, Homo sapien
ctctgttgacattaaagtgcttagt

SEQ ID NO: 4614780 - DNA, 25 bp, Homo sapien
cttgttttcttaatggatgcctcag

SEQ ID NO: 4614781 - DNA, 25 bp, Homo sapien
agtgcttagttccaaatgagttggc

SEQ ID NO: 4614782 - DNA, 25 bp, Homo sapien
aaagaagtgggcatcaaaaaatagt

SEQ ID NO: 4614783 - DNA, 25 bp, Homo sapien
gcagttaaaggaacgtagacacagg

SEQ ID NO: 4614784 - DNA, 25 bp, Homo sapien
aaatagtcttgatcgagacaaaggc

SEQ ID NO: 4614785 - DNA, 25 bp, Homo sapien
cacaggaccactggtgttctacctg

SEQ ID NO: 4614786 - DNA, 25 bp, Homo sapien
gggccaccctaagactgattgtcgc

SEQ ID NO: 4614787 - DNA, 25 bp, Homo sapien
tgattgtcgcaaattagcttggtaa

SEQ ID NO: 4614788 - DNA, 25 bp, Homo sapien
tggtaaagtgatggactaaacttcc

SEQ ID NO: 4614789 - DNA, 25 bp, Homo sapien
ctaaacttcccggatgagttccaag

SEQ ID NO: 4614790 - DNA, 25 bp, Homo sapien
ccaggtagtaatatccggagagaac

SEQ ID NO: 4614791 - DNA, 25 bp, Homo sapien
aaacacttagtttgcaggtggtcag

SEQ ID NO: 4614792 - DNA, 25 bp, Homo sapien
gaaatcagtcgacggaggagaagtt

SEQ ID NO: 4614793 - DNA, 25 bp, Homo sapien
tggtcaggcaaattttgggaccttg

SEQ ID NO: 4614794 - DNA, 25 bp, Homo sapien
tcatagcccacttccagaagggcca

SEQ ID NO: 4614795 - DNA, 25 bp, Homo sapien
ttcatagcccacttccagaagggcc

SEQ ID NO: 4614796 - DNA, 25 bp, Homo sapien
catagcccacttccagaagggccat

SEQ ID NO: 4614797 - DNA, 25 bp, Homo sapien
gagtgggcatgctgagcgcctcttt

SEQ ID NO: 4614798 - DNA, 25 bp, Homo sapien
aagcgaagcagaagtctcaatagcc

SEQ ID NO: 4614799 - DNA, 25 bp, Homo sapien
agcttcgtagcactccatgttggta

SEQ ID NO: 4614800 - DNA, 25 bp, Homo sapien
gacaaatactctgccagcttcgtag

SEQ ID NO: 4614801 - DNA, 25 bp, Homo sapien
tgagggtgaccttccttagaccgct

SEQ ID NO: 4614802 - DNA, 25 bp, Homo sapien
ctacgtgtgagggtgaccttcctta

SEQ ID NO: 4614803 - DNA, 25 bp, Homo sapien
cgtgtgagggtgaccttccttagac

SEQ ID NO: 4614804 - DNA, 25 bp, Homo sapien
tgaccttccttagaccgctgatcct

SEQ ID NO: 4614805 - DNA, 25 bp, Homo sapien
gcgttgccctcaaaggacaagaggt

SEQ ID NO: 4614806 - DNA, 25 bp, Homo sapien
gaaatgattggcgttgccctcaaag

SEQ ID NO: 4614807 - DNA, 25 bp, Homo sapien
cctgaaagaatgtacagattcatct

SEQ ID NO: 4614808 - DNA, 25 bp, Homo sapien
gatgcttgaaatgattggcgttgcc

SEQ ID NO: 4614809 - DNA, 25 bp, Homo sapien
tgtacaccaatgatctgcatcctga

SEQ ID NO: 4614810 - DNA, 25 bp, Homo sapien
gatgttgttctcgagtgtatctcaa

SEQ ID NO: 4614811 - DNA, 25 bp, Homo sapien
tcctctgaagtttatgccgcggctc

SEQ ID NO: 4614812 - DNA, 25 bp, Homo sapien
tgcatcctgagctggtccaagctgt

SEQ ID NO: 4614813 - DNA, 25 bp, Homo sapien
ggtcttcattcccaagcctttcagc

SEQ ID NO: 4614814 - DNA, 25 bp, Homo sapien
caccatcccggtcttcattcccaag

SEQ ID NO: 4614815 - DNA, 25 bp, Homo sapien
gcacaggtgcagttaaataaggctt

SEQ ID NO: 4614816 - DNA, 25 bp, Homo sapien
aataaggctttactcctaggagtat

SEQ ID NO: 4614817 - DNA, 25 bp, Homo sapien
cattatacaattggcacgactagga

SEQ ID NO: 4614818 - DNA, 25 bp, Homo sapien
ctgacatttcagagacatagcttag

SEQ ID NO: 4614819 - DNA, 25 bp, Homo sapien
caattggcacgactaggagaggaac

SEQ ID NO: 4614820 - DNA, 25 bp, Homo sapien
gacttaacgagagaggctgacattt

SEQ ID NO: 4614821 - DNA, 25 bp, Homo sapien
tgtcatctgggcgtagtgccctccg

SEQ ID NO: 4614822 - DNA, 25 bp, Homo sapien
gtgctattgtcatctgggcgtagtg

SEQ ID NO: 4614823 - DNA, 25 bp, Homo sapien
ttccctctgatgctctcattgcacc

SEQ ID NO: 4614824 - DNA, 25 bp, Homo sapien
ggcgtagtgccctccgtgctctttc

SEQ ID NO: 4614825 - DNA, 25 bp, Homo sapien
cctgtatttatgaagatgtggagga

SEQ ID NO: 4614826 - DNA, 25 bp, Homo sapien
ctgtatttatgaagatgtggaggac

SEQ ID NO: 4614827 - DNA, 25 bp, Homo sapien
tctgcctgtatttatgaagatgtgg

SEQ ID NO: 4614828 - DNA, 25 bp, Homo sapien
tgcctgtatttatgaagatgtggag

SEQ ID NO: 4614829 - DNA, 25 bp, Homo sapien
tgaagtgggagcagaattgcaaatt

SEQ ID NO: 4614830 - DNA, 25 bp, Homo sapien
ggtattcttcctgtaccaccagcag

SEQ ID NO: 4614831 - DNA, 25 bp, Homo sapien
tagtccccagttatcagggggtgac

SEQ ID NO: 4614832 - DNA, 25 bp, Homo sapien
agcagcccctagtccccagttatca

SEQ ID NO: 4614833 - DNA, 25 bp, Homo sapien
ccttgaagaattcccaccctttgat

SEQ ID NO: 4614834 - DNA, 25 bp, Homo sapien
agaattcccaccctttgatacccag

SEQ ID NO: 4614835 - DNA, 25 bp, Homo sapien
tcaagcgccaagcccttgaagaatt

SEQ ID NO: 4614836 - DNA, 25 bp, Homo sapien
attcccaccctttgatacccaggtg

SEQ ID NO: 4614837 - DNA, 25 bp, Homo sapien
ctctctgtcttctgaccctattcta

SEQ ID NO: 4614838 - DNA, 25 bp, Homo sapien
ttctgaccctattctatctttctcc

SEQ ID NO: 4614839 - DNA, 25 bp, Homo sapien
gtgggatggttgtttcatcattccc

SEQ ID NO: 4614840 - DNA, 25 bp, Homo sapien
gggtgggatggttgtttcatcattc

SEQ ID NO: 4614841 - DNA, 25 bp, Homo sapien
cttctggctaggtctccaatctcca

SEQ ID NO: 4614842 - DNA, 25 bp, Homo sapien
ttgtacctgtccagttctatccttc

SEQ ID NO: 4614843 - DNA, 25 bp, Homo sapien
gttctatccttctggctaggtctcc

SEQ ID NO: 4614844 - DNA, 25 bp, Homo sapien
ttcccaatgccccttatgcttgtac

SEQ ID NO: 4614845 - DNA, 25 bp, Homo sapien
tgtggttcgaggcaattgtctgcaa

SEQ ID NO: 4614846 - DNA, 25 bp, Homo sapien
ctgtggggctaaattcagcgctggc

SEQ ID NO: 4614847 - DNA, 25 bp, Homo sapien
tcggagcaggtgctcgccaatggct

SEQ ID NO: 4614848 - DNA, 25 bp, Homo sapien
ctctgacagatgagcaagcggagcc

SEQ ID NO: 4614849 - DNA, 25 bp, Homo sapien
ttgtggaattggttacaggccgtgt

SEQ ID NO: 4614850 - DNA, 25 bp, Homo sapien
tggaattggttacaggccgtgtgct

SEQ ID NO: 4614851 - DNA, 25 bp, Homo sapien
catttgtggaattggttacaggccg

SEQ ID NO: 4614852 - DNA, 25 bp, Homo sapien
atttggcatttgtggaattggttac

SEQ ID NO: 4614853 - DNA, 25 bp, Homo sapien
agggtacagaaagcaggtacgcctt

SEQ ID NO: 4614854 - DNA, 25 bp, Homo sapien
ccttggaggcatgtaacccacatcc

SEQ ID NO: 4614855 - DNA, 25 bp, Homo sapien
agaaagcaggtacgccttggaggca

SEQ ID NO: 4614856 - DNA, 25 bp, Homo sapien
caggtacgccttggaggcatgtaac

SEQ ID NO: 4614857 - DNA, 25 bp, Homo sapien
cttgagtttctttccgtagtcttga

SEQ ID NO: 4614858 - DNA, 25 bp, Homo sapien
aaaggagggagtagttcttcagctt

SEQ ID NO: 4614859 - DNA, 25 bp, Homo sapien
ttgagtttctttccgtagtcttgag

SEQ ID NO: 4614860 - DNA, 25 bp, Homo sapien
cccctgcttcccttatcatctttcg

SEQ ID NO: 4614861 - DNA, 25 bp, Homo sapien
gaagggcacaggtttgtcatttctg

SEQ ID NO: 4614862 - DNA, 25 bp, Homo sapien
ttttctccataaatgctgcagcctc

SEQ ID NO: 4614863 - DNA, 25 bp, Homo sapien
ttgttccttgcggatcccagttttc

SEQ ID NO: 4614864 - DNA, 25 bp, Homo sapien
ggctgatggcgacttgcattgcctc

SEQ ID NO: 4614865 - DNA, 25 bp, Homo sapien
gcttctggctgatggcgacttgcat

SEQ ID NO: 4614866 - DNA, 25 bp, Homo sapien
ctggctgatggcgacttgcattgcc

SEQ ID NO: 4614867 - DNA, 25 bp, Homo sapien
ctgatggcgacttgcattgcctcca

SEQ ID NO: 4614868 - DNA, 25 bp, Homo sapien
tgagatctgagagcacttggctgca

SEQ ID NO: 4614869 - DNA, 25 bp, Homo sapien
tactcgggttcccatgaaggatctg

SEQ ID NO: 4614870 - DNA, 25 bp, Homo sapien
cttctcaggaggcaaagtaatgtga

SEQ ID NO: 4614871 - DNA, 25 bp, Homo sapien
tctctgtggttgttggcctccatga

SEQ ID NO: 4614872 - DNA, 25 bp, Homo sapien
tcctggagacttgaactccactaag

SEQ ID NO: 4614873 - DNA, 25 bp, Homo sapien
gacttgaactccactaagttgagct

SEQ ID NO: 4614874 - DNA, 25 bp, Homo sapien
gaactccactaagttgagcttccac

SEQ ID NO: 4614875 - DNA, 25 bp, Homo sapien
tggagacttgaactccactaagttg

SEQ ID NO: 4614876 - DNA, 25 bp, Homo sapien
tcctggtgtcctgctctgattatgc

SEQ ID NO: 4614877 - DNA, 25 bp, Homo sapien
agttccggcaggcctcctttcctag

SEQ ID NO: 4614878 - DNA, 25 bp, Homo sapien
tgtgcatagctgatcagcagcaggg

SEQ ID NO: 4614879 - DNA, 25 bp, Homo sapien
tctgattatgctttcggggagaggc

SEQ ID NO: 4614880 - DNA, 25 bp, Homo sapien
caagctttgttatcaagcgtgtaac

SEQ ID NO: 4614881 - DNA, 25 bp, Homo sapien
cattctgtctggatattgtccctca

SEQ ID NO: 4614882 - DNA, 25 bp, Homo sapien
accactgattccgtagccttttgga

SEQ ID NO: 4614883 - DNA, 25 bp, Homo sapien
tggattccccagtaatcaactgcac

SEQ ID NO: 4614884 - DNA, 25 bp, Homo sapien
ggagatgtctcaaatttgtttctgc

SEQ ID NO: 4614885 - DNA, 25 bp, Homo sapien
tatgttgtctaatttccgaatgtgg

SEQ ID NO: 4614886 - DNA, 25 bp, Homo sapien
aattgccctccctgtactactttag

SEQ ID NO: 4614887 - DNA, 25 bp, Homo sapien
taattcctttgtggctgtaaaacac

SEQ ID NO: 4614888 - DNA, 25 bp, Homo sapien
gagctgtagcttaactagggacatg

SEQ ID NO: 4614889 - DNA, 25 bp, Homo sapien
gtgttggttatgaggacccagtggc

SEQ ID NO: 4614890 - DNA, 25 bp, Homo sapien
gtggcagagctgtagcttaactagg

SEQ ID NO: 4614891 - DNA, 25 bp, Homo sapien
gtagcttaactagggacatgtccag

SEQ ID NO: 4614892 - DNA, 25 bp, Homo sapien
accaggtcatagtaggaactatcta

SEQ ID NO: 4614893 - DNA, 25 bp, Homo sapien
cgtgaccaggtcatagtaggaacta

SEQ ID NO: 4614894 - DNA, 25 bp, Homo sapien
tgaccaggtcatagtaggaactatc

SEQ ID NO: 4614895 - DNA, 25 bp, Homo sapien
gtgaccaggtcatagtaggaactat

SEQ ID NO: 4614896 - DNA, 25 bp, Homo sapien
tgggccctagggaagaatgtagtct

SEQ ID NO: 4614897 - DNA, 25 bp, Homo sapien
cacatgcaggtgtgcggtgactctg

SEQ ID NO: 4614898 - DNA, 25 bp, Homo sapien
caaggcaggccgctctcagattctg

SEQ ID NO: 4614899 - DNA, 25 bp, Homo sapien
tcagattctgaggagtgtgtgcttc

SEQ ID NO: 4614900 - DNA, 25 bp, Homo sapien
gatatctgcacatctcatgtaatag

SEQ ID NO: 4614901 - DNA, 25 bp, Homo sapien
tatctgcacatctcatgtaatagtt

SEQ ID NO: 4614902 - DNA, 25 bp, Homo sapien
cattgtgttcttttggacatgtcac

SEQ ID NO: 4614903 - DNA, 25 bp, Homo sapien
tgttcttttggacatgtcacatttc

SEQ ID NO: 4614904 - DNA, 25 bp, Homo sapien
aaattggaccctgtagacatccagc

SEQ ID NO: 4614905 - DNA, 25 bp, Homo sapien
gcgtgcaagagcaattggaaggaaa

SEQ ID NO: 4614906 - DNA, 25 bp, Homo sapien
aggaaaattggaccctgtagacatc

SEQ ID NO: 4614907 - DNA, 25 bp, Homo sapien
ttagcgtgcaagagcaattggaagg

SEQ ID NO: 4614908 - DNA, 25 bp, Homo sapien
atgtgtcttggagtttttcttcttg

SEQ ID NO: 4614909 - DNA, 25 bp, Homo sapien
ttaagcatttctctgtattggttat

SEQ ID NO: 4614910 - DNA, 25 bp, Homo sapien
agcatttctctgtattggttattct

SEQ ID NO: 4614911 - DNA, 25 bp, Homo sapien
tttcttcttggggagtatctttgtg

SEQ ID NO: 4614912 - DNA, 25 bp, Homo sapien
tcaggctcccggaagcggaagggga

SEQ ID NO: 4614913 - DNA, 25 bp, Homo sapien
tcggccggtccaggccctcaggctc

SEQ ID NO: 4614914 - DNA, 25 bp, Homo sapien
ctcccggaagcggaaggggagagcg

SEQ ID NO: 4614915 - DNA, 25 bp, Homo sapien
ggccctcaggctcccggaagcggaa

SEQ ID NO: 4614916 - DNA, 25 bp, Homo sapien
agatttagccaggattggatgctgt

SEQ ID NO: 4614917 - DNA, 25 bp, Homo sapien
gatttagccaggattggatgctgtc

SEQ ID NO: 4614918 - DNA, 25 bp, Homo sapien
ttgaagaattttgaggagcatctaa

SEQ ID NO: 4614919 - DNA, 25 bp, Homo sapien
ttttgaggagcatctaagggaagca

SEQ ID NO: 4614920 - DNA, 25 bp, Homo sapien
tagttggtcaatcttttaccattga

SEQ ID NO: 4614921 - DNA, 25 bp, Homo sapien
gatagtgtttgcttgcctcaggcca

SEQ ID NO: 4614922 - DNA, 25 bp, Homo sapien
ctgaagcagcataggtagttaataa

SEQ ID NO: 4614923 - DNA, 25 bp, Homo sapien
tggtcagtgtcttctaagtagttgg

SEQ ID NO: 4614924 - DNA, 25 bp, Homo sapien
atttggtactaagtgcactaataat

SEQ ID NO: 4614925 - DNA, 25 bp, Homo sapien
ggtactaagtgcactaataattggc

SEQ ID NO: 4614926 - DNA, 25 bp, Homo sapien
agtgcactaataattggcgatgctg

SEQ ID NO: 4614927 - DNA, 25 bp, Homo sapien
tactaagtgcactaataattggcga

SEQ ID NO: 4614928 - DNA, 25 bp, Homo sapien
aacttagtctctctgttcgcccttg

SEQ ID NO: 4614929 - DNA, 25 bp, Homo sapien
cttagtctctctgttcgcccttgga

SEQ ID NO: 4614930 - DNA, 25 bp, Homo sapien
tgtcctctcataggcacactgggga

SEQ ID NO: 4614931 - DNA, 25 bp, Homo sapien
gaagaacttagtctctctgttcgcc

SEQ ID NO: 4614932 - DNA, 25 bp, Homo sapien
gatgtctcccttgtaaatccagaag

SEQ ID NO: 4614933 - DNA, 25 bp, Homo sapien
gaaagtagaggttggattgggagaa

SEQ ID NO: 4614934 - DNA, 25 bp, Homo sapien
gaagtggatgtgagaaagtagaggt

SEQ ID NO: 4614935 - DNA, 25 bp, Homo sapien
gtctcccttgtaaatccagaagtgg

SEQ ID NO: 4614936 - DNA, 25 bp, Homo sapien
ccatgtgttatgagcttatagggac

SEQ ID NO: 4614937 - DNA, 25 bp, Homo sapien
ggaacagttttcagacagatgcccc

SEQ ID NO: 4614938 - DNA, 25 bp, Homo sapien
tacaagctgcataaagttacccaac

SEQ ID NO: 4614939 - DNA, 25 bp, Homo sapien
tagcttagctgtggaactgttttcc

SEQ ID NO: 4614940 - DNA, 25 bp, Homo sapien
ggcgttgtatttgagggaactgtaa

SEQ ID NO: 4614941 - DNA, 25 bp, Homo sapien
tttctgcagtgctcagtgggtccct

SEQ ID NO: 4614942 - DNA, 25 bp, Homo sapien
tgcagtgctcagtgggtccctaaat

SEQ ID NO: 4614943 - DNA, 25 bp, Homo sapien
ctacttctctttaaaggcgttgtat

SEQ ID NO: 4614944 - DNA, 25 bp, Homo sapien
gttttgggtgtggatctcctttgtc

SEQ ID NO: 4614945 - DNA, 25 bp, Homo sapien
cggttccacaaaactctcctttcat

SEQ ID NO: 4614946 - DNA, 25 bp, Homo sapien
ttttgggtgtggatctcctttgtct

SEQ ID NO: 4614947 - DNA, 25 bp, Homo sapien
tccacaaaactctcctttcatgttt

SEQ ID NO: 4614948 - DNA, 25 bp, Homo sapien
tcacattctaactgttctgttgtcc

SEQ ID NO: 4614949 - DNA, 25 bp, Homo sapien
ccggttctgcactctgattcttcac

SEQ ID NO: 4614950 - DNA, 25 bp, Homo sapien
ttcacctccctctggcaactcacat

SEQ ID NO: 4614951 - DNA, 25 bp, Homo sapien
ggttctgcactctgattcttcacct

SEQ ID NO: 4614952 - DNA, 25 bp, Homo sapien
tgtcttgaagaaaccagtgaccttg

SEQ ID NO: 4614953 - DNA, 25 bp, Homo sapien
caccaagtatgatcttgaaggagga

SEQ ID NO: 4614954 - DNA, 25 bp, Homo sapien
catttgtatcagatccagggctttt

SEQ ID NO: 4614955 - DNA, 25 bp, Homo sapien
ggaaaggagttaccaagaggagcaa

SEQ ID NO: 4614956 - DNA, 25 bp, Homo sapien
gattaagactagcaaccacaaccac

SEQ ID NO: 4614957 - DNA, 25 bp, Homo sapien
tagcagttctccgagtctttccaag

SEQ ID NO: 4614958 - DNA, 25 bp, Homo sapien
tgtaggcaccatagagaatcagagt

SEQ ID NO: 4614959 - DNA, 25 bp, Homo sapien
agtgagagctcacacatttgggtgg

SEQ ID NO: 4614960 - DNA, 25 bp, Homo sapien
aaaacataaaaatagcccggcatgg

SEQ ID NO: 4614961 - DNA, 25 bp, Homo sapien
tggtgcgtgcctgtagccccagcta

SEQ ID NO: 4614962 - DNA, 25 bp, Homo sapien
ctcaggaggctgaggcaagagaatc

SEQ ID NO: 4614963 - DNA, 25 bp, Homo sapien
caagagaatcgtttgaacccgggag

SEQ ID NO: 4614964 - DNA, 25 bp, Homo sapien
tctgggtataccagtcaggttgggt

SEQ ID NO: 4614965 - DNA, 25 bp, Homo sapien
cagtgggaggccagtttaaatctgg

SEQ ID NO: 4614966 - DNA, 25 bp, Homo sapien
tgcttaatctcaggacagtgggagg

SEQ ID NO: 4614967 - DNA, 25 bp, Homo sapien
tgtaatgcagaaagataactctcac

SEQ ID NO: 4614968 - DNA, 25 bp, Homo sapien
tcatccttgtgcaggggctatgcta

SEQ ID NO: 4614969 - DNA, 25 bp, Homo sapien
atcttctctgtagcattccaatttt

SEQ ID NO: 4614970 - DNA, 25 bp, Homo sapien
tatatgtgctgccaaggtgagcaca

SEQ ID NO: 4614971 - DNA, 25 bp, Homo sapien
atggaacactttccgaatttgtgtg

SEQ ID NO: 4614972 - DNA, 25 bp, Homo sapien
gatactaggagactggaattatttg

SEQ ID NO: 4614973 - DNA, 25 bp, Homo sapien
tggatactaggagactggaattatt

SEQ ID NO: 4614974 - DNA, 25 bp, Homo sapien
tactaggagactggaattatttggg

SEQ ID NO: 4614975 - DNA, 25 bp, Homo sapien
ggatactaggagactggaattattt

SEQ ID NO: 4614976 - DNA, 25 bp, Homo sapien
gcaggagagcccctggttccagtct

SEQ ID NO: 4614977 - DNA, 25 bp, Homo sapien
tgacttaggaagaagccacttccaa

SEQ ID NO: 4614978 - DNA, 25 bp, Homo sapien
cagtagaatccatggaggcttgctt

SEQ ID NO: 4614979 - DNA, 25 bp, Homo sapien
cgagagagtctcctgtataacaaaa

SEQ ID NO: 4614980 - DNA, 25 bp, Homo sapien
atttatctcacaatttcccttggtc

SEQ ID NO: 4614981 - DNA, 25 bp, Homo sapien
aatttcccttggtctggggtcagat

SEQ ID NO: 4614982 - DNA, 25 bp, Homo sapien
gctttaggttgccaccaggctgcag

SEQ ID NO: 4614983 - DNA, 25 bp, Homo sapien
ttctctgctttaggttgccaccagg

SEQ ID NO: 4614984 - DNA, 25 bp, Homo sapien
tgagataggattgctttgcgctggc

SEQ ID NO: 4614985 - DNA, 25 bp, Homo sapien
ttgcgctggctgtcagaagatgcat

SEQ ID NO: 4614986 - DNA, 25 bp, Homo sapien
gctttgcgctggctgtcagaagatg

SEQ ID NO: 4614987 - DNA, 25 bp, Homo sapien
gagataggattgctttgcgctggct

SEQ ID NO: 4614988 - DNA, 25 bp, Homo sapien
ggagataactgttgggtgaaatccc

SEQ ID NO: 4614989 - DNA, 25 bp, Homo sapien
tgttgggtgaaatcccaccggtgcc

SEQ ID NO: 4614990 - DNA, 25 bp, Homo sapien
acacactgctgaccaaccatttgga

SEQ ID NO: 4614991 - DNA, 25 bp, Homo sapien
gctgaccaaccatttggagataact

SEQ ID NO: 4614992 - DNA, 25 bp, Homo sapien
gttaagttcagtcatgagtcacaca

SEQ ID NO: 4614993 - DNA, 25 bp, Homo sapien
actggtatggtggttctgctttgca

SEQ ID NO: 4614994 - DNA, 25 bp, Homo sapien
ctcttcctggcagataaacattagg

SEQ ID NO: 4614995 - DNA, 25 bp, Homo sapien
aacattaggatcttggactttgacc

SEQ ID NO: 4614996 - DNA, 25 bp, Homo sapien
tgaaatcttgtttgcttcagaattt

SEQ ID NO: 4614997 - DNA, 25 bp, Homo sapien
ctcggtctgctcgtctgaattcttt

SEQ ID NO: 4614998 - DNA, 25 bp, Homo sapien
ttctggccctttctcggtctgctcg

SEQ ID NO: 4614999 - DNA, 25 bp, Homo sapien
cctttctcggtctgctcgtctgaat

SEQ ID NO: 4615000 - DNA, 25 bp, Homo sapien
tcccagctaggctgccaatgaaacg

SEQ ID NO: 4615001 - DNA, 25 bp, Homo sapien
taggctgccaatgaaacgtttgctc

SEQ ID NO: 4615002 - DNA, 25 bp, Homo sapien
ggccatcccagctaggctgccaatg

SEQ ID NO: 4615003 - DNA, 25 bp, Homo sapien
agggatggccatcccagctaggctg

SEQ ID NO: 4615004 - DNA, 25 bp, Homo sapien
caaactggtaattatcatggctggg

SEQ ID NO: 4615005 - DNA, 25 bp, Homo sapien
ggatatcttgacctacgtggcttgg

SEQ ID NO: 4615006 - DNA, 25 bp, Homo sapien
gcttggaagataagtggttttccca

SEQ ID NO: 4615007 - DNA, 25 bp, Homo sapien
gaacagaccgcccagaataagatta

SEQ ID NO: 4615008 - DNA, 25 bp, Homo sapien
cacaaatagggtaaactcctctagc

SEQ ID NO: 4615009 - DNA, 25 bp, Homo sapien
tctgcacaagccctagtgtcttcct

SEQ ID NO: 4615010 - DNA, 25 bp, Homo sapien
ggacattgtctaggtttgggccatg

SEQ ID NO: 4615011 - DNA, 25 bp, Homo sapien
gccaatgatgaaaccgtcctttatg

SEQ ID NO: 4615012 - DNA, 25 bp, Homo sapien
tcttccttaggtgttgccaatgatg

SEQ ID NO: 4615013 - DNA, 25 bp, Homo sapien
gtctaggctgttgaaccctggctgg

SEQ ID NO: 4615014 - DNA, 25 bp, Homo sapien
ggtgaacgtggcctgagagactggt

SEQ ID NO: 4615015 - DNA, 25 bp, Homo sapien
ccgagacagaccctggggctatggt

SEQ ID NO: 4615016 - DNA, 25 bp, Homo sapien
gtgttcctggtctaggctgttgaac

SEQ ID NO: 4615017 - DNA, 25 bp, Homo sapien
gccatctttgcattgacttcagtgg

SEQ ID NO: 4615018 - DNA, 25 bp, Homo sapien
acaacatagatgtggagggtatgtg

SEQ ID NO: 4615019 - DNA, 25 bp, Homo sapien
ctggacaacatagatgtggagggta

SEQ ID NO: 4615020 - DNA, 25 bp, Homo sapien
tagatgtggagggtatgtggactca

SEQ ID NO: 4615021 - DNA, 25 bp, Homo sapien
gactccatttggttgtggctccttt

SEQ ID NO: 4615022 - DNA, 25 bp, Homo sapien
ctagaagagttgcaggggcaaatag

SEQ ID NO: 4615023 - DNA, 25 bp, Homo sapien
ttgcaggggcaaatagttggagaca

SEQ ID NO: 4615024 - DNA, 25 bp, Homo sapien
gtggttcctttctctacaccatagc

SEQ ID NO: 4615025 - DNA, 25 bp, Homo sapien
tgcagttttggtgtggacatccttt

SEQ ID NO: 4615026 - DNA, 25 bp, Homo sapien
gatgctattcccttctgtttgtagt

SEQ ID NO: 4615027 - DNA, 25 bp, Homo sapien
tttggatgcagttttggtgtggaca

SEQ ID NO: 4615028 - DNA, 25 bp, Homo sapien
cccctgggaggtgtatactgggagg

SEQ ID NO: 4615029 - DNA, 25 bp, Homo sapien
tgctttgagatcttggcgctgcagc

SEQ ID NO: 4615030 - DNA, 25 bp, Homo sapien
ctttgagatcttggcgctgcagcgg

SEQ ID NO: 4615031 - DNA, 25 bp, Homo sapien
aatgctttgagatcttggcgctgca

SEQ ID NO: 4615032 - DNA, 25 bp, Homo sapien
gtgaatgctttgagatcttggcgct

SEQ ID NO: 4615033 - DNA, 25 bp, Homo sapien
tgcgtttctgcggtcacaatcaggg

SEQ ID NO: 4615034 - DNA, 25 bp, Homo sapien
tggctgcgtttctgcggtcacaatc

SEQ ID NO: 4615035 - DNA, 25 bp, Homo sapien
ttggaaacgcggttggcggcagggc

SEQ ID NO: 4615036 - DNA, 25 bp, Homo sapien
cctccgcgctgtagctgttggaaac

SEQ ID NO: 4615037 - DNA, 25 bp, Homo sapien
ctatcctgctctggaccggggcagc

SEQ ID NO: 4615038 - DNA, 25 bp, Homo sapien
caggtgaagaaatcccgttctgtct

SEQ ID NO: 4615039 - DNA, 25 bp, Homo sapien
gtgaagaaatcccgttctgtcttcc

SEQ ID NO: 4615040 - DNA, 25 bp, Homo sapien
tatcctgctctggaccggggcagct

SEQ ID NO: 4615041 - DNA, 25 bp, Homo sapien
acttaaaaggacagccaagaagtct

SEQ ID NO: 4615042 - DNA, 25 bp, Homo sapien
aggtttcctgtgacattacagcaag

SEQ ID NO: 4615043 - DNA, 25 bp, Homo sapien
aaaggtttcctgtgacattacagca

SEQ ID NO: 4615044 - DNA, 25 bp, Homo sapien
aaaaggtttcctgtgacattacagc

SEQ ID NO: 4615045 - DNA, 25 bp, Homo sapien
caaaagcctccaatgcgaatcccag

SEQ ID NO: 4615046 - DNA, 25 bp, Homo sapien
agcagccaactgcttccgggttcaa

SEQ ID NO: 4615047 - DNA, 25 bp, Homo sapien
gctcgggcgcgccaatttagggaaa

SEQ ID NO: 4615048 - DNA, 25 bp, Homo sapien
aatgcgaatcccagcgccgctcggg

SEQ ID NO: 4615049 - DNA, 25 bp, Homo sapien
ccgcgccgggcctgcgcttccagcc

SEQ ID NO: 4615050 - DNA, 25 bp, Homo sapien
ccgggcctgcgcttccagccaccgc

SEQ ID NO: 4615051 - DNA, 25 bp, Homo sapien
gcctgcgcttccagccaccgcccac

SEQ ID NO: 4615052 - DNA, 25 bp, Homo sapien
cgcgccgggcctgcgcttccagcca

SEQ ID NO: 4615053 - DNA, 25 bp, Homo sapien
tcctgtctgattccccttattgcta

SEQ ID NO: 4615054 - DNA, 25 bp, Homo sapien
gatttataacactgccagactaagt

SEQ ID NO: 4615055 - DNA, 25 bp, Homo sapien
cctatccgatttataacactgccag

SEQ ID NO: 4615056 - DNA, 25 bp, Homo sapien
tagttatcacaatggcacttccttc

SEQ ID NO: 4615057 - DNA, 25 bp, Homo sapien
ctgaaaattgacacacaaaacttca

SEQ ID NO: 4615058 - DNA, 25 bp, Homo sapien
cttcagttctccaaatcgtttttag

SEQ ID NO: 4615059 - DNA, 25 bp, Homo sapien
tcagttctccaaatcgtttttagta

SEQ ID NO: 4615060 - DNA, 25 bp, Homo sapien
aattgacacacaaaacttcagttct

SEQ ID NO: 4615061 - DNA, 25 bp, Homo sapien
ttcacagaatttacttttcttcaca

SEQ ID NO: 4615062 - DNA, 25 bp, Homo sapien
cagaatttacttttcttcacatcaa

SEQ ID NO: 4615063 - DNA, 25 bp, Homo sapien
tggagacatcagcttcacagaattt

SEQ ID NO: 4615064 - DNA, 25 bp, Homo sapien
cacagaatttacttttcttcacatc

SEQ ID NO: 4615065 - DNA, 25 bp, Homo sapien
cttcacagaacttccagaagtgata

SEQ ID NO: 4615066 - DNA, 25 bp, Homo sapien
tcacagaacttccagaagtgataga

SEQ ID NO: 4615067 - DNA, 25 bp, Homo sapien
ttcacagaacttccagaagtgatag

SEQ ID NO: 4615068 - DNA, 25 bp, Homo sapien
tcttcacagaacttccagaagtgat

SEQ ID NO: 4615069 - DNA, 25 bp, Homo sapien
caatgaaggttaaaattcgggactg

SEQ ID NO: 4615070 - DNA, 25 bp, Homo sapien
accccatgtggcactgagtttatct

SEQ ID NO: 4615071 - DNA, 25 bp, Homo sapien
ctctaataataatggtctggaactc

SEQ ID NO: 4615072 - DNA, 25 bp, Homo sapien
gtggcactgagtttatctctaataa

SEQ ID NO: 4615073 - DNA, 25 bp, Homo sapien
catgtggcactgagtttatctctaa

SEQ ID NO: 4615074 - DNA, 25 bp, Homo sapien
ttgactgcagcaaatacattatctc

SEQ ID NO: 4615075 - DNA, 25 bp, Homo sapien
tttataccaacatatacaggaagtt

SEQ ID NO: 4615076 - DNA, 25 bp, Homo sapien
acattatctccatttggaacaatta

SEQ ID NO: 4615077 - DNA, 25 bp, Homo sapien
catatacaggaagttcatcaggaga

SEQ ID NO: 4615078 - DNA, 25 bp, Homo sapien
ctgagaggcaaagggtagggcatcc

SEQ ID NO: 4615079 - DNA, 25 bp, Homo sapien
gagaggcaaagggtagggcatccat

SEQ ID NO: 4615080 - DNA, 25 bp, Homo sapien
aggcaaagggtagggcatccattta

SEQ ID NO: 4615081 - DNA, 25 bp, Homo sapien
cttagcattacaggggctgagaggc

SEQ ID NO: 4615082 - DNA, 25 bp, Homo sapien
agcagctgtagctgagatcccagca

SEQ ID NO: 4615083 - DNA, 25 bp, Homo sapien
agctgtagctgagatcccagcacct

SEQ ID NO: 4615084 - DNA, 25 bp, Homo sapien
gaggctgtgcttccacgatctccat

SEQ ID NO: 4615085 - DNA, 25 bp, Homo sapien
ggctgtgcttccacgatctccatca

SEQ ID NO: 4615086 - DNA, 25 bp, Homo sapien
tgcaatagtttgaaatctcagaggc

SEQ ID NO: 4615087 - DNA, 25 bp, Homo sapien
tccaagcagctgcaatagtttgaaa

SEQ ID NO: 4615088 - DNA, 25 bp, Homo sapien
ccaggctccacatgggatctagctt

SEQ ID NO: 4615089 - DNA, 25 bp, Homo sapien
acatgggatctagcttcttccaagc

SEQ ID NO: 4615090 - DNA, 25 bp, Homo sapien
agttctctggctgtttctgtgagtt

SEQ ID NO: 4615091 - DNA, 25 bp, Homo sapien
tgtgagtttttcatctacgtttttg

SEQ ID NO: 4615092 - DNA, 25 bp, Homo sapien
tgagtttttcatctacgtttttgaa

SEQ ID NO: 4615093 - DNA, 25 bp, Homo sapien
catctacgtttttgaagagattggt

SEQ ID NO: 4615094 - DNA, 25 bp, Homo sapien
tcttcatggttctctgttccagtga

SEQ ID NO: 4615095 - DNA, 25 bp, Homo sapien
tcatggttctctgttccagtgagta

SEQ ID NO: 4615096 - DNA, 25 bp, Homo sapien
catcttcatggttctctgttccagt

SEQ ID NO: 4615097 - DNA, 25 bp, Homo sapien
tgtttcatcttcatggttctctgtt

SEQ ID NO: 4615098 - DNA, 25 bp, Homo sapien
cttggtagaaagcacagaagaacct

SEQ ID NO: 4615099 - DNA, 25 bp, Homo sapien
gtagaaagcacagaagaacctgggt

SEQ ID NO: 4615100 - DNA, 25 bp, Homo sapien
tggtagaaagcacagaagaacctgg

SEQ ID NO: 4615101 - DNA, 25 bp, Homo sapien
cttcttggtagaaagcacagaagaa

SEQ ID NO: 4615102 - DNA, 25 bp, Homo sapien
gaggaaccaggcctgtaccgtgaaa

SEQ ID NO: 4615103 - DNA, 25 bp, Homo sapien
tttttatctactggaggaaccaggc

SEQ ID NO: 4615104 - DNA, 25 bp, Homo sapien
aggcctgtaccgtgaaaggtctttg

SEQ ID NO: 4615105 - DNA, 25 bp, Homo sapien
accaggcctgtaccgtgaaaggtct

SEQ ID NO: 4615106 - DNA, 25 bp, Homo sapien
catcagagactaattgcctctggct

SEQ ID NO: 4615107 - DNA, 25 bp, Homo sapien
caaagaggagatataggacagatca

SEQ ID NO: 4615108 - DNA, 25 bp, Homo sapien
cactggtcccatcagagactaattg

SEQ ID NO: 4615109 - DNA, 25 bp, Homo sapien
cagcctgtccaagtgtaatataata

SEQ ID NO: 4615110 - DNA, 25 bp, Homo sapien
cctttcccacttttggtagatcagt

SEQ ID NO: 4615111 - DNA, 25 bp, Homo sapien
ctttcccacttttggtagatcagta

SEQ ID NO: 4615112 - DNA, 25 bp, Homo sapien
ttcccacttttggtagatcagtatc

SEQ ID NO: 4615113 - DNA, 25 bp, Homo sapien
cccacttttggtagatcagtatcat

SEQ ID NO: 4615114 - DNA, 25 bp, Homo sapien
aaagcttttcgtctctcatcatcac

SEQ ID NO: 4615115 - DNA, 25 bp, Homo sapien
gcaaaagcttttcgtctctcatcat

SEQ ID NO: 4615116 - DNA, 25 bp, Homo sapien
gggagcaaaagcttttcgtctctca

SEQ ID NO: 4615117 - DNA, 25 bp, Homo sapien
gagcaaaagcttttcgtctctcatc

SEQ ID NO: 4615118 - DNA, 25 bp, Homo sapien
caaaagaggtccattcccaactcaa

SEQ ID NO: 4615119 - DNA, 25 bp, Homo sapien
atgtgagccatagcaaaagaggtcc

SEQ ID NO: 4615120 - DNA, 25 bp, Homo sapien
gagccatagcaaaagaggtccattc

SEQ ID NO: 4615121 - DNA, 25 bp, Homo sapien
gtccattcccaactcaagccccata

SEQ ID NO: 4615122 - DNA, 25 bp, Homo sapien
tcttcaacagattatatgcaagagg

SEQ ID NO: 4615123 - DNA, 25 bp, Homo sapien
tcctcttcaacagattatatgcaag

SEQ ID NO: 4615124 - DNA, 25 bp, Homo sapien
caacagattatatgcaagaggtaaa

SEQ ID NO: 4615125 - DNA, 25 bp, Homo sapien
cagattcctcttcaacagattatat

SEQ ID NO: 4615126 - DNA, 25 bp, Homo sapien
cattatcgttgcagccattatggct

SEQ ID NO: 4615127 - DNA, 25 bp, Homo sapien
aagtattgcctggtgtcatcgacac

SEQ ID NO: 4615128 - DNA, 25 bp, Homo sapien
gcctttcctaatccatacaccaggg

SEQ ID NO: 4615129 - DNA, 25 bp, Homo sapien
gggtaaacaccagtgaactgatcaa

SEQ ID NO: 4615130 - DNA, 25 bp, Homo sapien
cttttggattgttatctgtccccat

SEQ ID NO: 4615131 - DNA, 25 bp, Homo sapien
tttcacttttggattgttatctgtc

SEQ ID NO: 4615132 - DNA, 25 bp, Homo sapien
tcacttttggattgttatctgtccc

SEQ ID NO: 4615133 - DNA, 25 bp, Homo sapien
cacttttggattgttatctgtcccc

SEQ ID NO: 4615134 - DNA, 25 bp, Homo sapien
ttcaacttcaacattggatgatgtg

SEQ ID NO: 4615135 - DNA, 25 bp, Homo sapien
tggaatcttgacttccgtagctgca

SEQ ID NO: 4615136 - DNA, 25 bp, Homo sapien
gaatcttgacttccgtagctgcagg

SEQ ID NO: 4615137 - DNA, 25 bp, Homo sapien
acttcaacattggatgatgtgtttg

SEQ ID NO: 4615138 - DNA, 25 bp, Homo sapien
ttgtcctcttcagtaatgatgtcac

SEQ ID NO: 4615139 - DNA, 25 bp, Homo sapien
tttgtcctcttcagtaatgatgtca

SEQ ID NO: 4615140 - DNA, 25 bp, Homo sapien
ttttgtcctcttcagtaatgatgtc

SEQ ID NO: 4615141 - DNA, 25 bp, Homo sapien
ctactctattttgtctggctctttt

SEQ ID NO: 4615142 - DNA, 25 bp, Homo sapien
tcagaatcggaggttgatgtaaccc

SEQ ID NO: 4615143 - DNA, 25 bp, Homo sapien
cttcagaatcggaggttgatgtaac

SEQ ID NO: 4615144 - DNA, 25 bp, Homo sapien
ttcagaatcggaggttgatgtaacc

SEQ ID NO: 4615145 - DNA, 25 bp, Homo sapien
gagcagtctgaacgttcctgtcacc

SEQ ID NO: 4615146 - DNA, 25 bp, Homo sapien
tctgaacgttcctgtcaccttttct

SEQ ID NO: 4615147 - DNA, 25 bp, Homo sapien
tgtgagcagtctgaacgttcctgtc

SEQ ID NO: 4615148 - DNA, 25 bp, Homo sapien
gcagtctgaacgttcctgtcacctt

SEQ ID NO: 4615149 - DNA, 25 bp, Homo sapien
ttatcttcatgctgcaagtagcctg

SEQ ID NO: 4615150 - DNA, 25 bp, Homo sapien
taagagtagtttccacagagtaatt

SEQ ID NO: 4615151 - DNA, 25 bp, Homo sapien
taataagatcagtagcccgtgtttc

SEQ ID NO: 4615152 - DNA, 25 bp, Homo sapien
gcaaggcacatgcttaatgtaaata

SEQ ID NO: 4615153 - DNA, 25 bp, Homo sapien
ggatggccacttcttatcagtaagg

SEQ ID NO: 4615154 - DNA, 25 bp, Homo sapien
ttttaatcttggatttggagtccgc

SEQ ID NO: 4615155 - DNA, 25 bp, Homo sapien
ctccattaccgggatggccacttct

SEQ ID NO: 4615156 - DNA, 25 bp, Homo sapien
ggagtccgccgacattctggaattt

SEQ ID NO: 4615157 - DNA, 25 bp, Homo sapien
catcatcagttttttggtaatgatt

SEQ ID NO: 4615158 - DNA, 25 bp, Homo sapien
ctaagttcttctatttcctgtgttc

SEQ ID NO: 4615159 - DNA, 25 bp, Homo sapien
tcctgtgttctcatcatcagttttt

SEQ ID NO: 4615160 - DNA, 25 bp, Homo sapien
tgttctcatcatcagttttttggta

SEQ ID NO: 4615161 - DNA, 25 bp, Homo sapien
gatgggagggattagtttgtttgcc

SEQ ID NO: 4615162 - DNA, 25 bp, Homo sapien
tgccaacaggactgttttaatttgc

SEQ ID NO: 4615163 - DNA, 25 bp, Homo sapien
acatcttcaaatgcgctgtgttttg

SEQ ID NO: 4615164 - DNA, 25 bp, Homo sapien
aatgcgctgtgttttgtggaatgcc

SEQ ID NO: 4615165 - DNA, 25 bp, Homo sapien
tgtttgtgtcacaaggtggcaggga

SEQ ID NO: 4615166 - DNA, 25 bp, Homo sapien
cgtaaagagtgcttacttgctggat

SEQ ID NO: 4615167 - DNA, 25 bp, Homo sapien
agagtgcttacttgctggatttgaa

SEQ ID NO: 4615168 - DNA, 25 bp, Homo sapien
aaaacgcgtaaagagtgcttacttg

SEQ ID NO: 4615169 - DNA, 25 bp, Homo sapien
tgcctgggcgactccgcagggatct

SEQ ID NO: 4615170 - DNA, 25 bp, Homo sapien
ctaatttctcatgggacagtccagc

SEQ ID NO: 4615171 - DNA, 25 bp, Homo sapien
agtccagctgttgacgcacagccag

SEQ ID NO: 4615172 - DNA, 25 bp, Homo sapien
gctgttgacgcacagccagaaaaga

SEQ ID NO: 4615173 - DNA, 25 bp, Homo sapien
tcaatccactttgccaagctttctg

SEQ ID NO: 4615174 - DNA, 25 bp, Homo sapien
catttggttttggagctgcaggagc

SEQ ID NO: 4615175 - DNA, 25 bp, Homo sapien
cacctgtgtgaagttcgtccatgag

SEQ ID NO: 4615176 - DNA, 25 bp, Homo sapien
gctgtactccagacaacttggcatg

SEQ ID NO: 4615177 - DNA, 25 bp, Homo sapien
gaaattgattgtagctatcaaagca

SEQ ID NO: 4615178 - DNA, 25 bp, Homo sapien
cttgttgaatcataaaagctacctg

SEQ ID NO: 4615179 - DNA, 25 bp, Homo sapien
actgttcccaatgagtgttctcttg

SEQ ID NO: 4615180 - DNA, 25 bp, Homo sapien
tgctgatcaaggaggcattggatct

SEQ ID NO: 4615181 - DNA, 25 bp, Homo sapien
taaaggtttttagaggctggcaatg

SEQ ID NO: 4615182 - DNA, 25 bp, Homo sapien
ctttctcaactaggccagtattact

SEQ ID NO: 4615183 - DNA, 25 bp, Homo sapien
actgactttctcaactaggccagta

SEQ ID NO: 4615184 - DNA, 25 bp, Homo sapien
gagaaatctagtggaatcttttcca

SEQ ID NO: 4615185 - DNA, 25 bp, Homo sapien
gactagttgaactttgaggtcactc

SEQ ID NO: 4615186 - DNA, 25 bp, Homo sapien
tcctgtctttatcctcagagggcag

SEQ ID NO: 4615187 - DNA, 25 bp, Homo sapien
cagattaatcagtgccgaggaagat

SEQ ID NO: 4615188 - DNA, 25 bp, Homo sapien
tcattatcggaaaacccaacagtct

SEQ ID NO: 4615189 - DNA, 25 bp, Homo sapien
ggtgtaaccttagcgagaattggca

SEQ ID NO: 4615190 - DNA, 25 bp, Homo sapien
tcaaagcagtagtaggaaggcattc

SEQ ID NO: 4615191 - DNA, 25 bp, Homo sapien
tatagtgtatcctcccaggtgacag

SEQ ID NO: 4615192 - DNA, 25 bp, Homo sapien
cacgtgtgtccgagagatacttgac

SEQ ID NO: 4615193 - DNA, 25 bp, Homo sapien
caaaataattgccagcacccttcaa

SEQ ID NO: 4615194 - DNA, 25 bp, Homo sapien
gaccaaagggccatgctacaaaata

SEQ ID NO: 4615195 - DNA, 25 bp, Homo sapien
gaactggttatacaaactctgtcct

SEQ ID NO: 4615196 - DNA, 25 bp, Homo sapien
cacccttcaaaagtgttatgtaaga

SEQ ID NO: 4615197 - DNA, 25 bp, Homo sapien
aaatgtctcttgtccaagtactaac

SEQ ID NO: 4615198 - DNA, 25 bp, Homo sapien
aaaatgtctcttgtccaagtactaa

SEQ ID NO: 4615199 - DNA, 25 bp, Homo sapien
caaaatgtctcttgtccaagtacta

SEQ ID NO: 4615200 - DNA, 25 bp, Homo sapien
cagctcgtagccctgatatcatgca

SEQ ID NO: 4615201 - DNA, 25 bp, Homo sapien
ctgagaactcggcatcactgctgtg

SEQ ID NO: 4615202 - DNA, 25 bp, Homo sapien
gctcgtagccctgatatcatgcact

SEQ ID NO: 4615203 - DNA, 25 bp, Homo sapien
gtagccctgatatcatgcactgaga

SEQ ID NO: 4615204 - DNA, 25 bp, Homo sapien
tccctttcacttgtttagtcttaca

SEQ ID NO: 4615205 - DNA, 25 bp, Homo sapien
tgtaatccctttcacttgtttagtc

SEQ ID NO: 4615206 - DNA, 25 bp, Homo sapien
tcacttgtttagtcttacagagtgt

SEQ ID NO: 4615207 - DNA, 25 bp, Homo sapien
tagtcttacagagtgttttgacaac

SEQ ID NO: 4615208 - DNA, 25 bp, Homo sapien
ttaagaaactcatttgcctccttac

SEQ ID NO: 4615209 - DNA, 25 bp, Homo sapien
tttccttctctgagtggacctgccc

SEQ ID NO: 4615210 - DNA, 25 bp, Homo sapien
tataagatctgtgagctttgcactt

SEQ ID NO: 4615211 - DNA, 25 bp, Homo sapien
gtggtgacagatgcccttagtattt

SEQ ID NO: 4615212 - DNA, 25 bp, Homo sapien
tgttcacctctgtagaaagattagg

SEQ ID NO: 4615213 - DNA, 25 bp, Homo sapien
tgttgaccttggatagtctgatgac

SEQ ID NO: 4615214 - DNA, 25 bp, Homo sapien
catttgagaataggattttgctcca

SEQ ID NO: 4615215 - DNA, 25 bp, Homo sapien
gaaggatgaaccaaaatctttctag

SEQ ID NO: 4615216 - DNA, 25 bp, Homo sapien
gcctcaaccgtcctgtttcaagcga

SEQ ID NO: 4615217 - DNA, 25 bp, Homo sapien
tctttctagtgaatggagctttcat

SEQ ID NO: 4615218 - DNA, 25 bp, Homo sapien
gatccagcggccactcacatttaat

SEQ ID NO: 4615219 - DNA, 25 bp, Homo sapien
ctcacatttaatcgctgtctctgcc

SEQ ID NO: 4615220 - DNA, 25 bp, Homo sapien
ctgagatccagcggccactcacatt

SEQ ID NO: 4615221 - DNA, 25 bp, Homo sapien
cactcacatttaatcgctgtctctg

SEQ ID NO: 4615222 - DNA, 25 bp, Homo sapien
tccttctgacatggcgttgggtgca

SEQ ID NO: 4615223 - DNA, 25 bp, Homo sapien
cctctgccaccaaaggatttctgga

SEQ ID NO: 4615224 - DNA, 25 bp, Homo sapien
cactggcattggttggcccacaggt

SEQ ID NO: 4615225 - DNA, 25 bp, Homo sapien
ctgctgcctggtagagggccccatc

SEQ ID NO: 4615226 - DNA, 25 bp, Homo sapien
gaatttgaaaagatacaggctctgg

SEQ ID NO: 4615227 - DNA, 25 bp, Homo sapien
aacaggagctgtgcctatctcttgc

SEQ ID NO: 4615228 - DNA, 25 bp, Homo sapien
cagtaatttgctatgactatgggca

SEQ ID NO: 4615229 - DNA, 25 bp, Homo sapien
gaaggagtctgatttgcttgcctaa

SEQ ID NO: 4615230 - DNA, 25 bp, Homo sapien
gtcagatgtctgaagtgggtttcac

SEQ ID NO: 4615231 - DNA, 25 bp, Homo sapien
aatttgtgattgcctttagggccca

SEQ ID NO: 4615232 - DNA, 25 bp, Homo sapien
cagtatctagagctacattccttgc

SEQ ID NO: 4615233 - DNA, 25 bp, Homo sapien
ttttccagtatctagagctacattc

SEQ ID NO: 4615234 - DNA, 25 bp, Homo sapien
gagacctactccatcaaaacaggga

SEQ ID NO: 4615235 - DNA, 25 bp, Homo sapien
tttgtaaaactgcaaagcgtaaagc

SEQ ID NO: 4615236 - DNA, 25 bp, Homo sapien
gctgtttcatacagtctcacaatgg

SEQ ID NO: 4615237 - DNA, 25 bp, Homo sapien
taatatattgaagagcactgctgtt

SEQ ID NO: 4615238 - DNA, 25 bp, Homo sapien
tcttacactgagttccttgcctcct

SEQ ID NO: 4615239 - DNA, 25 bp, Homo sapien
aatgctcagcttgtgtctgaaagcc

SEQ ID NO: 4615240 - DNA, 25 bp, Homo sapien
actttctcagccctggtagcaatgc

SEQ ID NO: 4615241 - DNA, 25 bp, Homo sapien
cataagtaaccttcttgacatggct

SEQ ID NO: 4615242 - DNA, 25 bp, Homo sapien
actctgttacgactgacctgttctg

SEQ ID NO: 4615243 - DNA, 25 bp, Homo sapien
atacaaatactgatggccctttggg

SEQ ID NO: 4615244 - DNA, 25 bp, Homo sapien
gaaactcagctttagagaatggcaa

SEQ ID NO: 4615245 - DNA, 25 bp, Homo sapien
cattcagctttgtcagatgtcacta

SEQ ID NO: 4615246 - DNA, 25 bp, Homo sapien
gtgcttttgggtcagtgtttggctt

SEQ ID NO: 4615247 - DNA, 25 bp, Homo sapien
cacaaatcaagaccgggagagcacg

SEQ ID NO: 4615248 - DNA, 25 bp, Homo sapien
ctgcccacatgaataatttgttcca

SEQ ID NO: 4615249 - DNA, 25 bp, Homo sapien
gctgtatgaattactcctgcccaca

SEQ ID NO: 4615250 - DNA, 25 bp, Homo sapien
agaatcatcaatcaagggctcattg

SEQ ID NO: 4615251 - DNA, 25 bp, Homo sapien
cccctgtgcagaatcatcaatcaag

SEQ ID NO: 4615252 - DNA, 25 bp, Homo sapien
ggctcattgacccataccaggtcct

SEQ ID NO: 4615253 - DNA, 25 bp, Homo sapien
gcactgagtttctgagagagtggcc

SEQ ID NO: 4615254 - DNA, 25 bp, Homo sapien
gcaccaagtccgtttatacccagag

SEQ ID NO: 4615255 - DNA, 25 bp, Homo sapien
gtgcttcgtggatctgtgctgcctc

SEQ ID NO: 4615256 - DNA, 25 bp, Homo sapien
cctcctgatgcaccaagtccgttta

SEQ ID NO: 4615257 - DNA, 25 bp, Homo sapien
ccgcggccagttgctgtattggtga

SEQ ID NO: 4615258 - DNA, 25 bp, Homo sapien
tatttccgctagactatgaacaacc

SEQ ID NO: 4615259 - DNA, 25 bp, Homo sapien
gggcagagtccgtcacctctttgtc

SEQ ID NO: 4615260 - DNA, 25 bp, Homo sapien
ctctttgcctgtggttcgagtgtca

SEQ ID NO: 4615261 - DNA, 25 bp, Homo sapien
tcgagtgtcagtccatattctccat

SEQ ID NO: 4615262 - DNA, 25 bp, Homo sapien
tcagttctgcgaaattcctttgttt

SEQ ID NO: 4615263 - DNA, 25 bp, Homo sapien
ttcagttctgcgaaattcctttgtt

SEQ ID NO: 4615264 - DNA, 25 bp, Homo sapien
cttcagttctgcgaaattcctttgt

SEQ ID NO: 4615265 - DNA, 25 bp, Homo sapien
tttcatagataagcttcctttttgc

SEQ ID NO: 4615266 - DNA, 25 bp, Homo sapien
cctcaccattcgaatttcagttctg

SEQ ID NO: 4615267 - DNA, 25 bp, Homo sapien
tgatagtgcttcactttttcataga

SEQ ID NO: 4615268 - DNA, 25 bp, Homo sapien
ctcaccattcgaatttcagttctgt

SEQ ID NO: 4615269 - DNA, 25 bp, Homo sapien
tttgggttctgcaggcacatagacg

SEQ ID NO: 4615270 - DNA, 25 bp, Homo sapien
ctgcaggcacatagacgttgccagc

SEQ ID NO: 4615271 - DNA, 25 bp, Homo sapien
ggttctgcaggcacatagacgttgc

SEQ ID NO: 4615272 - DNA, 25 bp, Homo sapien
ggcacatagacgttgccagcttttc

SEQ ID NO: 4615273 - DNA, 25 bp, Homo sapien
ctttgtgctcacaccattgatacct

SEQ ID NO: 4615274 - DNA, 25 bp, Homo sapien
cattgatacctctgaatctgatgac

SEQ ID NO: 4615275 - DNA, 25 bp, Homo sapien
cacaccattgatacctctgaatctg

SEQ ID NO: 4615276 - DNA, 25 bp, Homo sapien
accattgatacctctgaatctgatg

SEQ ID NO: 4615277 - DNA, 25 bp, Homo sapien
ccttctacaaaatagatggtcagtt

SEQ ID NO: 4615278 - DNA, 25 bp, Homo sapien
cttcattccacttcttggagaagat

SEQ ID NO: 4615279 - DNA, 25 bp, Homo sapien
caaaatagatggtcagtttcttcat

SEQ ID NO: 4615280 - DNA, 25 bp, Homo sapien
tcattccacttcttggagaagataa

SEQ ID NO: 4615281 - DNA, 25 bp, Homo sapien
tactagctcgctcttcacgttccat

SEQ ID NO: 4615282 - DNA, 25 bp, Homo sapien
cacagttaaactccttagtagtcta

SEQ ID NO: 4615283 - DNA, 25 bp, Homo sapien
caacttaccgtttgtattactccat

SEQ ID NO: 4615284 - DNA, 25 bp, Homo sapien
cctgggctctaattaggttgttgct

SEQ ID NO: 4615285 - DNA, 25 bp, Homo sapien
cccaccacttcccagcttgaaaaca

SEQ ID NO: 4615286 - DNA, 25 bp, Homo sapien
ctgggtgagttgactcagaggtact

SEQ ID NO: 4615287 - DNA, 25 bp, Homo sapien
ggtgagttgactcagaggtactgaa

SEQ ID NO: 4615288 - DNA, 25 bp, Homo sapien
gttgactcagaggtactgaaccagg

SEQ ID NO: 4615289 - DNA, 25 bp, Homo sapien
actcagaggtactgaaccaggagca

SEQ ID NO: 4615290 - DNA, 25 bp, Homo sapien
gaaactacatttcccggcaggccat

SEQ ID NO: 4615291 - DNA, 25 bp, Homo sapien
gcaaaagcctgcagatcaaggcctc

SEQ ID NO: 4615292 - DNA, 25 bp, Homo sapien
caaggcctcgcagagcgtgatggaa

SEQ ID NO: 4615293 - DNA, 25 bp, Homo sapien
ctcgcagagcgtgatggaagttgta

SEQ ID NO: 4615294 - DNA, 25 bp, Homo sapien
tctggaaagttgcagccgccactgc

SEQ ID NO: 4615295 - DNA, 25 bp, Homo sapien
catactctggaaagttgcagccgcc

SEQ ID NO: 4615296 - DNA, 25 bp, Homo sapien
aaaggcgcccacatggaaagcgcgc

SEQ ID NO: 4615297 - DNA, 25 bp, Homo sapien
cgcgtatttagctcgggaagctcat

SEQ ID NO: 4615298 - DNA, 25 bp, Homo sapien
ctcccggtcggagtcagctgcctgg

SEQ ID NO: 4615299 - DNA, 25 bp, Homo sapien
cccggtcggagtcagctgcctggct

SEQ ID NO: 4615300 - DNA, 25 bp, Homo sapien
ggatgccggcggctccctcagcgac

SEQ ID NO: 4615301 - DNA, 25 bp, Homo sapien
ggctcccaggcagagcggatgccgg

SEQ ID NO: 4615302 - DNA, 25 bp, Homo sapien
ccagatccctggccaccgcggcatc

SEQ ID NO: 4615303 - DNA, 25 bp, Homo sapien
tccagatccctggccaccgcggcat

SEQ ID NO: 4615304 - DNA, 25 bp, Homo sapien
ttctggatcctcaccgtcctcaagg

SEQ ID NO: 4615305 - DNA, 25 bp, Homo sapien
tattctccggaatgacttctggatc

SEQ ID NO: 4615306 - DNA, 25 bp, Homo sapien
tggatcctcaccgtcctcaaggcat

SEQ ID NO: 4615307 - DNA, 25 bp, Homo sapien
agtcaccaggtcagtattctccgga

SEQ ID NO: 4615308 - DNA, 25 bp, Homo sapien
gactcaggacttcagcctaagggac

SEQ ID NO: 4615309 - DNA, 25 bp, Homo sapien
tacagagcaccaattggagcaaggc

SEQ ID NO: 4615310 - DNA, 25 bp, Homo sapien
tttgtgagccactacagactcagga

SEQ ID NO: 4615311 - DNA, 25 bp, Homo sapien
caagggagtgacaatcagatgtgca

SEQ ID NO: 4615312 - DNA, 25 bp, Homo sapien
tacaggttctccctatcttgccgag

SEQ ID NO: 4615313 - DNA, 25 bp, Homo sapien
atacaggttctccctatcttgccga

SEQ ID NO: 4615314 - DNA, 25 bp, Homo sapien
gatacaggttctccctatcttgccg

SEQ ID NO: 4615315 - DNA, 25 bp, Homo sapien
gtttcttgtctgcaggctcgatcta

SEQ ID NO: 4615316 - DNA, 25 bp, Homo sapien
gtctgcaggctcgatctattgtaat

SEQ ID NO: 4615317 - DNA, 25 bp, Homo sapien
catctcataaacgaatgtttcttgt

SEQ ID NO: 4615318 - DNA, 25 bp, Homo sapien
ctcataaacgaatgtttcttgtctg

SEQ ID NO: 4615319 - DNA, 25 bp, Homo sapien
caatgtcggtttactgttttaagag

SEQ ID NO: 4615320 - DNA, 25 bp, Homo sapien
attactaaccctcagccaatgtcgg

SEQ ID NO: 4615321 - DNA, 25 bp, Homo sapien
tgttttcaactaagcatatccagta

SEQ ID NO: 4615322 - DNA, 25 bp, Homo sapien
tagttcccagactcaaaggagtttc

SEQ ID NO: 4615323 - DNA, 25 bp, Homo sapien
aaatataacagggtacaagatattc

SEQ ID NO: 4615324 - DNA, 25 bp, Homo sapien
aatataacagggtacaagatattca

SEQ ID NO: 4615325 - DNA, 25 bp, Homo sapien
aagatattcacagataggataagct

SEQ ID NO: 4615326 - DNA, 25 bp, Homo sapien
tattcacagataggataagctcccc

SEQ ID NO: 4615327 - DNA, 25 bp, Homo sapien
cgaattgaatccctcagttgtgtga

SEQ ID NO: 4615328 - DNA, 25 bp, Homo sapien
tgctgaattcaccaccaatctggag

SEQ ID NO: 4615329 - DNA, 25 bp, Homo sapien
gaggtcactgacacatcgaattgaa

SEQ ID NO: 4615330 - DNA, 25 bp, Homo sapien
cttggtcaggagtgttgctgaattc

SEQ ID NO: 4615331 - DNA, 25 bp, Homo sapien
ttcaaaataaaagaaggctgatttg

SEQ ID NO: 4615332 - DNA, 25 bp, Homo sapien
tgagattaggaacgctgaattttca

SEQ ID NO: 4615333 - DNA, 25 bp, Homo sapien
cgctgaattttcataagggatcagt

SEQ ID NO: 4615334 - DNA, 25 bp, Homo sapien
cacatgttgagattaggaacgctga

SEQ ID NO: 4615335 - DNA, 25 bp, Homo sapien
tgtttgacacatgttgagattagga

SEQ ID NO: 4615336 - DNA, 25 bp, Homo sapien
gacatgttcacagtctccctgatga

SEQ ID NO: 4615337 - DNA, 25 bp, Homo sapien
gaaatcttccattctagcagtctga

SEQ ID NO: 4615338 - DNA, 25 bp, Homo sapien
tgacagtataagtaaggaaaaccca

SEQ ID NO: 4615339 - DNA, 25 bp, Homo sapien
tagcctctatcatgggactctgacc

SEQ ID NO: 4615340 - DNA, 25 bp, Homo sapien
tcccaagccaagttgcaatggttat

SEQ ID NO: 4615341 - DNA, 25 bp, Homo sapien
aaatgtcttaagtgctgtcacctac

SEQ ID NO: 4615342 - DNA, 25 bp, Homo sapien
acaaaatgtcttaagtgctgtcacc

SEQ ID NO: 4615343 - DNA, 25 bp, Homo sapien
ggtatttgcatggaaagaagacagt

SEQ ID NO: 4615344 - DNA, 25 bp, Homo sapien
tatgagctattaaatatatctgtgc

SEQ ID NO: 4615345 - DNA, 25 bp, Homo sapien
agtattaggaaaatagatactttca

SEQ ID NO: 4615346 - DNA, 25 bp, Homo sapien
tatatctgtgcctgagtattaggaa

SEQ ID NO: 4615347 - DNA, 25 bp, Homo sapien
caatttttgcttacaagatgttgct

SEQ ID NO: 4615348 - DNA, 25 bp, Homo sapien
ccatagccaatgcttcttgataagg

SEQ ID NO: 4615349 - DNA, 25 bp, Homo sapien
caagcagtcatcatgatgcacaagc

SEQ ID NO: 4615350 - DNA, 25 bp, Homo sapien
gatacaatgtcctatccaagcagtc

SEQ ID NO: 4615351 - DNA, 25 bp, Homo sapien
cattttctggtccatagccaatgct

SEQ ID NO: 4615352 - DNA, 25 bp, Homo sapien
gagcatcagatgttgccactcaaac

SEQ ID NO: 4615353 - DNA, 25 bp, Homo sapien
gccggttgaacatcccactgagaat

SEQ ID NO: 4615354 - DNA, 25 bp, Homo sapien
tatacaaatagcaatatgggcaaca

SEQ ID NO: 4615355 - DNA, 25 bp, Homo sapien
ggtggcgaaaacaaactgaagatac

SEQ ID NO: 4615356 - DNA, 25 bp, Homo sapien
cataaggataagcaaggaattcccc

SEQ ID NO: 4615357 - DNA, 25 bp, Homo sapien
gcagcattcggaagcaaacatcaca

SEQ ID NO: 4615358 - DNA, 25 bp, Homo sapien
tcacaaaagaagcatgggtcctctg

SEQ ID NO: 4615359 - DNA, 25 bp, Homo sapien
tcctctggtgcaaaactgtcattgt

SEQ ID NO: 4615360 - DNA, 25 bp, Homo sapien
cctgttcctcagtggcgtttcttag

SEQ ID NO: 4615361 - DNA, 25 bp, Homo sapien
caagagaacagttatttcatgaggg

SEQ ID NO: 4615362 - DNA, 25 bp, Homo sapien
gactgttcaaagtggatcctgttcc

SEQ ID NO: 4615363 - DNA, 25 bp, Homo sapien
ttttgatagctttagcggactgttc

SEQ ID NO: 4615364 - DNA, 25 bp, Homo sapien
taccggagaataagtgagccagagc

SEQ ID NO: 4615365 - DNA, 25 bp, Homo sapien
tgttctacccataaaggttcccaga

SEQ ID NO: 4615366 - DNA, 25 bp, Homo sapien
tatccaatagtatcattaccggaga

SEQ ID NO: 4615367 - DNA, 25 bp, Homo sapien
aaatctatctgatggtctagacctg

SEQ ID NO: 4615368 - DNA, 25 bp, Homo sapien
ataggtttcgtcagttttccatgtg

SEQ ID NO: 4615369 - DNA, 25 bp, Homo sapien
cagaaactcgtgcttgtcatctcca

SEQ ID NO: 4615370 - DNA, 25 bp, Homo sapien
actgtcaaacacataggcttatagg

SEQ ID NO: 4615371 - DNA, 25 bp, Homo sapien
actgtttgtggcatttaagtccata

SEQ ID NO: 4615372 - DNA, 25 bp, Homo sapien
gatacataacacacgggcaaactgt

SEQ ID NO: 4615373 - DNA, 25 bp, Homo sapien
aacacaatgttagagatgactgacc

SEQ ID NO: 4615374 - DNA, 25 bp, Homo sapien
tgtccttaaatggtactgatgcctg

SEQ ID NO: 4615375 - DNA, 25 bp, Homo sapien
catgtaagacctataaggaacgcag

SEQ ID NO: 4615376 - DNA, 25 bp, Homo sapien
acaaagaaactggtttaataggcag

SEQ ID NO: 4615377 - DNA, 25 bp, Homo sapien
catctaatcctgtataagagcagag

SEQ ID NO: 4615378 - DNA, 25 bp, Homo sapien
gctgtgagggctttgctaactctat

SEQ ID NO: 4615379 - DNA, 25 bp, Homo sapien
taactctattttgtccgattggcca

SEQ ID NO: 4615380 - DNA, 25 bp, Homo sapien
tcaagatgaggtctgcatctaatcc

SEQ ID NO: 4615381 - DNA, 25 bp, Homo sapien
catctatctgaatctgagaactgac

SEQ ID NO: 4615382 - DNA, 25 bp, Homo sapien
ggagaaattgcagatacatctatct

SEQ ID NO: 4615383 - DNA, 25 bp, Homo sapien
gggatttggtatgtgaacaactgga

SEQ ID NO: 4615384 - DNA, 25 bp, Homo sapien
aaaaagagtcataccatgaccaagc

SEQ ID NO: 4615385 - DNA, 25 bp, Homo sapien
ccctccaaaaagtacgtgtaatatg

SEQ ID NO: 4615386 - DNA, 25 bp, Homo sapien
ttaacacctcttttgggctggtatg

SEQ ID NO: 4615387 - DNA, 25 bp, Homo sapien
gacttaagaactttcaggatcattg

SEQ ID NO: 4615388 - DNA, 25 bp, Homo sapien
taattttgagatagataacccccac

SEQ ID NO: 4615389 - DNA, 25 bp, Homo sapien
agagtaagtgatggaattctgggtt

SEQ ID NO: 4615390 - DNA, 25 bp, Homo sapien
tttctatcaaactctgctagtaaat

SEQ ID NO: 4615391 - DNA, 25 bp, Homo sapien
ttttctatcaaactctgctagtaaa

SEQ ID NO: 4615392 - DNA, 25 bp, Homo sapien
gagtaagtgatggaattctgggttt

SEQ ID NO: 4615393 - DNA, 25 bp, Homo sapien
ttataatggaactaggaatcaccgt

SEQ ID NO: 4615394 - DNA, 25 bp, Homo sapien
cattgacgtgtatggactaaatcca

SEQ ID NO: 4615395 - DNA, 25 bp, Homo sapien
aaaaatggcttaagaccagcgtctc

SEQ ID NO: 4615396 - DNA, 25 bp, Homo sapien
gaatcaccgttttgagagaacctgc

SEQ ID NO: 4615397 - DNA, 25 bp, Homo sapien
taggcaggcactagtaactaaaact

SEQ ID NO: 4615398 - DNA, 25 bp, Homo sapien
gggcattcagtgaagtcttaggact

SEQ ID NO: 4615399 - DNA, 25 bp, Homo sapien
taaatgttatataaggaaactcacc

SEQ ID NO: 4615400 - DNA, 25 bp, Homo sapien
acttctttgcagacaactgactggg

SEQ ID NO: 4615401 - DNA, 25 bp, Homo sapien
tacttgtgcagtattaacagctaca

SEQ ID NO: 4615402 - DNA, 25 bp, Homo sapien
taaacattatcgctaagtgtacttg

SEQ ID NO: 4615403 - DNA, 25 bp, Homo sapien
aaaactgctacttgtataaaccttg

SEQ ID NO: 4615404 - DNA, 25 bp, Homo sapien
gacatggttgtagcatattttcaat

SEQ ID NO: 4615405 - DNA, 25 bp, Homo sapien
tagaaatgatggaaagggcttggtc

SEQ ID NO: 4615406 - DNA, 25 bp, Homo sapien
gactgaaatatctctgaaggattct

SEQ ID NO: 4615407 - DNA, 25 bp, Homo sapien
tggtccatgacactttgctgagtta

SEQ ID NO: 4615408 - DNA, 25 bp, Homo sapien
gaaggattctacactagataactag

SEQ ID NO: 4615409 - DNA, 25 bp, Homo sapien
gactttgccactgaattcaagggaa

SEQ ID NO: 4615410 - DNA, 25 bp, Homo sapien
gggaatggaactagctgggaaccca

SEQ ID NO: 4615411 - DNA, 25 bp, Homo sapien
ccactgtgtatctgaaggagttaga

SEQ ID NO: 4615412 - DNA, 25 bp, Homo sapien
caccctaaaataggctatggagcca

SEQ ID NO: 4615413 - DNA, 25 bp, Homo sapien
ttctggatctttagtggacaccttc

SEQ ID NO: 4615414 - DNA, 25 bp, Homo sapien
ccattggattccttcgcaagggtca

SEQ ID NO: 4615415 - DNA, 25 bp, Homo sapien
gatgctcaagatggtaatcagccac

SEQ ID NO: 4615416 - DNA, 25 bp, Homo sapien
caaagactctaaatggaggatctga

SEQ ID NO: 4615417 - DNA, 25 bp, Homo sapien
gaatgacatgggtccccttagagaa

SEQ ID NO: 4615418 - DNA, 25 bp, Homo sapien
tatggtgccttagctacccaaagcc

SEQ ID NO: 4615419 - DNA, 25 bp, Homo sapien
cacattgcttttccgtggtagaata

SEQ ID NO: 4615420 - DNA, 25 bp, Homo sapien
tctaacattcaagagagggctgtat

SEQ ID NO: 4615421 - DNA, 25 bp, Homo sapien
tacgaaaaatccctgacataccatt

SEQ ID NO: 4615422 - DNA, 25 bp, Homo sapien
gcatttcaaaagcagtcggttggtt

SEQ ID NO: 4615423 - DNA, 25 bp, Homo sapien
ccagctttggcagttcagtttatga

SEQ ID NO: 4615424 - DNA, 25 bp, Homo sapien
accgcgcctggtgataaagtcttac

SEQ ID NO: 4615425 - DNA, 25 bp, Homo sapien
taacaagctcagacgaagatggtgg

SEQ ID NO: 4615426 - DNA, 25 bp, Homo sapien
taggaaaaacgcagccaagtggtgg

SEQ ID NO: 4615427 - DNA, 25 bp, Homo sapien
tacacactacatactaaggtcggcc

SEQ ID NO: 4615428 - DNA, 25 bp, Homo sapien
tcaggtcacaatgcaacaagctcag

SEQ ID NO: 4615429 - DNA, 25 bp, Homo sapien
gactgctcacagaaggaatatgctg

SEQ ID NO: 4615430 - DNA, 25 bp, Homo sapien
ggacatcactcctatagcagggcat

SEQ ID NO: 4615431 - DNA, 25 bp, Homo sapien
gcagatcgaaaacgcaagcaagagg

SEQ ID NO: 4615432 - DNA, 25 bp, Homo sapien
tactggctttgcaagaagtgtactc

SEQ ID NO: 4615433 - DNA, 25 bp, Homo sapien
aataaccccatctgtctagaaaagg

SEQ ID NO: 4615434 - DNA, 25 bp, Homo sapien
aaggtagatgaaataggctgtggcc

SEQ ID NO: 4615435 - DNA, 25 bp, Homo sapien
caaggttttgcaatcttggtcaggc

SEQ ID NO: 4615436 - DNA, 25 bp, Homo sapien
caagaagttcttaacacccttcagg

SEQ ID NO: 4615437 - DNA, 25 bp, Homo sapien
tatttctgtagtaccaacttgcata

SEQ ID NO: 4615438 - DNA, 25 bp, Homo sapien
cagcagtaattaggattattgagca

SEQ ID NO: 4615439 - DNA, 25 bp, Homo sapien
tgctagtcagcacagcactgtctga

SEQ ID NO: 4615440 - DNA, 25 bp, Homo sapien
tatcatatgcttaagttgggacctt

SEQ ID NO: 4615441 - DNA, 25 bp, Homo sapien
gccacgtgcctagcctacaaatctt

SEQ ID NO: 4615442 - DNA, 25 bp, Homo sapien
cttgctgccttttctacttggatcc

SEQ ID NO: 4615443 - DNA, 25 bp, Homo sapien
gcagtgctgcaatcgcacactgtaa

SEQ ID NO: 4615444 - DNA, 25 bp, Homo sapien
tgagactggtctcatcgttcccagg

SEQ ID NO: 4615445 - DNA, 25 bp, Homo sapien
ggaaaagagctctcagtcttgagtt

SEQ ID NO: 4615446 - DNA, 25 bp, Homo sapien
tgactcagagctattgaatcaggat

SEQ ID NO: 4615447 - DNA, 25 bp, Homo sapien
ggagagagtcttctttgcaccaaag

SEQ ID NO: 4615448 - DNA, 25 bp, Homo sapien
tgagctaataatgttcagggaggaa

SEQ ID NO: 4615449 - DNA, 25 bp, Homo sapien
gaattgtatagtaacctctcttgag

SEQ ID NO: 4615450 - DNA, 25 bp, Homo sapien
gatgtggaggacttatgaatacatt

SEQ ID NO: 4615451 - DNA, 25 bp, Homo sapien
tgagggttagatgtctcagagcaag

SEQ ID NO: 4615452 - DNA, 25 bp, Homo sapien
catttgaatagtaatcccatgaggt

SEQ ID NO: 4615453 - DNA, 25 bp, Homo sapien
ttagcctcccaaagaatgcgtcatt

SEQ ID NO: 4615454 - DNA, 25 bp, Homo sapien
catggatttgagtagtcagtaaaga

SEQ ID NO: 4615455 - DNA, 25 bp, Homo sapien
tagtactaactttactggacttggc

SEQ ID NO: 4615456 - DNA, 25 bp, Homo sapien
ggtctttgtttccattgaacttaca

SEQ ID NO: 4615457 - DNA, 25 bp, Homo sapien
tgttttacttggcaaaactatctgt

SEQ ID NO: 4615458 - DNA, 25 bp, Homo sapien
tttcttagtgatatagcacccttaa

SEQ ID NO: 4615459 - DNA, 25 bp, Homo sapien
gatatagcacccttaaagtaacttg

SEQ ID NO: 4615460 - DNA, 25 bp, Homo sapien
ttttacttggcaaaactatctgtgt

SEQ ID NO: 4615461 - DNA, 25 bp, Homo sapien
tccccaatgctttcagttaaacgtg

SEQ ID NO: 4615462 - DNA, 25 bp, Homo sapien
gactaaagcagttgacataactact

SEQ ID NO: 4615463 - DNA, 25 bp, Homo sapien
tcttttttaggatgtgactaaagca

SEQ ID NO: 4615464 - DNA, 25 bp, Homo sapien
caatgctttcagttaaacgtgcttg

SEQ ID NO: 4615465 - DNA, 25 bp, Homo sapien
cagagggctatgagaggtctttatg

SEQ ID NO: 4615466 - DNA, 25 bp, Homo sapien
gaagcgaggtagcaacaaagtggaa

SEQ ID NO: 4615467 - DNA, 25 bp, Homo sapien
gctttataataggatcagagggcta

SEQ ID NO: 4615468 - DNA, 25 bp, Homo sapien
aactaggaagagcacgagtaaatct

SEQ ID NO: 4615469 - DNA, 25 bp, Homo sapien
cattgtgcaacgtctgtggttttac

SEQ ID NO: 4615470 - DNA, 25 bp, Homo sapien
cgtaaggcaccacgcatggcgatgt

SEQ ID NO: 4615471 - DNA, 25 bp, Homo sapien
taggattatggatttaaatagtagc

SEQ ID NO: 4615472 - DNA, 25 bp, Homo sapien
cacgcatggcgatgtaaccattttt

SEQ ID NO: 4615473 - DNA, 25 bp, Homo sapien
tgcggcaggccgagctattttcgcc

SEQ ID NO: 4615474 - DNA, 25 bp, Homo sapien
cctgttacatgaaagcgaacttggg

SEQ ID NO: 4615475 - DNA, 25 bp, Homo sapien
tctcggtaaacagttggtcgcgccc

SEQ ID NO: 4615476 - DNA, 25 bp, Homo sapien
gttgcgattccgagccgttgagacg

SEQ ID NO: 4615477 - DNA, 25 bp, Homo sapien
taatcttctctacatcattccagtc

SEQ ID NO: 4615478 - DNA, 25 bp, Homo sapien
ttctctacatcattccagtcttagt

SEQ ID NO: 4615479 - DNA, 25 bp, Homo sapien
tcttctctacatcattccagtctta

SEQ ID NO: 4615480 - DNA, 25 bp, Homo sapien
tatatgtgctgctgaaacaagcaca

SEQ ID NO: 4615481 - DNA, 25 bp, Homo sapien
tcagtcgccagagccgagtggaaat

SEQ ID NO: 4615482 - DNA, 25 bp, Homo sapien
tttcagcgtgaggtgtccgcgttcc

SEQ ID NO: 4615483 - DNA, 25 bp, Homo sapien
aacctaagaggtcggatcccagatc

SEQ ID NO: 4615484 - DNA, 25 bp, Homo sapien
gcacatcgtggaaaacgcctcggag

SEQ ID NO: 4615485 - DNA, 25 bp, Homo sapien
cagcttgcagctcctggatacgtac

SEQ ID NO: 4615486 - DNA, 25 bp, Homo sapien
tcagcttgcagctcctggatacgta

SEQ ID NO: 4615487 - DNA, 25 bp, Homo sapien
ggccgctccaagtctcacgggtgaa

SEQ ID NO: 4615488 - DNA, 25 bp, Homo sapien
tgttggaacacgacggactccagga

SEQ ID NO: 4615489 - DNA, 25 bp, Homo sapien
ggcagcccacgggaataagagcaaa

SEQ ID NO: 4615490 - DNA, 25 bp, Homo sapien
ggtctcgcgtgatccgtgctgcaca

SEQ ID NO: 4615491 - DNA, 25 bp, Homo sapien
gctccgcagcagtaaccctaagaag

SEQ ID NO: 4615492 - DNA, 25 bp, Homo sapien
tgattctcgggaacgaaagcgctcc

SEQ ID NO: 4615493 - DNA, 25 bp, Homo sapien
tctggctaggatgctccacggagat

SEQ ID NO: 4615494 - DNA, 25 bp, Homo sapien
ctaagaagctccaaatcccggtcct

SEQ ID NO: 4615495 - DNA, 25 bp, Homo sapien
ttcaaaataccctgctatttcttaa

SEQ ID NO: 4615496 - DNA, 25 bp, Homo sapien
aaattgcccaagatgtctgtggctt

SEQ ID NO: 4615497 - DNA, 25 bp, Homo sapien
gatgtctgtggcttcacgttagatg

SEQ ID NO: 4615498 - DNA, 25 bp, Homo sapien
ggcttcacgttagatgatttgaggt

SEQ ID NO: 4615499 - DNA, 25 bp, Homo sapien
ttgggtatcaccagtattacttgaa

SEQ ID NO: 4615500 - DNA, 25 bp, Homo sapien
tttgggtatcaccagtattacttga

SEQ ID NO: 4615501 - DNA, 25 bp, Homo sapien
cttcctgagattatcagtaatatcc

SEQ ID NO: 4615502 - DNA, 25 bp, Homo sapien
ttcctgagattatcagtaatatcca

SEQ ID NO: 4615503 - DNA, 25 bp, Homo sapien
tcctgagattatcagtaatatccaa

SEQ ID NO: 4615504 - DNA, 25 bp, Homo sapien
tcttcctgagattatcagtaatatc

SEQ ID NO: 4615505 - DNA, 25 bp, Homo sapien
tcttggatcctatgtgcctcggcta

SEQ ID NO: 4615506 - DNA, 25 bp, Homo sapien
agaccagcttcctttctagcaacag

SEQ ID NO: 4615507 - DNA, 25 bp, Homo sapien
tttcaacctcggaccgtagcttggc

SEQ ID NO: 4615508 - DNA, 25 bp, Homo sapien
gtagcttggcaatctggctctcata

SEQ ID NO: 4615509 - DNA, 25 bp, Homo sapien
gcaggcaaaagttcattagtagtga

SEQ ID NO: 4615510 - DNA, 25 bp, Homo sapien
gaacagatggtgttcggttgcaggc

SEQ ID NO: 4615511 - DNA, 25 bp, Homo sapien
catatgccactatttcgttcttttt

SEQ ID NO: 4615512 - DNA, 25 bp, Homo sapien
tattccttgctgtatatatagcaca

SEQ ID NO: 4615513 - DNA, 25 bp, Homo sapien
gcaatggcgtgtgggctttggtcag

SEQ ID NO: 4615514 - DNA, 25 bp, Homo sapien
atgcaatggcgtgtgggctttggtc

SEQ ID NO: 4615515 - DNA, 25 bp, Homo sapien
ggatgcaatggcgtgtgggctttgg

SEQ ID NO: 4615516 - DNA, 25 bp, Homo sapien
cagggatgcaatggcgtgtgggctt

SEQ ID NO: 4615517 - DNA, 25 bp, Homo sapien
gctttttgggcttgcgctctggctt

SEQ ID NO: 4615518 - DNA, 25 bp, Homo sapien
agaaggctttttgggcttgcgctct

SEQ ID NO: 4615519 - DNA, 25 bp, Homo sapien
caaagaaggctttttgggcttgcgc

SEQ ID NO: 4615520 - DNA, 25 bp, Homo sapien
aggctttttgggcttgcgctctggc

SEQ ID NO: 4615521 - DNA, 25 bp, Homo sapien
agctgcaactctattggtttttgtc

SEQ ID NO: 4615522 - DNA, 25 bp, Homo sapien
cagctgcaactctattggtttttgt

SEQ ID NO: 4615523 - DNA, 25 bp, Homo sapien
atagaataataggtacatttacaac

SEQ ID NO: 4615524 - DNA, 25 bp, Homo sapien
tattaagaatagaataataggtaca

SEQ ID NO: 4615525 - DNA, 25 bp, Homo sapien
gaataataggtacatttacaaccat

SEQ ID NO: 4615526 - DNA, 25 bp, Homo sapien
ctattaagaatagaataataggtac

SEQ ID NO: 4615527 - DNA, 25 bp, Homo sapien
atcatattctcgattgcaattttgg

SEQ ID NO: 4615528 - DNA, 25 bp, Homo sapien
aagtaaatcatattctcgattgcaa

SEQ ID NO: 4615529 - DNA, 25 bp, Homo sapien
tctcgattgcaattttggatcatat

SEQ ID NO: 4615530 - DNA, 25 bp, Homo sapien
ttgcaattttggatcatattgtctc

SEQ ID NO: 4615531 - DNA, 25 bp, Homo sapien
tttctgcttcccattgttcttcttg

SEQ ID NO: 4615532 - DNA, 25 bp, Homo sapien
taatctaaactcctccaatgctgtc

SEQ ID NO: 4615533 - DNA, 25 bp, Homo sapien
tctcattcttctcccgttgatgttt

SEQ ID NO: 4615534 - DNA, 25 bp, Homo sapien
gtactataaattgtaattctcttct

SEQ ID NO: 4615535 - DNA, 25 bp, Homo sapien
caattgcctcagaatagtagtagct

SEQ ID NO: 4615536 - DNA, 25 bp, Homo sapien
gatcagcccacaaaagcattgaatg

SEQ ID NO: 4615537 - DNA, 25 bp, Homo sapien
tagtagcttatggaatccagcagcc

SEQ ID NO: 4615538 - DNA, 25 bp, Homo sapien
tatatataagcctagtccctgagaa

SEQ ID NO: 4615539 - DNA, 25 bp, Homo sapien
cgccgtaaaaggtcagagcagtcca

SEQ ID NO: 4615540 - DNA, 25 bp, Homo sapien
cgttgagtgctaaattcaagttcac

SEQ ID NO: 4615541 - DNA, 25 bp, Homo sapien
tctaaggcgttcctctcgttgagtg

SEQ ID NO: 4615542 - DNA, 25 bp, Homo sapien
caagttcacttgtttgtcgccgtaa

SEQ ID NO: 4615543 - DNA, 25 bp, Homo sapien
ggtgaaactagtaaatattcacagt

SEQ ID NO: 4615544 - DNA, 25 bp, Homo sapien
ttttgtctgaagactcaaaacactc

SEQ ID NO: 4615545 - DNA, 25 bp, Homo sapien
caggcattccgctgaaaggtgaaac

SEQ ID NO: 4615546 - DNA, 25 bp, Homo sapien
tgggtctcaaggtaatttaaatcca

SEQ ID NO: 4615547 - DNA, 25 bp, Homo sapien
atttcctcactcttagagtagttgc

SEQ ID NO: 4615548 - DNA, 25 bp, Homo sapien
ttaagaaaatgcaggccaaaatatt

SEQ ID NO: 4615549 - DNA, 25 bp, Homo sapien
gaaaatgcaggccaaaatatttgtt

SEQ ID NO: 4615550 - DNA, 25 bp, Homo sapien
aagaaaatgcaggccaaaatatttg

SEQ ID NO: 4615551 - DNA, 25 bp, Homo sapien
aatgcaggccaaaatatttgtttac

SEQ ID NO: 4615552 - DNA, 25 bp, Homo sapien
taaagtcacgtgtcagcaagactcc

SEQ ID NO: 4615553 - DNA, 25 bp, Homo sapien
tgtgccaactcctccactaaggtag

SEQ ID NO: 4615554 - DNA, 25 bp, Homo sapien
caagaacagacagtgggtgagacct

SEQ ID NO: 4615555 - DNA, 25 bp, Homo sapien
tgatccaagataagctaccggcagt

SEQ ID NO: 4615556 - DNA, 25 bp, Homo sapien
ttctcgctcatatgcactttcaact

SEQ ID NO: 4615557 - DNA, 25 bp, Homo sapien
tctcttgtgcattatgcttttctcg

SEQ ID NO: 4615558 - DNA, 25 bp, Homo sapien
ggccttctctacttgcaaagctcct

SEQ ID NO: 4615559 - DNA, 25 bp, Homo sapien
gactggccttctctacttgcaaagc

SEQ ID NO: 4615560 - DNA, 25 bp, Homo sapien
taaccaatggcaggttcaagcatga

SEQ ID NO: 4615561 - DNA, 25 bp, Homo sapien
gctacgtcagttcacaacaggtaaa

SEQ ID NO: 4615562 - DNA, 25 bp, Homo sapien
tcctgcctttagtgagatcctgccg

SEQ ID NO: 4615563 - DNA, 25 bp, Homo sapien
acaggatctagtgtttggtggcaca

SEQ ID NO: 4615564 - DNA, 25 bp, Homo sapien
cattactagttcttcctgtaattca

SEQ ID NO: 4615565 - DNA, 25 bp, Homo sapien
gtctctttgaaaggtctataattac

SEQ ID NO: 4615566 - DNA, 25 bp, Homo sapien
ttttcattatactggagtctctttg

SEQ ID NO: 4615567 - DNA, 25 bp, Homo sapien
tttcttctgttcctcgatgtcttca

SEQ ID NO: 4615568 - DNA, 25 bp, Homo sapien
tatacaacaagaagctggccgttat

SEQ ID NO: 4615569 - DNA, 25 bp, Homo sapien
atacaacaagaagctggccgttatt

SEQ ID NO: 4615570 - DNA, 25 bp, Homo sapien
ttatacaacaagaagctggccgtta

SEQ ID NO: 4615571 - DNA, 25 bp, Homo sapien
actggcccgacacagtaaagctgtc

SEQ ID NO: 4615572 - DNA, 25 bp, Homo sapien
gctgtccaagatcgattccaattct

SEQ ID NO: 4615573 - DNA, 25 bp, Homo sapien
tctttcacgttattttcacatgtct

SEQ ID NO: 4615574 - DNA, 25 bp, Homo sapien
tttcacatgtctctactaggaaggc

SEQ ID NO: 4615575 - DNA, 25 bp, Homo sapien
cactaattcagtgcacagtcctttc

SEQ ID NO: 4615576 - DNA, 25 bp, Homo sapien
aaaatcactaattcagtgcacagtc

SEQ ID NO: 4615577 - DNA, 25 bp, Homo sapien
tcctttcgcaggaacacattccctg

SEQ ID NO: 4615578 - DNA, 25 bp, Homo sapien
cagtgcacagtcctttcgcaggaac

SEQ ID NO: 4615579 - DNA, 25 bp, Homo sapien
ccagcttgttctggtaatctgtcaa

SEQ ID NO: 4615580 - DNA, 25 bp, Homo sapien
tcattagatgcatcttccagcttgt

SEQ ID NO: 4615581 - DNA, 25 bp, Homo sapien
ggtaatctgtcaaggtacgcctcaa

SEQ ID NO: 4615582 - DNA, 25 bp, Homo sapien
gcctcaatctctcaaggacaacaga

SEQ ID NO: 4615583 - DNA, 25 bp, Homo sapien
aagcaaggaatacgtactggtacag

SEQ ID NO: 4615584 - DNA, 25 bp, Homo sapien
ctggtacaggccgaaggctatatgt

SEQ ID NO: 4615585 - DNA, 25 bp, Homo sapien
acaggccgaaggctatatgtgtgga

SEQ ID NO: 4615586 - DNA, 25 bp, Homo sapien
ttttgacctttgtaacaagcaagga

SEQ ID NO: 4615587 - DNA, 25 bp, Homo sapien
gagtctatcttctgtttcgtagaat

SEQ ID NO: 4615588 - DNA, 25 bp, Homo sapien
ttttagtgtgagagtctatcttctg

SEQ ID NO: 4615589 - DNA, 25 bp, Homo sapien
gaatcaagttcattacatgcctttt

SEQ ID NO: 4615590 - DNA, 25 bp, Homo sapien
tgtttcgtagaatcaagttcattac

SEQ ID NO: 4615591 - DNA, 25 bp, Homo sapien
ttaacatcagccagtttatcctgaa

SEQ ID NO: 4615592 - DNA, 25 bp, Homo sapien
tctcccaacagtgcagcacattttg

SEQ ID NO: 4615593 - DNA, 25 bp, Homo sapien
tgcatccttatggaaagcctgggaa

SEQ ID NO: 4615594 - DNA, 25 bp, Homo sapien
ttattaaagcctctcggtctgcaca

SEQ ID NO: 4615595 - DNA, 25 bp, Homo sapien
tgttgaggtctgcaatcagggcatc

SEQ ID NO: 4615596 - DNA, 25 bp, Homo sapien
ttttatgagcacacagcctgctacc

SEQ ID NO: 4615597 - DNA, 25 bp, Homo sapien
tgcacaaagctcagaccaagagaat

SEQ ID NO: 4615598 - DNA, 25 bp, Homo sapien
gcctgctaccaagtgctgatataag

SEQ ID NO: 4615599 - DNA, 25 bp, Homo sapien
aagagcacatgtcattgcaactaag

SEQ ID NO: 4615600 - DNA, 25 bp, Homo sapien
gagcacatgtcattgcaactaagac

SEQ ID NO: 4615601 - DNA, 25 bp, Homo sapien
tcccttaagagcacatgtcattgca

SEQ ID NO: 4615602 - DNA, 25 bp, Homo sapien
cttaagagcacatgtcattgcaact

SEQ ID NO: 4615603 - DNA, 25 bp, Homo sapien
agttcagaatactgcagctctagtt

SEQ ID NO: 4615604 - DNA, 25 bp, Homo sapien
tttttacagatatactctagatgcc

SEQ ID NO: 4615605 - DNA, 25 bp, Homo sapien
tgaagctctctcatcgtgtcagact

SEQ ID NO: 4615606 - DNA, 25 bp, Homo sapien
tgtcttcctgagtctgctgaagctc

SEQ ID NO: 4615607 - DNA, 25 bp, Homo sapien
tctgtgtagacaaggcgcatgatcg

SEQ ID NO: 4615608 - DNA, 25 bp, Homo sapien
tcctctacagttgacaaagcctggg

SEQ ID NO: 4615609 - DNA, 25 bp, Homo sapien
aaggcaccagccattaatgcacagg

SEQ ID NO: 4615610 - DNA, 25 bp, Homo sapien
tccatccaggtaaaaagagaggcac

SEQ ID NO: 4615611 - DNA, 25 bp, Homo sapien
ttacatgcaacttatatttttaaaa

SEQ ID NO: 4615612 - DNA, 25 bp, Homo sapien
tacatgcaacttatatttttaaaag

SEQ ID NO: 4615613 - DNA, 25 bp, Homo sapien
atatttttaaaagcagaaattatct

SEQ ID NO: 4615614 - DNA, 25 bp, Homo sapien
acatgcaacttatatttttaaaagc

SEQ ID NO: 4615615 - DNA, 25 bp, Homo sapien
ctgctttaccaatgacgtcttgtaa

SEQ ID NO: 4615616 - DNA, 25 bp, Homo sapien
attcagccatagaactgattattgc

SEQ ID NO: 4615617 - DNA, 25 bp, Homo sapien
gcttgtaaacaacgcaactgctcct

SEQ ID NO: 4615618 - DNA, 25 bp, Homo sapien
cagaactggtgagccaactgagcgc

SEQ ID NO: 4615619 - DNA, 25 bp, Homo sapien
tcttggctgcacctatgagtaaatg

SEQ ID NO: 4615620 - DNA, 25 bp, Homo sapien
aagaattcttggctgcacctatgag

SEQ ID NO: 4615621 - DNA, 25 bp, Homo sapien
tgcacctatgagtaaatgtccacaa

SEQ ID NO: 4615622 - DNA, 25 bp, Homo sapien
gcaaaagaattcttggctgcaccta

SEQ ID NO: 4615623 - DNA, 25 bp, Homo sapien
cgtaatgggcacatggccacgcaaa

SEQ ID NO: 4615624 - DNA, 25 bp, Homo sapien
tttactttatgaagtccatgggcca

SEQ ID NO: 4615625 - DNA, 25 bp, Homo sapien
gccagcctctgaaccagggaatctt

SEQ ID NO: 4615626 - DNA, 25 bp, Homo sapien
gcaaaccatatttcagggccagtgt

SEQ ID NO: 4615627 - DNA, 25 bp, Homo sapien
tctgtgacctctaagcgtagtgagc

SEQ ID NO: 4615628 - DNA, 25 bp, Homo sapien
tagtgagcggcgctccacttctgca

SEQ ID NO: 4615629 - DNA, 25 bp, Homo sapien
tcattcacacttcgtttgaattctg

SEQ ID NO: 4615630 - DNA, 25 bp, Homo sapien
tcacacttcgtttgaattctgtgac

SEQ ID NO: 4615631 - DNA, 25 bp, Homo sapien
cactggagtgcaattcaagtttata

SEQ ID NO: 4615632 - DNA, 25 bp, Homo sapien
cctcactggagtgcaattcaagttt

SEQ ID NO: 4615633 - DNA, 25 bp, Homo sapien
attcaatagcatttgtgcctgctct

SEQ ID NO: 4615634 - DNA, 25 bp, Homo sapien
tgttgtgcctgttcattcaatagca

SEQ ID NO: 4615635 - DNA, 25 bp, Homo sapien
ctaattctggaagaacctgttctct

SEQ ID NO: 4615636 - DNA, 25 bp, Homo sapien
gacagtaactttttgtggccgatac

SEQ ID NO: 4615637 - DNA, 25 bp, Homo sapien
gccttctgggaggttcttctttatc

SEQ ID NO: 4615638 - DNA, 25 bp, Homo sapien
tgctctccatagtcgcttgctctgc

SEQ ID NO: 4615639 - DNA, 25 bp, Homo sapien
tttttctctgtcatgtaaatcttct

SEQ ID NO: 4615640 - DNA, 25 bp, Homo sapien
ttttctctgtcatgtaaatcttctt

SEQ ID NO: 4615641 - DNA, 25 bp, Homo sapien
ttttttctctgtcatgtaaatcttc

SEQ ID NO: 4615642 - DNA, 25 bp, Homo sapien
agacaaataatttttttctctgtca

SEQ ID NO: 4615643 - DNA, 25 bp, Homo sapien
tacaaaactgtaagcagacatttac

SEQ ID NO: 4615644 - DNA, 25 bp, Homo sapien
atacaaaactgtaagcagacattta

SEQ ID NO: 4615645 - DNA, 25 bp, Homo sapien
atcatacaaaactgtaagcagacat

SEQ ID NO: 4615646 - DNA, 25 bp, Homo sapien
ataatcatacaaaactgtaagcaga

SEQ ID NO: 4615647 - DNA, 25 bp, Homo sapien
tgctcagtttagccacacattaaca

SEQ ID NO: 4615648 - DNA, 25 bp, Homo sapien
cttgctcagtttagccacacattaa

SEQ ID NO: 4615649 - DNA, 25 bp, Homo sapien
gctcagtttagccacacattaacat

SEQ ID NO: 4615650 - DNA, 25 bp, Homo sapien
ttgctcagtttagccacacattaac

SEQ ID NO: 4615651 - DNA, 25 bp, Homo sapien
gagggcactctctgcatcatggatg

SEQ ID NO: 4615652 - DNA, 25 bp, Homo sapien
agatgtctattgagctgacgcagag

SEQ ID NO: 4615653 - DNA, 25 bp, Homo sapien
tctcctccagtcgacgcttgtcctg

SEQ ID NO: 4615654 - DNA, 25 bp, Homo sapien
tgctccagctgggtaagatgtctat

SEQ ID NO: 4615655 - DNA, 25 bp, Homo sapien
actgctctcatgtgattagcaacac

SEQ ID NO: 4615656 - DNA, 25 bp, Homo sapien
ctcatgtgattagcaacacattctt

SEQ ID NO: 4615657 - DNA, 25 bp, Homo sapien
attttctactgctctcatgtgatta

SEQ ID NO: 4615658 - DNA, 25 bp, Homo sapien
tctactgctctcatgtgattagcaa

SEQ ID NO: 4615659 - DNA, 25 bp, Homo sapien
gtgatggtttttccctgacgtcgaa

SEQ ID NO: 4615660 - DNA, 25 bp, Homo sapien
ggtgatggtttttccctgacgtcga

SEQ ID NO: 4615661 - DNA, 25 bp, Homo sapien
tgacgtcgaagttcattccccaagt

SEQ ID NO: 4615662 - DNA, 25 bp, Homo sapien
ttttccctgacgtcgaagttcattc

SEQ ID NO: 4615663 - DNA, 25 bp, Homo sapien
caaactttgcaagccagaaggcagt

SEQ ID NO: 4615664 - DNA, 25 bp, Homo sapien
gggaaaaagaatgctatctaagaac

SEQ ID NO: 4615665 - DNA, 25 bp, Homo sapien
aaatgactcattacaaacaagggaa

SEQ ID NO: 4615666 - DNA, 25 bp, Homo sapien
ttgactttttcagctcaaactttgc

SEQ ID NO: 4615667 - DNA, 25 bp, Homo sapien
tactgtcataaaaatgatcgataag

SEQ ID NO: 4615668 - DNA, 25 bp, Homo sapien
ggaaaccaatactaatgaaatggag

SEQ ID NO: 4615669 - DNA, 25 bp, Homo sapien
tgatcgataagctcagaaaaataat

SEQ ID NO: 4615670 - DNA, 25 bp, Homo sapien
aactctggaaaccaatactaatgaa

SEQ ID NO: 4615671 - DNA, 25 bp, Homo sapien
ggttacatctaaatggatactttcc

SEQ ID NO: 4615672 - DNA, 25 bp, Homo sapien
caaagtgtgtcaatgcaatgaaaat

SEQ ID NO: 4615673 - DNA, 25 bp, Homo sapien
gatattcagggataggatggttaca

SEQ ID NO: 4615674 - DNA, 25 bp, Homo sapien
taagctgcatctgtcctgaacatgt

SEQ ID NO: 4615675 - DNA, 25 bp, Homo sapien
ggtgaagtcattcctacttgccgca

SEQ ID NO: 4615676 - DNA, 25 bp, Homo sapien
gcaaaggtctccaggtgcagtttgg

SEQ ID NO: 4615677 - DNA, 25 bp, Homo sapien
ccttgagcccctccattgcaaaggt

SEQ ID NO: 4615678 - DNA, 25 bp, Homo sapien
cagaccatgacagcgagatctgatc

SEQ ID NO: 4615679 - DNA, 25 bp, Homo sapien
tgtctcagtagcaaacaatgttatt

SEQ ID NO: 4615680 - DNA, 25 bp, Homo sapien
gcaaacaatgttatttagactctaa

SEQ ID NO: 4615681 - DNA, 25 bp, Homo sapien
tatttttctatatgtctcagtagca

SEQ ID NO: 4615682 - DNA, 25 bp, Homo sapien
ttctctccagttagtgcaatttatt

SEQ ID NO: 4615683 - DNA, 25 bp, Homo sapien
tacagcaatctaccctataacagag

SEQ ID NO: 4615684 - DNA, 25 bp, Homo sapien
ttaaagaggtaacagcctagtgtct

SEQ ID NO: 4615685 - DNA, 25 bp, Homo sapien
tagaaggatacctacagcatccgaa

SEQ ID NO: 4615686 - DNA, 25 bp, Homo sapien
tagagtgctattgaacaaggacagt

SEQ ID NO: 4615687 - DNA, 25 bp, Homo sapien
gcttgagccctggcatttgagactg

SEQ ID NO: 4615688 - DNA, 25 bp, Homo sapien
cacctgtggtcctaggtactcagca

SEQ ID NO: 4615689 - DNA, 25 bp, Homo sapien
acctgtggtcctaggtactcagcag

SEQ ID NO: 4615690 - DNA, 25 bp, Homo sapien
gagccctggcatttgagactgcagt

SEQ ID NO: 4615691 - DNA, 25 bp, Homo sapien
catcaaacactgttttttgtccaag

SEQ ID NO: 4615692 - DNA, 25 bp, Homo sapien
ggtcttcacctaggcagtccatcaa

SEQ ID NO: 4615693 - DNA, 25 bp, Homo sapien
ttcacctaggcagtccatcaaacac

SEQ ID NO: 4615694 - DNA, 25 bp, Homo sapien
ttttccaggtcttcacctaggcagt

SEQ ID NO: 4615695 - DNA, 25 bp, Homo sapien
tgtgcatgttgtaagaccaaggtcc

SEQ ID NO: 4615696 - DNA, 25 bp, Homo sapien
gggtcagtttatataagcggcatca

SEQ ID NO: 4615697 - DNA, 25 bp, Homo sapien
tgtcatgcagaatagggcaaatcgg

SEQ ID NO: 4615698 - DNA, 25 bp, Homo sapien
ccaatagtgcacaaaggttcgcttt

SEQ ID NO: 4615699 - DNA, 25 bp, Homo sapien
aacaggacctccaaactacttctgg

SEQ ID NO: 4615700 - DNA, 25 bp, Homo sapien
tgagtgcgttctctcaacaggacct

SEQ ID NO: 4615701 - DNA, 25 bp, Homo sapien
tactagaaggctccaaaactgaaaa

SEQ ID NO: 4615702 - DNA, 25 bp, Homo sapien
tggagctgtacaactcatgaattgc

SEQ ID NO: 4615703 - DNA, 25 bp, Homo sapien
ggttgtaagagttggcccagacttg

SEQ ID NO: 4615704 - DNA, 25 bp, Homo sapien
gagtctgggataaaacaagcggcca

SEQ ID NO: 4615705 - DNA, 25 bp, Homo sapien
gtcacgctgcacagtctcctagggt

SEQ ID NO: 4615706 - DNA, 25 bp, Homo sapien
cctagggtcaccttatggagacttc

SEQ ID NO: 4615707 - DNA, 25 bp, Homo sapien
tgtggtcccagttattgtggaggct

SEQ ID NO: 4615708 - DNA, 25 bp, Homo sapien
ccagtctggatgacagaagtaagac

SEQ ID NO: 4615709 - DNA, 25 bp, Homo sapien
ctgtggtcccagttattgtggaggc

SEQ ID NO: 4615710 - DNA, 25 bp, Homo sapien
actccagtctggatgacagaagtaa

SEQ ID NO: 4615711 - DNA, 25 bp, Homo sapien
ggaatccaggatacgaaccaccaag

SEQ ID NO: 4615712 - DNA, 25 bp, Homo sapien
tctatatgatcaacagagctggcca

SEQ ID NO: 4615713 - DNA, 25 bp, Homo sapien
cagaggattcctactggcatggagt

SEQ ID NO: 4615714 - DNA, 25 bp, Homo sapien
tgtgtcccagagtacagcgcaatgc

SEQ ID NO: 4615715 - DNA, 25 bp, Homo sapien
tccttgtaattaggaatggtaacac

SEQ ID NO: 4615716 - DNA, 25 bp, Homo sapien
cagtgattcccgtattagtgcttgt

SEQ ID NO: 4615717 - DNA, 25 bp, Homo sapien
tgcatgctcgttcattctctgtcat

SEQ ID NO: 4615718 - DNA, 25 bp, Homo sapien
tggtactcagtgattcccgtattag

SEQ ID NO: 4615719 - DNA, 25 bp, Homo sapien
ttaagaaggtttggtctgagattaa

SEQ ID NO: 4615720 - DNA, 25 bp, Homo sapien
gccaggttgcttcaacataaccaaa

SEQ ID NO: 4615721 - DNA, 25 bp, Homo sapien
atgccaggttgcttcaacataacca

SEQ ID NO: 4615722 - DNA, 25 bp, Homo sapien
ccaggttgcttcaacataaccaaat

SEQ ID NO: 4615723 - DNA, 25 bp, Homo sapien
ctttgctcaaaggttttccagcttc

SEQ ID NO: 4615724 - DNA, 25 bp, Homo sapien
aatctttgctcaaaggttttccagc

SEQ ID NO: 4615725 - DNA, 25 bp, Homo sapien
tctttgctcaaaggttttccagctt

SEQ ID NO: 4615726 - DNA, 25 bp, Homo sapien
atctttgctcaaaggttttccagct

SEQ ID NO: 4615727 - DNA, 25 bp, Homo sapien
ccacacatctgatagtttctagaat

SEQ ID NO: 4615728 - DNA, 25 bp, Homo sapien
atagcaaacaggcacataaagatat

SEQ ID NO: 4615729 - DNA, 25 bp, Homo sapien
actaagatacattttacgaaagaga

SEQ ID NO: 4615730 - DNA, 25 bp, Homo sapien
aatatacaaatcgcaaattttatca

SEQ ID NO: 4615731 - DNA, 25 bp, Homo sapien
taaagggcatactcagctccttgcc

SEQ ID NO: 4615732 - DNA, 25 bp, Homo sapien
ggcttcttgaaaggagtcacctgat

SEQ ID NO: 4615733 - DNA, 25 bp, Homo sapien
gaagaacatctctcagacaccttgg

SEQ ID NO: 4615734 - DNA, 25 bp, Homo sapien
tatctcttaatttccatgggccagg

SEQ ID NO: 4615735 - DNA, 25 bp, Homo sapien
ctgtagatgtacactggaagcaact

SEQ ID NO: 4615736 - DNA, 25 bp, Homo sapien
ggaagcaactgagctagttgactct

SEQ ID NO: 4615737 - DNA, 25 bp, Homo sapien
cttcccgtacttagggctgtgcagg

SEQ ID NO: 4615738 - DNA, 25 bp, Homo sapien
ctaactgtagatgtacactggaagc

SEQ ID NO: 4615739 - DNA, 25 bp, Homo sapien
catgctctgcccctatacacataaa

SEQ ID NO: 4615740 - DNA, 25 bp, Homo sapien
cattacggctattggtgttggacat

SEQ ID NO: 4615741 - DNA, 25 bp, Homo sapien
caaaaatgaacctatgctgacacat

SEQ ID NO: 4615742 - DNA, 25 bp, Homo sapien
tatcaataccctcctacaaagtggt

SEQ ID NO: 4615743 - DNA, 25 bp, Homo sapien
gacagacgcctcatatacaagcgct

SEQ ID NO: 4615744 - DNA, 25 bp, Homo sapien
gacgcctcatatacaagcgctccgg

SEQ ID NO: 4615745 - DNA, 25 bp, Homo sapien
agacgcctcatatacaagcgctccg

SEQ ID NO: 4615746 - DNA, 25 bp, Homo sapien
gttgacagacgcctcatatacaagc

SEQ ID NO: 4615747 - DNA, 25 bp, Homo sapien
caaggctgcaatgtgacttcgatga

SEQ ID NO: 4615748 - DNA, 25 bp, Homo sapien
cattttcacgtaaacaagctgtgtg

SEQ ID NO: 4615749 - DNA, 25 bp, Homo sapien
caagctggtagacatccatgaaact

SEQ ID NO: 4615750 - DNA, 25 bp, Homo sapien
tagtgcttgcaagctggtagacatc

SEQ ID NO: 4615751 - DNA, 25 bp, Homo sapien
ccatctcttctaaatgaaatgatga

SEQ ID NO: 4615752 - DNA, 25 bp, Homo sapien
aatcactacagggtgaaccatctct

SEQ ID NO: 4615753 - DNA, 25 bp, Homo sapien
aatgtttcgcattctatagatgaag

SEQ ID NO: 4615754 - DNA, 25 bp, Homo sapien
ctatagatgaagaatcactacaggg

SEQ ID NO: 4615755 - DNA, 25 bp, Homo sapien
tagaaagaaggtatgaggccattgg

SEQ ID NO: 4615756 - DNA, 25 bp, Homo sapien
tcatcactgtggaatagaactatat

SEQ ID NO: 4615757 - DNA, 25 bp, Homo sapien
caggatttgggttagtcaccatgat

SEQ ID NO: 4615758 - DNA, 25 bp, Homo sapien
gcattatgttgccagttactatcca

SEQ ID NO: 4615759 - DNA, 25 bp, Homo sapien
taattggttacgtaagtcagactac

SEQ ID NO: 4615760 - DNA, 25 bp, Homo sapien
cagtgacaaacgatcagaacaaagg

SEQ ID NO: 4615761 - DNA, 25 bp, Homo sapien
gacctgaccatatctgtgttttgga

SEQ ID NO: 4615762 - DNA, 25 bp, Homo sapien
taactctggcactaataaggcaggg

SEQ ID NO: 4615763 - DNA, 25 bp, Homo sapien
ctggaatcttgaggcctaaatcaac

SEQ ID NO: 4615764 - DNA, 25 bp, Homo sapien
gaagcacattttgacgggacagttt

SEQ ID NO: 4615765 - DNA, 25 bp, Homo sapien
ccacctaatcagaagcacattttga

SEQ ID NO: 4615766 - DNA, 25 bp, Homo sapien
gcctaaatcaacattgttttcacag

SEQ ID NO: 4615767 - DNA, 25 bp, Homo sapien
tccttgttcttgataaagtgcaaag

SEQ ID NO: 4615768 - DNA, 25 bp, Homo sapien
tgaaattgtgcactgagcaatattt

SEQ ID NO: 4615769 - DNA, 25 bp, Homo sapien
tgcaaagttaactatccctttaatg

SEQ ID NO: 4615770 - DNA, 25 bp, Homo sapien
taatgtccactaatggtgctgcagt

SEQ ID NO: 4615771 - DNA, 25 bp, Homo sapien
gattctatcaaagtatgccctaagc

SEQ ID NO: 4615772 - DNA, 25 bp, Homo sapien
tcagctaacatagaatcttaagaac

SEQ ID NO: 4615773 - DNA, 25 bp, Homo sapien
tggtgtcaggcaaacatggagaaca

SEQ ID NO: 4615774 - DNA, 25 bp, Homo sapien
taaagtcctgtaaccttagctggcc

SEQ ID NO: 4615775 - DNA, 25 bp, Homo sapien
ttgccacaaacttgatacgaaacac

SEQ ID NO: 4615776 - DNA, 25 bp, Homo sapien
gccacaaacttgatacgaaacacaa

SEQ ID NO: 4615777 - DNA, 25 bp, Homo sapien
acaaacttgatacgaaacacaaaat

SEQ ID NO: 4615778 - DNA, 25 bp, Homo sapien
ccacaaacttgatacgaaacacaaa

SEQ ID NO: 4615779 - DNA, 25 bp, Homo sapien
ttctaagagtccaaatgccagtcca

SEQ ID NO: 4615780 - DNA, 25 bp, Homo sapien
aagagtccaaatgccagtccatagg

SEQ ID NO: 4615781 - DNA, 25 bp, Homo sapien
agtccaaatgccagtccataggtct

SEQ ID NO: 4615782 - DNA, 25 bp, Homo sapien
taagagtccaaatgccagtccatag

SEQ ID NO: 4615783 - DNA, 25 bp, Homo sapien
taaaatccttagcaattcttcgtgg

SEQ ID NO: 4615784 - DNA, 25 bp, Homo sapien
taagctctatactccccagggctgt

SEQ ID NO: 4615785 - DNA, 25 bp, Homo sapien
cctttatttccccactgaccatggt

SEQ ID NO: 4615786 - DNA, 25 bp, Homo sapien
tttgaacagttccatagctgggcct

SEQ ID NO: 4615787 - DNA, 25 bp, Homo sapien
aatataagtatctgtcaatcacaca

SEQ ID NO: 4615788 - DNA, 25 bp, Homo sapien
caatataagtatctgtcaatcacac

SEQ ID NO: 4615789 - DNA, 25 bp, Homo sapien
tataagtatctgtcaatcacacatc

SEQ ID NO: 4615790 - DNA, 25 bp, Homo sapien
taagtatctgtcaatcacacatctc

SEQ ID NO: 4615791 - DNA, 25 bp, Homo sapien
tacgtcatgaaaaaacggtacacaa

SEQ ID NO: 4615792 - DNA, 25 bp, Homo sapien
ttgctgaccctagggcaagactacg

SEQ ID NO: 4615793 - DNA, 25 bp, Homo sapien
tgcttgttttgtggtattggaattg

SEQ ID NO: 4615794 - DNA, 25 bp, Homo sapien
aacaggtggcatgtagatttgctga

SEQ ID NO: 4615795 - DNA, 25 bp, Homo sapien
aagtgtaagtagtatcaagttcagc

SEQ ID NO: 4615796 - DNA, 25 bp, Homo sapien
ggcattagcagacatagtcactgga

SEQ ID NO: 4615797 - DNA, 25 bp, Homo sapien
cccaataccagttgtgtcagcagga

SEQ ID NO: 4615798 - DNA, 25 bp, Homo sapien
ctgagttggtctgttggcattagca

SEQ ID NO: 4615799 - DNA, 25 bp, Homo sapien
ttgtactgttaactcttcctccatt

SEQ ID NO: 4615800 - DNA, 25 bp, Homo sapien
ttaattgtactgttaactcttcctc

SEQ ID NO: 4615801 - DNA, 25 bp, Homo sapien
aattgtactgttaactcttcctcca

SEQ ID NO: 4615802 - DNA, 25 bp, Homo sapien
caattttaattgtactgttaactct

SEQ ID NO: 4615803 - DNA, 25 bp, Homo sapien
tgagggaaattacccaaaatgtgtc

SEQ ID NO: 4615804 - DNA, 25 bp, Homo sapien
ccagaatacatcaagatagcgcaca

SEQ ID NO: 4615805 - DNA, 25 bp, Homo sapien
ttattcaaggagacagagctaccag

SEQ ID NO: 4615806 - DNA, 25 bp, Homo sapien
gctgccatgaaatgacaggaatcat

SEQ ID NO: 4615807 - DNA, 25 bp, Homo sapien
gaccttctcacattgaccaggagtg

SEQ ID NO: 4615808 - DNA, 25 bp, Homo sapien
gaacagtctgtctagcgatacccaa

SEQ ID NO: 4615809 - DNA, 25 bp, Homo sapien
gatgggtgtcactcttgggtcctac

SEQ ID NO: 4615810 - DNA, 25 bp, Homo sapien
tagctttacaaggagcaacctgacc

SEQ ID NO: 4615811 - DNA, 25 bp, Homo sapien
tactgctgtgttccctcagatggca

SEQ ID NO: 4615812 - DNA, 25 bp, Homo sapien
gatgtgttacacagtacgacagtaa

SEQ ID NO: 4615813 - DNA, 25 bp, Homo sapien
tcctaatcattgtttggaacagcag

SEQ ID NO: 4615814 - DNA, 25 bp, Homo sapien
ttccaaggcacattttacaaagctg

SEQ ID NO: 4615815 - DNA, 25 bp, Homo sapien
taaaaagtgcacagtgagggcacag

SEQ ID NO: 4615816 - DNA, 25 bp, Homo sapien
tgatggaaactcctatgctagaggt

SEQ ID NO: 4615817 - DNA, 25 bp, Homo sapien
tgtatgatctttggtagccaaaagc

SEQ ID NO: 4615818 - DNA, 25 bp, Homo sapien
taataactggcataaaacagttgct

SEQ ID NO: 4615819 - DNA, 25 bp, Homo sapien
cattgctgcctaatttgggaaagtc

SEQ ID NO: 4615820 - DNA, 25 bp, Homo sapien
ctgaattacctctgcctctcatggg

SEQ ID NO: 4615821 - DNA, 25 bp, Homo sapien
tccaggtgggtctgtcaaagggact

SEQ ID NO: 4615822 - DNA, 25 bp, Homo sapien
catcgcagagaagggtttaatcaac

SEQ ID NO: 4615823 - DNA, 25 bp, Homo sapien
tatacgaatagctcataaacacatg

SEQ ID NO: 4615824 - DNA, 25 bp, Homo sapien
agatatacgaatagctcataaacac

SEQ ID NO: 4615825 - DNA, 25 bp, Homo sapien
gatatacgaatagctcataaacaca

SEQ ID NO: 4615826 - DNA, 25 bp, Homo sapien
acgaatagctcataaacacatgaaa

SEQ ID NO: 4615827 - DNA, 25 bp, Homo sapien
ccagaaagaatcgtaagggaaatga

SEQ ID NO: 4615828 - DNA, 25 bp, Homo sapien
tgctttggtaggacataattagaac

SEQ ID NO: 4615829 - DNA, 25 bp, Homo sapien
gcttaaagataacgggtccaagata

SEQ ID NO: 4615830 - DNA, 25 bp, Homo sapien
tgttaaaggcatttcggtgttctca

SEQ ID NO: 4615831 - DNA, 25 bp, Homo sapien
gcaaaatcctggctagcctggagta

SEQ ID NO: 4615832 - DNA, 25 bp, Homo sapien
taggcattccctagtgacgcatctg

SEQ ID NO: 4615833 - DNA, 25 bp, Homo sapien
tcaccaaggatagagctaggattca

SEQ ID NO: 4615834 - DNA, 25 bp, Homo sapien
cagttgaacctaggtgtgctcatca

SEQ ID NO: 4615835 - DNA, 25 bp, Homo sapien
gacaggatatactgccgctgtggaa

SEQ ID NO: 4615836 - DNA, 25 bp, Homo sapien
gcctctgagcgaagctatgtgggaa

SEQ ID NO: 4615837 - DNA, 25 bp, Homo sapien
tggatacacgctacaacacgaatga

SEQ ID NO: 4615838 - DNA, 25 bp, Homo sapien
tcatccgtgtaccaaagcatttcgg

SEQ ID NO: 4615839 - DNA, 25 bp, Homo sapien
tattagggaaatccaacagacacca

SEQ ID NO: 4615840 - DNA, 25 bp, Homo sapien
taatgaaggagagtgagccaaggaa

SEQ ID NO: 4615841 - DNA, 25 bp, Homo sapien
gaagtaacactacgctggatttgtg

SEQ ID NO: 4615842 - DNA, 25 bp, Homo sapien
acaatgcatccaaatgtctctgcag

SEQ ID NO: 4615843 - DNA, 25 bp, Homo sapien
gagaaggccctttaacatcacaaga

SEQ ID NO: 4615844 - DNA, 25 bp, Homo sapien
ttacgatcttactggaaaactgctg

SEQ ID NO: 4615845 - DNA, 25 bp, Homo sapien
tactgctcaagttcatcattccctg

SEQ ID NO: 4615846 - DNA, 25 bp, Homo sapien
taatgccatgcactgatttttacga

SEQ ID NO: 4615847 - DNA, 25 bp, Homo sapien
tgagatctttggaaccccctgcaat

SEQ ID NO: 4615848 - DNA, 25 bp, Homo sapien
gaaccccctgcaatgtgggagtata

SEQ ID NO: 4615849 - DNA, 25 bp, Homo sapien
gagatctttggaaccccctgcaatg

SEQ ID NO: 4615850 - DNA, 25 bp, Homo sapien
ctttggaaccccctgcaatgtggga

SEQ ID NO: 4615851 - DNA, 25 bp, Homo sapien
tcggaggcacatgatgaaatgtcac

SEQ ID NO: 4615852 - DNA, 25 bp, Homo sapien
cggtgtgtaagctccctgcctgtgt

SEQ ID NO: 4615853 - DNA, 25 bp, Homo sapien
gctccaaagtgcaaacgtagtgctg

SEQ ID NO: 4615854 - DNA, 25 bp, Homo sapien
ttcgtccaggtatccacggtgtgta

SEQ ID NO: 4615855 - DNA, 25 bp, Homo sapien
cgcaggtggtgcatcccacaggatg

SEQ ID NO: 4615856 - DNA, 25 bp, Homo sapien
tctccataggcctagtgagcgcagg

SEQ ID NO: 4615857 - DNA, 25 bp, Homo sapien
tctgcagacattagcatgataatac

SEQ ID NO: 4615858 - DNA, 25 bp, Homo sapien
tagtagccacagtcacctaatctgt

SEQ ID NO: 4615859 - DNA, 25 bp, Homo sapien
tggtagactgcatgtttgtccagga

SEQ ID NO: 4615860 - DNA, 25 bp, Homo sapien
aggcagcagtccctctctgggcgat

SEQ ID NO: 4615861 - DNA, 25 bp, Homo sapien
aggaacccagatgcaggcagcagtc

SEQ ID NO: 4615862 - DNA, 25 bp, Homo sapien
cctctctgggcgatccagagctgaa

SEQ ID NO: 4615863 - DNA, 25 bp, Homo sapien
tacaggagcagacaaatgactcggc

SEQ ID NO: 4615864 - DNA, 25 bp, Homo sapien
caaatgactcggctggtgggactca

SEQ ID NO: 4615865 - DNA, 25 bp, Homo sapien
caccctgaggttttgcactataaag

SEQ ID NO: 4615866 - DNA, 25 bp, Homo sapien
gactcaggtggactccgtgatctct

SEQ ID NO: 4615867 - DNA, 25 bp, Homo sapien
tctggcttctggtggtctgagcatg

SEQ ID NO: 4615868 - DNA, 25 bp, Homo sapien
catttccgtatggagtagctgctct

SEQ ID NO: 4615869 - DNA, 25 bp, Homo sapien
tgtccaagaaagtagcacacagttc

SEQ ID NO: 4615870 - DNA, 25 bp, Homo sapien
tatgcctgaggaagccatggtaaca

SEQ ID NO: 4615871 - DNA, 25 bp, Homo sapien
tggtcacatgactttcctattcctg

SEQ ID NO: 4615872 - DNA, 25 bp, Homo sapien
aatgatgccacctcttgatatgtgc

SEQ ID NO: 4615873 - DNA, 25 bp, Homo sapien
ctcttgatatgtgctctggtttcca

SEQ ID NO: 4615874 - DNA, 25 bp, Homo sapien
ataaagggaattgcttgggttgctg

SEQ ID NO: 4615875 - DNA, 25 bp, Homo sapien
cctgggatccctactggtttcaagc

SEQ ID NO: 4615876 - DNA, 25 bp, Homo sapien
acaggcgcacatgaccacatcaggc

SEQ ID NO: 4615877 - DNA, 25 bp, Homo sapien
gggatccctactggtttcaagcaat

SEQ ID NO: 4615878 - DNA, 25 bp, Homo sapien
ggcgcacatgaccacatcaggctaa

SEQ ID NO: 4615879 - DNA, 25 bp, Homo sapien
tagggtgaccccagctttaccaagc

SEQ ID NO: 4615880 - DNA, 25 bp, Homo sapien
taggtaatgactggttgaatctccc

SEQ ID NO: 4615881 - DNA, 25 bp, Homo sapien
gtatctgttgagaccctggctctgg

SEQ ID NO: 4615882 - DNA, 25 bp, Homo sapien
gggcccttgaggtggcttgaaaaca

SEQ ID NO: 4615883 - DNA, 25 bp, Homo sapien
tttctcccattatcaactgatgagc

SEQ ID NO: 4615884 - DNA, 25 bp, Homo sapien
aaaattcacaagttccgtattgagg

SEQ ID NO: 4615885 - DNA, 25 bp, Homo sapien
ggacagaagcgaatatttctcccat

SEQ ID NO: 4615886 - DNA, 25 bp, Homo sapien
gatcaaggtccaagaataggttaaa

SEQ ID NO: 4615887 - DNA, 25 bp, Homo sapien
taaccccttaactgtcatccctgtc

SEQ ID NO: 4615888 - DNA, 25 bp, Homo sapien
cttaactgtcatccctgtctaatct

SEQ ID NO: 4615889 - DNA, 25 bp, Homo sapien
actgtcatccctgtctaatctcctg

SEQ ID NO: 4615890 - DNA, 25 bp, Homo sapien
cccttaactgtcatccctgtctaat

SEQ ID NO: 4615891 - DNA, 25 bp, Homo sapien
cctagccctgtacagtggacactgg

SEQ ID NO: 4615892 - DNA, 25 bp, Homo sapien
tattgagatgatgcctgcttgtggt

SEQ ID NO: 4615893 - DNA, 25 bp, Homo sapien
gcttgtggttttatcctagccctgt

SEQ ID NO: 4615894 - DNA, 25 bp, Homo sapien
ggttttatcctagccctgtacagtg

SEQ ID NO: 4615895 - DNA, 25 bp, Homo sapien
ctaacggagacgtcaaaggtcttgg

SEQ ID NO: 4615896 - DNA, 25 bp, Homo sapien
gggctggcagactcaatttggaact

SEQ ID NO: 4615897 - DNA, 25 bp, Homo sapien
gtatataatttattcgattcagccc

SEQ ID NO: 4615898 - DNA, 25 bp, Homo sapien
cagactcaatttggaactgtgtttg

SEQ ID NO: 4615899 - DNA, 25 bp, Homo sapien
cacaggtggtgacattcgccacaga

SEQ ID NO: 4615900 - DNA, 25 bp, Homo sapien
gtcacaggtggtgacattcgccaca

SEQ ID NO: 4615901 - DNA, 25 bp, Homo sapien
taaataagagcgctgtcacaggtgg

SEQ ID NO: 4615902 - DNA, 25 bp, Homo sapien
caggtggtgacattcgccacagatc

SEQ ID NO: 4615903 - DNA, 25 bp, Homo sapien
agacaaggtctcatagtacttaggg

SEQ ID NO: 4615904 - DNA, 25 bp, Homo sapien
gcagccagctataggcaaagacaag

SEQ ID NO: 4615905 - DNA, 25 bp, Homo sapien
tctcatagtacttagggaacttcct

SEQ ID NO: 4615906 - DNA, 25 bp, Homo sapien
aggaatccatgtccaatgcagccag

SEQ ID NO: 4615907 - DNA, 25 bp, Homo sapien
ttttagtgggattgattctgatttc

SEQ ID NO: 4615908 - DNA, 25 bp, Homo sapien
tccaaacttttagtgggattgattc

SEQ ID NO: 4615909 - DNA, 25 bp, Homo sapien
acaatctctgtgttttaacagatac

SEQ ID NO: 4615910 - DNA, 25 bp, Homo sapien
ctgatttggtaattatcagtcttat

SEQ ID NO: 4615911 - DNA, 25 bp, Homo sapien
cttctagatgacagtccatcaatct

SEQ ID NO: 4615912 - DNA, 25 bp, Homo sapien
ctctggtggagtatgcgtctggcta

SEQ ID NO: 4615913 - DNA, 25 bp, Homo sapien
gcaggactgggcaaagcgttggcca

SEQ ID NO: 4615914 - DNA, 25 bp, Homo sapien
agcctccaacacgatgcctgtggct

SEQ ID NO: 4615915 - DNA, 25 bp, Homo sapien
tagttggccaaatccgactagctga

SEQ ID NO: 4615916 - DNA, 25 bp, Homo sapien
aatccgactagctgaaacctccact

SEQ ID NO: 4615917 - DNA, 25 bp, Homo sapien
aaatctgtcctgaacacaccaatct

SEQ ID NO: 4615918 - DNA, 25 bp, Homo sapien
ctgtcctgaacacaccaatctgaac

SEQ ID NO: 4615919 - DNA, 25 bp, Homo sapien
aagcattcagtttatctggtgtgcg

SEQ ID NO: 4615920 - DNA, 25 bp, Homo sapien
cattcagtttatctggtgtgcgtgt

SEQ ID NO: 4615921 - DNA, 25 bp, Homo sapien
ttcagtttatctggtgtgcgtgtac

SEQ ID NO: 4615922 - DNA, 25 bp, Homo sapien
ggaagcattcagtttatctggtgtg

SEQ ID NO: 4615923 - DNA, 25 bp, Homo sapien
tggccgccttgtccttggtgcactt

SEQ ID NO: 4615924 - DNA, 25 bp, Homo sapien
ccgccttgtccttggtgcacttgct

SEQ ID NO: 4615925 - DNA, 25 bp, Homo sapien
gccttgtccttggtgcacttgctca

SEQ ID NO: 4615926 - DNA, 25 bp, Homo sapien
cagtggccgccttgtccttggtgca

SEQ ID NO: 4615927 - DNA, 25 bp, Homo sapien
taaagccgggtgttctgcctatttc

SEQ ID NO: 4615928 - DNA, 25 bp, Homo sapien
gaaacccttgttaatactgcctgtc

SEQ ID NO: 4615929 - DNA, 25 bp, Homo sapien
aagttacactggctactaaatggca

SEQ ID NO: 4615930 - DNA, 25 bp, Homo sapien
cacagcgtttactacgtgcgaggta

SEQ ID NO: 4615931 - DNA, 25 bp, Homo sapien
ggaaggccagactgcgtgaggccag

SEQ ID NO: 4615932 - DNA, 25 bp, Homo sapien
gccagactgcgtgaggccagctttc

SEQ ID NO: 4615933 - DNA, 25 bp, Homo sapien
aggccagactgcgtgaggccagctt

SEQ ID NO: 4615934 - DNA, 25 bp, Homo sapien
gaaggccagactgcgtgaggccagc

SEQ ID NO: 4615935 - DNA, 25 bp, Homo sapien
aggtccagccactagccttcagaga

SEQ ID NO: 4615936 - DNA, 25 bp, Homo sapien
ccagccactagccttcagagagaag

SEQ ID NO: 4615937 - DNA, 25 bp, Homo sapien
aattgccatctgagtgcaggtccag

SEQ ID NO: 4615938 - DNA, 25 bp, Homo sapien
gccactagccttcagagagaagacc

SEQ ID NO: 4615939 - DNA, 25 bp, Homo sapien
ggatcatgttattgccctcagagct

SEQ ID NO: 4615940 - DNA, 25 bp, Homo sapien
gctgtagttgacctcacaccaaata

SEQ ID NO: 4615941 - DNA, 25 bp, Homo sapien
cacagtctcagcatcggtactgaca

SEQ ID NO: 4615942 - DNA, 25 bp, Homo sapien
gggcaaagaacaggctatgtcatcc

SEQ ID NO: 4615943 - DNA, 25 bp, Homo sapien
catggttagtgggtatggaaatgaa

SEQ ID NO: 4615944 - DNA, 25 bp, Homo sapien
tgttggcatggttagtgggtatgga

SEQ ID NO: 4615945 - DNA, 25 bp, Homo sapien
tggcatggttagtgggtatggaaat

SEQ ID NO: 4615946 - DNA, 25 bp, Homo sapien
tctgttggcatggttagtgggtatg

SEQ ID NO: 4615947 - DNA, 25 bp, Homo sapien
taagagcgtcccaaagatcaaaaag

SEQ ID NO: 4615948 - DNA, 25 bp, Homo sapien
ttgtggtccactctgaagttcaggt

SEQ ID NO: 4615949 - DNA, 25 bp, Homo sapien
gagtgttagagctcaaggaacctca

SEQ ID NO: 4615950 - DNA, 25 bp, Homo sapien
gaatgacaagcataagcccagtggc

SEQ ID NO: 4615951 - DNA, 25 bp, Homo sapien
acactgtctaccgagctggaagaca

SEQ ID NO: 4615952 - DNA, 25 bp, Homo sapien
tgaatggctcttctgaggtaatatt

SEQ ID NO: 4615953 - DNA, 25 bp, Homo sapien
actgtctaccgagctggaagacaat

SEQ ID NO: 4615954 - DNA, 25 bp, Homo sapien
gacacactgtctaccgagctggaag

SEQ ID NO: 4615955 - DNA, 25 bp, Homo sapien
gaggctcgcacgctggcgccttctt

SEQ ID NO: 4615956 - DNA, 25 bp, Homo sapien
gcacgctggcgccttcttcgtgcat

SEQ ID NO: 4615957 - DNA, 25 bp, Homo sapien
ggctcgcacgctggcgccttcttcg

SEQ ID NO: 4615958 - DNA, 25 bp, Homo sapien
ctcgcacgctggcgccttcttcgtg

SEQ ID NO: 4615959 - DNA, 25 bp, Homo sapien
gagcgttagccaatatttcatcaaa

SEQ ID NO: 4615960 - DNA, 25 bp, Homo sapien
gccccgagcgttagccaatatttca

SEQ ID NO: 4615961 - DNA, 25 bp, Homo sapien
cttcggtgccccgagcgttagccaa

SEQ ID NO: 4615962 - DNA, 25 bp, Homo sapien
cttcctcgggtccacatctgctcct

SEQ ID NO: 4615963 - DNA, 25 bp, Homo sapien
gctgacaccacaagagtagctggaa

SEQ ID NO: 4615964 - DNA, 25 bp, Homo sapien
cagccagctgtgctcgtgtgcttgt

SEQ ID NO: 4615965 - DNA, 25 bp, Homo sapien
gtgcatgacgcacatgtgggaatgt

SEQ ID NO: 4615966 - DNA, 25 bp, Homo sapien
gaatgtattctccatggccaggcac

SEQ ID NO: 4615967 - DNA, 25 bp, Homo sapien
gccagtattggatgatatacaacag

SEQ ID NO: 4615968 - DNA, 25 bp, Homo sapien
gaaagccagtattggatgatataca

SEQ ID NO: 4615969 - DNA, 25 bp, Homo sapien
tattggatgatatacaacagtgagg

SEQ ID NO: 4615970 - DNA, 25 bp, Homo sapien
tgatatacaacagtgaggaatttgg

SEQ ID NO: 4615971 - DNA, 25 bp, Homo sapien
taccccacatagcagaaagtctagg

SEQ ID NO: 4615972 - DNA, 25 bp, Homo sapien
aacactgtgccaatagttgccaggg

SEQ ID NO: 4615973 - DNA, 25 bp, Homo sapien
gaagctctactatacctggcaagac

SEQ ID NO: 4615974 - DNA, 25 bp, Homo sapien
taagatgtgttagacccacagaggt

SEQ ID NO: 4615975 - DNA, 25 bp, Homo sapien
atcgactgtttgctcccaaatacag

SEQ ID NO: 4615976 - DNA, 25 bp, Homo sapien
tatcttagcaaaatcgactgtttgc

SEQ ID NO: 4615977 - DNA, 25 bp, Homo sapien
tagcaaaatcgactgtttgctccca

SEQ ID NO: 4615978 - DNA, 25 bp, Homo sapien
cacttatcttagcaaaatcgactgt

SEQ ID NO: 4615979 - DNA, 25 bp, Homo sapien
tcttcattgtattaattcgctgaaa

SEQ ID NO: 4615980 - DNA, 25 bp, Homo sapien
taattcgctgaaagggcttcactgc

SEQ ID NO: 4615981 - DNA, 25 bp, Homo sapien
tgtattaattcgctgaaagggcttc

SEQ ID NO: 4615982 - DNA, 25 bp, Homo sapien
gaaagggcttcactgcatcagacat

SEQ ID NO: 4615983 - DNA, 25 bp, Homo sapien
cacctcttgggtctcatcttgcaaa

SEQ ID NO: 4615984 - DNA, 25 bp, Homo sapien
tgacttcagcatgtatggccaaagg

SEQ ID NO: 4615985 - DNA, 25 bp, Homo sapien
ggttgaccagttgtcccagagcatt

SEQ ID NO: 4615986 - DNA, 25 bp, Homo sapien
ttgtcagctcctacactagatggtg

SEQ ID NO: 4615987 - DNA, 25 bp, Homo sapien
aatggctatatcgtttgtggcctgg

SEQ ID NO: 4615988 - DNA, 25 bp, Homo sapien
tatatcgtttgtggcctgggtgtgt

SEQ ID NO: 4615989 - DNA, 25 bp, Homo sapien
gagaaaatggctatatcgtttgtgg

SEQ ID NO: 4615990 - DNA, 25 bp, Homo sapien
tttgagacgagaaaatggctatatc

SEQ ID NO: 4615991 - DNA, 25 bp, Homo sapien
tcaggtaggttggcccaccacagag

SEQ ID NO: 4615992 - DNA, 25 bp, Homo sapien
ggataaggatcagtgagggaaggca

SEQ ID NO: 4615993 - DNA, 25 bp, Homo sapien
aggcaaaggaagtctcattacaacc

SEQ ID NO: 4615994 - DNA, 25 bp, Homo sapien
caggtcaggataaggatcagtgagg

SEQ ID NO: 4615995 - DNA, 25 bp, Homo sapien
cactgcgatggcgtttcccatccat

SEQ ID NO: 4615996 - DNA, 25 bp, Homo sapien
tctgagagccactgcgatggcgttt

SEQ ID NO: 4615997 - DNA, 25 bp, Homo sapien
cagaaccttctgagagccactgcga

SEQ ID NO: 4615998 - DNA, 25 bp, Homo sapien
gagccactgcgatggcgtttcccat

SEQ ID NO: 4615999 - DNA, 25 bp, Homo sapien
ccctgtgtttgtgaagccttgctca

SEQ ID NO: 4616000 - DNA, 25 bp, Homo sapien
tgccacatctttgccctgtgtttgt

SEQ ID NO: 4616001 - DNA, 25 bp, Homo sapien
cctgtgtttgtgaagccttgctcac

SEQ ID NO: 4616002 - DNA, 25 bp, Homo sapien
acatctttgccctgtgtttgtgaag

SEQ ID NO: 4616003 - DNA, 25 bp, Homo sapien
gccacagaggctcgcttgcctagaa

SEQ ID NO: 4616004 - DNA, 25 bp, Homo sapien
gtcagccacagaggctcgcttgcct

SEQ ID NO: 4616005 - DNA, 25 bp, Homo sapien
agaggtcagccacagaggctcgctt

SEQ ID NO: 4616006 - DNA, 25 bp, Homo sapien
tgagagcaactgccgttcccaggct

SEQ ID NO: 4616007 - DNA, 25 bp, Homo sapien
ctgtttctacagcttcagatccata

SEQ ID NO: 4616008 - DNA, 25 bp, Homo sapien
cagatccataatgaactttggctga

SEQ ID NO: 4616009 - DNA, 25 bp, Homo sapien
ttagcgagccagcaactacatccgt

SEQ ID NO: 4616010 - DNA, 25 bp, Homo sapien
ggctgagatgacctgtttacttagc

SEQ ID NO: 4616011 - DNA, 25 bp, Homo sapien
gaaggggccatcttgcaaaatcaat

SEQ ID NO: 4616012 - DNA, 25 bp, Homo sapien
aggggccatcttgcaaaatcaattg

SEQ ID NO: 4616013 - DNA, 25 bp, Homo sapien
ctaaccaggattgcacagctctttg

SEQ ID NO: 4616014 - DNA, 25 bp, Homo sapien
aaggggccatcttgcaaaatcaatt

SEQ ID NO: 4616015 - DNA, 25 bp, Homo sapien
agacctcggatctgtttgttctgca

SEQ ID NO: 4616016 - DNA, 25 bp, Homo sapien
ttgttctgcaggccaattcccagca

SEQ ID NO: 4616017 - DNA, 25 bp, Homo sapien
gtcctgctcggtgcagagacctcgg

SEQ ID NO: 4616018 - DNA, 25 bp, Homo sapien
gctgagctcacatcccggcagcagc

SEQ ID NO: 4616019 - DNA, 25 bp, Homo sapien
cctggatgctcatgatgaattactt

SEQ ID NO: 4616020 - DNA, 25 bp, Homo sapien
ctcatgatgaattacttggccagca

SEQ ID NO: 4616021 - DNA, 25 bp, Homo sapien
agtcaataggtgaaggtgttcctgg

SEQ ID NO: 4616022 - DNA, 25 bp, Homo sapien
tcagtcaataggtgaaggtgttcct

SEQ ID NO: 4616023 - DNA, 25 bp, Homo sapien
gaaccacatgatctatttcactcca

SEQ ID NO: 4616024 - DNA, 25 bp, Homo sapien
atgccttcttctaccgctaacaatc

SEQ ID NO: 4616025 - DNA, 25 bp, Homo sapien
cttcatcttcgctctgtgaaccaca

SEQ ID NO: 4616026 - DNA, 25 bp, Homo sapien
tctctaaagccaaggccttcatctt

SEQ ID NO: 4616027 - DNA, 25 bp, Homo sapien
atcagaagcagcgtacagctgtggc

SEQ ID NO: 4616028 - DNA, 25 bp, Homo sapien
tcgcttgcggctgaaaaacaatcag

SEQ ID NO: 4616029 - DNA, 25 bp, Homo sapien
tctacctttggcttcgcttgcggct

SEQ ID NO: 4616030 - DNA, 25 bp, Homo sapien
aacaatcagaagcagcgtacagctg

SEQ ID NO: 4616031 - DNA, 25 bp, Homo sapien
ttttcctttttgctacagtcaccac

SEQ ID NO: 4616032 - DNA, 25 bp, Homo sapien
ctgcatgttggcctgtttttccttt

SEQ ID NO: 4616033 - DNA, 25 bp, Homo sapien
tgcatgttggcctgtttttcctttt

SEQ ID NO: 4616034 - DNA, 25 bp, Homo sapien
ctgtttttcctttttgctacagtca

SEQ ID NO: 4616035 - DNA, 25 bp, Homo sapien
taggcggtcctcgaggaagcgccca

SEQ ID NO: 4616036 - DNA, 25 bp, Homo sapien
caacctcaggttcgaagttgaggcc

SEQ ID NO: 4616037 - DNA, 25 bp, Homo sapien
cattaataatgcatcactgggactt

SEQ ID NO: 4616038 - DNA, 25 bp, Homo sapien
gagcagagtcgcaggtgtgcagtag

SEQ ID NO: 4616039 - DNA, 25 bp, Homo sapien
gatatttctacatgacctggtagca

SEQ ID NO: 4616040 - DNA, 25 bp, Homo sapien
cctggtagcatactcttagaagaga

SEQ ID NO: 4616041 - DNA, 25 bp, Homo sapien
catctctcagagacatttgacaggg

SEQ ID NO: 4616042 - DNA, 25 bp, Homo sapien
ctgagctcaacaggactacagtttg

SEQ ID NO: 4616043 - DNA, 25 bp, Homo sapien
gcaagagtctgcacaaatataaagg

SEQ ID NO: 4616044 - DNA, 25 bp, Homo sapien
tgttttcagtataggaatggcatga

SEQ ID NO: 4616045 - DNA, 25 bp, Homo sapien
tctagaggccatgagataggttagc

SEQ ID NO: 4616046 - DNA, 25 bp, Homo sapien
gacgtggacaacacttaagactcag

SEQ ID NO: 4616047 - DNA, 25 bp, Homo sapien
agtgcatggtcctttggagacccac

SEQ ID NO: 4616048 - DNA, 25 bp, Homo sapien
tatatgcctaagaagtggagcttca

SEQ ID NO: 4616049 - DNA, 25 bp, Homo sapien
acagcttgtcagagggcttcttaag

SEQ ID NO: 4616050 - DNA, 25 bp, Homo sapien
tcttaaggacagaacacgggctgcc

SEQ ID NO: 4616051 - DNA, 25 bp, Homo sapien
gtggtgatgagtgggtccctgctca

SEQ ID NO: 4616052 - DNA, 25 bp, Homo sapien
ccctcttcctgccatgacgtggcag

SEQ ID NO: 4616053 - DNA, 25 bp, Homo sapien
ggtgatgagtgggtccctgctcatc

SEQ ID NO: 4616054 - DNA, 25 bp, Homo sapien
tcttcctgccatgacgtggcaggat

SEQ ID NO: 4616055 - DNA, 25 bp, Homo sapien
aggaccctgaggatgaatattttgt

SEQ ID NO: 4616056 - DNA, 25 bp, Homo sapien
gccactagaggctattaaatctgtt

SEQ ID NO: 4616057 - DNA, 25 bp, Homo sapien
aatttttcggatggaaagccactag

SEQ ID NO: 4616058 - DNA, 25 bp, Homo sapien
gaggatgaatattttgtcaatttcc

SEQ ID NO: 4616059 - DNA, 25 bp, Homo sapien
ttgagtcagagccagtctgagtagt

SEQ ID NO: 4616060 - DNA, 25 bp, Homo sapien
ggccttgagtcagagccagtctgag

SEQ ID NO: 4616061 - DNA, 25 bp, Homo sapien
ccttgagtcagagccagtctgagta

SEQ ID NO: 4616062 - DNA, 25 bp, Homo sapien
tcaacagggtatgggccttgagtca

SEQ ID NO: 4616063 - DNA, 25 bp, Homo sapien
tcccaggaggcaacactctgagctt

SEQ ID NO: 4616064 - DNA, 25 bp, Homo sapien
gaaagggcattttctgcaaagacca

SEQ ID NO: 4616065 - DNA, 25 bp, Homo sapien
cacccagtgtagatggggaggcctt

SEQ ID NO: 4616066 - DNA, 25 bp, Homo sapien
ccatgaggagcatcggaaagggcat

SEQ ID NO: 4616067 - DNA, 25 bp, Homo sapien
tgtggcttcggggtcctggatggac

SEQ ID NO: 4616068 - DNA, 25 bp, Homo sapien
ttggctccagtagctgtggcttcgg

SEQ ID NO: 4616069 - DNA, 25 bp, Homo sapien
ccaggttggctccagtagctgtggc

SEQ ID NO: 4616070 - DNA, 25 bp, Homo sapien
gtcctggatggactccatggcctct

SEQ ID NO: 4616071 - DNA, 25 bp, Homo sapien
gcaatttcggtagtaccagctctgg

SEQ ID NO: 4616072 - DNA, 25 bp, Homo sapien
gggattagggaggacaggagacctg

SEQ ID NO: 4616073 - DNA, 25 bp, Homo sapien
ctgcagcatgcaatttcggtagtac

SEQ ID NO: 4616074 - DNA, 25 bp, Homo sapien
ttcggtagtaccagctctgggagtg

SEQ ID NO: 4616075 - DNA, 25 bp, Homo sapien
aattagcgaggtcatcttgttgacc

SEQ ID NO: 4616076 - DNA, 25 bp, Homo sapien
taagaattagcgaggtcatcttgtt

SEQ ID NO: 4616077 - DNA, 25 bp, Homo sapien
aacatcagctgataagaattagcga

SEQ ID NO: 4616078 - DNA, 25 bp, Homo sapien
cagctgataagaattagcgaggtca

SEQ ID NO: 4616079 - DNA, 25 bp, Homo sapien
tctgtctccccttgcaacttgacca

SEQ ID NO: 4616080 - DNA, 25 bp, Homo sapien
aacacctgtggtattcgaatcttgt

SEQ ID NO: 4616081 - DNA, 25 bp, Homo sapien
ggtattcgaatcttgtggagccagt

SEQ ID NO: 4616082 - DNA, 25 bp, Homo sapien
ttcgaatcttgtggagccagtggct

SEQ ID NO: 4616083 - DNA, 25 bp, Homo sapien
cagataggttgtccaacacagggat

SEQ ID NO: 4616084 - DNA, 25 bp, Homo sapien
gttgtccaacacagggatgcccttg

SEQ ID NO: 4616085 - DNA, 25 bp, Homo sapien
cacagggatgcccttgcagcttttg

SEQ ID NO: 4616086 - DNA, 25 bp, Homo sapien
atacaaaagacctccaaatcctttg

SEQ ID NO: 4616087 - DNA, 25 bp, Homo sapien
tatctaagagcccaaagcccatggc

SEQ ID NO: 4616088 - DNA, 25 bp, Homo sapien
tcacacacaggcaggaatccatttg

SEQ ID NO: 4616089 - DNA, 25 bp, Homo sapien
cacctgaagccaacgtatctaagag

SEQ ID NO: 4616090 - DNA, 25 bp, Homo sapien
tggttattcaggacccagggagtct

SEQ ID NO: 4616091 - DNA, 25 bp, Homo sapien
ggcactcttgcttgactcagtatca

SEQ ID NO: 4616092 - DNA, 25 bp, Homo sapien
ccgacacgctggtagggaggttctc

SEQ ID NO: 4616093 - DNA, 25 bp, Homo sapien
gcctgttctcaccatgacaagggag

SEQ ID NO: 4616094 - DNA, 25 bp, Homo sapien
tcaaagcttcctccgagcctgttct

SEQ ID NO: 4616095 - DNA, 25 bp, Homo sapien
acagatagacagactcggcagcctg

SEQ ID NO: 4616096 - DNA, 25 bp, Homo sapien
tgagtcctctacttttatcccaagg

SEQ ID NO: 4616097 - DNA, 25 bp, Homo sapien
ttccacgaatcaacagatagacaga

SEQ ID NO: 4616098 - DNA, 25 bp, Homo sapien
cagcctgcgaatgcagctccgactg

SEQ ID NO: 4616099 - DNA, 25 bp, Homo sapien
tggacaatattctctgcattgcgac

SEQ ID NO: 4616100 - DNA, 25 bp, Homo sapien
tcaaactcccctggatctcgggtac

SEQ ID NO: 4616101 - DNA, 25 bp, Homo sapien
ctgagttggacaatattctctgcat

SEQ ID NO: 4616102 - DNA, 25 bp, Homo sapien
ggatctcgggtactgagttggacaa

SEQ ID NO: 4616103 - DNA, 25 bp, Homo sapien
gggttgagccgctgtggtttgcttt

SEQ ID NO: 4616104 - DNA, 25 bp, Homo sapien
aactccggaacacatagaggttgca

SEQ ID NO: 4616105 - DNA, 25 bp, Homo sapien
cctttggaaactccggaacacatag

SEQ ID NO: 4616106 - DNA, 25 bp, Homo sapien
cggaacacatagaggttgcatgact

SEQ ID NO: 4616107 - DNA, 25 bp, Homo sapien
ttatcccagagacatcggactccgg

SEQ ID NO: 4616108 - DNA, 25 bp, Homo sapien
tatcagacaacataaaggcccgcca

SEQ ID NO: 4616109 - DNA, 25 bp, Homo sapien
tgccgcggaatatgcacataccagt

SEQ ID NO: 4616110 - DNA, 25 bp, Homo sapien
catgatgtgaagagagtccgccagc

SEQ ID NO: 4616111 - DNA, 25 bp, Homo sapien
gagaagcctaacctataaacacagt

SEQ ID NO: 4616112 - DNA, 25 bp, Homo sapien
ggactgtaatggagaggtgcacaca

SEQ ID NO: 4616113 - DNA, 25 bp, Homo sapien
ccctgtggcaggcactatattaagt

SEQ ID NO: 4616114 - DNA, 25 bp, Homo sapien
gaattcatctcactgtctactggag

SEQ ID NO: 4616115 - DNA, 25 bp, Homo sapien
aatacctcaagaaatttagcatgga

SEQ ID NO: 4616116 - DNA, 25 bp, Homo sapien
gcatggagtcattttcaatacctag

SEQ ID NO: 4616117 - DNA, 25 bp, Homo sapien
cacctcagtctgaaagtctctggaa

SEQ ID NO: 4616118 - DNA, 25 bp, Homo sapien
ctggaaagcccagagcaatacctca

SEQ ID NO: 4616119 - DNA, 25 bp, Homo sapien
ctgctgaccgtctctttcaatttgg

SEQ ID NO: 4616120 - DNA, 25 bp, Homo sapien
gctgacttagcacaaatttcccata

SEQ ID NO: 4616121 - DNA, 25 bp, Homo sapien
gagcagagactgaacttggaaactt

SEQ ID NO: 4616122 - DNA, 25 bp, Homo sapien
gacatccttgagacacaacctcagg

SEQ ID NO: 4616123 - DNA, 25 bp, Homo sapien
ttgctatgctcatatccaagcctga

SEQ ID NO: 4616124 - DNA, 25 bp, Homo sapien
tgctatgctcatatccaagcctgaa

SEQ ID NO: 4616125 - DNA, 25 bp, Homo sapien
ctatgctcatatccaagcctgaaac

SEQ ID NO: 4616126 - DNA, 25 bp, Homo sapien
cattgctatgctcatatccaagcct

SEQ ID NO: 4616127 - DNA, 25 bp, Homo sapien
tgttctcccattcaaatctggtagt

SEQ ID NO: 4616128 - DNA, 25 bp, Homo sapien
tttattggctctgtcatcgatccag

SEQ ID NO: 4616129 - DNA, 25 bp, Homo sapien
cacaaacatgggtgcattcaagaag

SEQ ID NO: 4616130 - DNA, 25 bp, Homo sapien
tctgaaactggcgatcctatttctc

SEQ ID NO: 4616131 - DNA, 25 bp, Homo sapien
aaggagtatgtgtttggcatgactc

SEQ ID NO: 4616132 - DNA, 25 bp, Homo sapien
tatgtgtttggcatgactcagtttt

SEQ ID NO: 4616133 - DNA, 25 bp, Homo sapien
ttttcaccagggtcgctaatgcatc

SEQ ID NO: 4616134 - DNA, 25 bp, Homo sapien
cagttttcaccagggtcgctaatgc

SEQ ID NO: 4616135 - DNA, 25 bp, Homo sapien
agaagaaaaccttcacatgcagctg

SEQ ID NO: 4616136 - DNA, 25 bp, Homo sapien
cagctggatcaataagaagaaaacc

SEQ ID NO: 4616137 - DNA, 25 bp, Homo sapien
cagaagtgcctcacaccagctggat

SEQ ID NO: 4616138 - DNA, 25 bp, Homo sapien
gtgcctcacaccagctggatcaata

SEQ ID NO: 4616139 - DNA, 25 bp, Homo sapien
ccgagtcgcattgtatcaaagatga

SEQ ID NO: 4616140 - DNA, 25 bp, Homo sapien
ggtccgagtcgcattgtatcaaaga

SEQ ID NO: 4616141 - DNA, 25 bp, Homo sapien
ctggtccgagtcgcattgtatcaaa

SEQ ID NO: 4616142 - DNA, 25 bp, Homo sapien
tccgagtcgcattgtatcaaagatg

SEQ ID NO: 4616143 - DNA, 25 bp, Homo sapien
tcctcgccacgcaatctggaccaag

SEQ ID NO: 4616144 - DNA, 25 bp, Homo sapien
cagccatcgccttccggtgagagaa

SEQ ID NO: 4616145 - DNA, 25 bp, Homo sapien
ttaggaatagcactccagccatcgc

SEQ ID NO: 4616146 - DNA, 25 bp, Homo sapien
caagccatgcaattccggggacgac

SEQ ID NO: 4616147 - DNA, 25 bp, Homo sapien
ttatcggttgactttgtcaatgcaa

SEQ ID NO: 4616148 - DNA, 25 bp, Homo sapien
ttgaggccctggtcatctaaatttg

SEQ ID NO: 4616149 - DNA, 25 bp, Homo sapien
tgaggccctggtcatctaaatttgc

SEQ ID NO: 4616150 - DNA, 25 bp, Homo sapien
tttgaggccctggtcatctaaattt

SEQ ID NO: 4616151 - DNA, 25 bp, Homo sapien
gcggcggcagcagcagcagccctgg

SEQ ID NO: 4616152 - DNA, 25 bp, Homo sapien
tctctcttgcccagggcagcggcgg

SEQ ID NO: 4616153 - DNA, 25 bp, Homo sapien
gcggcagcagcagcagccctggcat

SEQ ID NO: 4616154 - DNA, 25 bp, Homo sapien
ctctctcttgcccagggcagcggcg

SEQ ID NO: 4616155 - DNA, 25 bp, Homo sapien
ctctgtgtccctcacgttatggtat

SEQ ID NO: 4616156 - DNA, 25 bp, Homo sapien
tgtccctcacgttatggtataaata

SEQ ID NO: 4616157 - DNA, 25 bp, Homo sapien
cagagggttgagatatcttaacact

SEQ ID NO: 4616158 - DNA, 25 bp, Homo sapien
gaagtacagagggttgagatatctt

SEQ ID NO: 4616159 - DNA, 25 bp, Homo sapien
tactcacagaatatgtggaaagttc

SEQ ID NO: 4616160 - DNA, 25 bp, Homo sapien
gaatatgtggaaagttcccgtggca

SEQ ID NO: 4616161 - DNA, 25 bp, Homo sapien
cccgtggcaacttcttattgaaaat

SEQ ID NO: 4616162 - DNA, 25 bp, Homo sapien
agttcccgtggcaacttcttattga

SEQ ID NO: 4616163 - DNA, 25 bp, Homo sapien
tgaacagttaatttcgtctttgtgc

SEQ ID NO: 4616164 - DNA, 25 bp, Homo sapien
caatcaattcgagttgttgggtaaa

SEQ ID NO: 4616165 - DNA, 25 bp, Homo sapien
gcaatcaattcgagttgttgggtaa

SEQ ID NO: 4616166 - DNA, 25 bp, Homo sapien
atcaattcgagttgttgggtaaagt

SEQ ID NO: 4616167 - DNA, 25 bp, Homo sapien
agcaatcaattcgagttgttgggta

SEQ ID NO: 4616168 - DNA, 25 bp, Homo sapien
taccctcttcccttcgtagctggct

SEQ ID NO: 4616169 - DNA, 25 bp, Homo sapien
gatttggacacaggggctggtaccc

SEQ ID NO: 4616170 - DNA, 25 bp, Homo sapien
ctcttcccttcgtagctggctgagc

SEQ ID NO: 4616171 - DNA, 25 bp, Homo sapien
atggcacagcggctggaccaagaaa

SEQ ID NO: 4616172 - DNA, 25 bp, Homo sapien
actttgatatccagacaagcccagc

SEQ ID NO: 4616173 - DNA, 25 bp, Homo sapien
gccgcggtcggcagaaactgctgca

SEQ ID NO: 4616174 - DNA, 25 bp, Homo sapien
gatatccagacaagcccagctcaag

SEQ ID NO: 4616175 - DNA, 25 bp, Homo sapien
gctcgctgtcttagcagaaaggcac

SEQ ID NO: 4616176 - DNA, 25 bp, Homo sapien
tgatgcccggcaagttctagaaccc

SEQ ID NO: 4616177 - DNA, 25 bp, Homo sapien
tgtgaatccatggtcaggcgttccc

SEQ ID NO: 4616178 - DNA, 25 bp, Homo sapien
cagaatttacttggcccctgaagga

SEQ ID NO: 4616179 - DNA, 25 bp, Homo sapien
tgtgactggaataggcaggcaacct

SEQ ID NO: 4616180 - DNA, 25 bp, Homo sapien
tgatctgggcccaataaaagcccct

SEQ ID NO: 4616181 - DNA, 25 bp, Homo sapien
tgatgatctgggcccaataaaagcc

SEQ ID NO: 4616182 - DNA, 25 bp, Homo sapien
atgatctgggcccaataaaagcccc

SEQ ID NO: 4616183 - DNA, 25 bp, Homo sapien
gattgatgatctgggcccaataaaa

SEQ ID NO: 4616184 - DNA, 25 bp, Homo sapien
aaccccagtgacaggcgggctggta

SEQ ID NO: 4616185 - DNA, 25 bp, Homo sapien
ctatttagtgctttccaggacagga

SEQ ID NO: 4616186 - DNA, 25 bp, Homo sapien
aattttgaggcctgtcgaaccccag

SEQ ID NO: 4616187 - DNA, 25 bp, Homo sapien
taaacagattgaagaagctaatgac

SEQ ID NO: 4616188 - DNA, 25 bp, Homo sapien
gagaaccgcagtctgtgggacagcc

SEQ ID NO: 4616189 - DNA, 25 bp, Homo sapien
catgaaataaggcttgcctgaggcc

SEQ ID NO: 4616190 - DNA, 25 bp, Homo sapien
aggaacttagctctggcatgaaata

SEQ ID NO: 4616191 - DNA, 25 bp, Homo sapien
ttgagaaccgcagtctgtgggacag

SEQ ID NO: 4616192 - DNA, 25 bp, Homo sapien
taaacgaagggcatgaaaactctcc

SEQ ID NO: 4616193 - DNA, 25 bp, Homo sapien
ccatcctgattttgacgttgccaca

SEQ ID NO: 4616194 - DNA, 25 bp, Homo sapien
gagaccagtgttgcttggagcatcc

SEQ ID NO: 4616195 - DNA, 25 bp, Homo sapien
aactctccaaattagggtctctgag

SEQ ID NO: 4616196 - DNA, 25 bp, Homo sapien
tgaatacaaacaggccaaggtgcat

SEQ ID NO: 4616197 - DNA, 25 bp, Homo sapien
ctgaatacaaacaggccaaggtgca

SEQ ID NO: 4616198 - DNA, 25 bp, Homo sapien
gatacttgagcttccccaagctgag

SEQ ID NO: 4616199 - DNA, 25 bp, Homo sapien
cagccaagatcactggatacttgag

SEQ ID NO: 4616200 - DNA, 25 bp, Homo sapien
ttggctggcccctggttttgccgtg

SEQ ID NO: 4616201 - DNA, 25 bp, Homo sapien
ccgtgagtaatacactgggcttcat

SEQ ID NO: 4616202 - DNA, 25 bp, Homo sapien
gacatggcatatggtcacagacctg

SEQ ID NO: 4616203 - DNA, 25 bp, Homo sapien
taagaacggtacctacatcacagag

SEQ ID NO: 4616204 - DNA, 25 bp, Homo sapien
caatgaactccttctggtcggaaaa

SEQ ID NO: 4616205 - DNA, 25 bp, Homo sapien
gcaagaataggaaggcagactgcca

SEQ ID NO: 4616206 - DNA, 25 bp, Homo sapien
ctgaccaaacgagagggcaggcttg

SEQ ID NO: 4616207 - DNA, 25 bp, Homo sapien
caaaggcagtgtcggtgcgctgacc

SEQ ID NO: 4616208 - DNA, 25 bp, Homo sapien
caatcccaggtagaaaggccaacag

SEQ ID NO: 4616209 - DNA, 25 bp, Homo sapien
caacagagggaatgaaccgtggcct

SEQ ID NO: 4616210 - DNA, 25 bp, Homo sapien
tgcaaaacaacattaagaaaccgaa

SEQ ID NO: 4616211 - DNA, 25 bp, Homo sapien
gagaagtgagattctcagtgctcca

SEQ ID NO: 4616212 - DNA, 25 bp, Homo sapien
agtgagattctcagtgctccaataa

SEQ ID NO: 4616213 - DNA, 25 bp, Homo sapien
gaagtgagattctcagtgctccaat

SEQ ID NO: 4616214 - DNA, 25 bp, Homo sapien
tgggagcaagggccgggcagggacc

SEQ ID NO: 4616215 - DNA, 25 bp, Homo sapien
gggagcaagggccgggcagggacca

SEQ ID NO: 4616216 - DNA, 25 bp, Homo sapien
ctgggagcaagggccgggcagggac

SEQ ID NO: 4616217 - DNA, 25 bp, Homo sapien
gagcaagggccgggcagggaccagt

SEQ ID NO: 4616218 - DNA, 25 bp, Homo sapien
tggaaaatgctgcactgtgcatggg

SEQ ID NO: 4616219 - DNA, 25 bp, Homo sapien
aaatgctgcactgtgcatgggtgag

SEQ ID NO: 4616220 - DNA, 25 bp, Homo sapien
aggtgttggaaagaggatgcaacca

SEQ ID NO: 4616221 - DNA, 25 bp, Homo sapien
ggaaagaggatgcaaccatccccaa

SEQ ID NO: 4616222 - DNA, 25 bp, Homo sapien
tcccgtacacgcagggatgtctctg

SEQ ID NO: 4616223 - DNA, 25 bp, Homo sapien
tgttcccgtacacgcagggatgtct

SEQ ID NO: 4616224 - DNA, 25 bp, Homo sapien
ttctgttcccgtacacgcagggatg

SEQ ID NO: 4616225 - DNA, 25 bp, Homo sapien
ctgggtgacagccactgacccacct

SEQ ID NO: 4616226 - DNA, 25 bp, Homo sapien
catttaatgcgtgcggatctcctga

SEQ ID NO: 4616227 - DNA, 25 bp, Homo sapien
gatttgttttgtgcggtccagacca

SEQ ID NO: 4616228 - DNA, 25 bp, Homo sapien
tccgtagctgtggatgcaaaaggct

SEQ ID NO: 4616229 - DNA, 25 bp, Homo sapien
tatgttcacggttgggtcccttaga

SEQ ID NO: 4616230 - DNA, 25 bp, Homo sapien
tcccggctgtgctcatcactgattc

SEQ ID NO: 4616231 - DNA, 25 bp, Homo sapien
aaagtaatggttgtccagcaagccc

SEQ ID NO: 4616232 - DNA, 25 bp, Homo sapien
cctgaaatcataagagcagtccatg

SEQ ID NO: 4616233 - DNA, 25 bp, Homo sapien
gatttcggagcacctgacagtaaga

SEQ ID NO: 4616234 - DNA, 25 bp, Homo sapien
tatctgtgattatggtgatgtgccc

SEQ ID NO: 4616235 - DNA, 25 bp, Homo sapien
gagagacaatgtgggcacctatcac

SEQ ID NO: 4616236 - DNA, 25 bp, Homo sapien
ggtttatgtatcctcttggccgctc

SEQ ID NO: 4616237 - DNA, 25 bp, Homo sapien
cccttttgagataggcagccggctc

SEQ ID NO: 4616238 - DNA, 25 bp, Homo sapien
agagccggccgatgcatcagaatgc

SEQ ID NO: 4616239 - DNA, 25 bp, Homo sapien
aatatgaaggcaacagccagcccag

SEQ ID NO: 4616240 - DNA, 25 bp, Homo sapien
tgcgcattccgcatgaaatatgaag

SEQ ID NO: 4616241 - DNA, 25 bp, Homo sapien
cccgggtggatttagacgaagagca

SEQ ID NO: 4616242 - DNA, 25 bp, Homo sapien
gaaacttgaaggagctctacactgg

SEQ ID NO: 4616243 - DNA, 25 bp, Homo sapien
tatgagtgatttcaaagcttctgcc

SEQ ID NO: 4616244 - DNA, 25 bp, Homo sapien
taaataccatgggaagcaagggtca

SEQ ID NO: 4616245 - DNA, 25 bp, Homo sapien
tgatagagccagtcaaaacgaggaa

SEQ ID NO: 4616246 - DNA, 25 bp, Homo sapien
gcaaagtgttaagtagatggctgat

SEQ ID NO: 4616247 - DNA, 25 bp, Homo sapien
tgagcatgttaccatcgcatcctcg

SEQ ID NO: 4616248 - DNA, 25 bp, Homo sapien
tgaaggcggtcccatgtttgagacc

SEQ ID NO: 4616249 - DNA, 25 bp, Homo sapien
ttagtgggtacccagctcattggaa

SEQ ID NO: 4616250 - DNA, 25 bp, Homo sapien
gtagggaggcctgtatcattcaaag

SEQ ID NO: 4616251 - DNA, 25 bp, Homo sapien
tactgccagttctgatctccctagg

SEQ ID NO: 4616252 - DNA, 25 bp, Homo sapien
cagcttcctgcaagccgtgatggag

SEQ ID NO: 4616253 - DNA, 25 bp, Homo sapien
gagttgactcaagtatactgccagt

SEQ ID NO: 4616254 - DNA, 25 bp, Homo sapien
tggtgagcaggtaggaagtatgaga

SEQ ID NO: 4616255 - DNA, 25 bp, Homo sapien
gagtggtgagcaggtaggaagtatg

SEQ ID NO: 4616256 - DNA, 25 bp, Homo sapien
gagcaggtaggaagtatgagagagc

SEQ ID NO: 4616257 - DNA, 25 bp, Homo sapien
gtaggaagtatgagagagctgcaga

SEQ ID NO: 4616258 - DNA, 25 bp, Homo sapien
tagggttattacacagccgacaggg

SEQ ID NO: 4616259 - DNA, 25 bp, Homo sapien
tgatgaacaggtttagggttattac

SEQ ID NO: 4616260 - DNA, 25 bp, Homo sapien
caaggaggttacttcaagtgagggt

SEQ ID NO: 4616261 - DNA, 25 bp, Homo sapien
ggagaagcaaggaggttacttcaag

SEQ ID NO: 4616262 - DNA, 25 bp, Homo sapien
gagcctcatgatgtagtcatttcct

SEQ ID NO: 4616263 - DNA, 25 bp, Homo sapien
cctgagcctcatgatgtagtcattt

SEQ ID NO: 4616264 - DNA, 25 bp, Homo sapien
tgagcctcatgatgtagtcatttcc

SEQ ID NO: 4616265 - DNA, 25 bp, Homo sapien
ctgagcctcatgatgtagtcatttc

SEQ ID NO: 4616266 - DNA, 25 bp, Homo sapien
tgctgacccactctgcggctcatct

SEQ ID NO: 4616267 - DNA, 25 bp, Homo sapien
gctgacccactctgcggctcatctc

SEQ ID NO: 4616268 - DNA, 25 bp, Homo sapien
ctgacccactctgcggctcatctcc

SEQ ID NO: 4616269 - DNA, 25 bp, Homo sapien
ctgctgacccactctgcggctcatc

SEQ ID NO: 4616270 - DNA, 25 bp, Homo sapien
cagggtctcccactccacattaggg

SEQ ID NO: 4616271 - DNA, 25 bp, Homo sapien
agcagagtgacggattgggcaaaca

SEQ ID NO: 4616272 - DNA, 25 bp, Homo sapien
gggaattgacgtttccacggcaata

SEQ ID NO: 4616273 - DNA, 25 bp, Homo sapien
tggagacccagagcattcatatttt

SEQ ID NO: 4616274 - DNA, 25 bp, Homo sapien
gtttctgggagtttgctttctgatg

SEQ ID NO: 4616275 - DNA, 25 bp, Homo sapien
aaacaccagcccaagtctaccacaa

SEQ ID NO: 4616276 - DNA, 25 bp, Homo sapien
tctaccacaacctgtttctgggagt

SEQ ID NO: 4616277 - DNA, 25 bp, Homo sapien
tctgggagtttgctttctgatggag

SEQ ID NO: 4616278 - DNA, 25 bp, Homo sapien
agcactttagcaatttaatctgtga

SEQ ID NO: 4616279 - DNA, 25 bp, Homo sapien
ttagcaatttaatctgtgaaccaat

SEQ ID NO: 4616280 - DNA, 25 bp, Homo sapien
gccaaaaaagtcactcactaacttg

SEQ ID NO: 4616281 - DNA, 25 bp, Homo sapien
gaaccaattacttcagtacagtttc

SEQ ID NO: 4616282 - DNA, 25 bp, Homo sapien
caggtgcagctgaaagcacaccaca

SEQ ID NO: 4616283 - DNA, 25 bp, Homo sapien
ctcctccaacggccgcaggtgcagc

SEQ ID NO: 4616284 - DNA, 25 bp, Homo sapien
actcctgggcaatccctgagggcaa

SEQ ID NO: 4616285 - DNA, 25 bp, Homo sapien
ctgggcaatccctgagggcaacctt

SEQ ID NO: 4616286 - DNA, 25 bp, Homo sapien
cgaaggtgcgtggatgagcttccct

SEQ ID NO: 4616287 - DNA, 25 bp, Homo sapien
taaaacacgaaggtgcgtggatgag

SEQ ID NO: 4616288 - DNA, 25 bp, Homo sapien
ggctctacagattctgtgtagtgaa

SEQ ID NO: 4616289 - DNA, 25 bp, Homo sapien
ggaccagccctccttgaaatggatt

SEQ ID NO: 4616290 - DNA, 25 bp, Homo sapien
ctgcgccatggcagtgcaggtgtct

SEQ ID NO: 4616291 - DNA, 25 bp, Homo sapien
ctaccttcatggtgtggctttggga

SEQ ID NO: 4616292 - DNA, 25 bp, Homo sapien
cttctaccttcatggtgtggctttg

SEQ ID NO: 4616293 - DNA, 25 bp, Homo sapien
ggctttgggatcttaagaactgcag

SEQ ID NO: 4616294 - DNA, 25 bp, Homo sapien
ctgtaaggctgaataaactttgatt

SEQ ID NO: 4616295 - DNA, 25 bp, Homo sapien
caattttcaattcactgtaattgtc

SEQ ID NO: 4616296 - DNA, 25 bp, Homo sapien
tctcaattttcaattcactgtaatt

SEQ ID NO: 4616297 - DNA, 25 bp, Homo sapien
gattatcctggttatttctgccatc

SEQ ID NO: 4616298 - DNA, 25 bp, Homo sapien
tgagcagactagtatccagccggac

SEQ ID NO: 4616299 - DNA, 25 bp, Homo sapien
gcccatcctgagcagactagtatcc

SEQ ID NO: 4616300 - DNA, 25 bp, Homo sapien
tccagccggacatacagcattgacc

SEQ ID NO: 4616301 - DNA, 25 bp, Homo sapien
gtatccagccggacatacagcattg

SEQ ID NO: 4616302 - DNA, 25 bp, Homo sapien
tgcccaaagtgacatcgttagtaat

SEQ ID NO: 4616303 - DNA, 25 bp, Homo sapien
ccaaatgcggcggagttgtcaagga

SEQ ID NO: 4616304 - DNA, 25 bp, Homo sapien
tgaggtcactaatgaagccagagaa

SEQ ID NO: 4616305 - DNA, 25 bp, Homo sapien
tgaggctcccgactctggttaagtg

SEQ ID NO: 4616306 - DNA, 25 bp, Homo sapien
caagaccactttctcccggaggctg

SEQ ID NO: 4616307 - DNA, 25 bp, Homo sapien
tcctttgaggttaggagcaccccag

SEQ ID NO: 4616308 - DNA, 25 bp, Homo sapien
agagcacgttgtggccctctgtacc

SEQ ID NO: 4616309 - DNA, 25 bp, Homo sapien
tctgttctcagtaacccagcagagc

SEQ ID NO: 4616310 - DNA, 25 bp, Homo sapien
aatgccttaaagcaagcgtccaggg

SEQ ID NO: 4616311 - DNA, 25 bp, Homo sapien
ctgtgagtggttgtggcttaggtac

SEQ ID NO: 4616312 - DNA, 25 bp, Homo sapien
tgaatcctgagaagcggtttgcggc

SEQ ID NO: 4616313 - DNA, 25 bp, Homo sapien
tgagaagcggtttgcggccacattg

SEQ ID NO: 4616314 - DNA, 25 bp, Homo sapien
aaatgaagcacctagacaggcctca

SEQ ID NO: 4616315 - DNA, 25 bp, Homo sapien
gcaattagtctaaagggcctgggta

SEQ ID NO: 4616316 - DNA, 25 bp, Homo sapien
cagatttattggatcccgctgtccc

SEQ ID NO: 4616317 - DNA, 25 bp, Homo sapien
acaggcctcagatttattggatccc

SEQ ID NO: 4616318 - DNA, 25 bp, Homo sapien
caaaatgctggcgtagaagcgttgt

SEQ ID NO: 4616319 - DNA, 25 bp, Homo sapien
cgtagaagcgttgtggatctgggca

SEQ ID NO: 4616320 - DNA, 25 bp, Homo sapien
gagactttttcttaacgcaaaatgc

SEQ ID NO: 4616321 - DNA, 25 bp, Homo sapien
aaggcagggataccagaggagactt

SEQ ID NO: 4616322 - DNA, 25 bp, Homo sapien
cttgatgtacgttttaggacagttc

SEQ ID NO: 4616323 - DNA, 25 bp, Homo sapien
ggccaggtgcttgatgtacgtttta

SEQ ID NO: 4616324 - DNA, 25 bp, Homo sapien
cgttttaggacagttctattctcct

SEQ ID NO: 4616325 - DNA, 25 bp, Homo sapien
ttctatgggccaggtgcttgatgta

SEQ ID NO: 4616326 - DNA, 25 bp, Homo sapien
caagttcagaggcagcaagtcctcc

SEQ ID NO: 4616327 - DNA, 25 bp, Homo sapien
acagctcctcggtccctctgctcag

SEQ ID NO: 4616328 - DNA, 25 bp, Homo sapien
cacagctcctcggtccctctgctca

SEQ ID NO: 4616329 - DNA, 25 bp, Homo sapien
cctgggactctaggatctgaaggca

SEQ ID NO: 4616330 - DNA, 25 bp, Homo sapien
cagtgggtttaatctgcgtgtctcc

SEQ ID NO: 4616331 - DNA, 25 bp, Homo sapien
cagtagggaagacagtgttgctttt

SEQ ID NO: 4616332 - DNA, 25 bp, Homo sapien
tgcttttcttgagcaaaaccttttc

SEQ ID NO: 4616333 - DNA, 25 bp, Homo sapien
gaacatctcggtagtcctgactgtg

SEQ ID NO: 4616334 - DNA, 25 bp, Homo sapien
tgtgaacactcatcccgtttccata

SEQ ID NO: 4616335 - DNA, 25 bp, Homo sapien
ttacacctccagtagggggagagtg

SEQ ID NO: 4616336 - DNA, 25 bp, Homo sapien
ctgctttgcctgtagccataagttt

SEQ ID NO: 4616337 - DNA, 25 bp, Homo sapien
tagaacgagatgcttctgatcgtgg

SEQ ID NO: 4616338 - DNA, 25 bp, Homo sapien
aaacaggccaccacgtatgtctcct

SEQ ID NO: 4616339 - DNA, 25 bp, Homo sapien
cacaggtgggagtgctcaaacaggc

SEQ ID NO: 4616340 - DNA, 25 bp, Homo sapien
gaaagagatgtttgcaggctcttag

SEQ ID NO: 4616341 - DNA, 25 bp, Homo sapien
ctctgagattcaaactgatcaatgg

SEQ ID NO: 4616342 - DNA, 25 bp, Homo sapien
ctttgttctaggcagtatccctggg

SEQ ID NO: 4616343 - DNA, 25 bp, Homo sapien
gattcaaactgatcaatggcctctt

SEQ ID NO: 4616344 - DNA, 25 bp, Homo sapien
tggcctctttgttctaggcagtatc

SEQ ID NO: 4616345 - DNA, 25 bp, Homo sapien
gcttgtagccttccactagaatccc

SEQ ID NO: 4616346 - DNA, 25 bp, Homo sapien
gatatgcgtgacaagaagtgcttca

SEQ ID NO: 4616347 - DNA, 25 bp, Homo sapien
ggacttctccttaaggcttgtagcc

SEQ ID NO: 4616348 - DNA, 25 bp, Homo sapien
actagaatccccagatatgcgtgac

SEQ ID NO: 4616349 - DNA, 25 bp, Homo sapien
ctccctccattgttgccccattgcc

SEQ ID NO: 4616350 - DNA, 25 bp, Homo sapien
tccattgttgccccattgccttgca

SEQ ID NO: 4616351 - DNA, 25 bp, Homo sapien
ccctccattgttgccccattgcctt

SEQ ID NO: 4616352 - DNA, 25 bp, Homo sapien
ttgttgccccattgccttgcaccat

SEQ ID NO: 4616353 - DNA, 25 bp, Homo sapien
tatactctagttccccattgtgcca

SEQ ID NO: 4616354 - DNA, 25 bp, Homo sapien
caccagtctttttagtaccttcaca

SEQ ID NO: 4616355 - DNA, 25 bp, Homo sapien
tggcacccacttctgaccatgtttt

SEQ ID NO: 4616356 - DNA, 25 bp, Homo sapien
agttctggggtaacatgctggcacc

SEQ ID NO: 4616357 - DNA, 25 bp, Homo sapien
cttgagtgtgaacttttccgacact

SEQ ID NO: 4616358 - DNA, 25 bp, Homo sapien
gagtgtgaacttttccgacactctt

SEQ ID NO: 4616359 - DNA, 25 bp, Homo sapien
gtgtgaacttttccgacactctttg

SEQ ID NO: 4616360 - DNA, 25 bp, Homo sapien
tgagtgtgaacttttccgacactct

SEQ ID NO: 4616361 - DNA, 25 bp, Homo sapien
tgttttaccaggaatcagttttaca

SEQ ID NO: 4616362 - DNA, 25 bp, Homo sapien
tacactaagcctgaaatctggtggc

SEQ ID NO: 4616363 - DNA, 25 bp, Homo sapien
caccctcatgcatggctggttcagc

SEQ ID NO: 4616364 - DNA, 25 bp, Homo sapien
agcttgcctccacctgacggacatc

SEQ ID NO: 4616365 - DNA, 25 bp, Homo sapien
gtgtgatatccagacagcgaatggg

SEQ ID NO: 4616366 - DNA, 25 bp, Homo sapien
ggtggttccgatgctgacattccca

SEQ ID NO: 4616367 - DNA, 25 bp, Homo sapien
tgtgatatccagacagcgaatgggt

SEQ ID NO: 4616368 - DNA, 25 bp, Homo sapien
acagcgaatgggtggttccgatgct

SEQ ID NO: 4616369 - DNA, 25 bp, Homo sapien
ggccttcacaccgagtttccatttg

SEQ ID NO: 4616370 - DNA, 25 bp, Homo sapien
tatccatttctgatgggcaacaaag

SEQ ID NO: 4616371 - DNA, 25 bp, Homo sapien
ttagtgttctcgaatcccccagagg

SEQ ID NO: 4616372 - DNA, 25 bp, Homo sapien
caacaaagttagtgttctcgaatcc

SEQ ID NO: 4616373 - DNA, 25 bp, Homo sapien
attaggagaagaggccgctttccaa

SEQ ID NO: 4616374 - DNA, 25 bp, Homo sapien
gaattaggagaagaggccgctttcc

SEQ ID NO: 4616375 - DNA, 25 bp, Homo sapien
cttgaattaggagaagaggccgctt

SEQ ID NO: 4616376 - DNA, 25 bp, Homo sapien
tgaattaggagaagaggccgctttc

SEQ ID NO: 4616377 - DNA, 25 bp, Homo sapien
ctctcgcgccgactctggaggatta

SEQ ID NO: 4616378 - DNA, 25 bp, Homo sapien
cactggcttataatatctgagaagg

SEQ ID NO: 4616379 - DNA, 25 bp, Homo sapien
gctttgaagctatttggccttgagc

SEQ ID NO: 4616380 - DNA, 25 bp, Homo sapien
cgcgcatggtgtgagttgacactga

SEQ ID NO: 4616381 - DNA, 25 bp, Homo sapien
tcttttgaactgtgaccgtgactgt

SEQ ID NO: 4616382 - DNA, 25 bp, Homo sapien
tctgggtgtcttctaacaggaacct

SEQ ID NO: 4616383 - DNA, 25 bp, Homo sapien
cactcaagtgcataagtgcggccga

SEQ ID NO: 4616384 - DNA, 25 bp, Homo sapien
tggctaaaaagaggttacgcagggc

SEQ ID NO: 4616385 - DNA, 25 bp, Homo sapien
ctgctgcggcggagcacacatcgtt

SEQ ID NO: 4616386 - DNA, 25 bp, Homo sapien
ccgtgggagggcacaaggcatgcct

SEQ ID NO: 4616387 - DNA, 25 bp, Homo sapien
gcacacatcgttgctctgctgccag

SEQ ID NO: 4616388 - DNA, 25 bp, Homo sapien
cgacccctccttctgccgtgggagg

SEQ ID NO: 4616389 - DNA, 25 bp, Homo sapien
ctagaaatggggcaataacagcggc

SEQ ID NO: 4616390 - DNA, 25 bp, Homo sapien
tggggcaataacagcggcaacaaga

SEQ ID NO: 4616391 - DNA, 25 bp, Homo sapien
gcaataacagcggcaacaagaacca

SEQ ID NO: 4616392 - DNA, 25 bp, Homo sapien
gaaatggggcaataacagcggcaac

SEQ ID NO: 4616393 - DNA, 25 bp, Homo sapien
ggaagtattcctggcggcatgtgga

SEQ ID NO: 4616394 - DNA, 25 bp, Homo sapien
tcagcagcgaaaccctgggaaagcc

SEQ ID NO: 4616395 - DNA, 25 bp, Homo sapien
ccagtccgaggtgctcaggtggcat

SEQ ID NO: 4616396 - DNA, 25 bp, Homo sapien
gcatgcggttgtggtgagaaggact

SEQ ID NO: 4616397 - DNA, 25 bp, Homo sapien
gagcagggaagtggcccagccttct

SEQ ID NO: 4616398 - DNA, 25 bp, Homo sapien
ttctgctcccaagaggccctgcttg

SEQ ID NO: 4616399 - DNA, 25 bp, Homo sapien
cagggaagtggcccagccttctgct

SEQ ID NO: 4616400 - DNA, 25 bp, Homo sapien
gggaagtggcccagccttctgctcc

SEQ ID NO: 4616401 - DNA, 25 bp, Homo sapien
cctcagctccagacccgtgtgttat

SEQ ID NO: 4616402 - DNA, 25 bp, Homo sapien
gtgcctatcagagcgggcctcagct

SEQ ID NO: 4616403 - DNA, 25 bp, Homo sapien
tggtagtgcctatcagagcgggcct

SEQ ID NO: 4616404 - DNA, 25 bp, Homo sapien
gtcccttccccatggtagtgcctat

SEQ ID NO: 4616405 - DNA, 25 bp, Homo sapien
gggctggcagatcagcgtttccaga

SEQ ID NO: 4616406 - DNA, 25 bp, Homo sapien
cagaaacgaactcaatacatccgtc

SEQ ID NO: 4616407 - DNA, 25 bp, Homo sapien
cgcccagatgcatgggctttccttt

SEQ ID NO: 4616408 - DNA, 25 bp, Homo sapien
gaagtcgccgcccagatgcatgggc

SEQ ID NO: 4616409 - DNA, 25 bp, Homo sapien
gcctccaaggaatccgtctgtctgg

SEQ ID NO: 4616410 - DNA, 25 bp, Homo sapien
caccagtctgtcacggtgcctgaca

SEQ ID NO: 4616411 - DNA, 25 bp, Homo sapien
tatgctagagttggccgctgcctgg

SEQ ID NO: 4616412 - DNA, 25 bp, Homo sapien
ggttgacacatatcactccctttgt

SEQ ID NO: 4616413 - DNA, 25 bp, Homo sapien
ggtatgcagtcctgtctggagtctc

SEQ ID NO: 4616414 - DNA, 25 bp, Homo sapien
ttcagagggccgcagatggtatgca

SEQ ID NO: 4616415 - DNA, 25 bp, Homo sapien
gactgcctgtagtgaaggctcacac

SEQ ID NO: 4616416 - DNA, 25 bp, Homo sapien
agggtccaccttgcagcagagctgg

SEQ ID NO: 4616417 - DNA, 25 bp, Homo sapien
cggctgccaggtatgtccaaaatct

SEQ ID NO: 4616418 - DNA, 25 bp, Homo sapien
gggccggctgccaggtatgtccaaa

SEQ ID NO: 4616419 - DNA, 25 bp, Homo sapien
ctgccaggtatgtccaaaatctcca

SEQ ID NO: 4616420 - DNA, 25 bp, Homo sapien
gccggctgccaggtatgtccaaaat

SEQ ID NO: 4616421 - DNA, 25 bp, Homo sapien
caaacggaatagagacaggataaac

SEQ ID NO: 4616422 - DNA, 25 bp, Homo sapien
gccaaacggaatagagacaggataa

SEQ ID NO: 4616423 - DNA, 25 bp, Homo sapien
ccaaacggaatagagacaggataaa

SEQ ID NO: 4616424 - DNA, 25 bp, Homo sapien
ctagaatgagtaccgcctgtagtgt

SEQ ID NO: 4616425 - DNA, 25 bp, Homo sapien
taccgcctgtagtgtgtgtgcgcac

SEQ ID NO: 4616426 - DNA, 25 bp, Homo sapien
gtgtgtgcgcacacaatggtacaca

SEQ ID NO: 4616427 - DNA, 25 bp, Homo sapien
gtgcgcacacaatggtacacatgca

SEQ ID NO: 4616428 - DNA, 25 bp, Homo sapien
tgggagtcgtgccagcattctcagc

SEQ ID NO: 4616429 - DNA, 25 bp, Homo sapien
tcatctgtttgggcgagaggtccag

SEQ ID NO: 4616430 - DNA, 25 bp, Homo sapien
caaagctttcttgggtgggtaggat

SEQ ID NO: 4616431 - DNA, 25 bp, Homo sapien
tctttggccgccttgtttggcccag

SEQ ID NO: 4616432 - DNA, 25 bp, Homo sapien
gggctgatttggaagactatagatt

SEQ ID NO: 4616433 - DNA, 25 bp, Homo sapien
acgtcaggagactttccgtcctggg

SEQ ID NO: 4616434 - DNA, 25 bp, Homo sapien
gagagcacggccatctgatcagctg

SEQ ID NO: 4616435 - DNA, 25 bp, Homo sapien
gctgcccctccacgtcaggagactt

SEQ ID NO: 4616436 - DNA, 25 bp, Homo sapien
tcttctgttatctgatgactaaagt

SEQ ID NO: 4616437 - DNA, 25 bp, Homo sapien
gctgagtgtttgatcttctgttatc

SEQ ID NO: 4616438 - DNA, 25 bp, Homo sapien
gtttgatcttctgttatctgatgac

SEQ ID NO: 4616439 - DNA, 25 bp, Homo sapien
gagtgtttgatcttctgttatctga

SEQ ID NO: 4616440 - DNA, 25 bp, Homo sapien
tcaaacccgtcatggtaggctcggg

SEQ ID NO: 4616441 - DNA, 25 bp, Homo sapien
tcttcaccaggttcacgttagccat

SEQ ID NO: 4616442 - DNA, 25 bp, Homo sapien
gttagccatatcgtaagccttcagg

SEQ ID NO: 4616443 - DNA, 25 bp, Homo sapien
catacacctttcacactaatggcac

SEQ ID NO: 4616444 - DNA, 25 bp, Homo sapien
ggtgtataaaccatgaccccagaaa

SEQ ID NO: 4616445 - DNA, 25 bp, Homo sapien
ctgataactggtggatgttggtgta

SEQ ID NO: 4616446 - DNA, 25 bp, Homo sapien
gccaaatagttttgggcaaatcaac

SEQ ID NO: 4616447 - DNA, 25 bp, Homo sapien
cttgcttctaccacccaaagttgtg

SEQ ID NO: 4616448 - DNA, 25 bp, Homo sapien
caactggcagaccagctggaaaaat

SEQ ID NO: 4616449 - DNA, 25 bp, Homo sapien
cagagaatagactgttttgccatcc

SEQ ID NO: 4616450 - DNA, 25 bp, Homo sapien
tggtattcagatgacatttcttggc

SEQ ID NO: 4616451 - DNA, 25 bp, Homo sapien
tcttcgattaaataatggtattcag

SEQ ID NO: 4616452 - DNA, 25 bp, Homo sapien
tgaagcccgtgacctttcttgccct

SEQ ID NO: 4616453 - DNA, 25 bp, Homo sapien
cagtaatttgggagtggccgtgtta

SEQ ID NO: 4616454 - DNA, 25 bp, Homo sapien
tggctgtagcttggcccttggacca

SEQ ID NO: 4616455 - DNA, 25 bp, Homo sapien
gcagacgaacatttagccagtaatt

SEQ ID NO: 4616456 - DNA, 25 bp, Homo sapien
ctaaagcattagcacttttccagtc

SEQ ID NO: 4616457 - DNA, 25 bp, Homo sapien
cagtgcctcaaaggataccccagga

SEQ ID NO: 4616458 - DNA, 25 bp, Homo sapien
tcaggtcagacttggtccagtgcct

SEQ ID NO: 4616459 - DNA, 25 bp, Homo sapien
tgaagagtccagtagtcagacagac

SEQ ID NO: 4616460 - DNA, 25 bp, Homo sapien
ggttacaaaatcactctagctggtc

SEQ ID NO: 4616461 - DNA, 25 bp, Homo sapien
acatcctaaaagctgtggctttcca

SEQ ID NO: 4616462 - DNA, 25 bp, Homo sapien
taacatcctaaaagctgtggctttc

SEQ ID NO: 4616463 - DNA, 25 bp, Homo sapien
atcctaaaagctgtggctttccagc

SEQ ID NO: 4616464 - DNA, 25 bp, Homo sapien
ttaacatcctaaaagctgtggcttt

SEQ ID NO: 4616465 - DNA, 25 bp, Homo sapien
tcaaggtgtacatccatacgggccc

SEQ ID NO: 4616466 - DNA, 25 bp, Homo sapien
ctttttcaaagcaatctgcatcata

SEQ ID NO: 4616467 - DNA, 25 bp, Homo sapien
ttcaaagcaatctgcatcatattct

SEQ ID NO: 4616468 - DNA, 25 bp, Homo sapien
catacgggccctatttttctgaagt

SEQ ID NO: 4616469 - DNA, 25 bp, Homo sapien
gaagctcaacttcaattggcaatag

SEQ ID NO: 4616470 - DNA, 25 bp, Homo sapien
tctaagagacaccttgaaacctggg

SEQ ID NO: 4616471 - DNA, 25 bp, Homo sapien
gagaaacggtagaagcatttacaag

SEQ ID NO: 4616472 - DNA, 25 bp, Homo sapien
tcttccctttgcaaaaagtcttctc

SEQ ID NO: 4616473 - DNA, 25 bp, Homo sapien
cggcataaccgaacaagatattcat

SEQ ID NO: 4616474 - DNA, 25 bp, Homo sapien
ccatgcgtcggcataaccgaacaag

SEQ ID NO: 4616475 - DNA, 25 bp, Homo sapien
gtcggcataaccgaacaagatattc

SEQ ID NO: 4616476 - DNA, 25 bp, Homo sapien
tgcgtcggcataaccgaacaagata

SEQ ID NO: 4616477 - DNA, 25 bp, Homo sapien
gagaagcacactaatcccagctggc

SEQ ID NO: 4616478 - DNA, 25 bp, Homo sapien
agaagcacactaatcccagctggca

SEQ ID NO: 4616479 - DNA, 25 bp, Homo sapien
agagaagcacactaatcccagctgg

SEQ ID NO: 4616480 - DNA, 25 bp, Homo sapien
ggagcaaacccgatgacctggttcc

SEQ ID NO: 4616481 - DNA, 25 bp, Homo sapien
cctggttggaatttaggcgagtgtc

SEQ ID NO: 4616482 - DNA, 25 bp, Homo sapien
tgaagaggtggctaaattgccagga

SEQ ID NO: 4616483 - DNA, 25 bp, Homo sapien
tcagaaggactgatcgagtgggcat

SEQ ID NO: 4616484 - DNA, 25 bp, Homo sapien
cggctgcctcttggctgcctgtctt

SEQ ID NO: 4616485 - DNA, 25 bp, Homo sapien
tcggctgcctcttggctgcctgtct

SEQ ID NO: 4616486 - DNA, 25 bp, Homo sapien
caggctcggctgcctcttggctgcc

SEQ ID NO: 4616487 - DNA, 25 bp, Homo sapien
gctcggctgcctcttggctgcctgt

SEQ ID NO: 4616488 - DNA, 25 bp, Homo sapien
gagcaaagttgtttgctatcaggaa

SEQ ID NO: 4616489 - DNA, 25 bp, Homo sapien
agagcaaagttgtttgctatcagga

SEQ ID NO: 4616490 - DNA, 25 bp, Homo sapien
gtgccagactgaagtttaggctgca

SEQ ID NO: 4616491 - DNA, 25 bp, Homo sapien
tgtgccagactgaagtttaggctgc

SEQ ID NO: 4616492 - DNA, 25 bp, Homo sapien
ctgtgccagactgaagtttaggctg

SEQ ID NO: 4616493 - DNA, 25 bp, Homo sapien
tgtactggttgatcttgggtacttc

SEQ ID NO: 4616494 - DNA, 25 bp, Homo sapien
cagttgtactggttgatcttgggta

SEQ ID NO: 4616495 - DNA, 25 bp, Homo sapien
gatcttgggtacttctgacccactt

SEQ ID NO: 4616496 - DNA, 25 bp, Homo sapien
ctggttgatcttgggtacttctgac

SEQ ID NO: 4616497 - DNA, 25 bp, Homo sapien
gttactgagcctggtgtaggcctga

SEQ ID NO: 4616498 - DNA, 25 bp, Homo sapien
gcaggttactgagcctggtgtaggc

SEQ ID NO: 4616499 - DNA, 25 bp, Homo sapien
aggttactgagcctggtgtaggcct

SEQ ID NO: 4616500 - DNA, 25 bp, Homo sapien
ttactgagcctggtgtaggcctgag

SEQ ID NO: 4616501 - DNA, 25 bp, Homo sapien
taaggatgtctctactgaagtcaaa

SEQ ID NO: 4616502 - DNA, 25 bp, Homo sapien
taactaaggatgtctctactgaagt

SEQ ID NO: 4616503 - DNA, 25 bp, Homo sapien
ccatattaactaaggatgtctctac

SEQ ID NO: 4616504 - DNA, 25 bp, Homo sapien
gctgtaatccatattaactaaggat

SEQ ID NO: 4616505 - DNA, 25 bp, Homo sapien
tttggtcccgtcagatttggtctca

SEQ ID NO: 4616506 - DNA, 25 bp, Homo sapien
tggtctcattgtctaccactgtggg

SEQ ID NO: 4616507 - DNA, 25 bp, Homo sapien
taggatcctgatgtcaggctttctg

SEQ ID NO: 4616508 - DNA, 25 bp, Homo sapien
tgtgttttcaccctctgtgaatgtt

SEQ ID NO: 4616509 - DNA, 25 bp, Homo sapien
gctctttgtctgtagtctgtagcct

SEQ ID NO: 4616510 - DNA, 25 bp, Homo sapien
ctctttgtctgtagtctgtagcctc

SEQ ID NO: 4616511 - DNA, 25 bp, Homo sapien
tctttgtctgtagtctgtagcctcc

SEQ ID NO: 4616512 - DNA, 25 bp, Homo sapien
tgaactatgtgagcgctctccagtg

SEQ ID NO: 4616513 - DNA, 25 bp, Homo sapien
gcttatgagaggtaagatgaactat

SEQ ID NO: 4616514 - DNA, 25 bp, Homo sapien
gggtcgaaagacttgtctgagctta

SEQ ID NO: 4616515 - DNA, 25 bp, Homo sapien
gggcccttgatctatgcttgtgaac

SEQ ID NO: 4616516 - DNA, 25 bp, Homo sapien
gagatccaacagatggaaagaggct

SEQ ID NO: 4616517 - DNA, 25 bp, Homo sapien
cagatggaaagaggctccgggaccc

SEQ ID NO: 4616518 - DNA, 25 bp, Homo sapien
aacagatggaaagaggctccgggac

SEQ ID NO: 4616519 - DNA, 25 bp, Homo sapien
gatccaacagatggaaagaggctcc

SEQ ID NO: 4616520 - DNA, 25 bp, Homo sapien
cagagttgggggtacattattctcc

SEQ ID NO: 4616521 - DNA, 25 bp, Homo sapien
tctggtgctgtactccaatactgat

SEQ ID NO: 4616522 - DNA, 25 bp, Homo sapien
gcttgtggcagtgtatgatttggaa

SEQ ID NO: 4616523 - DNA, 25 bp, Homo sapien
ccaatactgattgcttgtggcagtg

SEQ ID NO: 4616524 - DNA, 25 bp, Homo sapien
agccaagctcaaccactgtattatt

SEQ ID NO: 4616525 - DNA, 25 bp, Homo sapien
gagccaagctcaaccactgtattat

SEQ ID NO: 4616526 - DNA, 25 bp, Homo sapien
accaagctcatcttttgctcagatg

SEQ ID NO: 4616527 - DNA, 25 bp, Homo sapien
ctgcagaggtcctggccgctcccaa

SEQ ID NO: 4616528 - DNA, 25 bp, Homo sapien
cagcagtatgaggatgactgacaca

SEQ ID NO: 4616529 - DNA, 25 bp, Homo sapien
taaacctgggtacatgaaggtcaga

SEQ ID NO: 4616530 - DNA, 25 bp, Homo sapien
acttgggcttgagacgacctgggct

SEQ ID NO: 4616531 - DNA, 25 bp, Homo sapien
taaagaatgcaggagagctaaacct

SEQ ID NO: 4616532 - DNA, 25 bp, Homo sapien
atgccctctccagctattaagtgga

SEQ ID NO: 4616533 - DNA, 25 bp, Homo sapien
gatgacttcttaaataaagggtcag

SEQ ID NO: 4616534 - DNA, 25 bp, Homo sapien
aagggtcagtagagagatgctgtct

SEQ ID NO: 4616535 - DNA, 25 bp, Homo sapien
ttaagtggacagtaacaagatgact

SEQ ID NO: 4616536 - DNA, 25 bp, Homo sapien
tcacactaacagcagacaacaccct

SEQ ID NO: 4616537 - DNA, 25 bp, Homo sapien
agctctcctggctacttattgccct

SEQ ID NO: 4616538 - DNA, 25 bp, Homo sapien
taatgtgaacgctgctgacaagact

SEQ ID NO: 4616539 - DNA, 25 bp, Homo sapien
gctgctgacaagactgtcacactaa

SEQ ID NO: 4616540 - DNA, 25 bp, Homo sapien
tggcatagctctgcctcgcagtggg

SEQ ID NO: 4616541 - DNA, 25 bp, Homo sapien
gagttcctatgaccaggtgagtcgg

SEQ ID NO: 4616542 - DNA, 25 bp, Homo sapien
ttggctcgagagaaaagactggcat

SEQ ID NO: 4616543 - DNA, 25 bp, Homo sapien
agcgtattgatcgtagggacctgca

SEQ ID NO: 4616544 - DNA, 25 bp, Homo sapien
tttcaggcccttccagtaagaggag

SEQ ID NO: 4616545 - DNA, 25 bp, Homo sapien
gagaaaggcacttaactggttaaca

SEQ ID NO: 4616546 - DNA, 25 bp, Homo sapien
gatcttagtccagctgccctgttca

SEQ ID NO: 4616547 - DNA, 25 bp, Homo sapien
gcacaatggtgccactgtcctcata

SEQ ID NO: 4616548 - DNA, 25 bp, Homo sapien
tgttgaaacttgtactgtcttgatc

SEQ ID NO: 4616549 - DNA, 25 bp, Homo sapien
gtccgctttcgggaatatctgcatg

SEQ ID NO: 4616550 - DNA, 25 bp, Homo sapien
aatatcaggtttagtccgctttcgg

SEQ ID NO: 4616551 - DNA, 25 bp, Homo sapien
tgatgttgaaacttgtactgtcttg

SEQ ID NO: 4616552 - DNA, 25 bp, Homo sapien
ggttttagccagagtttatcacagg

SEQ ID NO: 4616553 - DNA, 25 bp, Homo sapien
cacatgcattctatgctggctgaaa

SEQ ID NO: 4616554 - DNA, 25 bp, Homo sapien
caaaattaggcggtatgactgtgca

SEQ ID NO: 4616555 - DNA, 25 bp, Homo sapien
tgttcatccgacaagcttttcccca

SEQ ID NO: 4616556 - DNA, 25 bp, Homo sapien
tgtgatcgatttagcaaaagattag

SEQ ID NO: 4616557 - DNA, 25 bp, Homo sapien
gattagaaagctgatcttattgtca

SEQ ID NO: 4616558 - DNA, 25 bp, Homo sapien
agctgatcttattgtcacaaggtaa

SEQ ID NO: 4616559 - DNA, 25 bp, Homo sapien
gctttcttttgtgatcgatttagca

SEQ ID NO: 4616560 - DNA, 25 bp, Homo sapien
tttttgaccaattttgcttctgcct

SEQ ID NO: 4616561 - DNA, 25 bp, Homo sapien
caattttgcttctgcctgttggcca

SEQ ID NO: 4616562 - DNA, 25 bp, Homo sapien
tttgaccaattttgcttctgcctgt

SEQ ID NO: 4616563 - DNA, 25 bp, Homo sapien
gaccaattttgcttctgcctgttgg

SEQ ID NO: 4616564 - DNA, 25 bp, Homo sapien
aagacataaaacattacgaagtaat

SEQ ID NO: 4616565 - DNA, 25 bp, Homo sapien
ggacgtaggcagccaaagcaatatg

SEQ ID NO: 4616566 - DNA, 25 bp, Homo sapien
aaagaggtaaatgatagtatcctgt

SEQ ID NO: 4616567 - DNA, 25 bp, Homo sapien
tagaatatgctccttcaagagaagg

SEQ ID NO: 4616568 - DNA, 25 bp, Homo sapien
ctgacagtggtgctcggttgattag

SEQ ID NO: 4616569 - DNA, 25 bp, Homo sapien
caaaactatattctcatgacgggtg

SEQ ID NO: 4616570 - DNA, 25 bp, Homo sapien
tatattctcatgacgggtgttcacg

SEQ ID NO: 4616571 - DNA, 25 bp, Homo sapien
cgggtgttcacgaggactttcttgt

SEQ ID NO: 4616572 - DNA, 25 bp, Homo sapien
gaaagaagcttgtccttgccaaaaa

SEQ ID NO: 4616573 - DNA, 25 bp, Homo sapien
aatgtgcttgccataagactcccac

SEQ ID NO: 4616574 - DNA, 25 bp, Homo sapien
gcaggcaagctaagaccgaggaaga

SEQ ID NO: 4616575 - DNA, 25 bp, Homo sapien
catagtgaaggtttagccatgaagc

SEQ ID NO: 4616576 - DNA, 25 bp, Homo sapien
caggccaaaatatctgagcagaatg

SEQ ID NO: 4616577 - DNA, 25 bp, Homo sapien
tgagtgcaccggtggtatttttcat

SEQ ID NO: 4616578 - DNA, 25 bp, Homo sapien
gaatgcacatactgagtgcaccggt

SEQ ID NO: 4616579 - DNA, 25 bp, Homo sapien
taaaggaacaatctactgttcttgc

SEQ ID NO: 4616580 - DNA, 25 bp, Homo sapien
tcctgagtaattgctagttgtgccc

SEQ ID NO: 4616581 - DNA, 25 bp, Homo sapien
tctgtcaagcctaaagtgagcctcg

SEQ ID NO: 4616582 - DNA, 25 bp, Homo sapien
gctagttgtgccctcctcaagcaaa

SEQ ID NO: 4616583 - DNA, 25 bp, Homo sapien
caaaacggtctccttgtatcatggg

SEQ ID NO: 4616584 - DNA, 25 bp, Homo sapien
cgattgctagtttgatcagtccaca

SEQ ID NO: 4616585 - DNA, 25 bp, Homo sapien
tcctatggcggaagacatgtgtatt

SEQ ID NO: 4616586 - DNA, 25 bp, Homo sapien
tcctttgtaggcctctgggttagcg

SEQ ID NO: 4616587 - DNA, 25 bp, Homo sapien
tgtattaaaacctgctgatgtctcc

SEQ ID NO: 4616588 - DNA, 25 bp, Homo sapien
ttggccgtgctgtaatacaggagga

SEQ ID NO: 4616589 - DNA, 25 bp, Homo sapien
tgtgatttggccgtgctgtaataca

SEQ ID NO: 4616590 - DNA, 25 bp, Homo sapien
gcttataaacagtggaaagctgtac

SEQ ID NO: 4616591 - DNA, 25 bp, Homo sapien
gtggcttataaacagtggaaagctg

SEQ ID NO: 4616592 - DNA, 25 bp, Homo sapien
cacagtggattgtcttgcatattcc

SEQ ID NO: 4616593 - DNA, 25 bp, Homo sapien
cagtggattgtcttgcatattccac

SEQ ID NO: 4616594 - DNA, 25 bp, Homo sapien
tggattgtcttgcatattccactaa

SEQ ID NO: 4616595 - DNA, 25 bp, Homo sapien
gtggattgtcttgcatattccacta

SEQ ID NO: 4616596 - DNA, 25 bp, Homo sapien
ctgctccctcacatcctaatgaata

SEQ ID NO: 4616597 - DNA, 25 bp, Homo sapien
ccttggggttgttcaatcagcttca

SEQ ID NO: 4616598 - DNA, 25 bp, Homo sapien
cctcacatcctaatgaatatgttaa

SEQ ID NO: 4616599 - DNA, 25 bp, Homo sapien
agtattccatccctttctcgccctg

SEQ ID NO: 4616600 - DNA, 25 bp, Homo sapien
gcagaaagcggccacattaagctaa

SEQ ID NO: 4616601 - DNA, 25 bp, Homo sapien
taatggcacgtttgcagctctccaa

SEQ ID NO: 4616602 - DNA, 25 bp, Homo sapien
caaatgactaccgttaatgtggaga

SEQ ID NO: 4616603 - DNA, 25 bp, Homo sapien
caaggtaatctgtcaaagcgctagg

SEQ ID NO: 4616604 - DNA, 25 bp, Homo sapien
gaactgagcttaaggccacctagag

SEQ ID NO: 4616605 - DNA, 25 bp, Homo sapien
ccattcctggatcgagcaacagaac

SEQ ID NO: 4616606 - DNA, 25 bp, Homo sapien
gcttaaggccacctagagccaccat

SEQ ID NO: 4616607 - DNA, 25 bp, Homo sapien
tcgagcaacagaactgagcttaagg

SEQ ID NO: 4616608 - DNA, 25 bp, Homo sapien
tgaagatgagaaatttgaaggatgg

SEQ ID NO: 4616609 - DNA, 25 bp, Homo sapien
tacagagcactttccggtttgtttc

SEQ ID NO: 4616610 - DNA, 25 bp, Homo sapien
tggtcggttgttaaagaatctgaat

SEQ ID NO: 4616611 - DNA, 25 bp, Homo sapien
ttgaaggatggtcggttgttaaaga

SEQ ID NO: 4616612 - DNA, 25 bp, Homo sapien
ggacatccagggtgcaatattgagg

SEQ ID NO: 4616613 - DNA, 25 bp, Homo sapien
taggagtcagtaaggcaattttcaa

SEQ ID NO: 4616614 - DNA, 25 bp, Homo sapien
tgtgtattaataacttgactcatct

SEQ ID NO: 4616615 - DNA, 25 bp, Homo sapien
ttttttcaacgaaagcttcaagtgc

SEQ ID NO: 4616616 - DNA, 25 bp, Homo sapien
gataggagatcttttggacacggga

SEQ ID NO: 4616617 - DNA, 25 bp, Homo sapien
catcctctattattgcaagtgatga

SEQ ID NO: 4616618 - DNA, 25 bp, Homo sapien
taggaatggcgtcagtggctcagct

SEQ ID NO: 4616619 - DNA, 25 bp, Homo sapien
tgaaggcttctagtagcagtggaac

SEQ ID NO: 4616620 - DNA, 25 bp, Homo sapien
aacttccctaggattatcttccaca

SEQ ID NO: 4616621 - DNA, 25 bp, Homo sapien
gaacttccctaggattatcttccac

SEQ ID NO: 4616622 - DNA, 25 bp, Homo sapien
acttccctaggattatcttccacag

SEQ ID NO: 4616623 - DNA, 25 bp, Homo sapien
tgagtgctttttctgcgtgcgtact

SEQ ID NO: 4616624 - DNA, 25 bp, Homo sapien
ctgtgtgttgataatgagtgctttt

SEQ ID NO: 4616625 - DNA, 25 bp, Homo sapien
gctttttctgcgtgcgtactttatt

SEQ ID NO: 4616626 - DNA, 25 bp, Homo sapien
gcgtgcgtactttatttcttcgaaa

SEQ ID NO: 4616627 - DNA, 25 bp, Homo sapien
cagcatcggcttgaatagacatatt

SEQ ID NO: 4616628 - DNA, 25 bp, Homo sapien
tgaatagacatatttgaataaggtt

SEQ ID NO: 4616629 - DNA, 25 bp, Homo sapien
catatctaatgccatgttgatgatg

SEQ ID NO: 4616630 - DNA, 25 bp, Homo sapien
ggtagtagtactgcggagaggctgc

SEQ ID NO: 4616631 - DNA, 25 bp, Homo sapien
ccaaagttgtgaggtaagaagatcc

SEQ ID NO: 4616632 - DNA, 25 bp, Homo sapien
tcagaaaaagagcatcgtgcatatc

SEQ ID NO: 4616633 - DNA, 25 bp, Homo sapien
ctgatgtgttggaaatgtccgcgat

SEQ ID NO: 4616634 - DNA, 25 bp, Homo sapien
aagagttgactgatgtgttggaaat

SEQ ID NO: 4616635 - DNA, 25 bp, Homo sapien
cgcgatgatcaagtccaagatgtct

SEQ ID NO: 4616636 - DNA, 25 bp, Homo sapien
tgtctttgaccagaagtcctgagga

SEQ ID NO: 4616637 - DNA, 25 bp, Homo sapien
cactgaagggttggaccagggtgta

SEQ ID NO: 4616638 - DNA, 25 bp, Homo sapien
tggtggttcagatttccactggaaa

SEQ ID NO: 4616639 - DNA, 25 bp, Homo sapien
ccagggtgtagaaaggactttggtg

SEQ ID NO: 4616640 - DNA, 25 bp, Homo sapien
tgagtaatcaggtgaacctgccttg

SEQ ID NO: 4616641 - DNA, 25 bp, Homo sapien
gaattccctctggatgttgcttcca

SEQ ID NO: 4616642 - DNA, 25 bp, Homo sapien
gctttgaagcggctccatttcagac

SEQ ID NO: 4616643 - DNA, 25 bp, Homo sapien
ggagctgacatgattccctctcgga

SEQ ID NO: 4616644 - DNA, 25 bp, Homo sapien
gacactgacagccacagactattgg

SEQ ID NO: 4616645 - DNA, 25 bp, Homo sapien
gcgtcagatctttaacgggatccat

SEQ ID NO: 4616646 - DNA, 25 bp, Homo sapien
ttaacgggatccatcccaactgagt

SEQ ID NO: 4616647 - DNA, 25 bp, Homo sapien
taagcgtcagatctttaacgggatc

SEQ ID NO: 4616648 - DNA, 25 bp, Homo sapien
gatctttaacgggatccatcccaac

SEQ ID NO: 4616649 - DNA, 25 bp, Homo sapien
gattagagacagacgttccagacac

SEQ ID NO: 4616650 - DNA, 25 bp, Homo sapien
tgtttatgattagagacagacgttc

SEQ ID NO: 4616651 - DNA, 25 bp, Homo sapien
tgccagctgtggtgtttatgattag

SEQ ID NO: 4616652 - DNA, 25 bp, Homo sapien
tcattgccagctgtggtgtttatga

SEQ ID NO: 4616653 - DNA, 25 bp, Homo sapien
cctgaggcggcatcacaagaacgtt

SEQ ID NO: 4616654 - DNA, 25 bp, Homo sapien
agaacgttatctacaccagccccat

SEQ ID NO: 4616655 - DNA, 25 bp, Homo sapien
gttctgatacctgaggcggcatcac

SEQ ID NO: 4616656 - DNA, 25 bp, Homo sapien
tcacaagaacgttatctacaccagc

SEQ ID NO: 4616657 - DNA, 25 bp, Homo sapien
ggtttacacatctgaagtatggctg

SEQ ID NO: 4616658 - DNA, 25 bp, Homo sapien
cggattggtttacacatctgaagta

SEQ ID NO: 4616659 - DNA, 25 bp, Homo sapien
catttcggattggtttacacatctg

SEQ ID NO: 4616660 - DNA, 25 bp, Homo sapien
acatctgaagtatggctgagaattc

SEQ ID NO: 4616661 - DNA, 25 bp, Homo sapien
tcctggaactactgtgcgtgtgcat

SEQ ID NO: 4616662 - DNA, 25 bp, Homo sapien
ctcctggaactactgtgcgtgtgca

SEQ ID NO: 4616663 - DNA, 25 bp, Homo sapien
cctcctggaactactgtgcgtgtgc

SEQ ID NO: 4616664 - DNA, 25 bp, Homo sapien
gataagactcccatttagaccgcaa

SEQ ID NO: 4616665 - DNA, 25 bp, Homo sapien
caggcagctgaacacttcgtacagt

SEQ ID NO: 4616666 - DNA, 25 bp, Homo sapien
tagaccgcaaaacagtgccacaggg

SEQ ID NO: 4616667 - DNA, 25 bp, Homo sapien
ccagcagccatatacttgtaggaag

SEQ ID NO: 4616668 - DNA, 25 bp, Homo sapien
caaatccatggccatagggcgagta

SEQ ID NO: 4616669 - DNA, 25 bp, Homo sapien
gattggctgtgtgttaactgcctca

SEQ ID NO: 4616670 - DNA, 25 bp, Homo sapien
gcagaagaggatggccctgtcttct

SEQ ID NO: 4616671 - DNA, 25 bp, Homo sapien
tagcctttactatgcctgctgcaga

SEQ ID NO: 4616672 - DNA, 25 bp, Homo sapien
tagagttcctgctgagtatattcca

SEQ ID NO: 4616673 - DNA, 25 bp, Homo sapien
tctgtcttgcagtagccatgggctt

SEQ ID NO: 4616674 - DNA, 25 bp, Homo sapien
gcttttccacgtattgacatgtgag

SEQ ID NO: 4616675 - DNA, 25 bp, Homo sapien
caattctgaatcagggttccaattc

SEQ ID NO: 4616676 - DNA, 25 bp, Homo sapien
ttgaacgtataactgacttgcctgg

SEQ ID NO: 4616677 - DNA, 25 bp, Homo sapien
gagtggtattgatgcccctctcaac

SEQ ID NO: 4616678 - DNA, 25 bp, Homo sapien
ggccatccgtcttttagaggtccag

SEQ ID NO: 4616679 - DNA, 25 bp, Homo sapien
cagcctgtctgtggaaatcttctca

SEQ ID NO: 4616680 - DNA, 25 bp, Homo sapien
caaggttcatccagtaccttcacca

SEQ ID NO: 4616681 - DNA, 25 bp, Homo sapien
gtggccaaggttcatccagtacctt

SEQ ID NO: 4616682 - DNA, 25 bp, Homo sapien
cctgcgttggttggttctggctctg

SEQ ID NO: 4616683 - DNA, 25 bp, Homo sapien
tttgttcctgctggataggtgtcat

SEQ ID NO: 4616684 - DNA, 25 bp, Homo sapien
cacttattctgtgagggggtgctgt

SEQ ID NO: 4616685 - DNA, 25 bp, Homo sapien
tcacttattctgtgagggggtgctg

SEQ ID NO: 4616686 - DNA, 25 bp, Homo sapien
ttcacttattctgtgagggggtgct

SEQ ID NO: 4616687 - DNA, 25 bp, Homo sapien
cttcacttattctgtgagggggtgc

SEQ ID NO: 4616688 - DNA, 25 bp, Homo sapien
ttgtcagcggaaaacctgtcgtagg

SEQ ID NO: 4616689 - DNA, 25 bp, Homo sapien
gcagaatctgtgtcaggcaaaaacc

SEQ ID NO: 4616690 - DNA, 25 bp, Homo sapien
gagacaaaaacaggtgtcacacagg

SEQ ID NO: 4616691 - DNA, 25 bp, Homo sapien
tgccaaaagcgaccatcacaaggcc

SEQ ID NO: 4616692 - DNA, 25 bp, Homo sapien
attttaaggtataagcacagcccac

SEQ ID NO: 4616693 - DNA, 25 bp, Homo sapien
tgtctttatgcccatttgtgcgttt

SEQ ID NO: 4616694 - DNA, 25 bp, Homo sapien
tttaaggtataagcacagcccacaa

SEQ ID NO: 4616695 - DNA, 25 bp, Homo sapien
ctaattgccatttgcttttccagca

SEQ ID NO: 4616696 - DNA, 25 bp, Homo sapien
ttcagctcatgtctgagagcctcca

SEQ ID NO: 4616697 - DNA, 25 bp, Homo sapien
actcggaacaagaccaagctgtatg

SEQ ID NO: 4616698 - DNA, 25 bp, Homo sapien
tgtggtacattctgtgaacgacaaa

SEQ ID NO: 4616699 - DNA, 25 bp, Homo sapien
agctcatgtctgagagcctccaacc

SEQ ID NO: 4616700 - DNA, 25 bp, Homo sapien
cgtcatagatgagttttgtaatcaa

SEQ ID NO: 4616701 - DNA, 25 bp, Homo sapien
gatattcttttacattcgtcataga

SEQ ID NO: 4616702 - DNA, 25 bp, Homo sapien
gatacttggttgcaaaactcttcag

SEQ ID NO: 4616703 - DNA, 25 bp, Homo sapien
tcttcagtacaacaggtggatattc

SEQ ID NO: 4616704 - DNA, 25 bp, Homo sapien
aaaccgtagatcttttgacccatgt

SEQ ID NO: 4616705 - DNA, 25 bp, Homo sapien
gacccatgttctgtatctttctgac

SEQ ID NO: 4616706 - DNA, 25 bp, Homo sapien
ttttgacccatgttctgtatctttc

SEQ ID NO: 4616707 - DNA, 25 bp, Homo sapien
aaaaccgtagatcttttgacccatg

SEQ ID NO: 4616708 - DNA, 25 bp, Homo sapien
acttttctcccctgttgctttactg

SEQ ID NO: 4616709 - DNA, 25 bp, Homo sapien
cttttctcccctgttgctttactgg

SEQ ID NO: 4616710 - DNA, 25 bp, Homo sapien
tggtaaaatcaagatgtgccttcat

SEQ ID NO: 4616711 - DNA, 25 bp, Homo sapien
tgatttatgtgaagcgctaatgaag

SEQ ID NO: 4616712 - DNA, 25 bp, Homo sapien
tcaagatgtgccttcattgatttat

SEQ ID NO: 4616713 - DNA, 25 bp, Homo sapien
gaagccagtccaggtctcagcacag

SEQ ID NO: 4616714 - DNA, 25 bp, Homo sapien
gaaagaatttgccagtatccatatt

SEQ ID NO: 4616715 - DNA, 25 bp, Homo sapien
aatttgccagtatccatattctgtc

SEQ ID NO: 4616716 - DNA, 25 bp, Homo sapien
aagaatttgccagtatccatattct

SEQ ID NO: 4616717 - DNA, 25 bp, Homo sapien
aaatgaaagaatttgccagtatcca

SEQ ID NO: 4616718 - DNA, 25 bp, Homo sapien
tcacagggtaaaggctcctgtttct

SEQ ID NO: 4616719 - DNA, 25 bp, Homo sapien
agggtaaaggctcctgtttctctgc

SEQ ID NO: 4616720 - DNA, 25 bp, Homo sapien
gtaaaggctcctgtttctctgcagt

SEQ ID NO: 4616721 - DNA, 25 bp, Homo sapien
acagggtaaaggctcctgtttctct

SEQ ID NO: 4616722 - DNA, 25 bp, Homo sapien
cataaatagcagtatttgtggtcat

SEQ ID NO: 4616723 - DNA, 25 bp, Homo sapien
tcataaatagcagtatttgtggtca

SEQ ID NO: 4616724 - DNA, 25 bp, Homo sapien
taattggcattgctctcggcccagg

SEQ ID NO: 4616725 - DNA, 25 bp, Homo sapien
tctgtacagtaagttggtggttgca

SEQ ID NO: 4616726 - DNA, 25 bp, Homo sapien
gacaaaggtccatgtctccaaaacc

SEQ ID NO: 4616727 - DNA, 25 bp, Homo sapien
ccatcacaactgacactaattggca

SEQ ID NO: 4616728 - DNA, 25 bp, Homo sapien
ttacttaggactcaaatgttgctca

SEQ ID NO: 4616729 - DNA, 25 bp, Homo sapien
gaattaagtcattgttctaaatata

SEQ ID NO: 4616730 - DNA, 25 bp, Homo sapien
aatatacatgtaagctggtttataa

SEQ ID NO: 4616731 - DNA, 25 bp, Homo sapien
cttctcttacttaggactcaaatgt

SEQ ID NO: 4616732 - DNA, 25 bp, Homo sapien
ctccgtaccattggcagtacttgtc

SEQ ID NO: 4616733 - DNA, 25 bp, Homo sapien
taccattggcagtacttgtccatct

SEQ ID NO: 4616734 - DNA, 25 bp, Homo sapien
cattggcagtacttgtccatcttct

SEQ ID NO: 4616735 - DNA, 25 bp, Homo sapien
ccgtaccattggcagtacttgtcca

SEQ ID NO: 4616736 - DNA, 25 bp, Homo sapien
ctttcttttgtaatcgagttgtctc

SEQ ID NO: 4616737 - DNA, 25 bp, Homo sapien
aatcgagttgtctcatgatgtcatc

SEQ ID NO: 4616738 - DNA, 25 bp, Homo sapien
gagttgtctcatgatgtcatcgagg

SEQ ID NO: 4616739 - DNA, 25 bp, Homo sapien
tgatgtcatcgaggcaattaattga

SEQ ID NO: 4616740 - DNA, 25 bp, Homo sapien
tagtccgtggccatgctcgatatag

SEQ ID NO: 4616741 - DNA, 25 bp, Homo sapien
ggcgtcctcccgtgaacagattctg

SEQ ID NO: 4616742 - DNA, 25 bp, Homo sapien
cagattctggtaatgagaaggttca

SEQ ID NO: 4616743 - DNA, 25 bp, Homo sapien
gatgtttgatgttgtgtccctagtc

SEQ ID NO: 4616744 - DNA, 25 bp, Homo sapien
gaagggcgccttttcttagagcttc

SEQ ID NO: 4616745 - DNA, 25 bp, Homo sapien
cctccacctttatgaaaccactcag

SEQ ID NO: 4616746 - DNA, 25 bp, Homo sapien
tcaggactgtttgagctgcaactgt

SEQ ID NO: 4616747 - DNA, 25 bp, Homo sapien
tcctgaaagtcgtttgagttttaga

SEQ ID NO: 4616748 - DNA, 25 bp, Homo sapien
gctgtcaccaggctcaatttgatct

SEQ ID NO: 4616749 - DNA, 25 bp, Homo sapien
ggaagagctttattccctggctctg

SEQ ID NO: 4616750 - DNA, 25 bp, Homo sapien
tgacaacagcggaaccagataacat

SEQ ID NO: 4616751 - DNA, 25 bp, Homo sapien
ctggctctgtgacaacagcggaacc

SEQ ID NO: 4616752 - DNA, 25 bp, Homo sapien
gtgttgttgccatagtgaacattta

SEQ ID NO: 4616753 - DNA, 25 bp, Homo sapien
cgggtagtttggcaagtccacgtga

SEQ ID NO: 4616754 - DNA, 25 bp, Homo sapien
caagtccacgtgaaggtggttttcg

SEQ ID NO: 4616755 - DNA, 25 bp, Homo sapien
tggtataatcgggtagtttggcaag

SEQ ID NO: 4616756 - DNA, 25 bp, Homo sapien
gaagtttaataagccggctgtgcag

SEQ ID NO: 4616757 - DNA, 25 bp, Homo sapien
tttgctctgagcattcactccctgt

SEQ ID NO: 4616758 - DNA, 25 bp, Homo sapien
gattccgcttttcacttggaccgcc

SEQ ID NO: 4616759 - DNA, 25 bp, Homo sapien
gtgcagtttttaaaacgccagtgga

SEQ ID NO: 4616760 - DNA, 25 bp, Homo sapien
ctagagatcataccgccacacatgc

SEQ ID NO: 4616761 - DNA, 25 bp, Homo sapien
cctttggtcctcatactagagatca

SEQ ID NO: 4616762 - DNA, 25 bp, Homo sapien
tgtccagacccatctttattgttgg

SEQ ID NO: 4616763 - DNA, 25 bp, Homo sapien
tttatagtgatgtctaggtagagga

SEQ ID NO: 4616764 - DNA, 25 bp, Homo sapien
aggaatgctttacacagggtcatgt

SEQ ID NO: 4616765 - DNA, 25 bp, Homo sapien
tgttcctcacttttgtggtcttatc

SEQ ID NO: 4616766 - DNA, 25 bp, Homo sapien
ggagtcctctttagatataccaagg

SEQ ID NO: 4616767 - DNA, 25 bp, Homo sapien
tggtcttatctttgaggagtcctct

SEQ ID NO: 4616768 - DNA, 25 bp, Homo sapien
gataaataaaggaatgcgctcaggg

SEQ ID NO: 4616769 - DNA, 25 bp, Homo sapien
cactgtcactgggaagttaccgaca

SEQ ID NO: 4616770 - DNA, 25 bp, Homo sapien
gagcgtaaaaaggtgcatctgttcc

SEQ ID NO: 4616771 - DNA, 25 bp, Homo sapien
gttaccgacacggagacatgcccgt

SEQ ID NO: 4616772 - DNA, 25 bp, Homo sapien
tcagactccagaagatgtacaaggc

SEQ ID NO: 4616773 - DNA, 25 bp, Homo sapien
cagaagatgtacaaggctatgccag

SEQ ID NO: 4616774 - DNA, 25 bp, Homo sapien
gatgtacaaggctatgccagttttt

SEQ ID NO: 4616775 - DNA, 25 bp, Homo sapien
tattaccgaatgtgggggatccacg

SEQ ID NO: 4616776 - DNA, 25 bp, Homo sapien
cgatgttacgatatactgtatttcc

SEQ ID NO: 4616777 - DNA, 25 bp, Homo sapien
tgtcacgatgttacgatatactgta

SEQ ID NO: 4616778 - DNA, 25 bp, Homo sapien
tgttacgatatactgtatttccgga

SEQ ID NO: 4616779 - DNA, 25 bp, Homo sapien
tacgatatactgtatttccggatac

SEQ ID NO: 4616780 - DNA, 25 bp, Homo sapien
aaaccgctatttacttggatctgaa

SEQ ID NO: 4616781 - DNA, 25 bp, Homo sapien
tatttacttggatctgaataggaaa

SEQ ID NO: 4616782 - DNA, 25 bp, Homo sapien
gtttgcaaaccgctatttacttgga

SEQ ID NO: 4616783 - DNA, 25 bp, Homo sapien
cttagtttgcaaaccgctatttact

SEQ ID NO: 4616784 - DNA, 25 bp, Homo sapien
tttgaggatctggtgagatgtagaa

SEQ ID NO: 4616785 - DNA, 25 bp, Homo sapien
ggatctggtgagatgtagaattcca

SEQ ID NO: 4616786 - DNA, 25 bp, Homo sapien
tgtttgccttgtttgaggatctggt

SEQ ID NO: 4616787 - DNA, 25 bp, Homo sapien
tttgccttgtttgaggatctggtga

SEQ ID NO: 4616788 - DNA, 25 bp, Homo sapien
taaatcactatctcatatgcaggtc

SEQ ID NO: 4616789 - DNA, 25 bp, Homo sapien
gaagacgcacccaaggtttattgcc

SEQ ID NO: 4616790 - DNA, 25 bp, Homo sapien
tcttggacagagacataaatcacta

SEQ ID NO: 4616791 - DNA, 25 bp, Homo sapien
gtaacagactagtggccttatgtgg

SEQ ID NO: 4616792 - DNA, 25 bp, Homo sapien
gaggtgtctgatgtgactgaaattg

SEQ ID NO: 4616793 - DNA, 25 bp, Homo sapien
aggtgtctgatgtgactgaaattgc

SEQ ID NO: 4616794 - DNA, 25 bp, Homo sapien
ggtgtctgatgtgactgaaattgct

SEQ ID NO: 4616795 - DNA, 25 bp, Homo sapien
gcaagacctccatgatggaacgtca

SEQ ID NO: 4616796 - DNA, 25 bp, Homo sapien
ttttcatcagcaacagttacagtag

SEQ ID NO: 4616797 - DNA, 25 bp, Homo sapien
tagagacttgtgcaagacctccatg

SEQ ID NO: 4616798 - DNA, 25 bp, Homo sapien
cagttacagtagagacttgtgcaag

SEQ ID NO: 4616799 - DNA, 25 bp, Homo sapien
gaactggtgctgtcaggcattgatt

SEQ ID NO: 4616800 - DNA, 25 bp, Homo sapien
aggaactggtgctgtcaggcattga

SEQ ID NO: 4616801 - DNA, 25 bp, Homo sapien
atggctgaaggaactggtgctgtca

SEQ ID NO: 4616802 - DNA, 25 bp, Homo sapien
actggtgctgtcaggcattgattga

SEQ ID NO: 4616803 - DNA, 25 bp, Homo sapien
ggatttagcaataagcactgtcccc

SEQ ID NO: 4616804 - DNA, 25 bp, Homo sapien
cattgatgctttgtaggatttagca

SEQ ID NO: 4616805 - DNA, 25 bp, Homo sapien
caagtaatcttaatacattgatgct

SEQ ID NO: 4616806 - DNA, 25 bp, Homo sapien
caggtgtgtataggggcaaattcca

SEQ ID NO: 4616807 - DNA, 25 bp, Homo sapien
agtctcatactgtcggcagatgcgg

SEQ ID NO: 4616808 - DNA, 25 bp, Homo sapien
gtctcatactgtcggcagatgcggc

SEQ ID NO: 4616809 - DNA, 25 bp, Homo sapien
tgcatgccaggacagtcgttcgctg

SEQ ID NO: 4616810 - DNA, 25 bp, Homo sapien
tctttgctgcctgactgtgcatgcc

SEQ ID NO: 4616811 - DNA, 25 bp, Homo sapien
cagaggtcagtacatctgtggcttc

SEQ ID NO: 4616812 - DNA, 25 bp, Homo sapien
tggcgaatatgtccacacgtgtcca

SEQ ID NO: 4616813 - DNA, 25 bp, Homo sapien
tcaaaactaagccagtcagaagcta

SEQ ID NO: 4616814 - DNA, 25 bp, Homo sapien
gtagttgtactcattcccattattt

SEQ ID NO: 4616815 - DNA, 25 bp, Homo sapien
gagctctctcggttgatccacttca

SEQ ID NO: 4616816 - DNA, 25 bp, Homo sapien
ccatatttgtatggagctctctcgg

SEQ ID NO: 4616817 - DNA, 25 bp, Homo sapien
atcttttccaggtattctatactgg

SEQ ID NO: 4616818 - DNA, 25 bp, Homo sapien
tccaggtattctatactgggttttc

SEQ ID NO: 4616819 - DNA, 25 bp, Homo sapien
cataaatcttttccaggtattctat

SEQ ID NO: 4616820 - DNA, 25 bp, Homo sapien
tttctgactccttgttttctagttc

SEQ ID NO: 4616821 - DNA, 25 bp, Homo sapien
taccgcatagaaaccctgaagttgt

SEQ ID NO: 4616822 - DNA, 25 bp, Homo sapien
cagaccagattaggatacaggcagt

SEQ ID NO: 4616823 - DNA, 25 bp, Homo sapien
tacaggaatttttaccgcatagaaa

SEQ ID NO: 4616824 - DNA, 25 bp, Homo sapien
tagttgcttcctacaaggccagaaa

SEQ ID NO: 4616825 - DNA, 25 bp, Homo sapien
ggtaacagcaaccaccctgccaatt

SEQ ID NO: 4616826 - DNA, 25 bp, Homo sapien
acagcaaccaccctgccaattcttc

SEQ ID NO: 4616827 - DNA, 25 bp, Homo sapien
ctaggtaacagcaaccaccctgcca

SEQ ID NO: 4616828 - DNA, 25 bp, Homo sapien
cagcaaccaccctgccaattcttcc

SEQ ID NO: 4616829 - DNA, 25 bp, Homo sapien
ggtctctgaacatctggcagcgctg

SEQ ID NO: 4616830 - DNA, 25 bp, Homo sapien
gttaagctaagttcagattccattt

SEQ ID NO: 4616831 - DNA, 25 bp, Homo sapien
ttgccatgcacatgtgtctagcagc

SEQ ID NO: 4616832 - DNA, 25 bp, Homo sapien
tcaggaataaatgaggctgttaagc

SEQ ID NO: 4616833 - DNA, 25 bp, Homo sapien
gcccagggaagaccacctgagctct

SEQ ID NO: 4616834 - DNA, 25 bp, Homo sapien
aactggtactgtctgggtggtgtat

SEQ ID NO: 4616835 - DNA, 25 bp, Homo sapien
ctgagctctgctgtgccccaaactg

SEQ ID NO: 4616836 - DNA, 25 bp, Homo sapien
ctgctcttggcccagggaagaccac

SEQ ID NO: 4616837 - DNA, 25 bp, Homo sapien
caggatgcgttgtctgtaactgtag

SEQ ID NO: 4616838 - DNA, 25 bp, Homo sapien
ccattggcatgtactggcagagtgc

SEQ ID NO: 4616839 - DNA, 25 bp, Homo sapien
ccatttgggtatatcagcgtcatca

SEQ ID NO: 4616840 - DNA, 25 bp, Homo sapien
aaccagtgtagcgtatgtgcagcca

SEQ ID NO: 4616841 - DNA, 25 bp, Homo sapien
ggactcctggtgagcttattgtcaa

SEQ ID NO: 4616842 - DNA, 25 bp, Homo sapien
tgatggtcttcctgaactctttgtg

SEQ ID NO: 4616843 - DNA, 25 bp, Homo sapien
gaatccggcagtgcttgtacctagc

SEQ ID NO: 4616844 - DNA, 25 bp, Homo sapien
tgtataaccactgaaattaggctgg

SEQ ID NO: 4616845 - DNA, 25 bp, Homo sapien
ctgcagaggttgctcctatcacaga

SEQ ID NO: 4616846 - DNA, 25 bp, Homo sapien
actgttctttggcagctcaccccag

SEQ ID NO: 4616847 - DNA, 25 bp, Homo sapien
gcagaggttgctcctatcacagagc

SEQ ID NO: 4616848 - DNA, 25 bp, Homo sapien
gcactgttctttggcagctcacccc

SEQ ID NO: 4616849 - DNA, 25 bp, Homo sapien
ttgtggctgtgaaaaatctcctgta

SEQ ID NO: 4616850 - DNA, 25 bp, Homo sapien
tgtggctgtgaaaaatctcctgtaa

SEQ ID NO: 4616851 - DNA, 25 bp, Homo sapien
agggtgtcaccagggaagagagatt

SEQ ID NO: 4616852 - DNA, 25 bp, Homo sapien
cagggtgtcaccagggaagagagat

SEQ ID NO: 4616853 - DNA, 25 bp, Homo sapien
gggtgtcaccagggaagagagattt

SEQ ID NO: 4616854 - DNA, 25 bp, Homo sapien
tcagggtgtcaccagggaagagaga

SEQ ID NO: 4616855 - DNA, 25 bp, Homo sapien
cactgctcaagctgcttgctcattt

SEQ ID NO: 4616856 - DNA, 25 bp, Homo sapien
aagctgcttgctcattttggctttt

SEQ ID NO: 4616857 - DNA, 25 bp, Homo sapien
tcattttggctttttctcgtaagct

SEQ ID NO: 4616858 - DNA, 25 bp, Homo sapien
cattttggctttttctcgtaagctt

SEQ ID NO: 4616859 - DNA, 25 bp, Homo sapien
agtcaattacgtaagtagctctgtc

SEQ ID NO: 4616860 - DNA, 25 bp, Homo sapien
ggtaagtcaattacgtaagtagctc

SEQ ID NO: 4616861 - DNA, 25 bp, Homo sapien
taagtcaattacgtaagtagctctg

SEQ ID NO: 4616862 - DNA, 25 bp, Homo sapien
cattgggtaagtcaattacgtaagt

SEQ ID NO: 4616863 - DNA, 25 bp, Homo sapien
gggagctataaacatgatctaggag

SEQ ID NO: 4616864 - DNA, 25 bp, Homo sapien
taggagaatgtgttcgacaattgga

SEQ ID NO: 4616865 - DNA, 25 bp, Homo sapien
ctggaaaggcaggttagagctagat

SEQ ID NO: 4616866 - DNA, 25 bp, Homo sapien
ctagattgtagagggcctggaaaga

SEQ ID NO: 4616867 - DNA, 25 bp, Homo sapien
gaagggctaaatccaaccatgctaa

SEQ ID NO: 4616868 - DNA, 25 bp, Homo sapien
tgtgaaaccacacgagcatcttcag

SEQ ID NO: 4616869 - DNA, 25 bp, Homo sapien
tgctaattcaattgcagccaaaggt

SEQ ID NO: 4616870 - DNA, 25 bp, Homo sapien
aatcaggagttctggaaatggagca

SEQ ID NO: 4616871 - DNA, 25 bp, Homo sapien
tacaactcgaggaaaaagcatccct

SEQ ID NO: 4616872 - DNA, 25 bp, Homo sapien
ttaaatgtgaaagaactggcacctt

SEQ ID NO: 4616873 - DNA, 25 bp, Homo sapien
gcacctttgataagtagtccccata

SEQ ID NO: 4616874 - DNA, 25 bp, Homo sapien
caagcaataagtcagtaaatccagt

SEQ ID NO: 4616875 - DNA, 25 bp, Homo sapien
caattggacaagattgaaagtgaat

SEQ ID NO: 4616876 - DNA, 25 bp, Homo sapien
aactatgacctctgttaacttgcaa

SEQ ID NO: 4616877 - DNA, 25 bp, Homo sapien
taataagatgaatgatcagaaaaag

SEQ ID NO: 4616878 - DNA, 25 bp, Homo sapien
tgaatgtgcatcatatgaagatagt

SEQ ID NO: 4616879 - DNA, 25 bp, Homo sapien
ttgtgctttttagaattgcctatga

SEQ ID NO: 4616880 - DNA, 25 bp, Homo sapien
ctggctgtagctcaaggtcagggca

SEQ ID NO: 4616881 - DNA, 25 bp, Homo sapien
gggactttgtgctttttagaattgc

SEQ ID NO: 4616882 - DNA, 25 bp, Homo sapien
cagggcaaaaagaggggactttgtg

SEQ ID NO: 4616883 - DNA, 25 bp, Homo sapien
tagggtattctcttagatgaagtaa

SEQ ID NO: 4616884 - DNA, 25 bp, Homo sapien
tgcatgttaacctgctttgagatca

SEQ ID NO: 4616885 - DNA, 25 bp, Homo sapien
tcttagatgaagtaagatgttcttc

SEQ ID NO: 4616886 - DNA, 25 bp, Homo sapien
attttatatgtgcatgttaacctgc

SEQ ID NO: 4616887 - DNA, 25 bp, Homo sapien
cgtggtatttgtagcatgctctgat

SEQ ID NO: 4616888 - DNA, 25 bp, Homo sapien
tgatttcctaatatgtgatgcatcg

SEQ ID NO: 4616889 - DNA, 25 bp, Homo sapien
catgctctgatttcctaatatgtga

SEQ ID NO: 4616890 - DNA, 25 bp, Homo sapien
ggtatttgtagcatgctctgatttc

SEQ ID NO: 4616891 - DNA, 25 bp, Homo sapien
gtactggtacaatttcatagaaaat

SEQ ID NO: 4616892 - DNA, 25 bp, Homo sapien
ctgggcacctttttgaatttcagtg

SEQ ID NO: 4616893 - DNA, 25 bp, Homo sapien
caaaactctgggcacctttttgaat

SEQ ID NO: 4616894 - DNA, 25 bp, Homo sapien
actctgggcacctttttgaatttca

SEQ ID NO: 4616895 - DNA, 25 bp, Homo sapien
gggcacctttttgaatttcagtgaa

SEQ ID NO: 4616896 - DNA, 25 bp, Homo sapien
gcattgatttgttaaagcgctgaat

SEQ ID NO: 4616897 - DNA, 25 bp, Homo sapien
attgtgcttttctagtggcattgat

SEQ ID NO: 4616898 - DNA, 25 bp, Homo sapien
ttgttaaagcgctgaatcagcatct

SEQ ID NO: 4616899 - DNA, 25 bp, Homo sapien
cagctgcctgatccactgttttgtt

SEQ ID NO: 4616900 - DNA, 25 bp, Homo sapien
tccctcttaatgtgaaatacttgag

SEQ ID NO: 4616901 - DNA, 25 bp, Homo sapien
gagtcccctgacatctacccagtga

SEQ ID NO: 4616902 - DNA, 25 bp, Homo sapien
ttaagaagtcaaatcgctgacacag

SEQ ID NO: 4616903 - DNA, 25 bp, Homo sapien
taatccaagtgtatagggtgaagcg

SEQ ID NO: 4616904 - DNA, 25 bp, Homo sapien
tcatcctttacaggattctttgctc

SEQ ID NO: 4616905 - DNA, 25 bp, Homo sapien
catcctttacaggattctttgctct

SEQ ID NO: 4616906 - DNA, 25 bp, Homo sapien
tgatcggagtacctgaactgggtgt

SEQ ID NO: 4616907 - DNA, 25 bp, Homo sapien
attttatgatcggagtacctgaact

SEQ ID NO: 4616908 - DNA, 25 bp, Homo sapien
tttatgatcggagtacctgaactgg

SEQ ID NO: 4616909 - DNA, 25 bp, Homo sapien
tatgatcggagtacctgaactgggt

SEQ ID NO: 4616910 - DNA, 25 bp, Homo sapien
tttggtggtacgcttttgtggtctg

SEQ ID NO: 4616911 - DNA, 25 bp, Homo sapien
atctcactactgtctgccaaagctg

SEQ ID NO: 4616912 - DNA, 25 bp, Homo sapien
tcactactgtctgccaaagctgatg

SEQ ID NO: 4616913 - DNA, 25 bp, Homo sapien
cagaccttggtcagaagattgtttg

SEQ ID NO: 4616914 - DNA, 25 bp, Homo sapien
cgtgtagaaataattcgccatttga

SEQ ID NO: 4616915 - DNA, 25 bp, Homo sapien
gcctggtttgttatgcgtgtagaaa

SEQ ID NO: 4616916 - DNA, 25 bp, Homo sapien
gttatgcgtgtagaaataattcgcc

SEQ ID NO: 4616917 - DNA, 25 bp, Homo sapien
ttggagcctggtttgttatgcgtgt

SEQ ID NO: 4616918 - DNA, 25 bp, Homo sapien
gcctccctcctagacacgtcttgct

SEQ ID NO: 4616919 - DNA, 25 bp, Homo sapien
tccctcctagacacgtcttgctttt

SEQ ID NO: 4616920 - DNA, 25 bp, Homo sapien
gtgcctccctcctagacacgtcttg

SEQ ID NO: 4616921 - DNA, 25 bp, Homo sapien
cctggtgcctccctcctagacacgt

SEQ ID NO: 4616922 - DNA, 25 bp, Homo sapien
cttgcacaattgctggctccttggc

SEQ ID NO: 4616923 - DNA, 25 bp, Homo sapien
tgtgcgccggtctcctcttgcacaa

SEQ ID NO: 4616924 - DNA, 25 bp, Homo sapien
tgcacaattgctggctccttggctc

SEQ ID NO: 4616925 - DNA, 25 bp, Homo sapien
atgcgctccgtgatacgcgccctgt

SEQ ID NO: 4616926 - DNA, 25 bp, Homo sapien
aattaatcaccggagccggcggctc

SEQ ID NO: 4616927 - DNA, 25 bp, Homo sapien
cggttactgataattaatcaccgga

SEQ ID NO: 4616928 - DNA, 25 bp, Homo sapien
tgataattaatcaccggagccggcg

SEQ ID NO: 4616929 - DNA, 25 bp, Homo sapien
tactgataattaatcaccggagccg

SEQ ID NO: 4616930 - DNA, 25 bp, Homo sapien
ctgggaaagccgacgtggtagcgcg

SEQ ID NO: 4616931 - DNA, 25 bp, Homo sapien
aaagccgacgtggtagcgcgaggcc

SEQ ID NO: 4616932 - DNA, 25 bp, Homo sapien
ggaaagccgacgtggtagcgcgagg

SEQ ID NO: 4616933 - DNA, 25 bp, Homo sapien
agccgacgtggtagcgcgaggccat

SEQ ID NO: 4616934 - DNA, 25 bp, Homo sapien
gctggaggcgttcggcttgctggct

SEQ ID NO: 4616935 - DNA, 25 bp, Homo sapien
cagagccgctcctccgtcccggccg

SEQ ID NO: 4616936 - DNA, 25 bp, Homo sapien
cgcgctggaggcgttcggcttgctg

SEQ ID NO: 4616937 - DNA, 25 bp, Homo sapien
agcctcggcgtcttccccagagccg

SEQ ID NO: 4616938 - DNA, 25 bp, Homo sapien
cccgccggcccgccggcgcactcac

SEQ ID NO: 4616939 - DNA, 25 bp, Homo sapien
ccgcccgccggcccgccggcgcact

SEQ ID NO: 4616940 - DNA, 25 bp, Homo sapien
gcccgcccgccggcccgccggcgca

SEQ ID NO: 4616941 - DNA, 25 bp, Homo sapien
gcccgccggcccgccggcgcactca

SEQ ID NO: 4616942 - DNA, 25 bp, Homo sapien
tgctggaggagtcggcgtgcgtggc

SEQ ID NO: 4616943 - DNA, 25 bp, Homo sapien
tgcgcccgcccctgcattcccttcg

SEQ ID NO: 4616944 - DNA, 25 bp, Homo sapien
gggctgtgctgctcggtcctcgctc

SEQ ID NO: 4616945 - DNA, 25 bp, Homo sapien
ctgagaagagagacgaggctgtgca

SEQ ID NO: 4616946 - DNA, 25 bp, Homo sapien
gtggctggaggcagcttcgttcaga

SEQ ID NO: 4616947 - DNA, 25 bp, Homo sapien
tggctggaggcagcttcgttcagac

SEQ ID NO: 4616948 - DNA, 25 bp, Homo sapien
aaatctcggggcccctcagaacagc

SEQ ID NO: 4616949 - DNA, 25 bp, Homo sapien
tcaaatctcggggcccctcagaaca

SEQ ID NO: 4616950 - DNA, 25 bp, Homo sapien
tctcggggcccctcagaacagccct

SEQ ID NO: 4616951 - DNA, 25 bp, Homo sapien
atctcggggcccctcagaacagccc

SEQ ID NO: 4616952 - DNA, 25 bp, Homo sapien
ttcggaaccagaacgactacggctg

SEQ ID NO: 4616953 - DNA, 25 bp, Homo sapien
tgtgcagaaggtgcgaaagaagctc

SEQ ID NO: 4616954 - DNA, 25 bp, Homo sapien
tattcagaatgtcccaacaggtaag

SEQ ID NO: 4616955 - DNA, 25 bp, Homo sapien
tttcacagtacaatctgggtcaggg

SEQ ID NO: 4616956 - DNA, 25 bp, Homo sapien
caccgtgattgtggtgctgcctgga

SEQ ID NO: 4616957 - DNA, 25 bp, Homo sapien
tcatttggtgcctgacagtggaaca

SEQ ID NO: 4616958 - DNA, 25 bp, Homo sapien
tgctatccaatgacatgcagtggct

SEQ ID NO: 4616959 - DNA, 25 bp, Homo sapien
cacatacgagatgactttcaggagc

SEQ ID NO: 4616960 - DNA, 25 bp, Homo sapien
gctgactacttttatgagatggcat

SEQ ID NO: 4616961 - DNA, 25 bp, Homo sapien
ctgctgactacttttatgagatggc

SEQ ID NO: 4616962 - DNA, 25 bp, Homo sapien
ttttcctgctgactacttttatgag

SEQ ID NO: 4616963 - DNA, 25 bp, Homo sapien
tcctgctgactacttttatgagatg

SEQ ID NO: 4616964 - DNA, 25 bp, Homo sapien
gaggaggaagcttgctattgacagt

SEQ ID NO: 4616965 - DNA, 25 bp, Homo sapien
taacagccattagtgggaaggtcag

SEQ ID NO: 4616966 - DNA, 25 bp, Homo sapien
gtgtccttaagcctcccacaaataa

SEQ ID NO: 4616967 - DNA, 25 bp, Homo sapien
ccacaaataacagccattagtggga

SEQ ID NO: 4616968 - DNA, 25 bp, Homo sapien
gtctattactgcaggtgcttgctgc

SEQ ID NO: 4616969 - DNA, 25 bp, Homo sapien
acggggaatttcaagtcttgcagaa

SEQ ID NO: 4616970 - DNA, 25 bp, Homo sapien
ggaatttcaagtcttgcagaataac

SEQ ID NO: 4616971 - DNA, 25 bp, Homo sapien
gggaatttcaagtcttgcagaataa

SEQ ID NO: 4616972 - DNA, 25 bp, Homo sapien
tgtaatgccaccttgcttgggcttg

SEQ ID NO: 4616973 - DNA, 25 bp, Homo sapien
cagttttgccctaatgagttgcaac

SEQ ID NO: 4616974 - DNA, 25 bp, Homo sapien
catttagttacggagctgtgcagtt

SEQ ID NO: 4616975 - DNA, 25 bp, Homo sapien
tcacagcagggtctccaaattagcc

SEQ ID NO: 4616976 - DNA, 25 bp, Homo sapien
atggctgctggatgtgataacttca

SEQ ID NO: 4616977 - DNA, 25 bp, Homo sapien
atttccagttgcctggttatctgca

SEQ ID NO: 4616978 - DNA, 25 bp, Homo sapien
ttcaggtctgtgtagatggctgctg

SEQ ID NO: 4616979 - DNA, 25 bp, Homo sapien
ataacttcagtatcagtctgttttc

SEQ ID NO: 4616980 - DNA, 25 bp, Homo sapien
ctggcttagatcttcaatatcgttt

SEQ ID NO: 4616981 - DNA, 25 bp, Homo sapien
tggcttagatcttcaatatcgtttt

SEQ ID NO: 4616982 - DNA, 25 bp, Homo sapien
atattctctcctcggaccctttcat

SEQ ID NO: 4616983 - DNA, 25 bp, Homo sapien
tcatattctctcctcggaccctttc

SEQ ID NO: 4616984 - DNA, 25 bp, Homo sapien
tattctctcctcggaccctttcata

SEQ ID NO: 4616985 - DNA, 25 bp, Homo sapien
attctctcctcggaccctttcatac

SEQ ID NO: 4616986 - DNA, 25 bp, Homo sapien
ctaattgggcagaaagctggtgtga

SEQ ID NO: 4616987 - DNA, 25 bp, Homo sapien
gggcagaaagctggtgtgactttgg

SEQ ID NO: 4616988 - DNA, 25 bp, Homo sapien
gtgactttggaccacaattgcagtt

SEQ ID NO: 4616989 - DNA, 25 bp, Homo sapien
aattgggcagaaagctggtgtgact

SEQ ID NO: 4616990 - DNA, 25 bp, Homo sapien
tgtaattcttaagagtctggcttgg

SEQ ID NO: 4616991 - DNA, 25 bp, Homo sapien
ttattctgtaattcttaagagtctg

SEQ ID NO: 4616992 - DNA, 25 bp, Homo sapien
ttctgtaattcttaagagtctggct

SEQ ID NO: 4616993 - DNA, 25 bp, Homo sapien
ttcttaagagtctggcttggttttc

SEQ ID NO: 4616994 - DNA, 25 bp, Homo sapien
atggtagccagaaagtagtggtgat

SEQ ID NO: 4616995 - DNA, 25 bp, Homo sapien
gatggggagttctgattcttcagat

SEQ ID NO: 4616996 - DNA, 25 bp, Homo sapien
tggtgatggggagttctgattcttc

SEQ ID NO: 4616997 - DNA, 25 bp, Homo sapien
ggtgatggggagttctgattcttca

SEQ ID NO: 4616998 - DNA, 25 bp, Homo sapien
gactcaagcgccagggcatgagtga

SEQ ID NO: 4616999 - DNA, 25 bp, Homo sapien
gaaattgctcaagggtttattggac

SEQ ID NO: 4617000 - DNA, 25 bp, Homo sapien
cacatttcgatttctgtcatgttcg

SEQ ID NO: 4617001 - DNA, 25 bp, Homo sapien
gtcatgttcgacagttgtcaagaaa

SEQ ID NO: 4617002 - DNA, 25 bp, Homo sapien
tttatgttgcctaatcctcttccat

SEQ ID NO: 4617003 - DNA, 25 bp, Homo sapien
agaagacccgttgctttcttttatg

SEQ ID NO: 4617004 - DNA, 25 bp, Homo sapien
atgttgcctaatcctcttccattgt

SEQ ID NO: 4617005 - DNA, 25 bp, Homo sapien
tatgttgcctaatcctcttccattg

SEQ ID NO: 4617006 - DNA, 25 bp, Homo sapien
cctgggtgattggttaccatggtca

SEQ ID NO: 4617007 - DNA, 25 bp, Homo sapien
ggttaccatggtcattgtgggtaaa

SEQ ID NO: 4617008 - DNA, 25 bp, Homo sapien
ccagtattcatatgggtcattttgg

SEQ ID NO: 4617009 - DNA, 25 bp, Homo sapien
catggtcattgtgggtaaactcctg

SEQ ID NO: 4617010 - DNA, 25 bp, Homo sapien
tgttccatgtaagcagtgggaatgg

SEQ ID NO: 4617011 - DNA, 25 bp, Homo sapien
gaacgagaaaaccttgtgacgctga

SEQ ID NO: 4617012 - DNA, 25 bp, Homo sapien
tttctgattgcatgacgtgtagtcc

SEQ ID NO: 4617013 - DNA, 25 bp, Homo sapien
tgacgctgaaaagatttgcctgaag

SEQ ID NO: 4617014 - DNA, 25 bp, Homo sapien
agatgtttttattagtttcagtagt

SEQ ID NO: 4617015 - DNA, 25 bp, Homo sapien
accgagcccagccaagatgttttta

SEQ ID NO: 4617016 - DNA, 25 bp, Homo sapien
cccagccaagatgtttttattagtt

SEQ ID NO: 4617017 - DNA, 25 bp, Homo sapien
agccaagatgtttttattagtttca

SEQ ID NO: 4617018 - DNA, 25 bp, Homo sapien
gagggagttctgacgaaatttgctt

SEQ ID NO: 4617019 - DNA, 25 bp, Homo sapien
ggagttctgacgaaatttgcttgcc

SEQ ID NO: 4617020 - DNA, 25 bp, Homo sapien
agctagagagggagttctgacgaaa

SEQ ID NO: 4617021 - DNA, 25 bp, Homo sapien
ttctgacgaaatttgcttgccccat

SEQ ID NO: 4617022 - DNA, 25 bp, Homo sapien
atctgcggagatagctatggtttgc

SEQ ID NO: 4617023 - DNA, 25 bp, Homo sapien
gctatggtttgcttggtccgtggaa

SEQ ID NO: 4617024 - DNA, 25 bp, Homo sapien
tagctatggtttgcttggtccgtgg

SEQ ID NO: 4617025 - DNA, 25 bp, Homo sapien
gtaacgtaaaaatatctgcggagat

SEQ ID NO: 4617026 - DNA, 25 bp, Homo sapien
cagcctgaggacaataccttgcagt

SEQ ID NO: 4617027 - DNA, 25 bp, Homo sapien
gcctgaggacaataccttgcagtga

SEQ ID NO: 4617028 - DNA, 25 bp, Homo sapien
agcctgaggacaataccttgcagtg

SEQ ID NO: 4617029 - DNA, 25 bp, Homo sapien
ccagcctgaggacaataccttgcag

SEQ ID NO: 4617030 - DNA, 25 bp, Homo sapien
tcttgtgttgaaccttcctacttcc

SEQ ID NO: 4617031 - DNA, 25 bp, Homo sapien
attcttttccgcctacactgcttta

SEQ ID NO: 4617032 - DNA, 25 bp, Homo sapien
cgcctacactgctttaaaggactcc

SEQ ID NO: 4617033 - DNA, 25 bp, Homo sapien
tatcttgtgttgaaccttcctactt

SEQ ID NO: 4617034 - DNA, 25 bp, Homo sapien
ttagcagtcatcatttgtttgtgtc

SEQ ID NO: 4617035 - DNA, 25 bp, Homo sapien
gcagattgggcgtctctggactgta

SEQ ID NO: 4617036 - DNA, 25 bp, Homo sapien
cggtcacatgtggagttcgccttac

SEQ ID NO: 4617037 - DNA, 25 bp, Homo sapien
tcagttctgttgtgtgtagaggcgt

SEQ ID NO: 4617038 - DNA, 25 bp, Homo sapien
taaggagccctctaatggtttctcg

SEQ ID NO: 4617039 - DNA, 25 bp, Homo sapien
gcctggctgcattgcaagtgtcaga

SEQ ID NO: 4617040 - DNA, 25 bp, Homo sapien
tattgctaattgtactgagcctggc

SEQ ID NO: 4617041 - DNA, 25 bp, Homo sapien
tgatttgataggactgacatgcagc

SEQ ID NO: 4617042 - DNA, 25 bp, Homo sapien
gataagcggacacatgacatttgca

SEQ ID NO: 4617043 - DNA, 25 bp, Homo sapien
cactcgagtgccagggcaaactgga

SEQ ID NO: 4617044 - DNA, 25 bp, Homo sapien
catcagaaacgtagggaatattgca

SEQ ID NO: 4617045 - DNA, 25 bp, Homo sapien
cgaatgcaagatcgcactccttaga

SEQ ID NO: 4617046 - DNA, 25 bp, Homo sapien
tttccttctttaagggcattgcttc

SEQ ID NO: 4617047 - DNA, 25 bp, Homo sapien
ttccttctttaagggcattgcttct

SEQ ID NO: 4617048 - DNA, 25 bp, Homo sapien
ctttccttctttaagggcattgctt

SEQ ID NO: 4617049 - DNA, 25 bp, Homo sapien
ttcagaaacccagagactgaggatc

SEQ ID NO: 4617050 - DNA, 25 bp, Homo sapien
ggcaggtagcaaaaggtgaacccag

SEQ ID NO: 4617051 - DNA, 25 bp, Homo sapien
cagtcttagttctgtagccaggcag

SEQ ID NO: 4617052 - DNA, 25 bp, Homo sapien
tctgtgccctcttcagtcttagttc

SEQ ID NO: 4617053 - DNA, 25 bp, Homo sapien
gactgctggtggataatattccctg

SEQ ID NO: 4617054 - DNA, 25 bp, Homo sapien
cacatttgcacagaagactcccaag

SEQ ID NO: 4617055 - DNA, 25 bp, Homo sapien
taacataggcagatgggactgctgg

SEQ ID NO: 4617056 - DNA, 25 bp, Homo sapien
gactcccaagtgttttaacataggc

SEQ ID NO: 4617057 - DNA, 25 bp, Homo sapien
ttttgatacgagaccagctctcagg

SEQ ID NO: 4617058 - DNA, 25 bp, Homo sapien
ggtgtgaagtaaaacaaaagcctca

SEQ ID NO: 4617059 - DNA, 25 bp, Homo sapien
gacacgaggtgacaaactgcaggca

SEQ ID NO: 4617060 - DNA, 25 bp, Homo sapien
catctctgcctgtggtaatgacacg

SEQ ID NO: 4617061 - DNA, 25 bp, Homo sapien
ggagttatgtccaccttcatcttac

SEQ ID NO: 4617062 - DNA, 25 bp, Homo sapien
aaacatttatcattgctcttgcctg

SEQ ID NO: 4617063 - DNA, 25 bp, Homo sapien
cattgctcttgcctggagttatgtc

SEQ ID NO: 4617064 - DNA, 25 bp, Homo sapien
caccttcatcttactgcaagtgtca

SEQ ID NO: 4617065 - DNA, 25 bp, Homo sapien
acattccatatctaatctctcctac

SEQ ID NO: 4617066 - DNA, 25 bp, Homo sapien
ctgctatattaaagttgactgtgac

SEQ ID NO: 4617067 - DNA, 25 bp, Homo sapien
gcctgcctcaactctttgaatagta

SEQ ID NO: 4617068 - DNA, 25 bp, Homo sapien
ctctttgaatagtagtatccttaca

SEQ ID NO: 4617069 - DNA, 25 bp, Homo sapien
tttatgttaatggatccgccactca

SEQ ID NO: 4617070 - DNA, 25 bp, Homo sapien
tacttgaaagataatgccccttacc

SEQ ID NO: 4617071 - DNA, 25 bp, Homo sapien
caaatcttgatgtgggaagcacaga

SEQ ID NO: 4617072 - DNA, 25 bp, Homo sapien
caatgtctcaagctagtgattaggc

SEQ ID NO: 4617073 - DNA, 25 bp, Homo sapien
tcagccttaacattgctaacacagt

SEQ ID NO: 4617074 - DNA, 25 bp, Homo sapien
tggaatgcattcagttccatcaggg

SEQ ID NO: 4617075 - DNA, 25 bp, Homo sapien
taaagattaggaacagaccagtgtc

SEQ ID NO: 4617076 - DNA, 25 bp, Homo sapien
tggtaagtaagatccagctgcaggg

SEQ ID NO: 4617077 - DNA, 25 bp, Homo sapien
gatgaaacattttccacgaccatga

SEQ ID NO: 4617078 - DNA, 25 bp, Homo sapien
gaatctgttactggcttcattcagc

SEQ ID NO: 4617079 - DNA, 25 bp, Homo sapien
tatattggaccttgacactgattgt

SEQ ID NO: 4617080 - DNA, 25 bp, Homo sapien
taacttgtcaggaagtacagtttct

SEQ ID NO: 4617081 - DNA, 25 bp, Homo sapien
tagagagggtccttagcaggccttg

SEQ ID NO: 4617082 - DNA, 25 bp, Homo sapien
cctgagggcgtaattaacagtgtct

SEQ ID NO: 4617083 - DNA, 25 bp, Homo sapien
ggagggactgtttgtgctgtcttca

SEQ ID NO: 4617084 - DNA, 25 bp, Homo sapien
tctgctggaccaaaacctgagggcg

SEQ ID NO: 4617085 - DNA, 25 bp, Homo sapien
aacctccgccggccgatttcaagtg

SEQ ID NO: 4617086 - DNA, 25 bp, Homo sapien
cctccgccggccgatttcaagtgat

SEQ ID NO: 4617087 - DNA, 25 bp, Homo sapien
ctccgccggccgatttcaagtgatt

SEQ ID NO: 4617088 - DNA, 25 bp, Homo sapien
gcaacctccgccggccgatttcaag

SEQ ID NO: 4617089 - DNA, 25 bp, Homo sapien
tagatttctcggttacatcccagca

SEQ ID NO: 4617090 - DNA, 25 bp, Homo sapien
gccacatgttgatatgcatcccagg

SEQ ID NO: 4617091 - DNA, 25 bp, Homo sapien
gataggccgacgctggcagtaatga

SEQ ID NO: 4617092 - DNA, 25 bp, Homo sapien
caaccgtaaagaagtaagcgtcgag

SEQ ID NO: 4617093 - DNA, 25 bp, Homo sapien
aattagttcgcctggtgatgagccg

SEQ ID NO: 4617094 - DNA, 25 bp, Homo sapien
gaagcgacttctttgcagcgaggaa

SEQ ID NO: 4617095 - DNA, 25 bp, Homo sapien
tgatgagccgctctgtccgctttcg

SEQ ID NO: 4617096 - DNA, 25 bp, Homo sapien
cagcgaggaagcgtgcaattagttc

SEQ ID NO: 4617097 - DNA, 25 bp, Homo sapien
ttgttttacttgcacgttgactgga

SEQ ID NO: 4617098 - DNA, 25 bp, Homo sapien
tctataggagccgatttgttttact

SEQ ID NO: 4617099 - DNA, 25 bp, Homo sapien
cagagacggctcttttcgaagtgca

SEQ ID NO: 4617100 - DNA, 25 bp, Homo sapien
tttacttgcacgttgactggagggt

SEQ ID NO: 4617101 - DNA, 25 bp, Homo sapien
ttccgcgcgaaggtgagcggctggc

SEQ ID NO: 4617102 - DNA, 25 bp, Homo sapien
ccccgctcgcggcttccgcgcgaag

SEQ ID NO: 4617103 - DNA, 25 bp, Homo sapien
cggcttccgcgcgaaggtgagcggc

SEQ ID NO: 4617104 - DNA, 25 bp, Homo sapien
tgagcggctggctaggggaggctcc

SEQ ID NO: 4617105 - DNA, 25 bp, Homo sapien
taattcagggtgtagcttgcacaca

SEQ ID NO: 4617106 - DNA, 25 bp, Homo sapien
caaggtcatcatgggataattcagg

SEQ ID NO: 4617107 - DNA, 25 bp, Homo sapien
aaattacagttgtcgggccttgtgg

SEQ ID NO: 4617108 - DNA, 25 bp, Homo sapien
cttgtggtcacaagggcatgtgtta

SEQ ID NO: 4617109 - DNA, 25 bp, Homo sapien
tgacatcatcgggaatgacaggtat

SEQ ID NO: 4617110 - DNA, 25 bp, Homo sapien
caggtatcttgggggctttccctgt

SEQ ID NO: 4617111 - DNA, 25 bp, Homo sapien
catcatcgggaatgacaggtatctt

SEQ ID NO: 4617112 - DNA, 25 bp, Homo sapien
gaatctgacatcatcgggaatgaca

SEQ ID NO: 4617113 - DNA, 25 bp, Homo sapien
caaggagagacttccagagagtcat

SEQ ID NO: 4617114 - DNA, 25 bp, Homo sapien
caggtatgtcgcctttttgctgatg

SEQ ID NO: 4617115 - DNA, 25 bp, Homo sapien
ctctgaaaggatgaaggcacaagga

SEQ ID NO: 4617116 - DNA, 25 bp, Homo sapien
gggatacccattagctctgaaagga

SEQ ID NO: 4617117 - DNA, 25 bp, Homo sapien
gatgggaataaaggattgctcccca

SEQ ID NO: 4617118 - DNA, 25 bp, Homo sapien
tgatgggaataaaggattgctcccc

SEQ ID NO: 4617119 - DNA, 25 bp, Homo sapien
ggcaatgatgggaataaaggattgc

SEQ ID NO: 4617120 - DNA, 25 bp, Homo sapien
aatgatgggaataaaggattgctcc

SEQ ID NO: 4617121 - DNA, 25 bp, Homo sapien
catggagataactgattttatacta

SEQ ID NO: 4617122 - DNA, 25 bp, Homo sapien
tgttgttaacttggatcagtttttg

SEQ ID NO: 4617123 - DNA, 25 bp, Homo sapien
taacttggatcagtttttgtgatct

SEQ ID NO: 4617124 - DNA, 25 bp, Homo sapien
tgtgatcttggtattaagtgagaca

SEQ ID NO: 4617125 - DNA, 25 bp, Homo sapien
cagcatcttgctgtatacaatctga

SEQ ID NO: 4617126 - DNA, 25 bp, Homo sapien
tgactccctggatcacacagacctg

SEQ ID NO: 4617127 - DNA, 25 bp, Homo sapien
aagaattctcttactagcagcatct

SEQ ID NO: 4617128 - DNA, 25 bp, Homo sapien
caatctgaatgtggacgactcattt

SEQ ID NO: 4617129 - DNA, 25 bp, Homo sapien
aagtgggttacacaaatctttggtg

SEQ ID NO: 4617130 - DNA, 25 bp, Homo sapien
tctacaccatggaagtgggttacac

SEQ ID NO: 4617131 - DNA, 25 bp, Homo sapien
ggttacacaaatctttggtgggcaa

SEQ ID NO: 4617132 - DNA, 25 bp, Homo sapien
gtcactgacaactctacaccatgga

SEQ ID NO: 4617133 - DNA, 25 bp, Homo sapien
catatttgcaataagtaaccaggag

SEQ ID NO: 4617134 - DNA, 25 bp, Homo sapien
ataagtaaccaggagaaggctgctc

SEQ ID NO: 4617135 - DNA, 25 bp, Homo sapien
gtcccagggccgtcccgcatatttg

SEQ ID NO: 4617136 - DNA, 25 bp, Homo sapien
ctattcatccaaacggcagggcatc

SEQ ID NO: 4617137 - DNA, 25 bp, Homo sapien
aagctctgttttctcaagcatactc

SEQ ID NO: 4617138 - DNA, 25 bp, Homo sapien
cagccaaaacgaggttgttcttagc

SEQ ID NO: 4617139 - DNA, 25 bp, Homo sapien
gttttctcaagcatactcccaaata

SEQ ID NO: 4617140 - DNA, 25 bp, Homo sapien
tgagtcagccaaaacgaggttgttc

SEQ ID NO: 4617141 - DNA, 25 bp, Homo sapien
ctctcatagggctgccctcctttag

SEQ ID NO: 4617142 - DNA, 25 bp, Homo sapien
ttactctttcctgcagataatggcc

SEQ ID NO: 4617143 - DNA, 25 bp, Homo sapien
atagggctgccctcctttagatgtt

SEQ ID NO: 4617144 - DNA, 25 bp, Homo sapien
gatgtttactctttcctgcagataa

SEQ ID NO: 4617145 - DNA, 25 bp, Homo sapien
tccagcctcacagcgtttggcttct

SEQ ID NO: 4617146 - DNA, 25 bp, Homo sapien
cacgtccagactcaccttgttcagg

SEQ ID NO: 4617147 - DNA, 25 bp, Homo sapien
tacttgatgtagaaccttgtggtca

SEQ ID NO: 4617148 - DNA, 25 bp, Homo sapien
ggagaaccttgtctaatctcataga

SEQ ID NO: 4617149 - DNA, 25 bp, Homo sapien
tagtaaatcttgaaaagattctcta

SEQ ID NO: 4617150 - DNA, 25 bp, Homo sapien
aaagattctctaaagtgtgaaagta

SEQ ID NO: 4617151 - DNA, 25 bp, Homo sapien
taaatcttgaaaagattctctaaag

SEQ ID NO: 4617152 - DNA, 25 bp, Homo sapien
ttgaaaagattctctaaagtgtgaa

SEQ ID NO: 4617153 - DNA, 25 bp, Homo sapien
gatgcaaatgctttgtccgcagtca

SEQ ID NO: 4617154 - DNA, 25 bp, Homo sapien
tttcagtggagtcacctgaaacttc

SEQ ID NO: 4617155 - DNA, 25 bp, Homo sapien
tagccaggtctcaatgataaagtga

SEQ ID NO: 4617156 - DNA, 25 bp, Homo sapien
ccatttcttagccaggtctcaatga

SEQ ID NO: 4617157 - DNA, 25 bp, Homo sapien
agggattaaggcaccatcgtataac

SEQ ID NO: 4617158 - DNA, 25 bp, Homo sapien
cacgtcttcaggactggccgaagta

SEQ ID NO: 4617159 - DNA, 25 bp, Homo sapien
aagaaggaccaattgagagatgggt

SEQ ID NO: 4617160 - DNA, 25 bp, Homo sapien
ggccgaagtatagaaaatgcggaga

SEQ ID NO: 4617161 - DNA, 25 bp, Homo sapien
gccactccttctccgttgggtaaga

SEQ ID NO: 4617162 - DNA, 25 bp, Homo sapien
ccaaagagtgtgctctgactcatca

SEQ ID NO: 4617163 - DNA, 25 bp, Homo sapien
ggtagtcacttgttccataagcaaa

SEQ ID NO: 4617164 - DNA, 25 bp, Homo sapien
tgactcatcagaacagccactcctt

SEQ ID NO: 4617165 - DNA, 25 bp, Homo sapien
ccagttacatataggtggaggcaca

SEQ ID NO: 4617166 - DNA, 25 bp, Homo sapien
acactgcccaagtcagctgacaaat

SEQ ID NO: 4617167 - DNA, 25 bp, Homo sapien
actgcccaagtcagctgacaaatgg

SEQ ID NO: 4617168 - DNA, 25 bp, Homo sapien
cactgcccaagtcagctgacaaatg

SEQ ID NO: 4617169 - DNA, 25 bp, Homo sapien
tctcttttgagcgagagtcaggcga

SEQ ID NO: 4617170 - DNA, 25 bp, Homo sapien
gctccttgggaccatggtggcatat

SEQ ID NO: 4617171 - DNA, 25 bp, Homo sapien
agggctgagcaagacctgaatgggc

SEQ ID NO: 4617172 - DNA, 25 bp, Homo sapien
tggcatatgtggaaagggcacctct

SEQ ID NO: 4617173 - DNA, 25 bp, Homo sapien
aaatcaaccagccctgtaaagggat

SEQ ID NO: 4617174 - DNA, 25 bp, Homo sapien
tcaaccagccctgtaaagggatgac

SEQ ID NO: 4617175 - DNA, 25 bp, Homo sapien
aatcaaccagccctgtaaagggatg

SEQ ID NO: 4617176 - DNA, 25 bp, Homo sapien
atcaaccagccctgtaaagggatga

SEQ ID NO: 4617177 - DNA, 25 bp, Homo sapien
ccatcgtaattacaagtactgtaaa

SEQ ID NO: 4617178 - DNA, 25 bp, Homo sapien
ggaggacagcgttcatttcctgtgg

SEQ ID NO: 4617179 - DNA, 25 bp, Homo sapien
tccgcttaagtagcctcgctgagga

SEQ ID NO: 4617180 - DNA, 25 bp, Homo sapien
taggtgccgaaaaccatcgtaatta

SEQ ID NO: 4617181 - DNA, 25 bp, Homo sapien
ttctgcaatgggcaagctggagacc

SEQ ID NO: 4617182 - DNA, 25 bp, Homo sapien
tttctgcaatgggcaagctggagac

SEQ ID NO: 4617183 - DNA, 25 bp, Homo sapien
tctgcaatgggcaagctggagacct

SEQ ID NO: 4617184 - DNA, 25 bp, Homo sapien
ttcatcagccaagatagggaggtgt

SEQ ID NO: 4617185 - DNA, 25 bp, Homo sapien
aatctggaagtttgtctaattggac

SEQ ID NO: 4617186 - DNA, 25 bp, Homo sapien
aactccaaatggctgcggcatgttt

SEQ ID NO: 4617187 - DNA, 25 bp, Homo sapien
ggtgttgatggcttcccttttatgt

SEQ ID NO: 4617188 - DNA, 25 bp, Homo sapien
aagaccatcctaccattataatcag

SEQ ID NO: 4617189 - DNA, 25 bp, Homo sapien
ctttgcatgctaggaaagaccatcc

SEQ ID NO: 4617190 - DNA, 25 bp, Homo sapien
tccctcctagtatcaaagaagccag

SEQ ID NO: 4617191 - DNA, 25 bp, Homo sapien
gaatatgcctaaattactctacagg

SEQ ID NO: 4617192 - DNA, 25 bp, Homo sapien
gaatctaactgatacaaggaatgcc

SEQ ID NO: 4617193 - DNA, 25 bp, Homo sapien
cgtgaaactgttccctggctaaaag

SEQ ID NO: 4617194 - DNA, 25 bp, Homo sapien
tcgccacagtaatgattccaggata

SEQ ID NO: 4617195 - DNA, 25 bp, Homo sapien
tgatgataccttttagcccctggat

SEQ ID NO: 4617196 - DNA, 25 bp, Homo sapien
gaatcatattggcactctgttttgg

SEQ ID NO: 4617197 - DNA, 25 bp, Homo sapien
cagggaagccgatgctttattcttc

SEQ ID NO: 4617198 - DNA, 25 bp, Homo sapien
tgctaagaaccttggaatcatattg

SEQ ID NO: 4617199 - DNA, 25 bp, Homo sapien
gtaatatacagtgtgctaagaacct

SEQ ID NO: 4617200 - DNA, 25 bp, Homo sapien
ccccagaaggtccccatatcgatgt

SEQ ID NO: 4617201 - DNA, 25 bp, Homo sapien
ccccatatcgatgtccaacttagtg

SEQ ID NO: 4617202 - DNA, 25 bp, Homo sapien
caacttagtgcattcacccaatcag

SEQ ID NO: 4617203 - DNA, 25 bp, Homo sapien
ccaggctggcatgctttagctattc

SEQ ID NO: 4617204 - DNA, 25 bp, Homo sapien
tcagctgctaacactgttccccaag

SEQ ID NO: 4617205 - DNA, 25 bp, Homo sapien
gtttgtggtaaattcccagctccag

SEQ ID NO: 4617206 - DNA, 25 bp, Homo sapien
cattctgatagtatctgggagtcgc

SEQ ID NO: 4617207 - DNA, 25 bp, Homo sapien
gagaagcagcttgtttctgcagttt

SEQ ID NO: 4617208 - DNA, 25 bp, Homo sapien
tctaagtagagcagtcgttcattca

SEQ ID NO: 4617209 - DNA, 25 bp, Homo sapien
gacactgttggtgtgtaactttaca

SEQ ID NO: 4617210 - DNA, 25 bp, Homo sapien
aatacaggtaaggatatggtcctac

SEQ ID NO: 4617211 - DNA, 25 bp, Homo sapien
accgcgcctggtcagatatttatat

SEQ ID NO: 4617212 - DNA, 25 bp, Homo sapien
ggtcctacaattcggattctgaaaa

SEQ ID NO: 4617213 - DNA, 25 bp, Homo sapien
cagcatggagagagataccgacata

SEQ ID NO: 4617214 - DNA, 25 bp, Homo sapien
gaaggcagttgagagactacagcac

SEQ ID NO: 4617215 - DNA, 25 bp, Homo sapien
gaatttggacaactactcacacttg

SEQ ID NO: 4617216 - DNA, 25 bp, Homo sapien
cacttgggtggagcatagaaatata

SEQ ID NO: 4617217 - DNA, 25 bp, Homo sapien
taggtattgtgaaggttaatactga

SEQ ID NO: 4617218 - DNA, 25 bp, Homo sapien
caatgttgaaattgtggttaaaata

SEQ ID NO: 4617219 - DNA, 25 bp, Homo sapien
cccttactctgggtgggcactacct

SEQ ID NO: 4617220 - DNA, 25 bp, Homo sapien
cagcgtgaccagaatataaagcagg

SEQ ID NO: 4617221 - DNA, 25 bp, Homo sapien
tgaacagtttgggtccttggagcag

SEQ ID NO: 4617222 - DNA, 25 bp, Homo sapien
cagaaagggttccagaatacttggg

SEQ ID NO: 4617223 - DNA, 25 bp, Homo sapien
tgagagcagaagtagagagatgacc

SEQ ID NO: 4617224 - DNA, 25 bp, Homo sapien
gatatcagaggaagtgtagcccaca

SEQ ID NO: 4617225 - DNA, 25 bp, Homo sapien
gaaagccttgtgctgatctgggact

SEQ ID NO: 4617226 - DNA, 25 bp, Homo sapien
gaggatcaaggaatacgttttacac

SEQ ID NO: 4617227 - DNA, 25 bp, Homo sapien
ggcaaaactgctttagtacagctga

SEQ ID NO: 4617228 - DNA, 25 bp, Homo sapien
gaatgatgatcctttgtacaccctt

SEQ ID NO: 4617229 - DNA, 25 bp, Homo sapien
tgctaacgggtcaagttccctgttg

SEQ ID NO: 4617230 - DNA, 25 bp, Homo sapien
ggctgctaacgggtcaagttccctg

SEQ ID NO: 4617231 - DNA, 25 bp, Homo sapien
tgcggctgctaacgggtcaagttcc

SEQ ID NO: 4617232 - DNA, 25 bp, Homo sapien
gctgcggctgctaacgggtcaagtt

SEQ ID NO: 4617233 - DNA, 25 bp, Homo sapien
gattttatcactttcgtccgcgacc

SEQ ID NO: 4617234 - DNA, 25 bp, Homo sapien
aaaacccgaggcctcgctgcgcatt

SEQ ID NO: 4617235 - DNA, 25 bp, Homo sapien
gtgagggaggcgaacgcgccgccat

SEQ ID NO: 4617236 - DNA, 25 bp, Homo sapien
gcattgcgtgtacttcagctccccg

SEQ ID NO: 4617237 - DNA, 25 bp, Homo sapien
gaggggagcatgagccggagctgcc

SEQ ID NO: 4617238 - DNA, 25 bp, Homo sapien
gagcatgagccggagctgccccccc

SEQ ID NO: 4617239 - DNA, 25 bp, Homo sapien
ctgaggaggggagcatgagccggag

SEQ ID NO: 4617240 - DNA, 25 bp, Homo sapien
atgagccggagctgcccccccaggc

SEQ ID NO: 4617241 - DNA, 25 bp, Homo sapien
agcagctgcgtccgggtcaccatcg

SEQ ID NO: 4617242 - DNA, 25 bp, Homo sapien
tctagccgtctggaccccatgggcg

SEQ ID NO: 4617243 - DNA, 25 bp, Homo sapien
cctctaccgagatgccctctagccg

SEQ ID NO: 4617244 - DNA, 25 bp, Homo sapien
caactcctcctttaggctgctcagc

SEQ ID NO: 4617245 - DNA, 25 bp, Homo sapien
cgcgagcgaagcagggtgtgcatct

SEQ ID NO: 4617246 - DNA, 25 bp, Homo sapien
gagaggatgcgactgcgagtatcca

SEQ ID NO: 4617247 - DNA, 25 bp, Homo sapien
cctgtctggccgcagttcggaaagg

SEQ ID NO: 4617248 - DNA, 25 bp, Homo sapien
gagtatccaagtgaccaaaaccaaa

SEQ ID NO: 4617249 - DNA, 25 bp, Homo sapien
accaaactgaccacttgtgtgagat

SEQ ID NO: 4617250 - DNA, 25 bp, Homo sapien
ttccacaaagaccatacaaattctt

SEQ ID NO: 4617251 - DNA, 25 bp, Homo sapien
tttgtaacctggagacgtttccaca

SEQ ID NO: 4617252 - DNA, 25 bp, Homo sapien
ctgaccacttgtgtgagatctgggt

SEQ ID NO: 4617253 - DNA, 25 bp, Homo sapien
caggatgaaatttgtgtctaaggca

SEQ ID NO: 4617254 - DNA, 25 bp, Homo sapien
taggtggattacaagctgcagtacc

SEQ ID NO: 4617255 - DNA, 25 bp, Homo sapien
gatactggagtttggcacacatttg

SEQ ID NO: 4617256 - DNA, 25 bp, Homo sapien
acagcacattgttggataagtctac

SEQ ID NO: 4617257 - DNA, 25 bp, Homo sapien
tgagaactactgctaccaagtcttc

SEQ ID NO: 4617258 - DNA, 25 bp, Homo sapien
ttaggttctatcaggccttaacagc

SEQ ID NO: 4617259 - DNA, 25 bp, Homo sapien
caatatggcatcacatttggaatcc

SEQ ID NO: 4617260 - DNA, 25 bp, Homo sapien
cgttttggtggtacacatcttccgg

SEQ ID NO: 4617261 - DNA, 25 bp, Homo sapien
tctctcatcataccagaagtgacgg

SEQ ID NO: 4617262 - DNA, 25 bp, Homo sapien
gactgctttatactgccccagaagg

SEQ ID NO: 4617263 - DNA, 25 bp, Homo sapien
gaggacaatggagtacctacacact

SEQ ID NO: 4617264 - DNA, 25 bp, Homo sapien
tgatagcgcttggatctaaacacat

SEQ ID NO: 4617265 - DNA, 25 bp, Homo sapien
ggttcaagcatatgccaaatctctg

SEQ ID NO: 4617266 - DNA, 25 bp, Homo sapien
atggagaacaaataagcagctgcca

SEQ ID NO: 4617267 - DNA, 25 bp, Homo sapien
ttacaaacaggctagggtgtggagc

SEQ ID NO: 4617268 - DNA, 25 bp, Homo sapien
tcgctgaccctaaaatcaattgaaa

SEQ ID NO: 4617269 - DNA, 25 bp, Homo sapien
ttgtgctccgatatgcagatatgca

SEQ ID NO: 4617270 - DNA, 25 bp, Homo sapien
aggccactgttcactcaggcttgac

SEQ ID NO: 4617271 - DNA, 25 bp, Homo sapien
ccccatggaatgttgaattacgttc

SEQ ID NO: 4617272 - DNA, 25 bp, Homo sapien
catccagttggtacaacaccagctg

SEQ ID NO: 4617273 - DNA, 25 bp, Homo sapien
tatgcagaagcacaaccaggctcat

SEQ ID NO: 4617274 - DNA, 25 bp, Homo sapien
ccagtatgcagaagcacaaccaggc

SEQ ID NO: 4617275 - DNA, 25 bp, Homo sapien
cagtatgcagaagcacaaccaggct

SEQ ID NO: 4617276 - DNA, 25 bp, Homo sapien
gtatgcagaagcacaaccaggctca

SEQ ID NO: 4617277 - DNA, 25 bp, Homo sapien
gaacttttctgtctttagcttcaga

SEQ ID NO: 4617278 - DNA, 25 bp, Homo sapien
ttttggcatccttgacttgcagaat

SEQ ID NO: 4617279 - DNA, 25 bp, Homo sapien
tgacttgcagaatttctagaacttt

SEQ ID NO: 4617280 - DNA, 25 bp, Homo sapien
aaattcttgtattttggcatccttg

SEQ ID NO: 4617281 - DNA, 25 bp, Homo sapien
tctactgcaattttccgttttacaa

SEQ ID NO: 4617282 - DNA, 25 bp, Homo sapien
tgcaattttccgttttacaaggtca

SEQ ID NO: 4617283 - DNA, 25 bp, Homo sapien
ttcttcatctactgcaattttccgt

SEQ ID NO: 4617284 - DNA, 25 bp, Homo sapien
tcatctactgcaattttccgtttta

SEQ ID NO: 4617285 - DNA, 25 bp, Homo sapien
tccaggtcatttagcaggtcagtgc

SEQ ID NO: 4617286 - DNA, 25 bp, Homo sapien
tgcagcgggtacttaatttcttgtt

SEQ ID NO: 4617287 - DNA, 25 bp, Homo sapien
tataactagtctgttttgctcttct

SEQ ID NO: 4617288 - DNA, 25 bp, Homo sapien
tctttgttctgtacacactccttag

SEQ ID NO: 4617289 - DNA, 25 bp, Homo sapien
gcaccaccatagaaccacgtatttg

SEQ ID NO: 4617290 - DNA, 25 bp, Homo sapien
aaaagaggagtatggattccattcc

SEQ ID NO: 4617291 - DNA, 25 bp, Homo sapien
tttaggataaccatttgaagtcagt

SEQ ID NO: 4617292 - DNA, 25 bp, Homo sapien
gctagtccccactggtggatatgaa

SEQ ID NO: 4617293 - DNA, 25 bp, Homo sapien
tactagtactaaaatctgtgtctgc

SEQ ID NO: 4617294 - DNA, 25 bp, Homo sapien
ctagtactaaaatctgtgtctgccc

SEQ ID NO: 4617295 - DNA, 25 bp, Homo sapien
gagaccaccatatttactagtacta

SEQ ID NO: 4617296 - DNA, 25 bp, Homo sapien
catatacatggagagaccaccatat

SEQ ID NO: 4617297 - DNA, 25 bp, Homo sapien
aaatactgaatacaatgtaaacagt

SEQ ID NO: 4617298 - DNA, 25 bp, Homo sapien
tactgaatacaatgtaaacagttgt

SEQ ID NO: 4617299 - DNA, 25 bp, Homo sapien
gaatacaatgtaaacagttgttata

SEQ ID NO: 4617300 - DNA, 25 bp, Homo sapien
tgaatacaatgtaaacagttgttat

SEQ ID NO: 4617301 - DNA, 25 bp, Homo sapien
caaataccctacacacgttcccata

SEQ ID NO: 4617302 - DNA, 25 bp, Homo sapien
ataccctacacacgttcccatatac

SEQ ID NO: 4617303 - DNA, 25 bp, Homo sapien
aaataccctacacacgttcccatat

SEQ ID NO: 4617304 - DNA, 25 bp, Homo sapien
aataccctacacacgttcccatata

SEQ ID NO: 4617305 - DNA, 25 bp, Homo sapien
taatctgcaacaggtttatacaccg

SEQ ID NO: 4617306 - DNA, 25 bp, Homo sapien
ccccatgattgtgcactaatagact

SEQ ID NO: 4617307 - DNA, 25 bp, Homo sapien
tcagttctctcaatggctcagtcac

SEQ ID NO: 4617308 - DNA, 25 bp, Homo sapien
tgctgcttccgtgggtattgagtaa

SEQ ID NO: 4617309 - DNA, 25 bp, Homo sapien
ataaccagctaacatcataatgaca

SEQ ID NO: 4617310 - DNA, 25 bp, Homo sapien
taaatgtaaatgggcaacatgctcc

SEQ ID NO: 4617311 - DNA, 25 bp, Homo sapien
gaaactgcatcaactaacgagcaaa

SEQ ID NO: 4617312 - DNA, 25 bp, Homo sapien
aatgtaaagaccatcaaggatagga

SEQ ID NO: 4617313 - DNA, 25 bp, Homo sapien
tctgtttattactcaactgtaatga

SEQ ID NO: 4617314 - DNA, 25 bp, Homo sapien
tccttctggataagttcagtctgtt

SEQ ID NO: 4617315 - DNA, 25 bp, Homo sapien
atccttctggataagttcagtctgt

SEQ ID NO: 4617316 - DNA, 25 bp, Homo sapien
tattactcaactgtaatgatagagc

SEQ ID NO: 4617317 - DNA, 25 bp, Homo sapien
ttgctgggctgtatgtgtactgttc

SEQ ID NO: 4617318 - DNA, 25 bp, Homo sapien
tgggctgtatgtgtactgttctgtt

SEQ ID NO: 4617319 - DNA, 25 bp, Homo sapien
gctgggctgtatgtgtactgttctg

SEQ ID NO: 4617320 - DNA, 25 bp, Homo sapien
ctgtatgtgtactgttctgtttgta

SEQ ID NO: 4617321 - DNA, 25 bp, Homo sapien
gaacatcttcctgatttctcagtac

SEQ ID NO: 4617322 - DNA, 25 bp, Homo sapien
tcagctgtgtgaacatcttcctgat

SEQ ID NO: 4617323 - DNA, 25 bp, Homo sapien
tgtgaacatcttcctgatttctcag

SEQ ID NO: 4617324 - DNA, 25 bp, Homo sapien
cagctgtgtgaacatcttcctgatt

SEQ ID NO: 4617325 - DNA, 25 bp, Homo sapien
cagttagcacacctaaatacttggg

SEQ ID NO: 4617326 - DNA, 25 bp, Homo sapien
aatttcttgtaatagcaggccgagg

SEQ ID NO: 4617327 - DNA, 25 bp, Homo sapien
gattcagctctaattaccataaaga

SEQ ID NO: 4617328 - DNA, 25 bp, Homo sapien
tactcctagtatgtttcacagaagc

SEQ ID NO: 4617329 - DNA, 25 bp, Homo sapien
tagagtcccacaggttgtagtaaga

SEQ ID NO: 4617330 - DNA, 25 bp, Homo sapien
tatccttagtcttggaacaggcccc

SEQ ID NO: 4617331 - DNA, 25 bp, Homo sapien
ggtatgacaccatcaaggagagctt

SEQ ID NO: 4617332 - DNA, 25 bp, Homo sapien
tagagtcggaacatgtagagtccca

SEQ ID NO: 4617333 - DNA, 25 bp, Homo sapien
taactgctatactctggtcaccaaa

SEQ ID NO: 4617334 - DNA, 25 bp, Homo sapien
gaaaccaaatggatacaatcaggag

SEQ ID NO: 4617335 - DNA, 25 bp, Homo sapien
taaagtatgaacaataacacacctg

SEQ ID NO: 4617336 - DNA, 25 bp, Homo sapien
caatggccagagaaaaatgatggaa

SEQ ID NO: 4617337 - DNA, 25 bp, Homo sapien
taccacctgggacaactgttttcat

SEQ ID NO: 4617338 - DNA, 25 bp, Homo sapien
ctaccacctgggacaactgttttca

SEQ ID NO: 4617339 - DNA, 25 bp, Homo sapien
tctgtgctcaaaacttttttcagtt

SEQ ID NO: 4617340 - DNA, 25 bp, Homo sapien
ctctgtgctcaaaacttttttcagt

SEQ ID NO: 4617341 - DNA, 25 bp, Homo sapien
tgtctcccctcctcaattcccacat

SEQ ID NO: 4617342 - DNA, 25 bp, Homo sapien
tcacctttgtctcccctcctcaatt

SEQ ID NO: 4617343 - DNA, 25 bp, Homo sapien
caagagctaacctggctagggaaag

SEQ ID NO: 4617344 - DNA, 25 bp, Homo sapien
caatgaagagttcagcgtgcctact

SEQ ID NO: 4617345 - DNA, 25 bp, Homo sapien
taaccactttctaatctcgggtgca

SEQ ID NO: 4617346 - DNA, 25 bp, Homo sapien
ggaacctgacagcttaaagggacaa

SEQ ID NO: 4617347 - DNA, 25 bp, Homo sapien
tccacagctgataccatcaaatatt

SEQ ID NO: 4617348 - DNA, 25 bp, Homo sapien
tgccaaagtctaggcaatcttttaa

SEQ ID NO: 4617349 - DNA, 25 bp, Homo sapien
aataatccacttcactttattgcca

SEQ ID NO: 4617350 - DNA, 25 bp, Homo sapien
aattatctatcgatattattgtgga

SEQ ID NO: 4617351 - DNA, 25 bp, Homo sapien
agaaagtattgcctatatgatttat

SEQ ID NO: 4617352 - DNA, 25 bp, Homo sapien
agcttcatttgattttgtggtttca

SEQ ID NO: 4617353 - DNA, 25 bp, Homo sapien
gattagtaacactttgccggagcat

SEQ ID NO: 4617354 - DNA, 25 bp, Homo sapien
ctccctgtgattcctgaagtttttc

SEQ ID NO: 4617355 - DNA, 25 bp, Homo sapien
tcctgaagattagtaacactttgcc

SEQ ID NO: 4617356 - DNA, 25 bp, Homo sapien
ctctttttgtaatagctgatcctga

SEQ ID NO: 4617357 - DNA, 25 bp, Homo sapien
cagagtccagagatggagatacaca

SEQ ID NO: 4617358 - DNA, 25 bp, Homo sapien
ggtacgtggagctcaatcttaagaa

SEQ ID NO: 4617359 - DNA, 25 bp, Homo sapien
cttaagactgtcaatcactggagaa

SEQ ID NO: 4617360 - DNA, 25 bp, Homo sapien
ggaactgaatctacaaggtctagaa

SEQ ID NO: 4617361 - DNA, 25 bp, Homo sapien
aattcagagtaactcctttgataaa

SEQ ID NO: 4617362 - DNA, 25 bp, Homo sapien
ttcagagtaactcctttgataaaag

SEQ ID NO: 4617363 - DNA, 25 bp, Homo sapien
cagagtaactcctttgataaaagcc

SEQ ID NO: 4617364 - DNA, 25 bp, Homo sapien
tgaattcagagtaactcctttgata

SEQ ID NO: 4617365 - DNA, 25 bp, Homo sapien
gggaacttatcttgcacacatagcc

SEQ ID NO: 4617366 - DNA, 25 bp, Homo sapien
ttctagccagcagaaagccgcgctg

SEQ ID NO: 4617367 - DNA, 25 bp, Homo sapien
tgcagcaagaacatatggaggagct

SEQ ID NO: 4617368 - DNA, 25 bp, Homo sapien
cacatagccatagtaagatgcagca

SEQ ID NO: 4617369 - DNA, 25 bp, Homo sapien
taagcttgataaggatgggcgatga

SEQ ID NO: 4617370 - DNA, 25 bp, Homo sapien
aaccattaacgtttctaagcttgat

SEQ ID NO: 4617371 - DNA, 25 bp, Homo sapien
tttctaagcttgataaggatgggcg

SEQ ID NO: 4617372 - DNA, 25 bp, Homo sapien
taacgtttctaagcttgataaggat

SEQ ID NO: 4617373 - DNA, 25 bp, Homo sapien
tcatgatgctctttcgggagaaacc

SEQ ID NO: 4617374 - DNA, 25 bp, Homo sapien
atgctctttcgggagaaacccttgt

SEQ ID NO: 4617375 - DNA, 25 bp, Homo sapien
cctgtaaatactcaatttcagactt

SEQ ID NO: 4617376 - DNA, 25 bp, Homo sapien
tttcatttgctatctttagtttctc

SEQ ID NO: 4617377 - DNA, 25 bp, Homo sapien
ctttagttgtagtgccttctctaag

SEQ ID NO: 4617378 - DNA, 25 bp, Homo sapien
ggacaaagaccttgaacgtttcaca

SEQ ID NO: 4617379 - DNA, 25 bp, Homo sapien
tctgtgaaagagctctttggggaca

SEQ ID NO: 4617380 - DNA, 25 bp, Homo sapien
aagaccttgaacgtttcacaggtgg

SEQ ID NO: 4617381 - DNA, 25 bp, Homo sapien
tgtaacatctgtagccgttccttgc

SEQ ID NO: 4617382 - DNA, 25 bp, Homo sapien
gtaacatctgtagccgttccttgcg

SEQ ID NO: 4617383 - DNA, 25 bp, Homo sapien
gtctgtaacatctgtagccgttcct

SEQ ID NO: 4617384 - DNA, 25 bp, Homo sapien
aacatctgtagccgttccttgcgtt

SEQ ID NO: 4617385 - DNA, 25 bp, Homo sapien
tgccagttcattccacacagcgtca

SEQ ID NO: 4617386 - DNA, 25 bp, Homo sapien
tccacacagcgtcagaatcttcttg

SEQ ID NO: 4617387 - DNA, 25 bp, Homo sapien
gaatcattagctcctggttttccct

SEQ ID NO: 4617388 - DNA, 25 bp, Homo sapien
cgtcagaatcttcttgtcgaagttg

SEQ ID NO: 4617389 - DNA, 25 bp, Homo sapien
tttcttaggcacagatacattcaag

SEQ ID NO: 4617390 - DNA, 25 bp, Homo sapien
tgggaggaaactcttgcaaatgtct

SEQ ID NO: 4617391 - DNA, 25 bp, Homo sapien
gaaatatagcctacggaatgggagg

SEQ ID NO: 4617392 - DNA, 25 bp, Homo sapien
tgaggataaatctctgactatggga

SEQ ID NO: 4617393 - DNA, 25 bp, Homo sapien
ccatcatggttacgcgcacctgtag

SEQ ID NO: 4617394 - DNA, 25 bp, Homo sapien
cagtaagctataatttcactgctgc

SEQ ID NO: 4617395 - DNA, 25 bp, Homo sapien
gcaggattaattcagcccaagactt

SEQ ID NO: 4617396 - DNA, 25 bp, Homo sapien
aacaataacaactagcccatcatgg

SEQ ID NO: 4617397 - DNA, 25 bp, Homo sapien
tcttgtattgctgccttatcaatag

SEQ ID NO: 4617398 - DNA, 25 bp, Homo sapien
ttcaattcttgtattgctgccttat

SEQ ID NO: 4617399 - DNA, 25 bp, Homo sapien
gtattgctgccttatcaatagatat

SEQ ID NO: 4617400 - DNA, 25 bp, Homo sapien
attcttgtattgctgccttatcaat

SEQ ID NO: 4617401 - DNA, 25 bp, Homo sapien
tggacttgacttgcagcctgaaaca

SEQ ID NO: 4617402 - DNA, 25 bp, Homo sapien
tgttcaagaatcagacacatggagc

SEQ ID NO: 4617403 - DNA, 25 bp, Homo sapien
gctttagccaaagaaatcacgggtg

SEQ ID NO: 4617404 - DNA, 25 bp, Homo sapien
taatgcaaggcctagtagactctgg

SEQ ID NO: 4617405 - DNA, 25 bp, Homo sapien
catcttcaccagatctaaagagctg

SEQ ID NO: 4617406 - DNA, 25 bp, Homo sapien
cttctctggagtactcctcttgacc

SEQ ID NO: 4617407 - DNA, 25 bp, Homo sapien
tcttcaccagatctaaagagctgtt

SEQ ID NO: 4617408 - DNA, 25 bp, Homo sapien
ctcatcatcttcaccagatctaaag

SEQ ID NO: 4617409 - DNA, 25 bp, Homo sapien
taccctaaggcaagaaatagtagca

SEQ ID NO: 4617410 - DNA, 25 bp, Homo sapien
gggacaggacacaattctgccaata

SEQ ID NO: 4617411 - DNA, 25 bp, Homo sapien
cctacaagtcaattcagagatgcaa

SEQ ID NO: 4617412 - DNA, 25 bp, Homo sapien
gacatcctagctggtagtgcataga

SEQ ID NO: 4617413 - DNA, 25 bp, Homo sapien
tctccattgggttgatcagctcttc

SEQ ID NO: 4617414 - DNA, 25 bp, Homo sapien
caaaagatttcagccgattttccaa

SEQ ID NO: 4617415 - DNA, 25 bp, Homo sapien
gtctcctcagggaagtgacttctgt

SEQ ID NO: 4617416 - DNA, 25 bp, Homo sapien
ccagctcactgatttttacttgaag

SEQ ID NO: 4617417 - DNA, 25 bp, Homo sapien
gtggccatctcggatttagctctgt

SEQ ID NO: 4617418 - DNA, 25 bp, Homo sapien
cagtgtggtgacgacccacagagca

SEQ ID NO: 4617419 - DNA, 25 bp, Homo sapien
gctgaggttctcaaacacattgctc

SEQ ID NO: 4617420 - DNA, 25 bp, Homo sapien
tacaatcatatcgtccagatctcac

SEQ ID NO: 4617421 - DNA, 25 bp, Homo sapien
tcccaaagtttgagaggtctgtgct

SEQ ID NO: 4617422 - DNA, 25 bp, Homo sapien
ttcccaaagtttgagaggtctgtgc

SEQ ID NO: 4617423 - DNA, 25 bp, Homo sapien
atcttccgtaggacttattttctgg

SEQ ID NO: 4617424 - DNA, 25 bp, Homo sapien
tcttttccatcttccgtaggactta

SEQ ID NO: 4617425 - DNA, 25 bp, Homo sapien
ctctagtaggaactgctgtatgtga

SEQ ID NO: 4617426 - DNA, 25 bp, Homo sapien
gctgtatgtgaactcttttgcatct

SEQ ID NO: 4617427 - DNA, 25 bp, Homo sapien
tatgtgaactcttttgcatcttgca

SEQ ID NO: 4617428 - DNA, 25 bp, Homo sapien
ctagtaggaactgctgtatgtgaac

SEQ ID NO: 4617429 - DNA, 25 bp, Homo sapien
tcttggcattctgaagtacactgtt

SEQ ID NO: 4617430 - DNA, 25 bp, Homo sapien
gatcggatacttgctgttgatggag

SEQ ID NO: 4617431 - DNA, 25 bp, Homo sapien
gcaaggatataatccgttctcgtaa

SEQ ID NO: 4617432 - DNA, 25 bp, Homo sapien
ctgcctgcttgtctgaaatcgttga

SEQ ID NO: 4617433 - DNA, 25 bp, Homo sapien
ttgaaatagctagaattgagggtaa

SEQ ID NO: 4617434 - DNA, 25 bp, Homo sapien
caccagggccagcaacttcaggaat

SEQ ID NO: 4617435 - DNA, 25 bp, Homo sapien
catgtgactggaggttcggtagcac

SEQ ID NO: 4617436 - DNA, 25 bp, Homo sapien
tagtcacctatagagagcagccagc

SEQ ID NO: 4617437 - DNA, 25 bp, Homo sapien
cagcagagcacggagcatgtgactg

SEQ ID NO: 4617438 - DNA, 25 bp, Homo sapien
tgaagatccacgaaataaggccctt

SEQ ID NO: 4617439 - DNA, 25 bp, Homo sapien
ggtgtgggcactatagaacatacaa

SEQ ID NO: 4617440 - DNA, 25 bp, Homo sapien
aaaggaggctagaccaccacttgga

SEQ ID NO: 4617441 - DNA, 25 bp, Homo sapien
gtttctgcagcaaaacgtgcttctg

SEQ ID NO: 4617442 - DNA, 25 bp, Homo sapien
aacatgatccgagtgacatttcaca

SEQ ID NO: 4617443 - DNA, 25 bp, Homo sapien
tctcagctctgatcctgggttttgc

SEQ ID NO: 4617444 - DNA, 25 bp, Homo sapien
gatcctgggttttgcacagtttgcc

SEQ ID NO: 4617445 - DNA, 25 bp, Homo sapien
tgcacagtttgccttgcgaacatga

SEQ ID NO: 4617446 - DNA, 25 bp, Homo sapien
caggacataggaataagacagtcac

SEQ ID NO: 4617447 - DNA, 25 bp, Homo sapien
gaagacaggacataggaataagaca

SEQ ID NO: 4617448 - DNA, 25 bp, Homo sapien
ctagaatagaagacaggacatagga

SEQ ID NO: 4617449 - DNA, 25 bp, Homo sapien
gaatagaagacaggacataggaata

SEQ ID NO: 4617450 - DNA, 25 bp, Homo sapien
gaggatctgtcaaaccatttcccaa

SEQ ID NO: 4617451 - DNA, 25 bp, Homo sapien
aactctatgtttcactttgcgagga

SEQ ID NO: 4617452 - DNA, 25 bp, Homo sapien
tggtaggttatttggtaactctatg

SEQ ID NO: 4617453 - DNA, 25 bp, Homo sapien
cccatagcattgtatgaaggttaca

SEQ ID NO: 4617454 - DNA, 25 bp, Homo sapien
acatggccaatacgcatggccagag

SEQ ID NO: 4617455 - DNA, 25 bp, Homo sapien
catggccaatacgcatggccagagc

SEQ ID NO: 4617456 - DNA, 25 bp, Homo sapien
cacatggccaatacgcatggccaga

SEQ ID NO: 4617457 - DNA, 25 bp, Homo sapien
gccaacacgtttaaagccaagccag

SEQ ID NO: 4617458 - DNA, 25 bp, Homo sapien
tgcacagcaccggagcagagtgcag

SEQ ID NO: 4617459 - DNA, 25 bp, Homo sapien
ccacctaggtggagaagcacgctgg

SEQ ID NO: 4617460 - DNA, 25 bp, Homo sapien
agcggaccgcaactgtgtacgccaa

SEQ ID NO: 4617461 - DNA, 25 bp, Homo sapien
tctaggttatgcagaaaaggcgact

SEQ ID NO: 4617462 - DNA, 25 bp, Homo sapien
tgaagttactgaacagttcccttgg

SEQ ID NO: 4617463 - DNA, 25 bp, Homo sapien
gaacaaaagacgcttcccatggcct

SEQ ID NO: 4617464 - DNA, 25 bp, Homo sapien
tcaaactccctgatcttctaggtta

SEQ ID NO: 4617465 - DNA, 25 bp, Homo sapien
tttctttccgaagcccagccaaatc

SEQ ID NO: 4617466 - DNA, 25 bp, Homo sapien
tcagatgaggactccaatttcttta

SEQ ID NO: 4617467 - DNA, 25 bp, Homo sapien
tttcagatgaggactccaatttctt

SEQ ID NO: 4617468 - DNA, 25 bp, Homo sapien
agatgaggactccaatttctttagt

SEQ ID NO: 4617469 - DNA, 25 bp, Homo sapien
ttatactgcaattgcttcatttcca

SEQ ID NO: 4617470 - DNA, 25 bp, Homo sapien
ctttagtttatactgcaattgcttc

SEQ ID NO: 4617471 - DNA, 25 bp, Homo sapien
tgaaggactaagtgatgtaacttgt

SEQ ID NO: 4617472 - DNA, 25 bp, Homo sapien
tgatgtaacttgtatccgtggaaat

SEQ ID NO: 4617473 - DNA, 25 bp, Homo sapien
tttttctctgtcaatcttttgtttg

SEQ ID NO: 4617474 - DNA, 25 bp, Homo sapien
tgtttgtaattttttgcttctgtgt

SEQ ID NO: 4617475 - DNA, 25 bp, Homo sapien
ttgtaattttttgcttctgtgtcat

SEQ ID NO: 4617476 - DNA, 25 bp, Homo sapien
tctctgtcaatcttttgtttgtaat

SEQ ID NO: 4617477 - DNA, 25 bp, Homo sapien
cttttgctaggagttcaaatttcaa

SEQ ID NO: 4617478 - DNA, 25 bp, Homo sapien
tcacatttgatgactgtttagtgag

SEQ ID NO: 4617479 - DNA, 25 bp, Homo sapien
tttgctaggagttcaaatttcaaag

SEQ ID NO: 4617480 - DNA, 25 bp, Homo sapien
ctgtttagtgagttcattagtagca

SEQ ID NO: 4617481 - DNA, 25 bp, Homo sapien
aattgcactgcataagatattgttc

SEQ ID NO: 4617482 - DNA, 25 bp, Homo sapien
cagaaaataccttaacagtggtgat

SEQ ID NO: 4617483 - DNA, 25 bp, Homo sapien
cacttgtaaaatctatagttgtgac

SEQ ID NO: 4617484 - DNA, 25 bp, Homo sapien
gatattgacactgtaaatcagtaaa

SEQ ID NO: 4617485 - DNA, 25 bp, Homo sapien
gtcgaaatttcaagtcctctatcaa

SEQ ID NO: 4617486 - DNA, 25 bp, Homo sapien
tatatccctctccattcgagatatc

SEQ ID NO: 4617487 - DNA, 25 bp, Homo sapien
atttactttctgtcgaaatttcaag

SEQ ID NO: 4617488 - DNA, 25 bp, Homo sapien
gttatatccctctccattcgagata

SEQ ID NO: 4617489 - DNA, 25 bp, Homo sapien
gatttctgatacatctgttcatact

SEQ ID NO: 4617490 - DNA, 25 bp, Homo sapien
ttgctttagtgaatcaattgatacc

SEQ ID NO: 4617491 - DNA, 25 bp, Homo sapien
cttttacagcaacgttaagtctttg

SEQ ID NO: 4617492 - DNA, 25 bp, Homo sapien
ggaacattcttcagttaatgtcttt

SEQ ID NO: 4617493 - DNA, 25 bp, Homo sapien
cactttgcaatgctaattcttgaag

SEQ ID NO: 4617494 - DNA, 25 bp, Homo sapien
tggctaacagcaatgtcttctgtgc

SEQ ID NO: 4617495 - DNA, 25 bp, Homo sapien
tcacttattcttgatactaggagag

SEQ ID NO: 4617496 - DNA, 25 bp, Homo sapien
tgtgcaccttctaggacctgttcac

SEQ ID NO: 4617497 - DNA, 25 bp, Homo sapien
gctcttgtggtacaagctagtccca

SEQ ID NO: 4617498 - DNA, 25 bp, Homo sapien
gctagtcccaggataccatattttt

SEQ ID NO: 4617499 - DNA, 25 bp, Homo sapien
gattgatttcaagcaaccaacatga

SEQ ID NO: 4617500 - DNA, 25 bp, Homo sapien
ccatgaccggtcaatttctgtgaaa

SEQ ID NO: 4617501 - DNA, 25 bp, Homo sapien
cttatttgtcgccttaccacatgga

SEQ ID NO: 4617502 - DNA, 25 bp, Homo sapien
tatgggttgaggttttacaggcgtc

SEQ ID NO: 4617503 - DNA, 25 bp, Homo sapien
gaaatgttcaggatagaagctgcca

SEQ ID NO: 4617504 - DNA, 25 bp, Homo sapien
tggacatcattttgcaactctttgg

SEQ ID NO: 4617505 - DNA, 25 bp, Homo sapien
agaagtttctgaatgtacaacatcc

SEQ ID NO: 4617506 - DNA, 25 bp, Homo sapien
agtttctgaatgtacaacatccatt

SEQ ID NO: 4617507 - DNA, 25 bp, Homo sapien
aagtttctgaatgtacaacatccat

SEQ ID NO: 4617508 - DNA, 25 bp, Homo sapien
gaagtttctgaatgtacaacatcca

SEQ ID NO: 4617509 - DNA, 25 bp, Homo sapien
gagaatgcgggaagacacagtaata

SEQ ID NO: 4617510 - DNA, 25 bp, Homo sapien
gctgtctggctgtgaggaaaacatg

SEQ ID NO: 4617511 - DNA, 25 bp, Homo sapien
cagtaataaacagctgtctggctgt

SEQ ID NO: 4617512 - DNA, 25 bp, Homo sapien
aaatattgtagagaatgcgggaaga

SEQ ID NO: 4617513 - DNA, 25 bp, Homo sapien
cagcaaggctgtgagtagagaattt

SEQ ID NO: 4617514 - DNA, 25 bp, Homo sapien
tatatattagaggaggtaaaactac

SEQ ID NO: 4617515 - DNA, 25 bp, Homo sapien
tctagtgatacgaaagtaggcttac

SEQ ID NO: 4617516 - DNA, 25 bp, Homo sapien
ctgtaatcacattctagtgatacga

SEQ ID NO: 4617517 - DNA, 25 bp, Homo sapien
gaggcagaactgctcgagtctggca

SEQ ID NO: 4617518 - DNA, 25 bp, Homo sapien
gcagaactgctcgagtctggcaggc

SEQ ID NO: 4617519 - DNA, 25 bp, Homo sapien
ttttggtgagccacgattgcgccat

SEQ ID NO: 4617520 - DNA, 25 bp, Homo sapien
cagaactgctcgagtctggcaggcg

SEQ ID NO: 4617521 - DNA, 25 bp, Homo sapien
tataattctcgtccccaaaacttgc

SEQ ID NO: 4617522 - DNA, 25 bp, Homo sapien
taggctgtgattaggcttcttgtct

SEQ ID NO: 4617523 - DNA, 25 bp, Homo sapien
tccagaagcatctctaggctgtgat

SEQ ID NO: 4617524 - DNA, 25 bp, Homo sapien
aagttagccatagactttccttcaa

SEQ ID NO: 4617525 - DNA, 25 bp, Homo sapien
tgtcacgcagtactacacgcattcc

SEQ ID NO: 4617526 - DNA, 25 bp, Homo sapien
cacgcagtactacacgcattcctat

SEQ ID NO: 4617527 - DNA, 25 bp, Homo sapien
aatgatgtcacgcagtactacacgc

SEQ ID NO: 4617528 - DNA, 25 bp, Homo sapien
ttaaatgatgtcacgcagtactaca

SEQ ID NO: 4617529 - DNA, 25 bp, Homo sapien
aaaactctatattttcttcagttca

SEQ ID NO: 4617530 - DNA, 25 bp, Homo sapien
ttttcttcagttcaaaaacatacta

SEQ ID NO: 4617531 - DNA, 25 bp, Homo sapien
aacatactaaatattattaaaccat

SEQ ID NO: 4617532 - DNA, 25 bp, Homo sapien
tattaaaactctatattttcttcag

SEQ ID NO: 4617533 - DNA, 25 bp, Homo sapien
taccgtgtcaggattgcaatgcatg

SEQ ID NO: 4617534 - DNA, 25 bp, Homo sapien
caaaaagggtatggcaggaacacgg

SEQ ID NO: 4617535 - DNA, 25 bp, Homo sapien
ccagccatgaggaaagttgagtgca

SEQ ID NO: 4617536 - DNA, 25 bp, Homo sapien
caatttgtgtgtaccaagcctgctc

SEQ ID NO: 4617537 - DNA, 25 bp, Homo sapien
atcaaggtcatactagcagtctcat

SEQ ID NO: 4617538 - DNA, 25 bp, Homo sapien
tttattactcgtgctttcctgtgag

SEQ ID NO: 4617539 - DNA, 25 bp, Homo sapien
attctttgggtatacagtgtcatca

SEQ ID NO: 4617540 - DNA, 25 bp, Homo sapien
tgcttcgccatccaattcaataaca

SEQ ID NO: 4617541 - DNA, 25 bp, Homo sapien
ttttctggtctccaagggccatcca

SEQ ID NO: 4617542 - DNA, 25 bp, Homo sapien
tttcccacgttatgttgagagagag

SEQ ID NO: 4617543 - DNA, 25 bp, Homo sapien
tattgttgcagtcacaaagtaccac

SEQ ID NO: 4617544 - DNA, 25 bp, Homo sapien
tcaaggtgctgacaggactgagctt

SEQ ID NO: 4617545 - DNA, 25 bp, Homo sapien
tctggagaagagttatatatgtctg

SEQ ID NO: 4617546 - DNA, 25 bp, Homo sapien
gaggtgattgtccaggtaatagttc

SEQ ID NO: 4617547 - DNA, 25 bp, Homo sapien
tatatgtctgatccaattcccatca

SEQ ID NO: 4617548 - DNA, 25 bp, Homo sapien
ccttgtaaaacccatgataattgct

SEQ ID NO: 4617549 - DNA, 25 bp, Homo sapien
tctggtcgagtattttgtaggatgc

SEQ ID NO: 4617550 - DNA, 25 bp, Homo sapien
gtttctcagacgtttttgatgagca

SEQ ID NO: 4617551 - DNA, 25 bp, Homo sapien
gtctaatgtcctcttcataatcaag

SEQ ID NO: 4617552 - DNA, 25 bp, Homo sapien
gatgagcataacagttttgaggagc

SEQ ID NO: 4617553 - DNA, 25 bp, Homo sapien
ggtaaaatcacttttggatgctgtg

SEQ ID NO: 4617554 - DNA, 25 bp, Homo sapien
aatcacttttggatgctgtgcgaag

SEQ ID NO: 4617555 - DNA, 25 bp, Homo sapien
cacttttggatgctgtgcgaaggcc

SEQ ID NO: 4617556 - DNA, 25 bp, Homo sapien
cttttggatgctgtgcgaaggccat

SEQ ID NO: 4617557 - DNA, 25 bp, Homo sapien
cctgagcttgactgtcgactgcaat

SEQ ID NO: 4617558 - DNA, 25 bp, Homo sapien
gcaatattgtctggcctcacaaagc

SEQ ID NO: 4617559 - DNA, 25 bp, Homo sapien
ttccagcaacatcagaggacacctg

SEQ ID NO: 4617560 - DNA, 25 bp, Homo sapien
caggccactgggcttccagcaacat

SEQ ID NO: 4617561 - DNA, 25 bp, Homo sapien
cagtcttgagtaataggattctcca

SEQ ID NO: 4617562 - DNA, 25 bp, Homo sapien
gagtaataggattctccaaagaaac

SEQ ID NO: 4617563 - DNA, 25 bp, Homo sapien
taataggattctccaaagaaaccat

SEQ ID NO: 4617564 - DNA, 25 bp, Homo sapien
aaggcagtcttgagtaataggattc

SEQ ID NO: 4617565 - DNA, 25 bp, Homo sapien
caaggtcatagttttcaggcaggcc

SEQ ID NO: 4617566 - DNA, 25 bp, Homo sapien
cgaacctactaaaatggtaccagct

SEQ ID NO: 4617567 - DNA, 25 bp, Homo sapien
tgaggtgaaggatgactagttttga

SEQ ID NO: 4617568 - DNA, 25 bp, Homo sapien
tttgagtaaatgatgctccaaggtc

SEQ ID NO: 4617569 - DNA, 25 bp, Homo sapien
tgagtctttaagaacaccacctagg

SEQ ID NO: 4617570 - DNA, 25 bp, Homo sapien
ttccagttatctgagccggtgcccc

SEQ ID NO: 4617571 - DNA, 25 bp, Homo sapien
tagtcttgccaagagctgcttacgg

SEQ ID NO: 4617572 - DNA, 25 bp, Homo sapien
actggctgcgtatgagaaagcttcc

SEQ ID NO: 4617573 - DNA, 25 bp, Homo sapien
catcaaatattttcgctgcatctat

SEQ ID NO: 4617574 - DNA, 25 bp, Homo sapien
cctttattgtgtggttgagtgattt

SEQ ID NO: 4617575 - DNA, 25 bp, Homo sapien
tattaacatggtggaatttcatcaa

SEQ ID NO: 4617576 - DNA, 25 bp, Homo sapien
ctatctactactagtttgctaagag

SEQ ID NO: 4617577 - DNA, 25 bp, Homo sapien
gtctgattggttatcacaaagactc

SEQ ID NO: 4617578 - DNA, 25 bp, Homo sapien
ttcagatgttttatagtgataattt

SEQ ID NO: 4617579 - DNA, 25 bp, Homo sapien
cagatgttttatagtgataatttac

SEQ ID NO: 4617580 - DNA, 25 bp, Homo sapien
ctgattggttatcacaaagactctg

SEQ ID NO: 4617581 - DNA, 25 bp, Homo sapien
acctggaagtctcatgctgcttaac

SEQ ID NO: 4617582 - DNA, 25 bp, Homo sapien
aagtctcatgctgcttaacttcaaa

SEQ ID NO: 4617583 - DNA, 25 bp, Homo sapien
ccaccaacctggaagtctcatgctg

SEQ ID NO: 4617584 - DNA, 25 bp, Homo sapien
catccaccaacctggaagtctcatg

SEQ ID NO: 4617585 - DNA, 25 bp, Homo sapien
cacctgctacaaaagggtcctccat

SEQ ID NO: 4617586 - DNA, 25 bp, Homo sapien
ggcacagggtgaacacctgctacaa

SEQ ID NO: 4617587 - DNA, 25 bp, Homo sapien
tttttctgtctccgcaactcctgca

SEQ ID NO: 4617588 - DNA, 25 bp, Homo sapien
tgaacacctgctacaaaagggtcct

SEQ ID NO: 4617589 - DNA, 25 bp, Homo sapien
tgcagattggcagcccaggcacccg

SEQ ID NO: 4617590 - DNA, 25 bp, Homo sapien
gccctttgagcctggcgtctctgcg

SEQ ID NO: 4617591 - DNA, 25 bp, Homo sapien
tgagcctggcgtctctgcgccgcag

SEQ ID NO: 4617592 - DNA, 25 bp, Homo sapien
ggcggcgctgcctgcagacggccct

SEQ ID NO: 4617593 - DNA, 25 bp, Homo sapien
ccgctggcggatccctagtcagcgg

SEQ ID NO: 4617594 - DNA, 25 bp, Homo sapien
agcgggccgaggacgtcctcctgtc

SEQ ID NO: 4617595 - DNA, 25 bp, Homo sapien
gcggcacccgctggcggatccctag

SEQ ID NO: 4617596 - DNA, 25 bp, Homo sapien
gatccctagtcagcgggccgaggac

SEQ ID NO: 4617597 - DNA, 25 bp, Homo sapien
cggagcctagcgggacacgggctct

SEQ ID NO: 4617598 - DNA, 25 bp, Homo sapien
ggcgcggagcctagcgggacacggg

SEQ ID NO: 4617599 - DNA, 25 bp, Homo sapien
agcctagcgggacacgggctcttgc

SEQ ID NO: 4617600 - DNA, 25 bp, Homo sapien
gcgcggagcctagcgggacacgggc

SEQ ID NO: 4617601 - DNA, 25 bp, Homo sapien
ccctggccgcctctggtcgtgccgc

SEQ ID NO: 4617602 - DNA, 25 bp, Homo sapien
gggcggcgcgctcccctggccgcct

SEQ ID NO: 4617603 - DNA, 25 bp, Homo sapien
tggccgcctctggtcgtgccgccgc

SEQ ID NO: 4617604 - DNA, 25 bp, Homo sapien
gcggcgcgctcccctggccgcctct

SEQ ID NO: 4617605 - DNA, 25 bp, Homo sapien
ggtgcaggaggccgcgctggcggct

SEQ ID NO: 4617606 - DNA, 25 bp, Homo sapien
gtgcaggaggccgcgctggcggctg

SEQ ID NO: 4617607 - DNA, 25 bp, Homo sapien
ggaactgcttcttgaggccggccac

SEQ ID NO: 4617608 - DNA, 25 bp, Homo sapien
gcttcttgaggccggccaccgacat

SEQ ID NO: 4617609 - DNA, 25 bp, Homo sapien
ctttatggaactgcttcttgaggcc

SEQ ID NO: 4617610 - DNA, 25 bp, Homo sapien
agtggctttatggaactgcttcttg

SEQ ID NO: 4617611 - DNA, 25 bp, Homo sapien
aggcacctgcgcgccgcggcagcag

SEQ ID NO: 4617612 - DNA, 25 bp, Homo sapien
tgcgcgccgcggcagcagtgcagcc

SEQ ID NO: 4617613 - DNA, 25 bp, Homo sapien
acctgcgcgccgcggcagcagtgca

SEQ ID NO: 4617614 - DNA, 25 bp, Homo sapien
cgcgccgcggcagcagtgcagccgc

SEQ ID NO: 4617615 - DNA, 25 bp, Homo sapien
tgtagataacatcaggttcacggac

SEQ ID NO: 4617616 - DNA, 25 bp, Homo sapien
aggaagtaattctaggtctaaagct

SEQ ID NO: 4617617 - DNA, 25 bp, Homo sapien
ctctgtagataacatcaggttcacg

SEQ ID NO: 4617618 - DNA, 25 bp, Homo sapien
taattctaggtctaaagcttctctg

SEQ ID NO: 4617619 - DNA, 25 bp, Homo sapien
gaccgcatgccttccaaattatgtc

SEQ ID NO: 4617620 - DNA, 25 bp, Homo sapien
tgtctggcaccgtctaccagatgta

SEQ ID NO: 4617621 - DNA, 25 bp, Homo sapien
tggccaagctgctcaactgacacca

SEQ ID NO: 4617622 - DNA, 25 bp, Homo sapien
gatacaaaatcaggcctcactattc

SEQ ID NO: 4617623 - DNA, 25 bp, Homo sapien
gaagctgataaagtggtgattaatc

SEQ ID NO: 4617624 - DNA, 25 bp, Homo sapien
gtgattaatcaaataccaagtggaa

SEQ ID NO: 4617625 - DNA, 25 bp, Homo sapien
catggaaggacatttaacccacact

SEQ ID NO: 4617626 - DNA, 25 bp, Homo sapien
cttgaaaggcaagaaacgtatggca

SEQ ID NO: 4617627 - DNA, 25 bp, Homo sapien
gaccatccataaaggcatgcttgtg

SEQ ID NO: 4617628 - DNA, 25 bp, Homo sapien
caccaccgtcagcagtccagtggat

SEQ ID NO: 4617629 - DNA, 25 bp, Homo sapien
cagtggatcttgctagacgtgtcct

SEQ ID NO: 4617630 - DNA, 25 bp, Homo sapien
aggcatgcttgtgcccagcaatcca

SEQ ID NO: 4617631 - DNA, 25 bp, Homo sapien
ggccagcaagtcctgatgtctcctt

SEQ ID NO: 4617632 - DNA, 25 bp, Homo sapien
tctgttggcactgaagacagagccc

SEQ ID NO: 4617633 - DNA, 25 bp, Homo sapien
ggcaatgatcacctctaatctcctc

SEQ ID NO: 4617634 - DNA, 25 bp, Homo sapien
gacagagcccaaggcaatgatcacc

SEQ ID NO: 4617635 - DNA, 25 bp, Homo sapien
gctctgctgctaggcaaccttcccc

SEQ ID NO: 4617636 - DNA, 25 bp, Homo sapien
cacgggcttgccttctatgccagct

SEQ ID NO: 4617637 - DNA, 25 bp, Homo sapien
tttcccccatacagacaggtcacgg

SEQ ID NO: 4617638 - DNA, 25 bp, Homo sapien
cccatatgcacaactagtcccaata

SEQ ID NO: 4617639 - DNA, 25 bp, Homo sapien
ctcaggcacactcccggaagggctt

SEQ ID NO: 4617640 - DNA, 25 bp, Homo sapien
cagagctactaccacaaattcacca

SEQ ID NO: 4617641 - DNA, 25 bp, Homo sapien
tcaggcacactcccggaagggcttt

SEQ ID NO: 4617642 - DNA, 25 bp, Homo sapien
tcagcagttcaagcaagtttccaga

SEQ ID NO: 4617643 - DNA, 25 bp, Homo sapien
taaaggcacgcatagttttcagcag

SEQ ID NO: 4617644 - DNA, 25 bp, Homo sapien
tgtcagtcccacacaaaaagagtgt

SEQ ID NO: 4617645 - DNA, 25 bp, Homo sapien
ttctcggaagcaaggtaggcactgt

SEQ ID NO: 4617646 - DNA, 25 bp, Homo sapien
aacagtaaggcattccacacaaggt

SEQ ID NO: 4617647 - DNA, 25 bp, Homo sapien
agagcccaagagccaaaccaagatt

SEQ ID NO: 4617648 - DNA, 25 bp, Homo sapien
taagatgagcttagtcagccaggag

SEQ ID NO: 4617649 - DNA, 25 bp, Homo sapien
gaagaaagcatgtcccctcaagttg

SEQ ID NO: 4617650 - DNA, 25 bp, Homo sapien
taactgagtggacccgccaaagaag

SEQ ID NO: 4617651 - DNA, 25 bp, Homo sapien
tccgtgtgccatagtcaaagcaggg

SEQ ID NO: 4617652 - DNA, 25 bp, Homo sapien
aagtaatccaccttactgatcaagg

SEQ ID NO: 4617653 - DNA, 25 bp, Homo sapien
ggtcctgccattgagcacaaatttt

SEQ ID NO: 4617654 - DNA, 25 bp, Homo sapien
gatcaagggcatcattaataaaggt

SEQ ID NO: 4617655 - DNA, 25 bp, Homo sapien
tcatctactgtgtgatactcctgta

SEQ ID NO: 4617656 - DNA, 25 bp, Homo sapien
tgccacggcttctgcacttgtaaag

SEQ ID NO: 4617657 - DNA, 25 bp, Homo sapien
agaaggctataaggaaatacatcca

SEQ ID NO: 4617658 - DNA, 25 bp, Homo sapien
ggtagtcagccattcaacaatcagg

SEQ ID NO: 4617659 - DNA, 25 bp, Homo sapien
ttgagcaagttactatgccacggct

SEQ ID NO: 4617660 - DNA, 25 bp, Homo sapien
gtatccagtttatactcagtaacag

SEQ ID NO: 4617661 - DNA, 25 bp, Homo sapien
acaaccagagccgtatccagaagta

SEQ ID NO: 4617662 - DNA, 25 bp, Homo sapien
gccgtatccagaagtatccagttta

SEQ ID NO: 4617663 - DNA, 25 bp, Homo sapien
tatactcagtaacagtcacaagaat

SEQ ID NO: 4617664 - DNA, 25 bp, Homo sapien
acaggctccaaaagccacagatcat

SEQ ID NO: 4617665 - DNA, 25 bp, Homo sapien
gccacagatcatgtgtgtattgtgt

SEQ ID NO: 4617666 - DNA, 25 bp, Homo sapien
ttctgtaattcccagggccagaaga

SEQ ID NO: 4617667 - DNA, 25 bp, Homo sapien
tgtattgtgtggttctgtaattccc

SEQ ID NO: 4617668 - DNA, 25 bp, Homo sapien
tgatttggcaaagatccccgactca

SEQ ID NO: 4617669 - DNA, 25 bp, Homo sapien
taaggtaatggagaactaactacac

SEQ ID NO: 4617670 - DNA, 25 bp, Homo sapien
ccctgggcagtttaaagacagaata

SEQ ID NO: 4617671 - DNA, 25 bp, Homo sapien
gagtattcctctgcaataaccagaa

SEQ ID NO: 4617672 - DNA, 25 bp, Homo sapien
gaaagatgatcatctgactccagat

SEQ ID NO: 4617673 - DNA, 25 bp, Homo sapien
agctctctccgtgtcttgacacctt

SEQ ID NO: 4617674 - DNA, 25 bp, Homo sapien
caggagcagccaaagtatcagtttt

SEQ ID NO: 4617675 - DNA, 25 bp, Homo sapien
tgtcttgacaccttctagaagctag

SEQ ID NO: 4617676 - DNA, 25 bp, Homo sapien
acaaaacacagcacgtacacccctt

SEQ ID NO: 4617677 - DNA, 25 bp, Homo sapien
acacagcacgtacaccccttgccat

SEQ ID NO: 4617678 - DNA, 25 bp, Homo sapien
gaagagggagggacaaaacacagca

SEQ ID NO: 4617679 - DNA, 25 bp, Homo sapien
gggagggacaaaacacagcacgtac

SEQ ID NO: 4617680 - DNA, 25 bp, Homo sapien
ggttccagatgaaggcaagcatgca

SEQ ID NO: 4617681 - DNA, 25 bp, Homo sapien
gcatgcagggatgagtagggtaacc

SEQ ID NO: 4617682 - DNA, 25 bp, Homo sapien
caggttcagactacatggatcagac

SEQ ID NO: 4617683 - DNA, 25 bp, Homo sapien
tagggtaaccctcagagagcaacag

SEQ ID NO: 4617684 - DNA, 25 bp, Homo sapien
aacaataaatgtctaccggctcagc

SEQ ID NO: 4617685 - DNA, 25 bp, Homo sapien
cagtcagggtagaacgctgtaggca

SEQ ID NO: 4617686 - DNA, 25 bp, Homo sapien
caagttcagtactggaagaaaccct

SEQ ID NO: 4617687 - DNA, 25 bp, Homo sapien
ggctcagctacagaacatatgggca

SEQ ID NO: 4617688 - DNA, 25 bp, Homo sapien
aataatatcacacatctacaacagt

SEQ ID NO: 4617689 - DNA, 25 bp, Homo sapien
tatcacacatctacaacagtctgat

SEQ ID NO: 4617690 - DNA, 25 bp, Homo sapien
aatatcacacatctacaacagtctg

SEQ ID NO: 4617691 - DNA, 25 bp, Homo sapien
gagaaagccgaaactagatcccttc

SEQ ID NO: 4617692 - DNA, 25 bp, Homo sapien
gctttatattgctgttcccactgga

SEQ ID NO: 4617693 - DNA, 25 bp, Homo sapien
atgagaccttcagctttatattgct

SEQ ID NO: 4617694 - DNA, 25 bp, Homo sapien
agacagctggtaattggtagaaata

SEQ ID NO: 4617695 - DNA, 25 bp, Homo sapien
cagctggtaattggtagaaatagga

SEQ ID NO: 4617696 - DNA, 25 bp, Homo sapien
caagttgtcttttacaagagccaag

SEQ ID NO: 4617697 - DNA, 25 bp, Homo sapien
agttgtcttttacaagagccaagcc

SEQ ID NO: 4617698 - DNA, 25 bp, Homo sapien
aagttgtcttttacaagagccaagc

SEQ ID NO: 4617699 - DNA, 25 bp, Homo sapien
cattcatcaaattttggtggctcac

SEQ ID NO: 4617700 - DNA, 25 bp, Homo sapien
gcagcaaacgataattgtccacatt

SEQ ID NO: 4617701 - DNA, 25 bp, Homo sapien
actcaatccaatcaaaatgtttcct

SEQ ID NO: 4617702 - DNA, 25 bp, Homo sapien
tggaaagccactgtagtgaccactg

SEQ ID NO: 4617703 - DNA, 25 bp, Homo sapien
aaggcttcccatgtcttatgtgcca

SEQ ID NO: 4617704 - DNA, 25 bp, Homo sapien
tcccatgtcttatgtgccacaagtc

SEQ ID NO: 4617705 - DNA, 25 bp, Homo sapien
tataaggcttcccatgtcttatgtg

SEQ ID NO: 4617706 - DNA, 25 bp, Homo sapien
catgtcttatgtgccacaagtcgta

SEQ ID NO: 4617707 - DNA, 25 bp, Homo sapien
aagccaagcagtcagtttagccaag

SEQ ID NO: 4617708 - DNA, 25 bp, Homo sapien
gttccatagaaacccctggatgtgg

SEQ ID NO: 4617709 - DNA, 25 bp, Homo sapien
tggccatttcgatgttaattttctc

SEQ ID NO: 4617710 - DNA, 25 bp, Homo sapien
caatcacattggagtgggtgggtcc

SEQ ID NO: 4617711 - DNA, 25 bp, Homo sapien
ttgtttggcaagccagcttcttggc

SEQ ID NO: 4617712 - DNA, 25 bp, Homo sapien
cttgtttggcaagccagcttcttgg

SEQ ID NO: 4617713 - DNA, 25 bp, Homo sapien
tatctgtccttcactcccacttcct

SEQ ID NO: 4617714 - DNA, 25 bp, Homo sapien
cctctatctgtccttcactcccact

SEQ ID NO: 4617715 - DNA, 25 bp, Homo sapien
tctatctgtccttcactcccacttc

SEQ ID NO: 4617716 - DNA, 25 bp, Homo sapien
cccctctatctgtccttcactccca

SEQ ID NO: 4617717 - DNA, 25 bp, Homo sapien
tcagctcctccaaccttctcactca

SEQ ID NO: 4617718 - DNA, 25 bp, Homo sapien
agcttggttccttcagctcctccaa

SEQ ID NO: 4617719 - DNA, 25 bp, Homo sapien
gctcctccaaccttctcactcactt

SEQ ID NO: 4617720 - DNA, 25 bp, Homo sapien
tagcttggttccttcagctcctcca

SEQ ID NO: 4617721 - DNA, 25 bp, Homo sapien
tttccatctctttgaagtcatcatc

SEQ ID NO: 4617722 - DNA, 25 bp, Homo sapien
ctttccatctctttgaagtcatcat

SEQ ID NO: 4617723 - DNA, 25 bp, Homo sapien
cctttccatctctttgaagtcatca

SEQ ID NO: 4617724 - DNA, 25 bp, Homo sapien
caggcatggctgcattcttacagat

SEQ ID NO: 4617725 - DNA, 25 bp, Homo sapien
tgttatgaggagaaaagtagttccc

SEQ ID NO: 4617726 - DNA, 25 bp, Homo sapien
gttcccaaggccattaatcagaggc

SEQ ID NO: 4617727 - DNA, 25 bp, Homo sapien
gaagtcatctgccagtaggaggctg

SEQ ID NO: 4617728 - DNA, 25 bp, Homo sapien
ggattgggttgaaggtattcaattg

SEQ ID NO: 4617729 - DNA, 25 bp, Homo sapien
attgggttgaaggtattcaattgtt

SEQ ID NO: 4617730 - DNA, 25 bp, Homo sapien
ctggattgggttgaaggtattcaat

SEQ ID NO: 4617731 - DNA, 25 bp, Homo sapien
gattgggttgaaggtattcaattgt

SEQ ID NO: 4617732 - DNA, 25 bp, Homo sapien
tgtctactctcagggcaagaagctg

SEQ ID NO: 4617733 - DNA, 25 bp, Homo sapien
ctggtctgggctctatggccagtgt

SEQ ID NO: 4617734 - DNA, 25 bp, Homo sapien
gctctatggccagtgtctactctca

SEQ ID NO: 4617735 - DNA, 25 bp, Homo sapien
tatggccagtgtctactctcagggc

SEQ ID NO: 4617736 - DNA, 25 bp, Homo sapien
tccagtgttctctccgtcagtcagt

SEQ ID NO: 4617737 - DNA, 25 bp, Homo sapien
ggtctcagagcagcctacaaagtag

SEQ ID NO: 4617738 - DNA, 25 bp, Homo sapien
taagtgtaccttcagtacgctccag

SEQ ID NO: 4617739 - DNA, 25 bp, Homo sapien
caatgtgacactgcggaaatagggc

SEQ ID NO: 4617740 - DNA, 25 bp, Homo sapien
caaatttgagcatggcctctgccag

SEQ ID NO: 4617741 - DNA, 25 bp, Homo sapien
gcctctgcctgaggatagcctggcc

SEQ ID NO: 4617742 - DNA, 25 bp, Homo sapien
cggatttttgacatggtgttgatca

SEQ ID NO: 4617743 - DNA, 25 bp, Homo sapien
ccttctcctggccacggatttttga

SEQ ID NO: 4617744 - DNA, 25 bp, Homo sapien
tacaatgtgaggaagcacttgttac

SEQ ID NO: 4617745 - DNA, 25 bp, Homo sapien
ttacaatgtgaggaagcacttgtta

SEQ ID NO: 4617746 - DNA, 25 bp, Homo sapien
agagtctttgacctccgacagttcc

SEQ ID NO: 4617747 - DNA, 25 bp, Homo sapien
gacagttcccgcatggcctccccga

SEQ ID NO: 4617748 - DNA, 25 bp, Homo sapien
agtctttgacctccgacagttcccg

SEQ ID NO: 4617749 - DNA, 25 bp, Homo sapien
ttgacctccgacagttcccgcatgg

SEQ ID NO: 4617750 - DNA, 25 bp, Homo sapien
caagagattgaacatgcttgactca

SEQ ID NO: 4617751 - DNA, 25 bp, Homo sapien
tcatccggaatcttgccttgtcgtt

SEQ ID NO: 4617752 - DNA, 25 bp, Homo sapien
gcttgacgaagctcttcatccggaa

SEQ ID NO: 4617753 - DNA, 25 bp, Homo sapien
cagcaatttccttagactcatcaaa

SEQ ID NO: 4617754 - DNA, 25 bp, Homo sapien
tccagtctgaccgtgacttgctgca

SEQ ID NO: 4617755 - DNA, 25 bp, Homo sapien
cttccagtctgaccgtgacttgctg

SEQ ID NO: 4617756 - DNA, 25 bp, Homo sapien
tcttccagtctgaccgtgacttgct

SEQ ID NO: 4617757 - DNA, 25 bp, Homo sapien
ttcttccagtctgaccgtgacttgc

SEQ ID NO: 4617758 - DNA, 25 bp, Homo sapien
taggttgatattcccttctaggctg

SEQ ID NO: 4617759 - DNA, 25 bp, Homo sapien
cccattgggctgagtactgtctcca

SEQ ID NO: 4617760 - DNA, 25 bp, Homo sapien
taggctgagatgaagcctgtcttat

SEQ ID NO: 4617761 - DNA, 25 bp, Homo sapien
ttggaaactccaggctcattcgtgg

SEQ ID NO: 4617762 - DNA, 25 bp, Homo sapien
cagcagggctgatccatttggacac

SEQ ID NO: 4617763 - DNA, 25 bp, Homo sapien
gtgagtgtgatgatatcgccctctt

SEQ ID NO: 4617764 - DNA, 25 bp, Homo sapien
ttcaaagtcgtacagagctcggcag

SEQ ID NO: 4617765 - DNA, 25 bp, Homo sapien
gatgatatcgccctctttaaatccc

SEQ ID NO: 4617766 - DNA, 25 bp, Homo sapien
ccacataattgatggggaagaagcc

SEQ ID NO: 4617767 - DNA, 25 bp, Homo sapien
aatggccatgcagcatcccctcata

SEQ ID NO: 4617768 - DNA, 25 bp, Homo sapien
ggggaagaagcctgaatggccatgc

SEQ ID NO: 4617769 - DNA, 25 bp, Homo sapien
ggcagggcaaccagaatttccacat

SEQ ID NO: 4617770 - DNA, 25 bp, Homo sapien
ccgtaactatctgggtcaagaggag

SEQ ID NO: 4617771 - DNA, 25 bp, Homo sapien
tggatgacgtggaccactgcggcct

SEQ ID NO: 4617772 - DNA, 25 bp, Homo sapien
tgggagcccacaagtcaaccaaagt

SEQ ID NO: 4617773 - DNA, 25 bp, Homo sapien
tgccaaagcagtggttaaccgtaac

SEQ ID NO: 4617774 - DNA, 25 bp, Homo sapien
gcccaccaggctaagaggatatcat

SEQ ID NO: 4617775 - DNA, 25 bp, Homo sapien
tacgtcagaaatagccataagtgtg

SEQ ID NO: 4617776 - DNA, 25 bp, Homo sapien
cactactgcaggtggcacatcggaa

SEQ ID NO: 4617777 - DNA, 25 bp, Homo sapien
aaagagaccttcagatggcccctgg

SEQ ID NO: 4617778 - DNA, 25 bp, Homo sapien
tatcaagaggcatacgatgtctggt

SEQ ID NO: 4617779 - DNA, 25 bp, Homo sapien
tatgaaccgtaagacccatgaggaa

SEQ ID NO: 4617780 - DNA, 25 bp, Homo sapien
cacctggcaaagtgcagtcagttct

SEQ ID NO: 4617781 - DNA, 25 bp, Homo sapien
gaagattacatctaaaggcgtggtt

SEQ ID NO: 4617782 - DNA, 25 bp, Homo sapien
gagtgtgccgctagattatttgcac

SEQ ID NO: 4617783 - DNA, 25 bp, Homo sapien
tacatcatgacatttgcatacgaca

SEQ ID NO: 4617784 - DNA, 25 bp, Homo sapien
atttgcacactcagaatacatcatg

SEQ ID NO: 4617785 - DNA, 25 bp, Homo sapien
attttctgattagagtgtgccgcta

SEQ ID NO: 4617786 - DNA, 25 bp, Homo sapien
gaaatagggtctatcacctctacct

SEQ ID NO: 4617787 - DNA, 25 bp, Homo sapien
gccagagccttatgaccaattgtag

SEQ ID NO: 4617788 - DNA, 25 bp, Homo sapien
gctgaatgtattatgggccctagaa

SEQ ID NO: 4617789 - DNA, 25 bp, Homo sapien
gcaagttcgtttcaaggaagacatg

SEQ ID NO: 4617790 - DNA, 25 bp, Homo sapien
taggcatccaacctgatcagaaagg

SEQ ID NO: 4617791 - DNA, 25 bp, Homo sapien
gaagttaggcatccaacctgatcag

SEQ ID NO: 4617792 - DNA, 25 bp, Homo sapien
tgatggaagttaggcatccaacctg

SEQ ID NO: 4617793 - DNA, 25 bp, Homo sapien
caacctgatcagaaagggaagatgc

SEQ ID NO: 4617794 - DNA, 25 bp, Homo sapien
gctgatgagcaacctaaaagctggt

SEQ ID NO: 4617795 - DNA, 25 bp, Homo sapien
gagtagctgatgagcaacctaaaag

SEQ ID NO: 4617796 - DNA, 25 bp, Homo sapien
ttggtcacacatgaggaggactggt

SEQ ID NO: 4617797 - DNA, 25 bp, Homo sapien
aaaggctgagctggaccaacccagt

SEQ ID NO: 4617798 - DNA, 25 bp, Homo sapien
tcataggtactccaagatcactaac

SEQ ID NO: 4617799 - DNA, 25 bp, Homo sapien
tgggcttcagatggccagttgtaag

SEQ ID NO: 4617800 - DNA, 25 bp, Homo sapien
cactaactctactccttgggcttca

SEQ ID NO: 4617801 - DNA, 25 bp, Homo sapien
ttgggcttcagatggccagttgtaa

SEQ ID NO: 4617802 - DNA, 25 bp, Homo sapien
ggccacataatgagggaagagaaga

SEQ ID NO: 4617803 - DNA, 25 bp, Homo sapien
cagggatgtggtgttgagatcccac

SEQ ID NO: 4617804 - DNA, 25 bp, Homo sapien
tggatcaagggccacataatgaggg

SEQ ID NO: 4617805 - DNA, 25 bp, Homo sapien
gaagagaagagcatcttcacagcct

SEQ ID NO: 4617806 - DNA, 25 bp, Homo sapien
tccaaaaataagtcctggaagctgg

SEQ ID NO: 4617807 - DNA, 25 bp, Homo sapien
gtctccaaaaataagtcctggaagc

SEQ ID NO: 4617808 - DNA, 25 bp, Homo sapien
ctccaaaaataagtcctggaagctg

SEQ ID NO: 4617809 - DNA, 25 bp, Homo sapien
tctccaaaaataagtcctggaagct

SEQ ID NO: 4617810 - DNA, 25 bp, Homo sapien
tttcccaggaaccagtcctaggagc

SEQ ID NO: 4617811 - DNA, 25 bp, Homo sapien
gccggcccttggagaaggaaatctc

SEQ ID NO: 4617812 - DNA, 25 bp, Homo sapien
ttgctcgcgcttggaatgccaccct

SEQ ID NO: 4617813 - DNA, 25 bp, Homo sapien
tccgagtgctgttgctgacctggga

SEQ ID NO: 4617814 - DNA, 25 bp, Homo sapien
gagacccctccctcgaagaggtggc

SEQ ID NO: 4617815 - DNA, 25 bp, Homo sapien
tcgggcgtgcgccccacgagacaga

SEQ ID NO: 4617816 - DNA, 25 bp, Homo sapien
caggcggcgcggctttggagcttca

SEQ ID NO: 4617817 - DNA, 25 bp, Homo sapien
tcctgcgctgattgcggtggctccg

SEQ ID NO: 4617818 - DNA, 25 bp, Homo sapien
tccggcgatacagagcaggcaccag

SEQ ID NO: 4617819 - DNA, 25 bp, Homo sapien
tgtccggcgatacagagcaggcacc

SEQ ID NO: 4617820 - DNA, 25 bp, Homo sapien
ctgtccggcgatacagagcaggcac

SEQ ID NO: 4617821 - DNA, 25 bp, Homo sapien
gtccggcgatacagagcaggcacca

SEQ ID NO: 4617822 - DNA, 25 bp, Homo sapien
gaacgagagagggggctccgcgaag

SEQ ID NO: 4617823 - DNA, 25 bp, Homo sapien
tggaacgagagagggggctccgcga

SEQ ID NO: 4617824 - DNA, 25 bp, Homo sapien
acgagagagggggctccgcgaagga

SEQ ID NO: 4617825 - DNA, 25 bp, Homo sapien
ctggaacgagagagggggctccgcg

SEQ ID NO: 4617826 - DNA, 25 bp, Homo sapien
tcactaggtccgcagaagggcggaa

SEQ ID NO: 4617827 - DNA, 25 bp, Homo sapien
gcagaagggcggaagtgtggaggag

SEQ ID NO: 4617828 - DNA, 25 bp, Homo sapien
gtggaggagtgtcccagcacccgag

SEQ ID NO: 4617829 - DNA, 25 bp, Homo sapien
aggagtgtcccagcacccgagtgtc

SEQ ID NO: 4617830 - DNA, 25 bp, Homo sapien
agaggcacgatgtggaaaatactta

SEQ ID NO: 4617831 - DNA, 25 bp, Homo sapien
gaggcacgatgtggaaaatacttac

SEQ ID NO: 4617832 - DNA, 25 bp, Homo sapien
ctattaaagaaccaagaaggatgcc

SEQ ID NO: 4617833 - DNA, 25 bp, Homo sapien
cagatccatggatttgggagctcca

SEQ ID NO: 4617834 - DNA, 25 bp, Homo sapien
catctgcttttggacgagtgttcac

SEQ ID NO: 4617835 - DNA, 25 bp, Homo sapien
aggacaacactgatctgagactgca

SEQ ID NO: 4617836 - DNA, 25 bp, Homo sapien
gggtcccattgagccatttccacac

SEQ ID NO: 4617837 - DNA, 25 bp, Homo sapien
aaagatatccaaacctgtgcacagg

SEQ ID NO: 4617838 - DNA, 25 bp, Homo sapien
tttccacacagcctctacattgcgg

SEQ ID NO: 4617839 - DNA, 25 bp, Homo sapien
ggttggctgagaggctcccgaaatc

SEQ ID NO: 4617840 - DNA, 25 bp, Homo sapien
tgactcattaacagtggcagctaaa

SEQ ID NO: 4617841 - DNA, 25 bp, Homo sapien
caacagatgtggcttttgactcatt

SEQ ID NO: 4617842 - DNA, 25 bp, Homo sapien
tggccaaccgccctggaattgccaa

SEQ ID NO: 4617843 - DNA, 25 bp, Homo sapien
gaaccaaacaccctacattcagctt

SEQ ID NO: 4617844 - DNA, 25 bp, Homo sapien
gcagactacaaagcacagatacaat

SEQ ID NO: 4617845 - DNA, 25 bp, Homo sapien
ctctacttgtatgagaacctgggta

SEQ ID NO: 4617846 - DNA, 25 bp, Homo sapien
gagcaaaggcatcataaactagaag

SEQ ID NO: 4617847 - DNA, 25 bp, Homo sapien
aacatggtagtatctaggcaggaac

SEQ ID NO: 4617848 - DNA, 25 bp, Homo sapien
tgtcatttttacctatatgaatgta

SEQ ID NO: 4617849 - DNA, 25 bp, Homo sapien
caatacaatgtgtcatgtgacaaag

SEQ ID NO: 4617850 - DNA, 25 bp, Homo sapien
aacttttagcaatacaatgtgtcat

SEQ ID NO: 4617851 - DNA, 25 bp, Homo sapien
tgtaaacagtcagtgtgattccaaa

SEQ ID NO: 4617852 - DNA, 25 bp, Homo sapien
gtgggaactgctagtggcacaatgc

SEQ ID NO: 4617853 - DNA, 25 bp, Homo sapien
tgggaactgctagtggcacaatgcc

SEQ ID NO: 4617854 - DNA, 25 bp, Homo sapien
ggaactgctagtggcacaatgcctt

SEQ ID NO: 4617855 - DNA, 25 bp, Homo sapien
agggtgggaactgctagtggcacaa

SEQ ID NO: 4617856 - DNA, 25 bp, Homo sapien
cagcattgctctgataccaaagcta

SEQ ID NO: 4617857 - DNA, 25 bp, Homo sapien
gagattcatctctgggatacaagga

SEQ ID NO: 4617858 - DNA, 25 bp, Homo sapien
acaaagaatcaatcataagggacta

SEQ ID NO: 4617859 - DNA, 25 bp, Homo sapien
aaagaaaatcataggccaacagccc

SEQ ID NO: 4617860 - DNA, 25 bp, Homo sapien
cacctgcagaaggagctctgaatct

SEQ ID NO: 4617861 - DNA, 25 bp, Homo sapien
tgcagaaggagctctgaatctgctt

SEQ ID NO: 4617862 - DNA, 25 bp, Homo sapien
cctgcagaaggagctctgaatctgc

SEQ ID NO: 4617863 - DNA, 25 bp, Homo sapien
gcagaaggagctctgaatctgcttc

SEQ ID NO: 4617864 - DNA, 25 bp, Homo sapien
ggctagctataaactcctgagaaaa

SEQ ID NO: 4617865 - DNA, 25 bp, Homo sapien
tccaaaattagttctaggctagcta

SEQ ID NO: 4617866 - DNA, 25 bp, Homo sapien
actcctgagaaaagttcagcacctt

SEQ ID NO: 4617867 - DNA, 25 bp, Homo sapien
gtctcaagatccaaaattagttcta

SEQ ID NO: 4617868 - DNA, 25 bp, Homo sapien
gagtttcaagtacaatggaatccat

SEQ ID NO: 4617869 - DNA, 25 bp, Homo sapien
tgcaaaaggacaaccgatactagaa

SEQ ID NO: 4617870 - DNA, 25 bp, Homo sapien
tggaatccataccacaccatgaaga

SEQ ID NO: 4617871 - DNA, 25 bp, Homo sapien
caccatgaagaccatcagcttgcaa

SEQ ID NO: 4617872 - DNA, 25 bp, Homo sapien
gctgccaagagaaaacgataggtcc

SEQ ID NO: 4617873 - DNA, 25 bp, Homo sapien
caatccctacaagataaaggacaca

SEQ ID NO: 4617874 - DNA, 25 bp, Homo sapien
taggtccacttcaattgaagcacat

SEQ ID NO: 4617875 - DNA, 25 bp, Homo sapien
catcgcaatccctacaagataaagg

SEQ ID NO: 4617876 - DNA, 25 bp, Homo sapien
gagatcaggcacttttgtgcactta

SEQ ID NO: 4617877 - DNA, 25 bp, Homo sapien
caggcacttttgtgcacttaagatt

SEQ ID NO: 4617878 - DNA, 25 bp, Homo sapien
gattcctcttttggccagttaccat

SEQ ID NO: 4617879 - DNA, 25 bp, Homo sapien
ttggccagttaccatgctctgaatg

SEQ ID NO: 4617880 - DNA, 25 bp, Homo sapien
gtctatcatccctatttcttctcgt

SEQ ID NO: 4617881 - DNA, 25 bp, Homo sapien
ttcaatttcacattccgtccccagg

SEQ ID NO: 4617882 - DNA, 25 bp, Homo sapien
gaaaaactgtataagagtctatcat

SEQ ID NO: 4617883 - DNA, 25 bp, Homo sapien
tctctgaagcaactcctgctcttag

SEQ ID NO: 4617884 - DNA, 25 bp, Homo sapien
ttaagagacaatgtatcaacacaga

SEQ ID NO: 4617885 - DNA, 25 bp, Homo sapien
tgtccagcctacataatccgtttta

SEQ ID NO: 4617886 - DNA, 25 bp, Homo sapien
actagggtggtctttaagagacaat

SEQ ID NO: 4617887 - DNA, 25 bp, Homo sapien
tatgtaggacttctagaaagatggt

SEQ ID NO: 4617888 - DNA, 25 bp, Homo sapien
aaacttgttcaagcagagcatatca

SEQ ID NO: 4617889 - DNA, 25 bp, Homo sapien
gcagagcatatcatcctgtattgcc

SEQ ID NO: 4617890 - DNA, 25 bp, Homo sapien
tgctataagaaactgggatggtttt

SEQ ID NO: 4617891 - DNA, 25 bp, Homo sapien
ctgtattgcccacttgctataagaa

SEQ ID NO: 4617892 - DNA, 25 bp, Homo sapien
catgcgactgatgtaggctggcagc

SEQ ID NO: 4617893 - DNA, 25 bp, Homo sapien
gagacaagaagcataagtagctgag

SEQ ID NO: 4617894 - DNA, 25 bp, Homo sapien
cgggcagctcagagtaacaagtgca

SEQ ID NO: 4617895 - DNA, 25 bp, Homo sapien
ggcagtgcctgcaacttgagctcag

SEQ ID NO: 4617896 - DNA, 25 bp, Homo sapien
gagctgcttgataggtatggtgctt

SEQ ID NO: 4617897 - DNA, 25 bp, Homo sapien
gcttcctgtcttcccgcaatgacta

SEQ ID NO: 4617898 - DNA, 25 bp, Homo sapien
aatgcgaggtgaaaatgcccctgtg

SEQ ID NO: 4617899 - DNA, 25 bp, Homo sapien
gctgcttgataggtatggtgcttcc

SEQ ID NO: 4617900 - DNA, 25 bp, Homo sapien
taacatgctcttgaggattccagcc

SEQ ID NO: 4617901 - DNA, 25 bp, Homo sapien
gattgttcacggcatcctaagggag

SEQ ID NO: 4617902 - DNA, 25 bp, Homo sapien
tcaggaatggcaactacttttcaag

SEQ ID NO: 4617903 - DNA, 25 bp, Homo sapien
aaaaagttccctatgtgtctggtgg

SEQ ID NO: 4617904 - DNA, 25 bp, Homo sapien
gtaattcaatggtaagatccatgcc

SEQ ID NO: 4617905 - DNA, 25 bp, Homo sapien
agtaattcaatggtaagatccatgc

SEQ ID NO: 4617906 - DNA, 25 bp, Homo sapien
gaagagcccaaatctagtcctgcca

SEQ ID NO: 4617907 - DNA, 25 bp, Homo sapien
gaatcagtgtaaattcccgcaggaa

SEQ ID NO: 4617908 - DNA, 25 bp, Homo sapien
ggaggctctctcttcgaatcagtgt

SEQ ID NO: 4617909 - DNA, 25 bp, Homo sapien
gactattcaagaggtcagacaggaa

SEQ ID NO: 4617910 - DNA, 25 bp, Homo sapien
aagcgacactgtaccgagtcttcag

SEQ ID NO: 4617911 - DNA, 25 bp, Homo sapien
tcccataggcttcacgtgtacacaa

SEQ ID NO: 4617912 - DNA, 25 bp, Homo sapien
tgatgacaacagtagagagaaagcc

SEQ ID NO: 4617913 - DNA, 25 bp, Homo sapien
gcccagctctcctagagaatctgta

SEQ ID NO: 4617914 - DNA, 25 bp, Homo sapien
agagaaagcctgtcatgtatccacc

SEQ ID NO: 4617915 - DNA, 25 bp, Homo sapien
tgcctccatacatgactaagtcaga

SEQ ID NO: 4617916 - DNA, 25 bp, Homo sapien
aacgcacgggttgatagcttcagca

SEQ ID NO: 4617917 - DNA, 25 bp, Homo sapien
taagacagttccgaagttaagcagc

SEQ ID NO: 4617918 - DNA, 25 bp, Homo sapien
ccttcaactactgatggatggtgcc

SEQ ID NO: 4617919 - DNA, 25 bp, Homo sapien
ttccatgagcaaagatagtgagacc

SEQ ID NO: 4617920 - DNA, 25 bp, Homo sapien
ctctgaagattaagagcctggtact

SEQ ID NO: 4617921 - DNA, 25 bp, Homo sapien
tagtgagacccataggactttggag

SEQ ID NO: 4617922 - DNA, 25 bp, Homo sapien
caaggattctccatatctgtgtaga

SEQ ID NO: 4617923 - DNA, 25 bp, Homo sapien
tcttcttttcccagacttggactaa

SEQ ID NO: 4617924 - DNA, 25 bp, Homo sapien
cttcttcttttcccagacttggact

SEQ ID NO: 4617925 - DNA, 25 bp, Homo sapien
ttcttcttttcccagacttggacta

SEQ ID NO: 4617926 - DNA, 25 bp, Homo sapien
cagacttggactaaaattcccttct

SEQ ID NO: 4617927 - DNA, 25 bp, Homo sapien
tccctaaatcctaccctctgaaatc

SEQ ID NO: 4617928 - DNA, 25 bp, Homo sapien
aaatcctaccctctgaaatctcaat

SEQ ID NO: 4617929 - DNA, 25 bp, Homo sapien
cctaccctctgaaatctcaatatac

SEQ ID NO: 4617930 - DNA, 25 bp, Homo sapien
tgctttccctcttcttagccccttc

SEQ ID NO: 4617931 - DNA, 25 bp, Homo sapien
catatgtaactgagtttaagacttc

SEQ ID NO: 4617932 - DNA, 25 bp, Homo sapien
gatactgtattctaagtactttgcc

SEQ ID NO: 4617933 - DNA, 25 bp, Homo sapien
catcaactcctttgaacctgcttca

SEQ ID NO: 4617934 - DNA, 25 bp, Homo sapien
aaaatcaagcgctgtttctgaagat

SEQ ID NO: 4617935 - DNA, 25 bp, Homo sapien
tgacaacaggcaaaataaaagcgga

SEQ ID NO: 4617936 - DNA, 25 bp, Homo sapien
tccaatgacaacaggcaaaataaaa

SEQ ID NO: 4617937 - DNA, 25 bp, Homo sapien
aatgacaacaggcaaaataaaagcg

SEQ ID NO: 4617938 - DNA, 25 bp, Homo sapien
caacaggcaaaataaaagcggaagt

SEQ ID NO: 4617939 - DNA, 25 bp, Homo sapien
tgggaacaccacatgacagttgctg

SEQ ID NO: 4617940 - DNA, 25 bp, Homo sapien
gggaacaccacatgacagttgctga

SEQ ID NO: 4617941 - DNA, 25 bp, Homo sapien
ggaacaccacatgacagttgctgat

SEQ ID NO: 4617942 - DNA, 25 bp, Homo sapien
aataggagttatttagcttcagggc

SEQ ID NO: 4617943 - DNA, 25 bp, Homo sapien
ccatcatctataaggactgtactcc

SEQ ID NO: 4617944 - DNA, 25 bp, Homo sapien
ggagttatttagcttcagggctcca

SEQ ID NO: 4617945 - DNA, 25 bp, Homo sapien
gactgtactccatggagagtagtta

SEQ ID NO: 4617946 - DNA, 25 bp, Homo sapien
tctacagtacccatcaaaacctcat

SEQ ID NO: 4617947 - DNA, 25 bp, Homo sapien
tttatcttccgtccctctgtaccta

SEQ ID NO: 4617948 - DNA, 25 bp, Homo sapien
attttgtttatcttccgtccctctg

SEQ ID NO: 4617949 - DNA, 25 bp, Homo sapien
tctgtacctagctctaaggatgaat

SEQ ID NO: 4617950 - DNA, 25 bp, Homo sapien
cactgaggaagcacaagggataagc

SEQ ID NO: 4617951 - DNA, 25 bp, Homo sapien
taattcctaaagactgccggtgtgt

SEQ ID NO: 4617952 - DNA, 25 bp, Homo sapien
cagatagcgtctcatcaaaggtcac

SEQ ID NO: 4617953 - DNA, 25 bp, Homo sapien
tactactgactgaatgccagtgcca

SEQ ID NO: 4617954 - DNA, 25 bp, Homo sapien
tgaaagcaccaaggagggttgaccc

SEQ ID NO: 4617955 - DNA, 25 bp, Homo sapien
tggaagcagtacacaactcagcctg

SEQ ID NO: 4617956 - DNA, 25 bp, Homo sapien
cttgtagcgaatgaaaaacgatgcc

SEQ ID NO: 4617957 - DNA, 25 bp, Homo sapien
ttaacgcctgtctccaattagctgg

SEQ ID NO: 4617958 - DNA, 25 bp, Homo sapien
atttctccccgccaaattcaatagc

SEQ ID NO: 4617959 - DNA, 25 bp, Homo sapien
tccagttacagtttcactatcactc

SEQ ID NO: 4617960 - DNA, 25 bp, Homo sapien
cctcttcagtaggtttatcagtcac

SEQ ID NO: 4617961 - DNA, 25 bp, Homo sapien
agtttcactatcactccaactgtcc

SEQ ID NO: 4617962 - DNA, 25 bp, Homo sapien
gccattcaaagtcaaaggatgcata

SEQ ID NO: 4617963 - DNA, 25 bp, Homo sapien
ctcagtaaacaattatggcagccat

SEQ ID NO: 4617964 - DNA, 25 bp, Homo sapien
cattcaaagtcaaaggatgcatata

SEQ ID NO: 4617965 - DNA, 25 bp, Homo sapien
cagtaaacaattatggcagccattc

SEQ ID NO: 4617966 - DNA, 25 bp, Homo sapien
cagggtgcaacggatgcatagtctt

SEQ ID NO: 4617967 - DNA, 25 bp, Homo sapien
ttcacgtggctcttggaagatgagg

SEQ ID NO: 4617968 - DNA, 25 bp, Homo sapien
gaagatgagggagtaactacaggtt

SEQ ID NO: 4617969 - DNA, 25 bp, Homo sapien
tcattttgccggaagtcagagaagc

SEQ ID NO: 4617970 - DNA, 25 bp, Homo sapien
acagagcatgagcacggcctttgtg

SEQ ID NO: 4617971 - DNA, 25 bp, Homo sapien
gtcctctttgtataaacagagcatg

SEQ ID NO: 4617972 - DNA, 25 bp, Homo sapien
ttgggatcaaagtctgaacttgggt

SEQ ID NO: 4617973 - DNA, 25 bp, Homo sapien
tataaacagagcatgagcacggcct

SEQ ID NO: 4617974 - DNA, 25 bp, Homo sapien
tgtttgggtggtcacgatcacaaaa

SEQ ID NO: 4617975 - DNA, 25 bp, Homo sapien
gtttgggtggtcacgatcacaaaat

SEQ ID NO: 4617976 - DNA, 25 bp, Homo sapien
tgggtggtcacgatcacaaaatttt

SEQ ID NO: 4617977 - DNA, 25 bp, Homo sapien
ggtggtcacgatcacaaaatttttg

SEQ ID NO: 4617978 - DNA, 25 bp, Homo sapien
tgtggtctgtcagcagaagattttc

SEQ ID NO: 4617979 - DNA, 25 bp, Homo sapien
gctgaagggacggtgaaattctctt

SEQ ID NO: 4617980 - DNA, 25 bp, Homo sapien
taagggattgccacatttttgcaac

SEQ ID NO: 4617981 - DNA, 25 bp, Homo sapien
tattgatttaggtacttccccacag

SEQ ID NO: 4617982 - DNA, 25 bp, Homo sapien
tccaatgccatcaaacaataatcta

SEQ ID NO: 4617983 - DNA, 25 bp, Homo sapien
ggagatgctccagcgactacgagga

SEQ ID NO: 4617984 - DNA, 25 bp, Homo sapien
tgctccagcgactacgaggaagcat

SEQ ID NO: 4617985 - DNA, 25 bp, Homo sapien
aacaataatctatgggagatgctcc

SEQ ID NO: 4617986 - DNA, 25 bp, Homo sapien
ccacttgacacgtctagaatgtgca

SEQ ID NO: 4617987 - DNA, 25 bp, Homo sapien
gacaacttgctattccttatttggg

SEQ ID NO: 4617988 - DNA, 25 bp, Homo sapien
tgcaacgtccctctctatattgatg

SEQ ID NO: 4617989 - DNA, 25 bp, Homo sapien
tgggattaacgaaacaactgcttac

SEQ ID NO: 4617990 - DNA, 25 bp, Homo sapien
tagtgtctaaagctgggcctttgct

SEQ ID NO: 4617991 - DNA, 25 bp, Homo sapien
tgggcctttgctctgtcttgaaaaa

SEQ ID NO: 4617992 - DNA, 25 bp, Homo sapien
cccaggttttctagggctcagaagg

SEQ ID NO: 4617993 - DNA, 25 bp, Homo sapien
tctagggctcagaaggtagtgtcta

SEQ ID NO: 4617994 - DNA, 25 bp, Homo sapien
ccacgagcaaggcatgagaacactt

SEQ ID NO: 4617995 - DNA, 25 bp, Homo sapien
gagatcaactccgtagctgaggatg

SEQ ID NO: 4617996 - DNA, 25 bp, Homo sapien
caggtgttcccaggtcaccgagatc

SEQ ID NO: 4617997 - DNA, 25 bp, Homo sapien
aatgaggagcctcgaacatggagcg

SEQ ID NO: 4617998 - DNA, 25 bp, Homo sapien
ccttagcagtggcaaacgggctggt

SEQ ID NO: 4617999 - DNA, 25 bp, Homo sapien
ggctggtggtagaaaacgagtcatt

SEQ ID NO: 4618000 - DNA, 25 bp, Homo sapien
tggtagagattccttagcagtggca

SEQ ID NO: 4618001 - DNA, 25 bp, Homo sapien
taagttggtagagattccttagcag

SEQ ID NO: 4618002 - DNA, 25 bp, Homo sapien
gtgaccctcactctggtaagattta

SEQ ID NO: 4618003 - DNA, 25 bp, Homo sapien
tgtgaccctcactctggtaagattt

SEQ ID NO: 4618004 - DNA, 25 bp, Homo sapien
ttgtgaccctcactctggtaagatt

SEQ ID NO: 4618005 - DNA, 25 bp, Homo sapien
tgaccctcactctggtaagatttat

SEQ ID NO: 4618006 - DNA, 25 bp, Homo sapien
gaggatttctccagatggtgcgccc

SEQ ID NO: 4618007 - DNA, 25 bp, Homo sapien
gaagtccttctaagtaacatagtcc

SEQ ID NO: 4618008 - DNA, 25 bp, Homo sapien
gtagtaacataaaccttctccagag

SEQ ID NO: 4618009 - DNA, 25 bp, Homo sapien
gcagctaatcacatgacctaagtaa

SEQ ID NO: 4618010 - DNA, 25 bp, Homo sapien
tgttttcctttctagtctaatacta

SEQ ID NO: 4618011 - DNA, 25 bp, Homo sapien
gaacactgcctgtggtgattccttc

SEQ ID NO: 4618012 - DNA, 25 bp, Homo sapien
gggaacactgcctgtggtgattcct

SEQ ID NO: 4618013 - DNA, 25 bp, Homo sapien
tagatggcatagattctagctgcat

SEQ ID NO: 4618014 - DNA, 25 bp, Homo sapien
attcttaaaatatggctgatgagat

SEQ ID NO: 4618015 - DNA, 25 bp, Homo sapien
ttcttaaaatatggctgatgagatg

SEQ ID NO: 4618016 - DNA, 25 bp, Homo sapien
cattggctgcaaagcgtaaaggcat

SEQ ID NO: 4618017 - DNA, 25 bp, Homo sapien
gttgcatgaacaacattggctgcaa

SEQ ID NO: 4618018 - DNA, 25 bp, Homo sapien
cccagggcctgtgctaccagcaggc

SEQ ID NO: 4618019 - DNA, 25 bp, Homo sapien
ggcctgtgctaccagcaggcccacg

SEQ ID NO: 4618020 - DNA, 25 bp, Homo sapien
tttcggtattctccgctgagcttgg

SEQ ID NO: 4618021 - DNA, 25 bp, Homo sapien
ccacggcactggcccagacagtatt

SEQ ID NO: 4618022 - DNA, 25 bp, Homo sapien
tgcagctggatgacaacttagattc

SEQ ID NO: 4618023 - DNA, 25 bp, Homo sapien
caggaactctcctcgtaagcccatg

SEQ ID NO: 4618024 - DNA, 25 bp, Homo sapien
caacttagattcatggttctgagtc

SEQ ID NO: 4618025 - DNA, 25 bp, Homo sapien
aagcccatgcagctggatgacaact

SEQ ID NO: 4618026 - DNA, 25 bp, Homo sapien
tttgggttgcaaagttgcgtggccc

SEQ ID NO: 4618027 - DNA, 25 bp, Homo sapien
ttgcgtggcccattctatagtgacc

SEQ ID NO: 4618028 - DNA, 25 bp, Homo sapien
tatagtgcagcatacaggttgatgc

SEQ ID NO: 4618029 - DNA, 25 bp, Homo sapien
tatagtgaccatgttatatagtgca

SEQ ID NO: 4618030 - DNA, 25 bp, Homo sapien
tcggtaaagctaatgatttactgac

SEQ ID NO: 4618031 - DNA, 25 bp, Homo sapien
atttgttgcttcgtacactgtgacc

SEQ ID NO: 4618032 - DNA, 25 bp, Homo sapien
cactgtgacctctcggtaaagctaa

SEQ ID NO: 4618033 - DNA, 25 bp, Homo sapien
tgttgcttcgtacactgtgacctct

SEQ ID NO: 4618034 - DNA, 25 bp, Homo sapien
cagtcttgactttgcagccaattcc

SEQ ID NO: 4618035 - DNA, 25 bp, Homo sapien
tggtccacaggcctattttggcggc

SEQ ID NO: 4618036 - DNA, 25 bp, Homo sapien
taacacttggagactctcgcccagg

SEQ ID NO: 4618037 - DNA, 25 bp, Homo sapien
ttattggcctagctgtggtccacag

SEQ ID NO: 4618038 - DNA, 25 bp, Homo sapien
accaggcaaaagcaactcaagttca

SEQ ID NO: 4618039 - DNA, 25 bp, Homo sapien
gaagttatgtgcacagtccatacca

SEQ ID NO: 4618040 - DNA, 25 bp, Homo sapien
cataaggccaccacttagcagccat

SEQ ID NO: 4618041 - DNA, 25 bp, Homo sapien
agtgcataaggccaccacttagcag

SEQ ID NO: 4618042 - DNA, 25 bp, Homo sapien
tggtgtggcacccaggaatttacat

SEQ ID NO: 4618043 - DNA, 25 bp, Homo sapien
tagaagtacccgtccataaagcata

SEQ ID NO: 4618044 - DNA, 25 bp, Homo sapien
taaatccggttctctaggcgctggg

SEQ ID NO: 4618045 - DNA, 25 bp, Homo sapien
tgatattgccagaccagacacagac

SEQ ID NO: 4618046 - DNA, 25 bp, Homo sapien
tctattgagccacattccttcttgc

SEQ ID NO: 4618047 - DNA, 25 bp, Homo sapien
ctgtttactttatcctggatccact

SEQ ID NO: 4618048 - DNA, 25 bp, Homo sapien
cttctccatgaacatattgttctat

SEQ ID NO: 4618049 - DNA, 25 bp, Homo sapien
tccttcctctgtttgtgagcaccct

SEQ ID NO: 4618050 - DNA, 25 bp, Homo sapien
ttttttccacttcagcttagatcta

SEQ ID NO: 4618051 - DNA, 25 bp, Homo sapien
ctttcttgagtgactttacatattc

SEQ ID NO: 4618052 - DNA, 25 bp, Homo sapien
gactttacatattcagatcactttt

SEQ ID NO: 4618053 - DNA, 25 bp, Homo sapien
ttgagtgactttacatattcagatc

SEQ ID NO: 4618054 - DNA, 25 bp, Homo sapien
cactctcatgtttgtcggaagccag

SEQ ID NO: 4618055 - DNA, 25 bp, Homo sapien
tctcatgtttgtcggaagccaggac

SEQ ID NO: 4618056 - DNA, 25 bp, Homo sapien
ctggccactctcatgtttgtcggaa

SEQ ID NO: 4618057 - DNA, 25 bp, Homo sapien
catgtttgtcggaagccaggaccat

SEQ ID NO: 4618058 - DNA, 25 bp, Homo sapien
atcgtctcatcattgtagggattca

SEQ ID NO: 4618059 - DNA, 25 bp, Homo sapien
tcgtctcatcattgtagggattcat

SEQ ID NO: 4618060 - DNA, 25 bp, Homo sapien
gtgtatttgtctcttaacaatagct

SEQ ID NO: 4618061 - DNA, 25 bp, Homo sapien
aacaatagctttattaatctcggaa

SEQ ID NO: 4618062 - DNA, 25 bp, Homo sapien
caaagcttggaggaattgagtcaaa

SEQ ID NO: 4618063 - DNA, 25 bp, Homo sapien
taatctcggaatctgaagatgtctg

SEQ ID NO: 4618064 - DNA, 25 bp, Homo sapien
tccaggtcacctctgttaagaaaca

SEQ ID NO: 4618065 - DNA, 25 bp, Homo sapien
ctgaacttttgggaatgtgcccaca

SEQ ID NO: 4618066 - DNA, 25 bp, Homo sapien
ctttgatgccgcattcaacacctaa

SEQ ID NO: 4618067 - DNA, 25 bp, Homo sapien
tgtctgcctgcctacctttgatgcc

SEQ ID NO: 4618068 - DNA, 25 bp, Homo sapien
aattcctcaaggtatatgacctctt

SEQ ID NO: 4618069 - DNA, 25 bp, Homo sapien
ttacattgggcccaaattcctcaag

SEQ ID NO: 4618070 - DNA, 25 bp, Homo sapien
tcacatttcgacatggcatcttgca

SEQ ID NO: 4618071 - DNA, 25 bp, Homo sapien
agttccttctacattcagacctctc

SEQ ID NO: 4618072 - DNA, 25 bp, Homo sapien
ggcatcaatttgcaccttccagatt

SEQ ID NO: 4618073 - DNA, 25 bp, Homo sapien
ctgcactggcatcaatttgcacctt

SEQ ID NO: 4618074 - DNA, 25 bp, Homo sapien
tgtgttgcctactgtctgcactggc

SEQ ID NO: 4618075 - DNA, 25 bp, Homo sapien
ctttaaccactgtgttgcctactgt

SEQ ID NO: 4618076 - DNA, 25 bp, Homo sapien
tcaaagatgattggtgccaaacatt

SEQ ID NO: 4618077 - DNA, 25 bp, Homo sapien
caaagatgattggtgccaaacattc

SEQ ID NO: 4618078 - DNA, 25 bp, Homo sapien
tagtaggatagatgggtctaatggt

SEQ ID NO: 4618079 - DNA, 25 bp, Homo sapien
ccaggtaatgataagacaagcaaaa

SEQ ID NO: 4618080 - DNA, 25 bp, Homo sapien
caagcatgggtattttttgatacaa

SEQ ID NO: 4618081 - DNA, 25 bp, Homo sapien
atacaagcatgggtattttttgata

SEQ ID NO: 4618082 - DNA, 25 bp, Homo sapien
tgccagtagaggttctccaaaacaa

SEQ ID NO: 4618083 - DNA, 25 bp, Homo sapien
gccagtagaggttctccaaaacaaa

SEQ ID NO: 4618084 - DNA, 25 bp, Homo sapien
gtgccagtagaggttctccaaaaca

SEQ ID NO: 4618085 - DNA, 25 bp, Homo sapien
tctttgctgtactcgaagactccat

SEQ ID NO: 4618086 - DNA, 25 bp, Homo sapien
tttctttgctgtactcgaagactcc

SEQ ID NO: 4618087 - DNA, 25 bp, Homo sapien
ttctttgctgtactcgaagactcca

SEQ ID NO: 4618088 - DNA, 25 bp, Homo sapien
ctttctttgctgtactcgaagactc

SEQ ID NO: 4618089 - DNA, 25 bp, Homo sapien
cctcaaaggatgtctggcaattggc

SEQ ID NO: 4618090 - DNA, 25 bp, Homo sapien
tgggtggatcataaagccagacacc

SEQ ID NO: 4618091 - DNA, 25 bp, Homo sapien
taatgtgggaatctgggtggatcat

SEQ ID NO: 4618092 - DNA, 25 bp, Homo sapien
agacacccagggaatagtccaagaa

SEQ ID NO: 4618093 - DNA, 25 bp, Homo sapien
taatgctggagatccgacataatac

SEQ ID NO: 4618094 - DNA, 25 bp, Homo sapien
tttccatgacataatgctggagatc

SEQ ID NO: 4618095 - DNA, 25 bp, Homo sapien
agatccgacataatactcaaacacc

SEQ ID NO: 4618096 - DNA, 25 bp, Homo sapien
ttttccatgacataatgctggagat

SEQ ID NO: 4618097 - DNA, 25 bp, Homo sapien
ttgagctaaatctccacagccatgg

SEQ ID NO: 4618098 - DNA, 25 bp, Homo sapien
cagccatggccaccaactgtcttat

SEQ ID NO: 4618099 - DNA, 25 bp, Homo sapien
gtcaaccttctgactacttccatat

SEQ ID NO: 4618100 - DNA, 25 bp, Homo sapien
accaactgtcttatcatcaactggg

SEQ ID NO: 4618101 - DNA, 25 bp, Homo sapien
tgtcatcactattgtcttccatttc

SEQ ID NO: 4618102 - DNA, 25 bp, Homo sapien
gtcatcactattgtcttccatttcc

SEQ ID NO: 4618103 - DNA, 25 bp, Homo sapien
attccagggtggcccaatgccaaac

SEQ ID NO: 4618104 - DNA, 25 bp, Homo sapien
tcacgtcaactgctgcttggcctga

SEQ ID NO: 4618105 - DNA, 25 bp, Homo sapien
tgctgcttggcctgattggaatctg

SEQ ID NO: 4618106 - DNA, 25 bp, Homo sapien
ttggaatctgcattccagggtggcc

SEQ ID NO: 4618107 - DNA, 25 bp, Homo sapien
gagagatccttgcattcatcaggga

SEQ ID NO: 4618108 - DNA, 25 bp, Homo sapien
caatattaccaagctgctcttgagc

SEQ ID NO: 4618109 - DNA, 25 bp, Homo sapien
aacccggccccaattcttgtatctg

SEQ ID NO: 4618110 - DNA, 25 bp, Homo sapien
tagatgtgggatggcaaacccggcc

SEQ ID NO: 4618111 - DNA, 25 bp, Homo sapien
tagcagacaggggtgtataagtgcc

SEQ ID NO: 4618112 - DNA, 25 bp, Homo sapien
ctggtcttggcactgcgagtgtatc

SEQ ID NO: 4618113 - DNA, 25 bp, Homo sapien
gatcctctccttcccgttccagcag

SEQ ID NO: 4618114 - DNA, 25 bp, Homo sapien
aacagcagcgggcattagcagacag

SEQ ID NO: 4618115 - DNA, 25 bp, Homo sapien
tggttccaaaatactgccgtcaggt

SEQ ID NO: 4618116 - DNA, 25 bp, Homo sapien
cacgtggtgcaatgagcctctccat

SEQ ID NO: 4618117 - DNA, 25 bp, Homo sapien
gaagggacacgcttgaaacccgagc

SEQ ID NO: 4618118 - DNA, 25 bp, Homo sapien
tagggtaacattcacgagctcgaga

SEQ ID NO: 4618119 - DNA, 25 bp, Homo sapien
tcggaatgcaacgtccaggaagcct

SEQ ID NO: 4618120 - DNA, 25 bp, Homo sapien
cggtcatgacgtagtgaagacgaca

SEQ ID NO: 4618121 - DNA, 25 bp, Homo sapien
gaagacgacaccatgttccgtaaga

SEQ ID NO: 4618122 - DNA, 25 bp, Homo sapien
tgtttctagaccatgatgagggact

SEQ ID NO: 4618123 - DNA, 25 bp, Homo sapien
cattgtcctagtttcaaacttctca

SEQ ID NO: 4618124 - DNA, 25 bp, Homo sapien
gctcatccagtgtcctgtgtccttc

SEQ ID NO: 4618125 - DNA, 25 bp, Homo sapien
tggcagcagaaccttgactgtccat

SEQ ID NO: 4618126 - DNA, 25 bp, Homo sapien
ctcagtttgtggttacaatagcaat

SEQ ID NO: 4618127 - DNA, 25 bp, Homo sapien
catccagtactggtgctaacactcc

SEQ ID NO: 4618128 - DNA, 25 bp, Homo sapien
ggctcctgctaatcagacatgctga

SEQ ID NO: 4618129 - DNA, 25 bp, Homo sapien
cagagaaagtgtaacggtgcgagca

SEQ ID NO: 4618130 - DNA, 25 bp, Homo sapien
gaatggaatctctctcggagcaggc

SEQ ID NO: 4618131 - DNA, 25 bp, Homo sapien
gcttggatccttgccggaatcagaa

SEQ ID NO: 4618132 - DNA, 25 bp, Homo sapien
gacactgaataagctgctaagtgct

SEQ ID NO: 4618133 - DNA, 25 bp, Homo sapien
gccggaatcagaatcggacactgaa

SEQ ID NO: 4618134 - DNA, 25 bp, Homo sapien
gaatcggacactgaataagctgcta

SEQ ID NO: 4618135 - DNA, 25 bp, Homo sapien
ccaggagttgcccgacggcagcatt

SEQ ID NO: 4618136 - DNA, 25 bp, Homo sapien
caggagttgcccgacggcagcattc

SEQ ID NO: 4618137 - DNA, 25 bp, Homo sapien
ggagttgcccgacggcagcattcca

SEQ ID NO: 4618138 - DNA, 25 bp, Homo sapien
tgccaggagttgcccgacggcagca

SEQ ID NO: 4618139 - DNA, 25 bp, Homo sapien
tctgtcccaggagatttcaactgtt

SEQ ID NO: 4618140 - DNA, 25 bp, Homo sapien
ttcttggcctcactgtttgatccca

SEQ ID NO: 4618141 - DNA, 25 bp, Homo sapien
tatattcgccttccccttggatctg

SEQ ID NO: 4618142 - DNA, 25 bp, Homo sapien
ttctgttatattcgccttccccttg

SEQ ID NO: 4618143 - DNA, 25 bp, Homo sapien
aaagaacccgcttatgaggtgcacc

SEQ ID NO: 4618144 - DNA, 25 bp, Homo sapien
gaggtgcacccaaataattcacagg

SEQ ID NO: 4618145 - DNA, 25 bp, Homo sapien
ttgtaatctggcagcaggttcccca

SEQ ID NO: 4618146 - DNA, 25 bp, Homo sapien
tctaatgaggatgggagatacaacc

SEQ ID NO: 4618147 - DNA, 25 bp, Homo sapien
taaatgccaattaacctcataacag

SEQ ID NO: 4618148 - DNA, 25 bp, Homo sapien
aagcatgtttgttatctcagaccag

SEQ ID NO: 4618149 - DNA, 25 bp, Homo sapien
ttatctcagaccagttacaagcccc

SEQ ID NO: 4618150 - DNA, 25 bp, Homo sapien
tatgggctgggaatttaaatgccaa

SEQ ID NO: 4618151 - DNA, 25 bp, Homo sapien
cagtcaactgaggtcacattccgca

SEQ ID NO: 4618152 - DNA, 25 bp, Homo sapien
tgaactcaatagaaggagaacagac

SEQ ID NO: 4618153 - DNA, 25 bp, Homo sapien
tatctggatcctatgtactagatgc

SEQ ID NO: 4618154 - DNA, 25 bp, Homo sapien
gccacacagtataatacaggagaat

SEQ ID NO: 4618155 - DNA, 25 bp, Homo sapien
gagttttaactcaagattgttttgc

SEQ ID NO: 4618156 - DNA, 25 bp, Homo sapien
gcgcgccacgccgatctttgagttt

SEQ ID NO: 4618157 - DNA, 25 bp, Homo sapien
aactcaagattgttttgcagcagct

SEQ ID NO: 4618158 - DNA, 25 bp, Homo sapien
cacgccgatctttgagttttaactc

SEQ ID NO: 4618159 - DNA, 25 bp, Homo sapien
ttataagccaacaatgatctttgag

SEQ ID NO: 4618160 - DNA, 25 bp, Homo sapien
tttataagccaacaatgatctttga

SEQ ID NO: 4618161 - DNA, 25 bp, Homo sapien
gatatttataagccaacaatgatct

SEQ ID NO: 4618162 - DNA, 25 bp, Homo sapien
tatttataagccaacaatgatcttt

SEQ ID NO: 4618163 - DNA, 25 bp, Homo sapien
tgttcaatatagcatagccagtacc

SEQ ID NO: 4618164 - DNA, 25 bp, Homo sapien
gaaaccccgttacatcagcaatagt

SEQ ID NO: 4618165 - DNA, 25 bp, Homo sapien
tcagagacgtgctacatgcaagatc

SEQ ID NO: 4618166 - DNA, 25 bp, Homo sapien
tgggaaaacctactgtcattagcct

SEQ ID NO: 4618167 - DNA, 25 bp, Homo sapien
gctccactgcctaaagctgatggga

SEQ ID NO: 4618168 - DNA, 25 bp, Homo sapien
caactgttcactccttgctaggaga

SEQ ID NO: 4618169 - DNA, 25 bp, Homo sapien
gacctagtagtgttaataaatgcca

SEQ ID NO: 4618170 - DNA, 25 bp, Homo sapien
gccaggtgggctatgaactctcaga

SEQ ID NO: 4618171 - DNA, 25 bp, Homo sapien
ccatgtaaggtagagatggcaacca

SEQ ID NO: 4618172 - DNA, 25 bp, Homo sapien
cgtgagtcagcaacacctttagagg

SEQ ID NO: 4618173 - DNA, 25 bp, Homo sapien
tctctcaaaaaggtacatagggcat

SEQ ID NO: 4618174 - DNA, 25 bp, Homo sapien
gagggacgcgttgctttcacatgaa

SEQ ID NO: 4618175 - DNA, 25 bp, Homo sapien
tgcagtattctccttaacctgaagt

SEQ ID NO: 4618176 - DNA, 25 bp, Homo sapien
tccaattagactggaagctctttga

SEQ ID NO: 4618177 - DNA, 25 bp, Homo sapien
tgatgtcccattatgtagtactagt

SEQ ID NO: 4618178 - DNA, 25 bp, Homo sapien
taagttcagctctccttactcagaa

SEQ ID NO: 4618179 - DNA, 25 bp, Homo sapien
gtaaaagtccattagctttttgatg

SEQ ID NO: 4618180 - DNA, 25 bp, Homo sapien
ttcttaaagagcgtagtgtgtggat

SEQ ID NO: 4618181 - DNA, 25 bp, Homo sapien
ttttgatgtactttcttaaagagcg

SEQ ID NO: 4618182 - DNA, 25 bp, Homo sapien
aaagagcgtagtgtgtggatactga

SEQ ID NO: 4618183 - DNA, 25 bp, Homo sapien
ccccgcaggtgcgtgagcattcact

SEQ ID NO: 4618184 - DNA, 25 bp, Homo sapien
gtgagcattcactccatgggcccca

SEQ ID NO: 4618185 - DNA, 25 bp, Homo sapien
ttgctgctcaggcagcgcctcagag

SEQ ID NO: 4618186 - DNA, 25 bp, Homo sapien
gcctcagagagtaggaggccccacc

SEQ ID NO: 4618187 - DNA, 25 bp, Homo sapien
gcaattataagcacccgctaccacg

SEQ ID NO: 4618188 - DNA, 25 bp, Homo sapien
agtagaaatcgggtttgtccatatt

SEQ ID NO: 4618189 - DNA, 25 bp, Homo sapien
gaaatcgggtttgtccatattggcc

SEQ ID NO: 4618190 - DNA, 25 bp, Homo sapien
cctccctagcagctgcaattataag

SEQ ID NO: 4618191 - DNA, 25 bp, Homo sapien
cctccggaaaggagatcagatcttg

SEQ ID NO: 4618192 - DNA, 25 bp, Homo sapien
gatcagatcttggaacaatacaccc

SEQ ID NO: 4618193 - DNA, 25 bp, Homo sapien
gccttagcgcatttgcctccggaaa

SEQ ID NO: 4618194 - DNA, 25 bp, Homo sapien
tcagtcattggccttagcgcatttg

SEQ ID NO: 4618195 - DNA, 25 bp, Homo sapien
actgcatgttctgtatcggatattt

SEQ ID NO: 4618196 - DNA, 25 bp, Homo sapien
tgttctgtatcggatatttcttcct

SEQ ID NO: 4618197 - DNA, 25 bp, Homo sapien
cacattactgcatgttctgtatcgg

SEQ ID NO: 4618198 - DNA, 25 bp, Homo sapien
cattactgcatgttctgtatcggat

SEQ ID NO: 4618199 - DNA, 25 bp, Homo sapien
ccattctactctcccctgcttaaaa

SEQ ID NO: 4618200 - DNA, 25 bp, Homo sapien
caccagcatgctaatatttggtttt

SEQ ID NO: 4618201 - DNA, 25 bp, Homo sapien
ttttcattataagtcccattctact

SEQ ID NO: 4618202 - DNA, 25 bp, Homo sapien
tgcacaccagcatgctaatatttgg

SEQ ID NO: 4618203 - DNA, 25 bp, Homo sapien
agagagcctcctcgaaactcctgac

SEQ ID NO: 4618204 - DNA, 25 bp, Homo sapien
tggtatcctaccagagtcaagctac

SEQ ID NO: 4618205 - DNA, 25 bp, Homo sapien
tctgtgaaggaaattcaaccctggt

SEQ ID NO: 4618206 - DNA, 25 bp, Homo sapien
tatttcagtcttggagccaaaaagc

SEQ ID NO: 4618207 - DNA, 25 bp, Homo sapien
agcatacaacttaaggttaacctgg

SEQ ID NO: 4618208 - DNA, 25 bp, Homo sapien
tgtagcatacaacttaaggttaacc

SEQ ID NO: 4618209 - DNA, 25 bp, Homo sapien
tagcatacaacttaaggttaacctg

SEQ ID NO: 4618210 - DNA, 25 bp, Homo sapien
ttttgtagcatacaacttaaggtta

SEQ ID NO: 4618211 - DNA, 25 bp, Homo sapien
cacagcaccatgaatgacttgaaat

SEQ ID NO: 4618212 - DNA, 25 bp, Homo sapien
aaaccacttgatattgtctgcaggc

SEQ ID NO: 4618213 - DNA, 25 bp, Homo sapien
caacatggtgtatttcctggcaata

SEQ ID NO: 4618214 - DNA, 25 bp, Homo sapien
tactggcggcatgcaacacagcacc

SEQ ID NO: 4618215 - DNA, 25 bp, Homo sapien
tggaccgcttgtagaagactgtagc

SEQ ID NO: 4618216 - DNA, 25 bp, Homo sapien
tgccatgatggaccgcttgtagaag

SEQ ID NO: 4618217 - DNA, 25 bp, Homo sapien
aaagataaatgccatgatggaccgc

SEQ ID NO: 4618218 - DNA, 25 bp, Homo sapien
ccgcttgtagaagactgtagcattt

SEQ ID NO: 4618219 - DNA, 25 bp, Homo sapien
gaagactgtcgtcgactctccagct

SEQ ID NO: 4618220 - DNA, 25 bp, Homo sapien
tggaagactgtcgtcgactctccag

SEQ ID NO: 4618221 - DNA, 25 bp, Homo sapien
catggaagactgtcgtcgactctcc

SEQ ID NO: 4618222 - DNA, 25 bp, Homo sapien
aagactgtcgtcgactctccagctg

SEQ ID NO: 4618223 - DNA, 25 bp, Homo sapien
aaactggccatggtgcttgacatca

SEQ ID NO: 4618224 - DNA, 25 bp, Homo sapien
tcagggtcattagacacaggaagcc

SEQ ID NO: 4618225 - DNA, 25 bp, Homo sapien
gagctcggaaatcacctgcttctgg

SEQ ID NO: 4618226 - DNA, 25 bp, Homo sapien
taggtgctagttcaacaaccagggt

SEQ ID NO: 4618227 - DNA, 25 bp, Homo sapien
tgcacatatccaaagattctgtata

SEQ ID NO: 4618228 - DNA, 25 bp, Homo sapien
gcacatatccaaagattctgtatag

SEQ ID NO: 4618229 - DNA, 25 bp, Homo sapien
taactctagtctacttttccttcgc

SEQ ID NO: 4618230 - DNA, 25 bp, Homo sapien
gagtgattcagagagtgagactatg

SEQ ID NO: 4618231 - DNA, 25 bp, Homo sapien
caaactctaaaaagtgtaaagatga

SEQ ID NO: 4618232 - DNA, 25 bp, Homo sapien
ttttccttcgcacaatacaacactt

SEQ ID NO: 4618233 - DNA, 25 bp, Homo sapien
cacccactggggatgattgtcagaa

SEQ ID NO: 4618234 - DNA, 25 bp, Homo sapien
acccactggggatgattgtcagaat

SEQ ID NO: 4618235 - DNA, 25 bp, Homo sapien
ggctctccagcctctatcccatagc

SEQ ID NO: 4618236 - DNA, 25 bp, Homo sapien
ctccagcctctatcccatagcagat

SEQ ID NO: 4618237 - DNA, 25 bp, Homo sapien
aacagaggaaaaacatctccagtag

SEQ ID NO: 4618238 - DNA, 25 bp, Homo sapien
aaaacatctccagtagcagttggca

SEQ ID NO: 4618239 - DNA, 25 bp, Homo sapien
acatctccagtagcagttggcatga

SEQ ID NO: 4618240 - DNA, 25 bp, Homo sapien
aaaaacatctccagtagcagttggc

SEQ ID NO: 4618241 - DNA, 25 bp, Homo sapien
acaggatagcagctggtattctgcc

SEQ ID NO: 4618242 - DNA, 25 bp, Homo sapien
taaacacaagagtcctttgttgaga

SEQ ID NO: 4618243 - DNA, 25 bp, Homo sapien
cctttgttgagaagacaggatagca

SEQ ID NO: 4618244 - DNA, 25 bp, Homo sapien
gacatcatggtatactttgacatca

SEQ ID NO: 4618245 - DNA, 25 bp, Homo sapien
taacatgtctatctccacacaacat

SEQ ID NO: 4618246 - DNA, 25 bp, Homo sapien
tttattaacatgtctatctccacac

SEQ ID NO: 4618247 - DNA, 25 bp, Homo sapien
tattaacatgtctatctccacacaa

SEQ ID NO: 4618248 - DNA, 25 bp, Homo sapien
ttaacatgtctatctccacacaaca

SEQ ID NO: 4618249 - DNA, 25 bp, Homo sapien
ccagctggtgatcgcagccaacaat

SEQ ID NO: 4618250 - DNA, 25 bp, Homo sapien
aggtggacccatctccgttgcagac

SEQ ID NO: 4618251 - DNA, 25 bp, Homo sapien
gggatttatactgccctcggaccag

SEQ ID NO: 4618252 - DNA, 25 bp, Homo sapien
tatcttccttgacggtgcttcccag

SEQ ID NO: 4618253 - DNA, 25 bp, Homo sapien
taagccaggagaggataagtcaaca

SEQ ID NO: 4618254 - DNA, 25 bp, Homo sapien
taagtcaacaagtccaaaggtcgcc

SEQ ID NO: 4618255 - DNA, 25 bp, Homo sapien
gcagctggtaacctgacttgtccca

SEQ ID NO: 4618256 - DNA, 25 bp, Homo sapien
aaaggtcgcccatctctgtgtgtct

SEQ ID NO: 4618257 - DNA, 25 bp, Homo sapien
catgttccctgccagtgggtcgcct

SEQ ID NO: 4618258 - DNA, 25 bp, Homo sapien
agagcagcctcatgttccctgccag

SEQ ID NO: 4618259 - DNA, 25 bp, Homo sapien
ctgccagtgggtcgcctcacagtct

SEQ ID NO: 4618260 - DNA, 25 bp, Homo sapien
ggtcgcctcacagtctgtaaatata

SEQ ID NO: 4618261 - DNA, 25 bp, Homo sapien
ggctgatgctgtaatatctgtatgt

SEQ ID NO: 4618262 - DNA, 25 bp, Homo sapien
actggaacattaataccctagctct

SEQ ID NO: 4618263 - DNA, 25 bp, Homo sapien
tgatgctgtaatatctgtatgttcc

SEQ ID NO: 4618264 - DNA, 25 bp, Homo sapien
cattaataccctagctcttggctga

SEQ ID NO: 4618265 - DNA, 25 bp, Homo sapien
tatcattggaaggatttaggttaaa

SEQ ID NO: 4618266 - DNA, 25 bp, Homo sapien
cacctggcctgttcagacatatttt

SEQ ID NO: 4618267 - DNA, 25 bp, Homo sapien
ggaacacagtaagtattctgtaaac

SEQ ID NO: 4618268 - DNA, 25 bp, Homo sapien
tgtacataattatcctatcattgga

SEQ ID NO: 4618269 - DNA, 25 bp, Homo sapien
aagacaaggcgaatatgtctacttc

SEQ ID NO: 4618270 - DNA, 25 bp, Homo sapien
ataagtgatcaggaccttttaagac

SEQ ID NO: 4618271 - DNA, 25 bp, Homo sapien
ccttttaagacaaggcgaatatgtc

SEQ ID NO: 4618272 - DNA, 25 bp, Homo sapien
cgaatatgtctacttccatagggaa

SEQ ID NO: 4618273 - DNA, 25 bp, Homo sapien
gatcaaacacgtgaagatgagagaa

SEQ ID NO: 4618274 - DNA, 25 bp, Homo sapien
tatgatcaaacacgtgaagatgaga

SEQ ID NO: 4618275 - DNA, 25 bp, Homo sapien
tgatcaaacacgtgaagatgagaga

SEQ ID NO: 4618276 - DNA, 25 bp, Homo sapien
ctatatgatcaaacacgtgaagatg

SEQ ID NO: 4618277 - DNA, 25 bp, Homo sapien
ccacactagaattgtccacaaggaa

SEQ ID NO: 4618278 - DNA, 25 bp, Homo sapien
tagaattgtccacaaggaaagttcc

SEQ ID NO: 4618279 - DNA, 25 bp, Homo sapien
aattgtccacaaggaaagttcctgt

SEQ ID NO: 4618280 - DNA, 25 bp, Homo sapien
ctggaagtccacactagaattgtcc

SEQ ID NO: 4618281 - DNA, 25 bp, Homo sapien
aatctgctgtgagtggtccagccat

SEQ ID NO: 4618282 - DNA, 25 bp, Homo sapien
cttgacaatgaaatctgctgtgagt

SEQ ID NO: 4618283 - DNA, 25 bp, Homo sapien
atgaaatctgctgtgagtggtccag

SEQ ID NO: 4618284 - DNA, 25 bp, Homo sapien
caatgaaatctgctgtgagtggtcc

SEQ ID NO: 4618285 - DNA, 25 bp, Homo sapien
tcacgttcatgtggctggcgtctgg

SEQ ID NO: 4618286 - DNA, 25 bp, Homo sapien
tacctcggatggcttgtagcttctt

SEQ ID NO: 4618287 - DNA, 25 bp, Homo sapien
agcttcttgctcacgttcatgtggc

SEQ ID NO: 4618288 - DNA, 25 bp, Homo sapien
cctcggatggcttgtagcttcttgc

SEQ ID NO: 4618289 - DNA, 25 bp, Homo sapien
tactaagtcagccagttatccagat

SEQ ID NO: 4618290 - DNA, 25 bp, Homo sapien
cttcagaaaagatgcacatggcatg

SEQ ID NO: 4618291 - DNA, 25 bp, Homo sapien
ggttctaatgaagaatggacctatg

SEQ ID NO: 4618292 - DNA, 25 bp, Homo sapien
gactaaggaggactcttctacctgg

SEQ ID NO: 4618293 - DNA, 25 bp, Homo sapien
tcgaacaagagtatatggtagtgct

SEQ ID NO: 4618294 - DNA, 25 bp, Homo sapien
ctgcaggagtcaacaggaaagtaga

SEQ ID NO: 4618295 - DNA, 25 bp, Homo sapien
tggtcccttgcagcttcgaacaaga

SEQ ID NO: 4618296 - DNA, 25 bp, Homo sapien
gacagtgcggtgctttctggtccct

SEQ ID NO: 4618297 - DNA, 25 bp, Homo sapien
aaatccgtctccctccatcggtgga

SEQ ID NO: 4618298 - DNA, 25 bp, Homo sapien
ctggactgtactgtcagcggagccc

SEQ ID NO: 4618299 - DNA, 25 bp, Homo sapien
tgtcagcggagcccgagttacgaat

SEQ ID NO: 4618300 - DNA, 25 bp, Homo sapien
tgatgggttgatagaagatgaactg

SEQ ID NO: 4618301 - DNA, 25 bp, Homo sapien
tcctgtggatttctggtagggtggt

SEQ ID NO: 4618302 - DNA, 25 bp, Homo sapien
tagggtggtgatcaagacttagatt

SEQ ID NO: 4618303 - DNA, 25 bp, Homo sapien
ctggtagggtggtgatcaagactta

SEQ ID NO: 4618304 - DNA, 25 bp, Homo sapien
atttctggtagggtggtgatcaaga

SEQ ID NO: 4618305 - DNA, 25 bp, Homo sapien
aagttgcactcctgaagcttgggtt

SEQ ID NO: 4618306 - DNA, 25 bp, Homo sapien
cacggttgctcctcagatcgtagca

SEQ ID NO: 4618307 - DNA, 25 bp, Homo sapien
tgttctctgggtaatagtgacagta

SEQ ID NO: 4618308 - DNA, 25 bp, Homo sapien
tattggtcagcaaccacacggttgc

SEQ ID NO: 4618309 - DNA, 25 bp, Homo sapien
gattagtaatgaacactggacagca

SEQ ID NO: 4618310 - DNA, 25 bp, Homo sapien
gccagagcaaggagtatgggtacta

SEQ ID NO: 4618311 - DNA, 25 bp, Homo sapien
tctgaagagcatgtcacctgctgct

SEQ ID NO: 4618312 - DNA, 25 bp, Homo sapien
tagactccgagatggcctcgcatag

SEQ ID NO: 4618313 - DNA, 25 bp, Homo sapien
gctctgatcttgtccctgatcggga

SEQ ID NO: 4618314 - DNA, 25 bp, Homo sapien
taagaacgttgagtggtccattggc

SEQ ID NO: 4618315 - DNA, 25 bp, Homo sapien
aaaatcctgagaacattgtgtcatc

SEQ ID NO: 4618316 - DNA, 25 bp, Homo sapien
gctgtggccctgaaatatggtctgc

SEQ ID NO: 4618317 - DNA, 25 bp, Homo sapien
gactgcaaaggcaaacgttacacct

SEQ ID NO: 4618318 - DNA, 25 bp, Homo sapien
gaatgatttgcatcgacattgccca

SEQ ID NO: 4618319 - DNA, 25 bp, Homo sapien
taagttgaggatgagtaagctacac

SEQ ID NO: 4618320 - DNA, 25 bp, Homo sapien
ctctatataatcagtgtggacaggc

SEQ ID NO: 4618321 - DNA, 25 bp, Homo sapien
ggtagtgcataagtggaagatgctt

SEQ ID NO: 4618322 - DNA, 25 bp, Homo sapien
tagtgcataagtggaagatgcttat

SEQ ID NO: 4618323 - DNA, 25 bp, Homo sapien
gcataagtggaagatgcttattttg

SEQ ID NO: 4618324 - DNA, 25 bp, Homo sapien
taagtggaagatgcttattttgcaa

SEQ ID NO: 4618325 - DNA, 25 bp, Homo sapien
acagcaccttcatcaagagtgggag

SEQ ID NO: 4618326 - DNA, 25 bp, Homo sapien
gataagaccgctagtgcaacagcac

SEQ ID NO: 4618327 - DNA, 25 bp, Homo sapien
tcaactaaagtctccaattggtaag

SEQ ID NO: 4618328 - DNA, 25 bp, Homo sapien
ttggtaagactggtgggtccctgca

SEQ ID NO: 4618329 - DNA, 25 bp, Homo sapien
gggatggtagaggtcataaggcatg

SEQ ID NO: 4618330 - DNA, 25 bp, Homo sapien
ggatggtagaggtcataaggcatga

SEQ ID NO: 4618331 - DNA, 25 bp, Homo sapien
ggggatggtagaggtcataaggcat

SEQ ID NO: 4618332 - DNA, 25 bp, Homo sapien
gtcataaggcatgatctgcttgtat

SEQ ID NO: 4618333 - DNA, 25 bp, Homo sapien
attgctaagcctcctcagtgactgg

SEQ ID NO: 4618334 - DNA, 25 bp, Homo sapien
caaggggagtcatcagggcagacat

SEQ ID NO: 4618335 - DNA, 25 bp, Homo sapien
taagcctcctcagtgactggtccac

SEQ ID NO: 4618336 - DNA, 25 bp, Homo sapien
gtcatcagggcagacatgcacattg

SEQ ID NO: 4618337 - DNA, 25 bp, Homo sapien
cactgaagtgacatgcccctggatg

SEQ ID NO: 4618338 - DNA, 25 bp, Homo sapien
caggaaactgcccggctctggatgc

SEQ ID NO: 4618339 - DNA, 25 bp, Homo sapien
catttagggcagtcaaaaatgttgc

SEQ ID NO: 4618340 - DNA, 25 bp, Homo sapien
cagggctgcgcgatgggcatcttag

SEQ ID NO: 4618341 - DNA, 25 bp, Homo sapien
aatgaacaaagaaagaaggcacagt

SEQ ID NO: 4618342 - DNA, 25 bp, Homo sapien
ctaatgaacaaagaaagaaggcaca

SEQ ID NO: 4618343 - DNA, 25 bp, Homo sapien
gaacaaagaaagaaggcacagttac

SEQ ID NO: 4618344 - DNA, 25 bp, Homo sapien
tgaacaaagaaagaaggcacagtta

SEQ ID NO: 4618345 - DNA, 25 bp, Homo sapien
tctgcattagcagtcaggaaaccct

SEQ ID NO: 4618346 - DNA, 25 bp, Homo sapien
tgaatgaccagatgcccaatgtaga

SEQ ID NO: 4618347 - DNA, 25 bp, Homo sapien
gaaaggcagttgcttccccgtgcta

SEQ ID NO: 4618348 - DNA, 25 bp, Homo sapien
caaagcagcttttacagattcggga

SEQ ID NO: 4618349 - DNA, 25 bp, Homo sapien
gaggaccacacggtatctgaggccc

SEQ ID NO: 4618350 - DNA, 25 bp, Homo sapien
tttttgggctacagcctcctgtgtg

SEQ ID NO: 4618351 - DNA, 25 bp, Homo sapien
cctcgatggtcgatgcagaggacca

SEQ ID NO: 4618352 - DNA, 25 bp, Homo sapien
gagtgggtacgatgcattcctcttt

SEQ ID NO: 4618353 - DNA, 25 bp, Homo sapien
gatttttcagagaaatttaatggct

SEQ ID NO: 4618354 - DNA, 25 bp, Homo sapien
aaagaaatgggagccatatttaata

SEQ ID NO: 4618355 - DNA, 25 bp, Homo sapien
aaattcatattcttgctaatctgag

SEQ ID NO: 4618356 - DNA, 25 bp, Homo sapien
ataataaagagctacactgtgactg

SEQ ID NO: 4618357 - DNA, 25 bp, Homo sapien
gttactacgttgaccaacacgaata

SEQ ID NO: 4618358 - DNA, 25 bp, Homo sapien
ctacgttgaccaacacgaataagtt

SEQ ID NO: 4618359 - DNA, 25 bp, Homo sapien
caagaagttactacgttgaccaaca

SEQ ID NO: 4618360 - DNA, 25 bp, Homo sapien
gaagttactacgttgaccaacacga

SEQ ID NO: 4618361 - DNA, 25 bp, Homo sapien
tgcacatacaaaagaagaggttaga

SEQ ID NO: 4618362 - DNA, 25 bp, Homo sapien
gaattcagtgcatgcacatacaaaa

SEQ ID NO: 4618363 - DNA, 25 bp, Homo sapien
agaattcagtgcatgcacatacaaa

SEQ ID NO: 4618364 - DNA, 25 bp, Homo sapien
gcacatacaaaagaagaggttagaa

SEQ ID NO: 4618365 - DNA, 25 bp, Homo sapien
gaaccatggcaacttggcctcgact

SEQ ID NO: 4618366 - DNA, 25 bp, Homo sapien
tggcaacttggcctcgactggaagt

SEQ ID NO: 4618367 - DNA, 25 bp, Homo sapien
cttgtttgaaccatggcaacttggc

SEQ ID NO: 4618368 - DNA, 25 bp, Homo sapien
tttgaaccatggcaacttggcctcg

SEQ ID NO: 4618369 - DNA, 25 bp, Homo sapien
tggtgagatgattacacttagttca

SEQ ID NO: 4618370 - DNA, 25 bp, Homo sapien
tgaaagctacaaccagtgagacact

SEQ ID NO: 4618371 - DNA, 25 bp, Homo sapien
aaactaatcaatctttaatttgaga

SEQ ID NO: 4618372 - DNA, 25 bp, Homo sapien
agctttggtgagatgattacactta

SEQ ID NO: 4618373 - DNA, 25 bp, Homo sapien
tcttggcaattcagtttttagtctt

SEQ ID NO: 4618374 - DNA, 25 bp, Homo sapien
ttatttatttcttggcaattcagtt

SEQ ID NO: 4618375 - DNA, 25 bp, Homo sapien
tatttcttggcaattcagtttttag

SEQ ID NO: 4618376 - DNA, 25 bp, Homo sapien
tttcttggcaattcagtttttagtc

SEQ ID NO: 4618377 - DNA, 25 bp, Homo sapien
atcagatgtgtcataacaaaccaat

SEQ ID NO: 4618378 - DNA, 25 bp, Homo sapien
gctaagcgacagttcagatttagct

SEQ ID NO: 4618379 - DNA, 25 bp, Homo sapien
gctctgctaagcgacagttcagatt

SEQ ID NO: 4618380 - DNA, 25 bp, Homo sapien
taagcgacagttcagatttagcttt

SEQ ID NO: 4618381 - DNA, 25 bp, Homo sapien
tctgctaagcgacagttcagattta

SEQ ID NO: 4618382 - DNA, 25 bp, Homo sapien
ggcacacaaggatcccattaatttg

SEQ ID NO: 4618383 - DNA, 25 bp, Homo sapien
aaaatgaccttaatggacttaacat

SEQ ID NO: 4618384 - DNA, 25 bp, Homo sapien
gacttaacatatattggtggtgaca

SEQ ID NO: 4618385 - DNA, 25 bp, Homo sapien
tgacagggtgcatactttattttgg

SEQ ID NO: 4618386 - DNA, 25 bp, Homo sapien
caaacaagaggacaggatgagaagc

SEQ ID NO: 4618387 - DNA, 25 bp, Homo sapien
gcaaacaagaggacaggatgagaag

SEQ ID NO: 4618388 - DNA, 25 bp, Homo sapien
caagcaaacaagaggacaggatgag

SEQ ID NO: 4618389 - DNA, 25 bp, Homo sapien
aagcaaacaagaggacaggatgaga

SEQ ID NO: 4618390 - DNA, 25 bp, Homo sapien
agcacctggcacctgactattcgca

SEQ ID NO: 4618391 - DNA, 25 bp, Homo sapien
gcacctgactattcgcacctgggtc

SEQ ID NO: 4618392 - DNA, 25 bp, Homo sapien
cctggcacctgactattcgcacctg

SEQ ID NO: 4618393 - DNA, 25 bp, Homo sapien
tggcacctgactattcgcacctggg

SEQ ID NO: 4618394 - DNA, 25 bp, Homo sapien
tgcataacaggcacgctgggatgct

SEQ ID NO: 4618395 - DNA, 25 bp, Homo sapien
gactcggagcacttggtgaacccct

SEQ ID NO: 4618396 - DNA, 25 bp, Homo sapien
tcgtcaataggcaggtcagccacgg

SEQ ID NO: 4618397 - DNA, 25 bp, Homo sapien
tacagctcgtcgaaatcctgcaggc

SEQ ID NO: 4618398 - DNA, 25 bp, Homo sapien
cagctgtagatcatcactgtgaatt

SEQ ID NO: 4618399 - DNA, 25 bp, Homo sapien
gtagatcatcactgtgaattgcttc

SEQ ID NO: 4618400 - DNA, 25 bp, Homo sapien
gaattgcttccttgctcatgcataa

SEQ ID NO: 4618401 - DNA, 25 bp, Homo sapien
catgcataagtgtatctgcaatact

SEQ ID NO: 4618402 - DNA, 25 bp, Homo sapien
actgatgatgttccaatgattcttg

SEQ ID NO: 4618403 - DNA, 25 bp, Homo sapien
cactgatgatgttccaatgattctt

SEQ ID NO: 4618404 - DNA, 25 bp, Homo sapien
ccaatgattcttgttggtaataagt

SEQ ID NO: 4618405 - DNA, 25 bp, Homo sapien
gcaacccggagggagtgacactggc

SEQ ID NO: 4618406 - DNA, 25 bp, Homo sapien
tgtggtgccgagagtagcaacccgg

SEQ ID NO: 4618407 - DNA, 25 bp, Homo sapien
ggtactaggtttcgacaagtttgca

SEQ ID NO: 4618408 - DNA, 25 bp, Homo sapien
cactggctgcgggaacccggtgaca

SEQ ID NO: 4618409 - DNA, 25 bp, Homo sapien
gaaattcatggtatgacgacacagc

SEQ ID NO: 4618410 - DNA, 25 bp, Homo sapien
taatcactgatacttcccactggaa

SEQ ID NO: 4618411 - DNA, 25 bp, Homo sapien
gaaattgggtcaacgatcctgaggc

SEQ ID NO: 4618412 - DNA, 25 bp, Homo sapien
catattctgtaatgctgactgcagg

SEQ ID NO: 4618413 - DNA, 25 bp, Homo sapien
tctcctcccacgtatgctgtgtttc

SEQ ID NO: 4618414 - DNA, 25 bp, Homo sapien
ctcctcccacgtatgctgtgtttct

SEQ ID NO: 4618415 - DNA, 25 bp, Homo sapien
tggtcacgcacaggttctcctcagc

SEQ ID NO: 4618416 - DNA, 25 bp, Homo sapien
caggctcccgagtctgtttgttcaa

SEQ ID NO: 4618417 - DNA, 25 bp, Homo sapien
aattgcaggacttcaggagctgtgg

SEQ ID NO: 4618418 - DNA, 25 bp, Homo sapien
tgtttgttcaagcagctcaccacag

SEQ ID NO: 4618419 - DNA, 25 bp, Homo sapien
gttccatgctgagtcgatactgctt

SEQ ID NO: 4618420 - DNA, 25 bp, Homo sapien
caaagaacgttgcaggcgttccatg

SEQ ID NO: 4618421 - DNA, 25 bp, Homo sapien
aagaacgttgcaggcgttccatgct

SEQ ID NO: 4618422 - DNA, 25 bp, Homo sapien
gcgttccatgctgagtcgatactgc

SEQ ID NO: 4618423 - DNA, 25 bp, Homo sapien
tcgccctaggccacagagctagttg

SEQ ID NO: 4618424 - DNA, 25 bp, Homo sapien
tgagcaagtcatgggatctcagatc

SEQ ID NO: 4618425 - DNA, 25 bp, Homo sapien
aaacataaagggcagacacctcgcc

SEQ ID NO: 4618426 - DNA, 25 bp, Homo sapien
gaatcatgggacatgtgagcaagtc

SEQ ID NO: 4618427 - DNA, 25 bp, Homo sapien
tatggtcgacccaagaaactcctgg

SEQ ID NO: 4618428 - DNA, 25 bp, Homo sapien
tgtctgtgagtcaacaaaagggtca

SEQ ID NO: 4618429 - DNA, 25 bp, Homo sapien
gctgtgcccagtgagaggtcttgcc

SEQ ID NO: 4618430 - DNA, 25 bp, Homo sapien
gcagttttaagcaagtcccaggcac

SEQ ID NO: 4618431 - DNA, 25 bp, Homo sapien
taatatggtccaaacattgctacct

SEQ ID NO: 4618432 - DNA, 25 bp, Homo sapien
taaggaaaggatcaacagcatctgg

SEQ ID NO: 4618433 - DNA, 25 bp, Homo sapien
taaatttggccctggtccttcatac

SEQ ID NO: 4618434 - DNA, 25 bp, Homo sapien
caaagctgatagcaagaactctaaa

SEQ ID NO: 4618435 - DNA, 25 bp, Homo sapien
gctggcttgaagctaggttctatcc

SEQ ID NO: 4618436 - DNA, 25 bp, Homo sapien
taaatggaatgtcccaacaagtact

SEQ ID NO: 4618437 - DNA, 25 bp, Homo sapien
taactgcctaagagatctggtgagg

SEQ ID NO: 4618438 - DNA, 25 bp, Homo sapien
tttcaggaccccatgatgacaagct

SEQ ID NO: 4618439 - DNA, 25 bp, Homo sapien
tcaaggactgattcaagcccttcct

SEQ ID NO: 4618440 - DNA, 25 bp, Homo sapien
gatcaaggactgattcaagcccttc

SEQ ID NO: 4618441 - DNA, 25 bp, Homo sapien
caagatcaaggactgattcaagccc

SEQ ID NO: 4618442 - DNA, 25 bp, Homo sapien
ctcaagatcaaggactgattcaagc

SEQ ID NO: 4618443 - DNA, 25 bp, Homo sapien
ttgttggcttcccaatacaccatgt

SEQ ID NO: 4618444 - DNA, 25 bp, Homo sapien
gcttcccaatacaccatgtttctct

SEQ ID NO: 4618445 - DNA, 25 bp, Homo sapien
caggcacagccacttgttggcttcc

SEQ ID NO: 4618446 - DNA, 25 bp, Homo sapien
tttcacatctgtgaatttgcttcca

SEQ ID NO: 4618447 - DNA, 25 bp, Homo sapien
ggcaacggggcactgcatgtctgga

SEQ ID NO: 4618448 - DNA, 25 bp, Homo sapien
tggagttgaactttcaaactggcct

SEQ ID NO: 4618449 - DNA, 25 bp, Homo sapien
cttccactttgtagggactgaactt

SEQ ID NO: 4618450 - DNA, 25 bp, Homo sapien
tcctcttccactttgtagggactga

SEQ ID NO: 4618451 - DNA, 25 bp, Homo sapien
gctattatgccctaagaaccttctt

SEQ ID NO: 4618452 - DNA, 25 bp, Homo sapien
tatgtgagttgccaaggttttgctc

SEQ ID NO: 4618453 - DNA, 25 bp, Homo sapien
tcttttacctcgacttttgcagcaa

SEQ ID NO: 4618454 - DNA, 25 bp, Homo sapien
aatttctaatggcagacccttccca

SEQ ID NO: 4618455 - DNA, 25 bp, Homo sapien
cgtgcgttctgtgcctttggctgtt

SEQ ID NO: 4618456 - DNA, 25 bp, Homo sapien
gggctgatgccctattccgtgcgtt

SEQ ID NO: 4618457 - DNA, 25 bp, Homo sapien
gccctattccgtgcgttctgtgcct

SEQ ID NO: 4618458 - DNA, 25 bp, Homo sapien
gcctgcaagtgtgggcctgggtctt

SEQ ID NO: 4618459 - DNA, 25 bp, Homo sapien
ggcccgcatctgagtcagttttgta

SEQ ID NO: 4618460 - DNA, 25 bp, Homo sapien
cagttttgtattacttgcagggtcc

SEQ ID NO: 4618461 - DNA, 25 bp, Homo sapien
aagggcactgctagagtgtatacct

SEQ ID NO: 4618462 - DNA, 25 bp, Homo sapien
tatacctcctgatgtagggcccgca

SEQ ID NO: 4618463 - DNA, 25 bp, Homo sapien
catgtgagactacatggactccact

SEQ ID NO: 4618464 - DNA, 25 bp, Homo sapien
cacatgtgagactacatggactcca

SEQ ID NO: 4618465 - DNA, 25 bp, Homo sapien
cccacatgtgagactacatggactc

SEQ ID NO: 4618466 - DNA, 25 bp, Homo sapien
accccacatgtgagactacatggac

SEQ ID NO: 4618467 - DNA, 25 bp, Homo sapien
ctctctggaaagcaggtggctgcag

SEQ ID NO: 4618468 - DNA, 25 bp, Homo sapien
ggtggctgcagaagacgtctctggt

SEQ ID NO: 4618469 - DNA, 25 bp, Homo sapien
gcaggtggctgcagaagacgtctct

SEQ ID NO: 4618470 - DNA, 25 bp, Homo sapien
ctctggaaagcaggtggctgcagaa

SEQ ID NO: 4618471 - DNA, 25 bp, Homo sapien
caagcttgcaccgtgctgggcttgg

SEQ ID NO: 4618472 - DNA, 25 bp, Homo sapien
gcaattaaagcggttacaagcttgc

SEQ ID NO: 4618473 - DNA, 25 bp, Homo sapien
cttgggctggcgacacagctcatca

SEQ ID NO: 4618474 - DNA, 25 bp, Homo sapien
ttgggctggcgacacagctcatcag

SEQ ID NO: 4618475 - DNA, 25 bp, Homo sapien
agtctgagagaagccactcgctggg

SEQ ID NO: 4618476 - DNA, 25 bp, Homo sapien
tgaagctgaacagaaggtctcagga

SEQ ID NO: 4618477 - DNA, 25 bp, Homo sapien
cttgctggcaggcaggttttgaagc

SEQ ID NO: 4618478 - DNA, 25 bp, Homo sapien
tgccatcagccatgcgctgcttgca

SEQ ID NO: 4618479 - DNA, 25 bp, Homo sapien
cacaggttgccagcatacagggcct

SEQ ID NO: 4618480 - DNA, 25 bp, Homo sapien
ttgagaggccggttttcagcatctt

SEQ ID NO: 4618481 - DNA, 25 bp, Homo sapien
cgggcacagggtggaattgacaacc

SEQ ID NO: 4618482 - DNA, 25 bp, Homo sapien
caaatggcgcttcgagtctgggtgc

SEQ ID NO: 4618483 - DNA, 25 bp, Homo sapien
gtctgtatgtagaccttcctggcgg

SEQ ID NO: 4618484 - DNA, 25 bp, Homo sapien
acgagcttgcggttgcctccgatga

SEQ ID NO: 4618485 - DNA, 25 bp, Homo sapien
tgtagacgcctgcatccgagggctt

SEQ ID NO: 4618486 - DNA, 25 bp, Homo sapien
ttaatcacaaagtgctcccgggccg

SEQ ID NO: 4618487 - DNA, 25 bp, Homo sapien
ttcctccccgcaagcacctcttcct

SEQ ID NO: 4618488 - DNA, 25 bp, Homo sapien
ctccccgcaagcacctcttcctcac

SEQ ID NO: 4618489 - DNA, 25 bp, Homo sapien
cttcctccccgcaagcacctcttcc

SEQ ID NO: 4618490 - DNA, 25 bp, Homo sapien
tcctccccgcaagcacctcttcctc

SEQ ID NO: 4618491 - DNA, 25 bp, Homo sapien
cgaggtcgtgttcctttccgcagag

SEQ ID NO: 4618492 - DNA, 25 bp, Homo sapien
ccagacacgtgtttatgaggcgaga

SEQ ID NO: 4618493 - DNA, 25 bp, Homo sapien
tccgagggcttcaggagcgtgtcct

SEQ ID NO: 4618494 - DNA, 25 bp, Homo sapien
tgctgccgttggagaagatcccgtt

SEQ ID NO: 4618495 - DNA, 25 bp, Homo sapien
ccatgggaaacagcaggtgctggct

SEQ ID NO: 4618496 - DNA, 25 bp, Homo sapien
ggtgctggctgcattctctgcccag

SEQ ID NO: 4618497 - DNA, 25 bp, Homo sapien
tgctggctgcattctctgcccagcc

SEQ ID NO: 4618498 - DNA, 25 bp, Homo sapien
caggtgctggctgcattctctgccc

SEQ ID NO: 4618499 - DNA, 25 bp, Homo sapien
gccattggagttagactctcaatgc

SEQ ID NO: 4618500 - DNA, 25 bp, Homo sapien
ttggagttagactctcaatgcccat

SEQ ID NO: 4618501 - DNA, 25 bp, Homo sapien
cttaaagccattggagttagactct

SEQ ID NO: 4618502 - DNA, 25 bp, Homo sapien
taaagccattggagttagactctca

SEQ ID NO: 4618503 - DNA, 25 bp, Homo sapien
tagtgttctttgcacctggctgcca

SEQ ID NO: 4618504 - DNA, 25 bp, Homo sapien
cttgcctaggcccagtgctttagtg

SEQ ID NO: 4618505 - DNA, 25 bp, Homo sapien
cctggctgccacgtctctgtttcta

SEQ ID NO: 4618506 - DNA, 25 bp, Homo sapien
ggcccagtgctttagtgttctttgc

SEQ ID NO: 4618507 - DNA, 25 bp, Homo sapien
tctggcttgctattcttacactttt

SEQ ID NO: 4618508 - DNA, 25 bp, Homo sapien
ttctttttctctggcttgctattct

SEQ ID NO: 4618509 - DNA, 25 bp, Homo sapien
ctttttctctggcttgctattctta

SEQ ID NO: 4618510 - DNA, 25 bp, Homo sapien
tttctctggcttgctattcttacac

SEQ ID NO: 4618511 - DNA, 25 bp, Homo sapien
ggttgtctactatcctccagtgctc

SEQ ID NO: 4618512 - DNA, 25 bp, Homo sapien
tagtactgtctgtttgccactggtt

SEQ ID NO: 4618513 - DNA, 25 bp, Homo sapien
gtactgtctgtttgccactggttgt

SEQ ID NO: 4618514 - DNA, 25 bp, Homo sapien
agtactgtctgtttgccactggttg

SEQ ID NO: 4618515 - DNA, 25 bp, Homo sapien
gtagatgaaggcttgaaggctgcca

SEQ ID NO: 4618516 - DNA, 25 bp, Homo sapien
cactaggcggagcagtagttctgga

SEQ ID NO: 4618517 - DNA, 25 bp, Homo sapien
aaggctgccactaggcggagcagta

SEQ ID NO: 4618518 - DNA, 25 bp, Homo sapien
gatgaaggcttgaaggctgccacta

SEQ ID NO: 4618519 - DNA, 25 bp, Homo sapien
tagaagtaaggcttccatcaatcaa

SEQ ID NO: 4618520 - DNA, 25 bp, Homo sapien
gtagaagtaaggcttccatcaatca

SEQ ID NO: 4618521 - DNA, 25 bp, Homo sapien
catcaatcaatcgagttatatatgg

SEQ ID NO: 4618522 - DNA, 25 bp, Homo sapien
tcaatcgagttatatatgggcagct

SEQ ID NO: 4618523 - DNA, 25 bp, Homo sapien
aaaagaaatatagacctggtcaagt

SEQ ID NO: 4618524 - DNA, 25 bp, Homo sapien
tttggcattcaatattggtaaggca

SEQ ID NO: 4618525 - DNA, 25 bp, Homo sapien
ggaacctcagggtgtatgcagaacc

SEQ ID NO: 4618526 - DNA, 25 bp, Homo sapien
gacctggtcaagtcagttgactcct

SEQ ID NO: 4618527 - DNA, 25 bp, Homo sapien
ctaatgtgacggcaatggagacaga

SEQ ID NO: 4618528 - DNA, 25 bp, Homo sapien
gcttccactggtgccaagatctgta

SEQ ID NO: 4618529 - DNA, 25 bp, Homo sapien
ccaaggcattggtggcattgcaagt

SEQ ID NO: 4618530 - DNA, 25 bp, Homo sapien
gagacagagtcgtatcccaaggcat

SEQ ID NO: 4618531 - DNA, 25 bp, Homo sapien
tgtgactggagtacagtatgacaac

SEQ ID NO: 4618532 - DNA, 25 bp, Homo sapien
gcaaagccgcctgctaagggtccct

SEQ ID NO: 4618533 - DNA, 25 bp, Homo sapien
gttgactttgatcttccccgcaaag

SEQ ID NO: 4618534 - DNA, 25 bp, Homo sapien
tatcagtctttaatccggcccaggg

SEQ ID NO: 4618535 - DNA, 25 bp, Homo sapien
atttaacagccaagatgattctcca

SEQ ID NO: 4618536 - DNA, 25 bp, Homo sapien
taacagccaagatgattctccaatc

SEQ ID NO: 4618537 - DNA, 25 bp, Homo sapien
ttgcctaggccattcggatttggaa

SEQ ID NO: 4618538 - DNA, 25 bp, Homo sapien
tttggaagatttctgagcaagatgg

SEQ ID NO: 4618539 - DNA, 25 bp, Homo sapien
aacagaagtgttcagccaaccaggc

SEQ ID NO: 4618540 - DNA, 25 bp, Homo sapien
ggagagcctgacatatggctaaaac

SEQ ID NO: 4618541 - DNA, 25 bp, Homo sapien
aggccattaaggaaggagcatggcc

SEQ ID NO: 4618542 - DNA, 25 bp, Homo sapien
actcgtacgtcagcatccaaggatg

SEQ ID NO: 4618543 - DNA, 25 bp, Homo sapien
tagggaaaagtgtaactatgccatc

SEQ ID NO: 4618544 - DNA, 25 bp, Homo sapien
tctttccagaagtcgaagtcctgtg

SEQ ID NO: 4618545 - DNA, 25 bp, Homo sapien
ttaataggcctttatcagctgggaa

SEQ ID NO: 4618546 - DNA, 25 bp, Homo sapien
caaggtctttggtcagttggctttc

SEQ ID NO: 4618547 - DNA, 25 bp, Homo sapien
ccctgcactgttttgatggtgcttc

SEQ ID NO: 4618548 - DNA, 25 bp, Homo sapien
tcctatatcgactgtgactgcaggc

SEQ ID NO: 4618549 - DNA, 25 bp, Homo sapien
gactgcaggcttctccgtgttgatc

SEQ ID NO: 4618550 - DNA, 25 bp, Homo sapien
ctgcaacctggcagttgattgtcac

SEQ ID NO: 4618551 - DNA, 25 bp, Homo sapien
aaagggctctactggcaccaccatt

SEQ ID NO: 4618552 - DNA, 25 bp, Homo sapien
tgcagaaagggctctactggcacca

SEQ ID NO: 4618553 - DNA, 25 bp, Homo sapien
tgtgtccatagtgatcaggtgtgtg

SEQ ID NO: 4618554 - DNA, 25 bp, Homo sapien
gtttcatcgccaaagcatgtgtcca

SEQ ID NO: 4618555 - DNA, 25 bp, Homo sapien
tgcgggagatgatcttttctagcct

SEQ ID NO: 4618556 - DNA, 25 bp, Homo sapien
caaggtgttgtcaggagagaggttc

SEQ ID NO: 4618557 - DNA, 25 bp, Homo sapien
tcttgttgagaagcttggtcaggtt

SEQ ID NO: 4618558 - DNA, 25 bp, Homo sapien
tctgctgtggttgtaaaaccaaggt

SEQ ID NO: 4618559 - DNA, 25 bp, Homo sapien
ccaggaatggcttgcaagcttcttc

SEQ ID NO: 4618560 - DNA, 25 bp, Homo sapien
ctggatataaaccaaaagggctgaa

SEQ ID NO: 4618561 - DNA, 25 bp, Homo sapien
atctcatgccgttctaaaattgtgc

SEQ ID NO: 4618562 - DNA, 25 bp, Homo sapien
aaaccaaaagggctgaattcctctg

SEQ ID NO: 4618563 - DNA, 25 bp, Homo sapien
tgcctgcatcttcctttgaggaggg

SEQ ID NO: 4618564 - DNA, 25 bp, Homo sapien
tgctctagggaccccatgaattcct

SEQ ID NO: 4618565 - DNA, 25 bp, Homo sapien
ctagggaccccatgaattcctcagg

SEQ ID NO: 4618566 - DNA, 25 bp, Homo sapien
ctctagggaccccatgaattcctca

SEQ ID NO: 4618567 - DNA, 25 bp, Homo sapien
gtgctctagggaccccatgaattcc

SEQ ID NO: 4618568 - DNA, 25 bp, Homo sapien
tgagcccagaggcatttatagcttc

SEQ ID NO: 4618569 - DNA, 25 bp, Homo sapien
ggcatttatagcttcttgaatcccc

SEQ ID NO: 4618570 - DNA, 25 bp, Homo sapien
tctacagggacatcttctaccaggc

SEQ ID NO: 4618571 - DNA, 25 bp, Homo sapien
ctgctctacagggacatcttctacc

SEQ ID NO: 4618572 - DNA, 25 bp, Homo sapien
aaaaccccactcatcagtcaaacac

SEQ ID NO: 4618573 - DNA, 25 bp, Homo sapien
aaaccccactcatcagtcaaacaca

SEQ ID NO: 4618574 - DNA, 25 bp, Homo sapien
aaccccactcatcagtcaaacacat

SEQ ID NO: 4618575 - DNA, 25 bp, Homo sapien
caaggagccttcgtgcagatggtgc

SEQ ID NO: 4618576 - DNA, 25 bp, Homo sapien
acacgtttgtgagcagcaaggagcc

SEQ ID NO: 4618577 - DNA, 25 bp, Homo sapien
agtacaggccctgatccgaggagga

SEQ ID NO: 4618578 - DNA, 25 bp, Homo sapien
tccatgaagattggccgccctgcag

SEQ ID NO: 4618579 - DNA, 25 bp, Homo sapien
aacatggctgagtccagaactgggc

SEQ ID NO: 4618580 - DNA, 25 bp, Homo sapien
aaaacggttatagcttgcaacatgg

SEQ ID NO: 4618581 - DNA, 25 bp, Homo sapien
tggagactttagatggaccagacca

SEQ ID NO: 4618582 - DNA, 25 bp, Homo sapien
cagatggtggatggtgtcccagcaa

SEQ ID NO: 4618583 - DNA, 25 bp, Homo sapien
gttcggtccagtggcagcgagcaag

SEQ ID NO: 4618584 - DNA, 25 bp, Homo sapien
agcactgaaggaaggttcggtccag

SEQ ID NO: 4618585 - DNA, 25 bp, Homo sapien
ccctgatgtcttccaactgtgtggg

SEQ ID NO: 4618586 - DNA, 25 bp, Homo sapien
gcagcgagcaaggccctgatgtctt

SEQ ID NO: 4618587 - DNA, 25 bp, Homo sapien
tcagaaaggagccatattggaatct

SEQ ID NO: 4618588 - DNA, 25 bp, Homo sapien
cagagtccagactaacaactgcatt

SEQ ID NO: 4618589 - DNA, 25 bp, Homo sapien
catattggaatctagacaagccaca

SEQ ID NO: 4618590 - DNA, 25 bp, Homo sapien
ttagtgattccctgttggccacccc

SEQ ID NO: 4618591 - DNA, 25 bp, Homo sapien
gtacaactccttgctaccagagggc

SEQ ID NO: 4618592 - DNA, 25 bp, Homo sapien
ggcactacccatgtgggaaataact

SEQ ID NO: 4618593 - DNA, 25 bp, Homo sapien
ggcccaggacttgaatgccctcgta

SEQ ID NO: 4618594 - DNA, 25 bp, Homo sapien
catgtgtgaaggtttttccggcatc

SEQ ID NO: 4618595 - DNA, 25 bp, Homo sapien
ggaatttaaggtgtctcttaactgc

SEQ ID NO: 4618596 - DNA, 25 bp, Homo sapien
tcattcaaatggagcagtctggatg

SEQ ID NO: 4618597 - DNA, 25 bp, Homo sapien
gtctcttaactgctggatttaaata

SEQ ID NO: 4618598 - DNA, 25 bp, Homo sapien
caaatggagcagtctggatgtggac

SEQ ID NO: 4618599 - DNA, 25 bp, Homo sapien
ttctcatacccagagcgcacactgt

SEQ ID NO: 4618600 - DNA, 25 bp, Homo sapien
atttctcatacccagagcgcacact

SEQ ID NO: 4618601 - DNA, 25 bp, Homo sapien
ttatttctcatacccagagcgcaca

SEQ ID NO: 4618602 - DNA, 25 bp, Homo sapien
ctcatacccagagcgcacactgtgg

SEQ ID NO: 4618603 - DNA, 25 bp, Homo sapien
tcttagcagggatgtctgaactgca

SEQ ID NO: 4618604 - DNA, 25 bp, Homo sapien
ctttttgcatgagatttagggtcaa

SEQ ID NO: 4618605 - DNA, 25 bp, Homo sapien
agagccttgccgctcttagcaggga

SEQ ID NO: 4618606 - DNA, 25 bp, Homo sapien
tagggtcaacaagagccttgccgct

SEQ ID NO: 4618607 - DNA, 25 bp, Homo sapien
gcatccctgtccttccttggcatca

SEQ ID NO: 4618608 - DNA, 25 bp, Homo sapien
ctgtccttccttggcatcaccttcc

SEQ ID NO: 4618609 - DNA, 25 bp, Homo sapien
tccttggcatcaccttccttgccac

SEQ ID NO: 4618610 - DNA, 25 bp, Homo sapien
ctccccttcccggcatccctgtcct

SEQ ID NO: 4618611 - DNA, 25 bp, Homo sapien
cctatgaatatgctacctcacatga

SEQ ID NO: 4618612 - DNA, 25 bp, Homo sapien
ctaatataaactacgctgtggtgaa

SEQ ID NO: 4618613 - DNA, 25 bp, Homo sapien
ggtgaatttcctagtacatacatct

SEQ ID NO: 4618614 - DNA, 25 bp, Homo sapien
catgactgaagtagcactgatagct

SEQ ID NO: 4618615 - DNA, 25 bp, Homo sapien
catgatcctgggcatctggtagaag

SEQ ID NO: 4618616 - DNA, 25 bp, Homo sapien
tcttcacccctagcgtaagctttgg

SEQ ID NO: 4618617 - DNA, 25 bp, Homo sapien
tatgctaacgtctcccatgatcctg

SEQ ID NO: 4618618 - DNA, 25 bp, Homo sapien
tttatgacttgattaaggccttgca

SEQ ID NO: 4618619 - DNA, 25 bp, Homo sapien
taaggccatggggtgactgagcaaa

SEQ ID NO: 4618620 - DNA, 25 bp, Homo sapien
cactctaaggccatggggtgactga

SEQ ID NO: 4618621 - DNA, 25 bp, Homo sapien
agagcttagaaggagtgggagctgg

SEQ ID NO: 4618622 - DNA, 25 bp, Homo sapien
tggcagagatggtcgctaaagagct

SEQ ID NO: 4618623 - DNA, 25 bp, Homo sapien
atgtgtgtcgggatgaaacttggca

SEQ ID NO: 4618624 - DNA, 25 bp, Homo sapien
ttggcacttggtgtagtcagtctgg

SEQ ID NO: 4618625 - DNA, 25 bp, Homo sapien
tgtgtcgggatgaaacttggcactt

SEQ ID NO: 4618626 - DNA, 25 bp, Homo sapien
aacttggcacttggtgtagtcagtc

SEQ ID NO: 4618627 - DNA, 25 bp, Homo sapien
cttcgtttctttgctcacttatttt

SEQ ID NO: 4618628 - DNA, 25 bp, Homo sapien
tccttcgtttctttgctcacttatt

SEQ ID NO: 4618629 - DNA, 25 bp, Homo sapien
tgctcacttatttttttccccttca

SEQ ID NO: 4618630 - DNA, 25 bp, Homo sapien
ctccttcgtttctttgctcacttat

SEQ ID NO: 4618631 - DNA, 25 bp, Homo sapien
tgccaagatgtgatgcgtcagtcct

SEQ ID NO: 4618632 - DNA, 25 bp, Homo sapien
acttgaaggatctgtccagctgcca

SEQ ID NO: 4618633 - DNA, 25 bp, Homo sapien
ggcagtgacaattggctgaccacca

SEQ ID NO: 4618634 - DNA, 25 bp, Homo sapien
gatgccttctgcatgagcacccctg

SEQ ID NO: 4618635 - DNA, 25 bp, Homo sapien
ccatcacagtacagatttgagctgg

SEQ ID NO: 4618636 - DNA, 25 bp, Homo sapien
agcagaggctagctggctccaagaa

SEQ ID NO: 4618637 - DNA, 25 bp, Homo sapien
gagagtgcttatttacatgagacaa

SEQ ID NO: 4618638 - DNA, 25 bp, Homo sapien
tacaagtcttgcaaataggccctgg

SEQ ID NO: 4618639 - DNA, 25 bp, Homo sapien
aggttgccagtctgtccacagacca

SEQ ID NO: 4618640 - DNA, 25 bp, Homo sapien
ggttgacctccgtgctgttcagcag

SEQ ID NO: 4618641 - DNA, 25 bp, Homo sapien
agtctctccggttgcacgcgatggg

SEQ ID NO: 4618642 - DNA, 25 bp, Homo sapien
tgggctgcaccgcagggcgaacctt

SEQ ID NO: 4618643 - DNA, 25 bp, Homo sapien
tatacgtttcagcaatttttcagga

SEQ ID NO: 4618644 - DNA, 25 bp, Homo sapien
caaactgctgatattaatgagcatg

SEQ ID NO: 4618645 - DNA, 25 bp, Homo sapien
ttcctgtggaaaccttcccgtcagc

SEQ ID NO: 4618646 - DNA, 25 bp, Homo sapien
gcgggccaggctatgttacagttca

SEQ ID NO: 4618647 - DNA, 25 bp, Homo sapien
acacagctgctggttacaggcctgg

SEQ ID NO: 4618648 - DNA, 25 bp, Homo sapien
agatcccagaggctttcagcttttg

SEQ ID NO: 4618649 - DNA, 25 bp, Homo sapien
gacctgggtgcacatgtcattggac

SEQ ID NO: 4618650 - DNA, 25 bp, Homo sapien
tcagcttttgacaggtcaccctgcg

SEQ ID NO: 4618651 - DNA, 25 bp, Homo sapien
tacaaactgccaataagcctcgagg

SEQ ID NO: 4618652 - DNA, 25 bp, Homo sapien
gcccttggactagcagcactgatgt

SEQ ID NO: 4618653 - DNA, 25 bp, Homo sapien
cacaaatggcttacgagatggaacg

SEQ ID NO: 4618654 - DNA, 25 bp, Homo sapien
aaagctcgacacgtactggcctgga

SEQ ID NO: 4618655 - DNA, 25 bp, Homo sapien
ggtaacataccgcacattagccaag

SEQ ID NO: 4618656 - DNA, 25 bp, Homo sapien
catggcatgcacgatccttgtgtag

SEQ ID NO: 4618657 - DNA, 25 bp, Homo sapien
tagaaccagtaagagaacgtcaagc

SEQ ID NO: 4618658 - DNA, 25 bp, Homo sapien
tgggcattctgccagcaaatggcta

SEQ ID NO: 4618659 - DNA, 25 bp, Homo sapien
gaggcccgatgcaaggcccattgca

SEQ ID NO: 4618660 - DNA, 25 bp, Homo sapien
taggtgaggcccgatgcaaggccca

SEQ ID NO: 4618661 - DNA, 25 bp, Homo sapien
tgaggcccgatgcaaggcccattgc

SEQ ID NO: 4618662 - DNA, 25 bp, Homo sapien
ggtgaggcccgatgcaaggcccatt

SEQ ID NO: 4618663 - DNA, 25 bp, Homo sapien
tcggaagagcactgcactgctctga

SEQ ID NO: 4618664 - DNA, 25 bp, Homo sapien
aggtgatgccatcccgtgtctggca

SEQ ID NO: 4618665 - DNA, 25 bp, Homo sapien
cccgtgtctggcagaagacttgtct

SEQ ID NO: 4618666 - DNA, 25 bp, Homo sapien
actgctctgatggtaaggtgatgcc

SEQ ID NO: 4618667 - DNA, 25 bp, Homo sapien
tgcacagggtccacaggctgactct

SEQ ID NO: 4618668 - DNA, 25 bp, Homo sapien
actgccttgttggtgcgggcatgca

SEQ ID NO: 4618669 - DNA, 25 bp, Homo sapien
ggtgatgttgcagcgctgccagttg

SEQ ID NO: 4618670 - DNA, 25 bp, Homo sapien
cacgccgggactggaagccgtagtt

SEQ ID NO: 4618671 - DNA, 25 bp, Homo sapien
ctctctgcactcgatgctctatggg

SEQ ID NO: 4618672 - DNA, 25 bp, Homo sapien
catgccctatgctcagggtcggtcc

SEQ ID NO: 4618673 - DNA, 25 bp, Homo sapien
cctatgctcagggtcggtcccaggg

SEQ ID NO: 4618674 - DNA, 25 bp, Homo sapien
tgccctatgctcagggtcggtccca

SEQ ID NO: 4618675 - DNA, 25 bp, Homo sapien
ggtgagccactgacacaaacatggg

SEQ ID NO: 4618676 - DNA, 25 bp, Homo sapien
aacgcagcctgtgtgaggtgcagcc

SEQ ID NO: 4618677 - DNA, 25 bp, Homo sapien
cagcaccaggacgttctagttcagt

SEQ ID NO: 4618678 - DNA, 25 bp, Homo sapien
gaaacagagactaatgaacgcagcc

SEQ ID NO: 4618679 - DNA, 25 bp, Homo sapien
gatttaaactggctgagttggcaga

SEQ ID NO: 4618680 - DNA, 25 bp, Homo sapien
caagttccacagcagcgagatttaa

SEQ ID NO: 4618681 - DNA, 25 bp, Homo sapien
tgtttcaccttctcgcagtacctgg

SEQ ID NO: 4618682 - DNA, 25 bp, Homo sapien
ttaaactggctgagttggcagagtt

SEQ ID NO: 4618683 - DNA, 25 bp, Homo sapien
cacatgcatgggatcagagctggtc

SEQ ID NO: 4618684 - DNA, 25 bp, Homo sapien
taaatactacatgccggaggacctg

SEQ ID NO: 4618685 - DNA, 25 bp, Homo sapien
aaattacttggccaaagctgctcgg

SEQ ID NO: 4618686 - DNA, 25 bp, Homo sapien
gacgttgactctgatagcttgggaa

SEQ ID NO: 4618687 - DNA, 25 bp, Homo sapien
tcgcagctgacttagctctggtcat

SEQ ID NO: 4618688 - DNA, 25 bp, Homo sapien
taacattctcttgtcccagggcacc

SEQ ID NO: 4618689 - DNA, 25 bp, Homo sapien
ccagtgagttccctgtgtggtaggt

SEQ ID NO: 4618690 - DNA, 25 bp, Homo sapien
tatgtcctgtcatgtaaaccgccac

SEQ ID NO: 4618691 - DNA, 25 bp, Homo sapien
gagggcagctcttggaacgacccaa

SEQ ID NO: 4618692 - DNA, 25 bp, Homo sapien
gctcttggaacgacccaagtatcac

SEQ ID NO: 4618693 - DNA, 25 bp, Homo sapien
tggcgagggcagctcttggaacgac

SEQ ID NO: 4618694 - DNA, 25 bp, Homo sapien
tggaacgacccaagtatcacagagc

SEQ ID NO: 4618695 - DNA, 25 bp, Homo sapien
ccaagtttttggatactgagcacca

SEQ ID NO: 4618696 - DNA, 25 bp, Homo sapien
tccttggccataagggcacactgcc

SEQ ID NO: 4618697 - DNA, 25 bp, Homo sapien
acataagacataagggccccaagtt

SEQ ID NO: 4618698 - DNA, 25 bp, Homo sapien
tttggatactgagcaccaatgtcaa

SEQ ID NO: 4618699 - DNA, 25 bp, Homo sapien
tagttttctcaatcatattaccaag

SEQ ID NO: 4618700 - DNA, 25 bp, Homo sapien
tttgtgcttgtagcaagagctctct

SEQ ID NO: 4618701 - DNA, 25 bp, Homo sapien
tggccacaacatgagctgctaccct

SEQ ID NO: 4618702 - DNA, 25 bp, Homo sapien
gacccacacgcagaaggatttagcc

SEQ ID NO: 4618703 - DNA, 25 bp, Homo sapien
tcaggtattgattgggctagtggct

SEQ ID NO: 4618704 - DNA, 25 bp, Homo sapien
tgaatttcacaaatccgtgcgtcaa

SEQ ID NO: 4618705 - DNA, 25 bp, Homo sapien
gaaataacctagaagcactgtggag

SEQ ID NO: 4618706 - DNA, 25 bp, Homo sapien
taggtaacgctctaccaggataagc

SEQ ID NO: 4618707 - DNA, 25 bp, Homo sapien
tatgtacaacctagccagctctgat

SEQ ID NO: 4618708 - DNA, 25 bp, Homo sapien
aattcttttagggtgccatgagcca

SEQ ID NO: 4618709 - DNA, 25 bp, Homo sapien
tgagccacgcccgtataagacagca

SEQ ID NO: 4618710 - DNA, 25 bp, Homo sapien
agctctgattgctacactgtgtgca

SEQ ID NO: 4618711 - DNA, 25 bp, Homo sapien
gccaggagagtacactcgaggagcc

SEQ ID NO: 4618712 - DNA, 25 bp, Homo sapien
gggctccatcgtgaggtgctgggtc

SEQ ID NO: 4618713 - DNA, 25 bp, Homo sapien
gccctgtaactccagtcaattgctg

SEQ ID NO: 4618714 - DNA, 25 bp, Homo sapien
tgggtctctgcccatccttgggcag

SEQ ID NO: 4618715 - DNA, 25 bp, Homo sapien
cacttggtatccgatgtaggagcct

SEQ ID NO: 4618716 - DNA, 25 bp, Homo sapien
tggtatccgatgtaggagcctgctc

SEQ ID NO: 4618717 - DNA, 25 bp, Homo sapien
tcacttggtatccgatgtaggagcc

SEQ ID NO: 4618718 - DNA, 25 bp, Homo sapien
cttggtatccgatgtaggagcctgc

SEQ ID NO: 4618719 - DNA, 25 bp, Homo sapien
gatgcgacgtctttcactctggtga

SEQ ID NO: 4618720 - DNA, 25 bp, Homo sapien
cagagcctgttctctcttgaagcca

SEQ ID NO: 4618721 - DNA, 25 bp, Homo sapien
tcctgtacagtctttgatgcgacgt

SEQ ID NO: 4618722 - DNA, 25 bp, Homo sapien
agtgcactgtaacttgtacctctcc

SEQ ID NO: 4618723 - DNA, 25 bp, Homo sapien
attggggatgatattgatggcatag

SEQ ID NO: 4618724 - DNA, 25 bp, Homo sapien
ggggatgatattgatggcatagggt

SEQ ID NO: 4618725 - DNA, 25 bp, Homo sapien
aaattggggatgatattgatggcat

SEQ ID NO: 4618726 - DNA, 25 bp, Homo sapien
ggatgatattgatggcatagggtga

SEQ ID NO: 4618727 - DNA, 25 bp, Homo sapien
ggtgcatggctgtcaaatgccggac

SEQ ID NO: 4618728 - DNA, 25 bp, Homo sapien
ccagtgagcacgtagtataaataac

SEQ ID NO: 4618729 - DNA, 25 bp, Homo sapien
cacatccttcagtggtgacacccag

SEQ ID NO: 4618730 - DNA, 25 bp, Homo sapien
taaatctttccagatagtgcactgg

SEQ ID NO: 4618731 - DNA, 25 bp, Homo sapien
cttggaaaaagtcccctgcagtggc

SEQ ID NO: 4618732 - DNA, 25 bp, Homo sapien
gaacttccggtgctgtgatcagctt

SEQ ID NO: 4618733 - DNA, 25 bp, Homo sapien
ccctcgctgagttgctaagttgcat

SEQ ID NO: 4618734 - DNA, 25 bp, Homo sapien
tatgtttgccagacacagttgctcc

SEQ ID NO: 4618735 - DNA, 25 bp, Homo sapien
tatctccgggtattcctagttgagt

SEQ ID NO: 4618736 - DNA, 25 bp, Homo sapien
ttagtttcaactggagctgcaatca

SEQ ID NO: 4618737 - DNA, 25 bp, Homo sapien
cctttttgccacgtcttataacttg

SEQ ID NO: 4618738 - DNA, 25 bp, Homo sapien
tgagctgtttatatcatcatggcta

SEQ ID NO: 4618739 - DNA, 25 bp, Homo sapien
accagcttgttcaaagtaactttga

SEQ ID NO: 4618740 - DNA, 25 bp, Homo sapien
ccagttccatcttgcttggcctcat

SEQ ID NO: 4618741 - DNA, 25 bp, Homo sapien
gttgagcacctccaccccagttcca

SEQ ID NO: 4618742 - DNA, 25 bp, Homo sapien
caccccagttccatcttgcttggcc

SEQ ID NO: 4618743 - DNA, 25 bp, Homo sapien
acctccaccccagttccatcttgct

SEQ ID NO: 4618744 - DNA, 25 bp, Homo sapien
tcactgtccagaagccatgtgcgct

SEQ ID NO: 4618745 - DNA, 25 bp, Homo sapien
tcttgatctcactgtccagaagcca

SEQ ID NO: 4618746 - DNA, 25 bp, Homo sapien
tgtccagaagccatgtgcgctggat

SEQ ID NO: 4618747 - DNA, 25 bp, Homo sapien
tgcgctggatgatctcctccgtgga

SEQ ID NO: 4618748 - DNA, 25 bp, Homo sapien
gtacaccagggttttgttcacattg

SEQ ID NO: 4618749 - DNA, 25 bp, Homo sapien
atttggaccatcctcctcttgatca

SEQ ID NO: 4618750 - DNA, 25 bp, Homo sapien
caccagggttttgttcacattgatt

SEQ ID NO: 4618751 - DNA, 25 bp, Homo sapien
aatatttggaccatcctcctcttga

SEQ ID NO: 4618752 - DNA, 25 bp, Homo sapien
cgtgtagaggttttgatcacagcac

SEQ ID NO: 4618753 - DNA, 25 bp, Homo sapien
gtgtagaggttttgatcacagcaca

SEQ ID NO: 4618754 - DNA, 25 bp, Homo sapien
gtcgtgtagaggttttgatcacagc

SEQ ID NO: 4618755 - DNA, 25 bp, Homo sapien
ctgtcgtgtagaggttttgatcaca

SEQ ID NO: 4618756 - DNA, 25 bp, Homo sapien
atccaatcacaggtaggaagtatgt

SEQ ID NO: 4618757 - DNA, 25 bp, Homo sapien
caatccaatcacaggtaggaagtat

SEQ ID NO: 4618758 - DNA, 25 bp, Homo sapien
aatccaatcacaggtaggaagtatg

SEQ ID NO: 4618759 - DNA, 25 bp, Homo sapien
cgcgagtcgtactctgggcagtgtc

SEQ ID NO: 4618760 - DNA, 25 bp, Homo sapien
ccgcgagtcgtactctgggcagtgt

SEQ ID NO: 4618761 - DNA, 25 bp, Homo sapien
tgtctccaggattggataggagtct

SEQ ID NO: 4618762 - DNA, 25 bp, Homo sapien
gcagtgtctccaggattggatagga

SEQ ID NO: 4618763 - DNA, 25 bp, Homo sapien
gtgtcactgtattgctccgtgggtc

SEQ ID NO: 4618764 - DNA, 25 bp, Homo sapien
gttcattgacaagacagtggcctcc

SEQ ID NO: 4618765 - DNA, 25 bp, Homo sapien
tccttgtggttcattgacaagacag

SEQ ID NO: 4618766 - DNA, 25 bp, Homo sapien
tgttggatccgcaagttctcaaact

SEQ ID NO: 4618767 - DNA, 25 bp, Homo sapien
caggccaggagggtcttctccgtcc

SEQ ID NO: 4618768 - DNA, 25 bp, Homo sapien
cccaggccaggagggtcttctccgt

SEQ ID NO: 4618769 - DNA, 25 bp, Homo sapien
gcccaggccaggagggtcttctccg

SEQ ID NO: 4618770 - DNA, 25 bp, Homo sapien
aggcccaggccaggagggtcttctc

SEQ ID NO: 4618771 - DNA, 25 bp, Homo sapien
tgcttggtgcctatggcatccagct

SEQ ID NO: 4618772 - DNA, 25 bp, Homo sapien
gtgcttggtgcctatggcatccagc

SEQ ID NO: 4618773 - DNA, 25 bp, Homo sapien
gtcaaagtgcttggtgcctatggca

SEQ ID NO: 4618774 - DNA, 25 bp, Homo sapien
agccatccagctggttcagaagctc

SEQ ID NO: 4618775 - DNA, 25 bp, Homo sapien
tgcacctctcggtccccggacttct

SEQ ID NO: 4618776 - DNA, 25 bp, Homo sapien
ttgggtgttgggctggaagccatcc

SEQ ID NO: 4618777 - DNA, 25 bp, Homo sapien
tggttcagaagctccagcatcgtcc

SEQ ID NO: 4618778 - DNA, 25 bp, Homo sapien
gatgtccacccggtttgtgactgca

SEQ ID NO: 4618779 - DNA, 25 bp, Homo sapien
tgtccacccggtttgtgactgcaat

SEQ ID NO: 4618780 - DNA, 25 bp, Homo sapien
gtccaggatgtccacccggtttgtg

SEQ ID NO: 4618781 - DNA, 25 bp, Homo sapien
ccacccggtttgtgactgcaattac

SEQ ID NO: 4618782 - DNA, 25 bp, Homo sapien
caggcactcgatcttgcggtccagg

SEQ ID NO: 4618783 - DNA, 25 bp, Homo sapien
ggcccaggcactcgatcttgcggtc

SEQ ID NO: 4618784 - DNA, 25 bp, Homo sapien
ctggcccaggcactcgatcttgcgg

SEQ ID NO: 4618785 - DNA, 25 bp, Homo sapien
cccaggcactcgatcttgcggtcca

SEQ ID NO: 4618786 - DNA, 25 bp, Homo sapien
cagctccctcgcagttcacgtcagg

SEQ ID NO: 4618787 - DNA, 25 bp, Homo sapien
gctccctcgcagttcacgtcaggac

SEQ ID NO: 4618788 - DNA, 25 bp, Homo sapien
agctccctcgcagttcacgtcagga

SEQ ID NO: 4618789 - DNA, 25 bp, Homo sapien
tcagctccctcgcagttcacgtcag

SEQ ID NO: 4618790 - DNA, 25 bp, Homo sapien
gcctccacagacacagccttgcact

SEQ ID NO: 4618791 - DNA, 25 bp, Homo sapien
acccgcctccacagacacagccttg

SEQ ID NO: 4618792 - DNA, 25 bp, Homo sapien
ttgcactgggccccgttgaagtcat

SEQ ID NO: 4618793 - DNA, 25 bp, Homo sapien
cttgcactgggccccgttgaagtca

SEQ ID NO: 4618794 - DNA, 25 bp, Homo sapien
tgccttccatgtagtcctcgtgggt

SEQ ID NO: 4618795 - DNA, 25 bp, Homo sapien
tgtagtcctcgtgggtgagctccgt

SEQ ID NO: 4618796 - DNA, 25 bp, Homo sapien
tggcacccctgcgcagtgcgatcat

SEQ ID NO: 4618797 - DNA, 25 bp, Homo sapien
tccatgtagtcctcgtgggtgagct

SEQ ID NO: 4618798 - DNA, 25 bp, Homo sapien
accatcttttattgcgcacttcagc

SEQ ID NO: 4618799 - DNA, 25 bp, Homo sapien
ccatcttttattgcgcacttcagcc

SEQ ID NO: 4618800 - DNA, 25 bp, Homo sapien
aaccatcttttattgcgcacttcag

SEQ ID NO: 4618801 - DNA, 25 bp, Homo sapien
ggcgagtgggctctggagatgctca

SEQ ID NO: 4618802 - DNA, 25 bp, Homo sapien
tggagatgctcagaggcctggataa

SEQ ID NO: 4618803 - DNA, 25 bp, Homo sapien
gaggacattgtacttgttggcgagt

SEQ ID NO: 4618804 - DNA, 25 bp, Homo sapien
cctggataaaaaggtgtccatctgc

SEQ ID NO: 4618805 - DNA, 25 bp, Homo sapien
gatctcttagaggctccttctatct

SEQ ID NO: 4618806 - DNA, 25 bp, Homo sapien
tgatctcttagaggctccttctatc

SEQ ID NO: 4618807 - DNA, 25 bp, Homo sapien
atgatctcttagaggctccttctat

SEQ ID NO: 4618808 - DNA, 25 bp, Homo sapien
gagggttgaaaatgggcgtgaccgc

SEQ ID NO: 4618809 - DNA, 25 bp, Homo sapien
gaaaatgggcgtgaccgcgcagtct

SEQ ID NO: 4618810 - DNA, 25 bp, Homo sapien
aaatgggcgtgaccgcgcagtctgc

SEQ ID NO: 4618811 - DNA, 25 bp, Homo sapien
ttgaaaatgggcgtgaccgcgcagt

SEQ ID NO: 4618812 - DNA, 25 bp, Homo sapien
cagttctggcgaatgtggctgtttt

SEQ ID NO: 4618813 - DNA, 25 bp, Homo sapien
aatgtggctgttttcgggccttctg

SEQ ID NO: 4618814 - DNA, 25 bp, Homo sapien
gcccgcggacgccacatcagttctg

SEQ ID NO: 4618815 - DNA, 25 bp, Homo sapien
ccttctgtgccgcttcacttgagaa

SEQ ID NO: 4618816 - DNA, 25 bp, Homo sapien
aacggctcgggagatacgctcgctt

SEQ ID NO: 4618817 - DNA, 25 bp, Homo sapien
cccgcggctgtcagtggcaacggct

SEQ ID NO: 4618818 - DNA, 25 bp, Homo sapien
gagccttgaaaagccgctgctctaa

SEQ ID NO: 4618819 - DNA, 25 bp, Homo sapien
gctcttactcagatgggagcgcccg

SEQ ID NO: 4618820 - DNA, 25 bp, Homo sapien
gactcgcaggccgcgcctcgctccg

SEQ ID NO: 4618821 - DNA, 25 bp, Homo sapien
tgagggcgcggcctacacgcagcgc

SEQ ID NO: 4618822 - DNA, 25 bp, Homo sapien
gcggcctacacgcagcgccgaggga

SEQ ID NO: 4618823 - DNA, 25 bp, Homo sapien
cacgcagcgccgagggaggggtcgg

SEQ ID NO: 4618824 - DNA, 25 bp, Homo sapien
ggcctgagggcgcggcctacacgca

SEQ ID NO: 4618825 - DNA, 25 bp, Homo sapien
aaggaagcggccaatttactgcagc

SEQ ID NO: 4618826 - DNA, 25 bp, Homo sapien
tcccagatggacgttcgaaaacaag

SEQ ID NO: 4618827 - DNA, 25 bp, Homo sapien
gatcttctcaaaccggtggacgtcg

SEQ ID NO: 4618828 - DNA, 25 bp, Homo sapien
gatcgacggatctgacatgaccacc

SEQ ID NO: 4618829 - DNA, 25 bp, Homo sapien
tcagcttcaagctctactgggtagc

SEQ ID NO: 4618830 - DNA, 25 bp, Homo sapien
tttgcaatctgatacggaatacagg

SEQ ID NO: 4618831 - DNA, 25 bp, Homo sapien
gatgtgcatatctatcataaccagg

SEQ ID NO: 4618832 - DNA, 25 bp, Homo sapien
caaagcccacttttaagcacacgac

SEQ ID NO: 4618833 - DNA, 25 bp, Homo sapien
ttgctaacacgtttattcatgaatg

SEQ ID NO: 4618834 - DNA, 25 bp, Homo sapien
tgctaacacgtttattcatgaatga

SEQ ID NO: 4618835 - DNA, 25 bp, Homo sapien
aattgctaacacgtttattcatgaa

SEQ ID NO: 4618836 - DNA, 25 bp, Homo sapien
attgctaacacgtttattcatgaat

SEQ ID NO: 4618837 - DNA, 25 bp, Homo sapien
tggagacctgtgtaaaagcagacta

SEQ ID NO: 4618838 - DNA, 25 bp, Homo sapien
gataccttttctttaccatgagact

SEQ ID NO: 4618839 - DNA, 25 bp, Homo sapien
aatgtaaaagcattgaagtaaatgt

SEQ ID NO: 4618840 - DNA, 25 bp, Homo sapien
tttaccatgagactcttgactatga

SEQ ID NO: 4618841 - DNA, 25 bp, Homo sapien
gtgttgggagtatgtattcacacac

SEQ ID NO: 4618842 - DNA, 25 bp, Homo sapien
atacatcagcttgaaacctgagata

SEQ ID NO: 4618843 - DNA, 25 bp, Homo sapien
catttaatatcccacgaattgattt

SEQ ID NO: 4618844 - DNA, 25 bp, Homo sapien
catggaataaatggtaaagagggct

SEQ ID NO: 4618845 - DNA, 25 bp, Homo sapien
tactattgccctctgtgaaccagga

SEQ ID NO: 4618846 - DNA, 25 bp, Homo sapien
aagaaccaccgtctgacttgacaag

SEQ ID NO: 4618847 - DNA, 25 bp, Homo sapien
gagtagacacttgcaaggaacactg

SEQ ID NO: 4618848 - DNA, 25 bp, Homo sapien
acttgacaagatgaagacgtaccca

SEQ ID NO: 4618849 - DNA, 25 bp, Homo sapien
gatttggaatgtttagccttcacca

SEQ ID NO: 4618850 - DNA, 25 bp, Homo sapien
ccctgctgtcggcaataggatagat

SEQ ID NO: 4618851 - DNA, 25 bp, Homo sapien
tttcagaaactagccgaatggagac

SEQ ID NO: 4618852 - DNA, 25 bp, Homo sapien
tgctgaccagtcacatagatgaacc

SEQ ID NO: 4618853 - DNA, 25 bp, Homo sapien
tatgcatgctcaggggccatgttaa

SEQ ID NO: 4618854 - DNA, 25 bp, Homo sapien
taatatatgtgcagctgaagtgagc

SEQ ID NO: 4618855 - DNA, 25 bp, Homo sapien
gtgttatgcatgctcaggggccatg

SEQ ID NO: 4618856 - DNA, 25 bp, Homo sapien
tctctgtattgttccaattttaata

SEQ ID NO: 4618857 - DNA, 25 bp, Homo sapien
gattgtagtataacctagtcagtgg

SEQ ID NO: 4618858 - DNA, 25 bp, Homo sapien
gctttgatgtgagttaagtattttc

SEQ ID NO: 4618859 - DNA, 25 bp, Homo sapien
ctgaagggagatgttaagtatgaaa

SEQ ID NO: 4618860 - DNA, 25 bp, Homo sapien
ggaatcaaaatgagtctggtttggc

SEQ ID NO: 4618861 - DNA, 25 bp, Homo sapien
ggagattgtataccaccaacgttag

SEQ ID NO: 4618862 - DNA, 25 bp, Homo sapien
gagctcagatggacctgacaactca

SEQ ID NO: 4618863 - DNA, 25 bp, Homo sapien
tgacaactcacttcatcggtgtttg

SEQ ID NO: 4618864 - DNA, 25 bp, Homo sapien
ccatagacttgacatctgagactga

SEQ ID NO: 4618865 - DNA, 25 bp, Homo sapien
gaggagaacggatcaaataattcac

SEQ ID NO: 4618866 - DNA, 25 bp, Homo sapien
aagcttcattgactaggttccacca

SEQ ID NO: 4618867 - DNA, 25 bp, Homo sapien
catttgcctagacacttgcttatgg

SEQ ID NO: 4618868 - DNA, 25 bp, Homo sapien
gaaacattacctagcttatcgaaat

SEQ ID NO: 4618869 - DNA, 25 bp, Homo sapien
gagggaattgcaggaataagaccac

SEQ ID NO: 4618870 - DNA, 25 bp, Homo sapien
gtcagagcctatagccagaactcag

SEQ ID NO: 4618871 - DNA, 25 bp, Homo sapien
cactagtgcatgctgtggccagaca

SEQ ID NO: 4618872 - DNA, 25 bp, Homo sapien
tgctaggcaaccctaaattgggaag

SEQ ID NO: 4618873 - DNA, 25 bp, Homo sapien
caagtagctagtataaaggccctca

SEQ ID NO: 4618874 - DNA, 25 bp, Homo sapien
ttggagattatgtataatgcttctg

SEQ ID NO: 4618875 - DNA, 25 bp, Homo sapien
tgctgggttatataataactgttta

SEQ ID NO: 4618876 - DNA, 25 bp, Homo sapien
caccaacactgtatggaggctccaa

SEQ ID NO: 4618877 - DNA, 25 bp, Homo sapien
gttcgttctacttttggagattatg

SEQ ID NO: 4618878 - DNA, 25 bp, Homo sapien
tttcacaatattggccaggcttaac

SEQ ID NO: 4618879 - DNA, 25 bp, Homo sapien
acaatattggccaggcttaactcct

SEQ ID NO: 4618880 - DNA, 25 bp, Homo sapien
tcacaatattggccaggcttaactc

SEQ ID NO: 4618881 - DNA, 25 bp, Homo sapien
gtttcacaatattggccaggcttaa

SEQ ID NO: 4618882 - DNA, 25 bp, Homo sapien
tgggagtccttgattcacatacatg

SEQ ID NO: 4618883 - DNA, 25 bp, Homo sapien
tctgtaacagtgtggctgctttgct

SEQ ID NO: 4618884 - DNA, 25 bp, Homo sapien
tttgagactccctaactgacaatct

SEQ ID NO: 4618885 - DNA, 25 bp, Homo sapien
gctttgctgagtttatgctcccaca

SEQ ID NO: 4618886 - DNA, 25 bp, Homo sapien
agttggctggcagcaacctgattgg

SEQ ID NO: 4618887 - DNA, 25 bp, Homo sapien
aatagttgtttgcctgagttcccag

SEQ ID NO: 4618888 - DNA, 25 bp, Homo sapien
gagttggctggcagcaacctgattg

SEQ ID NO: 4618889 - DNA, 25 bp, Homo sapien
ctcatccacatgcagatgaccctga

SEQ ID NO: 4618890 - DNA, 25 bp, Homo sapien
gctccaggtgcagccacccttgaat

SEQ ID NO: 4618891 - DNA, 25 bp, Homo sapien
cagctccaggtgcagccacccttga

SEQ ID NO: 4618892 - DNA, 25 bp, Homo sapien
tccaggtgcagccacccttgaatac

SEQ ID NO: 4618893 - DNA, 25 bp, Homo sapien
cccagctccaggtgcagccaccctt

SEQ ID NO: 4618894 - DNA, 25 bp, Homo sapien
aatgccatttctgatagtgttggtc

SEQ ID NO: 4618895 - DNA, 25 bp, Homo sapien
aaatgccatttctgatagtgttggt

SEQ ID NO: 4618896 - DNA, 25 bp, Homo sapien
tgtgacccacaggagagagtcctgg

SEQ ID NO: 4618897 - DNA, 25 bp, Homo sapien
tggtaatgtgacccacaggagagag

SEQ ID NO: 4618898 - DNA, 25 bp, Homo sapien
aatgtgacccacaggagagagtcct

SEQ ID NO: 4618899 - DNA, 25 bp, Homo sapien
gtaatgtgacccacaggagagagtc

SEQ ID NO: 4618900 - DNA, 25 bp, Homo sapien
tgccatggcagattgtgtttacaac

SEQ ID NO: 4618901 - DNA, 25 bp, Homo sapien
gcagaatgccatggcagattgtgtt

SEQ ID NO: 4618902 - DNA, 25 bp, Homo sapien
ccatggcagattgtgtttacaacca

SEQ ID NO: 4618903 - DNA, 25 bp, Homo sapien
aatgccatggcagattgtgtttaca

SEQ ID NO: 4618904 - DNA, 25 bp, Homo sapien
ccttggctccagtgcaccatgtgag

SEQ ID NO: 4618905 - DNA, 25 bp, Homo sapien
ttcctgcagggctcagactggcggt

SEQ ID NO: 4618906 - DNA, 25 bp, Homo sapien
cactgaggacagtgccgggagatac

SEQ ID NO: 4618907 - DNA, 25 bp, Homo sapien
ttcccacgcatgagtagagggctct

SEQ ID NO: 4618908 - DNA, 25 bp, Homo sapien
aagcgctctggaggccgctgtgcac

SEQ ID NO: 4618909 - DNA, 25 bp, Homo sapien
ggcgcggggtctgagccttgcgggc

SEQ ID NO: 4618910 - DNA, 25 bp, Homo sapien
ctcctcagcgttcgcgcggccgagc

SEQ ID NO: 4618911 - DNA, 25 bp, Homo sapien
ggtctgagccttgcgggcctccgat

SEQ ID NO: 4618912 - DNA, 25 bp, Homo sapien
ccgtcggacagtgcgggcggcgcgt

SEQ ID NO: 4618913 - DNA, 25 bp, Homo sapien
agccgtcccaagacctgaccgccat

SEQ ID NO: 4618914 - DNA, 25 bp, Homo sapien
tgcctccgcgctgtgagccgtcgga

SEQ ID NO: 4618915 - DNA, 25 bp, Homo sapien
cgggcggcgcgtcgcctaggagctg

SEQ ID NO: 4618916 - DNA, 25 bp, Homo sapien
ggactgggcgcgctcggcagggcag

SEQ ID NO: 4618917 - DNA, 25 bp, Homo sapien
cgccgcctcagtccggtctgcgcct

SEQ ID NO: 4618918 - DNA, 25 bp, Homo sapien
ggcaagaaagcaccggattcgcgga

SEQ ID NO: 4618919 - DNA, 25 bp, Homo sapien
gcctcgcgggcagggtctccgaggg

SEQ ID NO: 4618920 - DNA, 25 bp, Homo sapien
cagcgcagccccgacacggcttctt

SEQ ID NO: 4618921 - DNA, 25 bp, Homo sapien
tgctcctctgtcagcgcagccccga

SEQ ID NO: 4618922 - DNA, 25 bp, Homo sapien
tctgtcagcgcagccccgacacggc

SEQ ID NO: 4618923 - DNA, 25 bp, Homo sapien
agcgcagccccgacacggcttcttc

SEQ ID NO: 4618924 - DNA, 25 bp, Homo sapien
aaacgattctcatgggcccggcggg

SEQ ID NO: 4618925 - DNA, 25 bp, Homo sapien
ccctcgcgcttgtacgcaaacgatt

SEQ ID NO: 4618926 - DNA, 25 bp, Homo sapien
cgcggagaaactaggccacgaacgc

SEQ ID NO: 4618927 - DNA, 25 bp, Homo sapien
tttccccgactgcatcccgcaggat

SEQ ID NO: 4618928 - DNA, 25 bp, Homo sapien
tcaacggagataccaatgcggagga

SEQ ID NO: 4618929 - DNA, 25 bp, Homo sapien
tacactgcacgaggtactattggcc

SEQ ID NO: 4618930 - DNA, 25 bp, Homo sapien
tatccagaacttagcgccttagcac

SEQ ID NO: 4618931 - DNA, 25 bp, Homo sapien
tctcacagcaagacggcagtttacc

SEQ ID NO: 4618932 - DNA, 25 bp, Homo sapien
gggcctctttaatagatcctctttc

SEQ ID NO: 4618933 - DNA, 25 bp, Homo sapien
taacctattagaccttactagtcac

SEQ ID NO: 4618934 - DNA, 25 bp, Homo sapien
ttcctagcagatagaaaagggcctc

SEQ ID NO: 4618935 - DNA, 25 bp, Homo sapien
tgtagttacggtgcttatttatagg

SEQ ID NO: 4618936 - DNA, 25 bp, Homo sapien
aacaagtctactacatccttgatgg

SEQ ID NO: 4618937 - DNA, 25 bp, Homo sapien
ctgttgttgcacagagggctctata

SEQ ID NO: 4618938 - DNA, 25 bp, Homo sapien
tctgtccacttgtgctatcaactag

SEQ ID NO: 4618939 - DNA, 25 bp, Homo sapien
tatcaactagtacgagaatggcatt

SEQ ID NO: 4618940 - DNA, 25 bp, Homo sapien
aaaaagattattcaacatgaccctg

SEQ ID NO: 4618941 - DNA, 25 bp, Homo sapien
caacatgaccctgtgggatttaaac

SEQ ID NO: 4618942 - DNA, 25 bp, Homo sapien
atgaccctgtgggatttaaaccagg

SEQ ID NO: 4618943 - DNA, 25 bp, Homo sapien
tgtgggatttaaaccagggagacaa

SEQ ID NO: 4618944 - DNA, 25 bp, Homo sapien
tggctattacccaagaccactaagg

SEQ ID NO: 4618945 - DNA, 25 bp, Homo sapien
taaggtgctccctaatgtagatacg

SEQ ID NO: 4618946 - DNA, 25 bp, Homo sapien
aacccgctgaataaagagcccttgg

SEQ ID NO: 4618947 - DNA, 25 bp, Homo sapien
tagatacggctatagagaccaagga

SEQ ID NO: 4618948 - DNA, 25 bp, Homo sapien
caacgcaaccttcgttcgcctccca

SEQ ID NO: 4618949 - DNA, 25 bp, Homo sapien
tctttaactcaaccacctcaggtga

SEQ ID NO: 4618950 - DNA, 25 bp, Homo sapien
gctggtctttaactcaaccacctca

SEQ ID NO: 4618951 - DNA, 25 bp, Homo sapien
atctcaactcaacgcaaccttcgtt

SEQ ID NO: 4618952 - DNA, 25 bp, Homo sapien
tctgtaagcggtggtttatctctcc

SEQ ID NO: 4618953 - DNA, 25 bp, Homo sapien
tgagaccagctacgacaaagtagtc

SEQ ID NO: 4618954 - DNA, 25 bp, Homo sapien
caaagtagtctgtcactcttggtcc

SEQ ID NO: 4618955 - DNA, 25 bp, Homo sapien
aaagagtagatgtgtcagtgagacc

SEQ ID NO: 4618956 - DNA, 25 bp, Homo sapien
ggaggagcccttcgataagtgataa

SEQ ID NO: 4618957 - DNA, 25 bp, Homo sapien
tagggtgtggctaggatcacttcac

SEQ ID NO: 4618958 - DNA, 25 bp, Homo sapien
tcacttcacatcctggaataagccg

SEQ ID NO: 4618959 - DNA, 25 bp, Homo sapien
tattgttgacattggcacagcgacc

SEQ ID NO: 4618960 - DNA, 25 bp, Homo sapien
ttgttggataccaactaaagattca

SEQ ID NO: 4618961 - DNA, 25 bp, Homo sapien
tgttggataccaactaaagattcat

SEQ ID NO: 4618962 - DNA, 25 bp, Homo sapien
cagacttcttataacacagaaacac

SEQ ID NO: 4618963 - DNA, 25 bp, Homo sapien
caggtacagacttcttataacacag

SEQ ID NO: 4618964 - DNA, 25 bp, Homo sapien
tacagacttcttataacacagaaac

SEQ ID NO: 4618965 - DNA, 25 bp, Homo sapien
ggtacagacttcttataacacagaa

SEQ ID NO: 4618966 - DNA, 25 bp, Homo sapien
tgtttggtgggggtattaatatatc

SEQ ID NO: 4618967 - DNA, 25 bp, Homo sapien
gcatactttatctcttttagccaaa

SEQ ID NO: 4618968 - DNA, 25 bp, Homo sapien
tcaattctacaaactatgtaaggga

SEQ ID NO: 4618969 - DNA, 25 bp, Homo sapien
tgcaccaataactatagcaattgag

SEQ ID NO: 4618970 - DNA, 25 bp, Homo sapien
gatcccagcactcaatagtagctcc

SEQ ID NO: 4618971 - DNA, 25 bp, Homo sapien
agtggaaatgactcatagtcctctt

SEQ ID NO: 4618972 - DNA, 25 bp, Homo sapien
tgactcatagtcctcttctggatat

SEQ ID NO: 4618973 - DNA, 25 bp, Homo sapien
ttcaggatcccagcactcaatagta

SEQ ID NO: 4618974 - DNA, 25 bp, Homo sapien
cacctggccttatctctgctgttta

SEQ ID NO: 4618975 - DNA, 25 bp, Homo sapien
ctggccttatctctgctgtttaacc

SEQ ID NO: 4618976 - DNA, 25 bp, Homo sapien
cgcacctggccttatctctgctgtt

SEQ ID NO: 4618977 - DNA, 25 bp, Homo sapien
tgctgtttaacccattcactgaatt

SEQ ID NO: 4618978 - DNA, 25 bp, Homo sapien
gatataataagaggcgggataggcc

SEQ ID NO: 4618979 - DNA, 25 bp, Homo sapien
tccggtgttccatgatagcaccatg

SEQ ID NO: 4618980 - DNA, 25 bp, Homo sapien
tactgctatcagctttttatactga

SEQ ID NO: 4618981 - DNA, 25 bp, Homo sapien
gttgttttgtctccggtgttccatg

SEQ ID NO: 4618982 - DNA, 25 bp, Homo sapien
cagtcatgctacacaattcccaagg

SEQ ID NO: 4618983 - DNA, 25 bp, Homo sapien
tcccaaggtagaaacttcgaagtca

SEQ ID NO: 4618984 - DNA, 25 bp, Homo sapien
ccattacaggtaaaatgccacagtc

SEQ ID NO: 4618985 - DNA, 25 bp, Homo sapien
gtccgtgtaagtggcatgatgctct

SEQ ID NO: 4618986 - DNA, 25 bp, Homo sapien
gcataagctgtttctctgatagaag

SEQ ID NO: 4618987 - DNA, 25 bp, Homo sapien
gaagttcccgagagtaaggttcata

SEQ ID NO: 4618988 - DNA, 25 bp, Homo sapien
tttcaatgggaagaggatgtggtcc

SEQ ID NO: 4618989 - DNA, 25 bp, Homo sapien
atttttctctccacaggcgtcaaca

SEQ ID NO: 4618990 - DNA, 25 bp, Homo sapien
ggtgaaggaaaagggatgttttgca

SEQ ID NO: 4618991 - DNA, 25 bp, Homo sapien
tggtgaaggaaaagggatgttttgc

SEQ ID NO: 4618992 - DNA, 25 bp, Homo sapien
gtgaaggaaaagggatgttttgcat

SEQ ID NO: 4618993 - DNA, 25 bp, Homo sapien
taatattaatgcatcatggactgac

SEQ ID NO: 4618994 - DNA, 25 bp, Homo sapien
gaaactggctgtgataatattaatg

SEQ ID NO: 4618995 - DNA, 25 bp, Homo sapien
taaaggtgtagaaactggctgtgat

SEQ ID NO: 4618996 - DNA, 25 bp, Homo sapien
cttagtggtaaaggtgtagaaactg

SEQ ID NO: 4618997 - DNA, 25 bp, Homo sapien
tggcctaagagaatgcagcagaatt

SEQ ID NO: 4618998 - DNA, 25 bp, Homo sapien
ggacccagattcattagcaaggtgc

SEQ ID NO: 4618999 - DNA, 25 bp, Homo sapien
tagcaaggtgctaaagttggctcca

SEQ ID NO: 4619000 - DNA, 25 bp, Homo sapien
tgttgcacaattctcaggacccaga

SEQ ID NO: 4619001 - DNA, 25 bp, Homo sapien
aagagattaggtccttactcccagg

SEQ ID NO: 4619002 - DNA, 25 bp, Homo sapien
gctaggcaactgtaacaagtgctga

SEQ ID NO: 4619003 - DNA, 25 bp, Homo sapien
gattaagatcttggagacatacccc

SEQ ID NO: 4619004 - DNA, 25 bp, Homo sapien
tagggttggagaagtggaccatcta

SEQ ID NO: 4619005 - DNA, 25 bp, Homo sapien
tatctgtcatcactcaccccaaaga

SEQ ID NO: 4619006 - DNA, 25 bp, Homo sapien
atgcctataacgcttactacccctg

SEQ ID NO: 4619007 - DNA, 25 bp, Homo sapien
tacccctgccagctattacagaggg

SEQ ID NO: 4619008 - DNA, 25 bp, Homo sapien
tacagagggttattcaggattggaa

SEQ ID NO: 4619009 - DNA, 25 bp, Homo sapien
catgttcgtatccaagtcaatgcaa

SEQ ID NO: 4619010 - DNA, 25 bp, Homo sapien
tcttgtggtgggtcatgaagatcaa

SEQ ID NO: 4619011 - DNA, 25 bp, Homo sapien
taaaggtgcactaagcactgcagcc

SEQ ID NO: 4619012 - DNA, 25 bp, Homo sapien
ctgcagccagtgaaagaggacaaag

SEQ ID NO: 4619013 - DNA, 25 bp, Homo sapien
tatccaagatgatggttggatctgg

SEQ ID NO: 4619014 - DNA, 25 bp, Homo sapien
atccaagatgatggttggatctgga

SEQ ID NO: 4619015 - DNA, 25 bp, Homo sapien
ttatccaagatgatggttggatctg

SEQ ID NO: 4619016 - DNA, 25 bp, Homo sapien
aaaagaaatcccatagtcacttagc

SEQ ID NO: 4619017 - DNA, 25 bp, Homo sapien
atcccatagtcacttagcttccaat

SEQ ID NO: 4619018 - DNA, 25 bp, Homo sapien
aagaaatcccatagtcacttagctt

SEQ ID NO: 4619019 - DNA, 25 bp, Homo sapien
aatcccatagtcacttagcttccaa

SEQ ID NO: 4619020 - DNA, 25 bp, Homo sapien
tttaaggtgctaagtagatttttgc

SEQ ID NO: 4619021 - DNA, 25 bp, Homo sapien
cggctttttgggaagttgcttccag

SEQ ID NO: 4619022 - DNA, 25 bp, Homo sapien
agacagctggggatacaatttcttt

SEQ ID NO: 4619023 - DNA, 25 bp, Homo sapien
gctaagtagatttttgcacggcttt

SEQ ID NO: 4619024 - DNA, 25 bp, Homo sapien
gagccttcttgagttttttggtgaa

SEQ ID NO: 4619025 - DNA, 25 bp, Homo sapien
ctgagccttcttgagttttttggtg

SEQ ID NO: 4619026 - DNA, 25 bp, Homo sapien
tgagccttcttgagttttttggtga

SEQ ID NO: 4619027 - DNA, 25 bp, Homo sapien
ggtcaaacaatgaatcagcagctgt

SEQ ID NO: 4619028 - DNA, 25 bp, Homo sapien
gaaggagcctctgtgattggtctga

SEQ ID NO: 4619029 - DNA, 25 bp, Homo sapien
gaaatctgcttcaattggagtcatg

SEQ ID NO: 4619030 - DNA, 25 bp, Homo sapien
gaatttccatctcaagctgtgtcat

SEQ ID NO: 4619031 - DNA, 25 bp, Homo sapien
gattctgcagcatctcaggttttgg

SEQ ID NO: 4619032 - DNA, 25 bp, Homo sapien
tacattatacacacagtctgaaggg

SEQ ID NO: 4619033 - DNA, 25 bp, Homo sapien
tagggaagctcaacctgtggtaact

SEQ ID NO: 4619034 - DNA, 25 bp, Homo sapien
ggatgagacccaagtaaacaggaaa

SEQ ID NO: 4619035 - DNA, 25 bp, Homo sapien
cataggcacgatctcgactttttaa

SEQ ID NO: 4619036 - DNA, 25 bp, Homo sapien
tggataaaagggtatagaattttgc

SEQ ID NO: 4619037 - DNA, 25 bp, Homo sapien
gaattttgcataggcacgatctcga

SEQ ID NO: 4619038 - DNA, 25 bp, Homo sapien
gtatctttatcacttacaaaactgc

SEQ ID NO: 4619039 - DNA, 25 bp, Homo sapien
ctgttttctctgtgcctttatcagg

SEQ ID NO: 4619040 - DNA, 25 bp, Homo sapien
tctctgtgcctttatcaggaaacaa

SEQ ID NO: 4619041 - DNA, 25 bp, Homo sapien
gttttctctgtgcctttatcaggaa

SEQ ID NO: 4619042 - DNA, 25 bp, Homo sapien
tttctctgtgcctttatcaggaaac

SEQ ID NO: 4619043 - DNA, 25 bp, Homo sapien
aatcatctagttctatcaatctggt

SEQ ID NO: 4619044 - DNA, 25 bp, Homo sapien
ctttggtgacaggtcctttccatca

SEQ ID NO: 4619045 - DNA, 25 bp, Homo sapien
tggcggcattataaatacagtatgc

SEQ ID NO: 4619046 - DNA, 25 bp, Homo sapien
tacagtatgctcacttttctgtgaa

SEQ ID NO: 4619047 - DNA, 25 bp, Homo sapien
tgtaatgctattcccagtagggtgt

SEQ ID NO: 4619048 - DNA, 25 bp, Homo sapien
ctcctgcggtctgtcaaaaagctta

SEQ ID NO: 4619049 - DNA, 25 bp, Homo sapien
tgagaggtggactctttgtaatgct

SEQ ID NO: 4619050 - DNA, 25 bp, Homo sapien
aaggtccagtcttggaaagtatttg

SEQ ID NO: 4619051 - DNA, 25 bp, Homo sapien
taaacagacacttggcccactgtgg

SEQ ID NO: 4619052 - DNA, 25 bp, Homo sapien
catctcttcgccaatttatgagctg

SEQ ID NO: 4619053 - DNA, 25 bp, Homo sapien
gagaaactctaacataggccggaag

SEQ ID NO: 4619054 - DNA, 25 bp, Homo sapien
atcatatgcctgctgaagtgctctg

SEQ ID NO: 4619055 - DNA, 25 bp, Homo sapien
cacatctgttttcctcatcttaata

SEQ ID NO: 4619056 - DNA, 25 bp, Homo sapien
ctgttttcctcatcttaataagtac

SEQ ID NO: 4619057 - DNA, 25 bp, Homo sapien
catctgttttcctcatcttaataag

SEQ ID NO: 4619058 - DNA, 25 bp, Homo sapien
ctcatctaagggatccacatctgtt

SEQ ID NO: 4619059 - DNA, 25 bp, Homo sapien
aaccataagtaatagcattaggctt

SEQ ID NO: 4619060 - DNA, 25 bp, Homo sapien
ccacaaagctgcatcactactcgat

SEQ ID NO: 4619061 - DNA, 25 bp, Homo sapien
aaagctgcatcactactcgatagca

SEQ ID NO: 4619062 - DNA, 25 bp, Homo sapien
gctttatcctagcagttttcatttc

SEQ ID NO: 4619063 - DNA, 25 bp, Homo sapien
tgcacagtctttttaagcggctgcc

SEQ ID NO: 4619064 - DNA, 25 bp, Homo sapien
gaaaataccactgcgggtactgcta

SEQ ID NO: 4619065 - DNA, 25 bp, Homo sapien
cattccgtaccttcgtccataagaa

SEQ ID NO: 4619066 - DNA, 25 bp, Homo sapien
aaactgtgccaagccacgtaccaca

SEQ ID NO: 4619067 - DNA, 25 bp, Homo sapien
gctcatggttcagtaaggaattata

SEQ ID NO: 4619068 - DNA, 25 bp, Homo sapien
actaaacatgattgacccacagttc

SEQ ID NO: 4619069 - DNA, 25 bp, Homo sapien
cccacagttcatttatagttgcaga

SEQ ID NO: 4619070 - DNA, 25 bp, Homo sapien
aatgtatgtgaaaatgtctaccgga

SEQ ID NO: 4619071 - DNA, 25 bp, Homo sapien
caatggactcaagcctgattaaatc

SEQ ID NO: 4619072 - DNA, 25 bp, Homo sapien
tgtgctagagtgattatcaatggac

SEQ ID NO: 4619073 - DNA, 25 bp, Homo sapien
gaactatccacactaccgtggctca

SEQ ID NO: 4619074 - DNA, 25 bp, Homo sapien
gctccccattgttagcatcattaga

SEQ ID NO: 4619075 - DNA, 25 bp, Homo sapien
ttaacatgagagtaagtgaagggtt

SEQ ID NO: 4619076 - DNA, 25 bp, Homo sapien
catgagagtaagtgaagggttagta

SEQ ID NO: 4619077 - DNA, 25 bp, Homo sapien
agtgaagggttagtaaaatctggat

SEQ ID NO: 4619078 - DNA, 25 bp, Homo sapien
aacatgagagtaagtgaagggttag

SEQ ID NO: 4619079 - DNA, 25 bp, Homo sapien
aagactccaaaagcatcaaatggca

SEQ ID NO: 4619080 - DNA, 25 bp, Homo sapien
agactccaaaagcatcaaatggcat

SEQ ID NO: 4619081 - DNA, 25 bp, Homo sapien
agttcatccttagacccgtatcctt

SEQ ID NO: 4619082 - DNA, 25 bp, Homo sapien
tcatcctttataagttcatccttag

SEQ ID NO: 4619083 - DNA, 25 bp, Homo sapien
ccttagacccgtatccttggtcaga

SEQ ID NO: 4619084 - DNA, 25 bp, Homo sapien
ccgtatccttggtcagactgaccac

SEQ ID NO: 4619085 - DNA, 25 bp, Homo sapien
agacggaactttcacaatactgctg

SEQ ID NO: 4619086 - DNA, 25 bp, Homo sapien
gacatcaaatataccagacggaact

SEQ ID NO: 4619087 - DNA, 25 bp, Homo sapien
gctctggactaggttgtgaatgttt

SEQ ID NO: 4619088 - DNA, 25 bp, Homo sapien
catgcaggaggttcagtaggactgt

SEQ ID NO: 4619089 - DNA, 25 bp, Homo sapien
taaccctcagtgtgacagtattagg

SEQ ID NO: 4619090 - DNA, 25 bp, Homo sapien
aataagttagcactctgcaacctgg

SEQ ID NO: 4619091 - DNA, 25 bp, Homo sapien
tttgatcatgaaagtggaaccctga

SEQ ID NO: 4619092 - DNA, 25 bp, Homo sapien
tagcactggcaaattctaagaaggc

SEQ ID NO: 4619093 - DNA, 25 bp, Homo sapien
gacatacaagtcctactatcaggta

SEQ ID NO: 4619094 - DNA, 25 bp, Homo sapien
tctctggcaccggagatgatctgtg

SEQ ID NO: 4619095 - DNA, 25 bp, Homo sapien
gattagtagcttcgccaaagactgc

SEQ ID NO: 4619096 - DNA, 25 bp, Homo sapien
tgtgagaatcttggcatctgctccc

SEQ ID NO: 4619097 - DNA, 25 bp, Homo sapien
gtctctggactgattactgttacta

SEQ ID NO: 4619098 - DNA, 25 bp, Homo sapien
cagtagttttaggtacgtcatcaac

SEQ ID NO: 4619099 - DNA, 25 bp, Homo sapien
tctgaaccaccttagcaataccata

SEQ ID NO: 4619100 - DNA, 25 bp, Homo sapien
gactctcatatgtatctactgttgc

SEQ ID NO: 4619101 - DNA, 25 bp, Homo sapien
ggtttgctgcttgaaacgcccagta

SEQ ID NO: 4619102 - DNA, 25 bp, Homo sapien
tgtggcgaagaacgcaccagtgctg

SEQ ID NO: 4619103 - DNA, 25 bp, Homo sapien
gaatttactacagaacccaacgagc

SEQ ID NO: 4619104 - DNA, 25 bp, Homo sapien
ctgagtagctgtaggcagacgcaac

SEQ ID NO: 4619105 - DNA, 25 bp, Homo sapien
tatcgcttctaaggtaagagcatgg

SEQ ID NO: 4619106 - DNA, 25 bp, Homo sapien
caatttagaccttttacgatctgaa

SEQ ID NO: 4619107 - DNA, 25 bp, Homo sapien
gctattttatttcgccttcccttga

SEQ ID NO: 4619108 - DNA, 25 bp, Homo sapien
ttgactgacctcgtaagctctttaa

SEQ ID NO: 4619109 - DNA, 25 bp, Homo sapien
ctgtagttcttaactacataggtga

SEQ ID NO: 4619110 - DNA, 25 bp, Homo sapien
ttgttgaagctttaggtagaaaaca

SEQ ID NO: 4619111 - DNA, 25 bp, Homo sapien
caaatatcaatattagagccaagaa

SEQ ID NO: 4619112 - DNA, 25 bp, Homo sapien
atcaatattagagccaagaaacatg

SEQ ID NO: 4619113 - DNA, 25 bp, Homo sapien
ctgggaagctgtagtctctattagt

SEQ ID NO: 4619114 - DNA, 25 bp, Homo sapien
tgttgctctgggtaagttcactggg

SEQ ID NO: 4619115 - DNA, 25 bp, Homo sapien
ttgtgttaggcgatatattctcccc

SEQ ID NO: 4619116 - DNA, 25 bp, Homo sapien
tgttggataatgcagttttcctaca

SEQ ID NO: 4619117 - DNA, 25 bp, Homo sapien
gggaccaaccctgagatacttgtgt

SEQ ID NO: 4619118 - DNA, 25 bp, Homo sapien
cttgccctttcatgcctcttggaaa

SEQ ID NO: 4619119 - DNA, 25 bp, Homo sapien
gatagatgctagacatgctggtatt

SEQ ID NO: 4619120 - DNA, 25 bp, Homo sapien
attctgatagatgctagacatgctg

SEQ ID NO: 4619121 - DNA, 25 bp, Homo sapien
tttcatgcctcttggaaatggaact

SEQ ID NO: 4619122 - DNA, 25 bp, Homo sapien
ctactttatcatgaactgaatatag

SEQ ID NO: 4619123 - DNA, 25 bp, Homo sapien
agctactttatcatgaactgaatat

SEQ ID NO: 4619124 - DNA, 25 bp, Homo sapien
gctactttatcatgaactgaatata

SEQ ID NO: 4619125 - DNA, 25 bp, Homo sapien
caagctctacactgtgaacaactgg

SEQ ID NO: 4619126 - DNA, 25 bp, Homo sapien
tgtattcaaatttgagtcatctgct

SEQ ID NO: 4619127 - DNA, 25 bp, Homo sapien
agctccacaagctctacactgtgaa

SEQ ID NO: 4619128 - DNA, 25 bp, Homo sapien
tgctgtccatccagccataatttct

SEQ ID NO: 4619129 - DNA, 25 bp, Homo sapien
aaactgtcaccagaggtacttggtt

SEQ ID NO: 4619130 - DNA, 25 bp, Homo sapien
tacaggtttgtgctccaaggattca

SEQ ID NO: 4619131 - DNA, 25 bp, Homo sapien
ggaagtccataaagttgatcaagtc

SEQ ID NO: 4619132 - DNA, 25 bp, Homo sapien
catttgccaatggaatgcttccact

SEQ ID NO: 4619133 - DNA, 25 bp, Homo sapien
ggagagagacccagtcatatttact

SEQ ID NO: 4619134 - DNA, 25 bp, Homo sapien
gtatttaatctctactaggccacga

SEQ ID NO: 4619135 - DNA, 25 bp, Homo sapien
taggccacgatccacctaaggagag

SEQ ID NO: 4619136 - DNA, 25 bp, Homo sapien
taagggccaagtgtacatttcacag

SEQ ID NO: 4619137 - DNA, 25 bp, Homo sapien
aaattttcatagtttggacatctcc

SEQ ID NO: 4619138 - DNA, 25 bp, Homo sapien
attttcatagtttggacatctccac

SEQ ID NO: 4619139 - DNA, 25 bp, Homo sapien
aattttcatagtttggacatctcca

SEQ ID NO: 4619140 - DNA, 25 bp, Homo sapien
cgctgggtaaagtcaatattctgca

SEQ ID NO: 4619141 - DNA, 25 bp, Homo sapien
tcctgcagactatttggaagactaa

SEQ ID NO: 4619142 - DNA, 25 bp, Homo sapien
gatgccatgaaacggtcgctgggta

SEQ ID NO: 4619143 - DNA, 25 bp, Homo sapien
gacttcgagtcaaagacacatttcg

SEQ ID NO: 4619144 - DNA, 25 bp, Homo sapien
gataaaagcagtgtgattatatttt

SEQ ID NO: 4619145 - DNA, 25 bp, Homo sapien
aacagactaaataacttgatactat

SEQ ID NO: 4619146 - DNA, 25 bp, Homo sapien
aagctagatgatgggggactcatta

SEQ ID NO: 4619147 - DNA, 25 bp, Homo sapien
taaaagcagtgtgattatatttttc

SEQ ID NO: 4619148 - DNA, 25 bp, Homo sapien
actcaagtagggcacagaaacaggg

SEQ ID NO: 4619149 - DNA, 25 bp, Homo sapien
cctggcaagttactaggaaggtcca

SEQ ID NO: 4619150 - DNA, 25 bp, Homo sapien
gaaggtccaaacgtctgaaatacca

SEQ ID NO: 4619151 - DNA, 25 bp, Homo sapien
tctttacggagtactagaggactca

SEQ ID NO: 4619152 - DNA, 25 bp, Homo sapien
taaaattcctccatgagacatacag

SEQ ID NO: 4619153 - DNA, 25 bp, Homo sapien
gacatacagaggttctcttggttcc

SEQ ID NO: 4619154 - DNA, 25 bp, Homo sapien
tcctgatgaaggttgatattatccc

SEQ ID NO: 4619155 - DNA, 25 bp, Homo sapien
ccataacagctgaatatacacaagt

SEQ ID NO: 4619156 - DNA, 25 bp, Homo sapien
caatttgcttatccagtcacctatg

SEQ ID NO: 4619157 - DNA, 25 bp, Homo sapien
agtcacctatggatgcgtatttgag

SEQ ID NO: 4619158 - DNA, 25 bp, Homo sapien
gatgcgtatttgagttgttcccatt

SEQ ID NO: 4619159 - DNA, 25 bp, Homo sapien
aatttgcttatccagtcacctatgg

SEQ ID NO: 4619160 - DNA, 25 bp, Homo sapien
tcatgagcttttggccatttgaaca

SEQ ID NO: 4619161 - DNA, 25 bp, Homo sapien
ctaacacggagtcatgaagatttac

SEQ ID NO: 4619162 - DNA, 25 bp, Homo sapien
caaatatctcctcccaatctgtcga

SEQ ID NO: 4619163 - DNA, 25 bp, Homo sapien
gaaggccttgcctaactaacacgga

SEQ ID NO: 4619164 - DNA, 25 bp, Homo sapien
gatgtaattcataactttttagaca

SEQ ID NO: 4619165 - DNA, 25 bp, Homo sapien
tgagccaaccatgtctagccttatt

SEQ ID NO: 4619166 - DNA, 25 bp, Homo sapien
tagacagtttttcactccgtcaccc

SEQ ID NO: 4619167 - DNA, 25 bp, Homo sapien
caacatgatgtaattcataactttt

SEQ ID NO: 4619168 - DNA, 25 bp, Homo sapien
tgagacaacatctcactctgttacc

SEQ ID NO: 4619169 - DNA, 25 bp, Homo sapien
tagggtctcaccaggttgcccaggt

SEQ ID NO: 4619170 - DNA, 25 bp, Homo sapien
ctaacaataagaacacagtaagttt

SEQ ID NO: 4619171 - DNA, 25 bp, Homo sapien
caaccttcgtctcccaggctcaagt

SEQ ID NO: 4619172 - DNA, 25 bp, Homo sapien
ctgtgaaagtaggttgatgggttta

SEQ ID NO: 4619173 - DNA, 25 bp, Homo sapien
gcctgatggtttctactaaagtgct

SEQ ID NO: 4619174 - DNA, 25 bp, Homo sapien
tcttgttgttcctctgacaggagag

SEQ ID NO: 4619175 - DNA, 25 bp, Homo sapien
tgtgctgaatactctgcctgatggt

SEQ ID NO: 4619176 - DNA, 25 bp, Homo sapien
aatgactgagtggtggcaagcaaaa

SEQ ID NO: 4619177 - DNA, 25 bp, Homo sapien
tgtgtagcacttaaaacaatagatg

SEQ ID NO: 4619178 - DNA, 25 bp, Homo sapien
tcaagtaggaatgtatatatctgtg

SEQ ID NO: 4619179 - DNA, 25 bp, Homo sapien
tgtgtttcttcgacaactagagata

SEQ ID NO: 4619180 - DNA, 25 bp, Homo sapien
caatgtaaaaggtggtgtggtctct

SEQ ID NO: 4619181 - DNA, 25 bp, Homo sapien
tatttaacccaatagcaaaggacag

SEQ ID NO: 4619182 - DNA, 25 bp, Homo sapien
gacgtaaggctgattctagtgacac

SEQ ID NO: 4619183 - DNA, 25 bp, Homo sapien
gactcagttgttaaagatgacagga

SEQ ID NO: 4619184 - DNA, 25 bp, Homo sapien
ttttaatggtgaagacattaagttc

SEQ ID NO: 4619185 - DNA, 25 bp, Homo sapien
aatggtgaagacattaagttctgtc

SEQ ID NO: 4619186 - DNA, 25 bp, Homo sapien
gacattaagttctgtcatctagtta

SEQ ID NO: 4619187 - DNA, 25 bp, Homo sapien
tttaaaagtcaatgggcaaatagca

SEQ ID NO: 4619188 - DNA, 25 bp, Homo sapien
tctctcttcctagagacactaatga

SEQ ID NO: 4619189 - DNA, 25 bp, Homo sapien
ttcaaattggtattgagtcaaatta

SEQ ID NO: 4619190 - DNA, 25 bp, Homo sapien
gtatttgaactatatatttagaagt

SEQ ID NO: 4619191 - DNA, 25 bp, Homo sapien
tcataatcttttattaaccaactta

SEQ ID NO: 4619192 - DNA, 25 bp, Homo sapien
acagccgttcatttcaaattggtat

SEQ ID NO: 4619193 - DNA, 25 bp, Homo sapien
cagactattgtatgcaattccatat

SEQ ID NO: 4619194 - DNA, 25 bp, Homo sapien
aatgagaggcgctccaaaacacttc

SEQ ID NO: 4619195 - DNA, 25 bp, Homo sapien
gcaacctttcaagaatctctgaaga

SEQ ID NO: 4619196 - DNA, 25 bp, Homo sapien
actcgacactggcacttggtggagc

SEQ ID NO: 4619197 - DNA, 25 bp, Homo sapien
caatgagacccctttcagaaaaccg

SEQ ID NO: 4619198 - DNA, 25 bp, Homo sapien
ataagccctgggacattcaaatggc

SEQ ID NO: 4619199 - DNA, 25 bp, Homo sapien
tccccaagccttgtgtgtcaacatt

SEQ ID NO: 4619200 - DNA, 25 bp, Homo sapien
cagaaaaccgtattgcaacatgcaa

SEQ ID NO: 4619201 - DNA, 25 bp, Homo sapien
ggctttttaaaccatgcagagagtt

SEQ ID NO: 4619202 - DNA, 25 bp, Homo sapien
tctcagacagtgcaaaagatccatt

SEQ ID NO: 4619203 - DNA, 25 bp, Homo sapien
tgcagtgcaagtttatcccacaggt

SEQ ID NO: 4619204 - DNA, 25 bp, Homo sapien
aataaaacttccgtgtgcagtgcaa

SEQ ID NO: 4619205 - DNA, 25 bp, Homo sapien
agcgcgtcagtaagtgaaaacttga

SEQ ID NO: 4619206 - DNA, 25 bp, Homo sapien
caaaatattgggattctaaagatta

SEQ ID NO: 4619207 - DNA, 25 bp, Homo sapien
ttttttaatgggaagcgcgtcagta

SEQ ID NO: 4619208 - DNA, 25 bp, Homo sapien
caagttacgagtgaaggaatggaaa

SEQ ID NO: 4619209 - DNA, 25 bp, Homo sapien
cccaatatctaaatggcagcagcag

SEQ ID NO: 4619210 - DNA, 25 bp, Homo sapien
ccttgaccgcctgggaactacaggt

SEQ ID NO: 4619211 - DNA, 25 bp, Homo sapien
gacatgtcgttaactatgcaggttg

SEQ ID NO: 4619212 - DNA, 25 bp, Homo sapien
tacagtgctacaagtcattccaggt

SEQ ID NO: 4619213 - DNA, 25 bp, Homo sapien
tcccaggtgttaggccggtagtgcc

SEQ ID NO: 4619214 - DNA, 25 bp, Homo sapien
tatcaggatctttagaaggtggcac

SEQ ID NO: 4619215 - DNA, 25 bp, Homo sapien
tctaacagttctatgctgactagcc

SEQ ID NO: 4619216 - DNA, 25 bp, Homo sapien
gaattgttaggctgttcacacactg

SEQ ID NO: 4619217 - DNA, 25 bp, Homo sapien
gtgtcttgacccatggccgtgtccg

SEQ ID NO: 4619218 - DNA, 25 bp, Homo sapien
atcagtggtgggaacgacaaacaag

SEQ ID NO: 4619219 - DNA, 25 bp, Homo sapien
gtgtccgcctgctactgagtaaggg

SEQ ID NO: 4619220 - DNA, 25 bp, Homo sapien
cagtggtgggaacgacaaacaaggt

SEQ ID NO: 4619221 - DNA, 25 bp, Homo sapien
ctgacgctctgggtgaagaatggaa

SEQ ID NO: 4619222 - DNA, 25 bp, Homo sapien
ttgctgctgacgctctgggtgaaga

SEQ ID NO: 4619223 - DNA, 25 bp, Homo sapien
cagaagttgctgctgacgctctggg

SEQ ID NO: 4619224 - DNA, 25 bp, Homo sapien
atggccacagaagttgctgctgacg

SEQ ID NO: 4619225 - DNA, 25 bp, Homo sapien
caacctgacgaacatggccaaaacc

SEQ ID NO: 4619226 - DNA, 25 bp, Homo sapien
ctttcaaatctatatacccggcccg

SEQ ID NO: 4619227 - DNA, 25 bp, Homo sapien
tgttggttaacccacccaatctgtg

SEQ ID NO: 4619228 - DNA, 25 bp, Homo sapien
tggcaacccttgcaaactaacacag

SEQ ID NO: 4619229 - DNA, 25 bp, Homo sapien
catcacaatggcctgtagacttcat

SEQ ID NO: 4619230 - DNA, 25 bp, Homo sapien
tgggcccataggtatgcttccactg

SEQ ID NO: 4619231 - DNA, 25 bp, Homo sapien
tatgggcccataggtatgcttccac

SEQ ID NO: 4619232 - DNA, 25 bp, Homo sapien
gcccataggtatgcttccactgcac

SEQ ID NO: 4619233 - DNA, 25 bp, Homo sapien
gggttatgggcccataggtatgctt

SEQ ID NO: 4619234 - DNA, 25 bp, Homo sapien
ggtgtcagtggaaggtttccagaca

SEQ ID NO: 4619235 - DNA, 25 bp, Homo sapien
tcttttccagatggtccttatataa

SEQ ID NO: 4619236 - DNA, 25 bp, Homo sapien
ctgaaggtgtcagtggaaggtttcc

SEQ ID NO: 4619237 - DNA, 25 bp, Homo sapien
ttcttttccagatggtccttatata

SEQ ID NO: 4619238 - DNA, 25 bp, Homo sapien
aacgcggcgacagccagcggcgaaa

SEQ ID NO: 4619239 - DNA, 25 bp, Homo sapien
ctgctgcggaggcaaaacgcggcga

SEQ ID NO: 4619240 - DNA, 25 bp, Homo sapien
gggtaaccgccggatgtgcgcctcc

SEQ ID NO: 4619241 - DNA, 25 bp, Homo sapien
gctttatgaagcaccgggtaaccgc

SEQ ID NO: 4619242 - DNA, 25 bp, Homo sapien
agtccacctccgagctaccagcctg

SEQ ID NO: 4619243 - DNA, 25 bp, Homo sapien
tagcaggcacgatggtgtagttgtc

SEQ ID NO: 4619244 - DNA, 25 bp, Homo sapien
cgtgttgtagaactcggcgatagca

SEQ ID NO: 4619245 - DNA, 25 bp, Homo sapien
gtgtagttgtcctcgcaccagtcca

SEQ ID NO: 4619246 - DNA, 25 bp, Homo sapien
gaagagacttgtcccggcaggttca

SEQ ID NO: 4619247 - DNA, 25 bp, Homo sapien
cagcactccgagagcaggtattcag

SEQ ID NO: 4619248 - DNA, 25 bp, Homo sapien
caaacaaggagaatgggctgacaca

SEQ ID NO: 4619249 - DNA, 25 bp, Homo sapien
tgactcagcccctggagagaatgcc

SEQ ID NO: 4619250 - DNA, 25 bp, Homo sapien
gacttcagaactggagaaagcacag

SEQ ID NO: 4619251 - DNA, 25 bp, Homo sapien
gcaaatccaaaacccgcacattatc

SEQ ID NO: 4619252 - DNA, 25 bp, Homo sapien
ttagcggcttgcacaagacaggaca

SEQ ID NO: 4619253 - DNA, 25 bp, Homo sapien
ttcctttcatccctcagacttcaga

SEQ ID NO: 4619254 - DNA, 25 bp, Homo sapien
gtagagtcaaatggaccaagttctg

SEQ ID NO: 4619255 - DNA, 25 bp, Homo sapien
tacagtggcacttatagcttcaaga

SEQ ID NO: 4619256 - DNA, 25 bp, Homo sapien
cccagccttatacatgcgtatttta

SEQ ID NO: 4619257 - DNA, 25 bp, Homo sapien
aaagtatgagttttatcctagagat

SEQ ID NO: 4619258 - DNA, 25 bp, Homo sapien
ttctgacctccttggcttaactcct

SEQ ID NO: 4619259 - DNA, 25 bp, Homo sapien
ggctttcctcttgttaaactagcaa

SEQ ID NO: 4619260 - DNA, 25 bp, Homo sapien
gatctttctcccttcatatacatga

SEQ ID NO: 4619261 - DNA, 25 bp, Homo sapien
cagggctggctcaagtcagagagcc

SEQ ID NO: 4619262 - DNA, 25 bp, Homo sapien
cagtgactgtcatattggaaactca

SEQ ID NO: 4619263 - DNA, 25 bp, Homo sapien
gtttgggctaggcacatttcctgtg

SEQ ID NO: 4619264 - DNA, 25 bp, Homo sapien
ttttgttcataccaaagccttgaag

SEQ ID NO: 4619265 - DNA, 25 bp, Homo sapien
cagtgtaaatttcacactcacaaca

SEQ ID NO: 4619266 - DNA, 25 bp, Homo sapien
cagatgggcggtaaaatgaaaaata

SEQ ID NO: 4619267 - DNA, 25 bp, Homo sapien
gcagatgggcggtaaaatgaaaaat

SEQ ID NO: 4619268 - DNA, 25 bp, Homo sapien
agcatgttgcatactgacgaaacaa

SEQ ID NO: 4619269 - DNA, 25 bp, Homo sapien
tgttgcatactgacgaaacaagcac

SEQ ID NO: 4619270 - DNA, 25 bp, Homo sapien
catgttgcatactgacgaaacaagc

SEQ ID NO: 4619271 - DNA, 25 bp, Homo sapien
ttgcatactgacgaaacaagcacat

SEQ ID NO: 4619272 - DNA, 25 bp, Homo sapien
acccaaaggactgcaagttcatcaa

SEQ ID NO: 4619273 - DNA, 25 bp, Homo sapien
tccgaaagatctttggtagatacct

SEQ ID NO: 4619274 - DNA, 25 bp, Homo sapien
gttgcatggaagtagacggatccaa

SEQ ID NO: 4619275 - DNA, 25 bp, Homo sapien
gaaactaagggttgcatggaagtag

SEQ ID NO: 4619276 - DNA, 25 bp, Homo sapien
aattatataatgtgccccttgcagc

SEQ ID NO: 4619277 - DNA, 25 bp, Homo sapien
gttcagatgaaaggtaaaagcggct

SEQ ID NO: 4619278 - DNA, 25 bp, Homo sapien
aatggctgtagttaggtgtcctcac

SEQ ID NO: 4619279 - DNA, 25 bp, Homo sapien
aatgcccaagaacagccaatggctg

SEQ ID NO: 4619280 - DNA, 25 bp, Homo sapien
gaagtggcgacgtgatcctagacac

SEQ ID NO: 4619281 - DNA, 25 bp, Homo sapien
ttcagtagaaagagccggaagtggc

SEQ ID NO: 4619282 - DNA, 25 bp, Homo sapien
tgcaggtcctaaggtctcaactact

SEQ ID NO: 4619283 - DNA, 25 bp, Homo sapien
atggctgggtgccaataaaacctga

SEQ ID NO: 4619284 - DNA, 25 bp, Homo sapien
taggaaaaccagagacctttgttca

SEQ ID NO: 4619285 - DNA, 25 bp, Homo sapien
caagtacccagggacccaaacgctg

SEQ ID NO: 4619286 - DNA, 25 bp, Homo sapien
cttgtttatctgctgaccttccctc

SEQ ID NO: 4619287 - DNA, 25 bp, Homo sapien
cggaaggccgcagggtcctctgcct

SEQ ID NO: 4619288 - DNA, 25 bp, Homo sapien
ccaggatgacaatggtggctttgtg

SEQ ID NO: 4619289 - DNA, 25 bp, Homo sapien
gccaggatgacaatggtggctttgt

SEQ ID NO: 4619290 - DNA, 25 bp, Homo sapien
cgggccaggatgacaatggtggctt

SEQ ID NO: 4619291 - DNA, 25 bp, Homo sapien
aacgggccaggatgacaatggtggc

SEQ ID NO: 4619292 - DNA, 25 bp, Homo sapien
ccgaccgcccctactgggaagtgag

SEQ ID NO: 4619293 - DNA, 25 bp, Homo sapien
ccagccgccccatccgggaggtgag

SEQ ID NO: 4619294 - DNA, 25 bp, Homo sapien
ccatccgggaggtgaggggtgcctc

SEQ ID NO: 4619295 - DNA, 25 bp, Homo sapien
cgccccatccgggaggtgaggggtg

SEQ ID NO: 4619296 - DNA, 25 bp, Homo sapien
atctctgcccggctgccattccatc

SEQ ID NO: 4619297 - DNA, 25 bp, Homo sapien
tgcccggctgccattccatctggga

SEQ ID NO: 4619298 - DNA, 25 bp, Homo sapien
gcccggctgccattccatctgggaa

SEQ ID NO: 4619299 - DNA, 25 bp, Homo sapien
ggagcatctctgcccggctgccatt

SEQ ID NO: 4619300 - DNA, 25 bp, Homo sapien
gtaaccgcagacaggacactgacca

SEQ ID NO: 4619301 - DNA, 25 bp, Homo sapien
tcgtaaccgcagacaggacactgac

SEQ ID NO: 4619302 - DNA, 25 bp, Homo sapien
gtcgtaaccgcagacaggacactga

SEQ ID NO: 4619303 - DNA, 25 bp, Homo sapien
acgtcgtaaccgcagacaggacact

SEQ ID NO: 4619304 - DNA, 25 bp, Homo sapien
gctggccacctttcctgtgtctcct

SEQ ID NO: 4619305 - DNA, 25 bp, Homo sapien
tcctgtgtctccttcgctggttcct

SEQ ID NO: 4619306 - DNA, 25 bp, Homo sapien
gtgtctccttcgctggttcctctca

SEQ ID NO: 4619307 - DNA, 25 bp, Homo sapien
cttgctggccacctttcctgtgtct

SEQ ID NO: 4619308 - DNA, 25 bp, Homo sapien
cgggggtccagagagtcactcatcg

SEQ ID NO: 4619309 - DNA, 25 bp, Homo sapien
gctcgcagaaagctcggtcactgat

SEQ ID NO: 4619310 - DNA, 25 bp, Homo sapien
gacagcagctcgcagaaagctcggt

SEQ ID NO: 4619311 - DNA, 25 bp, Homo sapien
gcagaaagctcggtcactgatccag

SEQ ID NO: 4619312 - DNA, 25 bp, Homo sapien
ccagcttaaacacacgcatgttgtc

SEQ ID NO: 4619313 - DNA, 25 bp, Homo sapien
ctaagcatgacaatcaggcctttcg

SEQ ID NO: 4619314 - DNA, 25 bp, Homo sapien
tgacaatcaggcctttcgttccggc

SEQ ID NO: 4619315 - DNA, 25 bp, Homo sapien
gttccggctaagcctgctccctgga

SEQ ID NO: 4619316 - DNA, 25 bp, Homo sapien
aatcaggcctttcgttccggctaag

SEQ ID NO: 4619317 - DNA, 25 bp, Homo sapien
tacagaaacaggtgggtgacattaa

SEQ ID NO: 4619318 - DNA, 25 bp, Homo sapien
aatgtctctaaatggccagtgcggc

SEQ ID NO: 4619319 - DNA, 25 bp, Homo sapien
tccaaagtatagacgctccaatgtg

SEQ ID NO: 4619320 - DNA, 25 bp, Homo sapien
gctattactgaactccaaggttgtt

SEQ ID NO: 4619321 - DNA, 25 bp, Homo sapien
ggcctcttctaattaggaaaggatg

SEQ ID NO: 4619322 - DNA, 25 bp, Homo sapien
gaatagcaggatgataaatcttcag

SEQ ID NO: 4619323 - DNA, 25 bp, Homo sapien
gatgaagattaccaacaatccctgg

SEQ ID NO: 4619324 - DNA, 25 bp, Homo sapien
tcagcaatttgggacccgttttaga

SEQ ID NO: 4619325 - DNA, 25 bp, Homo sapien
cccatttctcattgggccagaactt

SEQ ID NO: 4619326 - DNA, 25 bp, Homo sapien
gcccatttctcattgggccagaact

SEQ ID NO: 4619327 - DNA, 25 bp, Homo sapien
ctgtcttcctagcaaaggaagccca

SEQ ID NO: 4619328 - DNA, 25 bp, Homo sapien
cccactgcatgaggggcgataagca

SEQ ID NO: 4619329 - DNA, 25 bp, Homo sapien
ccaactattcgaactcccttggctg

SEQ ID NO: 4619330 - DNA, 25 bp, Homo sapien
tattcgaactcccttggctgtcttc

SEQ ID NO: 4619331 - DNA, 25 bp, Homo sapien
cactaaagaaattaagagccccagc

SEQ ID NO: 4619332 - DNA, 25 bp, Homo sapien
ccacagacacattagggaggaggag

SEQ ID NO: 4619333 - DNA, 25 bp, Homo sapien
catggccattaaggacgcagcccaa

SEQ ID NO: 4619334 - DNA, 25 bp, Homo sapien
tcagtagagtccactccaagggcgc

SEQ ID NO: 4619335 - DNA, 25 bp, Homo sapien
tatgtaggacagtgacatgactcct

SEQ ID NO: 4619336 - DNA, 25 bp, Homo sapien
cctggatgtgtcaaaaatcgtcacc

SEQ ID NO: 4619337 - DNA, 25 bp, Homo sapien
gcccgtgagtgcatagctactgcca

SEQ ID NO: 4619338 - DNA, 25 bp, Homo sapien
gcaccttctactgcaagcgtgaaga

SEQ ID NO: 4619339 - DNA, 25 bp, Homo sapien
tttggccagctggaataatagcacc

SEQ ID NO: 4619340 - DNA, 25 bp, Homo sapien
taaattttaccacagccagtgggca

SEQ ID NO: 4619341 - DNA, 25 bp, Homo sapien
tgccccaagggataaagagccagga

SEQ ID NO: 4619342 - DNA, 25 bp, Homo sapien
taatagcacctaggcaaagccttgg

SEQ ID NO: 4619343 - DNA, 25 bp, Homo sapien
tgtggtcccagcggacaatggccaa

SEQ ID NO: 4619344 - DNA, 25 bp, Homo sapien
gtggtcccagcggacaatggccaag

SEQ ID NO: 4619345 - DNA, 25 bp, Homo sapien
ggtcccagcggacaatggccaagac

SEQ ID NO: 4619346 - DNA, 25 bp, Homo sapien
tggtcccagcggacaatggccaaga

SEQ ID NO: 4619347 - DNA, 25 bp, Homo sapien
catacacactttcagggaatctcgt

SEQ ID NO: 4619348 - DNA, 25 bp, Homo sapien
tggcagaagcgttagcgttatcagc

SEQ ID NO: 4619349 - DNA, 25 bp, Homo sapien
cattctctggaaccttggctttaaa

SEQ ID NO: 4619350 - DNA, 25 bp, Homo sapien
gatatatgcatgaacacggccttgg

SEQ ID NO: 4619351 - DNA, 25 bp, Homo sapien
gatatgtgcgagcaaagccccagaa

SEQ ID NO: 4619352 - DNA, 25 bp, Homo sapien
cacgctgaaagcaggtgggcgtcca

SEQ ID NO: 4619353 - DNA, 25 bp, Homo sapien
ggctgacgcttgacactgaaaatgc

SEQ ID NO: 4619354 - DNA, 25 bp, Homo sapien
aagtcggcagcgagaacaggcttcc

SEQ ID NO: 4619355 - DNA, 25 bp, Homo sapien
ctcagtgtagcctcaaacacctgga

SEQ ID NO: 4619356 - DNA, 25 bp, Homo sapien
tcatagctcagtgtagcctcaaaca

SEQ ID NO: 4619357 - DNA, 25 bp, Homo sapien
tagctcagtgtagcctcaaacacct

SEQ ID NO: 4619358 - DNA, 25 bp, Homo sapien
tcagtgtagcctcaaacacctggac

SEQ ID NO: 4619359 - DNA, 25 bp, Homo sapien
taaagcaaagttcacccatatggaa

SEQ ID NO: 4619360 - DNA, 25 bp, Homo sapien
tccttgggaggacatgtaaagcagc

SEQ ID NO: 4619361 - DNA, 25 bp, Homo sapien
gcagatttcataatgctttggtggt

SEQ ID NO: 4619362 - DNA, 25 bp, Homo sapien
catatacctgggaaatgtaggatgt

SEQ ID NO: 4619363 - DNA, 25 bp, Homo sapien
taatggatccataagtaactaaggc

SEQ ID NO: 4619364 - DNA, 25 bp, Homo sapien
gctactgattgatctcatgggccag

SEQ ID NO: 4619365 - DNA, 25 bp, Homo sapien
actatactgggtgcagcatgaccat

SEQ ID NO: 4619366 - DNA, 25 bp, Homo sapien
taactaaggccttggagactaacag

SEQ ID NO: 4619367 - DNA, 25 bp, Homo sapien
gaatctcattcatcaaggtcaggac

SEQ ID NO: 4619368 - DNA, 25 bp, Homo sapien
taggtgactgactcaactgcaaaca

SEQ ID NO: 4619369 - DNA, 25 bp, Homo sapien
gaatttgtcctgcttccttagagag

SEQ ID NO: 4619370 - DNA, 25 bp, Homo sapien
tcttgaagggcaaccaagttggtta

SEQ ID NO: 4619371 - DNA, 25 bp, Homo sapien
tgcaagtggcgaatgaacaaaatcc

SEQ ID NO: 4619372 - DNA, 25 bp, Homo sapien
tggctcctgtacaccgtcattcaca

SEQ ID NO: 4619373 - DNA, 25 bp, Homo sapien
tgctcttcgtcatcctctctatcgc

SEQ ID NO: 4619374 - DNA, 25 bp, Homo sapien
tgtgccatcgtccttctcttcatca

SEQ ID NO: 4619375 - DNA, 25 bp, Homo sapien
gaggataagaacagagtagagagaa

SEQ ID NO: 4619376 - DNA, 25 bp, Homo sapien
taagaggtaagtgataggaaagtag

SEQ ID NO: 4619377 - DNA, 25 bp, Homo sapien
tgccttccaataagaaacacgtaaa

SEQ ID NO: 4619378 - DNA, 25 bp, Homo sapien
ttggtttaggatgttcacacagaag

SEQ ID NO: 4619379 - DNA, 25 bp, Homo sapien
tagagttggggtcttgcaccatcac

SEQ ID NO: 4619380 - DNA, 25 bp, Homo sapien
agagttggggtcttgcaccatcacc

SEQ ID NO: 4619381 - DNA, 25 bp, Homo sapien
agttggggtcttgcaccatcaccca

SEQ ID NO: 4619382 - DNA, 25 bp, Homo sapien
tttagagttggggtcttgcaccatc

SEQ ID NO: 4619383 - DNA, 25 bp, Homo sapien
ttcacagtttgtgacttgggaatga

SEQ ID NO: 4619384 - DNA, 25 bp, Homo sapien
tcttcacagtttgtgacttgggaat

SEQ ID NO: 4619385 - DNA, 25 bp, Homo sapien
tgacttgggaatgaacagatcctga

SEQ ID NO: 4619386 - DNA, 25 bp, Homo sapien
cttcacagtttgtgacttgggaatg

SEQ ID NO: 4619387 - DNA, 25 bp, Homo sapien
ttctggcgaagaaggagagttgcca

SEQ ID NO: 4619388 - DNA, 25 bp, Homo sapien
cgaagaaggagagttgccattgagt

SEQ ID NO: 4619389 - DNA, 25 bp, Homo sapien
gttgccattgagttaaggaagtaaa

SEQ ID NO: 4619390 - DNA, 25 bp, Homo sapien
ctgtatctcgttggaaagatcccag

SEQ ID NO: 4619391 - DNA, 25 bp, Homo sapien
cactccagttctgcaagcaggctct

SEQ ID NO: 4619392 - DNA, 25 bp, Homo sapien
tcatacagtgccgttcagaggaaag

SEQ ID NO: 4619393 - DNA, 25 bp, Homo sapien
ggaactagggcatcaggatatttcc

SEQ ID NO: 4619394 - DNA, 25 bp, Homo sapien
tcttgggaactagggcatcaggata

SEQ ID NO: 4619395 - DNA, 25 bp, Homo sapien
ctactctgttttccaggatggccag

SEQ ID NO: 4619396 - DNA, 25 bp, Homo sapien
gttttccaggatggccaggtgtatc

SEQ ID NO: 4619397 - DNA, 25 bp, Homo sapien
tctgttttccaggatggccaggtgt

SEQ ID NO: 4619398 - DNA, 25 bp, Homo sapien
atctactctgttttccaggatggcc

SEQ ID NO: 4619399 - DNA, 25 bp, Homo sapien
agctgggacatctcctagtctctgt

SEQ ID NO: 4619400 - DNA, 25 bp, Homo sapien
taaaagctgggacatctcctagtct

SEQ ID NO: 4619401 - DNA, 25 bp, Homo sapien
gtaaaagctgggacatctcctagtc

SEQ ID NO: 4619402 - DNA, 25 bp, Homo sapien
aaagctgggacatctcctagtctct

SEQ ID NO: 4619403 - DNA, 25 bp, Homo sapien
ctactaagatctgctggcgtatttc

SEQ ID NO: 4619404 - DNA, 25 bp, Homo sapien
agatctgctggcgtatttcctcctc

SEQ ID NO: 4619405 - DNA, 25 bp, Homo sapien
tctgctggcgtatttcctcctctgg

SEQ ID NO: 4619406 - DNA, 25 bp, Homo sapien
ctaagatctgctggcgtatttcctc

SEQ ID NO: 4619407 - DNA, 25 bp, Homo sapien
tctcagaggagtgtacagtatacgc

SEQ ID NO: 4619408 - DNA, 25 bp, Homo sapien
tacgcttagcttggaaaattgaccc

SEQ ID NO: 4619409 - DNA, 25 bp, Homo sapien
gatttttgtacactgccagctggtg

SEQ ID NO: 4619410 - DNA, 25 bp, Homo sapien
tcagccctgtgtaggccatggatgc

SEQ ID NO: 4619411 - DNA, 25 bp, Homo sapien
tagggtcctgacaacttacatttga

SEQ ID NO: 4619412 - DNA, 25 bp, Homo sapien
tataaggcagacgattgatgaattc

SEQ ID NO: 4619413 - DNA, 25 bp, Homo sapien
ccattaagtctggaatatcagggac

SEQ ID NO: 4619414 - DNA, 25 bp, Homo sapien
aacatctggcctgaataatgggtcc

SEQ ID NO: 4619415 - DNA, 25 bp, Homo sapien
gcaagggcaatttcagggaacggaa

SEQ ID NO: 4619416 - DNA, 25 bp, Homo sapien
tgtgataatttgtggcaagggcaat

SEQ ID NO: 4619417 - DNA, 25 bp, Homo sapien
aatttgtggcaagggcaatttcagg

SEQ ID NO: 4619418 - DNA, 25 bp, Homo sapien
ttcagggaacggaaatgatctgttg

SEQ ID NO: 4619419 - DNA, 25 bp, Homo sapien
gcattcagagctttagagaaatttc

SEQ ID NO: 4619420 - DNA, 25 bp, Homo sapien
cagcattcagagctttagagaaatt

SEQ ID NO: 4619421 - DNA, 25 bp, Homo sapien
ttcagagctttagagaaatttctct

SEQ ID NO: 4619422 - DNA, 25 bp, Homo sapien
cattcagagctttagagaaatttct

SEQ ID NO: 4619423 - DNA, 25 bp, Homo sapien
gaagaagacataggaaaccctaata

SEQ ID NO: 4619424 - DNA, 25 bp, Homo sapien
taggaaaccctaatacagaccatct

SEQ ID NO: 4619425 - DNA, 25 bp, Homo sapien
gtttgtagtcttgtcctctttggcc

SEQ ID NO: 4619426 - DNA, 25 bp, Homo sapien
cagttttagagacctgtttgtagtc

SEQ ID NO: 4619427 - DNA, 25 bp, Homo sapien
ccctccatggcattgctaagccagt

SEQ ID NO: 4619428 - DNA, 25 bp, Homo sapien
gctaagccagtagccatgttctggg

SEQ ID NO: 4619429 - DNA, 25 bp, Homo sapien
catgttctgggcaatgcttgctgct

SEQ ID NO: 4619430 - DNA, 25 bp, Homo sapien
taaattgccattaatgtcccatttc

SEQ ID NO: 4619431 - DNA, 25 bp, Homo sapien
tagactcctgagacccaattagtac

SEQ ID NO: 4619432 - DNA, 25 bp, Homo sapien
ttcatcccctttactgccaacatag

SEQ ID NO: 4619433 - DNA, 25 bp, Homo sapien
caacatagactcctgagacccaatt

SEQ ID NO: 4619434 - DNA, 25 bp, Homo sapien
cctttactgccaacatagactcctg

SEQ ID NO: 4619435 - DNA, 25 bp, Homo sapien
gaggactgcccaaatggaagagaag

SEQ ID NO: 4619436 - DNA, 25 bp, Homo sapien
gcctgcggcgcatgtcatagagaaa

SEQ ID NO: 4619437 - DNA, 25 bp, Homo sapien
cccgtgtggtcgatgaatgaaacta

SEQ ID NO: 4619438 - DNA, 25 bp, Homo sapien
ttataagagcgcagctgctgaagcc

SEQ ID NO: 4619439 - DNA, 25 bp, Homo sapien
acactgatgcttgcattgccgtgtg

SEQ ID NO: 4619440 - DNA, 25 bp, Homo sapien
gcttgcattgccgtgtgagtacgga

SEQ ID NO: 4619441 - DNA, 25 bp, Homo sapien
gcagacatggtttattaggtccctt

SEQ ID NO: 4619442 - DNA, 25 bp, Homo sapien
gcatgttgcagacatggtttattag

SEQ ID NO: 4619443 - DNA, 25 bp, Homo sapien
cagagaaatcctgtgcggcagagga

SEQ ID NO: 4619444 - DNA, 25 bp, Homo sapien
gaggaaaacgttcagacctgcatct

SEQ ID NO: 4619445 - DNA, 25 bp, Homo sapien
gacctgcatctttcatccgtttgct

SEQ ID NO: 4619446 - DNA, 25 bp, Homo sapien
cactgagctggtccggaagggacaa

SEQ ID NO: 4619447 - DNA, 25 bp, Homo sapien
tcacagttgacagattgcggaaggg

SEQ ID NO: 4619448 - DNA, 25 bp, Homo sapien
ttctgttgacaagtcaggaggcatc

SEQ ID NO: 4619449 - DNA, 25 bp, Homo sapien
aggcatcttctgtcactaccgttca

SEQ ID NO: 4619450 - DNA, 25 bp, Homo sapien
actgctgttctgatccattcccagg

SEQ ID NO: 4619451 - DNA, 25 bp, Homo sapien
agttgacccctgctctctgacagcc

SEQ ID NO: 4619452 - DNA, 25 bp, Homo sapien
gagttgacccctgctctctgacagc

SEQ ID NO: 4619453 - DNA, 25 bp, Homo sapien
cagaaacaggagggcacagtaaagc

SEQ ID NO: 4619454 - DNA, 25 bp, Homo sapien
agaaacaggagggcacagtaaagca

SEQ ID NO: 4619455 - DNA, 25 bp, Homo sapien
gaaacaggagggcacagtaaagcag

SEQ ID NO: 4619456 - DNA, 25 bp, Homo sapien
tgaccatttcaaggcgaggcaccac

SEQ ID NO: 4619457 - DNA, 25 bp, Homo sapien
caggtgcagctaagagcagctttgc

SEQ ID NO: 4619458 - DNA, 25 bp, Homo sapien
ggtgcagctaagagcagctttgcca

SEQ ID NO: 4619459 - DNA, 25 bp, Homo sapien
cggtcatgaccatttcaaggcgagg

SEQ ID NO: 4619460 - DNA, 25 bp, Homo sapien
cccatgggagatttcacagcctggc

SEQ ID NO: 4619461 - DNA, 25 bp, Homo sapien
caaagattgattccctatggtcctt

SEQ ID NO: 4619462 - DNA, 25 bp, Homo sapien
ttctgcccatgggagatttcacagc

SEQ ID NO: 4619463 - DNA, 25 bp, Homo sapien
cttttccaaagattgattccctatg

SEQ ID NO: 4619464 - DNA, 25 bp, Homo sapien
ttgtagtataaaggcattggagtgc

SEQ ID NO: 4619465 - DNA, 25 bp, Homo sapien
tcttgttaaaagctccacatttgac

SEQ ID NO: 4619466 - DNA, 25 bp, Homo sapien
tttgcttgcaaacaatcttcccttg

SEQ ID NO: 4619467 - DNA, 25 bp, Homo sapien
tcttcccttgtagtataaaggcatt

SEQ ID NO: 4619468 - DNA, 25 bp, Homo sapien
cgccacaatgccagttcccaatcag

SEQ ID NO: 4619469 - DNA, 25 bp, Homo sapien
gagtcctcatagtcacgccacaatg

SEQ ID NO: 4619470 - DNA, 25 bp, Homo sapien
tttccccagagagtcctcatagtca

SEQ ID NO: 4619471 - DNA, 25 bp, Homo sapien
cccaatcagtcaactttttaagtat

SEQ ID NO: 4619472 - DNA, 25 bp, Homo sapien
tcccagttcaatacccacaggtggt

SEQ ID NO: 4619473 - DNA, 25 bp, Homo sapien
actcccagttcaatacccacaggtg

SEQ ID NO: 4619474 - DNA, 25 bp, Homo sapien
atgagcagcccctggtctatcacag

SEQ ID NO: 4619475 - DNA, 25 bp, Homo sapien
ccagttcaatacccacaggtggttg

SEQ ID NO: 4619476 - DNA, 25 bp, Homo sapien
tgttggtacatgcactggatgccca

SEQ ID NO: 4619477 - DNA, 25 bp, Homo sapien
tggtacatgcactggatgcccactt

SEQ ID NO: 4619478 - DNA, 25 bp, Homo sapien
atgttggtacatgcactggatgccc

SEQ ID NO: 4619479 - DNA, 25 bp, Homo sapien
ctggacagagtaatgttggtacatg

SEQ ID NO: 4619480 - DNA, 25 bp, Homo sapien
cctcttttgccttttgagctgtggc

SEQ ID NO: 4619481 - DNA, 25 bp, Homo sapien
cttttgccttttgagctgtggctca

SEQ ID NO: 4619482 - DNA, 25 bp, Homo sapien
ttgtcctcttttgccttttgagctg

SEQ ID NO: 4619483 - DNA, 25 bp, Homo sapien
gcttttgtcctcttttgccttttga

SEQ ID NO: 4619484 - DNA, 25 bp, Homo sapien
ttccttggcctgaagtggccaatag

SEQ ID NO: 4619485 - DNA, 25 bp, Homo sapien
ttggcctgaagtggccaatagatct

SEQ ID NO: 4619486 - DNA, 25 bp, Homo sapien
tccttggcctgaagtggccaataga

SEQ ID NO: 4619487 - DNA, 25 bp, Homo sapien
ccttggcctgaagtggccaatagat

SEQ ID NO: 4619488 - DNA, 25 bp, Homo sapien
gtgtccgtgatgcagtgaccataag

SEQ ID NO: 4619489 - DNA, 25 bp, Homo sapien
cgtgatgcagtgaccataagcctgg

SEQ ID NO: 4619490 - DNA, 25 bp, Homo sapien
tccgtgatgcagtgaccataagcct

SEQ ID NO: 4619491 - DNA, 25 bp, Homo sapien
tgtccgtgatgcagtgaccataagc

SEQ ID NO: 4619492 - DNA, 25 bp, Homo sapien
tcagaggtgaccttccagattctat

SEQ ID NO: 4619493 - DNA, 25 bp, Homo sapien
gaacaatcttattgcagtgcagaaa

SEQ ID NO: 4619494 - DNA, 25 bp, Homo sapien
aaatagcctttcacaacatcagtca

SEQ ID NO: 4619495 - DNA, 25 bp, Homo sapien
tacgagcttcacctgggtctagcac

SEQ ID NO: 4619496 - DNA, 25 bp, Homo sapien
cagagctatggaactctctactccc

SEQ ID NO: 4619497 - DNA, 25 bp, Homo sapien
tgcagagctatggaactctctactc

SEQ ID NO: 4619498 - DNA, 25 bp, Homo sapien
tacaagtctcatgcttggtgggaca

SEQ ID NO: 4619499 - DNA, 25 bp, Homo sapien
ctacaagtctcatgcttggtgggac

SEQ ID NO: 4619500 - DNA, 25 bp, Homo sapien
ccatcctggatcaagtcctcattct

SEQ ID NO: 4619501 - DNA, 25 bp, Homo sapien
ctagctccatcctggatcaagtcct

SEQ ID NO: 4619502 - DNA, 25 bp, Homo sapien
tcttctctctagtttccgttcttat

SEQ ID NO: 4619503 - DNA, 25 bp, Homo sapien
tctctctagtttccgttcttatttc

SEQ ID NO: 4619504 - DNA, 25 bp, Homo sapien
aaaatactgcttggttctctaaaag

SEQ ID NO: 4619505 - DNA, 25 bp, Homo sapien
gtccgatacatatccaggtgacaca

SEQ ID NO: 4619506 - DNA, 25 bp, Homo sapien
gggtctcatcccctgccactttatg

SEQ ID NO: 4619507 - DNA, 25 bp, Homo sapien
taaaagaagcttggagtttgatgca

SEQ ID NO: 4619508 - DNA, 25 bp, Homo sapien
tccaagcctctgcagatcaggaagg

SEQ ID NO: 4619509 - DNA, 25 bp, Homo sapien
tcagatttccaagcctctgcagatc

SEQ ID NO: 4619510 - DNA, 25 bp, Homo sapien
ccaagcctctgcagatcaggaaggc

SEQ ID NO: 4619511 - DNA, 25 bp, Homo sapien
atttccaagcctctgcagatcagga

SEQ ID NO: 4619512 - DNA, 25 bp, Homo sapien
gtaatgggaattacacagcagagga

SEQ ID NO: 4619513 - DNA, 25 bp, Homo sapien
cagcagaggaaagatttgataattc

SEQ ID NO: 4619514 - DNA, 25 bp, Homo sapien
tactggtgcgttgtccttgaatgga

SEQ ID NO: 4619515 - DNA, 25 bp, Homo sapien
aggccctgacaagtgcccacatttt

SEQ ID NO: 4619516 - DNA, 25 bp, Homo sapien
gtactgggcccttagctttatacat

SEQ ID NO: 4619517 - DNA, 25 bp, Homo sapien
acaggcctttgctccaagatgtgaa

SEQ ID NO: 4619518 - DNA, 25 bp, Homo sapien
aagatgtgaactttgcctgttttgc

SEQ ID NO: 4619519 - DNA, 25 bp, Homo sapien
agcaaagcagttaggccacaggcct

SEQ ID NO: 4619520 - DNA, 25 bp, Homo sapien
caaagggcgcttaatgcttcaagaa

SEQ ID NO: 4619521 - DNA, 25 bp, Homo sapien
ggtcccatttgcagtatctggtgcc

SEQ ID NO: 4619522 - DNA, 25 bp, Homo sapien
tcttggattgaatcactccccttga

SEQ ID NO: 4619523 - DNA, 25 bp, Homo sapien
tcataggtagaaggccaaagggcgc

SEQ ID NO: 4619524 - DNA, 25 bp, Homo sapien
cgtaccacctgatagcaaccaaata

SEQ ID NO: 4619525 - DNA, 25 bp, Homo sapien
cattgaatattggtgtattccagga

SEQ ID NO: 4619526 - DNA, 25 bp, Homo sapien
tgttagttttccgagacggccgatg

SEQ ID NO: 4619527 - DNA, 25 bp, Homo sapien
tatttcaggcccgtaatagacattg

SEQ ID NO: 4619528 - DNA, 25 bp, Homo sapien
aaaatgtctgtatagctggttagga

SEQ ID NO: 4619529 - DNA, 25 bp, Homo sapien
aatgtctgtatagctggttaggaat

SEQ ID NO: 4619530 - DNA, 25 bp, Homo sapien
tgtctgtatagctggttaggaataa

SEQ ID NO: 4619531 - DNA, 25 bp, Homo sapien
ttaaaatgtctgtatagctggttag

SEQ ID NO: 4619532 - DNA, 25 bp, Homo sapien
cttcataagtgtgctgactgcctgc

SEQ ID NO: 4619533 - DNA, 25 bp, Homo sapien
gctgagaaatgcatgatactgactc

SEQ ID NO: 4619534 - DNA, 25 bp, Homo sapien
gagggtcattgtcaggagtctttta

SEQ ID NO: 4619535 - DNA, 25 bp, Homo sapien
ctaaagtcgaggtttggaactactg

SEQ ID NO: 4619536 - DNA, 25 bp, Homo sapien
cactcccagtcaggctaaaggcttg

SEQ ID NO: 4619537 - DNA, 25 bp, Homo sapien
ctcccagtcaggctaaaggcttgcc

SEQ ID NO: 4619538 - DNA, 25 bp, Homo sapien
tgcacagctatgtgcctgggttcat

SEQ ID NO: 4619539 - DNA, 25 bp, Homo sapien
acagctatgtgcctgggttcatcct

SEQ ID NO: 4619540 - DNA, 25 bp, Homo sapien
aaattacctgttgtagctgccctgg

SEQ ID NO: 4619541 - DNA, 25 bp, Homo sapien
tctgcctaccagacatccatcggat

SEQ ID NO: 4619542 - DNA, 25 bp, Homo sapien
gccagcctgcggatgtaacacatca

SEQ ID NO: 4619543 - DNA, 25 bp, Homo sapien
taaccacaggttatgactggaccag

SEQ ID NO: 4619544 - DNA, 25 bp, Homo sapien
cactgaggaccctctgctgtggatg

SEQ ID NO: 4619545 - DNA, 25 bp, Homo sapien
ccagtggctggggtatctgttctcc

SEQ ID NO: 4619546 - DNA, 25 bp, Homo sapien
gctcactctcatgcactgaggaccc

SEQ ID NO: 4619547 - DNA, 25 bp, Homo sapien
ctctgctgtggatgtccaaacttcc

SEQ ID NO: 4619548 - DNA, 25 bp, Homo sapien
ttctgaatcctcacagtgcagtaca

SEQ ID NO: 4619549 - DNA, 25 bp, Homo sapien
tctctgtttctgaatcctcacagtg

SEQ ID NO: 4619550 - DNA, 25 bp, Homo sapien
tcctcacagtgcagtacaaataggc

SEQ ID NO: 4619551 - DNA, 25 bp, Homo sapien
tgtttctgaatcctcacagtgcagt

SEQ ID NO: 4619552 - DNA, 25 bp, Homo sapien
acattccaaggtgcttcacaatctg

SEQ ID NO: 4619553 - DNA, 25 bp, Homo sapien
ccacattccaaggtgcttcacaatc

SEQ ID NO: 4619554 - DNA, 25 bp, Homo sapien
cacattccaaggtgcttcacaatct

SEQ ID NO: 4619555 - DNA, 25 bp, Homo sapien
tgaaatttctagtctacacaacatg

SEQ ID NO: 4619556 - DNA, 25 bp, Homo sapien
ctacacaacatgacttggttgatca

SEQ ID NO: 4619557 - DNA, 25 bp, Homo sapien
tttgaaatttctagtctacacaaca

SEQ ID NO: 4619558 - DNA, 25 bp, Homo sapien
tctagtctacacaacatgacttggt

SEQ ID NO: 4619559 - DNA, 25 bp, Homo sapien
ctgttttatccaagactaggatggg

SEQ ID NO: 4619560 - DNA, 25 bp, Homo sapien
tatccaagactaggatgggaacccc

SEQ ID NO: 4619561 - DNA, 25 bp, Homo sapien
ttttatccaagactaggatgggaac

SEQ ID NO: 4619562 - DNA, 25 bp, Homo sapien
caagactaggatgggaacccctgcc

SEQ ID NO: 4619563 - DNA, 25 bp, Homo sapien
tgagaaaactgggtcaatgtttact

SEQ ID NO: 4619564 - DNA, 25 bp, Homo sapien
agaaaactgggtcaatgtttactgg

SEQ ID NO: 4619565 - DNA, 25 bp, Homo sapien
gagaaaactgggtcaatgtttactg

SEQ ID NO: 4619566 - DNA, 25 bp, Homo sapien
caaggtgtcccataagacaaaaatt

SEQ ID NO: 4619567 - DNA, 25 bp, Homo sapien
ttcaaggtgtcccataagacaaaaa

SEQ ID NO: 4619568 - DNA, 25 bp, Homo sapien
tcaaggtgtcccataagacaaaaat

SEQ ID NO: 4619569 - DNA, 25 bp, Homo sapien
gacaatggcgtaataatctgcacag

SEQ ID NO: 4619570 - DNA, 25 bp, Homo sapien
tctcaggcccttctttcagacaatg

SEQ ID NO: 4619571 - DNA, 25 bp, Homo sapien
gcccttctttcagacaatggcgtaa

SEQ ID NO: 4619572 - DNA, 25 bp, Homo sapien
tctttcagacaatggcgtaataatc

SEQ ID NO: 4619573 - DNA, 25 bp, Homo sapien
tactccttcactccaaacattaggg

SEQ ID NO: 4619574 - DNA, 25 bp, Homo sapien
aaatatccattccaggtgaccacag

SEQ ID NO: 4619575 - DNA, 25 bp, Homo sapien
caggttcctgtctctgagtgtttct

SEQ ID NO: 4619576 - DNA, 25 bp, Homo sapien
tagggaattccacacttgaggtcgg

SEQ ID NO: 4619577 - DNA, 25 bp, Homo sapien
atgagatggtatctcagtgtggtct

SEQ ID NO: 4619578 - DNA, 25 bp, Homo sapien
tatgagatggtatctcagtgtggtc

SEQ ID NO: 4619579 - DNA, 25 bp, Homo sapien
gtgtggtcttgatttgcatttctat

SEQ ID NO: 4619580 - DNA, 25 bp, Homo sapien
agtgtggtcttgatttgcatttcta

SEQ ID NO: 4619581 - DNA, 25 bp, Homo sapien
tagaaatagcctacgtgtccagctc

SEQ ID NO: 4619582 - DNA, 25 bp, Homo sapien
tgctcccaatataatgctaagtgga

SEQ ID NO: 4619583 - DNA, 25 bp, Homo sapien
ccagctctagagaagtgactattat

SEQ ID NO: 4619584 - DNA, 25 bp, Homo sapien
tgcacctatacataaagaacttgga

SEQ ID NO: 4619585 - DNA, 25 bp, Homo sapien
cgatcgatacacgtcatgtaggttg

SEQ ID NO: 4619586 - DNA, 25 bp, Homo sapien
tcatgtaggttgtataggtcagtca

SEQ ID NO: 4619587 - DNA, 25 bp, Homo sapien
cacgtcatgtaggttgtataggtca

SEQ ID NO: 4619588 - DNA, 25 bp, Homo sapien
cggctcccgatcgatacacgtcatg

SEQ ID NO: 4619589 - DNA, 25 bp, Homo sapien
gatggaaacctgaccaagatgacat

SEQ ID NO: 4619590 - DNA, 25 bp, Homo sapien
gatatctggaagcactgatcccact

SEQ ID NO: 4619591 - DNA, 25 bp, Homo sapien
ctgatcccactgatggacacagctg

SEQ ID NO: 4619592 - DNA, 25 bp, Homo sapien
ggcttctgctgggtagatatctgga

SEQ ID NO: 4619593 - DNA, 25 bp, Homo sapien
tctgtggaagggcttgtttgttttg

SEQ ID NO: 4619594 - DNA, 25 bp, Homo sapien
ccttttctgtggaagggcttgtttg

SEQ ID NO: 4619595 - DNA, 25 bp, Homo sapien
caccaggaaaacaggcccttttctg

SEQ ID NO: 4619596 - DNA, 25 bp, Homo sapien
caggcccttttctgtggaagggctt

SEQ ID NO: 4619597 - DNA, 25 bp, Homo sapien
tatggcctgaagagtagacatactc

SEQ ID NO: 4619598 - DNA, 25 bp, Homo sapien
caacacaaagggtaactcgagccaa

SEQ ID NO: 4619599 - DNA, 25 bp, Homo sapien
gcctgaagagtagacatactcaaca

SEQ ID NO: 4619600 - DNA, 25 bp, Homo sapien
cttatggcctgaagagtagacatac

SEQ ID NO: 4619601 - DNA, 25 bp, Homo sapien
gaaacagagaatggtgaagtcaaac

SEQ ID NO: 4619602 - DNA, 25 bp, Homo sapien
tcacgtaactacagcggagcgaaaa

SEQ ID NO: 4619603 - DNA, 25 bp, Homo sapien
acagcggagcgaaaaggaaacagag

SEQ ID NO: 4619604 - DNA, 25 bp, Homo sapien
tactgaatgaaaggtgagtcacgta

SEQ ID NO: 4619605 - DNA, 25 bp, Homo sapien
ctgtgtgatcccagtccaaggacag

SEQ ID NO: 4619606 - DNA, 25 bp, Homo sapien
cagtccaaggacaggagacagggct

SEQ ID NO: 4619607 - DNA, 25 bp, Homo sapien
tccaaggacaggagacagggctttc

SEQ ID NO: 4619608 - DNA, 25 bp, Homo sapien
ccagtccaaggacaggagacagggc

SEQ ID NO: 4619609 - DNA, 25 bp, Homo sapien
taagccagtgatgagccgtgaacac

SEQ ID NO: 4619610 - DNA, 25 bp, Homo sapien
gcaatgtcccaagctatgtagacca

SEQ ID NO: 4619611 - DNA, 25 bp, Homo sapien
aacacctggacactgattggatgac

SEQ ID NO: 4619612 - DNA, 25 bp, Homo sapien
aaagaactgggcgaagcatctggga

SEQ ID NO: 4619613 - DNA, 25 bp, Homo sapien
cttgtgggagttacgcccctgcctc

SEQ ID NO: 4619614 - DNA, 25 bp, Homo sapien
ggagttacgcccctgcctcaaggag

SEQ ID NO: 4619615 - DNA, 25 bp, Homo sapien
gaacacagacctctaattgctgtga

SEQ ID NO: 4619616 - DNA, 25 bp, Homo sapien
agttacgcccctgcctcaaggagaa

SEQ ID NO: 4619617 - DNA, 25 bp, Homo sapien
tgaaggtaacatgctaaggtccagg

SEQ ID NO: 4619618 - DNA, 25 bp, Homo sapien
tccctttctcttcgttaaatctcat

SEQ ID NO: 4619619 - DNA, 25 bp, Homo sapien
aaggtaacatgctaaggtccaggct

SEQ ID NO: 4619620 - DNA, 25 bp, Homo sapien
gatgccggctggagtgtggaattgc

SEQ ID NO: 4619621 - DNA, 25 bp, Homo sapien
gagagaactttctagcccaaggcac

SEQ ID NO: 4619622 - DNA, 25 bp, Homo sapien
cacacggttgccactgaggaaaaga

SEQ ID NO: 4619623 - DNA, 25 bp, Homo sapien
tagatccgcaagtgaagtaggtgcc

SEQ ID NO: 4619624 - DNA, 25 bp, Homo sapien
taaacctaggcaggcgagcttaagc

SEQ ID NO: 4619625 - DNA, 25 bp, Homo sapien
caggagcatcagtataattgtcttc

SEQ ID NO: 4619626 - DNA, 25 bp, Homo sapien
aaacatgtacattagcctacacagg

SEQ ID NO: 4619627 - DNA, 25 bp, Homo sapien
agttcttcagggaaaataacatgca

SEQ ID NO: 4619628 - DNA, 25 bp, Homo sapien
agcatcagtataattgtcttccacc

SEQ ID NO: 4619629 - DNA, 25 bp, Homo sapien
tatgggacagtcctgggcaaaccaa

SEQ ID NO: 4619630 - DNA, 25 bp, Homo sapien
cagctgtcttgtttggcctggaact

SEQ ID NO: 4619631 - DNA, 25 bp, Homo sapien
ggtgttgtggacatgggacttccca

SEQ ID NO: 4619632 - DNA, 25 bp, Homo sapien
taattatcagtccagtttgaatgcc

SEQ ID NO: 4619633 - DNA, 25 bp, Homo sapien
tctctacaggacatgatgttccaga

SEQ ID NO: 4619634 - DNA, 25 bp, Homo sapien
tccagaggtccaagcaaagtgccca

SEQ ID NO: 4619635 - DNA, 25 bp, Homo sapien
ctgtgcccctctctacaggacatga

SEQ ID NO: 4619636 - DNA, 25 bp, Homo sapien
gtccaagcaaagtgcccactataag

SEQ ID NO: 4619637 - DNA, 25 bp, Homo sapien
ttggaaaaccgacgctgagacatga

SEQ ID NO: 4619638 - DNA, 25 bp, Homo sapien
gacgctgagacatgaagccacctgt

SEQ ID NO: 4619639 - DNA, 25 bp, Homo sapien
ggccgctttggaaaaccgacgctga

SEQ ID NO: 4619640 - DNA, 25 bp, Homo sapien
cagggcatgtgtctcggcccatgga

SEQ ID NO: 4619641 - DNA, 25 bp, Homo sapien
ctgcctggcaggcagcgcaggaggc

SEQ ID NO: 4619642 - DNA, 25 bp, Homo sapien
gcaggaggctccggagccccgccat

SEQ ID NO: 4619643 - DNA, 25 bp, Homo sapien
gcctgtttggcctctgctgtgcacg

SEQ ID NO: 4619644 - DNA, 25 bp, Homo sapien
ctctgctgtgcacgctgcctggcag

SEQ ID NO: 4619645 - DNA, 25 bp, Homo sapien
gccccgctcggttcgttactctgta

SEQ ID NO: 4619646 - DNA, 25 bp, Homo sapien
ttactctgtagaggctggcgaccag

SEQ ID NO: 4619647 - DNA, 25 bp, Homo sapien
gagctttacaactctccgggaagcg

SEQ ID NO: 4619648 - DNA, 25 bp, Homo sapien
gaccagcaaaagagaaagttcccga

SEQ ID NO: 4619649 - DNA, 25 bp, Homo sapien
gacagctctggtaaaggcaacgtca

SEQ ID NO: 4619650 - DNA, 25 bp, Homo sapien
aaggaacctaccctcctatgccatt

SEQ ID NO: 4619651 - DNA, 25 bp, Homo sapien
taaaggcaacgtcagtggcagccaa

SEQ ID NO: 4619652 - DNA, 25 bp, Homo sapien
ttcagcaccagccacgctttggaca

SEQ ID NO: 4619653 - DNA, 25 bp, Homo sapien
cacttgagtgtgacaccagcaatct

SEQ ID NO: 4619654 - DNA, 25 bp, Homo sapien
tgcacttgagtgtgacaccagcaat

SEQ ID NO: 4619655 - DNA, 25 bp, Homo sapien
acttgagtgtgacaccagcaatctg

SEQ ID NO: 4619656 - DNA, 25 bp, Homo sapien
cttgagtgtgacaccagcaatctgg

SEQ ID NO: 4619657 - DNA, 25 bp, Homo sapien
gcatcttctgcccacataatatatg

SEQ ID NO: 4619658 - DNA, 25 bp, Homo sapien
ccaggcttggcttaaagccattgac

SEQ ID NO: 4619659 - DNA, 25 bp, Homo sapien
tgaccagaacacagcatcttctgcc

SEQ ID NO: 4619660 - DNA, 25 bp, Homo sapien
gacctctgtggcctgcgttattgac

SEQ ID NO: 4619661 - DNA, 25 bp, Homo sapien
gctgatttacggttaaggcaaaatg

SEQ ID NO: 4619662 - DNA, 25 bp, Homo sapien
ttcagactccttagctgatttacgg

SEQ ID NO: 4619663 - DNA, 25 bp, Homo sapien
tgtctggaaactgtctgcatttcag

SEQ ID NO: 4619664 - DNA, 25 bp, Homo sapien
caaaatgggtcgtttgaaattgtgg

SEQ ID NO: 4619665 - DNA, 25 bp, Homo sapien
ttggcctaaacctagcaactcagag

SEQ ID NO: 4619666 - DNA, 25 bp, Homo sapien
cacaatacacttatccttccagcag

SEQ ID NO: 4619667 - DNA, 25 bp, Homo sapien
cagagacatttggattaggcaactc

SEQ ID NO: 4619668 - DNA, 25 bp, Homo sapien
ttattggaacatcttggcctaaacc

SEQ ID NO: 4619669 - DNA, 25 bp, Homo sapien
gcttgggtcctgactgcaccataaa

SEQ ID NO: 4619670 - DNA, 25 bp, Homo sapien
ggtcctgactgcaccataaagcctc

SEQ ID NO: 4619671 - DNA, 25 bp, Homo sapien
ctgtctgtactgtggagcttgggtt

SEQ ID NO: 4619672 - DNA, 25 bp, Homo sapien
tgggtcctgactgcaccataaagcc

SEQ ID NO: 4619673 - DNA, 25 bp, Homo sapien
tcctgaaggccctctatcaaaacca

SEQ ID NO: 4619674 - DNA, 25 bp, Homo sapien
gagtcctgaaggccctctatcaaaa

SEQ ID NO: 4619675 - DNA, 25 bp, Homo sapien
tgagtcctgaaggccctctatcaaa

SEQ ID NO: 4619676 - DNA, 25 bp, Homo sapien
gtcctgaaggccctctatcaaaacc

SEQ ID NO: 4619677 - DNA, 25 bp, Homo sapien
caagccaatcaaaaggaggaataag

SEQ ID NO: 4619678 - DNA, 25 bp, Homo sapien
aaaggaggaataagctgcacacctg

SEQ ID NO: 4619679 - DNA, 25 bp, Homo sapien
atgcatctgttgagagatcaagcca

SEQ ID NO: 4619680 - DNA, 25 bp, Homo sapien
agatcaagccaatcaaaaggaggaa

SEQ ID NO: 4619681 - DNA, 25 bp, Homo sapien
cacgggctgtatcataaccacagtg

SEQ ID NO: 4619682 - DNA, 25 bp, Homo sapien
tggactcacgggctgtatcataacc

SEQ ID NO: 4619683 - DNA, 25 bp, Homo sapien
tgcctgggacgtggaaggctgctgt

SEQ ID NO: 4619684 - DNA, 25 bp, Homo sapien
ccaggcatggactcacgggctgtat

SEQ ID NO: 4619685 - DNA, 25 bp, Homo sapien
tctaagggcaaaatgctttctacga

SEQ ID NO: 4619686 - DNA, 25 bp, Homo sapien
tccttactagaaccagctcccgcca

SEQ ID NO: 4619687 - DNA, 25 bp, Homo sapien
ctaagggcaaaatgctttctacgat

SEQ ID NO: 4619688 - DNA, 25 bp, Homo sapien
ccttactagaaccagctcccgccac

SEQ ID NO: 4619689 - DNA, 25 bp, Homo sapien
cgcatcccagttggcatccccaatt

SEQ ID NO: 4619690 - DNA, 25 bp, Homo sapien
ccgcatcccagttggcatccccaat

SEQ ID NO: 4619691 - DNA, 25 bp, Homo sapien
ttccaggtcgtcttcatctgcccca

SEQ ID NO: 4619692 - DNA, 25 bp, Homo sapien
tgccgcatcccagttggcatcccca

SEQ ID NO: 4619693 - DNA, 25 bp, Homo sapien
tggaagaacttgatgggtgggcatc

SEQ ID NO: 4619694 - DNA, 25 bp, Homo sapien
gggattaggagtgcgcattgccaac

SEQ ID NO: 4619695 - DNA, 25 bp, Homo sapien
caagtgcttctgggattaggagtgc

SEQ ID NO: 4619696 - DNA, 25 bp, Homo sapien
tgcttctgggattaggagtgcgcat

SEQ ID NO: 4619697 - DNA, 25 bp, Homo sapien
taaccaagtaaatcctggatagcat

SEQ ID NO: 4619698 - DNA, 25 bp, Homo sapien
tctgaagactatagaggttcacttg

SEQ ID NO: 4619699 - DNA, 25 bp, Homo sapien
tgtgcacactcaagctgtagtaacc

SEQ ID NO: 4619700 - DNA, 25 bp, Homo sapien
ttcacttgtaactctgagtgttcac

SEQ ID NO: 4619701 - DNA, 25 bp, Homo sapien
tcttcctggttgttccatctggaca

SEQ ID NO: 4619702 - DNA, 25 bp, Homo sapien
tatttttcagactagctttgtgagc

SEQ ID NO: 4619703 - DNA, 25 bp, Homo sapien
gactagctttgtgagcctgtaaaac

SEQ ID NO: 4619704 - DNA, 25 bp, Homo sapien
tgttatacatttgccaagaagaata

SEQ ID NO: 4619705 - DNA, 25 bp, Homo sapien
gcagtttttctaaataatatcccat

SEQ ID NO: 4619706 - DNA, 25 bp, Homo sapien
gatgccctggaaagcaggtggtctt

SEQ ID NO: 4619707 - DNA, 25 bp, Homo sapien
tgctgctcagaatgagagcctgaag

SEQ ID NO: 4619708 - DNA, 25 bp, Homo sapien
aaagctatttgttgcagagatgccc

SEQ ID NO: 4619709 - DNA, 25 bp, Homo sapien
tcagaagatgtgcattaagccaact

SEQ ID NO: 4619710 - DNA, 25 bp, Homo sapien
ttgctacaacaaagctatattttcc

SEQ ID NO: 4619711 - DNA, 25 bp, Homo sapien
ttaggcctttgacttttgctacaac

SEQ ID NO: 4619712 - DNA, 25 bp, Homo sapien
cctttaaacaggaaatctgtgtggg

SEQ ID NO: 4619713 - DNA, 25 bp, Homo sapien
taaacaggaaatctgtgtggggcat

SEQ ID NO: 4619714 - DNA, 25 bp, Homo sapien
cccctttctgcttctgcgcggtgaa

SEQ ID NO: 4619715 - DNA, 25 bp, Homo sapien
tctcggttccaatgggtgtgctgat

SEQ ID NO: 4619716 - DNA, 25 bp, Homo sapien
tctgcgcggtgaagcccaaataact

SEQ ID NO: 4619717 - DNA, 25 bp, Homo sapien
ttctctaattctcggttccaatggg

SEQ ID NO: 4619718 - DNA, 25 bp, Homo sapien
ttccagccactggacaaatagtttt

SEQ ID NO: 4619719 - DNA, 25 bp, Homo sapien
tcattccagccactggacaaatagt

SEQ ID NO: 4619720 - DNA, 25 bp, Homo sapien
gtcacttccactcacctcactattg

SEQ ID NO: 4619721 - DNA, 25 bp, Homo sapien
tccactcacctcactattggtaaag

SEQ ID NO: 4619722 - DNA, 25 bp, Homo sapien
gaactgaatcccaacggccaaactg

SEQ ID NO: 4619723 - DNA, 25 bp, Homo sapien
actgaatcccaacggccaaactgga

SEQ ID NO: 4619724 - DNA, 25 bp, Homo sapien
catagatggaagagtgatgagaact

SEQ ID NO: 4619725 - DNA, 25 bp, Homo sapien
ttacagtggttgtgcctgagccata

SEQ ID NO: 4619726 - DNA, 25 bp, Homo sapien
tttttttctccgattggggcatgtg

SEQ ID NO: 4619727 - DNA, 25 bp, Homo sapien
ttttctccgattggggcatgtggga

SEQ ID NO: 4619728 - DNA, 25 bp, Homo sapien
tttttctccgattggggcatgtggg

SEQ ID NO: 4619729 - DNA, 25 bp, Homo sapien
ttctccgattggggcatgtgggact

SEQ ID NO: 4619730 - DNA, 25 bp, Homo sapien
gaagctttcaaaaacaacatcgtgg

SEQ ID NO: 4619731 - DNA, 25 bp, Homo sapien
ttgggcatggaccagcaactgctga

SEQ ID NO: 4619732 - DNA, 25 bp, Homo sapien
catctgtgcacagagggaagctttc

SEQ ID NO: 4619733 - DNA, 25 bp, Homo sapien
gatgatctcatgttctggaccacct

SEQ ID NO: 4619734 - DNA, 25 bp, Homo sapien
ggagttttctctcgaatgccaagaa

SEQ ID NO: 4619735 - DNA, 25 bp, Homo sapien
ctggagttttctctcgaatgccaag

SEQ ID NO: 4619736 - DNA, 25 bp, Homo sapien
gaatttttctgcatggactgtctct

SEQ ID NO: 4619737 - DNA, 25 bp, Homo sapien
tctgcatggactgtctctgaagaca

SEQ ID NO: 4619738 - DNA, 25 bp, Homo sapien
tgagatcgaaccaacttcttgcttt

SEQ ID NO: 4619739 - DNA, 25 bp, Homo sapien
tttgaaaattgagatcgaaccaact

SEQ ID NO: 4619740 - DNA, 25 bp, Homo sapien
agagcattcttgtgtggagtagtaa

SEQ ID NO: 4619741 - DNA, 25 bp, Homo sapien
tgtggagtagtaaatctgctttaaa

SEQ ID NO: 4619742 - DNA, 25 bp, Homo sapien
cagtcgatttatcaacacaggatga

SEQ ID NO: 4619743 - DNA, 25 bp, Homo sapien
ggaaactctggctcttaagaactac

SEQ ID NO: 4619744 - DNA, 25 bp, Homo sapien
gagctcccagcagtcgatttatcaa

SEQ ID NO: 4619745 - DNA, 25 bp, Homo sapien
tcggcattgatggtcccagggactt

SEQ ID NO: 4619746 - DNA, 25 bp, Homo sapien
gctcccagcaccagcttgttcttca

SEQ ID NO: 4619747 - DNA, 25 bp, Homo sapien
tgctcccagcaccagcttgttcttc

SEQ ID NO: 4619748 - DNA, 25 bp, Homo sapien
ctgctcccagcaccagcttgttctt

SEQ ID NO: 4619749 - DNA, 25 bp, Homo sapien
ctcccagcaccagcttgttcttcat

SEQ ID NO: 4619750 - DNA, 25 bp, Homo sapien
taatgagggccgaaagtagtcagag

SEQ ID NO: 4619751 - DNA, 25 bp, Homo sapien
atgagctgtttggagtcagcacggg

SEQ ID NO: 4619752 - DNA, 25 bp, Homo sapien
tatgtgagaataagaggaaagctca

SEQ ID NO: 4619753 - DNA, 25 bp, Homo sapien
ccgaggtggtgatgaaacaaaggta

SEQ ID NO: 4619754 - DNA, 25 bp, Homo sapien
cctgctggcgcgttagtccatagga

SEQ ID NO: 4619755 - DNA, 25 bp, Homo sapien
tgccagaatattgggccagcacctg

SEQ ID NO: 4619756 - DNA, 25 bp, Homo sapien
caaaacaggagatgctttcggtgaa

SEQ ID NO: 4619757 - DNA, 25 bp, Homo sapien
tggagaggatgatcaaaacaggaga

SEQ ID NO: 4619758 - DNA, 25 bp, Homo sapien
tggagatctggtgggagctcccata

SEQ ID NO: 4619759 - DNA, 25 bp, Homo sapien
ctcccaaaaagtcagctgtttggaa

SEQ ID NO: 4619760 - DNA, 25 bp, Homo sapien
caaggcacaaagatcctcgatgtat

SEQ ID NO: 4619761 - DNA, 25 bp, Homo sapien
gggttccttgcattcactatcagtg

SEQ ID NO: 4619762 - DNA, 25 bp, Homo sapien
tttggtatgaagcatccagtggttc

SEQ ID NO: 4619763 - DNA, 25 bp, Homo sapien
tgacccagtgccaagaaagagaacc

SEQ ID NO: 4619764 - DNA, 25 bp, Homo sapien
gcccagaacgggtcatgacatacac

SEQ ID NO: 4619765 - DNA, 25 bp, Homo sapien
taagaagtaattgcggtgcccagaa

SEQ ID NO: 4619766 - DNA, 25 bp, Homo sapien
ctcatattccctctcttccacacca

SEQ ID NO: 4619767 - DNA, 25 bp, Homo sapien
tatttcaacctcatattccctctct

SEQ ID NO: 4619768 - DNA, 25 bp, Homo sapien
tcaacctcatattccctctcttcca

SEQ ID NO: 4619769 - DNA, 25 bp, Homo sapien
tctttatttcaacctcatattccct

SEQ ID NO: 4619770 - DNA, 25 bp, Homo sapien
tcagggggatccgggtaagcaattg

SEQ ID NO: 4619771 - DNA, 25 bp, Homo sapien
cagggggatccgggtaagcaattgc

SEQ ID NO: 4619772 - DNA, 25 bp, Homo sapien
ctcacactgtggaagtcactgacgg

SEQ ID NO: 4619773 - DNA, 25 bp, Homo sapien
cacactgtggaagtcactgacggta

SEQ ID NO: 4619774 - DNA, 25 bp, Homo sapien
gtggaagtcactgacggtagatcct

SEQ ID NO: 4619775 - DNA, 25 bp, Homo sapien
cactgtggaagtcactgacggtaga

SEQ ID NO: 4619776 - DNA, 25 bp, Homo sapien
acaagcatcatggttttgggctgtc

SEQ ID NO: 4619777 - DNA, 25 bp, Homo sapien
ctgttgggtgtggtattggttagac

SEQ ID NO: 4619778 - DNA, 25 bp, Homo sapien
catcagggacaagcatcatggtttt

SEQ ID NO: 4619779 - DNA, 25 bp, Homo sapien
tgggtgtggtattggttagacacat

SEQ ID NO: 4619780 - DNA, 25 bp, Homo sapien
tcttcatccccaagagatctcggtg

SEQ ID NO: 4619781 - DNA, 25 bp, Homo sapien
gatgaggaagccatggtccactatc

SEQ ID NO: 4619782 - DNA, 25 bp, Homo sapien
gcagagaggggtctgacaagggcag

SEQ ID NO: 4619783 - DNA, 25 bp, Homo sapien
gtctgacaagggcagagtttcttca

SEQ ID NO: 4619784 - DNA, 25 bp, Homo sapien
ggcctctgaggactccatcccttgc

SEQ ID NO: 4619785 - DNA, 25 bp, Homo sapien
atcccttgcccagaagaaccccact

SEQ ID NO: 4619786 - DNA, 25 bp, Homo sapien
gtatgcctgcactggacttccacag

SEQ ID NO: 4619787 - DNA, 25 bp, Homo sapien
acaaccccaaagtatgcctgcactg

SEQ ID NO: 4619788 - DNA, 25 bp, Homo sapien
cgatgagcaaatgcacaagtggtgg

SEQ ID NO: 4619789 - DNA, 25 bp, Homo sapien
aggccacgatgagcaaatgcacaag

SEQ ID NO: 4619790 - DNA, 25 bp, Homo sapien
gccacgatgagcaaatgcacaagtg

SEQ ID NO: 4619791 - DNA, 25 bp, Homo sapien
cacgatgagcaaatgcacaagtggt

SEQ ID NO: 4619792 - DNA, 25 bp, Homo sapien
gggaggatccaaatgagcccctggg

SEQ ID NO: 4619793 - DNA, 25 bp, Homo sapien
ggatttgaccccaaggaccagtcat

SEQ ID NO: 4619794 - DNA, 25 bp, Homo sapien
gtcataggggttccctacaatgaca

SEQ ID NO: 4619795 - DNA, 25 bp, Homo sapien
gttccctacaatgacaccaaatcca

SEQ ID NO: 4619796 - DNA, 25 bp, Homo sapien
catcagggttaatgtgtaaaatgga

SEQ ID NO: 4619797 - DNA, 25 bp, Homo sapien
tgcagcctcgtttcctgttggccac

SEQ ID NO: 4619798 - DNA, 25 bp, Homo sapien
tctttggtcttcaggtctagtttct

SEQ ID NO: 4619799 - DNA, 25 bp, Homo sapien
aaaatggatgatgctgatccaggtt

SEQ ID NO: 4619800 - DNA, 25 bp, Homo sapien
cttccttatggagtttgcctccacc

SEQ ID NO: 4619801 - DNA, 25 bp, Homo sapien
ttccttatggagtttgcctccacca

SEQ ID NO: 4619802 - DNA, 25 bp, Homo sapien
tccttatggagtttgcctccaccag

SEQ ID NO: 4619803 - DNA, 25 bp, Homo sapien
ccttatggagtttgcctccaccagt

SEQ ID NO: 4619804 - DNA, 25 bp, Homo sapien
cttctgcaagctggtcagggaccga

SEQ ID NO: 4619805 - DNA, 25 bp, Homo sapien
gagtcccggaaacttgggtctagca

SEQ ID NO: 4619806 - DNA, 25 bp, Homo sapien
aagctggtcagggaccgagtcccgg

SEQ ID NO: 4619807 - DNA, 25 bp, Homo sapien
agtcccggaaacttgggtctagcat

SEQ ID NO: 4619808 - DNA, 25 bp, Homo sapien
tagctagcaccacctaaccctttga

SEQ ID NO: 4619809 - DNA, 25 bp, Homo sapien
ggcttcccataggatttgccacgtc

SEQ ID NO: 4619810 - DNA, 25 bp, Homo sapien
caccaggtctggctcatagctagca

SEQ ID NO: 4619811 - DNA, 25 bp, Homo sapien
tatttaagggcaactttggagccac

SEQ ID NO: 4619812 - DNA, 25 bp, Homo sapien
tcctgataaggcccggtgcacagta

SEQ ID NO: 4619813 - DNA, 25 bp, Homo sapien
ccagagttcctgataaggcccggtg

SEQ ID NO: 4619814 - DNA, 25 bp, Homo sapien
agttcctgataaggcccggtgcaca

SEQ ID NO: 4619815 - DNA, 25 bp, Homo sapien
agagttcctgataaggcccggtgca

SEQ ID NO: 4619816 - DNA, 25 bp, Homo sapien
cctgcaaaggactgggtgttttaca

SEQ ID NO: 4619817 - DNA, 25 bp, Homo sapien
caaaggactgggtgttttacatgaa

SEQ ID NO: 4619818 - DNA, 25 bp, Homo sapien
tgcctgcaaaggactgggtgtttta

SEQ ID NO: 4619819 - DNA, 25 bp, Homo sapien
ctttgcctgcaaaggactgggtgtt

SEQ ID NO: 4619820 - DNA, 25 bp, Homo sapien
tcttgtaaaagataactccctgcat

SEQ ID NO: 4619821 - DNA, 25 bp, Homo sapien
ctcttgtaaaagataactccctgca

SEQ ID NO: 4619822 - DNA, 25 bp, Homo sapien
tatgggtagagaatctgcctacggc

SEQ ID NO: 4619823 - DNA, 25 bp, Homo sapien
ttgaaagaggcacgctaagaactcc

SEQ ID NO: 4619824 - DNA, 25 bp, Homo sapien
ctacggcaagtaacaccagtgctgg

SEQ ID NO: 4619825 - DNA, 25 bp, Homo sapien
taagaactccatcagaagtagctgg

SEQ ID NO: 4619826 - DNA, 25 bp, Homo sapien
ctctaagcaatactacatccccact

SEQ ID NO: 4619827 - DNA, 25 bp, Homo sapien
taagcaatactacatccccactcca

SEQ ID NO: 4619828 - DNA, 25 bp, Homo sapien
ccactccacagctgtggttccccac

SEQ ID NO: 4619829 - DNA, 25 bp, Homo sapien
cactccacagctgtggttccccaca

SEQ ID NO: 4619830 - DNA, 25 bp, Homo sapien
ctgatgccgagtgaatatacagtca

SEQ ID NO: 4619831 - DNA, 25 bp, Homo sapien
tgatgccgagtgaatatacagtcat

SEQ ID NO: 4619832 - DNA, 25 bp, Homo sapien
aagactggaaagatttggataggaa

SEQ ID NO: 4619833 - DNA, 25 bp, Homo sapien
aaggaggacagcctcctgaaggggt

SEQ ID NO: 4619834 - DNA, 25 bp, Homo sapien
ggggaaggaggacagcctcctgaag

SEQ ID NO: 4619835 - DNA, 25 bp, Homo sapien
ggaaggaggacagcctcctgaaggg

SEQ ID NO: 4619836 - DNA, 25 bp, Homo sapien
ctggggaaggaggacagcctcctga

SEQ ID NO: 4619837 - DNA, 25 bp, Homo sapien
caaacattggtcgttgccatagtgt

SEQ ID NO: 4619838 - DNA, 25 bp, Homo sapien
cggctgcaatcgttccaaacattgg

SEQ ID NO: 4619839 - DNA, 25 bp, Homo sapien
tattaagcatttgaagcagtgagcg

SEQ ID NO: 4619840 - DNA, 25 bp, Homo sapien
tgttcctttagcatgacgccaggga

SEQ ID NO: 4619841 - DNA, 25 bp, Homo sapien
ggatgccacagccactgctggcact

SEQ ID NO: 4619842 - DNA, 25 bp, Homo sapien
acagccactgctggcactgcccatt

SEQ ID NO: 4619843 - DNA, 25 bp, Homo sapien
aaatcttcctgctccaggatgccac

SEQ ID NO: 4619844 - DNA, 25 bp, Homo sapien
caaatcttcctgctccaggatgcca

SEQ ID NO: 4619845 - DNA, 25 bp, Homo sapien
catcattctttagagcctgtttaaa

SEQ ID NO: 4619846 - DNA, 25 bp, Homo sapien
aaacgtcactctggcctatgctgca

SEQ ID NO: 4619847 - DNA, 25 bp, Homo sapien
tttttggcctttatgcttcttagca

SEQ ID NO: 4619848 - DNA, 25 bp, Homo sapien
ccacttctatcagtgctgtagcatc

SEQ ID NO: 4619849 - DNA, 25 bp, Homo sapien
tctcagaattccatggagtagcttc

SEQ ID NO: 4619850 - DNA, 25 bp, Homo sapien
gatgctaaatggtttgtttccagga

SEQ ID NO: 4619851 - DNA, 25 bp, Homo sapien
ggagtagcttctgacctgatgctaa

SEQ ID NO: 4619852 - DNA, 25 bp, Homo sapien
tggtctcagaattccatggagtagc

SEQ ID NO: 4619853 - DNA, 25 bp, Homo sapien
tccctgttagagcatgttctggaac

SEQ ID NO: 4619854 - DNA, 25 bp, Homo sapien
gattccaagtcgtatgggcacaatt

SEQ ID NO: 4619855 - DNA, 25 bp, Homo sapien
cctgataccctttgatattttggtg

SEQ ID NO: 4619856 - DNA, 25 bp, Homo sapien
tgtgtctccaagtcctactacctga

SEQ ID NO: 4619857 - DNA, 25 bp, Homo sapien
taaaagggccgtctgtgcaagtaac

SEQ ID NO: 4619858 - DNA, 25 bp, Homo sapien
tgagaagtgctaaacgcagcaagat

SEQ ID NO: 4619859 - DNA, 25 bp, Homo sapien
tgatactgatttcctagccgaacag

SEQ ID NO: 4619860 - DNA, 25 bp, Homo sapien
gccgaacagcattcctcacacatgt

SEQ ID NO: 4619861 - DNA, 25 bp, Homo sapien
cgatatcttttacaggcccacctaa

SEQ ID NO: 4619862 - DNA, 25 bp, Homo sapien
caaagccaccgctgtctgtaaactg

SEQ ID NO: 4619863 - DNA, 25 bp, Homo sapien
cagctgcagtgaatgttaaggagtc

SEQ ID NO: 4619864 - DNA, 25 bp, Homo sapien
ttagtttagtctcgggctggaagtc

SEQ ID NO: 4619865 - DNA, 25 bp, Homo sapien
caagatagcaaagtaagtttttcac

SEQ ID NO: 4619866 - DNA, 25 bp, Homo sapien
ttttgaagtggtaatcttgctctca

SEQ ID NO: 4619867 - DNA, 25 bp, Homo sapien
aaacttatccatcttctactcatca

SEQ ID NO: 4619868 - DNA, 25 bp, Homo sapien
aattaagactgagagttacgttatt

SEQ ID NO: 4619869 - DNA, 25 bp, Homo sapien
taagtacttggtcccgtggatgctc

SEQ ID NO: 4619870 - DNA, 25 bp, Homo sapien
gatcttggaccatggtagaaaatgc

SEQ ID NO: 4619871 - DNA, 25 bp, Homo sapien
tccaagtcctttaactcgttgcagt

SEQ ID NO: 4619872 - DNA, 25 bp, Homo sapien
cagtgaccttactcgtataccgtgc

SEQ ID NO: 4619873 - DNA, 25 bp, Homo sapien
aaaatcaaacaaccttcagctttat

SEQ ID NO: 4619874 - DNA, 25 bp, Homo sapien
tccccgggaagagttagcctggata

SEQ ID NO: 4619875 - DNA, 25 bp, Homo sapien
gtggtggttcattccacaggacgaa

SEQ ID NO: 4619876 - DNA, 25 bp, Homo sapien
tggtatcatgtatctctctgtggtg

SEQ ID NO: 4619877 - DNA, 25 bp, Homo sapien
tatatcttcagtattaagcttggcc

SEQ ID NO: 4619878 - DNA, 25 bp, Homo sapien
cagtggatgcctttgtttaggtggc

SEQ ID NO: 4619879 - DNA, 25 bp, Homo sapien
ggagggctccaacactgacaagcct

SEQ ID NO: 4619880 - DNA, 25 bp, Homo sapien
tcttcatcaaagtgtccaagatgcc

SEQ ID NO: 4619881 - DNA, 25 bp, Homo sapien
tggatctggaccctcactaacttgt

SEQ ID NO: 4619882 - DNA, 25 bp, Homo sapien
catgtgtgctgttgttctaattgaa

SEQ ID NO: 4619883 - DNA, 25 bp, Homo sapien
cagtgtggatctggaccctcactaa

SEQ ID NO: 4619884 - DNA, 25 bp, Homo sapien
gttctaattgaacagtgtggatctg

SEQ ID NO: 4619885 - DNA, 25 bp, Homo sapien
tcccaatatgctggcatataacttt

SEQ ID NO: 4619886 - DNA, 25 bp, Homo sapien
catataactttcgtgagaaactgtc

SEQ ID NO: 4619887 - DNA, 25 bp, Homo sapien
tcgtgagaaactgtcttgaaggatc

SEQ ID NO: 4619888 - DNA, 25 bp, Homo sapien
ctgtcttgaaggatcccatcttttg

SEQ ID NO: 4619889 - DNA, 25 bp, Homo sapien
tttaccttgttgatcacaatcttca

SEQ ID NO: 4619890 - DNA, 25 bp, Homo sapien
ttatcttgtttaccttgttgatcac

SEQ ID NO: 4619891 - DNA, 25 bp, Homo sapien
cttgtttaccttgttgatcacaatc

SEQ ID NO: 4619892 - DNA, 25 bp, Homo sapien
tatcttgtttaccttgttgatcaca

SEQ ID NO: 4619893 - DNA, 25 bp, Homo sapien
tctgattaacagtagatttggcttc

SEQ ID NO: 4619894 - DNA, 25 bp, Homo sapien
gcttcttggtaactcagggagctca

SEQ ID NO: 4619895 - DNA, 25 bp, Homo sapien
agttcccgcttaccgacaaggtgag

SEQ ID NO: 4619896 - DNA, 25 bp, Homo sapien
gaggcctcggataagcaaattgaag

SEQ ID NO: 4619897 - DNA, 25 bp, Homo sapien
aaacttgggtgtgagtaatggactc

SEQ ID NO: 4619898 - DNA, 25 bp, Homo sapien
tctgaccatctggtagtggtgccac

SEQ ID NO: 4619899 - DNA, 25 bp, Homo sapien
cacattctggtgaaaagggaagagt

SEQ ID NO: 4619900 - DNA, 25 bp, Homo sapien
gagtcttgctttatgtaacctaata

SEQ ID NO: 4619901 - DNA, 25 bp, Homo sapien
gttgtcctcataggtggatttggca

SEQ ID NO: 4619902 - DNA, 25 bp, Homo sapien
tgacaggttgtcctcataggtggat

SEQ ID NO: 4619903 - DNA, 25 bp, Homo sapien
cctcataggtggatttggcatgcag

SEQ ID NO: 4619904 - DNA, 25 bp, Homo sapien
cataggtggatttggcatgcagagc

SEQ ID NO: 4619905 - DNA, 25 bp, Homo sapien
cagttagcagtaattgtgcctcgca

SEQ ID NO: 4619906 - DNA, 25 bp, Homo sapien
agttagcagtaattgtgcctcgcat

SEQ ID NO: 4619907 - DNA, 25 bp, Homo sapien
gttagcagtaattgtgcctcgcata

SEQ ID NO: 4619908 - DNA, 25 bp, Homo sapien
tcagttagcagtaattgtgcctcgc

SEQ ID NO: 4619909 - DNA, 25 bp, Homo sapien
cctaagagcagactctcctcctgta

SEQ ID NO: 4619910 - DNA, 25 bp, Homo sapien
tcctcctgtatcaagtgccttctga

SEQ ID NO: 4619911 - DNA, 25 bp, Homo sapien
gcagactctcctcctgtatcaagtg

SEQ ID NO: 4619912 - DNA, 25 bp, Homo sapien
gactctcctcctgtatcaagtgcct

SEQ ID NO: 4619913 - DNA, 25 bp, Homo sapien
gcaaaatccagacttatttgtattt

SEQ ID NO: 4619914 - DNA, 25 bp, Homo sapien
agtgcaaaatccagacttatttgta

SEQ ID NO: 4619915 - DNA, 25 bp, Homo sapien
tagtgcaaaatccagacttatttgt

SEQ ID NO: 4619916 - DNA, 25 bp, Homo sapien
gtgcaaaatccagacttatttgtat

SEQ ID NO: 4619917 - DNA, 25 bp, Homo sapien
catgttatgtgttggttcttgctta

SEQ ID NO: 4619918 - DNA, 25 bp, Homo sapien
gaattcatagtcaggtatggctgag

SEQ ID NO: 4619919 - DNA, 25 bp, Homo sapien
tctccttgaacggtcagcatcatct

SEQ ID NO: 4619920 - DNA, 25 bp, Homo sapien
tttcattattctctcgaatctctcc

SEQ ID NO: 4619921 - DNA, 25 bp, Homo sapien
aatttcatcacttgcgttagctcca

SEQ ID NO: 4619922 - DNA, 25 bp, Homo sapien
aattcagcatttctccgaagagcag

SEQ ID NO: 4619923 - DNA, 25 bp, Homo sapien
tttgcttggcccgacataagagctt

SEQ ID NO: 4619924 - DNA, 25 bp, Homo sapien
atatatttgatgtggtatccccagg

SEQ ID NO: 4619925 - DNA, 25 bp, Homo sapien
ttgccaagatgtctaccaaaaaggc

SEQ ID NO: 4619926 - DNA, 25 bp, Homo sapien
gactatttggtacagtcttcccaga

SEQ ID NO: 4619927 - DNA, 25 bp, Homo sapien
cctttaattcagttagcaatatgcc

SEQ ID NO: 4619928 - DNA, 25 bp, Homo sapien
atgtgtgtcagcgtagagattggca

SEQ ID NO: 4619929 - DNA, 25 bp, Homo sapien
tatttatccctggagtttatacaac

SEQ ID NO: 4619930 - DNA, 25 bp, Homo sapien
cattgttattaatacccgagactgg

SEQ ID NO: 4619931 - DNA, 25 bp, Homo sapien
tagtaatggcatattagtcccttct

SEQ ID NO: 4619932 - DNA, 25 bp, Homo sapien
cagagttttcacaggaatgagggaa

SEQ ID NO: 4619933 - DNA, 25 bp, Homo sapien
cagcttccagatacacttctctttc

SEQ ID NO: 4619934 - DNA, 25 bp, Homo sapien
tctaacagcttccagatacacttct

SEQ ID NO: 4619935 - DNA, 25 bp, Homo sapien
atgcagttctaacagcttccagata

SEQ ID NO: 4619936 - DNA, 25 bp, Homo sapien
cttctctttcccatatgcttgccat

SEQ ID NO: 4619937 - DNA, 25 bp, Homo sapien
tttcgcattaagccagggcctactt

SEQ ID NO: 4619938 - DNA, 25 bp, Homo sapien
cgcattaagccagggcctacttgtt

SEQ ID NO: 4619939 - DNA, 25 bp, Homo sapien
tttagggggtgccttgcactcttca

SEQ ID NO: 4619940 - DNA, 25 bp, Homo sapien
ttagggggtgccttgcactcttcat

SEQ ID NO: 4619941 - DNA, 25 bp, Homo sapien
caacctatcaaagtgggcgggcatc

SEQ ID NO: 4619942 - DNA, 25 bp, Homo sapien
aacctatcaaagtgggcgggcatct

SEQ ID NO: 4619943 - DNA, 25 bp, Homo sapien
ctatcaaagtgggcgggcatctgat

SEQ ID NO: 4619944 - DNA, 25 bp, Homo sapien
acctatcaaagtgggcgggcatctg

SEQ ID NO: 4619945 - DNA, 25 bp, Homo sapien
cctcattcagagatttgctgggctg

SEQ ID NO: 4619946 - DNA, 25 bp, Homo sapien
gaggatgttgtagcgccctctgtag

SEQ ID NO: 4619947 - DNA, 25 bp, Homo sapien
gccaagctactaggtgccttcctga

SEQ ID NO: 4619948 - DNA, 25 bp, Homo sapien
gaacaggtatgagtgataatcacac

SEQ ID NO: 4619949 - DNA, 25 bp, Homo sapien
tttggtctcagtacaaatgttcttg

SEQ ID NO: 4619950 - DNA, 25 bp, Homo sapien
ttcttagtgatagccaaaattataa

SEQ ID NO: 4619951 - DNA, 25 bp, Homo sapien
ccaagcctttcttagtgatagccaa

SEQ ID NO: 4619952 - DNA, 25 bp, Homo sapien
tgcttttttggtctcagtacaaatg

SEQ ID NO: 4619953 - DNA, 25 bp, Homo sapien
cagagaacaagacataatataggta

SEQ ID NO: 4619954 - DNA, 25 bp, Homo sapien
aagacataatataggtacggatttc

SEQ ID NO: 4619955 - DNA, 25 bp, Homo sapien
cataatataggtacggatttctgaa

SEQ ID NO: 4619956 - DNA, 25 bp, Homo sapien
gaacaagacataatataggtacgga

SEQ ID NO: 4619957 - DNA, 25 bp, Homo sapien
ttggcctcctgctttttcaggacag

SEQ ID NO: 4619958 - DNA, 25 bp, Homo sapien
gctttttcaggacagcaggggccgg

SEQ ID NO: 4619959 - DNA, 25 bp, Homo sapien
tttcttggcctcctgctttttcagg

SEQ ID NO: 4619960 - DNA, 25 bp, Homo sapien
cggagccaccttctttctcttggcc

SEQ ID NO: 4619961 - DNA, 25 bp, Homo sapien
gaactggttaataatctcaggaagt

SEQ ID NO: 4619962 - DNA, 25 bp, Homo sapien
taatctcaggaagtgctttcagccg

SEQ ID NO: 4619963 - DNA, 25 bp, Homo sapien
ctttcagccgcttgtaataggatgg

SEQ ID NO: 4619964 - DNA, 25 bp, Homo sapien
agcgagttaagtcccttttgggctg

SEQ ID NO: 4619965 - DNA, 25 bp, Homo sapien
ccaggccaacaagctctgcttcttg

SEQ ID NO: 4619966 - DNA, 25 bp, Homo sapien
caggccaacaagctctgcttcttgt

SEQ ID NO: 4619967 - DNA, 25 bp, Homo sapien
ctcaatgggatccatgttgtgtgca

SEQ ID NO: 4619968 - DNA, 25 bp, Homo sapien
agccagctcaatgggatccatgttg

SEQ ID NO: 4619969 - DNA, 25 bp, Homo sapien
cagccagctcaatgggatccatgtt

SEQ ID NO: 4619970 - DNA, 25 bp, Homo sapien
aatgggatccatgttgtgtgcagtc

SEQ ID NO: 4619971 - DNA, 25 bp, Homo sapien
tgagccacagtctagggacccagtg

SEQ ID NO: 4619972 - DNA, 25 bp, Homo sapien
acagtctagggacccagtgacggca

SEQ ID NO: 4619973 - DNA, 25 bp, Homo sapien
agtctagggacccagtgacggcaga

SEQ ID NO: 4619974 - DNA, 25 bp, Homo sapien
gtgagccacagtctagggacccagt

SEQ ID NO: 4619975 - DNA, 25 bp, Homo sapien
tgccaaccacatgcatgttgctatg

SEQ ID NO: 4619976 - DNA, 25 bp, Homo sapien
tctaatacggttaaagatgtatgac

SEQ ID NO: 4619977 - DNA, 25 bp, Homo sapien
gctgctcgggctgatttaaatctaa

SEQ ID NO: 4619978 - DNA, 25 bp, Homo sapien
tgtatgactaaaatacaaggttgtt

SEQ ID NO: 4619979 - DNA, 25 bp, Homo sapien
ttaggttgtacctttacaaggctca

SEQ ID NO: 4619980 - DNA, 25 bp, Homo sapien
taggttgtacctttacaaggctcat

SEQ ID NO: 4619981 - DNA, 25 bp, Homo sapien
aactgtgttttcaaccaaaatgcta

SEQ ID NO: 4619982 - DNA, 25 bp, Homo sapien
tttcaaccaaaatgctatttccggc

SEQ ID NO: 4619983 - DNA, 25 bp, Homo sapien
tcaaccaaaatgctatttccggcat

SEQ ID NO: 4619984 - DNA, 25 bp, Homo sapien
tgttttcaaccaaaatgctatttcc

SEQ ID NO: 4619985 - DNA, 25 bp, Homo sapien
ccagagctgctgtttagtactgtcc

SEQ ID NO: 4619986 - DNA, 25 bp, Homo sapien
tacagccaactgtaggcctgaacaa

SEQ ID NO: 4619987 - DNA, 25 bp, Homo sapien
tagtggtcgctgaaatcaatggttc

SEQ ID NO: 4619988 - DNA, 25 bp, Homo sapien
tgttcatacacctgccagcccatgt

SEQ ID NO: 4619989 - DNA, 25 bp, Homo sapien
tttctccatgatcaaataaagggag

SEQ ID NO: 4619990 - DNA, 25 bp, Homo sapien
ttttctccatgatcaaataaaggga

SEQ ID NO: 4619991 - DNA, 25 bp, Homo sapien
ttctccatgatcaaataaagggagt

SEQ ID NO: 4619992 - DNA, 25 bp, Homo sapien
tcttttctccatgatcaaataaagg

SEQ ID NO: 4619993 - DNA, 25 bp, Homo sapien
gaagataatcttgtcaattgtaaac

SEQ ID NO: 4619994 - DNA, 25 bp, Homo sapien
tcctccaattggtgggagaaaacta

SEQ ID NO: 4619995 - DNA, 25 bp, Homo sapien
tcagtggggcatccttttattcctc

SEQ ID NO: 4619996 - DNA, 25 bp, Homo sapien
caattgtaaacaaatactcagtggg

SEQ ID NO: 4619997 - DNA, 25 bp, Homo sapien
tgccaaatcttgcagttacgctttc

SEQ ID NO: 4619998 - DNA, 25 bp, Homo sapien
ggctgttgaccaagttgtggaaagt

SEQ ID NO: 4619999 - DNA, 25 bp, Homo sapien
cttgcagttacgctttcttggaacc

SEQ ID NO: 4620000 - DNA, 25 bp, Homo sapien
cagggctgttgaccaagttgtggaa

SEQ ID NO: 4620001 - DNA, 25 bp, Homo sapien
cacatagggttacgttggaacctga

SEQ ID NO: 4620002 - DNA, 25 bp, Homo sapien
tcatttgttccccttggtcgtgagc

SEQ ID NO: 4620003 - DNA, 25 bp, Homo sapien
attcttcttgatgtattccttttac

SEQ ID NO: 4620004 - DNA, 25 bp, Homo sapien
cccttggtcgtgagcatggacagga

SEQ ID NO: 4620005 - DNA, 25 bp, Homo sapien
tcatactctattttcaaagccaagg

SEQ ID NO: 4620006 - DNA, 25 bp, Homo sapien
aattttaagtgggaaattggctctg

SEQ ID NO: 4620007 - DNA, 25 bp, Homo sapien
gaaattggctctgaaataatcaaat

SEQ ID NO: 4620008 - DNA, 25 bp, Homo sapien
tcaaagccaaggtctagaattttaa

SEQ ID NO: 4620009 - DNA, 25 bp, Homo sapien
tatgaagacgattcactgctgcctc

SEQ ID NO: 4620010 - DNA, 25 bp, Homo sapien
gataacttagtgaagtatgtggtaa

SEQ ID NO: 4620011 - DNA, 25 bp, Homo sapien
tcaaatagtcctcccgaattggcct

SEQ ID NO: 4620012 - DNA, 25 bp, Homo sapien
cctgtgtctgattttatggataact

SEQ ID NO: 4620013 - DNA, 25 bp, Homo sapien
aagagacctctatctgttgtgcggg

SEQ ID NO: 4620014 - DNA, 25 bp, Homo sapien
gtaaggacgtccgtggaagagctcc

SEQ ID NO: 4620015 - DNA, 25 bp, Homo sapien
atctcaagagagtccggtggctggc

SEQ ID NO: 4620016 - DNA, 25 bp, Homo sapien
tggctggcgccggaagaagttaaac

SEQ ID NO: 4620017 - DNA, 25 bp, Homo sapien
ttctgccctccaggacttttgtact

SEQ ID NO: 4620018 - DNA, 25 bp, Homo sapien
cagtatggaacaggctccaagtcat

SEQ ID NO: 4620019 - DNA, 25 bp, Homo sapien
tacagaactgtggtgtaaccatgtc

SEQ ID NO: 4620020 - DNA, 25 bp, Homo sapien
caaggtttgactaatcttggtcatc

SEQ ID NO: 4620021 - DNA, 25 bp, Homo sapien
cttggtcatctgttcagggaagtac

SEQ ID NO: 4620022 - DNA, 25 bp, Homo sapien
cttcccgtttttatctcttcaatgg

SEQ ID NO: 4620023 - DNA, 25 bp, Homo sapien
ttttatatattcttggaccccatag

SEQ ID NO: 4620024 - DNA, 25 bp, Homo sapien
aattgaactcagctttgcaccaagc

SEQ ID NO: 4620025 - DNA, 25 bp, Homo sapien
cagatcaacgagacagaaagtcaac

SEQ ID NO: 4620026 - DNA, 25 bp, Homo sapien
attgaactcagctttgcaccaagca

SEQ ID NO: 4620027 - DNA, 25 bp, Homo sapien
cagaaagtcaacaaggatacccagg

SEQ ID NO: 4620028 - DNA, 25 bp, Homo sapien
cggcagcgaggctgcgggaggggcg

SEQ ID NO: 4620029 - DNA, 25 bp, Homo sapien
ttgcccaggcttgattaggtaaaca

SEQ ID NO: 4620030 - DNA, 25 bp, Homo sapien
ttgattaggtaaacaaagcagccgg

SEQ ID NO: 4620031 - DNA, 25 bp, Homo sapien
cattgcccaggcttgattaggtaaa

SEQ ID NO: 4620032 - DNA, 25 bp, Homo sapien
cgtgagcgatggagaagacggtgat

SEQ ID NO: 4620033 - DNA, 25 bp, Homo sapien
caattaagaatggagttagttgcag

SEQ ID NO: 4620034 - DNA, 25 bp, Homo sapien
gtgagcgatggagaagacggtgatt

SEQ ID NO: 4620035 - DNA, 25 bp, Homo sapien
gttagttgcagggaggagcaaagat

SEQ ID NO: 4620036 - DNA, 25 bp, Homo sapien
gctttagctttaagactgccaacaa

SEQ ID NO: 4620037 - DNA, 25 bp, Homo sapien
gggtaattcctctctgtcctcgcag

SEQ ID NO: 4620038 - DNA, 25 bp, Homo sapien
gaaagattcctttgtcagggatgtg

SEQ ID NO: 4620039 - DNA, 25 bp, Homo sapien
cacgtgcatttcacatgaggatgat

SEQ ID NO: 4620040 - DNA, 25 bp, Homo sapien
tattaattaggagtcgggcatggtg

SEQ ID NO: 4620041 - DNA, 25 bp, Homo sapien
ccacgtgtggcacgcacgtgtagtc

SEQ ID NO: 4620042 - DNA, 25 bp, Homo sapien
atggtgagacaccacgtgtggcacg

SEQ ID NO: 4620043 - DNA, 25 bp, Homo sapien
attttattaattaggagtcgggcat

SEQ ID NO: 4620044 - DNA, 25 bp, Homo sapien
gcatttggtcacgtaacacagccag

SEQ ID NO: 4620045 - DNA, 25 bp, Homo sapien
tcacaagggagacgcagtaacattg

SEQ ID NO: 4620046 - DNA, 25 bp, Homo sapien
caaatcacgcctaagctgaaagcag

SEQ ID NO: 4620047 - DNA, 25 bp, Homo sapien
gactataaacagaggtatgggcagg

SEQ ID NO: 4620048 - DNA, 25 bp, Homo sapien
aacatgtattttctcgtggggcggg

SEQ ID NO: 4620049 - DNA, 25 bp, Homo sapien
cagacagcagccacgatgaaacacg

SEQ ID NO: 4620050 - DNA, 25 bp, Homo sapien
cccacgtgagaaggctgtaacagac

SEQ ID NO: 4620051 - DNA, 25 bp, Homo sapien
ccacgtgagaaggctgtaacagaca

SEQ ID NO: 4620052 - DNA, 25 bp, Homo sapien
gcaggagagagccaatgggctgcat

SEQ ID NO: 4620053 - DNA, 25 bp, Homo sapien
gcggggactgcaggagagagccaat

SEQ ID NO: 4620054 - DNA, 25 bp, Homo sapien
gactgcaggagagagccaatgggct

SEQ ID NO: 4620055 - DNA, 25 bp, Homo sapien
gggactgcaggagagagccaatggg

SEQ ID NO: 4620056 - DNA, 25 bp, Homo sapien
ctcccttctgccacaagctcagccc

SEQ ID NO: 4620057 - DNA, 25 bp, Homo sapien
cttctgccacaagctcagcccagcg

SEQ ID NO: 4620058 - DNA, 25 bp, Homo sapien
ctgccacaagctcagcccagcgccg

SEQ ID NO: 4620059 - DNA, 25 bp, Homo sapien
gccacaagctcagcccagcgccggc

SEQ ID NO: 4620060 - DNA, 25 bp, Homo sapien
tttcaactgctaatctgtgtggatg

SEQ ID NO: 4620061 - DNA, 25 bp, Homo sapien
caactgctaatctgtgtggatggaa

SEQ ID NO: 4620062 - DNA, 25 bp, Homo sapien
tcaactgctaatctgtgtggatgga

SEQ ID NO: 4620063 - DNA, 25 bp, Homo sapien
ttcaactgctaatctgtgtggatgg

SEQ ID NO: 4620064 - DNA, 25 bp, Homo sapien
tcaagtatgttagcttcagtctaga

SEQ ID NO: 4620065 - DNA, 25 bp, Homo sapien
tttaatcaagtatgttagcttcagt

SEQ ID NO: 4620066 - DNA, 25 bp, Homo sapien
atcaagtatgttagcttcagtctag

SEQ ID NO: 4620067 - DNA, 25 bp, Homo sapien
taatcaagtatgttagcttcagtct

SEQ ID NO: 4620068 - DNA, 25 bp, Homo sapien
tttgccaggagattaatccatctgc

SEQ ID NO: 4620069 - DNA, 25 bp, Homo sapien
gagattaatccatctgcacctgaga

SEQ ID NO: 4620070 - DNA, 25 bp, Homo sapien
aattgtttgccaggagattaatcca

SEQ ID NO: 4620071 - DNA, 25 bp, Homo sapien
ctttgattctaaattgtttgccagg

SEQ ID NO: 4620072 - DNA, 25 bp, Homo sapien
gctcaagggcagtcatatggctgaa

SEQ ID NO: 4620073 - DNA, 25 bp, Homo sapien
tatggctgaaactcagggctaaaca

SEQ ID NO: 4620074 - DNA, 25 bp, Homo sapien
ggtccaatgatgacgaagacagaca

SEQ ID NO: 4620075 - DNA, 25 bp, Homo sapien
gccaaggtagttcagcccctaagaa

SEQ ID NO: 4620076 - DNA, 25 bp, Homo sapien
aaactctcccacagctatcagtcgt

SEQ ID NO: 4620077 - DNA, 25 bp, Homo sapien
tatcagtcgtcatctggcacagatc

SEQ ID NO: 4620078 - DNA, 25 bp, Homo sapien
tctgccttgtgctgttgtccctcca

SEQ ID NO: 4620079 - DNA, 25 bp, Homo sapien
ggcacagatctccaaacgcttccat

SEQ ID NO: 4620080 - DNA, 25 bp, Homo sapien
ttcccaattgtgtcaatcacaactt

SEQ ID NO: 4620081 - DNA, 25 bp, Homo sapien
tattagcttaagcaggtcaaaaatt

SEQ ID NO: 4620082 - DNA, 25 bp, Homo sapien
tgtgtcaatcacaactttcttgtag

SEQ ID NO: 4620083 - DNA, 25 bp, Homo sapien
tcctttgaattccataatactcaca

SEQ ID NO: 4620084 - DNA, 25 bp, Homo sapien
ttttgcttctcttacatgtatgtgt

SEQ ID NO: 4620085 - DNA, 25 bp, Homo sapien
ttgcttctcttacatgtatgtgtgc

SEQ ID NO: 4620086 - DNA, 25 bp, Homo sapien
cttctcttacatgtatgtgtgcagc

SEQ ID NO: 4620087 - DNA, 25 bp, Homo sapien
tctcttacatgtatgtgtgcagctt

SEQ ID NO: 4620088 - DNA, 25 bp, Homo sapien
ttcaaaccttttcctgatatcatct

SEQ ID NO: 4620089 - DNA, 25 bp, Homo sapien
tattaatccctcatactcttcagac

SEQ ID NO: 4620090 - DNA, 25 bp, Homo sapien
acaggtttatttgttaccatgagca

SEQ ID NO: 4620091 - DNA, 25 bp, Homo sapien
gttcccaataatcataggccaaaaa

SEQ ID NO: 4620092 - DNA, 25 bp, Homo sapien
taactgtttacctctgttcccaata

SEQ ID NO: 4620093 - DNA, 25 bp, Homo sapien
ctttaggactgcagcaataagatga

SEQ ID NO: 4620094 - DNA, 25 bp, Homo sapien
taggactgcagcaataagatgaccc

SEQ ID NO: 4620095 - DNA, 25 bp, Homo sapien
ggactgcagcaataagatgacccac

SEQ ID NO: 4620096 - DNA, 25 bp, Homo sapien
ctgcagcaataagatgacccacagc

SEQ ID NO: 4620097 - DNA, 25 bp, Homo sapien
tgatcctgagcaacgagtgccacca

SEQ ID NO: 4620098 - DNA, 25 bp, Homo sapien
gagtatcccattgagaacatagctg

SEQ ID NO: 4620099 - DNA, 25 bp, Homo sapien
tcacagcaggctgttcgaaccacta

SEQ ID NO: 4620100 - DNA, 25 bp, Homo sapien
catagctgaactctgcatgatcctg

SEQ ID NO: 4620101 - DNA, 25 bp, Homo sapien
ttagcgcagcagagaagtgggaagt

SEQ ID NO: 4620102 - DNA, 25 bp, Homo sapien
tagtcttcgtattcactacacaccg

SEQ ID NO: 4620103 - DNA, 25 bp, Homo sapien
ctccctgtggatgacaatttagaca

SEQ ID NO: 4620104 - DNA, 25 bp, Homo sapien
tgttggccaaatagccaaagaacct

SEQ ID NO: 4620105 - DNA, 25 bp, Homo sapien
taaattatggctcatccacacaatg

SEQ ID NO: 4620106 - DNA, 25 bp, Homo sapien
gcctgagcaatatagagagatcccg

SEQ ID NO: 4620107 - DNA, 25 bp, Homo sapien
acaattgaagaggccaggcatagtg

SEQ ID NO: 4620108 - DNA, 25 bp, Homo sapien
atatagagagatcccgtttcaaaaa

SEQ ID NO: 4620109 - DNA, 25 bp, Homo sapien
tggctggaagccagaagatcacttg

SEQ ID NO: 4620110 - DNA, 25 bp, Homo sapien
ggtgtctcccactatatcctccagt

SEQ ID NO: 4620111 - DNA, 25 bp, Homo sapien
tgtaactgagaactctggactataa

SEQ ID NO: 4620112 - DNA, 25 bp, Homo sapien
ttttgtaactgagaactctggacta

SEQ ID NO: 4620113 - DNA, 25 bp, Homo sapien
taactgagaactctggactataagg

SEQ ID NO: 4620114 - DNA, 25 bp, Homo sapien
taatggcttttatcaagccatgtgt

SEQ ID NO: 4620115 - DNA, 25 bp, Homo sapien
tggcttttatcaagccatgtgtatt

SEQ ID NO: 4620116 - DNA, 25 bp, Homo sapien
aatggcttttatcaagccatgtgta

SEQ ID NO: 4620117 - DNA, 25 bp, Homo sapien
atttgtagtaagtgcataatggctt

SEQ ID NO: 4620118 - DNA, 25 bp, Homo sapien
ggtatatatactctgaatattcttt

SEQ ID NO: 4620119 - DNA, 25 bp, Homo sapien
ctaatggtatatatactctgaatat

SEQ ID NO: 4620120 - DNA, 25 bp, Homo sapien
tggtatatatactctgaatattctt

SEQ ID NO: 4620121 - DNA, 25 bp, Homo sapien
aatggtatatatactctgaatattc

SEQ ID NO: 4620122 - DNA, 25 bp, Homo sapien
cccgaacccataagctctgtctctc

SEQ ID NO: 4620123 - DNA, 25 bp, Homo sapien
tacccgaacccataagctctgtctc

SEQ ID NO: 4620124 - DNA, 25 bp, Homo sapien
ttacccgaacccataagctctgtct

SEQ ID NO: 4620125 - DNA, 25 bp, Homo sapien
cttacccgaacccataagctctgtc

SEQ ID NO: 4620126 - DNA, 25 bp, Homo sapien
aacactggccagcaatcaggtctgt

SEQ ID NO: 4620127 - DNA, 25 bp, Homo sapien
ctggaaaaacgctgtcagctgctgc

SEQ ID NO: 4620128 - DNA, 25 bp, Homo sapien
ggcactgctggaaaaacgctgtcag

SEQ ID NO: 4620129 - DNA, 25 bp, Homo sapien
tggccagcaatcaggtctgtgttca

SEQ ID NO: 4620130 - DNA, 25 bp, Homo sapien
acttccttaataacagcttttctca

SEQ ID NO: 4620131 - DNA, 25 bp, Homo sapien
tgcttaacttccttaataacagctt

SEQ ID NO: 4620132 - DNA, 25 bp, Homo sapien
tccttaataacagcttttctcatat

SEQ ID NO: 4620133 - DNA, 25 bp, Homo sapien
aatgcttaacttccttaataacagc

SEQ ID NO: 4620134 - DNA, 25 bp, Homo sapien
gaactatgtcacaacacagttgaag

SEQ ID NO: 4620135 - DNA, 25 bp, Homo sapien
gtttagcatattcttgtaactgaga

SEQ ID NO: 4620136 - DNA, 25 bp, Homo sapien
ggtgccattatttgaatgcatgaaa

SEQ ID NO: 4620137 - DNA, 25 bp, Homo sapien
gaagtaagactttcagcagggctag

SEQ ID NO: 4620138 - DNA, 25 bp, Homo sapien
tgaagactcatctgggtaagctgaa

SEQ ID NO: 4620139 - DNA, 25 bp, Homo sapien
gaaaacaggatgacgcaaaaggctt

SEQ ID NO: 4620140 - DNA, 25 bp, Homo sapien
aacatcatcgcctctgttgtctgta

SEQ ID NO: 4620141 - DNA, 25 bp, Homo sapien
cactgtgctctaaaaggtgaattga

SEQ ID NO: 4620142 - DNA, 25 bp, Homo sapien
tctgctgacttgctggagtctgtag

SEQ ID NO: 4620143 - DNA, 25 bp, Homo sapien
agtagtaaagctattccaattatga

SEQ ID NO: 4620144 - DNA, 25 bp, Homo sapien
taagattggcttctgctgacttgct

SEQ ID NO: 4620145 - DNA, 25 bp, Homo sapien
cttgctggagtctgtagaagtagta

SEQ ID NO: 4620146 - DNA, 25 bp, Homo sapien
ctttgggattttctgatcctcagta

SEQ ID NO: 4620147 - DNA, 25 bp, Homo sapien
tctctgtaacattcctgctgtatca

SEQ ID NO: 4620148 - DNA, 25 bp, Homo sapien
gccaactgctgcctagagggacctt

SEQ ID NO: 4620149 - DNA, 25 bp, Homo sapien
tccaaaaggtttagagccaactgct

SEQ ID NO: 4620150 - DNA, 25 bp, Homo sapien
cacagatatacagtcttccaaggca

SEQ ID NO: 4620151 - DNA, 25 bp, Homo sapien
aatcctggccccatagcctgaggga

SEQ ID NO: 4620152 - DNA, 25 bp, Homo sapien
tgagggaggacctgtgaaaatgcta

SEQ ID NO: 4620153 - DNA, 25 bp, Homo sapien
ttgtcccattgagtgacagctgcca

SEQ ID NO: 4620154 - DNA, 25 bp, Homo sapien
gcaaggatgcaatcaagcgttttct

SEQ ID NO: 4620155 - DNA, 25 bp, Homo sapien
ccatacatactggttacagggcaca

SEQ ID NO: 4620156 - DNA, 25 bp, Homo sapien
ggcgcagggatcacagcagtaatag

SEQ ID NO: 4620157 - DNA, 25 bp, Homo sapien
tcctccaggctgtaaatattgtacc

SEQ ID NO: 4620158 - DNA, 25 bp, Homo sapien
gcagacgagtctgtcattacttcaa

SEQ ID NO: 4620159 - DNA, 25 bp, Homo sapien
tgctccacttcaggttgtctggcca

SEQ ID NO: 4620160 - DNA, 25 bp, Homo sapien
tgtctggccacggtacaagtatgga

SEQ ID NO: 4620161 - DNA, 25 bp, Homo sapien
ccacggtacaagtatggagaggacc

SEQ ID NO: 4620162 - DNA, 25 bp, Homo sapien
gtatggagaggaccgatccccactt

SEQ ID NO: 4620163 - DNA, 25 bp, Homo sapien
aatacgagcctttctgtgataaggg

SEQ ID NO: 4620164 - DNA, 25 bp, Homo sapien
tttaaactcaatacgagcctttctg

SEQ ID NO: 4620165 - DNA, 25 bp, Homo sapien
ccggcccaaaacatgctgtgtcttc

SEQ ID NO: 4620166 - DNA, 25 bp, Homo sapien
cccggcccaaaacatgctgtgtctt

SEQ ID NO: 4620167 - DNA, 25 bp, Homo sapien
gcctttctttgacaccccaacaaga

SEQ ID NO: 4620168 - DNA, 25 bp, Homo sapien
tagcagcataattgtgactgtgtgt

SEQ ID NO: 4620169 - DNA, 25 bp, Homo sapien
gactgtgtgtgactgcctttctttg

SEQ ID NO: 4620170 - DNA, 25 bp, Homo sapien
agctatcacgtagcagcataattgt

SEQ ID NO: 4620171 - DNA, 25 bp, Homo sapien
tacagaaaatggttcggcattatca

SEQ ID NO: 4620172 - DNA, 25 bp, Homo sapien
ttatcaatcaatgcccactgaagcc

SEQ ID NO: 4620173 - DNA, 25 bp, Homo sapien
ccactgaagcctaaacttgagatta

SEQ ID NO: 4620174 - DNA, 25 bp, Homo sapien
gaagcctaaacttgagattatctcc

SEQ ID NO: 4620175 - DNA, 25 bp, Homo sapien
cagggtttgatctaagacaacctaa

SEQ ID NO: 4620176 - DNA, 25 bp, Homo sapien
tttgcacaacaagacaattcatccg

SEQ ID NO: 4620177 - DNA, 25 bp, Homo sapien
acagcatgtgtcactatagcttcag

SEQ ID NO: 4620178 - DNA, 25 bp, Homo sapien
gaactcatcaaatgttcactgagtg

SEQ ID NO: 4620179 - DNA, 25 bp, Homo sapien
gcatggttggtttcacacacagtgt

SEQ ID NO: 4620180 - DNA, 25 bp, Homo sapien
cagtgacctctcaatcaggcgattt

SEQ ID NO: 4620181 - DNA, 25 bp, Homo sapien
cagcagttgaaagaccataaaaggg

SEQ ID NO: 4620182 - DNA, 25 bp, Homo sapien
cataaaagggtgaatgtcctccaga

SEQ ID NO: 4620183 - DNA, 25 bp, Homo sapien
gcaaagaatgaatcttcagaaggat

SEQ ID NO: 4620184 - DNA, 25 bp, Homo sapien
gaatcttcagaaggatttcccggaa

SEQ ID NO: 4620185 - DNA, 25 bp, Homo sapien
atgaatcttcagaaggatttcccgg

SEQ ID NO: 4620186 - DNA, 25 bp, Homo sapien
atcttcagaaggatttcccggaagg

SEQ ID NO: 4620187 - DNA, 25 bp, Homo sapien
cctttactgttcaacatagtagcca

SEQ ID NO: 4620188 - DNA, 25 bp, Homo sapien
gcatttgaaatgtagctactctgaa

SEQ ID NO: 4620189 - DNA, 25 bp, Homo sapien
gatttgggaggcttagcacaaatac

SEQ ID NO: 4620190 - DNA, 25 bp, Homo sapien
tagtagccactagctttatatggcc

SEQ ID NO: 4620191 - DNA, 25 bp, Homo sapien
gactgaattcctgtatccatagaat

SEQ ID NO: 4620192 - DNA, 25 bp, Homo sapien
taaatgataactatagtgactgaat

SEQ ID NO: 4620193 - DNA, 25 bp, Homo sapien
ttcttggacaaaagtagctacacat

SEQ ID NO: 4620194 - DNA, 25 bp, Homo sapien
tatagtgactgaattcctgtatcca

SEQ ID NO: 4620195 - DNA, 25 bp, Homo sapien
ataacaagtgttgccgaatatgtga

SEQ ID NO: 4620196 - DNA, 25 bp, Homo sapien
gctcgtggtaatgtaaagtagttca

SEQ ID NO: 4620197 - DNA, 25 bp, Homo sapien
gttgccgaatatgtgaagaaattgg

SEQ ID NO: 4620198 - DNA, 25 bp, Homo sapien
cactgctcgtggtaatgtaaagtag

SEQ ID NO: 4620199 - DNA, 25 bp, Homo sapien
caccaagcttaggtaaagtatacaa

SEQ ID NO: 4620200 - DNA, 25 bp, Homo sapien
ataatataggttccagtggtcttcc

SEQ ID NO: 4620201 - DNA, 25 bp, Homo sapien
cttgtgaacaccaagcttaggtaaa

SEQ ID NO: 4620202 - DNA, 25 bp, Homo sapien
ttatataatataggttccagtggtc

SEQ ID NO: 4620203 - DNA, 25 bp, Homo sapien
agttgtattattcgtagaatttgtc

SEQ ID NO: 4620204 - DNA, 25 bp, Homo sapien
cgtggtgtggttccaagtagttgta

SEQ ID NO: 4620205 - DNA, 25 bp, Homo sapien
cagctcttagtcgtggtgtggttcc

SEQ ID NO: 4620206 - DNA, 25 bp, Homo sapien
caaagatgtcagcaagcgcaaagtg

SEQ ID NO: 4620207 - DNA, 25 bp, Homo sapien
cattggacttccttgcccaccgaaa

SEQ ID NO: 4620208 - DNA, 25 bp, Homo sapien
aagagaaggtacatcagacacagcc

SEQ ID NO: 4620209 - DNA, 25 bp, Homo sapien
tacatatatctctgattgatgctgc

SEQ ID NO: 4620210 - DNA, 25 bp, Homo sapien
cacagccatgaaacgctgcagttca

SEQ ID NO: 4620211 - DNA, 25 bp, Homo sapien
tcagcttgacagagtgcatgaagac

SEQ ID NO: 4620212 - DNA, 25 bp, Homo sapien
catatctgcaccatgttgatatggc

SEQ ID NO: 4620213 - DNA, 25 bp, Homo sapien
catgaagaccctgtaataccaaggc

SEQ ID NO: 4620214 - DNA, 25 bp, Homo sapien
gatcaggcttggtgcattcattcaa

SEQ ID NO: 4620215 - DNA, 25 bp, Homo sapien
tatggtcagccaagattcctacaac

SEQ ID NO: 4620216 - DNA, 25 bp, Homo sapien
acatcaacagcattaaggaagggac

SEQ ID NO: 4620217 - DNA, 25 bp, Homo sapien
cctcagagatgcacccaagaacaat

SEQ ID NO: 4620218 - DNA, 25 bp, Homo sapien
tacagaacccaagaaatagtagctg

SEQ ID NO: 4620219 - DNA, 25 bp, Homo sapien
taaacgtgtgcgatgcttgctccac

SEQ ID NO: 4620220 - DNA, 25 bp, Homo sapien
taagtaaacgtgtgcgatgcttgct

SEQ ID NO: 4620221 - DNA, 25 bp, Homo sapien
cattagctattcttctcagatgctc

SEQ ID NO: 4620222 - DNA, 25 bp, Homo sapien
tgctacgtaagtaaacgtgtgcgat

SEQ ID NO: 4620223 - DNA, 25 bp, Homo sapien
caagtgtacaatcatgaaactccca

SEQ ID NO: 4620224 - DNA, 25 bp, Homo sapien
caattacgtagtgggcttttggctg

SEQ ID NO: 4620225 - DNA, 25 bp, Homo sapien
ttggcatctgattcatccaacacag

SEQ ID NO: 4620226 - DNA, 25 bp, Homo sapien
ggctcccaggcctaatattagaatt

SEQ ID NO: 4620227 - DNA, 25 bp, Homo sapien
aatactccattctatatatatatgc

SEQ ID NO: 4620228 - DNA, 25 bp, Homo sapien
tatatatgctttaaacttttccata

SEQ ID NO: 4620229 - DNA, 25 bp, Homo sapien
atatgctttaaacttttccataagt

SEQ ID NO: 4620230 - DNA, 25 bp, Homo sapien
tataatactccattctatatatata

SEQ ID NO: 4620231 - DNA, 25 bp, Homo sapien
agaatgagaggtcttgtgtcacaac

SEQ ID NO: 4620232 - DNA, 25 bp, Homo sapien
tccaagtggagcgaatgcaaacaac

SEQ ID NO: 4620233 - DNA, 25 bp, Homo sapien
cagttgtattgaccgttaaggaagg

SEQ ID NO: 4620234 - DNA, 25 bp, Homo sapien
gtcacaactcagctttggagagaga

SEQ ID NO: 4620235 - DNA, 25 bp, Homo sapien
cttccaacagtcggtggtcttcttc

SEQ ID NO: 4620236 - DNA, 25 bp, Homo sapien
ttccaacagtcggtggtcttcttca

SEQ ID NO: 4620237 - DNA, 25 bp, Homo sapien
tccaacagtcggtggtcttcttcat

SEQ ID NO: 4620238 - DNA, 25 bp, Homo sapien
tttgagtatgagtccagaggaagct

SEQ ID NO: 4620239 - DNA, 25 bp, Homo sapien
aagttggccagggatctatatgcag

SEQ ID NO: 4620240 - DNA, 25 bp, Homo sapien
tatgcagcatttgctacaattgggt

SEQ ID NO: 4620241 - DNA, 25 bp, Homo sapien
cctgcagtaaagttggccagggatc

SEQ ID NO: 4620242 - DNA, 25 bp, Homo sapien
tatatgcagcatttgctacaattgg

SEQ ID NO: 4620243 - DNA, 25 bp, Homo sapien
tctagtcatatgtccatgacagagc

SEQ ID NO: 4620244 - DNA, 25 bp, Homo sapien
cactgtaagccagtataagcaatga

SEQ ID NO: 4620245 - DNA, 25 bp, Homo sapien
cactctatcataatgtccacatgga

SEQ ID NO: 4620246 - DNA, 25 bp, Homo sapien
gattaactaaatggtcatgactcta

SEQ ID NO: 4620247 - DNA, 25 bp, Homo sapien
tgagatagcaagagccaggaactga

SEQ ID NO: 4620248 - DNA, 25 bp, Homo sapien
tcttcatcgtcatctaactcttcag

SEQ ID NO: 4620249 - DNA, 25 bp, Homo sapien
tcatcgtcatctaactcttcaggaa

SEQ ID NO: 4620250 - DNA, 25 bp, Homo sapien
tgagtgacaacagtttgagatagca

SEQ ID NO: 4620251 - DNA, 25 bp, Homo sapien
ggcaagtgagtacttctaaacacaa

SEQ ID NO: 4620252 - DNA, 25 bp, Homo sapien
caatgacctagagtaccagtgcaaa

SEQ ID NO: 4620253 - DNA, 25 bp, Homo sapien
gtaagttcctaatcacagtccacaa

SEQ ID NO: 4620254 - DNA, 25 bp, Homo sapien
ccatttcttgggtagggcatatagt

SEQ ID NO: 4620255 - DNA, 25 bp, Homo sapien
gagcgggcacctccttttaatgcag

SEQ ID NO: 4620256 - DNA, 25 bp, Homo sapien
taatgcagagtgatatatcccacga

SEQ ID NO: 4620257 - DNA, 25 bp, Homo sapien
cagtcctggttgcttgtttgtttca

SEQ ID NO: 4620258 - DNA, 25 bp, Homo sapien
tatcccacgaggcatattcaccatt

SEQ ID NO: 4620259 - DNA, 25 bp, Homo sapien
ttctgcgatgtcttttaaagtgcga

SEQ ID NO: 4620260 - DNA, 25 bp, Homo sapien
ctacagttctgcgatgtcttttaaa

SEQ ID NO: 4620261 - DNA, 25 bp, Homo sapien
tttataatttatccacatgttagta

SEQ ID NO: 4620262 - DNA, 25 bp, Homo sapien
ttaaagtgcgatgatttttataatt

SEQ ID NO: 4620263 - DNA, 25 bp, Homo sapien
atctttactctgatacatggaaaca

SEQ ID NO: 4620264 - DNA, 25 bp, Homo sapien
ctttactctgatacatggaaacatc

SEQ ID NO: 4620265 - DNA, 25 bp, Homo sapien
aagagcaagtgaagtctgcttgaaa

SEQ ID NO: 4620266 - DNA, 25 bp, Homo sapien
gtctgcttgaaacttcgccctctgc

SEQ ID NO: 4620267 - DNA, 25 bp, Homo sapien
taatccactcgtatagccagagact

SEQ ID NO: 4620268 - DNA, 25 bp, Homo sapien
tccactcgtatagccagagacttca

SEQ ID NO: 4620269 - DNA, 25 bp, Homo sapien
cagattaatccactcgtatagccag

SEQ ID NO: 4620270 - DNA, 25 bp, Homo sapien
gaagaaacagattaatccactcgta

SEQ ID NO: 4620271 - DNA, 25 bp, Homo sapien
gtggaagaaaaattgcacggtgcca

SEQ ID NO: 4620272 - DNA, 25 bp, Homo sapien
ggaagaaaaattgcacggtgccact

SEQ ID NO: 4620273 - DNA, 25 bp, Homo sapien
aaattgcacggtgccactctgaaag

SEQ ID NO: 4620274 - DNA, 25 bp, Homo sapien
agaaaaattgcacggtgccactctg

SEQ ID NO: 4620275 - DNA, 25 bp, Homo sapien
ctcgattcatgtatgcaagccaggc

SEQ ID NO: 4620276 - DNA, 25 bp, Homo sapien
catgataagctcgattcatgtatgc

SEQ ID NO: 4620277 - DNA, 25 bp, Homo sapien
ctgtaaaatggcatgataagctcga

SEQ ID NO: 4620278 - DNA, 25 bp, Homo sapien
taaaatggcatgataagctcgattc

SEQ ID NO: 4620279 - DNA, 25 bp, Homo sapien
agagagatccagcagcattcaactc

SEQ ID NO: 4620280 - DNA, 25 bp, Homo sapien
gagagatccagcagcattcaactca

SEQ ID NO: 4620281 - DNA, 25 bp, Homo sapien
gagatccagcagcattcaactcagt

SEQ ID NO: 4620282 - DNA, 25 bp, Homo sapien
gatccagcagcattcaactcagtca

SEQ ID NO: 4620283 - DNA, 25 bp, Homo sapien
tcaggcactctgagatgtaacggac

SEQ ID NO: 4620284 - DNA, 25 bp, Homo sapien
gagatgtaacggacactgtattcac

SEQ ID NO: 4620285 - DNA, 25 bp, Homo sapien
cactctgagatgtaacggacactgt

SEQ ID NO: 4620286 - DNA, 25 bp, Homo sapien
gatgtaacggacactgtattcacat

SEQ ID NO: 4620287 - DNA, 25 bp, Homo sapien
tttttttgtactgcacctcctcagg

SEQ ID NO: 4620288 - DNA, 25 bp, Homo sapien
tttgtactgcacctcctcaggttct

SEQ ID NO: 4620289 - DNA, 25 bp, Homo sapien
tttttgtactgcacctcctcaggtt

SEQ ID NO: 4620290 - DNA, 25 bp, Homo sapien
gctttttttgtactgcacctcctca

SEQ ID NO: 4620291 - DNA, 25 bp, Homo sapien
ctcatcagtcagcatgtctctaacc

SEQ ID NO: 4620292 - DNA, 25 bp, Homo sapien
tttgcagctgccttggtgatctcat

SEQ ID NO: 4620293 - DNA, 25 bp, Homo sapien
gtgatctcatcagtcagcatgtctc

SEQ ID NO: 4620294 - DNA, 25 bp, Homo sapien
gatctcatcagtcagcatgtctcta

SEQ ID NO: 4620295 - DNA, 25 bp, Homo sapien
cagttgacaaaggaacctgaagaga

SEQ ID NO: 4620296 - DNA, 25 bp, Homo sapien
attgttcaagcaagtttcgggtatt

SEQ ID NO: 4620297 - DNA, 25 bp, Homo sapien
gagattgttcaagcaagtttcgggt

SEQ ID NO: 4620298 - DNA, 25 bp, Homo sapien
agttgacaaaggaacctgaagagat

SEQ ID NO: 4620299 - DNA, 25 bp, Homo sapien
gagaaggtaataccatgagaacatg

SEQ ID NO: 4620300 - DNA, 25 bp, Homo sapien
gccactttgtaagttttgatgagaa

SEQ ID NO: 4620301 - DNA, 25 bp, Homo sapien
ctttaggtattagtcacgaagtgat

SEQ ID NO: 4620302 - DNA, 25 bp, Homo sapien
aattgcaatatctactagacacgag

SEQ ID NO: 4620303 - DNA, 25 bp, Homo sapien
tcaatgtagtatgggtcattatgcc

SEQ ID NO: 4620304 - DNA, 25 bp, Homo sapien
caacagagaactttggtattaacca

SEQ ID NO: 4620305 - DNA, 25 bp, Homo sapien
aaagagctaatataggagggcaggt

SEQ ID NO: 4620306 - DNA, 25 bp, Homo sapien
tttgttgtgttaggccaacagtttc

SEQ ID NO: 4620307 - DNA, 25 bp, Homo sapien
tctagatacgacgacagcaaggctg

SEQ ID NO: 4620308 - DNA, 25 bp, Homo sapien
gcgcattgcctttcactaccggact

SEQ ID NO: 4620309 - DNA, 25 bp, Homo sapien
tgcttagagctaacagcgcattgcc

SEQ ID NO: 4620310 - DNA, 25 bp, Homo sapien
gaggctggcttcatgtctagatacg

SEQ ID NO: 4620311 - DNA, 25 bp, Homo sapien
cttggtgccataatcacagaatcta

SEQ ID NO: 4620312 - DNA, 25 bp, Homo sapien
gacataatcaaagccaattgtttaa

SEQ ID NO: 4620313 - DNA, 25 bp, Homo sapien
tcaaagccaattgtttaaatcaccc

SEQ ID NO: 4620314 - DNA, 25 bp, Homo sapien
tctaaccttgtaagcccagggccag

SEQ ID NO: 4620315 - DNA, 25 bp, Homo sapien
ccctctgggttggtaatggctatcc

SEQ ID NO: 4620316 - DNA, 25 bp, Homo sapien
ggtaatggctatccacaatgaccaa

SEQ ID NO: 4620317 - DNA, 25 bp, Homo sapien
caagagtgtatcaagtaccatggaa

SEQ ID NO: 4620318 - DNA, 25 bp, Homo sapien
aaaccaggagagaagttgccctctg

SEQ ID NO: 4620319 - DNA, 25 bp, Homo sapien
gaaacatccctaaagcaaggcccat

SEQ ID NO: 4620320 - DNA, 25 bp, Homo sapien
gatttgcacggcttgagactcatca

SEQ ID NO: 4620321 - DNA, 25 bp, Homo sapien
agaacgggcaatggcactagctgtg

SEQ ID NO: 4620322 - DNA, 25 bp, Homo sapien
caagagataatgaaaactggcacaa

SEQ ID NO: 4620323 - DNA, 25 bp, Homo sapien
gggcatccaacgacttcatcagaag

SEQ ID NO: 4620324 - DNA, 25 bp, Homo sapien
gaagaaggttcatctcttggccaga

SEQ ID NO: 4620325 - DNA, 25 bp, Homo sapien
ttgtattcaagactagtgtcaaagc

SEQ ID NO: 4620326 - DNA, 25 bp, Homo sapien
gcagcaattttccagggcatccaac

SEQ ID NO: 4620327 - DNA, 25 bp, Homo sapien
acctgtgagagtggaaataggaaca

SEQ ID NO: 4620328 - DNA, 25 bp, Homo sapien
aagtacctgtgagagtggaaatagg

SEQ ID NO: 4620329 - DNA, 25 bp, Homo sapien
ctaagtacctgtgagagtggaaata

SEQ ID NO: 4620330 - DNA, 25 bp, Homo sapien
gtgagagtggaaataggaacaacat

SEQ ID NO: 4620331 - DNA, 25 bp, Homo sapien
ccatttctacttcttaggcacatga

SEQ ID NO: 4620332 - DNA, 25 bp, Homo sapien
taaaaagattaagtcggctgggcag

SEQ ID NO: 4620333 - DNA, 25 bp, Homo sapien
cataaatcatcggtcaaaggccctc

SEQ ID NO: 4620334 - DNA, 25 bp, Homo sapien
gctaagcaggttggtaatccctgat

SEQ ID NO: 4620335 - DNA, 25 bp, Homo sapien
tatctgctgccgaagaagacattcc

SEQ ID NO: 4620336 - DNA, 25 bp, Homo sapien
atctgctgccgaagaagacattcca

SEQ ID NO: 4620337 - DNA, 25 bp, Homo sapien
cgtgaacgcgggactgcatttggct

SEQ ID NO: 4620338 - DNA, 25 bp, Homo sapien
gacagcttccggagcaatgctgcta

SEQ ID NO: 4620339 - DNA, 25 bp, Homo sapien
ctgaaacgttctgctctggctcccg

SEQ ID NO: 4620340 - DNA, 25 bp, Homo sapien
tgtcatctacgtgcgcagacagctt

SEQ ID NO: 4620341 - DNA, 25 bp, Homo sapien
actgaacgctgatgtacatacacag

SEQ ID NO: 4620342 - DNA, 25 bp, Homo sapien
tgtagcctcaataattccagcactg

SEQ ID NO: 4620343 - DNA, 25 bp, Homo sapien
ggctattctccactaacagtcgaag

SEQ ID NO: 4620344 - DNA, 25 bp, Homo sapien
ttgttcataacatcctcagcctctg

SEQ ID NO: 4620345 - DNA, 25 bp, Homo sapien
agggagtagtttgctgcccaagtct

SEQ ID NO: 4620346 - DNA, 25 bp, Homo sapien
gtccacacacagacaatccatgaac

SEQ ID NO: 4620347 - DNA, 25 bp, Homo sapien
acacacagacaatccatgaactatg

SEQ ID NO: 4620348 - DNA, 25 bp, Homo sapien
gggagtagtttgctgcccaagtctt

SEQ ID NO: 4620349 - DNA, 25 bp, Homo sapien
gctgccagacaaagcattgtgggag

SEQ ID NO: 4620350 - DNA, 25 bp, Homo sapien
ccagacaaagcattgtgggagtgcc

SEQ ID NO: 4620351 - DNA, 25 bp, Homo sapien
gccagacaaagcattgtgggagtgc

SEQ ID NO: 4620352 - DNA, 25 bp, Homo sapien
tgccagacaaagcattgtgggagtg

SEQ ID NO: 4620353 - DNA, 25 bp, Homo sapien
atgacttcattaagtctgccttgaa

SEQ ID NO: 4620354 - DNA, 25 bp, Homo sapien
cttgaggatagagtagatagatgaa

SEQ ID NO: 4620355 - DNA, 25 bp, Homo sapien
gaagatgtccaagaagccagactgc

SEQ ID NO: 4620356 - DNA, 25 bp, Homo sapien
cagaggctctactttgacttgagga

SEQ ID NO: 4620357 - DNA, 25 bp, Homo sapien
cagactgcatttgactggagaccaa

SEQ ID NO: 4620358 - DNA, 25 bp, Homo sapien
ctctggcctgggtccaagatagcca

SEQ ID NO: 4620359 - DNA, 25 bp, Homo sapien
tctggcctgggtccaagatagccag

SEQ ID NO: 4620360 - DNA, 25 bp, Homo sapien
tggcctgggtccaagatagccagtg

SEQ ID NO: 4620361 - DNA, 25 bp, Homo sapien
cctgggtccaagatagccagtgggt

SEQ ID NO: 4620362 - DNA, 25 bp, Homo sapien
ggcaagtagctatagtcagtaggaa

SEQ ID NO: 4620363 - DNA, 25 bp, Homo sapien
ccaatagctgctccaataaaactgc

SEQ ID NO: 4620364 - DNA, 25 bp, Homo sapien
gaagccaatagctgctccaataaaa

SEQ ID NO: 4620365 - DNA, 25 bp, Homo sapien
aaaactgctttcaggcaagtagcta

SEQ ID NO: 4620366 - DNA, 25 bp, Homo sapien
agagagaagtgcagcccagttcaca

SEQ ID NO: 4620367 - DNA, 25 bp, Homo sapien
cagttgctatgggtttcatcactac

SEQ ID NO: 4620368 - DNA, 25 bp, Homo sapien
gaggatattggtagctttctccaac

SEQ ID NO: 4620369 - DNA, 25 bp, Homo sapien
caaaatttagcctcataagtggaga

SEQ ID NO: 4620370 - DNA, 25 bp, Homo sapien
acccacaagcccaatagtgcagctg

SEQ ID NO: 4620371 - DNA, 25 bp, Homo sapien
agcccaatagtgcagctgcattctg

SEQ ID NO: 4620372 - DNA, 25 bp, Homo sapien
ccataatttcaaggcacagttgctg

SEQ ID NO: 4620373 - DNA, 25 bp, Homo sapien
gtgcctgggtcaccataatttcaag

SEQ ID NO: 4620374 - DNA, 25 bp, Homo sapien
cctgggctatggagcgagaaactgt

SEQ ID NO: 4620375 - DNA, 25 bp, Homo sapien
tgcactattctcaaacaattaaagc

SEQ ID NO: 4620376 - DNA, 25 bp, Homo sapien
aacaaggctgaatagggacaaaggc

SEQ ID NO: 4620377 - DNA, 25 bp, Homo sapien
caattaaagcctcctaggacagaag

SEQ ID NO: 4620378 - DNA, 25 bp, Homo sapien
ttcacggtccaatgggccaccaatg

SEQ ID NO: 4620379 - DNA, 25 bp, Homo sapien
gccaccaatgcatgtaattttggct

SEQ ID NO: 4620380 - DNA, 25 bp, Homo sapien
tgtttatatgggatctgccaaccca

SEQ ID NO: 4620381 - DNA, 25 bp, Homo sapien
ccagggtgaatcatgtgtttatatg

SEQ ID NO: 4620382 - DNA, 25 bp, Homo sapien
tcccagtagcttcagagagcagact

SEQ ID NO: 4620383 - DNA, 25 bp, Homo sapien
catggcctggctcagaccgtgtaaa

SEQ ID NO: 4620384 - DNA, 25 bp, Homo sapien
tgggcatagctcaggacttccaagt

SEQ ID NO: 4620385 - DNA, 25 bp, Homo sapien
accgtgtaaagcacttgggcatagc

SEQ ID NO: 4620386 - DNA, 25 bp, Homo sapien
cataaattgtcaggaatgtaaatat

SEQ ID NO: 4620387 - DNA, 25 bp, Homo sapien
ccaaacataaattgtcaggaatgta

SEQ ID NO: 4620388 - DNA, 25 bp, Homo sapien
aatatcccaaacataaattgtcagg

SEQ ID NO: 4620389 - DNA, 25 bp, Homo sapien
acatacacctccccactttgccaag

SEQ ID NO: 4620390 - DNA, 25 bp, Homo sapien
gtaaagcgtaaggacttctgagcct

SEQ ID NO: 4620391 - DNA, 25 bp, Homo sapien
acttctgagccttctcgtcttctac

SEQ ID NO: 4620392 - DNA, 25 bp, Homo sapien
ggattctccaggtgtaaagcgtaag

SEQ ID NO: 4620393 - DNA, 25 bp, Homo sapien
attctccaggtgtaaagcgtaagga

SEQ ID NO: 4620394 - DNA, 25 bp, Homo sapien
gctgatatacagctctagatccttt

SEQ ID NO: 4620395 - DNA, 25 bp, Homo sapien
tatgctgatatacagctctagatcc

SEQ ID NO: 4620396 - DNA, 25 bp, Homo sapien
ttgctatgctgatatacagctctag

SEQ ID NO: 4620397 - DNA, 25 bp, Homo sapien
tgatatacagctctagatcctttct

SEQ ID NO: 4620398 - DNA, 25 bp, Homo sapien
ctgggcgatccgattggcatcatca

SEQ ID NO: 4620399 - DNA, 25 bp, Homo sapien
tgggcgatccgattggcatcatcat

SEQ ID NO: 4620400 - DNA, 25 bp, Homo sapien
cctgggcgatccgattggcatcatc

SEQ ID NO: 4620401 - DNA, 25 bp, Homo sapien
cgaagtccaccagctataagggagc

SEQ ID NO: 4620402 - DNA, 25 bp, Homo sapien
cattagtaggctgaacaagaggctc

SEQ ID NO: 4620403 - DNA, 25 bp, Homo sapien
tctgattgaataggcaaacctgcca

SEQ ID NO: 4620404 - DNA, 25 bp, Homo sapien
gttaagcaccaaccacattagtagg

SEQ ID NO: 4620405 - DNA, 25 bp, Homo sapien
taacatgagcatacaatagagggtt

SEQ ID NO: 4620406 - DNA, 25 bp, Homo sapien
aggcatcactccaagcacttaacat

SEQ ID NO: 4620407 - DNA, 25 bp, Homo sapien
ccataaatttgttcaggagttagtc

SEQ ID NO: 4620408 - DNA, 25 bp, Homo sapien
tgcagcacatgacccatctgcctgt

SEQ ID NO: 4620409 - DNA, 25 bp, Homo sapien
taagtacagtttgacaaaggcagct

SEQ ID NO: 4620410 - DNA, 25 bp, Homo sapien
ggtgctgcacagcaacgctcagcat

SEQ ID NO: 4620411 - DNA, 25 bp, Homo sapien
cttgagagactaagtacagtttgac

SEQ ID NO: 4620412 - DNA, 25 bp, Homo sapien
tcagcatatcggtcaggttcaccaa

SEQ ID NO: 4620413 - DNA, 25 bp, Homo sapien
cacaatccgtgcctggtataagctg

SEQ ID NO: 4620414 - DNA, 25 bp, Homo sapien
caatccgtgcctggtataagctgtg

SEQ ID NO: 4620415 - DNA, 25 bp, Homo sapien
acaatccgtgcctggtataagctgt

SEQ ID NO: 4620416 - DNA, 25 bp, Homo sapien
ccctgaccactagtgataaaatgca

SEQ ID NO: 4620417 - DNA, 25 bp, Homo sapien
tctccctgaccactagtgataaaat

SEQ ID NO: 4620418 - DNA, 25 bp, Homo sapien
cattattcacatcagataacagtat

SEQ ID NO: 4620419 - DNA, 25 bp, Homo sapien
attaaacacactaggagaaatctgg

SEQ ID NO: 4620420 - DNA, 25 bp, Homo sapien
tgcaatacccgagacttgtgactgc

SEQ ID NO: 4620421 - DNA, 25 bp, Homo sapien
actaaagcagaacacctggtgagga

SEQ ID NO: 4620422 - DNA, 25 bp, Homo sapien
tcatgttcccttgcaatacccgaga

SEQ ID NO: 4620423 - DNA, 25 bp, Homo sapien
gaggattccattaaccagtttcatg

SEQ ID NO: 4620424 - DNA, 25 bp, Homo sapien
tctaatataacccatcagttccaag

SEQ ID NO: 4620425 - DNA, 25 bp, Homo sapien
taatataacccatcagttccaagag

SEQ ID NO: 4620426 - DNA, 25 bp, Homo sapien
atataacccatcagttccaagagcc

SEQ ID NO: 4620427 - DNA, 25 bp, Homo sapien
atttctaatataacccatcagttcc

SEQ ID NO: 4620428 - DNA, 25 bp, Homo sapien
tgtcaagagccgtattgtgaaagga

SEQ ID NO: 4620429 - DNA, 25 bp, Homo sapien
tcaagagccgtattgtgaaaggatg

SEQ ID NO: 4620430 - DNA, 25 bp, Homo sapien
ttgtcaagagccgtattgtgaaagg

SEQ ID NO: 4620431 - DNA, 25 bp, Homo sapien
agagccgtattgtgaaaggatgttg

SEQ ID NO: 4620432 - DNA, 25 bp, Homo sapien
aaagctgcaaacagcaacgtgctcc

SEQ ID NO: 4620433 - DNA, 25 bp, Homo sapien
ttatgggatcaatcccagctacaca

SEQ ID NO: 4620434 - DNA, 25 bp, Homo sapien
cagagaatcattaagtgtgtctaaa

SEQ ID NO: 4620435 - DNA, 25 bp, Homo sapien
taccagttttcttgcggcatcagag

SEQ ID NO: 4620436 - DNA, 25 bp, Homo sapien
tccctttatgtgaaggcagaagacc

SEQ ID NO: 4620437 - DNA, 25 bp, Homo sapien
caattcctaatcacatcaagatcca

SEQ ID NO: 4620438 - DNA, 25 bp, Homo sapien
gaaacatcgtttattcaattcctaa

SEQ ID NO: 4620439 - DNA, 25 bp, Homo sapien
tattatcgctctaacatttcaggag

SEQ ID NO: 4620440 - DNA, 25 bp, Homo sapien
gtgaccctgtgcattggactcctgc

SEQ ID NO: 4620441 - DNA, 25 bp, Homo sapien
caaggaagcttggtactggcccagc

SEQ ID NO: 4620442 - DNA, 25 bp, Homo sapien
aaccactgcggttgcaaatatcagc

SEQ ID NO: 4620443 - DNA, 25 bp, Homo sapien
cctgcagagtgaccctgtgcattgg

SEQ ID NO: 4620444 - DNA, 25 bp, Homo sapien
tgggtctgttccttccatggctctt

SEQ ID NO: 4620445 - DNA, 25 bp, Homo sapien
cttctgggtctgttccttccatggc

SEQ ID NO: 4620446 - DNA, 25 bp, Homo sapien
ggctctttctgcagcagcagagcca

SEQ ID NO: 4620447 - DNA, 25 bp, Homo sapien
tctgggtctgttccttccatggctc

SEQ ID NO: 4620448 - DNA, 25 bp, Homo sapien
ctttcaaaagatccctggactgtgc

SEQ ID NO: 4620449 - DNA, 25 bp, Homo sapien
ctttagggctttccatgatgctgaa

SEQ ID NO: 4620450 - DNA, 25 bp, Homo sapien
tgatgctgaatagccagtcaatgaa

SEQ ID NO: 4620451 - DNA, 25 bp, Homo sapien
ctggactgtgctgagagggcttctt

SEQ ID NO: 4620452 - DNA, 25 bp, Homo sapien
caatcagttaatgggaaattctgca

SEQ ID NO: 4620453 - DNA, 25 bp, Homo sapien
gttaggttcatgtactcaatggagc

SEQ ID NO: 4620454 - DNA, 25 bp, Homo sapien
tatgaaggaatgtaggtaagccaga

SEQ ID NO: 4620455 - DNA, 25 bp, Homo sapien
taagccagagttacacaattattgt

SEQ ID NO: 4620456 - DNA, 25 bp, Homo sapien
catatgctctggtccatacagcttt

SEQ ID NO: 4620457 - DNA, 25 bp, Homo sapien
caaccatatgctctggtccatacag

SEQ ID NO: 4620458 - DNA, 25 bp, Homo sapien
agaactctcaaggacagcagggtgg

SEQ ID NO: 4620459 - DNA, 25 bp, Homo sapien
aaccatatgctctggtccatacagc

SEQ ID NO: 4620460 - DNA, 25 bp, Homo sapien
gcaataccaggcatgaattctgaaa

SEQ ID NO: 4620461 - DNA, 25 bp, Homo sapien
gaggcatgtgtcaagctgtcagtga

SEQ ID NO: 4620462 - DNA, 25 bp, Homo sapien
tgtttcagtctcaactggcccgggt

SEQ ID NO: 4620463 - DNA, 25 bp, Homo sapien
tggcccgggtactaaagcaatgcac

SEQ ID NO: 4620464 - DNA, 25 bp, Homo sapien
tgtatctgtgggcagacacctttct

SEQ ID NO: 4620465 - DNA, 25 bp, Homo sapien
ctgtatctgtgggcagacacctttc

SEQ ID NO: 4620466 - DNA, 25 bp, Homo sapien
cattcgtaaacgaagatgatgctgt

SEQ ID NO: 4620467 - DNA, 25 bp, Homo sapien
caggatcacagtaatgtatttcccc

SEQ ID NO: 4620468 - DNA, 25 bp, Homo sapien
tacagaagcatgttacctcgtccag

SEQ ID NO: 4620469 - DNA, 25 bp, Homo sapien
tatgtttgacaagaatcagatgagc

SEQ ID NO: 4620470 - DNA, 25 bp, Homo sapien
tcaaggcatcagctaatgcagtttc

SEQ ID NO: 4620471 - DNA, 25 bp, Homo sapien
catagcattctgtacctggtcctac

SEQ ID NO: 4620472 - DNA, 25 bp, Homo sapien
taatagaacaccataaaccgaatgg

SEQ ID NO: 4620473 - DNA, 25 bp, Homo sapien
tgggaattccgctcaggatcaaggc

SEQ ID NO: 4620474 - DNA, 25 bp, Homo sapien
tgtattctttttcacttccaagttc

SEQ ID NO: 4620475 - DNA, 25 bp, Homo sapien
ttcacttccaagttcccaaatagat

SEQ ID NO: 4620476 - DNA, 25 bp, Homo sapien
atgtattctttttcacttccaagtt

SEQ ID NO: 4620477 - DNA, 25 bp, Homo sapien
tttcacttccaagttcccaaataga

SEQ ID NO: 4620478 - DNA, 25 bp, Homo sapien
cataacaggctatgtttttcacaca

SEQ ID NO: 4620479 - DNA, 25 bp, Homo sapien
tacattgtatgaagtctgattattt

SEQ ID NO: 4620480 - DNA, 25 bp, Homo sapien
taatgagaaataggagattagctgc

SEQ ID NO: 4620481 - DNA, 25 bp, Homo sapien
tatatattctccataccctgcttca

SEQ ID NO: 4620482 - DNA, 25 bp, Homo sapien
aaagggcaaaaccatagcgtagcta

SEQ ID NO: 4620483 - DNA, 25 bp, Homo sapien
tatggacttccaatttttgaaataa

SEQ ID NO: 4620484 - DNA, 25 bp, Homo sapien
tgaaataattacacgacaataaaaa

SEQ ID NO: 4620485 - DNA, 25 bp, Homo sapien
tctccaatcccctcctccgaaatga

SEQ ID NO: 4620486 - DNA, 25 bp, Homo sapien
catttcagacgtgtgtatcataagg

SEQ ID NO: 4620487 - DNA, 25 bp, Homo sapien
tattctacttgcagggtcccataag

SEQ ID NO: 4620488 - DNA, 25 bp, Homo sapien
tgggaaaagtcatgctgtgctcatc

SEQ ID NO: 4620489 - DNA, 25 bp, Homo sapien
tcttcatgttccatccgcacgtggg

SEQ ID NO: 4620490 - DNA, 25 bp, Homo sapien
ttcctggaccgcgctggaagccctg

SEQ ID NO: 4620491 - DNA, 25 bp, Homo sapien
ctccttcctggaccgcgctggaagc

SEQ ID NO: 4620492 - DNA, 25 bp, Homo sapien
ccgcccttccgcgcccagccgcggg

SEQ ID NO: 4620493 - DNA, 25 bp, Homo sapien
tccttcctggaccgcgctggaagcc

SEQ ID NO: 4620494 - DNA, 25 bp, Homo sapien
aggccccggaaatcgcccagatgca

SEQ ID NO: 4620495 - DNA, 25 bp, Homo sapien
atcgcccagatgcattaatttccag

SEQ ID NO: 4620496 - DNA, 25 bp, Homo sapien
cagcgagttcggaggccccggaaat

SEQ ID NO: 4620497 - DNA, 25 bp, Homo sapien
gggatgggcttcagcgagttcggag

SEQ ID NO: 4620498 - DNA, 25 bp, Homo sapien
cggtgggcattgagcagagcccacc

SEQ ID NO: 4620499 - DNA, 25 bp, Homo sapien
agagcccaccctggaatccactcat

SEQ ID NO: 4620500 - DNA, 25 bp, Homo sapien
gggcattgagcagagcccaccctgg

SEQ ID NO: 4620501 - DNA, 25 bp, Homo sapien
ttgagcagagcccaccctggaatcc

SEQ ID NO: 4620502 - DNA, 25 bp, Homo sapien
aagatgggctggatcttattagcaa

SEQ ID NO: 4620503 - DNA, 25 bp, Homo sapien
ttgcaagtgccttcttagatgtttc

SEQ ID NO: 4620504 - DNA, 25 bp, Homo sapien
ggctggatcttattagcaaagcagg

SEQ ID NO: 4620505 - DNA, 25 bp, Homo sapien
ctggatcttattagcaaagcaggag

SEQ ID NO: 4620506 - DNA, 25 bp, Homo sapien
ggtagcaccaaattcagggcacaat

SEQ ID NO: 4620507 - DNA, 25 bp, Homo sapien
ttagggtagcaccaaattcagggca

SEQ ID NO: 4620508 - DNA, 25 bp, Homo sapien
gaagtttccgaatgaactgccaggg

SEQ ID NO: 4620509 - DNA, 25 bp, Homo sapien
ggcagtgcctgcacagaagtttccg

SEQ ID NO: 4620510 - DNA, 25 bp, Homo sapien
cctagccagagacagcgaaatcagt

SEQ ID NO: 4620511 - DNA, 25 bp, Homo sapien
aatccttatctagaaaaccagccca

SEQ ID NO: 4620512 - DNA, 25 bp, Homo sapien
attcctatctgggttcagccttgac

SEQ ID NO: 4620513 - DNA, 25 bp, Homo sapien
cagttttctatctgcctaataggca

SEQ ID NO: 4620514 - DNA, 25 bp, Homo sapien
ggtgaggatacaaaggttcctgtac

SEQ ID NO: 4620515 - DNA, 25 bp, Homo sapien
aggatacaaaggttcctgtactcgg

SEQ ID NO: 4620516 - DNA, 25 bp, Homo sapien
ttgtattgtgctgggtgggggtgag

SEQ ID NO: 4620517 - DNA, 25 bp, Homo sapien
gatacaaaggttcctgtactcggaa

SEQ ID NO: 4620518 - DNA, 25 bp, Homo sapien
accagcagtgggctcgcatggatca

SEQ ID NO: 4620519 - DNA, 25 bp, Homo sapien
cagtgggctcgcatggatcatgaca

SEQ ID NO: 4620520 - DNA, 25 bp, Homo sapien
tgggctcgcatggatcatgacattc

SEQ ID NO: 4620521 - DNA, 25 bp, Homo sapien
cagcagtgggctcgcatggatcatg

SEQ ID NO: 4620522 - DNA, 25 bp, Homo sapien
ttctgagaagggattatggctatca

SEQ ID NO: 4620523 - DNA, 25 bp, Homo sapien
aaggttctgagaagggattatggct

SEQ ID NO: 4620524 - DNA, 25 bp, Homo sapien
ggctatcaagctgtggtaacttcca

SEQ ID NO: 4620525 - DNA, 25 bp, Homo sapien
ttatggctatcaagctgtggtaact

SEQ ID NO: 4620526 - DNA, 25 bp, Homo sapien
ggccaagctctatttctgatgcatg

SEQ ID NO: 4620527 - DNA, 25 bp, Homo sapien
gatgcatgagaggtctgccaagcac

SEQ ID NO: 4620528 - DNA, 25 bp, Homo sapien
tttggctgtgggaaacacagagaga

SEQ ID NO: 4620529 - DNA, 25 bp, Homo sapien
tggatttcttcttgacgggtttggc

SEQ ID NO: 4620530 - DNA, 25 bp, Homo sapien
tctagctcttgaacagtaagaaggc

SEQ ID NO: 4620531 - DNA, 25 bp, Homo sapien
taagaaggcactggtgaacatctgg

SEQ ID NO: 4620532 - DNA, 25 bp, Homo sapien
ggaactgtcttatctagctcttgaa

SEQ ID NO: 4620533 - DNA, 25 bp, Homo sapien
agctggattaggagatggaactgtc

SEQ ID NO: 4620534 - DNA, 25 bp, Homo sapien
gcccttctgtagccgaactcctctt

SEQ ID NO: 4620535 - DNA, 25 bp, Homo sapien
ccttctgtagccgaactcctctttt

SEQ ID NO: 4620536 - DNA, 25 bp, Homo sapien
ttctgtagccgaactcctctttttc

SEQ ID NO: 4620537 - DNA, 25 bp, Homo sapien
cttctgtagccgaactcctcttttt

SEQ ID NO: 4620538 - DNA, 25 bp, Homo sapien
caggaatgtcctgtccagttttctg

SEQ ID NO: 4620539 - DNA, 25 bp, Homo sapien
tctgcattgcggacgccacatagtt

SEQ ID NO: 4620540 - DNA, 25 bp, Homo sapien
tctgttgctctgcattgcggacgcc

SEQ ID NO: 4620541 - DNA, 25 bp, Homo sapien
tcatacagaattccaggaatgtcct

SEQ ID NO: 4620542 - DNA, 25 bp, Homo sapien
catagtatctaggccagatagcacc

SEQ ID NO: 4620543 - DNA, 25 bp, Homo sapien
aaggcccttgtgatgttagcaccca

SEQ ID NO: 4620544 - DNA, 25 bp, Homo sapien
tgtttgaaacccaaggcccttgtga

SEQ ID NO: 4620545 - DNA, 25 bp, Homo sapien
ccttgtgatgttagcacccaaggga

SEQ ID NO: 4620546 - DNA, 25 bp, Homo sapien
tttctccaaatgcaatctgaagcta

SEQ ID NO: 4620547 - DNA, 25 bp, Homo sapien
agcccagcatggaaagaagcagctt

SEQ ID NO: 4620548 - DNA, 25 bp, Homo sapien
gcttgcggttataaagcccagcatg

SEQ ID NO: 4620549 - DNA, 25 bp, Homo sapien
tagctgttggcttgcggttataaag

SEQ ID NO: 4620550 - DNA, 25 bp, Homo sapien
gcccagcatggaaagaagcagcttc

SEQ ID NO: 4620551 - DNA, 25 bp, Homo sapien
ttttgcaccacctggttcatcgtac

SEQ ID NO: 4620552 - DNA, 25 bp, Homo sapien
tgttatttttgcaccacctggttca

SEQ ID NO: 4620553 - DNA, 25 bp, Homo sapien
gttatttttgcaccacctggttcat

SEQ ID NO: 4620554 - DNA, 25 bp, Homo sapien
tgcaccacctggttcatcgtacagc

SEQ ID NO: 4620555 - DNA, 25 bp, Homo sapien
tctctacctttcgaggagctaaatg

SEQ ID NO: 4620556 - DNA, 25 bp, Homo sapien
tcgacaattcacatttagtttcctt

SEQ ID NO: 4620557 - DNA, 25 bp, Homo sapien
gataagcagcacttgcctcaggcaa

SEQ ID NO: 4620558 - DNA, 25 bp, Homo sapien
gggaatacccgctccattcttcaat

SEQ ID NO: 4620559 - DNA, 25 bp, Homo sapien
acaccagctgtctacaatggcacac

SEQ ID NO: 4620560 - DNA, 25 bp, Homo sapien
ggatgtagacagaagcactgctacc

SEQ ID NO: 4620561 - DNA, 25 bp, Homo sapien
catttcgcagcaaatatcccaggat

SEQ ID NO: 4620562 - DNA, 25 bp, Homo sapien
tgactgagccaatcatttcgcagca

SEQ ID NO: 4620563 - DNA, 25 bp, Homo sapien
aatgaattggttagttttccatttg

SEQ ID NO: 4620564 - DNA, 25 bp, Homo sapien
tgaattggttagttttccatttgct

SEQ ID NO: 4620565 - DNA, 25 bp, Homo sapien
atctgcgttgtatgattttattctc

SEQ ID NO: 4620566 - DNA, 25 bp, Homo sapien
ttatctgcgttgtatgattttattc

SEQ ID NO: 4620567 - DNA, 25 bp, Homo sapien
tatccaaagcaaaagtactcacagt

SEQ ID NO: 4620568 - DNA, 25 bp, Homo sapien
tctggagcaccgtacactaactgaa

SEQ ID NO: 4620569 - DNA, 25 bp, Homo sapien
gacacatgctgcaagaggattctgg

SEQ ID NO: 4620570 - DNA, 25 bp, Homo sapien
aacccaaatgcctatggacggatga

SEQ ID NO: 4620571 - DNA, 25 bp, Homo sapien
cctcaatttccagggcagactcttg

SEQ ID NO: 4620572 - DNA, 25 bp, Homo sapien
catcctctataccaagcaggtctcc

SEQ ID NO: 4620573 - DNA, 25 bp, Homo sapien
cagtgtagggccctcaatttccagg

SEQ ID NO: 4620574 - DNA, 25 bp, Homo sapien
cagtctggagtttgtccaggaaggc

SEQ ID NO: 4620575 - DNA, 25 bp, Homo sapien
gacttcctgaggacatgttgagtac

SEQ ID NO: 4620576 - DNA, 25 bp, Homo sapien
gacatgttgagtactctctggagac

SEQ ID NO: 4620577 - DNA, 25 bp, Homo sapien
catgtgctccatgtaataggacttc

SEQ ID NO: 4620578 - DNA, 25 bp, Homo sapien
gatcttcaggattgcatgtgctcca

SEQ ID NO: 4620579 - DNA, 25 bp, Homo sapien
gccatgcatacaagcaatgtcttca

SEQ ID NO: 4620580 - DNA, 25 bp, Homo sapien
cctagggtccaaggttaagccatat

SEQ ID NO: 4620581 - DNA, 25 bp, Homo sapien
tatcccagctcagtaaagccaggag

SEQ ID NO: 4620582 - DNA, 25 bp, Homo sapien
tgtcatcctcttaaggtcataggga

SEQ ID NO: 4620583 - DNA, 25 bp, Homo sapien
ttttgacagattctactgctatgcc

SEQ ID NO: 4620584 - DNA, 25 bp, Homo sapien
tttcttcactaaacctccaggagga

SEQ ID NO: 4620585 - DNA, 25 bp, Homo sapien
tagggtcacattccagagctgtctg

SEQ ID NO: 4620586 - DNA, 25 bp, Homo sapien
taaggtagtaggataagctcaagcc

SEQ ID NO: 4620587 - DNA, 25 bp, Homo sapien
tcccaatacgatctcaagtgaacaa

SEQ ID NO: 4620588 - DNA, 25 bp, Homo sapien
caaatttgctgactggatcaactac

SEQ ID NO: 4620589 - DNA, 25 bp, Homo sapien
ttatggaaacccctgtgcacatttc

SEQ ID NO: 4620590 - DNA, 25 bp, Homo sapien
tgtgaatgccacatagaacaattgt

SEQ ID NO: 4620591 - DNA, 25 bp, Homo sapien
ctttttgcagctgtttcatttataa

SEQ ID NO: 4620592 - DNA, 25 bp, Homo sapien
tttgcagctgtttcatttataatat

SEQ ID NO: 4620593 - DNA, 25 bp, Homo sapien
gctgtttcatttataatatttagat

SEQ ID NO: 4620594 - DNA, 25 bp, Homo sapien
gcagctgtttcatttataatattta

SEQ ID NO: 4620595 - DNA, 25 bp, Homo sapien
ggaatcgtgaaatccttctcttcat

SEQ ID NO: 4620596 - DNA, 25 bp, Homo sapien
catcaacaaacttgcaagaaggact

SEQ ID NO: 4620597 - DNA, 25 bp, Homo sapien
atacagtgactgtgcttgggaggtt

SEQ ID NO: 4620598 - DNA, 25 bp, Homo sapien
gcaagaaggactgagaagtaaggat

SEQ ID NO: 4620599 - DNA, 25 bp, Homo sapien
tgcagctggaatgcctggagtcttg

SEQ ID NO: 4620600 - DNA, 25 bp, Homo sapien
ctgcagctggaatgcctggagtctt

SEQ ID NO: 4620601 - DNA, 25 bp, Homo sapien
ttggcacttctgggccaaatgtgca

SEQ ID NO: 4620602 - DNA, 25 bp, Homo sapien
tggcacttctgggccaaatgtgcag

SEQ ID NO: 4620603 - DNA, 25 bp, Homo sapien
ctgcttcctctactcgtggccctgc

SEQ ID NO: 4620604 - DNA, 25 bp, Homo sapien
tggccctgccgctttgccactgtgg

SEQ ID NO: 4620605 - DNA, 25 bp, Homo sapien
agcagcaccctcgtttcccaatggt

SEQ ID NO: 4620606 - DNA, 25 bp, Homo sapien
tcctgcttcctctactcgtggccct

SEQ ID NO: 4620607 - DNA, 25 bp, Homo sapien
ttttattcgcatccttgtgatcttc

SEQ ID NO: 4620608 - DNA, 25 bp, Homo sapien
acgtgacagagtgccttttcgagac

SEQ ID NO: 4620609 - DNA, 25 bp, Homo sapien
cccgccgaccatccaagggagagtg

SEQ ID NO: 4620610 - DNA, 25 bp, Homo sapien
gcagagccttgtcgttacagctgcc

SEQ ID NO: 4620611 - DNA, 25 bp, Homo sapien
aagggagagtgagacctggcagcca

SEQ ID NO: 4620612 - DNA, 25 bp, Homo sapien
ggagaaagtcctgtggagcctgcag

SEQ ID NO: 4620613 - DNA, 25 bp, Homo sapien
gcgggggctctggttgtaaaacaca

SEQ ID NO: 4620614 - DNA, 25 bp, Homo sapien
ccctgttcctccatcaacgaaggaa

SEQ ID NO: 4620615 - DNA, 25 bp, Homo sapien
cctgtgcagctccgattttattcgc

SEQ ID NO: 4620616 - DNA, 25 bp, Homo sapien
ccctttcctgtgtacacgtgacaga

SEQ ID NO: 4620617 - DNA, 25 bp, Homo sapien
tgctgcgaaagacccacatgctaca

SEQ ID NO: 4620618 - DNA, 25 bp, Homo sapien
gaagatcacaaggatgcgaataaaa

SEQ ID NO: 4620619 - DNA, 25 bp, Homo sapien
gtctcgaaaaggcactctgtcacgt

SEQ ID NO: 4620620 - DNA, 25 bp, Homo sapien
ggcagctgtaacgacaaggctctgc

SEQ ID NO: 4620621 - DNA, 25 bp, Homo sapien
tctgtcacgtgtacacaggaaaggg

SEQ ID NO: 4620622 - DNA, 25 bp, Homo sapien
tggctgccaggtctcactctccctt

SEQ ID NO: 4620623 - DNA, 25 bp, Homo sapien
tgtagcatgtgggtctttcgcagca

SEQ ID NO: 4620624 - DNA, 25 bp, Homo sapien
ctgcaggctccacaggactttctcc

SEQ ID NO: 4620625 - DNA, 25 bp, Homo sapien
ttccttcgttgatggaggaacaggg

SEQ ID NO: 4620626 - DNA, 25 bp, Homo sapien
gcgaataaaatcggagctgcacagg

SEQ ID NO: 4620627 - DNA, 25 bp, Homo sapien
cactctcccttggatggtcggcggg

SEQ ID NO: 4620628 - DNA, 25 bp, Homo sapien
tgtgttttacaaccagagcccccgc

SEQ ID NO: 4620629 - DNA, 25 bp, Homo sapien
atcattagcctgcactgcctcttca

SEQ ID NO: 4620630 - DNA, 25 bp, Homo sapien
cagtccaggaaggtgtaagagcagc

SEQ ID NO: 4620631 - DNA, 25 bp, Homo sapien
tctgtctgtagcaaaccatagagag

SEQ ID NO: 4620632 - DNA, 25 bp, Homo sapien
tccatacattggagacgttcgcatg

SEQ ID NO: 4620633 - DNA, 25 bp, Homo sapien
agatccgtgtttctatggtgtcagc

SEQ ID NO: 4620634 - DNA, 25 bp, Homo sapien
gctcttctgggccaaatgcagagaa

SEQ ID NO: 4620635 - DNA, 25 bp, Homo sapien
tgctgcctggaacatgaccctcctg

SEQ ID NO: 4620636 - DNA, 25 bp, Homo sapien
gttccccctggagatgtggatggca

SEQ ID NO: 4620637 - DNA, 25 bp, Homo sapien
tgcttcagcagatcttcagcgtcta

SEQ ID NO: 4620638 - DNA, 25 bp, Homo sapien
atcattagcctgcactgcctcttca

SEQ ID NO: 4620639 - DNA, 25 bp, Homo sapien
ctcctccatctttataacaatggtg

SEQ ID NO: 4620640 - DNA, 25 bp, Homo sapien
tctttataacaatggtgctagcaat

SEQ ID NO: 4620641 - DNA, 25 bp, Homo sapien
aacaatggtgctagcaatgttctta

SEQ ID NO: 4620642 - DNA, 25 bp, Homo sapien
gcaatgttcttaggcctccctgcag

SEQ ID NO: 4620643 - DNA, 25 bp, Homo sapien
actcttcattaacctgcattgcctc

SEQ ID NO: 4620644 - DNA, 25 bp, Homo sapien
tcttcattaacctgcattgcctctt

SEQ ID NO: 4620645 - DNA, 25 bp, Homo sapien
tcttcttctagaaatccgcactgtt

SEQ ID NO: 4620646 - DNA, 25 bp, Homo sapien
ctagaaatccgcactgttctcttct

SEQ ID NO: 4620647 - DNA, 25 bp, Homo sapien
tccttttgatatctgtagtttcatc

SEQ ID NO: 4620648 - DNA, 25 bp, Homo sapien
gaatgcctataggagatcaaggaga

SEQ ID NO: 4620649 - DNA, 25 bp, Homo sapien
gaggttcatggctaccatttgggaa

SEQ ID NO: 4620650 - DNA, 25 bp, Homo sapien
ttagtagatagtctagccacttgca

SEQ ID NO: 4620651 - DNA, 25 bp, Homo sapien
tacatcttatgtctgaacctggtgc

SEQ ID NO: 4620652 - DNA, 25 bp, Homo sapien
tactttcccgtattctgcagttgac

SEQ ID NO: 4620653 - DNA, 25 bp, Homo sapien
caggtagctgactaatgctatgcta

SEQ ID NO: 4620654 - DNA, 25 bp, Homo sapien
gacatatcaaggtgatactgccctg

SEQ ID NO: 4620655 - DNA, 25 bp, Homo sapien
caaaggtatccctattggttgagaa

SEQ ID NO: 4620656 - DNA, 25 bp, Homo sapien
ggtctgaaccttactgcccatacaa

SEQ ID NO: 4620657 - DNA, 25 bp, Homo sapien
cctggaataattgtctacctgaaga

SEQ ID NO: 4620658 - DNA, 25 bp, Homo sapien
tacagagcctctggaacactatggt

SEQ ID NO: 4620659 - DNA, 25 bp, Homo sapien
gactaaaccgttacttcagatgaag

SEQ ID NO: 4620660 - DNA, 25 bp, Homo sapien
tattctgaacaaagctatagggttt

SEQ ID NO: 4620661 - DNA, 25 bp, Homo sapien
cacagattggtaaagttcaggtttc

SEQ ID NO: 4620662 - DNA, 25 bp, Homo sapien
aatttagatagataagggctacagc

SEQ ID NO: 4620663 - DNA, 25 bp, Homo sapien
tgaaagtgtcccttggtaacggcga

SEQ ID NO: 4620664 - DNA, 25 bp, Homo sapien
tgtaaggcaggaaccacacgctttt

SEQ ID NO: 4620665 - DNA, 25 bp, Homo sapien
cacagttcggtggtattgcaaggct

SEQ ID NO: 4620666 - DNA, 25 bp, Homo sapien
gctttgtgatgtgaccctggtacca

SEQ ID NO: 4620667 - DNA, 25 bp, Homo sapien
taggcttttccggaaggagcggctc

SEQ ID NO: 4620668 - DNA, 25 bp, Homo sapien
ccttgctcaaagacaggccggtggc

SEQ ID NO: 4620669 - DNA, 25 bp, Homo sapien
acactctaggtacagcggagggcgc

SEQ ID NO: 4620670 - DNA, 25 bp, Homo sapien
taatcagatttgaggtccacagccc

SEQ ID NO: 4620671 - DNA, 25 bp, Homo sapien
gtcccacatacaaggcagctctaag

SEQ ID NO: 4620672 - DNA, 25 bp, Homo sapien
gcagcataacacacttgcttgcaca

SEQ ID NO: 4620673 - DNA, 25 bp, Homo sapien
cacattctgtcctatttggtcccac

SEQ ID NO: 4620674 - DNA, 25 bp, Homo sapien
aaacttatatcaaacgtgcagcata

SEQ ID NO: 4620675 - DNA, 25 bp, Homo sapien
tcaatttatacaaatgccgcatttc

SEQ ID NO: 4620676 - DNA, 25 bp, Homo sapien
taatgtgggataacaattattgttt

SEQ ID NO: 4620677 - DNA, 25 bp, Homo sapien
acagaagctaggaagcgtaaagctt

SEQ ID NO: 4620678 - DNA, 25 bp, Homo sapien
aaaattaagcatccaggtttcctct

SEQ ID NO: 4620679 - DNA, 25 bp, Homo sapien
tgctgctgagctggttcagatggat

SEQ ID NO: 4620680 - DNA, 25 bp, Homo sapien
gctgagctggttcagatggatgacc

SEQ ID NO: 4620681 - DNA, 25 bp, Homo sapien
ctgctgagctggttcagatggatga

SEQ ID NO: 4620682 - DNA, 25 bp, Homo sapien
atgctgctgagctggttcagatgga

SEQ ID NO: 4620683 - DNA, 25 bp, Homo sapien
gcaccactagggccaccagtaaata

SEQ ID NO: 4620684 - DNA, 25 bp, Homo sapien
caccactagggccaccagtaaataa

SEQ ID NO: 4620685 - DNA, 25 bp, Homo sapien
agcaccactagggccaccagtaaat

SEQ ID NO: 4620686 - DNA, 25 bp, Homo sapien
ggaactgtttatcatcaaactcctc

SEQ ID NO: 4620687 - DNA, 25 bp, Homo sapien
gcaggagaaaggagagattcttcgc

SEQ ID NO: 4620688 - DNA, 25 bp, Homo sapien
aggagaaaggagagattcttcgcat

SEQ ID NO: 4620689 - DNA, 25 bp, Homo sapien
gggaattcaaagtcatgtctgtcct

SEQ ID NO: 4620690 - DNA, 25 bp, Homo sapien
gctgctggtcaagttcgatgtagaa

SEQ ID NO: 4620691 - DNA, 25 bp, Homo sapien
catctagaagggtctcatccaaagc

SEQ ID NO: 4620692 - DNA, 25 bp, Homo sapien
tcctcgtacatcaggggagactcta

SEQ ID NO: 4620693 - DNA, 25 bp, Homo sapien
cgatgtagaattcatctagaagggt

SEQ ID NO: 4620694 - DNA, 25 bp, Homo sapien
tttttgcaagttgattgataaagag

SEQ ID NO: 4620695 - DNA, 25 bp, Homo sapien
gttgattgataaagagaaggatctc

SEQ ID NO: 4620696 - DNA, 25 bp, Homo sapien
cttcaatcttttttgcaagttgatt

SEQ ID NO: 4620697 - DNA, 25 bp, Homo sapien
caagttgattgataaagagaaggat

SEQ ID NO: 4620698 - DNA, 25 bp, Homo sapien
gaatcatttccgtgttgtaccaggt

SEQ ID NO: 4620699 - DNA, 25 bp, Homo sapien
tagtgcccatacagctgaacaggat

SEQ ID NO: 4620700 - DNA, 25 bp, Homo sapien
ggtctttgaaagagcacaacttgtc

SEQ ID NO: 4620701 - DNA, 25 bp, Homo sapien
tcagtttgcacaatcagggttggag

SEQ ID NO: 4620702 - DNA, 25 bp, Homo sapien
gcctcagaatcacggcaggaggtga

SEQ ID NO: 4620703 - DNA, 25 bp, Homo sapien
ggcctcagaatcacggcaggaggtg

SEQ ID NO: 4620704 - DNA, 25 bp, Homo sapien
aggcctcagaatcacggcaggaggt

SEQ ID NO: 4620705 - DNA, 25 bp, Homo sapien
tgtgcacaaacatgtatgacccaca

SEQ ID NO: 4620706 - DNA, 25 bp, Homo sapien
gcacaaacatgtatgacccacacag

SEQ ID NO: 4620707 - DNA, 25 bp, Homo sapien
ctgtgtgcacaaacatgtatgaccc

SEQ ID NO: 4620708 - DNA, 25 bp, Homo sapien
aaacatgtatgacccacacagagtc

SEQ ID NO: 4620709 - DNA, 25 bp, Homo sapien
acctcttgcttctacagtgtttctg

SEQ ID NO: 4620710 - DNA, 25 bp, Homo sapien
tcaaaatggatgatattttcaacct

SEQ ID NO: 4620711 - DNA, 25 bp, Homo sapien
ggctgtctttggctatctaggattg

SEQ ID NO: 4620712 - DNA, 25 bp, Homo sapien
tctaggattgtcaattgttggcatc

SEQ ID NO: 4620713 - DNA, 25 bp, Homo sapien
tcttcctttgactccaaaagcagcc

SEQ ID NO: 4620714 - DNA, 25 bp, Homo sapien
aaagtgagtcttcctttgactccaa

SEQ ID NO: 4620715 - DNA, 25 bp, Homo sapien
aagtgagtcttcctttgactccaaa

SEQ ID NO: 4620716 - DNA, 25 bp, Homo sapien
cctttgactccaaaagcagccacat

SEQ ID NO: 4620717 - DNA, 25 bp, Homo sapien
gactggactttgtgttgtctactga

SEQ ID NO: 4620718 - DNA, 25 bp, Homo sapien
ttgtgttgtctactgatgaacccac

SEQ ID NO: 4620719 - DNA, 25 bp, Homo sapien
tgtctactgatgaacccactgaaga

SEQ ID NO: 4620720 - DNA, 25 bp, Homo sapien
ggtcagactggactttgtgttgtct

SEQ ID NO: 4620721 - DNA, 25 bp, Homo sapien
tttattgaggtccatgaggccgtgg

SEQ ID NO: 4620722 - DNA, 25 bp, Homo sapien
gggatataccagaccatctatggca

SEQ ID NO: 4620723 - DNA, 25 bp, Homo sapien
ctatgggtgtatgaagttagggata

SEQ ID NO: 4620724 - DNA, 25 bp, Homo sapien
acaaagtcaggattaatgcagacca

SEQ ID NO: 4620725 - DNA, 25 bp, Homo sapien
gaccaccactagagagtgaaggcag

SEQ ID NO: 4620726 - DNA, 25 bp, Homo sapien
tggggtctgagtgtaatttggaacc

SEQ ID NO: 4620727 - DNA, 25 bp, Homo sapien
gcacacaactaggaccaccactaga

SEQ ID NO: 4620728 - DNA, 25 bp, Homo sapien
cacatcccagagatcaaaaagagcc

SEQ ID NO: 4620729 - DNA, 25 bp, Homo sapien
cccagaagcaccaacgtcttccttc

SEQ ID NO: 4620730 - DNA, 25 bp, Homo sapien
catttggcccagaagcaccaacgtc

SEQ ID NO: 4620731 - DNA, 25 bp, Homo sapien
caagaaaggggagatccatttcatt

SEQ ID NO: 4620732 - DNA, 25 bp, Homo sapien
tccatttcatttggcccagaagcac

SEQ ID NO: 4620733 - DNA, 25 bp, Homo sapien
tctcatggaggacagacagggcctg

SEQ ID NO: 4620734 - DNA, 25 bp, Homo sapien
agcagaggagcgctctgtgtggaag

SEQ ID NO: 4620735 - DNA, 25 bp, Homo sapien
agcgctctgtgtggaagaggctgaa

SEQ ID NO: 4620736 - DNA, 25 bp, Homo sapien
gaggagcgctctgtgtggaagaggc

SEQ ID NO: 4620737 - DNA, 25 bp, Homo sapien
attctccctctcccactgcccgcac

SEQ ID NO: 4620738 - DNA, 25 bp, Homo sapien
tcacccagcagattctccctctccc

SEQ ID NO: 4620739 - DNA, 25 bp, Homo sapien
acccagcagattctccctctcccac

SEQ ID NO: 4620740 - DNA, 25 bp, Homo sapien
ccagcagattctccctctcccactg

SEQ ID NO: 4620741 - DNA, 25 bp, Homo sapien
cctgtgagtttgttgatatagagaa

SEQ ID NO: 4620742 - DNA, 25 bp, Homo sapien
catccaagatcatatgtgaaagtgt

SEQ ID NO: 4620743 - DNA, 25 bp, Homo sapien
atctcttagagtcccatgccgctgg

SEQ ID NO: 4620744 - DNA, 25 bp, Homo sapien
gaaagtgtgacatggcagattagtc

SEQ ID NO: 4620745 - DNA, 25 bp, Homo sapien
ccttgacgtctgcagtcctgagctt

SEQ ID NO: 4620746 - DNA, 25 bp, Homo sapien
gctcattgggtatagtctgtgggca

SEQ ID NO: 4620747 - DNA, 25 bp, Homo sapien
ccagtgggacatccttgacgtctgc

SEQ ID NO: 4620748 - DNA, 25 bp, Homo sapien
ggcaggaccccctctattcagtgtt

SEQ ID NO: 4620749 - DNA, 25 bp, Homo sapien
caacttcttcatattgcacgtgggc

SEQ ID NO: 4620750 - DNA, 25 bp, Homo sapien
cgtgggctctgcttttttgaacaaa

SEQ ID NO: 4620751 - DNA, 25 bp, Homo sapien
cacgtgggctctgcttttttgaaca

SEQ ID NO: 4620752 - DNA, 25 bp, Homo sapien
tcttcatattgcacgtgggctctgc

SEQ ID NO: 4620753 - DNA, 25 bp, Homo sapien
gggtgtctttcaaaggtggctgaac

SEQ ID NO: 4620754 - DNA, 25 bp, Homo sapien
gaagccataacccatggttactccc

SEQ ID NO: 4620755 - DNA, 25 bp, Homo sapien
tttcaaaggtggctgaacttgcgct

SEQ ID NO: 4620756 - DNA, 25 bp, Homo sapien
gaaaaaggcactggtgagtaggaca

SEQ ID NO: 4620757 - DNA, 25 bp, Homo sapien
gactttgagacactggccagtcagg

SEQ ID NO: 4620758 - DNA, 25 bp, Homo sapien
ctgagggatcaggtcatcatctgtg

SEQ ID NO: 4620759 - DNA, 25 bp, Homo sapien
caaagctgaaacaccatctgttcct

SEQ ID NO: 4620760 - DNA, 25 bp, Homo sapien
ttgacagtcactcccacaaagctga

SEQ ID NO: 4620761 - DNA, 25 bp, Homo sapien
tccactttcttaatgcttctgggcc

SEQ ID NO: 4620762 - DNA, 25 bp, Homo sapien
actttcttaatgcttctgggccact

SEQ ID NO: 4620763 - DNA, 25 bp, Homo sapien
gggaacatactgatttccactttct

SEQ ID NO: 4620764 - DNA, 25 bp, Homo sapien
ttcttaatgcttctgggccactttc

SEQ ID NO: 4620765 - DNA, 25 bp, Homo sapien
ctgagatgggtgactctgaaccttg

SEQ ID NO: 4620766 - DNA, 25 bp, Homo sapien
ttgctgagatgggtgactctgaacc

SEQ ID NO: 4620767 - DNA, 25 bp, Homo sapien
tgctgagatgggtgactctgaacct

SEQ ID NO: 4620768 - DNA, 25 bp, Homo sapien
gctgagatgggtgactctgaacctt

SEQ ID NO: 4620769 - DNA, 25 bp, Homo sapien
tgttatccaggctgtgggtctcagg

SEQ ID NO: 4620770 - DNA, 25 bp, Homo sapien
gcaccaccaggaccatcagtaaagc

SEQ ID NO: 4620771 - DNA, 25 bp, Homo sapien
gaaggagagattctgctcatttgtg

SEQ ID NO: 4620772 - DNA, 25 bp, Homo sapien
catcaaggtcctcctgttatccagg

SEQ ID NO: 4620773 - DNA, 25 bp, Homo sapien
gagttcggtgcagaatttgtctagg

SEQ ID NO: 4620774 - DNA, 25 bp, Homo sapien
ctgctggtagagttcggtgcagaat

SEQ ID NO: 4620775 - DNA, 25 bp, Homo sapien
tggtaaagaggttgaagatctgctg

SEQ ID NO: 4620776 - DNA, 25 bp, Homo sapien
tcttttgtggtaaagaggttgaaga

SEQ ID NO: 4620777 - DNA, 25 bp, Homo sapien
aagagagggatctcatgatttctgc

SEQ ID NO: 4620778 - DNA, 25 bp, Homo sapien
ttcttgcaagtttgttgataaagag

SEQ ID NO: 4620779 - DNA, 25 bp, Homo sapien
atctttcttgcaagtttgttgataa

SEQ ID NO: 4620780 - DNA, 25 bp, Homo sapien
tgcaagtttgttgataaagagaggg

SEQ ID NO: 4620781 - DNA, 25 bp, Homo sapien
gaattcatgaaagcgtgacctggtg

SEQ ID NO: 4620782 - DNA, 25 bp, Homo sapien
taaatcagtttatcagcatggtcat

SEQ ID NO: 4620783 - DNA, 25 bp, Homo sapien
taaaggtgcacatgacgttatatga

SEQ ID NO: 4620784 - DNA, 25 bp, Homo sapien
cctggtgtatgagtcaataagaatt

SEQ ID NO: 4620785 - DNA, 25 bp, Homo sapien
gctgcccattgtccaaagaggacat

SEQ ID NO: 4620786 - DNA, 25 bp, Homo sapien
cagagctgcccattgtccaaagagg

SEQ ID NO: 4620787 - DNA, 25 bp, Homo sapien
ccccagagctgcccattgtccaaag

SEQ ID NO: 4620788 - DNA, 25 bp, Homo sapien
gagctgcccattgtccaaagaggac

SEQ ID NO: 4620789 - DNA, 25 bp, Homo sapien
tgatttcccttgaagtgccacagtc

SEQ ID NO: 4620790 - DNA, 25 bp, Homo sapien
gatttcccttgaagtgccacagtca

SEQ ID NO: 4620791 - DNA, 25 bp, Homo sapien
gggtggaagtaaggccacacgcaca

SEQ ID NO: 4620792 - DNA, 25 bp, Homo sapien
ggtggaagtaaggccacacgcacac

SEQ ID NO: 4620793 - DNA, 25 bp, Homo sapien
tggaagtaaggccacacgcacactc

SEQ ID NO: 4620794 - DNA, 25 bp, Homo sapien
agggtggaagtaaggccacacgcac

SEQ ID NO: 4620795 - DNA, 25 bp, Homo sapien
tcggtccattggttgagttgtgagt

SEQ ID NO: 4620796 - DNA, 25 bp, Homo sapien
tatttctatccccagcccattcagg

SEQ ID NO: 4620797 - DNA, 25 bp, Homo sapien
tgtgtactgattgtgtccagtgaag

SEQ ID NO: 4620798 - DNA, 25 bp, Homo sapien
tcagcctgctgctcttattgccaag

SEQ ID NO: 4620799 - DNA, 25 bp, Homo sapien
tgcacccagccaatgaaatatcttt

SEQ ID NO: 4620800 - DNA, 25 bp, Homo sapien
aatgaagtagatttgtctgccaatt

SEQ ID NO: 4620801 - DNA, 25 bp, Homo sapien
gcacccagccaatgaaatatctttt

SEQ ID NO: 4620802 - DNA, 25 bp, Homo sapien
agtagatttgtctgccaattaaaaa

SEQ ID NO: 4620803 - DNA, 25 bp, Homo sapien
aaggtgttcctgcctagcaggccat

SEQ ID NO: 4620804 - DNA, 25 bp, Homo sapien
ggttctgaggcaggttatatcctag

SEQ ID NO: 4620805 - DNA, 25 bp, Homo sapien
ttctgaggcaggttatatcctagag

SEQ ID NO: 4620806 - DNA, 25 bp, Homo sapien
tctgaggcaggttatatcctagaga

SEQ ID NO: 4620807 - DNA, 25 bp, Homo sapien
tgcaactggctgacttccaccttct

SEQ ID NO: 4620808 - DNA, 25 bp, Homo sapien
agtgtagagccctcaatcacccact

SEQ ID NO: 4620809 - DNA, 25 bp, Homo sapien
ctgctgatgacgtaaagtgtggagt

SEQ ID NO: 4620810 - DNA, 25 bp, Homo sapien
agaggaaagacatagcctgggcctt

SEQ ID NO: 4620811 - DNA, 25 bp, Homo sapien
ggataggcatcagcccgcttcttta

SEQ ID NO: 4620812 - DNA, 25 bp, Homo sapien
caaaaagactctcctgaggattcca

SEQ ID NO: 4620813 - DNA, 25 bp, Homo sapien
tgtcctggccaatgaccactatatg

SEQ ID NO: 4620814 - DNA, 25 bp, Homo sapien
tgttggtctcacagctggtagggta

SEQ ID NO: 4620815 - DNA, 25 bp, Homo sapien
taatatgtcagtagctcagtttcct

SEQ ID NO: 4620816 - DNA, 25 bp, Homo sapien
tatttattctctcaataatgcacac

SEQ ID NO: 4620817 - DNA, 25 bp, Homo sapien
agctgaccatgtttggaaatgttaa

SEQ ID NO: 4620818 - DNA, 25 bp, Homo sapien
gacctgcctctcaagaatattataa

SEQ ID NO: 4620819 - DNA, 25 bp, Homo sapien
agttctccttttggaccagtcctca

SEQ ID NO: 4620820 - DNA, 25 bp, Homo sapien
gttctccttttggaccagtcctcat

SEQ ID NO: 4620821 - DNA, 25 bp, Homo sapien
gatttgtgttgttgagtccatcccc

SEQ ID NO: 4620822 - DNA, 25 bp, Homo sapien
ttaatcgtttaccattgtatttgta

SEQ ID NO: 4620823 - DNA, 25 bp, Homo sapien
ttgtagcagctagactgataggaga

SEQ ID NO: 4620824 - DNA, 25 bp, Homo sapien
cagctagactgataggagatttgtg

SEQ ID NO: 4620825 - DNA, 25 bp, Homo sapien
ccatgtgtggaaatgaacattgctt

SEQ ID NO: 4620826 - DNA, 25 bp, Homo sapien
ccccttgacctcaatgtagttgatg

SEQ ID NO: 4620827 - DNA, 25 bp, Homo sapien
tgaacattgcttgccaagcgccatc

SEQ ID NO: 4620828 - DNA, 25 bp, Homo sapien
cctcatctacatcagttacagacat

SEQ ID NO: 4620829 - DNA, 25 bp, Homo sapien
aaaatgtacagtgattgggcccagt

SEQ ID NO: 4620830 - DNA, 25 bp, Homo sapien
tagattttaattagaacaatagcct

SEQ ID NO: 4620831 - DNA, 25 bp, Homo sapien
tttaattagaacaatagcctctgca

SEQ ID NO: 4620832 - DNA, 25 bp, Homo sapien
tgggcccagtttgctaatgtgcctt

SEQ ID NO: 4620833 - DNA, 25 bp, Homo sapien
tcctgggaattgtcatagctcttca

SEQ ID NO: 4620834 - DNA, 25 bp, Homo sapien
gatttcccacattggatatttgagc

SEQ ID NO: 4620835 - DNA, 25 bp, Homo sapien
tggtgtccttgacatctgacagtgc

SEQ ID NO: 4620836 - DNA, 25 bp, Homo sapien
ttcattttgcttgaccctggtgtcc

SEQ ID NO: 4620837 - DNA, 25 bp, Homo sapien
tacagcgatgtttgagttgagctca

SEQ ID NO: 4620838 - DNA, 25 bp, Homo sapien
taagctgggagagccttggtcccgc

SEQ ID NO: 4620839 - DNA, 25 bp, Homo sapien
tctctgtccctaaacctcgaggaag

SEQ ID NO: 4620840 - DNA, 25 bp, Homo sapien
cgttggcgcccaaacgaggatgcgc

SEQ ID NO: 4620841 - DNA, 25 bp, Homo sapien
tcgtgtgcgcttgggcgaggccggg

SEQ ID NO: 4620842 - DNA, 25 bp, Homo sapien
ccgggcggcgcttctgtcctcctac

SEQ ID NO: 4620843 - DNA, 25 bp, Homo sapien
gcggccccttcgtgtgcgcttgggc

SEQ ID NO: 4620844 - DNA, 25 bp, Homo sapien
ccttcgtgtgcgcttgggcgaggcc

SEQ ID NO: 4620845 - DNA, 25 bp, Homo sapien
ggcggtgttccgtgagccgcctggt

SEQ ID NO: 4620846 - DNA, 25 bp, Homo sapien
agctgggaggcggtgttccgtgagc

SEQ ID NO: 4620847 - DNA, 25 bp, Homo sapien
gagaaggaagacgcgcgtccccggc

SEQ ID NO: 4620848 - DNA, 25 bp, Homo sapien
caggttccacgtccggcgcctggag

SEQ ID NO: 4620849 - DNA, 25 bp, Homo sapien
ccgcaaagggctactgtgccaaaag

SEQ ID NO: 4620850 - DNA, 25 bp, Homo sapien
tactgtgccaaaagcgagcgtagtg

SEQ ID NO: 4620851 - DNA, 25 bp, Homo sapien
cccacaaaattccgtcactcgggag

SEQ ID NO: 4620852 - DNA, 25 bp, Homo sapien
aaagcgagcgtagtggccgccgctt

SEQ ID NO: 4620853 - DNA, 25 bp, Homo sapien
tagctctgactgcgagaagctccca

SEQ ID NO: 4620854 - DNA, 25 bp, Homo sapien
agctctgactgcgagaagctcccac

SEQ ID NO: 4620855 - DNA, 25 bp, Homo sapien
ttagctctgactgcgagaagctccc

SEQ ID NO: 4620856 - DNA, 25 bp, Homo sapien
caaatctgggcgcaggtgggtaccc

SEQ ID NO: 4620857 - DNA, 25 bp, Homo sapien
gatagccgccacgtttctagaagac

SEQ ID NO: 4620858 - DNA, 25 bp, Homo sapien
ggagagaggccactccagatggaaa

SEQ ID NO: 4620859 - DNA, 25 bp, Homo sapien
caaagagggcggaatcaaatctggg

SEQ ID NO: 4620860 - DNA, 25 bp, Homo sapien
taccactattaaccttgctctgacg

SEQ ID NO: 4620861 - DNA, 25 bp, Homo sapien
cttctggctaggtcatcgggtcgga

SEQ ID NO: 4620862 - DNA, 25 bp, Homo sapien
tcgggtcggattaccctgccatgta

SEQ ID NO: 4620863 - DNA, 25 bp, Homo sapien
caggtgaaaggctaccatgctgggc

SEQ ID NO: 4620864 - DNA, 25 bp, Homo sapien
ttgattcatcaattatgcacagtgc

SEQ ID NO: 4620865 - DNA, 25 bp, Homo sapien
ttcatcaattatgcacagtgctctg

SEQ ID NO: 4620866 - DNA, 25 bp, Homo sapien
tcaattatgcacagtgctctgtgta

SEQ ID NO: 4620867 - DNA, 25 bp, Homo sapien
tgtgtagagtccagaccatgccctc

SEQ ID NO: 4620868 - DNA, 25 bp, Homo sapien
gaagcatccaatgcattggccaatt

SEQ ID NO: 4620869 - DNA, 25 bp, Homo sapien
gactgcctggcagattactactcat

SEQ ID NO: 4620870 - DNA, 25 bp, Homo sapien
gcttgaacctccaggttctctgaag

SEQ ID NO: 4620871 - DNA, 25 bp, Homo sapien
ttcaccattgcttgaacctccaggt

SEQ ID NO: 4620872 - DNA, 25 bp, Homo sapien
atcaagcttgctttgccctggacct

SEQ ID NO: 4620873 - DNA, 25 bp, Homo sapien
ttgctttgccctggacctgttttgg

SEQ ID NO: 4620874 - DNA, 25 bp, Homo sapien
caagcttgctttgccctggacctgt

SEQ ID NO: 4620875 - DNA, 25 bp, Homo sapien
gctttgccctggacctgttttggtc

SEQ ID NO: 4620876 - DNA, 25 bp, Homo sapien
cctgaatccactgtctcagtgctat

SEQ ID NO: 4620877 - DNA, 25 bp, Homo sapien
tccactgtctcagtgctattattac

SEQ ID NO: 4620878 - DNA, 25 bp, Homo sapien
aatccactgtctcagtgctattatt

SEQ ID NO: 4620879 - DNA, 25 bp, Homo sapien
agcctgaatccactgtctcagtgct

SEQ ID NO: 4620880 - DNA, 25 bp, Homo sapien
tcaggagttcaataatccgacaaac

SEQ ID NO: 4620881 - DNA, 25 bp, Homo sapien
ggagatgctaatttggcaactgaga

SEQ ID NO: 4620882 - DNA, 25 bp, Homo sapien
ttatgtcagaatgtagccaatcagg

SEQ ID NO: 4620883 - DNA, 25 bp, Homo sapien
ccgacaaacttgtgtagacagggca

SEQ ID NO: 4620884 - DNA, 25 bp, Homo sapien
ttttattcttgaaggagatgttgtt

SEQ ID NO: 4620885 - DNA, 25 bp, Homo sapien
tttattcttgaaggagatgttgttg

SEQ ID NO: 4620886 - DNA, 25 bp, Homo sapien
ttattcttgaaggagatgttgttgt

SEQ ID NO: 4620887 - DNA, 25 bp, Homo sapien
cagccggttaaccttctttggcctg

SEQ ID NO: 4620888 - DNA, 25 bp, Homo sapien
tttggcctgctctgctaagtaataa

SEQ ID NO: 4620889 - DNA, 25 bp, Homo sapien
gaagaattggtgtgaatgggtttat

SEQ ID NO: 4620890 - DNA, 25 bp, Homo sapien
ttatatattacccagatggcctcac

SEQ ID NO: 4620891 - DNA, 25 bp, Homo sapien
aacatagcctttatgtttctgggcc

SEQ ID NO: 4620892 - DNA, 25 bp, Homo sapien
ctagaaaacatagcctttatgtttc

SEQ ID NO: 4620893 - DNA, 25 bp, Homo sapien
aaacatagcctttatgtttctgggc

SEQ ID NO: 4620894 - DNA, 25 bp, Homo sapien
gaaaacatagcctttatgtttctgg

SEQ ID NO: 4620895 - DNA, 25 bp, Homo sapien
aactgtctcttatggccccctagac

SEQ ID NO: 4620896 - DNA, 25 bp, Homo sapien
ccctagaccaaaatctggagtgctg

SEQ ID NO: 4620897 - DNA, 25 bp, Homo sapien
ttcactgtcgttgcagcatcaccta

SEQ ID NO: 4620898 - DNA, 25 bp, Homo sapien
gcatcacctacaattttggctgcga

SEQ ID NO: 4620899 - DNA, 25 bp, Homo sapien
taatctatactttgcaggctgaatc

SEQ ID NO: 4620900 - DNA, 25 bp, Homo sapien
ttcgcgccctctgccaaagatcagg

SEQ ID NO: 4620901 - DNA, 25 bp, Homo sapien
agattttgtcaatttgttcgcgccc

SEQ ID NO: 4620902 - DNA, 25 bp, Homo sapien
gtaatctatactttgcaggctgaat

SEQ ID NO: 4620903 - DNA, 25 bp, Homo sapien
cacactgtgcttgggtaggccactg

SEQ ID NO: 4620904 - DNA, 25 bp, Homo sapien
cactgtgcttgggtaggccactgct

SEQ ID NO: 4620905 - DNA, 25 bp, Homo sapien
ctgtgcttgggtaggccactgctgc

SEQ ID NO: 4620906 - DNA, 25 bp, Homo sapien
acacactgtgcttgggtaggccact

SEQ ID NO: 4620907 - DNA, 25 bp, Homo sapien
cattctggccccctttggcggtgtc

SEQ ID NO: 4620908 - DNA, 25 bp, Homo sapien
gtcctgtacagtgccattctggccc

SEQ ID NO: 4620909 - DNA, 25 bp, Homo sapien
tcatgtcctgtacagtgccattctg

SEQ ID NO: 4620910 - DNA, 25 bp, Homo sapien
cgttgcccgcagggatcatgtcctg

SEQ ID NO: 4620911 - DNA, 25 bp, Homo sapien
cttcactccagcgtattcctgcagc

SEQ ID NO: 4620912 - DNA, 25 bp, Homo sapien
ggatccggagagggttgtccacatt

SEQ ID NO: 4620913 - DNA, 25 bp, Homo sapien
cagggatccggagagggttgtccac

SEQ ID NO: 4620914 - DNA, 25 bp, Homo sapien
ccagggatccggagagggttgtcca

SEQ ID NO: 4620915 - DNA, 25 bp, Homo sapien
agggatccggagagggttgtccaca

SEQ ID NO: 4620916 - DNA, 25 bp, Homo sapien
tcccggaggatgtccatcaccatct

SEQ ID NO: 4620917 - DNA, 25 bp, Homo sapien
ttcccggaggatgtccatcaccatc

SEQ ID NO: 4620918 - DNA, 25 bp, Homo sapien
gttcccggaggatgtccatcaccat

SEQ ID NO: 4620919 - DNA, 25 bp, Homo sapien
agaatgcctgggcaccggcacatca

SEQ ID NO: 4620920 - DNA, 25 bp, Homo sapien
gtccgagatccgtaatcattccagt

SEQ ID NO: 4620921 - DNA, 25 bp, Homo sapien
aatgcctgggcaccggcacatcaat

SEQ ID NO: 4620922 - DNA, 25 bp, Homo sapien
gtccccgccagtccgagatccgtaa

SEQ ID NO: 4620923 - DNA, 25 bp, Homo sapien
atatgagcaatcttctcgggccctg

SEQ ID NO: 4620924 - DNA, 25 bp, Homo sapien
ttatatgagcaatcttctcgggccc

SEQ ID NO: 4620925 - DNA, 25 bp, Homo sapien
cattatatgagcaatcttctcgggc

SEQ ID NO: 4620926 - DNA, 25 bp, Homo sapien
ccccattatatgagcaatcttctcg

SEQ ID NO: 4620927 - DNA, 25 bp, Homo sapien
tcgttgatgatccgggctgcgtgct

SEQ ID NO: 4620928 - DNA, 25 bp, Homo sapien
ctggaggaggtcgttgatgatccgg

SEQ ID NO: 4620929 - DNA, 25 bp, Homo sapien
gaggtcgttgatgatccgggctgcg

SEQ ID NO: 4620930 - DNA, 25 bp, Homo sapien
gatgatccgggctgcgtgctcgcac

SEQ ID NO: 4620931 - DNA, 25 bp, Homo sapien
gcctccccgggggcatgcctggacc

SEQ ID NO: 4620932 - DNA, 25 bp, Homo sapien
gggcatgcctggaccccttggaggg

SEQ ID NO: 4620933 - DNA, 25 bp, Homo sapien
ccgggggcatgcctggaccccttgg

SEQ ID NO: 4620934 - DNA, 25 bp, Homo sapien
atgcctggaccccttggagggcctg

SEQ ID NO: 4620935 - DNA, 25 bp, Homo sapien
ggccgatgaccagccggcgcttgtg

SEQ ID NO: 4620936 - DNA, 25 bp, Homo sapien
gccgatgaccagccggcgcttgtga

SEQ ID NO: 4620937 - DNA, 25 bp, Homo sapien
ccagccggcgcttgtgagtggggat

SEQ ID NO: 4620938 - DNA, 25 bp, Homo sapien
atgaccagccggcgcttgtgagtgg

SEQ ID NO: 4620939 - DNA, 25 bp, Homo sapien
gatccccactggatggtagctgcca

SEQ ID NO: 4620940 - DNA, 25 bp, Homo sapien
ttgaagggccccctcgataagctgc

SEQ ID NO: 4620941 - DNA, 25 bp, Homo sapien
ccccactggatggtagctgccagga

SEQ ID NO: 4620942 - DNA, 25 bp, Homo sapien
aagctgctcggcgtgttggatctgc

SEQ ID NO: 4620943 - DNA, 25 bp, Homo sapien
tggtaaggagggagcccccaggcac

SEQ ID NO: 4620944 - DNA, 25 bp, Homo sapien
ctggtaaggagggagcccccaggca

SEQ ID NO: 4620945 - DNA, 25 bp, Homo sapien
tgctttgcttggatcgtgaggagca

SEQ ID NO: 4620946 - DNA, 25 bp, Homo sapien
taggcggcccatgtggcgttggcgt

SEQ ID NO: 4620947 - DNA, 25 bp, Homo sapien
ctgctttgcttggatcgtgaggagc

SEQ ID NO: 4620948 - DNA, 25 bp, Homo sapien
ccgcggtagacgcagctgctttgct

SEQ ID NO: 4620949 - DNA, 25 bp, Homo sapien
cttagtgtagtccgactggccggtg

SEQ ID NO: 4620950 - DNA, 25 bp, Homo sapien
tagtgtagtccgactggccggtggg

SEQ ID NO: 4620951 - DNA, 25 bp, Homo sapien
ttagtgtagtccgactggccggtgg

SEQ ID NO: 4620952 - DNA, 25 bp, Homo sapien
cctgatgcatggctgccgggacctg

SEQ ID NO: 4620953 - DNA, 25 bp, Homo sapien
cgtgtagtcctgctgccgggcgctt

SEQ ID NO: 4620954 - DNA, 25 bp, Homo sapien
catggctgccgggacctgggatctg

SEQ ID NO: 4620955 - DNA, 25 bp, Homo sapien
ccagactgcattgtagtctggctgg

SEQ ID NO: 4620956 - DNA, 25 bp, Homo sapien
tcacagatgaagaagttcacattca

SEQ ID NO: 4620957 - DNA, 25 bp, Homo sapien
cagatgaagaagttcacattcattc

SEQ ID NO: 4620958 - DNA, 25 bp, Homo sapien
gatgaagaagttcacattcattcca

SEQ ID NO: 4620959 - DNA, 25 bp, Homo sapien
atgaagaagttcacattcattccat

SEQ ID NO: 4620960 - DNA, 25 bp, Homo sapien
tgcggacacccgatacgcatagcac

SEQ ID NO: 4620961 - DNA, 25 bp, Homo sapien
cggacacccgatacgcatagcacac

SEQ ID NO: 4620962 - DNA, 25 bp, Homo sapien
gcggacacccgatacgcatagcaca

SEQ ID NO: 4620963 - DNA, 25 bp, Homo sapien
gtctgcattgtgcttttacacataa

SEQ ID NO: 4620964 - DNA, 25 bp, Homo sapien
tcagtctgcattgtgcttttacaca

SEQ ID NO: 4620965 - DNA, 25 bp, Homo sapien
gaaatcagtctgcattgtgctttta

SEQ ID NO: 4620966 - DNA, 25 bp, Homo sapien
aatcagtctgcattgtgcttttaca

SEQ ID NO: 4620967 - DNA, 25 bp, Homo sapien
gctcttccttccagctaaacatatt

SEQ ID NO: 4620968 - DNA, 25 bp, Homo sapien
taaaatgttcctgtacggattctcc

SEQ ID NO: 4620969 - DNA, 25 bp, Homo sapien
caagacctgagaagttagtaattgt

SEQ ID NO: 4620970 - DNA, 25 bp, Homo sapien
ggcagctcttctcatgctgagatcc

SEQ ID NO: 4620971 - DNA, 25 bp, Homo sapien
tagttaagttttaactgccaactca

SEQ ID NO: 4620972 - DNA, 25 bp, Homo sapien
agttaagttttaactgccaactcat

SEQ ID NO: 4620973 - DNA, 25 bp, Homo sapien
ctctattcttggctgctttgaatgc

SEQ ID NO: 4620974 - DNA, 25 bp, Homo sapien
acaatgaattttgagtccctctgca

SEQ ID NO: 4620975 - DNA, 25 bp, Homo sapien
tcttggctgctttgaatgctcttcc

SEQ ID NO: 4620976 - DNA, 25 bp, Homo sapien
cacaatgaattttgagtccctctgc

SEQ ID NO: 4620977 - DNA, 25 bp, Homo sapien
gagagagtatgttcaatcttgatct

SEQ ID NO: 4620978 - DNA, 25 bp, Homo sapien
gtgaaagagagagtatgttcaatct

SEQ ID NO: 4620979 - DNA, 25 bp, Homo sapien
gagtatgttcaatcttgatctgaag

SEQ ID NO: 4620980 - DNA, 25 bp, Homo sapien
gttcaatcttgatctgaagagacat

SEQ ID NO: 4620981 - DNA, 25 bp, Homo sapien
gatggattaagcgttctgaaacaaa

SEQ ID NO: 4620982 - DNA, 25 bp, Homo sapien
acaccacgagccctttacagggata

SEQ ID NO: 4620983 - DNA, 25 bp, Homo sapien
ttaaccttccttgatggattaagcg

SEQ ID NO: 4620984 - DNA, 25 bp, Homo sapien
ggataatccctcatgcttacagccc

SEQ ID NO: 4620985 - DNA, 25 bp, Homo sapien
gaatacacctggattcagaatccaa

SEQ ID NO: 4620986 - DNA, 25 bp, Homo sapien
aaactcaggtctccgtcattcaaca

SEQ ID NO: 4620987 - DNA, 25 bp, Homo sapien
tccaaactcaggtctccgtcattca

SEQ ID NO: 4620988 - DNA, 25 bp, Homo sapien
taacccgttctacgccggagcggca

SEQ ID NO: 4620989 - DNA, 25 bp, Homo sapien
cgcgggtttgcgtatttcccttgat

SEQ ID NO: 4620990 - DNA, 25 bp, Homo sapien
ctcagggatgacgaaagggaaataa

SEQ ID NO: 4620991 - DNA, 25 bp, Homo sapien
ggttgagaccttgcacaactcccag

SEQ ID NO: 4620992 - DNA, 25 bp, Homo sapien
tggacttgacccaagactcagggat

SEQ ID NO: 4620993 - DNA, 25 bp, Homo sapien
ctaagggaaccaagcgagccacaga

SEQ ID NO: 4620994 - DNA, 25 bp, Homo sapien
tgccaacctcactgcgcgggagtga

SEQ ID NO: 4620995 - DNA, 25 bp, Homo sapien
cggtggctgtgccaacctcactgcg

SEQ ID NO: 4620996 - DNA, 25 bp, Homo sapien
cgagcgctcgggactaagggaacca

SEQ ID NO: 4620997 - DNA, 25 bp, Homo sapien
ggcggtggtggtggtgccagaggcc

SEQ ID NO: 4620998 - DNA, 25 bp, Homo sapien
cttcacggcggtggtggtggtgcca

SEQ ID NO: 4620999 - DNA, 25 bp, Homo sapien
acggcggtggtggtggtgccagagg

SEQ ID NO: 4621000 - DNA, 25 bp, Homo sapien
cggtggtggtggtgccagaggccat

SEQ ID NO: 4621001 - DNA, 25 bp, Homo sapien
gggaaaacttcagcgcggagaaggc

SEQ ID NO: 4621002 - DNA, 25 bp, Homo sapien
agtattacgctgctggggaaaactt

SEQ ID NO: 4621003 - DNA, 25 bp, Homo sapien
gcggagaaggcctacgtttggagga

SEQ ID NO: 4621004 - DNA, 25 bp, Homo sapien
aaaagaagccggaagcatacaaaag

SEQ ID NO: 4621005 - DNA, 25 bp, Homo sapien
ggaggacaatgtctccctgaggtcc

SEQ ID NO: 4621006 - DNA, 25 bp, Homo sapien
actggtttggccctctgtcaggaat

SEQ ID NO: 4621007 - DNA, 25 bp, Homo sapien
cttggctccaaggagtcactcgtgg

SEQ ID NO: 4621008 - DNA, 25 bp, Homo sapien
tgaattactctcactccaggtggct

SEQ ID NO: 4621009 - DNA, 25 bp, Homo sapien
tgccatgactacaaccacaggtgag

SEQ ID NO: 4621010 - DNA, 25 bp, Homo sapien
tgttaaaaatgtagatggccaccct

SEQ ID NO: 4621011 - DNA, 25 bp, Homo sapien
tgtcaaaacctagattgctgggccc

SEQ ID NO: 4621012 - DNA, 25 bp, Homo sapien
tcagtggctgtcaaacttcggtgga

SEQ ID NO: 4621013 - DNA, 25 bp, Homo sapien
tctaaggtcagtctccttggcttgt

SEQ ID NO: 4621014 - DNA, 25 bp, Homo sapien
cgtgtcccaatctcttacaagcaca

SEQ ID NO: 4621015 - DNA, 25 bp, Homo sapien
ccctctgtatgtgtccgtgtcccaa

SEQ ID NO: 4621016 - DNA, 25 bp, Homo sapien
tggcttgtagatggcagcgttctcc

SEQ ID NO: 4621017 - DNA, 25 bp, Homo sapien
ctaggatctgatcaagggcatctca

SEQ ID NO: 4621018 - DNA, 25 bp, Homo sapien
tatacttcggtgcaaagctttcctg

SEQ ID NO: 4621019 - DNA, 25 bp, Homo sapien
caccctcagggctaaagatgtccgg

SEQ ID NO: 4621020 - DNA, 25 bp, Homo sapien
gacatgcacatgcttaatgcccaaa

SEQ ID NO: 4621021 - DNA, 25 bp, Homo sapien
gggatacagggacaagtgtagcaac

SEQ ID NO: 4621022 - DNA, 25 bp, Homo sapien
cagggacaagtgtagcaactgagtc

SEQ ID NO: 4621023 - DNA, 25 bp, Homo sapien
aagtgtagcaactgagtcccgccat

SEQ ID NO: 4621024 - DNA, 25 bp, Homo sapien
tgtgcgagggatacagggacaagtg

SEQ ID NO: 4621025 - DNA, 25 bp, Homo sapien
gaggctaagaaaccatccagcccat

SEQ ID NO: 4621026 - DNA, 25 bp, Homo sapien
tgaggaggctaagaaaccatccagc

SEQ ID NO: 4621027 - DNA, 25 bp, Homo sapien
tcatgaggaggctaagaaaccatcc

SEQ ID NO: 4621028 - DNA, 25 bp, Homo sapien
ccacaggtcatgaggaggctaagaa

SEQ ID NO: 4621029 - DNA, 25 bp, Homo sapien
ccttagcctggcttctccatcttat

SEQ ID NO: 4621030 - DNA, 25 bp, Homo sapien
ccatcttatccttcattccgtggac

SEQ ID NO: 4621031 - DNA, 25 bp, Homo sapien
atcccaatccttccttagcctggct

SEQ ID NO: 4621032 - DNA, 25 bp, Homo sapien
taggaaatcccaatccttccttagc

SEQ ID NO: 4621033 - DNA, 25 bp, Homo sapien
gaattacaagtcagcatagagaggt

SEQ ID NO: 4621034 - DNA, 25 bp, Homo sapien
ttcccacgccattagaatcacagag

SEQ ID NO: 4621035 - DNA, 25 bp, Homo sapien
tcagaagactgctgggatataaaat

SEQ ID NO: 4621036 - DNA, 25 bp, Homo sapien
cctaaaagtaggcaagtatggtagt

SEQ ID NO: 4621037 - DNA, 25 bp, Homo sapien
gccaaatggagtatccacatatttt

SEQ ID NO: 4621038 - DNA, 25 bp, Homo sapien
ggcctgttccaccaattattccaat

SEQ ID NO: 4621039 - DNA, 25 bp, Homo sapien
ccttctaaaatttctggatcatcca

SEQ ID NO: 4621040 - DNA, 25 bp, Homo sapien
cttgccaaatggagtatccacatat

SEQ ID NO: 4621041 - DNA, 25 bp, Homo sapien
cttgcaaggaggacgcaatcaacat

SEQ ID NO: 4621042 - DNA, 25 bp, Homo sapien
tatcttccccaaaattaaggcatca

SEQ ID NO: 4621043 - DNA, 25 bp, Homo sapien
gaggacgcaatcaacattttttatc

SEQ ID NO: 4621044 - DNA, 25 bp, Homo sapien
gcaaggaggacgcaatcaacatttt

SEQ ID NO: 4621045 - DNA, 25 bp, Homo sapien
ctggtagttgacctttgaaggcatg

SEQ ID NO: 4621046 - DNA, 25 bp, Homo sapien
ttgacctttgaaggcatgatggtgt

SEQ ID NO: 4621047 - DNA, 25 bp, Homo sapien
ggcatgatggtgtgctgccttccat

SEQ ID NO: 4621048 - DNA, 25 bp, Homo sapien
tagttgacctttgaaggcatgatgg

SEQ ID NO: 4621049 - DNA, 25 bp, Homo sapien
aaaaaagcaagcgagtctgtggcac

SEQ ID NO: 4621050 - DNA, 25 bp, Homo sapien
ggcgggtgatctcctgattcaagac

SEQ ID NO: 4621051 - DNA, 25 bp, Homo sapien
tgaaaatgaccagctacaatagcct

SEQ ID NO: 4621052 - DNA, 25 bp, Homo sapien
ccacgcgtcgtccatttgagctgaa

SEQ ID NO: 4621053 - DNA, 25 bp, Homo sapien
tggtgcaattcagccctccattggg

SEQ ID NO: 4621054 - DNA, 25 bp, Homo sapien
caatgtgtgtggttctaggtaagtc

SEQ ID NO: 4621055 - DNA, 25 bp, Homo sapien
tgcacagggccaaacagagtcaaga

SEQ ID NO: 4621056 - DNA, 25 bp, Homo sapien
cttacggcaataggccaatgtgtgt

SEQ ID NO: 4621057 - DNA, 25 bp, Homo sapien
tacggtctgtatccacaacaagccc

SEQ ID NO: 4621058 - DNA, 25 bp, Homo sapien
cccaacatgcagaatcgtgagtcaa

SEQ ID NO: 4621059 - DNA, 25 bp, Homo sapien
gaaatgtggtgttgcaaacaagctg

SEQ ID NO: 4621060 - DNA, 25 bp, Homo sapien
cacaatcatcgacctctgaggacat

SEQ ID NO: 4621061 - DNA, 25 bp, Homo sapien
gttttggggcaaaacggctcagcca

SEQ ID NO: 4621062 - DNA, 25 bp, Homo sapien
gcaaaacggctcagccattggaata

SEQ ID NO: 4621063 - DNA, 25 bp, Homo sapien
aacggctcagccattggaatatggc

SEQ ID NO: 4621064 - DNA, 25 bp, Homo sapien
gggcaaaacggctcagccattggaa

SEQ ID NO: 4621065 - DNA, 25 bp, Homo sapien
tagaagtcagagaaaatcaatgcgc

SEQ ID NO: 4621066 - DNA, 25 bp, Homo sapien
gacctcagattcatacgagcatgca

SEQ ID NO: 4621067 - DNA, 25 bp, Homo sapien
tcaatgcgcagtggtatctccgaaa

SEQ ID NO: 4621068 - DNA, 25 bp, Homo sapien
gcttccctcagtactcggttttaga

SEQ ID NO: 4621069 - DNA, 25 bp, Homo sapien
ggttgctgttggtctataaaagtgc

SEQ ID NO: 4621070 - DNA, 25 bp, Homo sapien
tggattgctttttggcagattgctt

SEQ ID NO: 4621071 - DNA, 25 bp, Homo sapien
ttttttcctgcaactgttgtaaagc

SEQ ID NO: 4621072 - DNA, 25 bp, Homo sapien
caaggcctagataggtttttccgat

SEQ ID NO: 4621073 - DNA, 25 bp, Homo sapien
cggccagctaattcttttctttgta

SEQ ID NO: 4621074 - DNA, 25 bp, Homo sapien
ccacgctggaatgcattagtgcgat

SEQ ID NO: 4621075 - DNA, 25 bp, Homo sapien
cacggccagctaattcttttctttg

SEQ ID NO: 4621076 - DNA, 25 bp, Homo sapien
cgctggaatgcattagtgcgatctt

SEQ ID NO: 4621077 - DNA, 25 bp, Homo sapien
tgtcccctttgagtggcaccggagt

SEQ ID NO: 4621078 - DNA, 25 bp, Homo sapien
ctttgagtggcaccggagtcctagc

SEQ ID NO: 4621079 - DNA, 25 bp, Homo sapien
agtggcaccggagtcctagcttctt

SEQ ID NO: 4621080 - DNA, 25 bp, Homo sapien
ccctttgagtggcaccggagtccta

SEQ ID NO: 4621081 - DNA, 25 bp, Homo sapien
tgtcgccatggcgatacttgcgtaa

SEQ ID NO: 4621082 - DNA, 25 bp, Homo sapien
gatacttgcgtaacaaattccagcc

SEQ ID NO: 4621083 - DNA, 25 bp, Homo sapien
ctccttagcaagaaccacctctgga

SEQ ID NO: 4621084 - DNA, 25 bp, Homo sapien
tctgcccgggagctaaaacgaggtc

SEQ ID NO: 4621085 - DNA, 25 bp, Homo sapien
tattcaagtaacacaaggaataaaa

SEQ ID NO: 4621086 - DNA, 25 bp, Homo sapien
aagagacaagaggtaatcattaaaa

SEQ ID NO: 4621087 - DNA, 25 bp, Homo sapien
aatacaacatatggattgtaaggga

SEQ ID NO: 4621088 - DNA, 25 bp, Homo sapien
caatgatggcatggttataacttaa

SEQ ID NO: 4621089 - DNA, 25 bp, Homo sapien
gaacttaaaattccactgcttgtca

SEQ ID NO: 4621090 - DNA, 25 bp, Homo sapien
taaaattccactgcttgtcataaaa

SEQ ID NO: 4621091 - DNA, 25 bp, Homo sapien
aattccactgcttgtcataaaacat

SEQ ID NO: 4621092 - DNA, 25 bp, Homo sapien
ttactagaacttaaaattccactgc

SEQ ID NO: 4621093 - DNA, 25 bp, Homo sapien
ttctgtggaccctatctgaggtatg

SEQ ID NO: 4621094 - DNA, 25 bp, Homo sapien
gaccattctgtggaccctatctgag

SEQ ID NO: 4621095 - DNA, 25 bp, Homo sapien
gagggtttctgaccattctgtggac

SEQ ID NO: 4621096 - DNA, 25 bp, Homo sapien
cttcaggttatggagggtttctgac

SEQ ID NO: 4621097 - DNA, 25 bp, Homo sapien
ggagcacttgtaccacgtaaattag

SEQ ID NO: 4621098 - DNA, 25 bp, Homo sapien
taggtcctaggtatacagtgttgaa

SEQ ID NO: 4621099 - DNA, 25 bp, Homo sapien
tcctaactgctgagagacaccttag

SEQ ID NO: 4621100 - DNA, 25 bp, Homo sapien
gaaactggccgtactggagcacttg

SEQ ID NO: 4621101 - DNA, 25 bp, Homo sapien
tcagtgctaacaatactaccccaga

SEQ ID NO: 4621102 - DNA, 25 bp, Homo sapien
gataatcacttattgccataccagc

SEQ ID NO: 4621103 - DNA, 25 bp, Homo sapien
caaaccagaccttgacgtatagcag

SEQ ID NO: 4621104 - DNA, 25 bp, Homo sapien
cccagcctggattattgtttatgca

SEQ ID NO: 4621105 - DNA, 25 bp, Homo sapien
ggtactctaaactcttggttcctca

SEQ ID NO: 4621106 - DNA, 25 bp, Homo sapien
cagatgtggaacttcgggtactcta

SEQ ID NO: 4621107 - DNA, 25 bp, Homo sapien
tactctaaactcttggttcctcacc

SEQ ID NO: 4621108 - DNA, 25 bp, Homo sapien
gatgtggaacttcgggtactctaaa

SEQ ID NO: 4621109 - DNA, 25 bp, Homo sapien
agtgaggacgcaggaaacatacact

SEQ ID NO: 4621110 - DNA, 25 bp, Homo sapien
tcaaagtgaggacgcaggaaacata

SEQ ID NO: 4621111 - DNA, 25 bp, Homo sapien
tctagatcaaagtgaggacgcagga

SEQ ID NO: 4621112 - DNA, 25 bp, Homo sapien
gattttctagatcaaagtgaggacg

SEQ ID NO: 4621113 - DNA, 25 bp, Homo sapien
aaggaagaaaggaggcagtgatatt

SEQ ID NO: 4621114 - DNA, 25 bp, Homo sapien
aaaggaagaaaggaggcagtgatat

SEQ ID NO: 4621115 - DNA, 25 bp, Homo sapien
ctgaaaggaagaaaggaggcagtga

SEQ ID NO: 4621116 - DNA, 25 bp, Homo sapien
tgaaaggaagaaaggaggcagtgat

SEQ ID NO: 4621117 - DNA, 25 bp, Homo sapien
ataaaacagaaaactgggccatatt

SEQ ID NO: 4621118 - DNA, 25 bp, Homo sapien
taatgtcttggtaataaaacagaaa

SEQ ID NO: 4621119 - DNA, 25 bp, Homo sapien
ttaatgtcttggtaataaaacagaa

SEQ ID NO: 4621120 - DNA, 25 bp, Homo sapien
taataaaacagaaaactgggccata

SEQ ID NO: 4621121 - DNA, 25 bp, Homo sapien
caaattgccctccagaaatactgta

SEQ ID NO: 4621122 - DNA, 25 bp, Homo sapien
gttcccagcacaaagtacgtccgta

SEQ ID NO: 4621123 - DNA, 25 bp, Homo sapien
tactctttgataggcaagggcatga

SEQ ID NO: 4621124 - DNA, 25 bp, Homo sapien
aattgctagatgtagagttcccagc

SEQ ID NO: 4621125 - DNA, 25 bp, Homo sapien
ggattttcagttggctgattcacaa

SEQ ID NO: 4621126 - DNA, 25 bp, Homo sapien
agagcaaccgtgtctttttaggaca

SEQ ID NO: 4621127 - DNA, 25 bp, Homo sapien
caaaactagtactataaaatgctac

SEQ ID NO: 4621128 - DNA, 25 bp, Homo sapien
taactaagacataatttacctccaa

SEQ ID NO: 4621129 - DNA, 25 bp, Homo sapien
taaacacctagcttttctcagaaag

SEQ ID NO: 4621130 - DNA, 25 bp, Homo sapien
tgttgcaaacccaagtactgttctg

SEQ ID NO: 4621131 - DNA, 25 bp, Homo sapien
aataaagatgtaactcccttaaatg

SEQ ID NO: 4621132 - DNA, 25 bp, Homo sapien
taccagaaacagtgttttcaagaac

SEQ ID NO: 4621133 - DNA, 25 bp, Homo sapien
actcgtataaaataatttaactcat

SEQ ID NO: 4621134 - DNA, 25 bp, Homo sapien
taactcataaaaaggagaatcaaac

SEQ ID NO: 4621135 - DNA, 25 bp, Homo sapien
gcaagcttccactttattaaaaagc

SEQ ID NO: 4621136 - DNA, 25 bp, Homo sapien
agcaagcttccactttattaaaaag

SEQ ID NO: 4621137 - DNA, 25 bp, Homo sapien
tgtgcccggccaacaaaaagcattt

SEQ ID NO: 4621138 - DNA, 25 bp, Homo sapien
gaaacaagccatggtagctacctcc

SEQ ID NO: 4621139 - DNA, 25 bp, Homo sapien
aaaatgctcacaactgaccatggtg

SEQ ID NO: 4621140 - DNA, 25 bp, Homo sapien
tcacacgttaccagagctagagaag

SEQ ID NO: 4621141 - DNA, 25 bp, Homo sapien
cacagcaactcgtgctagcgaaggg

SEQ ID NO: 4621142 - DNA, 25 bp, Homo sapien
tgccctgaggtagcagccagagaag

SEQ ID NO: 4621143 - DNA, 25 bp, Homo sapien
catgccctgaggtagcagccagaga

SEQ ID NO: 4621144 - DNA, 25 bp, Homo sapien
aaccatgccctgaggtagcagccag

SEQ ID NO: 4621145 - DNA, 25 bp, Homo sapien
caaccatgccctgaggtagcagcca

SEQ ID NO: 4621146 - DNA, 25 bp, Homo sapien
ttgggatcccgaggttctcaaaggc

SEQ ID NO: 4621147 - DNA, 25 bp, Homo sapien
tacattgagccagattgtgtgcaca

SEQ ID NO: 4621148 - DNA, 25 bp, Homo sapien
caaaggcatagctggcaacaggccc

SEQ ID NO: 4621149 - DNA, 25 bp, Homo sapien
tgtggcaagaactcctcatttcgtg

SEQ ID NO: 4621150 - DNA, 25 bp, Homo sapien
gagtataggcatttgcacaagtgaa

SEQ ID NO: 4621151 - DNA, 25 bp, Homo sapien
aaaacgctgacaataccaagctttg

SEQ ID NO: 4621152 - DNA, 25 bp, Homo sapien
aattcttacaaattactggtgggag

SEQ ID NO: 4621153 - DNA, 25 bp, Homo sapien
ccaagctttgtcaagaattcttaca

SEQ ID NO: 4621154 - DNA, 25 bp, Homo sapien
aatatttgtacagatagttcacgaa

SEQ ID NO: 4621155 - DNA, 25 bp, Homo sapien
cacgaaatatgtgaatggccaataa

SEQ ID NO: 4621156 - DNA, 25 bp, Homo sapien
gactaagaatagtcacaacacacat

SEQ ID NO: 4621157 - DNA, 25 bp, Homo sapien
gataaactaggcttcgtcaaaatga

SEQ ID NO: 4621158 - DNA, 25 bp, Homo sapien
cataccatgtccatcgattgaaagg

SEQ ID NO: 4621159 - DNA, 25 bp, Homo sapien
aagatatatacaagacttcttcact

SEQ ID NO: 4621160 - DNA, 25 bp, Homo sapien
agatatatacaagacttcttcacta

SEQ ID NO: 4621161 - DNA, 25 bp, Homo sapien
aacataccatgtccatcgattgaaa

SEQ ID NO: 4621162 - DNA, 25 bp, Homo sapien
tccctaaggcacttgcaataaaata

SEQ ID NO: 4621163 - DNA, 25 bp, Homo sapien
gacatgattgtgtacacaaggtatc

SEQ ID NO: 4621164 - DNA, 25 bp, Homo sapien
tacacaaggtatccctaaggcactt

SEQ ID NO: 4621165 - DNA, 25 bp, Homo sapien
gattgtgtacacaaggtatccctaa

SEQ ID NO: 4621166 - DNA, 25 bp, Homo sapien
gtgaaaaactagacgctatcctctg

SEQ ID NO: 4621167 - DNA, 25 bp, Homo sapien
aaaattaaccaagccctgacacctg

SEQ ID NO: 4621168 - DNA, 25 bp, Homo sapien
gaaggtcctagccattacgacaaag

SEQ ID NO: 4621169 - DNA, 25 bp, Homo sapien
tatcctctgctgttgagaataagac

SEQ ID NO: 4621170 - DNA, 25 bp, Homo sapien
gggttctttatcattaggactgcag

SEQ ID NO: 4621171 - DNA, 25 bp, Homo sapien
aaagttgaaaggtctgatctgtcta

SEQ ID NO: 4621172 - DNA, 25 bp, Homo sapien
tcattaggactgcagtcataaagca

SEQ ID NO: 4621173 - DNA, 25 bp, Homo sapien
ggtctgatctgtctacagttaattg

SEQ ID NO: 4621174 - DNA, 25 bp, Homo sapien
gaggaccagataccagactcacatt

SEQ ID NO: 4621175 - DNA, 25 bp, Homo sapien
caggcatgaactgttagagaggacc

SEQ ID NO: 4621176 - DNA, 25 bp, Homo sapien
tgttagagaggaccagataccagac

SEQ ID NO: 4621177 - DNA, 25 bp, Homo sapien
gaactgttagagaggaccagatacc

SEQ ID NO: 4621178 - DNA, 25 bp, Homo sapien
gtttatagacgcctacagtctcaag

SEQ ID NO: 4621179 - DNA, 25 bp, Homo sapien
tcacagtttatagacgcctacagtc

SEQ ID NO: 4621180 - DNA, 25 bp, Homo sapien
tatagacgcctacagtctcaagaag

SEQ ID NO: 4621181 - DNA, 25 bp, Homo sapien
gacgcctacagtctcaagaagacaa

SEQ ID NO: 4621182 - DNA, 25 bp, Homo sapien
gaattcgtaaactaaagtgaggtca

SEQ ID NO: 4621183 - DNA, 25 bp, Homo sapien
ctaaagtgaggtcaaacagagcagc

SEQ ID NO: 4621184 - DNA, 25 bp, Homo sapien
tagccttgtaatcttgattcctaaa

SEQ ID NO: 4621185 - DNA, 25 bp, Homo sapien
ccttgtaatcttgattcctaaaggg

SEQ ID NO: 4621186 - DNA, 25 bp, Homo sapien
gcaatggatccaaactaagtcgaaa

SEQ ID NO: 4621187 - DNA, 25 bp, Homo sapien
taggaccatatcaagggacaacacc

SEQ ID NO: 4621188 - DNA, 25 bp, Homo sapien
taatgctgtcttgagagagccacct

SEQ ID NO: 4621189 - DNA, 25 bp, Homo sapien
taaccactagcacaaccagcattag

SEQ ID NO: 4621190 - DNA, 25 bp, Homo sapien
attagctttttgatacaatgctgga

SEQ ID NO: 4621191 - DNA, 25 bp, Homo sapien
gttgagtatttttgtatacatgttc

SEQ ID NO: 4621192 - DNA, 25 bp, Homo sapien
gcttttgtgacaaatcatatttatt

SEQ ID NO: 4621193 - DNA, 25 bp, Homo sapien
caagaataaaggctacttgatcatg

SEQ ID NO: 4621194 - DNA, 25 bp, Homo sapien
tgccttcctttcgttatggacccaa

SEQ ID NO: 4621195 - DNA, 25 bp, Homo sapien
cttcctttcgttatggacccaatag

SEQ ID NO: 4621196 - DNA, 25 bp, Homo sapien
cctttcgttatggacccaatagtca

SEQ ID NO: 4621197 - DNA, 25 bp, Homo sapien
tcctttcgttatggacccaatagtc

SEQ ID NO: 4621198 - DNA, 25 bp, Homo sapien
atccatctgttcctggagttttttg

SEQ ID NO: 4621199 - DNA, 25 bp, Homo sapien
attgcatctaattgaatcttctctc

SEQ ID NO: 4621200 - DNA, 25 bp, Homo sapien
tggttggtagggtgttaattattgc

SEQ ID NO: 4621201 - DNA, 25 bp, Homo sapien
ccatctgttcctggagttttttggt

SEQ ID NO: 4621202 - DNA, 25 bp, Homo sapien
tattgcgtgatgtatatttacctct

SEQ ID NO: 4621203 - DNA, 25 bp, Homo sapien
tgaacagtttatattcgtttgggta

SEQ ID NO: 4621204 - DNA, 25 bp, Homo sapien
atgagtctttatggttgaacagttt

SEQ ID NO: 4621205 - DNA, 25 bp, Homo sapien
tgatgaacataagcatgcatgagtc

SEQ ID NO: 4621206 - DNA, 25 bp, Homo sapien
tctttctggcctcacaaaaatactg

SEQ ID NO: 4621207 - DNA, 25 bp, Homo sapien
tcttctgctaacatttgtgcgtgga

SEQ ID NO: 4621208 - DNA, 25 bp, Homo sapien
tctcagcttgaaggtactcatacca

SEQ ID NO: 4621209 - DNA, 25 bp, Homo sapien
tctcctctcgtgcattctgggtaac

SEQ ID NO: 4621210 - DNA, 25 bp, Homo sapien
caccaccgggttcacatagtctaaa

SEQ ID NO: 4621211 - DNA, 25 bp, Homo sapien
tcgcgcctagccttatatacaaact

SEQ ID NO: 4621212 - DNA, 25 bp, Homo sapien
agttaaacactactgaccaccaccg

SEQ ID NO: 4621213 - DNA, 25 bp, Homo sapien
gagcattatgtcacagcctttacag

SEQ ID NO: 4621214 - DNA, 25 bp, Homo sapien
ttatgtatcttatctacttagaaca

SEQ ID NO: 4621215 - DNA, 25 bp, Homo sapien
tggcccattgtaagtgttttataca

SEQ ID NO: 4621216 - DNA, 25 bp, Homo sapien
ctggcccattgtaagtgttttatac

SEQ ID NO: 4621217 - DNA, 25 bp, Homo sapien
tctgtgggatcggtcttgatactcc

SEQ ID NO: 4621218 - DNA, 25 bp, Homo sapien
ggtcttgatactccctttatcagtt

SEQ ID NO: 4621219 - DNA, 25 bp, Homo sapien
ggatcggtcttgatactccctttat

SEQ ID NO: 4621220 - DNA, 25 bp, Homo sapien
tgtgggatcggtcttgatactccct

SEQ ID NO: 4621221 - DNA, 25 bp, Homo sapien
tgccagtaaagcgttgagtatgaga

SEQ ID NO: 4621222 - DNA, 25 bp, Homo sapien
gcgttgagtatgagaaccaacagga

SEQ ID NO: 4621223 - DNA, 25 bp, Homo sapien
gaaccaacaggagcagagccatggt

SEQ ID NO: 4621224 - DNA, 25 bp, Homo sapien
gagaaccaacaggagcagagccatg

SEQ ID NO: 4621225 - DNA, 25 bp, Homo sapien
ctatgcttgtccaatctctggtaca

SEQ ID NO: 4621226 - DNA, 25 bp, Homo sapien
tatgcttgtccaatctctggtacag

SEQ ID NO: 4621227 - DNA, 25 bp, Homo sapien
atgcttgtccaatctctggtacagg

SEQ ID NO: 4621228 - DNA, 25 bp, Homo sapien
ttagaacccattctgctgtggagct

SEQ ID NO: 4621229 - DNA, 25 bp, Homo sapien
tgctggcaaaactgaatggacttaa

SEQ ID NO: 4621230 - DNA, 25 bp, Homo sapien
tggtagctacattcatgcctgctaa

SEQ ID NO: 4621231 - DNA, 25 bp, Homo sapien
aaataccaaggatgacaacacaccc

SEQ ID NO: 4621232 - DNA, 25 bp, Homo sapien
gggaagtctaggagtcctctgtaga

SEQ ID NO: 4621233 - DNA, 25 bp, Homo sapien
gatgggaagtctaggagtcctctgt

SEQ ID NO: 4621234 - DNA, 25 bp, Homo sapien
tgccatgtcccactgatgggaagtc

SEQ ID NO: 4621235 - DNA, 25 bp, Homo sapien
ccatgtcccactgatgggaagtcta

SEQ ID NO: 4621236 - DNA, 25 bp, Homo sapien
gagtgtctggtgatttagtccttct

SEQ ID NO: 4621237 - DNA, 25 bp, Homo sapien
aaactgtagccatgtgccaggtaca

SEQ ID NO: 4621238 - DNA, 25 bp, Homo sapien
tatcaaagagataaccctcaggtcc

SEQ ID NO: 4621239 - DNA, 25 bp, Homo sapien
caacttgaagaacatttgcgctagg

SEQ ID NO: 4621240 - DNA, 25 bp, Homo sapien
ttatatgcaactaaagaactgcccc

SEQ ID NO: 4621241 - DNA, 25 bp, Homo sapien
gatgacctgaaataccattgccctg

SEQ ID NO: 4621242 - DNA, 25 bp, Homo sapien
gaaagaaacgtagctcagaagagtc

SEQ ID NO: 4621243 - DNA, 25 bp, Homo sapien
catagcaacttgaagacgtgtctcc

SEQ ID NO: 4621244 - DNA, 25 bp, Homo sapien
aattctagttttgcatcagtttact

SEQ ID NO: 4621245 - DNA, 25 bp, Homo sapien
gcaacacgaagcacaaagaattatt

SEQ ID NO: 4621246 - DNA, 25 bp, Homo sapien
tgtaggccgattagttacaagggaa

SEQ ID NO: 4621247 - DNA, 25 bp, Homo sapien
taaaaactggagcaatactctttaa

SEQ ID NO: 4621248 - DNA, 25 bp, Homo sapien
aacaattgtggtgggatagtgttcc

SEQ ID NO: 4621249 - DNA, 25 bp, Homo sapien
gtgaatcagattaatgtgctttggg

SEQ ID NO: 4621250 - DNA, 25 bp, Homo sapien
gctttgggcgctatggccatattaa

SEQ ID NO: 4621251 - DNA, 25 bp, Homo sapien
tgctatcagcttgaaagctatcggg

SEQ ID NO: 4621252 - DNA, 25 bp, Homo sapien
gttgtccactgggtactaccacagg

SEQ ID NO: 4621253 - DNA, 25 bp, Homo sapien
ttcaagaaagtgcagtcagaaagtg

SEQ ID NO: 4621254 - DNA, 25 bp, Homo sapien
tttacaggcaagtgaggttgtccac

SEQ ID NO: 4621255 - DNA, 25 bp, Homo sapien
taccacaggaccaaagacgaatact

SEQ ID NO: 4621256 - DNA, 25 bp, Homo sapien
gggtacacgccacataacataaaac

SEQ ID NO: 4621257 - DNA, 25 bp, Homo sapien
tagggtacacgccacataacataaa

SEQ ID NO: 4621258 - DNA, 25 bp, Homo sapien
agggtacacgccacataacataaaa

SEQ ID NO: 4621259 - DNA, 25 bp, Homo sapien
ttagggtacacgccacataacataa

SEQ ID NO: 4621260 - DNA, 25 bp, Homo sapien
gactgctgccaaaccggaaggaact

SEQ ID NO: 4621261 - DNA, 25 bp, Homo sapien
tgtgaggttgcgaatgactgctgcc

SEQ ID NO: 4621262 - DNA, 25 bp, Homo sapien
cttcactgaggttgggagatgctcc

SEQ ID NO: 4621263 - DNA, 25 bp, Homo sapien
caaccctggcccatagtctcggaat

SEQ ID NO: 4621264 - DNA, 25 bp, Homo sapien
tttgggatattttgctcaccaggcc

SEQ ID NO: 4621265 - DNA, 25 bp, Homo sapien
tttcatcgcatggaagacagcatcg

SEQ ID NO: 4621266 - DNA, 25 bp, Homo sapien
tagactcgagactggcacatctgga

SEQ ID NO: 4621267 - DNA, 25 bp, Homo sapien
tcaaaagccgtgtctcaagatcgat

SEQ ID NO: 4621268 - DNA, 25 bp, Homo sapien
ccagatgtcgcgtcagaggcgtgca

SEQ ID NO: 4621269 - DNA, 25 bp, Homo sapien
gatagagcaatgagatgacctcgct

SEQ ID NO: 4621270 - DNA, 25 bp, Homo sapien
cagcctcctgattggcggatagagc

SEQ ID NO: 4621271 - DNA, 25 bp, Homo sapien
gagcggagcggcttttagttcaaaa

SEQ ID NO: 4621272 - DNA, 25 bp, Homo sapien
aaagcaaacctcaaacattattggg

SEQ ID NO: 4621273 - DNA, 25 bp, Homo sapien
gcttctagctccattgtggaataca

SEQ ID NO: 4621274 - DNA, 25 bp, Homo sapien
tattgggtatcaattaccacctggt

SEQ ID NO: 4621275 - DNA, 25 bp, Homo sapien
taagttcgtatctaaacctaagaca

SEQ ID NO: 4621276 - DNA, 25 bp, Homo sapien
tgcaaactcagtgcaaacgcctaga

SEQ ID NO: 4621277 - DNA, 25 bp, Homo sapien
tgggtttaccactaactcctgagaa

SEQ ID NO: 4621278 - DNA, 25 bp, Homo sapien
tatgatggctcgtgggatgtcctac

SEQ ID NO: 4621279 - DNA, 25 bp, Homo sapien
gggatagttcccaaaagattgctga

SEQ ID NO: 4621280 - DNA, 25 bp, Homo sapien
gacggcagtcgatgcgttcactcca

SEQ ID NO: 4621281 - DNA, 25 bp, Homo sapien
tatggtgaacccacaacttaggccc

SEQ ID NO: 4621282 - DNA, 25 bp, Homo sapien
tgattagcacttgggtgacggcagt

SEQ ID NO: 4621283 - DNA, 25 bp, Homo sapien
gaaatccttgactggacctggtggc

SEQ ID NO: 4621284 - DNA, 25 bp, Homo sapien
gccagttatgagctcagacacatga

SEQ ID NO: 4621285 - DNA, 25 bp, Homo sapien
tccgcacgggatttgctatgagaac

SEQ ID NO: 4621286 - DNA, 25 bp, Homo sapien
tgacaaacaaaagccttccgcacgg

SEQ ID NO: 4621287 - DNA, 25 bp, Homo sapien
tgtactgagtataacctgaaggtgg

SEQ ID NO: 4621288 - DNA, 25 bp, Homo sapien
tgaagaaaaagaggatggcagatct

SEQ ID NO: 4621289 - DNA, 25 bp, Homo sapien
aagaaaaagaggatggcagatctgt

SEQ ID NO: 4621290 - DNA, 25 bp, Homo sapien
gaaaaagaggatggcagatctgttc

SEQ ID NO: 4621291 - DNA, 25 bp, Homo sapien
aagaggatggcagatctgttcatac

SEQ ID NO: 4621292 - DNA, 25 bp, Homo sapien
ggtcttgcccgtgagggtcttcaca

SEQ ID NO: 4621293 - DNA, 25 bp, Homo sapien
cccgtgagggtcttcacaaagatct

SEQ ID NO: 4621294 - DNA, 25 bp, Homo sapien
tcttgcccgtgagggtcttcacaaa

SEQ ID NO: 4621295 - DNA, 25 bp, Homo sapien
ctcaatggtgtcactgggctcgacc

SEQ ID NO: 4621296 - DNA, 25 bp, Homo sapien
ctccttgtcttgaattttcgcactg

SEQ ID NO: 4621297 - DNA, 25 bp, Homo sapien
ccttgtcttgaattttcgcactgac

SEQ ID NO: 4621298 - DNA, 25 bp, Homo sapien
cttgtcaggggggataccctccttg

SEQ ID NO: 4621299 - DNA, 25 bp, Homo sapien
ccctccttgtcttgaattttcgcac

SEQ ID NO: 4621300 - DNA, 25 bp, Homo sapien
tgtttgctggcaaatatcagacgct

SEQ ID NO: 4621301 - DNA, 25 bp, Homo sapien
tgcagcaccaggtgcggggtgggct

SEQ ID NO: 4621302 - DNA, 25 bp, Homo sapien
ggctgtttctggacgttgtagtctg

SEQ ID NO: 4621303 - DNA, 25 bp, Homo sapien
cagctgtttgctggcaaatatcaga

SEQ ID NO: 4621304 - DNA, 25 bp, Homo sapien
ctggaagagtgaaggctcaataatg

SEQ ID NO: 4621305 - DNA, 25 bp, Homo sapien
agctggaagagtgaaggctcaataa

SEQ ID NO: 4621306 - DNA, 25 bp, Homo sapien
gctggaagagtgaaggctcaataat

SEQ ID NO: 4621307 - DNA, 25 bp, Homo sapien
tcttgcggcaattgacagcataggg

SEQ ID NO: 4621308 - DNA, 25 bp, Homo sapien
aggagagcatagcgcttatggcaga

SEQ ID NO: 4621309 - DNA, 25 bp, Homo sapien
gagcatagcgcttatggcagatcat

SEQ ID NO: 4621310 - DNA, 25 bp, Homo sapien
ttcttgcggcaattgacagcatagg

SEQ ID NO: 4621311 - DNA, 25 bp, Homo sapien
tgtgaactcactccattaggccctt

SEQ ID NO: 4621312 - DNA, 25 bp, Homo sapien
gaagacagcccacttgggaaagacg

SEQ ID NO: 4621313 - DNA, 25 bp, Homo sapien
tggtaagtgaatgcgcaactctggg

SEQ ID NO: 4621314 - DNA, 25 bp, Homo sapien
cactcaggcatgcatggagacccaa

SEQ ID NO: 4621315 - DNA, 25 bp, Homo sapien
aaagaaattgctatccctcctggaa

SEQ ID NO: 4621316 - DNA, 25 bp, Homo sapien
aattttcgagagactcttatcagcg

SEQ ID NO: 4621317 - DNA, 25 bp, Homo sapien
gaccgaaaagagtgcctgtgacata

SEQ ID NO: 4621318 - DNA, 25 bp, Homo sapien
tgtcacggatgtattttgaggaccg

SEQ ID NO: 4621319 - DNA, 25 bp, Homo sapien
accactgtctaccaatggttttgtc

SEQ ID NO: 4621320 - DNA, 25 bp, Homo sapien
tagaaagaagactttcaccaccgtc

SEQ ID NO: 4621321 - DNA, 25 bp, Homo sapien
gattcgttctgtgtatattagctgc

SEQ ID NO: 4621322 - DNA, 25 bp, Homo sapien
gagtgatatcctgagactattctgt

SEQ ID NO: 4621323 - DNA, 25 bp, Homo sapien
ctgaggaatcatcacagcatggaca

SEQ ID NO: 4621324 - DNA, 25 bp, Homo sapien
gaggagctgaggaatcatcacagca

SEQ ID NO: 4621325 - DNA, 25 bp, Homo sapien
catggacaccaatattctctcttgg

SEQ ID NO: 4621326 - DNA, 25 bp, Homo sapien
ctttgaaatgtcgtggcaaatagtc

SEQ ID NO: 4621327 - DNA, 25 bp, Homo sapien
cagtggcacataccacaccctaact

SEQ ID NO: 4621328 - DNA, 25 bp, Homo sapien
ctcagtggcacataccacaccctaa

SEQ ID NO: 4621329 - DNA, 25 bp, Homo sapien
gtggcacataccacaccctaactac

SEQ ID NO: 4621330 - DNA, 25 bp, Homo sapien
agtggcacataccacaccctaacta

SEQ ID NO: 4621331 - DNA, 25 bp, Homo sapien
tattcactacactagggccacagtc

SEQ ID NO: 4621332 - DNA, 25 bp, Homo sapien
gacagcaagtggtattgatgacaga

SEQ ID NO: 4621333 - DNA, 25 bp, Homo sapien
gacccctggtgtagtgaagagaaaa

SEQ ID NO: 4621334 - DNA, 25 bp, Homo sapien
cactgggcatgaggaaataatattc

SEQ ID NO: 4621335 - DNA, 25 bp, Homo sapien
tctacactgtagtatgccttaagga

SEQ ID NO: 4621336 - DNA, 25 bp, Homo sapien
gaaacaagctactatcaggacctct

SEQ ID NO: 4621337 - DNA, 25 bp, Homo sapien
gatggccctcaaaagcgaaacaagc

SEQ ID NO: 4621338 - DNA, 25 bp, Homo sapien
ttgtgacagaaactcgatggccctc

SEQ ID NO: 4621339 - DNA, 25 bp, Homo sapien
aataatgaatacttgtgccaaaagc

SEQ ID NO: 4621340 - DNA, 25 bp, Homo sapien
cagtgtggagttgagtaaataaacc

SEQ ID NO: 4621341 - DNA, 25 bp, Homo sapien
cactcaacaggtagtagctattcta

SEQ ID NO: 4621342 - DNA, 25 bp, Homo sapien
tactttcaccagtaattagcagtgt

SEQ ID NO: 4621343 - DNA, 25 bp, Homo sapien
tagtctttgtatctaattagctaag

SEQ ID NO: 4621344 - DNA, 25 bp, Homo sapien
aattagccgcacatgggagtgcaca

SEQ ID NO: 4621345 - DNA, 25 bp, Homo sapien
gaggacgactatagcccaagaggtt

SEQ ID NO: 4621346 - DNA, 25 bp, Homo sapien
cagtataaatgagctataagaatca

SEQ ID NO: 4621347 - DNA, 25 bp, Homo sapien
gcatccaccttagaggcacacactt

SEQ ID NO: 4621348 - DNA, 25 bp, Homo sapien
ccaccttagaggcacacacttctgc

SEQ ID NO: 4621349 - DNA, 25 bp, Homo sapien
atccaccttagaggcacacacttct

SEQ ID NO: 4621350 - DNA, 25 bp, Homo sapien
agcatccaccttagaggcacacact

SEQ ID NO: 4621351 - DNA, 25 bp, Homo sapien
tggattggtgactggatatctccca

SEQ ID NO: 4621352 - DNA, 25 bp, Homo sapien
tctcccatgaaactcgaaaaacaag

SEQ ID NO: 4621353 - DNA, 25 bp, Homo sapien
ttgttgtacttttccccgatatgga

SEQ ID NO: 4621354 - DNA, 25 bp, Homo sapien
tccccgatatggattggattggtga

SEQ ID NO: 4621355 - DNA, 25 bp, Homo sapien
ctttggagttagatacattccaaat

SEQ ID NO: 4621356 - DNA, 25 bp, Homo sapien
gatacattccaaatagatctccccg

SEQ ID NO: 4621357 - DNA, 25 bp, Homo sapien
tacattccaaatagatctccccggt

SEQ ID NO: 4621358 - DNA, 25 bp, Homo sapien
cattccaaatagatctccccggttt

SEQ ID NO: 4621359 - DNA, 25 bp, Homo sapien
gatcaaatgacagaagctaaattcc

SEQ ID NO: 4621360 - DNA, 25 bp, Homo sapien
aaagattcgcccttatccagccaca

SEQ ID NO: 4621361 - DNA, 25 bp, Homo sapien
ctatgctctagggaccatgtagggc

SEQ ID NO: 4621362 - DNA, 25 bp, Homo sapien
tgggagtattgatgtccacatgggc

SEQ ID NO: 4621363 - DNA, 25 bp, Homo sapien
ggataaaccaggcagtcagccaaat

SEQ ID NO: 4621364 - DNA, 25 bp, Homo sapien
tgaaaagacagcaagcccacacttt

SEQ ID NO: 4621365 - DNA, 25 bp, Homo sapien
caaatgcgggatttgtgggctgact

SEQ ID NO: 4621366 - DNA, 25 bp, Homo sapien
gggctgactaatgtcctgggataaa

SEQ ID NO: 4621367 - DNA, 25 bp, Homo sapien
gtcaaaattctctctatccgccggg

SEQ ID NO: 4621368 - DNA, 25 bp, Homo sapien
tcaaaattctctctatccgccgggt

SEQ ID NO: 4621369 - DNA, 25 bp, Homo sapien
aaaattctctctatccgccgggtgt

SEQ ID NO: 4621370 - DNA, 25 bp, Homo sapien
aattctctctatccgccgggtgtgg

SEQ ID NO: 4621371 - DNA, 25 bp, Homo sapien
tatacaatccggagttgaggagatg

SEQ ID NO: 4621372 - DNA, 25 bp, Homo sapien
tatgtggcaattttcacagttcccc

SEQ ID NO: 4621373 - DNA, 25 bp, Homo sapien
gtccatgcggctcactgttcactat

SEQ ID NO: 4621374 - DNA, 25 bp, Homo sapien
cttaacatgtagcattcaggccaag

SEQ ID NO: 4621375 - DNA, 25 bp, Homo sapien
tgtgttaggtctatgtttttccctg

SEQ ID NO: 4621376 - DNA, 25 bp, Homo sapien
ccatttgtcctgtgttaggtctatg

SEQ ID NO: 4621377 - DNA, 25 bp, Homo sapien
tcagtgaaggcgttcattggagaga

SEQ ID NO: 4621378 - DNA, 25 bp, Homo sapien
ctggtgtgtccttcatgctttggat

SEQ ID NO: 4621379 - DNA, 25 bp, Homo sapien
ttatcacccagcttcgtaggaaatt

SEQ ID NO: 4621380 - DNA, 25 bp, Homo sapien
aatacagctaatcagtgatggatcc

SEQ ID NO: 4621381 - DNA, 25 bp, Homo sapien
gatggatcctggtatagaatgaagc

SEQ ID NO: 4621382 - DNA, 25 bp, Homo sapien
ggaaattcctagctccgtaatcatc

SEQ ID NO: 4621383 - DNA, 25 bp, Homo sapien
tgtctggcctcctttgatgaacagg

SEQ ID NO: 4621384 - DNA, 25 bp, Homo sapien
atgaacaggcagattctgtaaaatt

SEQ ID NO: 4621385 - DNA, 25 bp, Homo sapien
aatggccccagtttaatcactgtgc

SEQ ID NO: 4621386 - DNA, 25 bp, Homo sapien
tcatatgaatggccccagtttaatc

SEQ ID NO: 4621387 - DNA, 25 bp, Homo sapien
tcactgtgctcctcattcccaaatt

SEQ ID NO: 4621388 - DNA, 25 bp, Homo sapien
gccccagtttaatcactgtgctcct

SEQ ID NO: 4621389 - DNA, 25 bp, Homo sapien
aagtcactggtctgagttcttaaac

SEQ ID NO: 4621390 - DNA, 25 bp, Homo sapien
gtcactggtctgagttcttaaactc

SEQ ID NO: 4621391 - DNA, 25 bp, Homo sapien
agtcactggtctgagttcttaaact

SEQ ID NO: 4621392 - DNA, 25 bp, Homo sapien
ctaagtcactggtctgagttcttaa

SEQ ID NO: 4621393 - DNA, 25 bp, Homo sapien
cccagagttaagcaaagctttttgg

SEQ ID NO: 4621394 - DNA, 25 bp, Homo sapien
cagagggcagcaacttcgaagcttg

SEQ ID NO: 4621395 - DNA, 25 bp, Homo sapien
agctttttgggttagcctctgacca

SEQ ID NO: 4621396 - DNA, 25 bp, Homo sapien
ctggctggacttctcaatgccccaa

SEQ ID NO: 4621397 - DNA, 25 bp, Homo sapien
tcgggaagtgctagcagcaatgttt

SEQ ID NO: 4621398 - DNA, 25 bp, Homo sapien
tagaacgtagaactcgggaagtgct

SEQ ID NO: 4621399 - DNA, 25 bp, Homo sapien
tggtggatgttgtagaacgtagaac

SEQ ID NO: 4621400 - DNA, 25 bp, Homo sapien
gggaagtgctagcagcaatgtttct

SEQ ID NO: 4621401 - DNA, 25 bp, Homo sapien
tgtagagcttcgtatccccaatgag

SEQ ID NO: 4621402 - DNA, 25 bp, Homo sapien
gatacagtaatgtttgtataactgg

SEQ ID NO: 4621403 - DNA, 25 bp, Homo sapien
aactggagttacacattgtttgaca

SEQ ID NO: 4621404 - DNA, 25 bp, Homo sapien
caccatcttcaagtgtgtagagctt

SEQ ID NO: 4621405 - DNA, 25 bp, Homo sapien
caggtttctcttcggaatcacttcc

SEQ ID NO: 4621406 - DNA, 25 bp, Homo sapien
tttctttccatgtacttggtgatgt

SEQ ID NO: 4621407 - DNA, 25 bp, Homo sapien
ttttcaggtttctcttcggaatcac

SEQ ID NO: 4621408 - DNA, 25 bp, Homo sapien
tctcttcggaatcacttccctgctg

SEQ ID NO: 4621409 - DNA, 25 bp, Homo sapien
tgcactggaattgctctgagctaac

SEQ ID NO: 4621410 - DNA, 25 bp, Homo sapien
ctgagctaacttatggtgaatctac

SEQ ID NO: 4621411 - DNA, 25 bp, Homo sapien
tattacttgtactccaagtctggac

SEQ ID NO: 4621412 - DNA, 25 bp, Homo sapien
ggatcacagaccatacttgcactgg

SEQ ID NO: 4621413 - DNA, 25 bp, Homo sapien
tagcctccatgtagcagaaagctgc

SEQ ID NO: 4621414 - DNA, 25 bp, Homo sapien
taaatcttgactctggccctagcct

SEQ ID NO: 4621415 - DNA, 25 bp, Homo sapien
gctgaccagtgtgctgcaaagcata

SEQ ID NO: 4621416 - DNA, 25 bp, Homo sapien
tatgcagtagctcacaaggaaacac

SEQ ID NO: 4621417 - DNA, 25 bp, Homo sapien
tgatgacaacacaggaaaatatacc

SEQ ID NO: 4621418 - DNA, 25 bp, Homo sapien
tctgccacagctttgatctatatgc

SEQ ID NO: 4621419 - DNA, 25 bp, Homo sapien
taccagcggtgcaacttctttatgc

SEQ ID NO: 4621420 - DNA, 25 bp, Homo sapien
gacagcatctggcactaggtaagca

SEQ ID NO: 4621421 - DNA, 25 bp, Homo sapien
tccaaaggcaaaactctctggctat

SEQ ID NO: 4621422 - DNA, 25 bp, Homo sapien
ctggctattaccaccactctcttga

SEQ ID NO: 4621423 - DNA, 25 bp, Homo sapien
actgcaatgctttgccctgaagcta

SEQ ID NO: 4621424 - DNA, 25 bp, Homo sapien
tggactccccagaactaatatgacc

SEQ ID NO: 4621425 - DNA, 25 bp, Homo sapien
cctgggctgcagaacccatcaatga

SEQ ID NO: 4621426 - DNA, 25 bp, Homo sapien
ccacccccactgaccccacatcggg

SEQ ID NO: 4621427 - DNA, 25 bp, Homo sapien
ccttggctaagggaagtggcctctc

SEQ ID NO: 4621428 - DNA, 25 bp, Homo sapien
ccatcaatgatgttgccgtgcccct

SEQ ID NO: 4621429 - DNA, 25 bp, Homo sapien
ggggccctgcgccccacacactctg

SEQ ID NO: 4621430 - DNA, 25 bp, Homo sapien
ggccctgcgccccacacactctgac

SEQ ID NO: 4621431 - DNA, 25 bp, Homo sapien
cgggggccctgcgccccacacactc

SEQ ID NO: 4621432 - DNA, 25 bp, Homo sapien
cgccccacacactctgaccccgcat

SEQ ID NO: 4621433 - DNA, 25 bp, Homo sapien
ggcatggcaggcaccctcaaaggca

SEQ ID NO: 4621434 - DNA, 25 bp, Homo sapien
gcatggcaggcaccctcaaaggcag

SEQ ID NO: 4621435 - DNA, 25 bp, Homo sapien
gtaactggtgaatagacttgttaaa

SEQ ID NO: 4621436 - DNA, 25 bp, Homo sapien
taccacattactatgattttgtaac

SEQ ID NO: 4621437 - DNA, 25 bp, Homo sapien
gttgtgcctgtaccacattactatg

SEQ ID NO: 4621438 - DNA, 25 bp, Homo sapien
cttactgttgaatgttgtgcctgta

SEQ ID NO: 4621439 - DNA, 25 bp, Homo sapien
tgaactcttaactctgacccagtct

SEQ ID NO: 4621440 - DNA, 25 bp, Homo sapien
ggtgtgtgctgtcacatcctcatgt

SEQ ID NO: 4621441 - DNA, 25 bp, Homo sapien
cttgccagtatcaccacaagtgttg

SEQ ID NO: 4621442 - DNA, 25 bp, Homo sapien
ccagtctccagtatccttgccagta

SEQ ID NO: 4621443 - DNA, 25 bp, Homo sapien
ctttggttcttctgtctctcctctt

SEQ ID NO: 4621444 - DNA, 25 bp, Homo sapien
ttggttcttctgtctctcctcttca

SEQ ID NO: 4621445 - DNA, 25 bp, Homo sapien
tttggttcttctgtctctcctcttc

SEQ ID NO: 4621446 - DNA, 25 bp, Homo sapien
tggttcttctgtctctcctcttcat

SEQ ID NO: 4621447 - DNA, 25 bp, Homo sapien
agaatgccagaccttcggcgtctgc

SEQ ID NO: 4621448 - DNA, 25 bp, Homo sapien
aatgccagaccttcggcgtctgcaa

SEQ ID NO: 4621449 - DNA, 25 bp, Homo sapien
tcacagaatgccagaccttcggcgt

SEQ ID NO: 4621450 - DNA, 25 bp, Homo sapien
acagaatgccagaccttcggcgtct

SEQ ID NO: 4621451 - DNA, 25 bp, Homo sapien
gaaacaccatcactgggacaattgg

SEQ ID NO: 4621452 - DNA, 25 bp, Homo sapien
accatcactgggacaattgggtgcg

SEQ ID NO: 4621453 - DNA, 25 bp, Homo sapien
tcactgggacaattgggtgcgacga

SEQ ID NO: 4621454 - DNA, 25 bp, Homo sapien
cacggaaacaccatcactgggacaa

SEQ ID NO: 4621455 - DNA, 25 bp, Homo sapien
gtggttgattccaacacatatacct

SEQ ID NO: 4621456 - DNA, 25 bp, Homo sapien
ttgattccaacacatataccttccc

SEQ ID NO: 4621457 - DNA, 25 bp, Homo sapien
ctgtggttgattccaacacatatac

SEQ ID NO: 4621458 - DNA, 25 bp, Homo sapien
ggttgattccaacacatataccttc

SEQ ID NO: 4621459 - DNA, 25 bp, Homo sapien
tcggccattccatctagtgaactgc

SEQ ID NO: 4621460 - DNA, 25 bp, Homo sapien
gactttcggccattccatctagtga

SEQ ID NO: 4621461 - DNA, 25 bp, Homo sapien
ctaccacatgggactttcggccatt

SEQ ID NO: 4621462 - DNA, 25 bp, Homo sapien
ccatctagtgaactgccgaagagct

SEQ ID NO: 4621463 - DNA, 25 bp, Homo sapien
tagtaccaagagggaactttatagc

SEQ ID NO: 4621464 - DNA, 25 bp, Homo sapien
acgcccagccataatacacatcttt

SEQ ID NO: 4621465 - DNA, 25 bp, Homo sapien
gcttgatagtacaaacactgtcact

SEQ ID NO: 4621466 - DNA, 25 bp, Homo sapien
tgggaataccctaatatcatttttc

SEQ ID NO: 4621467 - DNA, 25 bp, Homo sapien
caacagagaagaagcttgatagtac

SEQ ID NO: 4621468 - DNA, 25 bp, Homo sapien
cactgtcactattgtttcttgggaa

SEQ ID NO: 4621469 - DNA, 25 bp, Homo sapien
tctgggacacattcaaagcagtgtg

SEQ ID NO: 4621470 - DNA, 25 bp, Homo sapien
aaagcaggaaagatccaaaattgac

SEQ ID NO: 4621471 - DNA, 25 bp, Homo sapien
ggacacattcaaagcagtgtgtaga

SEQ ID NO: 4621472 - DNA, 25 bp, Homo sapien
gatccaaaattgacaccctaacatc

SEQ ID NO: 4621473 - DNA, 25 bp, Homo sapien
tgagcttgaaaaaccaaagcctaag

SEQ ID NO: 4621474 - DNA, 25 bp, Homo sapien
gattttctacccgattgagcttgaa

SEQ ID NO: 4621475 - DNA, 25 bp, Homo sapien
aatgtttccctaaggcctgaatgga

SEQ ID NO: 4621476 - DNA, 25 bp, Homo sapien
tgttagattttctacccgattgagc

SEQ ID NO: 4621477 - DNA, 25 bp, Homo sapien
taactggcccacagtatatgaccaa

SEQ ID NO: 4621478 - DNA, 25 bp, Homo sapien
caatttgaaacctgggaatcttgag

SEQ ID NO: 4621479 - DNA, 25 bp, Homo sapien
tctgctgttggaaaattgaattcaa

SEQ ID NO: 4621480 - DNA, 25 bp, Homo sapien
tgagagaaagcatcaggtctgctgt

SEQ ID NO: 4621481 - DNA, 25 bp, Homo sapien
tcaatactcttcaacgaagtctctc

SEQ ID NO: 4621482 - DNA, 25 bp, Homo sapien
attcaatactcttcaacgaagtctc

SEQ ID NO: 4621483 - DNA, 25 bp, Homo sapien
tactcttcaacgaagtctctccttc

SEQ ID NO: 4621484 - DNA, 25 bp, Homo sapien
aatactcttcaacgaagtctctcct

SEQ ID NO: 4621485 - DNA, 25 bp, Homo sapien
gacacactttgtcatggttcacttg

SEQ ID NO: 4621486 - DNA, 25 bp, Homo sapien
tcacaaagacacactttgtcatggt

SEQ ID NO: 4621487 - DNA, 25 bp, Homo sapien
catggttcacttggaaaaatccaaa

SEQ ID NO: 4621488 - DNA, 25 bp, Homo sapien
ggaggtggatgaataataaaccaaa

SEQ ID NO: 4621489 - DNA, 25 bp, Homo sapien
caagtggaaagtgcgctgaccgcag

SEQ ID NO: 4621490 - DNA, 25 bp, Homo sapien
aatttctggccgggagtcccaagtg

SEQ ID NO: 4621491 - DNA, 25 bp, Homo sapien
ggacgcgccgtggtcctactgagct

SEQ ID NO: 4621492 - DNA, 25 bp, Homo sapien
tccactcggaaggagttgggacgac

SEQ ID NO: 4621493 - DNA, 25 bp, Homo sapien
ctgctgccacactgtgaccgctcca

SEQ ID NO: 4621494 - DNA, 25 bp, Homo sapien
tgctgccacactgtgaccgctccat

SEQ ID NO: 4621495 - DNA, 25 bp, Homo sapien
aggtcggccgctaacgcctcggtct

SEQ ID NO: 4621496 - DNA, 25 bp, Homo sapien
gccaagtgaggtcggccgctaacgc

SEQ ID NO: 4621497 - DNA, 25 bp, Homo sapien
cccaggggccaagtgaggtcggccg

SEQ ID NO: 4621498 - DNA, 25 bp, Homo sapien
tgaggtcggccgctaacgcctcggt

SEQ ID NO: 4621499 - DNA, 25 bp, Homo sapien
ggccgctgctcgcagaaagaggctg

SEQ ID NO: 4621500 - DNA, 25 bp, Homo sapien
cggccgctgctcgcagaaagaggct

SEQ ID NO: 4621501 - DNA, 25 bp, Homo sapien
gcggccgctgctcgcagaaagaggc

SEQ ID NO: 4621502 - DNA, 25 bp, Homo sapien
ccgcggccgctgctcgcagaaagag

SEQ ID NO: 4621503 - DNA, 25 bp, Homo sapien
gcgtccgcgggtagccgcagcccac

SEQ ID NO: 4621504 - DNA, 25 bp, Homo sapien
cttgggcgtccgcgggtagccgcag

SEQ ID NO: 4621505 - DNA, 25 bp, Homo sapien
ccaccgcgcctaccccgctctccag

SEQ ID NO: 4621506 - DNA, 25 bp, Homo sapien
gcgggtagccgcagcccaccgcgcc

SEQ ID NO: 4621507 - DNA, 25 bp, Homo sapien
cacaccatggttacgacagcgggcg

SEQ ID NO: 4621508 - DNA, 25 bp, Homo sapien
ccacaccatggttacgacagcgggc

SEQ ID NO: 4621509 - DNA, 25 bp, Homo sapien
caccacaccatggttacgacagcgg

SEQ ID NO: 4621510 - DNA, 25 bp, Homo sapien
accacaccatggttacgacagcggg

SEQ ID NO: 4621511 - DNA, 25 bp, Homo sapien
cccgccagcggcagaagcgcttgtg

SEQ ID NO: 4621512 - DNA, 25 bp, Homo sapien
cgcagtcccgccagcggcagaagcg

SEQ ID NO: 4621513 - DNA, 25 bp, Homo sapien
gcgcagtcccgccagcggcagaagc

SEQ ID NO: 4621514 - DNA, 25 bp, Homo sapien
agtcccgccagcggcagaagcgctt

SEQ ID NO: 4621515 - DNA, 25 bp, Homo sapien
cgcgctggcgctcggcgatcagggt

SEQ ID NO: 4621516 - DNA, 25 bp, Homo sapien
cgggcttcgctctcctcctgcgcct

SEQ ID NO: 4621517 - DNA, 25 bp, Homo sapien
gtagcccccgggcttcgctctcctc

SEQ ID NO: 4621518 - DNA, 25 bp, Homo sapien
ggccatgacgcgctggcgctcggcg

SEQ ID NO: 4621519 - DNA, 25 bp, Homo sapien
agggccgcccgtggactgtggattc

SEQ ID NO: 4621520 - DNA, 25 bp, Homo sapien
tttcctcaggataatcttgctggaa

SEQ ID NO: 4621521 - DNA, 25 bp, Homo sapien
cttgctggaaaacttcgaaagcggg

SEQ ID NO: 4621522 - DNA, 25 bp, Homo sapien
ggataatcttgctggaaaacttcga

SEQ ID NO: 4621523 - DNA, 25 bp, Homo sapien
cctcaggataatcttgctggaaaac

SEQ ID NO: 4621524 - DNA, 25 bp, Homo sapien
aacagtaaattcctccaaagtgaag

SEQ ID NO: 4621525 - DNA, 25 bp, Homo sapien
ggcgatggggtctctcacactctca

SEQ ID NO: 4621526 - DNA, 25 bp, Homo sapien
caaagtgaaggcgatggggtctctc

SEQ ID NO: 4621527 - DNA, 25 bp, Homo sapien
ctgagggaacaacagtaaattcctc

SEQ ID NO: 4621528 - DNA, 25 bp, Homo sapien
tgtttcccaatgacaccattagacc

SEQ ID NO: 4621529 - DNA, 25 bp, Homo sapien
ccgatactttgtttcccaatgacac

SEQ ID NO: 4621530 - DNA, 25 bp, Homo sapien
aaatagatgacccgatactttgttt

SEQ ID NO: 4621531 - DNA, 25 bp, Homo sapien
atgacaccattagacctagaagatg

SEQ ID NO: 4621532 - DNA, 25 bp, Homo sapien
cacatcccctttgcagaaccgtaga

SEQ ID NO: 4621533 - DNA, 25 bp, Homo sapien
gtagaatgccttctagccggctgcg

SEQ ID NO: 4621534 - DNA, 25 bp, Homo sapien
gaaggcttgccttggtcgcagtcaa

SEQ ID NO: 4621535 - DNA, 25 bp, Homo sapien
taaaacctgttcaatggcttggacc

SEQ ID NO: 4621536 - DNA, 25 bp, Homo sapien
caggagatggcgcagtcttatttcc

SEQ ID NO: 4621537 - DNA, 25 bp, Homo sapien
aaaaatctttagtgagtcatgctgc

SEQ ID NO: 4621538 - DNA, 25 bp, Homo sapien
tagttttcaaatgcgccagagggag

SEQ ID NO: 4621539 - DNA, 25 bp, Homo sapien
tacagagctcagttgcaattggcga

SEQ ID NO: 4621540 - DNA, 25 bp, Homo sapien
gcaaaactgtgtgtctgtacgccat

SEQ ID NO: 4621541 - DNA, 25 bp, Homo sapien
tagacattgtactacggtttaggct

SEQ ID NO: 4621542 - DNA, 25 bp, Homo sapien
tttaggagattcaagaacccagtga

SEQ ID NO: 4621543 - DNA, 25 bp, Homo sapien
gaatcaccaaggaatctaacctgaa

SEQ ID NO: 4621544 - DNA, 25 bp, Homo sapien
gctgaagtgagcacagtaattccac

SEQ ID NO: 4621545 - DNA, 25 bp, Homo sapien
aaatctagtgtataggttgagaacc

SEQ ID NO: 4621546 - DNA, 25 bp, Homo sapien
gatgactcatattactaaccttagg

SEQ ID NO: 4621547 - DNA, 25 bp, Homo sapien
tatcagacactgttcaaggccatga

SEQ ID NO: 4621548 - DNA, 25 bp, Homo sapien
gaggcagccactacactcttggaca

SEQ ID NO: 4621549 - DNA, 25 bp, Homo sapien
gatgctttatcatacgaggcagcca

SEQ ID NO: 4621550 - DNA, 25 bp, Homo sapien
tattcccttgtaagtcacgcactgc

SEQ ID NO: 4621551 - DNA, 25 bp, Homo sapien
tatagaccgtgagcaacttgaggca

SEQ ID NO: 4621552 - DNA, 25 bp, Homo sapien
tacgctgctctagtgatggctgccc

SEQ ID NO: 4621553 - DNA, 25 bp, Homo sapien
tactctttgttgagagactgccacg

SEQ ID NO: 4621554 - DNA, 25 bp, Homo sapien
tatgttacaaaacacgtggctcgcc

SEQ ID NO: 4621555 - DNA, 25 bp, Homo sapien
gaagtctggaactaagcctgtacgc

SEQ ID NO: 4621556 - DNA, 25 bp, Homo sapien
tgagcttttcagtggtatctacttc

SEQ ID NO: 4621557 - DNA, 25 bp, Homo sapien
ctcattggatacaacacaacatcgt

SEQ ID NO: 4621558 - DNA, 25 bp, Homo sapien
tagacatcgaggttaaggctgagct

SEQ ID NO: 4621559 - DNA, 25 bp, Homo sapien
tcgtgcaggcaacatttgcaaagtg

SEQ ID NO: 4621560 - DNA, 25 bp, Homo sapien
ccttgaaatgcctggagcacattta

SEQ ID NO: 4621561 - DNA, 25 bp, Homo sapien
cttgaaatgcctggagcacatttac

SEQ ID NO: 4621562 - DNA, 25 bp, Homo sapien
tggtcacagtaaagctataatggga

SEQ ID NO: 4621563 - DNA, 25 bp, Homo sapien
catttacaggagaagcatgttagat

SEQ ID NO: 4621564 - DNA, 25 bp, Homo sapien
cataacatgcacaataatagtacca

SEQ ID NO: 4621565 - DNA, 25 bp, Homo sapien
gatattaagctagcataatccgaag

SEQ ID NO: 4621566 - DNA, 25 bp, Homo sapien
caagaaggtgtttatctgttttaca

SEQ ID NO: 4621567 - DNA, 25 bp, Homo sapien
ctaattgctgcacttgttagagtgt

SEQ ID NO: 4621568 - DNA, 25 bp, Homo sapien
tgttagagtgtgcaagaaggtgttt

SEQ ID NO: 4621569 - DNA, 25 bp, Homo sapien
tgtttggtgccaagacatcctgggg

SEQ ID NO: 4621570 - DNA, 25 bp, Homo sapien
atcatcagggtcagtaatagcagca

SEQ ID NO: 4621571 - DNA, 25 bp, Homo sapien
tcattcatcatcagggtcagtaata

SEQ ID NO: 4621572 - DNA, 25 bp, Homo sapien
ttcatcatcagggtcagtaatagca

SEQ ID NO: 4621573 - DNA, 25 bp, Homo sapien
catcatcagggtcagtaatagcagc

SEQ ID NO: 4621574 - DNA, 25 bp, Homo sapien
ggctgatacaactcagaagtgtggt

SEQ ID NO: 4621575 - DNA, 25 bp, Homo sapien
tctgggagattattgagaagctggc

SEQ ID NO: 4621576 - DNA, 25 bp, Homo sapien
gagaagctggctgatacaactcaga

SEQ ID NO: 4621577 - DNA, 25 bp, Homo sapien
gaagtgtggtgttgatagctctccc

SEQ ID NO: 4621578 - DNA, 25 bp, Homo sapien
gattaagtgccatatggcaccaaga

SEQ ID NO: 4621579 - DNA, 25 bp, Homo sapien
taaattttagattaagtgccatatg

SEQ ID NO: 4621580 - DNA, 25 bp, Homo sapien
ttcttaaccacatgttttaatttga

SEQ ID NO: 4621581 - DNA, 25 bp, Homo sapien
tgaatttactgaggagtgatttgct

SEQ ID NO: 4621582 - DNA, 25 bp, Homo sapien
ttcatttttagtacattctttacac

SEQ ID NO: 4621583 - DNA, 25 bp, Homo sapien
tttttagtacattctttacacctca

SEQ ID NO: 4621584 - DNA, 25 bp, Homo sapien
catttttagtacattctttacacct

SEQ ID NO: 4621585 - DNA, 25 bp, Homo sapien
tcatttttagtacattctttacacc

SEQ ID NO: 4621586 - DNA, 25 bp, Homo sapien
tattcctccacaatattgtcctgtc

SEQ ID NO: 4621587 - DNA, 25 bp, Homo sapien
ttattcctccacaatattgtcctgt

SEQ ID NO: 4621588 - DNA, 25 bp, Homo sapien
attcctccacaatattgtcctgtcc

SEQ ID NO: 4621589 - DNA, 25 bp, Homo sapien
gactgtgatggaggattcattataa

SEQ ID NO: 4621590 - DNA, 25 bp, Homo sapien
gttcataagtgcaaatcgtacccat

SEQ ID NO: 4621591 - DNA, 25 bp, Homo sapien
tatagacatctatgttccactctta

SEQ ID NO: 4621592 - DNA, 25 bp, Homo sapien
aaaagaccgagaaaacagactgtga

SEQ ID NO: 4621593 - DNA, 25 bp, Homo sapien
tgcagaaccaacatgaatatgcctc

SEQ ID NO: 4621594 - DNA, 25 bp, Homo sapien
tgtttatatgatctacttgggtcct

SEQ ID NO: 4621595 - DNA, 25 bp, Homo sapien
tctggttctccaatgccactaatgg

SEQ ID NO: 4621596 - DNA, 25 bp, Homo sapien
cagccccatgctgtcgtgacaatca

SEQ ID NO: 4621597 - DNA, 25 bp, Homo sapien
tcaactaagtcctgatggcatttgt

SEQ ID NO: 4621598 - DNA, 25 bp, Homo sapien
cacaggattcactatcaactaagtc

SEQ ID NO: 4621599 - DNA, 25 bp, Homo sapien
ttcactatcaactaagtcctgatgg

SEQ ID NO: 4621600 - DNA, 25 bp, Homo sapien
tgttttctattggcagataacctcc

SEQ ID NO: 4621601 - DNA, 25 bp, Homo sapien
cttattcttcataacatgctggtac

SEQ ID NO: 4621602 - DNA, 25 bp, Homo sapien
gcttattcttcataacatgctggta

SEQ ID NO: 4621603 - DNA, 25 bp, Homo sapien
aagtgacacgcaagtattgttttgt

SEQ ID NO: 4621604 - DNA, 25 bp, Homo sapien
gagcaaagtgacacgcaagtattgt

SEQ ID NO: 4621605 - DNA, 25 bp, Homo sapien
taaaggatacaagagaattagactt

SEQ ID NO: 4621606 - DNA, 25 bp, Homo sapien
ctgagcaaagtgacacgcaagtatt

SEQ ID NO: 4621607 - DNA, 25 bp, Homo sapien
ctttttgccattgttctgagacttc

SEQ ID NO: 4621608 - DNA, 25 bp, Homo sapien
gacctccagaaattgcactgacatg

SEQ ID NO: 4621609 - DNA, 25 bp, Homo sapien
caaatgtatcatgccctccgtattt

SEQ ID NO: 4621610 - DNA, 25 bp, Homo sapien
ttcagggctacaattgacctccaga

SEQ ID NO: 4621611 - DNA, 25 bp, Homo sapien
gatgacaacctttctagggcacatc

SEQ ID NO: 4621612 - DNA, 25 bp, Homo sapien
gaagagcatagctgcagagcatagc

SEQ ID NO: 4621613 - DNA, 25 bp, Homo sapien
gagcatagcattttgtaaggatgac

SEQ ID NO: 4621614 - DNA, 25 bp, Homo sapien
taattgaacccatcttgtgttactc

SEQ ID NO: 4621615 - DNA, 25 bp, Homo sapien
actgtctagaggtctcacctgaaga

SEQ ID NO: 4621616 - DNA, 25 bp, Homo sapien
tctagaggtctcacctgaagatgtg

SEQ ID NO: 4621617 - DNA, 25 bp, Homo sapien
tgtctagaggtctcacctgaagatg

SEQ ID NO: 4621618 - DNA, 25 bp, Homo sapien
tgaagatgtggaagttccactaaaa

SEQ ID NO: 4621619 - DNA, 25 bp, Homo sapien
taaatgtacgtgcataacatggcag

SEQ ID NO: 4621620 - DNA, 25 bp, Homo sapien
cagaaaatactatagcaggatagga

SEQ ID NO: 4621621 - DNA, 25 bp, Homo sapien
gaagttgcagactttcgcaagtgat

SEQ ID NO: 4621622 - DNA, 25 bp, Homo sapien
tatactgaacccactataatttagt

SEQ ID NO: 4621623 - DNA, 25 bp, Homo sapien
gccatgtaactttctgctgagactg

SEQ ID NO: 4621624 - DNA, 25 bp, Homo sapien
tggccatgtaactttctgctgagac

SEQ ID NO: 4621625 - DNA, 25 bp, Homo sapien
gaatctccgaattcatttggccatg

SEQ ID NO: 4621626 - DNA, 25 bp, Homo sapien
ggcaggatttgaatctccgaattca

SEQ ID NO: 4621627 - DNA, 25 bp, Homo sapien
tcttgtaaggctcatttagtatcat

SEQ ID NO: 4621628 - DNA, 25 bp, Homo sapien
gcaaaaaatagaataggagatgtat

SEQ ID NO: 4621629 - DNA, 25 bp, Homo sapien
gaatggcagaggcaaagcttgtgca

SEQ ID NO: 4621630 - DNA, 25 bp, Homo sapien
taaaaccattggctcttgtaaggct

SEQ ID NO: 4621631 - DNA, 25 bp, Homo sapien
gcagagactcatcatatacaaggga

SEQ ID NO: 4621632 - DNA, 25 bp, Homo sapien
tgtgggaaggcatatttaaagcgct

SEQ ID NO: 4621633 - DNA, 25 bp, Homo sapien
tgtatttggctaaaaccgacttcac

SEQ ID NO: 4621634 - DNA, 25 bp, Homo sapien
gaaagtacactaggctgtagctgaa

SEQ ID NO: 4621635 - DNA, 25 bp, Homo sapien
gatgtacagtatgagagttaaagga

SEQ ID NO: 4621636 - DNA, 25 bp, Homo sapien
tttaacaatgacatgtcgctttgtc

SEQ ID NO: 4621637 - DNA, 25 bp, Homo sapien
aatgacatgtcgctttgtcagggat

SEQ ID NO: 4621638 - DNA, 25 bp, Homo sapien
tgtcgctttgtcagggatgtctttg

SEQ ID NO: 4621639 - DNA, 25 bp, Homo sapien
tgatgcttatacaatcttctactca

SEQ ID NO: 4621640 - DNA, 25 bp, Homo sapien
aaactcgactgcataggaatcttga

SEQ ID NO: 4621641 - DNA, 25 bp, Homo sapien
cataggaatcttgagaattttagtc

SEQ ID NO: 4621642 - DNA, 25 bp, Homo sapien
ttctttgttggaactcagtcatatg

SEQ ID NO: 4621643 - DNA, 25 bp, Homo sapien
tctgatactggaagctcataggctt

SEQ ID NO: 4621644 - DNA, 25 bp, Homo sapien
tactggaagctcataggcttcacgg

SEQ ID NO: 4621645 - DNA, 25 bp, Homo sapien
tcatctgatactggaagctcatagg

SEQ ID NO: 4621646 - DNA, 25 bp, Homo sapien
agctcataggcttcacggtagcacc

SEQ ID NO: 4621647 - DNA, 25 bp, Homo sapien
cagtatttgattctgggtgttttgg

SEQ ID NO: 4621648 - DNA, 25 bp, Homo sapien
gtatttgattctgggtgttttggtg

SEQ ID NO: 4621649 - DNA, 25 bp, Homo sapien
cagcagtatttgattctgggtgttt

SEQ ID NO: 4621650 - DNA, 25 bp, Homo sapien
gcagtatttgattctgggtgttttg

SEQ ID NO: 4621651 - DNA, 25 bp, Homo sapien
gatatatgcagagaatttggcaaag

SEQ ID NO: 4621652 - DNA, 25 bp, Homo sapien
tcttgatatatgcagagaatttggc

SEQ ID NO: 4621653 - DNA, 25 bp, Homo sapien
cttgaattcttgatatatgcagaga

SEQ ID NO: 4621654 - DNA, 25 bp, Homo sapien
cttgatatatgcagagaatttggca

SEQ ID NO: 4621655 - DNA, 25 bp, Homo sapien
tgacagcagattgcaatcagctaat

SEQ ID NO: 4621656 - DNA, 25 bp, Homo sapien
gctgtccagaaatttacgtttagaa

SEQ ID NO: 4621657 - DNA, 25 bp, Homo sapien
acaatatgcagctttgacagcagat

SEQ ID NO: 4621658 - DNA, 25 bp, Homo sapien
cattgctgtccagaaatttacgttt

SEQ ID NO: 4621659 - DNA, 25 bp, Homo sapien
ttcttttggaatatcaaagttgcga

SEQ ID NO: 4621660 - DNA, 25 bp, Homo sapien
cttttggaatatcaaagttgcgatt

SEQ ID NO: 4621661 - DNA, 25 bp, Homo sapien
tggaatatcaaagttgcgatttttt

SEQ ID NO: 4621662 - DNA, 25 bp, Homo sapien
atcaaagttgcgatttttttggcca

SEQ ID NO: 4621663 - DNA, 25 bp, Homo sapien
ttagttaggtatctccagatgacag

SEQ ID NO: 4621664 - DNA, 25 bp, Homo sapien
cattagttagttaggtatctccaga

SEQ ID NO: 4621665 - DNA, 25 bp, Homo sapien
ctactgtatgcattagttagttagg

SEQ ID NO: 4621666 - DNA, 25 bp, Homo sapien
tatgcattagttagttaggtatctc

SEQ ID NO: 4621667 - DNA, 25 bp, Homo sapien
ggtgagtcttttggctacatcacta

SEQ ID NO: 4621668 - DNA, 25 bp, Homo sapien
tgggacaggtactggtgaactcatc

SEQ ID NO: 4621669 - DNA, 25 bp, Homo sapien
cctcatcactgggacaggtactggt

SEQ ID NO: 4621670 - DNA, 25 bp, Homo sapien
ggctacatcactatatgctatttca

SEQ ID NO: 4621671 - DNA, 25 bp, Homo sapien
gaacacatctctttcagaaacgcga

SEQ ID NO: 4621672 - DNA, 25 bp, Homo sapien
cacatctctttcagaaacgcgattt

SEQ ID NO: 4621673 - DNA, 25 bp, Homo sapien
catgaacacatctctttcagaaacg

SEQ ID NO: 4621674 - DNA, 25 bp, Homo sapien
agacatgaacacatctctttcagaa

SEQ ID NO: 4621675 - DNA, 25 bp, Homo sapien
tcagtttgaagacaaatatggctgc

SEQ ID NO: 4621676 - DNA, 25 bp, Homo sapien
cttttcccctagcttgagggcatga

SEQ ID NO: 4621677 - DNA, 25 bp, Homo sapien
gagggctcttatcctattccgatga

SEQ ID NO: 4621678 - DNA, 25 bp, Homo sapien
tttgtgctgcacgtgagatgtacca

SEQ ID NO: 4621679 - DNA, 25 bp, Homo sapien
atgtgtgctatattttagactgaag

SEQ ID NO: 4621680 - DNA, 25 bp, Homo sapien
cctctactttcaccatgagaacttg

SEQ ID NO: 4621681 - DNA, 25 bp, Homo sapien
aagaatgaatgtgggacatatggag

SEQ ID NO: 4621682 - DNA, 25 bp, Homo sapien
tggagcttcactgcatagccagcca

SEQ ID NO: 4621683 - DNA, 25 bp, Homo sapien
tctactttcaccatgagaacttgcc

SEQ ID NO: 4621684 - DNA, 25 bp, Homo sapien
ttcttgtctgagagtgtcacagcca

SEQ ID NO: 4621685 - DNA, 25 bp, Homo sapien
tacctgactgtactctagaaaactg

SEQ ID NO: 4621686 - DNA, 25 bp, Homo sapien
ggagcttaagaagacatgatgacca

SEQ ID NO: 4621687 - DNA, 25 bp, Homo sapien
tataggaaagcatcatacaactctc

SEQ ID NO: 4621688 - DNA, 25 bp, Homo sapien
aagtctttccacagtccaccaccat

SEQ ID NO: 4621689 - DNA, 25 bp, Homo sapien
tcatcttttcttggtaaagtctttc

SEQ ID NO: 4621690 - DNA, 25 bp, Homo sapien
atttcaactcatcttttcttggtaa

SEQ ID NO: 4621691 - DNA, 25 bp, Homo sapien
cttggtaaagtctttccacagtcca

SEQ ID NO: 4621692 - DNA, 25 bp, Homo sapien
gaataactcacagaggaactgtagc

SEQ ID NO: 4621693 - DNA, 25 bp, Homo sapien
gtggaatcatgaatatgcaatcggc

SEQ ID NO: 4621694 - DNA, 25 bp, Homo sapien
cactttctgtgatggtaccttggca

SEQ ID NO: 4621695 - DNA, 25 bp, Homo sapien
tgcaatcggcaaatggttctggagc

SEQ ID NO: 4621696 - DNA, 25 bp, Homo sapien
gataatgtgaaagaagctcactatt

SEQ ID NO: 4621697 - DNA, 25 bp, Homo sapien
cctttttgttatgagagttgcatct

SEQ ID NO: 4621698 - DNA, 25 bp, Homo sapien
tgaaattattcagaggctatagcaa

SEQ ID NO: 4621699 - DNA, 25 bp, Homo sapien
gattggcatgccctcaagttggctt

SEQ ID NO: 4621700 - DNA, 25 bp, Homo sapien
taataaaatggtcatacagttcaca

SEQ ID NO: 4621701 - DNA, 25 bp, Homo sapien
gaatccctgacttcttatggcttat

SEQ ID NO: 4621702 - DNA, 25 bp, Homo sapien
tatccctccaccaataacattcgtg

SEQ ID NO: 4621703 - DNA, 25 bp, Homo sapien
tgaaaaggctatgctgctaccattt

SEQ ID NO: 4621704 - DNA, 25 bp, Homo sapien
actgcagagatatcccatgggtaca

SEQ ID NO: 4621705 - DNA, 25 bp, Homo sapien
tgtaatctaccactacagttgtgtg

SEQ ID NO: 4621706 - DNA, 25 bp, Homo sapien
gggtacatgggatatctatttggcc

SEQ ID NO: 4621707 - DNA, 25 bp, Homo sapien
tcacctgtacaaggacatccaagtt

SEQ ID NO: 4621708 - DNA, 25 bp, Homo sapien
catttggcaggcacaacaatcttct

SEQ ID NO: 4621709 - DNA, 25 bp, Homo sapien
cacacacagcagtcgtagatattgg

SEQ ID NO: 4621710 - DNA, 25 bp, Homo sapien
tagatattggatggagaccctgctg

SEQ ID NO: 4621711 - DNA, 25 bp, Homo sapien
tttggcaaaccaatagtagacctcc

SEQ ID NO: 4621712 - DNA, 25 bp, Homo sapien
ctcttgttcgaaactggcttctttg

SEQ ID NO: 4621713 - DNA, 25 bp, Homo sapien
attatgaatctcaagggctcttgtt

SEQ ID NO: 4621714 - DNA, 25 bp, Homo sapien
tgattatgaatctcaagggctcttg

SEQ ID NO: 4621715 - DNA, 25 bp, Homo sapien
actgattatgaatctcaagggctct

SEQ ID NO: 4621716 - DNA, 25 bp, Homo sapien
aaggacttcactgatatgagttgtg

SEQ ID NO: 4621717 - DNA, 25 bp, Homo sapien
ttattcttgattgtctgggtgctcc

SEQ ID NO: 4621718 - DNA, 25 bp, Homo sapien
tcttgattgtctgggtgctccttgg

SEQ ID NO: 4621719 - DNA, 25 bp, Homo sapien
cttcactgatatgagttgtggttgc

SEQ ID NO: 4621720 - DNA, 25 bp, Homo sapien
gaaacacaccacttctcagtactaa

SEQ ID NO: 4621721 - DNA, 25 bp, Homo sapien
tatacaaccatacgaaatacttgag

SEQ ID NO: 4621722 - DNA, 25 bp, Homo sapien
gaaggatgaaagtccatggtcacag

SEQ ID NO: 4621723 - DNA, 25 bp, Homo sapien
cttgtgccttgcaaaagggtgcctt

SEQ ID NO: 4621724 - DNA, 25 bp, Homo sapien
cataattcgatccagaaatggttca

SEQ ID NO: 4621725 - DNA, 25 bp, Homo sapien
caagcctctcgtttccttcgcaaaa

SEQ ID NO: 4621726 - DNA, 25 bp, Homo sapien
aatggctggccactacactcttcgt

SEQ ID NO: 4621727 - DNA, 25 bp, Homo sapien
gtcgttgtctacttccaatggctgg

SEQ ID NO: 4621728 - DNA, 25 bp, Homo sapien
ctgaggttttgtacctaggtggcaa

SEQ ID NO: 4621729 - DNA, 25 bp, Homo sapien
tagttgcaggcaaaatatagcagca

SEQ ID NO: 4621730 - DNA, 25 bp, Homo sapien
caaggagggtagagatgtcgtcatc

SEQ ID NO: 4621731 - DNA, 25 bp, Homo sapien
taccaagtaccatggaataaacctg

SEQ ID NO: 4621732 - DNA, 25 bp, Homo sapien
ttgcaagcctagtggttaaaggtgg

SEQ ID NO: 4621733 - DNA, 25 bp, Homo sapien
taagtaagtaagtcatgccagtaat

SEQ ID NO: 4621734 - DNA, 25 bp, Homo sapien
tggtttactccaaaagaatgacacc

SEQ ID NO: 4621735 - DNA, 25 bp, Homo sapien
catattcctggatacttgatagaac

SEQ ID NO: 4621736 - DNA, 25 bp, Homo sapien
gataagaaattactacacacactgg

SEQ ID NO: 4621737 - DNA, 25 bp, Homo sapien
ggtatgtaaactacaactctcatcc

SEQ ID NO: 4621738 - DNA, 25 bp, Homo sapien
tatcaagtgttggtcaggaggtatg

SEQ ID NO: 4621739 - DNA, 25 bp, Homo sapien
ctacacacactggttagaatatgtg

SEQ ID NO: 4621740 - DNA, 25 bp, Homo sapien
gaatctaattatcacagggcagctg

SEQ ID NO: 4621741 - DNA, 25 bp, Homo sapien
taaaatgccacagtgtaaactcttg

SEQ ID NO: 4621742 - DNA, 25 bp, Homo sapien
tctatcttcccaagaatatggaggg

SEQ ID NO: 4621743 - DNA, 25 bp, Homo sapien
tacactgagacaaaaggtattgcag

SEQ ID NO: 4621744 - DNA, 25 bp, Homo sapien
ataacgggggcagatttctcgtgaa

SEQ ID NO: 4621745 - DNA, 25 bp, Homo sapien
ctcttgttcctactctgatcatttg

SEQ ID NO: 4621746 - DNA, 25 bp, Homo sapien
cctggtaggttgtgattagataacg

SEQ ID NO: 4621747 - DNA, 25 bp, Homo sapien
tgatgtgcctgcaccacatttgcct

SEQ ID NO: 4621748 - DNA, 25 bp, Homo sapien
acttattttacccagatatagtatt

SEQ ID NO: 4621749 - DNA, 25 bp, Homo sapien
tctacttattttacccagatatagt

SEQ ID NO: 4621750 - DNA, 25 bp, Homo sapien
atatatcgacaagaaactgattaaa

SEQ ID NO: 4621751 - DNA, 25 bp, Homo sapien
attagaaaatatatcgacaagaaac

SEQ ID NO: 4621752 - DNA, 25 bp, Homo sapien
catgaacctatagttagctccttta

SEQ ID NO: 4621753 - DNA, 25 bp, Homo sapien
tagctgacatgaacctatagttagc

SEQ ID NO: 4621754 - DNA, 25 bp, Homo sapien
acaaaggacgccagtagctgacatg

SEQ ID NO: 4621755 - DNA, 25 bp, Homo sapien
gacgccagtagctgacatgaaccta

SEQ ID NO: 4621756 - DNA, 25 bp, Homo sapien
attcgtgaacattctcagacgcttg

SEQ ID NO: 4621757 - DNA, 25 bp, Homo sapien
ttcgtgaacattctcagacgcttga

SEQ ID NO: 4621758 - DNA, 25 bp, Homo sapien
catcgtacagctaggtattgttctg

SEQ ID NO: 4621759 - DNA, 25 bp, Homo sapien
tcgtacagctaggtattgttctgat

SEQ ID NO: 4621760 - DNA, 25 bp, Homo sapien
gtacagctaggtattgttctgatag

SEQ ID NO: 4621761 - DNA, 25 bp, Homo sapien
tcatcgtacagctaggtattgttct

SEQ ID NO: 4621762 - DNA, 25 bp, Homo sapien
gtcctgaaatccgtggaactcaagg

SEQ ID NO: 4621763 - DNA, 25 bp, Homo sapien
tttgccttatgcttcacatcaccag

SEQ ID NO: 4621764 - DNA, 25 bp, Homo sapien
attattggtccgcaagcagagcagc

SEQ ID NO: 4621765 - DNA, 25 bp, Homo sapien
attggtccgcaagcagagcagccag

SEQ ID NO: 4621766 - DNA, 25 bp, Homo sapien
tagccctggataaatctcactgtca

SEQ ID NO: 4621767 - DNA, 25 bp, Homo sapien
ctgtcactgctaacattgcatcttg

SEQ ID NO: 4621768 - DNA, 25 bp, Homo sapien
catcttgagccttcagacacatggc

SEQ ID NO: 4621769 - DNA, 25 bp, Homo sapien
tcaaagcaagcgatagccctggata

SEQ ID NO: 4621770 - DNA, 25 bp, Homo sapien
tcagaatttttggttctcgtatcat

SEQ ID NO: 4621771 - DNA, 25 bp, Homo sapien
cagaacacaaatcttctgctgcatt

SEQ ID NO: 4621772 - DNA, 25 bp, Homo sapien
gaacacaaatcttctgctgcatttt

SEQ ID NO: 4621773 - DNA, 25 bp, Homo sapien
cttctgctgcattttcttaacccac

SEQ ID NO: 4621774 - DNA, 25 bp, Homo sapien
tctgctgcattttcttaacccacat

SEQ ID NO: 4621775 - DNA, 25 bp, Homo sapien
agcacagatcactttcatcaaacat

SEQ ID NO: 4621776 - DNA, 25 bp, Homo sapien
caaccccagcacagatcactttcat

SEQ ID NO: 4621777 - DNA, 25 bp, Homo sapien
ctttaaagcatttgcagagcaccaa

SEQ ID NO: 4621778 - DNA, 25 bp, Homo sapien
tttaaagcatttgcagagcaccaac

SEQ ID NO: 4621779 - DNA, 25 bp, Homo sapien
cccaagaattccttgatgaggcttc

SEQ ID NO: 4621780 - DNA, 25 bp, Homo sapien
aggattgcagggtgctccactgttc

SEQ ID NO: 4621781 - DNA, 25 bp, Homo sapien
ctccccaagaattccttgatgaggc

SEQ ID NO: 4621782 - DNA, 25 bp, Homo sapien
gattgcagggtgctccactgttcca

SEQ ID NO: 4621783 - DNA, 25 bp, Homo sapien
tgggctcagaacaatactctttggg

SEQ ID NO: 4621784 - DNA, 25 bp, Homo sapien
tgctgaacattgcttactatggctg

SEQ ID NO: 4621785 - DNA, 25 bp, Homo sapien
gcacttgactgctcgtttggtggga

SEQ ID NO: 4621786 - DNA, 25 bp, Homo sapien
ggaacgtcctttagcaagcacttga

SEQ ID NO: 4621787 - DNA, 25 bp, Homo sapien
ccatggctttccaaggtgattgaat

SEQ ID NO: 4621788 - DNA, 25 bp, Homo sapien
tgctgccgccatggctttccaaggt

SEQ ID NO: 4621789 - DNA, 25 bp, Homo sapien
aagcaatttctctgctgccgccatg

SEQ ID NO: 4621790 - DNA, 25 bp, Homo sapien
aatttctctgctgccgccatggctt

SEQ ID NO: 4621791 - DNA, 25 bp, Homo sapien
cttcctgcattcagatttgggtaca

SEQ ID NO: 4621792 - DNA, 25 bp, Homo sapien
tttattctctgagccacaagtgctc

SEQ ID NO: 4621793 - DNA, 25 bp, Homo sapien
ctttattctctgagccacaagtgct

SEQ ID NO: 4621794 - DNA, 25 bp, Homo sapien
ttattctctgagccacaagtgctca

SEQ ID NO: 4621795 - DNA, 25 bp, Homo sapien
tattctctgagccacaagtgctcat

SEQ ID NO: 4621796 - DNA, 25 bp, Homo sapien
caacttttgtaccaattcactacag

SEQ ID NO: 4621797 - DNA, 25 bp, Homo sapien
aagtaggagctgacttcaatccatc

SEQ ID NO: 4621798 - DNA, 25 bp, Homo sapien
ttcactacagctcataaatacattt

SEQ ID NO: 4621799 - DNA, 25 bp, Homo sapien
tcaatccatctggatccaacttttg

SEQ ID NO: 4621800 - DNA, 25 bp, Homo sapien
ttaagtgtacacgattaggatgcca

SEQ ID NO: 4621801 - DNA, 25 bp, Homo sapien
gagctggcatactccattaagtgta

SEQ ID NO: 4621802 - DNA, 25 bp, Homo sapien
gcttctaggcttctgaatctcgcaa

SEQ ID NO: 4621803 - DNA, 25 bp, Homo sapien
atgtttttagagacacatccactga

SEQ ID NO: 4621804 - DNA, 25 bp, Homo sapien
cttgttagctgtcgacaatgtcact

SEQ ID NO: 4621805 - DNA, 25 bp, Homo sapien
gctgaaaacctctcttgttagctgt

SEQ ID NO: 4621806 - DNA, 25 bp, Homo sapien
tttgaaacagaggtgataattaatc

SEQ ID NO: 4621807 - DNA, 25 bp, Homo sapien
atgtgatgggtttctactgctgctt

SEQ ID NO: 4621808 - DNA, 25 bp, Homo sapien
acaaaattagtagattcctgtgagt

SEQ ID NO: 4621809 - DNA, 25 bp, Homo sapien
caaaattagtagattcctgtgagtc

SEQ ID NO: 4621810 - DNA, 25 bp, Homo sapien
aaattagtagattcctgtgagtcat

SEQ ID NO: 4621811 - DNA, 25 bp, Homo sapien
aaaattagtagattcctgtgagtca

SEQ ID NO: 4621812 - DNA, 25 bp, Homo sapien
agatgtgagagcctggtagaaggaa

SEQ ID NO: 4621813 - DNA, 25 bp, Homo sapien
tctctggagggcttagagtggctca

SEQ ID NO: 4621814 - DNA, 25 bp, Homo sapien
gaaggaagcttgactttcataaaag

SEQ ID NO: 4621815 - DNA, 25 bp, Homo sapien
ttgctgaagatgtgagagcctggta

SEQ ID NO: 4621816 - DNA, 25 bp, Homo sapien
gcaacatcaagatagcagacaacac

SEQ ID NO: 4621817 - DNA, 25 bp, Homo sapien
caacatcaagatagcagacaacact

SEQ ID NO: 4621818 - DNA, 25 bp, Homo sapien
agcaacatcaagatagcagacaaca

SEQ ID NO: 4621819 - DNA, 25 bp, Homo sapien
cagcaacatcaagatagcagacaac

SEQ ID NO: 4621820 - DNA, 25 bp, Homo sapien
agagaagtacatccttgacaggagc

SEQ ID NO: 4621821 - DNA, 25 bp, Homo sapien
ttgccaagagaagtacatccttgac

SEQ ID NO: 4621822 - DNA, 25 bp, Homo sapien
caagagaagtacatccttgacagga

SEQ ID NO: 4621823 - DNA, 25 bp, Homo sapien
actttgccaagagaagtacatcctt

SEQ ID NO: 4621824 - DNA, 25 bp, Homo sapien
gagttttacacaagctaagccagtc

SEQ ID NO: 4621825 - DNA, 25 bp, Homo sapien
taagatatcacctccttggcataga

SEQ ID NO: 4621826 - DNA, 25 bp, Homo sapien
agccagtcagaatctatttccatcc

SEQ ID NO: 4621827 - DNA, 25 bp, Homo sapien
catattgtacaggttctgagagact

SEQ ID NO: 4621828 - DNA, 25 bp, Homo sapien
tagctttcttctgatggccacacac

SEQ ID NO: 4621829 - DNA, 25 bp, Homo sapien
ctagctttcttctgatggccacaca

SEQ ID NO: 4621830 - DNA, 25 bp, Homo sapien
ccaactggggagcacggtaattggt

SEQ ID NO: 4621831 - DNA, 25 bp, Homo sapien
gaagcattcacaaaccaactgggga

SEQ ID NO: 4621832 - DNA, 25 bp, Homo sapien
taattggtgacctgggtgaattttc

SEQ ID NO: 4621833 - DNA, 25 bp, Homo sapien
ttgtgtgcaacaaataagtctgctg

SEQ ID NO: 4621834 - DNA, 25 bp, Homo sapien
gcagtgataattcttagtacaagca

SEQ ID NO: 4621835 - DNA, 25 bp, Homo sapien
agcaaactctcttgtgaagcttcag

SEQ ID NO: 4621836 - DNA, 25 bp, Homo sapien
ttaaggttatttcagcaaacagctg

SEQ ID NO: 4621837 - DNA, 25 bp, Homo sapien
agctgtctcacaaacacttccaaga

SEQ ID NO: 4621838 - DNA, 25 bp, Homo sapien
gcagctctgtttagcatagtcctga

SEQ ID NO: 4621839 - DNA, 25 bp, Homo sapien
ggagcactgcgggtatcagcagctc

SEQ ID NO: 4621840 - DNA, 25 bp, Homo sapien
gcactgcgggtatcagcagctctgt

SEQ ID NO: 4621841 - DNA, 25 bp, Homo sapien
agtcctgagtgtatggctatattga

SEQ ID NO: 4621842 - DNA, 25 bp, Homo sapien
gtggcagctctccacaatgggccca

SEQ ID NO: 4621843 - DNA, 25 bp, Homo sapien
atgtggcagctctccacaatgggcc

SEQ ID NO: 4621844 - DNA, 25 bp, Homo sapien
tgtggcagctctccacaatgggccc

SEQ ID NO: 4621845 - DNA, 25 bp, Homo sapien
ttgctgctgattggtgctggtccat

SEQ ID NO: 4621846 - DNA, 25 bp, Homo sapien
tctccatgcagacgagagctgagtt

SEQ ID NO: 4621847 - DNA, 25 bp, Homo sapien
caaggatgttgatagtgtgttcagc

SEQ ID NO: 4621848 - DNA, 25 bp, Homo sapien
tcagctttgatgcattgtcgcactc

SEQ ID NO: 4621849 - DNA, 25 bp, Homo sapien
aatacagaagggcgatggtacagaa

SEQ ID NO: 4621850 - DNA, 25 bp, Homo sapien
atacagaagggcgatggtacagaac

SEQ ID NO: 4621851 - DNA, 25 bp, Homo sapien
cagaatacagaagggcgatggtaca

SEQ ID NO: 4621852 - DNA, 25 bp, Homo sapien
tttcagaatacagaagggcgatggt

SEQ ID NO: 4621853 - DNA, 25 bp, Homo sapien
cacgttccctcttttgatgctccgg

SEQ ID NO: 4621854 - DNA, 25 bp, Homo sapien
ggatgcatggatccattgtcagtca

SEQ ID NO: 4621855 - DNA, 25 bp, Homo sapien
gatgctccggtcctcactgaatgga

SEQ ID NO: 4621856 - DNA, 25 bp, Homo sapien
tcacagagcagtgtccacgttccct

SEQ ID NO: 4621857 - DNA, 25 bp, Homo sapien
ggcagtttcaaatcttgatccaaat

SEQ ID NO: 4621858 - DNA, 25 bp, Homo sapien
gtttcaaatcttgatccaaatctca

SEQ ID NO: 4621859 - DNA, 25 bp, Homo sapien
taaggcagtttcaaatcttgatcca

SEQ ID NO: 4621860 - DNA, 25 bp, Homo sapien
ttttctaaggcagtttcaaatcttg

SEQ ID NO: 4621861 - DNA, 25 bp, Homo sapien
gggaaacaagcaattggatcactac

SEQ ID NO: 4621862 - DNA, 25 bp, Homo sapien
gacaactattaggttagcagtaagc

SEQ ID NO: 4621863 - DNA, 25 bp, Homo sapien
tcttgccccgaagaaagtcgtcgtc

SEQ ID NO: 4621864 - DNA, 25 bp, Homo sapien
gagttaccgtgatgatgaatatggc

SEQ ID NO: 4621865 - DNA, 25 bp, Homo sapien
ctgctttactttccaatacctgctc

SEQ ID NO: 4621866 - DNA, 25 bp, Homo sapien
ctctatctcccagtgatgtctgttc

SEQ ID NO: 4621867 - DNA, 25 bp, Homo sapien
tatctcccagtgatgtctgttcagc

SEQ ID NO: 4621868 - DNA, 25 bp, Homo sapien
gttcagctgtccctgctttactttc

SEQ ID NO: 4621869 - DNA, 25 bp, Homo sapien
gtcagtggtggaaccagggctatta

SEQ ID NO: 4621870 - DNA, 25 bp, Homo sapien
aaagttgaaggactatttcaagatc

SEQ ID NO: 4621871 - DNA, 25 bp, Homo sapien
gttgaaggactatttcaagatcact

SEQ ID NO: 4621872 - DNA, 25 bp, Homo sapien
aaccagggctattaacttctgtgaa

SEQ ID NO: 4621873 - DNA, 25 bp, Homo sapien
ttaagagtaaccctctgaaacatca

SEQ ID NO: 4621874 - DNA, 25 bp, Homo sapien
ttctgcagtgaagaactgactactt

SEQ ID NO: 4621875 - DNA, 25 bp, Homo sapien
tgaggatggcttattaagagtaacc

SEQ ID NO: 4621876 - DNA, 25 bp, Homo sapien
gaactgactacttcacaccgtcgtt

SEQ ID NO: 4621877 - DNA, 25 bp, Homo sapien
accagctttctctctgctatcgata

SEQ ID NO: 4621878 - DNA, 25 bp, Homo sapien
tttctctctgctatcgatataggcc

SEQ ID NO: 4621879 - DNA, 25 bp, Homo sapien
agctttctctctgctatcgatatag

SEQ ID NO: 4621880 - DNA, 25 bp, Homo sapien
tctctctgctatcgatataggccat

SEQ ID NO: 4621881 - DNA, 25 bp, Homo sapien
tctgcttagtggggctacttttgcc

SEQ ID NO: 4621882 - DNA, 25 bp, Homo sapien
gcttagtggggctacttttgcccat

SEQ ID NO: 4621883 - DNA, 25 bp, Homo sapien
ctctgcttagtggggctacttttgc

SEQ ID NO: 4621884 - DNA, 25 bp, Homo sapien
tgcttagtggggctacttttgccca

SEQ ID NO: 4621885 - DNA, 25 bp, Homo sapien
tgctttttagtagatcagatcctag

SEQ ID NO: 4621886 - DNA, 25 bp, Homo sapien
catctttcaccaacgaggtatcgta

SEQ ID NO: 4621887 - DNA, 25 bp, Homo sapien
ctgcagagtagatggatttatccag

SEQ ID NO: 4621888 - DNA, 25 bp, Homo sapien
aactgagaaaggttgaccaatggcc

SEQ ID NO: 4621889 - DNA, 25 bp, Homo sapien
gggtagtatggctactatatggcaa

SEQ ID NO: 4621890 - DNA, 25 bp, Homo sapien
tcaagtgtgggtagtatggctacta

SEQ ID NO: 4621891 - DNA, 25 bp, Homo sapien
gctactatatggcaagcatccaaaa

SEQ ID NO: 4621892 - DNA, 25 bp, Homo sapien
tatggcaagcatccaaaaactctgg

SEQ ID NO: 4621893 - DNA, 25 bp, Homo sapien
atcgttgctcaaaccaatgtcaatg

SEQ ID NO: 4621894 - DNA, 25 bp, Homo sapien
tgttgctttgctggcctaagctttt

SEQ ID NO: 4621895 - DNA, 25 bp, Homo sapien
tcatttcataggttgtctctcactc

SEQ ID NO: 4621896 - DNA, 25 bp, Homo sapien
aagcttttgggatcatactcaaaaa

SEQ ID NO: 4621897 - DNA, 25 bp, Homo sapien
gatcagcgctcccacacagaatccc

SEQ ID NO: 4621898 - DNA, 25 bp, Homo sapien
aagagaaatgtgggatcagcgctcc

SEQ ID NO: 4621899 - DNA, 25 bp, Homo sapien
gagaaatgtgggatcagcgctccca

SEQ ID NO: 4621900 - DNA, 25 bp, Homo sapien
tgggatcagcgctcccacacagaat

SEQ ID NO: 4621901 - DNA, 25 bp, Homo sapien
ttatcccatcccttttggctgctct

SEQ ID NO: 4621902 - DNA, 25 bp, Homo sapien
tcttttcccttcacttatcccatcc

SEQ ID NO: 4621903 - DNA, 25 bp, Homo sapien
catcccttttggctgctctaaacat

SEQ ID NO: 4621904 - DNA, 25 bp, Homo sapien
cttcacttatcccatcccttttggc

SEQ ID NO: 4621905 - DNA, 25 bp, Homo sapien
ctcctggtttactatttccctcagg

SEQ ID NO: 4621906 - DNA, 25 bp, Homo sapien
tactatttccctcaggtttatctcc

SEQ ID NO: 4621907 - DNA, 25 bp, Homo sapien
ttactatttccctcaggtttatctc

SEQ ID NO: 4621908 - DNA, 25 bp, Homo sapien
gtgaacagctcatagacatacactt

SEQ ID NO: 4621909 - DNA, 25 bp, Homo sapien
agaaaagcagctttctcggttgctt

SEQ ID NO: 4621910 - DNA, 25 bp, Homo sapien
ggaagaatgattggcatggaatggg

SEQ ID NO: 4621911 - DNA, 25 bp, Homo sapien
tcctctggttaagaaatttccaatg

SEQ ID NO: 4621912 - DNA, 25 bp, Homo sapien
cttgttcatggaatgactaaaaaat

SEQ ID NO: 4621913 - DNA, 25 bp, Homo sapien
ggaattttatgttctttctctgggc

SEQ ID NO: 4621914 - DNA, 25 bp, Homo sapien
aattttatgttctttctctgggcca

SEQ ID NO: 4621915 - DNA, 25 bp, Homo sapien
tcatggaatgactaaaaaataggaa

SEQ ID NO: 4621916 - DNA, 25 bp, Homo sapien
gagcagtttaagaggatgggcttcc

SEQ ID NO: 4621917 - DNA, 25 bp, Homo sapien
cttccaaatgggtgagttgtgagga

SEQ ID NO: 4621918 - DNA, 25 bp, Homo sapien
agtttctgagaaactagcaaaccaa

SEQ ID NO: 4621919 - DNA, 25 bp, Homo sapien
caaacagcaaggtttgatggtgaga

SEQ ID NO: 4621920 - DNA, 25 bp, Homo sapien
taagcttgacctcaatatagattcc

SEQ ID NO: 4621921 - DNA, 25 bp, Homo sapien
gaaccgtaaccttcactgtgatttc

SEQ ID NO: 4621922 - DNA, 25 bp, Homo sapien
agcccaaatccctatcagaaccgta

SEQ ID NO: 4621923 - DNA, 25 bp, Homo sapien
ttccttaagcttgacctcaatatag

SEQ ID NO: 4621924 - DNA, 25 bp, Homo sapien
tcagcagatttcaaagctgtctctg

SEQ ID NO: 4621925 - DNA, 25 bp, Homo sapien
aaagctgtctctgggcttcatgtca

SEQ ID NO: 4621926 - DNA, 25 bp, Homo sapien
cagcagatttcaaagctgtctctgg

SEQ ID NO: 4621927 - DNA, 25 bp, Homo sapien
gtctctgggcttcatgtcagtgtga

SEQ ID NO: 4621928 - DNA, 25 bp, Homo sapien
caattgtggaaagtagttttccact

SEQ ID NO: 4621929 - DNA, 25 bp, Homo sapien
gtcattgctgttgcttccatggtca

SEQ ID NO: 4621930 - DNA, 25 bp, Homo sapien
cagtcattgctgttgcttccatggt

SEQ ID NO: 4621931 - DNA, 25 bp, Homo sapien
tggacctgtgttttctcagtcattg

SEQ ID NO: 4621932 - DNA, 25 bp, Homo sapien
tcctgttgctgtgagtgatggacct

SEQ ID NO: 4621933 - DNA, 25 bp, Homo sapien
cttcattattcagtggacttttcac

SEQ ID NO: 4621934 - DNA, 25 bp, Homo sapien
ttcattattcagtggacttttcacg

SEQ ID NO: 4621935 - DNA, 25 bp, Homo sapien
ttattcagtggacttttcacgttgt

SEQ ID NO: 4621936 - DNA, 25 bp, Homo sapien
attcagtggacttttcacgttgttg

SEQ ID NO: 4621937 - DNA, 25 bp, Homo sapien
ctggactgtagctctaaggttgggc

SEQ ID NO: 4621938 - DNA, 25 bp, Homo sapien
agctctaaggttgggctcatttttg

SEQ ID NO: 4621939 - DNA, 25 bp, Homo sapien
tttgattatcccagcccataacctg

SEQ ID NO: 4621940 - DNA, 25 bp, Homo sapien
gccactgaggcttgattttacccat

SEQ ID NO: 4621941 - DNA, 25 bp, Homo sapien
taggtacaattgctccagttctttc

SEQ ID NO: 4621942 - DNA, 25 bp, Homo sapien
ctaggtacaattgctccagttcttt

SEQ ID NO: 4621943 - DNA, 25 bp, Homo sapien
gctgataggctgataaggcttgttc

SEQ ID NO: 4621944 - DNA, 25 bp, Homo sapien
ccaggagacctgaaactgggtgtaa

SEQ ID NO: 4621945 - DNA, 25 bp, Homo sapien
acagatttgcagctcttaaggacac

SEQ ID NO: 4621946 - DNA, 25 bp, Homo sapien
cgttggatctataactccttttgga

SEQ ID NO: 4621947 - DNA, 25 bp, Homo sapien
ggaactgccctaccaactctgacat

SEQ ID NO: 4621948 - DNA, 25 bp, Homo sapien
ttctccagaatcccctgtgcctgtg

SEQ ID NO: 4621949 - DNA, 25 bp, Homo sapien
cgtgggaactgccctaccaactctg

SEQ ID NO: 4621950 - DNA, 25 bp, Homo sapien
tgggaactgccctaccaactctgac

SEQ ID NO: 4621951 - DNA, 25 bp, Homo sapien
cagggtatcactgggaattctcatt

SEQ ID NO: 4621952 - DNA, 25 bp, Homo sapien
cccctgcttcaaccactgagtggaa

SEQ ID NO: 4621953 - DNA, 25 bp, Homo sapien
cctaagcctcttcatggtggtcctc

SEQ ID NO: 4621954 - DNA, 25 bp, Homo sapien
catttgctcttgattgtccatgaca

SEQ ID NO: 4621955 - DNA, 25 bp, Homo sapien
gattatgtaatactgagtcacatgc

SEQ ID NO: 4621956 - DNA, 25 bp, Homo sapien
tccaggtgtggccaaaatttgctat

SEQ ID NO: 4621957 - DNA, 25 bp, Homo sapien
tgggaactttgccacatacggatta

SEQ ID NO: 4621958 - DNA, 25 bp, Homo sapien
gtggccaaaatttgctatagatata

SEQ ID NO: 4621959 - DNA, 25 bp, Homo sapien
ttcttgctcaacctgtacctgatga

SEQ ID NO: 4621960 - DNA, 25 bp, Homo sapien
gtgatgcgggatatactggctggaa

SEQ ID NO: 4621961 - DNA, 25 bp, Homo sapien
caaactggagagaaacgtcttcttg

SEQ ID NO: 4621962 - DNA, 25 bp, Homo sapien
cctgatgactgatgtgtgatgcggg

SEQ ID NO: 4621963 - DNA, 25 bp, Homo sapien
acagtcttgccagcttctgtgatac

SEQ ID NO: 4621964 - DNA, 25 bp, Homo sapien
cgacaggtctttgtcgttttcttgg

SEQ ID NO: 4621965 - DNA, 25 bp, Homo sapien
caggcattgtcgtgccgttaccttt

SEQ ID NO: 4621966 - DNA, 25 bp, Homo sapien
tcctaaggctttatgagcccgacag

SEQ ID NO: 4621967 - DNA, 25 bp, Homo sapien
ccaagtgattaagaccataagttgt

SEQ ID NO: 4621968 - DNA, 25 bp, Homo sapien
gattaagaccataagttgttccttc

SEQ ID NO: 4621969 - DNA, 25 bp, Homo sapien
gaccataagttgttccttctacagc

SEQ ID NO: 4621970 - DNA, 25 bp, Homo sapien
agtgattaagaccataagttgttcc

SEQ ID NO: 4621971 - DNA, 25 bp, Homo sapien
tgtcctccaccagaccaatcagtct

SEQ ID NO: 4621972 - DNA, 25 bp, Homo sapien
cagaccaatcagtctgtcatataag

SEQ ID NO: 4621973 - DNA, 25 bp, Homo sapien
tccaccagaccaatcagtctgtcat

SEQ ID NO: 4621974 - DNA, 25 bp, Homo sapien
caatcagtctgtcatataagtcata

SEQ ID NO: 4621975 - DNA, 25 bp, Homo sapien
tggactttctctgaaagggaaggat

SEQ ID NO: 4621976 - DNA, 25 bp, Homo sapien
cttggactttctctgaaagggaagg

SEQ ID NO: 4621977 - DNA, 25 bp, Homo sapien
gactttctctgaaagggaaggatat

SEQ ID NO: 4621978 - DNA, 25 bp, Homo sapien
agggaaggatatttcttcttggcca

SEQ ID NO: 4621979 - DNA, 25 bp, Homo sapien
catcctccttcataataaataactg

SEQ ID NO: 4621980 - DNA, 25 bp, Homo sapien
gttttccatcctccttcataataaa

SEQ ID NO: 4621981 - DNA, 25 bp, Homo sapien
taataaataactgccattttaagga

SEQ ID NO: 4621982 - DNA, 25 bp, Homo sapien
ataaataactgccattttaaggaag

SEQ ID NO: 4621983 - DNA, 25 bp, Homo sapien
gcaacttagaagtaacatcttgtcg

SEQ ID NO: 4621984 - DNA, 25 bp, Homo sapien
tgtcctcagggatatgtttggtgct

SEQ ID NO: 4621985 - DNA, 25 bp, Homo sapien
caaatagcgcctgaggtcttgcaac

SEQ ID NO: 4621986 - DNA, 25 bp, Homo sapien
tgtcgtttgaggataacactgccaa

SEQ ID NO: 4621987 - DNA, 25 bp, Homo sapien
gctaatgtgccgagtccaaggtgga

SEQ ID NO: 4621988 - DNA, 25 bp, Homo sapien
tgaaaaggcccgcatagaagctaat

SEQ ID NO: 4621989 - DNA, 25 bp, Homo sapien
aaatttctaaccactgaccagggag

SEQ ID NO: 4621990 - DNA, 25 bp, Homo sapien
tctgctgatgggaacctggaacctt

SEQ ID NO: 4621991 - DNA, 25 bp, Homo sapien
tggtgtggtctttccatatagcact

SEQ ID NO: 4621992 - DNA, 25 bp, Homo sapien
ctgtcagtagaactgtcttggacat

SEQ ID NO: 4621993 - DNA, 25 bp, Homo sapien
gggacttggtgtggtctttccatat

SEQ ID NO: 4621994 - DNA, 25 bp, Homo sapien
cttggtgtggtctttccatatagca

SEQ ID NO: 4621995 - DNA, 25 bp, Homo sapien
tgcccgttgactgcccactttgagg

SEQ ID NO: 4621996 - DNA, 25 bp, Homo sapien
cctgggatgtccttgtgtaatgaaa

SEQ ID NO: 4621997 - DNA, 25 bp, Homo sapien
gatgtaatttctagccctgaactcc

SEQ ID NO: 4621998 - DNA, 25 bp, Homo sapien
ccctgtggttgtgaagccttttgtc

SEQ ID NO: 4621999 - DNA, 25 bp, Homo sapien
ttcattccttcgttgggcttttcat

SEQ ID NO: 4622000 - DNA, 25 bp, Homo sapien
cacaaaggaggtatcgagtcttcac

SEQ ID NO: 4622001 - DNA, 25 bp, Homo sapien
gggcttttcattggcctcagtgggt

SEQ ID NO: 4622002 - DNA, 25 bp, Homo sapien
ctcagtgggtgccagaatctcctca

SEQ ID NO: 4622003 - DNA, 25 bp, Homo sapien
ccccagatgtattatgcccatccac

SEQ ID NO: 4622004 - DNA, 25 bp, Homo sapien
ctacaccccagatgtattatgccca

SEQ ID NO: 4622005 - DNA, 25 bp, Homo sapien
acaccccagatgtattatgcccatc

SEQ ID NO: 4622006 - DNA, 25 bp, Homo sapien
accccagatgtattatgcccatcca

SEQ ID NO: 4622007 - DNA, 25 bp, Homo sapien
caatgtagtttcgttgtttcgagtc

SEQ ID NO: 4622008 - DNA, 25 bp, Homo sapien
gttgtttcgagtcaaagatgctccg

SEQ ID NO: 4622009 - DNA, 25 bp, Homo sapien
tttgtatcggatggtgaaaacggat

SEQ ID NO: 4622010 - DNA, 25 bp, Homo sapien
agatgctccgctcttgttttccttc

SEQ ID NO: 4622011 - DNA, 25 bp, Homo sapien
agtgctctctgtgaggtgacctcca

SEQ ID NO: 4622012 - DNA, 25 bp, Homo sapien
ttcttgggttaagaggtcagtgctc

SEQ ID NO: 4622013 - DNA, 25 bp, Homo sapien
tctggttaccgtttcacaaattggc

SEQ ID NO: 4622014 - DNA, 25 bp, Homo sapien
ctcccctgttgtctgctgggaaatg

SEQ ID NO: 4622015 - DNA, 25 bp, Homo sapien
agccactgtccccctagaggcttga

SEQ ID NO: 4622016 - DNA, 25 bp, Homo sapien
gtaccccagtactaccactgtgcca

SEQ ID NO: 4622017 - DNA, 25 bp, Homo sapien
tgtgccaagagagtactgtcttttg

SEQ ID NO: 4622018 - DNA, 25 bp, Homo sapien
gtgccaagagagtactgtcttttgg

SEQ ID NO: 4622019 - DNA, 25 bp, Homo sapien
ctgtgccaagagagtactgtctttt

SEQ ID NO: 4622020 - DNA, 25 bp, Homo sapien
tgtgcactcctacttctcttgccac

SEQ ID NO: 4622021 - DNA, 25 bp, Homo sapien
cttgccaccatttaaattcactgcc

SEQ ID NO: 4622022 - DNA, 25 bp, Homo sapien
ctcttgccaccatttaaattcactg

SEQ ID NO: 4622023 - DNA, 25 bp, Homo sapien
acttctcttgccaccatttaaattc

SEQ ID NO: 4622024 - DNA, 25 bp, Homo sapien
cttgttttagtgtcggtggtctgtc

SEQ ID NO: 4622025 - DNA, 25 bp, Homo sapien
cggtggtctgtcgaatctgagattt

SEQ ID NO: 4622026 - DNA, 25 bp, Homo sapien
atctgagatttggtgacttcagtaa

SEQ ID NO: 4622027 - DNA, 25 bp, Homo sapien
tgagatttggtgacttcagtaatgt

SEQ ID NO: 4622028 - DNA, 25 bp, Homo sapien
gaaatcgtaggcataggtggaaaac

SEQ ID NO: 4622029 - DNA, 25 bp, Homo sapien
ggtttgagaaatcgtaggcataggt

SEQ ID NO: 4622030 - DNA, 25 bp, Homo sapien
atgaaggtttgagaaatcgtaggca

SEQ ID NO: 4622031 - DNA, 25 bp, Homo sapien
tgagaaatcgtaggcataggtggaa

SEQ ID NO: 4622032 - DNA, 25 bp, Homo sapien
ccccggcagagcgttaggaatgaaa

SEQ ID NO: 4622033 - DNA, 25 bp, Homo sapien
tagccttggagcttaggattcccct

SEQ ID NO: 4622034 - DNA, 25 bp, Homo sapien
gaatgttcagcaaacccgaatagca

SEQ ID NO: 4622035 - DNA, 25 bp, Homo sapien
gaaatgcgttaagatcagagtccta

SEQ ID NO: 4622036 - DNA, 25 bp, Homo sapien
tcggtagcagttatgggtatttctg

SEQ ID NO: 4622037 - DNA, 25 bp, Homo sapien
ctcggtagcagttatgggtatttct

SEQ ID NO: 4622038 - DNA, 25 bp, Homo sapien
cggtagcagttatgggtatttctgt

SEQ ID NO: 4622039 - DNA, 25 bp, Homo sapien
ggtagcagttatgggtatttctgtt

SEQ ID NO: 4622040 - DNA, 25 bp, Homo sapien
gagatgcgacctttattcctggcag

SEQ ID NO: 4622041 - DNA, 25 bp, Homo sapien
gaagcagtcgatttgcgaggcaata

SEQ ID NO: 4622042 - DNA, 25 bp, Homo sapien
tcatgagcacctcagcgaagcagtc

SEQ ID NO: 4622043 - DNA, 25 bp, Homo sapien
tggtgtattaccctttgtcatcagg

SEQ ID NO: 4622044 - DNA, 25 bp, Homo sapien
tgggacggcaagtgcagctagcatt

SEQ ID NO: 4622045 - DNA, 25 bp, Homo sapien
ttttccaaagatgggacggcaagtg

SEQ ID NO: 4622046 - DNA, 25 bp, Homo sapien
gcaagtgcagctagcatttcttttc

SEQ ID NO: 4622047 - DNA, 25 bp, Homo sapien
tccaaagatgggacggcaagtgcag

SEQ ID NO: 4622048 - DNA, 25 bp, Homo sapien
gccagcggtctcttctcgatggctg

SEQ ID NO: 4622049 - DNA, 25 bp, Homo sapien
gcctctttgggatcattaactgctt

SEQ ID NO: 4622050 - DNA, 25 bp, Homo sapien
gggttttacacttgtctttgcacac

SEQ ID NO: 4622051 - DNA, 25 bp, Homo sapien
agagttagatgggtctttgattcca

SEQ ID NO: 4622052 - DNA, 25 bp, Homo sapien
catcttcctggggtactttatgtaa

SEQ ID NO: 4622053 - DNA, 25 bp, Homo sapien
cacaatatgcttcgtgtgtgagaat

SEQ ID NO: 4622054 - DNA, 25 bp, Homo sapien
gggacgtccgtttgcactctcatct

SEQ ID NO: 4622055 - DNA, 25 bp, Homo sapien
aggacacggaatgggaaatgtcgcc

SEQ ID NO: 4622056 - DNA, 25 bp, Homo sapien
cactatgctgtaagatttaggctga

SEQ ID NO: 4622057 - DNA, 25 bp, Homo sapien
gattttttgctaacctgagacctgg

SEQ ID NO: 4622058 - DNA, 25 bp, Homo sapien
agctgtgtccttttaggaggtcaga

SEQ ID NO: 4622059 - DNA, 25 bp, Homo sapien
tatgtatggcatctagaagttgaac

SEQ ID NO: 4622060 - DNA, 25 bp, Homo sapien
tcctcgtcctgttgaatgcatgctt

SEQ ID NO: 4622061 - DNA, 25 bp, Homo sapien
aaacaacccgcccatctgcggattt

SEQ ID NO: 4622062 - DNA, 25 bp, Homo sapien
ggtgtactccttttgagaatgctcc

SEQ ID NO: 4622063 - DNA, 25 bp, Homo sapien
ttttcatggtgtactccttttgaga

SEQ ID NO: 4622064 - DNA, 25 bp, Homo sapien
gagccacacagaagtggcagcagtt

SEQ ID NO: 4622065 - DNA, 25 bp, Homo sapien
gccacacagaagtggcagcagttga

SEQ ID NO: 4622066 - DNA, 25 bp, Homo sapien
ctgagccacacagaagtggcagcag

SEQ ID NO: 4622067 - DNA, 25 bp, Homo sapien
ccacacagaagtggcagcagttgag

SEQ ID NO: 4622068 - DNA, 25 bp, Homo sapien
ctacagtaaagtgttgtacacaaag

SEQ ID NO: 4622069 - DNA, 25 bp, Homo sapien
gggagactcctaatgttgcatgtag

SEQ ID NO: 4622070 - DNA, 25 bp, Homo sapien
catgtagtcgtggagaaggttgttc

SEQ ID NO: 4622071 - DNA, 25 bp, Homo sapien
agtgttgtacacaaagtgcattaaa

SEQ ID NO: 4622072 - DNA, 25 bp, Homo sapien
atgaattgtagtggaaactgacaac

SEQ ID NO: 4622073 - DNA, 25 bp, Homo sapien
aaatgaattgtagtggaaactgaca

SEQ ID NO: 4622074 - DNA, 25 bp, Homo sapien
tgaattgtagtggaaactgacaact

SEQ ID NO: 4622075 - DNA, 25 bp, Homo sapien
aatgaattgtagtggaaactgacaa

SEQ ID NO: 4622076 - DNA, 25 bp, Homo sapien
gtatgacttaattcacatctgttgg

SEQ ID NO: 4622077 - DNA, 25 bp, Homo sapien
tatactactgtagcaaaccaaggca

SEQ ID NO: 4622078 - DNA, 25 bp, Homo sapien
ttgagtatttaagaggctgtacatg

SEQ ID NO: 4622079 - DNA, 25 bp, Homo sapien
gatgagagggcatgcaaattgtgct

SEQ ID NO: 4622080 - DNA, 25 bp, Homo sapien
aataagtctttaccatgtatgaaag

SEQ ID NO: 4622081 - DNA, 25 bp, Homo sapien
gttacttgaggtcttgcttaatcac

SEQ ID NO: 4622082 - DNA, 25 bp, Homo sapien
tctgattagcatctagcttataata

SEQ ID NO: 4622083 - DNA, 25 bp, Homo sapien
tgtagatagtctagcttcagctgtt

SEQ ID NO: 4622084 - DNA, 25 bp, Homo sapien
tgcacatgatttgtactgcagcaaa

SEQ ID NO: 4622085 - DNA, 25 bp, Homo sapien
tcatggtgtttagtgatgtacttgc

SEQ ID NO: 4622086 - DNA, 25 bp, Homo sapien
aagaaatcccttcagatagagctca

SEQ ID NO: 4622087 - DNA, 25 bp, Homo sapien
ttaaggaaaaaagacgttgcacatg

SEQ ID NO: 4622088 - DNA, 25 bp, Homo sapien
aaatgacatcatccctgtactgcat

SEQ ID NO: 4622089 - DNA, 25 bp, Homo sapien
tgaaatgacatcatccctgtactgc

SEQ ID NO: 4622090 - DNA, 25 bp, Homo sapien
cttgctggtgaaatgacatcatccc

SEQ ID NO: 4622091 - DNA, 25 bp, Homo sapien
ggtgaaatgacatcatccctgtact

SEQ ID NO: 4622092 - DNA, 25 bp, Homo sapien
tttgcagctccgactttttggtata

SEQ ID NO: 4622093 - DNA, 25 bp, Homo sapien
cagctccgactttttggtataccct

SEQ ID NO: 4622094 - DNA, 25 bp, Homo sapien
ttttggagcccatctaaaggaattc

SEQ ID NO: 4622095 - DNA, 25 bp, Homo sapien
tcccagcgtccatgcatatgctttt

SEQ ID NO: 4622096 - DNA, 25 bp, Homo sapien
agctttgtggcttttatagtgtgac

SEQ ID NO: 4622097 - DNA, 25 bp, Homo sapien
gagatgtgggtcagggtaatgggca

SEQ ID NO: 4622098 - DNA, 25 bp, Homo sapien
aatagcaggctacttctttccccgc

SEQ ID NO: 4622099 - DNA, 25 bp, Homo sapien
gcttttatagtgtgacatcagtttc

SEQ ID NO: 4622100 - DNA, 25 bp, Homo sapien
tctctttagggcccagctgcttggg

SEQ ID NO: 4622101 - DNA, 25 bp, Homo sapien
ttactgttcatcatccagccttttc

SEQ ID NO: 4622102 - DNA, 25 bp, Homo sapien
ccttttctctttagggcccagctgc

SEQ ID NO: 4622103 - DNA, 25 bp, Homo sapien
cagccttttctctttagggcccagc

SEQ ID NO: 4622104 - DNA, 25 bp, Homo sapien
tccacaggagaaatgcccgtggcct

SEQ ID NO: 4622105 - DNA, 25 bp, Homo sapien
tactaaatatcctcctgcacgaaga

SEQ ID NO: 4622106 - DNA, 25 bp, Homo sapien
aatgcaggggaaataggtctccaca

SEQ ID NO: 4622107 - DNA, 25 bp, Homo sapien
cacgaagatccagaagaaggtagaa

SEQ ID NO: 4622108 - DNA, 25 bp, Homo sapien
tagatgattccattgcagtcaagtt

SEQ ID NO: 4622109 - DNA, 25 bp, Homo sapien
tagaaagggcaattagactatgctg

SEQ ID NO: 4622110 - DNA, 25 bp, Homo sapien
gactatgctgatacaattgatttat

SEQ ID NO: 4622111 - DNA, 25 bp, Homo sapien
tattttgtcatagaatagcagtatg

SEQ ID NO: 4622112 - DNA, 25 bp, Homo sapien
gttcagcgtagtatgcttttggctt

SEQ ID NO: 4622113 - DNA, 25 bp, Homo sapien
tggcttgtctcttttatacttcttt

SEQ ID NO: 4622114 - DNA, 25 bp, Homo sapien
cagcgtagtatgcttttggcttgtc

SEQ ID NO: 4622115 - DNA, 25 bp, Homo sapien
gcttttggcttgtctcttttatact

SEQ ID NO: 4622116 - DNA, 25 bp, Homo sapien
tcttgaggtttgtgaagctgtgtct

SEQ ID NO: 4622117 - DNA, 25 bp, Homo sapien
cccaaacaccatcagtctgttttgg

SEQ ID NO: 4622118 - DNA, 25 bp, Homo sapien
aacaccatcagtctgttttggaatt

SEQ ID NO: 4622119 - DNA, 25 bp, Homo sapien
agagtgttcttgaggtttgtgaagc

SEQ ID NO: 4622120 - DNA, 25 bp, Homo sapien
tgtacagctcaatttcctctgggga

SEQ ID NO: 4622121 - DNA, 25 bp, Homo sapien
tcgtagccatggttcccatctgacc

SEQ ID NO: 4622122 - DNA, 25 bp, Homo sapien
catctgacccatagcctttacaact

SEQ ID NO: 4622123 - DNA, 25 bp, Homo sapien
gggactgtgttccattaggattcct

SEQ ID NO: 4622124 - DNA, 25 bp, Homo sapien
tgtccatattgcagacggcaactcc

SEQ ID NO: 4622125 - DNA, 25 bp, Homo sapien
gtgggcagcagagccttggaccggg

SEQ ID NO: 4622126 - DNA, 25 bp, Homo sapien
tctgcttagaagtggttcgtgggca

SEQ ID NO: 4622127 - DNA, 25 bp, Homo sapien
gacggcaactccaaactaacatggc

SEQ ID NO: 4622128 - DNA, 25 bp, Homo sapien
aaaggctcccaacacgactctgcag

SEQ ID NO: 4622129 - DNA, 25 bp, Homo sapien
aggctcccaacacgactctgcagcc

SEQ ID NO: 4622130 - DNA, 25 bp, Homo sapien
ttaaaaggctcccaacacgactctg

SEQ ID NO: 4622131 - DNA, 25 bp, Homo sapien
taaaaggctcccaacacgactctgc

SEQ ID NO: 4622132 - DNA, 25 bp, Homo sapien
tgtctgctctcttccggtgctgagg

SEQ ID NO: 4622133 - DNA, 25 bp, Homo sapien
tcaggcatataggagcacacagagt

SEQ ID NO: 4622134 - DNA, 25 bp, Homo sapien
ctgaggatgtttccatgaggcagga

SEQ ID NO: 4622135 - DNA, 25 bp, Homo sapien
ttcctcgaggtttgtctgctctctt

SEQ ID NO: 4622136 - DNA, 25 bp, Homo sapien
cagattgcgtcctgtgttgtggttc

SEQ ID NO: 4622137 - DNA, 25 bp, Homo sapien
tgcttagacagtaagtgggaactcc

SEQ ID NO: 4622138 - DNA, 25 bp, Homo sapien
aagtgggaactccttatctgagtca

SEQ ID NO: 4622139 - DNA, 25 bp, Homo sapien
tcccttctttgcttagacagtaagt

SEQ ID NO: 4622140 - DNA, 25 bp, Homo sapien
tacttggctgctgaagaacattgaa

SEQ ID NO: 4622141 - DNA, 25 bp, Homo sapien
tctcagggaagtacaataagaagta

SEQ ID NO: 4622142 - DNA, 25 bp, Homo sapien
ctgggagtggctccctctactgcct

SEQ ID NO: 4622143 - DNA, 25 bp, Homo sapien
gcctcaaccctcattgtgacagttg

SEQ ID NO: 4622144 - DNA, 25 bp, Homo sapien
tgggtcaaatcgctcttcaaatgga

SEQ ID NO: 4622145 - DNA, 25 bp, Homo sapien
tttaaatggagattgcaagttaccc

SEQ ID NO: 4622146 - DNA, 25 bp, Homo sapien
ctcaaaggacagagtatgggtcaaa

SEQ ID NO: 4622147 - DNA, 25 bp, Homo sapien
gagtccttttatgtgatgtctcaaa

SEQ ID NO: 4622148 - DNA, 25 bp, Homo sapien
cacgttggaaggtcacatgagctaa

SEQ ID NO: 4622149 - DNA, 25 bp, Homo sapien
ttggagcacgttggaaggtcacatg

SEQ ID NO: 4622150 - DNA, 25 bp, Homo sapien
gcacctcggagtagttcacctgctc

SEQ ID NO: 4622151 - DNA, 25 bp, Homo sapien
ctaaaaatgcacctcggagtagttc

SEQ ID NO: 4622152 - DNA, 25 bp, Homo sapien
tttgagaggaagatggagcatgcat

SEQ ID NO: 4622153 - DNA, 25 bp, Homo sapien
cagggctttgagaggaagatggagc

SEQ ID NO: 4622154 - DNA, 25 bp, Homo sapien
ctttgagaggaagatggagcatgca

SEQ ID NO: 4622155 - DNA, 25 bp, Homo sapien
ggctttgagaggaagatggagcatg

SEQ ID NO: 4622156 - DNA, 25 bp, Homo sapien
tgtgcatggtcgttgggtgctcaga

SEQ ID NO: 4622157 - DNA, 25 bp, Homo sapien
agaggaagaaaacgtgagtttatgg

SEQ ID NO: 4622158 - DNA, 25 bp, Homo sapien
atatgagctgtttgttagcattcag

SEQ ID NO: 4622159 - DNA, 25 bp, Homo sapien
tgctcagaaacactaggatgtggat

SEQ ID NO: 4622160 - DNA, 25 bp, Homo sapien
tcctgaagggtgatccgtgagcttc

SEQ ID NO: 4622161 - DNA, 25 bp, Homo sapien
gacaaattatttgtgccacaggtcc

SEQ ID NO: 4622162 - DNA, 25 bp, Homo sapien
tgaagaatatcttctgtgaccaagt

SEQ ID NO: 4622163 - DNA, 25 bp, Homo sapien
cagaaggagcagttggtatcagtgg

SEQ ID NO: 4622164 - DNA, 25 bp, Homo sapien
tggagacttaacaccggccgcgttg

SEQ ID NO: 4622165 - DNA, 25 bp, Homo sapien
ggtgtctggtgtgtgcccacttgct

SEQ ID NO: 4622166 - DNA, 25 bp, Homo sapien
tcgcgcgcgcggtccttggagctct

SEQ ID NO: 4622167 - DNA, 25 bp, Homo sapien
tggcaaccccgccttgcgggaggat

SEQ ID NO: 4622168 - DNA, 25 bp, Homo sapien
cacgagccgtagtagctgcagcttc

SEQ ID NO: 4622169 - DNA, 25 bp, Homo sapien
gccagcggcacgagccgtagtagct

SEQ ID NO: 4622170 - DNA, 25 bp, Homo sapien
gccgtagtagctgcagcttcgagtc

SEQ ID NO: 4622171 - DNA, 25 bp, Homo sapien
cggcacgagccgtagtagctgcagc

SEQ ID NO: 4622172 - DNA, 25 bp, Homo sapien
tcctctgggcgctcaacgctctcca

SEQ ID NO: 4622173 - DNA, 25 bp, Homo sapien
tccggagggacggagctgagctgct

SEQ ID NO: 4622174 - DNA, 25 bp, Homo sapien
gaagcctggtgagactcggaagtcc

SEQ ID NO: 4622175 - DNA, 25 bp, Homo sapien
ccgagtccagagaaaccttgtcggg

SEQ ID NO: 4622176 - DNA, 25 bp, Homo sapien
tagctgctctgactccccgttagcg

SEQ ID NO: 4622177 - DNA, 25 bp, Homo sapien
ccgggcctcgggatttgcaaacttg

SEQ ID NO: 4622178 - DNA, 25 bp, Homo sapien
ctctgactccccgttagcgccccgg

SEQ ID NO: 4622179 - DNA, 25 bp, Homo sapien
ggcctcgggatttgcaaacttgcac

SEQ ID NO: 4622180 - DNA, 25 bp, Homo sapien
tctgtccagggacaggaccccttgg

SEQ ID NO: 4622181 - DNA, 25 bp, Homo sapien
tattttctgtccagggacaggaccc

SEQ ID NO: 4622182 - DNA, 25 bp, Homo sapien
ttattttctgtccagggacaggacc

SEQ ID NO: 4622183 - DNA, 25 bp, Homo sapien
ttctgtccagggacaggaccccttg

SEQ ID NO: 4622184 - DNA, 25 bp, Homo sapien
ttaatacgaaagctatacaactgtg

SEQ ID NO: 4622185 - DNA, 25 bp, Homo sapien
tctgtacagaattaatacgaaagct

SEQ ID NO: 4622186 - DNA, 25 bp, Homo sapien
ctatttcacgtctgtacagaattaa

SEQ ID NO: 4622187 - DNA, 25 bp, Homo sapien
tacgaaagctatacaactgtgacaa

SEQ ID NO: 4622188 - DNA, 25 bp, Homo sapien
actggactctgcgaagggcggtggg

SEQ ID NO: 4622189 - DNA, 25 bp, Homo sapien
agtgcccaccactggagctccgcgg

SEQ ID NO: 4622190 - DNA, 25 bp, Homo sapien
cggtgggggctagggatggcaaggt

SEQ ID NO: 4622191 - DNA, 25 bp, Homo sapien
ggcggacgagacctcgcgtggccat

SEQ ID NO: 4622192 - DNA, 25 bp, Homo sapien
attgttaaattgacgccaggagaaa

SEQ ID NO: 4622193 - DNA, 25 bp, Homo sapien
ccccacttcctcgaatagctattgt

SEQ ID NO: 4622194 - DNA, 25 bp, Homo sapien
cacttcctcgaatagctattgttaa

SEQ ID NO: 4622195 - DNA, 25 bp, Homo sapien
gctattgttaaattgacgccaggag

SEQ ID NO: 4622196 - DNA, 25 bp, Homo sapien
gctgtgtctatgaagtgccggctgc

SEQ ID NO: 4622197 - DNA, 25 bp, Homo sapien
tccttggtcctacgcggctgacttc

SEQ ID NO: 4622198 - DNA, 25 bp, Homo sapien
ggatatgagattccctttgttcaga

SEQ ID NO: 4622199 - DNA, 25 bp, Homo sapien
taaataagatccttggagctgtgtc

SEQ ID NO: 4622200 - DNA, 25 bp, Homo sapien
ctccaattatcataattcagtttta

SEQ ID NO: 4622201 - DNA, 25 bp, Homo sapien
tccaattatcataattcagttttaa

SEQ ID NO: 4622202 - DNA, 25 bp, Homo sapien
cggactccaattatcataattcagt

SEQ ID NO: 4622203 - DNA, 25 bp, Homo sapien
cacggactccaattatcataattca

SEQ ID NO: 4622204 - DNA, 25 bp, Homo sapien
caccaggcagcgagttgtagttgac

SEQ ID NO: 4622205 - DNA, 25 bp, Homo sapien
gattagaccagcgaaaaccacaggc

SEQ ID NO: 4622206 - DNA, 25 bp, Homo sapien
gacgggagaggctttacaatcatta

SEQ ID NO: 4622207 - DNA, 25 bp, Homo sapien
tggaatttagatgctgcaccaggca

SEQ ID NO: 4622208 - DNA, 25 bp, Homo sapien
tgaacggcaataggagggtagtctc

SEQ ID NO: 4622209 - DNA, 25 bp, Homo sapien
ggagaaagacatcgtctttttgaaa

SEQ ID NO: 4622210 - DNA, 25 bp, Homo sapien
caataggagggtagtctctccgtct

SEQ ID NO: 4622211 - DNA, 25 bp, Homo sapien
tttgtttagttgaacggcaatagga

SEQ ID NO: 4622212 - DNA, 25 bp, Homo sapien
tccattgagctctcgagagtgacac

SEQ ID NO: 4622213 - DNA, 25 bp, Homo sapien
ggactccattgagctctcgagagtg

SEQ ID NO: 4622214 - DNA, 25 bp, Homo sapien
tgagctctcgagagtgacacaagcc

SEQ ID NO: 4622215 - DNA, 25 bp, Homo sapien
agctctcgagagtgacacaagccca

SEQ ID NO: 4622216 - DNA, 25 bp, Homo sapien
gctgtttctctagccgctgtgtctc

SEQ ID NO: 4622217 - DNA, 25 bp, Homo sapien
ctccatctctgcagcgggctgataa

SEQ ID NO: 4622218 - DNA, 25 bp, Homo sapien
accgtggcccggtgccggcacttgc

SEQ ID NO: 4622219 - DNA, 25 bp, Homo sapien
acaaactccgcctttgtcaccgtgg

SEQ ID NO: 4622220 - DNA, 25 bp, Homo sapien
tagctgtaatttccaacctagaagc

SEQ ID NO: 4622221 - DNA, 25 bp, Homo sapien
gcagtttccagtgtggactgtgcaa

SEQ ID NO: 4622222 - DNA, 25 bp, Homo sapien
taagaatatctggagcatacaggga

SEQ ID NO: 4622223 - DNA, 25 bp, Homo sapien
tgatgactcatgtctaggactgaaa

SEQ ID NO: 4622224 - DNA, 25 bp, Homo sapien
tagttctatgaagaatgatggtcat

SEQ ID NO: 4622225 - DNA, 25 bp, Homo sapien
tctatgcatgctctttttgggatcc

SEQ ID NO: 4622226 - DNA, 25 bp, Homo sapien
gttctatgaagaatgatggtcatat

SEQ ID NO: 4622227 - DNA, 25 bp, Homo sapien
tctatgaagaatgatggtcatattt

SEQ ID NO: 4622228 - DNA, 25 bp, Homo sapien
tacattcctcaggttcttcagtatg

SEQ ID NO: 4622229 - DNA, 25 bp, Homo sapien
tcaggttcttcagtatgagtccttt

SEQ ID NO: 4622230 - DNA, 25 bp, Homo sapien
tcctcaggttcttcagtatgagtcc

SEQ ID NO: 4622231 - DNA, 25 bp, Homo sapien
acatttcttacattcctcaggttct

SEQ ID NO: 4622232 - DNA, 25 bp, Homo sapien
tctagtgaaattagaacatctgaaa

SEQ ID NO: 4622233 - DNA, 25 bp, Homo sapien
tctcatattccttatatttgttggg

SEQ ID NO: 4622234 - DNA, 25 bp, Homo sapien
tgtgttctagtgaaattagaacatc

SEQ ID NO: 4622235 - DNA, 25 bp, Homo sapien
aattagaacatctgaaagctttaac

SEQ ID NO: 4622236 - DNA, 25 bp, Homo sapien
attacaaggtatatctctattgtga

SEQ ID NO: 4622237 - DNA, 25 bp, Homo sapien
tacaaggtatatctctattgtgaat

SEQ ID NO: 4622238 - DNA, 25 bp, Homo sapien
ttacaaggtatatctctattgtgaa

SEQ ID NO: 4622239 - DNA, 25 bp, Homo sapien
acaaggtatatctctattgtgaatt

SEQ ID NO: 4622240 - DNA, 25 bp, Homo sapien
tcatacggcttttctccactaagtc

SEQ ID NO: 4622241 - DNA, 25 bp, Homo sapien
ggcttttctccactaagtccttcca

SEQ ID NO: 4622242 - DNA, 25 bp, Homo sapien
atacggcttttctccactaagtcct

SEQ ID NO: 4622243 - DNA, 25 bp, Homo sapien
attcatacggcttttctccactaag

SEQ ID NO: 4622244 - DNA, 25 bp, Homo sapien
agcgcttgagctttgctaaaggaaa

SEQ ID NO: 4622245 - DNA, 25 bp, Homo sapien
agcctccacgggtaataccagacag

SEQ ID NO: 4622246 - DNA, 25 bp, Homo sapien
aagagatatcccagcaaagcgcttg

SEQ ID NO: 4622247 - DNA, 25 bp, Homo sapien
cagcagaagtcaacaggcacctcat

SEQ ID NO: 4622248 - DNA, 25 bp, Homo sapien
atacttgttcaatagttactccaag

SEQ ID NO: 4622249 - DNA, 25 bp, Homo sapien
tatacttgttcaatagttactccaa

SEQ ID NO: 4622250 - DNA, 25 bp, Homo sapien
cttgttcaatagttactccaagaga

SEQ ID NO: 4622251 - DNA, 25 bp, Homo sapien
ctatacttgttcaatagttactcca

SEQ ID NO: 4622252 - DNA, 25 bp, Homo sapien
ctctcgcaagactattgaaattcct

SEQ ID NO: 4622253 - DNA, 25 bp, Homo sapien
tattgaaattccttgtggtacactg

SEQ ID NO: 4622254 - DNA, 25 bp, Homo sapien
tctccagtggctgcattagtgccaa

SEQ ID NO: 4622255 - DNA, 25 bp, Homo sapien
tagtgccaattggtttctcaactgc

SEQ ID NO: 4622256 - DNA, 25 bp, Homo sapien
gataaaactagctactgtgagggct

SEQ ID NO: 4622257 - DNA, 25 bp, Homo sapien
gagaggactgtatccctcagtggca

SEQ ID NO: 4622258 - DNA, 25 bp, Homo sapien
tctctccatgggcagacgtcagctg

SEQ ID NO: 4622259 - DNA, 25 bp, Homo sapien
tgtgagggctcatctaacttctggt

SEQ ID NO: 4622260 - DNA, 25 bp, Homo sapien
tagcactttgtaagttgatattctc

SEQ ID NO: 4622261 - DNA, 25 bp, Homo sapien
gaacctgacagcgagtatcttcctt

SEQ ID NO: 4622262 - DNA, 25 bp, Homo sapien
caatgatctccagttatcgcatctc

SEQ ID NO: 4622263 - DNA, 25 bp, Homo sapien
tatcgcatctccatcgtagctagca

SEQ ID NO: 4622264 - DNA, 25 bp, Homo sapien
gtgtacatttgttaaattcaatctc

SEQ ID NO: 4622265 - DNA, 25 bp, Homo sapien
tcttagtgtacatttgttaaattca

SEQ ID NO: 4622266 - DNA, 25 bp, Homo sapien
tagtgtacatttgttaaattcaatc

SEQ ID NO: 4622267 - DNA, 25 bp, Homo sapien
gtacatttgttaaattcaatctctc

SEQ ID NO: 4622268 - DNA, 25 bp, Homo sapien
tctgctcattgaattagtgtcagct

SEQ ID NO: 4622269 - DNA, 25 bp, Homo sapien
tcaggaattatgatcggatttaacc

SEQ ID NO: 4622270 - DNA, 25 bp, Homo sapien
tatgatcggatttaaccttctgctc

SEQ ID NO: 4622271 - DNA, 25 bp, Homo sapien
ccgtctccattacctcaggaattat

SEQ ID NO: 4622272 - DNA, 25 bp, Homo sapien
ttagttgccatcagcgacaatccac

SEQ ID NO: 4622273 - DNA, 25 bp, Homo sapien
catcagcgacaatccactatggagt

SEQ ID NO: 4622274 - DNA, 25 bp, Homo sapien
gcgacaatccactatggagtctcat

SEQ ID NO: 4622275 - DNA, 25 bp, Homo sapien
catgggaagtactgatccacagctt

SEQ ID NO: 4622276 - DNA, 25 bp, Homo sapien
agaagggctgttagaggcgaatcca

SEQ ID NO: 4622277 - DNA, 25 bp, Homo sapien
ctgagaagggctgttagaggcgaat

SEQ ID NO: 4622278 - DNA, 25 bp, Homo sapien
agggctgttagaggcgaatccagca

SEQ ID NO: 4622279 - DNA, 25 bp, Homo sapien
tgttagaggcgaatccagcaagggc

SEQ ID NO: 4622280 - DNA, 25 bp, Homo sapien
tatgcacatgcaattgacatgctgc

SEQ ID NO: 4622281 - DNA, 25 bp, Homo sapien
gccgggcacgcacagattccattat

SEQ ID NO: 4622282 - DNA, 25 bp, Homo sapien
caccccgatactagtgatcagatca

SEQ ID NO: 4622283 - DNA, 25 bp, Homo sapien
tcagatcaggggagcaatcaggccg

SEQ ID NO: 4622284 - DNA, 25 bp, Homo sapien
gatttttcttcaggagagcacattt

SEQ ID NO: 4622285 - DNA, 25 bp, Homo sapien
ttctgatttttcttcaggagagcac

SEQ ID NO: 4622286 - DNA, 25 bp, Homo sapien
ctatcaatgtatttctgatttttct

SEQ ID NO: 4622287 - DNA, 25 bp, Homo sapien
tctgatttttcttcaggagagcaca

SEQ ID NO: 4622288 - DNA, 25 bp, Homo sapien
aacccaagaataggctcgtggtgga

SEQ ID NO: 4622289 - DNA, 25 bp, Homo sapien
gaataggctcgtggtggataaaatg

SEQ ID NO: 4622290 - DNA, 25 bp, Homo sapien
taaacccaagaataggctcgtggtg

SEQ ID NO: 4622291 - DNA, 25 bp, Homo sapien
caagaataggctcgtggtggataaa

SEQ ID NO: 4622292 - DNA, 25 bp, Homo sapien
ctgcctctcttagatttagtatttg

SEQ ID NO: 4622293 - DNA, 25 bp, Homo sapien
cttagatttagtatttgaattctgg

SEQ ID NO: 4622294 - DNA, 25 bp, Homo sapien
gatttagtatttgaattctgggcca

SEQ ID NO: 4622295 - DNA, 25 bp, Homo sapien
tagatttagtatttgaattctgggc

SEQ ID NO: 4622296 - DNA, 25 bp, Homo sapien
tgccgcttgggtaaacattgtactt

SEQ ID NO: 4622297 - DNA, 25 bp, Homo sapien
tttgagtctcttgccgcttgggtaa

SEQ ID NO: 4622298 - DNA, 25 bp, Homo sapien
tagaccacaaggttttttaacagca

SEQ ID NO: 4622299 - DNA, 25 bp, Homo sapien
tttaacagcatcccatatttctgtt

SEQ ID NO: 4622300 - DNA, 25 bp, Homo sapien
cgaatacgctttgatcctggatgct

SEQ ID NO: 4622301 - DNA, 25 bp, Homo sapien
gatagttcttcgcatcacgaatacg

SEQ ID NO: 4622302 - DNA, 25 bp, Homo sapien
tgccaagttggtaaaagggatgtcc

SEQ ID NO: 4622303 - DNA, 25 bp, Homo sapien
cttgaaaacttcatggcacagagca

SEQ ID NO: 4622304 - DNA, 25 bp, Homo sapien
aaaattgccatgagtcgtgagatga

SEQ ID NO: 4622305 - DNA, 25 bp, Homo sapien
gatttgtgtttatattcattcttaa

SEQ ID NO: 4622306 - DNA, 25 bp, Homo sapien
aacaaggccctgaaatagaaactca

SEQ ID NO: 4622307 - DNA, 25 bp, Homo sapien
tagaaactcaaacgtgatttgtgtt

SEQ ID NO: 4622308 - DNA, 25 bp, Homo sapien
gcattttgttcagctgctgagcaca

SEQ ID NO: 4622309 - DNA, 25 bp, Homo sapien
gcaataaagaatgagtgggcgcctc

SEQ ID NO: 4622310 - DNA, 25 bp, Homo sapien
caatgaggtagagttagtcatatgg

SEQ ID NO: 4622311 - DNA, 25 bp, Homo sapien
gagtgggcgcctcagaatatagcac

SEQ ID NO: 4622312 - DNA, 25 bp, Homo sapien
tcaagataccaaagccatccgacta

SEQ ID NO: 4622313 - DNA, 25 bp, Homo sapien
ccgactattcagcagcaaagtgaga

SEQ ID NO: 4622314 - DNA, 25 bp, Homo sapien
ggttgcagtgcagtgttaccatttg

SEQ ID NO: 4622315 - DNA, 25 bp, Homo sapien
tctccttcgggtttctctctgcaga

SEQ ID NO: 4622316 - DNA, 25 bp, Homo sapien
tccaatgacagaatttgaagcagaa

SEQ ID NO: 4622317 - DNA, 25 bp, Homo sapien
caatgacatcatagagaaaggcttt

SEQ ID NO: 4622318 - DNA, 25 bp, Homo sapien
tgcaagatggatgctgtagctctac

SEQ ID NO: 4622319 - DNA, 25 bp, Homo sapien
ggctcagtggctcaacaatgacatc

SEQ ID NO: 4622320 - DNA, 25 bp, Homo sapien
gaggagtataagcacagcagctgca

SEQ ID NO: 4622321 - DNA, 25 bp, Homo sapien
cgggaggagtataagcacagcagct

SEQ ID NO: 4622322 - DNA, 25 bp, Homo sapien
ctaggcgggaggagtataagcacag

SEQ ID NO: 4622323 - DNA, 25 bp, Homo sapien
taggcgggaggagtataagcacagc

SEQ ID NO: 4622324 - DNA, 25 bp, Homo sapien
cagtgggaatatacaaaaactggct

SEQ ID NO: 4622325 - DNA, 25 bp, Homo sapien
ttcagtgggaatatacaaaaactgg

SEQ ID NO: 4622326 - DNA, 25 bp, Homo sapien
ttgttgaagactcagaatttcctcc

SEQ ID NO: 4622327 - DNA, 25 bp, Homo sapien
ggctctttgttgaagactcagaatt

SEQ ID NO: 4622328 - DNA, 25 bp, Homo sapien
tgcatgatagggactgggagacttt

SEQ ID NO: 4622329 - DNA, 25 bp, Homo sapien
gatagggactgggagactttctcct

SEQ ID NO: 4622330 - DNA, 25 bp, Homo sapien
tcaccttcggtactccacggcaatc

SEQ ID NO: 4622331 - DNA, 25 bp, Homo sapien
aatcacatgcatgatagggactggg

SEQ ID NO: 4622332 - DNA, 25 bp, Homo sapien
ccctgattgacacttggctggctct

SEQ ID NO: 4622333 - DNA, 25 bp, Homo sapien
caacttctgacaccttggaggctca

SEQ ID NO: 4622334 - DNA, 25 bp, Homo sapien
tggacgcagaaagcagagtagcctt

SEQ ID NO: 4622335 - DNA, 25 bp, Homo sapien
taatgaagcatctcaccctaggtca

SEQ ID NO: 4622336 - DNA, 25 bp, Homo sapien
caaataatgtttctcaactatcttc

SEQ ID NO: 4622337 - DNA, 25 bp, Homo sapien
aataatgtttctcaactatcttctt

SEQ ID NO: 4622338 - DNA, 25 bp, Homo sapien
aatgtttctcaactatcttctttaa

SEQ ID NO: 4622339 - DNA, 25 bp, Homo sapien
taatgtttctcaactatcttcttta

SEQ ID NO: 4622340 - DNA, 25 bp, Homo sapien
ttgagaagtggtcaatgccgctgct

SEQ ID NO: 4622341 - DNA, 25 bp, Homo sapien
agaagtggtcaatgccgctgctggc

SEQ ID NO: 4622342 - DNA, 25 bp, Homo sapien
tgagaagtggtcaatgccgctgctg

SEQ ID NO: 4622343 - DNA, 25 bp, Homo sapien
agtggtcaatgccgctgctggctcc

SEQ ID NO: 4622344 - DNA, 25 bp, Homo sapien
tatattgtaccaggacatcagaatc

SEQ ID NO: 4622345 - DNA, 25 bp, Homo sapien
gtaccaggacatcagaatctacagt

SEQ ID NO: 4622346 - DNA, 25 bp, Homo sapien
ccttactcactttatattgtaccag

SEQ ID NO: 4622347 - DNA, 25 bp, Homo sapien
cactttatattgtaccaggacatca

SEQ ID NO: 4622348 - DNA, 25 bp, Homo sapien
ccattaaagatttgtagctgttaaa

SEQ ID NO: 4622349 - DNA, 25 bp, Homo sapien
ggcttctttcaaggtgtgttgacat

SEQ ID NO: 4622350 - DNA, 25 bp, Homo sapien
cagttgatggtctagcaactccatt

SEQ ID NO: 4622351 - DNA, 25 bp, Homo sapien
caaggtgtgttgacatgtcagttga

SEQ ID NO: 4622352 - DNA, 25 bp, Homo sapien
agagacaaagcaactcgaccatatt

SEQ ID NO: 4622353 - DNA, 25 bp, Homo sapien
tctggccttccgaaaatgcttgcat

SEQ ID NO: 4622354 - DNA, 25 bp, Homo sapien
ccatattcagaatcggcaagaagaa

SEQ ID NO: 4622355 - DNA, 25 bp, Homo sapien
cattgatctggccttccgaaaatgc

SEQ ID NO: 4622356 - DNA, 25 bp, Homo sapien
tgaggaaaccttattgcatactgct

SEQ ID NO: 4622357 - DNA, 25 bp, Homo sapien
ggaaaccttattgcatactgctctt

SEQ ID NO: 4622358 - DNA, 25 bp, Homo sapien
agaaagaatatgtccctgctgagga

SEQ ID NO: 4622359 - DNA, 25 bp, Homo sapien
tttcagaaagaatatgtccctgctg

SEQ ID NO: 4622360 - DNA, 25 bp, Homo sapien
aacatctcattaatatcaccatgat

SEQ ID NO: 4622361 - DNA, 25 bp, Homo sapien
gaacatctcattaatatcaccatga

SEQ ID NO: 4622362 - DNA, 25 bp, Homo sapien
taacttcagtttgaacgctgaacat

SEQ ID NO: 4622363 - DNA, 25 bp, Homo sapien
cagggagtactgaatttttacaggc

SEQ ID NO: 4622364 - DNA, 25 bp, Homo sapien
gcagaaccacatccagtagccattc

SEQ ID NO: 4622365 - DNA, 25 bp, Homo sapien
cagcagaaccacatccagtagccat

SEQ ID NO: 4622366 - DNA, 25 bp, Homo sapien
cacagcagaaccacatccagtagcc

SEQ ID NO: 4622367 - DNA, 25 bp, Homo sapien
gccagttccagtataaatgattgtc

SEQ ID NO: 4622368 - DNA, 25 bp, Homo sapien
taaggccaccttgcatcactgtttt

SEQ ID NO: 4622369 - DNA, 25 bp, Homo sapien
tgtaacattctttggaactaaggcc

SEQ ID NO: 4622370 - DNA, 25 bp, Homo sapien
gtctgctctcttaatctgctgaaga

SEQ ID NO: 4622371 - DNA, 25 bp, Homo sapien
gaatcttcaatgtgcggacaggacc

SEQ ID NO: 4622372 - DNA, 25 bp, Homo sapien
tgctcatagagggaggtcataaaac

SEQ ID NO: 4622373 - DNA, 25 bp, Homo sapien
tccttccggctgtgagtgctcatag

SEQ ID NO: 4622374 - DNA, 25 bp, Homo sapien
agcccgcttggctcagcagttttaa

SEQ ID NO: 4622375 - DNA, 25 bp, Homo sapien
cataggtgttggcatcagagggatc

SEQ ID NO: 4622376 - DNA, 25 bp, Homo sapien
taagagggcactaatcaaagcttca

SEQ ID NO: 4622377 - DNA, 25 bp, Homo sapien
cagagggatctctatccgaagcgta

SEQ ID NO: 4622378 - DNA, 25 bp, Homo sapien
ccttaggtctgtgggtgctaatgcc

SEQ ID NO: 4622379 - DNA, 25 bp, Homo sapien
ctttccgggactcacttctatcagg

SEQ ID NO: 4622380 - DNA, 25 bp, Homo sapien
gactcacttctatcaggatcacaag

SEQ ID NO: 4622381 - DNA, 25 bp, Homo sapien
cttctatcaggatcacaagtaaccc

SEQ ID NO: 4622382 - DNA, 25 bp, Homo sapien
cctccaaagtgcacacaggggcatt

SEQ ID NO: 4622383 - DNA, 25 bp, Homo sapien
ttcttgttatcactttcatctaaag

SEQ ID NO: 4622384 - DNA, 25 bp, Homo sapien
ttatttcttgttatcactttcatct

SEQ ID NO: 4622385 - DNA, 25 bp, Homo sapien
tttcttgttatcactttcatctaaa

SEQ ID NO: 4622386 - DNA, 25 bp, Homo sapien
tatttcttgttatcactttcatcta

SEQ ID NO: 4622387 - DNA, 25 bp, Homo sapien
gttctgcattgtcacagctgagctt

SEQ ID NO: 4622388 - DNA, 25 bp, Homo sapien
atgttctgcattgtcacagctgagc

SEQ ID NO: 4622389 - DNA, 25 bp, Homo sapien
catatgttctgcattgtcacagctg

SEQ ID NO: 4622390 - DNA, 25 bp, Homo sapien
tctgcattgtcacagctgagctttc

SEQ ID NO: 4622391 - DNA, 25 bp, Homo sapien
cccagcaatctgctggtaagatttc

SEQ ID NO: 4622392 - DNA, 25 bp, Homo sapien
tcagaacagcgaagacccttgccct

SEQ ID NO: 4622393 - DNA, 25 bp, Homo sapien
ctgtcccagcaatctgctggtaaga

SEQ ID NO: 4622394 - DNA, 25 bp, Homo sapien
caaaactcagaacagcgaagaccct

SEQ ID NO: 4622395 - DNA, 25 bp, Homo sapien
actcccatgataggaacttgttaca

SEQ ID NO: 4622396 - DNA, 25 bp, Homo sapien
ccataccattgtgtatttgtggttg

SEQ ID NO: 4622397 - DNA, 25 bp, Homo sapien
gaacttgttacatctaagacaaaac

SEQ ID NO: 4622398 - DNA, 25 bp, Homo sapien
ttgtggttgtatggtacagactccc

SEQ ID NO: 4622399 - DNA, 25 bp, Homo sapien
tacaggctcatgagtggaaggaaat

SEQ ID NO: 4622400 - DNA, 25 bp, Homo sapien
taggaagcaactaacttgctttaaa

SEQ ID NO: 4622401 - DNA, 25 bp, Homo sapien
ctcatgagtggaaggaaattgcctt

SEQ ID NO: 4622402 - DNA, 25 bp, Homo sapien
tgagtggaaggaaattgccttgtct

SEQ ID NO: 4622403 - DNA, 25 bp, Homo sapien
caaccaaccaatcgcctggaaccag

SEQ ID NO: 4622404 - DNA, 25 bp, Homo sapien
tccgatcaagactctgttcctcatt

SEQ ID NO: 4622405 - DNA, 25 bp, Homo sapien
gagagattggtgatttgggcttaat

SEQ ID NO: 4622406 - DNA, 25 bp, Homo sapien
tggaaccagccaattaagagagatt

SEQ ID NO: 4622407 - DNA, 25 bp, Homo sapien
ttttaaaaatctctattgccatgga

SEQ ID NO: 4622408 - DNA, 25 bp, Homo sapien
taaaaatctctattgccatggacat

SEQ ID NO: 4622409 - DNA, 25 bp, Homo sapien
ttaaaaatctctattgccatggaca

SEQ ID NO: 4622410 - DNA, 25 bp, Homo sapien
ttttttaaaaatctctattgccatg

SEQ ID NO: 4622411 - DNA, 25 bp, Homo sapien
tctttcccacaaatttggctatcat

SEQ ID NO: 4622412 - DNA, 25 bp, Homo sapien
ctctttcccacaaatttggctatca

SEQ ID NO: 4622413 - DNA, 25 bp, Homo sapien
ggaaacctggatctctaactggagg

SEQ ID NO: 4622414 - DNA, 25 bp, Homo sapien
ggctcagttgctgtagaaagacaaa

SEQ ID NO: 4622415 - DNA, 25 bp, Homo sapien
tattcccaagtaattgcccatttta

SEQ ID NO: 4622416 - DNA, 25 bp, Homo sapien
attttattagtaacacagggcagga

SEQ ID NO: 4622417 - DNA, 25 bp, Homo sapien
gtcgctaaactctcttactactgct

SEQ ID NO: 4622418 - DNA, 25 bp, Homo sapien
aattgtgtcgctaaactctcttact

SEQ ID NO: 4622419 - DNA, 25 bp, Homo sapien
gtgtcgctaaactctcttactactg

SEQ ID NO: 4622420 - DNA, 25 bp, Homo sapien
taaattgtgtcgctaaactctctta

SEQ ID NO: 4622421 - DNA, 25 bp, Homo sapien
taggttgacactgtagactcataac

SEQ ID NO: 4622422 - DNA, 25 bp, Homo sapien
tgtgcctacacatcagcaaacataa

SEQ ID NO: 4622423 - DNA, 25 bp, Homo sapien
tcagggagggttcaagagttcacac

SEQ ID NO: 4622424 - DNA, 25 bp, Homo sapien
tatgtataaacaagatatcctgaat

SEQ ID NO: 4622425 - DNA, 25 bp, Homo sapien
gaaatgatgcattgcatggaaattc

SEQ ID NO: 4622426 - DNA, 25 bp, Homo sapien
ctatggagggttaagctgatctgct

SEQ ID NO: 4622427 - DNA, 25 bp, Homo sapien
gctgctcaccgacagcatctgctgg

SEQ ID NO: 4622428 - DNA, 25 bp, Homo sapien
ctgagagtgcaaataagggaagaaa

SEQ ID NO: 4622429 - DNA, 25 bp, Homo sapien
agatttgacattttgtgacattttc

SEQ ID NO: 4622430 - DNA, 25 bp, Homo sapien
gacattttcagatttgacattttgt

SEQ ID NO: 4622431 - DNA, 25 bp, Homo sapien
cagtttaatattgctaataccctgg

SEQ ID NO: 4622432 - DNA, 25 bp, Homo sapien
tcagtttaatattgctaataccctg

SEQ ID NO: 4622433 - DNA, 25 bp, Homo sapien
ataatggggatgtagtgttactgag

SEQ ID NO: 4622434 - DNA, 25 bp, Homo sapien
ttataatggggatgtagtgttactg

SEQ ID NO: 4622435 - DNA, 25 bp, Homo sapien
agttgtttataatggggatgtagtg

SEQ ID NO: 4622436 - DNA, 25 bp, Homo sapien
gtttataatggggatgtagtgttac

SEQ ID NO: 4622437 - DNA, 25 bp, Homo sapien
tacagacccctactagcttgaagcc

SEQ ID NO: 4622438 - DNA, 25 bp, Homo sapien
tatgtggtagctccatggggctgtc

SEQ ID NO: 4622439 - DNA, 25 bp, Homo sapien
gaagcctgttagagcaggagacttt

SEQ ID NO: 4622440 - DNA, 25 bp, Homo sapien
cattcaagggcttagatctctctgc

SEQ ID NO: 4622441 - DNA, 25 bp, Homo sapien
ttctataggatcacttccataaccc

SEQ ID NO: 4622442 - DNA, 25 bp, Homo sapien
gttaagcaatctctcaggttctata

SEQ ID NO: 4622443 - DNA, 25 bp, Homo sapien
gagtttgagttaagcaatctctcag

SEQ ID NO: 4622444 - DNA, 25 bp, Homo sapien
agagtctcatgaggatgcaagtcag

SEQ ID NO: 4622445 - DNA, 25 bp, Homo sapien
aaggtgccagtcagatcctgagttg

SEQ ID NO: 4622446 - DNA, 25 bp, Homo sapien
cagtcagatcctgagttgagttgta

SEQ ID NO: 4622447 - DNA, 25 bp, Homo sapien
tgatatgccagcaaaggtgccagtc

SEQ ID NO: 4622448 - DNA, 25 bp, Homo sapien
ccttggtgatatgccagcaaaggtg

SEQ ID NO: 4622449 - DNA, 25 bp, Homo sapien
tatggcgaactaggttaacatctgt

SEQ ID NO: 4622450 - DNA, 25 bp, Homo sapien
tggctactgggttctcattattggt

SEQ ID NO: 4622451 - DNA, 25 bp, Homo sapien
gagaaattctgcatgtacctggtat

SEQ ID NO: 4622452 - DNA, 25 bp, Homo sapien
tatggtctggttgaaaatacttaac

SEQ ID NO: 4622453 - DNA, 25 bp, Homo sapien
tcctgcctcaccgttgacctttttg

SEQ ID NO: 4622454 - DNA, 25 bp, Homo sapien
tattccaaatatggaagttaatgac

SEQ ID NO: 4622455 - DNA, 25 bp, Homo sapien
tctccactgaactgaaaccttcctg

SEQ ID NO: 4622456 - DNA, 25 bp, Homo sapien
gcttattccaaatatggaagttaat

SEQ ID NO: 4622457 - DNA, 25 bp, Homo sapien
tctcatgaaggaggcatattatccg

SEQ ID NO: 4622458 - DNA, 25 bp, Homo sapien
tcaacgtctgaacttaatggagcat

SEQ ID NO: 4622459 - DNA, 25 bp, Homo sapien
tatgtggagattaatagccgcctac

SEQ ID NO: 4622460 - DNA, 25 bp, Homo sapien
actacgttgctgtttctggaaagaa

SEQ ID NO: 4622461 - DNA, 25 bp, Homo sapien
tcccgaaagcttccattaatatttg

SEQ ID NO: 4622462 - DNA, 25 bp, Homo sapien
aatatttgccagtatctcatgggct

SEQ ID NO: 4622463 - DNA, 25 bp, Homo sapien
ttgccttacatacccattcttgatg

SEQ ID NO: 4622464 - DNA, 25 bp, Homo sapien
ccagtatctcatgggctgtgattgc

SEQ ID NO: 4622465 - DNA, 25 bp, Homo sapien
cacttggggaatggcatatagtcct

SEQ ID NO: 4622466 - DNA, 25 bp, Homo sapien
gcggaaagacacatagtcctggaaa

SEQ ID NO: 4622467 - DNA, 25 bp, Homo sapien
aaagggaacggcatatagtcctggg

SEQ ID NO: 4622468 - DNA, 25 bp, Homo sapien
cctggaaagggaacggcatatagtc

SEQ ID NO: 4622469 - DNA, 25 bp, Homo sapien
cagatacctggaatttcttgaagcc

SEQ ID NO: 4622470 - DNA, 25 bp, Homo sapien
tctccagatacctggaatttcttga

SEQ ID NO: 4622471 - DNA, 25 bp, Homo sapien
gatacctggaatttcttgaagcctg

SEQ ID NO: 4622472 - DNA, 25 bp, Homo sapien
tccagatacctggaatttcttgaag

SEQ ID NO: 4622473 - DNA, 25 bp, Homo sapien
tacttcttctgcaccaacctgatat

SEQ ID NO: 4622474 - DNA, 25 bp, Homo sapien
ttaggttggtgcagcaattacttct

SEQ ID NO: 4622475 - DNA, 25 bp, Homo sapien
cctgatatttgataaggagacagat

SEQ ID NO: 4622476 - DNA, 25 bp, Homo sapien
gacagatggtacagacacaggaacc

SEQ ID NO: 4622477 - DNA, 25 bp, Homo sapien
tggcatcaggggtgcacaccaaaca

SEQ ID NO: 4622478 - DNA, 25 bp, Homo sapien
aaacagccgtatcttcacctaactg

SEQ ID NO: 4622479 - DNA, 25 bp, Homo sapien
tacagaggcggttgtggcatcaggg

SEQ ID NO: 4622480 - DNA, 25 bp, Homo sapien
tcttcacctaactgttgacctgctc

SEQ ID NO: 4622481 - DNA, 25 bp, Homo sapien
caatagctggtagaacaagtccttc

SEQ ID NO: 4622482 - DNA, 25 bp, Homo sapien
ctcggtgtcttaattggagtaataa

SEQ ID NO: 4622483 - DNA, 25 bp, Homo sapien
caatattgatgacaatctcggtgtc

SEQ ID NO: 4622484 - DNA, 25 bp, Homo sapien
tacctggttcttcaagtgtctttgc

SEQ ID NO: 4622485 - DNA, 25 bp, Homo sapien
gagaccaaattagtatggaaaaatg

SEQ ID NO: 4622486 - DNA, 25 bp, Homo sapien
tataacttctacagggagatgaatg

SEQ ID NO: 4622487 - DNA, 25 bp, Homo sapien
aatatataacttctacagggagatg

SEQ ID NO: 4622488 - DNA, 25 bp, Homo sapien
gttgttctcattgagaccaaattag

SEQ ID NO: 4622489 - DNA, 25 bp, Homo sapien
caagtagactaactgggaggcacac

SEQ ID NO: 4622490 - DNA, 25 bp, Homo sapien
aagtagactaactgggaggcacacc

SEQ ID NO: 4622491 - DNA, 25 bp, Homo sapien
ccagcatactgtctattttctcttt

SEQ ID NO: 4622492 - DNA, 25 bp, Homo sapien
ctgcgttgtttccaccagcatactg

SEQ ID NO: 4622493 - DNA, 25 bp, Homo sapien
gtttccaccagcatactgtctattt

SEQ ID NO: 4622494 - DNA, 25 bp, Homo sapien
tccaccagcatactgtctattttct

SEQ ID NO: 4622495 - DNA, 25 bp, Homo sapien
tcagcaaagcctaacccgcaaacac

SEQ ID NO: 4622496 - DNA, 25 bp, Homo sapien
gtaatgagcagcaagttttgaatga

SEQ ID NO: 4622497 - DNA, 25 bp, Homo sapien
tggacccaaatgtaatgagcagcaa

SEQ ID NO: 4622498 - DNA, 25 bp, Homo sapien
agttttgaatgatattcagcaaagc

SEQ ID NO: 4622499 - DNA, 25 bp, Homo sapien
ccaagggaacttgctcactcagagc

SEQ ID NO: 4622500 - DNA, 25 bp, Homo sapien
gaaccaagggaacttgctcactcag

SEQ ID NO: 4622501 - DNA, 25 bp, Homo sapien
tgagaaccaagggaacttgctcact

SEQ ID NO: 4622502 - DNA, 25 bp, Homo sapien
ggaacttgctcactcagagcccaca

SEQ ID NO: 4622503 - DNA, 25 bp, Homo sapien
cttctttctctccacaggatgaagg

SEQ ID NO: 4622504 - DNA, 25 bp, Homo sapien
cacttctttctctccacaggatgaa

SEQ ID NO: 4622505 - DNA, 25 bp, Homo sapien
ctttctctccacaggatgaaggtta

SEQ ID NO: 4622506 - DNA, 25 bp, Homo sapien
tctttctctccacaggatgaaggtt

SEQ ID NO: 4622507 - DNA, 25 bp, Homo sapien
ctagcaaaagggaacctggccctgg

SEQ ID NO: 4622508 - DNA, 25 bp, Homo sapien
tgggtctggagcttctgaggaatga

SEQ ID NO: 4622509 - DNA, 25 bp, Homo sapien
ccctgggtctggagcttctgaggaa

SEQ ID NO: 4622510 - DNA, 25 bp, Homo sapien
ggtctggagcttctgaggaatgaac

SEQ ID NO: 4622511 - DNA, 25 bp, Homo sapien
tccaatagttaacctacagttcaga

SEQ ID NO: 4622512 - DNA, 25 bp, Homo sapien
tctgtatctcctttcctagtacagt

SEQ ID NO: 4622513 - DNA, 25 bp, Homo sapien
gtaaaccttccagtattaatcacac

SEQ ID NO: 4622514 - DNA, 25 bp, Homo sapien
aatgtgcattttagctctgtatctc

SEQ ID NO: 4622515 - DNA, 25 bp, Homo sapien
tgtttactctgagactctgaatccg

SEQ ID NO: 4622516 - DNA, 25 bp, Homo sapien
gagtaagctgctcaagttcacacaa

SEQ ID NO: 4622517 - DNA, 25 bp, Homo sapien
cgctagagctacagttaaaggccat

SEQ ID NO: 4622518 - DNA, 25 bp, Homo sapien
tacacatcgtgcagcaaactggtga

SEQ ID NO: 4622519 - DNA, 25 bp, Homo sapien
ctcagaaaatgtcgtttgtttcatc

SEQ ID NO: 4622520 - DNA, 25 bp, Homo sapien
gaaaatgtcgtttgtttcatctctt

SEQ ID NO: 4622521 - DNA, 25 bp, Homo sapien
gtgaactcagaaaatgtcgtttgtt

SEQ ID NO: 4622522 - DNA, 25 bp, Homo sapien
atttgggaaatccatagattttcaa

SEQ ID NO: 4622523 - DNA, 25 bp, Homo sapien
aaaggcaacagtggccatgttgatc

SEQ ID NO: 4622524 - DNA, 25 bp, Homo sapien
ccagttataaatggcaaaggcaaca

SEQ ID NO: 4622525 - DNA, 25 bp, Homo sapien
tgaggttctgaaaacgttctggttg

SEQ ID NO: 4622526 - DNA, 25 bp, Homo sapien
catgttgatcagcactaggcatctg

SEQ ID NO: 4622527 - DNA, 25 bp, Homo sapien
tagcaggaagtgagtacttccttct

SEQ ID NO: 4622528 - DNA, 25 bp, Homo sapien
gagtacttccttcttcgagcatttt

SEQ ID NO: 4622529 - DNA, 25 bp, Homo sapien
aattagcaggaagtgagtacttcct

SEQ ID NO: 4622530 - DNA, 25 bp, Homo sapien
tccttcttcgagcatttttctcata

SEQ ID NO: 4622531 - DNA, 25 bp, Homo sapien
ttaatttatacagaggtctccttcg

SEQ ID NO: 4622532 - DNA, 25 bp, Homo sapien
cattctgggaacaaccattagcaaa

SEQ ID NO: 4622533 - DNA, 25 bp, Homo sapien
aattaaggtcatgttgacacttctc

SEQ ID NO: 4622534 - DNA, 25 bp, Homo sapien
aggttagaacttggcatattatccc

SEQ ID NO: 4622535 - DNA, 25 bp, Homo sapien
cactttcattatgcgtatagtaact

SEQ ID NO: 4622536 - DNA, 25 bp, Homo sapien
tgacaggaaactttgcactttcatt

SEQ ID NO: 4622537 - DNA, 25 bp, Homo sapien
ggaaactttgcactttcattatgcg

SEQ ID NO: 4622538 - DNA, 25 bp, Homo sapien
tgcgtatagtaactaatagatcttt

SEQ ID NO: 4622539 - DNA, 25 bp, Homo sapien
ttttactatgccattcacagctcat

SEQ ID NO: 4622540 - DNA, 25 bp, Homo sapien
tgtctgcaacctgccccctacttca

SEQ ID NO: 4622541 - DNA, 25 bp, Homo sapien
cttctgtctgcaacctgccccctac

SEQ ID NO: 4622542 - DNA, 25 bp, Homo sapien
atgccattcacagctcatcaccagg

SEQ ID NO: 4622543 - DNA, 25 bp, Homo sapien
atgagcctgcttggacttttgccac

SEQ ID NO: 4622544 - DNA, 25 bp, Homo sapien
tatgagcctgcttggacttttgcca

SEQ ID NO: 4622545 - DNA, 25 bp, Homo sapien
tgagcctgcttggacttttgccaca

SEQ ID NO: 4622546 - DNA, 25 bp, Homo sapien
atatgagcctgcttggacttttgcc

SEQ ID NO: 4622547 - DNA, 25 bp, Homo sapien
cagggcactgctcagagctcaccat

SEQ ID NO: 4622548 - DNA, 25 bp, Homo sapien
tgagcagaaatacatgccagcattt

SEQ ID NO: 4622549 - DNA, 25 bp, Homo sapien
tacatgccagcatttctggctccag

SEQ ID NO: 4622550 - DNA, 25 bp, Homo sapien
agaaatacatgccagcatttctggc

SEQ ID NO: 4622551 - DNA, 25 bp, Homo sapien
tcagtgatagcacttggagtaatcc

SEQ ID NO: 4622552 - DNA, 25 bp, Homo sapien
ggagtaatccctgtttcagccccaa

SEQ ID NO: 4622553 - DNA, 25 bp, Homo sapien
gccccaatatatgagctgatttcca

SEQ ID NO: 4622554 - DNA, 25 bp, Homo sapien
tcatgtaattagtgcatgtcagctc

SEQ ID NO: 4622555 - DNA, 25 bp, Homo sapien
aagatctctataaaggtagtaggaa

SEQ ID NO: 4622556 - DNA, 25 bp, Homo sapien
tctataaaggtagtaggaagaagcc

SEQ ID NO: 4622557 - DNA, 25 bp, Homo sapien
gaagccagagtagtttcctttataa

SEQ ID NO: 4622558 - DNA, 25 bp, Homo sapien
gatctctataaaggtagtaggaaga

SEQ ID NO: 4622559 - DNA, 25 bp, Homo sapien
tctgtattattacacacagtccagt

SEQ ID NO: 4622560 - DNA, 25 bp, Homo sapien
ctgtattattacacacagtccagtg

SEQ ID NO: 4622561 - DNA, 25 bp, Homo sapien
tgtattattacacacagtccagtgc

SEQ ID NO: 4622562 - DNA, 25 bp, Homo sapien
cagaagagtaaggaacaagtcacca

SEQ ID NO: 4622563 - DNA, 25 bp, Homo sapien
cagtgtgtagcttagaaaacaggtc

SEQ ID NO: 4622564 - DNA, 25 bp, Homo sapien
catgctgctcctgctatgcctatta

SEQ ID NO: 4622565 - DNA, 25 bp, Homo sapien
gccacatggtactctttgacgtagg

SEQ ID NO: 4622566 - DNA, 25 bp, Homo sapien
caagggtactttccaaaggatcagc

SEQ ID NO: 4622567 - DNA, 25 bp, Homo sapien
gccctccatatccaagggtactttc

SEQ ID NO: 4622568 - DNA, 25 bp, Homo sapien
ctgccctccatatccaagggtactt

SEQ ID NO: 4622569 - DNA, 25 bp, Homo sapien
aagggtactttccaaaggatcagct

SEQ ID NO: 4622570 - DNA, 25 bp, Homo sapien
agaaggaggatttagatgtggccat

SEQ ID NO: 4622571 - DNA, 25 bp, Homo sapien
taatcagtatattaatcttatcagc

SEQ ID NO: 4622572 - DNA, 25 bp, Homo sapien
cagtatattaatcttatcagcagct

SEQ ID NO: 4622573 - DNA, 25 bp, Homo sapien
gaaaaggtgttaatcagtatattaa

SEQ ID NO: 4622574 - DNA, 25 bp, Homo sapien
ggttggcgtacacatgcagaattgt

SEQ ID NO: 4622575 - DNA, 25 bp, Homo sapien
tgtatattgcatgagctcttgaagc

SEQ ID NO: 4622576 - DNA, 25 bp, Homo sapien
cctgctgttgtgaagagtcaagtcc

SEQ ID NO: 4622577 - DNA, 25 bp, Homo sapien
tatgagaactagcagtggaatgagc

SEQ ID NO: 4622578 - DNA, 25 bp, Homo sapien
ttgcccttaggcgatatcccaaagc

SEQ ID NO: 4622579 - DNA, 25 bp, Homo sapien
taggcgatatcccaaagcaccctct

SEQ ID NO: 4622580 - DNA, 25 bp, Homo sapien
cttaggcgatatcccaaagcaccct

SEQ ID NO: 4622581 - DNA, 25 bp, Homo sapien
tgctctattgcccttaggcgatatc

SEQ ID NO: 4622582 - DNA, 25 bp, Homo sapien
taaatatgtgcttctaggtgagtgt

SEQ ID NO: 4622583 - DNA, 25 bp, Homo sapien
agatgcgagtaggagcttctcaaag

SEQ ID NO: 4622584 - DNA, 25 bp, Homo sapien
tgagtgtgagatgcgagtaggagct

SEQ ID NO: 4622585 - DNA, 25 bp, Homo sapien
tatgtgcttctaggtgagtgtgaga

SEQ ID NO: 4622586 - DNA, 25 bp, Homo sapien
tattggtgagtctagtgactccact

SEQ ID NO: 4622587 - DNA, 25 bp, Homo sapien
gactccactagagtcactagtagca

SEQ ID NO: 4622588 - DNA, 25 bp, Homo sapien
gagtctagtgactccactagagtca

SEQ ID NO: 4622589 - DNA, 25 bp, Homo sapien
tctgtattggtgagtctagtgactc

SEQ ID NO: 4622590 - DNA, 25 bp, Homo sapien
tgtttgcattttgagtgactgctat

SEQ ID NO: 4622591 - DNA, 25 bp, Homo sapien
gagtttgcaatgcagcaggcctgca

SEQ ID NO: 4622592 - DNA, 25 bp, Homo sapien
gcaatcaaaggcatggtacattaaa

SEQ ID NO: 4622593 - DNA, 25 bp, Homo sapien
tcaaatagccccataaatcagcaca

SEQ ID NO: 4622594 - DNA, 25 bp, Homo sapien
acttaaaggagaaaacagattgatc

SEQ ID NO: 4622595 - DNA, 25 bp, Homo sapien
acagcctgctggtgtcaatcagggc

SEQ ID NO: 4622596 - DNA, 25 bp, Homo sapien
aagttgatctgaaatctgagcgccc

SEQ ID NO: 4622597 - DNA, 25 bp, Homo sapien
acttggaccctatcattaaatgtgg

SEQ ID NO: 4622598 - DNA, 25 bp, Homo sapien
tattgttgaaggtatctgttgagta

SEQ ID NO: 4622599 - DNA, 25 bp, Homo sapien
gaaggtatctgttgagtattcgatc

SEQ ID NO: 4622600 - DNA, 25 bp, Homo sapien
tatctgttgagtattcgatcctcat

SEQ ID NO: 4622601 - DNA, 25 bp, Homo sapien
ttttattgttgaaggtatctgttga

SEQ ID NO: 4622602 - DNA, 25 bp, Homo sapien
tcaggaaacactcagttttacattc

SEQ ID NO: 4622603 - DNA, 25 bp, Homo sapien
caggaaacactcagttttacattca

SEQ ID NO: 4622604 - DNA, 25 bp, Homo sapien
agttttacattcacagcttgttcaa

SEQ ID NO: 4622605 - DNA, 25 bp, Homo sapien
tttacattcacagcttgttcaatac

SEQ ID NO: 4622606 - DNA, 25 bp, Homo sapien
agctgccattgggagcaactgtctc

SEQ ID NO: 4622607 - DNA, 25 bp, Homo sapien
gcaactgtctcccattttctggaaa

SEQ ID NO: 4622608 - DNA, 25 bp, Homo sapien
taggcacactcagaatacttggctt

SEQ ID NO: 4622609 - DNA, 25 bp, Homo sapien
ttccttccatggtcataggcacact

SEQ ID NO: 4622610 - DNA, 25 bp, Homo sapien
aactcaacgttactatcactacctc

SEQ ID NO: 4622611 - DNA, 25 bp, Homo sapien
tgtaaactcaacgttactatcacta

SEQ ID NO: 4622612 - DNA, 25 bp, Homo sapien
ggtctgtgagtgtgtattgtaaact

SEQ ID NO: 4622613 - DNA, 25 bp, Homo sapien
tgtgtattgtaaactcaacgttact

SEQ ID NO: 4622614 - DNA, 25 bp, Homo sapien
gcaaccaagttggaatacacatttc

SEQ ID NO: 4622615 - DNA, 25 bp, Homo sapien
aattgatgaggagaatgcaaccaag

SEQ ID NO: 4622616 - DNA, 25 bp, Homo sapien
cttactgaaataaggtgtaaagaca

SEQ ID NO: 4622617 - DNA, 25 bp, Homo sapien
acctatgattggctggtgtatctga

SEQ ID NO: 4622618 - DNA, 25 bp, Homo sapien
tggactcacataacttagaaaggct

SEQ ID NO: 4622619 - DNA, 25 bp, Homo sapien
tcacattacccgagaaggagcctgg

SEQ ID NO: 4622620 - DNA, 25 bp, Homo sapien
ctggatactacatttttcccacggg

SEQ ID NO: 4622621 - DNA, 25 bp, Homo sapien
tgaatgaaaagttgaggatctggca

SEQ ID NO: 4622622 - DNA, 25 bp, Homo sapien
ctgtttctccatttcacgtttctcc

SEQ ID NO: 4622623 - DNA, 25 bp, Homo sapien
tatagaacctaactggtcactcaga

SEQ ID NO: 4622624 - DNA, 25 bp, Homo sapien
tccctggacagtgaatcaagatgcc

SEQ ID NO: 4622625 - DNA, 25 bp, Homo sapien
catgtgtcaaagagatcgcctatag

SEQ ID NO: 4622626 - DNA, 25 bp, Homo sapien
gattaggtcagcttgtaattccctg

SEQ ID NO: 4622627 - DNA, 25 bp, Homo sapien
gtcaccctttctaccaggcataata

SEQ ID NO: 4622628 - DNA, 25 bp, Homo sapien
cagtgtctcatcagttatcacatac

SEQ ID NO: 4622629 - DNA, 25 bp, Homo sapien
cccctggaattaagttgacctgaga

SEQ ID NO: 4622630 - DNA, 25 bp, Homo sapien
ttcactggattgagttttagatgtc

SEQ ID NO: 4622631 - DNA, 25 bp, Homo sapien
tttctggcgcctgaagaagaatgtc

SEQ ID NO: 4622632 - DNA, 25 bp, Homo sapien
tggaagtttctggcgcctgaagaag

SEQ ID NO: 4622633 - DNA, 25 bp, Homo sapien
gaagtttctggcgcctgaagaagaa

SEQ ID NO: 4622634 - DNA, 25 bp, Homo sapien
agtttctggcgcctgaagaagaatg

SEQ ID NO: 4622635 - DNA, 25 bp, Homo sapien
gatttctcgttcagttgaagcacaa

SEQ ID NO: 4622636 - DNA, 25 bp, Homo sapien
gctttagggatgctagctgtgtaga

SEQ ID NO: 4622637 - DNA, 25 bp, Homo sapien
ctttccacagccaatagagattccc

SEQ ID NO: 4622638 - DNA, 25 bp, Homo sapien
gagtgaatctccaccccactgtttg

SEQ ID NO: 4622639 - DNA, 25 bp, Homo sapien
ccactttaggagtttctatctccat

SEQ ID NO: 4622640 - DNA, 25 bp, Homo sapien
cgacttaatgttgccactttaggag

SEQ ID NO: 4622641 - DNA, 25 bp, Homo sapien
ggtctagcccctgaacgacttaatg

SEQ ID NO: 4622642 - DNA, 25 bp, Homo sapien
tcattcctttggcagttcagtaggt

SEQ ID NO: 4622643 - DNA, 25 bp, Homo sapien
gcgaatattggtgaacagcaagtgt

SEQ ID NO: 4622644 - DNA, 25 bp, Homo sapien
ggtgaacagcaagtgttgctgccta

SEQ ID NO: 4622645 - DNA, 25 bp, Homo sapien
aacagcaagtgttgctgcctaatcg

SEQ ID NO: 4622646 - DNA, 25 bp, Homo sapien
cagcaagtgttgctgcctaatcgtt

SEQ ID NO: 4622647 - DNA, 25 bp, Homo sapien
ttttagtgctcttgtcagaaatcag

SEQ ID NO: 4622648 - DNA, 25 bp, Homo sapien
tcatttatggaaggagggtgtcttt

SEQ ID NO: 4622649 - DNA, 25 bp, Homo sapien
ctctagatttaaatgaccttggtca

SEQ ID NO: 4622650 - DNA, 25 bp, Homo sapien
ggtcattattgctctggctattcaa

SEQ ID NO: 4622651 - DNA, 25 bp, Homo sapien
caataatgcgttcaaatttaagagt

SEQ ID NO: 4622652 - DNA, 25 bp, Homo sapien
ttaaagggccaagatatttaagtca

SEQ ID NO: 4622653 - DNA, 25 bp, Homo sapien
tttttgtaatctgagttatcagttt

SEQ ID NO: 4622654 - DNA, 25 bp, Homo sapien
gtcaattagaacaataatgcgttca

SEQ ID NO: 4622655 - DNA, 25 bp, Homo sapien
tccagcgtacaagtttgaggacagt

SEQ ID NO: 4622656 - DNA, 25 bp, Homo sapien
cgtacaagtttgaggacagttatcg

SEQ ID NO: 4622657 - DNA, 25 bp, Homo sapien
tgaggacagttatcgtaatccccat

SEQ ID NO: 4622658 - DNA, 25 bp, Homo sapien
caagtttgaggacagttatcgtaat

SEQ ID NO: 4622659 - DNA, 25 bp, Homo sapien
tgtatgtacaatgtaactcttggag

SEQ ID NO: 4622660 - DNA, 25 bp, Homo sapien
gcaccaactgttgagctctgacagc

SEQ ID NO: 4622661 - DNA, 25 bp, Homo sapien
cagctgttaggtctgtaccagttac

SEQ ID NO: 4622662 - DNA, 25 bp, Homo sapien
gagtggcagctatctgcaccaactg

SEQ ID NO: 4622663 - DNA, 25 bp, Homo sapien
tactgagagctatggtgctaactgg

SEQ ID NO: 4622664 - DNA, 25 bp, Homo sapien
tgcacactgacactgcttatttgcc

SEQ ID NO: 4622665 - DNA, 25 bp, Homo sapien
ctgtgcagcagttttatagagttct

SEQ ID NO: 4622666 - DNA, 25 bp, Homo sapien
tgcatcgggattccttctgcaggcc

SEQ ID NO: 4622667 - DNA, 25 bp, Homo sapien
tttatagagttctcagcaagctgcg

SEQ ID NO: 4622668 - DNA, 25 bp, Homo sapien
aagaaggttttccactacatctcct

SEQ ID NO: 4622669 - DNA, 25 bp, Homo sapien
caaagaaggttttccactacatctc

SEQ ID NO: 4622670 - DNA, 25 bp, Homo sapien
gccacaaagaaggttttccactaca

SEQ ID NO: 4622671 - DNA, 25 bp, Homo sapien
tttccactacatctcctttgaattt

SEQ ID NO: 4622672 - DNA, 25 bp, Homo sapien
gtaagataagtggtcatattttcaa

SEQ ID NO: 4622673 - DNA, 25 bp, Homo sapien
catattttcaatattgaaagcagtt

SEQ ID NO: 4622674 - DNA, 25 bp, Homo sapien
taagtggtcatattttcaatattga

SEQ ID NO: 4622675 - DNA, 25 bp, Homo sapien
agcaacaatagtaagataagtggtc

SEQ ID NO: 4622676 - DNA, 25 bp, Homo sapien
ggtacatatattgggacagacagcc

SEQ ID NO: 4622677 - DNA, 25 bp, Homo sapien
tatcccattgttccccatcaatgag

SEQ ID NO: 4622678 - DNA, 25 bp, Homo sapien
cactggtacatatattgggacagac

SEQ ID NO: 4622679 - DNA, 25 bp, Homo sapien
catctttcagcactggtacatatat

SEQ ID NO: 4622680 - DNA, 25 bp, Homo sapien
tcttccccgggaggatgttagcaca

SEQ ID NO: 4622681 - DNA, 25 bp, Homo sapien
tagcacatctgccagtagcataagc

SEQ ID NO: 4622682 - DNA, 25 bp, Homo sapien
tgccagtagcataagccagaaccaa

SEQ ID NO: 4622683 - DNA, 25 bp, Homo sapien
ttttccagttgggtggaagccctga

SEQ ID NO: 4622684 - DNA, 25 bp, Homo sapien
gacccaagggctttccgatgactta

SEQ ID NO: 4622685 - DNA, 25 bp, Homo sapien
cagcctgtaattggagtcaccgaag

SEQ ID NO: 4622686 - DNA, 25 bp, Homo sapien
caggtaggtagctcgtggaaacaga

SEQ ID NO: 4622687 - DNA, 25 bp, Homo sapien
gaagctatgtccaactttccgagta

SEQ ID NO: 4622688 - DNA, 25 bp, Homo sapien
acgtgacgtatctgtggtgacatac

SEQ ID NO: 4622689 - DNA, 25 bp, Homo sapien
gtatgtcaccacagatacgtcacgt

SEQ ID NO: 4622690 - DNA, 25 bp, Homo sapien
taccaagaagctactgttagtgtcc

SEQ ID NO: 4622691 - DNA, 25 bp, Homo sapien
tgaacccagtttgatcatgctgact

SEQ ID NO: 4622692 - DNA, 25 bp, Homo sapien
gatctctgacaaacatatggctaag

SEQ ID NO: 4622693 - DNA, 25 bp, Homo sapien
gactgaaatcattaggttaccaccc

SEQ ID NO: 4622694 - DNA, 25 bp, Homo sapien
gccagaagttttttgatcatgaatg

SEQ ID NO: 4622695 - DNA, 25 bp, Homo sapien
ccagaagttttttgatcatgaatgt

SEQ ID NO: 4622696 - DNA, 25 bp, Homo sapien
caattttgccagaagttttttgatc

SEQ ID NO: 4622697 - DNA, 25 bp, Homo sapien
ttttgccagaagttttttgatcatg

SEQ ID NO: 4622698 - DNA, 25 bp, Homo sapien
catctgcagcccgattacgcacttt

SEQ ID NO: 4622699 - DNA, 25 bp, Homo sapien
tgtaatagaaattaacagtgccatc

SEQ ID NO: 4622700 - DNA, 25 bp, Homo sapien
taagatccctgcatggtttatagca

SEQ ID NO: 4622701 - DNA, 25 bp, Homo sapien
gcaaagctagtcacaattatattcg

SEQ ID NO: 4622702 - DNA, 25 bp, Homo sapien
ctggtttccgtgcttcatggagcat

SEQ ID NO: 4622703 - DNA, 25 bp, Homo sapien
tcctttgcagtagatcagatatttc

SEQ ID NO: 4622704 - DNA, 25 bp, Homo sapien
cctttgcagtagatcagatatttct

SEQ ID NO: 4622705 - DNA, 25 bp, Homo sapien
tttgcagtagatcagatatttctgc

SEQ ID NO: 4622706 - DNA, 25 bp, Homo sapien
tgcagtagatcagatatttctgcta

SEQ ID NO: 4622707 - DNA, 25 bp, Homo sapien
ttgtcatccacatttcctaaggtgt

SEQ ID NO: 4622708 - DNA, 25 bp, Homo sapien
attgtcatccacatttcctaaggtg

SEQ ID NO: 4622709 - DNA, 25 bp, Homo sapien
attagatccatctgaacttaaacca

SEQ ID NO: 4622710 - DNA, 25 bp, Homo sapien
cattagatccatctgaacttaaacc

SEQ ID NO: 4622711 - DNA, 25 bp, Homo sapien
ttcattagatccatctgaacttaaa

SEQ ID NO: 4622712 - DNA, 25 bp, Homo sapien
ttttcattagatccatctgaactta

SEQ ID NO: 4622713 - DNA, 25 bp, Homo sapien
cagtggataaatcgtacagcatgct

SEQ ID NO: 4622714 - DNA, 25 bp, Homo sapien
tcagtggataaatcgtacagcatgc

SEQ ID NO: 4622715 - DNA, 25 bp, Homo sapien
aaggtgacatttcattagcacattt

SEQ ID NO: 4622716 - DNA, 25 bp, Homo sapien
ttaccaagctgtccaaggtgacatt

SEQ ID NO: 4622717 - DNA, 25 bp, Homo sapien
ggtgacatttcattagcacattttg

SEQ ID NO: 4622718 - DNA, 25 bp, Homo sapien
accaagctgtccaaggtgacatttc

SEQ ID NO: 4622719 - DNA, 25 bp, Homo sapien
gtatgcacgtactaaaaaattagga

SEQ ID NO: 4622720 - DNA, 25 bp, Homo sapien
tgtcatggttgtcagccaagtatgc

SEQ ID NO: 4622721 - DNA, 25 bp, Homo sapien
tcagccaagtatgcacgtactaaaa

SEQ ID NO: 4622722 - DNA, 25 bp, Homo sapien
ttgagcagctcttatgtcatggttg

SEQ ID NO: 4622723 - DNA, 25 bp, Homo sapien
actgagcacccacaaatcacacatt

SEQ ID NO: 4622724 - DNA, 25 bp, Homo sapien
acaggtttctgcagggacatgggtt

SEQ ID NO: 4622725 - DNA, 25 bp, Homo sapien
caggtttctgcagggacatgggttt

SEQ ID NO: 4622726 - DNA, 25 bp, Homo sapien
gacaggtttctgcagggacatgggt

SEQ ID NO: 4622727 - DNA, 25 bp, Homo sapien
tactttctccaccacgacttcccag

SEQ ID NO: 4622728 - DNA, 25 bp, Homo sapien
actttctccaccacgacttcccagg

SEQ ID NO: 4622729 - DNA, 25 bp, Homo sapien
ctgaccactgaagttcttttctcct

SEQ ID NO: 4622730 - DNA, 25 bp, Homo sapien
gaccactgaagttcttttctcctct

SEQ ID NO: 4622731 - DNA, 25 bp, Homo sapien
agttcttttctcctcttcaaatgcc

SEQ ID NO: 4622732 - DNA, 25 bp, Homo sapien
ttcttttctcctcttcaaatgccat

SEQ ID NO: 4622733 - DNA, 25 bp, Homo sapien
taggtgctgcaaattacgttagggc

SEQ ID NO: 4622734 - DNA, 25 bp, Homo sapien
caaggtttgaagatgtgtaggtgct

SEQ ID NO: 4622735 - DNA, 25 bp, Homo sapien
tgtggtgcctaaatagagaatcgtg

SEQ ID NO: 4622736 - DNA, 25 bp, Homo sapien
gacccagagattctattgacttgaa

SEQ ID NO: 4622737 - DNA, 25 bp, Homo sapien
caaaatagactgctctaaattgcca

SEQ ID NO: 4622738 - DNA, 25 bp, Homo sapien
ttctgcattgtcaaaatagactgct

SEQ ID NO: 4622739 - DNA, 25 bp, Homo sapien
gagaggagttcttgtttgaagatcc

SEQ ID NO: 4622740 - DNA, 25 bp, Homo sapien
ctttttgagaggagttcttgtttga

SEQ ID NO: 4622741 - DNA, 25 bp, Homo sapien
catatctgtctattataccaactgg

SEQ ID NO: 4622742 - DNA, 25 bp, Homo sapien
taagattagctccattggtggaaca

SEQ ID NO: 4622743 - DNA, 25 bp, Homo sapien
gctgtataagcacactaaagtttgg

SEQ ID NO: 4622744 - DNA, 25 bp, Homo sapien
tgctagagagccaagtcagaaactc

SEQ ID NO: 4622745 - DNA, 25 bp, Homo sapien
ctttttcataatccaaaggagtcat

SEQ ID NO: 4622746 - DNA, 25 bp, Homo sapien
tatctttttcataatccaaaggagt

SEQ ID NO: 4622747 - DNA, 25 bp, Homo sapien
tgtatctttttcataatccaaagga

SEQ ID NO: 4622748 - DNA, 25 bp, Homo sapien
tctttttcataatccaaaggagtca

SEQ ID NO: 4622749 - DNA, 25 bp, Homo sapien
agctcattgtaacttccacttccaa

SEQ ID NO: 4622750 - DNA, 25 bp, Homo sapien
tgggacaggcgcatgccatgacgcc

SEQ ID NO: 4622751 - DNA, 25 bp, Homo sapien
tcattgtaacttccacttccaaggc

SEQ ID NO: 4622752 - DNA, 25 bp, Homo sapien
gtctggcttgccacccaagctgcag

SEQ ID NO: 4622753 - DNA, 25 bp, Homo sapien
ggcaaacagcggagtaaaggagtat

SEQ ID NO: 4622754 - DNA, 25 bp, Homo sapien
gagtaaaggagtatcggatggtccc

SEQ ID NO: 4622755 - DNA, 25 bp, Homo sapien
agccctcaaaaccactgcaacacgg

SEQ ID NO: 4622756 - DNA, 25 bp, Homo sapien
caacacgggcaaacagcggagtaaa

SEQ ID NO: 4622757 - DNA, 25 bp, Homo sapien
tttcgtgagttctccagataaagtc

SEQ ID NO: 4622758 - DNA, 25 bp, Homo sapien
tacagctctttcgtgagttctccag

SEQ ID NO: 4622759 - DNA, 25 bp, Homo sapien
ggtggtacagctctttcgtgagttc

SEQ ID NO: 4622760 - DNA, 25 bp, Homo sapien
caggtggtggtacagctctttcgtg

SEQ ID NO: 4622761 - DNA, 25 bp, Homo sapien
aattgagagatatgcaagttcacga

SEQ ID NO: 4622762 - DNA, 25 bp, Homo sapien
tgtgtgccccattgctagcctgaag

SEQ ID NO: 4622763 - DNA, 25 bp, Homo sapien
tacatggtgtgcagtgattacgtgg

SEQ ID NO: 4622764 - DNA, 25 bp, Homo sapien
tcttattcaggcttacagttggaag

SEQ ID NO: 4622765 - DNA, 25 bp, Homo sapien
tagtcaatgtttagtttccacttag

SEQ ID NO: 4622766 - DNA, 25 bp, Homo sapien
tgtttagtttccacttaggtatgaa

SEQ ID NO: 4622767 - DNA, 25 bp, Homo sapien
cacttaggtatgaaaacatatggca

SEQ ID NO: 4622768 - DNA, 25 bp, Homo sapien
ccacatgtaggccccagtgtaactg

SEQ ID NO: 4622769 - DNA, 25 bp, Homo sapien
ctagggaggatacatttctgattaa

SEQ ID NO: 4622770 - DNA, 25 bp, Homo sapien
ttccctttcctagaacatcggcatt

SEQ ID NO: 4622771 - DNA, 25 bp, Homo sapien
tcggcattgttctagggaggataca

SEQ ID NO: 4622772 - DNA, 25 bp, Homo sapien
gaacatcggcattgttctagggagg

SEQ ID NO: 4622773 - DNA, 25 bp, Homo sapien
gattcataaccatcacttcctttct

SEQ ID NO: 4622774 - DNA, 25 bp, Homo sapien
ccgattcataaccatcacttccttt

SEQ ID NO: 4622775 - DNA, 25 bp, Homo sapien
tttcccgattcataaccatcacttc

SEQ ID NO: 4622776 - DNA, 25 bp, Homo sapien
tctttcccgattcataaccatcact

SEQ ID NO: 4622777 - DNA, 25 bp, Homo sapien
caattggtgaggtaaggaatattga

SEQ ID NO: 4622778 - DNA, 25 bp, Homo sapien
aggcaaaggaatctaggataactgc

SEQ ID NO: 4622779 - DNA, 25 bp, Homo sapien
gaaagaattgttttgttcatacgga

SEQ ID NO: 4622780 - DNA, 25 bp, Homo sapien
aatttttagactcaatcaacttggg

SEQ ID NO: 4622781 - DNA, 25 bp, Homo sapien
cttttgctcttgcttatggtcctgg

SEQ ID NO: 4622782 - DNA, 25 bp, Homo sapien
cctaaattggtgatactatgtttcc

SEQ ID NO: 4622783 - DNA, 25 bp, Homo sapien
ctggacattctaccaaccggcataa

SEQ ID NO: 4622784 - DNA, 25 bp, Homo sapien
cctggcttgcactaaagcagagtga

SEQ ID NO: 4622785 - DNA, 25 bp, Homo sapien
tattcttacatgtgatgcaaaatac

SEQ ID NO: 4622786 - DNA, 25 bp, Homo sapien
catgtgatgcaaaatacaatgaaca

SEQ ID NO: 4622787 - DNA, 25 bp, Homo sapien
cagttaatagtttatacgaagtgac

SEQ ID NO: 4622788 - DNA, 25 bp, Homo sapien
agtgacttacagagtgacaaggaga

SEQ ID NO: 4622789 - DNA, 25 bp, Homo sapien
cataactagtgggtaaagtatttgg

SEQ ID NO: 4622790 - DNA, 25 bp, Homo sapien
tgcaatgtcataactagtgggtaaa

SEQ ID NO: 4622791 - DNA, 25 bp, Homo sapien
tgtcataactagtgggtaaagtatt

SEQ ID NO: 4622792 - DNA, 25 bp, Homo sapien
ctaaatggggcttgcatgactgaat

SEQ ID NO: 4622793 - DNA, 25 bp, Homo sapien
gacagtaacatttgtacataaaggc

SEQ ID NO: 4622794 - DNA, 25 bp, Homo sapien
ttgacagtaacatttgtacataaag

SEQ ID NO: 4622795 - DNA, 25 bp, Homo sapien
gtaacatttgtacataaaggccatt

SEQ ID NO: 4622796 - DNA, 25 bp, Homo sapien
cagtaacatttgtacataaaggcca

SEQ ID NO: 4622797 - DNA, 25 bp, Homo sapien
tgatttggtcggcagacatgatggt

SEQ ID NO: 4622798 - DNA, 25 bp, Homo sapien
tttggtcggcagacatgatggtcat

SEQ ID NO: 4622799 - DNA, 25 bp, Homo sapien
gtgatttgatttggtcggcagacat

SEQ ID NO: 4622800 - DNA, 25 bp, Homo sapien
ctttcagcttgaagtgatttgattt

SEQ ID NO: 4622801 - DNA, 25 bp, Homo sapien
gacctttttcttagaaataatggca

SEQ ID NO: 4622802 - DNA, 25 bp, Homo sapien
aataatggcattttgtggatactga

SEQ ID NO: 4622803 - DNA, 25 bp, Homo sapien
cataatggatttggattcttttcag

SEQ ID NO: 4622804 - DNA, 25 bp, Homo sapien
tggattcttttcagttagtttgacc

SEQ ID NO: 4622805 - DNA, 25 bp, Homo sapien
agagatgtgtctaattgtttggcaa

SEQ ID NO: 4622806 - DNA, 25 bp, Homo sapien
tgtggtccttcaaaaataggactaa

SEQ ID NO: 4622807 - DNA, 25 bp, Homo sapien
taatctgtggtccttcaaaaatagg

SEQ ID NO: 4622808 - DNA, 25 bp, Homo sapien
aattgtttggcaataatctgtggtc

SEQ ID NO: 4622809 - DNA, 25 bp, Homo sapien
accaactttcatgcgcttcggtgtg

SEQ ID NO: 4622810 - DNA, 25 bp, Homo sapien
acagcaccaactttcatgcgcttcg

SEQ ID NO: 4622811 - DNA, 25 bp, Homo sapien
gcaccaactttcatgcgcttcggtg

SEQ ID NO: 4622812 - DNA, 25 bp, Homo sapien
actttcatgcgcttcggtgtgaaga

SEQ ID NO: 4622813 - DNA, 25 bp, Homo sapien
gctgctaagctgagaagatctggga

SEQ ID NO: 4622814 - DNA, 25 bp, Homo sapien
ccaggggttctgggagcggctgcca

SEQ ID NO: 4622815 - DNA, 25 bp, Homo sapien
ggggttctgggagcggctgccaggt

SEQ ID NO: 4622816 - DNA, 25 bp, Homo sapien
agctgctaagctgagaagatctggg

SEQ ID NO: 4622817 - DNA, 25 bp, Homo sapien
gagacggaatttcaccagataatgt

SEQ ID NO: 4622818 - DNA, 25 bp, Homo sapien
caggagacggaatttcaccagataa

SEQ ID NO: 4622819 - DNA, 25 bp, Homo sapien
gccaggagacggaatttcaccagat

SEQ ID NO: 4622820 - DNA, 25 bp, Homo sapien
gacggaatttcaccagataatgtca

SEQ ID NO: 4622821 - DNA, 25 bp, Homo sapien
ggctgcagtccctgtacatctaata

SEQ ID NO: 4622822 - DNA, 25 bp, Homo sapien
taatatatactgatttgtttgcccc

SEQ ID NO: 4622823 - DNA, 25 bp, Homo sapien
taagtcggtgttacttggatgtcct

SEQ ID NO: 4622824 - DNA, 25 bp, Homo sapien
tataacctaggaactcatgcctgtc

SEQ ID NO: 4622825 - DNA, 25 bp, Homo sapien
ccctgagggcccgacttgagaagct

SEQ ID NO: 4622826 - DNA, 25 bp, Homo sapien
agcacgaaccggagggctagagaca

SEQ ID NO: 4622827 - DNA, 25 bp, Homo sapien
tgaagcgcgagaaccgcagcctctt

SEQ ID NO: 4622828 - DNA, 25 bp, Homo sapien
ggaggagcagcctctacaggaaccc

SEQ ID NO: 4622829 - DNA, 25 bp, Homo sapien
gacggtgctgcggacggccgagggc

SEQ ID NO: 4622830 - DNA, 25 bp, Homo sapien
ccgcgcggacggcgcccgacagcag

SEQ ID NO: 4622831 - DNA, 25 bp, Homo sapien
gcggcggcgtgggctggcgaggccg

SEQ ID NO: 4622832 - DNA, 25 bp, Homo sapien
gggagttgctgcggcggggacggtg

SEQ ID NO: 4622833 - DNA, 25 bp, Homo sapien
ggatacacgctttttcccgcgcagc

SEQ ID NO: 4622834 - DNA, 25 bp, Homo sapien
gacggctagttcctgcagtgcccag

SEQ ID NO: 4622835 - DNA, 25 bp, Homo sapien
taaagagcaaagtaaccactggtgg

SEQ ID NO: 4622836 - DNA, 25 bp, Homo sapien
aggacacgcctcagtctgggcaaat

SEQ ID NO: 4622837 - DNA, 25 bp, Homo sapien
gacatgtagattcttgctagggcat

SEQ ID NO: 4622838 - DNA, 25 bp, Homo sapien
gcccggcctggaatgtggtccttct

SEQ ID NO: 4622839 - DNA, 25 bp, Homo sapien
tctctgggaccctgttagacatgta

SEQ ID NO: 4622840 - DNA, 25 bp, Homo sapien
acttgcttaagagattctggcgtca

SEQ ID NO: 4622841 - DNA, 25 bp, Homo sapien
tttgaaagattggtggactctccat

SEQ ID NO: 4622842 - DNA, 25 bp, Homo sapien
cataagacaaatgttcactgctaca

SEQ ID NO: 4622843 - DNA, 25 bp, Homo sapien
taacaaactacagtgtggagaagca

SEQ ID NO: 4622844 - DNA, 25 bp, Homo sapien
tactctttgtgctaccatcctcaga

SEQ ID NO: 4622845 - DNA, 25 bp, Homo sapien
ttgccaacagcaacaaatactccat

SEQ ID NO: 4622846 - DNA, 25 bp, Homo sapien
tttgccaacagcaacaaatactcca

SEQ ID NO: 4622847 - DNA, 25 bp, Homo sapien
ttttgccaacagcaacaaatactcc

SEQ ID NO: 4622848 - DNA, 25 bp, Homo sapien
atatttgaatctgagtctgcgagtc

SEQ ID NO: 4622849 - DNA, 25 bp, Homo sapien
tctgcttcatcttgtgatctcatat

SEQ ID NO: 4622850 - DNA, 25 bp, Homo sapien
tacttcttgcttgagttggcttctg

SEQ ID NO: 4622851 - DNA, 25 bp, Homo sapien
gagtctgcgagtctctgattctccc

SEQ ID NO: 4622852 - DNA, 25 bp, Homo sapien
cagagtgggaacctttgcggagaca

SEQ ID NO: 4622853 - DNA, 25 bp, Homo sapien
gagattcatgaggactcccattttg

SEQ ID NO: 4622854 - DNA, 25 bp, Homo sapien
gagacagtatgcactccagttccta

SEQ ID NO: 4622855 - DNA, 25 bp, Homo sapien
gggatggccctctggcgttctttgc

SEQ ID NO: 4622856 - DNA, 25 bp, Homo sapien
caaacaagactgacggttttgcttc

SEQ ID NO: 4622857 - DNA, 25 bp, Homo sapien
caaacaaacaagactgacggttttg

SEQ ID NO: 4622858 - DNA, 25 bp, Homo sapien
ctgttcttgaagagcggacaaagca

SEQ ID NO: 4622859 - DNA, 25 bp, Homo sapien
gaagagcggacaaagcagacaagtt

SEQ ID NO: 4622860 - DNA, 25 bp, Homo sapien
tcagtgattgagaagacaacatgtg

SEQ ID NO: 4622861 - DNA, 25 bp, Homo sapien
gagtgctcccagtgatacttcattg

SEQ ID NO: 4622862 - DNA, 25 bp, Homo sapien
gaagctctagtaaaggtgcactgag

SEQ ID NO: 4622863 - DNA, 25 bp, Homo sapien
catgaagtggatttgtgagtgctcc

SEQ ID NO: 4622864 - DNA, 25 bp, Homo sapien
ccttctatcatgctgtattgtgaaa

SEQ ID NO: 4622865 - DNA, 25 bp, Homo sapien
tgctccttctatcatgctgtattgt

SEQ ID NO: 4622866 - DNA, 25 bp, Homo sapien
ctccttctatcatgctgtattgtga

SEQ ID NO: 4622867 - DNA, 25 bp, Homo sapien
ttctatcatgctgtattgtgaaaac

SEQ ID NO: 4622868 - DNA, 25 bp, Homo sapien
accacatcaatcaggtactgcaggg

SEQ ID NO: 4622869 - DNA, 25 bp, Homo sapien
tagtgaagcataggaattccctgcc

SEQ ID NO: 4622870 - DNA, 25 bp, Homo sapien
tcattgccagagtacaaggactcct

SEQ ID NO: 4622871 - DNA, 25 bp, Homo sapien
gcttggttcaatgaaggttagccta

SEQ ID NO: 4622872 - DNA, 25 bp, Homo sapien
tcgctcgctctgatgaaagagggtg

SEQ ID NO: 4622873 - DNA, 25 bp, Homo sapien
aagagggtgttatctttctcttgag

SEQ ID NO: 4622874 - DNA, 25 bp, Homo sapien
gctaactttcagattgccatctgga

SEQ ID NO: 4622875 - DNA, 25 bp, Homo sapien
tctattgtcctcaaaaggatcgtcc

SEQ ID NO: 4622876 - DNA, 25 bp, Homo sapien
aactgaatgtaaccgccttattctc

SEQ ID NO: 4622877 - DNA, 25 bp, Homo sapien
atgtaaccgccttattctccttcag

SEQ ID NO: 4622878 - DNA, 25 bp, Homo sapien
gctctaactgaatgtaaccgcctta

SEQ ID NO: 4622879 - DNA, 25 bp, Homo sapien
ttctttgtgtggcagtctcctctct

SEQ ID NO: 4622880 - DNA, 25 bp, Homo sapien
aagtcacccagtctgcgacatcttg

SEQ ID NO: 4622881 - DNA, 25 bp, Homo sapien
taccgatccattgccagggtttgag

SEQ ID NO: 4622882 - DNA, 25 bp, Homo sapien
tcttgttgtagaaggctgagcagac

SEQ ID NO: 4622883 - DNA, 25 bp, Homo sapien
gaaacatatccacgttggcccatgg

SEQ ID NO: 4622884 - DNA, 25 bp, Homo sapien
cagagaatccaggcattggtcagca

SEQ ID NO: 4622885 - DNA, 25 bp, Homo sapien
agagaatccaggcattggtcagcat

SEQ ID NO: 4622886 - DNA, 25 bp, Homo sapien
tcttattgggtggtctggttcagcg

SEQ ID NO: 4622887 - DNA, 25 bp, Homo sapien
tcacactatcagttggagccacagt

SEQ ID NO: 4622888 - DNA, 25 bp, Homo sapien
aagatttgaccaggactagatgagc

SEQ ID NO: 4622889 - DNA, 25 bp, Homo sapien
gagccacttctaggttcactcatga

SEQ ID NO: 4622890 - DNA, 25 bp, Homo sapien
cattagagtaggagtccatgaatgc

SEQ ID NO: 4622891 - DNA, 25 bp, Homo sapien
gagtaggagtccatgaatgcaattt

SEQ ID NO: 4622892 - DNA, 25 bp, Homo sapien
atccattagagtaggagtccatgaa

SEQ ID NO: 4622893 - DNA, 25 bp, Homo sapien
tacttttatgtgcttagtcactatt

SEQ ID NO: 4622894 - DNA, 25 bp, Homo sapien
tatgttctggatgcagagaccctcc

SEQ ID NO: 4622895 - DNA, 25 bp, Homo sapien
tctgggtctcatgtatatgttctgg

SEQ ID NO: 4622896 - DNA, 25 bp, Homo sapien
aatcctcattgttccatgtggcttg

SEQ ID NO: 4622897 - DNA, 25 bp, Homo sapien
atgtggcttgttctgggtctcatgt

SEQ ID NO: 4622898 - DNA, 25 bp, Homo sapien
tttgatgcaagactgtatttagctg

SEQ ID NO: 4622899 - DNA, 25 bp, Homo sapien
gatgcaagactgtatttagctgcat

SEQ ID NO: 4622900 - DNA, 25 bp, Homo sapien
tccttccagagtatactttctccgc

SEQ ID NO: 4622901 - DNA, 25 bp, Homo sapien
gagtatactttctccgcattctttt

SEQ ID NO: 4622902 - DNA, 25 bp, Homo sapien
ggaattggtgacaagacgatggatc

SEQ ID NO: 4622903 - DNA, 25 bp, Homo sapien
catattggctcgttgatccaacaaa

SEQ ID NO: 4622904 - DNA, 25 bp, Homo sapien
gtgacaagacgatggatcagtttct

SEQ ID NO: 4622905 - DNA, 25 bp, Homo sapien
tctccatattggctcgttgatccaa

SEQ ID NO: 4622906 - DNA, 25 bp, Homo sapien
caaggcctgctgattgaagcttcct

SEQ ID NO: 4622907 - DNA, 25 bp, Homo sapien
gggagcttcttgtttatcaggaagt

SEQ ID NO: 4622908 - DNA, 25 bp, Homo sapien
tgcagtaaataaggctcctggagca

SEQ ID NO: 4622909 - DNA, 25 bp, Homo sapien
cctggagcagccttatttgaggtaa

SEQ ID NO: 4622910 - DNA, 25 bp, Homo sapien
tcttttgcacagattggtcgcactt

SEQ ID NO: 4622911 - DNA, 25 bp, Homo sapien
cttgcttttggctaagctgatgctg

SEQ ID NO: 4622912 - DNA, 25 bp, Homo sapien
agattggtcgcactttcatttttgg

SEQ ID NO: 4622913 - DNA, 25 bp, Homo sapien
taaattcacagatggtctcgagcat

SEQ ID NO: 4622914 - DNA, 25 bp, Homo sapien
atactgagagccgtaaatgctacca

SEQ ID NO: 4622915 - DNA, 25 bp, Homo sapien
ctaagtataatactgagagccgtaa

SEQ ID NO: 4622916 - DNA, 25 bp, Homo sapien
tataatactgagagccgtaaatgct

SEQ ID NO: 4622917 - DNA, 25 bp, Homo sapien
gagccgtaaatgctaccagtgtcat

SEQ ID NO: 4622918 - DNA, 25 bp, Homo sapien
tatattggcgtctcttccccaacct

SEQ ID NO: 4622919 - DNA, 25 bp, Homo sapien
tcattgggttgcatatattggcgtc

SEQ ID NO: 4622920 - DNA, 25 bp, Homo sapien
ggttgcatatattggcgtctcttcc

SEQ ID NO: 4622921 - DNA, 25 bp, Homo sapien
gcatatattggcgtctcttccccaa

SEQ ID NO: 4622922 - DNA, 25 bp, Homo sapien
aagaacagccccttcggaatactcg

SEQ ID NO: 4622923 - DNA, 25 bp, Homo sapien
ctagataggttgagaataagaaaag

SEQ ID NO: 4622924 - DNA, 25 bp, Homo sapien
ccttcggaatactcgaagcattaat

SEQ ID NO: 4622925 - DNA, 25 bp, Homo sapien
cagccccttcggaatactcgaagca

SEQ ID NO: 4622926 - DNA, 25 bp, Homo sapien
ttcttcacggtcagaaagcagaaca

SEQ ID NO: 4622927 - DNA, 25 bp, Homo sapien
ttcttcttcacggtcagaaagcaga

SEQ ID NO: 4622928 - DNA, 25 bp, Homo sapien
atctctgaagtccacctatttcttc

SEQ ID NO: 4622929 - DNA, 25 bp, Homo sapien
aagcagaacataggtattgagcacc

SEQ ID NO: 4622930 - DNA, 25 bp, Homo sapien
gtgtttgccaattagactgatgcca

SEQ ID NO: 4622931 - DNA, 25 bp, Homo sapien
ctgctatgtgtttgccaattagact

SEQ ID NO: 4622932 - DNA, 25 bp, Homo sapien
ttgccaattagactgatgccaaaat

SEQ ID NO: 4622933 - DNA, 25 bp, Homo sapien
atgtgtttgccaattagactgatgc

SEQ ID NO: 4622934 - DNA, 25 bp, Homo sapien
cagcagacatcccttcagggtaggg

SEQ ID NO: 4622935 - DNA, 25 bp, Homo sapien
cagacatcccttcagggtagggcca

SEQ ID NO: 4622936 - DNA, 25 bp, Homo sapien
gacatcccttcagggtagggccaac

SEQ ID NO: 4622937 - DNA, 25 bp, Homo sapien
tgcctccgcaggacacaggtagacc

SEQ ID NO: 4622938 - DNA, 25 bp, Homo sapien
gacccactggggacatgttgacaac

SEQ ID NO: 4622939 - DNA, 25 bp, Homo sapien
catgctgggtcgatttcttctggca

SEQ ID NO: 4622940 - DNA, 25 bp, Homo sapien
atttcttctggcatgctcagtgact

SEQ ID NO: 4622941 - DNA, 25 bp, Homo sapien
cacatgcaaggaccatgctgggtcg

SEQ ID NO: 4622942 - DNA, 25 bp, Homo sapien
tcacagctggctatgtagatctgac

SEQ ID NO: 4622943 - DNA, 25 bp, Homo sapien
tgtagatctgaccatattcctgtga

SEQ ID NO: 4622944 - DNA, 25 bp, Homo sapien
catattcctgtgaagcatgtggttc

SEQ ID NO: 4622945 - DNA, 25 bp, Homo sapien
cacagctggctatgtagatctgacc

SEQ ID NO: 4622946 - DNA, 25 bp, Homo sapien
catctctgtcttataaagtgcctcc

SEQ ID NO: 4622947 - DNA, 25 bp, Homo sapien
atctctgtcttataaagtgcctcca

SEQ ID NO: 4622948 - DNA, 25 bp, Homo sapien
tctgatccatagacagaagcaggag

SEQ ID NO: 4622949 - DNA, 25 bp, Homo sapien
gagtttccttgtctcaatctggaaa

SEQ ID NO: 4622950 - DNA, 25 bp, Homo sapien
aatctggaaaggagggatataagaa

SEQ ID NO: 4622951 - DNA, 25 bp, Homo sapien
agggatgtaagaagaagtgagaggc

SEQ ID NO: 4622952 - DNA, 25 bp, Homo sapien
aacagaggtcttgggttatgtggct

SEQ ID NO: 4622953 - DNA, 25 bp, Homo sapien
gaagagtccgtgaccaacgttggat

SEQ ID NO: 4622954 - DNA, 25 bp, Homo sapien
cccggcattgaccaaacagcgaggg

SEQ ID NO: 4622955 - DNA, 25 bp, Homo sapien
gcaaatggccaaggtgggcatcccc

SEQ ID NO: 4622956 - DNA, 25 bp, Homo sapien
caatgttgaattcaacgtccttctt

SEQ ID NO: 4622957 - DNA, 25 bp, Homo sapien
aatgttgaattcaacgtccttcttt

SEQ ID NO: 4622958 - DNA, 25 bp, Homo sapien
ttctgggtgctagtgtgttgatttc

SEQ ID NO: 4622959 - DNA, 25 bp, Homo sapien
gatttccagaaggtacaaaccatga

SEQ ID NO: 4622960 - DNA, 25 bp, Homo sapien
gcttctgcgttttcttgatgccaca

SEQ ID NO: 4622961 - DNA, 25 bp, Homo sapien
aaccatgattcccatgcttctgcgt

SEQ ID NO: 4622962 - DNA, 25 bp, Homo sapien
gccacttaggcttgactccactgtg

SEQ ID NO: 4622963 - DNA, 25 bp, Homo sapien
cttaggcttgactccactgtgtatc

SEQ ID NO: 4622964 - DNA, 25 bp, Homo sapien
cacttaggcttgactccactgtgta

SEQ ID NO: 4622965 - DNA, 25 bp, Homo sapien
taggcttgactccactgtgtatcat

SEQ ID NO: 4622966 - DNA, 25 bp, Homo sapien
tcatgtgcggtattgcattctttcc

SEQ ID NO: 4622967 - DNA, 25 bp, Homo sapien
gcagtgatcatgttgtatttgtgtg

SEQ ID NO: 4622968 - DNA, 25 bp, Homo sapien
tatttgtgtgacaatctcatgtcca

SEQ ID NO: 4622969 - DNA, 25 bp, Homo sapien
tccagtgatgtgaaacagctttgaa

SEQ ID NO: 4622970 - DNA, 25 bp, Homo sapien
ggtgggatgaggatcacactagcat

SEQ ID NO: 4622971 - DNA, 25 bp, Homo sapien
tcaatttatgagacgatcccagagt

SEQ ID NO: 4622972 - DNA, 25 bp, Homo sapien
tctcactctctctacacattaagca

SEQ ID NO: 4622973 - DNA, 25 bp, Homo sapien
tctctctttctgtctactggcttag

SEQ ID NO: 4622974 - DNA, 25 bp, Homo sapien
ggcttagcttatatatgcattcagt

SEQ ID NO: 4622975 - DNA, 25 bp, Homo sapien
gtaacaaaactctttcacagcagct

SEQ ID NO: 4622976 - DNA, 25 bp, Homo sapien
tttcacagcagcttaagaaagagag

SEQ ID NO: 4622977 - DNA, 25 bp, Homo sapien
caagtaacaaaactctttcacagca

SEQ ID NO: 4622978 - DNA, 25 bp, Homo sapien
tatgtttgattctattgagaaaggg

SEQ ID NO: 4622979 - DNA, 25 bp, Homo sapien
agattgaggcctgaaataacttctt

SEQ ID NO: 4622980 - DNA, 25 bp, Homo sapien
gaagtgccacctgctaagattgagg

SEQ ID NO: 4622981 - DNA, 25 bp, Homo sapien
cctgctaagattgaggcctgaaata

SEQ ID NO: 4622982 - DNA, 25 bp, Homo sapien
ccttgtgaaaccttggaagtgccac

SEQ ID NO: 4622983 - DNA, 25 bp, Homo sapien
tttagagtgctcaggtcatggctag

SEQ ID NO: 4622984 - DNA, 25 bp, Homo sapien
cattttagagtgctcaggtcatggc

SEQ ID NO: 4622985 - DNA, 25 bp, Homo sapien
catttcaacaggcagacttcacatt

SEQ ID NO: 4622986 - DNA, 25 bp, Homo sapien
acatttcaacaggcagacttcacat

SEQ ID NO: 4622987 - DNA, 25 bp, Homo sapien
tgatacacactttagagcccacagg

SEQ ID NO: 4622988 - DNA, 25 bp, Homo sapien
ctctgtgatacacactttagagccc

SEQ ID NO: 4622989 - DNA, 25 bp, Homo sapien
caggattcccatgaaattatagctc

SEQ ID NO: 4622990 - DNA, 25 bp, Homo sapien
ccacaggattcccatgaaattatag

SEQ ID NO: 4622991 - DNA, 25 bp, Homo sapien
tagactatttccagcctatctgaaa

SEQ ID NO: 4622992 - DNA, 25 bp, Homo sapien
tacatcctggtaatcactacccaga

SEQ ID NO: 4622993 - DNA, 25 bp, Homo sapien
cagcacatgctttaacctttggctt

SEQ ID NO: 4622994 - DNA, 25 bp, Homo sapien
tcttgatcaccagagtaagcgttgt

SEQ ID NO: 4622995 - DNA, 25 bp, Homo sapien
tgtggtacctggtttgatatcttta

SEQ ID NO: 4622996 - DNA, 25 bp, Homo sapien
cagaaaggaagctaacactgagttc

SEQ ID NO: 4622997 - DNA, 25 bp, Homo sapien
tggtacctggtttgatatctttaaa

SEQ ID NO: 4622998 - DNA, 25 bp, Homo sapien
aaagacagaaaggaagctaacactg

SEQ ID NO: 4622999 - DNA, 25 bp, Homo sapien
actggtttacataatggttatcctc

SEQ ID NO: 4623000 - DNA, 25 bp, Homo sapien
cataatggttatcctctgcttcact

SEQ ID NO: 4623001 - DNA, 25 bp, Homo sapien
gctgttattggaaggattgttctgt

SEQ ID NO: 4623002 - DNA, 25 bp, Homo sapien
tgttctgtggtcttgatatattttt

SEQ ID NO: 4623003 - DNA, 25 bp, Homo sapien
tgattttgaatccaagttgggagat

SEQ ID NO: 4623004 - DNA, 25 bp, Homo sapien
actggagtctcccacacgatgggag

SEQ ID NO: 4623005 - DNA, 25 bp, Homo sapien
caaagagaagtcactaatgttatat

SEQ ID NO: 4623006 - DNA, 25 bp, Homo sapien
ttgggagattagacagtatgtctcc

SEQ ID NO: 4623007 - DNA, 25 bp, Homo sapien
cagaagattatctagaccatcagat

SEQ ID NO: 4623008 - DNA, 25 bp, Homo sapien
acaagaagggcagtgtatttgggcc

SEQ ID NO: 4623009 - DNA, 25 bp, Homo sapien
aagctcatcctgcttacatatatgg

SEQ ID NO: 4623010 - DNA, 25 bp, Homo sapien
acatatatggtttcctactttctcc

SEQ ID NO: 4623011 - DNA, 25 bp, Homo sapien
ctggaagacctagacgtgctccctc

SEQ ID NO: 4623012 - DNA, 25 bp, Homo sapien
ttcctggaagacctagacgtgctcc

SEQ ID NO: 4623013 - DNA, 25 bp, Homo sapien
ttgcacttggtgttcaagactctca

SEQ ID NO: 4623014 - DNA, 25 bp, Homo sapien
gaagacctagacgtgctccctccat

SEQ ID NO: 4623015 - DNA, 25 bp, Homo sapien
taacaatgaatttgttccaccctct

SEQ ID NO: 4623016 - DNA, 25 bp, Homo sapien
aatgaatttgttccaccctctctca

SEQ ID NO: 4623017 - DNA, 25 bp, Homo sapien
tgctcttggtaacaatgaatttgtt

SEQ ID NO: 4623018 - DNA, 25 bp, Homo sapien
tggtaacaatgaatttgttccaccc

SEQ ID NO: 4623019 - DNA, 25 bp, Homo sapien
ttgggagagttgatacaaagagctt

SEQ ID NO: 4623020 - DNA, 25 bp, Homo sapien
tttgggagagttgatacaaagagct

SEQ ID NO: 4623021 - DNA, 25 bp, Homo sapien
ttttgggagagttgatacaaagagc

SEQ ID NO: 4623022 - DNA, 25 bp, Homo sapien
tttttatccgatccacagaagttta

SEQ ID NO: 4623023 - DNA, 25 bp, Homo sapien
cagctctagcgctctgcttttcaag

SEQ ID NO: 4623024 - DNA, 25 bp, Homo sapien
tattatgcagctttcagatattgct

SEQ ID NO: 4623025 - DNA, 25 bp, Homo sapien
gctaaattgatttcagctctagcgc

SEQ ID NO: 4623026 - DNA, 25 bp, Homo sapien
agttcagacttataagggaatgctc

SEQ ID NO: 4623027 - DNA, 25 bp, Homo sapien
ctagaggaagaatcggccagtctga

SEQ ID NO: 4623028 - DNA, 25 bp, Homo sapien
gccagtctgattgtcataagatggg

SEQ ID NO: 4623029 - DNA, 25 bp, Homo sapien
tagtgtgtcccaaatttcaaaccaa

SEQ ID NO: 4623030 - DNA, 25 bp, Homo sapien
ccaccttctctcctccaagcctgtt

SEQ ID NO: 4623031 - DNA, 25 bp, Homo sapien
ggccaccttctctcctccaagcctg

SEQ ID NO: 4623032 - DNA, 25 bp, Homo sapien
aatccctcttcttggccaccttctc

SEQ ID NO: 4623033 - DNA, 25 bp, Homo sapien
ctaatccctcttcttggccaccttc

SEQ ID NO: 4623034 - DNA, 25 bp, Homo sapien
gacactttcagccctgttcctagtc

SEQ ID NO: 4623035 - DNA, 25 bp, Homo sapien
ctgacactttcagccctgttcctag

SEQ ID NO: 4623036 - DNA, 25 bp, Homo sapien
ttctgacactttcagccctgttcct

SEQ ID NO: 4623037 - DNA, 25 bp, Homo sapien
tctgacactttcagccctgttccta

SEQ ID NO: 4623038 - DNA, 25 bp, Homo sapien
catctcatgattaccacttttctcc

SEQ ID NO: 4623039 - DNA, 25 bp, Homo sapien
ccacttttctccataagttgtttca

SEQ ID NO: 4623040 - DNA, 25 bp, Homo sapien
gattaccacttttctccataagttg

SEQ ID NO: 4623041 - DNA, 25 bp, Homo sapien
catgattaccacttttctccataag

SEQ ID NO: 4623042 - DNA, 25 bp, Homo sapien
cattatttagtatcaatttgtggag

SEQ ID NO: 4623043 - DNA, 25 bp, Homo sapien
ggagtttgttatataggctgcctat

SEQ ID NO: 4623044 - DNA, 25 bp, Homo sapien
cctaaattttcatggctgtgggaca

SEQ ID NO: 4623045 - DNA, 25 bp, Homo sapien
ttgtctggaagcctaaattttcatg

SEQ ID NO: 4623046 - DNA, 25 bp, Homo sapien
ttccttcatgtcgatgtcaaatctg

SEQ ID NO: 4623047 - DNA, 25 bp, Homo sapien
ccttcatgtcgatgtcaaatctggc

SEQ ID NO: 4623048 - DNA, 25 bp, Homo sapien
tcatgtcgatgtcaaatctggccat

SEQ ID NO: 4623049 - DNA, 25 bp, Homo sapien
ttcatgtcgatgtcaaatctggcca

SEQ ID NO: 4623050 - DNA, 25 bp, Homo sapien
tggactgctaaggtgttaaccagct

SEQ ID NO: 4623051 - DNA, 25 bp, Homo sapien
gatttcactcactcaaacccactgg

SEQ ID NO: 4623052 - DNA, 25 bp, Homo sapien
cactgggctcaacccttcatgggag

SEQ ID NO: 4623053 - DNA, 25 bp, Homo sapien
gacctttttgcaggcggaactggag

SEQ ID NO: 4623054 - DNA, 25 bp, Homo sapien
catagagatctaattagtactctga

SEQ ID NO: 4623055 - DNA, 25 bp, Homo sapien
agtagttccaatacttaaggcctgg

SEQ ID NO: 4623056 - DNA, 25 bp, Homo sapien
gctaattaagcttgatttcatagag

SEQ ID NO: 4623057 - DNA, 25 bp, Homo sapien
ctgaaagccctagaacagaatttcc

SEQ ID NO: 4623058 - DNA, 25 bp, Homo sapien
tgaaatcagaatgttcctgaaattt

SEQ ID NO: 4623059 - DNA, 25 bp, Homo sapien
tccttgaaatcagaatgttcctgaa

SEQ ID NO: 4623060 - DNA, 25 bp, Homo sapien
cttgaaatcagaatgttcctgaaat

SEQ ID NO: 4623061 - DNA, 25 bp, Homo sapien
ccttgaaatcagaatgttcctgaaa

SEQ ID NO: 4623062 - DNA, 25 bp, Homo sapien
ttgtctacacaatgcatactactgt

SEQ ID NO: 4623063 - DNA, 25 bp, Homo sapien
tctgacagtgatgagttcaaatcct

SEQ ID NO: 4623064 - DNA, 25 bp, Homo sapien
gaacctacagcccatagttattgtc

SEQ ID NO: 4623065 - DNA, 25 bp, Homo sapien
ctactgtaataaagagaacagggat

SEQ ID NO: 4623066 - DNA, 25 bp, Homo sapien
tctccccagagttaacctgtttgcc

SEQ ID NO: 4623067 - DNA, 25 bp, Homo sapien
gattcattccggcagtggagccctg

SEQ ID NO: 4623068 - DNA, 25 bp, Homo sapien
tctctttcggattctgaagcttgag

SEQ ID NO: 4623069 - DNA, 25 bp, Homo sapien
cgtggaaataatctgcagctgattc

SEQ ID NO: 4623070 - DNA, 25 bp, Homo sapien
attccctgggtcagttaattccatc

SEQ ID NO: 4623071 - DNA, 25 bp, Homo sapien
tcacagcaaaaactgctccagctgc

SEQ ID NO: 4623072 - DNA, 25 bp, Homo sapien
gtgctttggcccttcctgtgcctgc

SEQ ID NO: 4623073 - DNA, 25 bp, Homo sapien
tgcttctgcattttcagtcagaaga

SEQ ID NO: 4623074 - DNA, 25 bp, Homo sapien
cttctgcattttcagtcagaagaag

SEQ ID NO: 4623075 - DNA, 25 bp, Homo sapien
cctgcttctgcattttcagtcagaa

SEQ ID NO: 4623076 - DNA, 25 bp, Homo sapien
tcacttgctgtagtgctattcctaa

SEQ ID NO: 4623077 - DNA, 25 bp, Homo sapien
tagcgaatatcttcacttgctgtag

SEQ ID NO: 4623078 - DNA, 25 bp, Homo sapien
tcctaataagatgcctggagcaggt

SEQ ID NO: 4623079 - DNA, 25 bp, Homo sapien
tttccaggacaggtagcgaatatct

SEQ ID NO: 4623080 - DNA, 25 bp, Homo sapien
cttacaggagtaacagcagtaaatg

SEQ ID NO: 4623081 - DNA, 25 bp, Homo sapien
ttacaggagtaacagcagtaaatga

SEQ ID NO: 4623082 - DNA, 25 bp, Homo sapien
cgtcatctgtatcaccagacaggtc

SEQ ID NO: 4623083 - DNA, 25 bp, Homo sapien
tctgtatcaccagacaggtcatagt

SEQ ID NO: 4623084 - DNA, 25 bp, Homo sapien
tttccgtcatctgtatcaccagaca

SEQ ID NO: 4623085 - DNA, 25 bp, Homo sapien
tatcaccagacaggtcatagttttc

SEQ ID NO: 4623086 - DNA, 25 bp, Homo sapien
tggaaagccccgatttggttctggc

SEQ ID NO: 4623087 - DNA, 25 bp, Homo sapien
gcaattcaactttcccctcaatgaa

SEQ ID NO: 4623088 - DNA, 25 bp, Homo sapien
atgcaattcaactttcccctcaatg

SEQ ID NO: 4623089 - DNA, 25 bp, Homo sapien
ttctggctgcttaattaataaatgc

SEQ ID NO: 4623090 - DNA, 25 bp, Homo sapien
cataataaagttgcttaaaacagtc

SEQ ID NO: 4623091 - DNA, 25 bp, Homo sapien
tcataataaagttgcttaaaacagt

SEQ ID NO: 4623092 - DNA, 25 bp, Homo sapien
taataaagttgcttaaaacagtcat

SEQ ID NO: 4623093 - DNA, 25 bp, Homo sapien
cttcataataaagttgcttaaaaca

SEQ ID NO: 4623094 - DNA, 25 bp, Homo sapien
gacatttaaattctcgcctctcttc

SEQ ID NO: 4623095 - DNA, 25 bp, Homo sapien
ttctccagtgggctttaacagctca

SEQ ID NO: 4623096 - DNA, 25 bp, Homo sapien
ctctttgcgttgtggctcctcctga

SEQ ID NO: 4623097 - DNA, 25 bp, Homo sapien
acattccttgtatctccggagaaca

SEQ ID NO: 4623098 - DNA, 25 bp, Homo sapien
attcaaatttggaaccttgtaggtg

SEQ ID NO: 4623099 - DNA, 25 bp, Homo sapien
cagatttaactgtgtcattctgctc

SEQ ID NO: 4623100 - DNA, 25 bp, Homo sapien
tgtaggtgacaagtgacaggatgac

SEQ ID NO: 4623101 - DNA, 25 bp, Homo sapien
tctgctcactgttaattcttgtctc

SEQ ID NO: 4623102 - DNA, 25 bp, Homo sapien
ttcttattgcagcagaatgataccc

SEQ ID NO: 4623103 - DNA, 25 bp, Homo sapien
tcttattgcagcagaatgataccca

SEQ ID NO: 4623104 - DNA, 25 bp, Homo sapien
cttattgcagcagaatgatacccac

SEQ ID NO: 4623105 - DNA, 25 bp, Homo sapien
gttttagtaattgccggatctgcag

SEQ ID NO: 4623106 - DNA, 25 bp, Homo sapien
tgaaagctgttttagtaattgccgg

SEQ ID NO: 4623107 - DNA, 25 bp, Homo sapien
aagctgttttagtaattgccggatc

SEQ ID NO: 4623108 - DNA, 25 bp, Homo sapien
ctgttttagtaattgccggatctgc

SEQ ID NO: 4623109 - DNA, 25 bp, Homo sapien
ttagcttgattggaaattatcacct

SEQ ID NO: 4623110 - DNA, 25 bp, Homo sapien
agcttgattggaaattatcaccttt

SEQ ID NO: 4623111 - DNA, 25 bp, Homo sapien
gcttgattggaaattatcacctttg

SEQ ID NO: 4623112 - DNA, 25 bp, Homo sapien
tagcttgattggaaattatcacctt

SEQ ID NO: 4623113 - DNA, 25 bp, Homo sapien
tctctccacagtgtattttggtgac

SEQ ID NO: 4623114 - DNA, 25 bp, Homo sapien
aacatcggggttgcctgtgcagtcc

SEQ ID NO: 4623115 - DNA, 25 bp, Homo sapien
tatcttatcgccttgagtgactgta

SEQ ID NO: 4623116 - DNA, 25 bp, Homo sapien
catacaagggtcaagtttggctctc

SEQ ID NO: 4623117 - DNA, 25 bp, Homo sapien
acttagtgacttgttcagactcctt

SEQ ID NO: 4623118 - DNA, 25 bp, Homo sapien
tgacttagtgacttgttcagactcc

SEQ ID NO: 4623119 - DNA, 25 bp, Homo sapien
cttagtgacttgttcagactccttc

SEQ ID NO: 4623120 - DNA, 25 bp, Homo sapien
gacttagtgacttgttcagactcct

SEQ ID NO: 4623121 - DNA, 25 bp, Homo sapien
tgtaaggtaataccttcaagggctg

SEQ ID NO: 4623122 - DNA, 25 bp, Homo sapien
ctggcgctggcattgagagaacagc

SEQ ID NO: 4623123 - DNA, 25 bp, Homo sapien
ggcgctggcattgagagaacagctt

SEQ ID NO: 4623124 - DNA, 25 bp, Homo sapien
cagtggctgtaaggtaataccttca

SEQ ID NO: 4623125 - DNA, 25 bp, Homo sapien
tctctcgtatgtggacttaaggtgg

SEQ ID NO: 4623126 - DNA, 25 bp, Homo sapien
taggtggctttctcgtctctcgtat

SEQ ID NO: 4623127 - DNA, 25 bp, Homo sapien
ctgggcattgatgggtggccccaaa

SEQ ID NO: 4623128 - DNA, 25 bp, Homo sapien
tcagggccaaggataaaaatggagg

SEQ ID NO: 4623129 - DNA, 25 bp, Homo sapien
tgaggctataatggccaaatgcaat

SEQ ID NO: 4623130 - DNA, 25 bp, Homo sapien
tctcactggtctgcctggtagattt

SEQ ID NO: 4623131 - DNA, 25 bp, Homo sapien
ctttgggtaaacgatggcggatgga

SEQ ID NO: 4623132 - DNA, 25 bp, Homo sapien
ctggtctgcctggtagattttgatg

SEQ ID NO: 4623133 - DNA, 25 bp, Homo sapien
gctctcgatgacaattgcttttgtg

SEQ ID NO: 4623134 - DNA, 25 bp, Homo sapien
cactgttcaagatcatatttaatct

SEQ ID NO: 4623135 - DNA, 25 bp, Homo sapien
tcaaaatcctgacaatttttaggtc

SEQ ID NO: 4623136 - DNA, 25 bp, Homo sapien
gtttgagcagctgtgaatgctctcg

SEQ ID NO: 4623137 - DNA, 25 bp, Homo sapien
aagtaaatgttctagatacattaga

SEQ ID NO: 4623138 - DNA, 25 bp, Homo sapien
tcgtagagttaaagtaaatgttcta

SEQ ID NO: 4623139 - DNA, 25 bp, Homo sapien
taaagtaaatgttctagatacatta

SEQ ID NO: 4623140 - DNA, 25 bp, Homo sapien
gagttaaagtaaatgttctagatac

SEQ ID NO: 4623141 - DNA, 25 bp, Homo sapien
ctggaggaatcacatcagggtttaa

SEQ ID NO: 4623142 - DNA, 25 bp, Homo sapien
caatttgtaaacctttagtaagcag

SEQ ID NO: 4623143 - DNA, 25 bp, Homo sapien
attcccctgagagccatttcaattt

SEQ ID NO: 4623144 - DNA, 25 bp, Homo sapien
aaaaattcccctgagagccatttca

SEQ ID NO: 4623145 - DNA, 25 bp, Homo sapien
aaacctttagtaagcagtttagcat

SEQ ID NO: 4623146 - DNA, 25 bp, Homo sapien
tcagtgactttgatgcaattgagtt

SEQ ID NO: 4623147 - DNA, 25 bp, Homo sapien
tgtaagaagccaatatttggccaga

SEQ ID NO: 4623148 - DNA, 25 bp, Homo sapien
atagctgcacaatttaagtcacatg

SEQ ID NO: 4623149 - DNA, 25 bp, Homo sapien
cagatcctttgtaactgattgagag

SEQ ID NO: 4623150 - DNA, 25 bp, Homo sapien
tctgttgtgacaattccatagatag

SEQ ID NO: 4623151 - DNA, 25 bp, Homo sapien
tccatagatagagctttcagagtct

SEQ ID NO: 4623152 - DNA, 25 bp, Homo sapien
tgcctgataggagtcagtatctgtt

SEQ ID NO: 4623153 - DNA, 25 bp, Homo sapien
taggagtcagtatctgttgtgacaa

SEQ ID NO: 4623154 - DNA, 25 bp, Homo sapien
gacagttggctctccatttctcact

SEQ ID NO: 4623155 - DNA, 25 bp, Homo sapien
caaaagcaggacagttggctctcca

SEQ ID NO: 4623156 - DNA, 25 bp, Homo sapien
taccacttacaaaagcaggacagtt

SEQ ID NO: 4623157 - DNA, 25 bp, Homo sapien
caaaagccaataccacttacaaaag

SEQ ID NO: 4623158 - DNA, 25 bp, Homo sapien
gaagataatcggtgtgctgaaagca

SEQ ID NO: 4623159 - DNA, 25 bp, Homo sapien
gcctattaaatggatccattcggca

SEQ ID NO: 4623160 - DNA, 25 bp, Homo sapien
tctgtagctaatcccaagaagctgc

SEQ ID NO: 4623161 - DNA, 25 bp, Homo sapien
gaagcacattagcatctttacagtg

SEQ ID NO: 4623162 - DNA, 25 bp, Homo sapien
cagtcatctgatggtgctgaaagat

SEQ ID NO: 4623163 - DNA, 25 bp, Homo sapien
gactcactcatgtgactattggcag

SEQ ID NO: 4623164 - DNA, 25 bp, Homo sapien
ttagccatgtctgttatccaatgtt

SEQ ID NO: 4623165 - DNA, 25 bp, Homo sapien
aaaactgtaagccagtgatacagtc

SEQ ID NO: 4623166 - DNA, 25 bp, Homo sapien
agactccctatgcttggctccatat

SEQ ID NO: 4623167 - DNA, 25 bp, Homo sapien
tttaagactccctatgcttggctcc

SEQ ID NO: 4623168 - DNA, 25 bp, Homo sapien
gattaatcaatttttcccgactcat

SEQ ID NO: 4623169 - DNA, 25 bp, Homo sapien
tacttccttgttgattaatcaattt

SEQ ID NO: 4623170 - DNA, 25 bp, Homo sapien
ctgcagcagatcatatccagaggcc

SEQ ID NO: 4623171 - DNA, 25 bp, Homo sapien
agcagatcatatccagaggccatag

SEQ ID NO: 4623172 - DNA, 25 bp, Homo sapien
gcagatcatatccagaggccatagc

SEQ ID NO: 4623173 - DNA, 25 bp, Homo sapien
cggagctgcagcagatcatatccag

SEQ ID NO: 4623174 - DNA, 25 bp, Homo sapien
gcaccatagattgttccctctgatc

SEQ ID NO: 4623175 - DNA, 25 bp, Homo sapien
tccaggcagtaaggcataatatttg

SEQ ID NO: 4623176 - DNA, 25 bp, Homo sapien
tgaagactcaaatgggaccctttac

SEQ ID NO: 4623177 - DNA, 25 bp, Homo sapien
actctgccctatgaacactggctgt

SEQ ID NO: 4623178 - DNA, 25 bp, Homo sapien
ggccttggagacagctgagatgcta

SEQ ID NO: 4623179 - DNA, 25 bp, Homo sapien
gccttggagacagctgagatgctaa

SEQ ID NO: 4623180 - DNA, 25 bp, Homo sapien
cttggagacagctgagatgctaaag

SEQ ID NO: 4623181 - DNA, 25 bp, Homo sapien
tggagacagctgagatgctaaagag

SEQ ID NO: 4623182 - DNA, 25 bp, Homo sapien
aggttgacttatttgaggggccaat

SEQ ID NO: 4623183 - DNA, 25 bp, Homo sapien
tgacttatttgaggggccaatttct

SEQ ID NO: 4623184 - DNA, 25 bp, Homo sapien
ttgacttatttgaggggccaatttc

SEQ ID NO: 4623185 - DNA, 25 bp, Homo sapien
cttatttgaggggccaatttcttct

SEQ ID NO: 4623186 - DNA, 25 bp, Homo sapien
agttcagtttataggactggtggta

SEQ ID NO: 4623187 - DNA, 25 bp, Homo sapien
ccaataatgtgggctcttagtgcaa

SEQ ID NO: 4623188 - DNA, 25 bp, Homo sapien
tacacaaacatctgttcgaagccca

SEQ ID NO: 4623189 - DNA, 25 bp, Homo sapien
cagaggactgatgagctgatgcacc

SEQ ID NO: 4623190 - DNA, 25 bp, Homo sapien
ccaatgctgtctcccagttgcccaa

SEQ ID NO: 4623191 - DNA, 25 bp, Homo sapien
tcatttggctagatactggctcctc

SEQ ID NO: 4623192 - DNA, 25 bp, Homo sapien
tcctccatatcctcctctatttccc

SEQ ID NO: 4623193 - DNA, 25 bp, Homo sapien
tggtggcatgtccagagttgctgaa

SEQ ID NO: 4623194 - DNA, 25 bp, Homo sapien
ctctggtgattttgctgtggtggca

SEQ ID NO: 4623195 - DNA, 25 bp, Homo sapien
tgtccagagttgctgaatgacagac

SEQ ID NO: 4623196 - DNA, 25 bp, Homo sapien
gattttgctgtggtggcatgtccag

SEQ ID NO: 4623197 - DNA, 25 bp, Homo sapien
tcacttgccatacaagttttagcaa

SEQ ID NO: 4623198 - DNA, 25 bp, Homo sapien
gatgattttcacttgccatacaagt

SEQ ID NO: 4623199 - DNA, 25 bp, Homo sapien
ttttcacttgccatacaagttttag

SEQ ID NO: 4623200 - DNA, 25 bp, Homo sapien
cttgccatacaagttttagcaatct

SEQ ID NO: 4623201 - DNA, 25 bp, Homo sapien
gttctataaatcctcaggcactgtt

SEQ ID NO: 4623202 - DNA, 25 bp, Homo sapien
ttcagtgtaggaagagaaaccctca

SEQ ID NO: 4623203 - DNA, 25 bp, Homo sapien
tctacttaggtgaaaggactgcgct

SEQ ID NO: 4623204 - DNA, 25 bp, Homo sapien
atgaatagccggcacaagtccctga

SEQ ID NO: 4623205 - DNA, 25 bp, Homo sapien
agtgggattcacaatggcagctgcc

SEQ ID NO: 4623206 - DNA, 25 bp, Homo sapien
gaattccctgatgtgtattcacagt

SEQ ID NO: 4623207 - DNA, 25 bp, Homo sapien
gggctctctactcccttgttctcaa

SEQ ID NO: 4623208 - DNA, 25 bp, Homo sapien
gctgccatcactggctagaattccc

SEQ ID NO: 4623209 - DNA, 25 bp, Homo sapien
agtgggttacagagcaggcaaagcc

SEQ ID NO: 4623210 - DNA, 25 bp, Homo sapien
tactgaaagggcaccataagtgcct

SEQ ID NO: 4623211 - DNA, 25 bp, Homo sapien
tctgtgatttgatgaagtgggttac

SEQ ID NO: 4623212 - DNA, 25 bp, Homo sapien
caaagcccgctttgagcaggtactg

SEQ ID NO: 4623213 - DNA, 25 bp, Homo sapien
atctctctatggcagtgaccactgc

SEQ ID NO: 4623214 - DNA, 25 bp, Homo sapien
tgatctctctatggcagtgaccact

SEQ ID NO: 4623215 - DNA, 25 bp, Homo sapien
agtgatctctctatggcagtgacca

SEQ ID NO: 4623216 - DNA, 25 bp, Homo sapien
ctgctcatgttttggtcttgatctt

SEQ ID NO: 4623217 - DNA, 25 bp, Homo sapien
cttcaaccaaggtgatgagccacat

SEQ ID NO: 4623218 - DNA, 25 bp, Homo sapien
gactgccttcaaccaaggtgatgag

SEQ ID NO: 4623219 - DNA, 25 bp, Homo sapien
tctggagactgccttcaaccaaggt

SEQ ID NO: 4623220 - DNA, 25 bp, Homo sapien
tggagactgccttcaaccaaggtga

SEQ ID NO: 4623221 - DNA, 25 bp, Homo sapien
tttcctttccggactggcaagcatt

SEQ ID NO: 4623222 - DNA, 25 bp, Homo sapien
gactggcaagcattggctaaatact

SEQ ID NO: 4623223 - DNA, 25 bp, Homo sapien
gcattggctaaatactctgtcatgt

SEQ ID NO: 4623224 - DNA, 25 bp, Homo sapien
tggctaaatactctgtcatgtaacc

SEQ ID NO: 4623225 - DNA, 25 bp, Homo sapien
ccgtattcattaacttggctatgtt

SEQ ID NO: 4623226 - DNA, 25 bp, Homo sapien
ctgtttcccaaatgccacttaactg

SEQ ID NO: 4623227 - DNA, 25 bp, Homo sapien
tactgtttccagcttactgtttccc

SEQ ID NO: 4623228 - DNA, 25 bp, Homo sapien
catacgtcagcaattctggagtagc

SEQ ID NO: 4623229 - DNA, 25 bp, Homo sapien
tggagtagcttcagactgcacgttc

SEQ ID NO: 4623230 - DNA, 25 bp, Homo sapien
gtttgcataacattccaatatgtgg

SEQ ID NO: 4623231 - DNA, 25 bp, Homo sapien
gtggctatgtggcaatttatttaaa

SEQ ID NO: 4623232 - DNA, 25 bp, Homo sapien
tcaatagatatgtttgcagccaaat

SEQ ID NO: 4623233 - DNA, 25 bp, Homo sapien
gcagccaaatcattatgtgtacttc

SEQ ID NO: 4623234 - DNA, 25 bp, Homo sapien
tcctggcttacctgggttcctgagg

SEQ ID NO: 4623235 - DNA, 25 bp, Homo sapien
tgttcctggcttacctgggttcctg

SEQ ID NO: 4623236 - DNA, 25 bp, Homo sapien
tgggttcctgaggtcttactgttct

SEQ ID NO: 4623237 - DNA, 25 bp, Homo sapien
gttcctggcttacctgggttcctga

SEQ ID NO: 4623238 - DNA, 25 bp, Homo sapien
gaaacatctgctgtagataccatgg

SEQ ID NO: 4623239 - DNA, 25 bp, Homo sapien
gggtccttcaccatcctgaaacttc

SEQ ID NO: 4623240 - DNA, 25 bp, Homo sapien
gacagcttcatttatcacgccgtcc

SEQ ID NO: 4623241 - DNA, 25 bp, Homo sapien
agataccatggcaggagtttcttca

SEQ ID NO: 4623242 - DNA, 25 bp, Homo sapien
aacaggactcattgtggaccacaca

SEQ ID NO: 4623243 - DNA, 25 bp, Homo sapien
gattcatagacaaacaacaggactc

SEQ ID NO: 4623244 - DNA, 25 bp, Homo sapien
ttgtttcttgaaactcgctatgttc

SEQ ID NO: 4623245 - DNA, 25 bp, Homo sapien
ctgcagagcaaagggattcatagac

SEQ ID NO: 4623246 - DNA, 25 bp, Homo sapien
cagagagttcatcatagccaggtgt

SEQ ID NO: 4623247 - DNA, 25 bp, Homo sapien
gagagttcatcatagccaggtgttt

SEQ ID NO: 4623248 - DNA, 25 bp, Homo sapien
tcagagagttcatcatagccaggtg

SEQ ID NO: 4623249 - DNA, 25 bp, Homo sapien
attcagagagttcatcatagccagg

SEQ ID NO: 4623250 - DNA, 25 bp, Homo sapien
gattcctgcttcatcggctttctgc

SEQ ID NO: 4623251 - DNA, 25 bp, Homo sapien
caggtggaatctttatgtcccatga

SEQ ID NO: 4623252 - DNA, 25 bp, Homo sapien
ttaaagaggccgatggaaagcccac

SEQ ID NO: 4623253 - DNA, 25 bp, Homo sapien
tctgcgacaggtgaaagatggagaa

SEQ ID NO: 4623254 - DNA, 25 bp, Homo sapien
tgtcctcttgtaacaaaggatgggc

SEQ ID NO: 4623255 - DNA, 25 bp, Homo sapien
tcttgtaacaaaggatgggctggaa

SEQ ID NO: 4623256 - DNA, 25 bp, Homo sapien
ggctggaagttgtgggtggtcgtta

SEQ ID NO: 4623257 - DNA, 25 bp, Homo sapien
tgggtggtcgttagtggtagagcca

SEQ ID NO: 4623258 - DNA, 25 bp, Homo sapien
ggggacttggcacttatgatgttac

SEQ ID NO: 4623259 - DNA, 25 bp, Homo sapien
gaatgggatggaacttttgagagga

SEQ ID NO: 4623260 - DNA, 25 bp, Homo sapien
agatggggacttggcacttatgatg

SEQ ID NO: 4623261 - DNA, 25 bp, Homo sapien
tgaatgggatggaacttttgagagg

SEQ ID NO: 4623262 - DNA, 25 bp, Homo sapien
atgactgcaagtcattgtgcagagc

SEQ ID NO: 4623263 - DNA, 25 bp, Homo sapien
tctgtaaaaccgaaatgactgcaag

SEQ ID NO: 4623264 - DNA, 25 bp, Homo sapien
gagctgtggagcttggatcacttgc

SEQ ID NO: 4623265 - DNA, 25 bp, Homo sapien
cacttgcgacgttgctgatgcaacc

SEQ ID NO: 4623266 - DNA, 25 bp, Homo sapien
tgttggctgtcacttgatagctgtc

SEQ ID NO: 4623267 - DNA, 25 bp, Homo sapien
gatagctgtcgggtgtcctagctgc

SEQ ID NO: 4623268 - DNA, 25 bp, Homo sapien
tatgcccgattgtctgaatcatggc

SEQ ID NO: 4623269 - DNA, 25 bp, Homo sapien
gaaatgcctttagactgctgtactg

SEQ ID NO: 4623270 - DNA, 25 bp, Homo sapien
gcagctgctttcaagggcaactgaa

SEQ ID NO: 4623271 - DNA, 25 bp, Homo sapien
tgctttcaagggcaactgaaaaaac

SEQ ID NO: 4623272 - DNA, 25 bp, Homo sapien
ttttataaatgttacgagcaaagtc

SEQ ID NO: 4623273 - DNA, 25 bp, Homo sapien
gttacgagcaaagtcaacctctggg

SEQ ID NO: 4623274 - DNA, 25 bp, Homo sapien
tcatcctccatattagcaattgctt

SEQ ID NO: 4623275 - DNA, 25 bp, Homo sapien
ttctggagtccatgtttaaaacctg

SEQ ID NO: 4623276 - DNA, 25 bp, Homo sapien
gctgcggagattaaatgggcatttc

SEQ ID NO: 4623277 - DNA, 25 bp, Homo sapien
cccttcagtgtggtgaaatggtaga

SEQ ID NO: 4623278 - DNA, 25 bp, Homo sapien
cactgcaaagtgagattaggtgctt

SEQ ID NO: 4623279 - DNA, 25 bp, Homo sapien
gattaggtgcttgaaatgcggctgc

SEQ ID NO: 4623280 - DNA, 25 bp, Homo sapien
tctgtttttaaaggaagcctcaggc

SEQ ID NO: 4623281 - DNA, 25 bp, Homo sapien
tgtttttaaaggaagcctcaggcat

SEQ ID NO: 4623282 - DNA, 25 bp, Homo sapien
gacattgaaaatggttctgttttta

SEQ ID NO: 4623283 - DNA, 25 bp, Homo sapien
ttgacattgaaaatggttctgtttt

SEQ ID NO: 4623284 - DNA, 25 bp, Homo sapien
gttccagcaggagatgcacgtagtt

SEQ ID NO: 4623285 - DNA, 25 bp, Homo sapien
ggaattgagtggaatattagttcca

SEQ ID NO: 4623286 - DNA, 25 bp, Homo sapien
aattgagtggaatattagttccagc

SEQ ID NO: 4623287 - DNA, 25 bp, Homo sapien
gagtggaatattagttccagcagga

SEQ ID NO: 4623288 - DNA, 25 bp, Homo sapien
tctgtcagagtttctgcaatcgtgt

SEQ ID NO: 4623289 - DNA, 25 bp, Homo sapien
cagagtttctgcaatcgtgtctctt

SEQ ID NO: 4623290 - DNA, 25 bp, Homo sapien
tgttggctggcttgattcgaatagg

SEQ ID NO: 4623291 - DNA, 25 bp, Homo sapien
tgattcgaataggagctgtcactgt

SEQ ID NO: 4623292 - DNA, 25 bp, Homo sapien
atttgatatgtctaagccaattatc

SEQ ID NO: 4623293 - DNA, 25 bp, Homo sapien
caaagtcttagtgataagaagcagc

SEQ ID NO: 4623294 - DNA, 25 bp, Homo sapien
taagccaattatcaaagtcttagtg

SEQ ID NO: 4623295 - DNA, 25 bp, Homo sapien
tatcaaagtcttagtgataagaagc

SEQ ID NO: 4623296 - DNA, 25 bp, Homo sapien
taatgactcgaatatcaagccctga

SEQ ID NO: 4623297 - DNA, 25 bp, Homo sapien
caagccctgacaatatctgcagatg

SEQ ID NO: 4623298 - DNA, 25 bp, Homo sapien
taatatcatgaagcgttagcagacg

SEQ ID NO: 4623299 - DNA, 25 bp, Homo sapien
gagagaaatgatggtatactgtgca

SEQ ID NO: 4623300 - DNA, 25 bp, Homo sapien
ttctaatggtctgcttatccagcgc

SEQ ID NO: 4623301 - DNA, 25 bp, Homo sapien
tatgtatctggagagcatgcggagt

SEQ ID NO: 4623302 - DNA, 25 bp, Homo sapien
gggtcagagtgaatttgtccctcag

SEQ ID NO: 4623303 - DNA, 25 bp, Homo sapien
gggctgcagcccaaatgttatggac

SEQ ID NO: 4623304 - DNA, 25 bp, Homo sapien
cccctgggatgtgagaggaactcat

SEQ ID NO: 4623305 - DNA, 25 bp, Homo sapien
gcccctgggatgtgagaggaactca

SEQ ID NO: 4623306 - DNA, 25 bp, Homo sapien
tagtaacttcttaactagcctcttg

SEQ ID NO: 4623307 - DNA, 25 bp, Homo sapien
gacaattagtaacttcttaactagc

SEQ ID NO: 4623308 - DNA, 25 bp, Homo sapien
caattagtaacttcttaactagcct

SEQ ID NO: 4623309 - DNA, 25 bp, Homo sapien
taacttcttaactagcctcttggcc

SEQ ID NO: 4623310 - DNA, 25 bp, Homo sapien
tctttgcaattgctaggttctgtgc

SEQ ID NO: 4623311 - DNA, 25 bp, Homo sapien
tctcttggttaacgggctcctcttc

SEQ ID NO: 4623312 - DNA, 25 bp, Homo sapien
tcctgactgactctcttggttaacg

SEQ ID NO: 4623313 - DNA, 25 bp, Homo sapien
gcttccttgtttgaccatgcaacat

SEQ ID NO: 4623314 - DNA, 25 bp, Homo sapien
gagagttggtagaatcctgctatta

SEQ ID NO: 4623315 - DNA, 25 bp, Homo sapien
cccatgttgagagttggtagaatcc

SEQ ID NO: 4623316 - DNA, 25 bp, Homo sapien
ggtagaatcctgctattaatgttga

SEQ ID NO: 4623317 - DNA, 25 bp, Homo sapien
cctgctattaatgttgatgccatta

SEQ ID NO: 4623318 - DNA, 25 bp, Homo sapien
gtatcctttacttgctctaacacca

SEQ ID NO: 4623319 - DNA, 25 bp, Homo sapien
tccgggcccctggaagtgctacttc

SEQ ID NO: 4623320 - DNA, 25 bp, Homo sapien
acttggtacactgcctgtatccttt

SEQ ID NO: 4623321 - DNA, 25 bp, Homo sapien
gctacttcagctgccaatgatgtat

SEQ ID NO: 4623322 - DNA, 25 bp, Homo sapien
cactgcctgcctgtgatccctgcat

SEQ ID NO: 4623323 - DNA, 25 bp, Homo sapien
ctcctcactgcctgcctgtgatccc

SEQ ID NO: 4623324 - DNA, 25 bp, Homo sapien
ctcactgcctgcctgtgatccctgc

SEQ ID NO: 4623325 - DNA, 25 bp, Homo sapien
tcctcactgcctgcctgtgatccct

SEQ ID NO: 4623326 - DNA, 25 bp, Homo sapien
taaatgtccggccttctgttggtcc

SEQ ID NO: 4623327 - DNA, 25 bp, Homo sapien
tccagcattttccacaggatcagga

SEQ ID NO: 4623328 - DNA, 25 bp, Homo sapien
cagcattttccacaggatcaggaag

SEQ ID NO: 4623329 - DNA, 25 bp, Homo sapien
ctgcagcaaataaatgtccggcctt

SEQ ID NO: 4623330 - DNA, 25 bp, Homo sapien
gactctcacataacatttgctccga

SEQ ID NO: 4623331 - DNA, 25 bp, Homo sapien
tggtaaatatgatcagggcacctga

SEQ ID NO: 4623332 - DNA, 25 bp, Homo sapien
gggcagtggctcatttagactctca

SEQ ID NO: 4623333 - DNA, 25 bp, Homo sapien
ggattaacttttagtgaggccaaca

SEQ ID NO: 4623334 - DNA, 25 bp, Homo sapien
cagtctttctggcaaaggttgtagc

SEQ ID NO: 4623335 - DNA, 25 bp, Homo sapien
tgttcccggttgtcctcacatttgt

SEQ ID NO: 4623336 - DNA, 25 bp, Homo sapien
tggtcagatgactttggcgacagtc

SEQ ID NO: 4623337 - DNA, 25 bp, Homo sapien
gttacatcttagaggaatctgaccc

SEQ ID NO: 4623338 - DNA, 25 bp, Homo sapien
taatatgctaaagtagtacagaata

SEQ ID NO: 4623339 - DNA, 25 bp, Homo sapien
acagatttgagttatgagttcattg

SEQ ID NO: 4623340 - DNA, 25 bp, Homo sapien
cctatatgattttaaatgcttctct

SEQ ID NO: 4623341 - DNA, 25 bp, Homo sapien
tatgaaacgctggaattgcagttac

SEQ ID NO: 4623342 - DNA, 25 bp, Homo sapien
aagccattagcaaagagtcgtggta

SEQ ID NO: 4623343 - DNA, 25 bp, Homo sapien
tagcagacacgccattctaacaggt

SEQ ID NO: 4623344 - DNA, 25 bp, Homo sapien
caatatagttggatagcctggatac

SEQ ID NO: 4623345 - DNA, 25 bp, Homo sapien
cgaagcatgtttctcttaaggctac

SEQ ID NO: 4623346 - DNA, 25 bp, Homo sapien
taagagaagatgtttttctgttccc

SEQ ID NO: 4623347 - DNA, 25 bp, Homo sapien
cttgtaagagaagatgtttttctgt

SEQ ID NO: 4623348 - DNA, 25 bp, Homo sapien
tgtaagagaagatgtttttctgttc

SEQ ID NO: 4623349 - DNA, 25 bp, Homo sapien
agagaagatgtttttctgttcccat

SEQ ID NO: 4623350 - DNA, 25 bp, Homo sapien
tcttcatcatttattgctttcttta

SEQ ID NO: 4623351 - DNA, 25 bp, Homo sapien
ttattgctttctttaaatcagtagt

SEQ ID NO: 4623352 - DNA, 25 bp, Homo sapien
cttcatcatttattgctttctttaa

SEQ ID NO: 4623353 - DNA, 25 bp, Homo sapien
tctttaaatcagtagtttttgacat

SEQ ID NO: 4623354 - DNA, 25 bp, Homo sapien
taaatatattttgccaactttggaa

SEQ ID NO: 4623355 - DNA, 25 bp, Homo sapien
tttggaaaaagaattattcttggca

SEQ ID NO: 4623356 - DNA, 25 bp, Homo sapien
ctaaatatattttgccaactttgga

SEQ ID NO: 4623357 - DNA, 25 bp, Homo sapien
aactaaatatattttgccaactttg

SEQ ID NO: 4623358 - DNA, 25 bp, Homo sapien
tgtattgtgttattcccgctgttga

SEQ ID NO: 4623359 - DNA, 25 bp, Homo sapien
ttattcccgctgttgaatacctgca

SEQ ID NO: 4623360 - DNA, 25 bp, Homo sapien
cacttaagctgtattgtgttattcc

SEQ ID NO: 4623361 - DNA, 25 bp, Homo sapien
tttaagttcctacacttaagctgta

SEQ ID NO: 4623362 - DNA, 25 bp, Homo sapien
cagtctgccaagagaacgccgtttt

SEQ ID NO: 4623363 - DNA, 25 bp, Homo sapien
gctagcgcggcaatctcaaggtcgt

SEQ ID NO: 4623364 - DNA, 25 bp, Homo sapien
gaagaatacgagttggaagctagcc

SEQ ID NO: 4623365 - DNA, 25 bp, Homo sapien
cctatggtttcactctgccggaaga

SEQ ID NO: 4623366 - DNA, 25 bp, Homo sapien
tttcggaagaagtcgggcttccaga

SEQ ID NO: 4623367 - DNA, 25 bp, Homo sapien
gtgcgtgcgcgcccctctggccgct

SEQ ID NO: 4623368 - DNA, 25 bp, Homo sapien
gactcttccagcgtctcgggctcct

SEQ ID NO: 4623369 - DNA, 25 bp, Homo sapien
cagcgtctcgggctccttgcagcag

SEQ ID NO: 4623370 - DNA, 25 bp, Homo sapien
cagcagtggaagcactagcggctgc

SEQ ID NO: 4623371 - DNA, 25 bp, Homo sapien
caattttagtggaagtgtcaccggc

SEQ ID NO: 4623372 - DNA, 25 bp, Homo sapien
ggagaaacggcgcaaacgtagcagt

SEQ ID NO: 4623373 - DNA, 25 bp, Homo sapien
ctgctgtgggaacgccaattttagt

SEQ ID NO: 4623374 - DNA, 25 bp, Homo sapien
ggtcgcaccagagacagcggacttt

SEQ ID NO: 4623375 - DNA, 25 bp, Homo sapien
gaagcgcaactggttatggcaaccc

SEQ ID NO: 4623376 - DNA, 25 bp, Homo sapien
gactttcctccgatggttgcagcag

SEQ ID NO: 4623377 - DNA, 25 bp, Homo sapien
tgacgcataacctgcgacgccagtg

SEQ ID NO: 4623378 - DNA, 25 bp, Homo sapien
atatcttaagatttggaggtaaacg

SEQ ID NO: 4623379 - DNA, 25 bp, Homo sapien
gttccaccttctatcctttgtagag

SEQ ID NO: 4623380 - DNA, 25 bp, Homo sapien
gaatcagcaactatacttcaacctt

SEQ ID NO: 4623381 - DNA, 25 bp, Homo sapien
aactctgactagacaggctacccgc

SEQ ID NO: 4623382 - DNA, 25 bp, Homo sapien
ttaatatgcgaatgtagggtgccac

SEQ ID NO: 4623383 - DNA, 25 bp, Homo sapien
actaatttgcatatgacccagggaa

SEQ ID NO: 4623384 - DNA, 25 bp, Homo sapien
agggaaccttgggtgcagcagacaa

SEQ ID NO: 4623385 - DNA, 25 bp, Homo sapien
gaggctccctcatacagaaccagag

SEQ ID NO: 4623386 - DNA, 25 bp, Homo sapien
actgatcagtacagcgcactacagc

SEQ ID NO: 4623387 - DNA, 25 bp, Homo sapien
cctccccagtttgcctcttgagtag

SEQ ID NO: 4623388 - DNA, 25 bp, Homo sapien
gtgcagacaactgatcagtacagcg

SEQ ID NO: 4623389 - DNA, 25 bp, Homo sapien
tagtgctgaactaagtgcagacaac

SEQ ID NO: 4623390 - DNA, 25 bp, Homo sapien
ctgtgacctcattactaatcagcat

SEQ ID NO: 4623391 - DNA, 25 bp, Homo sapien
gctgtgacctcattactaatcagca

SEQ ID NO: 4623392 - DNA, 25 bp, Homo sapien
gccactaagaagacaagggctgtta

SEQ ID NO: 4623393 - DNA, 25 bp, Homo sapien
tccaccttcattgctagatccttcg

SEQ ID NO: 4623394 - DNA, 25 bp, Homo sapien
gctataatcagcaacaacacaatga

SEQ ID NO: 4623395 - DNA, 25 bp, Homo sapien
gaacagcactgatacatttcaaggt

SEQ ID NO: 4623396 - DNA, 25 bp, Homo sapien
tagtgatgctaagattattttgtgc

SEQ ID NO: 4623397 - DNA, 25 bp, Homo sapien
gatgcatactacttttacattacgg

SEQ ID NO: 4623398 - DNA, 25 bp, Homo sapien
cattcagatggcatctacccaggcc

SEQ ID NO: 4623399 - DNA, 25 bp, Homo sapien
agcacataatgttggatttcctcac

SEQ ID NO: 4623400 - DNA, 25 bp, Homo sapien
gaatgacaagtgcatgatgaccttg

SEQ ID NO: 4623401 - DNA, 25 bp, Homo sapien
taagttgaatgattctgtggcaact

SEQ ID NO: 4623402 - DNA, 25 bp, Homo sapien
tgaatgattctgtggcaacttaaat

SEQ ID NO: 4623403 - DNA, 25 bp, Homo sapien
gatgaccttgcaggtacagtagttc

SEQ ID NO: 4623404 - DNA, 25 bp, Homo sapien
tacgtggcttgtaagtggcacagct

SEQ ID NO: 4623405 - DNA, 25 bp, Homo sapien
cttttggacattgagcttggctgca

SEQ ID NO: 4623406 - DNA, 25 bp, Homo sapien
aagttccgctccctcgtttcacaga

SEQ ID NO: 4623407 - DNA, 25 bp, Homo sapien
gcgtctctgctgaattgagccttag

SEQ ID NO: 4623408 - DNA, 25 bp, Homo sapien
tgcggactggtctcgcacagtgcct

SEQ ID NO: 4623409 - DNA, 25 bp, Homo sapien
gcggcccggcgctctccgagtcgcc

SEQ ID NO: 4623410 - DNA, 25 bp, Homo sapien
gcaccgggcgccagacagacactgg

SEQ ID NO: 4623411 - DNA, 25 bp, Homo sapien
gcgctctccgagtcgcccctgcgga

SEQ ID NO: 4623412 - DNA, 25 bp, Homo sapien
tgcccagcgcgaaagactcaggttt

SEQ ID NO: 4623413 - DNA, 25 bp, Homo sapien
taaaatatccggattcggcgcgccg

SEQ ID NO: 4623414 - DNA, 25 bp, Homo sapien
cgcacacactctgcgtcatggaggg

SEQ ID NO: 4623415 - DNA, 25 bp, Homo sapien
aaggaccccagggtcaggcgtcctg

SEQ ID NO: 4623416 - DNA, 25 bp, Homo sapien
gggcacttaaactacctttgcagaa

SEQ ID NO: 4623417 - DNA, 25 bp, Homo sapien
gactgactccattttgctcaaaacc

SEQ ID NO: 4623418 - DNA, 25 bp, Homo sapien
tgagagaaatctaacatgactgact

SEQ ID NO: 4623419 - DNA, 25 bp, Homo sapien
ggcagcaccaaaccacaagtggtga

SEQ ID NO: 4623420 - DNA, 25 bp, Homo sapien
gcaccaactgttccgttcctgcttt

SEQ ID NO: 4623421 - DNA, 25 bp, Homo sapien
tatggatgcgattctggcaccaact

SEQ ID NO: 4623422 - DNA, 25 bp, Homo sapien
tacacaacgcatcatgaagtatgga

SEQ ID NO: 4623423 - DNA, 25 bp, Homo sapien
taggacggcatagcgtacacaacgc

SEQ ID NO: 4623424 - DNA, 25 bp, Homo sapien
acgctcagttttcctcggctctcag

SEQ ID NO: 4623425 - DNA, 25 bp, Homo sapien
cgctcagttttcctcggctctcagg

SEQ ID NO: 4623426 - DNA, 25 bp, Homo sapien
gcgggtgccttaacttctttctgag

SEQ ID NO: 4623427 - DNA, 25 bp, Homo sapien
ccggctcgcgggtgccttaacttct

SEQ ID NO: 4623428 - DNA, 25 bp, Homo sapien
gccactcgaatatttcctgataggg

SEQ ID NO: 4623429 - DNA, 25 bp, Homo sapien
tgcagttgccactcgaatatttcct

SEQ ID NO: 4623430 - DNA, 25 bp, Homo sapien
tgataggggtcgtatcccagaagga

SEQ ID NO: 4623431 - DNA, 25 bp, Homo sapien
tccacctcttgaaacagggcgagct

SEQ ID NO: 4623432 - DNA, 25 bp, Homo sapien
taatattacccctagcatcaaaaga

SEQ ID NO: 4623433 - DNA, 25 bp, Homo sapien
gaaattttgattggacataaggctt

SEQ ID NO: 4623434 - DNA, 25 bp, Homo sapien
tacccctagcatcaaaagaaatgtc

SEQ ID NO: 4623435 - DNA, 25 bp, Homo sapien
taaggcttgtggtcttaatacagaa

SEQ ID NO: 4623436 - DNA, 25 bp, Homo sapien
ttcgtcccagttttcattccagtca

SEQ ID NO: 4623437 - DNA, 25 bp, Homo sapien
tgttacagggcgatgggcaactttg

SEQ ID NO: 4623438 - DNA, 25 bp, Homo sapien
tatgggacaaccacgagaacctggt

SEQ ID NO: 4623439 - DNA, 25 bp, Homo sapien
cagaactccaccagtccctatggga

SEQ ID NO: 4623440 - DNA, 25 bp, Homo sapien
caaaccttgtaagagatgaagtgcc

SEQ ID NO: 4623441 - DNA, 25 bp, Homo sapien
tcaaaccttgtaagagatgaagtgc

SEQ ID NO: 4623442 - DNA, 25 bp, Homo sapien
aagaagcccaagatagtaagatttg

SEQ ID NO: 4623443 - DNA, 25 bp, Homo sapien
ctaagaagcccaagatagtaagatt

SEQ ID NO: 4623444 - DNA, 25 bp, Homo sapien
taagaagcccaagatagtaagattt

SEQ ID NO: 4623445 - DNA, 25 bp, Homo sapien
gaagcccaagatagtaagatttgtc

SEQ ID NO: 4623446 - DNA, 25 bp, Homo sapien
agaatgaggtatattctggctgggt

SEQ ID NO: 4623447 - DNA, 25 bp, Homo sapien
tgacaaatatactgaattctcttga

SEQ ID NO: 4623448 - DNA, 25 bp, Homo sapien
ttctattcccttctgaagtttatta

SEQ ID NO: 4623449 - DNA, 25 bp, Homo sapien
taacttcagttgtaagttcacttat

SEQ ID NO: 4623450 - DNA, 25 bp, Homo sapien
tatactgaattctcttgattgtaca

SEQ ID NO: 4623451 - DNA, 25 bp, Homo sapien
tcttttatctcaacagctaaagtct

SEQ ID NO: 4623452 - DNA, 25 bp, Homo sapien
gttgtccttgaagctcttttatctc

SEQ ID NO: 4623453 - DNA, 25 bp, Homo sapien
cttttatctcaacagctaaagtctc

SEQ ID NO: 4623454 - DNA, 25 bp, Homo sapien
ttgtccttgaagctcttttatctca

SEQ ID NO: 4623455 - DNA, 25 bp, Homo sapien
ttcagtgttggtattaagtttatct

SEQ ID NO: 4623456 - DNA, 25 bp, Homo sapien
gtgttggtattaagtttatctacca

SEQ ID NO: 4623457 - DNA, 25 bp, Homo sapien
cagtgttggtattaagtttatctac

SEQ ID NO: 4623458 - DNA, 25 bp, Homo sapien
tgttggtattaagtttatctaccaa

SEQ ID NO: 4623459 - DNA, 25 bp, Homo sapien
ttgtaatcattcattacttcttcca

SEQ ID NO: 4623460 - DNA, 25 bp, Homo sapien
tgtgtttctcgatcattttgagctt

SEQ ID NO: 4623461 - DNA, 25 bp, Homo sapien
ttgtgtttctcgatcattttgagct

SEQ ID NO: 4623462 - DNA, 25 bp, Homo sapien
ggcatccctcttctatgggcaatca

SEQ ID NO: 4623463 - DNA, 25 bp, Homo sapien
ttttgtaaatgatttaggcatccct

SEQ ID NO: 4623464 - DNA, 25 bp, Homo sapien
aggcatccctcttctatgggcaatc

SEQ ID NO: 4623465 - DNA, 25 bp, Homo sapien
gtaaatgatttaggcatccctcttc

SEQ ID NO: 4623466 - DNA, 25 bp, Homo sapien
caccccctctttcaatctttctcct

SEQ ID NO: 4623467 - DNA, 25 bp, Homo sapien
ctaaaatcagaagcacgtaatattc

SEQ ID NO: 4623468 - DNA, 25 bp, Homo sapien
ttcttcttcgacacttctgatttgt

SEQ ID NO: 4623469 - DNA, 25 bp, Homo sapien
tttgataatgtcatctgttgcttgt

SEQ ID NO: 4623470 - DNA, 25 bp, Homo sapien
ttgataatgtcatctgttgcttgtt

SEQ ID NO: 4623471 - DNA, 25 bp, Homo sapien
ttcaatttcttcttcgacacttctg

SEQ ID NO: 4623472 - DNA, 25 bp, Homo sapien
tcatgttctgtgaatccaattgttg

SEQ ID NO: 4623473 - DNA, 25 bp, Homo sapien
cttttttcatgttctgtgaatccaa

SEQ ID NO: 4623474 - DNA, 25 bp, Homo sapien
tgttctgtgaatccaattgttgttg

SEQ ID NO: 4623475 - DNA, 25 bp, Homo sapien
caattgttgttgaagtgtatctaat

SEQ ID NO: 4623476 - DNA, 25 bp, Homo sapien
gatctcgatgggactccaactcata

SEQ ID NO: 4623477 - DNA, 25 bp, Homo sapien
tttcatgcagcaataccgcctcctg

SEQ ID NO: 4623478 - DNA, 25 bp, Homo sapien
cattggagatcctatgcttttgtct

SEQ ID NO: 4623479 - DNA, 25 bp, Homo sapien
caatcatttgatctcgatgggactc

SEQ ID NO: 4623480 - DNA, 25 bp, Homo sapien
tggctatttcctgattatcatcttt

SEQ ID NO: 4623481 - DNA, 25 bp, Homo sapien
ggctatttcctgattatcatcttta

SEQ ID NO: 4623482 - DNA, 25 bp, Homo sapien
tgtctttccatgctggctatttcct

SEQ ID NO: 4623483 - DNA, 25 bp, Homo sapien
tctttccatgctggctatttcctga

SEQ ID NO: 4623484 - DNA, 25 bp, Homo sapien
tatctgatgacacctctatctagca

SEQ ID NO: 4623485 - DNA, 25 bp, Homo sapien
actggaaccctcacatgctgctcat

SEQ ID NO: 4623486 - DNA, 25 bp, Homo sapien
tcttcctactttaatctaggattgt

SEQ ID NO: 4623487 - DNA, 25 bp, Homo sapien
gtgagacaccgcttcatacccatta

SEQ ID NO: 4623488 - DNA, 25 bp, Homo sapien
ggaaaacctaccactggcagaagat

SEQ ID NO: 4623489 - DNA, 25 bp, Homo sapien
ccactgcgccaagcatagatctttt

SEQ ID NO: 4623490 - DNA, 25 bp, Homo sapien
ctgagaacactagttgcctgagtta

SEQ ID NO: 4623491 - DNA, 25 bp, Homo sapien
tttactgattcatatttggagccca

SEQ ID NO: 4623492 - DNA, 25 bp, Homo sapien
tttccaagttgcataaacaatatct

SEQ ID NO: 4623493 - DNA, 25 bp, Homo sapien
tttatgaaggaaatatagacattca

SEQ ID NO: 4623494 - DNA, 25 bp, Homo sapien
aataatatgtcttattctaaggaca

SEQ ID NO: 4623495 - DNA, 25 bp, Homo sapien
tctaaggacaatactataactgacg

SEQ ID NO: 4623496 - DNA, 25 bp, Homo sapien
cttcaataaactgatttatcttttc

SEQ ID NO: 4623497 - DNA, 25 bp, Homo sapien
tgttcctctaaatccatgtcaagtt

SEQ ID NO: 4623498 - DNA, 25 bp, Homo sapien
cctctaaatccatgtcaagttgtct

SEQ ID NO: 4623499 - DNA, 25 bp, Homo sapien
tctaaatccatgtcaagttgtctaa

SEQ ID NO: 4623500 - DNA, 25 bp, Homo sapien
ctggtacctgcattagttcttcaaa

SEQ ID NO: 4623501 - DNA, 25 bp, Homo sapien
tccctcaggtgttctggtacctgca

SEQ ID NO: 4623502 - DNA, 25 bp, Homo sapien
caagctccctcaggtgttctggtac

SEQ ID NO: 4623503 - DNA, 25 bp, Homo sapien
tcaggtgttctggtacctgcattag

SEQ ID NO: 4623504 - DNA, 25 bp, Homo sapien
caccgcacacgacctaaaagaattt

SEQ ID NO: 4623505 - DNA, 25 bp, Homo sapien
ccgcacacgacctaaaagaatttct

SEQ ID NO: 4623506 - DNA, 25 bp, Homo sapien
agccaccgcacacgacctaaaagaa

SEQ ID NO: 4623507 - DNA, 25 bp, Homo sapien
gcacacgacctaaaagaatttctta

SEQ ID NO: 4623508 - DNA, 25 bp, Homo sapien
gactgaagatctgtgaaacaatggg

SEQ ID NO: 4623509 - DNA, 25 bp, Homo sapien
ggctatagcagggtattcttcagtt

SEQ ID NO: 4623510 - DNA, 25 bp, Homo sapien
tagtctgtaagggatttctttcacc

SEQ ID NO: 4623511 - DNA, 25 bp, Homo sapien
gatgaacactgctcaaacagtgggt

SEQ ID NO: 4623512 - DNA, 25 bp, Homo sapien
aaatccatgacactgtagtcaaggt

SEQ ID NO: 4623513 - DNA, 25 bp, Homo sapien
taatggcttccaacatgcactgact

SEQ ID NO: 4623514 - DNA, 25 bp, Homo sapien
tgtaaagctcttccataaatccatg

SEQ ID NO: 4623515 - DNA, 25 bp, Homo sapien
actgactacctcattccataatggc

SEQ ID NO: 4623516 - DNA, 25 bp, Homo sapien
taagtggtgaaacacaaggctaact

SEQ ID NO: 4623517 - DNA, 25 bp, Homo sapien
tgaaccttctaacaggacatcggaa

SEQ ID NO: 4623518 - DNA, 25 bp, Homo sapien
tgagatgcgcagcactgtaggtaag

SEQ ID NO: 4623519 - DNA, 25 bp, Homo sapien
cattaagacgcatcaaaactctggc

SEQ ID NO: 4623520 - DNA, 25 bp, Homo sapien
ttttctttagctccttgtatttctg

SEQ ID NO: 4623521 - DNA, 25 bp, Homo sapien
tgtccatatgttcctcccttttctt

SEQ ID NO: 4623522 - DNA, 25 bp, Homo sapien
ctcccttttctttagctccttgtat

SEQ ID NO: 4623523 - DNA, 25 bp, Homo sapien
tctttagctccttgtatttctggtt

SEQ ID NO: 4623524 - DNA, 25 bp, Homo sapien
gcctttcgtttcagttcctgattct

SEQ ID NO: 4623525 - DNA, 25 bp, Homo sapien
ccaagagtgcaacaatgttggcttc

SEQ ID NO: 4623526 - DNA, 25 bp, Homo sapien
gcttctatctgtgcctttcgtttca

SEQ ID NO: 4623527 - DNA, 25 bp, Homo sapien
tcgactgcagtgctccaagagtgca

SEQ ID NO: 4623528 - DNA, 25 bp, Homo sapien
tcctgcatcatctttagctcttgat

SEQ ID NO: 4623529 - DNA, 25 bp, Homo sapien
ctgcacttcagtagatttaaaattg

SEQ ID NO: 4623530 - DNA, 25 bp, Homo sapien
ctcttgattggtgatagaggatatc

SEQ ID NO: 4623531 - DNA, 25 bp, Homo sapien
gaggtcatcctgcatcatctttagc

SEQ ID NO: 4623532 - DNA, 25 bp, Homo sapien
tttgcccatgcagtacaccagtgtt

SEQ ID NO: 4623533 - DNA, 25 bp, Homo sapien
cacccatgtggtgtgtagccattta

SEQ ID NO: 4623534 - DNA, 25 bp, Homo sapien
ctcagaaggaaccactttgacccgg

SEQ ID NO: 4623535 - DNA, 25 bp, Homo sapien
tgtgtacataggagcaaaatctcag

SEQ ID NO: 4623536 - DNA, 25 bp, Homo sapien
cagatccaactgcagacgttgaatg

SEQ ID NO: 4623537 - DNA, 25 bp, Homo sapien
tttctagaagctccattttctgcag

SEQ ID NO: 4623538 - DNA, 25 bp, Homo sapien
taaagctggcaaatcattatatatc

SEQ ID NO: 4623539 - DNA, 25 bp, Homo sapien
tagagaatgctgttcttcagtcatc

SEQ ID NO: 4623540 - DNA, 25 bp, Homo sapien
gtgtctcattttcttgcaattgtgt

SEQ ID NO: 4623541 - DNA, 25 bp, Homo sapien
tagtgcctcatactctatgttttgc

SEQ ID NO: 4623542 - DNA, 25 bp, Homo sapien
gtttttagtgcctcatactctatgt

SEQ ID NO: 4623543 - DNA, 25 bp, Homo sapien
tgtgtctcattttcttgcaattgtg

SEQ ID NO: 4623544 - DNA, 25 bp, Homo sapien
gattataagagagctggtaaaaagc

SEQ ID NO: 4623545 - DNA, 25 bp, Homo sapien
gctggcactgttacaataatttctg

SEQ ID NO: 4623546 - DNA, 25 bp, Homo sapien
gctggtaaaaagctggcactgttac

SEQ ID NO: 4623547 - DNA, 25 bp, Homo sapien
tgcagtgtgaagattataagagagc

SEQ ID NO: 4623548 - DNA, 25 bp, Homo sapien
ctaaatttcctgtgtaattccacaa

SEQ ID NO: 4623549 - DNA, 25 bp, Homo sapien
taaatttcctgtgtaattccacaag

SEQ ID NO: 4623550 - DNA, 25 bp, Homo sapien
ggttcagccatataggagaaacttc

SEQ ID NO: 4623551 - DNA, 25 bp, Homo sapien
tcaaaggttcagccatataggagaa

SEQ ID NO: 4623552 - DNA, 25 bp, Homo sapien
gcctttctaagaggataagacaaaa

SEQ ID NO: 4623553 - DNA, 25 bp, Homo sapien
tattataccaatgaacatgccaact

SEQ ID NO: 4623554 - DNA, 25 bp, Homo sapien
tgatgaatcctataacatgttttac

SEQ ID NO: 4623555 - DNA, 25 bp, Homo sapien
tgagataaagccacggtagaaaaaa

SEQ ID NO: 4623556 - DNA, 25 bp, Homo sapien
aggtgttgccactttctctccaaat

SEQ ID NO: 4623557 - DNA, 25 bp, Homo sapien
tgctcaaggtgttgccactttctct

SEQ ID NO: 4623558 - DNA, 25 bp, Homo sapien
tattttgctcaaggtgttgccactt

SEQ ID NO: 4623559 - DNA, 25 bp, Homo sapien
aattattttgctcaaggtgttgcca

SEQ ID NO: 4623560 - DNA, 25 bp, Homo sapien
ccactgagtcaggatctagttctcc

SEQ ID NO: 4623561 - DNA, 25 bp, Homo sapien
gagcatactgtgaacaagtcctcta

SEQ ID NO: 4623562 - DNA, 25 bp, Homo sapien
tccagtgtgagacttagagcatact

SEQ ID NO: 4623563 - DNA, 25 bp, Homo sapien
tctaattgtgcctgagaaaggaact

SEQ ID NO: 4623564 - DNA, 25 bp, Homo sapien
agtttccgctggtgctatgtaaagc

SEQ ID NO: 4623565 - DNA, 25 bp, Homo sapien
ggttttattgtactctgcaatctgc

SEQ ID NO: 4623566 - DNA, 25 bp, Homo sapien
tcttaattggctggtaatcactctc

SEQ ID NO: 4623567 - DNA, 25 bp, Homo sapien
agcatccacgatggttttattgtac

SEQ ID NO: 4623568 - DNA, 25 bp, Homo sapien
aggatacttccttagagactttcag

SEQ ID NO: 4623569 - DNA, 25 bp, Homo sapien
tggtagtcaacttgtaccaagttta

SEQ ID NO: 4623570 - DNA, 25 bp, Homo sapien
acttccttagagactttcagtggac

SEQ ID NO: 4623571 - DNA, 25 bp, Homo sapien
agcaagaggatacttccttagagac

SEQ ID NO: 4623572 - DNA, 25 bp, Homo sapien
tcagcagtcgggtatatccataaag

SEQ ID NO: 4623573 - DNA, 25 bp, Homo sapien
tctgaaaaaggccatagagccaccc

SEQ ID NO: 4623574 - DNA, 25 bp, Homo sapien
tgaatgaacgaagggctgcaaactg

SEQ ID NO: 4623575 - DNA, 25 bp, Homo sapien
gcagtagccatagtccaaaacagcc

SEQ ID NO: 4623576 - DNA, 25 bp, Homo sapien
tcaggaagagccagttcatgcagct

SEQ ID NO: 4623577 - DNA, 25 bp, Homo sapien
gctgtaatcctctaagcaggcactg

SEQ ID NO: 4623578 - DNA, 25 bp, Homo sapien
gactatagtattgtccaaacgaggg

SEQ ID NO: 4623579 - DNA, 25 bp, Homo sapien
gatgcgtatctaaaaagactggtga

SEQ ID NO: 4623580 - DNA, 25 bp, Homo sapien
gcaagttggttggttttcaccaata

SEQ ID NO: 4623581 - DNA, 25 bp, Homo sapien
tatgtttacagaagggcaagttggt

SEQ ID NO: 4623582 - DNA, 25 bp, Homo sapien
tgagaacaagttaagcagtccattt

SEQ ID NO: 4623583 - DNA, 25 bp, Homo sapien
agaacaagttaagcagtccatttct

SEQ ID NO: 4623584 - DNA, 25 bp, Homo sapien
gagaacaagttaagcagtccatttc

SEQ ID NO: 4623585 - DNA, 25 bp, Homo sapien
tactctagcttcaataaggacagac

SEQ ID NO: 4623586 - DNA, 25 bp, Homo sapien
ttaattattgataatcttctgtcct

SEQ ID NO: 4623587 - DNA, 25 bp, Homo sapien
tgtccttcaacctggcttactctag

SEQ ID NO: 4623588 - DNA, 25 bp, Homo sapien
tcaacctggcttactctagcttcaa

SEQ ID NO: 4623589 - DNA, 25 bp, Homo sapien
ccagcccgggcaacaggatgagatc

SEQ ID NO: 4623590 - DNA, 25 bp, Homo sapien
gagatcctatctctaaaaaagtaaa

SEQ ID NO: 4623591 - DNA, 25 bp, Homo sapien
agcccgggcaacaggatgagatcct

SEQ ID NO: 4623592 - DNA, 25 bp, Homo sapien
cccgggcaacaggatgagatcctat

SEQ ID NO: 4623593 - DNA, 25 bp, Homo sapien
tgggtggatgtttcaggtacctttc

SEQ ID NO: 4623594 - DNA, 25 bp, Homo sapien
aatctgggtggatgtttcaggtacc

SEQ ID NO: 4623595 - DNA, 25 bp, Homo sapien
cttagtttccaaaatctgggtggat

SEQ ID NO: 4623596 - DNA, 25 bp, Homo sapien
tccaaaatctgggtggatgtttcag

SEQ ID NO: 4623597 - DNA, 25 bp, Homo sapien
gcatccattcatcagtccgtggaca

SEQ ID NO: 4623598 - DNA, 25 bp, Homo sapien
tatgcaaagatgtcttcgagatcct

SEQ ID NO: 4623599 - DNA, 25 bp, Homo sapien
aagtagaatcctgcaatatttgtct

SEQ ID NO: 4623600 - DNA, 25 bp, Homo sapien
gggttatgagattatacggtaatta

SEQ ID NO: 4623601 - DNA, 25 bp, Homo sapien
gagacacagaaatagaagatgttgt

SEQ ID NO: 4623602 - DNA, 25 bp, Homo sapien
tattcaccgtaggaagagacacaga

SEQ ID NO: 4623603 - DNA, 25 bp, Homo sapien
cattgaaacggcaaggactatatta

SEQ ID NO: 4623604 - DNA, 25 bp, Homo sapien
cagaaatagaagatgttgtctctgc

SEQ ID NO: 4623605 - DNA, 25 bp, Homo sapien
gggtgtcagccacctacagtacagc

SEQ ID NO: 4623606 - DNA, 25 bp, Homo sapien
gatacataaagtgtggcctccagga

SEQ ID NO: 4623607 - DNA, 25 bp, Homo sapien
gcattgctcatgacacaaaggataa

SEQ ID NO: 4623608 - DNA, 25 bp, Homo sapien
aatgctcgaagggatggataccacc

SEQ ID NO: 4623609 - DNA, 25 bp, Homo sapien
cacagaagcaggctgtaacagtctc

SEQ ID NO: 4623610 - DNA, 25 bp, Homo sapien
gcaattcatcaaaacacttatctgt

SEQ ID NO: 4623611 - DNA, 25 bp, Homo sapien
cttaaaggcatttggtatcagcagg

SEQ ID NO: 4623612 - DNA, 25 bp, Homo sapien
tgtttacaagttagaggcaagaagg

SEQ ID NO: 4623613 - DNA, 25 bp, Homo sapien
ccacaaatgtgcatgaggtcccaag

SEQ ID NO: 4623614 - DNA, 25 bp, Homo sapien
ggtttgtgactttccattagcatcg

SEQ ID NO: 4623615 - DNA, 25 bp, Homo sapien
caaggatcctttcaaaaacccagcg

SEQ ID NO: 4623616 - DNA, 25 bp, Homo sapien
aacccagcggtttgtgactttccat

SEQ ID NO: 4623617 - DNA, 25 bp, Homo sapien
actccacagagaactaagctggcta

SEQ ID NO: 4623618 - DNA, 25 bp, Homo sapien
gagaactaagctggctaaagagtcc

SEQ ID NO: 4623619 - DNA, 25 bp, Homo sapien
cacagagaactaagctggctaaaga

SEQ ID NO: 4623620 - DNA, 25 bp, Homo sapien
gaactaagctggctaaagagtccat

SEQ ID NO: 4623621 - DNA, 25 bp, Homo sapien
caaaatcagttcatgccacagagcc

SEQ ID NO: 4623622 - DNA, 25 bp, Homo sapien
tatacactgccttaattgggcccct

SEQ ID NO: 4623623 - DNA, 25 bp, Homo sapien
gacacctgggcttcacatcactata

SEQ ID NO: 4623624 - DNA, 25 bp, Homo sapien
taggaatgcaagctacgatcaagac

SEQ ID NO: 4623625 - DNA, 25 bp, Homo sapien
tagaggaacgggctcctatggctgt

SEQ ID NO: 4623626 - DNA, 25 bp, Homo sapien
caagaaacaacccactggactagag

SEQ ID NO: 4623627 - DNA, 25 bp, Homo sapien
ccctcttatgggtaaacaactctgt

SEQ ID NO: 4623628 - DNA, 25 bp, Homo sapien
taccaggagtttgactagaggaacg

SEQ ID NO: 4623629 - DNA, 25 bp, Homo sapien
tgctcctgcagcctttgggaaggag

SEQ ID NO: 4623630 - DNA, 25 bp, Homo sapien
gcacatccacgtcttcacacctgct

SEQ ID NO: 4623631 - DNA, 25 bp, Homo sapien
ctggcacatccacgtcttcacacct

SEQ ID NO: 4623632 - DNA, 25 bp, Homo sapien
tcaggactctgcatctggcacatcc

SEQ ID NO: 4623633 - DNA, 25 bp, Homo sapien
ttggctagtccaaattttctccctc

SEQ ID NO: 4623634 - DNA, 25 bp, Homo sapien
caatgggtatgtacttcctctaata

SEQ ID NO: 4623635 - DNA, 25 bp, Homo sapien
tagacatgaaaccaccaagcaatgg

SEQ ID NO: 4623636 - DNA, 25 bp, Homo sapien
cactcataccacattagacatgaaa

SEQ ID NO: 4623637 - DNA, 25 bp, Homo sapien
tagagggaaagcacggcagttcttg

SEQ ID NO: 4623638 - DNA, 25 bp, Homo sapien
gagggaaagcacggcagttcttgaa

SEQ ID NO: 4623639 - DNA, 25 bp, Homo sapien
ctagagggaaagcacggcagttctt

SEQ ID NO: 4623640 - DNA, 25 bp, Homo sapien
agagggaaagcacggcagttcttga

SEQ ID NO: 4623641 - DNA, 25 bp, Homo sapien
tgacagatcatcctagagcccgtga

SEQ ID NO: 4623642 - DNA, 25 bp, Homo sapien
caacaagcttagtcacaagtgaggc

SEQ ID NO: 4623643 - DNA, 25 bp, Homo sapien
caccaggatgggtccaaaaatgcaa

SEQ ID NO: 4623644 - DNA, 25 bp, Homo sapien
tcagtcacgacccagaaatgagagg

SEQ ID NO: 4623645 - DNA, 25 bp, Homo sapien
cttcatcctataccctaaaggctct

SEQ ID NO: 4623646 - DNA, 25 bp, Homo sapien
tcttataagtgtctctgtccctgcc

SEQ ID NO: 4623647 - DNA, 25 bp, Homo sapien
ttaatccctgccaccttcttcaatg

SEQ ID NO: 4623648 - DNA, 25 bp, Homo sapien
tgtgtagccgcaaaaaccactgcat

SEQ ID NO: 4623649 - DNA, 25 bp, Homo sapien
tgactatataaacctggtagccagt

SEQ ID NO: 4623650 - DNA, 25 bp, Homo sapien
tagccagtaggtatggcagtatgac

SEQ ID NO: 4623651 - DNA, 25 bp, Homo sapien
acctggtagccagtaggtatggcag

SEQ ID NO: 4623652 - DNA, 25 bp, Homo sapien
agtaggtatggcagtatgacaggcc

SEQ ID NO: 4623653 - DNA, 25 bp, Homo sapien
cagccaaatggcacccttgtctgtc

SEQ ID NO: 4623654 - DNA, 25 bp, Homo sapien
ctcgccaccttcaaacgccggaaat

SEQ ID NO: 4623655 - DNA, 25 bp, Homo sapien
cccaaaggccatgcccgtttcccat

SEQ ID NO: 4623656 - DNA, 25 bp, Homo sapien
ttgtctgtctgctggagggaatgac

SEQ ID NO: 4623657 - DNA, 25 bp, Homo sapien
cgcatcttcatggttcgtatcctga

SEQ ID NO: 4623658 - DNA, 25 bp, Homo sapien
gagtaacttccagcggatcctggtg

SEQ ID NO: 4623659 - DNA, 25 bp, Homo sapien
tcagcatcagatacaagaggtaggg

SEQ ID NO: 4623660 - DNA, 25 bp, Homo sapien
gatcctggtgctggttcattaaggc

SEQ ID NO: 4623661 - DNA, 25 bp, Homo sapien
tgcccaaaacttaggggcatgttac

SEQ ID NO: 4623662 - DNA, 25 bp, Homo sapien
gacaaaaggtgtgtgtgttcctcag

SEQ ID NO: 4623663 - DNA, 25 bp, Homo sapien
cattcaggtagtgcatgccctgccc

SEQ ID NO: 4623664 - DNA, 25 bp, Homo sapien
gatcgtcaagctctacattcaggta

SEQ ID NO: 4623665 - DNA, 25 bp, Homo sapien
taacattccatgtaccagacacggt

SEQ ID NO: 4623666 - DNA, 25 bp, Homo sapien
cctcaacggagagctgcattcctgg

SEQ ID NO: 4623667 - DNA, 25 bp, Homo sapien
tctcttccctcaacggagagctgca

SEQ ID NO: 4623668 - DNA, 25 bp, Homo sapien
ggtgaacattctagttttgctaaga

SEQ ID NO: 4623669 - DNA, 25 bp, Homo sapien
gaatttctgttgtgcacttttccca

SEQ ID NO: 4623670 - DNA, 25 bp, Homo sapien
aaagatatgttcacgttatctccct

SEQ ID NO: 4623671 - DNA, 25 bp, Homo sapien
agatatgttcacgttatctcccttg

SEQ ID NO: 4623672 - DNA, 25 bp, Homo sapien
tgaaagatatgttcacgttatctcc

SEQ ID NO: 4623673 - DNA, 25 bp, Homo sapien
atatgttcacgttatctcccttgtc

SEQ ID NO: 4623674 - DNA, 25 bp, Homo sapien
ggtgtacttctagaatatcaggtac

SEQ ID NO: 4623675 - DNA, 25 bp, Homo sapien
ttcatgccggggcactgaatggatg

SEQ ID NO: 4623676 - DNA, 25 bp, Homo sapien
ggtttcctcctatatacctggccga

SEQ ID NO: 4623677 - DNA, 25 bp, Homo sapien
tggtgaaggccgaggtgaagaggtt

SEQ ID NO: 4623678 - DNA, 25 bp, Homo sapien
caggtatgtctcaataaagagcatg

SEQ ID NO: 4623679 - DNA, 25 bp, Homo sapien
ctgatgtctccccagccatattgaa

SEQ ID NO: 4623680 - DNA, 25 bp, Homo sapien
gatgtctccccagccatattgaact

SEQ ID NO: 4623681 - DNA, 25 bp, Homo sapien
tctcaggtatgtctcaataaagagc

SEQ ID NO: 4623682 - DNA, 25 bp, Homo sapien
agtgtccccgtctggtatggtttgg

SEQ ID NO: 4623683 - DNA, 25 bp, Homo sapien
taagagtccttagtgtccccgtctg

SEQ ID NO: 4623684 - DNA, 25 bp, Homo sapien
gtaagaggtcatttaatcatggagg

SEQ ID NO: 4623685 - DNA, 25 bp, Homo sapien
ctcttgagctcaaagggcctctcaa

SEQ ID NO: 4623686 - DNA, 25 bp, Homo sapien
cagagatggttgcattcaggtcccc

SEQ ID NO: 4623687 - DNA, 25 bp, Homo sapien
agatggttgcattcaggtccccact

SEQ ID NO: 4623688 - DNA, 25 bp, Homo sapien
gagatggttgcattcaggtccccac

SEQ ID NO: 4623689 - DNA, 25 bp, Homo sapien
agagatggttgcattcaggtcccca

SEQ ID NO: 4623690 - DNA, 25 bp, Homo sapien
cataaacccaggagggcaaatgcat

SEQ ID NO: 4623691 - DNA, 25 bp, Homo sapien
tccagtatcttcatggcagacacca

SEQ ID NO: 4623692 - DNA, 25 bp, Homo sapien
ttctcacacgtccttcccataaacc

SEQ ID NO: 4623693 - DNA, 25 bp, Homo sapien
gggcaaatgcattctccagtatctt

SEQ ID NO: 4623694 - DNA, 25 bp, Homo sapien
taagacttgcatccctcttgtccac

SEQ ID NO: 4623695 - DNA, 25 bp, Homo sapien
tggcacaggaacacccataggggtc

SEQ ID NO: 4623696 - DNA, 25 bp, Homo sapien
tcagggagacagaacacataagact

SEQ ID NO: 4623697 - DNA, 25 bp, Homo sapien
tacaagttctgccaaacgtgtgcag

SEQ ID NO: 4623698 - DNA, 25 bp, Homo sapien
tgctagaacatcctctgtccaaggg

SEQ ID NO: 4623699 - DNA, 25 bp, Homo sapien
ctgctagaacatcctctgtccaagg

SEQ ID NO: 4623700 - DNA, 25 bp, Homo sapien
agcagagacatccttggaagcgatc

SEQ ID NO: 4623701 - DNA, 25 bp, Homo sapien
tccttggaagcgatcacacatctcc

SEQ ID NO: 4623702 - DNA, 25 bp, Homo sapien
cacctaagcttacaatctggcccgt

SEQ ID NO: 4623703 - DNA, 25 bp, Homo sapien
taagcttacaatctggcccgtaaaa

SEQ ID NO: 4623704 - DNA, 25 bp, Homo sapien
ggcaaatccactatctttggggtca

SEQ ID NO: 4623705 - DNA, 25 bp, Homo sapien
taggtagcggccagccagaagcttt

SEQ ID NO: 4623706 - DNA, 25 bp, Homo sapien
gcaaatgggattaaatttaccactg

SEQ ID NO: 4623707 - DNA, 25 bp, Homo sapien
taccactgtttacttctatatgatc

SEQ ID NO: 4623708 - DNA, 25 bp, Homo sapien
ccggtggatggtgaatatggctact

SEQ ID NO: 4623709 - DNA, 25 bp, Homo sapien
tatggctactgagaaatgatccgta

SEQ ID NO: 4623710 - DNA, 25 bp, Homo sapien
tgatccgtatggttaaagtcttttg

SEQ ID NO: 4623711 - DNA, 25 bp, Homo sapien
atccggtggatggtgaatatggcta

SEQ ID NO: 4623712 - DNA, 25 bp, Homo sapien
acatgtccaacaaagtcctcttaaa

SEQ ID NO: 4623713 - DNA, 25 bp, Homo sapien
atgtccaacaaagtcctcttaaagt

SEQ ID NO: 4623714 - DNA, 25 bp, Homo sapien
catgtccaacaaagtcctcttaaag

SEQ ID NO: 4623715 - DNA, 25 bp, Homo sapien
cagattagtccttcggctttgaggt

SEQ ID NO: 4623716 - DNA, 25 bp, Homo sapien
tccttcggctttgaggttttgtgat

SEQ ID NO: 4623717 - DNA, 25 bp, Homo sapien
tttcagaaggcagattagtccttcg

SEQ ID NO: 4623718 - DNA, 25 bp, Homo sapien
aaggcagattagtccttcggctttg

SEQ ID NO: 4623719 - DNA, 25 bp, Homo sapien
tatgtccagtgtcaatcacgtttgg

SEQ ID NO: 4623720 - DNA, 25 bp, Homo sapien
tgttgatgacagcaaagttatgtcc

SEQ ID NO: 4623721 - DNA, 25 bp, Homo sapien
gaatatgttgccaagcctcatagtg

SEQ ID NO: 4623722 - DNA, 25 bp, Homo sapien
tggtccatccccaaagtaaggctca

SEQ ID NO: 4623723 - DNA, 25 bp, Homo sapien
cgatagaagctgttgtgaagcgtct

SEQ ID NO: 4623724 - DNA, 25 bp, Homo sapien
tattctgtccgaggttccaaatagt

SEQ ID NO: 4623725 - DNA, 25 bp, Homo sapien
cagttgcacacagagttcatattct

SEQ ID NO: 4623726 - DNA, 25 bp, Homo sapien
tgaagcgtctcacaggtccaggatg

SEQ ID NO: 4623727 - DNA, 25 bp, Homo sapien
taagtagcaccgaagtcaagttgcc

SEQ ID NO: 4623728 - DNA, 25 bp, Homo sapien
tccgagcttggaaatattggttgcc

SEQ ID NO: 4623729 - DNA, 25 bp, Homo sapien
tgttgactctagctcggaccacgta

SEQ ID NO: 4623730 - DNA, 25 bp, Homo sapien
gaccacgtactgctccctgggatgt

SEQ ID NO: 4623731 - DNA, 25 bp, Homo sapien
cttccaggatcaatgagatccagtg

SEQ ID NO: 4623732 - DNA, 25 bp, Homo sapien
tagcttccaggatcaatgagatcca

SEQ ID NO: 4623733 - DNA, 25 bp, Homo sapien
gatcaatgagatccagtgtgttcag

SEQ ID NO: 4623734 - DNA, 25 bp, Homo sapien
caggatcaatgagatccagtgtgtt

SEQ ID NO: 4623735 - DNA, 25 bp, Homo sapien
cacatcaacgtgctggtcttcattc

SEQ ID NO: 4623736 - DNA, 25 bp, Homo sapien
aggcccttgagctgatactgagtga

SEQ ID NO: 4623737 - DNA, 25 bp, Homo sapien
gcttgaccctatgttgttctctgca

SEQ ID NO: 4623738 - DNA, 25 bp, Homo sapien
aatgtccacctggtatgctgtttca

SEQ ID NO: 4623739 - DNA, 25 bp, Homo sapien
caatatgatcagaaaggccaacagc

SEQ ID NO: 4623740 - DNA, 25 bp, Homo sapien
gcacatttgccctcttcaattgcaa

SEQ ID NO: 4623741 - DNA, 25 bp, Homo sapien
ggatggctataagcagcatcttccc

SEQ ID NO: 4623742 - DNA, 25 bp, Homo sapien
agcacagtcaggcaggtcattccag

SEQ ID NO: 4623743 - DNA, 25 bp, Homo sapien
tagagccaaacccaacacagtatct

SEQ ID NO: 4623744 - DNA, 25 bp, Homo sapien
ctctcgtagtaaggcttagaatctc

SEQ ID NO: 4623745 - DNA, 25 bp, Homo sapien
tggccacaagatgattgaagcttag

SEQ ID NO: 4623746 - DNA, 25 bp, Homo sapien
tagaatctctaagtccactctggcc

SEQ ID NO: 4623747 - DNA, 25 bp, Homo sapien
cttgatgcgcgccttaagaacttgg

SEQ ID NO: 4623748 - DNA, 25 bp, Homo sapien
caagcactggataaattgtaggatc

SEQ ID NO: 4623749 - DNA, 25 bp, Homo sapien
gatggcagcatccatccgtaaccca

SEQ ID NO: 4623750 - DNA, 25 bp, Homo sapien
cctgtttagggccagagtccctgag

SEQ ID NO: 4623751 - DNA, 25 bp, Homo sapien
gatggtgtccaagtttacaaagaac

SEQ ID NO: 4623752 - DNA, 25 bp, Homo sapien
cacatgctcctaagagattgatgat

SEQ ID NO: 4623753 - DNA, 25 bp, Homo sapien
gatgtttggatggtgtccaagttta

SEQ ID NO: 4623754 - DNA, 25 bp, Homo sapien
gctcctaagagattgatgatgtttg

SEQ ID NO: 4623755 - DNA, 25 bp, Homo sapien
cagaaaactggtttagtctgtccac

SEQ ID NO: 4623756 - DNA, 25 bp, Homo sapien
aactggtttagtctgtccaccacgg

SEQ ID NO: 4623757 - DNA, 25 bp, Homo sapien
tccaccacggccacttggcttcctg

SEQ ID NO: 4623758 - DNA, 25 bp, Homo sapien
accacggccacttggcttcctgtca

SEQ ID NO: 4623759 - DNA, 25 bp, Homo sapien
ggcgcgtactcaatggccaggtaca

SEQ ID NO: 4623760 - DNA, 25 bp, Homo sapien
gacgcggtgctattggcaatggcaa

SEQ ID NO: 4623761 - DNA, 25 bp, Homo sapien
cacacggctcttgcgaaggaagtcc

SEQ ID NO: 4623762 - DNA, 25 bp, Homo sapien
ttggctcaagtagtccatgccccgg

SEQ ID NO: 4623763 - DNA, 25 bp, Homo sapien
caggaaagatatccaaagcgaagtc

SEQ ID NO: 4623764 - DNA, 25 bp, Homo sapien
tccaaagcgaagtcctccggacaaa

SEQ ID NO: 4623765 - DNA, 25 bp, Homo sapien
gggaactccacaggaaagatatcca

SEQ ID NO: 4623766 - DNA, 25 bp, Homo sapien
gatatccaaagcgaagtcctccgga

SEQ ID NO: 4623767 - DNA, 25 bp, Homo sapien
tcttgacctcgggacaatccaaaat

SEQ ID NO: 4623768 - DNA, 25 bp, Homo sapien
gacctcgggacaatccaaaatctgc

SEQ ID NO: 4623769 - DNA, 25 bp, Homo sapien
tacacctcttgacctcgggacaatc

SEQ ID NO: 4623770 - DNA, 25 bp, Homo sapien
ttcacatacacctcttgacctcggg

SEQ ID NO: 4623771 - DNA, 25 bp, Homo sapien
tcactgttggttgtgtacacactgt

SEQ ID NO: 4623772 - DNA, 25 bp, Homo sapien
ggccatccagcgcactgggagcctt

SEQ ID NO: 4623773 - DNA, 25 bp, Homo sapien
taattcagtgactcgatggccatcc

SEQ ID NO: 4623774 - DNA, 25 bp, Homo sapien
ctgtaattcagtgactcgatggcca

SEQ ID NO: 4623775 - DNA, 25 bp, Homo sapien
ctaagctaacaatctcccatagtaa

SEQ ID NO: 4623776 - DNA, 25 bp, Homo sapien
caatctcccatagtaacacaccata

SEQ ID NO: 4623777 - DNA, 25 bp, Homo sapien
taacaatctcccatagtaacacacc

SEQ ID NO: 4623778 - DNA, 25 bp, Homo sapien
agctaacaatctcccatagtaacac

SEQ ID NO: 4623779 - DNA, 25 bp, Homo sapien
tagagttctgcacaagtcatcccgc

SEQ ID NO: 4623780 - DNA, 25 bp, Homo sapien
cttctcgtagagttctgcacaagtc

SEQ ID NO: 4623781 - DNA, 25 bp, Homo sapien
tctccagtctgtagccctggggcag

SEQ ID NO: 4623782 - DNA, 25 bp, Homo sapien
gtcatcccgcagtagggtgtgcctc

SEQ ID NO: 4623783 - DNA, 25 bp, Homo sapien
gccagttagcttctaccacggatag

SEQ ID NO: 4623784 - DNA, 25 bp, Homo sapien
tcttagcagaagcaaggttctaggc

SEQ ID NO: 4623785 - DNA, 25 bp, Homo sapien
ttctgggaatgctggtatcactaca

SEQ ID NO: 4623786 - DNA, 25 bp, Homo sapien
tagtgatggtcaactatgtccaggt

SEQ ID NO: 4623787 - DNA, 25 bp, Homo sapien
agggttaattctataactgtgcttc

SEQ ID NO: 4623788 - DNA, 25 bp, Homo sapien
ttaattctataactgtgcttcagtc

SEQ ID NO: 4623789 - DNA, 25 bp, Homo sapien
gggttaattctataactgtgcttca

SEQ ID NO: 4623790 - DNA, 25 bp, Homo sapien
taaagggttaattctataactgtgc

SEQ ID NO: 4623791 - DNA, 25 bp, Homo sapien
cgctcctctaacattctgtttaagg

SEQ ID NO: 4623792 - DNA, 25 bp, Homo sapien
ggacaccaatatctgggcaaatgat

SEQ ID NO: 4623793 - DNA, 25 bp, Homo sapien
ctcccgccagcattgtctcattaga

SEQ ID NO: 4623794 - DNA, 25 bp, Homo sapien
tgtttaaggacaccaatatctgggc

SEQ ID NO: 4623795 - DNA, 25 bp, Homo sapien
gcataagtaaacttctcataaagcg

SEQ ID NO: 4623796 - DNA, 25 bp, Homo sapien
cataaagcgtggtattcacgtaggt

SEQ ID NO: 4623797 - DNA, 25 bp, Homo sapien
gcagaacagtcaattcctgcataag

SEQ ID NO: 4623798 - DNA, 25 bp, Homo sapien
gcttcttcagcagaacagtcaattc

SEQ ID NO: 4623799 - DNA, 25 bp, Homo sapien
tatgtacacttatatatcacatcct

SEQ ID NO: 4623800 - DNA, 25 bp, Homo sapien
aaagggaaacagagggtatacagat

SEQ ID NO: 4623801 - DNA, 25 bp, Homo sapien
caggtgtcaagggtctcccatgcca

SEQ ID NO: 4623802 - DNA, 25 bp, Homo sapien
cctttggcagaggcatgttttctca

SEQ ID NO: 4623803 - DNA, 25 bp, Homo sapien
catgcatgggatctacagtggtgaa

SEQ ID NO: 4623804 - DNA, 25 bp, Homo sapien
catactacatagatccatgcatggg

SEQ ID NO: 4623805 - DNA, 25 bp, Homo sapien
cagtcctattagagtcagagcatac

SEQ ID NO: 4623806 - DNA, 25 bp, Homo sapien
tatctaggacaacaatgagttatgc

SEQ ID NO: 4623807 - DNA, 25 bp, Homo sapien
tgacttgcaggctgtggaaacacaa

SEQ ID NO: 4623808 - DNA, 25 bp, Homo sapien
caaagtgtgcctacagtatacaagg

SEQ ID NO: 4623809 - DNA, 25 bp, Homo sapien
catgatatatcagtgcaaagtgtgc

SEQ ID NO: 4623810 - DNA, 25 bp, Homo sapien
taaatgaaacgggactggctgctac

SEQ ID NO: 4623811 - DNA, 25 bp, Homo sapien
taatgctagccctcctcaagaggcc

SEQ ID NO: 4623812 - DNA, 25 bp, Homo sapien
gtttgtgcagcatgtagaactacaa

SEQ ID NO: 4623813 - DNA, 25 bp, Homo sapien
tagttaagtgttatgtgagcagcct

SEQ ID NO: 4623814 - DNA, 25 bp, Homo sapien
catgctagaccgatatttcagtggc

SEQ ID NO: 4623815 - DNA, 25 bp, Homo sapien
tgtctccctctcgttggacacaagc

SEQ ID NO: 4623816 - DNA, 25 bp, Homo sapien
actctttcggattgtctccctctcg

SEQ ID NO: 4623817 - DNA, 25 bp, Homo sapien
cactgggcactctttcggattgtct

SEQ ID NO: 4623818 - DNA, 25 bp, Homo sapien
acccttttggcactgggcactcttt

SEQ ID NO: 4623819 - DNA, 25 bp, Homo sapien
caactctgcttccacagaaacttat

SEQ ID NO: 4623820 - DNA, 25 bp, Homo sapien
tcaactctgcttccacagaaactta

SEQ ID NO: 4623821 - DNA, 25 bp, Homo sapien
tgagcttgggtattcaaatgtcaca

SEQ ID NO: 4623822 - DNA, 25 bp, Homo sapien
tttaggaaatcagttatatgtgagc

SEQ ID NO: 4623823 - DNA, 25 bp, Homo sapien
ggttccatttatgattgtattaagc

SEQ ID NO: 4623824 - DNA, 25 bp, Homo sapien
ttgtattaagcatttgactataagg

SEQ ID NO: 4623825 - DNA, 25 bp, Homo sapien
tgtcccttccatactccatgagtac

SEQ ID NO: 4623826 - DNA, 25 bp, Homo sapien
cccttccatactccatgagtaccac

SEQ ID NO: 4623827 - DNA, 25 bp, Homo sapien
ccttccatactccatgagtaccaca

SEQ ID NO: 4623828 - DNA, 25 bp, Homo sapien
ttatgtcccttccatactccatgag

SEQ ID NO: 4623829 - DNA, 25 bp, Homo sapien
tcccaaagctctccacatcactctc

SEQ ID NO: 4623830 - DNA, 25 bp, Homo sapien
tcaacgtgaaaccttcccaaagctc

SEQ ID NO: 4623831 - DNA, 25 bp, Homo sapien
aagctctccacatcactctctgtta

SEQ ID NO: 4623832 - DNA, 25 bp, Homo sapien
ccaaagctctccacatcactctctg

SEQ ID NO: 4623833 - DNA, 25 bp, Homo sapien
gaattccattcaactcgagctgaag

SEQ ID NO: 4623834 - DNA, 25 bp, Homo sapien
tactcctctcacagttcttcgggca

SEQ ID NO: 4623835 - DNA, 25 bp, Homo sapien
tcttcgggcatggaaattctatagc

SEQ ID NO: 4623836 - DNA, 25 bp, Homo sapien
cagagtctcagagccaggttaagtg

SEQ ID NO: 4623837 - DNA, 25 bp, Homo sapien
ggccagagcttgaataacagctggg

SEQ ID NO: 4623838 - DNA, 25 bp, Homo sapien
gatggatggcccaatgtaaaggagc

SEQ ID NO: 4623839 - DNA, 25 bp, Homo sapien
cttgaataacagctgggatggatgg

SEQ ID NO: 4623840 - DNA, 25 bp, Homo sapien
gctgggatggatggcccaatgtaaa

SEQ ID NO: 4623841 - DNA, 25 bp, Homo sapien
tgctggaattgttctggaagaattg

SEQ ID NO: 4623842 - DNA, 25 bp, Homo sapien
ctggaagaattgttctggaagaatg

SEQ ID NO: 4623843 - DNA, 25 bp, Homo sapien
ctgtggaagaatgagttctgctgga

SEQ ID NO: 4623844 - DNA, 25 bp, Homo sapien
tggaagaatgagttctgctggaatt

SEQ ID NO: 4623845 - DNA, 25 bp, Homo sapien
taaagcacgttcacctccactgttt

SEQ ID NO: 4623846 - DNA, 25 bp, Homo sapien
cagtcctaaagcacgttcacctcca

SEQ ID NO: 4623847 - DNA, 25 bp, Homo sapien
gacagagatgcttccgtctgacacc

SEQ ID NO: 4623848 - DNA, 25 bp, Homo sapien
agagatgcttccgtctgacacccag

SEQ ID NO: 4623849 - DNA, 25 bp, Homo sapien
ttggctaccgctttctgtccagttc

SEQ ID NO: 4623850 - DNA, 25 bp, Homo sapien
caggatatttggctaccgctttctg

SEQ ID NO: 4623851 - DNA, 25 bp, Homo sapien
ggcatgtgtgattacctcttgaaga

SEQ ID NO: 4623852 - DNA, 25 bp, Homo sapien
cttgaaggaggcttgacgacaggat

SEQ ID NO: 4623853 - DNA, 25 bp, Homo sapien
ggcttggggataaccgattggcaaa

SEQ ID NO: 4623854 - DNA, 25 bp, Homo sapien
agtcaaataatgattctggtgtgtg

SEQ ID NO: 4623855 - DNA, 25 bp, Homo sapien
taaccgattggcaaacttgccagag

SEQ ID NO: 4623856 - DNA, 25 bp, Homo sapien
gtcaaataatgattctggtgtgtgt

SEQ ID NO: 4623857 - DNA, 25 bp, Homo sapien
tggtgtttggccttgcacaagtcat

SEQ ID NO: 4623858 - DNA, 25 bp, Homo sapien
caagtcattaaatgtctgtcctcct

SEQ ID NO: 4623859 - DNA, 25 bp, Homo sapien
caggagattgtattctagtttgtcc

SEQ ID NO: 4623860 - DNA, 25 bp, Homo sapien
tagtttgtccttgatttggtgtttg

SEQ ID NO: 4623861 - DNA, 25 bp, Homo sapien
gaacagcgctatccttcttcctgca

SEQ ID NO: 4623862 - DNA, 25 bp, Homo sapien
gagaatctctgcacctccgtataga

SEQ ID NO: 4623863 - DNA, 25 bp, Homo sapien
tcttaggcctgccacatgacttgga

SEQ ID NO: 4623864 - DNA, 25 bp, Homo sapien
tatgaggcatttctcttgaacagcg

SEQ ID NO: 4623865 - DNA, 25 bp, Homo sapien
ttagttcttgctctgagctacaaaa

SEQ ID NO: 4623866 - DNA, 25 bp, Homo sapien
tctgagctacaaaatcctccagagc

SEQ ID NO: 4623867 - DNA, 25 bp, Homo sapien
gctacaaaatcctccagagcaaatg

SEQ ID NO: 4623868 - DNA, 25 bp, Homo sapien
ttcttgctctgagctacaaaatcct

SEQ ID NO: 4623869 - DNA, 25 bp, Homo sapien
tgctcttgggtgccatattctatca

SEQ ID NO: 4623870 - DNA, 25 bp, Homo sapien
catattctatcactgtaaagcccct

SEQ ID NO: 4623871 - DNA, 25 bp, Homo sapien
ttccctggcccggttccattgctgg

SEQ ID NO: 4623872 - DNA, 25 bp, Homo sapien
gcccctgttgccttccgtagcttga

SEQ ID NO: 4623873 - DNA, 25 bp, Homo sapien
ttcggtccatgactagtctcccttt

SEQ ID NO: 4623874 - DNA, 25 bp, Homo sapien
tgactagtctcccttttaacctgct

SEQ ID NO: 4623875 - DNA, 25 bp, Homo sapien
ttttttcggtccatgactagtctcc

SEQ ID NO: 4623876 - DNA, 25 bp, Homo sapien
ggtccatgactagtctcccttttaa

SEQ ID NO: 4623877 - DNA, 25 bp, Homo sapien
caagttgtactaagtgtacaccaag

SEQ ID NO: 4623878 - DNA, 25 bp, Homo sapien
agtgtacaccaagttgtactaaggg

SEQ ID NO: 4623879 - DNA, 25 bp, Homo sapien
tgtactaagtgtacaccaagttgta

SEQ ID NO: 4623880 - DNA, 25 bp, Homo sapien
ttagtacaccaagttgtactaagtg

SEQ ID NO: 4623881 - DNA, 25 bp, Homo sapien
gccatgtagcgttctttctggctct

SEQ ID NO: 4623882 - DNA, 25 bp, Homo sapien
tggacccataagtaaagcctcagct

SEQ ID NO: 4623883 - DNA, 25 bp, Homo sapien
tccatgtggacccataagtaaagcc

SEQ ID NO: 4623884 - DNA, 25 bp, Homo sapien
ttgccatgtagcgttctttctggct

SEQ ID NO: 4623885 - DNA, 25 bp, Homo sapien
taaggatcagggtataagtaaggtg

SEQ ID NO: 4623886 - DNA, 25 bp, Homo sapien
ctttaaggatcagggtataagtaag

SEQ ID NO: 4623887 - DNA, 25 bp, Homo sapien
ggtgagagtagcttagtttagccat

SEQ ID NO: 4623888 - DNA, 25 bp, Homo sapien
taagtaaggtgagagtagcttagtt

SEQ ID NO: 4623889 - DNA, 25 bp, Homo sapien
gccctttgtagagtctgcgcaccca

SEQ ID NO: 4623890 - DNA, 25 bp, Homo sapien
ccatcagcatttgccctttgtagag

SEQ ID NO: 4623891 - DNA, 25 bp, Homo sapien
tatcccattaagctcaccatcagca

SEQ ID NO: 4623892 - DNA, 25 bp, Homo sapien
taagctcaccatcagcatttgccct

SEQ ID NO: 4623893 - DNA, 25 bp, Homo sapien
gctcggtggccagtacaaattgcat

SEQ ID NO: 4623894 - DNA, 25 bp, Homo sapien
tctggtatattctttgctcggtggc

SEQ ID NO: 4623895 - DNA, 25 bp, Homo sapien
tgagttgattggcagattggctttc

SEQ ID NO: 4623896 - DNA, 25 bp, Homo sapien
gttgattggcagattggctttccag

SEQ ID NO: 4623897 - DNA, 25 bp, Homo sapien
atacattgtttggaaataccttggg

SEQ ID NO: 4623898 - DNA, 25 bp, Homo sapien
aatacattgtttggaaataccttgg

SEQ ID NO: 4623899 - DNA, 25 bp, Homo sapien
ttgattgatgaaaagatggtagaat

SEQ ID NO: 4623900 - DNA, 25 bp, Homo sapien
gaaaagatggtagaatgtaagcttg

SEQ ID NO: 4623901 - DNA, 25 bp, Homo sapien
tttgtgggagtcagaaatgaatcaa

SEQ ID NO: 4623902 - DNA, 25 bp, Homo sapien
caagatgaggtagcttcctttgctc

SEQ ID NO: 4623903 - DNA, 25 bp, Homo sapien
aatgaatcaaagaccatgagaggct

SEQ ID NO: 4623904 - DNA, 25 bp, Homo sapien
gagaggctgccggagagcaccatcc

SEQ ID NO: 4623905 - DNA, 25 bp, Homo sapien
gtgaaaggctcagagtccgcactcc

SEQ ID NO: 4623906 - DNA, 25 bp, Homo sapien
aaaggctcagagtccgcactcctac

SEQ ID NO: 4623907 - DNA, 25 bp, Homo sapien
cgttggctgcagtagtgggtgaaag

SEQ ID NO: 4623908 - DNA, 25 bp, Homo sapien
taagtaaaattggttctgcgttggc

SEQ ID NO: 4623909 - DNA, 25 bp, Homo sapien
tgtcctttttgtgggattggactcc

SEQ ID NO: 4623910 - DNA, 25 bp, Homo sapien
aaatatggtaattaagtcactaggc

SEQ ID NO: 4623911 - DNA, 25 bp, Homo sapien
tatccaagaagattcatctgtctcc

SEQ ID NO: 4623912 - DNA, 25 bp, Homo sapien
tttttcgtggctctcctttcaaata

SEQ ID NO: 4623913 - DNA, 25 bp, Homo sapien
acatccccagtcacctgactccaca

SEQ ID NO: 4623914 - DNA, 25 bp, Homo sapien
atttcagaatcccagaagttcccag

SEQ ID NO: 4623915 - DNA, 25 bp, Homo sapien
taccaccaattcagcagtagcagtt

SEQ ID NO: 4623916 - DNA, 25 bp, Homo sapien
gttctgaagcctgtcacaatctcag

SEQ ID NO: 4623917 - DNA, 25 bp, Homo sapien
gtagcagttctgaagcctgtcacaa

SEQ ID NO: 4623918 - DNA, 25 bp, Homo sapien
cctaccaccaattcagcagtagcag

SEQ ID NO: 4623919 - DNA, 25 bp, Homo sapien
cacagatgggtgcctctttgttctg

SEQ ID NO: 4623920 - DNA, 25 bp, Homo sapien
aaagacacagatgggtgcctctttg

SEQ ID NO: 4623921 - DNA, 25 bp, Homo sapien
agacacagatgggtgcctctttgtt

SEQ ID NO: 4623922 - DNA, 25 bp, Homo sapien
gacacagatgggtgcctctttgttc

SEQ ID NO: 4623923 - DNA, 25 bp, Homo sapien
aataaatggaagtttgtttattcat

SEQ ID NO: 4623924 - DNA, 25 bp, Homo sapien
ctgttgacaaaacaataaatggaag

SEQ ID NO: 4623925 - DNA, 25 bp, Homo sapien
tgacaaaacaataaatggaagtttg

SEQ ID NO: 4623926 - DNA, 25 bp, Homo sapien
caataaatggaagtttgtttattca

SEQ ID NO: 4623927 - DNA, 25 bp, Homo sapien
ttttttctcgaacatacccacactc

SEQ ID NO: 4623928 - DNA, 25 bp, Homo sapien
ttttctcgaacatacccacactcaa

SEQ ID NO: 4623929 - DNA, 25 bp, Homo sapien
ctgtcaaggcgattgtattcaaaac

SEQ ID NO: 4623930 - DNA, 25 bp, Homo sapien
agacctggtcattgtcaccatctgt

SEQ ID NO: 4623931 - DNA, 25 bp, Homo sapien
taaccactgtgttgttgctagtgct

SEQ ID NO: 4623932 - DNA, 25 bp, Homo sapien
cactggagacctcctaggtgctggg

SEQ ID NO: 4623933 - DNA, 25 bp, Homo sapien
ggtgctgggctatacaagtcagtcc

SEQ ID NO: 4623934 - DNA, 25 bp, Homo sapien
aacctttctgcttgaggccgcaata

SEQ ID NO: 4623935 - DNA, 25 bp, Homo sapien
tgagcacctttaggacaagaactgt

SEQ ID NO: 4623936 - DNA, 25 bp, Homo sapien
cgcctgatacgtggtaggtcctcta

SEQ ID NO: 4623937 - DNA, 25 bp, Homo sapien
tacagagagctcgaacaagaggccc

SEQ ID NO: 4623938 - DNA, 25 bp, Homo sapien
gcatgagccttagttcacccatctg

SEQ ID NO: 4623939 - DNA, 25 bp, Homo sapien
tacatgtgacgtcccactttgcaac

SEQ ID NO: 4623940 - DNA, 25 bp, Homo sapien
ccaatcgaataacctgagagtctga

SEQ ID NO: 4623941 - DNA, 25 bp, Homo sapien
gccctgaactgaccaatcgaataac

SEQ ID NO: 4623942 - DNA, 25 bp, Homo sapien
tttagaagttgacattatactgtcc

SEQ ID NO: 4623943 - DNA, 25 bp, Homo sapien
ggctacacgcaccacggcgtttctg

SEQ ID NO: 4623944 - DNA, 25 bp, Homo sapien
cgcaccacggcgtttctgtgggctg

SEQ ID NO: 4623945 - DNA, 25 bp, Homo sapien
gtgagaacaccatagaggctacacg

SEQ ID NO: 4623946 - DNA, 25 bp, Homo sapien
atagaggctacacgcaccacggcgt

SEQ ID NO: 4623947 - DNA, 25 bp, Homo sapien
gagctacagaaaagagttcagctgc

SEQ ID NO: 4623948 - DNA, 25 bp, Homo sapien
tgctgtctccttgccaacaggcatg

SEQ ID NO: 4623949 - DNA, 25 bp, Homo sapien
tgggatagcatttcttcatcatggc

SEQ ID NO: 4623950 - DNA, 25 bp, Homo sapien
aacttccctctgtgtaggctgctgt

SEQ ID NO: 4623951 - DNA, 25 bp, Homo sapien
tcctgagcgaagaccctagtaactt

SEQ ID NO: 4623952 - DNA, 25 bp, Homo sapien
gttctgggaggaatttctcctgtgg

SEQ ID NO: 4623953 - DNA, 25 bp, Homo sapien
tacaggagttaccactagcacatgc

SEQ ID NO: 4623954 - DNA, 25 bp, Homo sapien
gagcaccgtgagatgtcctgagcga

SEQ ID NO: 4623955 - DNA, 25 bp, Homo sapien
tagcctggcagaggattcacatgct

SEQ ID NO: 4623956 - DNA, 25 bp, Homo sapien
taggaataatcttctagagcaaggg

SEQ ID NO: 4623957 - DNA, 25 bp, Homo sapien
tttcctagatcacatccaagagtgg

SEQ ID NO: 4623958 - DNA, 25 bp, Homo sapien
taagttggccttacttagcctggca

SEQ ID NO: 4623959 - DNA, 25 bp, Homo sapien
aaggaggaataagttgtagtgcatg

SEQ ID NO: 4623960 - DNA, 25 bp, Homo sapien
agttgtagtgcatgatctcgaggag

SEQ ID NO: 4623961 - DNA, 25 bp, Homo sapien
gacatttccgtcactggcctaggtc

SEQ ID NO: 4623962 - DNA, 25 bp, Homo sapien
cactggcctaggtcctgaagaagga

SEQ ID NO: 4623963 - DNA, 25 bp, Homo sapien
ttttttgcaagctaaaaaatccaga

SEQ ID NO: 4623964 - DNA, 25 bp, Homo sapien
tgcaagctaaaaaatccagaagatg

SEQ ID NO: 4623965 - DNA, 25 bp, Homo sapien
caagctaaaaaatccagaagatgtg

SEQ ID NO: 4623966 - DNA, 25 bp, Homo sapien
tttgcaagctaaaaaatccagaaga

SEQ ID NO: 4623967 - DNA, 25 bp, Homo sapien
tcagtaagttacagtccagggatag

SEQ ID NO: 4623968 - DNA, 25 bp, Homo sapien
gaaatatctcctcagttccaggctg

SEQ ID NO: 4623969 - DNA, 25 bp, Homo sapien
gactcttctcaggtgaacgttcagt

SEQ ID NO: 4623970 - DNA, 25 bp, Homo sapien
tatacccataaggatctcaagccac

SEQ ID NO: 4623971 - DNA, 25 bp, Homo sapien
tgggccctgcgcttggaataatctt

SEQ ID NO: 4623972 - DNA, 25 bp, Homo sapien
tgcatttgcgtagccacaatctctg

SEQ ID NO: 4623973 - DNA, 25 bp, Homo sapien
ccaagggcagaaccaggtacatttc

SEQ ID NO: 4623974 - DNA, 25 bp, Homo sapien
ttttaatctggaacaactctgctga

SEQ ID NO: 4623975 - DNA, 25 bp, Homo sapien
tctacgcagccgactgagatcgtgg

SEQ ID NO: 4623976 - DNA, 25 bp, Homo sapien
tttcgagacagtggaagcgcgttcc

SEQ ID NO: 4623977 - DNA, 25 bp, Homo sapien
caaaggctcaaatccgagaaggtgc

SEQ ID NO: 4623978 - DNA, 25 bp, Homo sapien
caatccagagcgtccagtggttggt

SEQ ID NO: 4623979 - DNA, 25 bp, Homo sapien
tgcgtggattggcaagcgacgcccc

SEQ ID NO: 4623980 - DNA, 25 bp, Homo sapien
cctgggcgcgggtgcaagaaggtgc

SEQ ID NO: 4623981 - DNA, 25 bp, Homo sapien
caccggcggcagagtcccttgcgtg

SEQ ID NO: 4623982 - DNA, 25 bp, Homo sapien
accattttctttcgcgctggctgca

SEQ ID NO: 4623983 - DNA, 25 bp, Homo sapien
tatgctccgctctgtgtcaggcagt

SEQ ID NO: 4623984 - DNA, 25 bp, Homo sapien
gaccaagaccacacaagtagagagt

SEQ ID NO: 4623985 - DNA, 25 bp, Homo sapien
cacttcgtagttagttgcagaaacc

SEQ ID NO: 4623986 - DNA, 25 bp, Homo sapien
caagggtgatattgctccccgccaa

SEQ ID NO: 4623987 - DNA, 25 bp, Homo sapien
gagataacatcttaagggacactga

SEQ ID NO: 4623988 - DNA, 25 bp, Homo sapien
gaacagaaatattgcttagcggctg

SEQ ID NO: 4623989 - DNA, 25 bp, Homo sapien
cagagcaatatgactgtaggtccaa

SEQ ID NO: 4623990 - DNA, 25 bp, Homo sapien
gaaacaatgataggtggtgaccctg

SEQ ID NO: 4623991 - DNA, 25 bp, Homo sapien
gaagtgctgttttcctaggtgctac

SEQ ID NO: 4623992 - DNA, 25 bp, Homo sapien
gtcttaccatgtacctgctttggca

SEQ ID NO: 4623993 - DNA, 25 bp, Homo sapien
aaattgaaatgtgcacctcctgtgc

SEQ ID NO: 4623994 - DNA, 25 bp, Homo sapien
tgttttagacaaccactgaactaga

SEQ ID NO: 4623995 - DNA, 25 bp, Homo sapien
tggaagacctttctacactagtgtg

SEQ ID NO: 4623996 - DNA, 25 bp, Homo sapien
tatgcttttgggatacagacctatg

SEQ ID NO: 4623997 - DNA, 25 bp, Homo sapien
tcatgatcgctggtaaagtagctca

SEQ ID NO: 4623998 - DNA, 25 bp, Homo sapien
ttcggaacctgaagatagaccttga

SEQ ID NO: 4623999 - DNA, 25 bp, Homo sapien
gaagttgccaccactctaggttgaa

SEQ ID NO: 4624000 - DNA, 25 bp, Homo sapien
caacgaatttcatgtgtagacccac

SEQ ID NO: 4624001 - DNA, 25 bp, Homo sapien
tctgtgatctccaaagccttaggtt

SEQ ID NO: 4624002 - DNA, 25 bp, Homo sapien
gactgccgagctgctttatgaaggg

SEQ ID NO: 4624003 - DNA, 25 bp, Homo sapien
gagactcttacgaggagttggccag

SEQ ID NO: 4624004 - DNA, 25 bp, Homo sapien
ttataaaactgtgtctttgccattg

SEQ ID NO: 4624005 - DNA, 25 bp, Homo sapien
ttctgtgaccaggagactcttacga

SEQ ID NO: 4624006 - DNA, 25 bp, Homo sapien
aactgtgtctttgccattgtaatca

SEQ ID NO: 4624007 - DNA, 25 bp, Homo sapien
agacctttggttgcccgtgtccgca

SEQ ID NO: 4624008 - DNA, 25 bp, Homo sapien
cgtttgccacgtgcggattcgggtt

SEQ ID NO: 4624009 - DNA, 25 bp, Homo sapien
tttattgtggcaaccgccggagcag

SEQ ID NO: 4624010 - DNA, 25 bp, Homo sapien
gattcgggttccagactgaaggctg

SEQ ID NO: 4624011 - DNA, 25 bp, Homo sapien
gaatgatgtctctgtacactcccat

SEQ ID NO: 4624012 - DNA, 25 bp, Homo sapien
tcccacaaagaatgatgtctctgta

SEQ ID NO: 4624013 - DNA, 25 bp, Homo sapien
acaaagaatgatgtctctgtacact

SEQ ID NO: 4624014 - DNA, 25 bp, Homo sapien
cacaaagaatgatgtctctgtacac

SEQ ID NO: 4624015 - DNA, 25 bp, Homo sapien
ttctgggtgtttttgcaaattggca

SEQ ID NO: 4624016 - DNA, 25 bp, Homo sapien
catagccctagttaactcagctgta

SEQ ID NO: 4624017 - DNA, 25 bp, Homo sapien
cagaagcaaatctctgggtgaaaaa

SEQ ID NO: 4624018 - DNA, 25 bp, Homo sapien
taacacacttcttgcaatagcctgc

SEQ ID NO: 4624019 - DNA, 25 bp, Homo sapien
ctgggagggatgtaattttcttgac

SEQ ID NO: 4624020 - DNA, 25 bp, Homo sapien
agcacctgaatcttgagcatagctg

SEQ ID NO: 4624021 - DNA, 25 bp, Homo sapien
gcatagctgtcatacctccttagag

SEQ ID NO: 4624022 - DNA, 25 bp, Homo sapien
ttatatcttcgcattctgggaggga

SEQ ID NO: 4624023 - DNA, 25 bp, Homo sapien
gcttgtaatctgtgtttgacatgca

SEQ ID NO: 4624024 - DNA, 25 bp, Homo sapien
ttaacatcaagctagtgacaaggct

SEQ ID NO: 4624025 - DNA, 25 bp, Homo sapien
gctatgcaacgttttgtaaaaagcc

SEQ ID NO: 4624026 - DNA, 25 bp, Homo sapien
ggcaagactacaaggtttacatgca

SEQ ID NO: 4624027 - DNA, 25 bp, Homo sapien
agtagatttcaagtgcgttgaactg

SEQ ID NO: 4624028 - DNA, 25 bp, Homo sapien
catcagaggaacatccttgtactca

SEQ ID NO: 4624029 - DNA, 25 bp, Homo sapien
cttgtactcacaaggctcaagagca

SEQ ID NO: 4624030 - DNA, 25 bp, Homo sapien
tgcgttgaactggaactgattagaa

SEQ ID NO: 4624031 - DNA, 25 bp, Homo sapien
tcacacattcgacaggtgaggattc

SEQ ID NO: 4624032 - DNA, 25 bp, Homo sapien
aagatattggacacccatccattga

SEQ ID NO: 4624033 - DNA, 25 bp, Homo sapien
tagaagtcaatagctcctcatcaca

SEQ ID NO: 4624034 - DNA, 25 bp, Homo sapien
tgaggattcctagaagtgctgtaag

SEQ ID NO: 4624035 - DNA, 25 bp, Homo sapien
ggccagcgatgatgctaccattttt

SEQ ID NO: 4624036 - DNA, 25 bp, Homo sapien
taagtgttgtggtaattggtgaaga

SEQ ID NO: 4624037 - DNA, 25 bp, Homo sapien
aggccagcgatgatgctaccatttt

SEQ ID NO: 4624038 - DNA, 25 bp, Homo sapien
tacttaagtgttgtggtaattggtg

SEQ ID NO: 4624039 - DNA, 25 bp, Homo sapien
tcctgatgactgccgattgcaggaa

SEQ ID NO: 4624040 - DNA, 25 bp, Homo sapien
gttcctgatgactgccgattgcagg

SEQ ID NO: 4624041 - DNA, 25 bp, Homo sapien
ttcctgatgactgccgattgcagga

SEQ ID NO: 4624042 - DNA, 25 bp, Homo sapien
atccccagtgtttgcaagaatttca

SEQ ID NO: 4624043 - DNA, 25 bp, Homo sapien
aatccccagtgtttgcaagaatttc

SEQ ID NO: 4624044 - DNA, 25 bp, Homo sapien
caatcaccatatgttcaaactggag

SEQ ID NO: 4624045 - DNA, 25 bp, Homo sapien
gcacaggtggtaagtacaatcacca

SEQ ID NO: 4624046 - DNA, 25 bp, Homo sapien
ccaatatatatcaaacttggggctg

SEQ ID NO: 4624047 - DNA, 25 bp, Homo sapien
caatatatatcaaacttggggctga

SEQ ID NO: 4624048 - DNA, 25 bp, Homo sapien
aatatatatcaaacttggggctgac

SEQ ID NO: 4624049 - DNA, 25 bp, Homo sapien
cctggttggactgggaacctgccat

SEQ ID NO: 4624050 - DNA, 25 bp, Homo sapien
acaactcttcctggttggactggga

SEQ ID NO: 4624051 - DNA, 25 bp, Homo sapien
cttttgacaactcttcctggttgga

SEQ ID NO: 4624052 - DNA, 25 bp, Homo sapien
tgtttccacttttgacaactcttcc

SEQ ID NO: 4624053 - DNA, 25 bp, Homo sapien
gacacatatggtccatgtttcctgg

SEQ ID NO: 4624054 - DNA, 25 bp, Homo sapien
gcctacagttgatcttcatcccatc

SEQ ID NO: 4624055 - DNA, 25 bp, Homo sapien
aaggtccactcctctcgcctgcatt

SEQ ID NO: 4624056 - DNA, 25 bp, Homo sapien
ttcctgcctacagttgatcttcatc

SEQ ID NO: 4624057 - DNA, 25 bp, Homo sapien
tttcactttgatctcctcacagtca

SEQ ID NO: 4624058 - DNA, 25 bp, Homo sapien
tgtgaatgcctgaggatatctgtgc

SEQ ID NO: 4624059 - DNA, 25 bp, Homo sapien
cctcacagtcattgtgaatgcctga

SEQ ID NO: 4624060 - DNA, 25 bp, Homo sapien
ctgaggatatctgtgccctgagggc

SEQ ID NO: 4624061 - DNA, 25 bp, Homo sapien
aggtctgcatcatccaatctaatac

SEQ ID NO: 4624062 - DNA, 25 bp, Homo sapien
gtctgcatcatccaatctaataccc

SEQ ID NO: 4624063 - DNA, 25 bp, Homo sapien
tgcatcatccaatctaataccctgc

SEQ ID NO: 4624064 - DNA, 25 bp, Homo sapien
ctgcatcatccaatctaataccctg

SEQ ID NO: 4624065 - DNA, 25 bp, Homo sapien
ttaagcttaaagaacagtaactgta

SEQ ID NO: 4624066 - DNA, 25 bp, Homo sapien
ctcttgattgaagctcattttaagc

SEQ ID NO: 4624067 - DNA, 25 bp, Homo sapien
tcgggtctgacttaagcaattttcc

SEQ ID NO: 4624068 - DNA, 25 bp, Homo sapien
agaacagtaactgtaatcctagttc

SEQ ID NO: 4624069 - DNA, 25 bp, Homo sapien
cttgggtgccaatagattatagttg

SEQ ID NO: 4624070 - DNA, 25 bp, Homo sapien
gcaggaagcttcctattgagatgct

SEQ ID NO: 4624071 - DNA, 25 bp, Homo sapien
ggaagcttcctattgagatgctgga

SEQ ID NO: 4624072 - DNA, 25 bp, Homo sapien
tagattatagttggtctgcaggaag

SEQ ID NO: 4624073 - DNA, 25 bp, Homo sapien
cacatgttcggatgttggtgacttt

SEQ ID NO: 4624074 - DNA, 25 bp, Homo sapien
acttttactagggtgtcatgggttg

SEQ ID NO: 4624075 - DNA, 25 bp, Homo sapien
cttttactagggtgtcatgggttga

SEQ ID NO: 4624076 - DNA, 25 bp, Homo sapien
tgcaggaggtcacatgttcggatgt

SEQ ID NO: 4624077 - DNA, 25 bp, Homo sapien
tcttaactggtaaaatgtgattgac

SEQ ID NO: 4624078 - DNA, 25 bp, Homo sapien
cccagagaaggagctaaaagtttga

SEQ ID NO: 4624079 - DNA, 25 bp, Homo sapien
aaaagtactcacagcaaatgttggg

SEQ ID NO: 4624080 - DNA, 25 bp, Homo sapien
tgggggcagttatactcctaaggta

SEQ ID NO: 4624081 - DNA, 25 bp, Homo sapien
aaagttgtgtgtgggccacttcatt

SEQ ID NO: 4624082 - DNA, 25 bp, Homo sapien
ctgtgggattgcattagaggctttg

SEQ ID NO: 4624083 - DNA, 25 bp, Homo sapien
cagccggttgctgtgggattgcatt

SEQ ID NO: 4624084 - DNA, 25 bp, Homo sapien
ccagggagcacagccggttgctgtg

SEQ ID NO: 4624085 - DNA, 25 bp, Homo sapien
gcattagaggctttggtgaaaagcc

SEQ ID NO: 4624086 - DNA, 25 bp, Homo sapien
gccagatattcccatttcaaatcta

SEQ ID NO: 4624087 - DNA, 25 bp, Homo sapien
ttagaacgccgcaggcatttgagga

SEQ ID NO: 4624088 - DNA, 25 bp, Homo sapien
agggcctgagccagatattcccatt

SEQ ID NO: 4624089 - DNA, 25 bp, Homo sapien
ccatgaggacccaccgtgtgtttag

SEQ ID NO: 4624090 - DNA, 25 bp, Homo sapien
ccctattatgacaatgagagtaaca

SEQ ID NO: 4624091 - DNA, 25 bp, Homo sapien
tgaatagactgaggcaacacatgct

SEQ ID NO: 4624092 - DNA, 25 bp, Homo sapien
actgaaaatggcacaacacaaatcc

SEQ ID NO: 4624093 - DNA, 25 bp, Homo sapien
tccaagtgacaagactatccaaagc

SEQ ID NO: 4624094 - DNA, 25 bp, Homo sapien
taaacatcttacacttctaactctg

SEQ ID NO: 4624095 - DNA, 25 bp, Homo sapien
tattactttccataggcactttcca

SEQ ID NO: 4624096 - DNA, 25 bp, Homo sapien
aagaacacgaactaacacacttgtg

SEQ ID NO: 4624097 - DNA, 25 bp, Homo sapien
taaagtgtggtagattttaccagga

SEQ ID NO: 4624098 - DNA, 25 bp, Homo sapien
taccagttggccagtgacctgacta

SEQ ID NO: 4624099 - DNA, 25 bp, Homo sapien
atttcagttaccagttggccagtga

SEQ ID NO: 4624100 - DNA, 25 bp, Homo sapien
cagttaccagttggccagtgacctg

SEQ ID NO: 4624101 - DNA, 25 bp, Homo sapien
ggccagtgacctgactatggaccat

SEQ ID NO: 4624102 - DNA, 25 bp, Homo sapien
ctgctgactgaaagttacttacaat

SEQ ID NO: 4624103 - DNA, 25 bp, Homo sapien
ggagagctagattgagtgatttgtc

SEQ ID NO: 4624104 - DNA, 25 bp, Homo sapien
acaatttgtccagcaatggcatagg

SEQ ID NO: 4624105 - DNA, 25 bp, Homo sapien
gctagattgagtgatttgtctgctg

SEQ ID NO: 4624106 - DNA, 25 bp, Homo sapien
atggtctccaggtgtttgttgggct

SEQ ID NO: 4624107 - DNA, 25 bp, Homo sapien
gcaaaaactatcagacagcctcaga

SEQ ID NO: 4624108 - DNA, 25 bp, Homo sapien
tagaagtgtctagcatcagaacggt

SEQ ID NO: 4624109 - DNA, 25 bp, Homo sapien
tcagaacggtcaatatgtgaatagg

SEQ ID NO: 4624110 - DNA, 25 bp, Homo sapien
tctcaaggccaagctttaaagtggc

SEQ ID NO: 4624111 - DNA, 25 bp, Homo sapien
tacttttgctcacaatcttttgcta

SEQ ID NO: 4624112 - DNA, 25 bp, Homo sapien
agctaactgcaggagggttttggaa

SEQ ID NO: 4624113 - DNA, 25 bp, Homo sapien
gagcttagcgtttcctgagagttct

SEQ ID NO: 4624114 - DNA, 25 bp, Homo sapien
gagaatcccaaaaggacctcaatgt

SEQ ID NO: 4624115 - DNA, 25 bp, Homo sapien
aacactgagagtaggccattgaaag

SEQ ID NO: 4624116 - DNA, 25 bp, Homo sapien
catggttggtgcttcaggagagtta

SEQ ID NO: 4624117 - DNA, 25 bp, Homo sapien
caatgtgaccaatgccttcctgaat

SEQ ID NO: 4624118 - DNA, 25 bp, Homo sapien
ctttcagcgtgtccagtatggaaaa

SEQ ID NO: 4624119 - DNA, 25 bp, Homo sapien
ctgtctttcagcgtgtccagtatgg

SEQ ID NO: 4624120 - DNA, 25 bp, Homo sapien
ccagtatggaaaagcccctgacact

SEQ ID NO: 4624121 - DNA, 25 bp, Homo sapien
gtctttcagcgtgtccagtatggaa

SEQ ID NO: 4624122 - DNA, 25 bp, Homo sapien
gctgaacaggaacactgaactcctt

SEQ ID NO: 4624123 - DNA, 25 bp, Homo sapien
ctccagggatctaggaccaagctga

SEQ ID NO: 4624124 - DNA, 25 bp, Homo sapien
caagctgaacaggaacactgaactc

SEQ ID NO: 4624125 - DNA, 25 bp, Homo sapien
tgttctccagggatctaggaccaag

SEQ ID NO: 4624126 - DNA, 25 bp, Homo sapien
caaatctctggccacaaaggttcat

SEQ ID NO: 4624127 - DNA, 25 bp, Homo sapien
cactctgaaatctgtcttacagtca

SEQ ID NO: 4624128 - DNA, 25 bp, Homo sapien
tgtgtgcctttcagccgatacatta

SEQ ID NO: 4624129 - DNA, 25 bp, Homo sapien
cagtcactgtctcaagagtagggta

SEQ ID NO: 4624130 - DNA, 25 bp, Homo sapien
attcttgcagaattatccgtaaaca

SEQ ID NO: 4624131 - DNA, 25 bp, Homo sapien
ctgaaacgctcccacaaattcttgc

SEQ ID NO: 4624132 - DNA, 25 bp, Homo sapien
aacgctcccacaaattcttgcagaa

SEQ ID NO: 4624133 - DNA, 25 bp, Homo sapien
ttcttgcagaattatccgtaaacat

SEQ ID NO: 4624134 - DNA, 25 bp, Homo sapien
tgctgaaggtatcaagacataaaag

SEQ ID NO: 4624135 - DNA, 25 bp, Homo sapien
ctgactgctgaaggtatcaagacat

SEQ ID NO: 4624136 - DNA, 25 bp, Homo sapien
agcaagaaagaggaacatcttgatc

SEQ ID NO: 4624137 - DNA, 25 bp, Homo sapien
gcaagaaagaggaacatcttgatct

SEQ ID NO: 4624138 - DNA, 25 bp, Homo sapien
ttccaggaagacaggtttaagatcc

SEQ ID NO: 4624139 - DNA, 25 bp, Homo sapien
tgggaaacgacccaggtacatctgg

SEQ ID NO: 4624140 - DNA, 25 bp, Homo sapien
ctagccagattacccatgaggatca

SEQ ID NO: 4624141 - DNA, 25 bp, Homo sapien
ggaagccctcagtcttgacaactag

SEQ ID NO: 4624142 - DNA, 25 bp, Homo sapien
ccatcatggcaactggcaatcctga

SEQ ID NO: 4624143 - DNA, 25 bp, Homo sapien
ggcaactggcaatcctgatccctgg

SEQ ID NO: 4624144 - DNA, 25 bp, Homo sapien
gatacactcccatcatggcaactgg

SEQ ID NO: 4624145 - DNA, 25 bp, Homo sapien
cctggaggattgagatacactccca

SEQ ID NO: 4624146 - DNA, 25 bp, Homo sapien
aagcgagtatgctaaaggccctggg

SEQ ID NO: 4624147 - DNA, 25 bp, Homo sapien
cacttacagcagaagcgagtatgct

SEQ ID NO: 4624148 - DNA, 25 bp, Homo sapien
cagaagcgagtatgctaaaggccct

SEQ ID NO: 4624149 - DNA, 25 bp, Homo sapien
tacagcagaagcgagtatgctaaag

SEQ ID NO: 4624150 - DNA, 25 bp, Homo sapien
ggcaagatctctgtcatggtttgcc

SEQ ID NO: 4624151 - DNA, 25 bp, Homo sapien
ctaggcaagatctctgtcatggttt

SEQ ID NO: 4624152 - DNA, 25 bp, Homo sapien
gcaagatctctgtcatggtttgcca

SEQ ID NO: 4624153 - DNA, 25 bp, Homo sapien
aggcaagatctctgtcatggtttgc

SEQ ID NO: 4624154 - DNA, 25 bp, Homo sapien
aacagtctctgggatgtcaaacaaa

SEQ ID NO: 4624155 - DNA, 25 bp, Homo sapien
catttaatagctacgtcttgggtgg

SEQ ID NO: 4624156 - DNA, 25 bp, Homo sapien
taactgcctaaatcaggcccgagtg

SEQ ID NO: 4624157 - DNA, 25 bp, Homo sapien
gattgaagaacttatcagtggacgg

SEQ ID NO: 4624158 - DNA, 25 bp, Homo sapien
gagaacactgggtattgaataaggc

SEQ ID NO: 4624159 - DNA, 25 bp, Homo sapien
caaaggagcatgtttgcccagttag

SEQ ID NO: 4624160 - DNA, 25 bp, Homo sapien
ctagattgtcatccatagggagaga

SEQ ID NO: 4624161 - DNA, 25 bp, Homo sapien
gggaggtaaatcttggagtaactga

SEQ ID NO: 4624162 - DNA, 25 bp, Homo sapien
tcttactgcaaatgtgggcctaagg

SEQ ID NO: 4624163 - DNA, 25 bp, Homo sapien
caaatgtgggcctaaggagggatgt

SEQ ID NO: 4624164 - DNA, 25 bp, Homo sapien
tctcttactgcaaatgtgggcctaa

SEQ ID NO: 4624165 - DNA, 25 bp, Homo sapien
ttactgcaaatgtgggcctaaggag

SEQ ID NO: 4624166 - DNA, 25 bp, Homo sapien
tgtgctttccgctgacagcagttgt

SEQ ID NO: 4624167 - DNA, 25 bp, Homo sapien
cctttttgtgctttccgctgacagc

SEQ ID NO: 4624168 - DNA, 25 bp, Homo sapien
cattcccctggtgttctctgcaata

SEQ ID NO: 4624169 - DNA, 25 bp, Homo sapien
agcagttgtggatctcttattcatt

SEQ ID NO: 4624170 - DNA, 25 bp, Homo sapien
cgcagggctggtttcaatatagggc

SEQ ID NO: 4624171 - DNA, 25 bp, Homo sapien
tcaagagctcttcatggcagttctg

SEQ ID NO: 4624172 - DNA, 25 bp, Homo sapien
aaagttgctggctttaacgcagggc

SEQ ID NO: 4624173 - DNA, 25 bp, Homo sapien
ctggagaatccagtggtctgtgctt

SEQ ID NO: 4624174 - DNA, 25 bp, Homo sapien
ttatataagctcttctgttttagca

SEQ ID NO: 4624175 - DNA, 25 bp, Homo sapien
tataagctcttctgttttagcaaca

SEQ ID NO: 4624176 - DNA, 25 bp, Homo sapien
atataagctcttctgttttagcaac

SEQ ID NO: 4624177 - DNA, 25 bp, Homo sapien
ataagctcttctgttttagcaacac

SEQ ID NO: 4624178 - DNA, 25 bp, Homo sapien
tctgcaggttgagtgattctgattt

SEQ ID NO: 4624179 - DNA, 25 bp, Homo sapien
ttcacataatcacaagctgacagca

SEQ ID NO: 4624180 - DNA, 25 bp, Homo sapien
gaagcaggtgggttgatataatgcc

SEQ ID NO: 4624181 - DNA, 25 bp, Homo sapien
acagcaatctgcaggttgagtgatt

SEQ ID NO: 4624182 - DNA, 25 bp, Homo sapien
cattggtaactgagattcttgggta

SEQ ID NO: 4624183 - DNA, 25 bp, Homo sapien
ttggtaactgagattcttgggtaat

SEQ ID NO: 4624184 - DNA, 25 bp, Homo sapien
ctttcattggtaactgagattcttg

SEQ ID NO: 4624185 - DNA, 25 bp, Homo sapien
ttcattggtaactgagattcttggg

SEQ ID NO: 4624186 - DNA, 25 bp, Homo sapien
tgacaaacgatgtaagacgggagcc

SEQ ID NO: 4624187 - DNA, 25 bp, Homo sapien
aacgatgtaagacgggagcctccat

SEQ ID NO: 4624188 - DNA, 25 bp, Homo sapien
caaacgatgtaagacgggagcctcc

SEQ ID NO: 4624189 - DNA, 25 bp, Homo sapien
ctgagagtgaaggagattctgatga

SEQ ID NO: 4624190 - DNA, 25 bp, Homo sapien
catatgtctctccacgctgtaagtt

SEQ ID NO: 4624191 - DNA, 25 bp, Homo sapien
ccatatgtctctccacgctgtaagt

SEQ ID NO: 4624192 - DNA, 25 bp, Homo sapien
gtctctccacgctgtaagttcattt

SEQ ID NO: 4624193 - DNA, 25 bp, Homo sapien
tatgtctctccacgctgtaagttca

SEQ ID NO: 4624194 - DNA, 25 bp, Homo sapien
tctctggcagatggtgcttgagcaa

SEQ ID NO: 4624195 - DNA, 25 bp, Homo sapien
tcatctctggcagatggtgcttgag

SEQ ID NO: 4624196 - DNA, 25 bp, Homo sapien
catctctggcagatggtgcttgagc

SEQ ID NO: 4624197 - DNA, 25 bp, Homo sapien
tgtcatctctggcagatggtgcttg

SEQ ID NO: 4624198 - DNA, 25 bp, Homo sapien
ttgtgaagaatagcactggttacat

SEQ ID NO: 4624199 - DNA, 25 bp, Homo sapien
tgtgaagaatagcactggttacata

SEQ ID NO: 4624200 - DNA, 25 bp, Homo sapien
tctgtggttgaattctagtaagcct

SEQ ID NO: 4624201 - DNA, 25 bp, Homo sapien
tggttgaattctagtaagcctgatg

SEQ ID NO: 4624202 - DNA, 25 bp, Homo sapien
cagcaattgctggaagagctttcac

SEQ ID NO: 4624203 - DNA, 25 bp, Homo sapien
tgctggaagagctttcactttccac

SEQ ID NO: 4624204 - DNA, 25 bp, Homo sapien
gcaattgctggaagagctttcactt

SEQ ID NO: 4624205 - DNA, 25 bp, Homo sapien
ctggaagagctttcactttccacat

SEQ ID NO: 4624206 - DNA, 25 bp, Homo sapien
ggtgatctggcgaaacctggtcaga

SEQ ID NO: 4624207 - DNA, 25 bp, Homo sapien
tgacattaaagagagtggacggaca

SEQ ID NO: 4624208 - DNA, 25 bp, Homo sapien
tggacggacatgagcttttgcatcc

SEQ ID NO: 4624209 - DNA, 25 bp, Homo sapien
tctgctgttgcccactatgagcggc

SEQ ID NO: 4624210 - DNA, 25 bp, Homo sapien
gcttaagcggatatcaaaccagtcc

SEQ ID NO: 4624211 - DNA, 25 bp, Homo sapien
tcagctaagcctagaaccaaggtgt

SEQ ID NO: 4624212 - DNA, 25 bp, Homo sapien
cgaagaccaagggagcttaagcgga

SEQ ID NO: 4624213 - DNA, 25 bp, Homo sapien
gaactaagaagtcaagccgaagacc

SEQ ID NO: 4624214 - DNA, 25 bp, Homo sapien
tgaaggccagagtctaaagggcata

SEQ ID NO: 4624215 - DNA, 25 bp, Homo sapien
gaatcagatggaatgcagattacta

SEQ ID NO: 4624216 - DNA, 25 bp, Homo sapien
ttcatccacggatcccaaggtaggg

SEQ ID NO: 4624217 - DNA, 25 bp, Homo sapien
tgcaaaggaagatcttggttttaac

SEQ ID NO: 4624218 - DNA, 25 bp, Homo sapien
tgctccttgtcagagattgccacta

SEQ ID NO: 4624219 - DNA, 25 bp, Homo sapien
cagagattgccactaatgctcttgg

SEQ ID NO: 4624220 - DNA, 25 bp, Homo sapien
agattgccactaatgctcttggtaa

SEQ ID NO: 4624221 - DNA, 25 bp, Homo sapien
ccttgtcagagattgccactaatgc

SEQ ID NO: 4624222 - DNA, 25 bp, Homo sapien
tgtccctgtgcctactgctaattgg

SEQ ID NO: 4624223 - DNA, 25 bp, Homo sapien
caacattggtgctgcggttgctgac

SEQ ID NO: 4624224 - DNA, 25 bp, Homo sapien
ctgagtagttgggatacggcgaact

SEQ ID NO: 4624225 - DNA, 25 bp, Homo sapien
gatacggcgaactgtccctgtgcct

SEQ ID NO: 4624226 - DNA, 25 bp, Homo sapien
agatagcatttggtattgagtcact

SEQ ID NO: 4624227 - DNA, 25 bp, Homo sapien
tattgagtcactgggtattgtagct

SEQ ID NO: 4624228 - DNA, 25 bp, Homo sapien
catttggtattgagtcactgggtat

SEQ ID NO: 4624229 - DNA, 25 bp, Homo sapien
cactgggtattgtagctgcgagaga

SEQ ID NO: 4624230 - DNA, 25 bp, Homo sapien
agaagaaagagttagctcacacctc

SEQ ID NO: 4624231 - DNA, 25 bp, Homo sapien
ttaaagggacctcatagtctgtgtt

SEQ ID NO: 4624232 - DNA, 25 bp, Homo sapien
tccagtcttttcataggggaaacaa

SEQ ID NO: 4624233 - DNA, 25 bp, Homo sapien
taattgcgactttaaagggacctca

SEQ ID NO: 4624234 - DNA, 25 bp, Homo sapien
tcatcacatcgagtgtgacatgctg

SEQ ID NO: 4624235 - DNA, 25 bp, Homo sapien
caaatcatcacatcgagtgtgacat

SEQ ID NO: 4624236 - DNA, 25 bp, Homo sapien
tcgagtgtgacatgctgtttaatag

SEQ ID NO: 4624237 - DNA, 25 bp, Homo sapien
tgctgtttaatagttgtagcacact

SEQ ID NO: 4624238 - DNA, 25 bp, Homo sapien
agtcctcagtgacctacaaagagac

SEQ ID NO: 4624239 - DNA, 25 bp, Homo sapien
cataaagcaagtcctcagtgaccta

SEQ ID NO: 4624240 - DNA, 25 bp, Homo sapien
aagtcctcagtgacctacaaagaga

SEQ ID NO: 4624241 - DNA, 25 bp, Homo sapien
aagcaagtcctcagtgacctacaaa

SEQ ID NO: 4624242 - DNA, 25 bp, Homo sapien
ttctaggctttgcagctcaagggtc

SEQ ID NO: 4624243 - DNA, 25 bp, Homo sapien
ttcctgtatagagcgtctgagctta

SEQ ID NO: 4624244 - DNA, 25 bp, Homo sapien
tatctttaagatatccagtagtttc

SEQ ID NO: 4624245 - DNA, 25 bp, Homo sapien
cctggtgtgggcctatgcagccttc

SEQ ID NO: 4624246 - DNA, 25 bp, Homo sapien
aaggtcttgcgttgtggaacttcaa

SEQ ID NO: 4624247 - DNA, 25 bp, Homo sapien
ggaacttcaatcttgtacatacttg

SEQ ID NO: 4624248 - DNA, 25 bp, Homo sapien
catacttgatgtatagtcgttgaaa

SEQ ID NO: 4624249 - DNA, 25 bp, Homo sapien
tattggaactgggttgatacttctc

SEQ ID NO: 4624250 - DNA, 25 bp, Homo sapien
ttcttagacaaataacagtccttac

SEQ ID NO: 4624251 - DNA, 25 bp, Homo sapien
tgaccattagcgagaaataacccat

SEQ ID NO: 4624252 - DNA, 25 bp, Homo sapien
actgaccattagcgagaaataaccc

SEQ ID NO: 4624253 - DNA, 25 bp, Homo sapien
ctgaccattagcgagaaataaccca

SEQ ID NO: 4624254 - DNA, 25 bp, Homo sapien
aagcagagcacaggaccagccagat

SEQ ID NO: 4624255 - DNA, 25 bp, Homo sapien
agagcacaggaccagccagatcccg

SEQ ID NO: 4624256 - DNA, 25 bp, Homo sapien
gcagagcacaggaccagccagatcc

SEQ ID NO: 4624257 - DNA, 25 bp, Homo sapien
ctggaagcagagcacaggaccagcc

SEQ ID NO: 4624258 - DNA, 25 bp, Homo sapien
ctggcacctcgcccaggtgctggct

SEQ ID NO: 4624259 - DNA, 25 bp, Homo sapien
tggctggcacccagtggccctgtct

SEQ ID NO: 4624260 - DNA, 25 bp, Homo sapien
agtggccctgtcttggccggccctg

SEQ ID NO: 4624261 - DNA, 25 bp, Homo sapien
caggtgctggctggcacccagtggc

SEQ ID NO: 4624262 - DNA, 25 bp, Homo sapien
tgcggggctgatccgccagagccct

SEQ ID NO: 4624263 - DNA, 25 bp, Homo sapien
gggctgatccgccagagcccttcca

SEQ ID NO: 4624264 - DNA, 25 bp, Homo sapien
ggctgatccgccagagcccttccac

SEQ ID NO: 4624265 - DNA, 25 bp, Homo sapien
gggggtgcggggctgatccgccaga

SEQ ID NO: 4624266 - DNA, 25 bp, Homo sapien
gaaggcctcatggacaagacgagca

SEQ ID NO: 4624267 - DNA, 25 bp, Homo sapien
agcaggttgccaatggcatggccag

SEQ ID NO: 4624268 - DNA, 25 bp, Homo sapien
tggacaagacgagcaggttgccaat

SEQ ID NO: 4624269 - DNA, 25 bp, Homo sapien
ctgggaaggcctcatggacaagacg

SEQ ID NO: 4624270 - DNA, 25 bp, Homo sapien
cctctgagatgaggaatcctcacgg

SEQ ID NO: 4624271 - DNA, 25 bp, Homo sapien
cccatgttccgagggataagacaca

SEQ ID NO: 4624272 - DNA, 25 bp, Homo sapien
aacatcctggagttgtgagcagaca

SEQ ID NO: 4624273 - DNA, 25 bp, Homo sapien
cataggggcgccgtcccaactgact

SEQ ID NO: 4624274 - DNA, 25 bp, Homo sapien
aactgtggccggcagctctgtgtgg

SEQ ID NO: 4624275 - DNA, 25 bp, Homo sapien
actgtggccggcagctctgtgtgga

SEQ ID NO: 4624276 - DNA, 25 bp, Homo sapien
ttcttttgtgggaactgtggccggc

SEQ ID NO: 4624277 - DNA, 25 bp, Homo sapien
tttgtgggaactgtggccggcagct

SEQ ID NO: 4624278 - DNA, 25 bp, Homo sapien
taagcagctctcttactctcctgaa

SEQ ID NO: 4624279 - DNA, 25 bp, Homo sapien
caccctcatgttcttacacatgttg

SEQ ID NO: 4624280 - DNA, 25 bp, Homo sapien
tcctcctaagcagctctcttactct

SEQ ID NO: 4624281 - DNA, 25 bp, Homo sapien
ttaacaccctcatgttcttacacat

SEQ ID NO: 4624282 - DNA, 25 bp, Homo sapien
caatgtactgttgggtcttatttag

SEQ ID NO: 4624283 - DNA, 25 bp, Homo sapien
taactcatcatagtaagtgaacttg

SEQ ID NO: 4624284 - DNA, 25 bp, Homo sapien
tgatcttgacttgatttgcagtact

SEQ ID NO: 4624285 - DNA, 25 bp, Homo sapien
caagaatgaaccactcttggtcata

SEQ ID NO: 4624286 - DNA, 25 bp, Homo sapien
taagtttgctcctagtatgttgcat

SEQ ID NO: 4624287 - DNA, 25 bp, Homo sapien
tatgttgtttaaggaagactgacag

SEQ ID NO: 4624288 - DNA, 25 bp, Homo sapien
gtatatcaagcaattagtcctggag

SEQ ID NO: 4624289 - DNA, 25 bp, Homo sapien
ggaatgaagtaaagctccagtttta

SEQ ID NO: 4624290 - DNA, 25 bp, Homo sapien
tgcaaatttacactcccaggaacaa

SEQ ID NO: 4624291 - DNA, 25 bp, Homo sapien
aacaaatgtcttataggacacaaac

SEQ ID NO: 4624292 - DNA, 25 bp, Homo sapien
ggaacaacaaatgtcttataggaca

SEQ ID NO: 4624293 - DNA, 25 bp, Homo sapien
aattgccttttgggaaattgtgcaa

SEQ ID NO: 4624294 - DNA, 25 bp, Homo sapien
cagaagttttctcttcgttgtggaa

SEQ ID NO: 4624295 - DNA, 25 bp, Homo sapien
aaagtccataggtgtctgaaaaggg

SEQ ID NO: 4624296 - DNA, 25 bp, Homo sapien
gtcattctttagagcacagaagttt

SEQ ID NO: 4624297 - DNA, 25 bp, Homo sapien
tctcagtaagcgtagttgcaacaca

SEQ ID NO: 4624298 - DNA, 25 bp, Homo sapien
ggaaagcaggagtagacataaggaa

SEQ ID NO: 4624299 - DNA, 25 bp, Homo sapien
taataccgtcacctccagagttaga

SEQ ID NO: 4624300 - DNA, 25 bp, Homo sapien
atccagggctgattttgtctcataa

SEQ ID NO: 4624301 - DNA, 25 bp, Homo sapien
catttccacaaacgtatcttgggca

SEQ ID NO: 4624302 - DNA, 25 bp, Homo sapien
acttcgtgaaggatagtttttcagc

SEQ ID NO: 4624303 - DNA, 25 bp, Homo sapien
tcctccttggtacatacttcgtgaa

SEQ ID NO: 4624304 - DNA, 25 bp, Homo sapien
ctgtgaaactcatccttagggtatc

SEQ ID NO: 4624305 - DNA, 25 bp, Homo sapien
tgtgaatgcacagtcagattcttcc

SEQ ID NO: 4624306 - DNA, 25 bp, Homo sapien
gagtctttcgtttgtctgcattttc

SEQ ID NO: 4624307 - DNA, 25 bp, Homo sapien
ttctttctgcctaatttggtactgg

SEQ ID NO: 4624308 - DNA, 25 bp, Homo sapien
cctaatttggtactggtttctggca

SEQ ID NO: 4624309 - DNA, 25 bp, Homo sapien
caagttcgtgactgaaatggcccct

SEQ ID NO: 4624310 - DNA, 25 bp, Homo sapien
taagaatgtctaggaaatctccgtc

SEQ ID NO: 4624311 - DNA, 25 bp, Homo sapien
gccgtgcaggtggttcaactttagc

SEQ ID NO: 4624312 - DNA, 25 bp, Homo sapien
gtcatctttgtaattgccgtgcagg

SEQ ID NO: 4624313 - DNA, 25 bp, Homo sapien
ggcaaaattgcaggaaagatagtca

SEQ ID NO: 4624314 - DNA, 25 bp, Homo sapien
atgaaaagtacaggcaaatgcttgg

SEQ ID NO: 4624315 - DNA, 25 bp, Homo sapien
aaaagtacaggcaaatgcttgggga

SEQ ID NO: 4624316 - DNA, 25 bp, Homo sapien
caaatgcttggggaggaatcttcat

SEQ ID NO: 4624317 - DNA, 25 bp, Homo sapien
ggcaaatgcttggggaggaatcttc

SEQ ID NO: 4624318 - DNA, 25 bp, Homo sapien
gccattttttccatcgagcaaattc

SEQ ID NO: 4624319 - DNA, 25 bp, Homo sapien
ccatactgtgtggagtgtaagttta

SEQ ID NO: 4624320 - DNA, 25 bp, Homo sapien
ttcaccatactgtgtggagtgtaag

SEQ ID NO: 4624321 - DNA, 25 bp, Homo sapien
tccatcgagcaaattcaccatactg

SEQ ID NO: 4624322 - DNA, 25 bp, Homo sapien
ctcctgtgtcttctgagcacattta

SEQ ID NO: 4624323 - DNA, 25 bp, Homo sapien
tgtctaaaagtaaagcttggtctgt

SEQ ID NO: 4624324 - DNA, 25 bp, Homo sapien
aatttcctcatatcttctaagatat

SEQ ID NO: 4624325 - DNA, 25 bp, Homo sapien
taagatataagtcaaaaaatcctcc

SEQ ID NO: 4624326 - DNA, 25 bp, Homo sapien
aagagagtagagcatgtgggtacca

SEQ ID NO: 4624327 - DNA, 25 bp, Homo sapien
gcatcacattgccaaaagagagtag

SEQ ID NO: 4624328 - DNA, 25 bp, Homo sapien
tttatagaaagattgagaaataagc

SEQ ID NO: 4624329 - DNA, 25 bp, Homo sapien
tgagaaataagctgatttgtttcca

SEQ ID NO: 4624330 - DNA, 25 bp, Homo sapien
ttacaatgcaaccgccattgcaatt

SEQ ID NO: 4624331 - DNA, 25 bp, Homo sapien
aatgcaaccgccattgcaattgctc

SEQ ID NO: 4624332 - DNA, 25 bp, Homo sapien
caatgcaaccgccattgcaattgct

SEQ ID NO: 4624333 - DNA, 25 bp, Homo sapien
tgcaaccgccattgcaattgctctt

SEQ ID NO: 4624334 - DNA, 25 bp, Homo sapien
caacacgaaaatcatattgaagaca

SEQ ID NO: 4624335 - DNA, 25 bp, Homo sapien
tgcaatttatggtcagtgggagttt

SEQ ID NO: 4624336 - DNA, 25 bp, Homo sapien
tcatttgcaatttatggtcagtggg

SEQ ID NO: 4624337 - DNA, 25 bp, Homo sapien
gtgatggttatgttgtcaacacgaa

SEQ ID NO: 4624338 - DNA, 25 bp, Homo sapien
gctgtgagattgtacaaaattctta

SEQ ID NO: 4624339 - DNA, 25 bp, Homo sapien
cattgggctgtgagattgtacaaaa

SEQ ID NO: 4624340 - DNA, 25 bp, Homo sapien
ggtaggttgtggcatgagacattgg

SEQ ID NO: 4624341 - DNA, 25 bp, Homo sapien
agacattgggctgtgagattgtaca

SEQ ID NO: 4624342 - DNA, 25 bp, Homo sapien
tgatgacaaattgggtattcaaccc

SEQ ID NO: 4624343 - DNA, 25 bp, Homo sapien
tctgtgagccttgcaaatactatcc

SEQ ID NO: 4624344 - DNA, 25 bp, Homo sapien
tcttaaacagatgacagcttagcac

SEQ ID NO: 4624345 - DNA, 25 bp, Homo sapien
ccgagatattctggtatagacatgc

SEQ ID NO: 4624346 - DNA, 25 bp, Homo sapien
cttcactgggcaattgcatggttct

SEQ ID NO: 4624347 - DNA, 25 bp, Homo sapien
tcgactgtcctaagataacttactt

SEQ ID NO: 4624348 - DNA, 25 bp, Homo sapien
gccatactccttcgactgtcctaag

SEQ ID NO: 4624349 - DNA, 25 bp, Homo sapien
agggcctgccatactccttcgactg

SEQ ID NO: 4624350 - DNA, 25 bp, Homo sapien
gtttctcagggcctgccatactcct

SEQ ID NO: 4624351 - DNA, 25 bp, Homo sapien
tgatattgggataaagtggaatata

SEQ ID NO: 4624352 - DNA, 25 bp, Homo sapien
tattgggataaagtggaatatagtg

SEQ ID NO: 4624353 - DNA, 25 bp, Homo sapien
tgggataaagtggaatatagtgttt

SEQ ID NO: 4624354 - DNA, 25 bp, Homo sapien
acaagctgtccatgacattgtctct

SEQ ID NO: 4624355 - DNA, 25 bp, Homo sapien
ttccctccaagattatcctcagcaa

SEQ ID NO: 4624356 - DNA, 25 bp, Homo sapien
ccttccctccaagattatcctcagc

SEQ ID NO: 4624357 - DNA, 25 bp, Homo sapien
cttccctccaagattatcctcagca

SEQ ID NO: 4624358 - DNA, 25 bp, Homo sapien
ttttgcttccaataatgatctgaaa

SEQ ID NO: 4624359 - DNA, 25 bp, Homo sapien
ttgcttccaataatgatctgaaagt

SEQ ID NO: 4624360 - DNA, 25 bp, Homo sapien
catattttgcttccaataatgatct

SEQ ID NO: 4624361 - DNA, 25 bp, Homo sapien
tattttgcttccaataatgatctga

SEQ ID NO: 4624362 - DNA, 25 bp, Homo sapien
gcatatgtgtattccttgctgatag

SEQ ID NO: 4624363 - DNA, 25 bp, Homo sapien
ggactgggtttgactggactgcatt

SEQ ID NO: 4624364 - DNA, 25 bp, Homo sapien
cagatgtctgagagaatggccattc

SEQ ID NO: 4624365 - DNA, 25 bp, Homo sapien
gttatgcttagtcccaacaaaggca

SEQ ID NO: 4624366 - DNA, 25 bp, Homo sapien
ttgaaagaacatgggaatcctggtg

SEQ ID NO: 4624367 - DNA, 25 bp, Homo sapien
gagtcattcttgttccgattgtgaa

SEQ ID NO: 4624368 - DNA, 25 bp, Homo sapien
caaattagtccaattgtagcctgat

SEQ ID NO: 4624369 - DNA, 25 bp, Homo sapien
atttcttaggtgtttataaggacag

SEQ ID NO: 4624370 - DNA, 25 bp, Homo sapien
ccgatccccttctttctgattacat

SEQ ID NO: 4624371 - DNA, 25 bp, Homo sapien
attacatttaatcatcagatcacag

SEQ ID NO: 4624372 - DNA, 25 bp, Homo sapien
cccttctttctgattacatttaatc

SEQ ID NO: 4624373 - DNA, 25 bp, Homo sapien
tacatttaatcatcagatcacagac

SEQ ID NO: 4624374 - DNA, 25 bp, Homo sapien
aactttgaggagtgaggatgtttac

SEQ ID NO: 4624375 - DNA, 25 bp, Homo sapien
agctttaaactttgaggagtgagga

SEQ ID NO: 4624376 - DNA, 25 bp, Homo sapien
gctttaaactttgaggagtgaggat

SEQ ID NO: 4624377 - DNA, 25 bp, Homo sapien
aatgagtttactcccatctggcatc

SEQ ID NO: 4624378 - DNA, 25 bp, Homo sapien
tgtgctccaagacaatacttgggag

SEQ ID NO: 4624379 - DNA, 25 bp, Homo sapien
caaaggtatttcatgcttagagagc

SEQ ID NO: 4624380 - DNA, 25 bp, Homo sapien
ttagagagcatgcttcaggctgtgc

SEQ ID NO: 4624381 - DNA, 25 bp, Homo sapien
gtcctcatcactgtaaagtgcatct

SEQ ID NO: 4624382 - DNA, 25 bp, Homo sapien
tggcaaatactgtacaagtgcatct

SEQ ID NO: 4624383 - DNA, 25 bp, Homo sapien
gctttcatggagagttgagtcctca

SEQ ID NO: 4624384 - DNA, 25 bp, Homo sapien
tagttgctgagtattcttttgagaa

SEQ ID NO: 4624385 - DNA, 25 bp, Homo sapien
tgtacatctccataattgcgggtgg

SEQ ID NO: 4624386 - DNA, 25 bp, Homo sapien
gatgggatgacacgtagcgataaag

SEQ ID NO: 4624387 - DNA, 25 bp, Homo sapien
gcagcatgactgagactagaattgt

SEQ ID NO: 4624388 - DNA, 25 bp, Homo sapien
gagatttgagattccagtaccactg

SEQ ID NO: 4624389 - DNA, 25 bp, Homo sapien
tggaaaaacctctaagatatcatag

SEQ ID NO: 4624390 - DNA, 25 bp, Homo sapien
aagccaagccaagagatacccagat

SEQ ID NO: 4624391 - DNA, 25 bp, Homo sapien
catagaattgaagtctaatattgta

SEQ ID NO: 4624392 - DNA, 25 bp, Homo sapien
catatactgcagtacttttctgagg

SEQ ID NO: 4624393 - DNA, 25 bp, Homo sapien
gtcttcattctggtcattcctttta

SEQ ID NO: 4624394 - DNA, 25 bp, Homo sapien
aatgtcttcattctggtcattcctt

SEQ ID NO: 4624395 - DNA, 25 bp, Homo sapien
tgtcttcattctggtcattcctttt

SEQ ID NO: 4624396 - DNA, 25 bp, Homo sapien
atgtcttcattctggtcattccttt

SEQ ID NO: 4624397 - DNA, 25 bp, Homo sapien
ctatctacccagcagcaggcttttg

SEQ ID NO: 4624398 - DNA, 25 bp, Homo sapien
gatttccagtccccacagctaatgg

SEQ ID NO: 4624399 - DNA, 25 bp, Homo sapien
ctgatagaaactcttcatatgtgtc

SEQ ID NO: 4624400 - DNA, 25 bp, Homo sapien
agctgatagaaactcttcatatgtg

SEQ ID NO: 4624401 - DNA, 25 bp, Homo sapien
tttccagtccccacagctaatggca

SEQ ID NO: 4624402 - DNA, 25 bp, Homo sapien
cagtctctccaaacttaatgtcgcg

SEQ ID NO: 4624403 - DNA, 25 bp, Homo sapien
caaacttaatgtcgcgtttaggcat

SEQ ID NO: 4624404 - DNA, 25 bp, Homo sapien
taatgtcgcgtttaggcatctccat

SEQ ID NO: 4624405 - DNA, 25 bp, Homo sapien
tccaaacttaatgtcgcgtttaggc

SEQ ID NO: 4624406 - DNA, 25 bp, Homo sapien
attcccttagaaagtcagctttggc

SEQ ID NO: 4624407 - DNA, 25 bp, Homo sapien
caaaaattcccttagaaagtcagct

SEQ ID NO: 4624408 - DNA, 25 bp, Homo sapien
tcaaaaattcccttagaaagtcagc

SEQ ID NO: 4624409 - DNA, 25 bp, Homo sapien
aaattcccttagaaagtcagctttg

SEQ ID NO: 4624410 - DNA, 25 bp, Homo sapien
cttttgttgatagcctagaggggcc

SEQ ID NO: 4624411 - DNA, 25 bp, Homo sapien
tttgttgatagcctagaggggccca

SEQ ID NO: 4624412 - DNA, 25 bp, Homo sapien
cctagaggggcccagtagtttgcag

SEQ ID NO: 4624413 - DNA, 25 bp, Homo sapien
aacttttgttgatagcctagagggg

SEQ ID NO: 4624414 - DNA, 25 bp, Homo sapien
tcttagtgctcatatgatccccatc

SEQ ID NO: 4624415 - DNA, 25 bp, Homo sapien
ctcctgcttctttaaatccctgttt

SEQ ID NO: 4624416 - DNA, 25 bp, Homo sapien
ttttttcttagtgctcatatgatcc

SEQ ID NO: 4624417 - DNA, 25 bp, Homo sapien
taacataaccatatattttaggtat

SEQ ID NO: 4624418 - DNA, 25 bp, Homo sapien
gagaggcagtaacaacatagtagaa

SEQ ID NO: 4624419 - DNA, 25 bp, Homo sapien
tatactccaaagtgttgaaaataag

SEQ ID NO: 4624420 - DNA, 25 bp, Homo sapien
cttctgagaatagcttatactccaa

SEQ ID NO: 4624421 - DNA, 25 bp, Homo sapien
ctacaatcctatgacctgtttacct

SEQ ID NO: 4624422 - DNA, 25 bp, Homo sapien
caatctctcttagcctagggtttcg

SEQ ID NO: 4624423 - DNA, 25 bp, Homo sapien
catgcagaaccaagttccagagaag

SEQ ID NO: 4624424 - DNA, 25 bp, Homo sapien
tgctgatcagcatgcagaaccaagt

SEQ ID NO: 4624425 - DNA, 25 bp, Homo sapien
ggtttcgatccttcactgtgaaccc

SEQ ID NO: 4624426 - DNA, 25 bp, Homo sapien
gaaactgctgcctcaccagtagcct

SEQ ID NO: 4624427 - DNA, 25 bp, Homo sapien
tttctctgtatggactgcttccttt

SEQ ID NO: 4624428 - DNA, 25 bp, Homo sapien
ccagatagagatcccctgaggagtt

SEQ ID NO: 4624429 - DNA, 25 bp, Homo sapien
ctgtatggactgcttcctttccaga

SEQ ID NO: 4624430 - DNA, 25 bp, Homo sapien
ccactggcagtcacgaagcagcagt

SEQ ID NO: 4624431 - DNA, 25 bp, Homo sapien
tcttggtgataacgagccactggca

SEQ ID NO: 4624432 - DNA, 25 bp, Homo sapien
tatactttgtcagcctttatcttgg

SEQ ID NO: 4624433 - DNA, 25 bp, Homo sapien
gcagcagtctcatgctctcattaat

SEQ ID NO: 4624434 - DNA, 25 bp, Homo sapien
tcagccagttttggtcgttgtgcat

SEQ ID NO: 4624435 - DNA, 25 bp, Homo sapien
tctctaatgtcagccagttttggtc

SEQ ID NO: 4624436 - DNA, 25 bp, Homo sapien
tagtaacttctctaatgtcagccag

SEQ ID NO: 4624437 - DNA, 25 bp, Homo sapien
cttagtaacttctctaatgtcagcc

SEQ ID NO: 4624438 - DNA, 25 bp, Homo sapien
gcagagttaggacttattctaggtc

SEQ ID NO: 4624439 - DNA, 25 bp, Homo sapien
taagaatgatagttcagtccccttt

SEQ ID NO: 4624440 - DNA, 25 bp, Homo sapien
ccacccaaggagttaatgattagag

SEQ ID NO: 4624441 - DNA, 25 bp, Homo sapien
catatgctcatgacaccagaaaatt

SEQ ID NO: 4624442 - DNA, 25 bp, Homo sapien
tctcacttctattgtatttatctgc

SEQ ID NO: 4624443 - DNA, 25 bp, Homo sapien
tccattttctcacttctattgtatt

SEQ ID NO: 4624444 - DNA, 25 bp, Homo sapien
tctaggcctttccattttctcactt

SEQ ID NO: 4624445 - DNA, 25 bp, Homo sapien
ttctaggcctttccattttctcact

SEQ ID NO: 4624446 - DNA, 25 bp, Homo sapien
gctgtggcgtgatgccttgattcat

SEQ ID NO: 4624447 - DNA, 25 bp, Homo sapien
ggctgtggcgtgatgccttgattca

SEQ ID NO: 4624448 - DNA, 25 bp, Homo sapien
gacagctagtgcaaaatccaacaac

SEQ ID NO: 4624449 - DNA, 25 bp, Homo sapien
tacagtggagacagctagtgcaaaa

SEQ ID NO: 4624450 - DNA, 25 bp, Homo sapien
ctacaactcatattctatgtggtaa

SEQ ID NO: 4624451 - DNA, 25 bp, Homo sapien
tatgtggtaagcatgatgatttttc

SEQ ID NO: 4624452 - DNA, 25 bp, Homo sapien
tctatgtggtaagcatgatgatttt

SEQ ID NO: 4624453 - DNA, 25 bp, Homo sapien
attctatgtggtaagcatgatgatt

SEQ ID NO: 4624454 - DNA, 25 bp, Homo sapien
tctctcctgcagtttttgcatgcat

SEQ ID NO: 4624455 - DNA, 25 bp, Homo sapien
tcagtttctgtggacctgcaacttc

SEQ ID NO: 4624456 - DNA, 25 bp, Homo sapien
cttcagtttctgtggacctgcaact

SEQ ID NO: 4624457 - DNA, 25 bp, Homo sapien
agtttctgtggacctgcaacttccc

SEQ ID NO: 4624458 - DNA, 25 bp, Homo sapien
gtgcctctacatctacagaaaaagt

SEQ ID NO: 4624459 - DNA, 25 bp, Homo sapien
tcaagcagtcatacatgggcacctt

SEQ ID NO: 4624460 - DNA, 25 bp, Homo sapien
ttcttcaatcagtgcctctacatct

SEQ ID NO: 4624461 - DNA, 25 bp, Homo sapien
gcagtcatacatgggcacctttctt

SEQ ID NO: 4624462 - DNA, 25 bp, Homo sapien
gcctaagtgatattcgccaagttgt

SEQ ID NO: 4624463 - DNA, 25 bp, Homo sapien
tattcgccaagttgtctcagcacct

SEQ ID NO: 4624464 - DNA, 25 bp, Homo sapien
caggcacgaagggcctaagtgatat

SEQ ID NO: 4624465 - DNA, 25 bp, Homo sapien
agtgatattcgccaagttgtctcag

SEQ ID NO: 4624466 - DNA, 25 bp, Homo sapien
tagcagatagactcaaccaggagtt

SEQ ID NO: 4624467 - DNA, 25 bp, Homo sapien
tggaaggagaatgggtcattacgat

SEQ ID NO: 4624468 - DNA, 25 bp, Homo sapien
gggtcattacgatgtttatggtctc

SEQ ID NO: 4624469 - DNA, 25 bp, Homo sapien
tggtctctgtagttcccagatgggt

SEQ ID NO: 4624470 - DNA, 25 bp, Homo sapien
ccaatcctccacaatcagaagcata

SEQ ID NO: 4624471 - DNA, 25 bp, Homo sapien
tactaagtagcctttcaacgcgggc

SEQ ID NO: 4624472 - DNA, 25 bp, Homo sapien
gtagcctttcaacgcgggctgggct

SEQ ID NO: 4624473 - DNA, 25 bp, Homo sapien
acaatcagaagcatactaagtagcc

SEQ ID NO: 4624474 - DNA, 25 bp, Homo sapien
ccccagaatggctatgggaatctca

SEQ ID NO: 4624475 - DNA, 25 bp, Homo sapien
cagaatggctatgggaatctcaccc

SEQ ID NO: 4624476 - DNA, 25 bp, Homo sapien
ctagcatccccagaatggctatggg

SEQ ID NO: 4624477 - DNA, 25 bp, Homo sapien
tggctatgggaatctcaccctcttc

SEQ ID NO: 4624478 - DNA, 25 bp, Homo sapien
cagtagtagatgtacaatggcagct

SEQ ID NO: 4624479 - DNA, 25 bp, Homo sapien
aaatattccctttaggaagccagtg

SEQ ID NO: 4624480 - DNA, 25 bp, Homo sapien
tctcaagcgactggctatgggtaag

SEQ ID NO: 4624481 - DNA, 25 bp, Homo sapien
tgtcaattattcagcgacccatgca

SEQ ID NO: 4624482 - DNA, 25 bp, Homo sapien
ctcatccccacaccacttaacccta

SEQ ID NO: 4624483 - DNA, 25 bp, Homo sapien
ccacttaaccctagctgtctgtctg

SEQ ID NO: 4624484 - DNA, 25 bp, Homo sapien
cagagttgtgcgatgtcttttagac

SEQ ID NO: 4624485 - DNA, 25 bp, Homo sapien
ttagagtccgagtcctgtgtttcca

SEQ ID NO: 4624486 - DNA, 25 bp, Homo sapien
taggaatttctcactccctggtgat

SEQ ID NO: 4624487 - DNA, 25 bp, Homo sapien
tggctggtctataggaatttctcac

SEQ ID NO: 4624488 - DNA, 25 bp, Homo sapien
aagtcagctttgcttgttcgaactg

SEQ ID NO: 4624489 - DNA, 25 bp, Homo sapien
gttttcactggctggtctataggaa

SEQ ID NO: 4624490 - DNA, 25 bp, Homo sapien
caacaaaaataagaacagatcccat

SEQ ID NO: 4624491 - DNA, 25 bp, Homo sapien
caacaacaaaaataagaacagatcc

SEQ ID NO: 4624492 - DNA, 25 bp, Homo sapien
caagtgaaccaacaacaaaaataag

SEQ ID NO: 4624493 - DNA, 25 bp, Homo sapien
accaacaacaaaaataagaacagat

SEQ ID NO: 4624494 - DNA, 25 bp, Homo sapien
tgcaaaacggccactgttttcacaa

SEQ ID NO: 4624495 - DNA, 25 bp, Homo sapien
cacaggacactttcaacattttcaa

SEQ ID NO: 4624496 - DNA, 25 bp, Homo sapien
tcatccaactcggtgtccacaggac

SEQ ID NO: 4624497 - DNA, 25 bp, Homo sapien
ggtgtccacaggacactttcaacat

SEQ ID NO: 4624498 - DNA, 25 bp, Homo sapien
aaggaaaaggcgacctcatctgatg

SEQ ID NO: 4624499 - DNA, 25 bp, Homo sapien
gaccatccataagcaccatccataa

SEQ ID NO: 4624500 - DNA, 25 bp, Homo sapien
aaaaggcgacctcatctgatgtggg

SEQ ID NO: 4624501 - DNA, 25 bp, Homo sapien
tttggggaccatccataagcaccat

SEQ ID NO: 4624502 - DNA, 25 bp, Homo sapien
catttagggaaaatttgaggcatta

SEQ ID NO: 4624503 - DNA, 25 bp, Homo sapien
tgtcagtgctatatttccactgtgg

SEQ ID NO: 4624504 - DNA, 25 bp, Homo sapien
cattttaccacattgcattgtcatc

SEQ ID NO: 4624505 - DNA, 25 bp, Homo sapien
tccactgtggattctaatatgtcct

SEQ ID NO: 4624506 - DNA, 25 bp, Homo sapien
ctttcatcctcttcaccccacagca

SEQ ID NO: 4624507 - DNA, 25 bp, Homo sapien
tcttcaccccacagcactggttcct

SEQ ID NO: 4624508 - DNA, 25 bp, Homo sapien
accccacagcactggttccttttct

SEQ ID NO: 4624509 - DNA, 25 bp, Homo sapien
ttttcacttccactttcatcctctt

SEQ ID NO: 4624510 - DNA, 25 bp, Homo sapien
tcgttattattagcaccagtgccac

SEQ ID NO: 4624511 - DNA, 25 bp, Homo sapien
gttattattagcaccagtgccaccc

SEQ ID NO: 4624512 - DNA, 25 bp, Homo sapien
tattattagcaccagtgccacccaa

SEQ ID NO: 4624513 - DNA, 25 bp, Homo sapien
cttcgttattattagcaccagtgcc

SEQ ID NO: 4624514 - DNA, 25 bp, Homo sapien
ctgattgctataggtattattttca

SEQ ID NO: 4624515 - DNA, 25 bp, Homo sapien
aatgctacggtgttgtgacaaagtg

SEQ ID NO: 4624516 - DNA, 25 bp, Homo sapien
agatttgctggccagaaatgctacg

SEQ ID NO: 4624517 - DNA, 25 bp, Homo sapien
ccagaaatgctacggtgttgtgaca

SEQ ID NO: 4624518 - DNA, 25 bp, Homo sapien
gacaaagtgaataaataggaagcag

SEQ ID NO: 4624519 - DNA, 25 bp, Homo sapien
gaatggctactattccaatgccttt

SEQ ID NO: 4624520 - DNA, 25 bp, Homo sapien
ttttaacccatgtactgttgcatgc

SEQ ID NO: 4624521 - DNA, 25 bp, Homo sapien
tgttgtttatgcagtccttaatatg

SEQ ID NO: 4624522 - DNA, 25 bp, Homo sapien
tttatgcagtccttaatatgttctc

SEQ ID NO: 4624523 - DNA, 25 bp, Homo sapien
ccatcagactatctgtgttagaacc

SEQ ID NO: 4624524 - DNA, 25 bp, Homo sapien
catccatcagactatctgtgttaga

SEQ ID NO: 4624525 - DNA, 25 bp, Homo sapien
agaacaggaacaaggtatttttcag

SEQ ID NO: 4624526 - DNA, 25 bp, Homo sapien
aacatccatcagactatctgtgtta

SEQ ID NO: 4624527 - DNA, 25 bp, Homo sapien
caaccaaatggttcaactctggaag

SEQ ID NO: 4624528 - DNA, 25 bp, Homo sapien
caatatatttagtggctaaaagcca

SEQ ID NO: 4624529 - DNA, 25 bp, Homo sapien
gaaactgggatgtcaaaatgctcac

SEQ ID NO: 4624530 - DNA, 25 bp, Homo sapien
tccccatagacaggtactttaacgc

SEQ ID NO: 4624531 - DNA, 25 bp, Homo sapien
acagccagagtcagtacccagttga

SEQ ID NO: 4624532 - DNA, 25 bp, Homo sapien
gagtcagtacccagttgactgtttt

SEQ ID NO: 4624533 - DNA, 25 bp, Homo sapien
gaccctttagattccacagccagag

SEQ ID NO: 4624534 - DNA, 25 bp, Homo sapien
ttctttgtgaccctttagattccac

SEQ ID NO: 4624535 - DNA, 25 bp, Homo sapien
agatttgcagactgaggatctctga

SEQ ID NO: 4624536 - DNA, 25 bp, Homo sapien
aagatttgcagactgaggatctctg

SEQ ID NO: 4624537 - DNA, 25 bp, Homo sapien
gatttgcagactgaggatctctgag

SEQ ID NO: 4624538 - DNA, 25 bp, Homo sapien
ttgctctctaatgtagcaagaaggc

SEQ ID NO: 4624539 - DNA, 25 bp, Homo sapien
tcatggtacccatcaaaactcgaca

SEQ ID NO: 4624540 - DNA, 25 bp, Homo sapien
aaactcgacattcattattgctctc

SEQ ID NO: 4624541 - DNA, 25 bp, Homo sapien
tatagagaagggtcctcatggtacc

SEQ ID NO: 4624542 - DNA, 25 bp, Homo sapien
ctattacttctagaagtatgcccat

SEQ ID NO: 4624543 - DNA, 25 bp, Homo sapien
tctattacttctagaagtatgccca

SEQ ID NO: 4624544 - DNA, 25 bp, Homo sapien
ggaatttctaggtcgtttgtgtgtc

SEQ ID NO: 4624545 - DNA, 25 bp, Homo sapien
tctaggtcgtttgtgtgtcttgcaa

SEQ ID NO: 4624546 - DNA, 25 bp, Homo sapien
gtcttgcaaatgttcctttcgatgg

SEQ ID NO: 4624547 - DNA, 25 bp, Homo sapien
gttcctttcgatggacatcaactta

SEQ ID NO: 4624548 - DNA, 25 bp, Homo sapien
tcttacctgttcttagacatcctgg

SEQ ID NO: 4624549 - DNA, 25 bp, Homo sapien
tacgaccatttgattcagagggtgg

SEQ ID NO: 4624550 - DNA, 25 bp, Homo sapien
taaattaacatcaacatggtccctg

SEQ ID NO: 4624551 - DNA, 25 bp, Homo sapien
tggtccctgtacatatccctgtaga

SEQ ID NO: 4624552 - DNA, 25 bp, Homo sapien
gggctgtagttccatatgactgtcc

SEQ ID NO: 4624553 - DNA, 25 bp, Homo sapien
gactgtcctcattgccggaatgaac

SEQ ID NO: 4624554 - DNA, 25 bp, Homo sapien
tgtagttccatatgactgtcctcat

SEQ ID NO: 4624555 - DNA, 25 bp, Homo sapien
tgactgtcctcattgccggaatgaa

SEQ ID NO: 4624556 - DNA, 25 bp, Homo sapien
tccattgtagtctaggcccacagcc

SEQ ID NO: 4624557 - DNA, 25 bp, Homo sapien
cttcctttactgataaaagctccat

SEQ ID NO: 4624558 - DNA, 25 bp, Homo sapien
gataaaagctccattgtagtctagg

SEQ ID NO: 4624559 - DNA, 25 bp, Homo sapien
gaaggaactccacttcctttactga

SEQ ID NO: 4624560 - DNA, 25 bp, Homo sapien
ggtccacgaggtgtaggacaatgac

SEQ ID NO: 4624561 - DNA, 25 bp, Homo sapien
tatggtgtgagtcactgaatatgtg

SEQ ID NO: 4624562 - DNA, 25 bp, Homo sapien
ctactttatggtgtgagtcactgaa

SEQ ID NO: 4624563 - DNA, 25 bp, Homo sapien
tgtggtccacgaggtgtaggacaat

SEQ ID NO: 4624564 - DNA, 25 bp, Homo sapien
tattagggacaatgcagggtctccc

SEQ ID NO: 4624565 - DNA, 25 bp, Homo sapien
gcacaaggggcaccgttgcaattat

SEQ ID NO: 4624566 - DNA, 25 bp, Homo sapien
caagagagactttgagtgcccggga

SEQ ID NO: 4624567 - DNA, 25 bp, Homo sapien
tgggcaagagagactttgagtgccc

SEQ ID NO: 4624568 - DNA, 25 bp, Homo sapien
cagagtagttgaggctgtattcatt

SEQ ID NO: 4624569 - DNA, 25 bp, Homo sapien
gtagttgaggctgtattcattgtgg

SEQ ID NO: 4624570 - DNA, 25 bp, Homo sapien
ttcagagtagttgaggctgtattca

SEQ ID NO: 4624571 - DNA, 25 bp, Homo sapien
gagtagttgaggctgtattcattgt

SEQ ID NO: 4624572 - DNA, 25 bp, Homo sapien
gaagtaaactcattagacgtgtcag

SEQ ID NO: 4624573 - DNA, 25 bp, Homo sapien
taggaagacaaatatctcccagaca

SEQ ID NO: 4624574 - DNA, 25 bp, Homo sapien
taatgagaagtagttcagccagtgc

SEQ ID NO: 4624575 - DNA, 25 bp, Homo sapien
tacatctggcgatgctctgtggctc

SEQ ID NO: 4624576 - DNA, 25 bp, Homo sapien
tttagtctctagaccctctgggcag

SEQ ID NO: 4624577 - DNA, 25 bp, Homo sapien
tatataggcacctgacatcggacac

SEQ ID NO: 4624578 - DNA, 25 bp, Homo sapien
tattagactgactgtgtggctgacc

SEQ ID NO: 4624579 - DNA, 25 bp, Homo sapien
gacttagagatcacctctcaggagc

SEQ ID NO: 4624580 - DNA, 25 bp, Homo sapien
tctctgaggtcttggcatcatcttt

SEQ ID NO: 4624581 - DNA, 25 bp, Homo sapien
tagtggttattaagagctgagtctc

SEQ ID NO: 4624582 - DNA, 25 bp, Homo sapien
gttagtggttattaagagctgagtc

SEQ ID NO: 4624583 - DNA, 25 bp, Homo sapien
gttattaagagctgagtctctgagg

SEQ ID NO: 4624584 - DNA, 25 bp, Homo sapien
caaattcagctatctctaaggtgca

SEQ ID NO: 4624585 - DNA, 25 bp, Homo sapien
cttgcaacaacgataatttcagctc

SEQ ID NO: 4624586 - DNA, 25 bp, Homo sapien
tatcataccttgaagagaacctaag

SEQ ID NO: 4624587 - DNA, 25 bp, Homo sapien
tatgaacattgggagtagataacca

SEQ ID NO: 4624588 - DNA, 25 bp, Homo sapien
cttgtaacggagaaagatgaccact

SEQ ID NO: 4624589 - DNA, 25 bp, Homo sapien
tcttccagagtaatgaacacattac

SEQ ID NO: 4624590 - DNA, 25 bp, Homo sapien
attaccataggaaagattgtacacc

SEQ ID NO: 4624591 - DNA, 25 bp, Homo sapien
gaaagattgtacaccaggtagatga

SEQ ID NO: 4624592 - DNA, 25 bp, Homo sapien
cataggaaagattgtacaccaggta

SEQ ID NO: 4624593 - DNA, 25 bp, Homo sapien
ttcttcactaattagatgtctggac

SEQ ID NO: 4624594 - DNA, 25 bp, Homo sapien
tcttcactaattagatgtctggaca

SEQ ID NO: 4624595 - DNA, 25 bp, Homo sapien
cttcactaattagatgtctggacat

SEQ ID NO: 4624596 - DNA, 25 bp, Homo sapien
tcttcttcactaattagatgtctgg

SEQ ID NO: 4624597 - DNA, 25 bp, Homo sapien
tggagatcttggtcaacaattttca

SEQ ID NO: 4624598 - DNA, 25 bp, Homo sapien
ggagatcttggtcaacaattttcat

SEQ ID NO: 4624599 - DNA, 25 bp, Homo sapien
catggagatcttggtcaacaatttt

SEQ ID NO: 4624600 - DNA, 25 bp, Homo sapien
tccatggagatcttggtcaacaatt

SEQ ID NO: 4624601 - DNA, 25 bp, Homo sapien
gagtcgaacaagcccatgtgatgat

SEQ ID NO: 4624602 - DNA, 25 bp, Homo sapien
cagagtcgaacaagcccatgtgatg

SEQ ID NO: 4624603 - DNA, 25 bp, Homo sapien
tcagagtcgaacaagcccatgtgat

SEQ ID NO: 4624604 - DNA, 25 bp, Homo sapien
cccatgtgatgatttgagctctgag

SEQ ID NO: 4624605 - DNA, 25 bp, Homo sapien
gctttttcctttgcacgatttttca

SEQ ID NO: 4624606 - DNA, 25 bp, Homo sapien
catctcccattacatgagaaactgg

SEQ ID NO: 4624607 - DNA, 25 bp, Homo sapien
tagtcctagtagttatgaatcttga

SEQ ID NO: 4624608 - DNA, 25 bp, Homo sapien
gcctgagtgcttaggactgtttaga

SEQ ID NO: 4624609 - DNA, 25 bp, Homo sapien
ttaatgtctgaggatcgcttctggt

SEQ ID NO: 4624610 - DNA, 25 bp, Homo sapien
gataattcagtactaagaactttaa

SEQ ID NO: 4624611 - DNA, 25 bp, Homo sapien
tctgaggatcgcttctggtgacagc

SEQ ID NO: 4624612 - DNA, 25 bp, Homo sapien
gatcgcttctggtgacagccagttt

SEQ ID NO: 4624613 - DNA, 25 bp, Homo sapien
attttcataggtgggcgcactcagg

SEQ ID NO: 4624614 - DNA, 25 bp, Homo sapien
acaattttcataggtgggcgcactc

SEQ ID NO: 4624615 - DNA, 25 bp, Homo sapien
taacaattttcataggtgggcgcac

SEQ ID NO: 4624616 - DNA, 25 bp, Homo sapien
ataacaattttcataggtgggcgca

SEQ ID NO: 4624617 - DNA, 25 bp, Homo sapien
ggctttgtgatatgtgaaggtcatt

SEQ ID NO: 4624618 - DNA, 25 bp, Homo sapien
cttgctggctttgtgatatgtgaag

SEQ ID NO: 4624619 - DNA, 25 bp, Homo sapien
gatatgtgaaggtcattggtcagca

SEQ ID NO: 4624620 - DNA, 25 bp, Homo sapien
gtgaaggtcattggtcagcattttt

SEQ ID NO: 4624621 - DNA, 25 bp, Homo sapien
ctttaaacatgcatatccgattttc

SEQ ID NO: 4624622 - DNA, 25 bp, Homo sapien
taaacatgcatatccgattttcttc

SEQ ID NO: 4624623 - DNA, 25 bp, Homo sapien
tttaaacatgcatatccgattttct

SEQ ID NO: 4624624 - DNA, 25 bp, Homo sapien
ttaaacatgcatatccgattttctt

SEQ ID NO: 4624625 - DNA, 25 bp, Homo sapien
ttcctcttcacctgctggtgaagtc

SEQ ID NO: 4624626 - DNA, 25 bp, Homo sapien
tttcctcttcacctgctggtgaagt

SEQ ID NO: 4624627 - DNA, 25 bp, Homo sapien
tgtgtgcgtcgcatccttggcttgg

SEQ ID NO: 4624628 - DNA, 25 bp, Homo sapien
aagcccctggacttgtgtgcgtcgc

SEQ ID NO: 4624629 - DNA, 25 bp, Homo sapien
cctggacttgtgtgcgtcgcatcct

SEQ ID NO: 4624630 - DNA, 25 bp, Homo sapien
catccttggcttgggattttaagga

SEQ ID NO: 4624631 - DNA, 25 bp, Homo sapien
tacgaaggcttggaggcgcctctat

SEQ ID NO: 4624632 - DNA, 25 bp, Homo sapien
tggtcccggtctccatttccactgg

SEQ ID NO: 4624633 - DNA, 25 bp, Homo sapien
cctgatgccagggaattgactgacg

SEQ ID NO: 4624634 - DNA, 25 bp, Homo sapien
aggagcggccgcaactgagaatatc

SEQ ID NO: 4624635 - DNA, 25 bp, Homo sapien
agtgggcaggtaaagacgggatgcg

SEQ ID NO: 4624636 - DNA, 25 bp, Homo sapien
gctcctctattcgaaggacctcggg

SEQ ID NO: 4624637 - DNA, 25 bp, Homo sapien
gggattatgttcacgaagcgatgtg

SEQ ID NO: 4624638 - DNA, 25 bp, Homo sapien
aagcgatgtgtaggctcctctattc

SEQ ID NO: 4624639 - DNA, 25 bp, Homo sapien
taaatcttcacttctgcgctctgcg

SEQ ID NO: 4624640 - DNA, 25 bp, Homo sapien
tctggatcgatttcagagctgtgag

SEQ ID NO: 4624641 - DNA, 25 bp, Homo sapien
cgtttgccgctcaggaactcggttc

SEQ ID NO: 4624642 - DNA, 25 bp, Homo sapien
tgagtagcgctgctagaggtcatcc

SEQ ID NO: 4624643 - DNA, 25 bp, Homo sapien
tatgctatggattaccactactgca

SEQ ID NO: 4624644 - DNA, 25 bp, Homo sapien
ggatctgacagtatctttgagtctc

SEQ ID NO: 4624645 - DNA, 25 bp, Homo sapien
gggtacatcctctgatcctgaggtt

SEQ ID NO: 4624646 - DNA, 25 bp, Homo sapien
tccatagatagacctaagggtagcg

SEQ ID NO: 4624647 - DNA, 25 bp, Homo sapien
gtagcaaaggcataccagtaaagaa

SEQ ID NO: 4624648 - DNA, 25 bp, Homo sapien
tacaccaatagactgaatgctatgc

SEQ ID NO: 4624649 - DNA, 25 bp, Homo sapien
tgacaagatccgtgctctcagagct

SEQ ID NO: 4624650 - DNA, 25 bp, Homo sapien
tatctatgaaaagacagtacaccaa

SEQ ID NO: 4624651 - DNA, 25 bp, Homo sapien
acaccatgaccccaaccaattttat

SEQ ID NO: 4624652 - DNA, 25 bp, Homo sapien
tgtactgtaatgatccaaggtataa

SEQ ID NO: 4624653 - DNA, 25 bp, Homo sapien
gcagcttaatcttccatgatatgga

SEQ ID NO: 4624654 - DNA, 25 bp, Homo sapien
taacctctacctttgataccatctg

SEQ ID NO: 4624655 - DNA, 25 bp, Homo sapien
cttcaggaattcttttttcatcttc

SEQ ID NO: 4624656 - DNA, 25 bp, Homo sapien
ttcatcttccagtttagggaatccc

SEQ ID NO: 4624657 - DNA, 25 bp, Homo sapien
ttttcatcttccagtttagggaatc

SEQ ID NO: 4624658 - DNA, 25 bp, Homo sapien
attcttttttcatcttccagtttag

SEQ ID NO: 4624659 - DNA, 25 bp, Homo sapien
tctccccactaagaacatttgtgag

SEQ ID NO: 4624660 - DNA, 25 bp, Homo sapien
catctaaccgtaagtatagttcttg

SEQ ID NO: 4624661 - DNA, 25 bp, Homo sapien
catttgtgagttggcactctttcag

SEQ ID NO: 4624662 - DNA, 25 bp, Homo sapien
tggaacagaagctctactttgtctt

SEQ ID NO: 4624663 - DNA, 25 bp, Homo sapien
gcagcgttagaaccagccttagaaa

SEQ ID NO: 4624664 - DNA, 25 bp, Homo sapien
cacatagcttgttggtggcagcgtt

SEQ ID NO: 4624665 - DNA, 25 bp, Homo sapien
gaatgtgtcaaactccctgtctgcc

SEQ ID NO: 4624666 - DNA, 25 bp, Homo sapien
tttggccagcataccacatgtcatg

SEQ ID NO: 4624667 - DNA, 25 bp, Homo sapien
agtaatgcctcacccagaaatgctg

SEQ ID NO: 4624668 - DNA, 25 bp, Homo sapien
atgctgggagactatgctcccctct

SEQ ID NO: 4624669 - DNA, 25 bp, Homo sapien
tccttctcatgagaatggtctatag

SEQ ID NO: 4624670 - DNA, 25 bp, Homo sapien
cggttggtgccttggttagatgcta

SEQ ID NO: 4624671 - DNA, 25 bp, Homo sapien
ccaaagttagattctcaatgccagg

SEQ ID NO: 4624672 - DNA, 25 bp, Homo sapien
ccaggagaacctcctagaagtctgg

SEQ ID NO: 4624673 - DNA, 25 bp, Homo sapien
tgttgggaatcagaatgctggttag

SEQ ID NO: 4624674 - DNA, 25 bp, Homo sapien
gggatatagtagacaccaaagttag

SEQ ID NO: 4624675 - DNA, 25 bp, Homo sapien
ttcttcccttgtgggtccatagtgc

SEQ ID NO: 4624676 - DNA, 25 bp, Homo sapien
gacactgtgctggatgcatgcccat

SEQ ID NO: 4624677 - DNA, 25 bp, Homo sapien
gaagaaacaagcgaaagtctcagca

SEQ ID NO: 4624678 - DNA, 25 bp, Homo sapien
cagaaatgacatcgggacatagacc

SEQ ID NO: 4624679 - DNA, 25 bp, Homo sapien
tttgatcagggtacttcctcagaag

SEQ ID NO: 4624680 - DNA, 25 bp, Homo sapien
gaccactgtctaaaacaggatattt

SEQ ID NO: 4624681 - DNA, 25 bp, Homo sapien
catgggttctctgacgcagaagaca

SEQ ID NO: 4624682 - DNA, 25 bp, Homo sapien
atgtgaagacatatactcttttcta

SEQ ID NO: 4624683 - DNA, 25 bp, Homo sapien
ttttaggccaactaaatagcatggg

SEQ ID NO: 4624684 - DNA, 25 bp, Homo sapien
gatgaggaacaactcggagaggcat

SEQ ID NO: 4624685 - DNA, 25 bp, Homo sapien
ctcacaggggtggttttcagggatt

SEQ ID NO: 4624686 - DNA, 25 bp, Homo sapien
ggcccgcctcatggcttgtagacct

SEQ ID NO: 4624687 - DNA, 25 bp, Homo sapien
cccgcctcatggcttgtagacctgc

SEQ ID NO: 4624688 - DNA, 25 bp, Homo sapien
caggcccgcctcatggcttgtagac

SEQ ID NO: 4624689 - DNA, 25 bp, Homo sapien
tcaggcccgcctcatggcttgtaga

SEQ ID NO: 4624690 - DNA, 25 bp, Homo sapien
cactgctcttcccctcttgctcgtc

SEQ ID NO: 4624691 - DNA, 25 bp, Homo sapien
tcactgctcttcccctcttgctcgt

SEQ ID NO: 4624692 - DNA, 25 bp, Homo sapien
gcttgggctgcaagcataagcctca

SEQ ID NO: 4624693 - DNA, 25 bp, Homo sapien
ttgacagttacccttctactaagga

SEQ ID NO: 4624694 - DNA, 25 bp, Homo sapien
tgacagttacccttctactaaggat

SEQ ID NO: 4624695 - DNA, 25 bp, Homo sapien
tcacttgtatttcatcccatatctg

SEQ ID NO: 4624696 - DNA, 25 bp, Homo sapien
tctgtgccgaagattctttcttcat

SEQ ID NO: 4624697 - DNA, 25 bp, Homo sapien
tgtatttcatcccatatctgtgccg

SEQ ID NO: 4624698 - DNA, 25 bp, Homo sapien
catcccatatctgtgccgaagattc

SEQ ID NO: 4624699 - DNA, 25 bp, Homo sapien
caatgaacacgaattgtagtcatct

SEQ ID NO: 4624700 - DNA, 25 bp, Homo sapien
tcaatgaacacgaattgtagtcatc

SEQ ID NO: 4624701 - DNA, 25 bp, Homo sapien
gctccgcatgttgaagacagtacca

SEQ ID NO: 4624702 - DNA, 25 bp, Homo sapien
taattaactccatggtagctccgca

SEQ ID NO: 4624703 - DNA, 25 bp, Homo sapien
tagtgatcagttaagcagcaccttg

SEQ ID NO: 4624704 - DNA, 25 bp, Homo sapien
tctggtaccccgagtttagtgatca

SEQ ID NO: 4624705 - DNA, 25 bp, Homo sapien
aataacatagcttctggatcggcca

SEQ ID NO: 4624706 - DNA, 25 bp, Homo sapien
taccgctgacatttaacaccatatc

SEQ ID NO: 4624707 - DNA, 25 bp, Homo sapien
tagcttctggatcggccactcctct

SEQ ID NO: 4624708 - DNA, 25 bp, Homo sapien
atagtgcacccccttgtaataccgc

SEQ ID NO: 4624709 - DNA, 25 bp, Homo sapien
gagtgctgtctttggtcataatacc

SEQ ID NO: 4624710 - DNA, 25 bp, Homo sapien
aaagcaccacaaataccaccgtagc

SEQ ID NO: 4624711 - DNA, 25 bp, Homo sapien
gctaactatcactacaactgctgca

SEQ ID NO: 4624712 - DNA, 25 bp, Homo sapien
gcaatgaggcgtcacatttggtacc

SEQ ID NO: 4624713 - DNA, 25 bp, Homo sapien
atacggcactcagtgaaacagactg

SEQ ID NO: 4624714 - DNA, 25 bp, Homo sapien
catacggcactcagtgaaacagact

SEQ ID NO: 4624715 - DNA, 25 bp, Homo sapien
tacggcactcagtgaaacagactgt

SEQ ID NO: 4624716 - DNA, 25 bp, Homo sapien
gcactcagtgaaacagactgtattc

SEQ ID NO: 4624717 - DNA, 25 bp, Homo sapien
tattctcatgttttggttcaaagag

SEQ ID NO: 4624718 - DNA, 25 bp, Homo sapien
ttctcatgttttggttcaaagagta

SEQ ID NO: 4624719 - DNA, 25 bp, Homo sapien
tcatgttttggttcaaagagtaaag

SEQ ID NO: 4624720 - DNA, 25 bp, Homo sapien
ctattctcatgttttggttcaaaga

SEQ ID NO: 4624721 - DNA, 25 bp, Homo sapien
cccataacctgtagagtcttcgtta

SEQ ID NO: 4624722 - DNA, 25 bp, Homo sapien
cataacctgtagagtcttcgttacc

SEQ ID NO: 4624723 - DNA, 25 bp, Homo sapien
tacccattatttcaaggatgatata

SEQ ID NO: 4624724 - DNA, 25 bp, Homo sapien
gagtcttcgttacccattatttcaa

SEQ ID NO: 4624725 - DNA, 25 bp, Homo sapien
gctctggtaccaacagctggatatc

SEQ ID NO: 4624726 - DNA, 25 bp, Homo sapien
ctctctgggacccatccatggattt

SEQ ID NO: 4624727 - DNA, 25 bp, Homo sapien
tcctaacacggatgatgttcctgct

SEQ ID NO: 4624728 - DNA, 25 bp, Homo sapien
cctgctaatgtagatgctgaagtct

SEQ ID NO: 4624729 - DNA, 25 bp, Homo sapien
ctgcaaatataatatccatattccc

SEQ ID NO: 4624730 - DNA, 25 bp, Homo sapien
agcctgcaaatataatatccatatt

SEQ ID NO: 4624731 - DNA, 25 bp, Homo sapien
cagcctgcaaatataatatccatat

SEQ ID NO: 4624732 - DNA, 25 bp, Homo sapien
gcctgcaaatataatatccatattc

SEQ ID NO: 4624733 - DNA, 25 bp, Homo sapien
tagtgagtatctgatcctgtagggt

SEQ ID NO: 4624734 - DNA, 25 bp, Homo sapien
gaactgctttcgaggatttgaggaa

SEQ ID NO: 4624735 - DNA, 25 bp, Homo sapien
tgtagggtagaactgctttcgagga

SEQ ID NO: 4624736 - DNA, 25 bp, Homo sapien
tgagtatctgatcctgtagggtaga

SEQ ID NO: 4624737 - DNA, 25 bp, Homo sapien
atgtagtatgaatctcataatcttg

SEQ ID NO: 4624738 - DNA, 25 bp, Homo sapien
agtatgaatctcataatcttgtatg

SEQ ID NO: 4624739 - DNA, 25 bp, Homo sapien
ttttctgaagtgtttggatcttcat

SEQ ID NO: 4624740 - DNA, 25 bp, Homo sapien
gtagtatgaatctcataatcttgta

SEQ ID NO: 4624741 - DNA, 25 bp, Homo sapien
ccaagaaacagcaagtgaaccttaa

SEQ ID NO: 4624742 - DNA, 25 bp, Homo sapien
tccttggagggttctagcgcagata

SEQ ID NO: 4624743 - DNA, 25 bp, Homo sapien
agtgaaccttaaagccatccttgga

SEQ ID NO: 4624744 - DNA, 25 bp, Homo sapien
gaatgacgatcttcagatgtccaag

SEQ ID NO: 4624745 - DNA, 25 bp, Homo sapien
cagccagcgatgtcaaggaaagagt

SEQ ID NO: 4624746 - DNA, 25 bp, Homo sapien
gcgatgtcaaggaaagagttcctca

SEQ ID NO: 4624747 - DNA, 25 bp, Homo sapien
atgacagccagcgatgtcaaggaaa

SEQ ID NO: 4624748 - DNA, 25 bp, Homo sapien
aagtctctccatacagccatgacag

SEQ ID NO: 4624749 - DNA, 25 bp, Homo sapien
gcagccgattttccccttaacctga

SEQ ID NO: 4624750 - DNA, 25 bp, Homo sapien
tgcagccgattttccccttaacctg

SEQ ID NO: 4624751 - DNA, 25 bp, Homo sapien
gtctgcagccgattttccccttaac

SEQ ID NO: 4624752 - DNA, 25 bp, Homo sapien
tcagtctgcagccgattttcccctt

SEQ ID NO: 4624753 - DNA, 25 bp, Homo sapien
gaagccgctagagtagcagctggaa

SEQ ID NO: 4624754 - DNA, 25 bp, Homo sapien
tctactatcaggtttgaggaaagct

SEQ ID NO: 4624755 - DNA, 25 bp, Homo sapien
ctggaacagcaactgggaaagcagc

SEQ ID NO: 4624756 - DNA, 25 bp, Homo sapien
aaaccttgaggctgaagcaatggcc

SEQ ID NO: 4624757 - DNA, 25 bp, Homo sapien
caaggtagcttggtctggcacagtg

SEQ ID NO: 4624758 - DNA, 25 bp, Homo sapien
cacagtgtttggcaataggtccttg

SEQ ID NO: 4624759 - DNA, 25 bp, Homo sapien
gggctgtcactaccccttctaggtc

SEQ ID NO: 4624760 - DNA, 25 bp, Homo sapien
tagagctttgtattgcagcaccaag

SEQ ID NO: 4624761 - DNA, 25 bp, Homo sapien
tctggccaaattgggtgccctgttt

SEQ ID NO: 4624762 - DNA, 25 bp, Homo sapien
tggaaggggatatcatttcaattac

SEQ ID NO: 4624763 - DNA, 25 bp, Homo sapien
ctgagtggatattgccctattccat

SEQ ID NO: 4624764 - DNA, 25 bp, Homo sapien
tccatttctagtgctattctggcca

SEQ ID NO: 4624765 - DNA, 25 bp, Homo sapien
tcaattcctattggtcctccagttc

SEQ ID NO: 4624766 - DNA, 25 bp, Homo sapien
cttgttggggattcttttaactcat

SEQ ID NO: 4624767 - DNA, 25 bp, Homo sapien
tgattcacttgttggggattctttt

SEQ ID NO: 4624768 - DNA, 25 bp, Homo sapien
attgattcacttgttggggattctt

SEQ ID NO: 4624769 - DNA, 25 bp, Homo sapien
gattcacttgttggggattctttta

SEQ ID NO: 4624770 - DNA, 25 bp, Homo sapien
ggctggtggctcctttgagagtttc

SEQ ID NO: 4624771 - DNA, 25 bp, Homo sapien
gcttttaaactcagaccttttcata

SEQ ID NO: 4624772 - DNA, 25 bp, Homo sapien
gagtttcagctatctcactcaaaat

SEQ ID NO: 4624773 - DNA, 25 bp, Homo sapien
ctgaagcttttaaactcagaccttt

SEQ ID NO: 4624774 - DNA, 25 bp, Homo sapien
gtttctcctcgttcctaataatgtc

SEQ ID NO: 4624775 - DNA, 25 bp, Homo sapien
ttcctaataatgtcaacttcttcct

SEQ ID NO: 4624776 - DNA, 25 bp, Homo sapien
ttgtgaaaaatccatgccactggca

SEQ ID NO: 4624777 - DNA, 25 bp, Homo sapien
tgtctgtggtcaatatatctgctgg

SEQ ID NO: 4624778 - DNA, 25 bp, Homo sapien
tccatagaggagttacacagttttg

SEQ ID NO: 4624779 - DNA, 25 bp, Homo sapien
caggtcaagttggagtaaggagttc

SEQ ID NO: 4624780 - DNA, 25 bp, Homo sapien
ttatcaatgagttgtccaattgttg

SEQ ID NO: 4624781 - DNA, 25 bp, Homo sapien
ccagtttatcaatgagttgtccaat

SEQ ID NO: 4624782 - DNA, 25 bp, Homo sapien
caatgagttgtccaattgttggata

SEQ ID NO: 4624783 - DNA, 25 bp, Homo sapien
tgagttgtccaattgttggatattc

SEQ ID NO: 4624784 - DNA, 25 bp, Homo sapien
tagtctatttcagtgcagttttgtt

SEQ ID NO: 4624785 - DNA, 25 bp, Homo sapien
ctagtctatttcagtgcagttttgt

SEQ ID NO: 4624786 - DNA, 25 bp, Homo sapien
agtctatttcagtgcagttttgttc

SEQ ID NO: 4624787 - DNA, 25 bp, Homo sapien
taccaaatctaatgtctgcatgcat

SEQ ID NO: 4624788 - DNA, 25 bp, Homo sapien
attaccaaatctaatgtctgcatgc

SEQ ID NO: 4624789 - DNA, 25 bp, Homo sapien
ttaccaaatctaatgtctgcatgca

SEQ ID NO: 4624790 - DNA, 25 bp, Homo sapien
attcagtagtcacatactgatactt

SEQ ID NO: 4624791 - DNA, 25 bp, Homo sapien
tcattcagtagtcacatactgatac

SEQ ID NO: 4624792 - DNA, 25 bp, Homo sapien
cattcagtagtcacatactgatact

SEQ ID NO: 4624793 - DNA, 25 bp, Homo sapien
ttcagtagtcacatactgatacttc

SEQ ID NO: 4624794 - DNA, 25 bp, Homo sapien
ttctctctcagtttagattcccctt

SEQ ID NO: 4624795 - DNA, 25 bp, Homo sapien
tctctcagtttagattccccttctg

SEQ ID NO: 4624796 - DNA, 25 bp, Homo sapien
tatccttcctatgcagatatcagcc

SEQ ID NO: 4624797 - DNA, 25 bp, Homo sapien
ttatccttcctatgcagatatcagc

SEQ ID NO: 4624798 - DNA, 25 bp, Homo sapien
ttgcttatccttcctatgcagatat

SEQ ID NO: 4624799 - DNA, 25 bp, Homo sapien
gcttatccttcctatgcagatatca

SEQ ID NO: 4624800 - DNA, 25 bp, Homo sapien
ttctctcctctcgttctcactgctg

SEQ ID NO: 4624801 - DNA, 25 bp, Homo sapien
agcaggactctgagcgtggacatca

SEQ ID NO: 4624802 - DNA, 25 bp, Homo sapien
gcaggactctgagcgtggacatcac

SEQ ID NO: 4624803 - DNA, 25 bp, Homo sapien
ttgagctcatgttcgttcaatttca

SEQ ID NO: 4624804 - DNA, 25 bp, Homo sapien
tttgagctcatgttcgttcaatttc

SEQ ID NO: 4624805 - DNA, 25 bp, Homo sapien
tatttgagctcatgttcgttcaatt

SEQ ID NO: 4624806 - DNA, 25 bp, Homo sapien
ttatttgagctcatgttcgttcaat

SEQ ID NO: 4624807 - DNA, 25 bp, Homo sapien
catttaacttctttcgctttcacag

SEQ ID NO: 4624808 - DNA, 25 bp, Homo sapien
acttctgccaataatgttgccatta

SEQ ID NO: 4624809 - DNA, 25 bp, Homo sapien
aacttctttcgctttcacagaaaca

SEQ ID NO: 4624810 - DNA, 25 bp, Homo sapien
caaacatgtccttttcctgagattc

SEQ ID NO: 4624811 - DNA, 25 bp, Homo sapien
gaaccatttgcatcagcagctgtta

SEQ ID NO: 4624812 - DNA, 25 bp, Homo sapien
gaaggggccactcttagagaaccat

SEQ ID NO: 4624813 - DNA, 25 bp, Homo sapien
cagcagctgttagaagatatcccca

SEQ ID NO: 4624814 - DNA, 25 bp, Homo sapien
gggacagatccagcttagaaggggc

SEQ ID NO: 4624815 - DNA, 25 bp, Homo sapien
catttctagcgcctggatgtagcta

SEQ ID NO: 4624816 - DNA, 25 bp, Homo sapien
ctgaggaaggtttcccagagctttg

SEQ ID NO: 4624817 - DNA, 25 bp, Homo sapien
gaatctctggatccaaaagtcactg

SEQ ID NO: 4624818 - DNA, 25 bp, Homo sapien
tgtccactcttgaatgaatctctgg

SEQ ID NO: 4624819 - DNA, 25 bp, Homo sapien
attttaaagagagagatatgaggta

SEQ ID NO: 4624820 - DNA, 25 bp, Homo sapien
gagagatatgaggtactccagcagc

SEQ ID NO: 4624821 - DNA, 25 bp, Homo sapien
taaagagagagatatgaggtactcc

SEQ ID NO: 4624822 - DNA, 25 bp, Homo sapien
agagatatgaggtactccagcagct

SEQ ID NO: 4624823 - DNA, 25 bp, Homo sapien
tgcagccgataaaagtgtgaattcc

SEQ ID NO: 4624824 - DNA, 25 bp, Homo sapien
cagtcatactgcagccgataaaagt

SEQ ID NO: 4624825 - DNA, 25 bp, Homo sapien
catactgcagccgataaaagtgtga

SEQ ID NO: 4624826 - DNA, 25 bp, Homo sapien
cagccgataaaagtgtgaattcctt

SEQ ID NO: 4624827 - DNA, 25 bp, Homo sapien
catgatgtatcaggatttccctgag

SEQ ID NO: 4624828 - DNA, 25 bp, Homo sapien
cccagagaaatattaacgacaggaa

SEQ ID NO: 4624829 - DNA, 25 bp, Homo sapien
ttaataagcaaatataatgcaggtg

SEQ ID NO: 4624830 - DNA, 25 bp, Homo sapien
ccctgagcaggatttacggtgactg

SEQ ID NO: 4624831 - DNA, 25 bp, Homo sapien
ctccactgggtataagtctccccat

SEQ ID NO: 4624832 - DNA, 25 bp, Homo sapien
gcctccactgggtataagtctcccc

SEQ ID NO: 4624833 - DNA, 25 bp, Homo sapien
cctccactgggtataagtctcccca

SEQ ID NO: 4624834 - DNA, 25 bp, Homo sapien
ctccagacaggtcaggctactgcct

SEQ ID NO: 4624835 - DNA, 25 bp, Homo sapien
catcttttgggtttgcctgttcggt

SEQ ID NO: 4624836 - DNA, 25 bp, Homo sapien
tgttgcacatctttttaggagtggg

SEQ ID NO: 4624837 - DNA, 25 bp, Homo sapien
ctccagtaatagaagaggagcttgc

SEQ ID NO: 4624838 - DNA, 25 bp, Homo sapien
gcctgttcggttccaatgttgttat

SEQ ID NO: 4624839 - DNA, 25 bp, Homo sapien
agcagaagatgggatgttccaccag

SEQ ID NO: 4624840 - DNA, 25 bp, Homo sapien
tgctgctgcttaggtttgagcagaa

SEQ ID NO: 4624841 - DNA, 25 bp, Homo sapien
gctgcttaggtttgagcagaagatg

SEQ ID NO: 4624842 - DNA, 25 bp, Homo sapien
tgggatgttccaccagggctctgct

SEQ ID NO: 4624843 - DNA, 25 bp, Homo sapien
gtgatgcattgagtaatccacagca

SEQ ID NO: 4624844 - DNA, 25 bp, Homo sapien
tgatgcattgagtaatccacagcaa

SEQ ID NO: 4624845 - DNA, 25 bp, Homo sapien
gatgcattgagtaatccacagcaat

SEQ ID NO: 4624846 - DNA, 25 bp, Homo sapien
tgtgatgcattgagtaatccacagc

SEQ ID NO: 4624847 - DNA, 25 bp, Homo sapien
cactagtttagggtaccatgcaccc

SEQ ID NO: 4624848 - DNA, 25 bp, Homo sapien
gtagctaaattttaagcatattctc

SEQ ID NO: 4624849 - DNA, 25 bp, Homo sapien
tttcactagtttagggtaccatgca

SEQ ID NO: 4624850 - DNA, 25 bp, Homo sapien
aatttcactagtttagggtaccatg

SEQ ID NO: 4624851 - DNA, 25 bp, Homo sapien
cttgatatttcctcctaaaggtgca

SEQ ID NO: 4624852 - DNA, 25 bp, Homo sapien
catcaacaaaaaagggtaaggtctg

SEQ ID NO: 4624853 - DNA, 25 bp, Homo sapien
gtaaggtctggattcgcaagggcat

SEQ ID NO: 4624854 - DNA, 25 bp, Homo sapien
ggtgcagagacatgaaccatcaaca

SEQ ID NO: 4624855 - DNA, 25 bp, Homo sapien
catctccaggttgcgcttttctaag

SEQ ID NO: 4624856 - DNA, 25 bp, Homo sapien
gatgggtaaggtgctttcatgttgc

SEQ ID NO: 4624857 - DNA, 25 bp, Homo sapien
ttgttccatgtatcctaagcctttg

SEQ ID NO: 4624858 - DNA, 25 bp, Homo sapien
tctaagcgcaagtggattgttccat

SEQ ID NO: 4624859 - DNA, 25 bp, Homo sapien
tattttacataagaggcgtccagga

SEQ ID NO: 4624860 - DNA, 25 bp, Homo sapien
tgtttttaccccaggactgcaagaa

SEQ ID NO: 4624861 - DNA, 25 bp, Homo sapien
cgttgaacattaatggaggactctc

SEQ ID NO: 4624862 - DNA, 25 bp, Homo sapien
tatactcacacccaacagaaggctg

SEQ ID NO: 4624863 - DNA, 25 bp, Homo sapien
cacagctggccggtgttcttgatct

SEQ ID NO: 4624864 - DNA, 25 bp, Homo sapien
gccggtgttcttgatctgataagga

SEQ ID NO: 4624865 - DNA, 25 bp, Homo sapien
gatctgataaggatatgcagcccat

SEQ ID NO: 4624866 - DNA, 25 bp, Homo sapien
tcttgatctgataaggatatgcagc

SEQ ID NO: 4624867 - DNA, 25 bp, Homo sapien
tctgcttgaaagtaagtgtgcttaa

SEQ ID NO: 4624868 - DNA, 25 bp, Homo sapien
ttttgagcaaggtaatttcttgagg

SEQ ID NO: 4624869 - DNA, 25 bp, Homo sapien
tttgagcaaggtaatttcttgaggc

SEQ ID NO: 4624870 - DNA, 25 bp, Homo sapien
gcttgaaagtaagtgtgcttaacat

SEQ ID NO: 4624871 - DNA, 25 bp, Homo sapien
tagcagagcctgcttccatgtattt

SEQ ID NO: 4624872 - DNA, 25 bp, Homo sapien
gcagagcctgcttccatgtatttac

SEQ ID NO: 4624873 - DNA, 25 bp, Homo sapien
attgaaaattttagcagagcctgct

SEQ ID NO: 4624874 - DNA, 25 bp, Homo sapien
aattttagcagagcctgcttccatg

SEQ ID NO: 4624875 - DNA, 25 bp, Homo sapien
caacgatgacccttacacccaccat

SEQ ID NO: 4624876 - DNA, 25 bp, Homo sapien
cagtgaggttgtttccacgtttgga

SEQ ID NO: 4624877 - DNA, 25 bp, Homo sapien
ctggagctgaaagcgtgagtggagc

SEQ ID NO: 4624878 - DNA, 25 bp, Homo sapien
ccatcgaggcacaggcatatggtga

SEQ ID NO: 4624879 - DNA, 25 bp, Homo sapien
ctggaactagaggcagctccagagt

SEQ ID NO: 4624880 - DNA, 25 bp, Homo sapien
cccccaggtattacagggcagccca

SEQ ID NO: 4624881 - DNA, 25 bp, Homo sapien
cacccccaggtattacagggcagcc

SEQ ID NO: 4624882 - DNA, 25 bp, Homo sapien
cccaggtattacagggcagcccagg

SEQ ID NO: 4624883 - DNA, 25 bp, Homo sapien
gcacccccaggtattacagggcagc

SEQ ID NO: 4624884 - DNA, 25 bp, Homo sapien
tgttgaggagagcaagatgttctcg

SEQ ID NO: 4624885 - DNA, 25 bp, Homo sapien
gatgccgacgtaggcttattgctca

SEQ ID NO: 4624886 - DNA, 25 bp, Homo sapien
cacatttcaagggtcctgcttcagg

SEQ ID NO: 4624887 - DNA, 25 bp, Homo sapien
gccttttccaatgatgccgacgtag

SEQ ID NO: 4624888 - DNA, 25 bp, Homo sapien
caagtgaaacataggcccaaggtgg

SEQ ID NO: 4624889 - DNA, 25 bp, Homo sapien
gaaacataggcccaaggtggacacc

SEQ ID NO: 4624890 - DNA, 25 bp, Homo sapien
gccgcaagtgaaacataggcccaag

SEQ ID NO: 4624891 - DNA, 25 bp, Homo sapien
aaacataggcccaaggtggacacca

SEQ ID NO: 4624892 - DNA, 25 bp, Homo sapien
aatgagctcgccgataggggcttcc

SEQ ID NO: 4624893 - DNA, 25 bp, Homo sapien
ggtgacaatgggttcaagctccaat

SEQ ID NO: 4624894 - DNA, 25 bp, Homo sapien
tccgaggaccgaaccgtgaagccgc

SEQ ID NO: 4624895 - DNA, 25 bp, Homo sapien
ccgaggaccgaaccgtgaagccgct

SEQ ID NO: 4624896 - DNA, 25 bp, Homo sapien
ccgtgttaagcccaccagtgaacgg

SEQ ID NO: 4624897 - DNA, 25 bp, Homo sapien
tgaacggctttcctgggcaatctgc

SEQ ID NO: 4624898 - DNA, 25 bp, Homo sapien
ttaagcccaccagtgaacggctttc

SEQ ID NO: 4624899 - DNA, 25 bp, Homo sapien
agtgaacggctttcctgggcaatct

SEQ ID NO: 4624900 - DNA, 25 bp, Homo sapien
tttcatggtctttcaccaagagtac

SEQ ID NO: 4624901 - DNA, 25 bp, Homo sapien
tcatggtctttcaccaagagtactt

SEQ ID NO: 4624902 - DNA, 25 bp, Homo sapien
tggtttcatggtctttcaccaagag

SEQ ID NO: 4624903 - DNA, 25 bp, Homo sapien
tgttggtttcatggtctttcaccaa

SEQ ID NO: 4624904 - DNA, 25 bp, Homo sapien
gaggcggtccacgtctaccactttc

SEQ ID NO: 4624905 - DNA, 25 bp, Homo sapien
tggtttgttggcttgttccacctcg

SEQ ID NO: 4624906 - DNA, 25 bp, Homo sapien
aatatccaccgtcatccatgtgtcc

SEQ ID NO: 4624907 - DNA, 25 bp, Homo sapien
tctttttactggatgtggtcccctg

SEQ ID NO: 4624908 - DNA, 25 bp, Homo sapien
ggtgcataagctctagtatcatgag

SEQ ID NO: 4624909 - DNA, 25 bp, Homo sapien
gcataagctctagtatcatgagaac

SEQ ID NO: 4624910 - DNA, 25 bp, Homo sapien
acaaataatcatttctacaagaggg

SEQ ID NO: 4624911 - DNA, 25 bp, Homo sapien
aatcatttctacaagagggcagcag

SEQ ID NO: 4624912 - DNA, 25 bp, Homo sapien
tcatgatcacgaccatatctatctc

SEQ ID NO: 4624913 - DNA, 25 bp, Homo sapien
cgaccatatctatctctatcgctat

SEQ ID NO: 4624914 - DNA, 25 bp, Homo sapien
atagtcatgatcacgaccatatcta

SEQ ID NO: 4624915 - DNA, 25 bp, Homo sapien
tgatcacgaccatatctatctctat

SEQ ID NO: 4624916 - DNA, 25 bp, Homo sapien
catatccgtcacatgagctgctgta

SEQ ID NO: 4624917 - DNA, 25 bp, Homo sapien
gtggaggagggtatcctctttccat

SEQ ID NO: 4624918 - DNA, 25 bp, Homo sapien
tcctctttccatagaaggggtaagc

SEQ ID NO: 4624919 - DNA, 25 bp, Homo sapien
cccgatcacgaccacttgagtagag

SEQ ID NO: 4624920 - DNA, 25 bp, Homo sapien
tccccctctatcagatcggcttcct

SEQ ID NO: 4624921 - DNA, 25 bp, Homo sapien
ccctctatcagatcggcttcctcca

SEQ ID NO: 4624922 - DNA, 25 bp, Homo sapien
cccctctatcagatcggcttcctcc

SEQ ID NO: 4624923 - DNA, 25 bp, Homo sapien
ctccccctctatcagatcggcttcc

SEQ ID NO: 4624924 - DNA, 25 bp, Homo sapien
tctttgaactgggattttggtccaa

SEQ ID NO: 4624925 - DNA, 25 bp, Homo sapien
tagaatagcttccactttttgtttc

SEQ ID NO: 4624926 - DNA, 25 bp, Homo sapien
atgatagaatagcttccactttttg

SEQ ID NO: 4624927 - DNA, 25 bp, Homo sapien
tgggtagttatgatagaatagcttc

SEQ ID NO: 4624928 - DNA, 25 bp, Homo sapien
gtttactgggtgaatagcactttcc

SEQ ID NO: 4624929 - DNA, 25 bp, Homo sapien
ttactgggtgaatagcactttcctt

SEQ ID NO: 4624930 - DNA, 25 bp, Homo sapien
ggtttactgggtgaatagcactttc

SEQ ID NO: 4624931 - DNA, 25 bp, Homo sapien
ctgggtgaatagcactttccttaca

SEQ ID NO: 4624932 - DNA, 25 bp, Homo sapien
tttcaaacggtctaactgctttgta

SEQ ID NO: 4624933 - DNA, 25 bp, Homo sapien
actttcctgttgatacccggtgtca

SEQ ID NO: 4624934 - DNA, 25 bp, Homo sapien
ctattcaactatgatgtgctgggta

SEQ ID NO: 4624935 - DNA, 25 bp, Homo sapien
ggtgtcaatttggtgctgtctttca

SEQ ID NO: 4624936 - DNA, 25 bp, Homo sapien
tatgccagtgggagaagctgctttt

SEQ ID NO: 4624937 - DNA, 25 bp, Homo sapien
ctatgccagtgggagaagctgcttt

SEQ ID NO: 4624938 - DNA, 25 bp, Homo sapien
atgccagtgggagaagctgcttttc

SEQ ID NO: 4624939 - DNA, 25 bp, Homo sapien
aaagtgatcggcttttcagtctcag

SEQ ID NO: 4624940 - DNA, 25 bp, Homo sapien
ggttggatcaaagtgatcggctttt

SEQ ID NO: 4624941 - DNA, 25 bp, Homo sapien
tttcagtctcagtggttgacaggaa

SEQ ID NO: 4624942 - DNA, 25 bp, Homo sapien
tctcagtggttgacaggaagagcat

SEQ ID NO: 4624943 - DNA, 25 bp, Homo sapien
ggtgagaaaaatttaggagagctga

SEQ ID NO: 4624944 - DNA, 25 bp, Homo sapien
ccctggttgtcttgatcaaatatga

SEQ ID NO: 4624945 - DNA, 25 bp, Homo sapien
tgcaggttactttcttccctggttg

SEQ ID NO: 4624946 - DNA, 25 bp, Homo sapien
tgaggacggattgcaggttactttc

SEQ ID NO: 4624947 - DNA, 25 bp, Homo sapien
cagctgatattggtttaatttgact

SEQ ID NO: 4624948 - DNA, 25 bp, Homo sapien
tctgtgggtaggttgtaattcagct

SEQ ID NO: 4624949 - DNA, 25 bp, Homo sapien
taatttgactgggtacctcttcctg

SEQ ID NO: 4624950 - DNA, 25 bp, Homo sapien
tcctgaagttccagtgggtagggtg

SEQ ID NO: 4624951 - DNA, 25 bp, Homo sapien
tagacaacatctatatttccccaga

SEQ ID NO: 4624952 - DNA, 25 bp, Homo sapien
gacaacatctatatttccccagact

SEQ ID NO: 4624953 - DNA, 25 bp, Homo sapien
ctagacaacatctatatttccccag

SEQ ID NO: 4624954 - DNA, 25 bp, Homo sapien
aacatctatatttccccagactgac

SEQ ID NO: 4624955 - DNA, 25 bp, Homo sapien
caaaacagtcccctttggataatcg

SEQ ID NO: 4624956 - DNA, 25 bp, Homo sapien
gtcccctttggataatcgccattcc

SEQ ID NO: 4624957 - DNA, 25 bp, Homo sapien
aacagtcccctttggataatcgcca

SEQ ID NO: 4624958 - DNA, 25 bp, Homo sapien
cctttggataatcgccattccaggc

SEQ ID NO: 4624959 - DNA, 25 bp, Homo sapien
gctgactctttgcagatgcatttca

SEQ ID NO: 4624960 - DNA, 25 bp, Homo sapien
ttattcggctgactctttgcagatg

SEQ ID NO: 4624961 - DNA, 25 bp, Homo sapien
agttctttttgaattatagcccaat

SEQ ID NO: 4624962 - DNA, 25 bp, Homo sapien
tctttttgaattatagcccaattta

SEQ ID NO: 4624963 - DNA, 25 bp, Homo sapien
tgacggacccagactttgctgatga

SEQ ID NO: 4624964 - DNA, 25 bp, Homo sapien
tagattctggtgagcgccttagctg

SEQ ID NO: 4624965 - DNA, 25 bp, Homo sapien
cagggatgggtagttggtgaaagtg

SEQ ID NO: 4624966 - DNA, 25 bp, Homo sapien
aggagagtgacggacccagactttg

SEQ ID NO: 4624967 - DNA, 25 bp, Homo sapien
agatccccccggccatcctcgtggc

SEQ ID NO: 4624968 - DNA, 25 bp, Homo sapien
gatccccccggccatcctcgtggcc

SEQ ID NO: 4624969 - DNA, 25 bp, Homo sapien
cctctggttcttggtctcgaggctc

SEQ ID NO: 4624970 - DNA, 25 bp, Homo sapien
gttcttggtctcgaggctcctcgct

SEQ ID NO: 4624971 - DNA, 25 bp, Homo sapien
ctggttcttggtctcgaggctcctc

SEQ ID NO: 4624972 - DNA, 25 bp, Homo sapien
tggttcttggtctcgaggctcctcg

SEQ ID NO: 4624973 - DNA, 25 bp, Homo sapien
gccccagtctctgacttagggtctc

SEQ ID NO: 4624974 - DNA, 25 bp, Homo sapien
ctgaatggtaatggccccagtctct

SEQ ID NO: 4624975 - DNA, 25 bp, Homo sapien
agggtctcttcttctccaggtgcac

SEQ ID NO: 4624976 - DNA, 25 bp, Homo sapien
ttagggtctcttcttctccaggtgc

SEQ ID NO: 4624977 - DNA, 25 bp, Homo sapien
aacaatgtgggcattgtccatagta

SEQ ID NO: 4624978 - DNA, 25 bp, Homo sapien
caatgtgggcattgtccatagtatt

SEQ ID NO: 4624979 - DNA, 25 bp, Homo sapien
agaacaatgtgggcattgtccatag

SEQ ID NO: 4624980 - DNA, 25 bp, Homo sapien
gcagaacaatgtgggcattgtccat

SEQ ID NO: 4624981 - DNA, 25 bp, Homo sapien
aaagtcatcagcagcaagaccagca

SEQ ID NO: 4624982 - DNA, 25 bp, Homo sapien
tcatcagcagcaagaccagcattgt

SEQ ID NO: 4624983 - DNA, 25 bp, Homo sapien
gtcatcagcagcaagaccagcattg

SEQ ID NO: 4624984 - DNA, 25 bp, Homo sapien
cagcagcaagaccagcattgtcaac

SEQ ID NO: 4624985 - DNA, 25 bp, Homo sapien
tttctctctccacagaccggcgcat

SEQ ID NO: 4624986 - DNA, 25 bp, Homo sapien
aaagcctcgatctgtgtcttcagct

SEQ ID NO: 4624987 - DNA, 25 bp, Homo sapien
ccttgaaagcctcgatctgtgtctt

SEQ ID NO: 4624988 - DNA, 25 bp, Homo sapien
tgaaagcctcgatctgtgtcttcag

SEQ ID NO: 4624989 - DNA, 25 bp, Homo sapien
actgttaacccagagctgcaatctg

SEQ ID NO: 4624990 - DNA, 25 bp, Homo sapien
ctccactgttaacccagagctgcaa

SEQ ID NO: 4624991 - DNA, 25 bp, Homo sapien
tggggccatctacctccactgttaa

SEQ ID NO: 4624992 - DNA, 25 bp, Homo sapien
ttagcgagatcctgagatttggggc

SEQ ID NO: 4624993 - DNA, 25 bp, Homo sapien
ttccatgagcgtcacttcggcagct

SEQ ID NO: 4624994 - DNA, 25 bp, Homo sapien
ctcgggctgttctcccaattggcct

SEQ ID NO: 4624995 - DNA, 25 bp, Homo sapien
cagctcttcgttattgggcccggat

SEQ ID NO: 4624996 - DNA, 25 bp, Homo sapien
attggccttgttatttctcatcaag

SEQ ID NO: 4624997 - DNA, 25 bp, Homo sapien
ctatccagcgggtggcagtctttcg

SEQ ID NO: 4624998 - DNA, 25 bp, Homo sapien
atccagcgggtggcagtctttcgga

SEQ ID NO: 4624999 - DNA, 25 bp, Homo sapien
tccagcgggtggcagtctttcggat

SEQ ID NO: 4625000 - DNA, 25 bp, Homo sapien
tatccagcgggtggcagtctttcgg

SEQ ID NO: 4625001 - DNA, 25 bp, Homo sapien
tgtcgcagatttcgttaaacatcat

SEQ ID NO: 4625002 - DNA, 25 bp, Homo sapien
tcatattcgatgtatcgactcgctc

SEQ ID NO: 4625003 - DNA, 25 bp, Homo sapien
gaacttctagggaagtcatattcga

SEQ ID NO: 4625004 - DNA, 25 bp, Homo sapien
tcgctcctaaacgttctccttcagt

SEQ ID NO: 4625005 - DNA, 25 bp, Homo sapien
tatttggaggtgtgaaaataagtca

SEQ ID NO: 4625006 - DNA, 25 bp, Homo sapien
gaaatgaatcatacttgggtaggag

SEQ ID NO: 4625007 - DNA, 25 bp, Homo sapien
catcaaattaacatgacttatgaac

SEQ ID NO: 4625008 - DNA, 25 bp, Homo sapien
gatatattgtcctgagatgtttaca

SEQ ID NO: 4625009 - DNA, 25 bp, Homo sapien
catttacctacctaagcatacatac

SEQ ID NO: 4625010 - DNA, 25 bp, Homo sapien
atttacaatgggaatagaagacaaa

SEQ ID NO: 4625011 - DNA, 25 bp, Homo sapien
atgacttctgagagggtaaaatagg

SEQ ID NO: 4625012 - DNA, 25 bp, Homo sapien
tctggagaaagcctgatgctttcat

SEQ ID NO: 4625013 - DNA, 25 bp, Homo sapien
catactctgaggcattgggatgtgg

SEQ ID NO: 4625014 - DNA, 25 bp, Homo sapien
tccctgggttacattaagcatgtgc

SEQ ID NO: 4625015 - DNA, 25 bp, Homo sapien
gaaacgtgaagattgtgtgaccctc

SEQ ID NO: 4625016 - DNA, 25 bp, Homo sapien
taaagtgaggcttggtctacccgag

SEQ ID NO: 4625017 - DNA, 25 bp, Homo sapien
aattgatcaggtggttgatggctgc

SEQ ID NO: 4625018 - DNA, 25 bp, Homo sapien
gatcaggtggttgatggctgcttcc

SEQ ID NO: 4625019 - DNA, 25 bp, Homo sapien
caaattgatcaggtggttgatggct

SEQ ID NO: 4625020 - DNA, 25 bp, Homo sapien
agatgcaaattgatcaggtggttga

SEQ ID NO: 4625021 - DNA, 25 bp, Homo sapien
cagggctatggcaccttccaagaca

SEQ ID NO: 4625022 - DNA, 25 bp, Homo sapien
gagatgaaaatctgtgtggccaaac

SEQ ID NO: 4625023 - DNA, 25 bp, Homo sapien
ttcacagataaagtggcccatgcct

SEQ ID NO: 4625024 - DNA, 25 bp, Homo sapien
gcctttgcaagagatgccttcccag

SEQ ID NO: 4625025 - DNA, 25 bp, Homo sapien
tatcataagaaacttccagctttga

SEQ ID NO: 4625026 - DNA, 25 bp, Homo sapien
tcatcaagctttgtactggctgcat

SEQ ID NO: 4625027 - DNA, 25 bp, Homo sapien
tagagtagacaagtgcctgtgcttc

SEQ ID NO: 4625028 - DNA, 25 bp, Homo sapien
cactgggaaactagttaccaacatt

SEQ ID NO: 4625029 - DNA, 25 bp, Homo sapien
gacaatgctgaggttgcagactttc

SEQ ID NO: 4625030 - DNA, 25 bp, Homo sapien
acaatgctgaggttgcagactttct

SEQ ID NO: 4625031 - DNA, 25 bp, Homo sapien
atccaaatttatctttccttgcaat

SEQ ID NO: 4625032 - DNA, 25 bp, Homo sapien
tgacaatgctgaggttgcagacttt

SEQ ID NO: 4625033 - DNA, 25 bp, Homo sapien
acctgtatggtcacttcgacccact

SEQ ID NO: 4625034 - DNA, 25 bp, Homo sapien
tgtatggtcacttcgacccactggg

SEQ ID NO: 4625035 - DNA, 25 bp, Homo sapien
tggtcacttcgacccactgggtatt

SEQ ID NO: 4625036 - DNA, 25 bp, Homo sapien
cacttcgacccactgggtatttatg

SEQ ID NO: 4625037 - DNA, 25 bp, Homo sapien
gcaggtatctaactgagactctgtg

SEQ ID NO: 4625038 - DNA, 25 bp, Homo sapien
tgctaagtgtcaagatatgggacca

SEQ ID NO: 4625039 - DNA, 25 bp, Homo sapien
tgcattattaactctggcctcatta

SEQ ID NO: 4625040 - DNA, 25 bp, Homo sapien
gagtaaccctgtttctatgcaggta

SEQ ID NO: 4625041 - DNA, 25 bp, Homo sapien
ccagagtgtctggatcatttttatt

SEQ ID NO: 4625042 - DNA, 25 bp, Homo sapien
tgggtgatctagtttccctatatca

SEQ ID NO: 4625043 - DNA, 25 bp, Homo sapien
taccagcaatgcatgggtgatctag

SEQ ID NO: 4625044 - DNA, 25 bp, Homo sapien
tagtttccctatatcattgtcagca

SEQ ID NO: 4625045 - DNA, 25 bp, Homo sapien
ctgtgctcagtaaagggatcccact

SEQ ID NO: 4625046 - DNA, 25 bp, Homo sapien
tgcttgcacagattgctgctggcat

SEQ ID NO: 4625047 - DNA, 25 bp, Homo sapien
cagtaaagggatcccactctcttca

SEQ ID NO: 4625048 - DNA, 25 bp, Homo sapien
gctttactgcttgcacagattgctg

SEQ ID NO: 4625049 - DNA, 25 bp, Homo sapien
cccccaacatcccaactttggatgt

SEQ ID NO: 4625050 - DNA, 25 bp, Homo sapien
ccaacatcccaactttggatgtcat

SEQ ID NO: 4625051 - DNA, 25 bp, Homo sapien
ccccaacatcccaactttggatgtc

SEQ ID NO: 4625052 - DNA, 25 bp, Homo sapien
cccaacatcccaactttggatgtca

SEQ ID NO: 4625053 - DNA, 25 bp, Homo sapien
ttccttatcctctccgatgaaattc

SEQ ID NO: 4625054 - DNA, 25 bp, Homo sapien
tcctctccgatgaaattcagttctt

SEQ ID NO: 4625055 - DNA, 25 bp, Homo sapien
cttatcctctccgatgaaattcagt

SEQ ID NO: 4625056 - DNA, 25 bp, Homo sapien
tatcctctccgatgaaattcagttc

SEQ ID NO: 4625057 - DNA, 25 bp, Homo sapien
taggagatgatgttgggcctgtcca

SEQ ID NO: 4625058 - DNA, 25 bp, Homo sapien
gcatctctagtttcctgggatggta

SEQ ID NO: 4625059 - DNA, 25 bp, Homo sapien
tgatagtgtcctgcaagattgagga

SEQ ID NO: 4625060 - DNA, 25 bp, Homo sapien
ctctgctatgccttgtggctgagca

SEQ ID NO: 4625061 - DNA, 25 bp, Homo sapien
ggagcttgtgattctcatctagcag

SEQ ID NO: 4625062 - DNA, 25 bp, Homo sapien
gtgattctcatctagcagtgcaaca

SEQ ID NO: 4625063 - DNA, 25 bp, Homo sapien
catctagcagtgcaacatcatcttc

SEQ ID NO: 4625064 - DNA, 25 bp, Homo sapien
tgcaggagcttgtgattctcatcta

SEQ ID NO: 4625065 - DNA, 25 bp, Homo sapien
gcaaccctagtgcagtggtgcttcc

SEQ ID NO: 4625066 - DNA, 25 bp, Homo sapien
tcagatcctgtcatccatgctcctg

SEQ ID NO: 4625067 - DNA, 25 bp, Homo sapien
tagctatgccaaatacctcctcaga

SEQ ID NO: 4625068 - DNA, 25 bp, Homo sapien
aatctggaacctggtccctggacgt

SEQ ID NO: 4625069 - DNA, 25 bp, Homo sapien
cctctaacgtccagtctgtccaaat

SEQ ID NO: 4625070 - DNA, 25 bp, Homo sapien
catttccctctaacgtccagtctgt

SEQ ID NO: 4625071 - DNA, 25 bp, Homo sapien
taacgtccagtctgtccaaattgtc

SEQ ID NO: 4625072 - DNA, 25 bp, Homo sapien
ttcatttccctctaacgtccagtct

SEQ ID NO: 4625073 - DNA, 25 bp, Homo sapien
actagggaccagattattctcagag

SEQ ID NO: 4625074 - DNA, 25 bp, Homo sapien
gaagctttacggtgcacactaggga

SEQ ID NO: 4625075 - DNA, 25 bp, Homo sapien
tcctttgtaagaagctttacggtgc

SEQ ID NO: 4625076 - DNA, 25 bp, Homo sapien
cttcatatctgtgtgagcaagagtc

SEQ ID NO: 4625077 - DNA, 25 bp, Homo sapien
catatccatcttattgacctgaccc

SEQ ID NO: 4625078 - DNA, 25 bp, Homo sapien
catatattgagtgtccacagtgtat

SEQ ID NO: 4625079 - DNA, 25 bp, Homo sapien
tgaccctacttacatgttgcagtga

SEQ ID NO: 4625080 - DNA, 25 bp, Homo sapien
cccttgatctaggtagacacaatct

SEQ ID NO: 4625081 - DNA, 25 bp, Homo sapien
cgatgccacggctgtcttggagata

SEQ ID NO: 4625082 - DNA, 25 bp, Homo sapien
agctggacccgcttgatcgatgcca

SEQ ID NO: 4625083 - DNA, 25 bp, Homo sapien
tgatgcctccagctaggaagtcctt

SEQ ID NO: 4625084 - DNA, 25 bp, Homo sapien
tatcgtacaccctgaagtaggctgc

SEQ ID NO: 4625085 - DNA, 25 bp, Homo sapien
ccgcactgtgtcgaagggttaggag

SEQ ID NO: 4625086 - DNA, 25 bp, Homo sapien
tgtcgaagggttaggagagcacgcc

SEQ ID NO: 4625087 - DNA, 25 bp, Homo sapien
ctgtgtcgaagggttaggagagcac

SEQ ID NO: 4625088 - DNA, 25 bp, Homo sapien
cactgtgtcgaagggttaggagagc

SEQ ID NO: 4625089 - DNA, 25 bp, Homo sapien
cacccccatgcctttgagggcgttg

SEQ ID NO: 4625090 - DNA, 25 bp, Homo sapien
gcctttgagggcgttggaccacaca

SEQ ID NO: 4625091 - DNA, 25 bp, Homo sapien
cccccatgcctttgagggcgttgga

SEQ ID NO: 4625092 - DNA, 25 bp, Homo sapien
ccatgcctttgagggcgttggacca

SEQ ID NO: 4625093 - DNA, 25 bp, Homo sapien
gtcttctttcaggcccgtggtgtat

SEQ ID NO: 4625094 - DNA, 25 bp, Homo sapien
tttcaggcccgtggtgtattgggaa

SEQ ID NO: 4625095 - DNA, 25 bp, Homo sapien
tcaggcccgtggtgtattgggaata

SEQ ID NO: 4625096 - DNA, 25 bp, Homo sapien
tctttcaggcccgtggtgtattggg

SEQ ID NO: 4625097 - DNA, 25 bp, Homo sapien
gaagatggacttgttttcatagcat

SEQ ID NO: 4625098 - DNA, 25 bp, Homo sapien
cgtaggtggatctttttcacagagc

SEQ ID NO: 4625099 - DNA, 25 bp, Homo sapien
gttacttaaggtcatctgggtgtat

SEQ ID NO: 4625100 - DNA, 25 bp, Homo sapien
ttcagttacttaaggtcatctgggt

SEQ ID NO: 4625101 - DNA, 25 bp, Homo sapien
cagttacttaaggtcatctgggtgt

SEQ ID NO: 4625102 - DNA, 25 bp, Homo sapien
ttacttaaggtcatctgggtgtata

SEQ ID NO: 4625103 - DNA, 25 bp, Homo sapien
ttcagaggagactgaaggcgtggtc

SEQ ID NO: 4625104 - DNA, 25 bp, Homo sapien
tcaaggcgctctatggcagtgtaca

SEQ ID NO: 4625105 - DNA, 25 bp, Homo sapien
tctatggcagtgtacaaagagcacc

SEQ ID NO: 4625106 - DNA, 25 bp, Homo sapien
tgaaggcgtggtctccacaggtgtt

SEQ ID NO: 4625107 - DNA, 25 bp, Homo sapien
acctgctgaagtttttagtacaaag

SEQ ID NO: 4625108 - DNA, 25 bp, Homo sapien
cctgctgaagtttttagtacaaagt

SEQ ID NO: 4625109 - DNA, 25 bp, Homo sapien
gacataaaggtcacaaagacattaa

SEQ ID NO: 4625110 - DNA, 25 bp, Homo sapien
aggacataaaggtcacaaagacatt

SEQ ID NO: 4625111 - DNA, 25 bp, Homo sapien
ctgaggacataaaggtcacaaagac

SEQ ID NO: 4625112 - DNA, 25 bp, Homo sapien
aagacattaaaagtggaataggtca

SEQ ID NO: 4625113 - DNA, 25 bp, Homo sapien
tactatgggagttatttgctgatct

SEQ ID NO: 4625114 - DNA, 25 bp, Homo sapien
ctaactaatgtaagactagtgatca

SEQ ID NO: 4625115 - DNA, 25 bp, Homo sapien
gtgatcaaaacgagaccttgtacct

SEQ ID NO: 4625116 - DNA, 25 bp, Homo sapien
aatcacattgcctcttgaaactggg

SEQ ID NO: 4625117 - DNA, 25 bp, Homo sapien
tgtaggataacctggttgtgcccat

SEQ ID NO: 4625118 - DNA, 25 bp, Homo sapien
gttgtaggataacctggttgtgccc

SEQ ID NO: 4625119 - DNA, 25 bp, Homo sapien
ggttgtaggataacctggttgtgcc

SEQ ID NO: 4625120 - DNA, 25 bp, Homo sapien
ttgtaggataacctggttgtgccca

SEQ ID NO: 4625121 - DNA, 25 bp, Homo sapien
ttggttggagggatgagtattatgt

SEQ ID NO: 4625122 - DNA, 25 bp, Homo sapien
tggttggttggagggatgagtatta

SEQ ID NO: 4625123 - DNA, 25 bp, Homo sapien
taggtggttggttggagggatgagt

SEQ ID NO: 4625124 - DNA, 25 bp, Homo sapien
tggagggatgagtattatgtgtcat

SEQ ID NO: 4625125 - DNA, 25 bp, Homo sapien
tcttctgggaacgtacaacttttgc

SEQ ID NO: 4625126 - DNA, 25 bp, Homo sapien
aaaacagcttgatatatttccctct

SEQ ID NO: 4625127 - DNA, 25 bp, Homo sapien
gagagacttttctctggtatttaca

SEQ ID NO: 4625128 - DNA, 25 bp, Homo sapien
ggtatttacatcagtccattgagcc

SEQ ID NO: 4625129 - DNA, 25 bp, Homo sapien
aactttaagctgactgaattgagag

SEQ ID NO: 4625130 - DNA, 25 bp, Homo sapien
ttaagctgactgaattgagagtgaa

SEQ ID NO: 4625131 - DNA, 25 bp, Homo sapien
tgaatcaactttaagctgactgaat

SEQ ID NO: 4625132 - DNA, 25 bp, Homo sapien
ctgaattgagagtgaacatgcagca

SEQ ID NO: 4625133 - DNA, 25 bp, Homo sapien
attggcaactaaagcagattttcct

SEQ ID NO: 4625134 - DNA, 25 bp, Homo sapien
aattggcaactaaagcagattttcc

SEQ ID NO: 4625135 - DNA, 25 bp, Homo sapien
aaattggcaactaaagcagattttc

SEQ ID NO: 4625136 - DNA, 25 bp, Homo sapien
tacttagacatttgttgtgttgtaa

SEQ ID NO: 4625137 - DNA, 25 bp, Homo sapien
tttctcagaacttttcgtttctctc

SEQ ID NO: 4625138 - DNA, 25 bp, Homo sapien
gctttgtctagctgccaaagtagct

SEQ ID NO: 4625139 - DNA, 25 bp, Homo sapien
tgtgttgtaatatgcgttttccctg

SEQ ID NO: 4625140 - DNA, 25 bp, Homo sapien
tgtatctctggctttagatcttccc

SEQ ID NO: 4625141 - DNA, 25 bp, Homo sapien
tcctttgttgtctgtcttaagttga

SEQ ID NO: 4625142 - DNA, 25 bp, Homo sapien
tctttctcgtggatactctttcagt

SEQ ID NO: 4625143 - DNA, 25 bp, Homo sapien
gctttagatcttcccttgacaatca

SEQ ID NO: 4625144 - DNA, 25 bp, Homo sapien
caatgaagccataggtggtgagata

SEQ ID NO: 4625145 - DNA, 25 bp, Homo sapien
agccataggtggtgagataagttag

SEQ ID NO: 4625146 - DNA, 25 bp, Homo sapien
ccataggtggtgagataagttagtt

SEQ ID NO: 4625147 - DNA, 25 bp, Homo sapien
gaagccataggtggtgagataagtt

SEQ ID NO: 4625148 - DNA, 25 bp, Homo sapien
taaggcaggaacaggccattttcac

SEQ ID NO: 4625149 - DNA, 25 bp, Homo sapien
cgggatgagccaggagaaggaattt

SEQ ID NO: 4625150 - DNA, 25 bp, Homo sapien
caaggtgctcatttggggagctttt

SEQ ID NO: 4625151 - DNA, 25 bp, Homo sapien
gtgctcatttggggagcttttgagc

SEQ ID NO: 4625152 - DNA, 25 bp, Homo sapien
gctggcaactaatcttgcacagtac

SEQ ID NO: 4625153 - DNA, 25 bp, Homo sapien
ttacatttggtacagctggcaacta

SEQ ID NO: 4625154 - DNA, 25 bp, Homo sapien
tacatttggtacagctggcaactaa

SEQ ID NO: 4625155 - DNA, 25 bp, Homo sapien
cagctggcaactaatcttgcacagt

SEQ ID NO: 4625156 - DNA, 25 bp, Homo sapien
gcctgcacggtgattgtttgattag

SEQ ID NO: 4625157 - DNA, 25 bp, Homo sapien
gagagttttgcctgcacggtgattg

SEQ ID NO: 4625158 - DNA, 25 bp, Homo sapien
aattcactggagagttttgcctgca

SEQ ID NO: 4625159 - DNA, 25 bp, Homo sapien
cacggtgattgtttgattaggcaca

SEQ ID NO: 4625160 - DNA, 25 bp, Homo sapien
cagcaaagtcacctcttacgtggca

SEQ ID NO: 4625161 - DNA, 25 bp, Homo sapien
gcagcaaagtcacctcttacgtggc

SEQ ID NO: 4625162 - DNA, 25 bp, Homo sapien
agagaacttgctggacagaacatgc

SEQ ID NO: 4625163 - DNA, 25 bp, Homo sapien
tggagagagaacttgctggacagaa

SEQ ID NO: 4625164 - DNA, 25 bp, Homo sapien
gagagagaacttgctggacagaaca

SEQ ID NO: 4625165 - DNA, 25 bp, Homo sapien
gtcttcatggagagagaacttgctg

SEQ ID NO: 4625166 - DNA, 25 bp, Homo sapien
ctcttgcttgggaggaggccagtct

SEQ ID NO: 4625167 - DNA, 25 bp, Homo sapien
gccttcagttgattgcaggaggtct

SEQ ID NO: 4625168 - DNA, 25 bp, Homo sapien
cttcagttgattgcaggaggtctac

SEQ ID NO: 4625169 - DNA, 25 bp, Homo sapien
ccttcagttgattgcaggaggtcta

SEQ ID NO: 4625170 - DNA, 25 bp, Homo sapien
cacattagtatcatagacacagcaa

SEQ ID NO: 4625171 - DNA, 25 bp, Homo sapien
cacagcaagggcgtgaggacttaga

SEQ ID NO: 4625172 - DNA, 25 bp, Homo sapien
aaataggtaagtgtgttagcaggac

SEQ ID NO: 4625173 - DNA, 25 bp, Homo sapien
aaacaaaatgcagggagacgggaag

SEQ ID NO: 4625174 - DNA, 25 bp, Homo sapien
catagtttggccagaagtttttcac

SEQ ID NO: 4625175 - DNA, 25 bp, Homo sapien
tctacagctttaagaacaatgtgag

SEQ ID NO: 4625176 - DNA, 25 bp, Homo sapien
tccttctctacagctttaagaacaa

SEQ ID NO: 4625177 - DNA, 25 bp, Homo sapien
caatgtgaggtttaaacacggtcat

SEQ ID NO: 4625178 - DNA, 25 bp, Homo sapien
attatcccctattagaactaccagt

SEQ ID NO: 4625179 - DNA, 25 bp, Homo sapien
aattatcccctattagaactaccag

SEQ ID NO: 4625180 - DNA, 25 bp, Homo sapien
ctcctcacctaggagcttgatgaaa

SEQ ID NO: 4625181 - DNA, 25 bp, Homo sapien
agctcctcacctaggagcttgatga

SEQ ID NO: 4625182 - DNA, 25 bp, Homo sapien
cacttgatagccttgaacatgaata

SEQ ID NO: 4625183 - DNA, 25 bp, Homo sapien
tagaagagcagagtagtatcttttc

SEQ ID NO: 4625184 - DNA, 25 bp, Homo sapien
agccttgaacatgaatagtgggcag

SEQ ID NO: 4625185 - DNA, 25 bp, Homo sapien
tgggtcacttgatagccttgaacat

SEQ ID NO: 4625186 - DNA, 25 bp, Homo sapien
atttgtgatgctgagccacaacttg

SEQ ID NO: 4625187 - DNA, 25 bp, Homo sapien
gagccacaacttgagatttaaaatc

SEQ ID NO: 4625188 - DNA, 25 bp, Homo sapien
gccacaacttgagatttaaaatcat

SEQ ID NO: 4625189 - DNA, 25 bp, Homo sapien
tttcttccatttgtgatgctgagcc

SEQ ID NO: 4625190 - DNA, 25 bp, Homo sapien
ttacatggcaaaagattcaaaagat

SEQ ID NO: 4625191 - DNA, 25 bp, Homo sapien
tacatggcaaaagattcaaaagata

SEQ ID NO: 4625192 - DNA, 25 bp, Homo sapien
cagtcaaaccagaaacctccaggac

SEQ ID NO: 4625193 - DNA, 25 bp, Homo sapien
ggacctcattgatttttgtctccct

SEQ ID NO: 4625194 - DNA, 25 bp, Homo sapien
aaaccagaaacctccaggacctcat

SEQ ID NO: 4625195 - DNA, 25 bp, Homo sapien
gaaacctccaggacctcattgattt

SEQ ID NO: 4625196 - DNA, 25 bp, Homo sapien
ccttaacggaaatgattggcatcag

SEQ ID NO: 4625197 - DNA, 25 bp, Homo sapien
gcacttgtggttcgaggcttatcca

SEQ ID NO: 4625198 - DNA, 25 bp, Homo sapien
tgatgcctattcagactgcagtgca

SEQ ID NO: 4625199 - DNA, 25 bp, Homo sapien
tgtgtcaaggccgttcagagtttcc

SEQ ID NO: 4625200 - DNA, 25 bp, Homo sapien
tgcgcaggctgatctcgatatccca

SEQ ID NO: 4625201 - DNA, 25 bp, Homo sapien
cgcaggctgatctcgatatcccaag

SEQ ID NO: 4625202 - DNA, 25 bp, Homo sapien
cacggtgcccagctgggttttagag

SEQ ID NO: 4625203 - DNA, 25 bp, Homo sapien
ggctgatctcgatatcccaagctca

SEQ ID NO: 4625204 - DNA, 25 bp, Homo sapien
taatacagggagctacacagtggtc

SEQ ID NO: 4625205 - DNA, 25 bp, Homo sapien
gaaaatacagttcctcgggcacaaa

SEQ ID NO: 4625206 - DNA, 25 bp, Homo sapien
tgtgagtagcctctaaaagccggaa

SEQ ID NO: 4625207 - DNA, 25 bp, Homo sapien
tatttcagtctagagggccttatgc

SEQ ID NO: 4625208 - DNA, 25 bp, Homo sapien
ctgctgatgcaggaaagccgtatct

SEQ ID NO: 4625209 - DNA, 25 bp, Homo sapien
gccgtatctctacaaccttgattgc

SEQ ID NO: 4625210 - DNA, 25 bp, Homo sapien
gctagcatcaccaccacaattgtct

SEQ ID NO: 4625211 - DNA, 25 bp, Homo sapien
caccacaattgtctgagaaactggg

SEQ ID NO: 4625212 - DNA, 25 bp, Homo sapien
tggatattaattccctgtcacatgc

SEQ ID NO: 4625213 - DNA, 25 bp, Homo sapien
ttggatattaattccctgtcacatg

SEQ ID NO: 4625214 - DNA, 25 bp, Homo sapien
ggatattaattccctgtcacatgca

SEQ ID NO: 4625215 - DNA, 25 bp, Homo sapien
ttttggatattaattccctgtcaca

SEQ ID NO: 4625216 - DNA, 25 bp, Homo sapien
taggtgtgagtatccatgggacccc

SEQ ID NO: 4625217 - DNA, 25 bp, Homo sapien
caagactttcccagatgaactgaga

SEQ ID NO: 4625218 - DNA, 25 bp, Homo sapien
agagtcaccatgtagctatccacag

SEQ ID NO: 4625219 - DNA, 25 bp, Homo sapien
ttcataactacactgggaaagcagg

SEQ ID NO: 4625220 - DNA, 25 bp, Homo sapien
tttattgagggtctggtagacagag

SEQ ID NO: 4625221 - DNA, 25 bp, Homo sapien
tagagacattcttgcagtagtaagg

SEQ ID NO: 4625222 - DNA, 25 bp, Homo sapien
ggctggtttcatagttttccgactg

SEQ ID NO: 4625223 - DNA, 25 bp, Homo sapien
taatacccggtactgtgaaaatgac

SEQ ID NO: 4625224 - DNA, 25 bp, Homo sapien
atctcaaactataaccttctaattg

SEQ ID NO: 4625225 - DNA, 25 bp, Homo sapien
ccaaaaaaagagtcaaagcaaatag

SEQ ID NO: 4625226 - DNA, 25 bp, Homo sapien
aacaagggatatcatatttgaaaat

SEQ ID NO: 4625227 - DNA, 25 bp, Homo sapien
ttgtccactaacacaaaattcctag

SEQ ID NO: 4625228 - DNA, 25 bp, Homo sapien
catattgtcttcctacttttgttct

SEQ ID NO: 4625229 - DNA, 25 bp, Homo sapien
ggcatattgtcttcctacttttgtt

SEQ ID NO: 4625230 - DNA, 25 bp, Homo sapien
tgggcatattgtcttcctacttttg

SEQ ID NO: 4625231 - DNA, 25 bp, Homo sapien
tattgtcttcctacttttgttctct

SEQ ID NO: 4625232 - DNA, 25 bp, Homo sapien
gtctccaaggacttgatttatgaac

SEQ ID NO: 4625233 - DNA, 25 bp, Homo sapien
tccaaggacttgatttatgaaccta

SEQ ID NO: 4625234 - DNA, 25 bp, Homo sapien
caaggacttgatttatgaacctagg

SEQ ID NO: 4625235 - DNA, 25 bp, Homo sapien
tctccaaggacttgatttatgaacc

SEQ ID NO: 4625236 - DNA, 25 bp, Homo sapien
caagtctcagtctggagatcccaaa

SEQ ID NO: 4625237 - DNA, 25 bp, Homo sapien
ttcaagtctcagtctggagatccca

SEQ ID NO: 4625238 - DNA, 25 bp, Homo sapien
tcttcaagtctcagtctggagatcc

SEQ ID NO: 4625239 - DNA, 25 bp, Homo sapien
ctcttcaagtctcagtctggagatc

SEQ ID NO: 4625240 - DNA, 25 bp, Homo sapien
caggtttagaccttcacaggagcgt

SEQ ID NO: 4625241 - DNA, 25 bp, Homo sapien
tttagaccttcacaggagcgtcctc

SEQ ID NO: 4625242 - DNA, 25 bp, Homo sapien
aggtttagaccttcacaggagcgtc

SEQ ID NO: 4625243 - DNA, 25 bp, Homo sapien
ggtttagaccttcacaggagcgtcc

SEQ ID NO: 4625244 - DNA, 25 bp, Homo sapien
ttttaattcatcaatgtcatgataa

SEQ ID NO: 4625245 - DNA, 25 bp, Homo sapien
taattcatcaatgtcatgataaaat

SEQ ID NO: 4625246 - DNA, 25 bp, Homo sapien
aatgtcatgataaaattgtgttatt

SEQ ID NO: 4625247 - DNA, 25 bp, Homo sapien
catcaatgtcatgataaaattgtgt

SEQ ID NO: 4625248 - DNA, 25 bp, Homo sapien
cactgggccgtctcactaggccaaa

SEQ ID NO: 4625249 - DNA, 25 bp, Homo sapien
tttataggaataacactgggccgtc

SEQ ID NO: 4625250 - DNA, 25 bp, Homo sapien
taaaccaaacacaggcatatggaga

SEQ ID NO: 4625251 - DNA, 25 bp, Homo sapien
ccaaagcggttgttgtggattgaaa

SEQ ID NO: 4625252 - DNA, 25 bp, Homo sapien
taagaaagcattatacccaccaaat

SEQ ID NO: 4625253 - DNA, 25 bp, Homo sapien
gatatttgggtgagaatgtgaaact

SEQ ID NO: 4625254 - DNA, 25 bp, Homo sapien
aaaacaatcaggcattatcttatct

SEQ ID NO: 4625255 - DNA, 25 bp, Homo sapien
ggcattatcttatctagcaaagtta

SEQ ID NO: 4625256 - DNA, 25 bp, Homo sapien
ccattgaaggtgctgtgtacccttg

SEQ ID NO: 4625257 - DNA, 25 bp, Homo sapien
tggtgagaaagatatgcttcaaaat

SEQ ID NO: 4625258 - DNA, 25 bp, Homo sapien
aaaatacactctccattgaaggtgc

SEQ ID NO: 4625259 - DNA, 25 bp, Homo sapien
acaccacctgtcgagaaatgcttag

SEQ ID NO: 4625260 - DNA, 25 bp, Homo sapien
gagctcaccttaggagacctgtgtt

SEQ ID NO: 4625261 - DNA, 25 bp, Homo sapien
ctttcgtggtctgtattagtaatga

SEQ ID NO: 4625262 - DNA, 25 bp, Homo sapien
tgaggcctcactttcgtggtctgta

SEQ ID NO: 4625263 - DNA, 25 bp, Homo sapien
tcaccttaggagacctgtgttacca

SEQ ID NO: 4625264 - DNA, 25 bp, Homo sapien
aattttggaataagtgtgatgtgct

SEQ ID NO: 4625265 - DNA, 25 bp, Homo sapien
attttggaataagtgtgatgtgctg

SEQ ID NO: 4625266 - DNA, 25 bp, Homo sapien
ttttggaataagtgtgatgtgctga

SEQ ID NO: 4625267 - DNA, 25 bp, Homo sapien
caattttggaataagtgtgatgtgc

SEQ ID NO: 4625268 - DNA, 25 bp, Homo sapien
gattccataccttagctagtgtaaa

SEQ ID NO: 4625269 - DNA, 25 bp, Homo sapien
ggagtacagacatcgctttgacata

SEQ ID NO: 4625270 - DNA, 25 bp, Homo sapien
taccccagaatctgatagccaccat

SEQ ID NO: 4625271 - DNA, 25 bp, Homo sapien
cttttgaggctgagttgtgttctac

SEQ ID NO: 4625272 - DNA, 25 bp, Homo sapien
aatgacatcttccacggagcaggca

SEQ ID NO: 4625273 - DNA, 25 bp, Homo sapien
gatgccctggaaaatcatcagaggc

SEQ ID NO: 4625274 - DNA, 25 bp, Homo sapien
caatttcagatccagtggtgataac

SEQ ID NO: 4625275 - DNA, 25 bp, Homo sapien
tgataactgtaataggatgccctgg

SEQ ID NO: 4625276 - DNA, 25 bp, Homo sapien
tttatgagcttggaaaatctccttc

SEQ ID NO: 4625277 - DNA, 25 bp, Homo sapien
ttctggtttgtcctctaataagaat

SEQ ID NO: 4625278 - DNA, 25 bp, Homo sapien
atattttctggtttgtcctctaata

SEQ ID NO: 4625279 - DNA, 25 bp, Homo sapien
tggtttgtcctctaataagaatcat

SEQ ID NO: 4625280 - DNA, 25 bp, Homo sapien
catattttctggtttgtcctctaat

SEQ ID NO: 4625281 - DNA, 25 bp, Homo sapien
aatgtcagggtgactcttgggccta

SEQ ID NO: 4625282 - DNA, 25 bp, Homo sapien
ctcttgggcctatgagaaagtttga

SEQ ID NO: 4625283 - DNA, 25 bp, Homo sapien
gatgaatttaaggttagttgcttca

SEQ ID NO: 4625284 - DNA, 25 bp, Homo sapien
tgggcctatgagaaagtttgatgaa

SEQ ID NO: 4625285 - DNA, 25 bp, Homo sapien
agaccaacatctaacccaggacttg

SEQ ID NO: 4625286 - DNA, 25 bp, Homo sapien
caacatctaacccaggacttgaggc

SEQ ID NO: 4625287 - DNA, 25 bp, Homo sapien
ggtgctctccctcagaccaacatct

SEQ ID NO: 4625288 - DNA, 25 bp, Homo sapien
tcagaccaacatctaacccaggact

SEQ ID NO: 4625289 - DNA, 25 bp, Homo sapien
gaggggggagtgcagagctccttct

SEQ ID NO: 4625290 - DNA, 25 bp, Homo sapien
taagaagaaaccagttgcagctaga

SEQ ID NO: 4625291 - DNA, 25 bp, Homo sapien
gagtgcagagctccttcttgctttc

SEQ ID NO: 4625292 - DNA, 25 bp, Homo sapien
cttaagaagaaaccagttgcagcta

SEQ ID NO: 4625293 - DNA, 25 bp, Homo sapien
tctggactcatctgagcttgacatt

SEQ ID NO: 4625294 - DNA, 25 bp, Homo sapien
gcttgacatttcaggagatgtgata

SEQ ID NO: 4625295 - DNA, 25 bp, Homo sapien
catttcaggagatgtgataccttct

SEQ ID NO: 4625296 - DNA, 25 bp, Homo sapien
gatgtgataccttctgcacataggc

SEQ ID NO: 4625297 - DNA, 25 bp, Homo sapien
ctgctgaactgggctggaagtcagg

SEQ ID NO: 4625298 - DNA, 25 bp, Homo sapien
ttgccacacattctgtccctaattc

SEQ ID NO: 4625299 - DNA, 25 bp, Homo sapien
tatatttagctagaatttttgccac

SEQ ID NO: 4625300 - DNA, 25 bp, Homo sapien
atttttgccacacattctgtcccta

SEQ ID NO: 4625301 - DNA, 25 bp, Homo sapien
tctgactgaggagaaattgtccaga

SEQ ID NO: 4625302 - DNA, 25 bp, Homo sapien
ctgactgaggagaaattgtccagaa

SEQ ID NO: 4625303 - DNA, 25 bp, Homo sapien
atctgactgaggagaaattgtccag

SEQ ID NO: 4625304 - DNA, 25 bp, Homo sapien
tggctggtcattacagctctggtag

SEQ ID NO: 4625305 - DNA, 25 bp, Homo sapien
agctctggtagcaatactcacagct

SEQ ID NO: 4625306 - DNA, 25 bp, Homo sapien
aatactcacagctctatcaataagc

SEQ ID NO: 4625307 - DNA, 25 bp, Homo sapien
tggtagcaatactcacagctctatc

SEQ ID NO: 4625308 - DNA, 25 bp, Homo sapien
gattgtttatcgacggggcatgaag

SEQ ID NO: 4625309 - DNA, 25 bp, Homo sapien
gaaggattgtttatcgacggggcat

SEQ ID NO: 4625310 - DNA, 25 bp, Homo sapien
cttggaaggattgtttatcgacggg

SEQ ID NO: 4625311 - DNA, 25 bp, Homo sapien
ggattgtttatcgacggggcatgaa

SEQ ID NO: 4625312 - DNA, 25 bp, Homo sapien
tgaaggctcgcaggtcagttgcgtc

SEQ ID NO: 4625313 - DNA, 25 bp, Homo sapien
tagaatctactgatgcaccgacatt

SEQ ID NO: 4625314 - DNA, 25 bp, Homo sapien
cagttgcgtctgattactctggact

SEQ ID NO: 4625315 - DNA, 25 bp, Homo sapien
catccgctttttatttagctttgaa

SEQ ID NO: 4625316 - DNA, 25 bp, Homo sapien
aggaatggagcacggtggccaaggg

SEQ ID NO: 4625317 - DNA, 25 bp, Homo sapien
agggatgcgtgtgaaggaatggagc

SEQ ID NO: 4625318 - DNA, 25 bp, Homo sapien
tgaagaaattatgggtaaggagtag

SEQ ID NO: 4625319 - DNA, 25 bp, Homo sapien
tatgggtaaggagtagggatgcgtg

SEQ ID NO: 4625320 - DNA, 25 bp, Homo sapien
ttcctatttggccagcattcaacat

SEQ ID NO: 4625321 - DNA, 25 bp, Homo sapien
tctgccatgtggttaagaagcggag

SEQ ID NO: 4625322 - DNA, 25 bp, Homo sapien
tatttctcctgagtgttgaagtggg

SEQ ID NO: 4625323 - DNA, 25 bp, Homo sapien
agcagagtttcctatttggccagca

SEQ ID NO: 4625324 - DNA, 25 bp, Homo sapien
ttctgaggccagacaaggattgggc

SEQ ID NO: 4625325 - DNA, 25 bp, Homo sapien
acctttgtttttcttgatctctgca

SEQ ID NO: 4625326 - DNA, 25 bp, Homo sapien
cctttgtttttcttgatctctgcat

SEQ ID NO: 4625327 - DNA, 25 bp, Homo sapien
gaacctttgtttttcttgatctctg

SEQ ID NO: 4625328 - DNA, 25 bp, Homo sapien
ctggaacctttgtttttcttgatct

SEQ ID NO: 4625329 - DNA, 25 bp, Homo sapien
gtctgtctccctgcttttggaaggg

SEQ ID NO: 4625330 - DNA, 25 bp, Homo sapien
ctggaggcacagtagtctgacttga

SEQ ID NO: 4625331 - DNA, 25 bp, Homo sapien
gaggcacagtagtctgacttgagtc

SEQ ID NO: 4625332 - DNA, 25 bp, Homo sapien
gggatggcacagctttgcccccttt

SEQ ID NO: 4625333 - DNA, 25 bp, Homo sapien
aataggatcaggtccaggtaccacc

SEQ ID NO: 4625334 - DNA, 25 bp, Homo sapien
gatcccaagtccataagcaatagga

SEQ ID NO: 4625335 - DNA, 25 bp, Homo sapien
aggtaccaccttcttgaaatctgag

SEQ ID NO: 4625336 - DNA, 25 bp, Homo sapien
tgtaaatgtcatcagatagtccacc

SEQ ID NO: 4625337 - DNA, 25 bp, Homo sapien
ttttagactggttctcagtgacttg

SEQ ID NO: 4625338 - DNA, 25 bp, Homo sapien
caggttttagactggttctcagtga

SEQ ID NO: 4625339 - DNA, 25 bp, Homo sapien
cttccaggttttagactggttctca

SEQ ID NO: 4625340 - DNA, 25 bp, Homo sapien
ggttttagactggttctcagtgact

SEQ ID NO: 4625341 - DNA, 25 bp, Homo sapien
cagaggcatgttcagtggctgtcca

SEQ ID NO: 4625342 - DNA, 25 bp, Homo sapien
tgatgccgatggatgttggacctaa

SEQ ID NO: 4625343 - DNA, 25 bp, Homo sapien
caagtgtggacaatacctgtgatgc

SEQ ID NO: 4625344 - DNA, 25 bp, Homo sapien
tatcccggttcttaggtggagaggc

SEQ ID NO: 4625345 - DNA, 25 bp, Homo sapien
aacatggaatcattgcaaattcagg

SEQ ID NO: 4625346 - DNA, 25 bp, Homo sapien
tggaggtttatctgagaacatttct

SEQ ID NO: 4625347 - DNA, 25 bp, Homo sapien
atattctttgccttcaaacatggaa

SEQ ID NO: 4625348 - DNA, 25 bp, Homo sapien
gccaccacttggtttattcacatcc

SEQ ID NO: 4625349 - DNA, 25 bp, Homo sapien
tctagtaggattctcttcagcctca

SEQ ID NO: 4625350 - DNA, 25 bp, Homo sapien
ctcctgttccagacctccacggctc

SEQ ID NO: 4625351 - DNA, 25 bp, Homo sapien
tccccctctagtaggattctcttca

SEQ ID NO: 4625352 - DNA, 25 bp, Homo sapien
tcttcagcctcatgttcactccttc

SEQ ID NO: 4625353 - DNA, 25 bp, Homo sapien
gtataattggtgttcatgttgtacg

SEQ ID NO: 4625354 - DNA, 25 bp, Homo sapien
gcttgtgttgtgaatcctcatgaag

SEQ ID NO: 4625355 - DNA, 25 bp, Homo sapien
catgttgtacgtgcttgtgttgtga

SEQ ID NO: 4625356 - DNA, 25 bp, Homo sapien
tgttgtgaatcctcatgaagcccag

SEQ ID NO: 4625357 - DNA, 25 bp, Homo sapien
ttgtaggacctttagggccaatcca

SEQ ID NO: 4625358 - DNA, 25 bp, Homo sapien
tgtaggacctttagggccaatccaa

SEQ ID NO: 4625359 - DNA, 25 bp, Homo sapien
ttgttccttaatttcacatttactg

SEQ ID NO: 4625360 - DNA, 25 bp, Homo sapien
cttaatttcacatttactgactgtc

SEQ ID NO: 4625361 - DNA, 25 bp, Homo sapien
tccttaatttcacatttactgactg

SEQ ID NO: 4625362 - DNA, 25 bp, Homo sapien
gttccttaatttcacatttactgac

SEQ ID NO: 4625363 - DNA, 25 bp, Homo sapien
tataggctggaattccttattcacg

SEQ ID NO: 4625364 - DNA, 25 bp, Homo sapien
acacctgggtaaagagagtcctcat

SEQ ID NO: 4625365 - DNA, 25 bp, Homo sapien
tgttctccctgatgatagcacagag

SEQ ID NO: 4625366 - DNA, 25 bp, Homo sapien
cttattcacgtatttccagggcttg

SEQ ID NO: 4625367 - DNA, 25 bp, Homo sapien
tctagagtggcacggagggaagaca

SEQ ID NO: 4625368 - DNA, 25 bp, Homo sapien
cagagtcctctagagtggcacggag

SEQ ID NO: 4625369 - DNA, 25 bp, Homo sapien
tggcctttgcgctgttcagagtcct

SEQ ID NO: 4625370 - DNA, 25 bp, Homo sapien
tgttcagagtcctctagagtggcac

SEQ ID NO: 4625371 - DNA, 25 bp, Homo sapien
gatggcagcaagtgggctttcacaa

SEQ ID NO: 4625372 - DNA, 25 bp, Homo sapien
ctgaagtcggagaaatggctgggag

SEQ ID NO: 4625373 - DNA, 25 bp, Homo sapien
gcaagtgggctttcacaagatctgc

SEQ ID NO: 4625374 - DNA, 25 bp, Homo sapien
gcagcaagtgggctttcacaagatc

SEQ ID NO: 4625375 - DNA, 25 bp, Homo sapien
tctttgcgcaaagcctgccaagtgg

SEQ ID NO: 4625376 - DNA, 25 bp, Homo sapien
taggacttcagcatttccgtggcaa

SEQ ID NO: 4625377 - DNA, 25 bp, Homo sapien
tgccaagtggacatcggagtcacgc

SEQ ID NO: 4625378 - DNA, 25 bp, Homo sapien
tttctaatgcacgatgttcaccggt

SEQ ID NO: 4625379 - DNA, 25 bp, Homo sapien
gggctcccgcgaccggcgaacctga

SEQ ID NO: 4625380 - DNA, 25 bp, Homo sapien
gacgcgttcccgtgcgctgcgcggt

SEQ ID NO: 4625381 - DNA, 25 bp, Homo sapien
gcgaacctgacccaagcagcgggac

SEQ ID NO: 4625382 - DNA, 25 bp, Homo sapien
caagcagcgggacgcgttcccgtgc

SEQ ID NO: 4625383 - DNA, 25 bp, Homo sapien
agggtggacggcgctcccgcctggg

SEQ ID NO: 4625384 - DNA, 25 bp, Homo sapien
cgactctcgagggatacagggtgga

SEQ ID NO: 4625385 - DNA, 25 bp, Homo sapien
gactctcgagggatacagggtggac

SEQ ID NO: 4625386 - DNA, 25 bp, Homo sapien
gtgggtcgggccgcgtcggtactca

SEQ ID NO: 4625387 - DNA, 25 bp, Homo sapien
aagctcgcctccgtgtcccccgtgc

SEQ ID NO: 4625388 - DNA, 25 bp, Homo sapien
cccaagctcgcctccgtgtcccccg

SEQ ID NO: 4625389 - DNA, 25 bp, Homo sapien
cgtgtcccccgtgccgccactgcct

SEQ ID NO: 4625390 - DNA, 25 bp, Homo sapien
gctcgcctccgtgtcccccgtgccg

SEQ ID NO: 4625391 - DNA, 25 bp, Homo sapien
agccaaggctaagaagggtctagga

SEQ ID NO: 4625392 - DNA, 25 bp, Homo sapien
gactttcaggacagcacgcacagcc

SEQ ID NO: 4625393 - DNA, 25 bp, Homo sapien
gtttctctccccggcatgacataga

SEQ ID NO: 4625394 - DNA, 25 bp, Homo sapien
caaggctaagaagggtctaggaaag

SEQ ID NO: 4625395 - DNA, 25 bp, Homo sapien
gggctgaggaagcaccactcagagt

SEQ ID NO: 4625396 - DNA, 25 bp, Homo sapien
gaagcaccactcagagtgacaccct

SEQ ID NO: 4625397 - DNA, 25 bp, Homo sapien
actccaggatggtggaaactgcttt

SEQ ID NO: 4625398 - DNA, 25 bp, Homo sapien
gaaactgctttttgacaggggctga

SEQ ID NO: 4625399 - DNA, 25 bp, Homo sapien
gatactacatggtggcaagaagaga

SEQ ID NO: 4625400 - DNA, 25 bp, Homo sapien
atggtatcttttaaggtacaaggtg

SEQ ID NO: 4625401 - DNA, 25 bp, Homo sapien
ttctttgttctatagaatgagatga

SEQ ID NO: 4625402 - DNA, 25 bp, Homo sapien
aatgagatgatactacatggtggca

SEQ ID NO: 4625403 - DNA, 25 bp, Homo sapien
caaggtgtgcgaatgggttgctcat

SEQ ID NO: 4625404 - DNA, 25 bp, Homo sapien
acaggatccaatggctcagcaaggt

SEQ ID NO: 4625405 - DNA, 25 bp, Homo sapien
cctccaatttattcaaattgaagaa

SEQ ID NO: 4625406 - DNA, 25 bp, Homo sapien
tgaatcctccaatttattcaaattg

SEQ ID NO: 4625407 - DNA, 25 bp, Homo sapien
aaagtcctgcaggatgacacgagca

SEQ ID NO: 4625408 - DNA, 25 bp, Homo sapien
tgtgctgcgtgacattccaatgtag

SEQ ID NO: 4625409 - DNA, 25 bp, Homo sapien
actctgatcgaaaatggtaagcgcc

SEQ ID NO: 4625410 - DNA, 25 bp, Homo sapien
tcacaattccgaatggctgcttcca

SEQ ID NO: 4625411 - DNA, 25 bp, Homo sapien
aaagtcaaccacagcgggcacaccc

SEQ ID NO: 4625412 - DNA, 25 bp, Homo sapien
agcaaagtcaaccacagcgggcaca

SEQ ID NO: 4625413 - DNA, 25 bp, Homo sapien
tgcagcaaagtcaaccacagcgggc

SEQ ID NO: 4625414 - DNA, 25 bp, Homo sapien
gcagcaaagtcaaccacagcgggca

SEQ ID NO: 4625415 - DNA, 25 bp, Homo sapien
gatggaatgatctattacaagatca

SEQ ID NO: 4625416 - DNA, 25 bp, Homo sapien
ctattacaagatcagcagggcagac

SEQ ID NO: 4625417 - DNA, 25 bp, Homo sapien
ggatctcctcctaactttttcacag

SEQ ID NO: 4625418 - DNA, 25 bp, Homo sapien
tgatctattacaagatcagcagggc

SEQ ID NO: 4625419 - DNA, 25 bp, Homo sapien
cagggagctgagagtctacttacca

SEQ ID NO: 4625420 - DNA, 25 bp, Homo sapien
tatgcatggcctaaccttctgggct

SEQ ID NO: 4625421 - DNA, 25 bp, Homo sapien
caagtgacaacttcccttcaagggc

SEQ ID NO: 4625422 - DNA, 25 bp, Homo sapien
gcacgtggccaacgaagacatttta

SEQ ID NO: 4625423 - DNA, 25 bp, Homo sapien
aatttatctggtttggatgttagca

SEQ ID NO: 4625424 - DNA, 25 bp, Homo sapien
agttggcgagtacatggtctgttcc

SEQ ID NO: 4625425 - DNA, 25 bp, Homo sapien
tgttccaagtaccatcaattcaggg

SEQ ID NO: 4625426 - DNA, 25 bp, Homo sapien
gatgttagcaatattaactggagaa

SEQ ID NO: 4625427 - DNA, 25 bp, Homo sapien
gccccggctagtgttcactctgatt

SEQ ID NO: 4625428 - DNA, 25 bp, Homo sapien
tctaggtcaaagttcacccttggat

SEQ ID NO: 4625429 - DNA, 25 bp, Homo sapien
gatttggttatcaatctaggtcaaa

SEQ ID NO: 4625430 - DNA, 25 bp, Homo sapien
tatatatacatgtgggtttgctaga

SEQ ID NO: 4625431 - DNA, 25 bp, Homo sapien
caaatcgctctctatttctttcaaa

SEQ ID NO: 4625432 - DNA, 25 bp, Homo sapien
ttcaaatcgctctctatttctttca

SEQ ID NO: 4625433 - DNA, 25 bp, Homo sapien
ttaaaaattcaaatcgctctctatt

SEQ ID NO: 4625434 - DNA, 25 bp, Homo sapien
aaattcaaatcgctctctatttctt

SEQ ID NO: 4625435 - DNA, 25 bp, Homo sapien
gaacgcgtgaagtacttctactcag

SEQ ID NO: 4625436 - DNA, 25 bp, Homo sapien
cactatgaacgcgtgaagtacttct

SEQ ID NO: 4625437 - DNA, 25 bp, Homo sapien
tgaagtacttctactcagcccatct

SEQ ID NO: 4625438 - DNA, 25 bp, Homo sapien
aatggaaagaacactatgaacgcgt

SEQ ID NO: 4625439 - DNA, 25 bp, Homo sapien
tgatcaaataccactcttgccaaat

SEQ ID NO: 4625440 - DNA, 25 bp, Homo sapien
taatccgcatgttgtgaaaagcctg

SEQ ID NO: 4625441 - DNA, 25 bp, Homo sapien
catcaatcatggtagtgtgcgagtc

SEQ ID NO: 4625442 - DNA, 25 bp, Homo sapien
tgtgcgagtctgtgcccacgaggct

SEQ ID NO: 4625443 - DNA, 25 bp, Homo sapien
tgtagccaatcacctgaggaagcac

SEQ ID NO: 4625444 - DNA, 25 bp, Homo sapien
cacgatgtcagtggatgttaccaga

SEQ ID NO: 4625445 - DNA, 25 bp, Homo sapien
gaggaagcaccatactgattggctg

SEQ ID NO: 4625446 - DNA, 25 bp, Homo sapien
gattggctgacccagcatgacagct

SEQ ID NO: 4625447 - DNA, 25 bp, Homo sapien
tccaggcccgaagaactcgacaaat

SEQ ID NO: 4625448 - DNA, 25 bp, Homo sapien
ggcagcagttgctccgtactctgga

SEQ ID NO: 4625449 - DNA, 25 bp, Homo sapien
caatggacaactgggctactccagg

SEQ ID NO: 4625450 - DNA, 25 bp, Homo sapien
tcgtagctcggtcagcaatggacaa

SEQ ID NO: 4625451 - DNA, 25 bp, Homo sapien
gcaaatacatactaggtacctggta

SEQ ID NO: 4625452 - DNA, 25 bp, Homo sapien
cctacagatctgtaaagaggttgac

SEQ ID NO: 4625453 - DNA, 25 bp, Homo sapien
ccaggcagttgcagggttggattct

SEQ ID NO: 4625454 - DNA, 25 bp, Homo sapien
tattagccttgggtatgaacacttc

SEQ ID NO: 4625455 - DNA, 25 bp, Homo sapien
tcctgacctgttgttgagcccgctg

SEQ ID NO: 4625456 - DNA, 25 bp, Homo sapien
tgaagtatgcccaacggacatgcag

SEQ ID NO: 4625457 - DNA, 25 bp, Homo sapien
aaatggcggctcaagaagactaagt

SEQ ID NO: 4625458 - DNA, 25 bp, Homo sapien
tgtaagtacgcaacatacgctgcac

SEQ ID NO: 4625459 - DNA, 25 bp, Homo sapien
agaagggtcattgaaatctcgaaac

SEQ ID NO: 4625460 - DNA, 25 bp, Homo sapien
tgaaatctcgaaacattcctacagc

SEQ ID NO: 4625461 - DNA, 25 bp, Homo sapien
ctcgaaacattcctacagcctgaag

SEQ ID NO: 4625462 - DNA, 25 bp, Homo sapien
tgagaagggtcattgaaatctcgaa

SEQ ID NO: 4625463 - DNA, 25 bp, Homo sapien
tcatgtcggacacagcaactttgtc

SEQ ID NO: 4625464 - DNA, 25 bp, Homo sapien
actacagcaaggcactactgttttc

SEQ ID NO: 4625465 - DNA, 25 bp, Homo sapien
agtcctttttcatgtcggacacagc

SEQ ID NO: 4625466 - DNA, 25 bp, Homo sapien
gaggccttttgggtccactacagca

SEQ ID NO: 4625467 - DNA, 25 bp, Homo sapien
caagtgggatgaaagcctggacgct

SEQ ID NO: 4625468 - DNA, 25 bp, Homo sapien
tctgctatgagattctgagaaccca

SEQ ID NO: 4625469 - DNA, 25 bp, Homo sapien
tgccgcttggctcgtgactaatgga

SEQ ID NO: 4625470 - DNA, 25 bp, Homo sapien
tttcagcccaagcaccatgaagtgt

SEQ ID NO: 4625471 - DNA, 25 bp, Homo sapien
cattatgatgttcaggagcaacttg

SEQ ID NO: 4625472 - DNA, 25 bp, Homo sapien
taaaggtcttatggtcattatgatg

SEQ ID NO: 4625473 - DNA, 25 bp, Homo sapien
ttcagtgttatcatagataaaggtc

SEQ ID NO: 4625474 - DNA, 25 bp, Homo sapien
tatcatagataaaggtcttatggtc

SEQ ID NO: 4625475 - DNA, 25 bp, Homo sapien
tgcccctaacatcacagacggatta

SEQ ID NO: 4625476 - DNA, 25 bp, Homo sapien
tcacagacggattactggtgtttgt

SEQ ID NO: 4625477 - DNA, 25 bp, Homo sapien
ggtgtttgtgcagctagtaatggca

SEQ ID NO: 4625478 - DNA, 25 bp, Homo sapien
cggattactggtgtttgtgcagcta

SEQ ID NO: 4625479 - DNA, 25 bp, Homo sapien
cagaattgcgaaacaggccagtggc

SEQ ID NO: 4625480 - DNA, 25 bp, Homo sapien
ggtttgctccagaccagacaaggaa

SEQ ID NO: 4625481 - DNA, 25 bp, Homo sapien
tggcaatacacggactcaggcaaag

SEQ ID NO: 4625482 - DNA, 25 bp, Homo sapien
gacacaagaatgtaggctttcccag

SEQ ID NO: 4625483 - DNA, 25 bp, Homo sapien
caggctagttttgatgtaaggcatc

SEQ ID NO: 4625484 - DNA, 25 bp, Homo sapien
gctgagacagataaggcatgactcc

SEQ ID NO: 4625485 - DNA, 25 bp, Homo sapien
aggcatcacgttcaggccagcatcc

SEQ ID NO: 4625486 - DNA, 25 bp, Homo sapien
tcttgtaggtagtaggtgaccacgc

SEQ ID NO: 4625487 - DNA, 25 bp, Homo sapien
ccctagagggcaagagggctctctt

SEQ ID NO: 4625488 - DNA, 25 bp, Homo sapien
cacatctgttacaaggtgacacagc

SEQ ID NO: 4625489 - DNA, 25 bp, Homo sapien
cacagcaagatacatgagggataca

SEQ ID NO: 4625490 - DNA, 25 bp, Homo sapien
tcaacagtagtgtgtggtaatgtcc

SEQ ID NO: 4625491 - DNA, 25 bp, Homo sapien
ggttcaggtaaaggcccactgttgc

SEQ ID NO: 4625492 - DNA, 25 bp, Homo sapien
gatggcttctaccacaggttcaggt

SEQ ID NO: 4625493 - DNA, 25 bp, Homo sapien
gtgtgatggcttctaccacaggttc

SEQ ID NO: 4625494 - DNA, 25 bp, Homo sapien
tgccaatgcaggtcatgcagccata

SEQ ID NO: 4625495 - DNA, 25 bp, Homo sapien
ggctctttctcaaagtcgattctga

SEQ ID NO: 4625496 - DNA, 25 bp, Homo sapien
agaggctaaatagttggcccgggtg

SEQ ID NO: 4625497 - DNA, 25 bp, Homo sapien
tgtttccagatagtactccaacagc

SEQ ID NO: 4625498 - DNA, 25 bp, Homo sapien
gatggttccagcaattgcatatgct

SEQ ID NO: 4625499 - DNA, 25 bp, Homo sapien
ctttcagaaatacctgctgtccctt

SEQ ID NO: 4625500 - DNA, 25 bp, Homo sapien
tggatctcgtctctagtcggccaga

SEQ ID NO: 4625501 - DNA, 25 bp, Homo sapien
catactgacgctccactgcctggat

SEQ ID NO: 4625502 - DNA, 25 bp, Homo sapien
catccccgggatgacatactgacgc

SEQ ID NO: 4625503 - DNA, 25 bp, Homo sapien
caaacactgggtagcaaatgacagc

SEQ ID NO: 4625504 - DNA, 25 bp, Homo sapien
cagccagtgagaaacggaggacctc

SEQ ID NO: 4625505 - DNA, 25 bp, Homo sapien
acatgagtgagcctaagtggaccct

SEQ ID NO: 4625506 - DNA, 25 bp, Homo sapien
gatcctgccaatagccacatgagtg

SEQ ID NO: 4625507 - DNA, 25 bp, Homo sapien
tctgatggggttgctaaggcattcc

SEQ ID NO: 4625508 - DNA, 25 bp, Homo sapien
gaatggtggtgatttgatatacgta

SEQ ID NO: 4625509 - DNA, 25 bp, Homo sapien
ggttgctaaggcattccagctttca

SEQ ID NO: 4625510 - DNA, 25 bp, Homo sapien
ttgatatacgtagatttggaattcc

SEQ ID NO: 4625511 - DNA, 25 bp, Homo sapien
cctctgttagttaagtagcgagcag

SEQ ID NO: 4625512 - DNA, 25 bp, Homo sapien
cataggcatccactatagatttagg

SEQ ID NO: 4625513 - DNA, 25 bp, Homo sapien
agatttagggggctgaagatccaaa

SEQ ID NO: 4625514 - DNA, 25 bp, Homo sapien
agtagcgagcagcaggactgtttct

SEQ ID NO: 4625515 - DNA, 25 bp, Homo sapien
aaagcttcaacggagaagagagaga

SEQ ID NO: 4625516 - DNA, 25 bp, Homo sapien
ccaaagcttcaacggagaagagaga

SEQ ID NO: 4625517 - DNA, 25 bp, Homo sapien
tggtgagaggcataagtcagtattc

SEQ ID NO: 4625518 - DNA, 25 bp, Homo sapien
tattctcctgggttaattgtctttc

SEQ ID NO: 4625519 - DNA, 25 bp, Homo sapien
aagcaagcaaagattaaccttagct

SEQ ID NO: 4625520 - DNA, 25 bp, Homo sapien
gaagcaagcaaagattaaccttagc

SEQ ID NO: 4625521 - DNA, 25 bp, Homo sapien
gcaagcaaagattaaccttagctta

SEQ ID NO: 4625522 - DNA, 25 bp, Homo sapien
agcaagcaaagattaaccttagctt

SEQ ID NO: 4625523 - DNA, 25 bp, Homo sapien
tggtgcctgcttgttcaaaaatctg

SEQ ID NO: 4625524 - DNA, 25 bp, Homo sapien
atgacggcgtcattacctcggcggg

SEQ ID NO: 4625525 - DNA, 25 bp, Homo sapien
aatgttggcaaatgttccccgtgcc

SEQ ID NO: 4625526 - DNA, 25 bp, Homo sapien
tctgtttaacaagcgaatgttggca

SEQ ID NO: 4625527 - DNA, 25 bp, Homo sapien
caatatatgccaagagcttaggaga

SEQ ID NO: 4625528 - DNA, 25 bp, Homo sapien
gcctcagagcgttcttccaaggtaa

SEQ ID NO: 4625529 - DNA, 25 bp, Homo sapien
taagtcggcagggttatttctcaag

SEQ ID NO: 4625530 - DNA, 25 bp, Homo sapien
gacctatgacatgtaccagactcta

SEQ ID NO: 4625531 - DNA, 25 bp, Homo sapien
cagggcttgtaaatgcgtgtggtac

SEQ ID NO: 4625532 - DNA, 25 bp, Homo sapien
tgctatccattgaacaggcgtctgc

SEQ ID NO: 4625533 - DNA, 25 bp, Homo sapien
tataatcagttacgagtgaggcagt

SEQ ID NO: 4625534 - DNA, 25 bp, Homo sapien
cgtctgctgggctaggtactggtta

SEQ ID NO: 4625535 - DNA, 25 bp, Homo sapien
gctctcagtcccgttccaacttggg

SEQ ID NO: 4625536 - DNA, 25 bp, Homo sapien
gcatcaagaagtctggaacatgtct

SEQ ID NO: 4625537 - DNA, 25 bp, Homo sapien
ttaagtgcacttgactgatggtctg

SEQ ID NO: 4625538 - DNA, 25 bp, Homo sapien
tggtggaacacattgccaagtagct

SEQ ID NO: 4625539 - DNA, 25 bp, Homo sapien
catgtttcactggagtcagtaattt

SEQ ID NO: 4625540 - DNA, 25 bp, Homo sapien
agacatgtttcactggagtcagtaa

SEQ ID NO: 4625541 - DNA, 25 bp, Homo sapien
acatgtttcactggagtcagtaatt

SEQ ID NO: 4625542 - DNA, 25 bp, Homo sapien
gacatgtttcactggagtcagtaat

SEQ ID NO: 4625543 - DNA, 25 bp, Homo sapien
caggaaagggcccttagctgcccag

SEQ ID NO: 4625544 - DNA, 25 bp, Homo sapien
gcaccgtactctttgccagccagaa

SEQ ID NO: 4625545 - DNA, 25 bp, Homo sapien
agctgcccagtctcgggagctgcct

SEQ ID NO: 4625546 - DNA, 25 bp, Homo sapien
tgctggtaccgctcagcagcatcaa

SEQ ID NO: 4625547 - DNA, 25 bp, Homo sapien
ggtgaatgcgctcgtagctctcggc

SEQ ID NO: 4625548 - DNA, 25 bp, Homo sapien
gagatattcaagtgggatcacaccc

SEQ ID NO: 4625549 - DNA, 25 bp, Homo sapien
gatagtgtatcgttcttgccctgtg

SEQ ID NO: 4625550 - DNA, 25 bp, Homo sapien
caaccaggttactgcggtgaatgcg

SEQ ID NO: 4625551 - DNA, 25 bp, Homo sapien
tgtagttgaggatgcccccgttgag

SEQ ID NO: 4625552 - DNA, 25 bp, Homo sapien
catcagtgtcaaacctcatgacagc

SEQ ID NO: 4625553 - DNA, 25 bp, Homo sapien
gatgcccccgttgaggaaataagtg

SEQ ID NO: 4625554 - DNA, 25 bp, Homo sapien
ggaaataagtgagctccacatcagt

SEQ ID NO: 4625555 - DNA, 25 bp, Homo sapien
tgggcgcagcaccaagtgcacgtct

SEQ ID NO: 4625556 - DNA, 25 bp, Homo sapien
cttcctccctgggcgcagcaccaag

SEQ ID NO: 4625557 - DNA, 25 bp, Homo sapien
cctgcgctggctggtggtgcggctt

SEQ ID NO: 4625558 - DNA, 25 bp, Homo sapien
ctggctggtggtgcggcttcctccc

SEQ ID NO: 4625559 - DNA, 25 bp, Homo sapien
gaaacagtgaaaaagcaacgtcctg

SEQ ID NO: 4625560 - DNA, 25 bp, Homo sapien
tgagcagagcgtaagaggaacaata

SEQ ID NO: 4625561 - DNA, 25 bp, Homo sapien
taacacccgacctatccatgaggag

SEQ ID NO: 4625562 - DNA, 25 bp, Homo sapien
gaccctcaagaggaaggtttcattg

SEQ ID NO: 4625563 - DNA, 25 bp, Homo sapien
tatagcaacccaagcaaactaaggc

SEQ ID NO: 4625564 - DNA, 25 bp, Homo sapien
tcctgggtctccataagagtgggac

SEQ ID NO: 4625565 - DNA, 25 bp, Homo sapien
tgatgaccaggccatatcccctgag

SEQ ID NO: 4625566 - DNA, 25 bp, Homo sapien
tgtacttatatcgttgccactgcca

SEQ ID NO: 4625567 - DNA, 25 bp, Homo sapien
gaattataggcatgagccactgcgc

SEQ ID NO: 4625568 - DNA, 25 bp, Homo sapien
aggcacacaataccacacctggcta

SEQ ID NO: 4625569 - DNA, 25 bp, Homo sapien
ttataggcatgagccactgcgcctg

SEQ ID NO: 4625570 - DNA, 25 bp, Homo sapien
agcctctgcatcccgggtttaagca

SEQ ID NO: 4625571 - DNA, 25 bp, Homo sapien
gcctggcgaagatatttttaccgaa

SEQ ID NO: 4625572 - DNA, 25 bp, Homo sapien
aaagtctaggttcaaggcactggca

SEQ ID NO: 4625573 - DNA, 25 bp, Homo sapien
aagggacccaattccattagtctag

SEQ ID NO: 4625574 - DNA, 25 bp, Homo sapien
tgtttcctcataaccacagtcttgg

SEQ ID NO: 4625575 - DNA, 25 bp, Homo sapien
tcttcattcgcaaagaatatgggag

SEQ ID NO: 4625576 - DNA, 25 bp, Homo sapien
taccacagctaagattcatgcctaa

SEQ ID NO: 4625577 - DNA, 25 bp, Homo sapien
tgtaaatacacatgaagggcatccc

SEQ ID NO: 4625578 - DNA, 25 bp, Homo sapien
taactaactcttagcttgctgcgga

SEQ ID NO: 4625579 - DNA, 25 bp, Homo sapien
tctcaagagtatcctgtggagcaca

SEQ ID NO: 4625580 - DNA, 25 bp, Homo sapien
tctggttgaacacaaactggctggg

SEQ ID NO: 4625581 - DNA, 25 bp, Homo sapien
tccagcctgcatacgataagacaac

SEQ ID NO: 4625582 - DNA, 25 bp, Homo sapien
gaagcacagtagcaggtatccagcc

SEQ ID NO: 4625583 - DNA, 25 bp, Homo sapien
ggcatggactcaaacaaagtaggca

SEQ ID NO: 4625584 - DNA, 25 bp, Homo sapien
tgtccagccgtgtatgttttgaagc

SEQ ID NO: 4625585 - DNA, 25 bp, Homo sapien
agtggatcttttgactgactcccaa

SEQ ID NO: 4625586 - DNA, 25 bp, Homo sapien
gagtcatcccaacatcaaggtcagt

SEQ ID NO: 4625587 - DNA, 25 bp, Homo sapien
taatatgttctcttaacgtgtgcca

SEQ ID NO: 4625588 - DNA, 25 bp, Homo sapien
gctgtccactgtagagttgctgtat

SEQ ID NO: 4625589 - DNA, 25 bp, Homo sapien
gctgtatgtagcaatgtgtatccac

SEQ ID NO: 4625590 - DNA, 25 bp, Homo sapien
catgttcctggtgtagcaacgtgtg

SEQ ID NO: 4625591 - DNA, 25 bp, Homo sapien
catggatcgcttgtacccctgtgaa

SEQ ID NO: 4625592 - DNA, 25 bp, Homo sapien
ggtcctcaatcttcagctacaggga

SEQ ID NO: 4625593 - DNA, 25 bp, Homo sapien
cagacactgtactcgaagtggaagg

SEQ ID NO: 4625594 - DNA, 25 bp, Homo sapien
gagcaaagatattctgtgcccgaca

SEQ ID NO: 4625595 - DNA, 25 bp, Homo sapien
cctggtcatgttttagcactagcta

SEQ ID NO: 4625596 - DNA, 25 bp, Homo sapien
tgttacacagctgacgtaagagtga

SEQ ID NO: 4625597 - DNA, 25 bp, Homo sapien
tatgtattgtacgtatctgtgcctg

SEQ ID NO: 4625598 - DNA, 25 bp, Homo sapien
caaagtcaggtaccatatgttcatg

SEQ ID NO: 4625599 - DNA, 25 bp, Homo sapien
aattgaaagactaattggaggccac

SEQ ID NO: 4625600 - DNA, 25 bp, Homo sapien
cactgagtttgtgcctgcaaatgga

SEQ ID NO: 4625601 - DNA, 25 bp, Homo sapien
ggatataattatgcctgaaacagcg

SEQ ID NO: 4625602 - DNA, 25 bp, Homo sapien
tctgcctgttgtatcactcactgag

SEQ ID NO: 4625603 - DNA, 25 bp, Homo sapien
tttatagtcctacgggtccttgaga

SEQ ID NO: 4625604 - DNA, 25 bp, Homo sapien
tacgggtccttgagactttgcgctt

SEQ ID NO: 4625605 - DNA, 25 bp, Homo sapien
aatttaattataacctgtcttagag

SEQ ID NO: 4625606 - DNA, 25 bp, Homo sapien
tccttgcagaactccagtgccatga

SEQ ID NO: 4625607 - DNA, 25 bp, Homo sapien
gagcatcctggtccctgtatatggg

SEQ ID NO: 4625608 - DNA, 25 bp, Homo sapien
ccccttttgtgggtgctttgataag

SEQ ID NO: 4625609 - DNA, 25 bp, Homo sapien
tgtggcctgctgtcactagagcact

SEQ ID NO: 4625610 - DNA, 25 bp, Homo sapien
gctgtactgtccattgtctgtgtgt

SEQ ID NO: 4625611 - DNA, 25 bp, Homo sapien
gagtcctcagagaaaagctcctagg

SEQ ID NO: 4625612 - DNA, 25 bp, Homo sapien
tattttacgccttcagacatgggac

SEQ ID NO: 4625613 - DNA, 25 bp, Homo sapien
gatatacaccttggaatgggatgcc

SEQ ID NO: 4625614 - DNA, 25 bp, Homo sapien
ttagcgcctggcataaaatacgtgc

SEQ ID NO: 4625615 - DNA, 25 bp, Homo sapien
taaatttagcctccactatcgcagg

SEQ ID NO: 4625616 - DNA, 25 bp, Homo sapien
tgtccgccatgattacacaaactgg

SEQ ID NO: 4625617 - DNA, 25 bp, Homo sapien
gattaccttgctctacctgcctgag

SEQ ID NO: 4625618 - DNA, 25 bp, Homo sapien
cagttcggaagtgcactcgggcttt

SEQ ID NO: 4625619 - DNA, 25 bp, Homo sapien
tccagctagagtggtcaaaggataa

SEQ ID NO: 4625620 - DNA, 25 bp, Homo sapien
caggcccacctggagtgaactctct

SEQ ID NO: 4625621 - DNA, 25 bp, Homo sapien
caactgattagggacttgaatccca

SEQ ID NO: 4625622 - DNA, 25 bp, Homo sapien
tatctgggaggatcctaggtggccc

SEQ ID NO: 4625623 - DNA, 25 bp, Homo sapien
tacacaattgggctggcaaagcaag

SEQ ID NO: 4625624 - DNA, 25 bp, Homo sapien
taaggagtgtccaattgataattgc

SEQ ID NO: 4625625 - DNA, 25 bp, Homo sapien
aaaacctggcatattgactggacgt

SEQ ID NO: 4625626 - DNA, 25 bp, Homo sapien
tctatcagtcaaggtttaaccacag

SEQ ID NO: 4625627 - DNA, 25 bp, Homo sapien
tacggtcaagaaaccatatatgtgt

SEQ ID NO: 4625628 - DNA, 25 bp, Homo sapien
catgacagcgtactctgcactccag

SEQ ID NO: 4625629 - DNA, 25 bp, Homo sapien
ctgagcaacagaggtagaacctgtg

SEQ ID NO: 4625630 - DNA, 25 bp, Homo sapien
aagccgttttctctctacggtcaag

SEQ ID NO: 4625631 - DNA, 25 bp, Homo sapien
caaagacctcggtgagataaatctc

SEQ ID NO: 4625632 - DNA, 25 bp, Homo sapien
tccaaagtaagttcatccagacaca

SEQ ID NO: 4625633 - DNA, 25 bp, Homo sapien
gaatcacggattagcgacaaattta

SEQ ID NO: 4625634 - DNA, 25 bp, Homo sapien
tcatagctcagctgatgagggacac

SEQ ID NO: 4625635 - DNA, 25 bp, Homo sapien
attctggactttatgaagccattga

SEQ ID NO: 4625636 - DNA, 25 bp, Homo sapien
ttattctggactttatgaagccatt

SEQ ID NO: 4625637 - DNA, 25 bp, Homo sapien
gttattctggactttatgaagccat

SEQ ID NO: 4625638 - DNA, 25 bp, Homo sapien
tattctggactttatgaagccattg

SEQ ID NO: 4625639 - DNA, 25 bp, Homo sapien
agaggtgcagtatattcaggctgag

SEQ ID NO: 4625640 - DNA, 25 bp, Homo sapien
aggaggaaggctggttccgtggctt

SEQ ID NO: 4625641 - DNA, 25 bp, Homo sapien
tggttccgtggctttttggatgccc

SEQ ID NO: 4625642 - DNA, 25 bp, Homo sapien
gaggtgcagtatattcaggctgaga

SEQ ID NO: 4625643 - DNA, 25 bp, Homo sapien
gatcctgaggttcacaacacgaaaa

SEQ ID NO: 4625644 - DNA, 25 bp, Homo sapien
taaaaggcctcactaactcatccag

SEQ ID NO: 4625645 - DNA, 25 bp, Homo sapien
cctagtccaagtagtggagttcagt

SEQ ID NO: 4625646 - DNA, 25 bp, Homo sapien
ggagttcagtcttccccaatttcta

SEQ ID NO: 4625647 - DNA, 25 bp, Homo sapien
aaaggaagaatgtcgtctactgcag

SEQ ID NO: 4625648 - DNA, 25 bp, Homo sapien
tagataatattccacctctggcagc

SEQ ID NO: 4625649 - DNA, 25 bp, Homo sapien
gttcaaaatgtatgtcccaccctca

SEQ ID NO: 4625650 - DNA, 25 bp, Homo sapien
aaggcaattgccatcgccacggaca

SEQ ID NO: 4625651 - DNA, 25 bp, Homo sapien
cagagcaggtacacgttactatgtc

SEQ ID NO: 4625652 - DNA, 25 bp, Homo sapien
taatgtagccactgttagtcaggca

SEQ ID NO: 4625653 - DNA, 25 bp, Homo sapien
catcttactcaagctcagagcaggt

SEQ ID NO: 4625654 - DNA, 25 bp, Homo sapien
gcaccatgggatgatgaaactccag

SEQ ID NO: 4625655 - DNA, 25 bp, Homo sapien
tctgacaagggaacgaaatgcttct

SEQ ID NO: 4625656 - DNA, 25 bp, Homo sapien
tattgaagatggtggccgctacagg

SEQ ID NO: 4625657 - DNA, 25 bp, Homo sapien
taaggaggccaactacggcagatga

SEQ ID NO: 4625658 - DNA, 25 bp, Homo sapien
tgagacagattgcagtaaggaggcc

SEQ ID NO: 4625659 - DNA, 25 bp, Homo sapien
ggtgatgagccctttgcgtcacagg

SEQ ID NO: 4625660 - DNA, 25 bp, Homo sapien
tgcgccggcatcctccgaggtgagt

SEQ ID NO: 4625661 - DNA, 25 bp, Homo sapien
agtcgccgggtacgccttcgcggat

SEQ ID NO: 4625662 - DNA, 25 bp, Homo sapien
tgtctcgcgaggagggtgaagcgcc

SEQ ID NO: 4625663 - DNA, 25 bp, Homo sapien
gcatttgggccggtgcgctgagccc

SEQ ID NO: 4625664 - DNA, 25 bp, Homo sapien
ggccgcatttgggccggtgcgctga

SEQ ID NO: 4625665 - DNA, 25 bp, Homo sapien
ccgcatttgggccggtgcgctgagc

SEQ ID NO: 4625666 - DNA, 25 bp, Homo sapien
catttgggccggtgcgctgagcccc

SEQ ID NO: 4625667 - DNA, 25 bp, Homo sapien
ttgcttccgggaggcgtacaacagg

SEQ ID NO: 4625668 - DNA, 25 bp, Homo sapien
actttataggatactggttgggctc

SEQ ID NO: 4625669 - DNA, 25 bp, Homo sapien
ttgggatcccgttggactcctggtg

SEQ ID NO: 4625670 - DNA, 25 bp, Homo sapien
tggtaaggttgaaacgacatcgaac

SEQ ID NO: 4625671 - DNA, 25 bp, Homo sapien
tttgaggcctgaggagtagaatctg

SEQ ID NO: 4625672 - DNA, 25 bp, Homo sapien
caacgggccgcttaggctctagacg

SEQ ID NO: 4625673 - DNA, 25 bp, Homo sapien
gacgttctttatacctcgcagttat

SEQ ID NO: 4625674 - DNA, 25 bp, Homo sapien
ctctagaatgtttggggcgctcaca

SEQ ID NO: 4625675 - DNA, 25 bp, Homo sapien
tatcagtcaagcaacaagtgtttgt

SEQ ID NO: 4625676 - DNA, 25 bp, Homo sapien
tcaagcaacaagtgtttgttgagcg

SEQ ID NO: 4625677 - DNA, 25 bp, Homo sapien
taatgtatcagtcaagcaacaagtg

SEQ ID NO: 4625678 - DNA, 25 bp, Homo sapien
ccgccataatgtatcagtcaagcaa

SEQ ID NO: 4625679 - DNA, 25 bp, Homo sapien
tctaagaagaaatacgtgggacgcg

SEQ ID NO: 4625680 - DNA, 25 bp, Homo sapien
gcaggataaggtgctgtcgtgtcca

SEQ ID NO: 4625681 - DNA, 25 bp, Homo sapien
tattacgtctggctctaaagctgga

SEQ ID NO: 4625682 - DNA, 25 bp, Homo sapien
tgtgggaacccctgtaaatcgagcc

SEQ ID NO: 4625683 - DNA, 25 bp, Homo sapien
actcgcttcgtgcagcgctgtcgct

SEQ ID NO: 4625684 - DNA, 25 bp, Homo sapien
ggagctgcgggccttacagtaacct

SEQ ID NO: 4625685 - DNA, 25 bp, Homo sapien
acagtaacctcccaggcggtggctg

SEQ ID NO: 4625686 - DNA, 25 bp, Homo sapien
cagccatcttttagccgggcacgag

SEQ ID NO: 4625687 - DNA, 25 bp, Homo sapien
tccagtccagcgtgcgacgacttac

SEQ ID NO: 4625688 - DNA, 25 bp, Homo sapien
aaatccagtccagcgtgcgacgact

SEQ ID NO: 4625689 - DNA, 25 bp, Homo sapien
tgaataaatccagtccagcgtgcga

SEQ ID NO: 4625690 - DNA, 25 bp, Homo sapien
aataaatccagtccagcgtgcgacg

SEQ ID NO: 4625691 - DNA, 25 bp, Homo sapien
gggcccagtgagtcgacacggtggg

SEQ ID NO: 4625692 - DNA, 25 bp, Homo sapien
agtcgacacggtgggggcccgcgat

SEQ ID NO: 4625693 - DNA, 25 bp, Homo sapien
ctgcgggcccagtgagtcgacacgg

SEQ ID NO: 4625694 - DNA, 25 bp, Homo sapien
tgcgggcccagtgagtcgacacggt

SEQ ID NO: 4625695 - DNA, 25 bp, Homo sapien
ggtgagggagtgaaatgcttaattc

SEQ ID NO: 4625696 - DNA, 25 bp, Homo sapien
agatcgtatcctccaggaagaggcg

SEQ ID NO: 4625697 - DNA, 25 bp, Homo sapien
tctgggtgctgaagaaatagggcct

SEQ ID NO: 4625698 - DNA, 25 bp, Homo sapien
taagaagcggaagatcgtatcctcc

SEQ ID NO: 4625699 - DNA, 25 bp, Homo sapien
tggcgggtacacccagcagccctta

SEQ ID NO: 4625700 - DNA, 25 bp, Homo sapien
ggcgggtacacccagcagcccttac

SEQ ID NO: 4625701 - DNA, 25 bp, Homo sapien
gtggcgggtacacccagcagccctt

SEQ ID NO: 4625702 - DNA, 25 bp, Homo sapien
agtggcgggtacacccagcagccct

SEQ ID NO: 4625703 - DNA, 25 bp, Homo sapien
aaatctacctgatatttcccctcgc

SEQ ID NO: 4625704 - DNA, 25 bp, Homo sapien
tgtgaaatctacctgatatttcccc

SEQ ID NO: 4625705 - DNA, 25 bp, Homo sapien
ggtgtgaaatctacctgatatttcc

SEQ ID NO: 4625706 - DNA, 25 bp, Homo sapien
tgaaatctacctgatatttcccctc

SEQ ID NO: 4625707 - DNA, 25 bp, Homo sapien
cgaagcatagatgatgcagccccag

SEQ ID NO: 4625708 - DNA, 25 bp, Homo sapien
tcttgcagacaccatcgaagcatag

SEQ ID NO: 4625709 - DNA, 25 bp, Homo sapien
cattcgtcccaaagattttgtctgg

SEQ ID NO: 4625710 - DNA, 25 bp, Homo sapien
gagattaaaacgatggcaagcagca

SEQ ID NO: 4625711 - DNA, 25 bp, Homo sapien
tatatctacataagcatgagggaaa

SEQ ID NO: 4625712 - DNA, 25 bp, Homo sapien
tctacataagcatgagggaaagaac

SEQ ID NO: 4625713 - DNA, 25 bp, Homo sapien
ttatatctacataagcatgagggaa

SEQ ID NO: 4625714 - DNA, 25 bp, Homo sapien
tatctacataagcatgagggaaaga

SEQ ID NO: 4625715 - DNA, 25 bp, Homo sapien
tctattgggataatgctagctgtac

SEQ ID NO: 4625716 - DNA, 25 bp, Homo sapien
tcttaaacacatggctgaaactgaa

SEQ ID NO: 4625717 - DNA, 25 bp, Homo sapien
tataatcctgagcagtaccaggtca

SEQ ID NO: 4625718 - DNA, 25 bp, Homo sapien
tgctaccagactgctaagccagtgc

SEQ ID NO: 4625719 - DNA, 25 bp, Homo sapien
agccccttgattaacaagtacggag

SEQ ID NO: 4625720 - DNA, 25 bp, Homo sapien
tacggagtgcctagcatgtcctctt

SEQ ID NO: 4625721 - DNA, 25 bp, Homo sapien
gacatctttgttccgtgtactaagc

SEQ ID NO: 4625722 - DNA, 25 bp, Homo sapien
tgtactaagcagattaagccccttg

SEQ ID NO: 4625723 - DNA, 25 bp, Homo sapien
tggatgtcttgtgagtcgtcagtag

SEQ ID NO: 4625724 - DNA, 25 bp, Homo sapien
tcgtcagtagggataagaattgtcc

SEQ ID NO: 4625725 - DNA, 25 bp, Homo sapien
gccactcttgtttgagggacaagtt

SEQ ID NO: 4625726 - DNA, 25 bp, Homo sapien
tactaaaacggtgtcatggctgaag

SEQ ID NO: 4625727 - DNA, 25 bp, Homo sapien
ctacactggtggaagcagttaaaga

SEQ ID NO: 4625728 - DNA, 25 bp, Homo sapien
tggaagcagttaaagaacaagatgg

SEQ ID NO: 4625729 - DNA, 25 bp, Homo sapien
catcattcctacactggtggaagca

SEQ ID NO: 4625730 - DNA, 25 bp, Homo sapien
cactggtggaagcagttaaagaaca

SEQ ID NO: 4625731 - DNA, 25 bp, Homo sapien
tacgacggcagctatacaacagagg

SEQ ID NO: 4625732 - DNA, 25 bp, Homo sapien
tacagctgtgaaagccggatccgga

SEQ ID NO: 4625733 - DNA, 25 bp, Homo sapien
tctgcacaccggaaggctagttctc

SEQ ID NO: 4625734 - DNA, 25 bp, Homo sapien
cctacagtaacagggagagcaggct

SEQ ID NO: 4625735 - DNA, 25 bp, Homo sapien
gttgccttagacctcttctgctggt

SEQ ID NO: 4625736 - DNA, 25 bp, Homo sapien
cagaatattctgtgttgccttagac

SEQ ID NO: 4625737 - DNA, 25 bp, Homo sapien
cttctccacctagacaatcactcat

SEQ ID NO: 4625738 - DNA, 25 bp, Homo sapien
tctgtgttgccttagacctcttctg

SEQ ID NO: 4625739 - DNA, 25 bp, Homo sapien
acaggtctgatcatgctctgtattt

SEQ ID NO: 4625740 - DNA, 25 bp, Homo sapien
gaggtgacatctggcttttgggtag

SEQ ID NO: 4625741 - DNA, 25 bp, Homo sapien
cagatgcgggaatcagaggacacag

SEQ ID NO: 4625742 - DNA, 25 bp, Homo sapien
gcatccaggttgatgcagtgaggct

SEQ ID NO: 4625743 - DNA, 25 bp, Homo sapien
gcaggactaggagaggtgctgagtt

SEQ ID NO: 4625744 - DNA, 25 bp, Homo sapien
gagcagcaggactaggagaggtgct

SEQ ID NO: 4625745 - DNA, 25 bp, Homo sapien
agagcagcaggactaggagaggtgc

SEQ ID NO: 4625746 - DNA, 25 bp, Homo sapien
gcagcaggactaggagaggtgctga

SEQ ID NO: 4625747 - DNA, 25 bp, Homo sapien
gttgtatgatatagctacccttcct

SEQ ID NO: 4625748 - DNA, 25 bp, Homo sapien
ggttgtatgatatagctacccttcc

SEQ ID NO: 4625749 - DNA, 25 bp, Homo sapien
gcagggccgggcattctccagggtg

SEQ ID NO: 4625750 - DNA, 25 bp, Homo sapien
agggccgggcattctccagggtgct

SEQ ID NO: 4625751 - DNA, 25 bp, Homo sapien
ggcagggccgggcattctccagggt

SEQ ID NO: 4625752 - DNA, 25 bp, Homo sapien
ggccgggcattctccagggtgcttg

SEQ ID NO: 4625753 - DNA, 25 bp, Homo sapien
ttcgccttgatgtgaggaagaagtg

SEQ ID NO: 4625754 - DNA, 25 bp, Homo sapien
tcaaccttgtaatgacacttgcttt

SEQ ID NO: 4625755 - DNA, 25 bp, Homo sapien
aaactgacgcgtaggagccactctt

SEQ ID NO: 4625756 - DNA, 25 bp, Homo sapien
gaaaggtgagtcaacaaaattctga

SEQ ID NO: 4625757 - DNA, 25 bp, Homo sapien
atggcctgctgaccacgaacacaga

SEQ ID NO: 4625758 - DNA, 25 bp, Homo sapien
gtttctatggcctgctgaccacgaa

SEQ ID NO: 4625759 - DNA, 25 bp, Homo sapien
gcctgctgaccacgaacacagagtg

SEQ ID NO: 4625760 - DNA, 25 bp, Homo sapien
tgaccacgaacacagagtggccagt

SEQ ID NO: 4625761 - DNA, 25 bp, Homo sapien
tcctcccttccatttgacttgcttc

SEQ ID NO: 4625762 - DNA, 25 bp, Homo sapien
cctcccttccatttgacttgcttca

SEQ ID NO: 4625763 - DNA, 25 bp, Homo sapien
ctcccttccatttgacttgcttcat

SEQ ID NO: 4625764 - DNA, 25 bp, Homo sapien
gaacatgtgggagccctgaaagcag

SEQ ID NO: 4625765 - DNA, 25 bp, Homo sapien
catactcagtgcaggcttcagccct

SEQ ID NO: 4625766 - DNA, 25 bp, Homo sapien
cagggtgatgataaacctcatactc

SEQ ID NO: 4625767 - DNA, 25 bp, Homo sapien
actgtgagttgccattggaacatgt

SEQ ID NO: 4625768 - DNA, 25 bp, Homo sapien
gaacatacattcagtgaagctaggt

SEQ ID NO: 4625769 - DNA, 25 bp, Homo sapien
tgggtcagtgaagtggttataagta

SEQ ID NO: 4625770 - DNA, 25 bp, Homo sapien
cagtgaagtggttataagtaaggct

SEQ ID NO: 4625771 - DNA, 25 bp, Homo sapien
gaagctaggtgaatgtgggtcagtg

SEQ ID NO: 4625772 - DNA, 25 bp, Homo sapien
tacattgccggcattctgagaaata

SEQ ID NO: 4625773 - DNA, 25 bp, Homo sapien
ggagagtttgccatcaatgggcaat

SEQ ID NO: 4625774 - DNA, 25 bp, Homo sapien
tatttctacattgccggcattctga

SEQ ID NO: 4625775 - DNA, 25 bp, Homo sapien
ctggagagtttgccatcaatgggca

SEQ ID NO: 4625776 - DNA, 25 bp, Homo sapien
tatggacgctgggaggacaatatca

SEQ ID NO: 4625777 - DNA, 25 bp, Homo sapien
caatgaggatctggtgtatggacgc

SEQ ID NO: 4625778 - DNA, 25 bp, Homo sapien
aatggcactgatcttctggctgacg

SEQ ID NO: 4625779 - DNA, 25 bp, Homo sapien
tgacagataccaaaccaagagtggc

SEQ ID NO: 4625780 - DNA, 25 bp, Homo sapien
ccttggtaaatgatgaagggtggat

SEQ ID NO: 4625781 - DNA, 25 bp, Homo sapien
aaatgaagaattgactgggactggc

SEQ ID NO: 4625782 - DNA, 25 bp, Homo sapien
aattgactgggactggcggtgcctt

SEQ ID NO: 4625783 - DNA, 25 bp, Homo sapien
gactggcggtgccttggtaaatgat

SEQ ID NO: 4625784 - DNA, 25 bp, Homo sapien
tggcccatttactttagcgggtatc

SEQ ID NO: 4625785 - DNA, 25 bp, Homo sapien
ttttcggcaacatcagtggagcggg

SEQ ID NO: 4625786 - DNA, 25 bp, Homo sapien
gacccggctgcgatttgctgctgag

SEQ ID NO: 4625787 - DNA, 25 bp, Homo sapien
tcatgtcagactcggacagcgagga

SEQ ID NO: 4625788 - DNA, 25 bp, Homo sapien
ttaaacagttgtgaaggcatccaca

SEQ ID NO: 4625789 - DNA, 25 bp, Homo sapien
ctggaatccaaccagtaagctgtta

SEQ ID NO: 4625790 - DNA, 25 bp, Homo sapien
cctggataccattgccaacaagctg

SEQ ID NO: 4625791 - DNA, 25 bp, Homo sapien
gaaggcatccacagaggtagtcaaa

SEQ ID NO: 4625792 - DNA, 25 bp, Homo sapien
caaataagtaaggatcttcttttat

SEQ ID NO: 4625793 - DNA, 25 bp, Homo sapien
ctgcaaataagtaaggatcttcttt

SEQ ID NO: 4625794 - DNA, 25 bp, Homo sapien
aatcccagaaacttgcaactgctcc

SEQ ID NO: 4625795 - DNA, 25 bp, Homo sapien
ttatttgaatcccagaaacttgcaa

SEQ ID NO: 4625796 - DNA, 25 bp, Homo sapien
taagtggctgttttaggagggagcc

SEQ ID NO: 4625797 - DNA, 25 bp, Homo sapien
ctaagtggctgttttaggagggagc

SEQ ID NO: 4625798 - DNA, 25 bp, Homo sapien
gcagcccatgggaacgaacaatatt

SEQ ID NO: 4625799 - DNA, 25 bp, Homo sapien
ccaataggccttgtgatgatgctgc

SEQ ID NO: 4625800 - DNA, 25 bp, Homo sapien
tcacaaggtagtaacgagcagggcc

SEQ ID NO: 4625801 - DNA, 25 bp, Homo sapien
tagaattgaattggagccacggcac

SEQ ID NO: 4625802 - DNA, 25 bp, Homo sapien
tctttacgatgagtctctggagctg

SEQ ID NO: 4625803 - DNA, 25 bp, Homo sapien
catgccattgggtccttagctgtgg

SEQ ID NO: 4625804 - DNA, 25 bp, Homo sapien
tagctgtggaccatacgtgtcacac

SEQ ID NO: 4625805 - DNA, 25 bp, Homo sapien
ggaagacatccttagccatggacca

SEQ ID NO: 4625806 - DNA, 25 bp, Homo sapien
caaataggctgaggattttctctcc

SEQ ID NO: 4625807 - DNA, 25 bp, Homo sapien
gagtgaatttcctgacaagtagcaa

SEQ ID NO: 4625808 - DNA, 25 bp, Homo sapien
cagaagcgcactgagcatgcagagc

SEQ ID NO: 4625809 - DNA, 25 bp, Homo sapien
agcaaatttaagtgtcccctgccag

SEQ ID NO: 4625810 - DNA, 25 bp, Homo sapien
tacaacacgtgctcctgaaaggcag

SEQ ID NO: 4625811 - DNA, 25 bp, Homo sapien
ctggtcccatgctcttgcagtacaa

SEQ ID NO: 4625812 - DNA, 25 bp, Homo sapien
ggcccaatgccggatgcacagtagt

SEQ ID NO: 4625813 - DNA, 25 bp, Homo sapien
ggcagggaggtgtcgggactctgga

SEQ ID NO: 4625814 - DNA, 25 bp, Homo sapien
ttgcccaagtataatgccagcaccc

SEQ ID NO: 4625815 - DNA, 25 bp, Homo sapien
tgggccctcctttccgtgggatgat

SEQ ID NO: 4625816 - DNA, 25 bp, Homo sapien
ccctcctttccgtgggatgatgcca

SEQ ID NO: 4625817 - DNA, 25 bp, Homo sapien
gtcctctttgcccaagtataatgcc

SEQ ID NO: 4625818 - DNA, 25 bp, Homo sapien
gattgtggttcagaactccaagccc

SEQ ID NO: 4625819 - DNA, 25 bp, Homo sapien
gataggattgtggttcagaactcca

SEQ ID NO: 4625820 - DNA, 25 bp, Homo sapien
caaagataggattgtggttcagaac

SEQ ID NO: 4625821 - DNA, 25 bp, Homo sapien
agcacaaagataggattgtggttca

SEQ ID NO: 4625822 - DNA, 25 bp, Homo sapien
tgatgacatcaagtagggctgtggt

SEQ ID NO: 4625823 - DNA, 25 bp, Homo sapien
tccagatgggtcttggaacatgcct

SEQ ID NO: 4625824 - DNA, 25 bp, Homo sapien
gcatctatacgtgatcgtctacccg

SEQ ID NO: 4625825 - DNA, 25 bp, Homo sapien
tctacccgtgtgtgccagaagggct

SEQ ID NO: 4625826 - DNA, 25 bp, Homo sapien
ctaggctttttctcttctgaaacac

SEQ ID NO: 4625827 - DNA, 25 bp, Homo sapien
tccattttggctgtgttgtccctgc

SEQ ID NO: 4625828 - DNA, 25 bp, Homo sapien
aagttgctagctggcctgcagccat

SEQ ID NO: 4625829 - DNA, 25 bp, Homo sapien
cagagcaccaagttgctagctggcc

SEQ ID NO: 4625830 - DNA, 25 bp, Homo sapien
tctccattttggctgtgttgtccct

SEQ ID NO: 4625831 - DNA, 25 bp, Homo sapien
ggccttgccatcctgccacactggc

SEQ ID NO: 4625832 - DNA, 25 bp, Homo sapien
gagatgggcaaaactccttgtgctc

SEQ ID NO: 4625833 - DNA, 25 bp, Homo sapien
ccttgtgctcaggccttgccatcct

SEQ ID NO: 4625834 - DNA, 25 bp, Homo sapien
tgagatgggcaaaactccttgtgct

SEQ ID NO: 4625835 - DNA, 25 bp, Homo sapien
aaattccttgagtagccaaggttga

SEQ ID NO: 4625836 - DNA, 25 bp, Homo sapien
caaaattccttgagtagccaaggtt

SEQ ID NO: 4625837 - DNA, 25 bp, Homo sapien
gcaaaattccttgagtagccaaggt

SEQ ID NO: 4625838 - DNA, 25 bp, Homo sapien
aagcaaaattccttgagtagccaag

SEQ ID NO: 4625839 - DNA, 25 bp, Homo sapien
tgctgaaacttccatgtaacattct

SEQ ID NO: 4625840 - DNA, 25 bp, Homo sapien
gaaaatcccgcaacttctttggcac

SEQ ID NO: 4625841 - DNA, 25 bp, Homo sapien
tcattgtggaaaaagggtctaagaa

SEQ ID NO: 4625842 - DNA, 25 bp, Homo sapien
tcccattgtctttggacctctgctg

SEQ ID NO: 4625843 - DNA, 25 bp, Homo sapien
ctaagacaagccaacgtcggttagc

SEQ ID NO: 4625844 - DNA, 25 bp, Homo sapien
caacgtcggttagctcccgtgggag

SEQ ID NO: 4625845 - DNA, 25 bp, Homo sapien
ggttagctcccgtgggaggcccaca

SEQ ID NO: 4625846 - DNA, 25 bp, Homo sapien
aagccaacgtcggttagctcccgtg

SEQ ID NO: 4625847 - DNA, 25 bp, Homo sapien
catccccttgacagagcttctctat

SEQ ID NO: 4625848 - DNA, 25 bp, Homo sapien
ctgcatccccttgacagagcttctc

SEQ ID NO: 4625849 - DNA, 25 bp, Homo sapien
gcatccccttgacagagcttctcta

SEQ ID NO: 4625850 - DNA, 25 bp, Homo sapien
aactcacagcctttcagaatcggtc

SEQ ID NO: 4625851 - DNA, 25 bp, Homo sapien
ctgagatgcaagtgaactcacagcc

SEQ ID NO: 4625852 - DNA, 25 bp, Homo sapien
agtgaactcacagcctttcagaatc

SEQ ID NO: 4625853 - DNA, 25 bp, Homo sapien
gagatgcaagtgaactcacagcctt

SEQ ID NO: 4625854 - DNA, 25 bp, Homo sapien
ctgccttactggtcgtatattcagg

SEQ ID NO: 4625855 - DNA, 25 bp, Homo sapien
cgtatattcaggtacacaagttggg

SEQ ID NO: 4625856 - DNA, 25 bp, Homo sapien
tactggtcgtatattcaggtacaca

SEQ ID NO: 4625857 - DNA, 25 bp, Homo sapien
ggtcgtatattcaggtacacaagtt

SEQ ID NO: 4625858 - DNA, 25 bp, Homo sapien
tggttgttttaaatcctgtgccatg

SEQ ID NO: 4625859 - DNA, 25 bp, Homo sapien
gctggctggtcgtcctggtacatcc

SEQ ID NO: 4625860 - DNA, 25 bp, Homo sapien
tgtgtggttgttttaaatcctgtgc

SEQ ID NO: 4625861 - DNA, 25 bp, Homo sapien
tcctgtgccatggtttgggaaaagg

SEQ ID NO: 4625862 - DNA, 25 bp, Homo sapien
tgtcaacatcaaacagcagagggag

SEQ ID NO: 4625863 - DNA, 25 bp, Homo sapien
tggtgtcaacatcaaacagcagagg

SEQ ID NO: 4625864 - DNA, 25 bp, Homo sapien
ggtgtcaacatcaaacagcagaggg

SEQ ID NO: 4625865 - DNA, 25 bp, Homo sapien
ctctggatagaagcgttgtctgtgg

SEQ ID NO: 4625866 - DNA, 25 bp, Homo sapien
tctgtgccagggaaagtactaagcc

SEQ ID NO: 4625867 - DNA, 25 bp, Homo sapien
gtgccagggaaagtactaagcccac

SEQ ID NO: 4625868 - DNA, 25 bp, Homo sapien
gtctgtgccagggaaagtactaagc

SEQ ID NO: 4625869 - DNA, 25 bp, Homo sapien
ttagtctgtgccagggaaagtacta

SEQ ID NO: 4625870 - DNA, 25 bp, Homo sapien
catgcctttaaatctttctgccagg

SEQ ID NO: 4625871 - DNA, 25 bp, Homo sapien
gaaactgaggacctatggccatgcc

SEQ ID NO: 4625872 - DNA, 25 bp, Homo sapien
ctgtttgggctgaaactgaggacct

SEQ ID NO: 4625873 - DNA, 25 bp, Homo sapien
ggacctatggccatgcctttaaatc

SEQ ID NO: 4625874 - DNA, 25 bp, Homo sapien
tgagaagaggcaccccatcatctcc

SEQ ID NO: 4625875 - DNA, 25 bp, Homo sapien
ggaaacaactagtcagtagggattg

SEQ ID NO: 4625876 - DNA, 25 bp, Homo sapien
tataggtgaacaccagcaaacattg

SEQ ID NO: 4625877 - DNA, 25 bp, Homo sapien
cactgggtgtcatgcaaaggctata

SEQ ID NO: 4625878 - DNA, 25 bp, Homo sapien
gcttggtacatagtctgtgtacaaa

SEQ ID NO: 4625879 - DNA, 25 bp, Homo sapien
gtcatcataattagtgtcttcatca

SEQ ID NO: 4625880 - DNA, 25 bp, Homo sapien
ataaacgtaaagttcctagcacaat

SEQ ID NO: 4625881 - DNA, 25 bp, Homo sapien
tgagattaataccaaatatatgagg

SEQ ID NO: 4625882 - DNA, 25 bp, Homo sapien
acttctacagcgctgtggtgccggg

SEQ ID NO: 4625883 - DNA, 25 bp, Homo sapien
gtgattcttcaacagggctgcccat

SEQ ID NO: 4625884 - DNA, 25 bp, Homo sapien
gttcctcccgctctggtaggcaggg

SEQ ID NO: 4625885 - DNA, 25 bp, Homo sapien
tggagccgggatttcacttctacag

SEQ ID NO: 4625886 - DNA, 25 bp, Homo sapien
gggcagccgttgcaatatccgagct

SEQ ID NO: 4625887 - DNA, 25 bp, Homo sapien
ccggtgcccgaggactgctttggtc

SEQ ID NO: 4625888 - DNA, 25 bp, Homo sapien
tacaaatccgggtgactgacggcag

SEQ ID NO: 4625889 - DNA, 25 bp, Homo sapien
tcccagtccgggatccgaggagtta

SEQ ID NO: 4625890 - DNA, 25 bp, Homo sapien
tcccggtgctgtgcaagcggagccc

SEQ ID NO: 4625891 - DNA, 25 bp, Homo sapien
tcagaaacgcagacagacgcgcggg

SEQ ID NO: 4625892 - DNA, 25 bp, Homo sapien
gcctggccttgttacatcactgtca

SEQ ID NO: 4625893 - DNA, 25 bp, Homo sapien
tcggctcgctcccttggttctggga

SEQ ID NO: 4625894 - DNA, 25 bp, Homo sapien
gctgaccagggagcagcgttcctct

SEQ ID NO: 4625895 - DNA, 25 bp, Homo sapien
gaccagggagcagcgttcctctatt

SEQ ID NO: 4625896 - DNA, 25 bp, Homo sapien
ggctgcttgctgaccagggagcagc

SEQ ID NO: 4625897 - DNA, 25 bp, Homo sapien
tccatccaggttgggggctgcttgc

SEQ ID NO: 4625898 - DNA, 25 bp, Homo sapien
ccagtcctcgggttaatgtcatcag

SEQ ID NO: 4625899 - DNA, 25 bp, Homo sapien
atttgcggacccacagcagctcgtt

SEQ ID NO: 4625900 - DNA, 25 bp, Homo sapien
cactgtaggtgagggaactgcccga

SEQ ID NO: 4625901 - DNA, 25 bp, Homo sapien
gagcaaacgatgatactgtcctggg

SEQ ID NO: 4625902 - DNA, 25 bp, Homo sapien
ttagacgatggtctcgtggtcccac

SEQ ID NO: 4625903 - DNA, 25 bp, Homo sapien
tatttacatgactctcgggtaccag

SEQ ID NO: 4625904 - DNA, 25 bp, Homo sapien
caaataatgttgcacctggtaagga

SEQ ID NO: 4625905 - DNA, 25 bp, Homo sapien
tcatctctaacggtggcaaacttct

SEQ ID NO: 4625906 - DNA, 25 bp, Homo sapien
taacagtgtgaaggctctccaagca

SEQ ID NO: 4625907 - DNA, 25 bp, Homo sapien
taattgtgagaaacacaccactggt

SEQ ID NO: 4625908 - DNA, 25 bp, Homo sapien
catactagttctggtcctgatggga

SEQ ID NO: 4625909 - DNA, 25 bp, Homo sapien
gaagaagcatcgttttgtttcccac

SEQ ID NO: 4625910 - DNA, 25 bp, Homo sapien
tgttgaacacgatgctcttgaagac

SEQ ID NO: 4625911 - DNA, 25 bp, Homo sapien
cctgtttgtgtatctgggcagcatc

SEQ ID NO: 4625912 - DNA, 25 bp, Homo sapien
tcttttggttgggtgcccatagagt

SEQ ID NO: 4625913 - DNA, 25 bp, Homo sapien
ttttggttgggtgcccatagagtga

SEQ ID NO: 4625914 - DNA, 25 bp, Homo sapien
ctatctaacatcagtgcctgcctgt

SEQ ID NO: 4625915 - DNA, 25 bp, Homo sapien
tattagggataaagcatgcaaagct

SEQ ID NO: 4625916 - DNA, 25 bp, Homo sapien
tatcaccgagaataccaagtctgca

SEQ ID NO: 4625917 - DNA, 25 bp, Homo sapien
ggataaagcatgcaaagctttgtac

SEQ ID NO: 4625918 - DNA, 25 bp, Homo sapien
gcaaagctttgtactatcaccgaga

SEQ ID NO: 4625919 - DNA, 25 bp, Homo sapien
ggtgtcagaagcagatactcagagc

SEQ ID NO: 4625920 - DNA, 25 bp, Homo sapien
taccagccatgattgaagagttcct

SEQ ID NO: 4625921 - DNA, 25 bp, Homo sapien
gatgaaaggtttggagttcctccca

SEQ ID NO: 4625922 - DNA, 25 bp, Homo sapien
tactcagagctgattgttgtaggcc

SEQ ID NO: 4625923 - DNA, 25 bp, Homo sapien
gacttcagatggaaaagtcaagcag

SEQ ID NO: 4625924 - DNA, 25 bp, Homo sapien
tctctggacacgaagcacatggcag

SEQ ID NO: 4625925 - DNA, 25 bp, Homo sapien
tgtctgggaacgtgctattcctgat

SEQ ID NO: 4625926 - DNA, 25 bp, Homo sapien
gatgtgggtatgtccttcaactggc

SEQ ID NO: 4625927 - DNA, 25 bp, Homo sapien
gaaaatgtcattggcgttattgtgt

SEQ ID NO: 4625928 - DNA, 25 bp, Homo sapien
ttagaaaatgtcattggcgttattg

SEQ ID NO: 4625929 - DNA, 25 bp, Homo sapien
tcattggcgttattgtgttgagtcc

SEQ ID NO: 4625930 - DNA, 25 bp, Homo sapien
cgttattgtgttgagtcctctgggc

SEQ ID NO: 4625931 - DNA, 25 bp, Homo sapien
gagctgaaggtggtagagattttca

SEQ ID NO: 4625932 - DNA, 25 bp, Homo sapien
gacagaaggtggagcgaatgcgagc

SEQ ID NO: 4625933 - DNA, 25 bp, Homo sapien
cgaatgcgagctgaaggtggtagag

SEQ ID NO: 4625934 - DNA, 25 bp, Homo sapien
gaaggtggagcgaatgcgagctgaa

SEQ ID NO: 4625935 - DNA, 25 bp, Homo sapien
ccaaaagtaagagtggacaccaact

SEQ ID NO: 4625936 - DNA, 25 bp, Homo sapien
tatgtgataagaaggggcagatatc

SEQ ID NO: 4625937 - DNA, 25 bp, Homo sapien
caaaagtaagagtggacaccaactt

SEQ ID NO: 4625938 - DNA, 25 bp, Homo sapien
ctgcttgagggaggtatgtgataag

SEQ ID NO: 4625939 - DNA, 25 bp, Homo sapien
atgggaagaggggaaagcatagaac

SEQ ID NO: 4625940 - DNA, 25 bp, Homo sapien
gtaatgggaagaggggaaagcatag

SEQ ID NO: 4625941 - DNA, 25 bp, Homo sapien
tgcagtaatgggaagaggggaaagc

SEQ ID NO: 4625942 - DNA, 25 bp, Homo sapien
cagtaatgggaagaggggaaagcat

SEQ ID NO: 4625943 - DNA, 25 bp, Homo sapien
ttttccgagggttgagtgtgggagc

SEQ ID NO: 4625944 - DNA, 25 bp, Homo sapien
aggccccaaacaggctagcttcagc

SEQ ID NO: 4625945 - DNA, 25 bp, Homo sapien
ctgggagcccagtaagtgggaggca

SEQ ID NO: 4625946 - DNA, 25 bp, Homo sapien
tctgggctatctgaccacccagtgg

SEQ ID NO: 4625947 - DNA, 25 bp, Homo sapien
tgatctgagacccttagggctgtct

SEQ ID NO: 4625948 - DNA, 25 bp, Homo sapien
tcagatatctgagggatgccatgca

SEQ ID NO: 4625949 - DNA, 25 bp, Homo sapien
tgccagctggattggatgtacaggc

SEQ ID NO: 4625950 - DNA, 25 bp, Homo sapien
tccactatggagaggtgactggaag

SEQ ID NO: 4625951 - DNA, 25 bp, Homo sapien
agcttgctccgtttgttggctgcac

SEQ ID NO: 4625952 - DNA, 25 bp, Homo sapien
cctgggcagcgggttgacagtggcc

SEQ ID NO: 4625953 - DNA, 25 bp, Homo sapien
gtggccaaggattcccatgccagca

SEQ ID NO: 4625954 - DNA, 25 bp, Homo sapien
ccactcagatgtggttcggtggact

SEQ ID NO: 4625955 - DNA, 25 bp, Homo sapien
ggaacgtctactttctgtaagtgcc

SEQ ID NO: 4625956 - DNA, 25 bp, Homo sapien
gaaatggcctgtgtgagggaacgca

SEQ ID NO: 4625957 - DNA, 25 bp, Homo sapien
ggaacgcagagctactccctgtacc

SEQ ID NO: 4625958 - DNA, 25 bp, Homo sapien
ctctccatttattccgtctgtggaa

SEQ ID NO: 4625959 - DNA, 25 bp, Homo sapien
caggccccaaagggcttatttcaca

SEQ ID NO: 4625960 - DNA, 25 bp, Homo sapien
gctttcagaggtaggagcttcaggg

SEQ ID NO: 4625961 - DNA, 25 bp, Homo sapien
ttatactttctgtactgtcagagaa

SEQ ID NO: 4625962 - DNA, 25 bp, Homo sapien
tatactttctgtactgtcagagaaa

SEQ ID NO: 4625963 - DNA, 25 bp, Homo sapien
actttctgtactgtcagagaaattt

SEQ ID NO: 4625964 - DNA, 25 bp, Homo sapien
tccggtcctaggtctgctgtttctg

SEQ ID NO: 4625965 - DNA, 25 bp, Homo sapien
ggtctgctgtttctgtgccaggcat

SEQ ID NO: 4625966 - DNA, 25 bp, Homo sapien
cttccggtcctaggtctgctgtttc

SEQ ID NO: 4625967 - DNA, 25 bp, Homo sapien
taggtctgctgtttctgtgccaggc

SEQ ID NO: 4625968 - DNA, 25 bp, Homo sapien
ccagggatgtacatttgaactcaag

SEQ ID NO: 4625969 - DNA, 25 bp, Homo sapien
gaccagggatgtacatttgaactca

SEQ ID NO: 4625970 - DNA, 25 bp, Homo sapien
gggaccagggatgtacatttgaact

SEQ ID NO: 4625971 - DNA, 25 bp, Homo sapien
gggatgtacatttgaactcaagagg

SEQ ID NO: 4625972 - DNA, 25 bp, Homo sapien
ctgagccgccaggaagttgtcccgt

SEQ ID NO: 4625973 - DNA, 25 bp, Homo sapien
ttgtcccgtgtaggctccatcaaag

SEQ ID NO: 4625974 - DNA, 25 bp, Homo sapien
aagttgtcccgtgtaggctccatca

SEQ ID NO: 4625975 - DNA, 25 bp, Homo sapien
ccaggaagttgtcccgtgtaggctc

SEQ ID NO: 4625976 - DNA, 25 bp, Homo sapien
catgggggaacccattcagcctaac

SEQ ID NO: 4625977 - DNA, 25 bp, Homo sapien
tgctcacaggtgagtgtgccacgtg

SEQ ID NO: 4625978 - DNA, 25 bp, Homo sapien
agctcccccagctctaagcttggag

SEQ ID NO: 4625979 - DNA, 25 bp, Homo sapien
tggaggcaattgaggctgctcacag

SEQ ID NO: 4625980 - DNA, 25 bp, Homo sapien
cgaggatgcaagaggtgtccgggct

SEQ ID NO: 4625981 - DNA, 25 bp, Homo sapien
gaggatgcaagaggtgtccgggctg

SEQ ID NO: 4625982 - DNA, 25 bp, Homo sapien
ggattggaggctcgagttcctggca

SEQ ID NO: 4625983 - DNA, 25 bp, Homo sapien
tgggattggaggctcgagttcctgg

SEQ ID NO: 4625984 - DNA, 25 bp, Homo sapien
tttgccggcgatgccgggcctggcc

SEQ ID NO: 4625985 - DNA, 25 bp, Homo sapien
gcctcctcctgcttggcgatttcca

SEQ ID NO: 4625986 - DNA, 25 bp, Homo sapien
ccacttgtttgccggcgatgccggg

SEQ ID NO: 4625987 - DNA, 25 bp, Homo sapien
ttggcctcctcctgcttggcgattt

SEQ ID NO: 4625988 - DNA, 25 bp, Homo sapien
catttccttttcccgtggtgccgtg

SEQ ID NO: 4625989 - DNA, 25 bp, Homo sapien
atcatttccttttcccgtggtgccg

SEQ ID NO: 4625990 - DNA, 25 bp, Homo sapien
tcccgtggtgccgtggaacacatac

SEQ ID NO: 4625991 - DNA, 25 bp, Homo sapien
ttttcccgtggtgccgtggaacaca

SEQ ID NO: 4625992 - DNA, 25 bp, Homo sapien
ctttatctggggggccagcaaatag

SEQ ID NO: 4625993 - DNA, 25 bp, Homo sapien
tggggggccagcaaatagcaggtga

SEQ ID NO: 4625994 - DNA, 25 bp, Homo sapien
ggccagcaaatagcaggtgagctca

SEQ ID NO: 4625995 - DNA, 25 bp, Homo sapien
tatctggggggccagcaaatagcag

SEQ ID NO: 4625996 - DNA, 25 bp, Homo sapien
ctatttcatcaggtcattgcagccc

SEQ ID NO: 4625997 - DNA, 25 bp, Homo sapien
tctcgtctatgcttcacgggctctg

SEQ ID NO: 4625998 - DNA, 25 bp, Homo sapien
ctcgtctatgcttcacgggctctgg

SEQ ID NO: 4625999 - DNA, 25 bp, Homo sapien
tcgtctatgcttcacgggctctggg

SEQ ID NO: 4626000 - DNA, 25 bp, Homo sapien
gtctatgcttcacgggctctgggga

SEQ ID NO: 4626001 - DNA, 25 bp, Homo sapien
cccttttttgaacttgatctcgaga

SEQ ID NO: 4626002 - DNA, 25 bp, Homo sapien
ctgggtcctgggtcttcatgtagag

SEQ ID NO: 4626003 - DNA, 25 bp, Homo sapien
tttgaacttgatctcgagaatgtca

SEQ ID NO: 4626004 - DNA, 25 bp, Homo sapien
tgttgagggctttggctgggtcctg

SEQ ID NO: 4626005 - DNA, 25 bp, Homo sapien
acggcccacgccgtgcttgcctgca

SEQ ID NO: 4626006 - DNA, 25 bp, Homo sapien
aacttcattcaggtacacgaaaagc

SEQ ID NO: 4626007 - DNA, 25 bp, Homo sapien
cgccgtgcttgcctgcaacttcatt

SEQ ID NO: 4626008 - DNA, 25 bp, Homo sapien
tcattcaggtacacgaaaagctcca

SEQ ID NO: 4626009 - DNA, 25 bp, Homo sapien
caggacttcattccaatgaagcggt

SEQ ID NO: 4626010 - DNA, 25 bp, Homo sapien
tcattccaatgaagcggttctccac

SEQ ID NO: 4626011 - DNA, 25 bp, Homo sapien
tcaggacttcattccaatgaagcgg

SEQ ID NO: 4626012 - DNA, 25 bp, Homo sapien
acttcattccaatgaagcggttctc

SEQ ID NO: 4626013 - DNA, 25 bp, Homo sapien
tgggacttggcattacagtggcgga

SEQ ID NO: 4626014 - DNA, 25 bp, Homo sapien
gggacttggcattacagtggcggac

SEQ ID NO: 4626015 - DNA, 25 bp, Homo sapien
accgggcttggttcgatctgggcaa

SEQ ID NO: 4626016 - DNA, 25 bp, Homo sapien
tcgtcgcctgtggtgaaatatctgc

SEQ ID NO: 4626017 - DNA, 25 bp, Homo sapien
gtcatgaaaggctcccagacgctct

SEQ ID NO: 4626018 - DNA, 25 bp, Homo sapien
tagcgtctcctgttatccaaagcga

SEQ ID NO: 4626019 - DNA, 25 bp, Homo sapien
tgggctgcaccgaatggggagaagc

SEQ ID NO: 4626020 - DNA, 25 bp, Homo sapien
ccggataagggaagcggtgatgagg

SEQ ID NO: 4626021 - DNA, 25 bp, Homo sapien
ctccgagggagaccggccgagagct

SEQ ID NO: 4626022 - DNA, 25 bp, Homo sapien
taagggaagcggtgatgaggccagg

SEQ ID NO: 4626023 - DNA, 25 bp, Homo sapien
aggcgcctcctcttgtattcacgca

SEQ ID NO: 4626024 - DNA, 25 bp, Homo sapien
tcgaggaatttacaactcaaggtgt

SEQ ID NO: 4626025 - DNA, 25 bp, Homo sapien
agaatgcttcccctatgccaaggcg

SEQ ID NO: 4626026 - DNA, 25 bp, Homo sapien
tgtttgtgtcacaggccaagacggg

SEQ ID NO: 4626027 - DNA, 25 bp, Homo sapien
ctttctaactccaaggaaaccatca

SEQ ID NO: 4626028 - DNA, 25 bp, Homo sapien
tttctaactccaaggaaaccatcag

SEQ ID NO: 4626029 - DNA, 25 bp, Homo sapien
ttctaactccaaggaaaccatcagc

SEQ ID NO: 4626030 - DNA, 25 bp, Homo sapien
cttccatctcttccaagccttctgt

SEQ ID NO: 4626031 - DNA, 25 bp, Homo sapien
ctgtcttccatctcttccaagcctt

SEQ ID NO: 4626032 - DNA, 25 bp, Homo sapien
tcttccatctcttccaagccttctg

SEQ ID NO: 4626033 - DNA, 25 bp, Homo sapien
tgtcttccatctcttccaagccttc

SEQ ID NO: 4626034 - DNA, 25 bp, Homo sapien
ctggtagcagacacttcttttgggc

SEQ ID NO: 4626035 - DNA, 25 bp, Homo sapien
caattgctaagtcgctggtggtcaa

SEQ ID NO: 4626036 - DNA, 25 bp, Homo sapien
tagaggaagcactgtcaaagcagga

SEQ ID NO: 4626037 - DNA, 25 bp, Homo sapien
caaagcaggacggtcaatatacaga

SEQ ID NO: 4626038 - DNA, 25 bp, Homo sapien
aggttacaaatacattgctcagaga

SEQ ID NO: 4626039 - DNA, 25 bp, Homo sapien
ctaggttacaaatacattgctcaga

SEQ ID NO: 4626040 - DNA, 25 bp, Homo sapien
taggttacaaatacattgctcagag

SEQ ID NO: 4626041 - DNA, 25 bp, Homo sapien
ctagttggagttgccagggtccaga

SEQ ID NO: 4626042 - DNA, 25 bp, Homo sapien
agaccaccagcctttgcggctcttt

SEQ ID NO: 4626043 - DNA, 25 bp, Homo sapien
ggggatgtctgaagagccagttgag

SEQ ID NO: 4626044 - DNA, 25 bp, Homo sapien
ggatgtctgaagagccagttgagca

SEQ ID NO: 4626045 - DNA, 25 bp, Homo sapien
agaagcattgtagttctggcagcca

SEQ ID NO: 4626046 - DNA, 25 bp, Homo sapien
gttgaaagctgacacaacccactgc

SEQ ID NO: 4626047 - DNA, 25 bp, Homo sapien
gccacaagttgaaagctgacacaac

SEQ ID NO: 4626048 - DNA, 25 bp, Homo sapien
cacccccaactagtactgtttgaca

SEQ ID NO: 4626049 - DNA, 25 bp, Homo sapien
gaggcatctctcttaagtaggtgga

SEQ ID NO: 4626050 - DNA, 25 bp, Homo sapien
gaatgaaaaagttgcgtagagccac

SEQ ID NO: 4626051 - DNA, 25 bp, Homo sapien
gttcagctaacaatcacagcatagg

SEQ ID NO: 4626052 - DNA, 25 bp, Homo sapien
taataccgagggttcctggctgtga

SEQ ID NO: 4626053 - DNA, 25 bp, Homo sapien
gagcacaaagcaggtatgccagtat

SEQ ID NO: 4626054 - DNA, 25 bp, Homo sapien
gagcttaacttcaggcctgagggac

SEQ ID NO: 4626055 - DNA, 25 bp, Homo sapien
tttcaaatgtaatagagcagagcac

SEQ ID NO: 4626056 - DNA, 25 bp, Homo sapien
aatacataagcactgtggagttaca

SEQ ID NO: 4626057 - DNA, 25 bp, Homo sapien
gagggcctcatggtcggcctgtact

SEQ ID NO: 4626058 - DNA, 25 bp, Homo sapien
ccatcctccctagggcagggaattc

SEQ ID NO: 4626059 - DNA, 25 bp, Homo sapien
ttgcgtctcctcctaggcagtgcat

SEQ ID NO: 4626060 - DNA, 25 bp, Homo sapien
tagaggtggaaattgcccatgggtc

SEQ ID NO: 4626061 - DNA, 25 bp, Homo sapien
tcttagcaggtttttatggtgagcg

SEQ ID NO: 4626062 - DNA, 25 bp, Homo sapien
ggcactgcgctaaacactctacaaa

SEQ ID NO: 4626063 - DNA, 25 bp, Homo sapien
aaacgttgccatattgttatcctca

SEQ ID NO: 4626064 - DNA, 25 bp, Homo sapien
taatcacttgggtgctaatgcgaag

SEQ ID NO: 4626065 - DNA, 25 bp, Homo sapien
cccggcgctcgtggaatcttctgga

SEQ ID NO: 4626066 - DNA, 25 bp, Homo sapien
cctgagagtgcggaagtctccggct

SEQ ID NO: 4626067 - DNA, 25 bp, Homo sapien
gggtgttggtgctagcgcggcttcc

SEQ ID NO: 4626068 - DNA, 25 bp, Homo sapien
cttttctccactcagcgagcctgag

SEQ ID NO: 4626069 - DNA, 25 bp, Homo sapien
tttgtagccgaacccgggcgcgtca

SEQ ID NO: 4626070 - DNA, 25 bp, Homo sapien
tgtagccgaacccgggcgcgtcacc

SEQ ID NO: 4626071 - DNA, 25 bp, Homo sapien
gcgcgtcacccgccggaagtcccgc

SEQ ID NO: 4626072 - DNA, 25 bp, Homo sapien
ttgtagccgaacccgggcgcgtcac

SEQ ID NO: 4626073 - DNA, 25 bp, Homo sapien
aaggagcgccgagctgtgcgcagcc

SEQ ID NO: 4626074 - DNA, 25 bp, Homo sapien
gcagccggggtagttaccgctcctc

SEQ ID NO: 4626075 - DNA, 25 bp, Homo sapien
tgcgcagccggggtagttaccgctc

SEQ ID NO: 4626076 - DNA, 25 bp, Homo sapien
agcgggaaggagcgccgagctgtgc

SEQ ID NO: 4626077 - DNA, 25 bp, Homo sapien
ttcatttgggttcttatcaggatgg

SEQ ID NO: 4626078 - DNA, 25 bp, Homo sapien
caaaacatcgtagtaagttgtttct

SEQ ID NO: 4626079 - DNA, 25 bp, Homo sapien
caggatggtacttcaaagccagttt

SEQ ID NO: 4626080 - DNA, 25 bp, Homo sapien
aattcttcctgagtagcattgggtt

SEQ ID NO: 4626081 - DNA, 25 bp, Homo sapien
atgtccatgggggagccaaaaccgc

SEQ ID NO: 4626082 - DNA, 25 bp, Homo sapien
tcctttgtcatataattcccttttc

SEQ ID NO: 4626083 - DNA, 25 bp, Homo sapien
cgtaagcttgagaaatctgtttaaa

SEQ ID NO: 4626084 - DNA, 25 bp, Homo sapien
tttctttgcatcagagagaacttcg

SEQ ID NO: 4626085 - DNA, 25 bp, Homo sapien
gagcaacatggccaattacttcatc

SEQ ID NO: 4626086 - DNA, 25 bp, Homo sapien
cgtattgagcaacatggccaattac

SEQ ID NO: 4626087 - DNA, 25 bp, Homo sapien
attgagcaacatggccaattacttc

SEQ ID NO: 4626088 - DNA, 25 bp, Homo sapien
agcaacatggccaattacttcatcc

SEQ ID NO: 4626089 - DNA, 25 bp, Homo sapien
cacagaatgttcacgttatcacaga

SEQ ID NO: 4626090 - DNA, 25 bp, Homo sapien
ggccatcttggaaatatggtaagca

SEQ ID NO: 4626091 - DNA, 25 bp, Homo sapien
gagcctcacagggtacatctgttga

SEQ ID NO: 4626092 - DNA, 25 bp, Homo sapien
taagggcacagacgtggccatcttg

SEQ ID NO: 4626093 - DNA, 25 bp, Homo sapien
ttatataagtcttctagggttactg

SEQ ID NO: 4626094 - DNA, 25 bp, Homo sapien
attatataagtcttctagggttact

SEQ ID NO: 4626095 - DNA, 25 bp, Homo sapien
tatataagtcttctagggttactga

SEQ ID NO: 4626096 - DNA, 25 bp, Homo sapien
gcattccagtacctcggcaattggg

SEQ ID NO: 4626097 - DNA, 25 bp, Homo sapien
attccagtacctcggcaattgggac

SEQ ID NO: 4626098 - DNA, 25 bp, Homo sapien
cattccagtacctcggcaattggga

SEQ ID NO: 4626099 - DNA, 25 bp, Homo sapien
gaagaactatggtttaacaggagag

SEQ ID NO: 4626100 - DNA, 25 bp, Homo sapien
tagtaactcctaattaagaatgtgt

SEQ ID NO: 4626101 - DNA, 25 bp, Homo sapien
attcaatcatttacaggaccacaga

SEQ ID NO: 4626102 - DNA, 25 bp, Homo sapien
aaagtatgcctatcccttgatctag

SEQ ID NO: 4626103 - DNA, 25 bp, Homo sapien
gcttatttaaactagcccaggccag

SEQ ID NO: 4626104 - DNA, 25 bp, Homo sapien
tacagagtaagagtaggcacagcac

SEQ ID NO: 4626105 - DNA, 25 bp, Homo sapien
caagtaagccaattaagtgggccaa

SEQ ID NO: 4626106 - DNA, 25 bp, Homo sapien
gaggtcattctgctagaagtcccag

SEQ ID NO: 4626107 - DNA, 25 bp, Homo sapien
tctaacacaatgataatatcgcctg

SEQ ID NO: 4626108 - DNA, 25 bp, Homo sapien
tcttggtctccttcaccatggaatg

SEQ ID NO: 4626109 - DNA, 25 bp, Homo sapien
tctccttcaccatggaatgttatct

SEQ ID NO: 4626110 - DNA, 25 bp, Homo sapien
tgataatatcgcctggctccagtcc

SEQ ID NO: 4626111 - DNA, 25 bp, Homo sapien
aagagtgagggttaggccaggcact

SEQ ID NO: 4626112 - DNA, 25 bp, Homo sapien
ggatcacctaaggtctgaagttcaa

SEQ ID NO: 4626113 - DNA, 25 bp, Homo sapien
ccaggcactgtggttcgcatctgta

SEQ ID NO: 4626114 - DNA, 25 bp, Homo sapien
ggcactgtggttcgcatctgtaatt

SEQ ID NO: 4626115 - DNA, 25 bp, Homo sapien
acagtgcttcaacgagctgtatgtc

SEQ ID NO: 4626116 - DNA, 25 bp, Homo sapien
cacacagtgcttcaacgagctgtat

SEQ ID NO: 4626117 - DNA, 25 bp, Homo sapien
cacagtgcttcaacgagctgtatgt

SEQ ID NO: 4626118 - DNA, 25 bp, Homo sapien
ccacacagtgcttcaacgagctgta

SEQ ID NO: 4626119 - DNA, 25 bp, Homo sapien
gaatataaagaacagagcactgtcc

SEQ ID NO: 4626120 - DNA, 25 bp, Homo sapien
caagttcttccttaagtatggtcac

SEQ ID NO: 4626121 - DNA, 25 bp, Homo sapien
tttttatgaggcagggaatataaag

SEQ ID NO: 4626122 - DNA, 25 bp, Homo sapien
ctagctcattggcaggagtaaaact

SEQ ID NO: 4626123 - DNA, 25 bp, Homo sapien
tatggtctacgataaattggcatgc

SEQ ID NO: 4626124 - DNA, 25 bp, Homo sapien
atatggtctacgataaattggcatg

SEQ ID NO: 4626125 - DNA, 25 bp, Homo sapien
atggtctacgataaattggcatgcc

SEQ ID NO: 4626126 - DNA, 25 bp, Homo sapien
tttttatcagattttagtaagccaa

SEQ ID NO: 4626127 - DNA, 25 bp, Homo sapien
ttagtaagccaattgttctcaagta

SEQ ID NO: 4626128 - DNA, 25 bp, Homo sapien
ttttagtaagccaattgttctcaag

SEQ ID NO: 4626129 - DNA, 25 bp, Homo sapien
tcagattttagtaagccaattgttc

SEQ ID NO: 4626130 - DNA, 25 bp, Homo sapien
tgccaatctcaggttagaacaggct

SEQ ID NO: 4626131 - DNA, 25 bp, Homo sapien
tagctcccttagagtatcatggacc

SEQ ID NO: 4626132 - DNA, 25 bp, Homo sapien
caaggattatgaccagaagtcaggc

SEQ ID NO: 4626133 - DNA, 25 bp, Homo sapien
cgcggtggctcatacaattgggatt

SEQ ID NO: 4626134 - DNA, 25 bp, Homo sapien
tgtagtggcgccgtctttcctgatt

SEQ ID NO: 4626135 - DNA, 25 bp, Homo sapien
ctccattgtagtggcgccgtctttc

SEQ ID NO: 4626136 - DNA, 25 bp, Homo sapien
agtggcgccgtctttcctgatttgg

SEQ ID NO: 4626137 - DNA, 25 bp, Homo sapien
tgcttctccattgtagtggcgccgt

SEQ ID NO: 4626138 - DNA, 25 bp, Homo sapien
ctactgcacattaaatgccagcagt

SEQ ID NO: 4626139 - DNA, 25 bp, Homo sapien
aaaacaagagcaagtagtgagcata

SEQ ID NO: 4626140 - DNA, 25 bp, Homo sapien
agcagtgagtgttattcactggccc

SEQ ID NO: 4626141 - DNA, 25 bp, Homo sapien
tattatgattacagtccttcactca

SEQ ID NO: 4626142 - DNA, 25 bp, Homo sapien
aaaagcctgtagtgacacacattgg

SEQ ID NO: 4626143 - DNA, 25 bp, Homo sapien
tacagaccaacacttctctacaaaa

SEQ ID NO: 4626144 - DNA, 25 bp, Homo sapien
tataaagaactatacagaccaacac

SEQ ID NO: 4626145 - DNA, 25 bp, Homo sapien
gaccaggactggtcaagattatata

SEQ ID NO: 4626146 - DNA, 25 bp, Homo sapien
taatacaagctgaaaaactacacag

SEQ ID NO: 4626147 - DNA, 25 bp, Homo sapien
taatgaagggttcaacagaggctgt

SEQ ID NO: 4626148 - DNA, 25 bp, Homo sapien
ttgcaccaaccgacctaatatgact

SEQ ID NO: 4626149 - DNA, 25 bp, Homo sapien
cataggctctccctcattacattgt

SEQ ID NO: 4626150 - DNA, 25 bp, Homo sapien
ctgaagatgtatagagcacctctga

SEQ ID NO: 4626151 - DNA, 25 bp, Homo sapien
tagaactagttgcaggatccgttac

SEQ ID NO: 4626152 - DNA, 25 bp, Homo sapien
catgctaggcagtactttcaagaac

SEQ ID NO: 4626153 - DNA, 25 bp, Homo sapien
tatccctgaatctcaagtacagcag

SEQ ID NO: 4626154 - DNA, 25 bp, Homo sapien
gttttcattaatcttcgacctggag

SEQ ID NO: 4626155 - DNA, 25 bp, Homo sapien
tgaggaaaatgtccctcccatagta

SEQ ID NO: 4626156 - DNA, 25 bp, Homo sapien
cgacctggagagtgaaatactgata

SEQ ID NO: 4626157 - DNA, 25 bp, Homo sapien
caaatagattgtctgaattagtcac

SEQ ID NO: 4626158 - DNA, 25 bp, Homo sapien
gtgtgtgtggaaatggggtcatgcc

SEQ ID NO: 4626159 - DNA, 25 bp, Homo sapien
ttttcttgacagtggcttttacaga

SEQ ID NO: 4626160 - DNA, 25 bp, Homo sapien
tgtgtgtggaaatggggtcatgcca

SEQ ID NO: 4626161 - DNA, 25 bp, Homo sapien
gcctcattttcttgacagtggcttt

SEQ ID NO: 4626162 - DNA, 25 bp, Homo sapien
ctttgggtaaatgctaagtagtgtg

SEQ ID NO: 4626163 - DNA, 25 bp, Homo sapien
tgttggccattcaaataataggtgt

SEQ ID NO: 4626164 - DNA, 25 bp, Homo sapien
tatccagtcatctaccaaaggacat

SEQ ID NO: 4626165 - DNA, 25 bp, Homo sapien
aactgttccaaaatggatgtatcct

SEQ ID NO: 4626166 - DNA, 25 bp, Homo sapien
tgagcagaaaatacggacggttccc

SEQ ID NO: 4626167 - DNA, 25 bp, Homo sapien
ctatcagtatctcgtgccagagtgg

SEQ ID NO: 4626168 - DNA, 25 bp, Homo sapien
ggcaggtgtctaccattagagaatt

SEQ ID NO: 4626169 - DNA, 25 bp, Homo sapien
gcacagccttccacactatcagtat

SEQ ID NO: 4626170 - DNA, 25 bp, Homo sapien
cagcctagaccctcattttgtggga

SEQ ID NO: 4626171 - DNA, 25 bp, Homo sapien
gattttcagagcctaggacctcaac

SEQ ID NO: 4626172 - DNA, 25 bp, Homo sapien
tcctgcttggagagtagttcttgcc

SEQ ID NO: 4626173 - DNA, 25 bp, Homo sapien
gatttctcttgaggctaaggcgagg

SEQ ID NO: 4626174 - DNA, 25 bp, Homo sapien
tcttggaaatgatgctacaccctct

SEQ ID NO: 4626175 - DNA, 25 bp, Homo sapien
aattgcccaggccttagctggcgaa

SEQ ID NO: 4626176 - DNA, 25 bp, Homo sapien
tcatggcattgctgggacaggtaat

SEQ ID NO: 4626177 - DNA, 25 bp, Homo sapien
tttttcaggcatacccagatggaag

SEQ ID NO: 4626178 - DNA, 25 bp, Homo sapien
tgttttccatgctggggtgcaatgg

SEQ ID NO: 4626179 - DNA, 25 bp, Homo sapien
gagacggagttgcgctcttgttttc

SEQ ID NO: 4626180 - DNA, 25 bp, Homo sapien
actcacgacctcaggtgatcgcccg

SEQ ID NO: 4626181 - DNA, 25 bp, Homo sapien
acggagttgcgctcttgttttccat

SEQ ID NO: 4626182 - DNA, 25 bp, Homo sapien
agatgcttgggttgcagacggtggg

SEQ ID NO: 4626183 - DNA, 25 bp, Homo sapien
gcatcagagcttgaatgtttggtct

SEQ ID NO: 4626184 - DNA, 25 bp, Homo sapien
aatgtttggtctgggccagctggcc

SEQ ID NO: 4626185 - DNA, 25 bp, Homo sapien
tgctacatgaggtaaggctggcctg

SEQ ID NO: 4626186 - DNA, 25 bp, Homo sapien
ccctctccaaccctgatgtcagtac

SEQ ID NO: 4626187 - DNA, 25 bp, Homo sapien
ggagacaaggcctgccaggcctttc

SEQ ID NO: 4626188 - DNA, 25 bp, Homo sapien
ctccaaccctgatgtcagtacacat

SEQ ID NO: 4626189 - DNA, 25 bp, Homo sapien
tgggagacaaggcctgccaggcctt

SEQ ID NO: 4626190 - DNA, 25 bp, Homo sapien
tgtgtctgactcagatgctgtgtgt

SEQ ID NO: 4626191 - DNA, 25 bp, Homo sapien
tgtcgtgcaggttcactgcccacaa

SEQ ID NO: 4626192 - DNA, 25 bp, Homo sapien
tcccaggatccatgggcactcttcc

SEQ ID NO: 4626193 - DNA, 25 bp, Homo sapien
caacctccgggagactgttccaagg

SEQ ID NO: 4626194 - DNA, 25 bp, Homo sapien
gattttgacacagacctgagcctgg

SEQ ID NO: 4626195 - DNA, 25 bp, Homo sapien
tgctggacaatcaaacgtcgccggg

SEQ ID NO: 4626196 - DNA, 25 bp, Homo sapien
gtgactttggtctcccctgatgaca

SEQ ID NO: 4626197 - DNA, 25 bp, Homo sapien
tgtgcctgatcagagctcgacaagg

SEQ ID NO: 4626198 - DNA, 25 bp, Homo sapien
tcttttccatgggagaacgtggccc

SEQ ID NO: 4626199 - DNA, 25 bp, Homo sapien
gtttgctgctctcgactgaggccag

SEQ ID NO: 4626200 - DNA, 25 bp, Homo sapien
gaaggttaccaagtttctgccacat

SEQ ID NO: 4626201 - DNA, 25 bp, Homo sapien
tcatgagagtaatcaccagatcccc

SEQ ID NO: 4626202 - DNA, 25 bp, Homo sapien
cccatttgctgacgtagtgctctca

SEQ ID NO: 4626203 - DNA, 25 bp, Homo sapien
gcgaagttgtcatgtgccgtgccct

SEQ ID NO: 4626204 - DNA, 25 bp, Homo sapien
tgtttgcctggtccgtgagatgccg

SEQ ID NO: 4626205 - DNA, 25 bp, Homo sapien
gatgacggctttcatgtcccagaga

SEQ ID NO: 4626206 - DNA, 25 bp, Homo sapien
tggcactcagggtcaaacagactat

SEQ ID NO: 4626207 - DNA, 25 bp, Homo sapien
tcagctgcctaatcccagggttgag

SEQ ID NO: 4626208 - DNA, 25 bp, Homo sapien
caagaacttcggtgcctaaagcctc

SEQ ID NO: 4626209 - DNA, 25 bp, Homo sapien
cacctctgttgggagctattgagcc

SEQ ID NO: 4626210 - DNA, 25 bp, Homo sapien
tgatgtgttcgcagtgtcaccccag

SEQ ID NO: 4626211 - DNA, 25 bp, Homo sapien
caggacgagtgggatattttgcccc

SEQ ID NO: 4626212 - DNA, 25 bp, Homo sapien
tcgggacaccgagctagcgttttgg

SEQ ID NO: 4626213 - DNA, 25 bp, Homo sapien
gattccagggcaactctagcatcag

SEQ ID NO: 4626214 - DNA, 25 bp, Homo sapien
tttagaggcatgtctatatctcgcc

SEQ ID NO: 4626215 - DNA, 25 bp, Homo sapien
tctcgcccaaatgctgtggtcggga

SEQ ID NO: 4626216 - DNA, 25 bp, Homo sapien
gatccgccactcaagagacaagaaa

SEQ ID NO: 4626217 - DNA, 25 bp, Homo sapien
cgggaggtgtcgcatgatccgccac

SEQ ID NO: 4626218 - DNA, 25 bp, Homo sapien
ctaaccatcaatggatttcctaata

SEQ ID NO: 4626219 - DNA, 25 bp, Homo sapien
ccttatgttcagtattttggaggtg

SEQ ID NO: 4626220 - DNA, 25 bp, Homo sapien
tttggaggtgtctctgctctaagta

SEQ ID NO: 4626221 - DNA, 25 bp, Homo sapien
gtttctaaccatcaatggatttcct

SEQ ID NO: 4626222 - DNA, 25 bp, Homo sapien
tacagtgtggttggctcatgtagac

SEQ ID NO: 4626223 - DNA, 25 bp, Homo sapien
taggctgactagtacagtgtggttg

SEQ ID NO: 4626224 - DNA, 25 bp, Homo sapien
cctggtttaggctgactagtacagt

SEQ ID NO: 4626225 - DNA, 25 bp, Homo sapien
gtggttggctcatgtagacagcaga

SEQ ID NO: 4626226 - DNA, 25 bp, Homo sapien
tcgtgctaagctcctcaatgttggc

SEQ ID NO: 4626227 - DNA, 25 bp, Homo sapien
cggcacatttccgttgcaatggata

SEQ ID NO: 4626228 - DNA, 25 bp, Homo sapien
ccttgaaggactatgactacacctg

SEQ ID NO: 4626229 - DNA, 25 bp, Homo sapien
tgtttagtgacgtggacctcattcc

SEQ ID NO: 4626230 - DNA, 25 bp, Homo sapien
ggaattgataagaccagattcccaa

SEQ ID NO: 4626231 - DNA, 25 bp, Homo sapien
attgataagaccagattcccaactc

SEQ ID NO: 4626232 - DNA, 25 bp, Homo sapien
aattgataagaccagattcccaact

SEQ ID NO: 4626233 - DNA, 25 bp, Homo sapien
gaattgataagaccagattcccaac

SEQ ID NO: 4626234 - DNA, 25 bp, Homo sapien
tagagggctctgactatgttgatcc

SEQ ID NO: 4626235 - DNA, 25 bp, Homo sapien
gagattgtgtaccagtcgcaagccc

SEQ ID NO: 4626236 - DNA, 25 bp, Homo sapien
catggagagaagactttgagcatcc

SEQ ID NO: 4626237 - DNA, 25 bp, Homo sapien
taggataacagcatgtgtgcaggag

SEQ ID NO: 4626238 - DNA, 25 bp, Homo sapien
cagggtgccattgctcatgggcctt

SEQ ID NO: 4626239 - DNA, 25 bp, Homo sapien
ctcctccagggtgccattgctcatg

SEQ ID NO: 4626240 - DNA, 25 bp, Homo sapien
cctccagggtgccattgctcatggg

SEQ ID NO: 4626241 - DNA, 25 bp, Homo sapien
tccagggtgccattgctcatgggcc

SEQ ID NO: 4626242 - DNA, 25 bp, Homo sapien
acagaaaagcatacagagggtgttt

SEQ ID NO: 4626243 - DNA, 25 bp, Homo sapien
tctgtcctgttgagagcttagtgct

SEQ ID NO: 4626244 - DNA, 25 bp, Homo sapien
catacagagggtgtttcagcaaaca

SEQ ID NO: 4626245 - DNA, 25 bp, Homo sapien
gagagcttagtgctgcgttcttgca

SEQ ID NO: 4626246 - DNA, 25 bp, Homo sapien
taccgctgccactgctgctgccacc

SEQ ID NO: 4626247 - DNA, 25 bp, Homo sapien
accgctgccactgctgctgccacca

SEQ ID NO: 4626248 - DNA, 25 bp, Homo sapien
ccgctgccactgctgctgccaccac

SEQ ID NO: 4626249 - DNA, 25 bp, Homo sapien
gctgccactgctgctgccaccaccg

SEQ ID NO: 4626250 - DNA, 25 bp, Homo sapien
ggctccacaggtaagcacacgatgg

SEQ ID NO: 4626251 - DNA, 25 bp, Homo sapien
agagggaaggctccacaggtaagca

SEQ ID NO: 4626252 - DNA, 25 bp, Homo sapien
gaaggctccacaggtaagcacacga

SEQ ID NO: 4626253 - DNA, 25 bp, Homo sapien
tccacaggtaagcacacgatggcca

SEQ ID NO: 4626254 - DNA, 25 bp, Homo sapien
ccaattccgattgcatatcttctgg

SEQ ID NO: 4626255 - DNA, 25 bp, Homo sapien
tggccaggtgggtttgtcacaacca

SEQ ID NO: 4626256 - DNA, 25 bp, Homo sapien
taaacctgttagcatttcacgactg

SEQ ID NO: 4626257 - DNA, 25 bp, Homo sapien
ctggttctgaccatgttacttcctc

SEQ ID NO: 4626258 - DNA, 25 bp, Homo sapien
ccttctcagggcatcagtgacactc

SEQ ID NO: 4626259 - DNA, 25 bp, Homo sapien
catagacaacagtagggctgcggct

SEQ ID NO: 4626260 - DNA, 25 bp, Homo sapien
agagggacaggctccgaaagtcaca

SEQ ID NO: 4626261 - DNA, 25 bp, Homo sapien
cttacagcaggtcacaagggtttca

SEQ ID NO: 4626262 - DNA, 25 bp, Homo sapien
cagtttaggtgaatgtgagacttcc

SEQ ID NO: 4626263 - DNA, 25 bp, Homo sapien
ggaacaactaaccaagccagctcag

SEQ ID NO: 4626264 - DNA, 25 bp, Homo sapien
ccatgtaaagcaggtctcattcccg

SEQ ID NO: 4626265 - DNA, 25 bp, Homo sapien
agtgtgcttccccaaatggagcgaa

SEQ ID NO: 4626266 - DNA, 25 bp, Homo sapien
gaagtgtaaggtctcagtcctgccc

SEQ ID NO: 4626267 - DNA, 25 bp, Homo sapien
catcaaggtcaaggaactctgtgca

SEQ ID NO: 4626268 - DNA, 25 bp, Homo sapien
tcatttgaagagtctgagtacgccc

SEQ ID NO: 4626269 - DNA, 25 bp, Homo sapien
ggcagtttacggcttccatcaaggt

SEQ ID NO: 4626270 - DNA, 25 bp, Homo sapien
tgaggtaaacgccaaacagtgtgct

SEQ ID NO: 4626271 - DNA, 25 bp, Homo sapien
aaatgtgaagatgggcggccgctat

SEQ ID NO: 4626272 - DNA, 25 bp, Homo sapien
tggacctggagctcgtggcaaagca

SEQ ID NO: 4626273 - DNA, 25 bp, Homo sapien
gacacctggcacttacagcgaggaa

SEQ ID NO: 4626274 - DNA, 25 bp, Homo sapien
tagcaacttgacctcggtcccagtg

SEQ ID NO: 4626275 - DNA, 25 bp, Homo sapien
tgccctgaggagtccccgctgcttg

SEQ ID NO: 4626276 - DNA, 25 bp, Homo sapien
cgggtggcgactccagcccagtcgt

SEQ ID NO: 4626277 - DNA, 25 bp, Homo sapien
ccagcccagtcgtggattctggccc

SEQ ID NO: 4626278 - DNA, 25 bp, Homo sapien
cgcctgccccaactggtcggagtct

SEQ ID NO: 4626279 - DNA, 25 bp, Homo sapien
ctgccccaactggtcggagtctcca

SEQ ID NO: 4626280 - DNA, 25 bp, Homo sapien
agccgcctgccccaactggtcggag

SEQ ID NO: 4626281 - DNA, 25 bp, Homo sapien
gccccaactggtcggagtctccaca

SEQ ID NO: 4626282 - DNA, 25 bp, Homo sapien
gtactgccctcactacatgctcttt

SEQ ID NO: 4626283 - DNA, 25 bp, Homo sapien
tactgccctcactacatgctctttg

SEQ ID NO: 4626284 - DNA, 25 bp, Homo sapien
tttggccatggaaactagtttccca

SEQ ID NO: 4626285 - DNA, 25 bp, Homo sapien
caaaacagacggtgggctaggtttg

SEQ ID NO: 4626286 - DNA, 25 bp, Homo sapien
acatccttaagcagagctgtccccg

SEQ ID NO: 4626287 - DNA, 25 bp, Homo sapien
tactacatccttaagcagagctgtc

SEQ ID NO: 4626288 - DNA, 25 bp, Homo sapien
gagctactacatccttaagcagagc

SEQ ID NO: 4626289 - DNA, 25 bp, Homo sapien
ttaagcagagctgtccccgccaatc

SEQ ID NO: 4626290 - DNA, 25 bp, Homo sapien
tgatgaagtccatagcgcaggttgg

SEQ ID NO: 4626291 - DNA, 25 bp, Homo sapien
tcagtgatagccacaagggagcagg

SEQ ID NO: 4626292 - DNA, 25 bp, Homo sapien
gacatagcgagctccctgtcactgg

SEQ ID NO: 4626293 - DNA, 25 bp, Homo sapien
tgaagttagggtcgatgtccttcca

SEQ ID NO: 4626294 - DNA, 25 bp, Homo sapien
ttctgttgcttagaccccggctgga

SEQ ID NO: 4626295 - DNA, 25 bp, Homo sapien
gaaattgcggagatgatggtcctgc

SEQ ID NO: 4626296 - DNA, 25 bp, Homo sapien
ttatggaccctactaaatgcccagg

SEQ ID NO: 4626297 - DNA, 25 bp, Homo sapien
tgcccaggtagtcaaagcccaatca

SEQ ID NO: 4626298 - DNA, 25 bp, Homo sapien
gctcagccaagccacacatccccag

SEQ ID NO: 4626299 - DNA, 25 bp, Homo sapien
gcagctcagccaagccacacatccc

SEQ ID NO: 4626300 - DNA, 25 bp, Homo sapien
ctgcagctcagccaagccacacatc

SEQ ID NO: 4626301 - DNA, 25 bp, Homo sapien
acatccccaggctggggacctgggg

SEQ ID NO: 4626302 - DNA, 25 bp, Homo sapien
gggcacagatcatcgccatggactt

SEQ ID NO: 4626303 - DNA, 25 bp, Homo sapien
gactgggcacagatcatcgccatgg

SEQ ID NO: 4626304 - DNA, 25 bp, Homo sapien
acagatcatcgccatggacttcggg

SEQ ID NO: 4626305 - DNA, 25 bp, Homo sapien
atcatcgccatggacttcgggaccc

SEQ ID NO: 4626306 - DNA, 25 bp, Homo sapien
ctccaccttcctgcgtgcaaccact

SEQ ID NO: 4626307 - DNA, 25 bp, Homo sapien
ccaccttcctgcgtgcaaccactcc

SEQ ID NO: 4626308 - DNA, 25 bp, Homo sapien
gcaggagacaggctagctccagaga

SEQ ID NO: 4626309 - DNA, 25 bp, Homo sapien
accttcctgcgtgcaaccactcccc

SEQ ID NO: 4626310 - DNA, 25 bp, Homo sapien
cagatgggctgcaacactgaatgac

SEQ ID NO: 4626311 - DNA, 25 bp, Homo sapien
gaatgacattggatatcccaggcca

SEQ ID NO: 4626312 - DNA, 25 bp, Homo sapien
tgacattggatatcccaggccaccc

SEQ ID NO: 4626313 - DNA, 25 bp, Homo sapien
cactgaatgacattggatatcccag

SEQ ID NO: 4626314 - DNA, 25 bp, Homo sapien
gagctagggcaataaataccctggc

SEQ ID NO: 4626315 - DNA, 25 bp, Homo sapien
ctggcagagggggagctagggcaat

SEQ ID NO: 4626316 - DNA, 25 bp, Homo sapien
gggagctagggcaataaataccctg

SEQ ID NO: 4626317 - DNA, 25 bp, Homo sapien
cagagggggagctagggcaataaat

SEQ ID NO: 4626318 - DNA, 25 bp, Homo sapien
aggatgtagacttcttgctattcta

SEQ ID NO: 4626319 - DNA, 25 bp, Homo sapien
ggatgtagacttcttgctattctac

SEQ ID NO: 4626320 - DNA, 25 bp, Homo sapien
caggatgtagacttcttgctattct

SEQ ID NO: 4626321 - DNA, 25 bp, Homo sapien
ccatatgtgtgtgccctccagagtc

SEQ ID NO: 4626322 - DNA, 25 bp, Homo sapien
agagaaggtgaggtgagctcccaat

SEQ ID NO: 4626323 - DNA, 25 bp, Homo sapien
gtccagagaaggtgaggtgagctcc

SEQ ID NO: 4626324 - DNA, 25 bp, Homo sapien
catatgtgtgtgccctccagagtcc

SEQ ID NO: 4626325 - DNA, 25 bp, Homo sapien
tctggaagacggtctgtgtgcgaag

SEQ ID NO: 4626326 - DNA, 25 bp, Homo sapien
ctggaagacggtctgtgtgcgaagc

SEQ ID NO: 4626327 - DNA, 25 bp, Homo sapien
ggaagacggtctgtgtgcgaagcat

SEQ ID NO: 4626328 - DNA, 25 bp, Homo sapien
tggaagacggtctgtgtgcgaagca

SEQ ID NO: 4626329 - DNA, 25 bp, Homo sapien
ccctgctggcctcggtgagactgtg

SEQ ID NO: 4626330 - DNA, 25 bp, Homo sapien
caatacccttgcctgggactggacc

SEQ ID NO: 4626331 - DNA, 25 bp, Homo sapien
cacatttagggccagtgtgcctgga

SEQ ID NO: 4626332 - DNA, 25 bp, Homo sapien
tcagggcggcctgacctatcaggaa

SEQ ID NO: 4626333 - DNA, 25 bp, Homo sapien
ctgtgtgaagaatttttggcctctt

SEQ ID NO: 4626334 - DNA, 25 bp, Homo sapien
ggaccaggtaagtgacaggccacag

SEQ ID NO: 4626335 - DNA, 25 bp, Homo sapien
tgtgtgaagaatttttggcctcttc

SEQ ID NO: 4626336 - DNA, 25 bp, Homo sapien
ctgtggaccaggtaagtgacaggcc

SEQ ID NO: 4626337 - DNA, 25 bp, Homo sapien
ggtatggctcggaggaagggagcag

SEQ ID NO: 4626338 - DNA, 25 bp, Homo sapien
ggctcagtgtaatgggtatggctcg

SEQ ID NO: 4626339 - DNA, 25 bp, Homo sapien
tagatgtctgccgtgactggctcag

SEQ ID NO: 4626340 - DNA, 25 bp, Homo sapien
gatgtctgccgtgactggctcagtg

SEQ ID NO: 4626341 - DNA, 25 bp, Homo sapien
ttgtgcaccattgtaaattgtaaat

SEQ ID NO: 4626342 - DNA, 25 bp, Homo sapien
ttttttgtggtatagcaactgaatt

SEQ ID NO: 4626343 - DNA, 25 bp, Homo sapien
tttgtggtatagcaactgaatttgt

SEQ ID NO: 4626344 - DNA, 25 bp, Homo sapien
gaggtgaccaaattgttaatctgga

SEQ ID NO: 4626345 - DNA, 25 bp, Homo sapien
gctgatcctgggatagtgtagcctg

SEQ ID NO: 4626346 - DNA, 25 bp, Homo sapien
tcctgggatagtgtagcctgagctg

SEQ ID NO: 4626347 - DNA, 25 bp, Homo sapien
tgatcctgggatagtgtagcctgag

SEQ ID NO: 4626348 - DNA, 25 bp, Homo sapien
gatcctgggatagtgtagcctgagc

SEQ ID NO: 4626349 - DNA, 25 bp, Homo sapien
caaggccagggcgattacccactgg

SEQ ID NO: 4626350 - DNA, 25 bp, Homo sapien
cgattacccactggcggacggccat

SEQ ID NO: 4626351 - DNA, 25 bp, Homo sapien
gccagggcgattacccactggcgga

SEQ ID NO: 4626352 - DNA, 25 bp, Homo sapien
cagccaaggccagggcgattaccca

SEQ ID NO: 4626353 - DNA, 25 bp, Homo sapien
caaagccacagagaatccaggttct

SEQ ID NO: 4626354 - DNA, 25 bp, Homo sapien
cacagagaatccaggttctgcccac

SEQ ID NO: 4626355 - DNA, 25 bp, Homo sapien
aacacaaagccacagagaatccagg

SEQ ID NO: 4626356 - DNA, 25 bp, Homo sapien
gagaatccaggttctgcccactcac

SEQ ID NO: 4626357 - DNA, 25 bp, Homo sapien
gggagctttcctgctgccactggca

SEQ ID NO: 4626358 - DNA, 25 bp, Homo sapien
cattcttgagaaagggagctttcct

SEQ ID NO: 4626359 - DNA, 25 bp, Homo sapien
agctttcctgctgccactggcactt

SEQ ID NO: 4626360 - DNA, 25 bp, Homo sapien
agggagctttcctgctgccactggc

SEQ ID NO: 4626361 - DNA, 25 bp, Homo sapien
ggtgagaacaacacgcagctgcctt

SEQ ID NO: 4626362 - DNA, 25 bp, Homo sapien
gaataactggtttctcagcatggac

SEQ ID NO: 4626363 - DNA, 25 bp, Homo sapien
tctgagcaggatcgtggagaagaat

SEQ ID NO: 4626364 - DNA, 25 bp, Homo sapien
cgagaggactcctctcagcagagag

SEQ ID NO: 4626365 - DNA, 25 bp, Homo sapien
tcattcgtatatgtgagcccatcag

SEQ ID NO: 4626366 - DNA, 25 bp, Homo sapien
agctggcattcattcgtatatgtga

SEQ ID NO: 4626367 - DNA, 25 bp, Homo sapien
tatatgtgagcccatcagtgccgca

SEQ ID NO: 4626368 - DNA, 25 bp, Homo sapien
gcattcattcgtatatgtgagccca

SEQ ID NO: 4626369 - DNA, 25 bp, Homo sapien
tgagcgtcgcccacatatgcagtgt

SEQ ID NO: 4626370 - DNA, 25 bp, Homo sapien
ccttctcaggagctgtagtgtacca

SEQ ID NO: 4626371 - DNA, 25 bp, Homo sapien
catgcagttgtccatatccagtggg

SEQ ID NO: 4626372 - DNA, 25 bp, Homo sapien
tagtgtaccattcagggacctggca

SEQ ID NO: 4626373 - DNA, 25 bp, Homo sapien
gatctggatgtcctgtttggttttt

SEQ ID NO: 4626374 - DNA, 25 bp, Homo sapien
atgatctggatgtcctgtttggttt

SEQ ID NO: 4626375 - DNA, 25 bp, Homo sapien
ctttcatgatctggatgtcctgttt

SEQ ID NO: 4626376 - DNA, 25 bp, Homo sapien
tcatgatctggatgtcctgtttggt

SEQ ID NO: 4626377 - DNA, 25 bp, Homo sapien
tgacacttcatggcttgaggtgctc

SEQ ID NO: 4626378 - DNA, 25 bp, Homo sapien
acacttcatggcttgaggtgctcct

SEQ ID NO: 4626379 - DNA, 25 bp, Homo sapien
gacacttcatggcttgaggtgctcc

SEQ ID NO: 4626380 - DNA, 25 bp, Homo sapien
tttcatgtcatatcctctccatgcc

SEQ ID NO: 4626381 - DNA, 25 bp, Homo sapien
tatttcatgtcatatcctctccatg

SEQ ID NO: 4626382 - DNA, 25 bp, Homo sapien
ttatttcatgtcatatcctctccat

SEQ ID NO: 4626383 - DNA, 25 bp, Homo sapien
ttcatgtcatatcctctccatgccc

SEQ ID NO: 4626384 - DNA, 25 bp, Homo sapien
gagtagaggcgacaatgcaagatcc

SEQ ID NO: 4626385 - DNA, 25 bp, Homo sapien
ggcgacaatgcaagatccacctcct

SEQ ID NO: 4626386 - DNA, 25 bp, Homo sapien
aattcagagtagaggcgacaatgca

SEQ ID NO: 4626387 - DNA, 25 bp, Homo sapien
acatcaaattcagagtagaggcgac

SEQ ID NO: 4626388 - DNA, 25 bp, Homo sapien
tttctgcctgtgaaactcttctccc

SEQ ID NO: 4626389 - DNA, 25 bp, Homo sapien
ctgcctgtgaaactcttctcccgtg

SEQ ID NO: 4626390 - DNA, 25 bp, Homo sapien
gcctgtgaaactcttctcccgtgag

SEQ ID NO: 4626391 - DNA, 25 bp, Homo sapien
cctgtgaaactcttctcccgtgaga

SEQ ID NO: 4626392 - DNA, 25 bp, Homo sapien
tcaagcataacttgtaatatagtta

SEQ ID NO: 4626393 - DNA, 25 bp, Homo sapien
ttccttgggtgaaggagcttcttta

SEQ ID NO: 4626394 - DNA, 25 bp, Homo sapien
tagtccatgatagtttacttgtggg

SEQ ID NO: 4626395 - DNA, 25 bp, Homo sapien
tttcacagcatttacatagtccatg

SEQ ID NO: 4626396 - DNA, 25 bp, Homo sapien
tcaggactgggcaggttaagacctc

SEQ ID NO: 4626397 - DNA, 25 bp, Homo sapien
caagagaacttaggtcattagcgca

SEQ ID NO: 4626398 - DNA, 25 bp, Homo sapien
ggcgtgggccacaacatttaatgag

SEQ ID NO: 4626399 - DNA, 25 bp, Homo sapien
cagagagagagtcgttgaagtccca

SEQ ID NO: 4626400 - DNA, 25 bp, Homo sapien
gagtcaggtgcagtagctccttcct

SEQ ID NO: 4626401 - DNA, 25 bp, Homo sapien
gtcaggtgcagtagctccttcctgt

SEQ ID NO: 4626402 - DNA, 25 bp, Homo sapien
ttgagtcaggtgcagtagctccttc

SEQ ID NO: 4626403 - DNA, 25 bp, Homo sapien
aattgagtcaggtgcagtagctcct

SEQ ID NO: 4626404 - DNA, 25 bp, Homo sapien
cgcaggccgcggatgaagaagaaaa

SEQ ID NO: 4626405 - DNA, 25 bp, Homo sapien
tcgcaggccgcggatgaagaagaaa

SEQ ID NO: 4626406 - DNA, 25 bp, Homo sapien
agcgggcatgaccgacccaccaggg

SEQ ID NO: 4626407 - DNA, 25 bp, Homo sapien
tgcccggagtactgccagcgggcat

SEQ ID NO: 4626408 - DNA, 25 bp, Homo sapien
cgtgcgcaagcgcaatatgcctcct

SEQ ID NO: 4626409 - DNA, 25 bp, Homo sapien
accagaaacggaagcagagtcactc

SEQ ID NO: 4626410 - DNA, 25 bp, Homo sapien
caaaaggacttggtgctctcggaga

SEQ ID NO: 4626411 - DNA, 25 bp, Homo sapien
aatatgcctcctggcgtttcccgat

SEQ ID NO: 4626412 - DNA, 25 bp, Homo sapien
tcgctttcccgaagagtcggttcat

SEQ ID NO: 4626413 - DNA, 25 bp, Homo sapien
ttcgctttcccgaagagtcggttca

SEQ ID NO: 4626414 - DNA, 25 bp, Homo sapien
gagatagagagggacgacgtgtaag

SEQ ID NO: 4626415 - DNA, 25 bp, Homo sapien
tggtttgtggcgttaggaatgactt

SEQ ID NO: 4626416 - DNA, 25 bp, Homo sapien
aatgaagtggaagaatatgggcccg

SEQ ID NO: 4626417 - DNA, 25 bp, Homo sapien
ggtgtgtcagaggtcctgagcctac

SEQ ID NO: 4626418 - DNA, 25 bp, Homo sapien
tctcatcttcttgatctgatcctta

SEQ ID NO: 4626419 - DNA, 25 bp, Homo sapien
agcatccaatcgagaaatcttcttg

SEQ ID NO: 4626420 - DNA, 25 bp, Homo sapien
catcttcttgatctgatccttatac

SEQ ID NO: 4626421 - DNA, 25 bp, Homo sapien
gagaaatcttcttgtcaatggattc

SEQ ID NO: 4626422 - DNA, 25 bp, Homo sapien
ggccctatttctataggtgctaaaa

SEQ ID NO: 4626423 - DNA, 25 bp, Homo sapien
gctaaaactaggctctgccagcacc

SEQ ID NO: 4626424 - DNA, 25 bp, Homo sapien
ctaaaactaggctctgccagcacct

SEQ ID NO: 4626425 - DNA, 25 bp, Homo sapien
tgcgcccagccgaactaggccctat

SEQ ID NO: 4626426 - DNA, 25 bp, Homo sapien
tgcctacttcctctcttcttcaaag

SEQ ID NO: 4626427 - DNA, 25 bp, Homo sapien
ctctcttcttcaaagtagtaggcat

SEQ ID NO: 4626428 - DNA, 25 bp, Homo sapien
atgcctacttcctctcttcttcaaa

SEQ ID NO: 4626429 - DNA, 25 bp, Homo sapien
ttcctctcttcttcaaagtagtagg

SEQ ID NO: 4626430 - DNA, 25 bp, Homo sapien
ctcgcaaggctttctgcttgaccat

SEQ ID NO: 4626431 - DNA, 25 bp, Homo sapien
aactcgcaaggctttctgcttgacc

SEQ ID NO: 4626432 - DNA, 25 bp, Homo sapien
aaaactcgcaaggctttctgcttga

SEQ ID NO: 4626433 - DNA, 25 bp, Homo sapien
ttgctttaaaactcgcaaggctttc

SEQ ID NO: 4626434 - DNA, 25 bp, Homo sapien
gaatggtccgttcatggtgcaagca

SEQ ID NO: 4626435 - DNA, 25 bp, Homo sapien
ggaaacaatctaactatccaactag

SEQ ID NO: 4626436 - DNA, 25 bp, Homo sapien
cataccacgtatgcagaagcagagg

SEQ ID NO: 4626437 - DNA, 25 bp, Homo sapien
acagggagatgctcatgatataaca

SEQ ID NO: 4626438 - DNA, 25 bp, Homo sapien
tgaactccttgaagacaggcatatt

SEQ ID NO: 4626439 - DNA, 25 bp, Homo sapien
tatttatttgtttagagccagtctt

SEQ ID NO: 4626440 - DNA, 25 bp, Homo sapien
ttgaagacaggcatattttattttg

SEQ ID NO: 4626441 - DNA, 25 bp, Homo sapien
ttccagaattttgaactccttgaag

SEQ ID NO: 4626442 - DNA, 25 bp, Homo sapien
ttaggtatcacgcagaaaaattggc

SEQ ID NO: 4626443 - DNA, 25 bp, Homo sapien
gatatagcctactgcttgctcctag

SEQ ID NO: 4626444 - DNA, 25 bp, Homo sapien
ctaggtggtatagcccactattcac

SEQ ID NO: 4626445 - DNA, 25 bp, Homo sapien
tggtataatgcagtctgttctgtca

SEQ ID NO: 4626446 - DNA, 25 bp, Homo sapien
gttgggcaagattgtcccgctgctg

SEQ ID NO: 4626447 - DNA, 25 bp, Homo sapien
gactgttgggcaagattgtcccgct

SEQ ID NO: 4626448 - DNA, 25 bp, Homo sapien
atgactgttgggcaagattgtcccg

SEQ ID NO: 4626449 - DNA, 25 bp, Homo sapien
ctgttgggcaagattgtcccgctgc

SEQ ID NO: 4626450 - DNA, 25 bp, Homo sapien
tcttggtgtccttcaaagactggat

SEQ ID NO: 4626451 - DNA, 25 bp, Homo sapien
ctggatggtataattggcttgttcc

SEQ ID NO: 4626452 - DNA, 25 bp, Homo sapien
gtccttcaaagactggatggtataa

SEQ ID NO: 4626453 - DNA, 25 bp, Homo sapien
caaagactggatggtataattggct

SEQ ID NO: 4626454 - DNA, 25 bp, Homo sapien
taaaaagccatcggaaaagagaata

SEQ ID NO: 4626455 - DNA, 25 bp, Homo sapien
aaaagccatcggaaaagagaataag

SEQ ID NO: 4626456 - DNA, 25 bp, Homo sapien
cgatcttcacttgcttgtatgcctt

SEQ ID NO: 4626457 - DNA, 25 bp, Homo sapien
tttactcccagtttcatagcatcaa

SEQ ID NO: 4626458 - DNA, 25 bp, Homo sapien
tctggtcgatcttcacttgcttgta

SEQ ID NO: 4626459 - DNA, 25 bp, Homo sapien
tcaatctggtcgatcttcacttgct

SEQ ID NO: 4626460 - DNA, 25 bp, Homo sapien
ggtcaagagcgccattttatatgca

SEQ ID NO: 4626461 - DNA, 25 bp, Homo sapien
aactactggatgcttatcataggcc

SEQ ID NO: 4626462 - DNA, 25 bp, Homo sapien
catggcagggcattgttatgggcac

SEQ ID NO: 4626463 - DNA, 25 bp, Homo sapien
aaccaagtctaccacgccaggagtt

SEQ ID NO: 4626464 - DNA, 25 bp, Homo sapien
gccataactgcgactcagtgcttct

SEQ ID NO: 4626465 - DNA, 25 bp, Homo sapien
cataactgcgactcagtgcttcttg

SEQ ID NO: 4626466 - DNA, 25 bp, Homo sapien
ataactgcgactcagtgcttcttgg

SEQ ID NO: 4626467 - DNA, 25 bp, Homo sapien
taactgcgactcagtgcttcttgga

SEQ ID NO: 4626468 - DNA, 25 bp, Homo sapien
ggaggacacttacagataccaagca

SEQ ID NO: 4626469 - DNA, 25 bp, Homo sapien
ggtgacgccatattgctcagccagg

SEQ ID NO: 4626470 - DNA, 25 bp, Homo sapien
tttgcccagggacagtaccataaac

SEQ ID NO: 4626471 - DNA, 25 bp, Homo sapien
tgggcttgagtggatccgcctacct

SEQ ID NO: 4626472 - DNA, 25 bp, Homo sapien
gcccaggctgcagtggggcaatctc

SEQ ID NO: 4626473 - DNA, 25 bp, Homo sapien
tgcccaggctgcagtggggcaatct

SEQ ID NO: 4626474 - DNA, 25 bp, Homo sapien
aatctcggctcactggaacctctac

SEQ ID NO: 4626475 - DNA, 25 bp, Homo sapien
catttatcgatggacttgaaagaag

SEQ ID NO: 4626476 - DNA, 25 bp, Homo sapien
gaccattacgtgaaatcagactcca

SEQ ID NO: 4626477 - DNA, 25 bp, Homo sapien
caatagcaggtagagacttatcagg

SEQ ID NO: 4626478 - DNA, 25 bp, Homo sapien
gagattgttgtatgctgtgtgacca

SEQ ID NO: 4626479 - DNA, 25 bp, Homo sapien
gatgctgcctcatccaaataagaac

SEQ ID NO: 4626480 - DNA, 25 bp, Homo sapien
ttttgtatcagtgggaacaccttct

SEQ ID NO: 4626481 - DNA, 25 bp, Homo sapien
gaagctcatcacctagtgcatccaa

SEQ ID NO: 4626482 - DNA, 25 bp, Homo sapien
atcagccagaagctcatcacctagt

SEQ ID NO: 4626483 - DNA, 25 bp, Homo sapien
tagattcccagacttatggtcaagc

SEQ ID NO: 4626484 - DNA, 25 bp, Homo sapien
cccagacttatggtcaagcataaag

SEQ ID NO: 4626485 - DNA, 25 bp, Homo sapien
cttttagattcccagacttatggtc

SEQ ID NO: 4626486 - DNA, 25 bp, Homo sapien
tatggtcaagcataaagcctttgct

SEQ ID NO: 4626487 - DNA, 25 bp, Homo sapien
gagaaagagaaatctaagagtaaac

SEQ ID NO: 4626488 - DNA, 25 bp, Homo sapien
cacaggggaaagagagtgaaagagg

SEQ ID NO: 4626489 - DNA, 25 bp, Homo sapien
gggagaaagagaaatctaagagtaa

SEQ ID NO: 4626490 - DNA, 25 bp, Homo sapien
ggctcctccacaggggaaagagagt

SEQ ID NO: 4626491 - DNA, 25 bp, Homo sapien
tctgtggcaatccaaattcatccac

SEQ ID NO: 4626492 - DNA, 25 bp, Homo sapien
gcagggatctgtggcaatccaaatt

SEQ ID NO: 4626493 - DNA, 25 bp, Homo sapien
ctatgaagcagggatctgtggcaat

SEQ ID NO: 4626494 - DNA, 25 bp, Homo sapien
atgaagcagggatctgtggcaatcc

SEQ ID NO: 4626495 - DNA, 25 bp, Homo sapien
tcaaattttagtacgaagaaagcat

SEQ ID NO: 4626496 - DNA, 25 bp, Homo sapien
gaaaacaagtcatacgagctaaaaa

SEQ ID NO: 4626497 - DNA, 25 bp, Homo sapien
gaaagaaacctaaatctgttatggc

SEQ ID NO: 4626498 - DNA, 25 bp, Homo sapien
gaaagcatttcccaagcaatgagtc

SEQ ID NO: 4626499 - DNA, 25 bp, Homo sapien
tcaagatgtaatactgagggaacca

SEQ ID NO: 4626500 - DNA, 25 bp, Homo sapien
gaatcataatatgaacagccccaat

SEQ ID NO: 4626501 - DNA, 25 bp, Homo sapien
taatggacacagtaacgacttgttc

SEQ ID NO: 4626502 - DNA, 25 bp, Homo sapien
tcattttgagactgtagagttacac

SEQ ID NO: 4626503 - DNA, 25 bp, Homo sapien
tgaacttgctgtagtactccaggca

SEQ ID NO: 4626504 - DNA, 25 bp, Homo sapien
tcatataagaatagccccttgcagt

SEQ ID NO: 4626505 - DNA, 25 bp, Homo sapien
cacatgagagtcaggtgcacatagc

SEQ ID NO: 4626506 - DNA, 25 bp, Homo sapien
tgcacatagcactgtgaggcaccca

SEQ ID NO: 4626507 - DNA, 25 bp, Homo sapien
ggcatcaaggacaactcaagcgctt

SEQ ID NO: 4626508 - DNA, 25 bp, Homo sapien
taaaccattacagataggcagaggc

SEQ ID NO: 4626509 - DNA, 25 bp, Homo sapien
gactatgtgagagacatctaggcca

SEQ ID NO: 4626510 - DNA, 25 bp, Homo sapien
tatgccccggtggaagtattagagg

SEQ ID NO: 4626511 - DNA, 25 bp, Homo sapien
gagcagcagttaactctggatacac

SEQ ID NO: 4626512 - DNA, 25 bp, Homo sapien
tcccaatttattccgtggacgaaca

SEQ ID NO: 4626513 - DNA, 25 bp, Homo sapien
gcagaaattgatggtaacagtccag

SEQ ID NO: 4626514 - DNA, 25 bp, Homo sapien
ttcagactgatcaggcaccacagag

SEQ ID NO: 4626515 - DNA, 25 bp, Homo sapien
aaaccacccactctgggcgagaaca

SEQ ID NO: 4626516 - DNA, 25 bp, Homo sapien
ggatgtggatggtgaaatgacaccc

SEQ ID NO: 4626517 - DNA, 25 bp, Homo sapien
gctaacaatggaagtggacccggcc

SEQ ID NO: 4626518 - DNA, 25 bp, Homo sapien
actctgggcgagaacaaaaagagag

SEQ ID NO: 4626519 - DNA, 25 bp, Homo sapien
agggcattgtgctttggggtaaacg

SEQ ID NO: 4626520 - DNA, 25 bp, Homo sapien
agtgaccagggcattgtgctttggg

SEQ ID NO: 4626521 - DNA, 25 bp, Homo sapien
gggtccctgaaacaagtgggctctg

SEQ ID NO: 4626522 - DNA, 25 bp, Homo sapien
ggctcgaggagggacacccgaggaa

SEQ ID NO: 4626523 - DNA, 25 bp, Homo sapien
tccctgaaacaagtgggctctgcca

SEQ ID NO: 4626524 - DNA, 25 bp, Homo sapien
gctcgaggagggacacccgaggaaa

SEQ ID NO: 4626525 - DNA, 25 bp, Homo sapien
gcagcctgtcctgcgtgaaagaggt

SEQ ID NO: 4626526 - DNA, 25 bp, Homo sapien
agttaaatgtgcaatctcacttggg

SEQ ID NO: 4626527 - DNA, 25 bp, Homo sapien
tggttcacatttgccaacgccgctc

SEQ ID NO: 4626528 - DNA, 25 bp, Homo sapien
tcctctccttacagtagttaaatgt

SEQ ID NO: 4626529 - DNA, 25 bp, Homo sapien
tccggcgccgcgagaatattcgcat

SEQ ID NO: 4626530 - DNA, 25 bp, Homo sapien
tcacgtgccccggacttccggcgcc

SEQ ID NO: 4626531 - DNA, 25 bp, Homo sapien
acttccggcgccgcgagaatattcg

SEQ ID NO: 4626532 - DNA, 25 bp, Homo sapien
caggtcacgtgccccggacttccgg

SEQ ID NO: 4626533 - DNA, 25 bp, Homo sapien
ctagatcgagctgtacagccaagtc

SEQ ID NO: 4626534 - DNA, 25 bp, Homo sapien
gccgcagaacctagatcgagctgta

SEQ ID NO: 4626535 - DNA, 25 bp, Homo sapien
gaacctagatcgagctgtacagcca

SEQ ID NO: 4626536 - DNA, 25 bp, Homo sapien
cccgtgccgcagaacctagatcgag

SEQ ID NO: 4626537 - DNA, 25 bp, Homo sapien
ctgagacaggaggcgcctccgccat

SEQ ID NO: 4626538 - DNA, 25 bp, Homo sapien
tccgctccctgaaaggggcccagtc

SEQ ID NO: 4626539 - DNA, 25 bp, Homo sapien
ctgaaaggggcccagtcccgctcgg

SEQ ID NO: 4626540 - DNA, 25 bp, Homo sapien
gcacgatgcgcggggcttggccctt

SEQ ID NO: 4626541 - DNA, 25 bp, Homo sapien
atgcgcggggcttggcccttccgag

SEQ ID NO: 4626542 - DNA, 25 bp, Homo sapien
cgcggggcttggcccttccgagcca

SEQ ID NO: 4626543 - DNA, 25 bp, Homo sapien
cacgatgcgcggggcttggcccttc

SEQ ID NO: 4626544 - DNA, 25 bp, Homo sapien
ctaggccccaccgaattcttcttca

SEQ ID NO: 4626545 - DNA, 25 bp, Homo sapien
taggccccaccgaattcttcttcaa

SEQ ID NO: 4626546 - DNA, 25 bp, Homo sapien
ggactagaagattttgcctcattag

SEQ ID NO: 4626547 - DNA, 25 bp, Homo sapien
gcaaaatcaaactaaagcacatgaa

SEQ ID NO: 4626548 - DNA, 25 bp, Homo sapien
ctttggactagaagattttgcctca

SEQ ID NO: 4626549 - DNA, 25 bp, Homo sapien
gaggtctttggactagaagattttg

SEQ ID NO: 4626550 - DNA, 25 bp, Homo sapien
ctaaaatacgaacatggaatgggaa

SEQ ID NO: 4626551 - DNA, 25 bp, Homo sapien
tgggcttctgtttaaagactttgat

SEQ ID NO: 4626552 - DNA, 25 bp, Homo sapien
aagtatcctctgcactgggcttctg

SEQ ID NO: 4626553 - DNA, 25 bp, Homo sapien
cagaaaagtatcctctgcactgggc

SEQ ID NO: 4626554 - DNA, 25 bp, Homo sapien
ctttgatgatgagggtgtgggctaa

SEQ ID NO: 4626555 - DNA, 25 bp, Homo sapien
cacggctagaatacaagtggtaccc

SEQ ID NO: 4626556 - DNA, 25 bp, Homo sapien
taaatccaagataacacagcagcac

SEQ ID NO: 4626557 - DNA, 25 bp, Homo sapien
taaacaggatgtctagtcaccacgg

SEQ ID NO: 4626558 - DNA, 25 bp, Homo sapien
tggcagattacaaagtccagagaca

SEQ ID NO: 4626559 - DNA, 25 bp, Homo sapien
caattcaggatttgtcctgaaagct

SEQ ID NO: 4626560 - DNA, 25 bp, Homo sapien
ccaattcaggatttgtcctgaaagc

SEQ ID NO: 4626561 - DNA, 25 bp, Homo sapien
tgaaagctttcacataggcagaatt

SEQ ID NO: 4626562 - DNA, 25 bp, Homo sapien
tgtcctgaaagctttcacataggca

SEQ ID NO: 4626563 - DNA, 25 bp, Homo sapien
taaaggtcatagagtaacctctcac

SEQ ID NO: 4626564 - DNA, 25 bp, Homo sapien
ggaatgatcataaaggtcatagagt

SEQ ID NO: 4626565 - DNA, 25 bp, Homo sapien
tgatcataaaggtcatagagtaacc

SEQ ID NO: 4626566 - DNA, 25 bp, Homo sapien
aatggaatgatcataaaggtcatag

SEQ ID NO: 4626567 - DNA, 25 bp, Homo sapien
taccaatcctattagagtctagtct

SEQ ID NO: 4626568 - DNA, 25 bp, Homo sapien
tcctttgagtcccacaatttagacc

SEQ ID NO: 4626569 - DNA, 25 bp, Homo sapien
tttcttctaccaatcctattagagt

SEQ ID NO: 4626570 - DNA, 25 bp, Homo sapien
tagagtctagtctcctttgagtccc

SEQ ID NO: 4626571 - DNA, 25 bp, Homo sapien
tgcgtttgtatgtcggtggccctcc

SEQ ID NO: 4626572 - DNA, 25 bp, Homo sapien
cacatggttctgtttgcctcgggag

SEQ ID NO: 4626573 - DNA, 25 bp, Homo sapien
gcctcgggagaaaggagatactact

SEQ ID NO: 4626574 - DNA, 25 bp, Homo sapien
taatccagctgtatctgaggtctgc

SEQ ID NO: 4626575 - DNA, 25 bp, Homo sapien
aattcacagcacaccatgcactcgt

SEQ ID NO: 4626576 - DNA, 25 bp, Homo sapien
gaaacacatggtaacagctctgaca

SEQ ID NO: 4626577 - DNA, 25 bp, Homo sapien
ctgttgttagttgttcaattagaga

SEQ ID NO: 4626578 - DNA, 25 bp, Homo sapien
gggccgtgacacgaaccaattcaca

SEQ ID NO: 4626579 - DNA, 25 bp, Homo sapien
gatcctgcaatcacacttctgttta

SEQ ID NO: 4626580 - DNA, 25 bp, Homo sapien
gccaaaaatgagaagaagataaatt

SEQ ID NO: 4626581 - DNA, 25 bp, Homo sapien
tatgatcctgcaatcacacttctgt

SEQ ID NO: 4626582 - DNA, 25 bp, Homo sapien
gcctggccaaaaatgagaagaagat

SEQ ID NO: 4626583 - DNA, 25 bp, Homo sapien
aacaagtgtaggtattaggaacatg

SEQ ID NO: 4626584 - DNA, 25 bp, Homo sapien
acaagtgtaggtattaggaacatgt

SEQ ID NO: 4626585 - DNA, 25 bp, Homo sapien
attaggaacatgtgcagaaacattc

SEQ ID NO: 4626586 - DNA, 25 bp, Homo sapien
gcagggcacctccaaccactctggc

SEQ ID NO: 4626587 - DNA, 25 bp, Homo sapien
ttctgaactgatatgcgaattgctg

SEQ ID NO: 4626588 - DNA, 25 bp, Homo sapien
tctataactggacttctgaactgat

SEQ ID NO: 4626589 - DNA, 25 bp, Homo sapien
taagacaagtcgtctataactggac

SEQ ID NO: 4626590 - DNA, 25 bp, Homo sapien
tataagacaagtcgtctataactgg

SEQ ID NO: 4626591 - DNA, 25 bp, Homo sapien
aaacctcaccacagctatgtggaat

SEQ ID NO: 4626592 - DNA, 25 bp, Homo sapien
tacaaacctcaccacagctatgtgg

SEQ ID NO: 4626593 - DNA, 25 bp, Homo sapien
ttctttctacaaacctcaccacagc

SEQ ID NO: 4626594 - DNA, 25 bp, Homo sapien
tcaccacagctatgtggaatttcat

SEQ ID NO: 4626595 - DNA, 25 bp, Homo sapien
tctacctggtccgtaagaagtacag

SEQ ID NO: 4626596 - DNA, 25 bp, Homo sapien
gaagtaataatcaggcactgggcaa

SEQ ID NO: 4626597 - DNA, 25 bp, Homo sapien
gctactcaggtaaaaggcagaatgg

SEQ ID NO: 4626598 - DNA, 25 bp, Homo sapien
tatccaaacccgaacaaagctgtcc

SEQ ID NO: 4626599 - DNA, 25 bp, Homo sapien
gtttcactgaataaaccacagccat

SEQ ID NO: 4626600 - DNA, 25 bp, Homo sapien
ggtttcactgaataaaccacagcca

SEQ ID NO: 4626601 - DNA, 25 bp, Homo sapien
aggtttcactgaataaaccacagcc

SEQ ID NO: 4626602 - DNA, 25 bp, Homo sapien
aaaggcagggcagggtgggcagggt

SEQ ID NO: 4626603 - DNA, 25 bp, Homo sapien
aaggcagggcagggtgggcagggtc

SEQ ID NO: 4626604 - DNA, 25 bp, Homo sapien
tggttcgtccacattcacatgtttt

SEQ ID NO: 4626605 - DNA, 25 bp, Homo sapien
ctggttcgtccacattcacatgttt

SEQ ID NO: 4626606 - DNA, 25 bp, Homo sapien
ttcgtccacattcacatgtttttgt

SEQ ID NO: 4626607 - DNA, 25 bp, Homo sapien
gtccacattcacatgtttttgtcat

SEQ ID NO: 4626608 - DNA, 25 bp, Homo sapien
caatggcattatcctgagacccagc

SEQ ID NO: 4626609 - DNA, 25 bp, Homo sapien
acagtactttacagacgggaggaca

SEQ ID NO: 4626610 - DNA, 25 bp, Homo sapien
ttggacaaccaaactaacactgcgg

SEQ ID NO: 4626611 - DNA, 25 bp, Homo sapien
ggaggacagctatcatgtacccaga

SEQ ID NO: 4626612 - DNA, 25 bp, Homo sapien
gttagaacagtggactgagacagcc

SEQ ID NO: 4626613 - DNA, 25 bp, Homo sapien
tctcacatgggttagaacagtggac

SEQ ID NO: 4626614 - DNA, 25 bp, Homo sapien
aacagtggactgagacagcctgacc

SEQ ID NO: 4626615 - DNA, 25 bp, Homo sapien
aatattctcacatgggttagaacag

SEQ ID NO: 4626616 - DNA, 25 bp, Homo sapien
gacaatcattaataaggttccagaa

SEQ ID NO: 4626617 - DNA, 25 bp, Homo sapien
gcattgctagctggtgtgcccacca

SEQ ID NO: 4626618 - DNA, 25 bp, Homo sapien
tgacaccaatcaaagtttatcaaga

SEQ ID NO: 4626619 - DNA, 25 bp, Homo sapien
caatcaaagtttatcaagacaatca

SEQ ID NO: 4626620 - DNA, 25 bp, Homo sapien
tgttaggcctgaaaggaaacgctgg

SEQ ID NO: 4626621 - DNA, 25 bp, Homo sapien
tatgacagctgattttgaacaaccc

SEQ ID NO: 4626622 - DNA, 25 bp, Homo sapien
ggtctctgagcatgtttcacaggga

SEQ ID NO: 4626623 - DNA, 25 bp, Homo sapien
caatactggttttcgtggatcccac

SEQ ID NO: 4626624 - DNA, 25 bp, Homo sapien
caaaggaccctgttgccagccttaa

SEQ ID NO: 4626625 - DNA, 25 bp, Homo sapien
cagaagaattaggtagagtcacagc

SEQ ID NO: 4626626 - DNA, 25 bp, Homo sapien
taggcacgagagacagaaatatgag

SEQ ID NO: 4626627 - DNA, 25 bp, Homo sapien
actaaaaagctctcctaggcacgag

SEQ ID NO: 4626628 - DNA, 25 bp, Homo sapien
gaagcttttgctagtaggcttttct

SEQ ID NO: 4626629 - DNA, 25 bp, Homo sapien
tggaagcttttgctagtaggctttt

SEQ ID NO: 4626630 - DNA, 25 bp, Homo sapien
gcttttgctagtaggcttttctttg

SEQ ID NO: 4626631 - DNA, 25 bp, Homo sapien
tttgctaagtttctgctcaaacaga

SEQ ID NO: 4626632 - DNA, 25 bp, Homo sapien
tcttccagtaagtgcatgtgcaatt

SEQ ID NO: 4626633 - DNA, 25 bp, Homo sapien
atcttccagtaagtgcatgtgcaat

SEQ ID NO: 4626634 - DNA, 25 bp, Homo sapien
catcttccagtaagtgcatgtgcaa

SEQ ID NO: 4626635 - DNA, 25 bp, Homo sapien
ccggccataattaagactctagatt

SEQ ID NO: 4626636 - DNA, 25 bp, Homo sapien
cacgcccggccataattaagactct

SEQ ID NO: 4626637 - DNA, 25 bp, Homo sapien
cgcccggccataattaagactctag

SEQ ID NO: 4626638 - DNA, 25 bp, Homo sapien
gcccggccataattaagactctaga

SEQ ID NO: 4626639 - DNA, 25 bp, Homo sapien
gacccgcctaagagctttaccatag

SEQ ID NO: 4626640 - DNA, 25 bp, Homo sapien
cctgcgggtcctctggtgatgttac

SEQ ID NO: 4626641 - DNA, 25 bp, Homo sapien
ttacaggagatagacaagctaagct

SEQ ID NO: 4626642 - DNA, 25 bp, Homo sapien
tccataaggccgtggctgaacacca

SEQ ID NO: 4626643 - DNA, 25 bp, Homo sapien
ttagtaacatgtatgggttcttaaa

SEQ ID NO: 4626644 - DNA, 25 bp, Homo sapien
tagtaacatgtatgggttcttaaaa

SEQ ID NO: 4626645 - DNA, 25 bp, Homo sapien
atccatcagactttcctacatcggt

SEQ ID NO: 4626646 - DNA, 25 bp, Homo sapien
cataacacatctcgggaggtgctgc

SEQ ID NO: 4626647 - DNA, 25 bp, Homo sapien
gactttcctacatcggttccacata

SEQ ID NO: 4626648 - DNA, 25 bp, Homo sapien
tccacataacacatctcgggaggtg

SEQ ID NO: 4626649 - DNA, 25 bp, Homo sapien
acacttgcgaacatgtatggttacc

SEQ ID NO: 4626650 - DNA, 25 bp, Homo sapien
acaggggcaacagcgcaccagctgg

SEQ ID NO: 4626651 - DNA, 25 bp, Homo sapien
ctgagggtggcacacttgcgaacat

SEQ ID NO: 4626652 - DNA, 25 bp, Homo sapien
catgtatggttaccgcatttcaagt

SEQ ID NO: 4626653 - DNA, 25 bp, Homo sapien
ggcacagggtccatgcatgttttcc

SEQ ID NO: 4626654 - DNA, 25 bp, Homo sapien
cagggtccatgcatgttttccgact

SEQ ID NO: 4626655 - DNA, 25 bp, Homo sapien
gggtccatgcatgttttccgactac

SEQ ID NO: 4626656 - DNA, 25 bp, Homo sapien
cacagggtccatgcatgttttccga

SEQ ID NO: 4626657 - DNA, 25 bp, Homo sapien
accacaaggcagaggcttgccgcac

SEQ ID NO: 4626658 - DNA, 25 bp, Homo sapien
ctaaggaaccacaaggcagaggctt

SEQ ID NO: 4626659 - DNA, 25 bp, Homo sapien
aaggaaccacaaggcagaggcttgc

SEQ ID NO: 4626660 - DNA, 25 bp, Homo sapien
ggaaccacaaggcagaggcttgccg

SEQ ID NO: 4626661 - DNA, 25 bp, Homo sapien
tgccgccatacccaggtaaataaaa

SEQ ID NO: 4626662 - DNA, 25 bp, Homo sapien
gcacgtgccgccatacccaggtaaa

SEQ ID NO: 4626663 - DNA, 25 bp, Homo sapien
cgtgccgccatacccaggtaaataa

SEQ ID NO: 4626664 - DNA, 25 bp, Homo sapien
ccagggtcaaatgatccttttgcct

SEQ ID NO: 4626665 - DNA, 25 bp, Homo sapien
gttatgaactgtctctcgccctggg

SEQ ID NO: 4626666 - DNA, 25 bp, Homo sapien
gattagggctccagtattctgctgc

SEQ ID NO: 4626667 - DNA, 25 bp, Homo sapien
gaacctctgccctacgagtgagctg

SEQ ID NO: 4626668 - DNA, 25 bp, Homo sapien
aatgttgacaatgtggccttcccag

SEQ ID NO: 4626669 - DNA, 25 bp, Homo sapien
gcctaatgaattttgcatttcggtt

SEQ ID NO: 4626670 - DNA, 25 bp, Homo sapien
tttcatgttcactgatcgtttcttc

SEQ ID NO: 4626671 - DNA, 25 bp, Homo sapien
actattgagcccctttaatgaagtt

SEQ ID NO: 4626672 - DNA, 25 bp, Homo sapien
atggagtcttactccctcgtccagg

SEQ ID NO: 4626673 - DNA, 25 bp, Homo sapien
gcctcctgaattcaaacaatttttg

SEQ ID NO: 4626674 - DNA, 25 bp, Homo sapien
gcgcctagcccccctcttatacaaa

SEQ ID NO: 4626675 - DNA, 25 bp, Homo sapien
ttatacaaaatttaccacttatggc

SEQ ID NO: 4626676 - DNA, 25 bp, Homo sapien
ggcttccctcatttgttcctgtagg

SEQ ID NO: 4626677 - DNA, 25 bp, Homo sapien
agagcttttcacaggtatgaatgaa

SEQ ID NO: 4626678 - DNA, 25 bp, Homo sapien
agcttttcacaggtatgaatgaaat

SEQ ID NO: 4626679 - DNA, 25 bp, Homo sapien
gcagagcttttcacaggtatgaatg

SEQ ID NO: 4626680 - DNA, 25 bp, Homo sapien
ggcagagcttttcacaggtatgaat

SEQ ID NO: 4626681 - DNA, 25 bp, Homo sapien
tgcgagagcatggtccacagtctcc

SEQ ID NO: 4626682 - DNA, 25 bp, Homo sapien
gtgcgagagcatggtccacagtctc

SEQ ID NO: 4626683 - DNA, 25 bp, Homo sapien
tgtgcgagagcatggtccacagtct

SEQ ID NO: 4626684 - DNA, 25 bp, Homo sapien
atgtgcgagagcatggtccacagtc

SEQ ID NO: 4626685 - DNA, 25 bp, Homo sapien
catagcttttcaagaatacactcac

SEQ ID NO: 4626686 - DNA, 25 bp, Homo sapien
acatagcttttcaagaatacactca

SEQ ID NO: 4626687 - DNA, 25 bp, Homo sapien
cacttttgagactggtacatggaag

SEQ ID NO: 4626688 - DNA, 25 bp, Homo sapien
ttttgagactggtacatggaagctc

SEQ ID NO: 4626689 - DNA, 25 bp, Homo sapien
ttcacttttgagactggtacatgga

SEQ ID NO: 4626690 - DNA, 25 bp, Homo sapien
cttttgagactggtacatggaagct

SEQ ID NO: 4626691 - DNA, 25 bp, Homo sapien
tacataacccaactccctaacaaga

SEQ ID NO: 4626692 - DNA, 25 bp, Homo sapien
aaatcttaagtatgccttcactgaa

SEQ ID NO: 4626693 - DNA, 25 bp, Homo sapien
gattcagagtgacgacactttcacc

SEQ ID NO: 4626694 - DNA, 25 bp, Homo sapien
acaagattcagagtgacgacacttt

SEQ ID NO: 4626695 - DNA, 25 bp, Homo sapien
gggcagagacccaatgtgtgaagct

SEQ ID NO: 4626696 - DNA, 25 bp, Homo sapien
agcagctaacatacccacgaggaga

SEQ ID NO: 4626697 - DNA, 25 bp, Homo sapien
tattgctgggtacctcccaaacggc

SEQ ID NO: 4626698 - DNA, 25 bp, Homo sapien
ccagatatcctatcaggtgtggcag

SEQ ID NO: 4626699 - DNA, 25 bp, Homo sapien
ttacaggggtgcgccactgtacttg

SEQ ID NO: 4626700 - DNA, 25 bp, Homo sapien
aggcatgagccaccaggcttggacc

SEQ ID NO: 4626701 - DNA, 25 bp, Homo sapien
caggcatgagccaccaggcttggac

SEQ ID NO: 4626702 - DNA, 25 bp, Homo sapien
caggggtgcgccactgtacttggct

SEQ ID NO: 4626703 - DNA, 25 bp, Homo sapien
cccatggatatggaaggctggctga

SEQ ID NO: 4626704 - DNA, 25 bp, Homo sapien
tgtacaaacttttggagtccatggg

SEQ ID NO: 4626705 - DNA, 25 bp, Homo sapien
gaagccatgctcatcttagtagatg

SEQ ID NO: 4626706 - DNA, 25 bp, Homo sapien
tagcaacggtagtgtttaaggtgtg

SEQ ID NO: 4626707 - DNA, 25 bp, Homo sapien
gtccacacaaccgtttcttgttaca

SEQ ID NO: 4626708 - DNA, 25 bp, Homo sapien
cacacagcatatctcattacattta

SEQ ID NO: 4626709 - DNA, 25 bp, Homo sapien
tctcattacatttatgccgtccaca

SEQ ID NO: 4626710 - DNA, 25 bp, Homo sapien
tgttacaccgcttgtcacacataaa

SEQ ID NO: 4626711 - DNA, 25 bp, Homo sapien
cttaggggcctgtcccagtgacttt

SEQ ID NO: 4626712 - DNA, 25 bp, Homo sapien
tttaaatccgggctgcattctccac

SEQ ID NO: 4626713 - DNA, 25 bp, Homo sapien
gattatgcctaataagtccacttac

SEQ ID NO: 4626714 - DNA, 25 bp, Homo sapien
ttatggggactatgagagctctctg

SEQ ID NO: 4626715 - DNA, 25 bp, Homo sapien
ccaggccagtttgtgttgggacaac

SEQ ID NO: 4626716 - DNA, 25 bp, Homo sapien
cctaagcagtacatgaaacctgaag

SEQ ID NO: 4626717 - DNA, 25 bp, Homo sapien
tgtgttgctaccagatgccactggc

SEQ ID NO: 4626718 - DNA, 25 bp, Homo sapien
cccaagttgctaagtccaggccagt

SEQ ID NO: 4626719 - DNA, 25 bp, Homo sapien
tgtcctaataatttttcctactgac

SEQ ID NO: 4626720 - DNA, 25 bp, Homo sapien
atgtcctaataatttttcctactga

SEQ ID NO: 4626721 - DNA, 25 bp, Homo sapien
aatgtcctaataatttttcctactg

SEQ ID NO: 4626722 - DNA, 25 bp, Homo sapien
caaggttcttcacacctatgaaggc

SEQ ID NO: 4626723 - DNA, 25 bp, Homo sapien
ctatgaaggccacaacggagtttcc

SEQ ID NO: 4626724 - DNA, 25 bp, Homo sapien
cagtttccacgatgacaaggttctt

SEQ ID NO: 4626725 - DNA, 25 bp, Homo sapien
caacggagtttcctcccacaaatca

SEQ ID NO: 4626726 - DNA, 25 bp, Homo sapien
gtggagcagcaggtaaaacaaaaga

SEQ ID NO: 4626727 - DNA, 25 bp, Homo sapien
ggtggagcagcaggtaaaacaaaag

SEQ ID NO: 4626728 - DNA, 25 bp, Homo sapien
aaagaatcctttctgagtttgggat

SEQ ID NO: 4626729 - DNA, 25 bp, Homo sapien
tctgagtttgggatgtgcaagtaca

SEQ ID NO: 4626730 - DNA, 25 bp, Homo sapien
gcaccacaatggcaggttaattcat

SEQ ID NO: 4626731 - DNA, 25 bp, Homo sapien
gggaactggagggtaaatcactgat

SEQ ID NO: 4626732 - DNA, 25 bp, Homo sapien
caatggcaggttaattcatcaaaac

SEQ ID NO: 4626733 - DNA, 25 bp, Homo sapien
actggagggtaaatcactgatgcac

SEQ ID NO: 4626734 - DNA, 25 bp, Homo sapien
ggactctagcgcaggtttgggtaca

SEQ ID NO: 4626735 - DNA, 25 bp, Homo sapien
gatggtcacactcatggactctagc

SEQ ID NO: 4626736 - DNA, 25 bp, Homo sapien
tagcgcaggtttgggtacattcagg

SEQ ID NO: 4626737 - DNA, 25 bp, Homo sapien
cactcatggactctagcgcaggttt

SEQ ID NO: 4626738 - DNA, 25 bp, Homo sapien
tctgggctccctcacacttcctggt

SEQ ID NO: 4626739 - DNA, 25 bp, Homo sapien
tccctcacacttcctggtgtctcag

SEQ ID NO: 4626740 - DNA, 25 bp, Homo sapien
tggctaccacactctcgtctgggct

SEQ ID NO: 4626741 - DNA, 25 bp, Homo sapien
ctcacacttcctggtgtctcagttc

SEQ ID NO: 4626742 - DNA, 25 bp, Homo sapien
gggacacttctcctcactatgacaa

SEQ ID NO: 4626743 - DNA, 25 bp, Homo sapien
tcatgcttgcccatgcaccacttct

SEQ ID NO: 4626744 - DNA, 25 bp, Homo sapien
catgcaccacttctgagttaggaaa

SEQ ID NO: 4626745 - DNA, 25 bp, Homo sapien
taggaaagtgcaagggggacacttc

SEQ ID NO: 4626746 - DNA, 25 bp, Homo sapien
tttcttctgggtagacgcccagtag

SEQ ID NO: 4626747 - DNA, 25 bp, Homo sapien
cttttcttctgggtagacgcccagt

SEQ ID NO: 4626748 - DNA, 25 bp, Homo sapien
tcttctgggtagacgcccagtagtg

SEQ ID NO: 4626749 - DNA, 25 bp, Homo sapien
tcttttcttctgggtagacgcccag

SEQ ID NO: 4626750 - DNA, 25 bp, Homo sapien
gttagggtgacctgcaatcagtgat

SEQ ID NO: 4626751 - DNA, 25 bp, Homo sapien
agcacatgctcatttcgtgtctgca

SEQ ID NO: 4626752 - DNA, 25 bp, Homo sapien
tggtaattctcgcaacatctcagac

SEQ ID NO: 4626753 - DNA, 25 bp, Homo sapien
accgtgctcggacccagtgtgtagt

SEQ ID NO: 4626754 - DNA, 25 bp, Homo sapien
tcctcaccataggaaaaagctgctg

SEQ ID NO: 4626755 - DNA, 25 bp, Homo sapien
tctcgtaggaccaaaggctagtctt

SEQ ID NO: 4626756 - DNA, 25 bp, Homo sapien
tacccattctactaccagggcaaag

SEQ ID NO: 4626757 - DNA, 25 bp, Homo sapien
tacttctactgcagtgacacacaac

SEQ ID NO: 4626758 - DNA, 25 bp, Homo sapien
taatccgcaagagatatcaaccagg

SEQ ID NO: 4626759 - DNA, 25 bp, Homo sapien
tccgcaagagatatcaaccaggtga

SEQ ID NO: 4626760 - DNA, 25 bp, Homo sapien
ctgcagggtaatccgcaagagatat

SEQ ID NO: 4626761 - DNA, 25 bp, Homo sapien
aagagatatcaaccaggtgacaggg

SEQ ID NO: 4626762 - DNA, 25 bp, Homo sapien
gcagggtgccatacacgggtgacca

SEQ ID NO: 4626763 - DNA, 25 bp, Homo sapien
caagacactcccctttgtgacagag

SEQ ID NO: 4626764 - DNA, 25 bp, Homo sapien
ttgcagggctcatccacaagacact

SEQ ID NO: 4626765 - DNA, 25 bp, Homo sapien
ctctgacatttgtgcatcccacatg

SEQ ID NO: 4626766 - DNA, 25 bp, Homo sapien
gataagtactagatgcttcagagca

SEQ ID NO: 4626767 - DNA, 25 bp, Homo sapien
ctttgataagtactagatgcttcag

SEQ ID NO: 4626768 - DNA, 25 bp, Homo sapien
gtccacattcacactgtagctctac

SEQ ID NO: 4626769 - DNA, 25 bp, Homo sapien
cgtccacattcacactgtagctcta

SEQ ID NO: 4626770 - DNA, 25 bp, Homo sapien
ctgcatgtctgttatcttagaggcc

SEQ ID NO: 4626771 - DNA, 25 bp, Homo sapien
tggtaattaacttgctgatctccac

SEQ ID NO: 4626772 - DNA, 25 bp, Homo sapien
cctccaagctgcatgtctgttatct

SEQ ID NO: 4626773 - DNA, 25 bp, Homo sapien
tgaacctccaagctgcatgtctgtt

SEQ ID NO: 4626774 - DNA, 25 bp, Homo sapien
caaggctgaacactcctcatcacac

SEQ ID NO: 4626775 - DNA, 25 bp, Homo sapien
cctttccaaggctgaacactcctca

SEQ ID NO: 4626776 - DNA, 25 bp, Homo sapien
aaggctgaacactcctcatcacact

SEQ ID NO: 4626777 - DNA, 25 bp, Homo sapien
ttccaaggctgaacactcctcatca

SEQ ID NO: 4626778 - DNA, 25 bp, Homo sapien
tacaagagacggttctggtaattat

SEQ ID NO: 4626779 - DNA, 25 bp, Homo sapien
tagagtacaagagacggttctggta

SEQ ID NO: 4626780 - DNA, 25 bp, Homo sapien
caagagacggttctggtaattatct

SEQ ID NO: 4626781 - DNA, 25 bp, Homo sapien
ttatgtagagtacaagagacggttc

SEQ ID NO: 4626782 - DNA, 25 bp, Homo sapien
tgaataaagcattgctacatgcaac

SEQ ID NO: 4626783 - DNA, 25 bp, Homo sapien
tctaacagttaatacaaagatatcc

SEQ ID NO: 4626784 - DNA, 25 bp, Homo sapien
tttgtaatagtctaacagttaatac

SEQ ID NO: 4626785 - DNA, 25 bp, Homo sapien
cagtataatgggtaaatgaatagta

SEQ ID NO: 4626786 - DNA, 25 bp, Homo sapien
gaaagactctatccagtaagggtca

SEQ ID NO: 4626787 - DNA, 25 bp, Homo sapien
gagctctggctctaactagtataca

SEQ ID NO: 4626788 - DNA, 25 bp, Homo sapien
ctaaggcttacagacaatatgtgac

SEQ ID NO: 4626789 - DNA, 25 bp, Homo sapien
cctaatttacattctgcagctgaga

SEQ ID NO: 4626790 - DNA, 25 bp, Homo sapien
ggatgagccgctgtaacgggcccct

SEQ ID NO: 4626791 - DNA, 25 bp, Homo sapien
ttatggggatgagccgctgtaacgg

SEQ ID NO: 4626792 - DNA, 25 bp, Homo sapien
tttttcactataacgtttctctcta

SEQ ID NO: 4626793 - DNA, 25 bp, Homo sapien
ctataacgtttctctctatgtgtat

SEQ ID NO: 4626794 - DNA, 25 bp, Homo sapien
actatcactgaattttgaccctgaa

SEQ ID NO: 4626795 - DNA, 25 bp, Homo sapien
gaattttgaccctgaagaacgtata

SEQ ID NO: 4626796 - DNA, 25 bp, Homo sapien
cactgaattttgaccctgaagaacg

SEQ ID NO: 4626797 - DNA, 25 bp, Homo sapien
gaccctgaagaacgtatattgaaag

SEQ ID NO: 4626798 - DNA, 25 bp, Homo sapien
gaagcccagagatcctccaatttag

SEQ ID NO: 4626799 - DNA, 25 bp, Homo sapien
tccaactgagaacgcatgtgaatgt

SEQ ID NO: 4626800 - DNA, 25 bp, Homo sapien
gaactggcttaatcacaggaggagt

SEQ ID NO: 4626801 - DNA, 25 bp, Homo sapien
cagtttcgagaaaccaagagaagga

SEQ ID NO: 4626802 - DNA, 25 bp, Homo sapien
ccatttccttctcaacgtcactgac

SEQ ID NO: 4626803 - DNA, 25 bp, Homo sapien
catttccttctcaacgtcactgaca

SEQ ID NO: 4626804 - DNA, 25 bp, Homo sapien
ccttctcaacgtcactgacaaactt

SEQ ID NO: 4626805 - DNA, 25 bp, Homo sapien
tttccttctcaacgtcactgacaaa

SEQ ID NO: 4626806 - DNA, 25 bp, Homo sapien
gtccagtgggatgtttcgacttcaa

SEQ ID NO: 4626807 - DNA, 25 bp, Homo sapien
tgtccagtgggatgtttcgacttca

SEQ ID NO: 4626808 - DNA, 25 bp, Homo sapien
tccagtgggatgtttcgacttcaac

SEQ ID NO: 4626809 - DNA, 25 bp, Homo sapien
atgtccagtgggatgtttcgacttc

SEQ ID NO: 4626810 - DNA, 25 bp, Homo sapien
tgtgcccagccgactgtagatcttt

SEQ ID NO: 4626811 - DNA, 25 bp, Homo sapien
taaggatcctcaaagaagttgtgac

SEQ ID NO: 4626812 - DNA, 25 bp, Homo sapien
tacttacagctgactgcagagcttt

SEQ ID NO: 4626813 - DNA, 25 bp, Homo sapien
tcctacaactactctaggttgaaag

SEQ ID NO: 4626814 - DNA, 25 bp, Homo sapien
agtacagtgactcaacctcagctta

SEQ ID NO: 4626815 - DNA, 25 bp, Homo sapien
caatagcccttcaaagatctgaggg

SEQ ID NO: 4626816 - DNA, 25 bp, Homo sapien
agagtgtcttcctaagtgtcccaca

SEQ ID NO: 4626817 - DNA, 25 bp, Homo sapien
agtgggctttcctagcatacaatag

SEQ ID NO: 4626818 - DNA, 25 bp, Homo sapien
cctgcctttggaattataaagaaca

SEQ ID NO: 4626819 - DNA, 25 bp, Homo sapien
ttaaagctacctccgtgacatccct

SEQ ID NO: 4626820 - DNA, 25 bp, Homo sapien
tctgaaggagtctatcccactgctc

SEQ ID NO: 4626821 - DNA, 25 bp, Homo sapien
actgctctccagctgtagtcataca

SEQ ID NO: 4626822 - DNA, 25 bp, Homo sapien
gggcttctgactaaactcaagactt

SEQ ID NO: 4626823 - DNA, 25 bp, Homo sapien
aaaaccaccagcattagatacaggg

SEQ ID NO: 4626824 - DNA, 25 bp, Homo sapien
gaactgcgacttaggtagacagcat

SEQ ID NO: 4626825 - DNA, 25 bp, Homo sapien
caacagtcgcagctggacagggtta

SEQ ID NO: 4626826 - DNA, 25 bp, Homo sapien
tactaactgccaagcaagcctggag

SEQ ID NO: 4626827 - DNA, 25 bp, Homo sapien
gaagctgtggcttttcttactattc

SEQ ID NO: 4626828 - DNA, 25 bp, Homo sapien
ctgttcatgggagggaagctgtggc

SEQ ID NO: 4626829 - DNA, 25 bp, Homo sapien
gggaagctgtggcttttcttactat

SEQ ID NO: 4626830 - DNA, 25 bp, Homo sapien
ggagggaagctgtggcttttcttac

SEQ ID NO: 4626831 - DNA, 25 bp, Homo sapien
tggcagtgaccaccacattgcgctt

SEQ ID NO: 4626832 - DNA, 25 bp, Homo sapien
gtcatggatgatccggcggtggtct

SEQ ID NO: 4626833 - DNA, 25 bp, Homo sapien
tcggttcactgtcatagctcacgct

SEQ ID NO: 4626834 - DNA, 25 bp, Homo sapien
ggccataaacttgggccaagtcatg

SEQ ID NO: 4626835 - DNA, 25 bp, Homo sapien
ctgtcagcgtggtaggaggacaaac

SEQ ID NO: 4626836 - DNA, 25 bp, Homo sapien
gtctgtgatgaggaatcggtggtgg

SEQ ID NO: 4626837 - DNA, 25 bp, Homo sapien
caagcacacctgtcagcgtggtagg

SEQ ID NO: 4626838 - DNA, 25 bp, Homo sapien
tgcatttccctttcaagcacacctg

SEQ ID NO: 4626839 - DNA, 25 bp, Homo sapien
tcctggacgtcaaaatagtcaatta

SEQ ID NO: 4626840 - DNA, 25 bp, Homo sapien
ctgtaaattactgctcccaggattc

SEQ ID NO: 4626841 - DNA, 25 bp, Homo sapien
ttagtcctggacgtcaaaatagtca

SEQ ID NO: 4626842 - DNA, 25 bp, Homo sapien
ttctgtaaattactgctcccaggat

SEQ ID NO: 4626843 - DNA, 25 bp, Homo sapien
accacagtgtgaccctggcagaaga

SEQ ID NO: 4626844 - DNA, 25 bp, Homo sapien
tcacagtgatggtgtaaagagcctc

SEQ ID NO: 4626845 - DNA, 25 bp, Homo sapien
gcgtgattgcatacctagtgaccat

SEQ ID NO: 4626846 - DNA, 25 bp, Homo sapien
taactgggacaactgaggctatgac

SEQ ID NO: 4626847 - DNA, 25 bp, Homo sapien
tattcaaacagagtccagagctcag

SEQ ID NO: 4626848 - DNA, 25 bp, Homo sapien
tgaagaatgcctccagtgggctgct

SEQ ID NO: 4626849 - DNA, 25 bp, Homo sapien
gggcataagccctggactgtccata

SEQ ID NO: 4626850 - DNA, 25 bp, Homo sapien
tgccttaaaggagcctgaagaatgc

SEQ ID NO: 4626851 - DNA, 25 bp, Homo sapien
ctcaagtctcctgctactgctctgg

SEQ ID NO: 4626852 - DNA, 25 bp, Homo sapien
ttttgtcactctacttctcaagtct

SEQ ID NO: 4626853 - DNA, 25 bp, Homo sapien
gggtgccaatgcaagggtcacacta

SEQ ID NO: 4626854 - DNA, 25 bp, Homo sapien
tggcttgctctagggcagaaggaag

SEQ ID NO: 4626855 - DNA, 25 bp, Homo sapien
ctgctgctgtacctgatcccttttg

SEQ ID NO: 4626856 - DNA, 25 bp, Homo sapien
agaatttggtcgctggaaagctcta

SEQ ID NO: 4626857 - DNA, 25 bp, Homo sapien
aaagctctagcccataaaaactctc

SEQ ID NO: 4626858 - DNA, 25 bp, Homo sapien
ctggaaagctctagcccataaaaac

SEQ ID NO: 4626859 - DNA, 25 bp, Homo sapien
gctctagcccataaaaactctcctg

SEQ ID NO: 4626860 - DNA, 25 bp, Homo sapien
ataccaggcagtcttgttcaccagg

SEQ ID NO: 4626861 - DNA, 25 bp, Homo sapien
taccaggcagtcttgttcaccaggg

SEQ ID NO: 4626862 - DNA, 25 bp, Homo sapien
ccaggcagtcttgttcaccagggac

SEQ ID NO: 4626863 - DNA, 25 bp, Homo sapien
accaggcagtcttgttcaccaggga

SEQ ID NO: 4626864 - DNA, 25 bp, Homo sapien
gatggagactgtaccgagacgtgtc

SEQ ID NO: 4626865 - DNA, 25 bp, Homo sapien
tccggatagacaggacaagaactct

SEQ ID NO: 4626866 - DNA, 25 bp, Homo sapien
caacgctgtccctgaattgggctga

SEQ ID NO: 4626867 - DNA, 25 bp, Homo sapien
tttccccaggccagtacagatacag

SEQ ID NO: 4626868 - DNA, 25 bp, Homo sapien
ggagcccacatgaacgcagctgtga

SEQ ID NO: 4626869 - DNA, 25 bp, Homo sapien
gccgcgtgccctggaggaagtttcc

SEQ ID NO: 4626870 - DNA, 25 bp, Homo sapien
tagccatcgttgttctcatactgtt

SEQ ID NO: 4626871 - DNA, 25 bp, Homo sapien
tttgctaactgtgcgctgggccgcg

SEQ ID NO: 4626872 - DNA, 25 bp, Homo sapien
aggcaccgcccacatgcttgatacc

SEQ ID NO: 4626873 - DNA, 25 bp, Homo sapien
gcccacatgcttgatacctgcccac

SEQ ID NO: 4626874 - DNA, 25 bp, Homo sapien
accgcccacatgcttgatacctgcc

SEQ ID NO: 4626875 - DNA, 25 bp, Homo sapien
gcaccgcccacatgcttgatacctg

SEQ ID NO: 4626876 - DNA, 25 bp, Homo sapien
gaggcaggagggtgcgtcctctgag

SEQ ID NO: 4626877 - DNA, 25 bp, Homo sapien
aggcaggagggtgcgtcctctgaga

SEQ ID NO: 4626878 - DNA, 25 bp, Homo sapien
acccttggaacctcggaggcaggag

SEQ ID NO: 4626879 - DNA, 25 bp, Homo sapien
gccccatgagggctgttaacccttg

SEQ ID NO: 4626880 - DNA, 25 bp, Homo sapien
aaagtaatgatcttatcacaagaca

SEQ ID NO: 4626881 - DNA, 25 bp, Homo sapien
aagtaatgatcttatcacaagacat

SEQ ID NO: 4626882 - DNA, 25 bp, Homo sapien
ccttaatccagggcaaagtaatgat

SEQ ID NO: 4626883 - DNA, 25 bp, Homo sapien
taatccagggcaaagtaatgatctt

SEQ ID NO: 4626884 - DNA, 25 bp, Homo sapien
cagcgagcctctgcccttaacgtga

SEQ ID NO: 4626885 - DNA, 25 bp, Homo sapien
attgcatcttatgcagggtccaggg

SEQ ID NO: 4626886 - DNA, 25 bp, Homo sapien
tgcccttaacgtgactgtagccatg

SEQ ID NO: 4626887 - DNA, 25 bp, Homo sapien
tgactgtagccatgtttattgcatc

SEQ ID NO: 4626888 - DNA, 25 bp, Homo sapien
aagatccaggaaatactgcagagga

SEQ ID NO: 4626889 - DNA, 25 bp, Homo sapien
aagagccgatgggcagcaggcagac

SEQ ID NO: 4626890 - DNA, 25 bp, Homo sapien
cagctgggagttgaagagccgatgg

SEQ ID NO: 4626891 - DNA, 25 bp, Homo sapien
tcagctgggagttgaagagccgatg

SEQ ID NO: 4626892 - DNA, 25 bp, Homo sapien
ctgggagttgaagagccgatgggca

SEQ ID NO: 4626893 - DNA, 25 bp, Homo sapien
ccaggattctcttggtgttcttggc

SEQ ID NO: 4626894 - DNA, 25 bp, Homo sapien
tcttgccagctgtgtggtgatgagg

SEQ ID NO: 4626895 - DNA, 25 bp, Homo sapien
tcttggctttctgctctatccactt

SEQ ID NO: 4626896 - DNA, 25 bp, Homo sapien
ggctttctgctctatccacttctct

SEQ ID NO: 4626897 - DNA, 25 bp, Homo sapien
cagccttcttttcttgacctaaatt

SEQ ID NO: 4626898 - DNA, 25 bp, Homo sapien
atgccccacggtgcccactctttca

SEQ ID NO: 4626899 - DNA, 25 bp, Homo sapien
ttctctgggagcctcctaccccctc

SEQ ID NO: 4626900 - DNA, 25 bp, Homo sapien
tcacttcctccacatgccccacggt

SEQ ID NO: 4626901 - DNA, 25 bp, Homo sapien
tgttgggaggaccagcggtagagca

SEQ ID NO: 4626902 - DNA, 25 bp, Homo sapien
gctggagtcattcctcccacgcagt

SEQ ID NO: 4626903 - DNA, 25 bp, Homo sapien
aggagagagctgaagaccaccggca

SEQ ID NO: 4626904 - DNA, 25 bp, Homo sapien
gctgccggcttgctggagtcattcc

SEQ ID NO: 4626905 - DNA, 25 bp, Homo sapien
cctgggagagctgagaggcaggctc

SEQ ID NO: 4626906 - DNA, 25 bp, Homo sapien
ctcgaggccgccctgggagagctga

SEQ ID NO: 4626907 - DNA, 25 bp, Homo sapien
gggacacagggatagctgagcccca

SEQ ID NO: 4626908 - DNA, 25 bp, Homo sapien
cagcgctcgaggccgccctgggaga

SEQ ID NO: 4626909 - DNA, 25 bp, Homo sapien
cttggttcaagtggcaccagccaaa

SEQ ID NO: 4626910 - DNA, 25 bp, Homo sapien
tctggacttggttcaagtggcacca

SEQ ID NO: 4626911 - DNA, 25 bp, Homo sapien
gggatgttattttgggcagtgcatc

SEQ ID NO: 4626912 - DNA, 25 bp, Homo sapien
tgcatctggacttggttcaagtggc

SEQ ID NO: 4626913 - DNA, 25 bp, Homo sapien
caaatatggctcgtgtgtcctcctt

SEQ ID NO: 4626914 - DNA, 25 bp, Homo sapien
tcacaatgggggttccctgaggact

SEQ ID NO: 4626915 - DNA, 25 bp, Homo sapien
ctgcaaatatggctcgtgtgtcctc

SEQ ID NO: 4626916 - DNA, 25 bp, Homo sapien
gttccctgaggactgacccagggcc

SEQ ID NO: 4626917 - DNA, 25 bp, Homo sapien
ccgatgtcccgatccagctctgggt

SEQ ID NO: 4626918 - DNA, 25 bp, Homo sapien
gctgagccccgagcccgatgtcccg

SEQ ID NO: 4626919 - DNA, 25 bp, Homo sapien
gatgtcccgatccagctctgggtcc

SEQ ID NO: 4626920 - DNA, 25 bp, Homo sapien
gcccgatgtcccgatccagctctgg

SEQ ID NO: 4626921 - DNA, 25 bp, Homo sapien
tgcctgccccattgtttgagaccca

SEQ ID NO: 4626922 - DNA, 25 bp, Homo sapien
gccccattgtttgagacccagtcag

SEQ ID NO: 4626923 - DNA, 25 bp, Homo sapien
aactgcctgccccattgtttgagac

SEQ ID NO: 4626924 - DNA, 25 bp, Homo sapien
cccattgtttgagacccagtcaggc

SEQ ID NO: 4626925 - DNA, 25 bp, Homo sapien
acttctaacatgacctcatcccggc

SEQ ID NO: 4626926 - DNA, 25 bp, Homo sapien
cagatccacttctaacatgacctca

SEQ ID NO: 4626927 - DNA, 25 bp, Homo sapien
atccaagaccccagatccacttcta

SEQ ID NO: 4626928 - DNA, 25 bp, Homo sapien
gaccccagatccacttctaacatga

SEQ ID NO: 4626929 - DNA, 25 bp, Homo sapien
gatgggactgtgtcttctccacctc

SEQ ID NO: 4626930 - DNA, 25 bp, Homo sapien
cagatgggactgtgtcttctccacc

SEQ ID NO: 4626931 - DNA, 25 bp, Homo sapien
acagatgggactgtgtcttctccac

SEQ ID NO: 4626932 - DNA, 25 bp, Homo sapien
atgggactgtgtcttctccacctct

SEQ ID NO: 4626933 - DNA, 25 bp, Homo sapien
ttggtggcccctttagctgcctctc

SEQ ID NO: 4626934 - DNA, 25 bp, Homo sapien
ttcttcagtgctgttgccaccctct

SEQ ID NO: 4626935 - DNA, 25 bp, Homo sapien
ggtggcccctttagctgcctctctt

SEQ ID NO: 4626936 - DNA, 25 bp, Homo sapien
ttcagtgctgttgccaccctctatc

SEQ ID NO: 4626937 - DNA, 25 bp, Homo sapien
tcagatgccaagttaggcagctcca

SEQ ID NO: 4626938 - DNA, 25 bp, Homo sapien
gaattctgggttctcgacttcaggg

SEQ ID NO: 4626939 - DNA, 25 bp, Homo sapien
tataggctcttttaggatggagtag

SEQ ID NO: 4626940 - DNA, 25 bp, Homo sapien
tggagtaggcctaggttggaattct

SEQ ID NO: 4626941 - DNA, 25 bp, Homo sapien
gtttactatatgtcaaaccttcacg

SEQ ID NO: 4626942 - DNA, 25 bp, Homo sapien
ctatatgtcaaaccttcacgtgtgc

SEQ ID NO: 4626943 - DNA, 25 bp, Homo sapien
ttactatatgtcaaaccttcacgtg

SEQ ID NO: 4626944 - DNA, 25 bp, Homo sapien
actatatgtcaaaccttcacgtgtg

SEQ ID NO: 4626945 - DNA, 25 bp, Homo sapien
cctgacctggatttgctacacttag

SEQ ID NO: 4626946 - DNA, 25 bp, Homo sapien
tctgccctggcaagcgatgcttcat

SEQ ID NO: 4626947 - DNA, 25 bp, Homo sapien
gtgcccacatttgagactttgcccc

SEQ ID NO: 4626948 - DNA, 25 bp, Homo sapien
tttctctttgacatgctcaacatgt

SEQ ID NO: 4626949 - DNA, 25 bp, Homo sapien
cctggtggaatagacaaagctctgg

SEQ ID NO: 4626950 - DNA, 25 bp, Homo sapien
agcctggtggaatagacaaagctct

SEQ ID NO: 4626951 - DNA, 25 bp, Homo sapien
gaagcctggtggaatagacaaagct

SEQ ID NO: 4626952 - DNA, 25 bp, Homo sapien
aagaagcctggtggaatagacaaag

SEQ ID NO: 4626953 - DNA, 25 bp, Homo sapien
catcttgttatggtcagctgctcgt

SEQ ID NO: 4626954 - DNA, 25 bp, Homo sapien
accagcccgtccttcgcctctcggt

SEQ ID NO: 4626955 - DNA, 25 bp, Homo sapien
cttgttatggtcagctgctcgtctc

SEQ ID NO: 4626956 - DNA, 25 bp, Homo sapien
gctgctcgtctccatggagatgccc

SEQ ID NO: 4626957 - DNA, 25 bp, Homo sapien
ggaagctgtttcagggacaatccca

SEQ ID NO: 4626958 - DNA, 25 bp, Homo sapien
tcctgtgaggagcaatgggttcttg

SEQ ID NO: 4626959 - DNA, 25 bp, Homo sapien
aacttctttggtctcttgcgtcggg

SEQ ID NO: 4626960 - DNA, 25 bp, Homo sapien
tggcatcgtcccctgcttctagaga

SEQ ID NO: 4626961 - DNA, 25 bp, Homo sapien
ccatgtcccgggctttggcttttgg

SEQ ID NO: 4626962 - DNA, 25 bp, Homo sapien
cccgggctttggcttttggtgccag

SEQ ID NO: 4626963 - DNA, 25 bp, Homo sapien
tcagggactcagcatctccatgtcc

SEQ ID NO: 4626964 - DNA, 25 bp, Homo sapien
ggactcagcatctccatgtcccggg

SEQ ID NO: 4626965 - DNA, 25 bp, Homo sapien
ctccacagcccactttggaggagct

SEQ ID NO: 4626966 - DNA, 25 bp, Homo sapien
tgtcccttcttcctgtgctgagcca

SEQ ID NO: 4626967 - DNA, 25 bp, Homo sapien
cacagcccactttggaggagctcat

SEQ ID NO: 4626968 - DNA, 25 bp, Homo sapien
ttcctgtgctgagccatctccacag

SEQ ID NO: 4626969 - DNA, 25 bp, Homo sapien
gaggaagtgtgagggcgatagcgtg

SEQ ID NO: 4626970 - DNA, 25 bp, Homo sapien
tgtgagggcgatagcgtgctgtgtc

SEQ ID NO: 4626971 - DNA, 25 bp, Homo sapien
gagggaggaagtgtgagggcgatag

SEQ ID NO: 4626972 - DNA, 25 bp, Homo sapien
agggcgatagcgtgctgtgtcctga

SEQ ID NO: 4626973 - DNA, 25 bp, Homo sapien
gcagtgggacgtgtttctgtcataa

SEQ ID NO: 4626974 - DNA, 25 bp, Homo sapien
tacatacataagtaggagcagtggg

SEQ ID NO: 4626975 - DNA, 25 bp, Homo sapien
gtttggagctctggatgtacataca

SEQ ID NO: 4626976 - DNA, 25 bp, Homo sapien
tgttacagtcttagggatccgggat

SEQ ID NO: 4626977 - DNA, 25 bp, Homo sapien
tcccagggtcgcaaaatggagcagt

SEQ ID NO: 4626978 - DNA, 25 bp, Homo sapien
taagaagaagcacgaagatctaccc

SEQ ID NO: 4626979 - DNA, 25 bp, Homo sapien
gggcccatggaaagtactgcatcct

SEQ ID NO: 4626980 - DNA, 25 bp, Homo sapien
gagtcaggccagtccggtgcttctg

SEQ ID NO: 4626981 - DNA, 25 bp, Homo sapien
cacacacagtggcataaattctatt

SEQ ID NO: 4626982 - DNA, 25 bp, Homo sapien
actgtctgttcagttcgtttggcag

SEQ ID NO: 4626983 - DNA, 25 bp, Homo sapien
gactcagctcaaatagtgcccctcc

SEQ ID NO: 4626984 - DNA, 25 bp, Homo sapien
ccctcctctgaactattagagcagt

SEQ ID NO: 4626985 - DNA, 25 bp, Homo sapien
aagcttagctgggagcgtggtcatt

SEQ ID NO: 4626986 - DNA, 25 bp, Homo sapien
aatagcctatgctgtaatgctgagg

SEQ ID NO: 4626987 - DNA, 25 bp, Homo sapien
taacaggtaaactctatggcaatgt

SEQ ID NO: 4626988 - DNA, 25 bp, Homo sapien
aaaagtaggacgagcaatgtaaggg

SEQ ID NO: 4626989 - DNA, 25 bp, Homo sapien
ggattttggtctgcctctggtcctg

SEQ ID NO: 4626990 - DNA, 25 bp, Homo sapien
caggattttggtctgcctctggtcc

SEQ ID NO: 4626991 - DNA, 25 bp, Homo sapien
attttggtctgcctctggtcctgtc

SEQ ID NO: 4626992 - DNA, 25 bp, Homo sapien
ttttggtctgcctctggtcctgtcc

SEQ ID NO: 4626993 - DNA, 25 bp, Homo sapien
tcatgaagaatggtaagtaactggg

SEQ ID NO: 4626994 - DNA, 25 bp, Homo sapien
catgaagaatggtaagtaactgggc

SEQ ID NO: 4626995 - DNA, 25 bp, Homo sapien
gaaaaactccaagattacatccctg

SEQ ID NO: 4626996 - DNA, 25 bp, Homo sapien
actccaagattacatccctgttatc

SEQ ID NO: 4626997 - DNA, 25 bp, Homo sapien
tacatccctgttatctttcctccaa

SEQ ID NO: 4626998 - DNA, 25 bp, Homo sapien
gattacatccctgttatctttcctc

SEQ ID NO: 4626999 - DNA, 25 bp, Homo sapien
cctctctggtggagcgttaggttga

SEQ ID NO: 4627000 - DNA, 25 bp, Homo sapien
tggagcgttaggttgacagcgtttt

SEQ ID NO: 4627001 - DNA, 25 bp, Homo sapien
gagcgttaggttgacagcgttttag

SEQ ID NO: 4627002 - DNA, 25 bp, Homo sapien
tagcaggaccgcgagaaaccgggga

SEQ ID NO: 4627003 - DNA, 25 bp, Homo sapien
ggcgggcccaggagttgcctagagg

SEQ ID NO: 4627004 - DNA, 25 bp, Homo sapien
cgggcgggcccaggagttgcctaga

SEQ ID NO: 4627005 - DNA, 25 bp, Homo sapien
tgcgggcgggcccaggagttgccta

SEQ ID NO: 4627006 - DNA, 25 bp, Homo sapien
gggcccaggagttgcctagaggctg

SEQ ID NO: 4627007 - DNA, 25 bp, Homo sapien
cggctcctcctctgccagagctcga

SEQ ID NO: 4627008 - DNA, 25 bp, Homo sapien
ctcctcctctgccagagctcgagac

SEQ ID NO: 4627009 - DNA, 25 bp, Homo sapien
gctcctcctctgccagagctcgaga

SEQ ID NO: 4627010 - DNA, 25 bp, Homo sapien
ggctcctcctctgccagagctcgag

SEQ ID NO: 4627011 - DNA, 25 bp, Homo sapien
ggcgcctgtagctgggcgcccaggt

SEQ ID NO: 4627012 - DNA, 25 bp, Homo sapien
cctgtagctgggcgcccaggtggtg

SEQ ID NO: 4627013 - DNA, 25 bp, Homo sapien
cgcctgtagctgggcgcccaggtgg

SEQ ID NO: 4627014 - DNA, 25 bp, Homo sapien
gcgcctgtagctgggcgcccaggtg

SEQ ID NO: 4627015 - DNA, 25 bp, Homo sapien
tggcgcgggacgttccggaatctca

SEQ ID NO: 4627016 - DNA, 25 bp, Homo sapien
ctccagggaccgtccgcggggatgg

SEQ ID NO: 4627017 - DNA, 25 bp, Homo sapien
gacgttccggaatctcaggcgcgca

SEQ ID NO: 4627018 - DNA, 25 bp, Homo sapien
cgggacgttccggaatctcaggcgc

SEQ ID NO: 4627019 - DNA, 25 bp, Homo sapien
caggcgtctcccaaaactgaggagc

SEQ ID NO: 4627020 - DNA, 25 bp, Homo sapien
gtctcccaaaactgaggagcttcct

SEQ ID NO: 4627021 - DNA, 25 bp, Homo sapien
ctcccaaaactgaggagcttcctca

SEQ ID NO: 4627022 - DNA, 25 bp, Homo sapien
ggcgtctcccaaaactgaggagctt

SEQ ID NO: 4627023 - DNA, 25 bp, Homo sapien
tgtcgcggacgtccaagtcccggaa

SEQ ID NO: 4627024 - DNA, 25 bp, Homo sapien
agtcccggaacctgcgcgtcaggca

SEQ ID NO: 4627025 - DNA, 25 bp, Homo sapien
tgtcttttctgtcgcggacgtccaa

SEQ ID NO: 4627026 - DNA, 25 bp, Homo sapien
cgtcaggcagtgctccacctctgcg

SEQ ID NO: 4627027 - DNA, 25 bp, Homo sapien
tctgtcacagatgttgatctggcat

SEQ ID NO: 4627028 - DNA, 25 bp, Homo sapien
tgtcctgtttagtctgtcacagatg

SEQ ID NO: 4627029 - DNA, 25 bp, Homo sapien
tggcattttctgtccagcaagagag

SEQ ID NO: 4627030 - DNA, 25 bp, Homo sapien
ctgtttagtctgtcacagatgttga

SEQ ID NO: 4627031 - DNA, 25 bp, Homo sapien
ccacgtttcaggagaataatggcac

SEQ ID NO: 4627032 - DNA, 25 bp, Homo sapien
gaagtcccctcattatacacggcat

SEQ ID NO: 4627033 - DNA, 25 bp, Homo sapien
tggcgccacgtttcaggagaataat

SEQ ID NO: 4627034 - DNA, 25 bp, Homo sapien
cgtttcaggagaataatggcacaag

SEQ ID NO: 4627035 - DNA, 25 bp, Homo sapien
ctatgtcaatattaaaacaaacatt

SEQ ID NO: 4627036 - DNA, 25 bp, Homo sapien
tttgaaaagaaagttgattgatctg

SEQ ID NO: 4627037 - DNA, 25 bp, Homo sapien
gaaaagaaagttgattgatctgtac

SEQ ID NO: 4627038 - DNA, 25 bp, Homo sapien
attttgaaaagaaagttgattgatc

SEQ ID NO: 4627039 - DNA, 25 bp, Homo sapien
ccatatgctgtctcctggaatttat

SEQ ID NO: 4627040 - DNA, 25 bp, Homo sapien
accatatgctgtctcctggaattta

SEQ ID NO: 4627041 - DNA, 25 bp, Homo sapien
caccatatgctgtctcctggaattt

SEQ ID NO: 4627042 - DNA, 25 bp, Homo sapien
ccaccatatgctgtctcctggaatt

SEQ ID NO: 4627043 - DNA, 25 bp, Homo sapien
aaagtgggcaaagatttaggtgaag

SEQ ID NO: 4627044 - DNA, 25 bp, Homo sapien
cccattgcttcgaattatattgtaa

SEQ ID NO: 4627045 - DNA, 25 bp, Homo sapien
tttcccattgcttcgaattatattg

SEQ ID NO: 4627046 - DNA, 25 bp, Homo sapien
aagatttaggtgaagattttcccat

SEQ ID NO: 4627047 - DNA, 25 bp, Homo sapien
gagggtgacgatacttgacaagtta

SEQ ID NO: 4627048 - DNA, 25 bp, Homo sapien
aggagggtgacgatacttgacaagt

SEQ ID NO: 4627049 - DNA, 25 bp, Homo sapien
ggagggtgacgatacttgacaagtt

SEQ ID NO: 4627050 - DNA, 25 bp, Homo sapien
caggagggtgacgatacttgacaag

SEQ ID NO: 4627051 - DNA, 25 bp, Homo sapien
tgtcatttcgaagatgatttttaag

SEQ ID NO: 4627052 - DNA, 25 bp, Homo sapien
cttgattgtcatttcgaagatgatt

SEQ ID NO: 4627053 - DNA, 25 bp, Homo sapien
tcatttcgaagatgatttttaagca

SEQ ID NO: 4627054 - DNA, 25 bp, Homo sapien
atttcgaagatgatttttaagcatc

SEQ ID NO: 4627055 - DNA, 25 bp, Homo sapien
tgaacttgctccttgtgttttaaaa

SEQ ID NO: 4627056 - DNA, 25 bp, Homo sapien
tttgaacttgctccttgtgttttaa

SEQ ID NO: 4627057 - DNA, 25 bp, Homo sapien
tgctccttgtgttttaaaactttca

SEQ ID NO: 4627058 - DNA, 25 bp, Homo sapien
cttttgaacttgctccttgtgtttt

SEQ ID NO: 4627059 - DNA, 25 bp, Homo sapien
aaaagtcccctgcatgcttctgaat

SEQ ID NO: 4627060 - DNA, 25 bp, Homo sapien
aatttacaaaaagtcccctgcatgc

SEQ ID NO: 4627061 - DNA, 25 bp, Homo sapien
gcgagactacatccccgaaggaaaa

SEQ ID NO: 4627062 - DNA, 25 bp, Homo sapien
ttaaaagacacatgtgaagaaaagc

SEQ ID NO: 4627063 - DNA, 25 bp, Homo sapien
tttttcaaattttcaggcttcatag

SEQ ID NO: 4627064 - DNA, 25 bp, Homo sapien
ttttcaggcttcatagctgctgttt

SEQ ID NO: 4627065 - DNA, 25 bp, Homo sapien
tttcaaattttcaggcttcatagct

SEQ ID NO: 4627066 - DNA, 25 bp, Homo sapien
tcaaattttcaggcttcatagctgc

SEQ ID NO: 4627067 - DNA, 25 bp, Homo sapien
atgtttagttaaaatgaatgactta

SEQ ID NO: 4627068 - DNA, 25 bp, Homo sapien
tataaatgcaacgataagacctgag

SEQ ID NO: 4627069 - DNA, 25 bp, Homo sapien
gctgcatgtctggtttgttacaatc

SEQ ID NO: 4627070 - DNA, 25 bp, Homo sapien
gagatgggctccttctgttcagcca

SEQ ID NO: 4627071 - DNA, 25 bp, Homo sapien
tacaatctttacagtctgatctatt

SEQ ID NO: 4627072 - DNA, 25 bp, Homo sapien
atattttctcgtatttgcatatcaa

SEQ ID NO: 4627073 - DNA, 25 bp, Homo sapien
tattttctcgtatttgcatatcaaa

SEQ ID NO: 4627074 - DNA, 25 bp, Homo sapien
tagcagtgggactgtcatatgtggg

SEQ ID NO: 4627075 - DNA, 25 bp, Homo sapien
cttgccaaacaccttctaagcttta

SEQ ID NO: 4627076 - DNA, 25 bp, Homo sapien
ggactgtcatatgtgggtccctgaa

SEQ ID NO: 4627077 - DNA, 25 bp, Homo sapien
tgtcatatgtgggtccctgaaacac

SEQ ID NO: 4627078 - DNA, 25 bp, Homo sapien
tccaatggattgactttctttagct

SEQ ID NO: 4627079 - DNA, 25 bp, Homo sapien
tttatggacctgttcagtaagcaac

SEQ ID NO: 4627080 - DNA, 25 bp, Homo sapien
gttctgctttccaatggattgactt

SEQ ID NO: 4627081 - DNA, 25 bp, Homo sapien
ttcacccgagctttatggacctgtt

SEQ ID NO: 4627082 - DNA, 25 bp, Homo sapien
ttctctttctgctttttctttttca

SEQ ID NO: 4627083 - DNA, 25 bp, Homo sapien
ctctttctgctttttctttttcata

SEQ ID NO: 4627084 - DNA, 25 bp, Homo sapien
tctctttctgctttttctttttcat

SEQ ID NO: 4627085 - DNA, 25 bp, Homo sapien
ctgacaaaatatttttgttaccaat

SEQ ID NO: 4627086 - DNA, 25 bp, Homo sapien
ccagtggagactctgacattgaaaa

SEQ ID NO: 4627087 - DNA, 25 bp, Homo sapien
gatgatcgaccagttcttcttgaaa

SEQ ID NO: 4627088 - DNA, 25 bp, Homo sapien
tctttgaagtccatgtctcatccaa

SEQ ID NO: 4627089 - DNA, 25 bp, Homo sapien
attttttaagatgatcgaccagttc

SEQ ID NO: 4627090 - DNA, 25 bp, Homo sapien
tttgatccgcagtatagttcagtaa

SEQ ID NO: 4627091 - DNA, 25 bp, Homo sapien
tctttcttatttgatccgcagtata

SEQ ID NO: 4627092 - DNA, 25 bp, Homo sapien
ttatttgatccgcagtatagttcag

SEQ ID NO: 4627093 - DNA, 25 bp, Homo sapien
gatccgcagtatagttcagtaatga

SEQ ID NO: 4627094 - DNA, 25 bp, Homo sapien
tattgtcatttctaggcatttctta

SEQ ID NO: 4627095 - DNA, 25 bp, Homo sapien
aactgaagtcttcatttgcaaatgc

SEQ ID NO: 4627096 - DNA, 25 bp, Homo sapien
atggcaactgaagtcttcatttgca

SEQ ID NO: 4627097 - DNA, 25 bp, Homo sapien
aagtctccatggcaactgaagtctt

SEQ ID NO: 4627098 - DNA, 25 bp, Homo sapien
ggatacagaattacagttagataag

SEQ ID NO: 4627099 - DNA, 25 bp, Homo sapien
catcccattaaaagaatagaatatg

SEQ ID NO: 4627100 - DNA, 25 bp, Homo sapien
cagcccccagattgtgagagagatc

SEQ ID NO: 4627101 - DNA, 25 bp, Homo sapien
cttcagatgattcaatttctccaac

SEQ ID NO: 4627102 - DNA, 25 bp, Homo sapien
taccaagttctaccatatctttttc

SEQ ID NO: 4627103 - DNA, 25 bp, Homo sapien
tcttgtacttttcccatagataata

SEQ ID NO: 4627104 - DNA, 25 bp, Homo sapien
cagcttccttctcggccataagatc

SEQ ID NO: 4627105 - DNA, 25 bp, Homo sapien
tgatgaagaacttcattgtctttgg

SEQ ID NO: 4627106 - DNA, 25 bp, Homo sapien
ttcgttattttttctgacatggaac

SEQ ID NO: 4627107 - DNA, 25 bp, Homo sapien
atactcttctaattcagttgtaaca

SEQ ID NO: 4627108 - DNA, 25 bp, Homo sapien
ttcagttgtaacatcttcataagct

SEQ ID NO: 4627109 - DNA, 25 bp, Homo sapien
cgttattttttctgacatggaactg

SEQ ID NO: 4627110 - DNA, 25 bp, Homo sapien
gatcacagctattttcttatccgat

SEQ ID NO: 4627111 - DNA, 25 bp, Homo sapien
ggtaactctgggtctggcctcatag

SEQ ID NO: 4627112 - DNA, 25 bp, Homo sapien
taggaattcttatggccattttggg

SEQ ID NO: 4627113 - DNA, 25 bp, Homo sapien
tgggtctggcctcataggaagagtg

SEQ ID NO: 4627114 - DNA, 25 bp, Homo sapien
ccaaaagagaaatggtcatataact

SEQ ID NO: 4627115 - DNA, 25 bp, Homo sapien
caaaagagaaatggtcatataacta

SEQ ID NO: 4627116 - DNA, 25 bp, Homo sapien
aaaagagaaatggtcatataactaa

SEQ ID NO: 4627117 - DNA, 25 bp, Homo sapien
aaagagaaatggtcatataactaac

SEQ ID NO: 4627118 - DNA, 25 bp, Homo sapien
atgtggcctttagtatttttagtga

SEQ ID NO: 4627119 - DNA, 25 bp, Homo sapien
aatgtggcctttagtatttttagtg

SEQ ID NO: 4627120 - DNA, 25 bp, Homo sapien
agtagataggagcaagggcccaacg

SEQ ID NO: 4627121 - DNA, 25 bp, Homo sapien
agataggagcaagggcccaacgcag

SEQ ID NO: 4627122 - DNA, 25 bp, Homo sapien
gaaagtagataggagcaagggccca

SEQ ID NO: 4627123 - DNA, 25 bp, Homo sapien
agaaagtagataggagcaagggccc

SEQ ID NO: 4627124 - DNA, 25 bp, Homo sapien
tggggactagtgagcgcatgatggg

SEQ ID NO: 4627125 - DNA, 25 bp, Homo sapien
ttctgttggggactagtgagcgcat

SEQ ID NO: 4627126 - DNA, 25 bp, Homo sapien
ggactagtgagcgcatgatgggaag

SEQ ID NO: 4627127 - DNA, 25 bp, Homo sapien
cttctgttggggactagtgagcgca

SEQ ID NO: 4627128 - DNA, 25 bp, Homo sapien
ggcagacaagacaccctgtgctgct

SEQ ID NO: 4627129 - DNA, 25 bp, Homo sapien
caccctccagggtgccctgactcac

SEQ ID NO: 4627130 - DNA, 25 bp, Homo sapien
aggcaccctccagggtgccctgact

SEQ ID NO: 4627131 - DNA, 25 bp, Homo sapien
cctttccaggcaccctccagggtgc

SEQ ID NO: 4627132 - DNA, 25 bp, Homo sapien
ccctttccaggcaccctccagggtg

SEQ ID NO: 4627133 - DNA, 25 bp, Homo sapien
ggccaggattagagcctcccacagg

SEQ ID NO: 4627134 - DNA, 25 bp, Homo sapien
tttctgccctctccaccaagggtgg

SEQ ID NO: 4627135 - DNA, 25 bp, Homo sapien
ctcccacaggtgctccccaatttct

SEQ ID NO: 4627136 - DNA, 25 bp, Homo sapien
acaggtgctccccaatttctgccct

SEQ ID NO: 4627137 - DNA, 25 bp, Homo sapien
gatgtgcatctcacctagaaaacaa

SEQ ID NO: 4627138 - DNA, 25 bp, Homo sapien
cgcagagccactcacagagactgct

SEQ ID NO: 4627139 - DNA, 25 bp, Homo sapien
agatgtgcatctcacctagaaaaca

SEQ ID NO: 4627140 - DNA, 25 bp, Homo sapien
tagaaaacaatccttcacgcagagc

SEQ ID NO: 4627141 - DNA, 25 bp, Homo sapien
tgtccagaggagatgcagaatggaa

SEQ ID NO: 4627142 - DNA, 25 bp, Homo sapien
ggtgtccagaggagatgcagaatgg

SEQ ID NO: 4627143 - DNA, 25 bp, Homo sapien
ctgggggtgtccagaggagatgcag

SEQ ID NO: 4627144 - DNA, 25 bp, Homo sapien
gggggtgtccagaggagatgcagaa

SEQ ID NO: 4627145 - DNA, 25 bp, Homo sapien
aggcaccaagtagggcggttgtctc

SEQ ID NO: 4627146 - DNA, 25 bp, Homo sapien
gggtcagatgcaggcaccaagtagg

SEQ ID NO: 4627147 - DNA, 25 bp, Homo sapien
ggggggtcagatgcaggcaccaagt

SEQ ID NO: 4627148 - DNA, 25 bp, Homo sapien
tcagatgcaggcaccaagtagggcg

SEQ ID NO: 4627149 - DNA, 25 bp, Homo sapien
ctggcttcttccatgttgggctggt

SEQ ID NO: 4627150 - DNA, 25 bp, Homo sapien
gctggctgcatgctgccctggcttc

SEQ ID NO: 4627151 - DNA, 25 bp, Homo sapien
ttcccaaggcccaggtgccatctgg

SEQ ID NO: 4627152 - DNA, 25 bp, Homo sapien
tgcagggcagctggctgcatgctgc

SEQ ID NO: 4627153 - DNA, 25 bp, Homo sapien
gttcagatgccacgttcacccttcc

SEQ ID NO: 4627154 - DNA, 25 bp, Homo sapien
tgttcagatgccacgttcacccttc

SEQ ID NO: 4627155 - DNA, 25 bp, Homo sapien
ggtatggatctcattcccaagcagg

SEQ ID NO: 4627156 - DNA, 25 bp, Homo sapien
gtatggatctcattcccaagcaggg

SEQ ID NO: 4627157 - DNA, 25 bp, Homo sapien
gctccatctgcagcacagtggttgc

SEQ ID NO: 4627158 - DNA, 25 bp, Homo sapien
tccatctgcagcacagtggttgcat

SEQ ID NO: 4627159 - DNA, 25 bp, Homo sapien
tggctccatctgcagcacagtggtt

SEQ ID NO: 4627160 - DNA, 25 bp, Homo sapien
catctgcagcacagtggttgcattg

SEQ ID NO: 4627161 - DNA, 25 bp, Homo sapien
ccctcatgcatggactggagcccca

SEQ ID NO: 4627162 - DNA, 25 bp, Homo sapien
cttgaacacggagtccttctcaaga

SEQ ID NO: 4627163 - DNA, 25 bp, Homo sapien
ttctgcacttgaacacggagtcctt

SEQ ID NO: 4627164 - DNA, 25 bp, Homo sapien
gtaggagccctcatgcatggactgg

SEQ ID NO: 4627165 - DNA, 25 bp, Homo sapien
tctgatgctccttcttaaaacccat

SEQ ID NO: 4627166 - DNA, 25 bp, Homo sapien
ggtgaagcactcgaagccatcaatt

SEQ ID NO: 4627167 - DNA, 25 bp, Homo sapien
catcaccataatctgcttgcatgtc

SEQ ID NO: 4627168 - DNA, 25 bp, Homo sapien
ctgagtgccctgtgtttctatcttc

SEQ ID NO: 4627169 - DNA, 25 bp, Homo sapien
gattggcagagctcaccaacggtgt

SEQ ID NO: 4627170 - DNA, 25 bp, Homo sapien
tgattggcagagctcaccaacggtg

SEQ ID NO: 4627171 - DNA, 25 bp, Homo sapien
ggcagagctcaccaacggtgttgaa

SEQ ID NO: 4627172 - DNA, 25 bp, Homo sapien
ttggcagagctcaccaacggtgttg

SEQ ID NO: 4627173 - DNA, 25 bp, Homo sapien
catgactgggtccagttcctggatg

SEQ ID NO: 4627174 - DNA, 25 bp, Homo sapien
atgactgggtccagttcctggatgg

SEQ ID NO: 4627175 - DNA, 25 bp, Homo sapien
tccgggatgttgacctggtgtccct

SEQ ID NO: 4627176 - DNA, 25 bp, Homo sapien
atgatgtccgggatgttgacctggt

SEQ ID NO: 4627177 - DNA, 25 bp, Homo sapien
aagccatccttgtactaccgccaat

SEQ ID NO: 4627178 - DNA, 25 bp, Homo sapien
gaaacagtgcacaatcgagtatcta

SEQ ID NO: 4627179 - DNA, 25 bp, Homo sapien
gcaataaagtaagtggtatcattct

SEQ ID NO: 4627180 - DNA, 25 bp, Homo sapien
ttcacagggtttgaggtctacagca

SEQ ID NO: 4627181 - DNA, 25 bp, Homo sapien
caagaagattaaccattggtgaagg

SEQ ID NO: 4627182 - DNA, 25 bp, Homo sapien
gattaaccattggtgaaggaaccac

SEQ ID NO: 4627183 - DNA, 25 bp, Homo sapien
agattaaccattggtgaaggaacca

SEQ ID NO: 4627184 - DNA, 25 bp, Homo sapien
gaagattaaccattggtgaaggaac

SEQ ID NO: 4627185 - DNA, 25 bp, Homo sapien
ccaggtccctgctgaccatatcccg

SEQ ID NO: 4627186 - DNA, 25 bp, Homo sapien
tccctgctgaccatatcccgcacat

SEQ ID NO: 4627187 - DNA, 25 bp, Homo sapien
agtgctcagcagcccccgctgacca

SEQ ID NO: 4627188 - DNA, 25 bp, Homo sapien
ctcagcagcccccgctgaccaggtc

SEQ ID NO: 4627189 - DNA, 25 bp, Homo sapien
gcgccctcgataacgtgcattgcac

SEQ ID NO: 4627190 - DNA, 25 bp, Homo sapien
atcctgactgtccacagcgccctcg

SEQ ID NO: 4627191 - DNA, 25 bp, Homo sapien
acagcgccctcgataacgtgcattg

SEQ ID NO: 4627192 - DNA, 25 bp, Homo sapien
gcactactgggccatcctgactgtc

SEQ ID NO: 4627193 - DNA, 25 bp, Homo sapien
tgtatctggcattttcctaggtcct

SEQ ID NO: 4627194 - DNA, 25 bp, Homo sapien
tcctaggtccttagtttccatcttc

SEQ ID NO: 4627195 - DNA, 25 bp, Homo sapien
gtggaaaggctgtatctggcatttt

SEQ ID NO: 4627196 - DNA, 25 bp, Homo sapien
ctggcattttcctaggtccttagtt

SEQ ID NO: 4627197 - DNA, 25 bp, Homo sapien
taggatgtgcgatgggcccctgctc

SEQ ID NO: 4627198 - DNA, 25 bp, Homo sapien
agcatctgtgcctaggatgtgcgat

SEQ ID NO: 4627199 - DNA, 25 bp, Homo sapien
ctgcagtgcctacattagcatctgt

SEQ ID NO: 4627200 - DNA, 25 bp, Homo sapien
tgcagtgcctacattagcatctgtg

SEQ ID NO: 4627201 - DNA, 25 bp, Homo sapien
tcattctgcaaaacgctccttgttg

SEQ ID NO: 4627202 - DNA, 25 bp, Homo sapien
catctcccctcaggagtgaggtagt

SEQ ID NO: 4627203 - DNA, 25 bp, Homo sapien
taaagttgtgcaccaggtcataggc

SEQ ID NO: 4627204 - DNA, 25 bp, Homo sapien
ctaaagttgtgcaccaggtcatagg

SEQ ID NO: 4627205 - DNA, 25 bp, Homo sapien
aaagttgtgcaccaggtcataggcc

SEQ ID NO: 4627206 - DNA, 25 bp, Homo sapien
ccttgaggatgtcaacactctggct

SEQ ID NO: 4627207 - DNA, 25 bp, Homo sapien
caaagtcttgaatgtggccctggcc

SEQ ID NO: 4627208 - DNA, 25 bp, Homo sapien
gaggatgtcaacactctggctagtg

SEQ ID NO: 4627209 - DNA, 25 bp, Homo sapien
ccctggccttgaggatgtcaacact

SEQ ID NO: 4627210 - DNA, 25 bp, Homo sapien
ctgatctcaagctgtattctgcctc

SEQ ID NO: 4627211 - DNA, 25 bp, Homo sapien
caggaagacttccacagtcatttct

SEQ ID NO: 4627212 - DNA, 25 bp, Homo sapien
tctaaaacgtggctgactgaccctc

SEQ ID NO: 4627213 - DNA, 25 bp, Homo sapien
catttctaaaacgtggctgactgac

SEQ ID NO: 4627214 - DNA, 25 bp, Homo sapien
agtcatttctaaaacgtggctgact

SEQ ID NO: 4627215 - DNA, 25 bp, Homo sapien
tcatccaagcaggatccctcccttg

SEQ ID NO: 4627216 - DNA, 25 bp, Homo sapien
acttttcatccaagcaggatccctc

SEQ ID NO: 4627217 - DNA, 25 bp, Homo sapien
agatggtccctgaagacttttcatc

SEQ ID NO: 4627218 - DNA, 25 bp, Homo sapien
ctgagatggtccctgaagacttttc

SEQ ID NO: 4627219 - DNA, 25 bp, Homo sapien
aacacactaactcagagggcacctg

SEQ ID NO: 4627220 - DNA, 25 bp, Homo sapien
gaacacactaactcagagggcacct

SEQ ID NO: 4627221 - DNA, 25 bp, Homo sapien
tagaacacactaactcagagggcac

SEQ ID NO: 4627222 - DNA, 25 bp, Homo sapien
ttagaacacactaactcagagggca

SEQ ID NO: 4627223 - DNA, 25 bp, Homo sapien
ggtgctgacactgtcagggataagc

SEQ ID NO: 4627224 - DNA, 25 bp, Homo sapien
taagccacaataggaggcttaaaac

SEQ ID NO: 4627225 - DNA, 25 bp, Homo sapien
gctgacactgtcagggataagccac

SEQ ID NO: 4627226 - DNA, 25 bp, Homo sapien
acaaaacaccactcatatggagcag

SEQ ID NO: 4627227 - DNA, 25 bp, Homo sapien
ctggggtaaggtccacagaaacaat

SEQ ID NO: 4627228 - DNA, 25 bp, Homo sapien
tggggtaaggtccacagaaacaatc

SEQ ID NO: 4627229 - DNA, 25 bp, Homo sapien
cagaaaattccataggacccatgac

SEQ ID NO: 4627230 - DNA, 25 bp, Homo sapien
cttcccctgagtgggatctgtttga

SEQ ID NO: 4627231 - DNA, 25 bp, Homo sapien
tgacacttagcatgaacttcccctg

SEQ ID NO: 4627232 - DNA, 25 bp, Homo sapien
gacattgctggttctaaagagttgg

SEQ ID NO: 4627233 - DNA, 25 bp, Homo sapien
gcacctgaaggcacgtccagggcca

SEQ ID NO: 4627234 - DNA, 25 bp, Homo sapien
accagctggctgggctgccagcatc

SEQ ID NO: 4627235 - DNA, 25 bp, Homo sapien
tccagggccagaccagctggctggg

SEQ ID NO: 4627236 - DNA, 25 bp, Homo sapien
cataaagcataaccagcacctgaag

SEQ ID NO: 4627237 - DNA, 25 bp, Homo sapien
gagggctctggacagtatagcttgc

SEQ ID NO: 4627238 - DNA, 25 bp, Homo sapien
gctgctcagtagaagatgataagga

SEQ ID NO: 4627239 - DNA, 25 bp, Homo sapien
tttctcacagcccgagttcccatgg

SEQ ID NO: 4627240 - DNA, 25 bp, Homo sapien
ccgagttcccatggaatgttttact

SEQ ID NO: 4627241 - DNA, 25 bp, Homo sapien
agtgctgctcttgtcgttggctcta

SEQ ID NO: 4627242 - DNA, 25 bp, Homo sapien
agtggtgatctacttgagtctgtcc

SEQ ID NO: 4627243 - DNA, 25 bp, Homo sapien
tggctctagaaagatgatatcggcc

SEQ ID NO: 4627244 - DNA, 25 bp, Homo sapien
cacaaaaagcctcagtggtgatcta

SEQ ID NO: 4627245 - DNA, 25 bp, Homo sapien
gggtgtcaacactgttcctaatgga

SEQ ID NO: 4627246 - DNA, 25 bp, Homo sapien
gaaaaaagctggcatagagatccac

SEQ ID NO: 4627247 - DNA, 25 bp, Homo sapien
gaagtcatggcgttacgacagtaaa

SEQ ID NO: 4627248 - DNA, 25 bp, Homo sapien
tcctaatggatgatcactacaagtg

SEQ ID NO: 4627249 - DNA, 25 bp, Homo sapien
ccttaactcgatagtttcaatggac

SEQ ID NO: 4627250 - DNA, 25 bp, Homo sapien
tatgcatgaatgtactatgggtaac

SEQ ID NO: 4627251 - DNA, 25 bp, Homo sapien
ttgggtttaaccaacatggattcac

SEQ ID NO: 4627252 - DNA, 25 bp, Homo sapien
tggccactacgtcttcaaataattt

SEQ ID NO: 4627253 - DNA, 25 bp, Homo sapien
gaatcagaggcacagtttgtcctct

SEQ ID NO: 4627254 - DNA, 25 bp, Homo sapien
cacttcacaacgatctccatggctt

SEQ ID NO: 4627255 - DNA, 25 bp, Homo sapien
gggacctctgccttgatcctcaata

SEQ ID NO: 4627256 - DNA, 25 bp, Homo sapien
catctacatggcagtcatggcctgg

SEQ ID NO: 4627257 - DNA, 25 bp, Homo sapien
tgacgacgatgacaagatcattggg

SEQ ID NO: 4627258 - DNA, 25 bp, Homo sapien
actccagttgctgtcccctttgacg

SEQ ID NO: 4627259 - DNA, 25 bp, Homo sapien
tcattgggggctacacctgtgagga

SEQ ID NO: 4627260 - DNA, 25 bp, Homo sapien
tggttagcacttctgtggtggctcc

SEQ ID NO: 4627261 - DNA, 25 bp, Homo sapien
gacttgggagccacatccagtgatg

SEQ ID NO: 4627262 - DNA, 25 bp, Homo sapien
gggtacctaagtgccctgcagacac

SEQ ID NO: 4627263 - DNA, 25 bp, Homo sapien
tcttgcctgccttcactgtgcttat

SEQ ID NO: 4627264 - DNA, 25 bp, Homo sapien
tgggctgtaaggagatctgaacccc

SEQ ID NO: 4627265 - DNA, 25 bp, Homo sapien
aggtcggtgtggtatctggtcttca

SEQ ID NO: 4627266 - DNA, 25 bp, Homo sapien
tggaggtcggtgtggtatctggtct

SEQ ID NO: 4627267 - DNA, 25 bp, Homo sapien
aatgacaaattcaaatgactgtggt

SEQ ID NO: 4627268 - DNA, 25 bp, Homo sapien
gtcggtgtggtatctggtcttcaaa

SEQ ID NO: 4627269 - DNA, 25 bp, Homo sapien
aggttggcactaccataaatattga

SEQ ID NO: 4627270 - DNA, 25 bp, Homo sapien
ctttgctcatgacccgtgttacatc

SEQ ID NO: 4627271 - DNA, 25 bp, Homo sapien
aatctttgctcatgacccgtgttac

SEQ ID NO: 4627272 - DNA, 25 bp, Homo sapien
tgctcatgacccgtgttacatccat

SEQ ID NO: 4627273 - DNA, 25 bp, Homo sapien
catgacccgtgttacatccatctct

SEQ ID NO: 4627274 - DNA, 25 bp, Homo sapien
catcttccgtgatggccccacacca

SEQ ID NO: 4627275 - DNA, 25 bp, Homo sapien
cagcatcttccgtgatggccccaca

SEQ ID NO: 4627276 - DNA, 25 bp, Homo sapien
ctctggggagagttgtgaccactgt

SEQ ID NO: 4627277 - DNA, 25 bp, Homo sapien
gcagcagcatcttccgtgatggccc

SEQ ID NO: 4627278 - DNA, 25 bp, Homo sapien
cacccaagctcccaggtagaaggag

SEQ ID NO: 4627279 - DNA, 25 bp, Homo sapien
aagctcccaggtagaaggaggctca

SEQ ID NO: 4627280 - DNA, 25 bp, Homo sapien
gcccacccaagctcccaggtagaag

SEQ ID NO: 4627281 - DNA, 25 bp, Homo sapien
ctcccaggtagaaggaggctcatac

SEQ ID NO: 4627282 - DNA, 25 bp, Homo sapien
tccctctcccttcgatgagcataaa

SEQ ID NO: 4627283 - DNA, 25 bp, Homo sapien
taaacaatccacattgcctggccac

SEQ ID NO: 4627284 - DNA, 25 bp, Homo sapien
tggccaccgcttgaccatggcaaca

SEQ ID NO: 4627285 - DNA, 25 bp, Homo sapien
gatgagcataaacaatccacattgc

SEQ ID NO: 4627286 - DNA, 25 bp, Homo sapien
gaaagtccagggaacggcactcgat

SEQ ID NO: 4627287 - DNA, 25 bp, Homo sapien
ctcggatgttgagagacgacagcac

SEQ ID NO: 4627288 - DNA, 25 bp, Homo sapien
aaacatagttgtggcctgaaagtcc

SEQ ID NO: 4627289 - DNA, 25 bp, Homo sapien
ttcacagaggttccactcttacaga

SEQ ID NO: 4627290 - DNA, 25 bp, Homo sapien
ggccgtgcgccgagagctgagagcg

SEQ ID NO: 4627291 - DNA, 25 bp, Homo sapien
gggccgtgcgccgagagctgagagc

SEQ ID NO: 4627292 - DNA, 25 bp, Homo sapien
tgggccgtgcgccgagagctgagag

SEQ ID NO: 4627293 - DNA, 25 bp, Homo sapien
gccgtgcgccgagagctgagagcgt

SEQ ID NO: 4627294 - DNA, 25 bp, Homo sapien
cccttcatggagtcgtacagctgat

SEQ ID NO: 4627295 - DNA, 25 bp, Homo sapien
tcgcggttggtcacaatgttgacaa

SEQ ID NO: 4627296 - DNA, 25 bp, Homo sapien
tctgtgcattgtcgcggttggtcac

SEQ ID NO: 4627297 - DNA, 25 bp, Homo sapien
gcccttcatggagtcgtacagctga

SEQ ID NO: 4627298 - DNA, 25 bp, Homo sapien
gtatgtttagtagacctgttagctg

SEQ ID NO: 4627299 - DNA, 25 bp, Homo sapien
tgcttgtgatgtgatcacttcccat

SEQ ID NO: 4627300 - DNA, 25 bp, Homo sapien
ggctcagacagaaatcgtggtggta

SEQ ID NO: 4627301 - DNA, 25 bp, Homo sapien
ccccgtcagcaacctgcttgtgatg

SEQ ID NO: 4627302 - DNA, 25 bp, Homo sapien
tctgtaaggcttcctcacccgctcc

SEQ ID NO: 4627303 - DNA, 25 bp, Homo sapien
aaaaaagcccaggagggagcctgat

SEQ ID NO: 4627304 - DNA, 25 bp, Homo sapien
aaaaagcccaggagggagcctgata

SEQ ID NO: 4627305 - DNA, 25 bp, Homo sapien
cctgactccgtggactggatctcca

SEQ ID NO: 4627306 - DNA, 25 bp, Homo sapien
ggagacacagggtcacatagcagag

SEQ ID NO: 4627307 - DNA, 25 bp, Homo sapien
gagacacagggtcacatagcagagg

SEQ ID NO: 4627308 - DNA, 25 bp, Homo sapien
tcagttaggtctcctctctgaatat

SEQ ID NO: 4627309 - DNA, 25 bp, Homo sapien
ccttttcaacccttgagtaatagat

SEQ ID NO: 4627310 - DNA, 25 bp, Homo sapien
cccttgagtaatagatcagtctcag

SEQ ID NO: 4627311 - DNA, 25 bp, Homo sapien
cgtagccttcagttaggtctcctct

SEQ ID NO: 4627312 - DNA, 25 bp, Homo sapien
aaagagctacccagccgagaagcct

SEQ ID NO: 4627313 - DNA, 25 bp, Homo sapien
tgtgtgactttggcatgaaaacagc

SEQ ID NO: 4627314 - DNA, 25 bp, Homo sapien
gaccaaatatcctggagtctgtgtg

SEQ ID NO: 4627315 - DNA, 25 bp, Homo sapien
ttattctgattctgctgataccaac

SEQ ID NO: 4627316 - DNA, 25 bp, Homo sapien
gctgataccaacaaacaaaagtatg

SEQ ID NO: 4627317 - DNA, 25 bp, Homo sapien
atgagaatcgcttcttgtgcatctc

SEQ ID NO: 4627318 - DNA, 25 bp, Homo sapien
cattgagatgagaatcgcttcttgt

SEQ ID NO: 4627319 - DNA, 25 bp, Homo sapien
tgagatgagaatcgcttcttgtgca

SEQ ID NO: 4627320 - DNA, 25 bp, Homo sapien
agatgagaatcgcttcttgtgcatc

SEQ ID NO: 4627321 - DNA, 25 bp, Homo sapien
ctgtggcttaagctggctccagtta

SEQ ID NO: 4627322 - DNA, 25 bp, Homo sapien
cactgtggcttaagctggctccagt

SEQ ID NO: 4627323 - DNA, 25 bp, Homo sapien
actgtggcttaagctggctccagtt

SEQ ID NO: 4627324 - DNA, 25 bp, Homo sapien
ctgttcccaggagacaaaaggccac

SEQ ID NO: 4627325 - DNA, 25 bp, Homo sapien
caaaaggccacacagaagaggagca

SEQ ID NO: 4627326 - DNA, 25 bp, Homo sapien
gagacaaaaggccacacagaagagg

SEQ ID NO: 4627327 - DNA, 25 bp, Homo sapien
gacaaaaggccacacagaagaggag

SEQ ID NO: 4627328 - DNA, 25 bp, Homo sapien
ctgcaatctctatggataggcttaa

SEQ ID NO: 4627329 - DNA, 25 bp, Homo sapien
taaatgtcttcaagctgcaatctct

SEQ ID NO: 4627330 - DNA, 25 bp, Homo sapien
gtcttcaagctgcaatctctatgga

SEQ ID NO: 4627331 - DNA, 25 bp, Homo sapien
tctctatggataggcttaatccaga

SEQ ID NO: 4627332 - DNA, 25 bp, Homo sapien
ctgtctttgtgatcctattccttgg

SEQ ID NO: 4627333 - DNA, 25 bp, Homo sapien
tgtctttgtgatcctattccttggg

SEQ ID NO: 4627334 - DNA, 25 bp, Homo sapien
tatattttgacatcaaaggagcaat

SEQ ID NO: 4627335 - DNA, 25 bp, Homo sapien
cagagatctctcttttgtttatata

SEQ ID NO: 4627336 - DNA, 25 bp, Homo sapien
gacatcaaaggagcaatagatcaac

SEQ ID NO: 4627337 - DNA, 25 bp, Homo sapien
tttgacatcaaaggagcaatagatc

SEQ ID NO: 4627338 - DNA, 25 bp, Homo sapien
tttacggggctgtataagcccatct

SEQ ID NO: 4627339 - DNA, 25 bp, Homo sapien
tacggggctgtataagcccatctag

SEQ ID NO: 4627340 - DNA, 25 bp, Homo sapien
tgtttacggggctgtataagcccat

SEQ ID NO: 4627341 - DNA, 25 bp, Homo sapien
cggggctgtataagcccatctagac

SEQ ID NO: 4627342 - DNA, 25 bp, Homo sapien
tggtcaaattatggtgaaatcttcc

SEQ ID NO: 4627343 - DNA, 25 bp, Homo sapien
gtcaaattatggtgaaatcttccgg

SEQ ID NO: 4627344 - DNA, 25 bp, Homo sapien
caaattatggtgaaatcttccgggt

SEQ ID NO: 4627345 - DNA, 25 bp, Homo sapien
tcaaggtggtcaaattatggtgaaa

SEQ ID NO: 4627346 - DNA, 25 bp, Homo sapien
cagcagctacaccattaggatgtcc

SEQ ID NO: 4627347 - DNA, 25 bp, Homo sapien
tacagaggatgtctcccagtagtgg

SEQ ID NO: 4627348 - DNA, 25 bp, Homo sapien
caggatgggctcttgataaagtcat

SEQ ID NO: 4627349 - DNA, 25 bp, Homo sapien
gcaggatgggctcttgataaagtca

SEQ ID NO: 4627350 - DNA, 25 bp, Homo sapien
cacagttggggctacagaggatgtc

SEQ ID NO: 4627351 - DNA, 25 bp, Homo sapien
ggccacttggcggaggaacctgata

SEQ ID NO: 4627352 - DNA, 25 bp, Homo sapien
cacttggcggaggaacctgatagtc

SEQ ID NO: 4627353 - DNA, 25 bp, Homo sapien
aaaggccacttggcggaggaacctg

SEQ ID NO: 4627354 - DNA, 25 bp, Homo sapien
cttggcggaggaacctgatagtcat

SEQ ID NO: 4627355 - DNA, 25 bp, Homo sapien
tgcccctataacacggtgtcttggg

SEQ ID NO: 4627356 - DNA, 25 bp, Homo sapien
gaaaacgctctatccttattctgga

SEQ ID NO: 4627357 - DNA, 25 bp, Homo sapien
tggaattaacccataggaatggtgg

SEQ ID NO: 4627358 - DNA, 25 bp, Homo sapien
tctttcctgcccctataacacggtg

SEQ ID NO: 4627359 - DNA, 25 bp, Homo sapien
gagccagagatagtctttagtccag

SEQ ID NO: 4627360 - DNA, 25 bp, Homo sapien
tgtgcaagctcaattgaacagcaag

SEQ ID NO: 4627361 - DNA, 25 bp, Homo sapien
gactttcttcagctagccataaggc

SEQ ID NO: 4627362 - DNA, 25 bp, Homo sapien
ctgtgcagaaagttaaaggatcctt

SEQ ID NO: 4627363 - DNA, 25 bp, Homo sapien
gaggaactgaagtcatcaggtgcag

SEQ ID NO: 4627364 - DNA, 25 bp, Homo sapien
gagaggaactgaagtcatcaggtgc

SEQ ID NO: 4627365 - DNA, 25 bp, Homo sapien
tagagaggaactgaagtcatcaggt

SEQ ID NO: 4627366 - DNA, 25 bp, Homo sapien
catagagaggaactgaagtcatcag

SEQ ID NO: 4627367 - DNA, 25 bp, Homo sapien
tcaatcatatacctgctgtgaatgc

SEQ ID NO: 4627368 - DNA, 25 bp, Homo sapien
atcatatacctgctgtgaatgcttc

SEQ ID NO: 4627369 - DNA, 25 bp, Homo sapien
ctgcctgcaagcttcttttttctca

SEQ ID NO: 4627370 - DNA, 25 bp, Homo sapien
tgaatgcttcatgtgctgcctgcaa

SEQ ID NO: 4627371 - DNA, 25 bp, Homo sapien
cattacaagatacacaatctttgtg

SEQ ID NO: 4627372 - DNA, 25 bp, Homo sapien
ggattcaaagcataaaaaccattac

SEQ ID NO: 4627373 - DNA, 25 bp, Homo sapien
gaacaatattgatgatgtagtaagg

SEQ ID NO: 4627374 - DNA, 25 bp, Homo sapien
ttgtgctgaaagacattatgacacc

SEQ ID NO: 4627375 - DNA, 25 bp, Homo sapien
aacaaaaggagatatcaagaggatg

SEQ ID NO: 4627376 - DNA, 25 bp, Homo sapien
gacaggacagccatcatcaaagaga

SEQ ID NO: 4627377 - DNA, 25 bp, Homo sapien
aaaggagatatcaagaggatggatt

SEQ ID NO: 4627378 - DNA, 25 bp, Homo sapien
gagatcgttagcagaaacaaaagga

SEQ ID NO: 4627379 - DNA, 25 bp, Homo sapien
agctaccgccaagtccagagccatt

SEQ ID NO: 4627380 - DNA, 25 bp, Homo sapien
gctaccgccaagtccagagccattt

SEQ ID NO: 4627381 - DNA, 25 bp, Homo sapien
gggcatcagctaccgccaagtccag

SEQ ID NO: 4627382 - DNA, 25 bp, Homo sapien
gagcgaggggcatcagctaccgcca

SEQ ID NO: 4627383 - DNA, 25 bp, Homo sapien
cggaggattattcgtcttctcccca

SEQ ID NO: 4627384 - DNA, 25 bp, Homo sapien
gaggcagccgttcggaggattattc

SEQ ID NO: 4627385 - DNA, 25 bp, Homo sapien
cagccgttcggaggattattcgtct

SEQ ID NO: 4627386 - DNA, 25 bp, Homo sapien
ccgttcggaggattattcgtcttct

SEQ ID NO: 4627387 - DNA, 25 bp, Homo sapien
cttctactgcctccaacacggcggc

SEQ ID NO: 4627388 - DNA, 25 bp, Homo sapien
ggagggggtctgagtcgcctgtcac

SEQ ID NO: 4627389 - DNA, 25 bp, Homo sapien
ggaacgccggagagttggtctctcc

SEQ ID NO: 4627390 - DNA, 25 bp, Homo sapien
gagttggtctctccccttctactgc

SEQ ID NO: 4627391 - DNA, 25 bp, Homo sapien
ggtagcaaagtaacaatgtctgttt

SEQ ID NO: 4627392 - DNA, 25 bp, Homo sapien
ttttattcaaccttgcactggagat

SEQ ID NO: 4627393 - DNA, 25 bp, Homo sapien
tatcagacagtacagtcagataaga

SEQ ID NO: 4627394 - DNA, 25 bp, Homo sapien
gcactggagatatcagacagtacag

SEQ ID NO: 4627395 - DNA, 25 bp, Homo sapien
atccaatgtttgagagcaggaagca

SEQ ID NO: 4627396 - DNA, 25 bp, Homo sapien
aatccaatgtttgagagcaggaagc

SEQ ID NO: 4627397 - DNA, 25 bp, Homo sapien
gaatccaatgtttgagagcaggaag

SEQ ID NO: 4627398 - DNA, 25 bp, Homo sapien
caaggtaaagtcccacaataggtct

SEQ ID NO: 4627399 - DNA, 25 bp, Homo sapien
aaagtcccacaataggtcttctgca

SEQ ID NO: 4627400 - DNA, 25 bp, Homo sapien
tgtggccgaaggtccaagagcccct

SEQ ID NO: 4627401 - DNA, 25 bp, Homo sapien
caaaacatcaaaagtagggaagttg

SEQ ID NO: 4627402 - DNA, 25 bp, Homo sapien
atctagaactggaattgctagatta

SEQ ID NO: 4627403 - DNA, 25 bp, Homo sapien
tatctagaactggaattgctagatt

SEQ ID NO: 4627404 - DNA, 25 bp, Homo sapien
tctagaactggaattgctagattat

SEQ ID NO: 4627405 - DNA, 25 bp, Homo sapien
tggtatacaatgtgatattgtgaca

SEQ ID NO: 4627406 - DNA, 25 bp, Homo sapien
gcttagttgaaagctatctcattac

SEQ ID NO: 4627407 - DNA, 25 bp, Homo sapien
tatgcaaacacttgtttaatgcaca

SEQ ID NO: 4627408 - DNA, 25 bp, Homo sapien
cacgctgcataatagatctcttgaa

SEQ ID NO: 4627409 - DNA, 25 bp, Homo sapien
gaaaaacgtgtgcttccacaattga

SEQ ID NO: 4627410 - DNA, 25 bp, Homo sapien
gatatacaataaggtataggaggag

SEQ ID NO: 4627411 - DNA, 25 bp, Homo sapien
tggaatggccaaatatagatataca

SEQ ID NO: 4627412 - DNA, 25 bp, Homo sapien
aaacagacatgtctagggaggggca

SEQ ID NO: 4627413 - DNA, 25 bp, Homo sapien
ttaggagacaaatgatcacacagca

SEQ ID NO: 4627414 - DNA, 25 bp, Homo sapien
cttaggagacaaatgatcacacagc

SEQ ID NO: 4627415 - DNA, 25 bp, Homo sapien
taggagacaaatgatcacacagcag

SEQ ID NO: 4627416 - DNA, 25 bp, Homo sapien
cctttcctgtcccaatgattctgtg

SEQ ID NO: 4627417 - DNA, 25 bp, Homo sapien
tgtgtaactacagcatccttgaggc

SEQ ID NO: 4627418 - DNA, 25 bp, Homo sapien
tttcctgtcccaatgattctgtgtc

SEQ ID NO: 4627419 - DNA, 25 bp, Homo sapien
ttgggaattgtgtaactacagcatc

SEQ ID NO: 4627420 - DNA, 25 bp, Homo sapien
aaccagcttaggcacttttctcatg

SEQ ID NO: 4627421 - DNA, 25 bp, Homo sapien
acaaccaactgtgtggaccccttct

SEQ ID NO: 4627422 - DNA, 25 bp, Homo sapien
tgactcataaaagggtagggaacca

SEQ ID NO: 4627423 - DNA, 25 bp, Homo sapien
cctatagtctagtgggatattgaca

SEQ ID NO: 4627424 - DNA, 25 bp, Homo sapien
ggtcgagcctagttttctacgcact

SEQ ID NO: 4627425 - DNA, 25 bp, Homo sapien
tctacgcactggaatttcaaaggat

SEQ ID NO: 4627426 - DNA, 25 bp, Homo sapien
ccagtgttcttccagtaagagcaaa

SEQ ID NO: 4627427 - DNA, 25 bp, Homo sapien
gctgataataaagtcgcagtaggtg

SEQ ID NO: 4627428 - DNA, 25 bp, Homo sapien
tccccatcacagagtaatgaatagc

SEQ ID NO: 4627429 - DNA, 25 bp, Homo sapien
taaatgactccgtcaagtcaggaac

SEQ ID NO: 4627430 - DNA, 25 bp, Homo sapien
gaatagcaactacctcatggaaaga

SEQ ID NO: 4627431 - DNA, 25 bp, Homo sapien
aactcagaggaaatgcagcttggga

SEQ ID NO: 4627432 - DNA, 25 bp, Homo sapien
tctcaagttgtttagtacctggccc

SEQ ID NO: 4627433 - DNA, 25 bp, Homo sapien
taggaatgagttaaccctgagaggg

SEQ ID NO: 4627434 - DNA, 25 bp, Homo sapien
gatatgaaaggcatgctctagggaa

SEQ ID NO: 4627435 - DNA, 25 bp, Homo sapien
tgaggcagggtacacaggctaaata

SEQ ID NO: 4627436 - DNA, 25 bp, Homo sapien
tgaccacatggattttgtaggccca

SEQ ID NO: 4627437 - DNA, 25 bp, Homo sapien
taacggaaaggcatgtcatttgacc

SEQ ID NO: 4627438 - DNA, 25 bp, Homo sapien
taggcccatgggaagatcactatac

SEQ ID NO: 4627439 - DNA, 25 bp, Homo sapien
gaataaatttgcaggtgtgccgtgt

SEQ ID NO: 4627440 - DNA, 25 bp, Homo sapien
tacctaccagtagcccttagacaga

SEQ ID NO: 4627441 - DNA, 25 bp, Homo sapien
tgagcccacctgcataagtcaggat

SEQ ID NO: 4627442 - DNA, 25 bp, Homo sapien
ggtggcaacagcaggtaaagttctc

SEQ ID NO: 4627443 - DNA, 25 bp, Homo sapien
tctgaggtttaggacatagacagct

SEQ ID NO: 4627444 - DNA, 25 bp, Homo sapien
taacttcctgatgtcacggcattgg

SEQ ID NO: 4627445 - DNA, 25 bp, Homo sapien
tgcctatttttacggttatatcctg

SEQ ID NO: 4627446 - DNA, 25 bp, Homo sapien
cacggcattggtaaactgtcacagc

SEQ ID NO: 4627447 - DNA, 25 bp, Homo sapien
ttacggttatatcctgtttatatgc

SEQ ID NO: 4627448 - DNA, 25 bp, Homo sapien
aagtgcagataaaggctgactccag

SEQ ID NO: 4627449 - DNA, 25 bp, Homo sapien
catgttataatgttgactcttacca

SEQ ID NO: 4627450 - DNA, 25 bp, Homo sapien
agaagtgcagataaaggctgactcc

SEQ ID NO: 4627451 - DNA, 25 bp, Homo sapien
tgactcttaccaaggtttttcacca

SEQ ID NO: 4627452 - DNA, 25 bp, Homo sapien
gacatgaggtggttagccaattcca

SEQ ID NO: 4627453 - DNA, 25 bp, Homo sapien
ctactggaaccaagctgacatgagg

SEQ ID NO: 4627454 - DNA, 25 bp, Homo sapien
caggatgaagttgctctagttcaca

SEQ ID NO: 4627455 - DNA, 25 bp, Homo sapien
gtagcaaacaaagatcaccggttgg

SEQ ID NO: 4627456 - DNA, 25 bp, Homo sapien
gctactaagtgccagaaactgtctg

SEQ ID NO: 4627457 - DNA, 25 bp, Homo sapien
gaaaactgagggcttagagggctta

SEQ ID NO: 4627458 - DNA, 25 bp, Homo sapien
tgaagagggtagcatagctcagtcc

SEQ ID NO: 4627459 - DNA, 25 bp, Homo sapien
tgagttgccacgaataaagaggtta

SEQ ID NO: 4627460 - DNA, 25 bp, Homo sapien
aggacggtgattttcccatgtgctt

SEQ ID NO: 4627461 - DNA, 25 bp, Homo sapien
caggacggtgattttcccatgtgct

SEQ ID NO: 4627462 - DNA, 25 bp, Homo sapien
atgtgctttctgagaatacccaccc

SEQ ID NO: 4627463 - DNA, 25 bp, Homo sapien
catgtgctttctgagaatacccacc

SEQ ID NO: 4627464 - DNA, 25 bp, Homo sapien
gtcacagatgccattgagccaaatc

SEQ ID NO: 4627465 - DNA, 25 bp, Homo sapien
ctagtagggtgagggtatggatagg

SEQ ID NO: 4627466 - DNA, 25 bp, Homo sapien
gcccagcccatccaatctccaggga

SEQ ID NO: 4627467 - DNA, 25 bp, Homo sapien
tctaggttgcaatggggcagatgaa

SEQ ID NO: 4627468 - DNA, 25 bp, Homo sapien
gttttcaacaagtgcatgcataatt

SEQ ID NO: 4627469 - DNA, 25 bp, Homo sapien
gagcctagatttactttgctagggc

SEQ ID NO: 4627470 - DNA, 25 bp, Homo sapien
tttactttgctagggctgttttcaa

SEQ ID NO: 4627471 - DNA, 25 bp, Homo sapien
ttaatcatggcctaaggagcctaga

SEQ ID NO: 4627472 - DNA, 25 bp, Homo sapien
cacaattcaggagctcagtagacac

SEQ ID NO: 4627473 - DNA, 25 bp, Homo sapien
gatactctaaatagcagtgctgtcc

SEQ ID NO: 4627474 - DNA, 25 bp, Homo sapien
cagtagacacgaactagtggcttgc

SEQ ID NO: 4627475 - DNA, 25 bp, Homo sapien
ccaagaggctagctgaagttacata

SEQ ID NO: 4627476 - DNA, 25 bp, Homo sapien
gtgaatgaatctgcctgatgactgg

SEQ ID NO: 4627477 - DNA, 25 bp, Homo sapien
gaatgaatctgcctgatgactggac

SEQ ID NO: 4627478 - DNA, 25 bp, Homo sapien
ctagatgtgaatgaatctgcctgat

SEQ ID NO: 4627479 - DNA, 25 bp, Homo sapien
gatgtgaatgaatctgcctgatgac

SEQ ID NO: 4627480 - DNA, 25 bp, Homo sapien
gtaggcactcgcgagataattttct

SEQ ID NO: 4627481 - DNA, 25 bp, Homo sapien
gaaggtaggcactcgcgagataatt

SEQ ID NO: 4627482 - DNA, 25 bp, Homo sapien
cactcgcgagataattttcttttgg

SEQ ID NO: 4627483 - DNA, 25 bp, Homo sapien
ctggaaggtaggcactcgcgagata

SEQ ID NO: 4627484 - DNA, 25 bp, Homo sapien
tcctgcgacaccctcaccagtgctg

SEQ ID NO: 4627485 - DNA, 25 bp, Homo sapien
ctgcgacaccctcaccagtgctgag

SEQ ID NO: 4627486 - DNA, 25 bp, Homo sapien
cctgcgacaccctcaccagtgctga

SEQ ID NO: 4627487 - DNA, 25 bp, Homo sapien
tgcgacaccctcaccagtgctgagg

SEQ ID NO: 4627488 - DNA, 25 bp, Homo sapien
cgtggataggctgctggaccaagct

SEQ ID NO: 4627489 - DNA, 25 bp, Homo sapien
tttccacacgagtgtaacggcggcc

SEQ ID NO: 4627490 - DNA, 25 bp, Homo sapien
aagcgtggctaccagattcgcggcc

SEQ ID NO: 4627491 - DNA, 25 bp, Homo sapien
tagccagggctctcacgtggatagg

SEQ ID NO: 4627492 - DNA, 25 bp, Homo sapien
ctaggatggatccagcctcggttta

SEQ ID NO: 4627493 - DNA, 25 bp, Homo sapien
ttgaatccctaggatggatccagcc

SEQ ID NO: 4627494 - DNA, 25 bp, Homo sapien
cagagcctggctgttttgaggagca

SEQ ID NO: 4627495 - DNA, 25 bp, Homo sapien
cctcggtttaagtgcagattcctgc

SEQ ID NO: 4627496 - DNA, 25 bp, Homo sapien
ctcttttctgttttcgcttgacaac

SEQ ID NO: 4627497 - DNA, 25 bp, Homo sapien
ggtagatgtgttctcagcatagatg

SEQ ID NO: 4627498 - DNA, 25 bp, Homo sapien
cagaggagttgggtagatgtgttct

SEQ ID NO: 4627499 - DNA, 25 bp, Homo sapien
tctgttttcgcttgacaacacaggc

SEQ ID NO: 4627500 - DNA, 25 bp, Homo sapien
aaggacagctgttgggaatctacgg

SEQ ID NO: 4627501 - DNA, 25 bp, Homo sapien
tggtatgctgacatattgtttcaag

SEQ ID NO: 4627502 - DNA, 25 bp, Homo sapien
taaagggcactaatggtatgctgac

SEQ ID NO: 4627503 - DNA, 25 bp, Homo sapien
tagattgattagtgctggaggaaga

SEQ ID NO: 4627504 - DNA, 25 bp, Homo sapien
cttggtgacgtgtagagatccagga

SEQ ID NO: 4627505 - DNA, 25 bp, Homo sapien
ttggaacactggcttagcttggtga

SEQ ID NO: 4627506 - DNA, 25 bp, Homo sapien
cattgttcaggagactattttggaa

SEQ ID NO: 4627507 - DNA, 25 bp, Homo sapien
caaaataactgtgcagttgtcatca

SEQ ID NO: 4627508 - DNA, 25 bp, Homo sapien
acttttaggcctacatgtacttagc

SEQ ID NO: 4627509 - DNA, 25 bp, Homo sapien
aaggcagagacttttaggcctacat

SEQ ID NO: 4627510 - DNA, 25 bp, Homo sapien
gacttttaggcctacatgtacttag

SEQ ID NO: 4627511 - DNA, 25 bp, Homo sapien
cagagacttttaggcctacatgtac

SEQ ID NO: 4627512 - DNA, 25 bp, Homo sapien
ttccagaatggctgactaaaactag

SEQ ID NO: 4627513 - DNA, 25 bp, Homo sapien
cttccagaatggctgactaaaacta

SEQ ID NO: 4627514 - DNA, 25 bp, Homo sapien
tccagaatggctgactaaaactaga

SEQ ID NO: 4627515 - DNA, 25 bp, Homo sapien
gcttccagaatggctgactaaaact

SEQ ID NO: 4627516 - DNA, 25 bp, Homo sapien
cctgaagcaattggcttgataaaac

SEQ ID NO: 4627517 - DNA, 25 bp, Homo sapien
cagtggaatagcattttgaagtctc

SEQ ID NO: 4627518 - DNA, 25 bp, Homo sapien
tcagttatgacatcagctaggtggc

SEQ ID NO: 4627519 - DNA, 25 bp, Homo sapien
tgtatatgctatgaatcagtgtcca

SEQ ID NO: 4627520 - DNA, 25 bp, Homo sapien
ggcatctgtcgtcaggtccgcacat

SEQ ID NO: 4627521 - DNA, 25 bp, Homo sapien
gccagaccctttccacacttgaccg

SEQ ID NO: 4627522 - DNA, 25 bp, Homo sapien
ctcgccaagtgcgtccacccagaag

SEQ ID NO: 4627523 - DNA, 25 bp, Homo sapien
ccagcgtgcggggcatctgtcgtca

SEQ ID NO: 4627524 - DNA, 25 bp, Homo sapien
gggggcggtgggagtagtgtgcgca

SEQ ID NO: 4627525 - DNA, 25 bp, Homo sapien
cactcgggggcggtgggagtagtgt

SEQ ID NO: 4627526 - DNA, 25 bp, Homo sapien
aggcactcgggggcggtgggagtag

SEQ ID NO: 4627527 - DNA, 25 bp, Homo sapien
ctcgggggcggtgggagtagtgtgc

SEQ ID NO: 4627528 - DNA, 25 bp, Homo sapien
aagattggacttgacaatctttaag

SEQ ID NO: 4627529 - DNA, 25 bp, Homo sapien
tggaacaaagatggacatgaaatat

SEQ ID NO: 4627530 - DNA, 25 bp, Homo sapien
taaggttatacccagctctaagata

SEQ ID NO: 4627531 - DNA, 25 bp, Homo sapien
tagattctgacagttcaagtcagaa

SEQ ID NO: 4627532 - DNA, 25 bp, Homo sapien
aagatagtctgagccccgatgtctc

SEQ ID NO: 4627533 - DNA, 25 bp, Homo sapien
gaagatagtctgagccccgatgtct

SEQ ID NO: 4627534 - DNA, 25 bp, Homo sapien
gaacagcacggtcagaaggagtaag

SEQ ID NO: 4627535 - DNA, 25 bp, Homo sapien
gaaagtcctccattgctcacaggtg

SEQ ID NO: 4627536 - DNA, 25 bp, Homo sapien
gaagcttgttctggcacgatttcac

SEQ ID NO: 4627537 - DNA, 25 bp, Homo sapien
cattctgaatctgtccttgccggca

SEQ ID NO: 4627538 - DNA, 25 bp, Homo sapien
attttcatctaagttgattcaaaga

SEQ ID NO: 4627539 - DNA, 25 bp, Homo sapien
catctaagttgattcaaagaactga

SEQ ID NO: 4627540 - DNA, 25 bp, Homo sapien
tttcatctaagttgattcaaagaac

SEQ ID NO: 4627541 - DNA, 25 bp, Homo sapien
ctaagttgattcaaagaactgatct

SEQ ID NO: 4627542 - DNA, 25 bp, Homo sapien
gaatgttaggtttgggcggctgatg

SEQ ID NO: 4627543 - DNA, 25 bp, Homo sapien
acgttgacagatatccctgcttggc

SEQ ID NO: 4627544 - DNA, 25 bp, Homo sapien
taccagaacatcatggtgacttggc

SEQ ID NO: 4627545 - DNA, 25 bp, Homo sapien
gatgggaaacttgtcaatgacaaat

SEQ ID NO: 4627546 - DNA, 25 bp, Homo sapien
aagggagctgaggttcttgcttaga

SEQ ID NO: 4627547 - DNA, 25 bp, Homo sapien
tagatctttgatctgtgccctgcac

SEQ ID NO: 4627548 - DNA, 25 bp, Homo sapien
ttgacagggccctcaggttcatgtg

SEQ ID NO: 4627549 - DNA, 25 bp, Homo sapien
gagctgaggttcttgcttagatctt

SEQ ID NO: 4627550 - DNA, 25 bp, Homo sapien
ccaagagctgtggtttcctcttctg

SEQ ID NO: 4627551 - DNA, 25 bp, Homo sapien
agaagcagctgtgtctacccaagag

SEQ ID NO: 4627552 - DNA, 25 bp, Homo sapien
gaagcagctgtgtctacccaagagc

SEQ ID NO: 4627553 - DNA, 25 bp, Homo sapien
ctacccaagagctgtggtttcctct

SEQ ID NO: 4627554 - DNA, 25 bp, Homo sapien
cataatccaaggcttcactgtaggt

SEQ ID NO: 4627555 - DNA, 25 bp, Homo sapien
aatccaaggcttcactgtaggtaaa

SEQ ID NO: 4627556 - DNA, 25 bp, Homo sapien
aggaaggtgcttcataatccaaggc

SEQ ID NO: 4627557 - DNA, 25 bp, Homo sapien
ttaaagaggcaattttgtaatatag

SEQ ID NO: 4627558 - DNA, 25 bp, Homo sapien
ttctctgtagaacccatatcatctg

SEQ ID NO: 4627559 - DNA, 25 bp, Homo sapien
tatcctccccgcaactaaaacataa

SEQ ID NO: 4627560 - DNA, 25 bp, Homo sapien
ggcaccagcacaattccaattgaga

SEQ ID NO: 4627561 - DNA, 25 bp, Homo sapien
ctcaaatgcctttgtagagttttcc

SEQ ID NO: 4627562 - DNA, 25 bp, Homo sapien
tattcttcaggcttccatgtatggg

SEQ ID NO: 4627563 - DNA, 25 bp, Homo sapien
caggacagagtgcaggagaaacacc

SEQ ID NO: 4627564 - DNA, 25 bp, Homo sapien
ttggtgataaatccagtcaactggg

SEQ ID NO: 4627565 - DNA, 25 bp, Homo sapien
tgagtccaggctcccttagacagga

SEQ ID NO: 4627566 - DNA, 25 bp, Homo sapien
ggattttctgtatctagagcttgaa

SEQ ID NO: 4627567 - DNA, 25 bp, Homo sapien
ctgtctgaaaggaacacccaagaat

SEQ ID NO: 4627568 - DNA, 25 bp, Homo sapien
gaggattttctgtatctagagcttg

SEQ ID NO: 4627569 - DNA, 25 bp, Homo sapien
atgaggattttctgtatctagagct

SEQ ID NO: 4627570 - DNA, 25 bp, Homo sapien
atggagatcattgtgaactgtggga

SEQ ID NO: 4627571 - DNA, 25 bp, Homo sapien
ctgtgggaattgctgcaggtgacat

SEQ ID NO: 4627572 - DNA, 25 bp, Homo sapien
ccatggagatcattgtgaactgtgg

SEQ ID NO: 4627573 - DNA, 25 bp, Homo sapien
gcagcctcacggttgtcctggcaac

SEQ ID NO: 4627574 - DNA, 25 bp, Homo sapien
tttatgcagcctcacggttgtcctg

SEQ ID NO: 4627575 - DNA, 25 bp, Homo sapien
tgcagcctcacggttgtcctggcaa

SEQ ID NO: 4627576 - DNA, 25 bp, Homo sapien
tatgcagcctcacggttgtcctggc

SEQ ID NO: 4627577 - DNA, 25 bp, Homo sapien
gaggatggaaaaccaatggcgcact

SEQ ID NO: 4627578 - DNA, 25 bp, Homo sapien
tctggaggatggaaaaccaatggcg

SEQ ID NO: 4627579 - DNA, 25 bp, Homo sapien
tggaaaaccaatggcgcactcctcc

SEQ ID NO: 4627580 - DNA, 25 bp, Homo sapien
gatggaaaaccaatggcgcactcct

SEQ ID NO: 4627581 - DNA, 25 bp, Homo sapien
ctctgtgggtttgtgattcacaggt

SEQ ID NO: 4627582 - DNA, 25 bp, Homo sapien
ctgtgggtttgtgattcacaggtga

SEQ ID NO: 4627583 - DNA, 25 bp, Homo sapien
tctgtgggtttgtgattcacaggtg

SEQ ID NO: 4627584 - DNA, 25 bp, Homo sapien
tgtgggtttgtgattcacaggtgat

SEQ ID NO: 4627585 - DNA, 25 bp, Homo sapien
tcccacaaaggcaaggatcaggaat

SEQ ID NO: 4627586 - DNA, 25 bp, Homo sapien
cacaaaggcaaggatcaggaatgga

SEQ ID NO: 4627587 - DNA, 25 bp, Homo sapien
cccacaaaggcaaggatcaggaatg

SEQ ID NO: 4627588 - DNA, 25 bp, Homo sapien
gctcccacaaaggcaaggatcagga

SEQ ID NO: 4627589 - DNA, 25 bp, Homo sapien
gaagagcaattcttaactttggcgg

SEQ ID NO: 4627590 - DNA, 25 bp, Homo sapien
tagaacttctagagttgaatctctg

SEQ ID NO: 4627591 - DNA, 25 bp, Homo sapien
ggcatgcctggaaacgttaaaaatc

SEQ ID NO: 4627592 - DNA, 25 bp, Homo sapien
tcaggatactttggctaagctagga

SEQ ID NO: 4627593 - DNA, 25 bp, Homo sapien
tgtcatcatcgtcaaaggggacagc

SEQ ID NO: 4627594 - DNA, 25 bp, Homo sapien
cacctggtaggggagagaattctcc

SEQ ID NO: 4627595 - DNA, 25 bp, Homo sapien
gggagccagaattcagggacacctg

SEQ ID NO: 4627596 - DNA, 25 bp, Homo sapien
gagaattctcctcacaggtgtagcc

SEQ ID NO: 4627597 - DNA, 25 bp, Homo sapien
tgataccacccactgttcgctgatg

SEQ ID NO: 4627598 - DNA, 25 bp, Homo sapien
gtcttgtagcagtgagctgctgata

SEQ ID NO: 4627599 - DNA, 25 bp, Homo sapien
agctgctgataccacccactgttcg

SEQ ID NO: 4627600 - DNA, 25 bp, Homo sapien
tcttgtagcagtgagctgctgatac

SEQ ID NO: 4627601 - DNA, 25 bp, Homo sapien
gagaagtttgagttaattgccctgg

SEQ ID NO: 4627602 - DNA, 25 bp, Homo sapien
aatactcactggtattcacactgtc

SEQ ID NO: 4627603 - DNA, 25 bp, Homo sapien
gttaccagaggtagagtgttaaata

SEQ ID NO: 4627604 - DNA, 25 bp, Homo sapien
tcaaaaactctgtcttaggtcgctt

SEQ ID NO: 4627605 - DNA, 25 bp, Homo sapien
agggcaggcatggtgaagaccttct

SEQ ID NO: 4627606 - DNA, 25 bp, Homo sapien
caggcatggtgaagaccttctccca

SEQ ID NO: 4627607 - DNA, 25 bp, Homo sapien
gcatggtgaagaccttctcccacag

SEQ ID NO: 4627608 - DNA, 25 bp, Homo sapien
tggtgaagaccttctcccacagcct

SEQ ID NO: 4627609 - DNA, 25 bp, Homo sapien
agagtgtccctgttgtatttagggt

SEQ ID NO: 4627610 - DNA, 25 bp, Homo sapien
gagtgtccctgttgtatttagggtg

SEQ ID NO: 4627611 - DNA, 25 bp, Homo sapien
gtgtccctgttgtatttagggtggc

SEQ ID NO: 4627612 - DNA, 25 bp, Homo sapien
agtgtccctgttgtatttagggtgg

SEQ ID NO: 4627613 - DNA, 25 bp, Homo sapien
tgtgaggatcaggaagagatcaaag

SEQ ID NO: 4627614 - DNA, 25 bp, Homo sapien
ctgtgaggatcaggaagagatcaaa

SEQ ID NO: 4627615 - DNA, 25 bp, Homo sapien
cctgggtcagcaccggagcatccag

SEQ ID NO: 4627616 - DNA, 25 bp, Homo sapien
tcagcaccggagcatccaggcactt

SEQ ID NO: 4627617 - DNA, 25 bp, Homo sapien
gggtcagcaccggagcatccaggca

SEQ ID NO: 4627618 - DNA, 25 bp, Homo sapien
gcaccggagcatccaggcacttcag

SEQ ID NO: 4627619 - DNA, 25 bp, Homo sapien
gcaggaatccttgcctccctcaagg

SEQ ID NO: 4627620 - DNA, 25 bp, Homo sapien
ggaatccttgcctccctcaaggaag

SEQ ID NO: 4627621 - DNA, 25 bp, Homo sapien
tggcaggaatccttgcctccctcaa

SEQ ID NO: 4627622 - DNA, 25 bp, Homo sapien
tggtaatctttccagggtaggaggc

SEQ ID NO: 4627623 - DNA, 25 bp, Homo sapien
acatagttgtagaccttggtgtaga

SEQ ID NO: 4627624 - DNA, 25 bp, Homo sapien
caggagacaactccttggagctgtc

SEQ ID NO: 4627625 - DNA, 25 bp, Homo sapien
ccttggagctgtccgttgcagacca

SEQ ID NO: 4627626 - DNA, 25 bp, Homo sapien
gttgtagaccttggtgtagactcca

SEQ ID NO: 4627627 - DNA, 25 bp, Homo sapien
gctgttggcagcgatggtgtcctta

SEQ ID NO: 4627628 - DNA, 25 bp, Homo sapien
ttagctgttggcagcgatggtgtcc

SEQ ID NO: 4627629 - DNA, 25 bp, Homo sapien
tagctgttggcagcgatggtgtcct

SEQ ID NO: 4627630 - DNA, 25 bp, Homo sapien
tgttggcagcgatggtgtccttaat

SEQ ID NO: 4627631 - DNA, 25 bp, Homo sapien
ttggtatagagactgcagagggacc

SEQ ID NO: 4627632 - DNA, 25 bp, Homo sapien
cactttattggtatagagactgcag

SEQ ID NO: 4627633 - DNA, 25 bp, Homo sapien
ttattggtatagagactgcagaggg

SEQ ID NO: 4627634 - DNA, 25 bp, Homo sapien
ctttattggtatagagactgcagag

SEQ ID NO: 4627635 - DNA, 25 bp, Homo sapien
tacataaaaggcctggcccagaatg

SEQ ID NO: 4627636 - DNA, 25 bp, Homo sapien
tgttaagacaggttccccaagcttc

SEQ ID NO: 4627637 - DNA, 25 bp, Homo sapien
gacagcatggcctgtaccgtgcatt

SEQ ID NO: 4627638 - DNA, 25 bp, Homo sapien
ctctggagatcaccctgagcccttg

SEQ ID NO: 4627639 - DNA, 25 bp, Homo sapien
gctcgctcgccctctcgttctcttc

SEQ ID NO: 4627640 - DNA, 25 bp, Homo sapien
cccttctcctcacactcgggccggg

SEQ ID NO: 4627641 - DNA, 25 bp, Homo sapien
cggagggccggcgatggtgaaggga

SEQ ID NO: 4627642 - DNA, 25 bp, Homo sapien
gagttaggagaattcgctacgggtc

SEQ ID NO: 4627643 - DNA, 25 bp, Homo sapien
aagtagccgccttcgtagagggtgt

SEQ ID NO: 4627644 - DNA, 25 bp, Homo sapien
tcccagttgtagaggtcggactcgt

SEQ ID NO: 4627645 - DNA, 25 bp, Homo sapien
cgtccaccagggtgatccggaagcc

SEQ ID NO: 4627646 - DNA, 25 bp, Homo sapien
gatttcagctcgagcatcagggcct

SEQ ID NO: 4627647 - DNA, 25 bp, Homo sapien
tttgaaaagatagttccagccgggc

SEQ ID NO: 4627648 - DNA, 25 bp, Homo sapien
actctttctggctctagactcactg

SEQ ID NO: 4627649 - DNA, 25 bp, Homo sapien
ttccaaggaggttcagtactaaagc

SEQ ID NO: 4627650 - DNA, 25 bp, Homo sapien
gctacaatccttagcaggagttatt

SEQ ID NO: 4627651 - DNA, 25 bp, Homo sapien
ggtgcggaccatcacacccgctaat

SEQ ID NO: 4627652 - DNA, 25 bp, Homo sapien
ctagagagcagtgcctcgatatcag

SEQ ID NO: 4627653 - DNA, 25 bp, Homo sapien
aggtgcggaccatcacacccgctaa

SEQ ID NO: 4627654 - DNA, 25 bp, Homo sapien
gagcagtgcctcgatatcagttcac

SEQ ID NO: 4627655 - DNA, 25 bp, Homo sapien
caaataagcaaagcagatatctctt

SEQ ID NO: 4627656 - DNA, 25 bp, Homo sapien
tcaacaaggtagaaattattcaatg

SEQ ID NO: 4627657 - DNA, 25 bp, Homo sapien
tatgggacttatccctcaaattaaa

SEQ ID NO: 4627658 - DNA, 25 bp, Homo sapien
gtttgctactaaatgagccaatatg

SEQ ID NO: 4627659 - DNA, 25 bp, Homo sapien
gttcagtgaaacagagggaatgaag

SEQ ID NO: 4627660 - DNA, 25 bp, Homo sapien
gctagttcagtgaaacagagggaat

SEQ ID NO: 4627661 - DNA, 25 bp, Homo sapien
gggaatgaagaagaaactaagcaat

SEQ ID NO: 4627662 - DNA, 25 bp, Homo sapien
tagttcagtgaaacagagggaatga

SEQ ID NO: 4627663 - DNA, 25 bp, Homo sapien
tgatgctggttacacttcacagtga

SEQ ID NO: 4627664 - DNA, 25 bp, Homo sapien
taagtaatgctgaagctcttacaag

SEQ ID NO: 4627665 - DNA, 25 bp, Homo sapien
tacaagaaacgaccatatcagccgg

SEQ ID NO: 4627666 - DNA, 25 bp, Homo sapien
gctatgtcgtaaaatgtaactgaga

SEQ ID NO: 4627667 - DNA, 25 bp, Homo sapien
gaacccaatacagtaatgtcctcga

SEQ ID NO: 4627668 - DNA, 25 bp, Homo sapien
tacctgctaggcacacttcctcaag

SEQ ID NO: 4627669 - DNA, 25 bp, Homo sapien
tttaaaagtacctacagcaatgtga

SEQ ID NO: 4627670 - DNA, 25 bp, Homo sapien
taaagctacaggatttccaatctag

SEQ ID NO: 4627671 - DNA, 25 bp, Homo sapien
ttcattcaagctgctataccaaaag

SEQ ID NO: 4627672 - DNA, 25 bp, Homo sapien
caagctgctataccaaaagtcataa

SEQ ID NO: 4627673 - DNA, 25 bp, Homo sapien
ttagaaaacatacctacttagttca

SEQ ID NO: 4627674 - DNA, 25 bp, Homo sapien
tgtgaaagagacgttttctgctaat

SEQ ID NO: 4627675 - DNA, 25 bp, Homo sapien
ctgacaagatagatataatacagat

SEQ ID NO: 4627676 - DNA, 25 bp, Homo sapien
ggtattattagtattgctattctga

SEQ ID NO: 4627677 - DNA, 25 bp, Homo sapien
tattctcagcaatcacattggttat

SEQ ID NO: 4627678 - DNA, 25 bp, Homo sapien
tacgagaaaacaagcgagtaattaa

SEQ ID NO: 4627679 - DNA, 25 bp, Homo sapien
tttccagacaaatttgctatgaatg

SEQ ID NO: 4627680 - DNA, 25 bp, Homo sapien
ttgcaagcccaaggtgggcaaacca

SEQ ID NO: 4627681 - DNA, 25 bp, Homo sapien
ttttctacttgctgcattactacta

SEQ ID NO: 4627682 - DNA, 25 bp, Homo sapien
acttgctgcattactactaatgaag

SEQ ID NO: 4627683 - DNA, 25 bp, Homo sapien
cagaacacagtgttggagacacaca

SEQ ID NO: 4627684 - DNA, 25 bp, Homo sapien
tactatacgtaggttaatgaagaag

SEQ ID NO: 4627685 - DNA, 25 bp, Homo sapien
aaggacagaacacagtgttggagac

SEQ ID NO: 4627686 - DNA, 25 bp, Homo sapien
gacacacagaacatagtcaaaaatt

SEQ ID NO: 4627687 - DNA, 25 bp, Homo sapien
gaggcagttattatcaacaaacctg

SEQ ID NO: 4627688 - DNA, 25 bp, Homo sapien
tacaggcgtccatccatactcttga

SEQ ID NO: 4627689 - DNA, 25 bp, Homo sapien
cagagcagtgcacatattaatcact

SEQ ID NO: 4627690 - DNA, 25 bp, Homo sapien
aaggatatttccctactcagcacag

SEQ ID NO: 4627691 - DNA, 25 bp, Homo sapien
aacaactgcctgacaaatttctgtg

SEQ ID NO: 4627692 - DNA, 25 bp, Homo sapien
aaacaactgcctgacaaatttctgt

SEQ ID NO: 4627693 - DNA, 25 bp, Homo sapien
caaacaactgcctgacaaatttctg

SEQ ID NO: 4627694 - DNA, 25 bp, Homo sapien
tgtggctttatgctggaggtaacca

SEQ ID NO: 4627695 - DNA, 25 bp, Homo sapien
ctgaagtgtggctttatgctggagg

SEQ ID NO: 4627696 - DNA, 25 bp, Homo sapien
cataggaagtaaacaaaagactcac

SEQ ID NO: 4627697 - DNA, 25 bp, Homo sapien
ccataggaagtaaacaaaagactca

SEQ ID NO: 4627698 - DNA, 25 bp, Homo sapien
catacaactgtatcaaagatggaca

SEQ ID NO: 4627699 - DNA, 25 bp, Homo sapien
ggagtttcaaagtacaactgtgtcc

SEQ ID NO: 4627700 - DNA, 25 bp, Homo sapien
aacagagtagctgaaaaccccagga

SEQ ID NO: 4627701 - DNA, 25 bp, Homo sapien
aactgtgtccagtgttgttacatgg

SEQ ID NO: 4627702 - DNA, 25 bp, Homo sapien
gataataattccaaaacatacaaaa

SEQ ID NO: 4627703 - DNA, 25 bp, Homo sapien
aaaattagccatcagttttgcccca

SEQ ID NO: 4627704 - DNA, 25 bp, Homo sapien
tagaatgtccttaatataagtttaa

SEQ ID NO: 4627705 - DNA, 25 bp, Homo sapien
tcacgaaaaacactaaatctaccat

SEQ ID NO: 4627706 - DNA, 25 bp, Homo sapien
gtgtaggcattagcagtgctgccct

SEQ ID NO: 4627707 - DNA, 25 bp, Homo sapien
tgtgtaggcattagcagtgctgccc

SEQ ID NO: 4627708 - DNA, 25 bp, Homo sapien
aaatttgacctatatatcagctgtc

SEQ ID NO: 4627709 - DNA, 25 bp, Homo sapien
tttgacctatatatcagctgtctca

SEQ ID NO: 4627710 - DNA, 25 bp, Homo sapien
tgacctatatatcagctgtctcaag

SEQ ID NO: 4627711 - DNA, 25 bp, Homo sapien
acctatatatcagctgtctcaagaa

SEQ ID NO: 4627712 - DNA, 25 bp, Homo sapien
gtcgctcaggcagcagtgcagtggc

SEQ ID NO: 4627713 - DNA, 25 bp, Homo sapien
aattctcctgtctcacccacccaag

SEQ ID NO: 4627714 - DNA, 25 bp, Homo sapien
ctcccaggctcaagcaattctcctg

SEQ ID NO: 4627715 - DNA, 25 bp, Homo sapien
gatctctgctgactgcaacctccac

SEQ ID NO: 4627716 - DNA, 25 bp, Homo sapien
gggactgagtccttaacctatagaa

SEQ ID NO: 4627717 - DNA, 25 bp, Homo sapien
ggtatcagccactatcctcggcaca

SEQ ID NO: 4627718 - DNA, 25 bp, Homo sapien
gccataggcatccaaaatggaggca

SEQ ID NO: 4627719 - DNA, 25 bp, Homo sapien
cactaagttttgtacacgtgacacc

SEQ ID NO: 4627720 - DNA, 25 bp, Homo sapien
taaaaaccaaggaagctgacaggcc

SEQ ID NO: 4627721 - DNA, 25 bp, Homo sapien
cgccaaagccttactcccagagaat

SEQ ID NO: 4627722 - DNA, 25 bp, Homo sapien
tagaaaactccacttgcaaggctgt

SEQ ID NO: 4627723 - DNA, 25 bp, Homo sapien
tgtagagctatgcacatgcccagca

SEQ ID NO: 4627724 - DNA, 25 bp, Homo sapien
ctgaaggtaggtggtgaataggggt

SEQ ID NO: 4627725 - DNA, 25 bp, Homo sapien
ggtaggtggtgaataggggtagtca

SEQ ID NO: 4627726 - DNA, 25 bp, Homo sapien
tgaataggggtagtcaataggaaat

SEQ ID NO: 4627727 - DNA, 25 bp, Homo sapien
tggtgaataggggtagtcaatagga

SEQ ID NO: 4627728 - DNA, 25 bp, Homo sapien
cggatgaagaatcgaaatgcataca

SEQ ID NO: 4627729 - DNA, 25 bp, Homo sapien
tctgtgggtcatctacaggcggatg

SEQ ID NO: 4627730 - DNA, 25 bp, Homo sapien
tgagtaggattccacctttcagaag

SEQ ID NO: 4627731 - DNA, 25 bp, Homo sapien
ctcacattctgagtaggattccacc

SEQ ID NO: 4627732 - DNA, 25 bp, Homo sapien
caatagtcttgagtacacgtggtta

SEQ ID NO: 4627733 - DNA, 25 bp, Homo sapien
aaatatgtccattgaggtgctgaac

SEQ ID NO: 4627734 - DNA, 25 bp, Homo sapien
gcagataagactccaaaacaggatg

SEQ ID NO: 4627735 - DNA, 25 bp, Homo sapien
cctttagtgaacaccagttggctga

SEQ ID NO: 4627736 - DNA, 25 bp, Homo sapien
cgccataatcatgggcaagcatgca

SEQ ID NO: 4627737 - DNA, 25 bp, Homo sapien
tctggagccaaacctaaatcctgca

SEQ ID NO: 4627738 - DNA, 25 bp, Homo sapien
tagacccagcgtaatgtgatgacag

SEQ ID NO: 4627739 - DNA, 25 bp, Homo sapien
cactcttactgactctgggttctac

SEQ ID NO: 4627740 - DNA, 25 bp, Homo sapien
tccacaagaacacactggtgcacca

SEQ ID NO: 4627741 - DNA, 25 bp, Homo sapien
cacagcgaggcaataagataggtct

SEQ ID NO: 4627742 - DNA, 25 bp, Homo sapien
ccagactctcggttcctataaagaa

SEQ ID NO: 4627743 - DNA, 25 bp, Homo sapien
tctactccacgtctagaggaacaga

SEQ ID NO: 4627744 - DNA, 25 bp, Homo sapien
tcttgattagatggacacctgtgag

SEQ ID NO: 4627745 - DNA, 25 bp, Homo sapien
gacagcattggtctcctcaggcaga

SEQ ID NO: 4627746 - DNA, 25 bp, Homo sapien
tatgcatgtgacctaacctgggcca

SEQ ID NO: 4627747 - DNA, 25 bp, Homo sapien
ccaatcagaagcctggtgggaacta

SEQ ID NO: 4627748 - DNA, 25 bp, Homo sapien
ctgctcctagctggaaaaacagtgc

SEQ ID NO: 4627749 - DNA, 25 bp, Homo sapien
tgctcctagctggaaaaacagtgct

SEQ ID NO: 4627750 - DNA, 25 bp, Homo sapien
cactgctcctagctggaaaaacagt

SEQ ID NO: 4627751 - DNA, 25 bp, Homo sapien
ccactgctcctagctggaaaaacag

SEQ ID NO: 4627752 - DNA, 25 bp, Homo sapien
tcctgaacataactgaagcatcgac

SEQ ID NO: 4627753 - DNA, 25 bp, Homo sapien
cataactgaagcatcgacattggct

SEQ ID NO: 4627754 - DNA, 25 bp, Homo sapien
tgagattacacttaataggatagtc

SEQ ID NO: 4627755 - DNA, 25 bp, Homo sapien
gaaggtgttgggctcattaagcagt

SEQ ID NO: 4627756 - DNA, 25 bp, Homo sapien
ggctgtcctccgattcatgtaaggg

SEQ ID NO: 4627757 - DNA, 25 bp, Homo sapien
tagtgggcggaatgtcatgctttgt

SEQ ID NO: 4627758 - DNA, 25 bp, Homo sapien
ggtcggcgacttaagaatcagaaca

SEQ ID NO: 4627759 - DNA, 25 bp, Homo sapien
tattgacttagtgggcggaatgtca

SEQ ID NO: 4627760 - DNA, 25 bp, Homo sapien
ctgaagggaggttgacacagaaatg

SEQ ID NO: 4627761 - DNA, 25 bp, Homo sapien
ataattggccttaaataatcaatat

SEQ ID NO: 4627762 - DNA, 25 bp, Homo sapien
cacagaaatggtttacggtaagtct

SEQ ID NO: 4627763 - DNA, 25 bp, Homo sapien
tgacacagaaatggtttacggtaag

SEQ ID NO: 4627764 - DNA, 25 bp, Homo sapien
tttagttttgatgcagtattccgcc

SEQ ID NO: 4627765 - DNA, 25 bp, Homo sapien
tgatgcagtattccgccagggttgt

SEQ ID NO: 4627766 - DNA, 25 bp, Homo sapien
atccttttctgcttcggccttagtg

SEQ ID NO: 4627767 - DNA, 25 bp, Homo sapien
tgcttcggccttagtggctgaaact

SEQ ID NO: 4627768 - DNA, 25 bp, Homo sapien
cgtcgtaaagcaaatctgagctgtt

SEQ ID NO: 4627769 - DNA, 25 bp, Homo sapien
aagtcgtcgtaaagcaaatctgagc

SEQ ID NO: 4627770 - DNA, 25 bp, Homo sapien
gtaaagcaaatctgagctgttgtca

SEQ ID NO: 4627771 - DNA, 25 bp, Homo sapien
gtcgtcgtaaagcaaatctgagctg

SEQ ID NO: 4627772 - DNA, 25 bp, Homo sapien
atcatcataacagtcggcatcttcc

SEQ ID NO: 4627773 - DNA, 25 bp, Homo sapien
catcatcataacagtcggcatcttc

SEQ ID NO: 4627774 - DNA, 25 bp, Homo sapien
catcataacagtcggcatcttcctc

SEQ ID NO: 4627775 - DNA, 25 bp, Homo sapien
tcatcataacagtcggcatcttcct

SEQ ID NO: 4627776 - DNA, 25 bp, Homo sapien
cagtacaggggcactgaaggagcac

SEQ ID NO: 4627777 - DNA, 25 bp, Homo sapien
ctgagatggcagggcagtacagggg

SEQ ID NO: 4627778 - DNA, 25 bp, Homo sapien
agtacaggggcactgaaggagcacg

SEQ ID NO: 4627779 - DNA, 25 bp, Homo sapien
agatggcagggcagtacaggggcac

SEQ ID NO: 4627780 - DNA, 25 bp, Homo sapien
cgctgtgaataggtttttgctgagg

SEQ ID NO: 4627781 - DNA, 25 bp, Homo sapien
ctctctccattaaaggtccataaaa

SEQ ID NO: 4627782 - DNA, 25 bp, Homo sapien
cccacccgctgtgaataggtttttg

SEQ ID NO: 4627783 - DNA, 25 bp, Homo sapien
cattaaaggtccataaaaaggagca

SEQ ID NO: 4627784 - DNA, 25 bp, Homo sapien
ctgtagagacgaagtgaggcgggag

SEQ ID NO: 4627785 - DNA, 25 bp, Homo sapien
gagacgaagtgaggcgggagtttgg

SEQ ID NO: 4627786 - DNA, 25 bp, Homo sapien
tagagacgaagtgaggcgggagttt

SEQ ID NO: 4627787 - DNA, 25 bp, Homo sapien
gaatcaatatagtgatggaagggta

SEQ ID NO: 4627788 - DNA, 25 bp, Homo sapien
tgctacccagtatatgcagcacttg

SEQ ID NO: 4627789 - DNA, 25 bp, Homo sapien
gcagcacttgtgaactcccaacagg

SEQ ID NO: 4627790 - DNA, 25 bp, Homo sapien
attcttcaagaatctaaaaacagac

SEQ ID NO: 4627791 - DNA, 25 bp, Homo sapien
tttgctacccagtatatgcagcact

SEQ ID NO: 4627792 - DNA, 25 bp, Homo sapien
gagcagctaaaccttggcaaatttg

SEQ ID NO: 4627793 - DNA, 25 bp, Homo sapien
gcagctgaggcctccatgttacgat

SEQ ID NO: 4627794 - DNA, 25 bp, Homo sapien
ggctgaacgaatgcacacacactaa

SEQ ID NO: 4627795 - DNA, 25 bp, Homo sapien
tatttcaggctttcgatcccaatcg

SEQ ID NO: 4627796 - DNA, 25 bp, Homo sapien
tgctgggaccaaactttagaggccg

SEQ ID NO: 4627797 - DNA, 25 bp, Homo sapien
tctgagttacgagccaaaggaggag

SEQ ID NO: 4627798 - DNA, 25 bp, Homo sapien
catccaatgaagaaggcggtaactc

SEQ ID NO: 4627799 - DNA, 25 bp, Homo sapien
tacgtacatggttccggattgagcc

SEQ ID NO: 4627800 - DNA, 25 bp, Homo sapien
gaatcaagtttaacaaatggctacg

SEQ ID NO: 4627801 - DNA, 25 bp, Homo sapien
tacgtctataaggagcttgaaggga

SEQ ID NO: 4627802 - DNA, 25 bp, Homo sapien
gtatcagctcccgttttcagaatca

SEQ ID NO: 4627803 - DNA, 25 bp, Homo sapien
caatccttcactgacctacttgtat

SEQ ID NO: 4627804 - DNA, 25 bp, Homo sapien
cccattggatggactgagcgaagcc

SEQ ID NO: 4627805 - DNA, 25 bp, Homo sapien
tacacttgcgagcactggtcagagc

SEQ ID NO: 4627806 - DNA, 25 bp, Homo sapien
agttgactgcatagggcccattgga

SEQ ID NO: 4627807 - DNA, 25 bp, Homo sapien
aattcagcaggttgatgtactccca

SEQ ID NO: 4627808 - DNA, 25 bp, Homo sapien
ttttccccacttgtgtatccccaca

SEQ ID NO: 4627809 - DNA, 25 bp, Homo sapien
ttctcttgttacataaatgagagta

SEQ ID NO: 4627810 - DNA, 25 bp, Homo sapien
tcttgttacataaatgagagtattt

SEQ ID NO: 4627811 - DNA, 25 bp, Homo sapien
tgtgtatccccacaagtgtatcttg

SEQ ID NO: 4627812 - DNA, 25 bp, Homo sapien
tgttttgtcttctagttcgctctcc

SEQ ID NO: 4627813 - DNA, 25 bp, Homo sapien
ttgtcttctagttcgctctccagcc

SEQ ID NO: 4627814 - DNA, 25 bp, Homo sapien
taagtgtctgcgcggcttcctcttc

SEQ ID NO: 4627815 - DNA, 25 bp, Homo sapien
tcctcgagcacgtcacacacagtaa

SEQ ID NO: 4627816 - DNA, 25 bp, Homo sapien
catggcgagtcattcccgtccacca

SEQ ID NO: 4627817 - DNA, 25 bp, Homo sapien
atggcgagtcattcccgtccaccag

SEQ ID NO: 4627818 - DNA, 25 bp, Homo sapien
tggcgagtcattcccgtccaccagg

SEQ ID NO: 4627819 - DNA, 25 bp, Homo sapien
tcatggcgagtcattcccgtccacc

SEQ ID NO: 4627820 - DNA, 25 bp, Homo sapien
tcatctgttccagctccaaagacaa

SEQ ID NO: 4627821 - DNA, 25 bp, Homo sapien
gttccagctccaaagacaacaggcc

SEQ ID NO: 4627822 - DNA, 25 bp, Homo sapien
gctccaaagacaacaggccctccct

SEQ ID NO: 4627823 - DNA, 25 bp, Homo sapien
tctgccctcccgtctgtgagctccc

SEQ ID NO: 4627824 - DNA, 25 bp, Homo sapien
gtattctcaactacatgctagataa

SEQ ID NO: 4627825 - DNA, 25 bp, Homo sapien
ttacttatttacaccccagacgcag

SEQ ID NO: 4627826 - DNA, 25 bp, Homo sapien
acagctgcccaacgtgccaggatta

SEQ ID NO: 4627827 - DNA, 25 bp, Homo sapien
cactgcatcccctgtcaacttgata

SEQ ID NO: 4627828 - DNA, 25 bp, Homo sapien
ggcctcacagaatggtattggcttg

SEQ ID NO: 4627829 - DNA, 25 bp, Homo sapien
gataagagagttatgagtccaggac

SEQ ID NO: 4627830 - DNA, 25 bp, Homo sapien
caggactcagccttataggctcaga

SEQ ID NO: 4627831 - DNA, 25 bp, Homo sapien
ggctttgaagccgaatgttgtgcaa

SEQ ID NO: 4627832 - DNA, 25 bp, Homo sapien
caaaagcattgtaggcaggtctctg

SEQ ID NO: 4627833 - DNA, 25 bp, Homo sapien
tatttagtgactcagattagttcct

SEQ ID NO: 4627834 - DNA, 25 bp, Homo sapien
ggtaatgaattacacttgaagttac

SEQ ID NO: 4627835 - DNA, 25 bp, Homo sapien
ctttctcactgctttaccttactgt

SEQ ID NO: 4627836 - DNA, 25 bp, Homo sapien
tagagttagggggtctctgtgtttc

SEQ ID NO: 4627837 - DNA, 25 bp, Homo sapien
gaggaccactctctggtacatcttg

SEQ ID NO: 4627838 - DNA, 25 bp, Homo sapien
gccatcacggtttactacagcctcg

SEQ ID NO: 4627839 - DNA, 25 bp, Homo sapien
tcaggctggagtctttgaaaccctg

SEQ ID NO: 4627840 - DNA, 25 bp, Homo sapien
ttagaatatcttcccttcttaaggc

SEQ ID NO: 4627841 - DNA, 25 bp, Homo sapien
tgtctttgaggtgcatccatgtggt

SEQ ID NO: 4627842 - DNA, 25 bp, Homo sapien
tgtgttagaatatcttcccttctta

SEQ ID NO: 4627843 - DNA, 25 bp, Homo sapien
tgcaccctagccttatttgtccttt

SEQ ID NO: 4627844 - DNA, 25 bp, Homo sapien
acttgtatccctaagaaagctgagg

SEQ ID NO: 4627845 - DNA, 25 bp, Homo sapien
cacccagcctaagaaacaaagattc

SEQ ID NO: 4627846 - DNA, 25 bp, Homo sapien
taatcttactttggtggatgcagag

SEQ ID NO: 4627847 - DNA, 25 bp, Homo sapien
ccttgggacagagtaactagtggga

SEQ ID NO: 4627848 - DNA, 25 bp, Homo sapien
tgttttgaatgacagagacagatga

SEQ ID NO: 4627849 - DNA, 25 bp, Homo sapien
gacaattaggagaccagtggtgacc

SEQ ID NO: 4627850 - DNA, 25 bp, Homo sapien
gtgacctagggagtagcatttttcc

SEQ ID NO: 4627851 - DNA, 25 bp, Homo sapien
ccgcgcctagccgtatgaaatgttt

SEQ ID NO: 4627852 - DNA, 25 bp, Homo sapien
ctacagatttgtgccaccgtgccta

SEQ ID NO: 4627853 - DNA, 25 bp, Homo sapien
gcagctgctgtaggcccacaaaatg

SEQ ID NO: 4627854 - DNA, 25 bp, Homo sapien
tttacatattgtcactgaagtattt

SEQ ID NO: 4627855 - DNA, 25 bp, Homo sapien
ttatagcctctttcccatccagtcg

SEQ ID NO: 4627856 - DNA, 25 bp, Homo sapien
tgcctgccagtagactggagcttcc

SEQ ID NO: 4627857 - DNA, 25 bp, Homo sapien
ccgccacgctgtcggtcccatctca

SEQ ID NO: 4627858 - DNA, 25 bp, Homo sapien
ctcggtgcctgccagtagactggag

SEQ ID NO: 4627859 - DNA, 25 bp, Homo sapien
agtagactggagcttccccgccacg

SEQ ID NO: 4627860 - DNA, 25 bp, Homo sapien
tccgagagcagcagcggtaattgcc

SEQ ID NO: 4627861 - DNA, 25 bp, Homo sapien
ccgagagcagcagcggtaattgcca

SEQ ID NO: 4627862 - DNA, 25 bp, Homo sapien
ctccgagagcagcagcggtaattgc

SEQ ID NO: 4627863 - DNA, 25 bp, Homo sapien
cgagagcagcagcggtaattgccat

SEQ ID NO: 4627864 - DNA, 25 bp, Homo sapien
ccgctttgtaagaggcacattggca

SEQ ID NO: 4627865 - DNA, 25 bp, Homo sapien
cgtggtcccctcgtgcaacatttgg

SEQ ID NO: 4627866 - DNA, 25 bp, Homo sapien
tttgtgaggtcatcacggcgcgacg

SEQ ID NO: 4627867 - DNA, 25 bp, Homo sapien
caggcttgccctgagtggttggacc

SEQ ID NO: 4627868 - DNA, 25 bp, Homo sapien
ccttgagagcttgttaacacgggcg

SEQ ID NO: 4627869 - DNA, 25 bp, Homo sapien
ggtgacaagatagccagaacgccct

SEQ ID NO: 4627870 - DNA, 25 bp, Homo sapien
gatgctcctccttttcgaccgaata

SEQ ID NO: 4627871 - DNA, 25 bp, Homo sapien
ttaacacgggcgtgcagctactcct

SEQ ID NO: 4627872 - DNA, 25 bp, Homo sapien
tgggtaatgcgtttgattgtttgag

SEQ ID NO: 4627873 - DNA, 25 bp, Homo sapien
ttgctagaccctcttctgtaatggg

SEQ ID NO: 4627874 - DNA, 25 bp, Homo sapien
gatgttttgtactattgctagaccc

SEQ ID NO: 4627875 - DNA, 25 bp, Homo sapien
aaatgtagcacttgactttttgcca

SEQ ID NO: 4627876 - DNA, 25 bp, Homo sapien
ccagctttgggactagtctgtatct

SEQ ID NO: 4627877 - DNA, 25 bp, Homo sapien
tcaggctgaaatgacatagctcacc

SEQ ID NO: 4627878 - DNA, 25 bp, Homo sapien
catgccaggactgcaaagtgatcca

SEQ ID NO: 4627879 - DNA, 25 bp, Homo sapien
tagtgggaacaccaaagtttgccta

SEQ ID NO: 4627880 - DNA, 25 bp, Homo sapien
cattctgaaagaccgggagcctgga

SEQ ID NO: 4627881 - DNA, 25 bp, Homo sapien
tataccctgtattggccacgttaaa

SEQ ID NO: 4627882 - DNA, 25 bp, Homo sapien
gactacctacgctggatcctgtgtg

SEQ ID NO: 4627883 - DNA, 25 bp, Homo sapien
tcagtgattaacatggaccctcctc

SEQ ID NO: 4627884 - DNA, 25 bp, Homo sapien
gtaggttaatgtggagcagcctcat

SEQ ID NO: 4627885 - DNA, 25 bp, Homo sapien
agtaggttaatgtggagcagcctca

SEQ ID NO: 4627886 - DNA, 25 bp, Homo sapien
tgctagtttctggcagggatcccag

SEQ ID NO: 4627887 - DNA, 25 bp, Homo sapien
ggcagggatcccagtaggttaatgt

SEQ ID NO: 4627888 - DNA, 25 bp, Homo sapien
gatttttcgaattctgcaactgcct

SEQ ID NO: 4627889 - DNA, 25 bp, Homo sapien
cagaggaacggtcattgatgatgca

SEQ ID NO: 4627890 - DNA, 25 bp, Homo sapien
tcttccgtgctccagtgggagtaca

SEQ ID NO: 4627891 - DNA, 25 bp, Homo sapien
gatgatgcatccctggaagacctgg

SEQ ID NO: 4627892 - DNA, 25 bp, Homo sapien
tatatgtatacccaaccctgagctg

SEQ ID NO: 4627893 - DNA, 25 bp, Homo sapien
ggatgattgcgtccctcctggaaga

SEQ ID NO: 4627894 - DNA, 25 bp, Homo sapien
gaaggccttcttggacatagatatg

SEQ ID NO: 4627895 - DNA, 25 bp, Homo sapien
cctggaagaaggaagtagtctccct

SEQ ID NO: 4627896 - DNA, 25 bp, Homo sapien
tgaggaaccaagatgggcttagggt

SEQ ID NO: 4627897 - DNA, 25 bp, Homo sapien
caagatgggcttagggtccgcagat

SEQ ID NO: 4627898 - DNA, 25 bp, Homo sapien
aagatgggcttagggtccgcagatc

SEQ ID NO: 4627899 - DNA, 25 bp, Homo sapien
gaggaaccaagatgggcttagggtc

SEQ ID NO: 4627900 - DNA, 25 bp, Homo sapien
ttccgggtgcctgcggataggcggg

SEQ ID NO: 4627901 - DNA, 25 bp, Homo sapien
cagcagtagccaaacaaccgttgaa

SEQ ID NO: 4627902 - DNA, 25 bp, Homo sapien
ggtgcctgcggataggcgggctggg

SEQ ID NO: 4627903 - DNA, 25 bp, Homo sapien
agaagccagattcccttggccccag

SEQ ID NO: 4627904 - DNA, 25 bp, Homo sapien
gacagaacttgagatggtccaacag

SEQ ID NO: 4627905 - DNA, 25 bp, Homo sapien
tctttgattcggcttggaaaacaaa

SEQ ID NO: 4627906 - DNA, 25 bp, Homo sapien
tcaatctggtctttgattcggcttg

SEQ ID NO: 4627907 - DNA, 25 bp, Homo sapien
agtggtagtgccgacttgggatggc

SEQ ID NO: 4627908 - DNA, 25 bp, Homo sapien
tggtgagtacttctcagacgaggtg

SEQ ID NO: 4627909 - DNA, 25 bp, Homo sapien
ctggtgagtacttctcagacgaggt

SEQ ID NO: 4627910 - DNA, 25 bp, Homo sapien
gacccggaagatcacgctgaagaca

SEQ ID NO: 4627911 - DNA, 25 bp, Homo sapien
atcacgctgaagacaccgctgatct

SEQ ID NO: 4627912 - DNA, 25 bp, Homo sapien
gccctgacccggaagatcacgctga

SEQ ID NO: 4627913 - DNA, 25 bp, Homo sapien
ggaagatcacgctgaagacaccgct

SEQ ID NO: 4627914 - DNA, 25 bp, Homo sapien
agctcttcgccagcgcctaaggcct

SEQ ID NO: 4627915 - DNA, 25 bp, Homo sapien
ggcctcacctaggacgccttcctga

SEQ ID NO: 4627916 - DNA, 25 bp, Homo sapien
cagctcttcgccagcgcctaaggcc

SEQ ID NO: 4627917 - DNA, 25 bp, Homo sapien
ctaaggcctcacctaggacgccttc

SEQ ID NO: 4627918 - DNA, 25 bp, Homo sapien
tgtgaattcagtcatggccctgtat

SEQ ID NO: 4627919 - DNA, 25 bp, Homo sapien
tcctgggtatgagagttacaaaagc

SEQ ID NO: 4627920 - DNA, 25 bp, Homo sapien
tgctctcaccatccttatctagggt

SEQ ID NO: 4627921 - DNA, 25 bp, Homo sapien
ccatgtctatgttggcctggttcct

SEQ ID NO: 4627922 - DNA, 25 bp, Homo sapien
ttgtctatgtccatctaagataatg

SEQ ID NO: 4627923 - DNA, 25 bp, Homo sapien
tgtccatctaagataatgtatatct

SEQ ID NO: 4627924 - DNA, 25 bp, Homo sapien
ttctaattcactaacactctgtttg

SEQ ID NO: 4627925 - DNA, 25 bp, Homo sapien
cactctgtttgtctatgtccatcta

SEQ ID NO: 4627926 - DNA, 25 bp, Homo sapien
ggtacatgcttgtggtctcaactac

SEQ ID NO: 4627927 - DNA, 25 bp, Homo sapien
gagctccaaggaattctctgatgaa

SEQ ID NO: 4627928 - DNA, 25 bp, Homo sapien
cttttccacagaagagctccaagga

SEQ ID NO: 4627929 - DNA, 25 bp, Homo sapien
gtggtacatgcttgtggtctcaact

SEQ ID NO: 4627930 - DNA, 25 bp, Homo sapien
aggaggcagaagccggataatcact

SEQ ID NO: 4627931 - DNA, 25 bp, Homo sapien
gaggcagaagccggataatcacttg

SEQ ID NO: 4627932 - DNA, 25 bp, Homo sapien
ggcagaagccggataatcacttgaa

SEQ ID NO: 4627933 - DNA, 25 bp, Homo sapien
tcaggaggcagaagccggataatca

SEQ ID NO: 4627934 - DNA, 25 bp, Homo sapien
gccagcgcacccagcttgtggtttt

SEQ ID NO: 4627935 - DNA, 25 bp, Homo sapien
acagggtttcagtcttctgtcaccc

SEQ ID NO: 4627936 - DNA, 25 bp, Homo sapien
accatgcaccgctttttttttatat

SEQ ID NO: 4627937 - DNA, 25 bp, Homo sapien
cagcgcacccagcttgtggtttttt

SEQ ID NO: 4627938 - DNA, 25 bp, Homo sapien
tcccctcaccgccccactcatttgg

SEQ ID NO: 4627939 - DNA, 25 bp, Homo sapien
atgttgaagtcctacttccctcctc

SEQ ID NO: 4627940 - DNA, 25 bp, Homo sapien
cactcatttgggcgtctgacgtcat

SEQ ID NO: 4627941 - DNA, 25 bp, Homo sapien
ccccactcatttgggcgtctgacgt

SEQ ID NO: 4627942 - DNA, 25 bp, Homo sapien
tgctgccgccgtctcagaagccgaa

SEQ ID NO: 4627943 - DNA, 25 bp, Homo sapien
gtctcagaagccgaaaggtgctggc

SEQ ID NO: 4627944 - DNA, 25 bp, Homo sapien
aaaggtgctggcaccggccggcctc

SEQ ID NO: 4627945 - DNA, 25 bp, Homo sapien
agcccctagggagagcgaacgccac

SEQ ID NO: 4627946 - DNA, 25 bp, Homo sapien
tgacatcctctagttcccaccgagt

SEQ ID NO: 4627947 - DNA, 25 bp, Homo sapien
tcttccagtagggtattagtctcct

SEQ ID NO: 4627948 - DNA, 25 bp, Homo sapien
tcagtccagcccgatagatgtctac

SEQ ID NO: 4627949 - DNA, 25 bp, Homo sapien
gatgtctactatgcctgtcttccag

SEQ ID NO: 4627950 - DNA, 25 bp, Homo sapien
cagctcaccctcaactccccaccac

SEQ ID NO: 4627951 - DNA, 25 bp, Homo sapien
tcaccctcaactccccaccactcac

SEQ ID NO: 4627952 - DNA, 25 bp, Homo sapien
gctcaccctcaactccccaccactc

SEQ ID NO: 4627953 - DNA, 25 bp, Homo sapien
agctcaccctcaactccccaccact

SEQ ID NO: 4627954 - DNA, 25 bp, Homo sapien
atgacccacagcacccgcccgagat

SEQ ID NO: 4627955 - DNA, 25 bp, Homo sapien
cagcacccgcccgagattatttctt

SEQ ID NO: 4627956 - DNA, 25 bp, Homo sapien
gcccgagattatttcttttgaggta

SEQ ID NO: 4627957 - DNA, 25 bp, Homo sapien
cccgcccgagattatttcttttgag

SEQ ID NO: 4627958 - DNA, 25 bp, Homo sapien
tacaattaggagcttttctcaccag

SEQ ID NO: 4627959 - DNA, 25 bp, Homo sapien
tgatacaacaagcacaaaccagccg

SEQ ID NO: 4627960 - DNA, 25 bp, Homo sapien
tgaaccggatccaatctgactcagc

SEQ ID NO: 4627961 - DNA, 25 bp, Homo sapien
actgtccacacaaagaaaggtctca

SEQ ID NO: 4627962 - DNA, 25 bp, Homo sapien
tcctcgcccagatcaaatacttgac

SEQ ID NO: 4627963 - DNA, 25 bp, Homo sapien
aatacttgactccttagaagaataa

SEQ ID NO: 4627964 - DNA, 25 bp, Homo sapien
ttatatttcagtgtgatcctcgccc

SEQ ID NO: 4627965 - DNA, 25 bp, Homo sapien
acttgactccttagaagaataattc

SEQ ID NO: 4627966 - DNA, 25 bp, Homo sapien
ctgttcctggttcataattcccaca

SEQ ID NO: 4627967 - DNA, 25 bp, Homo sapien
gcaatataattttttagccctcaaa

SEQ ID NO: 4627968 - DNA, 25 bp, Homo sapien
gtgactttagaactcggtattctaa

SEQ ID NO: 4627969 - DNA, 25 bp, Homo sapien
gaactcggtattctaattgtataca

SEQ ID NO: 4627970 - DNA, 25 bp, Homo sapien
cctgggcaataagagtgaaattccg

SEQ ID NO: 4627971 - DNA, 25 bp, Homo sapien
gcctgggcaataagagtgaaattcc

SEQ ID NO: 4627972 - DNA, 25 bp, Homo sapien
cgaggcagaaggatcggatctctta

SEQ ID NO: 4627973 - DNA, 25 bp, Homo sapien
gcaaaatcctgactgtagcaaactt

SEQ ID NO: 4627974 - DNA, 25 bp, Homo sapien
tcattcaccattacaccaagcatag

SEQ ID NO: 4627975 - DNA, 25 bp, Homo sapien
tccaagttctcgtatgagatcagca

SEQ ID NO: 4627976 - DNA, 25 bp, Homo sapien
tatgcactacgaggacaaataccac

SEQ ID NO: 4627977 - DNA, 25 bp, Homo sapien
caaactcagtggattgtatcattct

SEQ ID NO: 4627978 - DNA, 25 bp, Homo sapien
tgactcagcaagtatatacaatcca

SEQ ID NO: 4627979 - DNA, 25 bp, Homo sapien
aaacctgaatgatttttcccacaga

SEQ ID NO: 4627980 - DNA, 25 bp, Homo sapien
tactagaagctattaatttgacctg

SEQ ID NO: 4627981 - DNA, 25 bp, Homo sapien
ccttattactgtccgctgcacatcg

SEQ ID NO: 4627982 - DNA, 25 bp, Homo sapien
gtccgctgcacatcggcgtacttgg

SEQ ID NO: 4627983 - DNA, 25 bp, Homo sapien
ttagcccccttattactgtccgctg

SEQ ID NO: 4627984 - DNA, 25 bp, Homo sapien
tactgtccgctgcacatcggcgtac

SEQ ID NO: 4627985 - DNA, 25 bp, Homo sapien
gcacataacataggagtagacatgg

SEQ ID NO: 4627986 - DNA, 25 bp, Homo sapien
taaagctataattaatcacagggaa

SEQ ID NO: 4627987 - DNA, 25 bp, Homo sapien
aatccagaagataacgttgtgatgg

SEQ ID NO: 4627988 - DNA, 25 bp, Homo sapien
gagtgtctactaaaggcacataaca

SEQ ID NO: 4627989 - DNA, 25 bp, Homo sapien
tctttcccttgtctgaatgttctgg

SEQ ID NO: 4627990 - DNA, 25 bp, Homo sapien
ggtaaacgatcatattgtcagcaaa

SEQ ID NO: 4627991 - DNA, 25 bp, Homo sapien
ccttgtctgaatgttctggctagga

SEQ ID NO: 4627992 - DNA, 25 bp, Homo sapien
caaggtaaacgatcatattgtcagc

SEQ ID NO: 4627993 - DNA, 25 bp, Homo sapien
ttcccacagcagtgtaaatgtgttg

SEQ ID NO: 4627994 - DNA, 25 bp, Homo sapien
tcccacagcagtgtaaatgtgttgc

SEQ ID NO: 4627995 - DNA, 25 bp, Homo sapien
ctccagcttgggcaagagagccagt

SEQ ID NO: 4627996 - DNA, 25 bp, Homo sapien
ggttgccgtgagccatgattaagcc

SEQ ID NO: 4627997 - DNA, 25 bp, Homo sapien
ttgccgtgagccatgattaagccac

SEQ ID NO: 4627998 - DNA, 25 bp, Homo sapien
tgcactccagcttgggcaagagagc

SEQ ID NO: 4627999 - DNA, 25 bp, Homo sapien
gaaaatctgcacccaacttcttaga

SEQ ID NO: 4628000 - DNA, 25 bp, Homo sapien
catgaaaatctgcacccaacttctt

SEQ ID NO: 4628001 - DNA, 25 bp, Homo sapien
ctgcacccaacttcttagaagccat

SEQ ID NO: 4628002 - DNA, 25 bp, Homo sapien
aaatctgcacccaacttcttagaag

SEQ ID NO: 4628003 - DNA, 25 bp, Homo sapien
cccgggctcagcactactcccacct

SEQ ID NO: 4628004 - DNA, 25 bp, Homo sapien
tctcatgtgattctggctggagtgc

SEQ ID NO: 4628005 - DNA, 25 bp, Homo sapien
gagacaggctctcatgtgattctgg

SEQ ID NO: 4628006 - DNA, 25 bp, Homo sapien
gacaggctctcatgtgattctggct

SEQ ID NO: 4628007 - DNA, 25 bp, Homo sapien
taaaccaggctatgctaatccgaag

SEQ ID NO: 4628008 - DNA, 25 bp, Homo sapien
taggactatagagaagctccaccac

SEQ ID NO: 4628009 - DNA, 25 bp, Homo sapien
tccgaagacaataatcagcataaga

SEQ ID NO: 4628010 - DNA, 25 bp, Homo sapien
cagcataagaaagacttgggacttg

SEQ ID NO: 4628011 - DNA, 25 bp, Homo sapien
tgatatacactgacaaacttatatt

SEQ ID NO: 4628012 - DNA, 25 bp, Homo sapien
gtgtgatatacactgacaaacttat

SEQ ID NO: 4628013 - DNA, 25 bp, Homo sapien
tgtgatatacactgacaaacttata

SEQ ID NO: 4628014 - DNA, 25 bp, Homo sapien
agtgtgatatacactgacaaactta

SEQ ID NO: 4628015 - DNA, 25 bp, Homo sapien
ttaaatgggacatcatcaaggtaac

SEQ ID NO: 4628016 - DNA, 25 bp, Homo sapien
acatcatcaaggtaactgaaagtcc

SEQ ID NO: 4628017 - DNA, 25 bp, Homo sapien
cttaaatgggacatcatcaaggtaa

SEQ ID NO: 4628018 - DNA, 25 bp, Homo sapien
gggacatcatcaaggtaactgaaag

SEQ ID NO: 4628019 - DNA, 25 bp, Homo sapien
aacctgcaaacaatcaggcaaggag

SEQ ID NO: 4628020 - DNA, 25 bp, Homo sapien
tctgacaacctgcaaacaatcaggc

SEQ ID NO: 4628021 - DNA, 25 bp, Homo sapien
ataggtagaccaactttagctggtg

SEQ ID NO: 4628022 - DNA, 25 bp, Homo sapien
caaggagaagccaataggtagacca

SEQ ID NO: 4628023 - DNA, 25 bp, Homo sapien
gcatagtaatacataaatgagtaac

SEQ ID NO: 4628024 - DNA, 25 bp, Homo sapien
cttgtttcactgtatggtcttcagg

SEQ ID NO: 4628025 - DNA, 25 bp, Homo sapien
ctaggcctataggatcatcagtatc

SEQ ID NO: 4628026 - DNA, 25 bp, Homo sapien
tcttcaggagcaatacatgcatgga

SEQ ID NO: 4628027 - DNA, 25 bp, Homo sapien
tctctcttcttgacgagatcgcgcc

SEQ ID NO: 4628028 - DNA, 25 bp, Homo sapien
gtctctcttcttgacgagatcgcgc

SEQ ID NO: 4628029 - DNA, 25 bp, Homo sapien
tctcttcttgacgagatcgcgccat

SEQ ID NO: 4628030 - DNA, 25 bp, Homo sapien
ctcttcttgacgagatcgcgccatt

SEQ ID NO: 4628031 - DNA, 25 bp, Homo sapien
ttaacaggatctacaaccaagcata

SEQ ID NO: 4628032 - DNA, 25 bp, Homo sapien
ttagattatgatgaacaggttgcag

SEQ ID NO: 4628033 - DNA, 25 bp, Homo sapien
gctggtagctaaatggaagagcctg

SEQ ID NO: 4628034 - DNA, 25 bp, Homo sapien
cagattctatgctcttaaaccacta

SEQ ID NO: 4628035 - DNA, 25 bp, Homo sapien
atttaaggcgtgtgggatgatcccc

SEQ ID NO: 4628036 - DNA, 25 bp, Homo sapien
tgatagccccaaacatgtaagaaat

SEQ ID NO: 4628037 - DNA, 25 bp, Homo sapien
gcaagaggataaccggacaaggcag

SEQ ID NO: 4628038 - DNA, 25 bp, Homo sapien
tcccatgctaggtaatgatagcccc

SEQ ID NO: 4628039 - DNA, 25 bp, Homo sapien
gaaagcccaagagtgtgatgcccat

SEQ ID NO: 4628040 - DNA, 25 bp, Homo sapien
ggttgcccgttccaaggatgccagg

SEQ ID NO: 4628041 - DNA, 25 bp, Homo sapien
gaattctggaacgtgccattgcgga

SEQ ID NO: 4628042 - DNA, 25 bp, Homo sapien
tatggaaagtgctcgccagcttggc

SEQ ID NO: 4628043 - DNA, 25 bp, Homo sapien
agatctctgctgttagtttattggc

SEQ ID NO: 4628044 - DNA, 25 bp, Homo sapien
ctgagatgaacaggtcagaaagaaa

SEQ ID NO: 4628045 - DNA, 25 bp, Homo sapien
gaatgacaagcgttctagtttgaga

SEQ ID NO: 4628046 - DNA, 25 bp, Homo sapien
catcaggctggtcaaagaatgacaa

SEQ ID NO: 4628047 - DNA, 25 bp, Homo sapien
ggattactggtgtgatatatttcaa

SEQ ID NO: 4628048 - DNA, 25 bp, Homo sapien
tggaaagataatgaagggatggtaa

SEQ ID NO: 4628049 - DNA, 25 bp, Homo sapien
gaagggatggtaattgccagcaatg

SEQ ID NO: 4628050 - DNA, 25 bp, Homo sapien
aaagggggtagcagtggacaatata

SEQ ID NO: 4628051 - DNA, 25 bp, Homo sapien
taatgtgtgtgcacaactcagcgga

SEQ ID NO: 4628052 - DNA, 25 bp, Homo sapien
tacattagtgtgagcttgcagagag

SEQ ID NO: 4628053 - DNA, 25 bp, Homo sapien
gagaggtcagttaccatgtcatgcc

SEQ ID NO: 4628054 - DNA, 25 bp, Homo sapien
tctgtacctatgtggccctcaagcc

SEQ ID NO: 4628055 - DNA, 25 bp, Homo sapien
taaccccagtcggataggcgtacag

SEQ ID NO: 4628056 - DNA, 25 bp, Homo sapien
gatcacaaatcaagcccaaggcagg

SEQ ID NO: 4628057 - DNA, 25 bp, Homo sapien
catggttaggtggtaggaagccctc

SEQ ID NO: 4628058 - DNA, 25 bp, Homo sapien
catggacagcttaggaacctggaca

SEQ ID NO: 4628059 - DNA, 25 bp, Homo sapien
catgttgggcacttgtgacactgag

SEQ ID NO: 4628060 - DNA, 25 bp, Homo sapien
gctctgaggacacactcgtacgagt

SEQ ID NO: 4628061 - DNA, 25 bp, Homo sapien
acacactgccgctcgctgggggaca

SEQ ID NO: 4628062 - DNA, 25 bp, Homo sapien
gagtagcccatgttgaccaccgtct

SEQ ID NO: 4628063 - DNA, 25 bp, Homo sapien
tcttctgaacactggtgcatttcca

SEQ ID NO: 4628064 - DNA, 25 bp, Homo sapien
ccagagcctcttccactaaaagagg

SEQ ID NO: 4628065 - DNA, 25 bp, Homo sapien
tcttccactaaaagagggtcgaagc

SEQ ID NO: 4628066 - DNA, 25 bp, Homo sapien
ttcttctgaacactggtgcatttcc

SEQ ID NO: 4628067 - DNA, 25 bp, Homo sapien
gagccccgtgagtctccataaggtc

SEQ ID NO: 4628068 - DNA, 25 bp, Homo sapien
taaggtcccctagcaagcagaggtg

SEQ ID NO: 4628069 - DNA, 25 bp, Homo sapien
ccagagccccgtgagtctccataag

SEQ ID NO: 4628070 - DNA, 25 bp, Homo sapien
ccataaggtcccctagcaagcagag

SEQ ID NO: 4628071 - DNA, 25 bp, Homo sapien
tccttaatgtctttcagctcaaagc

SEQ ID NO: 4628072 - DNA, 25 bp, Homo sapien
gctcctgcccgagccatgaggtctt

SEQ ID NO: 4628073 - DNA, 25 bp, Homo sapien
tgtcctggtcattgttgtgtaatag

SEQ ID NO: 4628074 - DNA, 25 bp, Homo sapien
gtgtaatagcaaaacttccttaatg

SEQ ID NO: 4628075 - DNA, 25 bp, Homo sapien
gcgtttaatacggaaggagccagga

SEQ ID NO: 4628076 - DNA, 25 bp, Homo sapien
gactggcgagcagtctccacacctg

SEQ ID NO: 4628077 - DNA, 25 bp, Homo sapien
cagctcagggcctaggctcacagag

SEQ ID NO: 4628078 - DNA, 25 bp, Homo sapien
gaaaatccggaagctgccccttctc

SEQ ID NO: 4628079 - DNA, 25 bp, Homo sapien
caccccagaaagactagggtagtct

SEQ ID NO: 4628080 - DNA, 25 bp, Homo sapien
ccagaaagactagggtagtctctcc

SEQ ID NO: 4628081 - DNA, 25 bp, Homo sapien
aagactagggtagtctctccggagg

SEQ ID NO: 4628082 - DNA, 25 bp, Homo sapien
gaaagactagggtagtctctccgga

SEQ ID NO: 4628083 - DNA, 25 bp, Homo sapien
agcactgagtctggccctcccgccc

SEQ ID NO: 4628084 - DNA, 25 bp, Homo sapien
cagcactgagtctggccctcccgcc

SEQ ID NO: 4628085 - DNA, 25 bp, Homo sapien
catctccccagcccctctcagcaac

SEQ ID NO: 4628086 - DNA, 25 bp, Homo sapien
ctccccagcccctctcagcaactag

SEQ ID NO: 4628087 - DNA, 25 bp, Homo sapien
tggtgactgcctggcagaaaaggca

SEQ ID NO: 4628088 - DNA, 25 bp, Homo sapien
tcagagatattgcagaaccagtgtt

SEQ ID NO: 4628089 - DNA, 25 bp, Homo sapien
ctctgggccccatagggaaaagtgc

SEQ ID NO: 4628090 - DNA, 25 bp, Homo sapien
cagtgttaacactatgagactttgt

SEQ ID NO: 4628091 - DNA, 25 bp, Homo sapien
ggctctaaaaccctgggtagcagag

SEQ ID NO: 4628092 - DNA, 25 bp, Homo sapien
gactgtggtccaaaccaagccaaaa

SEQ ID NO: 4628093 - DNA, 25 bp, Homo sapien
gaggactgtggtccaaaccaagcca

SEQ ID NO: 4628094 - DNA, 25 bp, Homo sapien
gggctctaaaaccctgggtagcaga

SEQ ID NO: 4628095 - DNA, 25 bp, Homo sapien
tgcttacccattcaatgtgctggga

SEQ ID NO: 4628096 - DNA, 25 bp, Homo sapien
tgtgtcatcctaaagcagtgggctg

SEQ ID NO: 4628097 - DNA, 25 bp, Homo sapien
ggtggagttagtgctggccaactaa

SEQ ID NO: 4628098 - DNA, 25 bp, Homo sapien
ccaactaaatcatggcctgtctgct

SEQ ID NO: 4628099 - DNA, 25 bp, Homo sapien
gaagaatcaaaatagttagttagca

SEQ ID NO: 4628100 - DNA, 25 bp, Homo sapien
gatttttattagtagttctctctga

SEQ ID NO: 4628101 - DNA, 25 bp, Homo sapien
ttagatttttattagtagttctctc

SEQ ID NO: 4628102 - DNA, 25 bp, Homo sapien
tctgaagaatcaaaatagttagtta

SEQ ID NO: 4628103 - DNA, 25 bp, Homo sapien
ttattggtgcttcccggctgcaggg

SEQ ID NO: 4628104 - DNA, 25 bp, Homo sapien
caaaagctcaagtgggacaatggca

SEQ ID NO: 4628105 - DNA, 25 bp, Homo sapien
gaaggcctacgtccttggtccacag

SEQ ID NO: 4628106 - DNA, 25 bp, Homo sapien
tctcttgagacactagcagcctggt

SEQ ID NO: 4628107 - DNA, 25 bp, Homo sapien
tctgtggtatgccatttaattctgc

SEQ ID NO: 4628108 - DNA, 25 bp, Homo sapien
cctctgtggtatgccatttaattct

SEQ ID NO: 4628109 - DNA, 25 bp, Homo sapien
ttataatcctctgtggtatgccatt

SEQ ID NO: 4628110 - DNA, 25 bp, Homo sapien
tcctctgtggtatgccatttaattc

SEQ ID NO: 4628111 - DNA, 25 bp, Homo sapien
agaaaatggctctatggccacataa

SEQ ID NO: 4628112 - DNA, 25 bp, Homo sapien
tggctctatggccacataagcaggt

SEQ ID NO: 4628113 - DNA, 25 bp, Homo sapien
gatgggactcgtaaagaattaggaa

SEQ ID NO: 4628114 - DNA, 25 bp, Homo sapien
tttgggtgatgggactcgtaaagaa

SEQ ID NO: 4628115 - DNA, 25 bp, Homo sapien
tgggaggtggtttgcgtgcaccacg

SEQ ID NO: 4628116 - DNA, 25 bp, Homo sapien
aggagcaggagggagcgcgtggctg

SEQ ID NO: 4628117 - DNA, 25 bp, Homo sapien
gtggtttgcgtgcaccacgatggac

SEQ ID NO: 4628118 - DNA, 25 bp, Homo sapien
gggagcgcgtggctgggaggtggtt

SEQ ID NO: 4628119 - DNA, 25 bp, Homo sapien
gctcagcttctctgcggtgccagga

SEQ ID NO: 4628120 - DNA, 25 bp, Homo sapien
tgtgttcggccagcgtggctgcctt

SEQ ID NO: 4628121 - DNA, 25 bp, Homo sapien
ttcttcacctcggtcgccaaggcca

SEQ ID NO: 4628122 - DNA, 25 bp, Homo sapien
tgagtgaacgcagcggctcgcccac

SEQ ID NO: 4628123 - DNA, 25 bp, Homo sapien
ccatccatgcactccatgtccttgg

SEQ ID NO: 4628124 - DNA, 25 bp, Homo sapien
gtcatggaaattgatcttggagtgc

SEQ ID NO: 4628125 - DNA, 25 bp, Homo sapien
gactgcagcgcactgcgcttgtcat

SEQ ID NO: 4628126 - DNA, 25 bp, Homo sapien
tggtgttgacaagcagggcgccatc

SEQ ID NO: 4628127 - DNA, 25 bp, Homo sapien
gcatctccacgatttgcagcttttc

SEQ ID NO: 4628128 - DNA, 25 bp, Homo sapien
accgagtcaccatgaagccacggtt

SEQ ID NO: 4628129 - DNA, 25 bp, Homo sapien
atctccacgatttgcagcttttcct

SEQ ID NO: 4628130 - DNA, 25 bp, Homo sapien
gggcatctccacgatttgcagcttt

SEQ ID NO: 4628131 - DNA, 25 bp, Homo sapien
aggtcatgggaacttccaccacccg

SEQ ID NO: 4628132 - DNA, 25 bp, Homo sapien
caaggagatggcgacaggcttctgc

SEQ ID NO: 4628133 - DNA, 25 bp, Homo sapien
atgggaacttccaccacccgcttgg

SEQ ID NO: 4628134 - DNA, 25 bp, Homo sapien
ggagatggcgacaggcttctgcttc

SEQ ID NO: 4628135 - DNA, 25 bp, Homo sapien
tgcgcagctccttgctcccatagat

SEQ ID NO: 4628136 - DNA, 25 bp, Homo sapien
cgcagctccttgctcccatagatgt

SEQ ID NO: 4628137 - DNA, 25 bp, Homo sapien
gtccttcttgtgtggcatgcgtgac

SEQ ID NO: 4628138 - DNA, 25 bp, Homo sapien
ggcatgcgtgacaagtttgccttgt

SEQ ID NO: 4628139 - DNA, 25 bp, Homo sapien
aaactcgtcttgcatcttgtcaacc

SEQ ID NO: 4628140 - DNA, 25 bp, Homo sapien
taaaactcgtcttgcatcttgtcaa

SEQ ID NO: 4628141 - DNA, 25 bp, Homo sapien
aaaactcgtcttgcatcttgtcaac

SEQ ID NO: 4628142 - DNA, 25 bp, Homo sapien
tcttccagaggagaagtcaacgaac

SEQ ID NO: 4628143 - DNA, 25 bp, Homo sapien
gaacgtcaaccgattccttggatgc

SEQ ID NO: 4628144 - DNA, 25 bp, Homo sapien
ttgacgggactgttaggttgcgggc

SEQ ID NO: 4628145 - DNA, 25 bp, Homo sapien
tcgaactggcgcttggcggcgttgc

SEQ ID NO: 4628146 - DNA, 25 bp, Homo sapien
ccaatcagaagagcctggttacgct

SEQ ID NO: 4628147 - DNA, 25 bp, Homo sapien
cctggttacgcttgggcccatcaat

SEQ ID NO: 4628148 - DNA, 25 bp, Homo sapien
gaagagcctggttacgcttgggccc

SEQ ID NO: 4628149 - DNA, 25 bp, Homo sapien
aagtacaccggccaatcagaagagc

SEQ ID NO: 4628150 - DNA, 25 bp, Homo sapien
gcggtggggctcttgttcgactttc

SEQ ID NO: 4628151 - DNA, 25 bp, Homo sapien
gcctgcattgtttacgctgtccctt

SEQ ID NO: 4628152 - DNA, 25 bp, Homo sapien
cattgtttacgctgtcccttttttg

SEQ ID NO: 4628153 - DNA, 25 bp, Homo sapien
gctataactgccacgatattatcca

SEQ ID NO: 4628154 - DNA, 25 bp, Homo sapien
ttccagttagatcaaggcagaggct

SEQ ID NO: 4628155 - DNA, 25 bp, Homo sapien
tacaattctagaaagctaactcggg

SEQ ID NO: 4628156 - DNA, 25 bp, Homo sapien
gaatttgtctgttgtgcgtatccca

SEQ ID NO: 4628157 - DNA, 25 bp, Homo sapien
gatgggtcactagtttaccaggcag

SEQ ID NO: 4628158 - DNA, 25 bp, Homo sapien
cttagggcactagtgtccagaaaat

SEQ ID NO: 4628159 - DNA, 25 bp, Homo sapien
gaaagccaactgtttgcctgcccac

SEQ ID NO: 4628160 - DNA, 25 bp, Homo sapien
gcaattctatgtgactactccctca

SEQ ID NO: 4628161 - DNA, 25 bp, Homo sapien
tgtagcctcaggctcctaatagcac

SEQ ID NO: 4628162 - DNA, 25 bp, Homo sapien
agatgtctagctgggatcatttcca

SEQ ID NO: 4628163 - DNA, 25 bp, Homo sapien
gaggttaagatgtctagctgggatc

SEQ ID NO: 4628164 - DNA, 25 bp, Homo sapien
gggagagggccgtagatgttaaatc

SEQ ID NO: 4628165 - DNA, 25 bp, Homo sapien
taaatcctggtatccgaagaagact

SEQ ID NO: 4628166 - DNA, 25 bp, Homo sapien
taggactacaagcaggagccatcac

SEQ ID NO: 4628167 - DNA, 25 bp, Homo sapien
tgctatgctgaccaagctagtcttg

SEQ ID NO: 4628168 - DNA, 25 bp, Homo sapien
actgcagcctcaagagctcactgca

SEQ ID NO: 4628169 - DNA, 25 bp, Homo sapien
tttttgacaatgtctctctgtgtca

SEQ ID NO: 4628170 - DNA, 25 bp, Homo sapien
agccaggattgcggaggtgagaact

SEQ ID NO: 4628171 - DNA, 25 bp, Homo sapien
gcagccaggattgcggaggtgagaa

SEQ ID NO: 4628172 - DNA, 25 bp, Homo sapien
aggctgacagcaggcaattcacact

SEQ ID NO: 4628173 - DNA, 25 bp, Homo sapien
caggattgcggaggtgagaactcca

SEQ ID NO: 4628174 - DNA, 25 bp, Homo sapien
tagggatccaagactagagggcaca

SEQ ID NO: 4628175 - DNA, 25 bp, Homo sapien
tctggacccatggaaagaacagttc

SEQ ID NO: 4628176 - DNA, 25 bp, Homo sapien
gaaagacaagcctgggttagccaca

SEQ ID NO: 4628177 - DNA, 25 bp, Homo sapien
taacagttaatctcaatggcgccag

SEQ ID NO: 4628178 - DNA, 25 bp, Homo sapien
aagatctcatattattggtccgtgg

SEQ ID NO: 4628179 - DNA, 25 bp, Homo sapien
acaaagatctcatattattggtccg

SEQ ID NO: 4628180 - DNA, 25 bp, Homo sapien
ttattggtccgtggttgaggcagaa

SEQ ID NO: 4628181 - DNA, 25 bp, Homo sapien
catattattggtccgtggttgaggc

SEQ ID NO: 4628182 - DNA, 25 bp, Homo sapien
cccattccagaagccaaaaggaagc

SEQ ID NO: 4628183 - DNA, 25 bp, Homo sapien
aaaaggaagcaccccatcactgtag

SEQ ID NO: 4628184 - DNA, 25 bp, Homo sapien
ccaaaaggaagcaccccatcactgt

SEQ ID NO: 4628185 - DNA, 25 bp, Homo sapien
aaggaagcaccccatcactgtagaa

SEQ ID NO: 4628186 - DNA, 25 bp, Homo sapien
ctccctatttatgtcaagaacttac

SEQ ID NO: 4628187 - DNA, 25 bp, Homo sapien
gactccctatttatgtcaagaactt

SEQ ID NO: 4628188 - DNA, 25 bp, Homo sapien
ggactccctatttatgtcaagaact

SEQ ID NO: 4628189 - DNA, 25 bp, Homo sapien
actccctatttatgtcaagaactta

SEQ ID NO: 4628190 - DNA, 25 bp, Homo sapien
cagaagtggtcctctccctgggtgg

SEQ ID NO: 4628191 - DNA, 25 bp, Homo sapien
ggtcctctccctgggtggatcacga

SEQ ID NO: 4628192 - DNA, 25 bp, Homo sapien
taagaaacagggacttactatgttg

SEQ ID NO: 4628193 - DNA, 25 bp, Homo sapien
actcccaaacagaagtggtcctctc

SEQ ID NO: 4628194 - DNA, 25 bp, Homo sapien
tggcaactaccctcagtcaatgtgg

SEQ ID NO: 4628195 - DNA, 25 bp, Homo sapien
tggcctctatcccaactcctccagg

SEQ ID NO: 4628196 - DNA, 25 bp, Homo sapien
tgtgacactggagatcctcagaagc

SEQ ID NO: 4628197 - DNA, 25 bp, Homo sapien
ggctggcatgtgtttgttgtgacac

SEQ ID NO: 4628198 - DNA, 25 bp, Homo sapien
tgaatgccatctgatgcctgcagca

SEQ ID NO: 4628199 - DNA, 25 bp, Homo sapien
tgttgtccactttgggaatgaggca

SEQ ID NO: 4628200 - DNA, 25 bp, Homo sapien
tcaagccacatgctctcaaggccat

SEQ ID NO: 4628201 - DNA, 25 bp, Homo sapien
tcttcggaagatgatcaagccacat

SEQ ID NO: 4628202 - DNA, 25 bp, Homo sapien
tcagtgacttttctaggtgttgcta

SEQ ID NO: 4628203 - DNA, 25 bp, Homo sapien
cagggcaggtagtgtctagttctcg

SEQ ID NO: 4628204 - DNA, 25 bp, Homo sapien
gcagggcaggtagtgtctagttctc

SEQ ID NO: 4628205 - DNA, 25 bp, Homo sapien
gacttttctaggtgttgctaaagga

SEQ ID NO: 4628206 - DNA, 25 bp, Homo sapien
cagccagcggtaggcttggtgctca

SEQ ID NO: 4628207 - DNA, 25 bp, Homo sapien
tgctcatgggagaggcggatctcca

SEQ ID NO: 4628208 - DNA, 25 bp, Homo sapien
gactgttttaggcttgttcctggcc

SEQ ID NO: 4628209 - DNA, 25 bp, Homo sapien
tccgccagccagtaaatgactgttt

SEQ ID NO: 4628210 - DNA, 25 bp, Homo sapien
cctgggagttgagccgatttcacaa

SEQ ID NO: 4628211 - DNA, 25 bp, Homo sapien
tacaaggtacacttactgggcctgg

SEQ ID NO: 4628212 - DNA, 25 bp, Homo sapien
gggtggcttcatcttagaaggccca

SEQ ID NO: 4628213 - DNA, 25 bp, Homo sapien
gaaggcccacaaggatcctgctgaa

SEQ ID NO: 4628214 - DNA, 25 bp, Homo sapien
ttcattgggcaacaactttctaata

SEQ ID NO: 4628215 - DNA, 25 bp, Homo sapien
agggctgtgggatctaacacctgct

SEQ ID NO: 4628216 - DNA, 25 bp, Homo sapien
cttcattgggcaacaactttctaat

SEQ ID NO: 4628217 - DNA, 25 bp, Homo sapien
cctggtaatccaggctgacctctgc

SEQ ID NO: 4628218 - DNA, 25 bp, Homo sapien
tccaaaaacttcatgcagcaggcct

SEQ ID NO: 4628219 - DNA, 25 bp, Homo sapien
tgtggtttggcactactgcccagca

SEQ ID NO: 4628220 - DNA, 25 bp, Homo sapien
tcagtgtgatatggtccctgctggc

SEQ ID NO: 4628221 - DNA, 25 bp, Homo sapien
ccctgctggcctggaaaaagaacat

SEQ ID NO: 4628222 - DNA, 25 bp, Homo sapien
ctttctgagaagctgggactgcagg

SEQ ID NO: 4628223 - DNA, 25 bp, Homo sapien
tgcaatctcaacctcaagcaatcct

SEQ ID NO: 4628224 - DNA, 25 bp, Homo sapien
ggtagagttcagtggcatagtcatg

SEQ ID NO: 4628225 - DNA, 25 bp, Homo sapien
tggcatagtcatggcttactgcaat

SEQ ID NO: 4628226 - DNA, 25 bp, Homo sapien
caagatacagctcaggccttggctt

SEQ ID NO: 4628227 - DNA, 25 bp, Homo sapien
gagaacctctgttaaggcaatgtgg

SEQ ID NO: 4628228 - DNA, 25 bp, Homo sapien
gaagtttgctacaggagtgaggccc

SEQ ID NO: 4628229 - DNA, 25 bp, Homo sapien
gcccagggacttggtaccatgcatc

SEQ ID NO: 4628230 - DNA, 25 bp, Homo sapien
cagagctgagctaccgagtgtgcgt

SEQ ID NO: 4628231 - DNA, 25 bp, Homo sapien
ttcaacaagccgtcaagggtgccag

SEQ ID NO: 4628232 - DNA, 25 bp, Homo sapien
caaggtgctgcgttttgcccaacag

SEQ ID NO: 4628233 - DNA, 25 bp, Homo sapien
gaaatcgacgacatgtacacacctg

SEQ ID NO: 4628234 - DNA, 25 bp, Homo sapien
taccctcaggtctatatacaataaa

SEQ ID NO: 4628235 - DNA, 25 bp, Homo sapien
aatttaagcaaacgttatctataga

SEQ ID NO: 4628236 - DNA, 25 bp, Homo sapien
attataatggcttttaatctgtaat

SEQ ID NO: 4628237 - DNA, 25 bp, Homo sapien
gcaaacgttatctatagaaaataat

SEQ ID NO: 4628238 - DNA, 25 bp, Homo sapien
tatcgtatgccctttcaggaagcaa

SEQ ID NO: 4628239 - DNA, 25 bp, Homo sapien
ctcaaattgccataataagtaaggg

SEQ ID NO: 4628240 - DNA, 25 bp, Homo sapien
tatgagagtgcctgactccatactc

SEQ ID NO: 4628241 - DNA, 25 bp, Homo sapien
cagctggaggaatgctaatgctatc

SEQ ID NO: 4628242 - DNA, 25 bp, Homo sapien
gaggccctctgaactcttagaaatt

SEQ ID NO: 4628243 - DNA, 25 bp, Homo sapien
tgtgggttcccaggcatgccactga

SEQ ID NO: 4628244 - DNA, 25 bp, Homo sapien
gaaacctgacctagaagatctccag

SEQ ID NO: 4628245 - DNA, 25 bp, Homo sapien
gctcttttgataggcttgaggcagg

SEQ ID NO: 4628246 - DNA, 25 bp, Homo sapien
tttgggggctcatttagactgctgc

SEQ ID NO: 4628247 - DNA, 25 bp, Homo sapien
acataccttatagcacaggcccagg

SEQ ID NO: 4628248 - DNA, 25 bp, Homo sapien
cacatgtggctctgtttgggattac

SEQ ID NO: 4628249 - DNA, 25 bp, Homo sapien
gcacagatagcctaagactgcacag

SEQ ID NO: 4628250 - DNA, 25 bp, Homo sapien
tgcaggcatgcagtagactcaccca

SEQ ID NO: 4628251 - DNA, 25 bp, Homo sapien
catagaaatttctgtggtggggagg

SEQ ID NO: 4628252 - DNA, 25 bp, Homo sapien
atagaaatttctgtggtggggaggg

SEQ ID NO: 4628253 - DNA, 25 bp, Homo sapien
caggtcatggtgtcacctaaaggaa

SEQ ID NO: 4628254 - DNA, 25 bp, Homo sapien
ttcggccccttagcacaggaccaga

SEQ ID NO: 4628255 - DNA, 25 bp, Homo sapien
caggaccagacttataattagtgac

SEQ ID NO: 4628256 - DNA, 25 bp, Homo sapien
tgtaaccagagagggtcttcggccc

SEQ ID NO: 4628257 - DNA, 25 bp, Homo sapien
tgtgacgaatgctaccaaaaaagtg

SEQ ID NO: 4628258 - DNA, 25 bp, Homo sapien
tattagtctctcaaggaggttgctg

SEQ ID NO: 4628259 - DNA, 25 bp, Homo sapien
tctactcagtcaaggctaagggcta

SEQ ID NO: 4628260 - DNA, 25 bp, Homo sapien
tcaggaacttgcaaaccactgtggc

SEQ ID NO: 4628261 - DNA, 25 bp, Homo sapien
tgggagtcatcctagctcaagtctt

SEQ ID NO: 4628262 - DNA, 25 bp, Homo sapien
ccttagtgccccagcggtttgacct

SEQ ID NO: 4628263 - DNA, 25 bp, Homo sapien
aacccagatccagtcagccttagtg

SEQ ID NO: 4628264 - DNA, 25 bp, Homo sapien
tttggtggcatcacaattcacgcag

SEQ ID NO: 4628265 - DNA, 25 bp, Homo sapien
ctgaagtccttgctgggcgcggatc

SEQ ID NO: 4628266 - DNA, 25 bp, Homo sapien
tgaagtccttgctgggcgcggatcc

SEQ ID NO: 4628267 - DNA, 25 bp, Homo sapien
gaagtccttgctgggcgcggatcct

SEQ ID NO: 4628268 - DNA, 25 bp, Homo sapien
gagatccctgaaaacgtattgccgg

SEQ ID NO: 4628269 - DNA, 25 bp, Homo sapien
caaaggtgcacaccgctagtggagg

SEQ ID NO: 4628270 - DNA, 25 bp, Homo sapien
catgatggaggagatcgaccggttc

SEQ ID NO: 4628271 - DNA, 25 bp, Homo sapien
cttgcaggacaagaaaaccgtggga

SEQ ID NO: 4628272 - DNA, 25 bp, Homo sapien
atagaatccaactccctgacgcggt

SEQ ID NO: 4628273 - DNA, 25 bp, Homo sapien
ttcagttaccagtcgcaacggttct

SEQ ID NO: 4628274 - DNA, 25 bp, Homo sapien
aaaacgctccctcgtctgaagacaa

SEQ ID NO: 4628275 - DNA, 25 bp, Homo sapien
tctttagggacagccgtcgttgtgg

SEQ ID NO: 4628276 - DNA, 25 bp, Homo sapien
ttatggggagccttcgcagaagcag

SEQ ID NO: 4628277 - DNA, 25 bp, Homo sapien
cttatgaggctgtttatggggagcc

SEQ ID NO: 4628278 - DNA, 25 bp, Homo sapien
tgtttatggggagccttcgcagaag

SEQ ID NO: 4628279 - DNA, 25 bp, Homo sapien
gctgtttatggggagccttcgcaga

SEQ ID NO: 4628280 - DNA, 25 bp, Homo sapien
gctgctctaacctgcaggcttctct

SEQ ID NO: 4628281 - DNA, 25 bp, Homo sapien
tctctccccttcatccccagggatc

SEQ ID NO: 4628282 - DNA, 25 bp, Homo sapien
ccctgaagcctttctgctgctctaa

SEQ ID NO: 4628283 - DNA, 25 bp, Homo sapien
tccccttcatccccagggatcccat

SEQ ID NO: 4628284 - DNA, 25 bp, Homo sapien
taatcataacaaaatggaactgcca

SEQ ID NO: 4628285 - DNA, 25 bp, Homo sapien
ttatcacttccagaaggaattccat

SEQ ID NO: 4628286 - DNA, 25 bp, Homo sapien
ggaactgccattggcaaaaattgtt

SEQ ID NO: 4628287 - DNA, 25 bp, Homo sapien
gttatcacttccagaaggaattcca

SEQ ID NO: 4628288 - DNA, 25 bp, Homo sapien
attaagcacaattctagcagcacct

SEQ ID NO: 4628289 - DNA, 25 bp, Homo sapien
gacctataggttattcagaagtatt

SEQ ID NO: 4628290 - DNA, 25 bp, Homo sapien
tctaatacagcgtttaaaactatac

SEQ ID NO: 4628291 - DNA, 25 bp, Homo sapien
tagcagcacctcacaatttttatgt

SEQ ID NO: 4628292 - DNA, 25 bp, Homo sapien
agaaggtcctcttctcttggatagg

SEQ ID NO: 4628293 - DNA, 25 bp, Homo sapien
gaagatgtctatgaaagagtgaagc

SEQ ID NO: 4628294 - DNA, 25 bp, Homo sapien
tctatttggccaagggaagatgtct

SEQ ID NO: 4628295 - DNA, 25 bp, Homo sapien
gcagacaatttagccctgcggatca

SEQ ID NO: 4628296 - DNA, 25 bp, Homo sapien
ttcctggttcctctgcctatgctga

SEQ ID NO: 4628297 - DNA, 25 bp, Homo sapien
cctggttcctctgcctatgctgatg

SEQ ID NO: 4628298 - DNA, 25 bp, Homo sapien
tggttcctctgcctatgctgatgct

SEQ ID NO: 4628299 - DNA, 25 bp, Homo sapien
tcttcctggttcctctgcctatgct

SEQ ID NO: 4628300 - DNA, 25 bp, Homo sapien
ctcacatgaggcttgggagtgtctt

SEQ ID NO: 4628301 - DNA, 25 bp, Homo sapien
tcacatgaggcttgggagtgtcttt

SEQ ID NO: 4628302 - DNA, 25 bp, Homo sapien
acaagcatacagaaagccccttcat

SEQ ID NO: 4628303 - DNA, 25 bp, Homo sapien
tttctgcttggacaagcatacagaa

SEQ ID NO: 4628304 - DNA, 25 bp, Homo sapien
tgtggctttggattgggcccattca

SEQ ID NO: 4628305 - DNA, 25 bp, Homo sapien
cagggggtctaactgtggctttgga

SEQ ID NO: 4628306 - DNA, 25 bp, Homo sapien
tggctttggattgggcccattcatc

SEQ ID NO: 4628307 - DNA, 25 bp, Homo sapien
agggggtctaactgtggctttggat

SEQ ID NO: 4628308 - DNA, 25 bp, Homo sapien
tttgaagctgtacctgacaatgttc

SEQ ID NO: 4628309 - DNA, 25 bp, Homo sapien
tccgagtgaactcctcctttaactc

SEQ ID NO: 4628310 - DNA, 25 bp, Homo sapien
gttgttggctgtcaaaatccgagtg

SEQ ID NO: 4628311 - DNA, 25 bp, Homo sapien
tgaagctgtacctgacaatgttctg

SEQ ID NO: 4628312 - DNA, 25 bp, Homo sapien
gaatgaaacccagactccattgctt

SEQ ID NO: 4628313 - DNA, 25 bp, Homo sapien
cagtagttgactgggatcttcctct

SEQ ID NO: 4628314 - DNA, 25 bp, Homo sapien
gtttaggaatgaaacccagactcca

SEQ ID NO: 4628315 - DNA, 25 bp, Homo sapien
tcatcttgtccccagtagttgactg

SEQ ID NO: 4628316 - DNA, 25 bp, Homo sapien
gaaggatcgccatcacacaggttgg

SEQ ID NO: 4628317 - DNA, 25 bp, Homo sapien
tgtatggcacactacggtaaactca

SEQ ID NO: 4628318 - DNA, 25 bp, Homo sapien
tcagatgtatgggaagacaagtcag

SEQ ID NO: 4628319 - DNA, 25 bp, Homo sapien
tgactttgggcttaaccactctaag

SEQ ID NO: 4628320 - DNA, 25 bp, Homo sapien
ggatagatcttcagagacaacccca

SEQ ID NO: 4628321 - DNA, 25 bp, Homo sapien
gagaagcaggattaggcttacagcc

SEQ ID NO: 4628322 - DNA, 25 bp, Homo sapien
ggttggcatttgtccgggtcacaca

SEQ ID NO: 4628323 - DNA, 25 bp, Homo sapien
gccataccacataccctgggcagat

SEQ ID NO: 4628324 - DNA, 25 bp, Homo sapien
atcctcagttaatctgaagttttca

SEQ ID NO: 4628325 - DNA, 25 bp, Homo sapien
aatcctcagttaatctgaagttttc

SEQ ID NO: 4628326 - DNA, 25 bp, Homo sapien
caaatcctcagttaatctgaagttt

SEQ ID NO: 4628327 - DNA, 25 bp, Homo sapien
aaatcctcagttaatctgaagtttt

SEQ ID NO: 4628328 - DNA, 25 bp, Homo sapien
ggtgtagtgaactgccagttggttc

SEQ ID NO: 4628329 - DNA, 25 bp, Homo sapien
gatcaggttcccaacctgggtgtag

SEQ ID NO: 4628330 - DNA, 25 bp, Homo sapien
atgctgccgccgtccttcatctgag

SEQ ID NO: 4628331 - DNA, 25 bp, Homo sapien
taattcatcgcggtaatgctgccgc

SEQ ID NO: 4628332 - DNA, 25 bp, Homo sapien
ctgcaggcacatctgtttgactccc

SEQ ID NO: 4628333 - DNA, 25 bp, Homo sapien
tcttcgtcttcttcgaggtttcctg

SEQ ID NO: 4628334 - DNA, 25 bp, Homo sapien
ctcttcgtcttcttcgaggtttcct

SEQ ID NO: 4628335 - DNA, 25 bp, Homo sapien
ggcacatctgtttgactcccaggct

SEQ ID NO: 4628336 - DNA, 25 bp, Homo sapien
tcctttcccaagttacccatgaagc

SEQ ID NO: 4628337 - DNA, 25 bp, Homo sapien
tcctcctttcccaagttacccatga

SEQ ID NO: 4628338 - DNA, 25 bp, Homo sapien
ctttcccaagttacccatgaagcct

SEQ ID NO: 4628339 - DNA, 25 bp, Homo sapien
ttcccaagttacccatgaagcctcc

SEQ ID NO: 4628340 - DNA, 25 bp, Homo sapien
tagaaaaccgggagatggggcaagc

SEQ ID NO: 4628341 - DNA, 25 bp, Homo sapien
cccagaggatcaggaatcagctgtg

SEQ ID NO: 4628342 - DNA, 25 bp, Homo sapien
tggtagaaaaccgggagatggggca

SEQ ID NO: 4628343 - DNA, 25 bp, Homo sapien
aataaagacccagaggatcaggaat

SEQ ID NO: 4628344 - DNA, 25 bp, Homo sapien
cactgaagttgaactggttagtgag

SEQ ID NO: 4628345 - DNA, 25 bp, Homo sapien
ctgaagttgaactggttagtgagct

SEQ ID NO: 4628346 - DNA, 25 bp, Homo sapien
tgaactggttagtgagctttctctc

SEQ ID NO: 4628347 - DNA, 25 bp, Homo sapien
aagttgaactggttagtgagctttc

SEQ ID NO: 4628348 - DNA, 25 bp, Homo sapien
agaacaagacaacaggagacccaca

SEQ ID NO: 4628349 - DNA, 25 bp, Homo sapien
tccaacagtatatctttgagagaag

SEQ ID NO: 4628350 - DNA, 25 bp, Homo sapien
aagcattttggctggggctgatgga

SEQ ID NO: 4628351 - DNA, 25 bp, Homo sapien
acaagacaacaggagacccacaaaa

SEQ ID NO: 4628352 - DNA, 25 bp, Homo sapien
ggctgtggctgaaaagtttgtcctg

SEQ ID NO: 4628353 - DNA, 25 bp, Homo sapien
gaggctccgtctggcattctcgatc

SEQ ID NO: 4628354 - DNA, 25 bp, Homo sapien
ggaggaggctccgtctggcattctc

SEQ ID NO: 4628355 - DNA, 25 bp, Homo sapien
ctgggaggaggctccgtctggcatt

SEQ ID NO: 4628356 - DNA, 25 bp, Homo sapien
cttctcaagttcctctacataggca

SEQ ID NO: 4628357 - DNA, 25 bp, Homo sapien
ctacataggcatcatagatctccca

SEQ ID NO: 4628358 - DNA, 25 bp, Homo sapien
cctctacataggcatcatagatctc

SEQ ID NO: 4628359 - DNA, 25 bp, Homo sapien
aagttcctctacataggcatcatag

SEQ ID NO: 4628360 - DNA, 25 bp, Homo sapien
tctggttgaccatccgctccatgat

SEQ ID NO: 4628361 - DNA, 25 bp, Homo sapien
atatgtattctggttgaccatccgc

SEQ ID NO: 4628362 - DNA, 25 bp, Homo sapien
gctccatgatcttagcagcttggga

SEQ ID NO: 4628363 - DNA, 25 bp, Homo sapien
cttgggacaatttgatgagatcatc

SEQ ID NO: 4628364 - DNA, 25 bp, Homo sapien
gaatgtgctgttcatgccatgggaa

SEQ ID NO: 4628365 - DNA, 25 bp, Homo sapien
aaataaatgcacaacctcttaggga

SEQ ID NO: 4628366 - DNA, 25 bp, Homo sapien
tacaagccacttgggaatgtgctgt

SEQ ID NO: 4628367 - DNA, 25 bp, Homo sapien
cttagggaaatacaagccacttggg

SEQ ID NO: 4628368 - DNA, 25 bp, Homo sapien
gctgggtttcaagaagccacgctgt

SEQ ID NO: 4628369 - DNA, 25 bp, Homo sapien
taatcaggtttgcagccctttggtg

SEQ ID NO: 4628370 - DNA, 25 bp, Homo sapien
aaagcactcaaggtcgttttccagc

SEQ ID NO: 4628371 - DNA, 25 bp, Homo sapien
ccttcatgattacactttcccaaag

SEQ ID NO: 4628372 - DNA, 25 bp, Homo sapien
tttctagtcagctgtccgtgtcccc

SEQ ID NO: 4628373 - DNA, 25 bp, Homo sapien
caaatcatgccaatgagtccagttg

SEQ ID NO: 4628374 - DNA, 25 bp, Homo sapien
gattaaaccaagaggagatccacgt

SEQ ID NO: 4628375 - DNA, 25 bp, Homo sapien
gagtacaaacaaggcacctcacgac

SEQ ID NO: 4628376 - DNA, 25 bp, Homo sapien
gctttatggcaaacccaggtccacc

SEQ ID NO: 4628377 - DNA, 25 bp, Homo sapien
tcagccctgggactgccgctttatg

SEQ ID NO: 4628378 - DNA, 25 bp, Homo sapien
tgtgtttccctagcatttcaggagg

SEQ ID NO: 4628379 - DNA, 25 bp, Homo sapien
ggtacattacaatacaccggccatg

SEQ ID NO: 4628380 - DNA, 25 bp, Homo sapien
atcagcagcatcgtcatagtactta

SEQ ID NO: 4628381 - DNA, 25 bp, Homo sapien
cacctggtcccggtattcatcagca

SEQ ID NO: 4628382 - DNA, 25 bp, Homo sapien
gcagcatcgtcatagtacttaaaat

SEQ ID NO: 4628383 - DNA, 25 bp, Homo sapien
agagggcagtgacggacaggcgctt

SEQ ID NO: 4628384 - DNA, 25 bp, Homo sapien
gacatctgttctccagcttaggccc

SEQ ID NO: 4628385 - DNA, 25 bp, Homo sapien
ggcataggaaatgaacatggccctc

SEQ ID NO: 4628386 - DNA, 25 bp, Homo sapien
tgtcacatgtcatactcaaggtggt

SEQ ID NO: 4628387 - DNA, 25 bp, Homo sapien
tgtgatcccataagaatccaagttc

SEQ ID NO: 4628388 - DNA, 25 bp, Homo sapien
gcaaacagatccctgtactttggat

SEQ ID NO: 4628389 - DNA, 25 bp, Homo sapien
aaacagatccctgtactttggattc

SEQ ID NO: 4628390 - DNA, 25 bp, Homo sapien
caaacagatccctgtactttggatt

SEQ ID NO: 4628391 - DNA, 25 bp, Homo sapien
tccacagtgtggttaaggtcctgcc

SEQ ID NO: 4628392 - DNA, 25 bp, Homo sapien
tgtcaccaacgaagaaaccaaggct

SEQ ID NO: 4628393 - DNA, 25 bp, Homo sapien
gaatgtgctagttccctgccagagg

SEQ ID NO: 4628394 - DNA, 25 bp, Homo sapien
tactgtgaagtgtagggccctctcc

SEQ ID NO: 4628395 - DNA, 25 bp, Homo sapien
tctgctcgggctccctgagggtact

SEQ ID NO: 4628396 - DNA, 25 bp, Homo sapien
gctcgggctccctgagggtactgca

SEQ ID NO: 4628397 - DNA, 25 bp, Homo sapien
cttctctgctcgggctccctgaggg

SEQ ID NO: 4628398 - DNA, 25 bp, Homo sapien
cacaccccccttctctgctcgggct

SEQ ID NO: 4628399 - DNA, 25 bp, Homo sapien
tggaggcactcaagagcatgggact

SEQ ID NO: 4628400 - DNA, 25 bp, Homo sapien
gaggtctagactcagctcaccagag

SEQ ID NO: 4628401 - DNA, 25 bp, Homo sapien
caaggctctggagaatagatgctca

SEQ ID NO: 4628402 - DNA, 25 bp, Homo sapien
tgggagcttccaaagacagtgtgat

SEQ ID NO: 4628403 - DNA, 25 bp, Homo sapien
cctggctggctccaaccaacctggc

SEQ ID NO: 4628404 - DNA, 25 bp, Homo sapien
cccgcagccgaggagtgatggattt

SEQ ID NO: 4628405 - DNA, 25 bp, Homo sapien
aatgggctggaaaggaccccttcag

SEQ ID NO: 4628406 - DNA, 25 bp, Homo sapien
tacagccggctgacatcattgcatc

SEQ ID NO: 4628407 - DNA, 25 bp, Homo sapien
tacccagcagctatagaagggaagc

SEQ ID NO: 4628408 - DNA, 25 bp, Homo sapien
tggaaggctagtgcagcccctacct

SEQ ID NO: 4628409 - DNA, 25 bp, Homo sapien
aaggctagtgcagcccctacctggg

SEQ ID NO: 4628410 - DNA, 25 bp, Homo sapien
caagctcaggggagccgaagctgga

SEQ ID NO: 4628411 - DNA, 25 bp, Homo sapien
agaggtggaaggctagtgcagcccc

SEQ ID NO: 4628412 - DNA, 25 bp, Homo sapien
cacacagggtctgagtgcttgccag

SEQ ID NO: 4628413 - DNA, 25 bp, Homo sapien
gcatgccccggctctgcttcatgaa

SEQ ID NO: 4628414 - DNA, 25 bp, Homo sapien
taaatggccacgttgccgtcatagt

SEQ ID NO: 4628415 - DNA, 25 bp, Homo sapien
tgtcgagacacatgacgccgctgtt

SEQ ID NO: 4628416 - DNA, 25 bp, Homo sapien
aagacacaatcctgccgtcagatga

SEQ ID NO: 4628417 - DNA, 25 bp, Homo sapien
caatcctgccgtcagatgacacaga

SEQ ID NO: 4628418 - DNA, 25 bp, Homo sapien
gagtccaagacacaatcctgccgtc

SEQ ID NO: 4628419 - DNA, 25 bp, Homo sapien
gtccaagacacaatcctgccgtcag

SEQ ID NO: 4628420 - DNA, 25 bp, Homo sapien
ggaacttccgtggtgctgccttcca

SEQ ID NO: 4628421 - DNA, 25 bp, Homo sapien
gatgacatctatgtgaaccagcttt

SEQ ID NO: 4628422 - DNA, 25 bp, Homo sapien
cagcttgatgacatctatgtgaacc

SEQ ID NO: 4628423 - DNA, 25 bp, Homo sapien
gtgcagctgcaacccctcaggaact

SEQ ID NO: 4628424 - DNA, 25 bp, Homo sapien
ctctgtgcccactaggaacatgtag

SEQ ID NO: 4628425 - DNA, 25 bp, Homo sapien
tgtagtcaatctctttgtggaagtc

SEQ ID NO: 4628426 - DNA, 25 bp, Homo sapien
tgtgcccactaggaacatgtagtca

SEQ ID NO: 4628427 - DNA, 25 bp, Homo sapien
tgcccactaggaacatgtagtcaat

SEQ ID NO: 4628428 - DNA, 25 bp, Homo sapien
cgtcataggtgtcgaggaattggct

SEQ ID NO: 4628429 - DNA, 25 bp, Homo sapien
agctgcaggacatgaagaccttggt

SEQ ID NO: 4628430 - DNA, 25 bp, Homo sapien
ccactgacatgttgtgggcgtcata

SEQ ID NO: 4628431 - DNA, 25 bp, Homo sapien
agaccttggtgtggtatgggttcca

SEQ ID NO: 4628432 - DNA, 25 bp, Homo sapien
agggctcacagtgccatagcccagg

SEQ ID NO: 4628433 - DNA, 25 bp, Homo sapien
agagggctcacagtgccatagccca

SEQ ID NO: 4628434 - DNA, 25 bp, Homo sapien
ggagggtggaaagcccatggcacag

SEQ ID NO: 4628435 - DNA, 25 bp, Homo sapien
acagagggctcacagtgccatagcc

SEQ ID NO: 4628436 - DNA, 25 bp, Homo sapien
gactgctgcgaacacagtagaagag

SEQ ID NO: 4628437 - DNA, 25 bp, Homo sapien
catcacccacggctgagttcaggtc

SEQ ID NO: 4628438 - DNA, 25 bp, Homo sapien
tctgtggtgactgctgcgaacacag

SEQ ID NO: 4628439 - DNA, 25 bp, Homo sapien
gtagaagagtatggcgcccaggcca

SEQ ID NO: 4628440 - DNA, 25 bp, Homo sapien
tccacaagagcaggtatctaagcca

SEQ ID NO: 4628441 - DNA, 25 bp, Homo sapien
tctcctccaaggtgaacagctctgt

SEQ ID NO: 4628442 - DNA, 25 bp, Homo sapien
gactgacggactttagaatggtgcc

SEQ ID NO: 4628443 - DNA, 25 bp, Homo sapien
ggcaccatcgttggcccttagtagt

SEQ ID NO: 4628444 - DNA, 25 bp, Homo sapien
agaagtggaattatacagtatgtgg

SEQ ID NO: 4628445 - DNA, 25 bp, Homo sapien
gtggaattatacagtatgtggtctt

SEQ ID NO: 4628446 - DNA, 25 bp, Homo sapien
tatagaagtggaattatacagtatg

SEQ ID NO: 4628447 - DNA, 25 bp, Homo sapien
aagtggaattatacagtatgtggtc

SEQ ID NO: 4628448 - DNA, 25 bp, Homo sapien
gattgaactgcacgtgggtgagcct

SEQ ID NO: 4628449 - DNA, 25 bp, Homo sapien
tgatggctaagtcaaatatgtgggc

SEQ ID NO: 4628450 - DNA, 25 bp, Homo sapien
tgatgatgtgcccacggtcatcgcc

SEQ ID NO: 4628451 - DNA, 25 bp, Homo sapien
catcttgcgcaaattgggtgagagc

SEQ ID NO: 4628452 - DNA, 25 bp, Homo sapien
gtttcgcaatctccacagctggacc

SEQ ID NO: 4628453 - DNA, 25 bp, Homo sapien
cagtttcgcaatctccacagctgga

SEQ ID NO: 4628454 - DNA, 25 bp, Homo sapien
tgtccagtttcgcaatctccacagc

SEQ ID NO: 4628455 - DNA, 25 bp, Homo sapien
agtttgtccagtttcgcaatctcca

SEQ ID NO: 4628456 - DNA, 25 bp, Homo sapien
tattcaagcgatgggacagagactg

SEQ ID NO: 4628457 - DNA, 25 bp, Homo sapien
gggtcaagccctaggagtactgtat

SEQ ID NO: 4628458 - DNA, 25 bp, Homo sapien
taaggtgctgggaccttaaggaaca

SEQ ID NO: 4628459 - DNA, 25 bp, Homo sapien
ttctacacaggtttatttgtgcaaa

SEQ ID NO: 4628460 - DNA, 25 bp, Homo sapien
tctgcaacggtctcgtgggcttctt

SEQ ID NO: 4628461 - DNA, 25 bp, Homo sapien
gctctgccgacgttgactctctctc

SEQ ID NO: 4628462 - DNA, 25 bp, Homo sapien
gtctgagggtgctgcctgtcatggg

SEQ ID NO: 4628463 - DNA, 25 bp, Homo sapien
ttgaggcagctccactgtctgtgct

SEQ ID NO: 4628464 - DNA, 25 bp, Homo sapien
aagttccctctgtgcaagctggcgc

SEQ ID NO: 4628465 - DNA, 25 bp, Homo sapien
ctggaggtctcctggtcgggctggc

SEQ ID NO: 4628466 - DNA, 25 bp, Homo sapien
gttccctctgtgcaagctggcgcct

SEQ ID NO: 4628467 - DNA, 25 bp, Homo sapien
caaagttccctctgtgcaagctggc

SEQ ID NO: 4628468 - DNA, 25 bp, Homo sapien
gagacatagaggagacatactcaga

SEQ ID NO: 4628469 - DNA, 25 bp, Homo sapien
acaggcacacatccaacggagggac

SEQ ID NO: 4628470 - DNA, 25 bp, Homo sapien
gaaatgagacatagaggagacatac

SEQ ID NO: 4628471 - DNA, 25 bp, Homo sapien
cacatccaacggagggacagtgaga

SEQ ID NO: 4628472 - DNA, 25 bp, Homo sapien
caagaaatccctaccagaggttagg

SEQ ID NO: 4628473 - DNA, 25 bp, Homo sapien
caggtgtagaaggtgcaagaaatcc

SEQ ID NO: 4628474 - DNA, 25 bp, Homo sapien
tcttcgctgtttttgctggccgccg

SEQ ID NO: 4628475 - DNA, 25 bp, Homo sapien
cacgcgacccgaagatggagataaa

SEQ ID NO: 4628476 - DNA, 25 bp, Homo sapien
aagcctgcgaccaacactgggtagg

SEQ ID NO: 4628477 - DNA, 25 bp, Homo sapien
ttttcacacctcttagggccaggga

SEQ ID NO: 4628478 - DNA, 25 bp, Homo sapien
tgcgggactgcactataggcggttc

SEQ ID NO: 4628479 - DNA, 25 bp, Homo sapien
tgtccaaagaacctgtgttgccaga

SEQ ID NO: 4628480 - DNA, 25 bp, Homo sapien
ttaaggctagacttgggagcactgg

SEQ ID NO: 4628481 - DNA, 25 bp, Homo sapien
tatagcttcagggatgtgatcctcc

SEQ ID NO: 4628482 - DNA, 25 bp, Homo sapien
cactgggagtcttcatgatatagct

SEQ ID NO: 4628483 - DNA, 25 bp, Homo sapien
gacggccggatcagaataggtgaca

SEQ ID NO: 4628484 - DNA, 25 bp, Homo sapien
aatttcggttctaatccaggctcta

SEQ ID NO: 4628485 - DNA, 25 bp, Homo sapien
taagggagacaacaagctggagttg

SEQ ID NO: 4628486 - DNA, 25 bp, Homo sapien
aggctctatcacctgctgccatggg

SEQ ID NO: 4628487 - DNA, 25 bp, Homo sapien
tgaaggcagtgcagcaaatttcggt

SEQ ID NO: 4628488 - DNA, 25 bp, Homo sapien
tttttttcagtttctcgctctgtca

SEQ ID NO: 4628489 - DNA, 25 bp, Homo sapien
ttttttttcagtttctcgctctgtc

SEQ ID NO: 4628490 - DNA, 25 bp, Homo sapien
cacaaaggagattcatttaaaccgc

SEQ ID NO: 4628491 - DNA, 25 bp, Homo sapien
gagcaagacacactctcttatttgt

SEQ ID NO: 4628492 - DNA, 25 bp, Homo sapien
gatatgctgtttgagcacaaaggag

SEQ ID NO: 4628493 - DNA, 25 bp, Homo sapien
tagattacgtctatgacgcatagcc

SEQ ID NO: 4628494 - DNA, 25 bp, Homo sapien
cattaaacgtcaccatttcatgagt

SEQ ID NO: 4628495 - DNA, 25 bp, Homo sapien
tcagtcccttctagtctgactcaat

SEQ ID NO: 4628496 - DNA, 25 bp, Homo sapien
ggttctcattaaacgtcaccatttc

SEQ ID NO: 4628497 - DNA, 25 bp, Homo sapien
gagtgggcggttctcattaaacgtc

SEQ ID NO: 4628498 - DNA, 25 bp, Homo sapien
ttgaaccaggcttcctaagctccct

SEQ ID NO: 4628499 - DNA, 25 bp, Homo sapien
gtcagtcgggttgggtgaaagcaga

SEQ ID NO: 4628500 - DNA, 25 bp, Homo sapien
ggcttcctaagctccctgcctgcat

SEQ ID NO: 4628501 - DNA, 25 bp, Homo sapien
tgattcccacctcctactccgtgtc

SEQ ID NO: 4628502 - DNA, 25 bp, Homo sapien
tcggggacagatgacggatctgagg

SEQ ID NO: 4628503 - DNA, 25 bp, Homo sapien
gacagatgacggatctgaggggctc

SEQ ID NO: 4628504 - DNA, 25 bp, Homo sapien
gggtgtcggggacagatgacggatc

SEQ ID NO: 4628505 - DNA, 25 bp, Homo sapien
tgtcggggacagatgacggatctga

SEQ ID NO: 4628506 - DNA, 25 bp, Homo sapien
tgacctgggtcatgtcccactgccc

SEQ ID NO: 4628507 - DNA, 25 bp, Homo sapien
gatcattggtgtacaattacggaaa

SEQ ID NO: 4628508 - DNA, 25 bp, Homo sapien
ggtgtacaattacggaaaagccaca

SEQ ID NO: 4628509 - DNA, 25 bp, Homo sapien
cattggtgtacaattacggaaaagc

SEQ ID NO: 4628510 - DNA, 25 bp, Homo sapien
ttgcttctgtgtggttgatagttct

SEQ ID NO: 4628511 - DNA, 25 bp, Homo sapien
cttctgtgtggttgatagttctctc

SEQ ID NO: 4628512 - DNA, 25 bp, Homo sapien
gcttctgtgtggttgatagttctct

SEQ ID NO: 4628513 - DNA, 25 bp, Homo sapien
tctgtgtggttgatagttctctctc

SEQ ID NO: 4628514 - DNA, 25 bp, Homo sapien
tctctggcagtgtgtctgactgtgt

SEQ ID NO: 4628515 - DNA, 25 bp, Homo sapien
tcaagggtagcaaaaggcaggcagg

SEQ ID NO: 4628516 - DNA, 25 bp, Homo sapien
gtatatctggcactgcgtctctgtc

SEQ ID NO: 4628517 - DNA, 25 bp, Homo sapien
tggcagtctttataacggtgtctct

SEQ ID NO: 4628518 - DNA, 25 bp, Homo sapien
tcctgctcccatgtggtgggcagtg

SEQ ID NO: 4628519 - DNA, 25 bp, Homo sapien
ggcactgaggcggaggatcttcctg

SEQ ID NO: 4628520 - DNA, 25 bp, Homo sapien
ggttcctgctcccatgtggtgggca

SEQ ID NO: 4628521 - DNA, 25 bp, Homo sapien
gcctggcactgaggcggaggatctt

SEQ ID NO: 4628522 - DNA, 25 bp, Homo sapien
tctgggtgcccgctagacagttatg

SEQ ID NO: 4628523 - DNA, 25 bp, Homo sapien
gagtggaggtctcatctccttccct

SEQ ID NO: 4628524 - DNA, 25 bp, Homo sapien
cacagcagatagctaggctgagagc

SEQ ID NO: 4628525 - DNA, 25 bp, Homo sapien
gcacatagaggttttgaagaggcct

SEQ ID NO: 4628526 - DNA, 25 bp, Homo sapien
gagagggcacgtaatcctccgcaaa

SEQ ID NO: 4628527 - DNA, 25 bp, Homo sapien
ggaaagtgtgctactgggctgagag

SEQ ID NO: 4628528 - DNA, 25 bp, Homo sapien
gcaaactgggaacaccttagggagc

SEQ ID NO: 4628529 - DNA, 25 bp, Homo sapien
gaggagtctgatggcttatttggaa

SEQ ID NO: 4628530 - DNA, 25 bp, Homo sapien
tctctgggcaggattggaagacatg

SEQ ID NO: 4628531 - DNA, 25 bp, Homo sapien
ggcacctaatcatacctttggcaga

SEQ ID NO: 4628532 - DNA, 25 bp, Homo sapien
tgtgcgtagctatacagactctgca

SEQ ID NO: 4628533 - DNA, 25 bp, Homo sapien
tgttttcaagggagcagttggaccc

SEQ ID NO: 4628534 - DNA, 25 bp, Homo sapien
caaaggtggcttctttctcgggcag

SEQ ID NO: 4628535 - DNA, 25 bp, Homo sapien
gttcgtagtggcctttgcgcgccca

SEQ ID NO: 4628536 - DNA, 25 bp, Homo sapien
tgcacgcgcggggtctggaaaaatt

SEQ ID NO: 4628537 - DNA, 25 bp, Homo sapien
aatctggacttcaaagcgcccgggg

SEQ ID NO: 4628538 - DNA, 25 bp, Homo sapien
ctgcggcggagtgcgcgcggccgga

SEQ ID NO: 4628539 - DNA, 25 bp, Homo sapien
ggctgaccagcagaccggcggccct

SEQ ID NO: 4628540 - DNA, 25 bp, Homo sapien
cggccggaccctcagagcccgggct

SEQ ID NO: 4628541 - DNA, 25 bp, Homo sapien
tgaccagcagaccggcggccctcat

SEQ ID NO: 4628542 - DNA, 25 bp, Homo sapien
gggtgtgccagggagtcggtgcgag

SEQ ID NO: 4628543 - DNA, 25 bp, Homo sapien
tgcgaggccgtcagggcctgaacgt

SEQ ID NO: 4628544 - DNA, 25 bp, Homo sapien
tcagggcctgaacgtgcgggagtgt

SEQ ID NO: 4628545 - DNA, 25 bp, Homo sapien
cgggagtgtgcgcaggagagacctg

SEQ ID NO: 4628546 - DNA, 25 bp, Homo sapien
gtggactgctgctctgccgacagca

SEQ ID NO: 4628547 - DNA, 25 bp, Homo sapien
cccggactcccagtgcggatcttgt

SEQ ID NO: 4628548 - DNA, 25 bp, Homo sapien
accgactgacgcctggacagaggtc

SEQ ID NO: 4628549 - DNA, 25 bp, Homo sapien
gacagaggtccgacgtgcgcctctt

SEQ ID NO: 4628550 - DNA, 25 bp, Homo sapien
tctgcattgctaaataagggcttcc

SEQ ID NO: 4628551 - DNA, 25 bp, Homo sapien
tgttctccgggcctgaatgtctggg

SEQ ID NO: 4628552 - DNA, 25 bp, Homo sapien
tcgttcccgaagaagggctcgagac

SEQ ID NO: 4628553 - DNA, 25 bp, Homo sapien
gacacccgatcgtgaagacctgctg

SEQ ID NO: 4628554 - DNA, 25 bp, Homo sapien
tttacagacagggacatacaccatg

SEQ ID NO: 4628555 - DNA, 25 bp, Homo sapien
tatactcttcgctcctatgctcggg

SEQ ID NO: 4628556 - DNA, 25 bp, Homo sapien
tcgcaggcatggtggttgaacagct

SEQ ID NO: 4628557 - DNA, 25 bp, Homo sapien
aacacatggatggtggagtacggcc

SEQ ID NO: 4628558 - DNA, 25 bp, Homo sapien
tgctcaggtgtcaccgcctctggaa

SEQ ID NO: 4628559 - DNA, 25 bp, Homo sapien
gaaggaattgtaggcccctgaagac

SEQ ID NO: 4628560 - DNA, 25 bp, Homo sapien
tgccccttctgcgagctcttaaaga

SEQ ID NO: 4628561 - DNA, 25 bp, Homo sapien
ttttgtgccgcagaacagagaagga

SEQ ID NO: 4628562 - DNA, 25 bp, Homo sapien
tggcccacagtcatggtctccctga

SEQ ID NO: 4628563 - DNA, 25 bp, Homo sapien
cacagtcatggtctccctgactcat

SEQ ID NO: 4628564 - DNA, 25 bp, Homo sapien
ctggcccacagtcatggtctccctg

SEQ ID NO: 4628565 - DNA, 25 bp, Homo sapien
gcccacagtcatggtctccctgact

SEQ ID NO: 4628566 - DNA, 25 bp, Homo sapien
tgagacaggaacaggagatctgctt

SEQ ID NO: 4628567 - DNA, 25 bp, Homo sapien
gagacaggaacaggagatctgcttt

SEQ ID NO: 4628568 - DNA, 25 bp, Homo sapien
gtgagacaggaacaggagatctgct

SEQ ID NO: 4628569 - DNA, 25 bp, Homo sapien
cagccgccagcacgtgactgactga

SEQ ID NO: 4628570 - DNA, 25 bp, Homo sapien
cgcgccgcccccgatgattggccag

SEQ ID NO: 4628571 - DNA, 25 bp, Homo sapien
cccgatgattggccagccgccagca

SEQ ID NO: 4628572 - DNA, 25 bp, Homo sapien
ctttcactttctccgtccacaccac

SEQ ID NO: 4628573 - DNA, 25 bp, Homo sapien
gaggccaccgggggatccgctggaa

SEQ ID NO: 4628574 - DNA, 25 bp, Homo sapien
tgcggcgtccgcctctgacgcctgc

SEQ ID NO: 4628575 - DNA, 25 bp, Homo sapien
gcctctgacgcctgctggcgttgct

SEQ ID NO: 4628576 - DNA, 25 bp, Homo sapien
ctggcgttgctgaggatcggttcca

SEQ ID NO: 4628577 - DNA, 25 bp, Homo sapien
tgctggcgttgctgaggatcggttc

SEQ ID NO: 4628578 - DNA, 25 bp, Homo sapien
gctccgcgccccagcgagtccctgc

SEQ ID NO: 4628579 - DNA, 25 bp, Homo sapien
gcgccccagcgagtccctgccgcgg

SEQ ID NO: 4628580 - DNA, 25 bp, Homo sapien
cagcgagtccctgccgcggtgcagt

SEQ ID NO: 4628581 - DNA, 25 bp, Homo sapien
cccagcgagtccctgccgcggtgca

SEQ ID NO: 4628582 - DNA, 25 bp, Homo sapien
cctgcagactgtacgccttgtcggt

SEQ ID NO: 4628583 - DNA, 25 bp, Homo sapien
tacgccttgtcggtctggctcggga

SEQ ID NO: 4628584 - DNA, 25 bp, Homo sapien
ggtctggctcgggatgagcgttcca

SEQ ID NO: 4628585 - DNA, 25 bp, Homo sapien
gactgtacgccttgtcggtctggct

SEQ ID NO: 4628586 - DNA, 25 bp, Homo sapien
ggccctgtcccgctcaggagctaga

SEQ ID NO: 4628587 - DNA, 25 bp, Homo sapien
gtcccgctcaggagctagaggccca

SEQ ID NO: 4628588 - DNA, 25 bp, Homo sapien
accagcaggcccaagctcgggagcg

SEQ ID NO: 4628589 - DNA, 25 bp, Homo sapien
gcgccaattggcctgctgctcgtac

SEQ ID NO: 4628590 - DNA, 25 bp, Homo sapien
ggcagacagtcaagatcagtcctca

SEQ ID NO: 4628591 - DNA, 25 bp, Homo sapien
gggcagacagtcaagatcagtcctc

SEQ ID NO: 4628592 - DNA, 25 bp, Homo sapien
ctgggggcagacagtcaagatcagt

SEQ ID NO: 4628593 - DNA, 25 bp, Homo sapien
gggggcagacagtcaagatcagtcc

SEQ ID NO: 4628594 - DNA, 25 bp, Homo sapien
catggcggggcactgtcttcagaag

SEQ ID NO: 4628595 - DNA, 25 bp, Homo sapien
cactcatcctgcagcgggttgtagc

SEQ ID NO: 4628596 - DNA, 25 bp, Homo sapien
ccagggccgcttcatgcggtgagct

SEQ ID NO: 4628597 - DNA, 25 bp, Homo sapien
gggctccacttgaccctgccagggc

SEQ ID NO: 4628598 - DNA, 25 bp, Homo sapien
tcactatccctgtgggtggaggaca

SEQ ID NO: 4628599 - DNA, 25 bp, Homo sapien
cctgcagatgcagggctctacaggc

SEQ ID NO: 4628600 - DNA, 25 bp, Homo sapien
tgacccagaaggaggttcactatcc

SEQ ID NO: 4628601 - DNA, 25 bp, Homo sapien
ttggtgggatatgacccagaaggag

SEQ ID NO: 4628602 - DNA, 25 bp, Homo sapien
cctggtgggcttcaaagactggaca

SEQ ID NO: 4628603 - DNA, 25 bp, Homo sapien
ccagttacctggtgggcttcaaaga

SEQ ID NO: 4628604 - DNA, 25 bp, Homo sapien
tgccccataccaccagttacctggt

SEQ ID NO: 4628605 - DNA, 25 bp, Homo sapien
agactggacaggctacaagggagta

SEQ ID NO: 4628606 - DNA, 25 bp, Homo sapien
tcaaacaggaaggtgctatcgtact

SEQ ID NO: 4628607 - DNA, 25 bp, Homo sapien
ctgggaagtcgttgtcaaacaggaa

SEQ ID NO: 4628608 - DNA, 25 bp, Homo sapien
aggtgctatcgtactggggattcac

SEQ ID NO: 4628609 - DNA, 25 bp, Homo sapien
aacaggaaggtgctatcgtactggg

SEQ ID NO: 4628610 - DNA, 25 bp, Homo sapien
ctggactgggggcatcaggctgcag

SEQ ID NO: 4628611 - DNA, 25 bp, Homo sapien
ggactgggggcatcaggctgcagag

SEQ ID NO: 4628612 - DNA, 25 bp, Homo sapien
tggactgggggcatcaggctgcaga

SEQ ID NO: 4628613 - DNA, 25 bp, Homo sapien
cagcagaagtccctcaagaggtcta

SEQ ID NO: 4628614 - DNA, 25 bp, Homo sapien
tgaggtaaaggagtatcactctctg

SEQ ID NO: 4628615 - DNA, 25 bp, Homo sapien
taaaggagtatcactctctgcagca

SEQ ID NO: 4628616 - DNA, 25 bp, Homo sapien
gaagtccctcaagaggtctagccac

SEQ ID NO: 4628617 - DNA, 25 bp, Homo sapien
cttggaaaaggggatgatcactggg

SEQ ID NO: 4628618 - DNA, 25 bp, Homo sapien
ttggaaaaggggatgatcactgggt

SEQ ID NO: 4628619 - DNA, 25 bp, Homo sapien
tggaaaaggggatgatcactgggtc

SEQ ID NO: 4628620 - DNA, 25 bp, Homo sapien
ctctggtttgaaagttgtaagaggg

SEQ ID NO: 4628621 - DNA, 25 bp, Homo sapien
caatgctgagtctccaactctggtt

SEQ ID NO: 4628622 - DNA, 25 bp, Homo sapien
ccccaatgctgagtctccaactctg

SEQ ID NO: 4628623 - DNA, 25 bp, Homo sapien
caactctggtttgaaagttgtaaga

SEQ ID NO: 4628624 - DNA, 25 bp, Homo sapien
aaagataaccgagaggtagggcttg

SEQ ID NO: 4628625 - DNA, 25 bp, Homo sapien
gataaccgagaggtagggcttggct

SEQ ID NO: 4628626 - DNA, 25 bp, Homo sapien
tgggtggtgacgggagaaaagataa

SEQ ID NO: 4628627 - DNA, 25 bp, Homo sapien
tgacgggagaaaagataaccgagag

SEQ ID NO: 4628628 - DNA, 25 bp, Homo sapien
actgaggcccatgcatcaacaacag

SEQ ID NO: 4628629 - DNA, 25 bp, Homo sapien
tgcatcaacaacagcccggatctca

SEQ ID NO: 4628630 - DNA, 25 bp, Homo sapien
cggatctcagggaccgacatgagtg

SEQ ID NO: 4628631 - DNA, 25 bp, Homo sapien
gtggcagcgttacatccgaccaggg

SEQ ID NO: 4628632 - DNA, 25 bp, Homo sapien
gtggaaacagaaatgttactcccca

SEQ ID NO: 4628633 - DNA, 25 bp, Homo sapien
tggaaacagaaatgttactccccag

SEQ ID NO: 4628634 - DNA, 25 bp, Homo sapien
gggtgggggttagaacagcccatca

SEQ ID NO: 4628635 - DNA, 25 bp, Homo sapien
gaacagcccatcatggcacctttgt

SEQ ID NO: 4628636 - DNA, 25 bp, Homo sapien
aacagcccatcatggcacctttgtt

SEQ ID NO: 4628637 - DNA, 25 bp, Homo sapien
acagcccatcatggcacctttgttt

SEQ ID NO: 4628638 - DNA, 25 bp, Homo sapien
tccatgctgactcttataggcctgc

SEQ ID NO: 4628639 - DNA, 25 bp, Homo sapien
aggcctgctgagatcgctcctcacg

SEQ ID NO: 4628640 - DNA, 25 bp, Homo sapien
cctggcggctgtactccattagcag

SEQ ID NO: 4628641 - DNA, 25 bp, Homo sapien
tggcggctgtactccattagcaggg

SEQ ID NO: 4628642 - DNA, 25 bp, Homo sapien
catgggataagaaagttagggactc

SEQ ID NO: 4628643 - DNA, 25 bp, Homo sapien
tcatgggataagaaagttagggact

SEQ ID NO: 4628644 - DNA, 25 bp, Homo sapien
tcatcaaggtgacataggagccgga

SEQ ID NO: 4628645 - DNA, 25 bp, Homo sapien
ccggagtgtggtcagcaaataggca

SEQ ID NO: 4628646 - DNA, 25 bp, Homo sapien
cctttagattactggattattgcta

SEQ ID NO: 4628647 - DNA, 25 bp, Homo sapien
taaggcctcctagcaagtctctctc

SEQ ID NO: 4628648 - DNA, 25 bp, Homo sapien
gggtcagctcaggtagccgccgcac

SEQ ID NO: 4628649 - DNA, 25 bp, Homo sapien
cagtgtctggtagggccatgttgcc

SEQ ID NO: 4628650 - DNA, 25 bp, Homo sapien
cagtgctcactggttaggaccagac

SEQ ID NO: 4628651 - DNA, 25 bp, Homo sapien
gggaccagtactaaccagtgctcac

SEQ ID NO: 4628652 - DNA, 25 bp, Homo sapien
ccatccagtgcctagccccaggatc

SEQ ID NO: 4628653 - DNA, 25 bp, Homo sapien
tactgggagcaacctccatccagtg

SEQ ID NO: 4628654 - DNA, 25 bp, Homo sapien
ctactgggagcaacctccatccagt

SEQ ID NO: 4628655 - DNA, 25 bp, Homo sapien
tccagtgcctagccccaggatccta

SEQ ID NO: 4628656 - DNA, 25 bp, Homo sapien
tcagcctggggtccagatgctgacc

SEQ ID NO: 4628657 - DNA, 25 bp, Homo sapien
ctggaatcagagcctgactctcagc

SEQ ID NO: 4628658 - DNA, 25 bp, Homo sapien
ctctcagcctggggtccagatgctg

SEQ ID NO: 4628659 - DNA, 25 bp, Homo sapien
ggaatcagagcctgactctcagcct

SEQ ID NO: 4628660 - DNA, 25 bp, Homo sapien
aaaggacgtctcaaagaggttgtca

SEQ ID NO: 4628661 - DNA, 25 bp, Homo sapien
tggagtagggaaaggacgtctcaaa

SEQ ID NO: 4628662 - DNA, 25 bp, Homo sapien
gttgtcatacttggtcaagagcttc

SEQ ID NO: 4628663 - DNA, 25 bp, Homo sapien
aaagaggttgtcatacttggtcaag

SEQ ID NO: 4628664 - DNA, 25 bp, Homo sapien
caggtatctgaaaactacatctccc

SEQ ID NO: 4628665 - DNA, 25 bp, Homo sapien
ttgcagttcactaggctgagcccca

SEQ ID NO: 4628666 - DNA, 25 bp, Homo sapien
ccagaaatggtgttggggctaaata

SEQ ID NO: 4628667 - DNA, 25 bp, Homo sapien
ggagattagaaagcacattggagat

SEQ ID NO: 4628668 - DNA, 25 bp, Homo sapien
agcctgagcaagcatttcgtagcca

SEQ ID NO: 4628669 - DNA, 25 bp, Homo sapien
gcgtgcagctgccaatggttccagt

SEQ ID NO: 4628670 - DNA, 25 bp, Homo sapien
ggtagtaatgagcgtgcagctgcca

SEQ ID NO: 4628671 - DNA, 25 bp, Homo sapien
gccaaccatgaatttccggacagtg

SEQ ID NO: 4628672 - DNA, 25 bp, Homo sapien
cacccggccgatggtatggagttct

SEQ ID NO: 4628673 - DNA, 25 bp, Homo sapien
gagacgagggcttcctatgtttccc

SEQ ID NO: 4628674 - DNA, 25 bp, Homo sapien
cacaagggcaacagaagtatcaggt

SEQ ID NO: 4628675 - DNA, 25 bp, Homo sapien
tctgccttgtgcaatgactggagca

SEQ ID NO: 4628676 - DNA, 25 bp, Homo sapien
gcaatgatgccatgatgatggctca

SEQ ID NO: 4628677 - DNA, 25 bp, Homo sapien
tgcaatgatgccatgatgatggctc

SEQ ID NO: 4628678 - DNA, 25 bp, Homo sapien
aaagggacagggagcaattaaggag

SEQ ID NO: 4628679 - DNA, 25 bp, Homo sapien
aagggacagggagcaattaaggagg

SEQ ID NO: 4628680 - DNA, 25 bp, Homo sapien
caggaagtgcccttagtctctctgc

SEQ ID NO: 4628681 - DNA, 25 bp, Homo sapien
ctcaggaagtgcccttagtctctct

SEQ ID NO: 4628682 - DNA, 25 bp, Homo sapien
ggaagtgcccttagtctctctgcag

SEQ ID NO: 4628683 - DNA, 25 bp, Homo sapien
gaagtgcccttagtctctctgcagc

SEQ ID NO: 4628684 - DNA, 25 bp, Homo sapien
tcaggcgatggttgctgtctccctg

SEQ ID NO: 4628685 - DNA, 25 bp, Homo sapien
aggcgatggttgctgtctccctgtc

SEQ ID NO: 4628686 - DNA, 25 bp, Homo sapien
ctgtccttctgccccaggtggtaat

SEQ ID NO: 4628687 - DNA, 25 bp, Homo sapien
ccttctgccccaggtggtaatgaac

SEQ ID NO: 4628688 - DNA, 25 bp, Homo sapien
gattcaaggccctttctgcttaatt

SEQ ID NO: 4628689 - DNA, 25 bp, Homo sapien
attcaaggccctttctgcttaattc

SEQ ID NO: 4628690 - DNA, 25 bp, Homo sapien
ttttattaatgctatatctgcccaa

SEQ ID NO: 4628691 - DNA, 25 bp, Homo sapien
ctctggaggttggacctaggcacca

SEQ ID NO: 4628692 - DNA, 25 bp, Homo sapien
tgttgttcccacagcgttgccaggg

SEQ ID NO: 4628693 - DNA, 25 bp, Homo sapien
cagcagaagtatatggtgcccgcac

SEQ ID NO: 4628694 - DNA, 25 bp, Homo sapien
tatatgtatgcctcaagaaaccagc

SEQ ID NO: 4628695 - DNA, 25 bp, Homo sapien
tggctccgcccaggcgccaatggaa

SEQ ID NO: 4628696 - DNA, 25 bp, Homo sapien
cattggagactccaactgccaatca

SEQ ID NO: 4628697 - DNA, 25 bp, Homo sapien
ccgcccaggcgccaatggaaggaga

SEQ ID NO: 4628698 - DNA, 25 bp, Homo sapien
gggctcctggcccattggagactcc

SEQ ID NO: 4628699 - DNA, 25 bp, Homo sapien
cttaagagaaaggtcagtcccatgg

SEQ ID NO: 4628700 - DNA, 25 bp, Homo sapien
tcccatgggctcttgaggtaggtcc

SEQ ID NO: 4628701 - DNA, 25 bp, Homo sapien
tactgctgaagtcacacattggcac

SEQ ID NO: 4628702 - DNA, 25 bp, Homo sapien
gcaatagggacagaaaacggcacgt

SEQ ID NO: 4628703 - DNA, 25 bp, Homo sapien
cccagcagcagagtgtccatagcct

SEQ ID NO: 4628704 - DNA, 25 bp, Homo sapien
gcagcagagtgtccatagcctctag

SEQ ID NO: 4628705 - DNA, 25 bp, Homo sapien
agcctctaggacttcctctcaccag

SEQ ID NO: 4628706 - DNA, 25 bp, Homo sapien
agcagagtgtccatagcctctagga

SEQ ID NO: 4628707 - DNA, 25 bp, Homo sapien
gggtgggcgaggagccagcagatgg

SEQ ID NO: 4628708 - DNA, 25 bp, Homo sapien
tgtagttaagcagatccagatgccc

SEQ ID NO: 4628709 - DNA, 25 bp, Homo sapien
gggggtgggcgaggagccagcagat

SEQ ID NO: 4628710 - DNA, 25 bp, Homo sapien
ctggggctgtgtagttaagcagatc

SEQ ID NO: 4628711 - DNA, 25 bp, Homo sapien
ttcgttggtctccagtttgtgaagc

SEQ ID NO: 4628712 - DNA, 25 bp, Homo sapien
aggcttctcgcctgaacctggctcc

SEQ ID NO: 4628713 - DNA, 25 bp, Homo sapien
ctggctccttggtctggctacttgg

SEQ ID NO: 4628714 - DNA, 25 bp, Homo sapien
tggctcttgacacttcgttggtctc

SEQ ID NO: 4628715 - DNA, 25 bp, Homo sapien
cctaggcagaccttatcaccctggg

SEQ ID NO: 4628716 - DNA, 25 bp, Homo sapien
gggtgtcatcatggatctgagccca

SEQ ID NO: 4628717 - DNA, 25 bp, Homo sapien
aaaagccggaggcaacagactgtgc

SEQ ID NO: 4628718 - DNA, 25 bp, Homo sapien
tggtccagggcttatcactgcctct

SEQ ID NO: 4628719 - DNA, 25 bp, Homo sapien
ctttcccactgtatacccagtgctt

SEQ ID NO: 4628720 - DNA, 25 bp, Homo sapien
ccactgtatacccagtgctttgcat

SEQ ID NO: 4628721 - DNA, 25 bp, Homo sapien
ctgaggtcccctttcccactgtata

SEQ ID NO: 4628722 - DNA, 25 bp, Homo sapien
tgaggtcccctttcccactgtatac

SEQ ID NO: 4628723 - DNA, 25 bp, Homo sapien
tggggagaggtagagtcaaaaatcc

SEQ ID NO: 4628724 - DNA, 25 bp, Homo sapien
caaaaatccccgacccctgagatgg

SEQ ID NO: 4628725 - DNA, 25 bp, Homo sapien
tcaaaaatccccgacccctgagatg

SEQ ID NO: 4628726 - DNA, 25 bp, Homo sapien
gagaggtagagtcaaaaatccccga

SEQ ID NO: 4628727 - DNA, 25 bp, Homo sapien
cagacaccagggctgtagccacggc

SEQ ID NO: 4628728 - DNA, 25 bp, Homo sapien
acaccagggctgtagccacggccac

SEQ ID NO: 4628729 - DNA, 25 bp, Homo sapien
accagggctgtagccacggccacca

SEQ ID NO: 4628730 - DNA, 25 bp, Homo sapien
agacaccagggctgtagccacggcc

SEQ ID NO: 4628731 - DNA, 25 bp, Homo sapien
gggctcactggatcaaagcatcatg

SEQ ID NO: 4628732 - DNA, 25 bp, Homo sapien
aggttgtagagcagggttcttctca

SEQ ID NO: 4628733 - DNA, 25 bp, Homo sapien
cagtgagggtggcaagtcacaagtc

SEQ ID NO: 4628734 - DNA, 25 bp, Homo sapien
tccccactttgtgagaatgacagat

SEQ ID NO: 4628735 - DNA, 25 bp, Homo sapien
actccaggacaacacagcttcacgg

SEQ ID NO: 4628736 - DNA, 25 bp, Homo sapien
tccaggacaacacagcttcacggac

SEQ ID NO: 4628737 - DNA, 25 bp, Homo sapien
acagcttcacggacctgcctggctg

SEQ ID NO: 4628738 - DNA, 25 bp, Homo sapien
ccggcagtcactccaggacaacaca

SEQ ID NO: 4628739 - DNA, 25 bp, Homo sapien
ggaccagttcatgccctagcccaga

SEQ ID NO: 4628740 - DNA, 25 bp, Homo sapien
ccatccagggtctggcagatgtagg

SEQ ID NO: 4628741 - DNA, 25 bp, Homo sapien
catcccgaaaccaggacactgggtc

SEQ ID NO: 4628742 - DNA, 25 bp, Homo sapien
agttcatgccctagcccagagtcag

SEQ ID NO: 4628743 - DNA, 25 bp, Homo sapien
taaaccgctgatctggctgggactc

SEQ ID NO: 4628744 - DNA, 25 bp, Homo sapien
gagaagttctcatagtcggctgctt

SEQ ID NO: 4628745 - DNA, 25 bp, Homo sapien
tagcgggtgggtaaaccgctgatct

SEQ ID NO: 4628746 - DNA, 25 bp, Homo sapien
ctgggactccaagtgcaagagaagt

SEQ ID NO: 4628747 - DNA, 25 bp, Homo sapien
gctatcagctcctaggactgtcttc

SEQ ID NO: 4628748 - DNA, 25 bp, Homo sapien
ctctggctatcagctcctaggactg

SEQ ID NO: 4628749 - DNA, 25 bp, Homo sapien
tggctatcagctcctaggactgtct

SEQ ID NO: 4628750 - DNA, 25 bp, Homo sapien
tctggctatcagctcctaggactgt

SEQ ID NO: 4628751 - DNA, 25 bp, Homo sapien
cacattaatccggtactggctccag

SEQ ID NO: 4628752 - DNA, 25 bp, Homo sapien
cagtcacattaatccggtactggct

SEQ ID NO: 4628753 - DNA, 25 bp, Homo sapien
gctccagaactcagccccgtggaca

SEQ ID NO: 4628754 - DNA, 25 bp, Homo sapien
gccccgtggacaacacagcgggcag

SEQ ID NO: 4628755 - DNA, 25 bp, Homo sapien
atgctgcgccggacggtactgcaaa

SEQ ID NO: 4628756 - DNA, 25 bp, Homo sapien
tactgcaaacggaacttgagcagga

SEQ ID NO: 4628757 - DNA, 25 bp, Homo sapien
gtatgtccagctggctcgcaggcgt

SEQ ID NO: 4628758 - DNA, 25 bp, Homo sapien
taacctggtactgactctacccgca

SEQ ID NO: 4628759 - DNA, 25 bp, Homo sapien
acccacagccgtgggttgggacgca

SEQ ID NO: 4628760 - DNA, 25 bp, Homo sapien
tgccagcactggaaagctatacaga

SEQ ID NO: 4628761 - DNA, 25 bp, Homo sapien
gaaagctatacagaacacccaggat

SEQ ID NO: 4628762 - DNA, 25 bp, Homo sapien
cccaggatcgtgaaatcagagacag

SEQ ID NO: 4628763 - DNA, 25 bp, Homo sapien
aaagtcccgggcactgactcgtaca

SEQ ID NO: 4628764 - DNA, 25 bp, Homo sapien
gcatctagaaagtcccgggcactga

SEQ ID NO: 4628765 - DNA, 25 bp, Homo sapien
cgggcactgactcgtacagcatggg

SEQ ID NO: 4628766 - DNA, 25 bp, Homo sapien
gcatctgtgatcacctcctccagtc

SEQ ID NO: 4628767 - DNA, 25 bp, Homo sapien
tgatagatgctttgggatggggcct

SEQ ID NO: 4628768 - DNA, 25 bp, Homo sapien
gctgatagatgctttgggatggggc

SEQ ID NO: 4628769 - DNA, 25 bp, Homo sapien
gatagatgctttgggatggggcctc

SEQ ID NO: 4628770 - DNA, 25 bp, Homo sapien
agatgctttgggatggggcctctgc

SEQ ID NO: 4628771 - DNA, 25 bp, Homo sapien
ctgcgtgtgtagctggccccatgct

SEQ ID NO: 4628772 - DNA, 25 bp, Homo sapien
ggccccatgctggtatctcctttgg

SEQ ID NO: 4628773 - DNA, 25 bp, Homo sapien
aagtagccgagggtgtggttggagg

SEQ ID NO: 4628774 - DNA, 25 bp, Homo sapien
tccacctctggctgcgtgtgtagct

SEQ ID NO: 4628775 - DNA, 25 bp, Homo sapien
aagaaaggattcccaaagacgccag

SEQ ID NO: 4628776 - DNA, 25 bp, Homo sapien
agccaccagtcccaggaaagaaagg

SEQ ID NO: 4628777 - DNA, 25 bp, Homo sapien
ccaccagtcccaggaaagaaaggat

SEQ ID NO: 4628778 - DNA, 25 bp, Homo sapien
gccaccagtcccaggaaagaaagga

SEQ ID NO: 4628779 - DNA, 25 bp, Homo sapien
aggctgagggaccaatggcagtcac

SEQ ID NO: 4628780 - DNA, 25 bp, Homo sapien
agaggctgagggaccaatggcagtc

SEQ ID NO: 4628781 - DNA, 25 bp, Homo sapien
gagcatgtgtgaggatcagaggctg

SEQ ID NO: 4628782 - DNA, 25 bp, Homo sapien
agcatgtgtgaggatcagaggctga

SEQ ID NO: 4628783 - DNA, 25 bp, Homo sapien
agcgggcagtcatgaagggtggaga

SEQ ID NO: 4628784 - DNA, 25 bp, Homo sapien
tcagcgggcagtcatgaagggtgga

SEQ ID NO: 4628785 - DNA, 25 bp, Homo sapien
tcatgaagggtggagatgaatgtgg

SEQ ID NO: 4628786 - DNA, 25 bp, Homo sapien
agtcatgaagggtggagatgaatgt

SEQ ID NO: 4628787 - DNA, 25 bp, Homo sapien
gggaggtagttccagaatcagacag

SEQ ID NO: 4628788 - DNA, 25 bp, Homo sapien
gtatggggaggtagttccagaatca

SEQ ID NO: 4628789 - DNA, 25 bp, Homo sapien
ttaaaatcaagtggggcatggggga

SEQ ID NO: 4628790 - DNA, 25 bp, Homo sapien
gaggtatggggaggtagttccagaa

SEQ ID NO: 4628791 - DNA, 25 bp, Homo sapien
ctccaacaatgtgggttatctcagt

SEQ ID NO: 4628792 - DNA, 25 bp, Homo sapien
tctccaacaatgtgggttatctcag

SEQ ID NO: 4628793 - DNA, 25 bp, Homo sapien
ctggacgcctgtccactggaatcac

SEQ ID NO: 4628794 - DNA, 25 bp, Homo sapien
ggacgcctgtccactggaatcactg

SEQ ID NO: 4628795 - DNA, 25 bp, Homo sapien
tggacgcctgtccactggaatcact

SEQ ID NO: 4628796 - DNA, 25 bp, Homo sapien
cactcaaaataggggcaaacatctc

SEQ ID NO: 4628797 - DNA, 25 bp, Homo sapien
caaatcttctggatgtcctactcac

SEQ ID NO: 4628798 - DNA, 25 bp, Homo sapien
tgaggagacccaacttggattccca

SEQ ID NO: 4628799 - DNA, 25 bp, Homo sapien
tccaaatcttctggatgtcctactc

SEQ ID NO: 4628800 - DNA, 25 bp, Homo sapien
catagggatctactgtcctgcctgg

SEQ ID NO: 4628801 - DNA, 25 bp, Homo sapien
agaatacatgttccctgcctcacag

SEQ ID NO: 4628802 - DNA, 25 bp, Homo sapien
cacattacacacgttccttgagcag

SEQ ID NO: 4628803 - DNA, 25 bp, Homo sapien
ttataggtggaatctgccgaagccc

SEQ ID NO: 4628804 - DNA, 25 bp, Homo sapien
tgattcaatcatgccgctccccagg

SEQ ID NO: 4628805 - DNA, 25 bp, Homo sapien
tcggagcccaggacatgtcgggaat

SEQ ID NO: 4628806 - DNA, 25 bp, Homo sapien
gacctggggctagggaatccctgat

SEQ ID NO: 4628807 - DNA, 25 bp, Homo sapien
tgggcagcctcgtcctgagaatgac

SEQ ID NO: 4628808 - DNA, 25 bp, Homo sapien
tgtctattgtcctgcacctgtgaag

SEQ ID NO: 4628809 - DNA, 25 bp, Homo sapien
tacatatgccaaatgggtgtgccct

SEQ ID NO: 4628810 - DNA, 25 bp, Homo sapien
gctaaaggtggtcggtgcacagctt

SEQ ID NO: 4628811 - DNA, 25 bp, Homo sapien
tcatgacatgatacagcctcaggag

SEQ ID NO: 4628812 - DNA, 25 bp, Homo sapien
cagggactctcctcatttgtccatc

SEQ ID NO: 4628813 - DNA, 25 bp, Homo sapien
gctcccagggactctcctcatttgt

SEQ ID NO: 4628814 - DNA, 25 bp, Homo sapien
tcccagggactctcctcatttgtcc

SEQ ID NO: 4628815 - DNA, 25 bp, Homo sapien
tgctcccagggactctcctcatttg

SEQ ID NO: 4628816 - DNA, 25 bp, Homo sapien
aattgaattattggccacatacctg

SEQ ID NO: 4628817 - DNA, 25 bp, Homo sapien
tgtggagacataaggtgcatcagcc

SEQ ID NO: 4628818 - DNA, 25 bp, Homo sapien
tactgtgaccaacctctaacctgag

SEQ ID NO: 4628819 - DNA, 25 bp, Homo sapien
ggacatcaatgtgttcatcaaccag

SEQ ID NO: 4628820 - DNA, 25 bp, Homo sapien
aatggtaatagtgcaaactctcctc

SEQ ID NO: 4628821 - DNA, 25 bp, Homo sapien
ctgcttattgctgaaattctcggag

SEQ ID NO: 4628822 - DNA, 25 bp, Homo sapien
cccttgtccaaactgcttattgctg

SEQ ID NO: 4628823 - DNA, 25 bp, Homo sapien
ctaatggtaatagtgcaaactctcc

SEQ ID NO: 4628824 - DNA, 25 bp, Homo sapien
gggtcaataagggagagggacagtg

SEQ ID NO: 4628825 - DNA, 25 bp, Homo sapien
tcagctctggggcataggaaaatgg

SEQ ID NO: 4628826 - DNA, 25 bp, Homo sapien
ggggcataggaaaatgggtcaataa

SEQ ID NO: 4628827 - DNA, 25 bp, Homo sapien
ctctggggcataggaaaatgggtca

SEQ ID NO: 4628828 - DNA, 25 bp, Homo sapien
cttggagtccaacattcaagggcag

SEQ ID NO: 4628829 - DNA, 25 bp, Homo sapien
cattcaagggcaggaaacatccagg

SEQ ID NO: 4628830 - DNA, 25 bp, Homo sapien
gagtccaacattcaagggcaggaaa

SEQ ID NO: 4628831 - DNA, 25 bp, Homo sapien
aacattcaagggcaggaaacatcca

SEQ ID NO: 4628832 - DNA, 25 bp, Homo sapien
ccatgtggctgctcaagttttcaag

SEQ ID NO: 4628833 - DNA, 25 bp, Homo sapien
catggtcgctccagtcaaggaagac

SEQ ID NO: 4628834 - DNA, 25 bp, Homo sapien
ttcattggccaaagtgggtcacaca

SEQ ID NO: 4628835 - DNA, 25 bp, Homo sapien
ccagcacagttgtagtccatgtggc

SEQ ID NO: 4628836 - DNA, 25 bp, Homo sapien
catctgcttctaaatccaagatatt

SEQ ID NO: 4628837 - DNA, 25 bp, Homo sapien
tacaacaaaattctattccccatgc

SEQ ID NO: 4628838 - DNA, 25 bp, Homo sapien
taggctaggtaatgctgtaataaca

SEQ ID NO: 4628839 - DNA, 25 bp, Homo sapien
cctgattggtcagaataggctaggt

SEQ ID NO: 4628840 - DNA, 25 bp, Homo sapien
atgactgtaatccctgcactttggg

SEQ ID NO: 4628841 - DNA, 25 bp, Homo sapien
caagatgggccaggctcagtggttc

SEQ ID NO: 4628842 - DNA, 25 bp, Homo sapien
aaagcaggaggatcatttcagccca

SEQ ID NO: 4628843 - DNA, 25 bp, Homo sapien
aggccaaagcaggaggatcatttca

SEQ ID NO: 4628844 - DNA, 25 bp, Homo sapien
catttgtactattgccccaagcctc

SEQ ID NO: 4628845 - DNA, 25 bp, Homo sapien
taaatatttagatagtgggcctcca

SEQ ID NO: 4628846 - DNA, 25 bp, Homo sapien
caacttgttcgcttgatttttacct

SEQ ID NO: 4628847 - DNA, 25 bp, Homo sapien
tcaccagtgttaggtggtcagcctg

SEQ ID NO: 4628848 - DNA, 25 bp, Homo sapien
tgagtgtgagcgagagggtgagtgt

SEQ ID NO: 4628849 - DNA, 25 bp, Homo sapien
agtgtggtcagagtaaagctgctcc

SEQ ID NO: 4628850 - DNA, 25 bp, Homo sapien
cggagtccgagtcaagcattgtgaa

SEQ ID NO: 4628851 - DNA, 25 bp, Homo sapien
cattgtgaattattacctaacctgg

SEQ ID NO: 4628852 - DNA, 25 bp, Homo sapien
ctctctgaggagctcgcagggtcac

SEQ ID NO: 4628853 - DNA, 25 bp, Homo sapien
ggagctcgcagggtcacagccgcat

SEQ ID NO: 4628854 - DNA, 25 bp, Homo sapien
gctcgcagggtcacagccgcatgcg

SEQ ID NO: 4628855 - DNA, 25 bp, Homo sapien
ctgaggagctcgcagggtcacagcc

SEQ ID NO: 4628856 - DNA, 25 bp, Homo sapien
cttaagcttcagctggtatcctttg

SEQ ID NO: 4628857 - DNA, 25 bp, Homo sapien
ttaagcttcagctggtatcctttgt

SEQ ID NO: 4628858 - DNA, 25 bp, Homo sapien
gttcaagaccaacacgggcaataaa

SEQ ID NO: 4628859 - DNA, 25 bp, Homo sapien
caagaccaacacgggcaataaagtg

SEQ ID NO: 4628860 - DNA, 25 bp, Homo sapien
agaccaacacgggcaataaagtgag

SEQ ID NO: 4628861 - DNA, 25 bp, Homo sapien
tcaagaccaacacgggcaataaagt

SEQ ID NO: 4628862 - DNA, 25 bp, Homo sapien
tgaattggtagccatgaacagttcc

SEQ ID NO: 4628863 - DNA, 25 bp, Homo sapien
catgggtacgtatgaattggtagcc

SEQ ID NO: 4628864 - DNA, 25 bp, Homo sapien
tctttacaaggcgataggactcatg

SEQ ID NO: 4628865 - DNA, 25 bp, Homo sapien
gataggactcatgggtacgtatgaa

SEQ ID NO: 4628866 - DNA, 25 bp, Homo sapien
ttttgctgcctgacactactctggg

SEQ ID NO: 4628867 - DNA, 25 bp, Homo sapien
gcggtaaccggctgtgtgagctccg

SEQ ID NO: 4628868 - DNA, 25 bp, Homo sapien
aacttcttggaaattctagctcttg

SEQ ID NO: 4628869 - DNA, 25 bp, Homo sapien
ctactcgccacgcttctgcaccggg

SEQ ID NO: 4628870 - DNA, 25 bp, Homo sapien
gagtggaattcactggcacatgcat

SEQ ID NO: 4628871 - DNA, 25 bp, Homo sapien
tattgattgcaagagtggaattcac

SEQ ID NO: 4628872 - DNA, 25 bp, Homo sapien
gcaagagtggaattcactggcacat

SEQ ID NO: 4628873 - DNA, 25 bp, Homo sapien
caacctattgattgcaagagtggaa

SEQ ID NO: 4628874 - DNA, 25 bp, Homo sapien
gcaagctgaacctactccaaattcc

SEQ ID NO: 4628875 - DNA, 25 bp, Homo sapien
ccacctggaacgtgattcttgattg

SEQ ID NO: 4628876 - DNA, 25 bp, Homo sapien
cacctggaacgtgattcttgattgg

SEQ ID NO: 4628877 - DNA, 25 bp, Homo sapien
ttggcaagctgaacctactccaaat

SEQ ID NO: 4628878 - DNA, 25 bp, Homo sapien
gactattcaaacagccagccgttct

SEQ ID NO: 4628879 - DNA, 25 bp, Homo sapien
ttcaaacagccagccgttctgaagg

SEQ ID NO: 4628880 - DNA, 25 bp, Homo sapien
cagccagccgttctgaaggctttaa

SEQ ID NO: 4628881 - DNA, 25 bp, Homo sapien
cagactattcaaacagccagccgtt

SEQ ID NO: 4628882 - DNA, 25 bp, Homo sapien
gaaagctgggctgtcgtgtaaccca

SEQ ID NO: 4628883 - DNA, 25 bp, Homo sapien
gacactctctgcagtactccacagg

SEQ ID NO: 4628884 - DNA, 25 bp, Homo sapien
gcctccggaatgtccaaatgaccca

SEQ ID NO: 4628885 - DNA, 25 bp, Homo sapien
gtgtaacccactttttgctgcagca

SEQ ID NO: 4628886 - DNA, 25 bp, Homo sapien
cgcggggactgaaacagccggccaa

SEQ ID NO: 4628887 - DNA, 25 bp, Homo sapien
catgggctcggatgagtagtgggcc

SEQ ID NO: 4628888 - DNA, 25 bp, Homo sapien
caggtgccagttggcgccctctacg

SEQ ID NO: 4628889 - DNA, 25 bp, Homo sapien
tggcgccctctacgagcgccctgga

SEQ ID NO: 4628890 - DNA, 25 bp, Homo sapien
gggttccatgggctcggatgagtag

SEQ ID NO: 4628891 - DNA, 25 bp, Homo sapien
ccggggccggcggactctatactgc

SEQ ID NO: 4628892 - DNA, 25 bp, Homo sapien
tgcgctgcccagcggagctcgaggg

SEQ ID NO: 4628893 - DNA, 25 bp, Homo sapien
ggcggactctatactgccggccctg

SEQ ID NO: 4628894 - DNA, 25 bp, Homo sapien
agcggagctcgagggccggcttgct

SEQ ID NO: 4628895 - DNA, 25 bp, Homo sapien
ttctacctccactaaaatgcagcct

SEQ ID NO: 4628896 - DNA, 25 bp, Homo sapien
agtttctacctccactaaaatgcag

SEQ ID NO: 4628897 - DNA, 25 bp, Homo sapien
taaaatgcagcctggagcaactggg

SEQ ID NO: 4628898 - DNA, 25 bp, Homo sapien
cgcagcagtttctacctccactaaa

SEQ ID NO: 4628899 - DNA, 25 bp, Homo sapien
tgatagagtgttagatctgaattca

SEQ ID NO: 4628900 - DNA, 25 bp, Homo sapien
caggatctcagtctggtgatagagt

SEQ ID NO: 4628901 - DNA, 25 bp, Homo sapien
gatctcagtctggtgatagagtgtt

SEQ ID NO: 4628902 - DNA, 25 bp, Homo sapien
cagtctggtgatagagtgttagatc

SEQ ID NO: 4628903 - DNA, 25 bp, Homo sapien
acagctatagtgaccactctgtacc

SEQ ID NO: 4628904 - DNA, 25 bp, Homo sapien
agctggaccacagctatagtgacca

SEQ ID NO: 4628905 - DNA, 25 bp, Homo sapien
ccacagctatagtgaccactctgta

SEQ ID NO: 4628906 - DNA, 25 bp, Homo sapien
tggaccacagctatagtgaccactc

SEQ ID NO: 4628907 - DNA, 25 bp, Homo sapien
tgtgttcaacgctgagttgttgagg

SEQ ID NO: 4628908 - DNA, 25 bp, Homo sapien
acttgtgttcaacgctgagttgttg

SEQ ID NO: 4628909 - DNA, 25 bp, Homo sapien
tcacttgtgttcaacgctgagttgt

SEQ ID NO: 4628910 - DNA, 25 bp, Homo sapien
ttcaacgctgagttgttgagggcag

SEQ ID NO: 4628911 - DNA, 25 bp, Homo sapien
aaatgcatggaacctgagcaacagc

SEQ ID NO: 4628912 - DNA, 25 bp, Homo sapien
taaatgcatggaacctgagcaacag

SEQ ID NO: 4628913 - DNA, 25 bp, Homo sapien
ctaaatgcatggaacctgagcaaca

SEQ ID NO: 4628914 - DNA, 25 bp, Homo sapien
catggaacctgagcaacagcatggg

SEQ ID NO: 4628915 - DNA, 25 bp, Homo sapien
cttctcataaggtgcccctgtgcca

SEQ ID NO: 4628916 - DNA, 25 bp, Homo sapien
cagagccgagacatcaggctggtat

SEQ ID NO: 4628917 - DNA, 25 bp, Homo sapien
gaaatagacactgcttgtggcacct

SEQ ID NO: 4628918 - DNA, 25 bp, Homo sapien
gactggatagatacggccaccttgg

SEQ ID NO: 4628919 - DNA, 25 bp, Homo sapien
ggctataaccattctcaccagggca

SEQ ID NO: 4628920 - DNA, 25 bp, Homo sapien
tattcatggaggttaagcaggtaac

SEQ ID NO: 4628921 - DNA, 25 bp, Homo sapien
aaaagtttccagaatccgactcaag

SEQ ID NO: 4628922 - DNA, 25 bp, Homo sapien
cattggctgttagggaagtattgca

SEQ ID NO: 4628923 - DNA, 25 bp, Homo sapien
gctggatgtacaagatcgaggtgct

SEQ ID NO: 4628924 - DNA, 25 bp, Homo sapien
caagggtcgattcacacttatcaaa

SEQ ID NO: 4628925 - DNA, 25 bp, Homo sapien
catagaatgcacacttccccaagag

SEQ ID NO: 4628926 - DNA, 25 bp, Homo sapien
acttccccaagagtgaactctaatg

SEQ ID NO: 4628927 - DNA, 25 bp, Homo sapien
atgatactaacaagggtcgattcac

SEQ ID NO: 4628928 - DNA, 25 bp, Homo sapien
gaagaaactagatcctttgtccata

SEQ ID NO: 4628929 - DNA, 25 bp, Homo sapien
catgttcatgaagaatgttggtctc

SEQ ID NO: 4628930 - DNA, 25 bp, Homo sapien
gcatccctgtggtctatcatgtttg

SEQ ID NO: 4628931 - DNA, 25 bp, Homo sapien
tggtatcaaggcaatcctggcttca

SEQ ID NO: 4628932 - DNA, 25 bp, Homo sapien
caaaagaaatgtccacatgttccat

SEQ ID NO: 4628933 - DNA, 25 bp, Homo sapien
cacaaaagaaatgtccacatgttcc

SEQ ID NO: 4628934 - DNA, 25 bp, Homo sapien
tccacaaaagaaatgtccacatgtt

SEQ ID NO: 4628935 - DNA, 25 bp, Homo sapien
cttctgatccacaaaagaaatgtcc

SEQ ID NO: 4628936 - DNA, 25 bp, Homo sapien
cgagcagacgggccggtaaaggtag

SEQ ID NO: 4628937 - DNA, 25 bp, Homo sapien
ctgggtgccgagcagacgggccggt

SEQ ID NO: 4628938 - DNA, 25 bp, Homo sapien
gtgccgagcagacgggccggtaaag

SEQ ID NO: 4628939 - DNA, 25 bp, Homo sapien
ggtgccgagcagacgggccggtaaa

SEQ ID NO: 4628940 - DNA, 25 bp, Homo sapien
taagtgggaacatgctgaggtggtc

SEQ ID NO: 4628941 - DNA, 25 bp, Homo sapien
cttgatgcctttatttaagtgggaa

SEQ ID NO: 4628942 - DNA, 25 bp, Homo sapien
gggatatgtacacctgcttgatgcc

SEQ ID NO: 4628943 - DNA, 25 bp, Homo sapien
gatatgtacacctgcttgatgcctt

SEQ ID NO: 4628944 - DNA, 25 bp, Homo sapien
tccttttccagtaccatcgatccag

SEQ ID NO: 4628945 - DNA, 25 bp, Homo sapien
ccagatatacatgacccggactttc

SEQ ID NO: 4628946 - DNA, 25 bp, Homo sapien
tccaggtcttgcagtgcagtccttt

SEQ ID NO: 4628947 - DNA, 25 bp, Homo sapien
atcgatccagatatacatgacccgg

SEQ ID NO: 4628948 - DNA, 25 bp, Homo sapien
ccatcaaaattcccctcaggcaact

SEQ ID NO: 4628949 - DNA, 25 bp, Homo sapien
tcaaaattcccctcaggcaactctt

SEQ ID NO: 4628950 - DNA, 25 bp, Homo sapien
tatagagccatcaaaattcccctca

SEQ ID NO: 4628951 - DNA, 25 bp, Homo sapien
atagagccatcaaaattcccctcag

SEQ ID NO: 4628952 - DNA, 25 bp, Homo sapien
taaacatagcagcaggaacgagata

SEQ ID NO: 4628953 - DNA, 25 bp, Homo sapien
ttaaacatagcagcaggaacgagat

SEQ ID NO: 4628954 - DNA, 25 bp, Homo sapien
catcacgtcgattatccgtttacag

SEQ ID NO: 4628955 - DNA, 25 bp, Homo sapien
gcgctgtaatgagcctccacgatgt

SEQ ID NO: 4628956 - DNA, 25 bp, Homo sapien
ctggttgctcatcacgtcgattatc

SEQ ID NO: 4628957 - DNA, 25 bp, Homo sapien
gattggcattagtccccacaatcct

SEQ ID NO: 4628958 - DNA, 25 bp, Homo sapien
tcacagggtccaatttgaaattctc

SEQ ID NO: 4628959 - DNA, 25 bp, Homo sapien
atgaaacgagccacccagagatgat

SEQ ID NO: 4628960 - DNA, 25 bp, Homo sapien
cacgatgcaagatgaaacgagccac

SEQ ID NO: 4628961 - DNA, 25 bp, Homo sapien
cacacacacgatgcaagatgaaacg

SEQ ID NO: 4628962 - DNA, 25 bp, Homo sapien
ttaggatcaaaggttgctatcactc

SEQ ID NO: 4628963 - DNA, 25 bp, Homo sapien
cttaggatcaaaggttgctatcact

SEQ ID NO: 4628964 - DNA, 25 bp, Homo sapien
ggatcaaaggttgctatcactccaa

SEQ ID NO: 4628965 - DNA, 25 bp, Homo sapien
tcaaaggttgctatcactccaaagt

SEQ ID NO: 4628966 - DNA, 25 bp, Homo sapien
gtgtcgggccttgtccaggcctcct

SEQ ID NO: 4628967 - DNA, 25 bp, Homo sapien
gtgtcgcttgcttaatttcttgatg

SEQ ID NO: 4628968 - DNA, 25 bp, Homo sapien
actggtgtcgcttgcttaatttctt

SEQ ID NO: 4628969 - DNA, 25 bp, Homo sapien
tgtcgggccttgtccaggcctcctt

SEQ ID NO: 4628970 - DNA, 25 bp, Homo sapien
gagggtcccaacgaaccttcacata

SEQ ID NO: 4628971 - DNA, 25 bp, Homo sapien
tttgcagtaccccactggcctccgg

SEQ ID NO: 4628972 - DNA, 25 bp, Homo sapien
ttcacataatcctcggctggcccag

SEQ ID NO: 4628973 - DNA, 25 bp, Homo sapien
cagtaccccactggcctccggaggg

SEQ ID NO: 4628974 - DNA, 25 bp, Homo sapien
gtgcacccgcgcgaggtgccctggg

SEQ ID NO: 4628975 - DNA, 25 bp, Homo sapien
ggcggcggactctacacaccgcggg

SEQ ID NO: 4628976 - DNA, 25 bp, Homo sapien
gtgggaatgcgggaggacggcggac

SEQ ID NO: 4628977 - DNA, 25 bp, Homo sapien
acggctccgatgagcagacggccca

SEQ ID NO: 4628978 - DNA, 25 bp, Homo sapien
ggaaattccagtgcctcactacagt

SEQ ID NO: 4628979 - DNA, 25 bp, Homo sapien
cccgaggggtccgattgttctccag

SEQ ID NO: 4628980 - DNA, 25 bp, Homo sapien
ctcagacattttgtcacctggcagt

SEQ ID NO: 4628981 - DNA, 25 bp, Homo sapien
tcactacagtgctcttggagcctgt

SEQ ID NO: 4628982 - DNA, 25 bp, Homo sapien
catccttgaaagcagacacagccag

SEQ ID NO: 4628983 - DNA, 25 bp, Homo sapien
tcacctgtgcgtcggatggaaggcc

SEQ ID NO: 4628984 - DNA, 25 bp, Homo sapien
tgtcatcatccagcttccgggtggg

SEQ ID NO: 4628985 - DNA, 25 bp, Homo sapien
tggaccaccgaggttcctgcttctg

SEQ ID NO: 4628986 - DNA, 25 bp, Homo sapien
cctgctccctgatgcactaagactt

SEQ ID NO: 4628987 - DNA, 25 bp, Homo sapien
gatgcactaagacttgaggatcctg

SEQ ID NO: 4628988 - DNA, 25 bp, Homo sapien
gacttgaggatcctgtcctaactgg

SEQ ID NO: 4628989 - DNA, 25 bp, Homo sapien
gatcctgtcctaactggatactcac

SEQ ID NO: 4628990 - DNA, 25 bp, Homo sapien
catcacacatctcatcgttgacaac

SEQ ID NO: 4628991 - DNA, 25 bp, Homo sapien
tgtctccttggatgtagcccatgcg

SEQ ID NO: 4628992 - DNA, 25 bp, Homo sapien
catggaaaaccctggtgcagaccct

SEQ ID NO: 4628993 - DNA, 25 bp, Homo sapien
ttctgtgtgggccatctccgtcacc

SEQ ID NO: 4628994 - DNA, 25 bp, Homo sapien
cagtaagcagcaagttgatgttgtc

SEQ ID NO: 4628995 - DNA, 25 bp, Homo sapien
gtctccgtgaggctatacatttcct

SEQ ID NO: 4628996 - DNA, 25 bp, Homo sapien
ttcctcctcagtaagcagcaagttg

SEQ ID NO: 4628997 - DNA, 25 bp, Homo sapien
cagggatgactttacaccgctgaaa

SEQ ID NO: 4628998 - DNA, 25 bp, Homo sapien
gacaagaagtcaggccactctatgt

SEQ ID NO: 4628999 - DNA, 25 bp, Homo sapien
tatgtggcctcgatgttcagggtcc

SEQ ID NO: 4629000 - DNA, 25 bp, Homo sapien
tggcggtaacgcagaaagtcctcca

SEQ ID NO: 4629001 - DNA, 25 bp, Homo sapien
gactcatgggacaagaagtcaggcc

SEQ ID NO: 4629002 - DNA, 25 bp, Homo sapien
ctgtcagaagcctcaacagagagtt

SEQ ID NO: 4629003 - DNA, 25 bp, Homo sapien
aaaaccaagagtgctgggcccggcg

SEQ ID NO: 4629004 - DNA, 25 bp, Homo sapien
ccactgccccgagccaggaaggcgg

SEQ ID NO: 4629005 - DNA, 25 bp, Homo sapien
ggagcctctgggaaccgtttgcaaa

SEQ ID NO: 4629006 - DNA, 25 bp, Homo sapien
gctggctgggctgctatctgcgatg

SEQ ID NO: 4629007 - DNA, 25 bp, Homo sapien
tgggctgctatctgcgatgggaccc

SEQ ID NO: 4629008 - DNA, 25 bp, Homo sapien
gctgggctgctatctgcgatgggac

SEQ ID NO: 4629009 - DNA, 25 bp, Homo sapien
ctgcgatgggacccacatggctgat

SEQ ID NO: 4629010 - DNA, 25 bp, Homo sapien
tcaggtgaatggctgcgctgttggg

SEQ ID NO: 4629011 - DNA, 25 bp, Homo sapien
gaggacattctcttgcaggaaggta

SEQ ID NO: 4629012 - DNA, 25 bp, Homo sapien
cattctcttgcaggaaggtaggcca

SEQ ID NO: 4629013 - DNA, 25 bp, Homo sapien
tgcaggaaggtaggccagtccacaa

SEQ ID NO: 4629014 - DNA, 25 bp, Homo sapien
caagggcctcgagcaatgaagacgt

SEQ ID NO: 4629015 - DNA, 25 bp, Homo sapien
tcgaaacattcagcaccgagcggtg

SEQ ID NO: 4629016 - DNA, 25 bp, Homo sapien
cagatgcagttcttaggcccaggag

SEQ ID NO: 4629017 - DNA, 25 bp, Homo sapien
tacaggaggagactacacagggctc

SEQ ID NO: 4629018 - DNA, 25 bp, Homo sapien
ccaaagaggtaggcatcaccttgat

SEQ ID NO: 4629019 - DNA, 25 bp, Homo sapien
cagctccaaagaggtaggcatcacc

SEQ ID NO: 4629020 - DNA, 25 bp, Homo sapien
gctccaaagaggtaggcatcacctt

SEQ ID NO: 4629021 - DNA, 25 bp, Homo sapien
tccaaagaggtaggcatcaccttga

SEQ ID NO: 4629022 - DNA, 25 bp, Homo sapien
aatgggcctgttcctgttgtggaag

SEQ ID NO: 4629023 - DNA, 25 bp, Homo sapien
cctggaatacggcaggcctgacctg

SEQ ID NO: 4629024 - DNA, 25 bp, Homo sapien
gaagtttgctgttctggaataggga

SEQ ID NO: 4629025 - DNA, 25 bp, Homo sapien
gagaagcgtgatccaaatgggcctg

SEQ ID NO: 4629026 - DNA, 25 bp, Homo sapien
cacagtgatgggagggcttgaaaac

SEQ ID NO: 4629027 - DNA, 25 bp, Homo sapien
ccacttaagcaaggtcagggtgaca

SEQ ID NO: 4629028 - DNA, 25 bp, Homo sapien
ggaactctactctttgctgagggaa

SEQ ID NO: 4629029 - DNA, 25 bp, Homo sapien
gaaaggctggtatctgccctgctag

SEQ ID NO: 4629030 - DNA, 25 bp, Homo sapien
aaagctttcccttagtgctagccga

SEQ ID NO: 4629031 - DNA, 25 bp, Homo sapien
catggctatgaaaaggcctggctac

SEQ ID NO: 4629032 - DNA, 25 bp, Homo sapien
ctgtcaggaacaggcacgatgcgtg

SEQ ID NO: 4629033 - DNA, 25 bp, Homo sapien
catgagggaccagagcgcattggat

SEQ ID NO: 4629034 - DNA, 25 bp, Homo sapien
ttggggacgttcccctcagcttgct

SEQ ID NO: 4629035 - DNA, 25 bp, Homo sapien
cttggggacgttcccctcagcttgc

SEQ ID NO: 4629036 - DNA, 25 bp, Homo sapien
gcttggggacgttcccctcagcttg

SEQ ID NO: 4629037 - DNA, 25 bp, Homo sapien
atcgcaatcgctttattatgatttc

SEQ ID NO: 4629038 - DNA, 25 bp, Homo sapien
gcatcgcaatcgctttattatgatt

SEQ ID NO: 4629039 - DNA, 25 bp, Homo sapien
tattatgatttccactgtgcccagc

SEQ ID NO: 4629040 - DNA, 25 bp, Homo sapien
gagcatcgcaatcgctttattatga

SEQ ID NO: 4629041 - DNA, 25 bp, Homo sapien
ccttctggaacccttgcgacgtcaa

SEQ ID NO: 4629042 - DNA, 25 bp, Homo sapien
ggccactgctcgaatcccaggagaa

SEQ ID NO: 4629043 - DNA, 25 bp, Homo sapien
accagttggccgtgcggccgtgcat

SEQ ID NO: 4629044 - DNA, 25 bp, Homo sapien
ccttgcgacgtcaaaggcagcctta

SEQ ID NO: 4629045 - DNA, 25 bp, Homo sapien
gccgccgatagcgggaccgggagcc

SEQ ID NO: 4629046 - DNA, 25 bp, Homo sapien
tggtccgtgagacagccgctgcccc

SEQ ID NO: 4629047 - DNA, 25 bp, Homo sapien
cccgggacaggagtcgcctgcccgc

SEQ ID NO: 4629048 - DNA, 25 bp, Homo sapien
gggacaggagtcgcctgcccgccgg

SEQ ID NO: 4629049 - DNA, 25 bp, Homo sapien
caagaacctactcaatgaagtcact

SEQ ID NO: 4629050 - DNA, 25 bp, Homo sapien
tgtatggcagcgtgtcagtgaggct

SEQ ID NO: 4629051 - DNA, 25 bp, Homo sapien
ggcagcgtgtatacctgtgacaggt

SEQ ID NO: 4629052 - DNA, 25 bp, Homo sapien
gacaggtgtgattgtgagggcccga

SEQ ID NO: 4629053 - DNA, 25 bp, Homo sapien
ctctgatcgctccaccggagccggc

SEQ ID NO: 4629054 - DNA, 25 bp, Homo sapien
gactctcagaggcgcgtgcccagca

SEQ ID NO: 4629055 - DNA, 25 bp, Homo sapien
accggagccggcctgaagtgctgca

SEQ ID NO: 4629056 - DNA, 25 bp, Homo sapien
tcagaggcgcgtgcccagcaaggcc

SEQ ID NO: 4629057 - DNA, 25 bp, Homo sapien
actgtgcgcttaaacatgcccagcc

SEQ ID NO: 4629058 - DNA, 25 bp, Homo sapien
tgtgcgcttaaacatgcccagccaa

SEQ ID NO: 4629059 - DNA, 25 bp, Homo sapien
cactgtgcgcttaaacatgcccagc

SEQ ID NO: 4629060 - DNA, 25 bp, Homo sapien
ctgtgcgcttaaacatgcccagcca

SEQ ID NO: 4629061 - DNA, 25 bp, Homo sapien
cacgctcgaagttttaagggctcca

SEQ ID NO: 4629062 - DNA, 25 bp, Homo sapien
taaacatcaagctggctaagaagtc

SEQ ID NO: 4629063 - DNA, 25 bp, Homo sapien
tggctaagaagtcttctccccagga

SEQ ID NO: 4629064 - DNA, 25 bp, Homo sapien
gagtgtgggaagctccggaaagctc

SEQ ID NO: 4629065 - DNA, 25 bp, Homo sapien
tggaatgacaaaggagccccatggc

SEQ ID NO: 4629066 - DNA, 25 bp, Homo sapien
cagcaaaagccgtctgagagggagc

SEQ ID NO: 4629067 - DNA, 25 bp, Homo sapien
gaaagaaccctagcacaccaagagg

SEQ ID NO: 4629068 - DNA, 25 bp, Homo sapien
tgcccctagagaacgagagcagctt

SEQ ID NO: 4629069 - DNA, 25 bp, Homo sapien
gcaggtggctgggttgactcatggt

SEQ ID NO: 4629070 - DNA, 25 bp, Homo sapien
tttctctgacgaagaaaaggctcca

SEQ ID NO: 4629071 - DNA, 25 bp, Homo sapien
cacaaaggcgggtactcccccattg

SEQ ID NO: 4629072 - DNA, 25 bp, Homo sapien
aggtggctgggttgactcatggttc

SEQ ID NO: 4629073 - DNA, 25 bp, Homo sapien
tagcaatgtcctaggctggcagcca

SEQ ID NO: 4629074 - DNA, 25 bp, Homo sapien
caggagtgaggcctgtaaccgggta

SEQ ID NO: 4629075 - DNA, 25 bp, Homo sapien
ggagaaccagagtctttctagcaat

SEQ ID NO: 4629076 - DNA, 25 bp, Homo sapien
cagcccttctgagacttggccaacc

SEQ ID NO: 4629077 - DNA, 25 bp, Homo sapien
tggagtcctgtctgccatcggagac

SEQ ID NO: 4629078 - DNA, 25 bp, Homo sapien
tgaggtcacctgagcatcgtggtct

SEQ ID NO: 4629079 - DNA, 25 bp, Homo sapien
tgacgatgctaagcctcacgtgtga

SEQ ID NO: 4629080 - DNA, 25 bp, Homo sapien
cagctgttaggagacaattgggcac

SEQ ID NO: 4629081 - DNA, 25 bp, Homo sapien
gctctgacattctagaattctgtga

SEQ ID NO: 4629082 - DNA, 25 bp, Homo sapien
ctctgacattctagaattctgtgat

SEQ ID NO: 4629083 - DNA, 25 bp, Homo sapien
acagccactggaccagcactggtct

SEQ ID NO: 4629084 - DNA, 25 bp, Homo sapien
cacagccactggaccagcactggtc

SEQ ID NO: 4629085 - DNA, 25 bp, Homo sapien
tggaccagcactggtctccttgttt

SEQ ID NO: 4629086 - DNA, 25 bp, Homo sapien
cactggaccagcactggtctccttg

SEQ ID NO: 4629087 - DNA, 25 bp, Homo sapien
catactggtcatacaggccccgttt

SEQ ID NO: 4629088 - DNA, 25 bp, Homo sapien
tacttcaaggccatcttccggtagg

SEQ ID NO: 4629089 - DNA, 25 bp, Homo sapien
cataggcctctgcaatctccttaaa

SEQ ID NO: 4629090 - DNA, 25 bp, Homo sapien
cttaaacttctcctcagcgttgggt

SEQ ID NO: 4629091 - DNA, 25 bp, Homo sapien
gggtccgggattgggctggagtgct

SEQ ID NO: 4629092 - DNA, 25 bp, Homo sapien
cgggattgggctggagtgctgccct

SEQ ID NO: 4629093 - DNA, 25 bp, Homo sapien
tccgggattgggctggagtgctgcc

SEQ ID NO: 4629094 - DNA, 25 bp, Homo sapien
ggattgggctggagtgctgccctct

SEQ ID NO: 4629095 - DNA, 25 bp, Homo sapien
tcagccaatgaagcagcggagactt

SEQ ID NO: 4629096 - DNA, 25 bp, Homo sapien
atgaagcagcggagacttcaggcag

SEQ ID NO: 4629097 - DNA, 25 bp, Homo sapien
catcagccaatgaagcagcggagac

SEQ ID NO: 4629098 - DNA, 25 bp, Homo sapien
gccaatgaagcagcggagacttcag

SEQ ID NO: 4629099 - DNA, 25 bp, Homo sapien
catgggggtccccatgaaaggtgta

SEQ ID NO: 4629100 - DNA, 25 bp, Homo sapien
tggcaaagaagatatcgaaggggtt

SEQ ID NO: 4629101 - DNA, 25 bp, Homo sapien
tgatgtgccaccgccggtcttcagg

SEQ ID NO: 4629102 - DNA, 25 bp, Homo sapien
tgaaaggtgtagtgaaaggagccac

SEQ ID NO: 4629103 - DNA, 25 bp, Homo sapien
gcacgttggtgccatctcggcggaa

SEQ ID NO: 4629104 - DNA, 25 bp, Homo sapien
gccgaaagcgccaaatgggtcctca

SEQ ID NO: 4629105 - DNA, 25 bp, Homo sapien
caggatcttgtcctcggtgcgcaca

SEQ ID NO: 4629106 - DNA, 25 bp, Homo sapien
catgtcatctgggtcaaagccactg

SEQ ID NO: 4629107 - DNA, 25 bp, Homo sapien
gaatgtgccagctggcgggaagaga

SEQ ID NO: 4629108 - DNA, 25 bp, Homo sapien
gctggcgggaagagagggaatgtcc

SEQ ID NO: 4629109 - DNA, 25 bp, Homo sapien
gggaaagaatgtgccagctggcggg

SEQ ID NO: 4629110 - DNA, 25 bp, Homo sapien
gaggtggggaaagaatgtgccagct

SEQ ID NO: 4629111 - DNA, 25 bp, Homo sapien
cacggtgcctggcttgatgacatca

SEQ ID NO: 4629112 - DNA, 25 bp, Homo sapien
agggcaaagggatcactcggccgtc

SEQ ID NO: 4629113 - DNA, 25 bp, Homo sapien
tctgtctgggaagcgaactttgaac

SEQ ID NO: 4629114 - DNA, 25 bp, Homo sapien
tcggccgtcgatagtgggaatgttc

SEQ ID NO: 4629115 - DNA, 25 bp, Homo sapien
ctgtggtaggctctggactggctgg

SEQ ID NO: 4629116 - DNA, 25 bp, Homo sapien
ggtaggctctggactggctggggca

SEQ ID NO: 4629117 - DNA, 25 bp, Homo sapien
ggctctggactggctggggcagagc

SEQ ID NO: 4629118 - DNA, 25 bp, Homo sapien
taggctctggactggctggggcaga

SEQ ID NO: 4629119 - DNA, 25 bp, Homo sapien
tcaagctgggtgcacattgagtgga

SEQ ID NO: 4629120 - DNA, 25 bp, Homo sapien
tttagaaaaagttgccagtgtccag

SEQ ID NO: 4629121 - DNA, 25 bp, Homo sapien
tggacatcaagctgggtgcacattg

SEQ ID NO: 4629122 - DNA, 25 bp, Homo sapien
tgccagtgtccagtggacatcaagc

SEQ ID NO: 4629123 - DNA, 25 bp, Homo sapien
gcataaaagggctggaaattcccca

SEQ ID NO: 4629124 - DNA, 25 bp, Homo sapien
caggcatggataaggaatctctaca

SEQ ID NO: 4629125 - DNA, 25 bp, Homo sapien
catgaacattgacccctggcctggg

SEQ ID NO: 4629126 - DNA, 25 bp, Homo sapien
gaaaagtgtctcgtgctcaagtccc

SEQ ID NO: 4629127 - DNA, 25 bp, Homo sapien
tagagtcacttgctggcatacagga

SEQ ID NO: 4629128 - DNA, 25 bp, Homo sapien
caaccactgtggagcaccaaagaca

SEQ ID NO: 4629129 - DNA, 25 bp, Homo sapien
gattgcacccaatgagtctaccagt

SEQ ID NO: 4629130 - DNA, 25 bp, Homo sapien
tatagtctgtcaccccaattgaagc

SEQ ID NO: 4629131 - DNA, 25 bp, Homo sapien
tcatgcttctgagtggccagctcct

SEQ ID NO: 4629132 - DNA, 25 bp, Homo sapien
taagtcttttatcgtcctccacaac

SEQ ID NO: 4629133 - DNA, 25 bp, Homo sapien
cctccacaacttcttggcgatttaa

SEQ ID NO: 4629134 - DNA, 25 bp, Homo sapien
cagtttgcaggtagttttaagtctt

SEQ ID NO: 4629135 - DNA, 25 bp, Homo sapien
tatgccagcctactgatgtatgaac

SEQ ID NO: 4629136 - DNA, 25 bp, Homo sapien
tggaaactatgtcaggcgaacctac

SEQ ID NO: 4629137 - DNA, 25 bp, Homo sapien
tctaataatgtgagacctacctgtc

SEQ ID NO: 4629138 - DNA, 25 bp, Homo sapien
tagaacatgatactttacaacctgc

SEQ ID NO: 4629139 - DNA, 25 bp, Homo sapien
tacagtgagatctcacggagccgcc

SEQ ID NO: 4629140 - DNA, 25 bp, Homo sapien
tcagcggccagaggtgagatcgagt

SEQ ID NO: 4629141 - DNA, 25 bp, Homo sapien
aagtcgcatgggtcagagtgtcagc

SEQ ID NO: 4629142 - DNA, 25 bp, Homo sapien
ccgacgtccgctggagggataatgc

SEQ ID NO: 4629143 - DNA, 25 bp, Homo sapien
tgttccgccctctccgtagggatgt

SEQ ID NO: 4629144 - DNA, 25 bp, Homo sapien
ggaactcgcgggttcttcctcgcca

SEQ ID NO: 4629145 - DNA, 25 bp, Homo sapien
atgtagtgttaagggcccggcagca

SEQ ID NO: 4629146 - DNA, 25 bp, Homo sapien
tccagcgtcctggtggagcatcgac

SEQ ID NO: 4629147 - DNA, 25 bp, Homo sapien
tcaggcaattcatgcttcacacagt

SEQ ID NO: 4629148 - DNA, 25 bp, Homo sapien
gcgtgaaccatcttgcctggcatat

SEQ ID NO: 4629149 - DNA, 25 bp, Homo sapien
tgattgcccagttcagaattatgct

SEQ ID NO: 4629150 - DNA, 25 bp, Homo sapien
tacatggattctagcaccgaactgc

SEQ ID NO: 4629151 - DNA, 25 bp, Homo sapien
tccatttcccttagccttctggcag

SEQ ID NO: 4629152 - DNA, 25 bp, Homo sapien
ttagccccaagcaggtcctccagca

SEQ ID NO: 4629153 - DNA, 25 bp, Homo sapien
tcccttagccttctggcagtttacc

SEQ ID NO: 4629154 - DNA, 25 bp, Homo sapien
ggtcctccagcagccattccatttc

SEQ ID NO: 4629155 - DNA, 25 bp, Homo sapien
ggcatgggtcagttggccccagaga

SEQ ID NO: 4629156 - DNA, 25 bp, Homo sapien
ggctagggcatgggtcagttggccc

SEQ ID NO: 4629157 - DNA, 25 bp, Homo sapien
ctagggcatgggtcagttggcccca

SEQ ID NO: 4629158 - DNA, 25 bp, Homo sapien
catgggtcagttggccccagagaag

SEQ ID NO: 4629159 - DNA, 25 bp, Homo sapien
atttcctggactctggaagcagctg

SEQ ID NO: 4629160 - DNA, 25 bp, Homo sapien
cagatttcctggactctggaagcag

SEQ ID NO: 4629161 - DNA, 25 bp, Homo sapien
ctggaagcagctgctgccgcagtgt

SEQ ID NO: 4629162 - DNA, 25 bp, Homo sapien
tctggaagcagctgctgccgcagtg

SEQ ID NO: 4629163 - DNA, 25 bp, Homo sapien
aaaccacgaataagaatagtgtcac

SEQ ID NO: 4629164 - DNA, 25 bp, Homo sapien
cttgccttgcaccatattcccagag

SEQ ID NO: 4629165 - DNA, 25 bp, Homo sapien
ctctgaatctgccaaaccacgaata

SEQ ID NO: 4629166 - DNA, 25 bp, Homo sapien
ttgccttgcaccatattcccagagc

SEQ ID NO: 4629167 - DNA, 25 bp, Homo sapien
aatgacctcacatgtggtgtcagca

SEQ ID NO: 4629168 - DNA, 25 bp, Homo sapien
taccaatgacctcacatgtggtgtc

SEQ ID NO: 4629169 - DNA, 25 bp, Homo sapien
cataccaatgacctcacatgtggtg

SEQ ID NO: 4629170 - DNA, 25 bp, Homo sapien
gacctcacatgtggtgtcagcagtc

SEQ ID NO: 4629171 - DNA, 25 bp, Homo sapien
gccacacggtgcagaagtggtagtt

SEQ ID NO: 4629172 - DNA, 25 bp, Homo sapien
tacacaggtgatcaaggaaggccac

SEQ ID NO: 4629173 - DNA, 25 bp, Homo sapien
ccacacggtgcagaagtggtagttc

SEQ ID NO: 4629174 - DNA, 25 bp, Homo sapien
gcttacacaggtgatcaaggaaggc

SEQ ID NO: 4629175 - DNA, 25 bp, Homo sapien
tctggtatccctatagccttgagga

SEQ ID NO: 4629176 - DNA, 25 bp, Homo sapien
ctgtttgctctggtatccctatagc

SEQ ID NO: 4629177 - DNA, 25 bp, Homo sapien
ttgctctggtatccctatagccttg

SEQ ID NO: 4629178 - DNA, 25 bp, Homo sapien
tggtatccctatagccttgaggagg

SEQ ID NO: 4629179 - DNA, 25 bp, Homo sapien
ttacaagctgggtgcttagaggccc

SEQ ID NO: 4629180 - DNA, 25 bp, Homo sapien
ccagagatggagacctagaagccga

SEQ ID NO: 4629181 - DNA, 25 bp, Homo sapien
gggcccattactagagactccagga

SEQ ID NO: 4629182 - DNA, 25 bp, Homo sapien
ttctgatgtagcgaggcattcccca

SEQ ID NO: 4629183 - DNA, 25 bp, Homo sapien
tcacttacgtgggactttgaaacag

SEQ ID NO: 4629184 - DNA, 25 bp, Homo sapien
cccgtcaggcttatagttgctttgg

SEQ ID NO: 4629185 - DNA, 25 bp, Homo sapien
cagagtttgaggatgggctggagcc

SEQ ID NO: 4629186 - DNA, 25 bp, Homo sapien
gttgctttggtctgcgataggctca

SEQ ID NO: 4629187 - DNA, 25 bp, Homo sapien
tactgggtgtaggggatccactgcc

SEQ ID NO: 4629188 - DNA, 25 bp, Homo sapien
tttgttgcacatttctccacacaag

SEQ ID NO: 4629189 - DNA, 25 bp, Homo sapien
tttctccacacaagttcaaggtcaa

SEQ ID NO: 4629190 - DNA, 25 bp, Homo sapien
gcacatttctccacacaagttcaag

SEQ ID NO: 4629191 - DNA, 25 bp, Homo sapien
gatgagtgcgttcaatcttcacagc

SEQ ID NO: 4629192 - DNA, 25 bp, Homo sapien
cagaagtctggaattgtggagctca

SEQ ID NO: 4629193 - DNA, 25 bp, Homo sapien
ggtactgtgcgctgaacttcttgag

SEQ ID NO: 4629194 - DNA, 25 bp, Homo sapien
gcagtgtgttgagagctctggcccc

SEQ ID NO: 4629195 - DNA, 25 bp, Homo sapien
tccatgtgggcccaaggacagtgct

SEQ ID NO: 4629196 - DNA, 25 bp, Homo sapien
ggtcgatggttatccaggcatttgg

SEQ ID NO: 4629197 - DNA, 25 bp, Homo sapien
tcaggatgtcacttgctcttcgccc

SEQ ID NO: 4629198 - DNA, 25 bp, Homo sapien
ggcatttggctaacaccttttgcaa

SEQ ID NO: 4629199 - DNA, 25 bp, Homo sapien
agtgctagtattaccagccttttct

SEQ ID NO: 4629200 - DNA, 25 bp, Homo sapien
tcttggcataccaagtgctagtatt

SEQ ID NO: 4629201 - DNA, 25 bp, Homo sapien
taccaagtgctagtattaccagcct

SEQ ID NO: 4629202 - DNA, 25 bp, Homo sapien
tcagctagtttattagaatttccat

SEQ ID NO: 4629203 - DNA, 25 bp, Homo sapien
tataagtatgtaccaccacccctag

SEQ ID NO: 4629204 - DNA, 25 bp, Homo sapien
gctatttacgggtgctatatcgcta

SEQ ID NO: 4629205 - DNA, 25 bp, Homo sapien
cattcggttcccaatcgtcatggca

SEQ ID NO: 4629206 - DNA, 25 bp, Homo sapien
tatatcgctactgatctgtgcagga

SEQ ID NO: 4629207 - DNA, 25 bp, Homo sapien
gttgacaggtttgagctaaataaag

SEQ ID NO: 4629208 - DNA, 25 bp, Homo sapien
cctgttgacaggtttgagctaaata

SEQ ID NO: 4629209 - DNA, 25 bp, Homo sapien
ggtgagttttggactcagaccctgt

SEQ ID NO: 4629210 - DNA, 25 bp, Homo sapien
gtggtgagttttggactcagaccct

SEQ ID NO: 4629211 - DNA, 25 bp, Homo sapien
ctttggagaccatagtagtgggaga

SEQ ID NO: 4629212 - DNA, 25 bp, Homo sapien
taagtgtgaactcacgttcccatgt

SEQ ID NO: 4629213 - DNA, 25 bp, Homo sapien
tcagataagtgtgaactcacgttcc

SEQ ID NO: 4629214 - DNA, 25 bp, Homo sapien
aactcacgttcccatgtaaaatgga

SEQ ID NO: 4629215 - DNA, 25 bp, Homo sapien
tcaaaaactgttgcgttaccactgc

SEQ ID NO: 4629216 - DNA, 25 bp, Homo sapien
cttacacacagagtcaacattgcgg

SEQ ID NO: 4629217 - DNA, 25 bp, Homo sapien
tggtacccaccaacattgaaggcag

SEQ ID NO: 4629218 - DNA, 25 bp, Homo sapien
gaaaaatctgtcctaggctgggcat

SEQ ID NO: 4629219 - DNA, 25 bp, Homo sapien
tatttgatgtggacggtaaggctag

SEQ ID NO: 4629220 - DNA, 25 bp, Homo sapien
cttatcctgaccaaagactgtgttg

SEQ ID NO: 4629221 - DNA, 25 bp, Homo sapien
taggcctgcaggatcccttatcctg

SEQ ID NO: 4629222 - DNA, 25 bp, Homo sapien
tatggcatccctccacctatatttg

SEQ ID NO: 4629223 - DNA, 25 bp, Homo sapien
taggcggagagtgaattaccaacag

SEQ ID NO: 4629224 - DNA, 25 bp, Homo sapien
cggtatgatgtctcctgttgcctca

SEQ ID NO: 4629225 - DNA, 25 bp, Homo sapien
gcacttgactcaatgctgcccgagc

SEQ ID NO: 4629226 - DNA, 25 bp, Homo sapien
aaagcgattttcatttggtaggcgg

SEQ ID NO: 4629227 - DNA, 25 bp, Homo sapien
ctgagatgagactcatatacttatc

SEQ ID NO: 4629228 - DNA, 25 bp, Homo sapien
gagactcatatacttatccctgatg

SEQ ID NO: 4629229 - DNA, 25 bp, Homo sapien
aaaggcaaattcatgtgtttgtaag

SEQ ID NO: 4629230 - DNA, 25 bp, Homo sapien
tccacagacctcccaaaatgaaaag

SEQ ID NO: 4629231 - DNA, 25 bp, Homo sapien
tactaggcgtgtcgcatcactgagg

SEQ ID NO: 4629232 - DNA, 25 bp, Homo sapien
gagccaggccgcaagcgaatttcct

SEQ ID NO: 4629233 - DNA, 25 bp, Homo sapien
gataaactccggagccaatgaactg

SEQ ID NO: 4629234 - DNA, 25 bp, Homo sapien
tccaatccgtcgaggaagcgtagcg

SEQ ID NO: 4629235 - DNA, 25 bp, Homo sapien
tgccagcagactacacgcggtagaa

SEQ ID NO: 4629236 - DNA, 25 bp, Homo sapien
tgagcagtgcaagtacagagcggca

SEQ ID NO: 4629237 - DNA, 25 bp, Homo sapien
tagaaagccgaccttggtgagcgtg

SEQ ID NO: 4629238 - DNA, 25 bp, Homo sapien
aaaggatggacgattacggagcgcc

SEQ ID NO: 4629239 - DNA, 25 bp, Homo sapien
tgtttagatatcaccctccaatcct

SEQ ID NO: 4629240 - DNA, 25 bp, Homo sapien
gaaaatctactgtttagatatcacc

SEQ ID NO: 4629241 - DNA, 25 bp, Homo sapien
ccggtttcatctatatagcagcaca

SEQ ID NO: 4629242 - DNA, 25 bp, Homo sapien
ccctggctagcactaatctgctgtt

SEQ ID NO: 4629243 - DNA, 25 bp, Homo sapien
cacaatggtgcatatgccctgaggc

SEQ ID NO: 4629244 - DNA, 25 bp, Homo sapien
tatggtaatctcaagagccccgagc

SEQ ID NO: 4629245 - DNA, 25 bp, Homo sapien
tcatcgttgccctgaagagacacct

SEQ ID NO: 4629246 - DNA, 25 bp, Homo sapien
catccatggtgggtggtcgagccaa

SEQ ID NO: 4629247 - DNA, 25 bp, Homo sapien
agcggaggcccagtcgactctcgac

SEQ ID NO: 4629248 - DNA, 25 bp, Homo sapien
ggcagagccggtcgcacgcctgggt

SEQ ID NO: 4629249 - DNA, 25 bp, Homo sapien
acgcctgggtcccagcggaggccca

SEQ ID NO: 4629250 - DNA, 25 bp, Homo sapien
agtcgactctcgacccgggccccag

SEQ ID NO: 4629251 - DNA, 25 bp, Homo sapien
caggaagccttgctgatgttacagt

SEQ ID NO: 4629252 - DNA, 25 bp, Homo sapien
tcggcatcgggaactgaagctgaca

SEQ ID NO: 4629253 - DNA, 25 bp, Homo sapien
cgtttggtcagtatgtgaacctcaa

SEQ ID NO: 4629254 - DNA, 25 bp, Homo sapien
gaattccctgacctcaatgagctca

SEQ ID NO: 4629255 - DNA, 25 bp, Homo sapien
ctgttcgtgccgcagcaggaggcct

SEQ ID NO: 4629256 - DNA, 25 bp, Homo sapien
aacaccgtggtactgttcgtgccgc

SEQ ID NO: 4629257 - DNA, 25 bp, Homo sapien
ctggattgccccgaaacaccgtggt

SEQ ID NO: 4629258 - DNA, 25 bp, Homo sapien
ttccttcagggctctctactggctt

SEQ ID NO: 4629259 - DNA, 25 bp, Homo sapien
gaaggtctgcgtttcccagggaaca

SEQ ID NO: 4629260 - DNA, 25 bp, Homo sapien
gatactacgctctggtgggcaaact

SEQ ID NO: 4629261 - DNA, 25 bp, Homo sapien
tatggcaaccatggcaacgagtcag

SEQ ID NO: 4629262 - DNA, 25 bp, Homo sapien
taagaccgggcataacaaaccttgc

SEQ ID NO: 4629263 - DNA, 25 bp, Homo sapien
taccctctgacctatctctgaaagc

SEQ ID NO: 4629264 - DNA, 25 bp, Homo sapien
tcagtagccaaagactcagcttccc

SEQ ID NO: 4629265 - DNA, 25 bp, Homo sapien
cagatattgctccaacctcaggagt

SEQ ID NO: 4629266 - DNA, 25 bp, Homo sapien
tgataattggcatcactcctccccg

SEQ ID NO: 4629267 - DNA, 25 bp, Homo sapien
gggcagtggagtcggcggcgcggag

SEQ ID NO: 4629268 - DNA, 25 bp, Homo sapien
aatgagcatggtcgctttccaggga

SEQ ID NO: 4629269 - DNA, 25 bp, Homo sapien
ccccatcagctggtaggaaatggcc

SEQ ID NO: 4629270 - DNA, 25 bp, Homo sapien
ggcttcctatggaccaatgagcatg

SEQ ID NO: 4629271 - DNA, 25 bp, Homo sapien
tgggaggtaggagctgccgggactc

SEQ ID NO: 4629272 - DNA, 25 bp, Homo sapien
ggtaggagctgccgggactccctcc

SEQ ID NO: 4629273 - DNA, 25 bp, Homo sapien
gaggtaggagctgccgggactccct

SEQ ID NO: 4629274 - DNA, 25 bp, Homo sapien
cgctgggaggtaggagctgccggga

SEQ ID NO: 4629275 - DNA, 25 bp, Homo sapien
gcgaactccgggtagcggtgagtac

SEQ ID NO: 4629276 - DNA, 25 bp, Homo sapien
tagcggtgagtaccggccggcaggc

SEQ ID NO: 4629277 - DNA, 25 bp, Homo sapien
cgtctgagcgaactccgggtagcgg

SEQ ID NO: 4629278 - DNA, 25 bp, Homo sapien
gggtagcggtgagtaccggccggca

SEQ ID NO: 4629279 - DNA, 25 bp, Homo sapien
catggtcccggtcgcaggtagcgtc

SEQ ID NO: 4629280 - DNA, 25 bp, Homo sapien
tggtcccggtcgcaggtagcgtccc

SEQ ID NO: 4629281 - DNA, 25 bp, Homo sapien
tcatggtcccggtcgcaggtagcgt

SEQ ID NO: 4629282 - DNA, 25 bp, Homo sapien
cctcatggtcccggtcgcaggtagc

SEQ ID NO: 4629283 - DNA, 25 bp, Homo sapien
tcagcaggtgccgcgactgctctcg

SEQ ID NO: 4629284 - DNA, 25 bp, Homo sapien
cgccggaccgctccctctttcctct

SEQ ID NO: 4629285 - DNA, 25 bp, Homo sapien
ctctcagcaggtgccgcgactgctc

SEQ ID NO: 4629286 - DNA, 25 bp, Homo sapien
gccgcgccggaccgctccctctttc

SEQ ID NO: 4629287 - DNA, 25 bp, Homo sapien
tacactggagttccttggcggcagc

SEQ ID NO: 4629288 - DNA, 25 bp, Homo sapien
ttctgcccattcctatacactggag

SEQ ID NO: 4629289 - DNA, 25 bp, Homo sapien
tacagttctgaccacatctatcaac

SEQ ID NO: 4629290 - DNA, 25 bp, Homo sapien
aactcgctgtactctaggctacaga

SEQ ID NO: 4629291 - DNA, 25 bp, Homo sapien
tgtcctgaggcacttaactggcaat

SEQ ID NO: 4629292 - DNA, 25 bp, Homo sapien
actgtactgcggtggtcttggctcc

SEQ ID NO: 4629293 - DNA, 25 bp, Homo sapien
tttaacagctgcaaactagcgggat

SEQ ID NO: 4629294 - DNA, 25 bp, Homo sapien
taaaagggtgatttgtagccaggac

SEQ ID NO: 4629295 - DNA, 25 bp, Homo sapien
tcattgtcgataggaagggaagcaa

SEQ ID NO: 4629296 - DNA, 25 bp, Homo sapien
aaatggctcctatatgcttttataa

SEQ ID NO: 4629297 - DNA, 25 bp, Homo sapien
ttcttttacagcttaaaatggctcc

SEQ ID NO: 4629298 - DNA, 25 bp, Homo sapien
aatagagaagatcaagaaatagagg

SEQ ID NO: 4629299 - DNA, 25 bp, Homo sapien
ctctcatgaagggatgttatgctgc

SEQ ID NO: 4629300 - DNA, 25 bp, Homo sapien
gccaaaccccaaactacagctgaaa

SEQ ID NO: 4629301 - DNA, 25 bp, Homo sapien
tctgaaatttaactcaggtgtttaa

SEQ ID NO: 4629302 - DNA, 25 bp, Homo sapien
tatgctgcttctaagccaaacccca

SEQ ID NO: 4629303 - DNA, 25 bp, Homo sapien
tctactggctgatagagatatccaa

SEQ ID NO: 4629304 - DNA, 25 bp, Homo sapien
ggtttcttagctataatgcccaaag

SEQ ID NO: 4629305 - DNA, 25 bp, Homo sapien
tgcagaggtatcgttccagaaaggg

SEQ ID NO: 4629306 - DNA, 25 bp, Homo sapien
aagttggcaaagtaacacgctcttt

SEQ ID NO: 4629307 - DNA, 25 bp, Homo sapien
tcaaagggatattagcatccccatg

SEQ ID NO: 4629308 - DNA, 25 bp, Homo sapien
aaaggatgtcagtatgtcaaaggga

SEQ ID NO: 4629309 - DNA, 25 bp, Homo sapien
tggatggaactggatagcatcatgt

SEQ ID NO: 4629310 - DNA, 25 bp, Homo sapien
gagctaaaataaaggagatctcctg

SEQ ID NO: 4629311 - DNA, 25 bp, Homo sapien
tgagacttctgatcaaaacttgaaa

SEQ ID NO: 4629312 - DNA, 25 bp, Homo sapien
gagaccttaaaagtcaatctgatct

SEQ ID NO: 4629313 - DNA, 25 bp, Homo sapien
tgaaaggcaaagagtcagacgagac

SEQ ID NO: 4629314 - DNA, 25 bp, Homo sapien
gattgttaaatctaaacctggagaa

SEQ ID NO: 4629315 - DNA, 25 bp, Homo sapien
ctggtgaaccctggaatttggccct

SEQ ID NO: 4629316 - DNA, 25 bp, Homo sapien
caggcggtctcaaatgcctgacctc

SEQ ID NO: 4629317 - DNA, 25 bp, Homo sapien
ttggccaggcggtctcaaatgcctg

SEQ ID NO: 4629318 - DNA, 25 bp, Homo sapien
tgctgtgtcacccagaccagggtgc

SEQ ID NO: 4629319 - DNA, 25 bp, Homo sapien
caggcccagccaaaaaaagaaatat

SEQ ID NO: 4629320 - DNA, 25 bp, Homo sapien
aatggagacataatacttagtgctc

SEQ ID NO: 4629321 - DNA, 25 bp, Homo sapien
aaaatggagacataatacttagtgc

SEQ ID NO: 4629322 - DNA, 25 bp, Homo sapien
acttagtgctcagattgttacccat

SEQ ID NO: 4629323 - DNA, 25 bp, Homo sapien
ggagacataatacttagtgctcaga

SEQ ID NO: 4629324 - DNA, 25 bp, Homo sapien
gctacagttgtgctcttcacattct

SEQ ID NO: 4629325 - DNA, 25 bp, Homo sapien
ggaaggctgatcaccacgaactgct

SEQ ID NO: 4629326 - DNA, 25 bp, Homo sapien
cagggtcacatatgtgttaaattta

SEQ ID NO: 4629327 - DNA, 25 bp, Homo sapien
ctttcagggtcacatatgtgttaaa

SEQ ID NO: 4629328 - DNA, 25 bp, Homo sapien
tttgttccatacctccacacttaga

SEQ ID NO: 4629329 - DNA, 25 bp, Homo sapien
gacccaggtccaggcgactaatctc

SEQ ID NO: 4629330 - DNA, 25 bp, Homo sapien
caccatggtgtcccagatcagtcct

SEQ ID NO: 4629331 - DNA, 25 bp, Homo sapien
tagtcttcagcgcaatccacacagt

SEQ ID NO: 4629332 - DNA, 25 bp, Homo sapien
tctaatgtggaccattccccaggcc

SEQ ID NO: 4629333 - DNA, 25 bp, Homo sapien
gtctttcattaacgtctctgcctct

SEQ ID NO: 4629334 - DNA, 25 bp, Homo sapien
actcaaatcttgtatcaagcaaaat

SEQ ID NO: 4629335 - DNA, 25 bp, Homo sapien
cacagatctcatcgtctttcattaa

SEQ ID NO: 4629336 - DNA, 25 bp, Homo sapien
ttacaggcgcacgacaccttgccca

SEQ ID NO: 4629337 - DNA, 25 bp, Homo sapien
attacaggcgcacgacaccttgccc

SEQ ID NO: 4629338 - DNA, 25 bp, Homo sapien
agattacaggcgcacgacaccttgc

SEQ ID NO: 4629339 - DNA, 25 bp, Homo sapien
tgagattacaggcgcacgacacctt

SEQ ID NO: 4629340 - DNA, 25 bp, Homo sapien
tcccatttgtaggtccaatatctgg

SEQ ID NO: 4629341 - DNA, 25 bp, Homo sapien
gcattgatttgctcccatttgtagg

SEQ ID NO: 4629342 - DNA, 25 bp, Homo sapien
gctcccaaggcattgatttgctccc

SEQ ID NO: 4629343 - DNA, 25 bp, Homo sapien
gtaggtccaatatctggcttcctcc

SEQ ID NO: 4629344 - DNA, 25 bp, Homo sapien
cacaaatcaataaatctaattcagc

SEQ ID NO: 4629345 - DNA, 25 bp, Homo sapien
aaaggtctttgacaaaattgaacag

SEQ ID NO: 4629346 - DNA, 25 bp, Homo sapien
acaaatcaataaatctaattcagca

SEQ ID NO: 4629347 - DNA, 25 bp, Homo sapien
ggtctttgacaaaattgaacagccc

SEQ ID NO: 4629348 - DNA, 25 bp, Homo sapien
ggcagcagtgggcaatggcttcctc

SEQ ID NO: 4629349 - DNA, 25 bp, Homo sapien
ctgggcggcagcagtgggcaatggc

SEQ ID NO: 4629350 - DNA, 25 bp, Homo sapien
agcagtgggcaatggcttcctctgg

SEQ ID NO: 4629351 - DNA, 25 bp, Homo sapien
aacactgggcggcagcagtgggcaa

SEQ ID NO: 4629352 - DNA, 25 bp, Homo sapien
tagatcagactctaagtcagtcctt

SEQ ID NO: 4629353 - DNA, 25 bp, Homo sapien
tactatgcataggtgttgagccaaa

SEQ ID NO: 4629354 - DNA, 25 bp, Homo sapien
cacaggttgaaaaagcgaaatagat

SEQ ID NO: 4629355 - DNA, 25 bp, Homo sapien
caatataccaaaaacgtatggctca

SEQ ID NO: 4629356 - DNA, 25 bp, Homo sapien
tcaaagtctaaagtcccaagtctta

SEQ ID NO: 4629357 - DNA, 25 bp, Homo sapien
tatcatctaaataagacgagtgatc

SEQ ID NO: 4629358 - DNA, 25 bp, Homo sapien
tcatcctaaagcgaaatgcatttcc

SEQ ID NO: 4629359 - DNA, 25 bp, Homo sapien
gacgagtgatcttgagtaaagagtc

SEQ ID NO: 4629360 - DNA, 25 bp, Homo sapien
taacagtgggatgacttccaaagtc

SEQ ID NO: 4629361 - DNA, 25 bp, Homo sapien
gagcagcaaacccaggttaagaaca

SEQ ID NO: 4629362 - DNA, 25 bp, Homo sapien
cacctccatttattacttcaagaaa

SEQ ID NO: 4629363 - DNA, 25 bp, Homo sapien
tagagatcatctagaacaccacctc

SEQ ID NO: 4629364 - DNA, 25 bp, Homo sapien
aataacagtgtgacacaataagaaa

SEQ ID NO: 4629365 - DNA, 25 bp, Homo sapien
tctctgcctgcagttcttggcacag

SEQ ID NO: 4629366 - DNA, 25 bp, Homo sapien
ttacaaaagactgacaactgttcag

SEQ ID NO: 4629367 - DNA, 25 bp, Homo sapien
cttctttacaaaagactgacaactg

SEQ ID NO: 4629368 - DNA, 25 bp, Homo sapien
caggatggttttgatgtaagtagtc

SEQ ID NO: 4629369 - DNA, 25 bp, Homo sapien
aggatggttttgatgtaagtagtca

SEQ ID NO: 4629370 - DNA, 25 bp, Homo sapien
ggatggttttgatgtaagtagtcat

SEQ ID NO: 4629371 - DNA, 25 bp, Homo sapien
ctagcaggccatcctaatgtcttca

SEQ ID NO: 4629372 - DNA, 25 bp, Homo sapien
tagcaggccatcctaatgtcttcaa

SEQ ID NO: 4629373 - DNA, 25 bp, Homo sapien
tactctgttgttctccccagcccaa

SEQ ID NO: 4629374 - DNA, 25 bp, Homo sapien
gtactctgttgttctccccagccca

SEQ ID NO: 4629375 - DNA, 25 bp, Homo sapien
ccccagcccaaataggtccagtgac

SEQ ID NO: 4629376 - DNA, 25 bp, Homo sapien
ctccccagcccaaataggtccagtg

SEQ ID NO: 4629377 - DNA, 25 bp, Homo sapien
catagagtcattacaagagtcccgg

SEQ ID NO: 4629378 - DNA, 25 bp, Homo sapien
ggtcatcgacggcactatcagggtc

SEQ ID NO: 4629379 - DNA, 25 bp, Homo sapien
gagtcccgggaactgccttgaagta

SEQ ID NO: 4629380 - DNA, 25 bp, Homo sapien
aactggtgcacagaagcgttgggct

SEQ ID NO: 4629381 - DNA, 25 bp, Homo sapien
ctgatgaagtaacacaatatctgca

SEQ ID NO: 4629382 - DNA, 25 bp, Homo sapien
ttctgatgaagtaacacaatatctg

SEQ ID NO: 4629383 - DNA, 25 bp, Homo sapien
tctgatgaagtaacacaatatctgc

SEQ ID NO: 4629384 - DNA, 25 bp, Homo sapien
ctatctccttatgtatatcttcttg

SEQ ID NO: 4629385 - DNA, 25 bp, Homo sapien
tccttatgtatatcttcttgctctt

SEQ ID NO: 4629386 - DNA, 25 bp, Homo sapien
tcagtagagaattctgtttgttggc

SEQ ID NO: 4629387 - DNA, 25 bp, Homo sapien
tttcatctttagcctgtgagccttg

SEQ ID NO: 4629388 - DNA, 25 bp, Homo sapien
tttcttcttctatctagtgtatcat

SEQ ID NO: 4629389 - DNA, 25 bp, Homo sapien
caaaatgattgtataaggatttctt

SEQ ID NO: 4629390 - DNA, 25 bp, Homo sapien
cttcttctatctagtgtatcatatt

SEQ ID NO: 4629391 - DNA, 25 bp, Homo sapien
tcttcttctatctagtgtatcatat

SEQ ID NO: 4629392 - DNA, 25 bp, Homo sapien
tttccaacttaatgcgctgcatgcc

SEQ ID NO: 4629393 - DNA, 25 bp, Homo sapien
actggacagatcataatcatgactt

SEQ ID NO: 4629394 - DNA, 25 bp, Homo sapien
tggtttgagccagatgacttttcac

SEQ ID NO: 4629395 - DNA, 25 bp, Homo sapien
gctgcatgccactcttaaccacaaa

SEQ ID NO: 4629396 - DNA, 25 bp, Homo sapien
tactgccagctatacaaggatgtcc

SEQ ID NO: 4629397 - DNA, 25 bp, Homo sapien
taaaggtggtatttgatccccaggc

SEQ ID NO: 4629398 - DNA, 25 bp, Homo sapien
tactgctgagccacgtaaactctgg

SEQ ID NO: 4629399 - DNA, 25 bp, Homo sapien
gagtcaagccacaagcaagcatcgg

SEQ ID NO: 4629400 - DNA, 25 bp, Homo sapien
gggaagctcataattctcacgctca

SEQ ID NO: 4629401 - DNA, 25 bp, Homo sapien
tatcagactctttggatgactggcc

SEQ ID NO: 4629402 - DNA, 25 bp, Homo sapien
tcatccccactatgctgaggtgcag

SEQ ID NO: 4629403 - DNA, 25 bp, Homo sapien
catttgctgtcatactaactgacga

SEQ ID NO: 4629404 - DNA, 25 bp, Homo sapien
ctggctagctagctccataggagta

SEQ ID NO: 4629405 - DNA, 25 bp, Homo sapien
gattcctctaacctactgtcatcga

SEQ ID NO: 4629406 - DNA, 25 bp, Homo sapien
tgcagcaggaaagttcccagcaccc

SEQ ID NO: 4629407 - DNA, 25 bp, Homo sapien
cataggagtaggacttgacctgacc

SEQ ID NO: 4629408 - DNA, 25 bp, Homo sapien
tgttgcagccatagagaaactccag

SEQ ID NO: 4629409 - DNA, 25 bp, Homo sapien
tgtgaatagcccttctgcctgagat

SEQ ID NO: 4629410 - DNA, 25 bp, Homo sapien
ctcttgctcagggtatcaaaggata

SEQ ID NO: 4629411 - DNA, 25 bp, Homo sapien
gaactactatgagaggcatccttct

SEQ ID NO: 4629412 - DNA, 25 bp, Homo sapien
gctatgctatctctatgaccactgg

SEQ ID NO: 4629413 - DNA, 25 bp, Homo sapien
ggtcattgtgctaccactctctaca

SEQ ID NO: 4629414 - DNA, 25 bp, Homo sapien
tcatgaactacttcttgggctatgc

SEQ ID NO: 4629415 - DNA, 25 bp, Homo sapien
aacctcaatggtgttgttaatggaa

SEQ ID NO: 4629416 - DNA, 25 bp, Homo sapien
gatgtccctggtacaatattggaac

SEQ ID NO: 4629417 - DNA, 25 bp, Homo sapien
tggttgaaagcctcttcttcatggg

SEQ ID NO: 4629418 - DNA, 25 bp, Homo sapien
ggatctgtggtaagacctcatcggg

SEQ ID NO: 4629419 - DNA, 25 bp, Homo sapien
tgaaaaagagttggacagtgagtca

SEQ ID NO: 4629420 - DNA, 25 bp, Homo sapien
agcatgtctactgaagagcctaatg

SEQ ID NO: 4629421 - DNA, 25 bp, Homo sapien
tgtctactgaagagcctaatgcaaa

SEQ ID NO: 4629422 - DNA, 25 bp, Homo sapien
gcctaatgcaaatttgtcttcctct

SEQ ID NO: 4629423 - DNA, 25 bp, Homo sapien
ctgaaagcatgtctactgaagagcc

SEQ ID NO: 4629424 - DNA, 25 bp, Homo sapien
ggatctggatgcaactgtgctggca

SEQ ID NO: 4629425 - DNA, 25 bp, Homo sapien
tgcccagtatcatcacccgagaaag

SEQ ID NO: 4629426 - DNA, 25 bp, Homo sapien
gaagctcttcggcaatgcaggtagg

SEQ ID NO: 4629427 - DNA, 25 bp, Homo sapien
aagtgcccttcggtttccagagtgg

SEQ ID NO: 4629428 - DNA, 25 bp, Homo sapien
tagcctcactggagttaaggtcctg

SEQ ID NO: 4629429 - DNA, 25 bp, Homo sapien
taaggtcctgatcactgctagtaac

SEQ ID NO: 4629430 - DNA, 25 bp, Homo sapien
gagtgtagactttacctggctgagc

SEQ ID NO: 4629431 - DNA, 25 bp, Homo sapien
caaacgaagctttggccaagtggtc

SEQ ID NO: 4629432 - DNA, 25 bp, Homo sapien
tgtattcccatatccagaaagtcat

SEQ ID NO: 4629433 - DNA, 25 bp, Homo sapien
ctgtattcccatatccagaaagtca

SEQ ID NO: 4629434 - DNA, 25 bp, Homo sapien
tacaggaggagccatacctactgct

SEQ ID NO: 4629435 - DNA, 25 bp, Homo sapien
attacaggaggagccatacctactg

SEQ ID NO: 4629436 - DNA, 25 bp, Homo sapien
caggaggagccatacctactgctgc

SEQ ID NO: 4629437 - DNA, 25 bp, Homo sapien
ggaggagccatacctactgctgctg

SEQ ID NO: 4629438 - DNA, 25 bp, Homo sapien
cgtctcccgatggtcgtcatcttgt

SEQ ID NO: 4629439 - DNA, 25 bp, Homo sapien
tctagttcacttagctgagagcttc

SEQ ID NO: 4629440 - DNA, 25 bp, Homo sapien
tgttcgtgatactggtctagttcac

SEQ ID NO: 4629441 - DNA, 25 bp, Homo sapien
tgtggcaagaatgaatcgagtccgt

SEQ ID NO: 4629442 - DNA, 25 bp, Homo sapien
gggagggtgggttgtggcatcttct

SEQ ID NO: 4629443 - DNA, 25 bp, Homo sapien
tcatctccttgggttcacatgctgc

SEQ ID NO: 4629444 - DNA, 25 bp, Homo sapien
tctctgcttgacctgtcacctccaa

SEQ ID NO: 4629445 - DNA, 25 bp, Homo sapien
ggccatctctggacaggctgtgaga

SEQ ID NO: 4629446 - DNA, 25 bp, Homo sapien
tggagtcgaaccttggtaactgctc

SEQ ID NO: 4629447 - DNA, 25 bp, Homo sapien
actgctcggatccaatgtgctctgg

SEQ ID NO: 4629448 - DNA, 25 bp, Homo sapien
cttggtaactgctcggatccaatgt

SEQ ID NO: 4629449 - DNA, 25 bp, Homo sapien
cctgcagctggagtcgaaccttggt

SEQ ID NO: 4629450 - DNA, 25 bp, Homo sapien
cagatgagccagtatggaccggcta

SEQ ID NO: 4629451 - DNA, 25 bp, Homo sapien
ggtaagggagacaactatcctcagg

SEQ ID NO: 4629452 - DNA, 25 bp, Homo sapien
gcacagaagaaagccactggccact

SEQ ID NO: 4629453 - DNA, 25 bp, Homo sapien
tatcaaaactgcacgggtacctcct

SEQ ID NO: 4629454 - DNA, 25 bp, Homo sapien
aatgcttgtagagctttgtactcaa

SEQ ID NO: 4629455 - DNA, 25 bp, Homo sapien
aaatgcttgtagagctttgtactca

SEQ ID NO: 4629456 - DNA, 25 bp, Homo sapien
atgcttgtagagctttgtactcaaa

SEQ ID NO: 4629457 - DNA, 25 bp, Homo sapien
caaatgcttgtagagctttgtactc

SEQ ID NO: 4629458 - DNA, 25 bp, Homo sapien
taactcaatcgattctgggctttga

SEQ ID NO: 4629459 - DNA, 25 bp, Homo sapien
cagccaaacttcaactggatgtgga

SEQ ID NO: 4629460 - DNA, 25 bp, Homo sapien
cagcagccaaacttcaactggatgt

SEQ ID NO: 4629461 - DNA, 25 bp, Homo sapien
tggatgtggaattctaactcaatcg

SEQ ID NO: 4629462 - DNA, 25 bp, Homo sapien
ctgcttgcccaaccgacaaacagac

SEQ ID NO: 4629463 - DNA, 25 bp, Homo sapien
ttaagaggaaatccatccaggagca

SEQ ID NO: 4629464 - DNA, 25 bp, Homo sapien
aaaaccatgaattctcaagttttag

SEQ ID NO: 4629465 - DNA, 25 bp, Homo sapien
gaagccacaggacgaactttctgag

SEQ ID NO: 4629466 - DNA, 25 bp, Homo sapien
ttgctcttggtattagccatgaaca

SEQ ID NO: 4629467 - DNA, 25 bp, Homo sapien
ccatgtagggattgggtatccctga

SEQ ID NO: 4629468 - DNA, 25 bp, Homo sapien
ttgggtatccctgatttgctcttgg

SEQ ID NO: 4629469 - DNA, 25 bp, Homo sapien
ctcttggtattagccatgaacaatg

SEQ ID NO: 4629470 - DNA, 25 bp, Homo sapien
attaccttggaaggcaacagcctgt

SEQ ID NO: 4629471 - DNA, 25 bp, Homo sapien
aattattgctggctgatgctttggg

SEQ ID NO: 4629472 - DNA, 25 bp, Homo sapien
gtgtggcctccaaacctcgcacatg

SEQ ID NO: 4629473 - DNA, 25 bp, Homo sapien
gcccctggatcctggcttgatttat

SEQ ID NO: 4629474 - DNA, 25 bp, Homo sapien
cagggtttgaggggttctctgcttc

SEQ ID NO: 4629475 - DNA, 25 bp, Homo sapien
tcagggtttgaggggttctctgctt

SEQ ID NO: 4629476 - DNA, 25 bp, Homo sapien
ctcagggtttgaggggttctctgct

SEQ ID NO: 4629477 - DNA, 25 bp, Homo sapien
agggtttgaggggttctctgcttct

SEQ ID NO: 4629478 - DNA, 25 bp, Homo sapien
aggagggtcccaaggtaaccatgat

SEQ ID NO: 4629479 - DNA, 25 bp, Homo sapien
cttagccttatctggggaaagcctg

SEQ ID NO: 4629480 - DNA, 25 bp, Homo sapien
gaggagggtcccaaggtaaccatga

SEQ ID NO: 4629481 - DNA, 25 bp, Homo sapien
ggtctctgccttagccttatctggg

SEQ ID NO: 4629482 - DNA, 25 bp, Homo sapien
caaaggttcccgctgttcacggcta

SEQ ID NO: 4629483 - DNA, 25 bp, Homo sapien
gcaatctcagtctgaagacggctga

SEQ ID NO: 4629484 - DNA, 25 bp, Homo sapien
gagacttcatccacggaaccctgga

SEQ ID NO: 4629485 - DNA, 25 bp, Homo sapien
gaaccagaccctgaaacataggcag

SEQ ID NO: 4629486 - DNA, 25 bp, Homo sapien
gggaaggggatgtgcctgccctgta

SEQ ID NO: 4629487 - DNA, 25 bp, Homo sapien
cctgccctgtaagcctttttaatgt

SEQ ID NO: 4629488 - DNA, 25 bp, Homo sapien
aggggatgtgcctgccctgtaagcc

SEQ ID NO: 4629489 - DNA, 25 bp, Homo sapien
gatgtgcctgccctgtaagcctttt

SEQ ID NO: 4629490 - DNA, 25 bp, Homo sapien
gcaagatgaagtctctatgctctag

SEQ ID NO: 4629491 - DNA, 25 bp, Homo sapien
tatgctctagatgggcaagcttcac

SEQ ID NO: 4629492 - DNA, 25 bp, Homo sapien
agatgaagtctctatgctctagatg

SEQ ID NO: 4629493 - DNA, 25 bp, Homo sapien
gatgggcaagcttcacaacagtggg

SEQ ID NO: 4629494 - DNA, 25 bp, Homo sapien
ggttcttctctggtggcaattcgga

SEQ ID NO: 4629495 - DNA, 25 bp, Homo sapien
tatttcatcccctagcttgggcaca

SEQ ID NO: 4629496 - DNA, 25 bp, Homo sapien
tgatatgttcctgttatgggtcccc

SEQ ID NO: 4629497 - DNA, 25 bp, Homo sapien
taacccagacaatgacaggcagctg

SEQ ID NO: 4629498 - DNA, 25 bp, Homo sapien
tcaggactgatggacccactgttct

SEQ ID NO: 4629499 - DNA, 25 bp, Homo sapien
tcagaatatcgagcccagcttcgca

SEQ ID NO: 4629500 - DNA, 25 bp, Homo sapien
gaaagtggtgaattgctcggcccag

SEQ ID NO: 4629501 - DNA, 25 bp, Homo sapien
tccttgaggacgtgagcagcacatt

SEQ ID NO: 4629502 - DNA, 25 bp, Homo sapien
gcaagagagaaggtgcttggatcct

SEQ ID NO: 4629503 - DNA, 25 bp, Homo sapien
tccagtgagcaatcctgggcacccc

SEQ ID NO: 4629504 - DNA, 25 bp, Homo sapien
tctccctgtgtggagacgccaactc

SEQ ID NO: 4629505 - DNA, 25 bp, Homo sapien
caaggagttattagaagcaagagag

SEQ ID NO: 4629506 - DNA, 25 bp, Homo sapien
ggtaaacggtctctgtacacacttg

SEQ ID NO: 4629507 - DNA, 25 bp, Homo sapien
tacacacttgctctaggctcagtct

SEQ ID NO: 4629508 - DNA, 25 bp, Homo sapien
tgtactagctcatgcagaagttttt

SEQ ID NO: 4629509 - DNA, 25 bp, Homo sapien
tcttctactgagagacggtttgcct

SEQ ID NO: 4629510 - DNA, 25 bp, Homo sapien
tgggaccctgttaaatagtgactca

SEQ ID NO: 4629511 - DNA, 25 bp, Homo sapien
cctgttaaatagtgactcagaatac

SEQ ID NO: 4629512 - DNA, 25 bp, Homo sapien
tcatactttagccagctgggaccct

SEQ ID NO: 4629513 - DNA, 25 bp, Homo sapien
gaccctgttaaatagtgactcagaa

SEQ ID NO: 4629514 - DNA, 25 bp, Homo sapien
tatttaaagagcttgtaagaagtat

SEQ ID NO: 4629515 - DNA, 25 bp, Homo sapien
tttaaagagcttgtaagaagtattg

SEQ ID NO: 4629516 - DNA, 25 bp, Homo sapien
ttaaagagcttgtaagaagtattgc

SEQ ID NO: 4629517 - DNA, 25 bp, Homo sapien
aatatttaaagagcttgtaagaagt

SEQ ID NO: 4629518 - DNA, 25 bp, Homo sapien
cctactgggtggactcaggcatatt

SEQ ID NO: 4629519 - DNA, 25 bp, Homo sapien
taagaagtgtctcttgcccaaccag

SEQ ID NO: 4629520 - DNA, 25 bp, Homo sapien
tattcagtttgtcctacccgttgga

SEQ ID NO: 4629521 - DNA, 25 bp, Homo sapien
gaccctgaggaactgctatactggc

SEQ ID NO: 4629522 - DNA, 25 bp, Homo sapien
tgaggcagagaggggtcaccatcat

SEQ ID NO: 4629523 - DNA, 25 bp, Homo sapien
ccactgaggcagagaggggtcacca

SEQ ID NO: 4629524 - DNA, 25 bp, Homo sapien
actgaggcagagaggggtcaccatc

SEQ ID NO: 4629525 - DNA, 25 bp, Homo sapien
ccttccgggagccactgaggcagag

SEQ ID NO: 4629526 - DNA, 25 bp, Homo sapien
gcctaggagtaacttaatcagccac

SEQ ID NO: 4629527 - DNA, 25 bp, Homo sapien
tcaagcctaggagtaacttaatcag

SEQ ID NO: 4629528 - DNA, 25 bp, Homo sapien
ggatcaagcctaggagtaacttaat

SEQ ID NO: 4629529 - DNA, 25 bp, Homo sapien
ggagtaacttaatcagccacaccat

SEQ ID NO: 4629530 - DNA, 25 bp, Homo sapien
catgctgtcaatgccatagagccct

SEQ ID NO: 4629531 - DNA, 25 bp, Homo sapien
tggcatgctgtcaatgccatagagc

SEQ ID NO: 4629532 - DNA, 25 bp, Homo sapien
caatgccatagagccctccggctgg

SEQ ID NO: 4629533 - DNA, 25 bp, Homo sapien
gctgtcaatgccatagagccctccg

SEQ ID NO: 4629534 - DNA, 25 bp, Homo sapien
tttcagaggcaactgagaggttctt

SEQ ID NO: 4629535 - DNA, 25 bp, Homo sapien
acaacatgatgttaaaggctcgaaa

SEQ ID NO: 4629536 - DNA, 25 bp, Homo sapien
gctcgaaagggcatgaaaactttca

SEQ ID NO: 4629537 - DNA, 25 bp, Homo sapien
acatgatgttaaaggctcgaaaggg

SEQ ID NO: 4629538 - DNA, 25 bp, Homo sapien
tttaaagaggatgagaaagggctct

SEQ ID NO: 4629539 - DNA, 25 bp, Homo sapien
ggatgagaaagggctctggagacac

SEQ ID NO: 4629540 - DNA, 25 bp, Homo sapien
gagaaagggctctggagacactcac

SEQ ID NO: 4629541 - DNA, 25 bp, Homo sapien
tgagaaagggctctggagacactca

SEQ ID NO: 4629542 - DNA, 25 bp, Homo sapien
ggagaggcacatggtttcctaaagg

SEQ ID NO: 4629543 - DNA, 25 bp, Homo sapien
cagaggacgctgagaaggcagaagt

SEQ ID NO: 4629544 - DNA, 25 bp, Homo sapien
atatcagcctaagcaggaggaacag

SEQ ID NO: 4629545 - DNA, 25 bp, Homo sapien
gaagggcccaagtgatttgggatga

SEQ ID NO: 4629546 - DNA, 25 bp, Homo sapien
gaaactccttgtttatgggaaggca

SEQ ID NO: 4629547 - DNA, 25 bp, Homo sapien
gagggagcttcagtgaccaaagcca

SEQ ID NO: 4629548 - DNA, 25 bp, Homo sapien
gatctgctgttagccctgaccactg

SEQ ID NO: 4629549 - DNA, 25 bp, Homo sapien
gacaagtgtcccaggttaagatgca

SEQ ID NO: 4629550 - DNA, 25 bp, Homo sapien
tagccattgcagaagtgattcctgc

SEQ ID NO: 4629551 - DNA, 25 bp, Homo sapien
ccttaagagaagtgcgtgtagccat

SEQ ID NO: 4629552 - DNA, 25 bp, Homo sapien
tgattcctgccttccgagactggac

SEQ ID NO: 4629553 - DNA, 25 bp, Homo sapien
cagctcttcgtccttaagagaagtg

SEQ ID NO: 4629554 - DNA, 25 bp, Homo sapien
ttctcatggcacttgactccacatt

SEQ ID NO: 4629555 - DNA, 25 bp, Homo sapien
ggcagtcagcattgagcagatcctg

SEQ ID NO: 4629556 - DNA, 25 bp, Homo sapien
tgactccacattcgctgcagcgcat

SEQ ID NO: 4629557 - DNA, 25 bp, Homo sapien
caaagttatgaggagtggtgcacga

SEQ ID NO: 4629558 - DNA, 25 bp, Homo sapien
tcttggctgaccatttggaggtgcc

SEQ ID NO: 4629559 - DNA, 25 bp, Homo sapien
tgttcactgtgaagacgtcccggat

SEQ ID NO: 4629560 - DNA, 25 bp, Homo sapien
gatctctggcttatttcgctctcgg

SEQ ID NO: 4629561 - DNA, 25 bp, Homo sapien
taatgttctgggtccggtcctcagc

SEQ ID NO: 4629562 - DNA, 25 bp, Homo sapien
cttggtacgcttcttagttttgctg

SEQ ID NO: 4629563 - DNA, 25 bp, Homo sapien
agtcacgtaagggtcactggatcct

SEQ ID NO: 4629564 - DNA, 25 bp, Homo sapien
tgctgacttgcacagtcacgtaagg

SEQ ID NO: 4629565 - DNA, 25 bp, Homo sapien
ccaaaaatggtcttggtacgcttct

SEQ ID NO: 4629566 - DNA, 25 bp, Homo sapien
agacgtccatctcgccacttagggt

SEQ ID NO: 4629567 - DNA, 25 bp, Homo sapien
cacgcaccttaatgcggtcagagga

SEQ ID NO: 4629568 - DNA, 25 bp, Homo sapien
aatcatcagactctcgctttaggcg

SEQ ID NO: 4629569 - DNA, 25 bp, Homo sapien
ttagggtccgaacctcaatgatggt

SEQ ID NO: 4629570 - DNA, 25 bp, Homo sapien
acggctgatttgtctgtcctcttct

SEQ ID NO: 4629571 - DNA, 25 bp, Homo sapien
ccacactgatttgtagtcggatagc

SEQ ID NO: 4629572 - DNA, 25 bp, Homo sapien
tagcccctgagacggctgatttgtc

SEQ ID NO: 4629573 - DNA, 25 bp, Homo sapien
tcatggagacatgtatactgcacgt

SEQ ID NO: 4629574 - DNA, 25 bp, Homo sapien
tcatggcctgatatatggactcaat

SEQ ID NO: 4629575 - DNA, 25 bp, Homo sapien
gggctgtctcatcaaagtacacctt

SEQ ID NO: 4629576 - DNA, 25 bp, Homo sapien
aattcatccacaatttcttgggctg

SEQ ID NO: 4629577 - DNA, 25 bp, Homo sapien
tggactcaatgccataacgcatggc

SEQ ID NO: 4629578 - DNA, 25 bp, Homo sapien
gttggccagtaaggtgctcatcact

SEQ ID NO: 4629579 - DNA, 25 bp, Homo sapien
tgtacttggatgataaacatgcaaa

SEQ ID NO: 4629580 - DNA, 25 bp, Homo sapien
catagtaggcgttgatgttggccag

SEQ ID NO: 4629581 - DNA, 25 bp, Homo sapien
gcacaccaggacacatgtacttgga

SEQ ID NO: 4629582 - DNA, 25 bp, Homo sapien
gtatgtagagaggtcgatcctcagt

SEQ ID NO: 4629583 - DNA, 25 bp, Homo sapien
cctgtatgtagagaggtcgatcctc

SEQ ID NO: 4629584 - DNA, 25 bp, Homo sapien
tgtgtagctggtccagcagttttac

SEQ ID NO: 4629585 - DNA, 25 bp, Homo sapien
tcctcagtgagttgtgtagctggtc

SEQ ID NO: 4629586 - DNA, 25 bp, Homo sapien
cacgagtcttaggagggagctgcta

SEQ ID NO: 4629587 - DNA, 25 bp, Homo sapien
ggaatggacatgctctctgatacag

SEQ ID NO: 4629588 - DNA, 25 bp, Homo sapien
tactcctggaagagattatcctcag

SEQ ID NO: 4629589 - DNA, 25 bp, Homo sapien
taagtggagccacactacagaccaa

SEQ ID NO: 4629590 - DNA, 25 bp, Homo sapien
ccactgtggattttaagtcctgaag

SEQ ID NO: 4629591 - DNA, 25 bp, Homo sapien
ggattttaagtcctgaagccgttca

SEQ ID NO: 4629592 - DNA, 25 bp, Homo sapien
tgaagccgttcaggactcccagcag

SEQ ID NO: 4629593 - DNA, 25 bp, Homo sapien
ctgaagccgttcaggactcccagca

SEQ ID NO: 4629594 - DNA, 25 bp, Homo sapien
cggctgtataagtcgtggcagttgt

SEQ ID NO: 4629595 - DNA, 25 bp, Homo sapien
tataagtcgtggcagttgttgaaga

SEQ ID NO: 4629596 - DNA, 25 bp, Homo sapien
tggcggctgtataagtcgtggcagt

SEQ ID NO: 4629597 - DNA, 25 bp, Homo sapien
ttcatatgtggagttcaaacaggcc

SEQ ID NO: 4629598 - DNA, 25 bp, Homo sapien
tcaagtactttgtcctgagtgcttt

SEQ ID NO: 4629599 - DNA, 25 bp, Homo sapien
gtactttgtcctgagtgcttttcca

SEQ ID NO: 4629600 - DNA, 25 bp, Homo sapien
agtactttgtcctgagtgcttttcc

SEQ ID NO: 4629601 - DNA, 25 bp, Homo sapien
caggtactgacttagggtgccaggc

SEQ ID NO: 4629602 - DNA, 25 bp, Homo sapien
cctcacagaaggatagggtcagtct

SEQ ID NO: 4629603 - DNA, 25 bp, Homo sapien
ctaaaacaggtgaagtagctcagcc

SEQ ID NO: 4629604 - DNA, 25 bp, Homo sapien
tagccagtggatgaatacaacccag

SEQ ID NO: 4629605 - DNA, 25 bp, Homo sapien
tgaaggagcactgtgctctcctcag

SEQ ID NO: 4629606 - DNA, 25 bp, Homo sapien
agcactgtgctctcctcagacctgg

SEQ ID NO: 4629607 - DNA, 25 bp, Homo sapien
ggagcactgtgctctcctcagacct

SEQ ID NO: 4629608 - DNA, 25 bp, Homo sapien
aaggagcactgtgctctcctcagac

SEQ ID NO: 4629609 - DNA, 25 bp, Homo sapien
tgtgatgagcttgggccagaaatcc

SEQ ID NO: 4629610 - DNA, 25 bp, Homo sapien
ccagaaatccaggttccgaatgctg

SEQ ID NO: 4629611 - DNA, 25 bp, Homo sapien
cctctatgattgacacgatgagtgt

SEQ ID NO: 4629612 - DNA, 25 bp, Homo sapien
cagaacaggtgtgtaggaattctta

SEQ ID NO: 4629613 - DNA, 25 bp, Homo sapien
ctccaatgcatatttcatgtcttgg

SEQ ID NO: 4629614 - DNA, 25 bp, Homo sapien
ccacatcacttctgcgctgactttt

SEQ ID NO: 4629615 - DNA, 25 bp, Homo sapien
caatgcatatttcatgtcttgggca

SEQ ID NO: 4629616 - DNA, 25 bp, Homo sapien
acttctgcgctgacttttcccacat

SEQ ID NO: 4629617 - DNA, 25 bp, Homo sapien
ctattctaacaagtcccatggagtc

SEQ ID NO: 4629618 - DNA, 25 bp, Homo sapien
ctctctttggttctggtaacgtcta

SEQ ID NO: 4629619 - DNA, 25 bp, Homo sapien
gtaatctgtcagaaaggccaatcca

SEQ ID NO: 4629620 - DNA, 25 bp, Homo sapien
taactgacaagttctgaaacaccgg

SEQ ID NO: 4629621 - DNA, 25 bp, Homo sapien
gagttgccatgggtgatgctcctcc

SEQ ID NO: 4629622 - DNA, 25 bp, Homo sapien
taagactagaggcaaaaggacaact

SEQ ID NO: 4629623 - DNA, 25 bp, Homo sapien
cagctggcccttgtgaactagtgta

SEQ ID NO: 4629624 - DNA, 25 bp, Homo sapien
atggaagcccgggattctgcctcaa

SEQ ID NO: 4629625 - DNA, 25 bp, Homo sapien
aggcagatcccgcacgtattcattg

SEQ ID NO: 4629626 - DNA, 25 bp, Homo sapien
tattcattgtggagccacttcacct

SEQ ID NO: 4629627 - DNA, 25 bp, Homo sapien
gcacttttacacaggtggtctttct

SEQ ID NO: 4629628 - DNA, 25 bp, Homo sapien
caggttcatgtagtcagcactttta

SEQ ID NO: 4629629 - DNA, 25 bp, Homo sapien
acgcaggaattccagggatacatcc

SEQ ID NO: 4629630 - DNA, 25 bp, Homo sapien
tccagggatacatcctcattctcat

SEQ ID NO: 4629631 - DNA, 25 bp, Homo sapien
cagccattgtagcacgaactgctca

SEQ ID NO: 4629632 - DNA, 25 bp, Homo sapien
atccttcttatctcgttccagggcc

SEQ ID NO: 4629633 - DNA, 25 bp, Homo sapien
gggcattccagcttccggatgatct

SEQ ID NO: 4629634 - DNA, 25 bp, Homo sapien
ttagcaaacctcctcatgtagtggg

SEQ ID NO: 4629635 - DNA, 25 bp, Homo sapien
ccggatgatctcaaagctctgattg

SEQ ID NO: 4629636 - DNA, 25 bp, Homo sapien
caggaaaagagtgcatgctctgatg

SEQ ID NO: 4629637 - DNA, 25 bp, Homo sapien
taggctgggaagtcctttgacaaga

SEQ ID NO: 4629638 - DNA, 25 bp, Homo sapien
gatgtctgcatactgcatcagcacc

SEQ ID NO: 4629639 - DNA, 25 bp, Homo sapien
gaagtcctttgacaagatgtctgca

SEQ ID NO: 4629640 - DNA, 25 bp, Homo sapien
ttctcctttgtgcaataggctggga

SEQ ID NO: 4629641 - DNA, 25 bp, Homo sapien
caagttctcgtaattttgtggcatg

SEQ ID NO: 4629642 - DNA, 25 bp, Homo sapien
aggaactctgtcaagttctcgtaat

SEQ ID NO: 4629643 - DNA, 25 bp, Homo sapien
actctgtcaagttctcgtaattttg

SEQ ID NO: 4629644 - DNA, 25 bp, Homo sapien
ctgtcaagttctcgtaattttgtgg

SEQ ID NO: 4629645 - DNA, 25 bp, Homo sapien
gcacgttgttcatcaggatgcaggg

SEQ ID NO: 4629646 - DNA, 25 bp, Homo sapien
tgctgcacgttgttcatcaggatgc

SEQ ID NO: 4629647 - DNA, 25 bp, Homo sapien
agctggaccctcagttgctgcacgt

SEQ ID NO: 4629648 - DNA, 25 bp, Homo sapien
cctcagttgctgcacgttgttcatc

SEQ ID NO: 4629649 - DNA, 25 bp, Homo sapien
gctcatccagaaccgtattcagttt

SEQ ID NO: 4629650 - DNA, 25 bp, Homo sapien
gaaccgtattcagtttcacctgcag

SEQ ID NO: 4629651 - DNA, 25 bp, Homo sapien
catgctgagctcatccagaaccgta

SEQ ID NO: 4629652 - DNA, 25 bp, Homo sapien
tgtttccaaacaccatgctgagctc

SEQ ID NO: 4629653 - DNA, 25 bp, Homo sapien
ggagtacgctatctgcatcctgagc

SEQ ID NO: 4629654 - DNA, 25 bp, Homo sapien
caggatgtcggccatttgtcgaaca

SEQ ID NO: 4629655 - DNA, 25 bp, Homo sapien
ggccctggcgtctggagatgcattc

SEQ ID NO: 4629656 - DNA, 25 bp, Homo sapien
aagtccatgagaggccggagtacgc

SEQ ID NO: 4629657 - DNA, 25 bp, Homo sapien
gtgttcatcaccacgcgccagagct

SEQ ID NO: 4629658 - DNA, 25 bp, Homo sapien
ttcagtacacgcttcagaaccgtct

SEQ ID NO: 4629659 - DNA, 25 bp, Homo sapien
tctccattgtgttcatcaccacgcg

SEQ ID NO: 4629660 - DNA, 25 bp, Homo sapien
gggcagaacaatcatcctctccatt

SEQ ID NO: 4629661 - DNA, 25 bp, Homo sapien
cagcagtgaagatcagctgggtgcc

SEQ ID NO: 4629662 - DNA, 25 bp, Homo sapien
tccttggcagcagtgaagatcagct

SEQ ID NO: 4629663 - DNA, 25 bp, Homo sapien
ttgagtttggaaagatggctcagct

SEQ ID NO: 4629664 - DNA, 25 bp, Homo sapien
atggctcagctccttggcagcagtg

SEQ ID NO: 4629665 - DNA, 25 bp, Homo sapien
agattccgtgtttcctctcgtacca

SEQ ID NO: 4629666 - DNA, 25 bp, Homo sapien
cagggcgaggtcaaggactgcacac

SEQ ID NO: 4629667 - DNA, 25 bp, Homo sapien
ccgtgtttcctctcgtaccatgtga

SEQ ID NO: 4629668 - DNA, 25 bp, Homo sapien
aggtcaaggactgcacactgctttg

SEQ ID NO: 4629669 - DNA, 25 bp, Homo sapien
tgtatccttggcagtacatagtaac

SEQ ID NO: 4629670 - DNA, 25 bp, Homo sapien
catagtaactctcttctggatgtgg

SEQ ID NO: 4629671 - DNA, 25 bp, Homo sapien
gtgtggtggttaagactgtctgaaa

SEQ ID NO: 4629672 - DNA, 25 bp, Homo sapien
tgttaagaattggagggacacctgg

SEQ ID NO: 4629673 - DNA, 25 bp, Homo sapien
caaaggtcttgatgagagtgtcagt

SEQ ID NO: 4629674 - DNA, 25 bp, Homo sapien
cttgggtggtctgcgagcgcacaaa

SEQ ID NO: 4629675 - DNA, 25 bp, Homo sapien
gagtgtcagtagtctgtgtgtacag

SEQ ID NO: 4629676 - DNA, 25 bp, Homo sapien
tagcgtagagactgcagatctgggc

SEQ ID NO: 4629677 - DNA, 25 bp, Homo sapien
ccttttccggacgaatgtcctcatt

SEQ ID NO: 4629678 - DNA, 25 bp, Homo sapien
tagcagtaaatctaatacctttccc

SEQ ID NO: 4629679 - DNA, 25 bp, Homo sapien
gacgaatgtcctcattagcagtaaa

SEQ ID NO: 4629680 - DNA, 25 bp, Homo sapien
taaatctaatacctttcccatcatg

SEQ ID NO: 4629681 - DNA, 25 bp, Homo sapien
taaacaagtccacctgaatagagac

SEQ ID NO: 4629682 - DNA, 25 bp, Homo sapien
gaatagagacttctcccacaggatc

SEQ ID NO: 4629683 - DNA, 25 bp, Homo sapien
gagacttctcccacaggatcgtcca

SEQ ID NO: 4629684 - DNA, 25 bp, Homo sapien
cccagtaccagggtgtgtaaacaag

SEQ ID NO: 4629685 - DNA, 25 bp, Homo sapien
aaaggccggaacatacccgctgtct

SEQ ID NO: 4629686 - DNA, 25 bp, Homo sapien
tatcactttggtgtgggccaaccat

SEQ ID NO: 4629687 - DNA, 25 bp, Homo sapien
ggatttggttgtgaacttcctcttc

SEQ ID NO: 4629688 - DNA, 25 bp, Homo sapien
atagtcacctccacgaaaggccgga

SEQ ID NO: 4629689 - DNA, 25 bp, Homo sapien
tatctgcaactcataggactcgggc

SEQ ID NO: 4629690 - DNA, 25 bp, Homo sapien
tttcacaaattctcgggccacctcg

SEQ ID NO: 4629691 - DNA, 25 bp, Homo sapien
taaaatccggagaatggtcaggcct

SEQ ID NO: 4629692 - DNA, 25 bp, Homo sapien
catccatatggatcttccggcccaa

SEQ ID NO: 4629693 - DNA, 25 bp, Homo sapien
tcaacaagtcttgggaagtccatct

SEQ ID NO: 4629694 - DNA, 25 bp, Homo sapien
gaaaatctctccatgtggtaacccc

SEQ ID NO: 4629695 - DNA, 25 bp, Homo sapien
tagccctcaggtagacacatgttag

SEQ ID NO: 4629696 - DNA, 25 bp, Homo sapien
gctttgaagcaccacgtgaacctga

SEQ ID NO: 4629697 - DNA, 25 bp, Homo sapien
tccaactccggcaactgccatctca

SEQ ID NO: 4629698 - DNA, 25 bp, Homo sapien
ccggcctccaactccggcaactgcc

SEQ ID NO: 4629699 - DNA, 25 bp, Homo sapien
cggcctccaactccggcaactgcca

SEQ ID NO: 4629700 - DNA, 25 bp, Homo sapien
aactccggcaactgccatctcaacg

SEQ ID NO: 4629701 - DNA, 25 bp, Homo sapien
ctgtcctcacttgggcttttaaata

SEQ ID NO: 4629702 - DNA, 25 bp, Homo sapien
gagacattgcagagtagaccaacta

SEQ ID NO: 4629703 - DNA, 25 bp, Homo sapien
tttaaatagagacattgcagagtag

SEQ ID NO: 4629704 - DNA, 25 bp, Homo sapien
gagtagaccaactataattccatgg

SEQ ID NO: 4629705 - DNA, 25 bp, Homo sapien
aagaaagtatactcgcctataatcc

SEQ ID NO: 4629706 - DNA, 25 bp, Homo sapien
agtaaagaaagtatactcgcctata

SEQ ID NO: 4629707 - DNA, 25 bp, Homo sapien
caagtaaagaaagtatactcgccta

SEQ ID NO: 4629708 - DNA, 25 bp, Homo sapien
taaagaaagtatactcgcctataat

SEQ ID NO: 4629709 - DNA, 25 bp, Homo sapien
tgtccttgacatgggcttcctccag

SEQ ID NO: 4629710 - DNA, 25 bp, Homo sapien
tctcctgagggtagcagaggactcc

SEQ ID NO: 4629711 - DNA, 25 bp, Homo sapien
cctttggatggaagtttcctgactt

SEQ ID NO: 4629712 - DNA, 25 bp, Homo sapien
tagcagaggactccctggttttcct

SEQ ID NO: 4629713 - DNA, 25 bp, Homo sapien
cttaccacaccctaaagtattctgg

SEQ ID NO: 4629714 - DNA, 25 bp, Homo sapien
ttaccacaccctaaagtattctggc

SEQ ID NO: 4629715 - DNA, 25 bp, Homo sapien
acttaccacaccctaaagtattctg

SEQ ID NO: 4629716 - DNA, 25 bp, Homo sapien
tattttctgttcataagaatatgca

SEQ ID NO: 4629717 - DNA, 25 bp, Homo sapien
gaagctcactaaagtctggaatgtc

SEQ ID NO: 4629718 - DNA, 25 bp, Homo sapien
aacagctggactcaaagaggagcct

SEQ ID NO: 4629719 - DNA, 25 bp, Homo sapien
gcttggctcagcattaggctctgga

SEQ ID NO: 4629720 - DNA, 25 bp, Homo sapien
gacaatcgcctcctccttatgggaa

SEQ ID NO: 4629721 - DNA, 25 bp, Homo sapien
catatcttggatagaacgttctgta

SEQ ID NO: 4629722 - DNA, 25 bp, Homo sapien
tattgtgcatatcttggatagaacg

SEQ ID NO: 4629723 - DNA, 25 bp, Homo sapien
gaatgtatattgtgcatatcttgga

SEQ ID NO: 4629724 - DNA, 25 bp, Homo sapien
gaagaatgtatattgtgcatatctt

SEQ ID NO: 4629725 - DNA, 25 bp, Homo sapien
gcactataaacgttcccattagcac

SEQ ID NO: 4629726 - DNA, 25 bp, Homo sapien
gtatctcaagaggttttaataatct

SEQ ID NO: 4629727 - DNA, 25 bp, Homo sapien
gattgtcaacttgtgatctttccga

SEQ ID NO: 4629728 - DNA, 25 bp, Homo sapien
tgaggtgtgatattagattgtcaac

SEQ ID NO: 4629729 - DNA, 25 bp, Homo sapien
cttgttttggttctttgatgacaga

SEQ ID NO: 4629730 - DNA, 25 bp, Homo sapien
ttgttttggttctttgatgacagac

SEQ ID NO: 4629731 - DNA, 25 bp, Homo sapien
cttgttctggctctttaatgacaga

SEQ ID NO: 4629732 - DNA, 25 bp, Homo sapien
ttgttctggctctttaatgacagac

SEQ ID NO: 4629733 - DNA, 25 bp, Homo sapien
tttgttgttggcttgcagatatctc

SEQ ID NO: 4629734 - DNA, 25 bp, Homo sapien
ttgttggcttgcagatatctctcat

SEQ ID NO: 4629735 - DNA, 25 bp, Homo sapien
tgttgttggcttgcagatatctctc

SEQ ID NO: 4629736 - DNA, 25 bp, Homo sapien
cggatatccaaaaatactgttgaat

SEQ ID NO: 4629737 - DNA, 25 bp, Homo sapien
tgaaacagccagagggatgacactc

SEQ ID NO: 4629738 - DNA, 25 bp, Homo sapien
ttctgaaacagccagagggatgaca

SEQ ID NO: 4629739 - DNA, 25 bp, Homo sapien
cccttctgaaacagccagagggatg

SEQ ID NO: 4629740 - DNA, 25 bp, Homo sapien
gaaacagccagagggatgacactca

SEQ ID NO: 4629741 - DNA, 25 bp, Homo sapien
attaaagacactatattttgaggtc

SEQ ID NO: 4629742 - DNA, 25 bp, Homo sapien
ttaaagacactatattttgaggtct

SEQ ID NO: 4629743 - DNA, 25 bp, Homo sapien
aattaaagacactatattttgaggt

SEQ ID NO: 4629744 - DNA, 25 bp, Homo sapien
tatagttgtataccatgtcaaggag

SEQ ID NO: 4629745 - DNA, 25 bp, Homo sapien
tcaaggaggagatctggggaatcaa

SEQ ID NO: 4629746 - DNA, 25 bp, Homo sapien
caccatcaggggtgttatagttgta

SEQ ID NO: 4629747 - DNA, 25 bp, Homo sapien
gggtgttatagttgtataccatgtc

SEQ ID NO: 4629748 - DNA, 25 bp, Homo sapien
caggtcatcgatggcatctttcaca

SEQ ID NO: 4629749 - DNA, 25 bp, Homo sapien
tccttcaaactaggccaagaggttg

SEQ ID NO: 4629750 - DNA, 25 bp, Homo sapien
caatccaaatgatgggcagggctac

SEQ ID NO: 4629751 - DNA, 25 bp, Homo sapien
gagggttcctagctgtgcacactta

SEQ ID NO: 4629752 - DNA, 25 bp, Homo sapien
caaggtgctctcaaactaggctaaa

SEQ ID NO: 4629753 - DNA, 25 bp, Homo sapien
gctggttgttgactcgatcgtcact

SEQ ID NO: 4629754 - DNA, 25 bp, Homo sapien
tgactcgatcgtcactttgatgcct

SEQ ID NO: 4629755 - DNA, 25 bp, Homo sapien
tagcagaacaggctggttgttgact

SEQ ID NO: 4629756 - DNA, 25 bp, Homo sapien
ttcaccagtagcagaacaggctggt

SEQ ID NO: 4629757 - DNA, 25 bp, Homo sapien
ttatgccaagcacccaaagagcggg

SEQ ID NO: 4629758 - DNA, 25 bp, Homo sapien
ggattgctatctgcagggcatgaca

SEQ ID NO: 4629759 - DNA, 25 bp, Homo sapien
tgtcacattctagcttctcctggag

SEQ ID NO: 4629760 - DNA, 25 bp, Homo sapien
tttgccagctacacataggcatggg

SEQ ID NO: 4629761 - DNA, 25 bp, Homo sapien
aatgacccttgaatatctgctctga

SEQ ID NO: 4629762 - DNA, 25 bp, Homo sapien
acccttgaatatctgctctgagaat

SEQ ID NO: 4629763 - DNA, 25 bp, Homo sapien
aagaaaatgacccttgaatatctgc

SEQ ID NO: 4629764 - DNA, 25 bp, Homo sapien
gaaaatgacccttgaatatctgctc

SEQ ID NO: 4629765 - DNA, 25 bp, Homo sapien
cccacttgaacattcatccatttgt

SEQ ID NO: 4629766 - DNA, 25 bp, Homo sapien
tgtatgtcagactatatggctcact

SEQ ID NO: 4629767 - DNA, 25 bp, Homo sapien
tctctatgtatgtcagactatatgg

SEQ ID NO: 4629768 - DNA, 25 bp, Homo sapien
cactgctagagagtaatagtatatc

SEQ ID NO: 4629769 - DNA, 25 bp, Homo sapien
ctatatggctcactgctagagagta

SEQ ID NO: 4629770 - DNA, 25 bp, Homo sapien
aggtagacagaagctccaggcgatc

SEQ ID NO: 4629771 - DNA, 25 bp, Homo sapien
aagctccaggcgatcttccatgtca

SEQ ID NO: 4629772 - DNA, 25 bp, Homo sapien
catgtcactggtaactgagatggcc

SEQ ID NO: 4629773 - DNA, 25 bp, Homo sapien
caggcgatcttccatgtcactggta

SEQ ID NO: 4629774 - DNA, 25 bp, Homo sapien
attcctgagaatttgtccaatttgt

SEQ ID NO: 4629775 - DNA, 25 bp, Homo sapien
tgtccaatttgttattgggagcctc

SEQ ID NO: 4629776 - DNA, 25 bp, Homo sapien
tcagagtagcagcttgtcatggtcc

SEQ ID NO: 4629777 - DNA, 25 bp, Homo sapien
agagtagcagcttgtcatggtccag

SEQ ID NO: 4629778 - DNA, 25 bp, Homo sapien
gatcaccaagccatagcaccaatct

SEQ ID NO: 4629779 - DNA, 25 bp, Homo sapien
catagcaccaatctgtattcctgat

SEQ ID NO: 4629780 - DNA, 25 bp, Homo sapien
tagcaccaatctgtattcctgatgt

SEQ ID NO: 4629781 - DNA, 25 bp, Homo sapien
cagtgtagatcaccaagccatagca

SEQ ID NO: 4629782 - DNA, 25 bp, Homo sapien
attctgcattaatttggtatctggc

SEQ ID NO: 4629783 - DNA, 25 bp, Homo sapien
ttctgcattaatttggtatctggcc

SEQ ID NO: 4629784 - DNA, 25 bp, Homo sapien
cattcatgagatggtctatctgtgt

SEQ ID NO: 4629785 - DNA, 25 bp, Homo sapien
aaggacattcatgagatggtctatc

SEQ ID NO: 4629786 - DNA, 25 bp, Homo sapien
ggacattcatgagatggtctatctg

SEQ ID NO: 4629787 - DNA, 25 bp, Homo sapien
gacattcatgagatggtctatctgt

SEQ ID NO: 4629788 - DNA, 25 bp, Homo sapien
ggaagggaagtatgtctatttgtaa

SEQ ID NO: 4629789 - DNA, 25 bp, Homo sapien
tgtgaaaggaagggaagtatgtcta

SEQ ID NO: 4629790 - DNA, 25 bp, Homo sapien
tgaaaggaagggaagtatgtctatt

SEQ ID NO: 4629791 - DNA, 25 bp, Homo sapien
aaaggaagggaagtatgtctatttg

SEQ ID NO: 4629792 - DNA, 25 bp, Homo sapien
ccatgttcctccattgcacaccaac

SEQ ID NO: 4629793 - DNA, 25 bp, Homo sapien
tgttcctccattgcacaccaacaaa

SEQ ID NO: 4629794 - DNA, 25 bp, Homo sapien
caaacagctaaattctgaactggaa

SEQ ID NO: 4629795 - DNA, 25 bp, Homo sapien
aacagctaaattctgaactggaaat

SEQ ID NO: 4629796 - DNA, 25 bp, Homo sapien
tgaactggtaaagattcagaggttg

SEQ ID NO: 4629797 - DNA, 25 bp, Homo sapien
ggtaaagattcagaggttgcaggtt

SEQ ID NO: 4629798 - DNA, 25 bp, Homo sapien
gaggttgcaggttggcttattctac

SEQ ID NO: 4629799 - DNA, 25 bp, Homo sapien
agaggttgcaggttggcttattcta

SEQ ID NO: 4629800 - DNA, 25 bp, Homo sapien
tagagtctaatgttgactgggcttc

SEQ ID NO: 4629801 - DNA, 25 bp, Homo sapien
ttctgggacactgccatctgtgcat

SEQ ID NO: 4629802 - DNA, 25 bp, Homo sapien
tagatgaagatgtagagtctaatgt

SEQ ID NO: 4629803 - DNA, 25 bp, Homo sapien
tgggcttctgggacactgccatctg

SEQ ID NO: 4629804 - DNA, 25 bp, Homo sapien
agacttgctttgctcttcagatggc

SEQ ID NO: 4629805 - DNA, 25 bp, Homo sapien
cttgctttgctcttcagatggctgc

SEQ ID NO: 4629806 - DNA, 25 bp, Homo sapien
cagatgtactgtccaattgagaaga

SEQ ID NO: 4629807 - DNA, 25 bp, Homo sapien
ccacagatgtactgtccaattgaga

SEQ ID NO: 4629808 - DNA, 25 bp, Homo sapien
tctgattttctcagcggcatcagct

SEQ ID NO: 4629809 - DNA, 25 bp, Homo sapien
ttttaagagcaattgtgtagatctg

SEQ ID NO: 4629810 - DNA, 25 bp, Homo sapien
ctcagcggcatcagctttgtaattt

SEQ ID NO: 4629811 - DNA, 25 bp, Homo sapien
gatctgagtaacagtgtacaccaca

SEQ ID NO: 4629812 - DNA, 25 bp, Homo sapien
caagaattttgtattccagcaggag

SEQ ID NO: 4629813 - DNA, 25 bp, Homo sapien
gcacgtttgttataaaagccctctg

SEQ ID NO: 4629814 - DNA, 25 bp, Homo sapien
gattcagacataaatagtgggtgca

SEQ ID NO: 4629815 - DNA, 25 bp, Homo sapien
ctgaaagaaacctgtagacagcaat

SEQ ID NO: 4629816 - DNA, 25 bp, Homo sapien
cagcctgaatcctgaaggtgtaggg

SEQ ID NO: 4629817 - DNA, 25 bp, Homo sapien
tgacagcctgaatcctgaaggtgta

SEQ ID NO: 4629818 - DNA, 25 bp, Homo sapien
tgaatcctgaaggtgtagggcacag

SEQ ID NO: 4629819 - DNA, 25 bp, Homo sapien
tcttcattgctagagcttttcctgc

SEQ ID NO: 4629820 - DNA, 25 bp, Homo sapien
taggaccagaatatgaggatggcag

SEQ ID NO: 4629821 - DNA, 25 bp, Homo sapien
taatgaagtaggaccagaatatgag

SEQ ID NO: 4629822 - DNA, 25 bp, Homo sapien
actgctaggacaaaacacacgatgc

SEQ ID NO: 4629823 - DNA, 25 bp, Homo sapien
ggaaatgggcaccatggtattgaga

SEQ ID NO: 4629824 - DNA, 25 bp, Homo sapien
tggtgcataaaacatcttccgatcc

SEQ ID NO: 4629825 - DNA, 25 bp, Homo sapien
tccttggtgcataaaacatcttccg

SEQ ID NO: 4629826 - DNA, 25 bp, Homo sapien
cccagttgatatataaactgttgcc

SEQ ID NO: 4629827 - DNA, 25 bp, Homo sapien
tcttccgatcccagttgatatataa

SEQ ID NO: 4629828 - DNA, 25 bp, Homo sapien
ttggccgagctcctcagtaagggtg

SEQ ID NO: 4629829 - DNA, 25 bp, Homo sapien
tttgacttggccgagctcctcagta

SEQ ID NO: 4629830 - DNA, 25 bp, Homo sapien
acatatttgacttggccgagctcct

SEQ ID NO: 4629831 - DNA, 25 bp, Homo sapien
gagctcctcagtaagggtggtagta

SEQ ID NO: 4629832 - DNA, 25 bp, Homo sapien
gaagacatgcatatcatagagcttc

SEQ ID NO: 4629833 - DNA, 25 bp, Homo sapien
gtgaactgagtacatagacattggg

SEQ ID NO: 4629834 - DNA, 25 bp, Homo sapien
tattaactaggatcaacatgctgtg

SEQ ID NO: 4629835 - DNA, 25 bp, Homo sapien
ctttgaccaacatccatctgattta

SEQ ID NO: 4629836 - DNA, 25 bp, Homo sapien
tatcaagctaactaacatatttatc

SEQ ID NO: 4629837 - DNA, 25 bp, Homo sapien
tctgtccatccttgtcataagtatc

SEQ ID NO: 4629838 - DNA, 25 bp, Homo sapien
ctgtccatccttgtcataagtatca

SEQ ID NO: 4629839 - DNA, 25 bp, Homo sapien
tgtccatccttgtcataagtatcac

SEQ ID NO: 4629840 - DNA, 25 bp, Homo sapien
gatttgtattaaggatgcttctctg

SEQ ID NO: 4629841 - DNA, 25 bp, Homo sapien
ttcccatggagctgtaatcactcac

SEQ ID NO: 4629842 - DNA, 25 bp, Homo sapien
atatttcagtggctaagggagtctc

SEQ ID NO: 4629843 - DNA, 25 bp, Homo sapien
aagggagtctcgatttgtattaagg

SEQ ID NO: 4629844 - DNA, 25 bp, Homo sapien
tccaggtccaagatagccaccttca

SEQ ID NO: 4629845 - DNA, 25 bp, Homo sapien
ataccaaggagattttgtaggctcc

SEQ ID NO: 4629846 - DNA, 25 bp, Homo sapien
accaaggagattttgtaggctcctc

SEQ ID NO: 4629847 - DNA, 25 bp, Homo sapien
ttccaggtccaagatagccaccttc

SEQ ID NO: 4629848 - DNA, 25 bp, Homo sapien
ctgatcaaacagactcatgcacagg

SEQ ID NO: 4629849 - DNA, 25 bp, Homo sapien
ctggaagcacccgagggtaaggagg

SEQ ID NO: 4629850 - DNA, 25 bp, Homo sapien
caggctgcctaggagcttccttatg

SEQ ID NO: 4629851 - DNA, 25 bp, Homo sapien
cagggtctctccatagaaggtccca

SEQ ID NO: 4629852 - DNA, 25 bp, Homo sapien
gctgcctaggagcttccttatgggt

SEQ ID NO: 4629853 - DNA, 25 bp, Homo sapien
caacacgaaggaactgtagatccca

SEQ ID NO: 4629854 - DNA, 25 bp, Homo sapien
gcctggctcatacagctctgggaaa

SEQ ID NO: 4629855 - DNA, 25 bp, Homo sapien
ttcgttctgcattgtaaagagcccc

SEQ ID NO: 4629856 - DNA, 25 bp, Homo sapien
tgttgaaatagaggttgtgctggcc

SEQ ID NO: 4629857 - DNA, 25 bp, Homo sapien
gaatactagacacaagccatcgctg

SEQ ID NO: 4629858 - DNA, 25 bp, Homo sapien
caacatggtttatcattgtccagta

SEQ ID NO: 4629859 - DNA, 25 bp, Homo sapien
gctgtacaggaggaatgacacccaa

SEQ ID NO: 4629860 - DNA, 25 bp, Homo sapien
caggctaccccagatgacaacatgg

SEQ ID NO: 4629861 - DNA, 25 bp, Homo sapien
tgtccatgctgataggccagaatag

SEQ ID NO: 4629862 - DNA, 25 bp, Homo sapien
taagaaattggtgcccaatcacagg

SEQ ID NO: 4629863 - DNA, 25 bp, Homo sapien
cagaggaccacactgaggataatgc

SEQ ID NO: 4629864 - DNA, 25 bp, Homo sapien
tcagcagcatttgcggctggttcag

SEQ ID NO: 4629865 - DNA, 25 bp, Homo sapien
ctgcgtagattttctgttgcactta

SEQ ID NO: 4629866 - DNA, 25 bp, Homo sapien
gggggatagggttttcatccacaga

SEQ ID NO: 4629867 - DNA, 25 bp, Homo sapien
ggtcatgaattatatctgcgtagat

SEQ ID NO: 4629868 - DNA, 25 bp, Homo sapien
gcaaaagaaggtcatgaattatatc

SEQ ID NO: 4629869 - DNA, 25 bp, Homo sapien
gaatgcataggcagaacgtcgagtg

SEQ ID NO: 4629870 - DNA, 25 bp, Homo sapien
aagtctcctgcactcttgaattctg

SEQ ID NO: 4629871 - DNA, 25 bp, Homo sapien
ggactgctgtggaagtctcctgcac

SEQ ID NO: 4629872 - DNA, 25 bp, Homo sapien
caaagccttgtttatgggagaatgc

SEQ ID NO: 4629873 - DNA, 25 bp, Homo sapien
taagttgcatgagtacgagggagga

SEQ ID NO: 4629874 - DNA, 25 bp, Homo sapien
gttgcatgagtacgagggaggaaga

SEQ ID NO: 4629875 - DNA, 25 bp, Homo sapien
ctaagttgcatgagtacgagggagg

SEQ ID NO: 4629876 - DNA, 25 bp, Homo sapien
gcatgagtacgagggaggaagagca

SEQ ID NO: 4629877 - DNA, 25 bp, Homo sapien
gaaggagcaggtttatgctggtttc

SEQ ID NO: 4629878 - DNA, 25 bp, Homo sapien
aggagcaggtttatgctggtttccc

SEQ ID NO: 4629879 - DNA, 25 bp, Homo sapien
agcaggtttatgctggtttcccagg

SEQ ID NO: 4629880 - DNA, 25 bp, Homo sapien
gagcaggtttatgctggtttcccag

SEQ ID NO: 4629881 - DNA, 25 bp, Homo sapien
gccttctggacaattaagaggctta

SEQ ID NO: 4629882 - DNA, 25 bp, Homo sapien
aatagccttctggacaattaagagg

SEQ ID NO: 4629883 - DNA, 25 bp, Homo sapien
tctggacaattaagaggcttagtcc

SEQ ID NO: 4629884 - DNA, 25 bp, Homo sapien
ggaatagccttctggacaattaaga

SEQ ID NO: 4629885 - DNA, 25 bp, Homo sapien
ccggtctatgggtagcactcatgca

SEQ ID NO: 4629886 - DNA, 25 bp, Homo sapien
tcaagaaacgctaaagacatggccc

SEQ ID NO: 4629887 - DNA, 25 bp, Homo sapien
gccctgggaaggtttatgcttgctc

SEQ ID NO: 4629888 - DNA, 25 bp, Homo sapien
tattttatgtgatgcctcgatggga

SEQ ID NO: 4629889 - DNA, 25 bp, Homo sapien
agcctcgtccttccgcgccggcggc

SEQ ID NO: 4629890 - DNA, 25 bp, Homo sapien
ggtcgcgttgcaggctagaggcgcc

SEQ ID NO: 4629891 - DNA, 25 bp, Homo sapien
gtctcgccctccaggggtcgcgttg

SEQ ID NO: 4629892 - DNA, 25 bp, Homo sapien
ccctccaggggtcgcgttgcaggct

SEQ ID NO: 4629893 - DNA, 25 bp, Homo sapien
actactgggcgcgagtcgttttgtg

SEQ ID NO: 4629894 - DNA, 25 bp, Homo sapien
caaagggacggtgggtgctgggtgt

SEQ ID NO: 4629895 - DNA, 25 bp, Homo sapien
tgctgggtgtttgaaggtccggtgg

SEQ ID NO: 4629896 - DNA, 25 bp, Homo sapien
gcagtttgaggagacggttggggat

SEQ ID NO: 4629897 - DNA, 25 bp, Homo sapien
cttcgcggcaagtgagtgcagtagt

SEQ ID NO: 4629898 - DNA, 25 bp, Homo sapien
tgcccttcgcggcaagtgagtgcag

SEQ ID NO: 4629899 - DNA, 25 bp, Homo sapien
tcaccgtgcccttcgcggcaagtga

SEQ ID NO: 4629900 - DNA, 25 bp, Homo sapien
cagtagtaggggacggttactgcca

SEQ ID NO: 4629901 - DNA, 25 bp, Homo sapien
gtatatccagcttaatcaggtgcag

SEQ ID NO: 4629902 - DNA, 25 bp, Homo sapien
tctaggatcttgcaccttctggtgg

SEQ ID NO: 4629903 - DNA, 25 bp, Homo sapien
gatattcaaataggacaacaccagg

SEQ ID NO: 4629904 - DNA, 25 bp, Homo sapien
caacagtccgagcatggatcccatg

SEQ ID NO: 4629905 - DNA, 25 bp, Homo sapien
agatgcatctgaacagtctacaccg

SEQ ID NO: 4629906 - DNA, 25 bp, Homo sapien
caccgaacctgtcatctagaaactt

SEQ ID NO: 4629907 - DNA, 25 bp, Homo sapien
agtctacaccgaacctgtcatctag

SEQ ID NO: 4629908 - DNA, 25 bp, Homo sapien
gtcatctagaaacttgtactcactc

SEQ ID NO: 4629909 - DNA, 25 bp, Homo sapien
atggaaaaccaaatatcttatgttc

SEQ ID NO: 4629910 - DNA, 25 bp, Homo sapien
ctcgggaatggaaaaccaaatatct

SEQ ID NO: 4629911 - DNA, 25 bp, Homo sapien
ggaatggaaaaccaaatatcttatg

SEQ ID NO: 4629912 - DNA, 25 bp, Homo sapien
taagtgaagtaactcgggaatggaa

SEQ ID NO: 4629913 - DNA, 25 bp, Homo sapien
acattcaccatgttcgctggagtgc

SEQ ID NO: 4629914 - DNA, 25 bp, Homo sapien
tttgtggagttggtgcttgtgatac

SEQ ID NO: 4629915 - DNA, 25 bp, Homo sapien
gatgctaaatatgctggcctgtaca

SEQ ID NO: 4629916 - DNA, 25 bp, Homo sapien
tcttggactatgtcactttgtggag

SEQ ID NO: 4629917 - DNA, 25 bp, Homo sapien
caaactgttacgcttcaaaggagga

SEQ ID NO: 4629918 - DNA, 25 bp, Homo sapien
taggagggtatgcaatccagagcgc

SEQ ID NO: 4629919 - DNA, 25 bp, Homo sapien
catccttaggtcagagcatggctcc

SEQ ID NO: 4629920 - DNA, 25 bp, Homo sapien
gagtcaagactaccaacagcatagg

SEQ ID NO: 4629921 - DNA, 25 bp, Homo sapien
taggtatagaactctgctcttcagg

SEQ ID NO: 4629922 - DNA, 25 bp, Homo sapien
tataagacatctaggacagggactg

SEQ ID NO: 4629923 - DNA, 25 bp, Homo sapien
tatttaaggcataggaactcacttc

SEQ ID NO: 4629924 - DNA, 25 bp, Homo sapien
gataataccttcctacagggtggtg

SEQ ID NO: 4629925 - DNA, 25 bp, Homo sapien
tgtagtcactgaacctagcctaaag

SEQ ID NO: 4629926 - DNA, 25 bp, Homo sapien
taaagttacataagacccagctctg

SEQ ID NO: 4629927 - DNA, 25 bp, Homo sapien
gcaggttccagacagaatgacagac

SEQ ID NO: 4629928 - DNA, 25 bp, Homo sapien
tattagctgcttccaatagggactg

SEQ ID NO: 4629929 - DNA, 25 bp, Homo sapien
tatttggcttctaacactagacagc

SEQ ID NO: 4629930 - DNA, 25 bp, Homo sapien
agctcggtactgattggaacactgc

SEQ ID NO: 4629931 - DNA, 25 bp, Homo sapien
ccaggctactggttgtattttctca

SEQ ID NO: 4629932 - DNA, 25 bp, Homo sapien
actatcaactcggatcagctcggta

SEQ ID NO: 4629933 - DNA, 25 bp, Homo sapien
gctgtattcctaccaaagctggaga

SEQ ID NO: 4629934 - DNA, 25 bp, Homo sapien
tgcctcgtagccaaataagtctctt

SEQ ID NO: 4629935 - DNA, 25 bp, Homo sapien
ccaggtcccagattattagttgcca

SEQ ID NO: 4629936 - DNA, 25 bp, Homo sapien
gagacatacatgagctaacacttgt

SEQ ID NO: 4629937 - DNA, 25 bp, Homo sapien
ggtcctgagtattcagcagcctagg

SEQ ID NO: 4629938 - DNA, 25 bp, Homo sapien
tctggccatgttctctacagaggag

SEQ ID NO: 4629939 - DNA, 25 bp, Homo sapien
gactgccagaaccatcaaagccttg

SEQ ID NO: 4629940 - DNA, 25 bp, Homo sapien
tcaccatggacagtaagagcactgg

SEQ ID NO: 4629941 - DNA, 25 bp, Homo sapien
aaaaggcccctatgctgctctttga

SEQ ID NO: 4629942 - DNA, 25 bp, Homo sapien
gacagaccgagttcttcagatgagg

SEQ ID NO: 4629943 - DNA, 25 bp, Homo sapien
ggcccacaggctaaagtctctcaat

SEQ ID NO: 4629944 - DNA, 25 bp, Homo sapien
actgctttgcttggaggatggccct

SEQ ID NO: 4629945 - DNA, 25 bp, Homo sapien
gattagataaataacctgttcccat

SEQ ID NO: 4629946 - DNA, 25 bp, Homo sapien
gaactagtccttcgttaagatagtg

SEQ ID NO: 4629947 - DNA, 25 bp, Homo sapien
gaaacacataatgcagaacaaaaca

SEQ ID NO: 4629948 - DNA, 25 bp, Homo sapien
ttgagggcagcctccaacagaaaac

SEQ ID NO: 4629949 - DNA, 25 bp, Homo sapien
caccgtgctcgaccaaaaattcttt

SEQ ID NO: 4629950 - DNA, 25 bp, Homo sapien
cggtccctgagaagttttgattaag

SEQ ID NO: 4629951 - DNA, 25 bp, Homo sapien
tgattaagtaaatcatgtcacttaa

SEQ ID NO: 4629952 - DNA, 25 bp, Homo sapien
gtccctgagaagttttgattaagta

SEQ ID NO: 4629953 - DNA, 25 bp, Homo sapien
ttaagtaaatcatgtcacttaacat

SEQ ID NO: 4629954 - DNA, 25 bp, Homo sapien
aaagcatactgtactttctcattgc

SEQ ID NO: 4629955 - DNA, 25 bp, Homo sapien
tactgtactttctcattgcattgca

SEQ ID NO: 4629956 - DNA, 25 bp, Homo sapien
catactgtactttctcattgcattg

SEQ ID NO: 4629957 - DNA, 25 bp, Homo sapien
aagcatactgtactttctcattgca

SEQ ID NO: 4629958 - DNA, 25 bp, Homo sapien
ccattagcggtcatctcaaggaggc

SEQ ID NO: 4629959 - DNA, 25 bp, Homo sapien
cagccttgacttgtttgagcagcca

SEQ ID NO: 4629960 - DNA, 25 bp, Homo sapien
catcagttctcggtcagtgctcagc

SEQ ID NO: 4629961 - DNA, 25 bp, Homo sapien
tcttaaggaccatggaggctgcagg

SEQ ID NO: 4629962 - DNA, 25 bp, Homo sapien
taatacaatggcatcgttgctaatg

SEQ ID NO: 4629963 - DNA, 25 bp, Homo sapien
catcgttgctaatgcagggaggctg

SEQ ID NO: 4629964 - DNA, 25 bp, Homo sapien
ggctgctggtgctgcggtgacgttg

SEQ ID NO: 4629965 - DNA, 25 bp, Homo sapien
atgcagggaggctgcgcaatcccag

SEQ ID NO: 4629966 - DNA, 25 bp, Homo sapien
tgcgtctgtcccttttgcactccga

SEQ ID NO: 4629967 - DNA, 25 bp, Homo sapien
tgagctggacccctgatgcgtctgt

SEQ ID NO: 4629968 - DNA, 25 bp, Homo sapien
cacacaggggaactgggccgatttc

SEQ ID NO: 4629969 - DNA, 25 bp, Homo sapien
cagctgagacactgttccacgggat

SEQ ID NO: 4629970 - DNA, 25 bp, Homo sapien
cgattccaattcagccatctaaggg

SEQ ID NO: 4629971 - DNA, 25 bp, Homo sapien
gagaaaggccgagcaatggctcctc

SEQ ID NO: 4629972 - DNA, 25 bp, Homo sapien
tctccacacaaccaagagaaaggcc

SEQ ID NO: 4629973 - DNA, 25 bp, Homo sapien
tcctctgtcagatatatgcctcatg

SEQ ID NO: 4629974 - DNA, 25 bp, Homo sapien
cactgagttgggcattagggtgact

SEQ ID NO: 4629975 - DNA, 25 bp, Homo sapien
tctgatgaccgtgggctaagtatcc

SEQ ID NO: 4629976 - DNA, 25 bp, Homo sapien
taacatgcgtctagctcaggataca

SEQ ID NO: 4629977 - DNA, 25 bp, Homo sapien
tacggtatcatctgaccaagtgact

SEQ ID NO: 4629978 - DNA, 25 bp, Homo sapien
cacatatgaaggtttgggcagtact

SEQ ID NO: 4629979 - DNA, 25 bp, Homo sapien
tagacacagctatagcacacaagtt

SEQ ID NO: 4629980 - DNA, 25 bp, Homo sapien
caatgaccagtccttagcacaaaaa

SEQ ID NO: 4629981 - DNA, 25 bp, Homo sapien
ctctccttggcagtaaacaatgacc

SEQ ID NO: 4629982 - DNA, 25 bp, Homo sapien
gcttcaacagcaccagacactgtcc

SEQ ID NO: 4629983 - DNA, 25 bp, Homo sapien
tggaaagttcgaataagggcttcaa

SEQ ID NO: 4629984 - DNA, 25 bp, Homo sapien
tctggaaagttcgaataagggcttc

SEQ ID NO: 4629985 - DNA, 25 bp, Homo sapien
gggcttcaacagcaccagacactgt

SEQ ID NO: 4629986 - DNA, 25 bp, Homo sapien
gactggatgtgctactgcagcggca

SEQ ID NO: 4629987 - DNA, 25 bp, Homo sapien
tgagccggagcatccagggttcctt

SEQ ID NO: 4629988 - DNA, 25 bp, Homo sapien
tgtctatagaccgtgcagttcctcc

SEQ ID NO: 4629989 - DNA, 25 bp, Homo sapien
tcacatagcccatggactggtcagc

SEQ ID NO: 4629990 - DNA, 25 bp, Homo sapien
tggctgcagaaggaagagtcgctgc

SEQ ID NO: 4629991 - DNA, 25 bp, Homo sapien
ctgcagaaggaagagtcgctgcagg

SEQ ID NO: 4629992 - DNA, 25 bp, Homo sapien
tgcaggactgtggggcagagttgag

SEQ ID NO: 4629993 - DNA, 25 bp, Homo sapien
cagaaggaagagtcgctgcaggact

SEQ ID NO: 4629994 - DNA, 25 bp, Homo sapien
gcagatccagatagaaggcgccagg

SEQ ID NO: 4629995 - DNA, 25 bp, Homo sapien
tgtgtggccacaacaagacgggcct

SEQ ID NO: 4629996 - DNA, 25 bp, Homo sapien
gcagttggcatcaagctcaggagaa

SEQ ID NO: 4629997 - DNA, 25 bp, Homo sapien
gaagaggcatgagggcaaccatagc

SEQ ID NO: 4629998 - DNA, 25 bp, Homo sapien
gctatggctacagcaagtgccctca

SEQ ID NO: 4629999 - DNA, 25 bp, Homo sapien
ttgggtctgggccaagtaggtccat

SEQ ID NO: 4630000 - DNA, 25 bp, Homo sapien
tctgggccaagtaggtccatgcctg

SEQ ID NO: 4630001 - DNA, 25 bp, Homo sapien
cttcttggatgggtgagaactcctg

SEQ ID NO: 4630002 - DNA, 25 bp, Homo sapien
tccctctgggtatggctgttggctg

SEQ ID NO: 4630003 - DNA, 25 bp, Homo sapien
ttgcccagtagctctgaggccagca

SEQ ID NO: 4630004 - DNA, 25 bp, Homo sapien
gcaggaggcatctcactggagtggg

SEQ ID NO: 4630005 - DNA, 25 bp, Homo sapien
ggccctggatccatcagctgagcca

SEQ ID NO: 4630006 - DNA, 25 bp, Homo sapien
gggcaggctgctgtgtacggctgca

SEQ ID NO: 4630007 - DNA, 25 bp, Homo sapien
ctggaacacgaagggctggatgggc

SEQ ID NO: 4630008 - DNA, 25 bp, Homo sapien
ccttgctgtagcgaaggactggtcg

SEQ ID NO: 4630009 - DNA, 25 bp, Homo sapien
gagtggatgcctgcggttcccctga

SEQ ID NO: 4630010 - DNA, 25 bp, Homo sapien
ctcggctgaggccagatcgccagga

SEQ ID NO: 4630011 - DNA, 25 bp, Homo sapien
tactcagtcaaggtcagtatcttct

SEQ ID NO: 4630012 - DNA, 25 bp, Homo sapien
tatcttctgatcctccttctgcggc

SEQ ID NO: 4630013 - DNA, 25 bp, Homo sapien
ctgttccatggagccggtactcagt

SEQ ID NO: 4630014 - DNA, 25 bp, Homo sapien
ggcctggtggccatgctgccctcac

SEQ ID NO: 4630015 - DNA, 25 bp, Homo sapien
cattactgggcctggtggccatgct

SEQ ID NO: 4630016 - DNA, 25 bp, Homo sapien
actgggcctggtggccatgctgccc

SEQ ID NO: 4630017 - DNA, 25 bp, Homo sapien
tgggcctggtggccatgctgccctc

SEQ ID NO: 4630018 - DNA, 25 bp, Homo sapien
agagtgtaagcaaccactcaaaggg

SEQ ID NO: 4630019 - DNA, 25 bp, Homo sapien
ccaggtgagagtgtaagcaaccact

SEQ ID NO: 4630020 - DNA, 25 bp, Homo sapien
tggtggaagtgcttgcgtgaggtgg

SEQ ID NO: 4630021 - DNA, 25 bp, Homo sapien
ggccccaggtgagagtgtaagcaac

SEQ ID NO: 4630022 - DNA, 25 bp, Homo sapien
gatattatctacagatgctgaggga

SEQ ID NO: 4630023 - DNA, 25 bp, Homo sapien
ctggaagcagaacagattagcagaa

SEQ ID NO: 4630024 - DNA, 25 bp, Homo sapien
catccacccagtgggcccatatgaa

SEQ ID NO: 4630025 - DNA, 25 bp, Homo sapien
cagaaagacaagagttggcaggaga

SEQ ID NO: 4630026 - DNA, 25 bp, Homo sapien
cttcttgtgatcttcggtctaggct

SEQ ID NO: 4630027 - DNA, 25 bp, Homo sapien
tccctgacaaaccaggtggccctag

SEQ ID NO: 4630028 - DNA, 25 bp, Homo sapien
ctgacaaaccaggtggccctagtgg

SEQ ID NO: 4630029 - DNA, 25 bp, Homo sapien
tcggtctaggctccctgacaaacca

SEQ ID NO: 4630030 - DNA, 25 bp, Homo sapien
ggtgtactggggaccctgctcacac

SEQ ID NO: 4630031 - DNA, 25 bp, Homo sapien
gggtgtactggggaccctgctcaca

SEQ ID NO: 4630032 - DNA, 25 bp, Homo sapien
ccgggtgtactggggaccctgctca

SEQ ID NO: 4630033 - DNA, 25 bp, Homo sapien
tgtactggggaccctgctcacacac

SEQ ID NO: 4630034 - DNA, 25 bp, Homo sapien
tcctgagcaactctcagtgcaggag

SEQ ID NO: 4630035 - DNA, 25 bp, Homo sapien
ctgagcaactctcagtgcaggagtt

SEQ ID NO: 4630036 - DNA, 25 bp, Homo sapien
aatcctgagcaactctcagtgcagg

SEQ ID NO: 4630037 - DNA, 25 bp, Homo sapien
atcaatcctgagcaactctcagtgc

SEQ ID NO: 4630038 - DNA, 25 bp, Homo sapien
agtggtaacggcttcactgcttggc

SEQ ID NO: 4630039 - DNA, 25 bp, Homo sapien
gacaaaactcagctggaggcttctc

SEQ ID NO: 4630040 - DNA, 25 bp, Homo sapien
ggtcaatggaaatggcctctgagct

SEQ ID NO: 4630041 - DNA, 25 bp, Homo sapien
gaagtcagggcaggtcagtggtaac

SEQ ID NO: 4630042 - DNA, 25 bp, Homo sapien
ccgggatcccggcttgtgccaaaat

SEQ ID NO: 4630043 - DNA, 25 bp, Homo sapien
aatgagccacaatgaggtccacagc

SEQ ID NO: 4630044 - DNA, 25 bp, Homo sapien
ggtccacagcgatgttaacagcttt

SEQ ID NO: 4630045 - DNA, 25 bp, Homo sapien
tgtgccaaaatgagccacaatgagg

SEQ ID NO: 4630046 - DNA, 25 bp, Homo sapien
gctgcccgatgatgacgtccagtac

SEQ ID NO: 4630047 - DNA, 25 bp, Homo sapien
ttcagaaccaggtggcccacattgg

SEQ ID NO: 4630048 - DNA, 25 bp, Homo sapien
ggacggcagggcacaagtacttcag

SEQ ID NO: 4630049 - DNA, 25 bp, Homo sapien
cgtccagtacaaaggccttgagccc

SEQ ID NO: 4630050 - DNA, 25 bp, Homo sapien
agctgtgtggaagcctcaaccacac

SEQ ID NO: 4630051 - DNA, 25 bp, Homo sapien
gctgtgtggaagcctcaaccacact

SEQ ID NO: 4630052 - DNA, 25 bp, Homo sapien
tagctgtgtggaagcctcaaccaca

SEQ ID NO: 4630053 - DNA, 25 bp, Homo sapien
ctagctgtgtggaagcctcaaccac

SEQ ID NO: 4630054 - DNA, 25 bp, Homo sapien
ttgttgtagaggccatgcaggacct

SEQ ID NO: 4630055 - DNA, 25 bp, Homo sapien
ctttgttgtagaggccatgcaggac

SEQ ID NO: 4630056 - DNA, 25 bp, Homo sapien
actttgttgtagaggccatgcagga

SEQ ID NO: 4630057 - DNA, 25 bp, Homo sapien
tttgttgtagaggccatgcaggacc

SEQ ID NO: 4630058 - DNA, 25 bp, Homo sapien
cgaggatgaaggcgttgaagcgcat

SEQ ID NO: 4630059 - DNA, 25 bp, Homo sapien
atgaaggcgttgaagcgcatggtat

SEQ ID NO: 4630060 - DNA, 25 bp, Homo sapien
ggatgaaggcgttgaagcgcatggt

SEQ ID NO: 4630061 - DNA, 25 bp, Homo sapien
gaggatgaaggcgttgaagcgcatg

SEQ ID NO: 4630062 - DNA, 25 bp, Homo sapien
agttgtttaggggatcttgctgctc

SEQ ID NO: 4630063 - DNA, 25 bp, Homo sapien
ggaccctccagatccaccctttctg

SEQ ID NO: 4630064 - DNA, 25 bp, Homo sapien
accctttctgtctgtccagggcgtt

SEQ ID NO: 4630065 - DNA, 25 bp, Homo sapien
tccagggcgttgtttccttggtgca

SEQ ID NO: 4630066 - DNA, 25 bp, Homo sapien
tgggcccatacctgagaaagcatgt

SEQ ID NO: 4630067 - DNA, 25 bp, Homo sapien
gaataggtgaacacgcccttccatg

SEQ ID NO: 4630068 - DNA, 25 bp, Homo sapien
catgttactaggatgtgggtcccaa

SEQ ID NO: 4630069 - DNA, 25 bp, Homo sapien
tttgtaaaagcagaccacgttggtg

SEQ ID NO: 4630070 - DNA, 25 bp, Homo sapien
ggtgattaaaccagaactccaggga

SEQ ID NO: 4630071 - DNA, 25 bp, Homo sapien
tgattaaaccagaactccagggacc

SEQ ID NO: 4630072 - DNA, 25 bp, Homo sapien
gtgattaaaccagaactccagggac

SEQ ID NO: 4630073 - DNA, 25 bp, Homo sapien
tgagtttgacctgcagggttctagg

SEQ ID NO: 4630074 - DNA, 25 bp, Homo sapien
ttgagtttgacctgcagggttctag

SEQ ID NO: 4630075 - DNA, 25 bp, Homo sapien
attgagtttgacctgcagggttcta

SEQ ID NO: 4630076 - DNA, 25 bp, Homo sapien
gaagcctgaggctctgaggatgaac

SEQ ID NO: 4630077 - DNA, 25 bp, Homo sapien
tgaacgcttgtgtggtccccctccc

SEQ ID NO: 4630078 - DNA, 25 bp, Homo sapien
tgaggctctgaggatgaacgcttgt

SEQ ID NO: 4630079 - DNA, 25 bp, Homo sapien
tgaggatgaacgcttgtgtggtccc

SEQ ID NO: 4630080 - DNA, 25 bp, Homo sapien
cagattgctagagtatcctgctggc

SEQ ID NO: 4630081 - DNA, 25 bp, Homo sapien
tgcaggctgtgcactagtcaacttg

SEQ ID NO: 4630082 - DNA, 25 bp, Homo sapien
gagggactgatccacacagagaacc

SEQ ID NO: 4630083 - DNA, 25 bp, Homo sapien
taagtataaacgctgctgcccacag

SEQ ID NO: 4630084 - DNA, 25 bp, Homo sapien
gctgcccactttgcagcagccggtg

SEQ ID NO: 4630085 - DNA, 25 bp, Homo sapien
gggacacccgcagcagttccttgtg

SEQ ID NO: 4630086 - DNA, 25 bp, Homo sapien
cagccggtgctggaacagcaagtcg

SEQ ID NO: 4630087 - DNA, 25 bp, Homo sapien
gacacacggtatgagctgcactcag

SEQ ID NO: 4630088 - DNA, 25 bp, Homo sapien
tcctcttctccaccttctgaggcac

SEQ ID NO: 4630089 - DNA, 25 bp, Homo sapien
ttcctcttctccaccttctgaggca

SEQ ID NO: 4630090 - DNA, 25 bp, Homo sapien
cttctccaccttctgaggcacccac

SEQ ID NO: 4630091 - DNA, 25 bp, Homo sapien
ctcttctccaccttctgaggcaccc

SEQ ID NO: 4630092 - DNA, 25 bp, Homo sapien
ctgagcccccggctgcctctgccac

SEQ ID NO: 4630093 - DNA, 25 bp, Homo sapien
cccacctcgggcccacctggcacgc

SEQ ID NO: 4630094 - DNA, 25 bp, Homo sapien
ccacctcgggcccacctggcacgcc

SEQ ID NO: 4630095 - DNA, 25 bp, Homo sapien
gagccatcgatgtagacctgggagc

SEQ ID NO: 4630096 - DNA, 25 bp, Homo sapien
gttgctgctaccacgagggaacctg

SEQ ID NO: 4630097 - DNA, 25 bp, Homo sapien
agccatcgatgtagacctgggagct

SEQ ID NO: 4630098 - DNA, 25 bp, Homo sapien
gggaacctggaaccctcaatggagc

SEQ ID NO: 4630099 - DNA, 25 bp, Homo sapien
ccaaagaggtgtccccacttgatgc

SEQ ID NO: 4630100 - DNA, 25 bp, Homo sapien
tcattttctgctggcgaggcagcgg

SEQ ID NO: 4630101 - DNA, 25 bp, Homo sapien
gcctcccgctgggcttttcgggagc

SEQ ID NO: 4630102 - DNA, 25 bp, Homo sapien
ctcagctcggccagcacagagtcag

SEQ ID NO: 4630103 - DNA, 25 bp, Homo sapien
gggaacccactgtctgcgccactag

SEQ ID NO: 4630104 - DNA, 25 bp, Homo sapien
gcgccactagttggaacatggactt

SEQ ID NO: 4630105 - DNA, 25 bp, Homo sapien
cactgtctgcgccactagttggaac

SEQ ID NO: 4630106 - DNA, 25 bp, Homo sapien
tctgcgccactagttggaacatgga

SEQ ID NO: 4630107 - DNA, 25 bp, Homo sapien
tggaggtcagagaaaccccctcaaa

SEQ ID NO: 4630108 - DNA, 25 bp, Homo sapien
tcgccccagcactcgtaggatgtct

SEQ ID NO: 4630109 - DNA, 25 bp, Homo sapien
gatgtctcctttgtggaagctcagc

SEQ ID NO: 4630110 - DNA, 25 bp, Homo sapien
gccacggctgcagcgcagccagtct

SEQ ID NO: 4630111 - DNA, 25 bp, Homo sapien
actcgtaggatgtctcctttgtgga

SEQ ID NO: 4630112 - DNA, 25 bp, Homo sapien
tcacccatggaagggttggcccaga

SEQ ID NO: 4630113 - DNA, 25 bp, Homo sapien
ctagggaaccctgtagatggctttc

SEQ ID NO: 4630114 - DNA, 25 bp, Homo sapien
ggcttagggatctggccccaatact

SEQ ID NO: 4630115 - DNA, 25 bp, Homo sapien
taaatacataaacagacgcctgggc

SEQ ID NO: 4630116 - DNA, 25 bp, Homo sapien
aagttccagtttggccacacatttg

SEQ ID NO: 4630117 - DNA, 25 bp, Homo sapien
ggccacacagggtataagttccagt

SEQ ID NO: 4630118 - DNA, 25 bp, Homo sapien
cagccatccttttggaagggagaga

SEQ ID NO: 4630119 - DNA, 25 bp, Homo sapien
ctggacatcaagttcccttcccttt

SEQ ID NO: 4630120 - DNA, 25 bp, Homo sapien
gtctagccaactggctgagaattaa

SEQ ID NO: 4630121 - DNA, 25 bp, Homo sapien
tctagccaactggctgagaattaaa

SEQ ID NO: 4630122 - DNA, 25 bp, Homo sapien
tttcgcaggtggctccagtacaact

SEQ ID NO: 4630123 - DNA, 25 bp, Homo sapien
caggtggctccagtacaactgctgg

SEQ ID NO: 4630124 - DNA, 25 bp, Homo sapien
cggtttgaacagacgcgacaagagg

SEQ ID NO: 4630125 - DNA, 25 bp, Homo sapien
acagacgcgacaagagggagaaccc

SEQ ID NO: 4630126 - DNA, 25 bp, Homo sapien
attgaggccctatttccagatcaga

SEQ ID NO: 4630127 - DNA, 25 bp, Homo sapien
ttgaggccctatttccagatcagac

SEQ ID NO: 4630128 - DNA, 25 bp, Homo sapien
atccttcgtgtactgacggaaacac

SEQ ID NO: 4630129 - DNA, 25 bp, Homo sapien
tgaaaccgatatccttcgtgtactg

SEQ ID NO: 4630130 - DNA, 25 bp, Homo sapien
aaaccgatatccttcgtgtactgac

SEQ ID NO: 4630131 - DNA, 25 bp, Homo sapien
ttaatgaaaccgatatccttcgtgt

SEQ ID NO: 4630132 - DNA, 25 bp, Homo sapien
actatcatggtctttcattgagcag

SEQ ID NO: 4630133 - DNA, 25 bp, Homo sapien
tggtctttcattgagcagatgcctt

SEQ ID NO: 4630134 - DNA, 25 bp, Homo sapien
tctttcattgagcagatgccttgga

SEQ ID NO: 4630135 - DNA, 25 bp, Homo sapien
ctatcatggtctttcattgagcaga

SEQ ID NO: 4630136 - DNA, 25 bp, Homo sapien
tcattaactctaaggccttaaatgc

SEQ ID NO: 4630137 - DNA, 25 bp, Homo sapien
cataataccgtatcttgaatcactt

SEQ ID NO: 4630138 - DNA, 25 bp, Homo sapien
cctctacatacacattgtgggtcat

SEQ ID NO: 4630139 - DNA, 25 bp, Homo sapien
catacacattgtgggtcatttcatt

SEQ ID NO: 4630140 - DNA, 25 bp, Homo sapien
gattagtaagaccattttgttggaa

SEQ ID NO: 4630141 - DNA, 25 bp, Homo sapien
cttggattagtaagaccattttgtt

SEQ ID NO: 4630142 - DNA, 25 bp, Homo sapien
tggattagtaagaccattttgttgg

SEQ ID NO: 4630143 - DNA, 25 bp, Homo sapien
ggattagtaagaccattttgttgga

SEQ ID NO: 4630144 - DNA, 25 bp, Homo sapien
cacattaatgttaacatctacaact

SEQ ID NO: 4630145 - DNA, 25 bp, Homo sapien
cattaatgttaacatctacaactaa

SEQ ID NO: 4630146 - DNA, 25 bp, Homo sapien
taatgttaacatctacaactaattt

SEQ ID NO: 4630147 - DNA, 25 bp, Homo sapien
gttaacatctacaactaatttgtga

SEQ ID NO: 4630148 - DNA, 25 bp, Homo sapien
tggtcttcagcacacgctcattcat

SEQ ID NO: 4630149 - DNA, 25 bp, Homo sapien
ttgcacggggcacgtgcatcctgtt

SEQ ID NO: 4630150 - DNA, 25 bp, Homo sapien
ctcacagaattgcacggggcacgtg

SEQ ID NO: 4630151 - DNA, 25 bp, Homo sapien
ttttctggaggcgtttggtcttcag

SEQ ID NO: 4630152 - DNA, 25 bp, Homo sapien
tgcacaagtttggagcgagaggaat

SEQ ID NO: 4630153 - DNA, 25 bp, Homo sapien
aaggtattgcacaagtttggagcga

SEQ ID NO: 4630154 - DNA, 25 bp, Homo sapien
attcgcaatccttccacagccggtg

SEQ ID NO: 4630155 - DNA, 25 bp, Homo sapien
cgagaggaatgggagacattcgcaa

SEQ ID NO: 4630156 - DNA, 25 bp, Homo sapien
gcggaacggtgggcggagggagaga

SEQ ID NO: 4630157 - DNA, 25 bp, Homo sapien
ctagcggcggaacggtgggcggagg

SEQ ID NO: 4630158 - DNA, 25 bp, Homo sapien
ccaatcatcgctagggttgggtggt

SEQ ID NO: 4630159 - DNA, 25 bp, Homo sapien
tccggcctcggcgaaatagccaatc

SEQ ID NO: 4630160 - DNA, 25 bp, Homo sapien
gacgcttccggttctgccgctggtt

SEQ ID NO: 4630161 - DNA, 25 bp, Homo sapien
tggtgacacgcgatcccggcggtcc

SEQ ID NO: 4630162 - DNA, 25 bp, Homo sapien
gtcagtgtgtcagaacccctcagtg

SEQ ID NO: 4630163 - DNA, 25 bp, Homo sapien
tgcaactggcctctttaagtcggcg

SEQ ID NO: 4630164 - DNA, 25 bp, Homo sapien
gaggaaatccactagtcattgtgac

SEQ ID NO: 4630165 - DNA, 25 bp, Homo sapien
gccctccacgtaggaacacggtctg

SEQ ID NO: 4630166 - DNA, 25 bp, Homo sapien
gggaagcccgtccttccgcaagatc

SEQ ID NO: 4630167 - DNA, 25 bp, Homo sapien
cccctcaaagaacgctgtccctcgg

SEQ ID NO: 4630168 - DNA, 25 bp, Homo sapien
tttgcccaaaagactctaagagaga

SEQ ID NO: 4630169 - DNA, 25 bp, Homo sapien
gacctccctcttactactttgccca

SEQ ID NO: 4630170 - DNA, 25 bp, Homo sapien
tttggccggcccatacccagcttag

SEQ ID NO: 4630171 - DNA, 25 bp, Homo sapien
gaggttgtgataccccggggctata

SEQ ID NO: 4630172 - DNA, 25 bp, Homo sapien
ctaacaccttctaccttcacgggag

SEQ ID NO: 4630173 - DNA, 25 bp, Homo sapien
ggtctcttcgactccgacaccttga

SEQ ID NO: 4630174 - DNA, 25 bp, Homo sapien
tgggctccagggaccaacggggcag

SEQ ID NO: 4630175 - DNA, 25 bp, Homo sapien
gattcctgggctccagggaccaacg

SEQ ID NO: 4630176 - DNA, 25 bp, Homo sapien
attcctgggctccagggaccaacgg

SEQ ID NO: 4630177 - DNA, 25 bp, Homo sapien
ctgggctccagggaccaacggggca

SEQ ID NO: 4630178 - DNA, 25 bp, Homo sapien
gagcttgaataacgggagggaatta

SEQ ID NO: 4630179 - DNA, 25 bp, Homo sapien
tgagcttgaataacgggagggaatt

SEQ ID NO: 4630180 - DNA, 25 bp, Homo sapien
ctgagcttgaataacgggagggaat

SEQ ID NO: 4630181 - DNA, 25 bp, Homo sapien
gggcaggccgcgcttgccatgggcg

SEQ ID NO: 4630182 - DNA, 25 bp, Homo sapien
ccggcgggctggcttgccgcgggcg

SEQ ID NO: 4630183 - DNA, 25 bp, Homo sapien
gaagatccgccgaagatcctggacc

SEQ ID NO: 4630184 - DNA, 25 bp, Homo sapien
cggctcccgccctgagaatggaaga

SEQ ID NO: 4630185 - DNA, 25 bp, Homo sapien
ggcccccagcccgggcctgcctcac

SEQ ID NO: 4630186 - DNA, 25 bp, Homo sapien
gggcccccagcccgggcctgcctca

SEQ ID NO: 4630187 - DNA, 25 bp, Homo sapien
ctgcggagagcccggtaggaggagg

SEQ ID NO: 4630188 - DNA, 25 bp, Homo sapien
tgcggagagcccggtaggaggaggg

SEQ ID NO: 4630189 - DNA, 25 bp, Homo sapien
caggcccgggcccagggccccgcag

SEQ ID NO: 4630190 - DNA, 25 bp, Homo sapien
ctcccccggcacctctccaggcccg

SEQ ID NO: 4630191 - DNA, 25 bp, Homo sapien
aaatcgtccacacgcgccaggctag

SEQ ID NO: 4630192 - DNA, 25 bp, Homo sapien
ctcagagaagaagccggccccgatc

SEQ ID NO: 4630193 - DNA, 25 bp, Homo sapien
gacctcagagaagaagccggccccg

SEQ ID NO: 4630194 - DNA, 25 bp, Homo sapien
cccgatcttctccgcgcagtgaaaa

SEQ ID NO: 4630195 - DNA, 25 bp, Homo sapien
ccgtagtgtgttgccccggttactg

SEQ ID NO: 4630196 - DNA, 25 bp, Homo sapien
tgcctgagccggttcatcagctgca

SEQ ID NO: 4630197 - DNA, 25 bp, Homo sapien
ccatgacttgccctgactgtcggtg

SEQ ID NO: 4630198 - DNA, 25 bp, Homo sapien
ggttcatcagctgcacttcccgtag

SEQ ID NO: 4630199 - DNA, 25 bp, Homo sapien
tgtaagagcgtgcagctgtccctgg

SEQ ID NO: 4630200 - DNA, 25 bp, Homo sapien
gtaagagcgtgcagctgtccctggt

SEQ ID NO: 4630201 - DNA, 25 bp, Homo sapien
taagagcgtgcagctgtccctggtg

SEQ ID NO: 4630202 - DNA, 25 bp, Homo sapien
agctgttccaatgtccccccattca

SEQ ID NO: 4630203 - DNA, 25 bp, Homo sapien
gcagctgttccaatgtccccccatt

SEQ ID NO: 4630204 - DNA, 25 bp, Homo sapien
tgagcagctgttccaatgtcccccc

SEQ ID NO: 4630205 - DNA, 25 bp, Homo sapien
agcagctgttccaatgtccccccat

SEQ ID NO: 4630206 - DNA, 25 bp, Homo sapien
tgtgaggtcgcggtgaaatacacct

SEQ ID NO: 4630207 - DNA, 25 bp, Homo sapien
tgaaatacacctttggagtgcaggt

SEQ ID NO: 4630208 - DNA, 25 bp, Homo sapien
cttggatgtgaggtcgcggtgaaat

SEQ ID NO: 4630209 - DNA, 25 bp, Homo sapien
cgcggtgaaatacacctttggagtg

SEQ ID NO: 4630210 - DNA, 25 bp, Homo sapien
cccaatgtataacccaaagccctgt

SEQ ID NO: 4630211 - DNA, 25 bp, Homo sapien
ggcctcccaatgtataacccaaagc

SEQ ID NO: 4630212 - DNA, 25 bp, Homo sapien
atagtatccccacgcactcatcacc

SEQ ID NO: 4630213 - DNA, 25 bp, Homo sapien
tatccccacgcactcatcaccttct

SEQ ID NO: 4630214 - DNA, 25 bp, Homo sapien
ccgaagtcacccacgacagcggtga

SEQ ID NO: 4630215 - DNA, 25 bp, Homo sapien
cgatcttcccgtcggactagacagt

SEQ ID NO: 4630216 - DNA, 25 bp, Homo sapien
aatcttttcggccagcccgaagtca

SEQ ID NO: 4630217 - DNA, 25 bp, Homo sapien
acgacagcggtgaagcctcgatctt

SEQ ID NO: 4630218 - DNA, 25 bp, Homo sapien
gggggaacagggacattcatctcac

SEQ ID NO: 4630219 - DNA, 25 bp, Homo sapien
tggggggaacagggacattcatctc

SEQ ID NO: 4630220 - DNA, 25 bp, Homo sapien
tttggggggaacagggacattcatc

SEQ ID NO: 4630221 - DNA, 25 bp, Homo sapien
gatttggggggaacagggacattca

SEQ ID NO: 4630222 - DNA, 25 bp, Homo sapien
gatgaggtgaactccctccgttccc

SEQ ID NO: 4630223 - DNA, 25 bp, Homo sapien
ggcagagtggtcagaagcatcctat

SEQ ID NO: 4630224 - DNA, 25 bp, Homo sapien
gggatgaggtgaactccctccgttc

SEQ ID NO: 4630225 - DNA, 25 bp, Homo sapien
agaagcatcctattcaggcatcccc

SEQ ID NO: 4630226 - DNA, 25 bp, Homo sapien
acagctcaccccgtaacacctctgg

SEQ ID NO: 4630227 - DNA, 25 bp, Homo sapien
caccccgtaacacctctggagccat

SEQ ID NO: 4630228 - DNA, 25 bp, Homo sapien
cttctcatcatacagctcaccccgt

SEQ ID NO: 4630229 - DNA, 25 bp, Homo sapien
tcatcatacagctcaccccgtaaca

SEQ ID NO: 4630230 - DNA, 25 bp, Homo sapien
ggtgggggatcttgacagttttcat

SEQ ID NO: 4630231 - DNA, 25 bp, Homo sapien
gggactcctgaagatctggtagggt

SEQ ID NO: 4630232 - DNA, 25 bp, Homo sapien
ttttcatgtgttagaagggtgcctg

SEQ ID NO: 4630233 - DNA, 25 bp, Homo sapien
gctttatgagaatacctcaagggtc

SEQ ID NO: 4630234 - DNA, 25 bp, Homo sapien
gatgagctcacagaggacaatcccg

SEQ ID NO: 4630235 - DNA, 25 bp, Homo sapien
cagtgcgtggtaggtagtcagggtc

SEQ ID NO: 4630236 - DNA, 25 bp, Homo sapien
gacaatcccgaaggcaaagacatca

SEQ ID NO: 4630237 - DNA, 25 bp, Homo sapien
tctgcaggtactcgggcgatgagct

SEQ ID NO: 4630238 - DNA, 25 bp, Homo sapien
tccaagtcagcttttcttgggttct

SEQ ID NO: 4630239 - DNA, 25 bp, Homo sapien
cagctagtctggaattctttctttg

SEQ ID NO: 4630240 - DNA, 25 bp, Homo sapien
cagtcagaacctcaacctctaggga

SEQ ID NO: 4630241 - DNA, 25 bp, Homo sapien
tcaacctctagggaatcctccttgg

SEQ ID NO: 4630242 - DNA, 25 bp, Homo sapien
atcccccaccagagttcggaaagca

SEQ ID NO: 4630243 - DNA, 25 bp, Homo sapien
ccaggagcaagaaaggcagtgggca

SEQ ID NO: 4630244 - DNA, 25 bp, Homo sapien
caccagagttcggaaagcaggcaca

SEQ ID NO: 4630245 - DNA, 25 bp, Homo sapien
aaagcaggcacatccaggccaaagt

SEQ ID NO: 4630246 - DNA, 25 bp, Homo sapien
cagccatggcagcttacggatgggg

SEQ ID NO: 4630247 - DNA, 25 bp, Homo sapien
gcagccatggcagcttacggatggg

SEQ ID NO: 4630248 - DNA, 25 bp, Homo sapien
ccaggtgctgggtaatttcggtgaa

SEQ ID NO: 4630249 - DNA, 25 bp, Homo sapien
cctgattgtgtgtcagggcggtcct

SEQ ID NO: 4630250 - DNA, 25 bp, Homo sapien
tgtcagggcggtcctggtgagtggg

SEQ ID NO: 4630251 - DNA, 25 bp, Homo sapien
gattgtgtgtcagggcggtcctggt

SEQ ID NO: 4630252 - DNA, 25 bp, Homo sapien
agagggaccccctcttgcaacagag

SEQ ID NO: 4630253 - DNA, 25 bp, Homo sapien
gggatctggcctgggaagcgtggca

SEQ ID NO: 4630254 - DNA, 25 bp, Homo sapien
ggcagagggaccccctcttgcaaca

SEQ ID NO: 4630255 - DNA, 25 bp, Homo sapien
cggcttcgggaaagccggggatctg

SEQ ID NO: 4630256 - DNA, 25 bp, Homo sapien
gcttgctgggtgtgtctaagagctt

SEQ ID NO: 4630257 - DNA, 25 bp, Homo sapien
ccctgaggtcttcccgtagtgagaa

SEQ ID NO: 4630258 - DNA, 25 bp, Homo sapien
ggttgactcgagtcagattgtcccc

SEQ ID NO: 4630259 - DNA, 25 bp, Homo sapien
taagagcttgatcttgccacccctg

SEQ ID NO: 4630260 - DNA, 25 bp, Homo sapien
ctcacagttcaggttgcggtagcgg

SEQ ID NO: 4630261 - DNA, 25 bp, Homo sapien
gattgttattgaggacgggtcctga

SEQ ID NO: 4630262 - DNA, 25 bp, Homo sapien
gcaggctatgctgggcccggttcca

SEQ ID NO: 4630263 - DNA, 25 bp, Homo sapien
ccgaggaacaggtgctgatgaagtt

SEQ ID NO: 4630264 - DNA, 25 bp, Homo sapien
tctggttcagtgatccccacgggaa

SEQ ID NO: 4630265 - DNA, 25 bp, Homo sapien
gaactggcactgtccagcaagtgtg

SEQ ID NO: 4630266 - DNA, 25 bp, Homo sapien
agcaagtgtgctctgttcttacagg

SEQ ID NO: 4630267 - DNA, 25 bp, Homo sapien
gctctgtcccttgagtccatgctgg

SEQ ID NO: 4630268 - DNA, 25 bp, Homo sapien
ggaaaagggtgaagccacctctaga

SEQ ID NO: 4630269 - DNA, 25 bp, Homo sapien
gacactcatgccaacaagaacctgt

SEQ ID NO: 4630270 - DNA, 25 bp, Homo sapien
gggttcctcagaccatctccttcat

SEQ ID NO: 4630271 - DNA, 25 bp, Homo sapien
gaagccacctctagaagggactttg

SEQ ID NO: 4630272 - DNA, 25 bp, Homo sapien
tgctgttaggagtgaccgccatctg

SEQ ID NO: 4630273 - DNA, 25 bp, Homo sapien
tggcgcagagtcaggaagcactaca

SEQ ID NO: 4630274 - DNA, 25 bp, Homo sapien
tccgcctcaagataacgcagctggg

SEQ ID NO: 4630275 - DNA, 25 bp, Homo sapien
tggaagtcactaacagcagcctgag

SEQ ID NO: 4630276 - DNA, 25 bp, Homo sapien
tgtcactttgctaggggcgggttct

SEQ ID NO: 4630277 - DNA, 25 bp, Homo sapien
agctccttcctatcccggatgtagg

SEQ ID NO: 4630278 - DNA, 25 bp, Homo sapien
tctgcggggcggatgtcactttgct

SEQ ID NO: 4630279 - DNA, 25 bp, Homo sapien
cacactacatcttgttctagctcct

SEQ ID NO: 4630280 - DNA, 25 bp, Homo sapien
taacagtgatcacaggcagccttca

SEQ ID NO: 4630281 - DNA, 25 bp, Homo sapien
taatcaagcaaggacagttaacagc

SEQ ID NO: 4630282 - DNA, 25 bp, Homo sapien
gcagaggcaccttaggaaacagtga

SEQ ID NO: 4630283 - DNA, 25 bp, Homo sapien
gatgacctttgacgacttttctgaa

SEQ ID NO: 4630284 - DNA, 25 bp, Homo sapien
ccaactcagtggtcatctccatatt

SEQ ID NO: 4630285 - DNA, 25 bp, Homo sapien
caggtcgctggcttgtccatggact

SEQ ID NO: 4630286 - DNA, 25 bp, Homo sapien
tcatctttaactcccactgccaact

SEQ ID NO: 4630287 - DNA, 25 bp, Homo sapien
cgctggcttgtccatggactggcca

SEQ ID NO: 4630288 - DNA, 25 bp, Homo sapien
tggatctcctcacagagttagggcg

SEQ ID NO: 4630289 - DNA, 25 bp, Homo sapien
ctcacagagttagggcgaggacagg

SEQ ID NO: 4630290 - DNA, 25 bp, Homo sapien
cctcacagagttagggcgaggacag

SEQ ID NO: 4630291 - DNA, 25 bp, Homo sapien
atctcctcacagagttagggcgagg

SEQ ID NO: 4630292 - DNA, 25 bp, Homo sapien
ctctttgtggtaaagcttgatggca

SEQ ID NO: 4630293 - DNA, 25 bp, Homo sapien
tttgtggtaaagcttgatggcatct

SEQ ID NO: 4630294 - DNA, 25 bp, Homo sapien
ctttatctctttgtggtaaagcttg

SEQ ID NO: 4630295 - DNA, 25 bp, Homo sapien
tatctctttgtggtaaagcttgatg

SEQ ID NO: 4630296 - DNA, 25 bp, Homo sapien
gccaggtccacgaggaggttttgaa

SEQ ID NO: 4630297 - DNA, 25 bp, Homo sapien
acagggcacggcctaggaggaatcc

SEQ ID NO: 4630298 - DNA, 25 bp, Homo sapien
tatggtgtgagtagacctctgcaga

SEQ ID NO: 4630299 - DNA, 25 bp, Homo sapien
taactcagagatgccttgtcacttg

SEQ ID NO: 4630300 - DNA, 25 bp, Homo sapien
cctccaggtacttccctagtggact

SEQ ID NO: 4630301 - DNA, 25 bp, Homo sapien
ctagtggactcctttccctcaccgg

SEQ ID NO: 4630302 - DNA, 25 bp, Homo sapien
agccagaaggagtgcccgtcctagc

SEQ ID NO: 4630303 - DNA, 25 bp, Homo sapien
accggcgtagcattccagccagaag

SEQ ID NO: 4630304 - DNA, 25 bp, Homo sapien
cttcgcccgcttaggactgagtccg

SEQ ID NO: 4630305 - DNA, 25 bp, Homo sapien
tcttcccacttggagtgccacagga

SEQ ID NO: 4630306 - DNA, 25 bp, Homo sapien
ccaggtggacgtgagagctttaccc

SEQ ID NO: 4630307 - DNA, 25 bp, Homo sapien
ctgaagatggctcagcgtcgcgcca

SEQ ID NO: 4630308 - DNA, 25 bp, Homo sapien
aaccacacggggctcattctcagcg

SEQ ID NO: 4630309 - DNA, 25 bp, Homo sapien
cacacggggctcattctcagcgcgg

SEQ ID NO: 4630310 - DNA, 25 bp, Homo sapien
ccacacggggctcattctcagcgcg

SEQ ID NO: 4630311 - DNA, 25 bp, Homo sapien
accacacggggctcattctcagcgc

SEQ ID NO: 4630312 - DNA, 25 bp, Homo sapien
tgccggcccacgggtggagggatcg

SEQ ID NO: 4630313 - DNA, 25 bp, Homo sapien
gaagcggtccggcattggccggccg

SEQ ID NO: 4630314 - DNA, 25 bp, Homo sapien
gggcggtgccgaagcggtccggcat

SEQ ID NO: 4630315 - DNA, 25 bp, Homo sapien
gagggatcgggcgggcggtgccgaa

SEQ ID NO: 4630316 - DNA, 25 bp, Homo sapien
taggaccccggacagcgcagacaca

SEQ ID NO: 4630317 - DNA, 25 bp, Homo sapien
attggcgcggtctcctaggaccccg

SEQ ID NO: 4630318 - DNA, 25 bp, Homo sapien
tgtgcccggaggtcgggattggcgc

SEQ ID NO: 4630319 - DNA, 25 bp, Homo sapien
ccaccacacccaagagcgaaactgc

SEQ ID NO: 4630320 - DNA, 25 bp, Homo sapien
tcgccgccggggttccgtggctcca

SEQ ID NO: 4630321 - DNA, 25 bp, Homo sapien
cttgagcggtggtcgccgccggggt

SEQ ID NO: 4630322 - DNA, 25 bp, Homo sapien
gccgccggggttccgtggctccaga

SEQ ID NO: 4630323 - DNA, 25 bp, Homo sapien
tgagcggtggtcgccgccggggttc

SEQ ID NO: 4630324 - DNA, 25 bp, Homo sapien
gccgcgacggccgcggtgtacagcg

SEQ ID NO: 4630325 - DNA, 25 bp, Homo sapien
ttgtacagcacaaaagccgcgacgg

SEQ ID NO: 4630326 - DNA, 25 bp, Homo sapien
cggcccgggtccgctcgcgttgatc

SEQ ID NO: 4630327 - DNA, 25 bp, Homo sapien
cagaggcagcgacccggcccgggtc

SEQ ID NO: 4630328 - DNA, 25 bp, Homo sapien
cctcctcgtggagaaccgcagtttc

SEQ ID NO: 4630329 - DNA, 25 bp, Homo sapien
tgcttgcttgcctcctcgtggagaa

SEQ ID NO: 4630330 - DNA, 25 bp, Homo sapien
ttgcttgcctcctcgtggagaaccg

SEQ ID NO: 4630331 - DNA, 25 bp, Homo sapien
ttgcctcctcgtggagaaccgcagt

SEQ ID NO: 4630332 - DNA, 25 bp, Homo sapien
gcagaagtggttatgtatcttctgc

SEQ ID NO: 4630333 - DNA, 25 bp, Homo sapien
ggggcagaagtggttatgtatcttc

SEQ ID NO: 4630334 - DNA, 25 bp, Homo sapien
ccagcacagacttctgctaaaccca

SEQ ID NO: 4630335 - DNA, 25 bp, Homo sapien
gggcagaagtggttatgtatcttct

SEQ ID NO: 4630336 - DNA, 25 bp, Homo sapien
gctgttgtgtcaactgggccagctg

SEQ ID NO: 4630337 - DNA, 25 bp, Homo sapien
ccagctgttgtgtcaactgggccag

SEQ ID NO: 4630338 - DNA, 25 bp, Homo sapien
ctgggccatcaggttgttcaggtgc

SEQ ID NO: 4630339 - DNA, 25 bp, Homo sapien
ggttgttcaggtgctgctctgtctg

SEQ ID NO: 4630340 - DNA, 25 bp, Homo sapien
ctcccaacctatgtccccattcctc

SEQ ID NO: 4630341 - DNA, 25 bp, Homo sapien
tggctcccaacctatgtccccattc

SEQ ID NO: 4630342 - DNA, 25 bp, Homo sapien
ccacaaattccccaaaaattcacag

SEQ ID NO: 4630343 - DNA, 25 bp, Homo sapien
gaaatgtccactcagtggctcccaa

SEQ ID NO: 4630344 - DNA, 25 bp, Homo sapien
cagcagctcgtggatggtccatagc

SEQ ID NO: 4630345 - DNA, 25 bp, Homo sapien
gatggtccatagcttcatgttcaga

SEQ ID NO: 4630346 - DNA, 25 bp, Homo sapien
gctcgtggatggtccatagcttcat

SEQ ID NO: 4630347 - DNA, 25 bp, Homo sapien
ctatcttgcagcagctcgtggatgg

SEQ ID NO: 4630348 - DNA, 25 bp, Homo sapien
ctccagcagactcgcctcccgagcc

SEQ ID NO: 4630349 - DNA, 25 bp, Homo sapien
cctccagcagactcgcctcccgagc

SEQ ID NO: 4630350 - DNA, 25 bp, Homo sapien
acctccagcagactcgcctcccgag

SEQ ID NO: 4630351 - DNA, 25 bp, Homo sapien
ccagcagactcgcctcccgagcctt

SEQ ID NO: 4630352 - DNA, 25 bp, Homo sapien
tcaggaatgttccagtttcagagac

SEQ ID NO: 4630353 - DNA, 25 bp, Homo sapien
aatgttccagtttcagagactttgt

SEQ ID NO: 4630354 - DNA, 25 bp, Homo sapien
gggagagatcaggaatgttccagtt

SEQ ID NO: 4630355 - DNA, 25 bp, Homo sapien
ctgtgtggggagagatcaggaatgt

SEQ ID NO: 4630356 - DNA, 25 bp, Homo sapien
gtagctaggttccatgtctctgtgc

SEQ ID NO: 4630357 - DNA, 25 bp, Homo sapien
tgactgtcaccaatctcctcctcgt

SEQ ID NO: 4630358 - DNA, 25 bp, Homo sapien
cctcctttaaacagaagtcctcagg

SEQ ID NO: 4630359 - DNA, 25 bp, Homo sapien
ctcccaggaagtagctaggttccat

SEQ ID NO: 4630360 - DNA, 25 bp, Homo sapien
aaggctgtgactggggccctttgcc

SEQ ID NO: 4630361 - DNA, 25 bp, Homo sapien
agactttgttttagtcgaccttcag

SEQ ID NO: 4630362 - DNA, 25 bp, Homo sapien
tgcaccttctccgtagtccccgccc

SEQ ID NO: 4630363 - DNA, 25 bp, Homo sapien
tagtcgaccttcagctgtcgtccct

SEQ ID NO: 4630364 - DNA, 25 bp, Homo sapien
aggatcgaaaaaacacacaggagca

SEQ ID NO: 4630365 - DNA, 25 bp, Homo sapien
gatcgaaaaaacacacaggagcact

SEQ ID NO: 4630366 - DNA, 25 bp, Homo sapien
ctaggatcgaaaaaacacacaggag

SEQ ID NO: 4630367 - DNA, 25 bp, Homo sapien
cgaaaaaacacacaggagcactcca

SEQ ID NO: 4630368 - DNA, 25 bp, Homo sapien
tgctgtcacactggaaggcagcctc

SEQ ID NO: 4630369 - DNA, 25 bp, Homo sapien
atgctggtggcctcaggaatacgag

SEQ ID NO: 4630370 - DNA, 25 bp, Homo sapien
tcaggaatacgaggaaaagagctgg

SEQ ID NO: 4630371 - DNA, 25 bp, Homo sapien
ctgaacgcgggcatgctggtggcct

SEQ ID NO: 4630372 - DNA, 25 bp, Homo sapien
atttttccactggatttgagtaaag

SEQ ID NO: 4630373 - DNA, 25 bp, Homo sapien
catttatttttccactggatttgag

SEQ ID NO: 4630374 - DNA, 25 bp, Homo sapien
tatttttccactggatttgagtaaa

SEQ ID NO: 4630375 - DNA, 25 bp, Homo sapien
tttatttttccactggatttgagta

SEQ ID NO: 4630376 - DNA, 25 bp, Homo sapien
tgcctggcacagatacagattaggt

SEQ ID NO: 4630377 - DNA, 25 bp, Homo sapien
ttagcttcagtgatccagtgcctgg

SEQ ID NO: 4630378 - DNA, 25 bp, Homo sapien
tggcatttggcatgggcccaggaca

SEQ ID NO: 4630379 - DNA, 25 bp, Homo sapien
cattacccggagataaaaaccacag

SEQ ID NO: 4630380 - DNA, 25 bp, Homo sapien
tgcagcattgaatagagaatagctc

SEQ ID NO: 4630381 - DNA, 25 bp, Homo sapien
acattctagtaaggctccattggct

SEQ ID NO: 4630382 - DNA, 25 bp, Homo sapien
tctaggccctacagatgcagcattg

SEQ ID NO: 4630383 - DNA, 25 bp, Homo sapien
tagagaatagctctactgttttgta

SEQ ID NO: 4630384 - DNA, 25 bp, Homo sapien
gctatttacaggtgcgaccctgtta

SEQ ID NO: 4630385 - DNA, 25 bp, Homo sapien
cttaggcaaccaggttgatgcagaa

SEQ ID NO: 4630386 - DNA, 25 bp, Homo sapien
tccacctgggtcagttcaaccatcc

SEQ ID NO: 4630387 - DNA, 25 bp, Homo sapien
cacctgactggtatactacactaca

SEQ ID NO: 4630388 - DNA, 25 bp, Homo sapien
tgtacgggctgtacgtgcattggaa

SEQ ID NO: 4630389 - DNA, 25 bp, Homo sapien
ccagcacacggtgtgtacgggctgt

SEQ ID NO: 4630390 - DNA, 25 bp, Homo sapien
cacacggtgtgtacgggctgtacgt

SEQ ID NO: 4630391 - DNA, 25 bp, Homo sapien
ctgtacgtgcattggaaacgagagc

SEQ ID NO: 4630392 - DNA, 25 bp, Homo sapien
ggcttaacttcaggtagatcctcct

SEQ ID NO: 4630393 - DNA, 25 bp, Homo sapien
acagcagcagttgcacagtgaggcc

SEQ ID NO: 4630394 - DNA, 25 bp, Homo sapien
gtaggtagatcctctaacttcaggg

SEQ ID NO: 4630395 - DNA, 25 bp, Homo sapien
ccaggagcctcaacagtaggtagat

SEQ ID NO: 4630396 - DNA, 25 bp, Homo sapien
gaaccgctcaagcttagagccccaa

SEQ ID NO: 4630397 - DNA, 25 bp, Homo sapien
gatgaaccgctcaagcttagagccc

SEQ ID NO: 4630398 - DNA, 25 bp, Homo sapien
aatgaaaaggatgaaccgctcaagc

SEQ ID NO: 4630399 - DNA, 25 bp, Homo sapien
gaaaaggatgaaccgctcaagctta

SEQ ID NO: 4630400 - DNA, 25 bp, Homo sapien
tccatagcgccaatgactctggtca

SEQ ID NO: 4630401 - DNA, 25 bp, Homo sapien
tagcgccaatgactctggtcatccc

SEQ ID NO: 4630402 - DNA, 25 bp, Homo sapien
catagcgccaatgactctggtcatc

SEQ ID NO: 4630403 - DNA, 25 bp, Homo sapien
ctccatagcgccaatgactctggtc

SEQ ID NO: 4630404 - DNA, 25 bp, Homo sapien
gttgcgcaggcgcagttctgggagc

SEQ ID NO: 4630405 - DNA, 25 bp, Homo sapien
gagctgggggcggatatccaccggg

SEQ ID NO: 4630406 - DNA, 25 bp, Homo sapien
gcgcagttctgggagcggcgggagc

SEQ ID NO: 4630407 - DNA, 25 bp, Homo sapien
tatccaccggggactggaagcggcc

SEQ ID NO: 4630408 - DNA, 25 bp, Homo sapien
agtgtgctccgagcccggacgacct

SEQ ID NO: 4630409 - DNA, 25 bp, Homo sapien
ccttccacagtgtgctccgagcccg

SEQ ID NO: 4630410 - DNA, 25 bp, Homo sapien
ttccacagtgtgctccgagcccgga

SEQ ID NO: 4630411 - DNA, 25 bp, Homo sapien
cacagtgtgctccgagcccggacga

SEQ ID NO: 4630412 - DNA, 25 bp, Homo sapien
aactctggcaaaggcggtgctgagg

SEQ ID NO: 4630413 - DNA, 25 bp, Homo sapien
caaaggcggtgctgaggtgaaccac

SEQ ID NO: 4630414 - DNA, 25 bp, Homo sapien
caaggcctcgtcaactctggcaaag

SEQ ID NO: 4630415 - DNA, 25 bp, Homo sapien
ccccaaggcctcgtcaactctggca

SEQ ID NO: 4630416 - DNA, 25 bp, Homo sapien
tggtggactggttttcaatgacaag

SEQ ID NO: 4630417 - DNA, 25 bp, Homo sapien
aacaagcttggtggactggttttca

SEQ ID NO: 4630418 - DNA, 25 bp, Homo sapien
gcttggtggactggttttcaatgac

SEQ ID NO: 4630419 - DNA, 25 bp, Homo sapien
caacaagcttggtggactggttttc

SEQ ID NO: 4630420 - DNA, 25 bp, Homo sapien
gacagatgagtgcatgtatccaggg

SEQ ID NO: 4630421 - DNA, 25 bp, Homo sapien
gagtgcatgtatccagggccatggc

SEQ ID NO: 4630422 - DNA, 25 bp, Homo sapien
gatgagtgcatgtatccagggccat

SEQ ID NO: 4630423 - DNA, 25 bp, Homo sapien
gccatggctgaaggccggaacatga

SEQ ID NO: 4630424 - DNA, 25 bp, Homo sapien
cgagacagcaactgctcataggcac

SEQ ID NO: 4630425 - DNA, 25 bp, Homo sapien
tccaagcgagacagcaactgctcat

SEQ ID NO: 4630426 - DNA, 25 bp, Homo sapien
cgatttcttccaagcgagacagcaa

SEQ ID NO: 4630427 - DNA, 25 bp, Homo sapien
cttcctcagcgatttcttccaagcg

SEQ ID NO: 4630428 - DNA, 25 bp, Homo sapien
gggtgattctttatgaactaggcca

SEQ ID NO: 4630429 - DNA, 25 bp, Homo sapien
ctgaagctccaaagggtgattcttt

SEQ ID NO: 4630430 - DNA, 25 bp, Homo sapien
tgaactaggccacagagattagtgg

SEQ ID NO: 4630431 - DNA, 25 bp, Homo sapien
ttagtggccagaccaacaaactgac

SEQ ID NO: 4630432 - DNA, 25 bp, Homo sapien
aacacagtccagatgacaccctggg

SEQ ID NO: 4630433 - DNA, 25 bp, Homo sapien
acagggcggtgtagtcagagacccc

SEQ ID NO: 4630434 - DNA, 25 bp, Homo sapien
cagagacccctcatattggaagtag

SEQ ID NO: 4630435 - DNA, 25 bp, Homo sapien
ggcaggagtgcagatatgtccagtc

SEQ ID NO: 4630436 - DNA, 25 bp, Homo sapien
cagctgtagccgagagtcaccaggt

SEQ ID NO: 4630437 - DNA, 25 bp, Homo sapien
tgcgtcgctcggaagttcagctgta

SEQ ID NO: 4630438 - DNA, 25 bp, Homo sapien
gggaaggaggcctcaatcactcgcc

SEQ ID NO: 4630439 - DNA, 25 bp, Homo sapien
caatcactcgcccattcaaaggctg

SEQ ID NO: 4630440 - DNA, 25 bp, Homo sapien
gcagccaggcaggaattcagctgga

SEQ ID NO: 4630441 - DNA, 25 bp, Homo sapien
agcagccaggcaggaattcagctgg

SEQ ID NO: 4630442 - DNA, 25 bp, Homo sapien
cagcagccaggcaggaattcagctg

SEQ ID NO: 4630443 - DNA, 25 bp, Homo sapien
gacaatgggggaatccccaccatga

SEQ ID NO: 4630444 - DNA, 25 bp, Homo sapien
acaatgggggaatccccaccatgat

SEQ ID NO: 4630445 - DNA, 25 bp, Homo sapien
agttctcaggcagcccctagtgcct

SEQ ID NO: 4630446 - DNA, 25 bp, Homo sapien
cacgagaaggggtaagataagcacc

SEQ ID NO: 4630447 - DNA, 25 bp, Homo sapien
ccagccaagggatgagggtggatac

SEQ ID NO: 4630448 - DNA, 25 bp, Homo sapien
gataagcaccgtttttgcttcctaa

SEQ ID NO: 4630449 - DNA, 25 bp, Homo sapien
aggaacgcgacgctggtgacagcaa

SEQ ID NO: 4630450 - DNA, 25 bp, Homo sapien
ggaacgcgacgctggtgacagcaaa

SEQ ID NO: 4630451 - DNA, 25 bp, Homo sapien
aaggaacgcgacgctggtgacagca

SEQ ID NO: 4630452 - DNA, 25 bp, Homo sapien
caggagcagctcatttgcatgcgct

SEQ ID NO: 4630453 - DNA, 25 bp, Homo sapien
tgtgtacacaacaggaaaggctaat

SEQ ID NO: 4630454 - DNA, 25 bp, Homo sapien
cctgaagaaagggtcagtgtaatac

SEQ ID NO: 4630455 - DNA, 25 bp, Homo sapien
catgaagtgactccacaagggtggg

SEQ ID NO: 4630456 - DNA, 25 bp, Homo sapien
aggctccagtctcggctacctctgc

SEQ ID NO: 4630457 - DNA, 25 bp, Homo sapien
taggctccagtctcggctacctctg

SEQ ID NO: 4630458 - DNA, 25 bp, Homo sapien
ctaggctccagtctcggctacctct

SEQ ID NO: 4630459 - DNA, 25 bp, Homo sapien
gaagtggcataatgagcaggacagg

SEQ ID NO: 4630460 - DNA, 25 bp, Homo sapien
gtggcataatgagcaggacaggaca

SEQ ID NO: 4630461 - DNA, 25 bp, Homo sapien
acagttaccggctccccctcagatg

SEQ ID NO: 4630462 - DNA, 25 bp, Homo sapien
ggcataatgagcaggacaggacagt

SEQ ID NO: 4630463 - DNA, 25 bp, Homo sapien
gaggagaacgtcgagattcaccaga

SEQ ID NO: 4630464 - DNA, 25 bp, Homo sapien
gaacgtcgagattcaccagaccttg

SEQ ID NO: 4630465 - DNA, 25 bp, Homo sapien
cgagattcaccagaccttggaccag

SEQ ID NO: 4630466 - DNA, 25 bp, Homo sapien
tgccaaggaggagaacgtcgagatt

SEQ ID NO: 4630467 - DNA, 25 bp, Homo sapien
agcctagggagagcccccatcatgc

SEQ ID NO: 4630468 - DNA, 25 bp, Homo sapien
caggaggagcagaaattgccaacat

SEQ ID NO: 4630469 - DNA, 25 bp, Homo sapien
tgccaacattgcacagccaggctgg

SEQ ID NO: 4630470 - DNA, 25 bp, Homo sapien
aggaactggacaacgcactcaatga

SEQ ID NO: 4630471 - DNA, 25 bp, Homo sapien
gagaaaaccatcgatgacctagaag

SEQ ID NO: 4630472 - DNA, 25 bp, Homo sapien
agttggagaaaaccatcgatgacct

SEQ ID NO: 4630473 - DNA, 25 bp, Homo sapien
ttggagaaaaccatcgatgacctag

SEQ ID NO: 4630474 - DNA, 25 bp, Homo sapien
tggagaaaaccatcgatgacctaga

SEQ ID NO: 4630475 - DNA, 25 bp, Homo sapien
aaggagaacgccatcgaccgcgccg

SEQ ID NO: 4630476 - DNA, 25 bp, Homo sapien
agctggacaaggagaacgccatcga

SEQ ID NO: 4630477 - DNA, 25 bp, Homo sapien
atcgaccgcgccgagcaggccgaag

SEQ ID NO: 4630478 - DNA, 25 bp, Homo sapien
gagcaggccgaagccgacaagaagc

SEQ ID NO: 4630479 - DNA, 25 bp, Homo sapien
gcctgccaccggtgcacccagtccg

SEQ ID NO: 4630480 - DNA, 25 bp, Homo sapien
ggtgcacccagtccgctcacccagc

SEQ ID NO: 4630481 - DNA, 25 bp, Homo sapien
tctgcccctacaaggtttgggccga

SEQ ID NO: 4630482 - DNA, 25 bp, Homo sapien
ccagcccagtccgtccggtcctcac

SEQ ID NO: 4630483 - DNA, 25 bp, Homo sapien
tcatcagctctcttcaccgtttttt

SEQ ID NO: 4630484 - DNA, 25 bp, Homo sapien
agccccaaacaggtcatgctccaat

SEQ ID NO: 4630485 - DNA, 25 bp, Homo sapien
gggctgcagagttataagccccaaa

SEQ ID NO: 4630486 - DNA, 25 bp, Homo sapien
tcaccgttttttgatactatcttcc

SEQ ID NO: 4630487 - DNA, 25 bp, Homo sapien
tggaagaggcaggatagcattcgct

SEQ ID NO: 4630488 - DNA, 25 bp, Homo sapien
tgaccaccggtaagacaggaactgg

SEQ ID NO: 4630489 - DNA, 25 bp, Homo sapien
tactgaaactttcgctgaccaccgg

SEQ ID NO: 4630490 - DNA, 25 bp, Homo sapien
gagatctgactaagctgggccctcc

SEQ ID NO: 4630491 - DNA, 25 bp, Homo sapien
ctgtgtattgattgaagtatgaatc

SEQ ID NO: 4630492 - DNA, 25 bp, Homo sapien
accttctgaaaatgcatagaggaaa

SEQ ID NO: 4630493 - DNA, 25 bp, Homo sapien
aaaagcaaagctactgtgtattgat

SEQ ID NO: 4630494 - DNA, 25 bp, Homo sapien
aagtatgaatcaaacattaggatgt

SEQ ID NO: 4630495 - DNA, 25 bp, Homo sapien
gcttcctaagtgcatgttcatcctt

SEQ ID NO: 4630496 - DNA, 25 bp, Homo sapien
ctcttggttccctgaaatggtgctc

SEQ ID NO: 4630497 - DNA, 25 bp, Homo sapien
tgtttcttggaatgcagagtttggc

SEQ ID NO: 4630498 - DNA, 25 bp, Homo sapien
aatgcagagtttggcgtggctttct

SEQ ID NO: 4630499 - DNA, 25 bp, Homo sapien
aattgcccaacttctttggaatgca

SEQ ID NO: 4630500 - DNA, 25 bp, Homo sapien
gcggttgcggactcagaggccaaat

SEQ ID NO: 4630501 - DNA, 25 bp, Homo sapien
ggtaacagactgagtgttactcccc

SEQ ID NO: 4630502 - DNA, 25 bp, Homo sapien
tccccttgtgggtatctgctctgac

SEQ ID NO: 4630503 - DNA, 25 bp, Homo sapien
gagcccgagggcgacccgagaagcg

SEQ ID NO: 4630504 - DNA, 25 bp, Homo sapien
gttcccaggacggaagtggccgaga

SEQ ID NO: 4630505 - DNA, 25 bp, Homo sapien
gagagagtgtcgaagggagggcgag

SEQ ID NO: 4630506 - DNA, 25 bp, Homo sapien
cgagggcgacccgagaagcggcggg

SEQ ID NO: 4630507 - DNA, 25 bp, Homo sapien
gctttggcggctcccgagcatcgag

SEQ ID NO: 4630508 - DNA, 25 bp, Homo sapien
ggctgccgggctttggcggctcccg

SEQ ID NO: 4630509 - DNA, 25 bp, Homo sapien
tggcggctcccgagcatcgagaacg

SEQ ID NO: 4630510 - DNA, 25 bp, Homo sapien
ccgggctttggcggctcccgagcat

SEQ ID NO: 4630511 - DNA, 25 bp, Homo sapien
tagcctgaaagggaactcgggcgtc

SEQ ID NO: 4630512 - DNA, 25 bp, Homo sapien
gtaggcctcgggcacctatccactg

SEQ ID NO: 4630513 - DNA, 25 bp, Homo sapien
ggcactgtgggacttggagttccct

SEQ ID NO: 4630514 - DNA, 25 bp, Homo sapien
ccactgtccctctacggccgggatt

SEQ ID NO: 4630515 - DNA, 25 bp, Homo sapien
agtggggccctcacggcctcatcgg

SEQ ID NO: 4630516 - DNA, 25 bp, Homo sapien
atcgggtgccgtccccaaatctcca

SEQ ID NO: 4630517 - DNA, 25 bp, Homo sapien
caaatctccactttcctctagcagg

SEQ ID NO: 4630518 - DNA, 25 bp, Homo sapien
gaaggccagcaggtcttggtcacca

SEQ ID NO: 4630519 - DNA, 25 bp, Homo sapien
gctgagaatgttcaacgacgctggg

SEQ ID NO: 4630520 - DNA, 25 bp, Homo sapien
gggactcagcagggagcacagcaaa

SEQ ID NO: 4630521 - DNA, 25 bp, Homo sapien
catagagacagtttcccgtgggagg

SEQ ID NO: 4630522 - DNA, 25 bp, Homo sapien
gaggagctgagaatgttcaacgacg

SEQ ID NO: 4630523 - DNA, 25 bp, Homo sapien
tgtcctccccgcaaacttatttcag

SEQ ID NO: 4630524 - DNA, 25 bp, Homo sapien
aaagggaaagtatgaatagccaggc

SEQ ID NO: 4630525 - DNA, 25 bp, Homo sapien
gaaagtatgaatagccaggcccatg

SEQ ID NO: 4630526 - DNA, 25 bp, Homo sapien
aatagccaggcccatgaaccctgtc

SEQ ID NO: 4630527 - DNA, 25 bp, Homo sapien
tgggtcccctcttttctacagctct

SEQ ID NO: 4630528 - DNA, 25 bp, Homo sapien
gctcctccatatgctgtggagtcat

SEQ ID NO: 4630529 - DNA, 25 bp, Homo sapien
cctccatatgctgtggagtcatctg

SEQ ID NO: 4630530 - DNA, 25 bp, Homo sapien
tgtggagtcatctgggtcccctctt

SEQ ID NO: 4630531 - DNA, 25 bp, Homo sapien
tcaggcagaataagcccctccttct

SEQ ID NO: 4630532 - DNA, 25 bp, Homo sapien
tcatctgtcagtactagcctagcaa

SEQ ID NO: 4630533 - DNA, 25 bp, Homo sapien
aagtgtctcaggcagaataagcccc

SEQ ID NO: 4630534 - DNA, 25 bp, Homo sapien
tccttctccaatagactcttctcct

SEQ ID NO: 4630535 - DNA, 25 bp, Homo sapien
tgcggctctcttgagcagatctttt

SEQ ID NO: 4630536 - DNA, 25 bp, Homo sapien
aacatacaccttctttttcctgcgg

SEQ ID NO: 4630537 - DNA, 25 bp, Homo sapien
gatcttttatttcgaatcttcctcc

SEQ ID NO: 4630538 - DNA, 25 bp, Homo sapien
tccgcacacgtttcagaatttgttc

SEQ ID NO: 4630539 - DNA, 25 bp, Homo sapien
taatacttacaacagagtccctctc

SEQ ID NO: 4630540 - DNA, 25 bp, Homo sapien
tatggcctgtatcctcccttcaaaa

SEQ ID NO: 4630541 - DNA, 25 bp, Homo sapien
caaaaacctaatacttacaacagag

SEQ ID NO: 4630542 - DNA, 25 bp, Homo sapien
ataacaaagatacggggatatggcc

SEQ ID NO: 4630543 - DNA, 25 bp, Homo sapien
aagctccatattctgggctgtgtat

SEQ ID NO: 4630544 - DNA, 25 bp, Homo sapien
ggcctggagtttcctcagttgatct

SEQ ID NO: 4630545 - DNA, 25 bp, Homo sapien
ctggagtttcctcagttgatctaga

SEQ ID NO: 4630546 - DNA, 25 bp, Homo sapien
gtttgatatctcaatcaccatggcc

SEQ ID NO: 4630547 - DNA, 25 bp, Homo sapien
gctggttttgtttgatatctcaatc

SEQ ID NO: 4630548 - DNA, 25 bp, Homo sapien
atgaagaagggctctggattgccct

SEQ ID NO: 4630549 - DNA, 25 bp, Homo sapien
tgaagaagggctctggattgccctg

SEQ ID NO: 4630550 - DNA, 25 bp, Homo sapien
aagaagggctctggattgccctgtc

SEQ ID NO: 4630551 - DNA, 25 bp, Homo sapien
gaagaagggctctggattgccctgt

SEQ ID NO: 4630552 - DNA, 25 bp, Homo sapien
gcaggctcccccttgtgtcagagga

SEQ ID NO: 4630553 - DNA, 25 bp, Homo sapien
ggaggcagaaggagactagtaggac

SEQ ID NO: 4630554 - DNA, 25 bp, Homo sapien
gtcagaggagtacatagcaggtaca

SEQ ID NO: 4630555 - DNA, 25 bp, Homo sapien
agtacatagcaggtacaaggaggag

SEQ ID NO: 4630556 - DNA, 25 bp, Homo sapien
acagtctgagccgtccaaccactgg

SEQ ID NO: 4630557 - DNA, 25 bp, Homo sapien
ggagcctgaggcatgtaatgcagca

SEQ ID NO: 4630558 - DNA, 25 bp, Homo sapien
cactggtgtgtgctgtctttcggca

SEQ ID NO: 4630559 - DNA, 25 bp, Homo sapien
tcctcactggggagggcacgaagct

SEQ ID NO: 4630560 - DNA, 25 bp, Homo sapien
atcctcccttccttgtgagatttgc

SEQ ID NO: 4630561 - DNA, 25 bp, Homo sapien
gccatcctcccttccttgtgagatt

SEQ ID NO: 4630562 - DNA, 25 bp, Homo sapien
ctaccagtaggaagccatcctccct

SEQ ID NO: 4630563 - DNA, 25 bp, Homo sapien
taccagtaggaagccatcctccctt

SEQ ID NO: 4630564 - DNA, 25 bp, Homo sapien
ttgagccctcagtcgtcctgacagg

SEQ ID NO: 4630565 - DNA, 25 bp, Homo sapien
gaggtcagttgatttccccaggtac

SEQ ID NO: 4630566 - DNA, 25 bp, Homo sapien
cattaagtgtggtgtgtttgagccc

SEQ ID NO: 4630567 - DNA, 25 bp, Homo sapien
catggtgtgacagacacatgggtac

SEQ ID NO: 4630568 - DNA, 25 bp, Homo sapien
tggcagctaccatgatccaagaggt

SEQ ID NO: 4630569 - DNA, 25 bp, Homo sapien
tgaaggctgctaccgtaccgtgtgg

SEQ ID NO: 4630570 - DNA, 25 bp, Homo sapien
tatctttgagctgaacgtccaggcc

SEQ ID NO: 4630571 - DNA, 25 bp, Homo sapien
tgtttggaccaaaggaagccatggc

SEQ ID NO: 4630572 - DNA, 25 bp, Homo sapien
gaagcctatgagagactgctgtgga

SEQ ID NO: 4630573 - DNA, 25 bp, Homo sapien
caggccgctattacaactatgacag

SEQ ID NO: 4630574 - DNA, 25 bp, Homo sapien
taagtagtcttaaggcagctgagag

SEQ ID NO: 4630575 - DNA, 25 bp, Homo sapien
actatgacagcagctctcggcctca

SEQ ID NO: 4630576 - DNA, 25 bp, Homo sapien
tctattacacggcatgggagcagct

SEQ ID NO: 4630577 - DNA, 25 bp, Homo sapien
tgtagggctcaagaaagaatgactc

SEQ ID NO: 4630578 - DNA, 25 bp, Homo sapien
ccacaggccccaggttagcgggtag

SEQ ID NO: 4630579 - DNA, 25 bp, Homo sapien
tgcagaccagacctatgatggatgg

SEQ ID NO: 4630580 - DNA, 25 bp, Homo sapien
ggtacctaggtcttcaacatcttgg

SEQ ID NO: 4630581 - DNA, 25 bp, Homo sapien
cctcggtacctaggtcttcaacatc

SEQ ID NO: 4630582 - DNA, 25 bp, Homo sapien
ttcctcggtacctaggtcttcaaca

SEQ ID NO: 4630583 - DNA, 25 bp, Homo sapien
tcggtacctaggtcttcaacatctt

SEQ ID NO: 4630584 - DNA, 25 bp, Homo sapien
gggatgcacatgcagtggccagtgt

SEQ ID NO: 4630585 - DNA, 25 bp, Homo sapien
cctcacgggtgatcaaaacttcctg

SEQ ID NO: 4630586 - DNA, 25 bp, Homo sapien
tatcgggactattacctcacgggtg

SEQ ID NO: 4630587 - DNA, 25 bp, Homo sapien
tttgtgctgcaggtttatcgggact

SEQ ID NO: 4630588 - DNA, 25 bp, Homo sapien
gctgcaggtttatcgggactattac

SEQ ID NO: 4630589 - DNA, 25 bp, Homo sapien
taatccatgatactgctgattggaa

SEQ ID NO: 4630590 - DNA, 25 bp, Homo sapien
atttaatccatgatactgctgattg

SEQ ID NO: 4630591 - DNA, 25 bp, Homo sapien
tttaatccatgatactgctgattgg

SEQ ID NO: 4630592 - DNA, 25 bp, Homo sapien
ttaatccatgatactgctgattgga

SEQ ID NO: 4630593 - DNA, 25 bp, Homo sapien
tttgctttctaccatgccctctatc

SEQ ID NO: 4630594 - DNA, 25 bp, Homo sapien
aggacctgcctctgctagaaactgc

SEQ ID NO: 4630595 - DNA, 25 bp, Homo sapien
cccgagcctggactgtctatcagct

SEQ ID NO: 4630596 - DNA, 25 bp, Homo sapien
tcttgccccatgactaccaggtgag

SEQ ID NO: 4630597 - DNA, 25 bp, Homo sapien
tgccagaagtatgtgtcctgcctct

SEQ ID NO: 4630598 - DNA, 25 bp, Homo sapien
tgacaatacccttcctggttcacgt

SEQ ID NO: 4630599 - DNA, 25 bp, Homo sapien
catgcttaacatgtgctagacactg

SEQ ID NO: 4630600 - DNA, 25 bp, Homo sapien
tgaccgcccctttagagttgcctag

SEQ ID NO: 4630601 - DNA, 25 bp, Homo sapien
gcttagatctctagccttcttccct

SEQ ID NO: 4630602 - DNA, 25 bp, Homo sapien
ttctctcccaggcttagatctctag

SEQ ID NO: 4630603 - DNA, 25 bp, Homo sapien
tcaccctgattgaggaaccttcacc

SEQ ID NO: 4630604 - DNA, 25 bp, Homo sapien
gacacgtagtacaaggttcctcacc

SEQ ID NO: 4630605 - DNA, 25 bp, Homo sapien
ggacctacagagacaaccgaaggag

SEQ ID NO: 4630606 - DNA, 25 bp, Homo sapien
ccggcgcccgcatctggaataggct

SEQ ID NO: 4630607 - DNA, 25 bp, Homo sapien
gatacttagtatccgagggctcggg

SEQ ID NO: 4630608 - DNA, 25 bp, Homo sapien
ctttggccgggcgagctaatcgtcg

SEQ ID NO: 4630609 - DNA, 25 bp, Homo sapien
ccagaccggaaagggctcgggtcat

SEQ ID NO: 4630610 - DNA, 25 bp, Homo sapien
ccggcaggccagaccggaaagggct

SEQ ID NO: 4630611 - DNA, 25 bp, Homo sapien
aagcgcccggcaggccagaccggaa

SEQ ID NO: 4630612 - DNA, 25 bp, Homo sapien
ggaagcgcccggcaggccagaccgg

SEQ ID NO: 4630613 - DNA, 25 bp, Homo sapien
tagggatcggcacccctaggcctca

SEQ ID NO: 4630614 - DNA, 25 bp, Homo sapien
tcagggacctggctaggtacgcggc

SEQ ID NO: 4630615 - DNA, 25 bp, Homo sapien
gacactagggatcggcacccctagg

SEQ ID NO: 4630616 - DNA, 25 bp, Homo sapien
ctcgcatagtcgacactagggatcg

SEQ ID NO: 4630617 - DNA, 25 bp, Homo sapien
ttgacagggaggggcgttgcggtga

SEQ ID NO: 4630618 - DNA, 25 bp, Homo sapien
tgacagggaggggcgttgcggtgag

SEQ ID NO: 4630619 - DNA, 25 bp, Homo sapien
gaaacaaggcggggcggaggtcagc

SEQ ID NO: 4630620 - DNA, 25 bp, Homo sapien
aaacaaggcggggcggaggtcagca

SEQ ID NO: 4630621 - DNA, 25 bp, Homo sapien
aacaaggcggggcggaggtcagcac

SEQ ID NO: 4630622 - DNA, 25 bp, Homo sapien
tggtgacggtcactacacactccag

SEQ ID NO: 4630623 - DNA, 25 bp, Homo sapien
gcagaagtggccgtgggcggaaggg

SEQ ID NO: 4630624 - DNA, 25 bp, Homo sapien
ctggatgcagaagtggccgtgggcg

SEQ ID NO: 4630625 - DNA, 25 bp, Homo sapien
gggttggtgacggtcactacacact

SEQ ID NO: 4630626 - DNA, 25 bp, Homo sapien
tggctgtcgggctggacatctggct

SEQ ID NO: 4630627 - DNA, 25 bp, Homo sapien
gaggcagtgctactcgactctcact

SEQ ID NO: 4630628 - DNA, 25 bp, Homo sapien
tggcatggaactggcagtggatttg

SEQ ID NO: 4630629 - DNA, 25 bp, Homo sapien
tggacatctggctgactagagtcag

SEQ ID NO: 4630630 - DNA, 25 bp, Homo sapien
cctcaggtcacagaatagaattttc

SEQ ID NO: 4630631 - DNA, 25 bp, Homo sapien
cagaatagaattttcggtggagtag

SEQ ID NO: 4630632 - DNA, 25 bp, Homo sapien
ttggactctccaggatcaagcctca

SEQ ID NO: 4630633 - DNA, 25 bp, Homo sapien
ttcggtggagtagaaaggatacact

SEQ ID NO: 4630634 - DNA, 25 bp, Homo sapien
acttagaaggcaattcagggatggg

SEQ ID NO: 4630635 - DNA, 25 bp, Homo sapien
tggttgggaagtagttgtcaggaca

SEQ ID NO: 4630636 - DNA, 25 bp, Homo sapien
caggagacttagaaggcaattcagg

SEQ ID NO: 4630637 - DNA, 25 bp, Homo sapien
cctccaggagacttagaaggcaatt

SEQ ID NO: 4630638 - DNA, 25 bp, Homo sapien
ttgactgactgaccccgaaaggagg

SEQ ID NO: 4630639 - DNA, 25 bp, Homo sapien
gagttgacacgctggcagccaatgg

SEQ ID NO: 4630640 - DNA, 25 bp, Homo sapien
gccaatggtcagtttgtagacgtac

SEQ ID NO: 4630641 - DNA, 25 bp, Homo sapien
agaaccctcagagggactctgagta

SEQ ID NO: 4630642 - DNA, 25 bp, Homo sapien
tcatcctggggaaaccggacatcct

SEQ ID NO: 4630643 - DNA, 25 bp, Homo sapien
atcctggggaaaccggacatcctga

SEQ ID NO: 4630644 - DNA, 25 bp, Homo sapien
tcctggggaaaccggacatcctgaa

SEQ ID NO: 4630645 - DNA, 25 bp, Homo sapien
ctcatcctggggaaaccggacatcc

SEQ ID NO: 4630646 - DNA, 25 bp, Homo sapien
ggatgtggcagccattaggcgttcc

SEQ ID NO: 4630647 - DNA, 25 bp, Homo sapien
cagctagccatgaatctttcttccc

SEQ ID NO: 4630648 - DNA, 25 bp, Homo sapien
tggcagccattaggcgttccccagc

SEQ ID NO: 4630649 - DNA, 25 bp, Homo sapien
tcagctagccatgaatctttcttcc

SEQ ID NO: 4630650 - DNA, 25 bp, Homo sapien
tgaagatgccaaacgtcccaacttt

SEQ ID NO: 4630651 - DNA, 25 bp, Homo sapien
tttccctcggccatcactgatattg

SEQ ID NO: 4630652 - DNA, 25 bp, Homo sapien
acgtcctcgccaagtctgtacacag

SEQ ID NO: 4630653 - DNA, 25 bp, Homo sapien
tgcaaacaagctacggttccttccc

SEQ ID NO: 4630654 - DNA, 25 bp, Homo sapien
gtactcaggctgtacacgctcctcg

SEQ ID NO: 4630655 - DNA, 25 bp, Homo sapien
cgctggtactcaggctgtacacgct

SEQ ID NO: 4630656 - DNA, 25 bp, Homo sapien
ggctgtacacgctcctcggtctgta

SEQ ID NO: 4630657 - DNA, 25 bp, Homo sapien
tcgccgctggtactcaggctgtaca

SEQ ID NO: 4630658 - DNA, 25 bp, Homo sapien
tgccgggcgtgagtcacatgtgaca

SEQ ID NO: 4630659 - DNA, 25 bp, Homo sapien
tagttgtatgtaggcaggattcctg

SEQ ID NO: 4630660 - DNA, 25 bp, Homo sapien
ggttctagttgtatgtaggcaggat

SEQ ID NO: 4630661 - DNA, 25 bp, Homo sapien
gccgggcgtgagtcacatgtgacac

SEQ ID NO: 4630662 - DNA, 25 bp, Homo sapien
tgtctacaggtacttgctcaggtcc

SEQ ID NO: 4630663 - DNA, 25 bp, Homo sapien
tcgggacgttacaaattcaaaatgc

SEQ ID NO: 4630664 - DNA, 25 bp, Homo sapien
aaaatgcaatctccacttcaaggac

SEQ ID NO: 4630665 - DNA, 25 bp, Homo sapien
taggagtaccaatcctggttctcgg

SEQ ID NO: 4630666 - DNA, 25 bp, Homo sapien
tggggcagcatatgaggccagggtg

SEQ ID NO: 4630667 - DNA, 25 bp, Homo sapien
ggggcagcatatgaggccagggtgg

SEQ ID NO: 4630668 - DNA, 25 bp, Homo sapien
gggcagcatatgaggccagggtggg

SEQ ID NO: 4630669 - DNA, 25 bp, Homo sapien
ggtgcaaaaatctgaccctcggctg

SEQ ID NO: 4630670 - DNA, 25 bp, Homo sapien
aaagtgggtcccattagagtccagg

SEQ ID NO: 4630671 - DNA, 25 bp, Homo sapien
gtatccggaaggaactagcaccagg

SEQ ID NO: 4630672 - DNA, 25 bp, Homo sapien
gacacgtgagtgaccaaagatggcc

SEQ ID NO: 4630673 - DNA, 25 bp, Homo sapien
cccaggagtctacagcaagtgctac

SEQ ID NO: 4630674 - DNA, 25 bp, Homo sapien
gatgatcccgtgtcaaaatacccag

SEQ ID NO: 4630675 - DNA, 25 bp, Homo sapien
cattcagaagtcaatacaagggcca

SEQ ID NO: 4630676 - DNA, 25 bp, Homo sapien
tggcaatcctctgaaacggaaaggg

SEQ ID NO: 4630677 - DNA, 25 bp, Homo sapien
gggggccggaatgctctcacttcct

SEQ ID NO: 4630678 - DNA, 25 bp, Homo sapien
gctcagcccagcctctagctttcca

SEQ ID NO: 4630679 - DNA, 25 bp, Homo sapien
ttcccaagcgtgtagtgcgcgccag

SEQ ID NO: 4630680 - DNA, 25 bp, Homo sapien
agcaggcacgcatgcgggctcgacc

SEQ ID NO: 4630681 - DNA, 25 bp, Homo sapien
gaagcccactaagtgaccctctgct

SEQ ID NO: 4630682 - DNA, 25 bp, Homo sapien
tcactgtctacgtcagcctctggac

SEQ ID NO: 4630683 - DNA, 25 bp, Homo sapien
tgtgttcagtgtccgtttcgcgccc

SEQ ID NO: 4630684 - DNA, 25 bp, Homo sapien
gcccgtagcgacaccacgacagaag

SEQ ID NO: 4630685 - DNA, 25 bp, Homo sapien
gacagtaatccaagacgcagacaac

SEQ ID NO: 4630686 - DNA, 25 bp, Homo sapien
gacgcagacaaccttgcttttaagc

SEQ ID NO: 4630687 - DNA, 25 bp, Homo sapien
aagccatccgttacacagagaccag

SEQ ID NO: 4630688 - DNA, 25 bp, Homo sapien
tttggcaaaggctgaatggcagaca

SEQ ID NO: 4630689 - DNA, 25 bp, Homo sapien
taaagggcaggttagagggctacac

SEQ ID NO: 4630690 - DNA, 25 bp, Homo sapien
atctgagagcctcacttttggtttt

SEQ ID NO: 4630691 - DNA, 25 bp, Homo sapien
tgaataccatattaccaatctgaga

SEQ ID NO: 4630692 - DNA, 25 bp, Homo sapien
cagtgaggggcaaatggcacaaaag

SEQ ID NO: 4630693 - DNA, 25 bp, Homo sapien
taaagtaatcacctttggcccaaca

SEQ ID NO: 4630694 - DNA, 25 bp, Homo sapien
taaggatcatggcagaattcgtctc

SEQ ID NO: 4630695 - DNA, 25 bp, Homo sapien
tttgggaccaaaggcaatgcagagt

SEQ ID NO: 4630696 - DNA, 25 bp, Homo sapien
ggctaaaacagcacgggagagtgca

SEQ ID NO: 4630697 - DNA, 25 bp, Homo sapien
ggatattctgctctcccaacaatgg

SEQ ID NO: 4630698 - DNA, 25 bp, Homo sapien
tacacagtttaggtcacaatgcaga

SEQ ID NO: 4630699 - DNA, 25 bp, Homo sapien
cagatgctaagcatcctacgatgca

SEQ ID NO: 4630700 - DNA, 25 bp, Homo sapien
gagacttatgcgagatcccctgaaa

SEQ ID NO: 4630701 - DNA, 25 bp, Homo sapien
gaatataccatggaggcagcctgct

SEQ ID NO: 4630702 - DNA, 25 bp, Homo sapien
tatgacagaaaaagggcgaattgac

SEQ ID NO: 4630703 - DNA, 25 bp, Homo sapien
cagggaaatctcaggacgaaaacaa

SEQ ID NO: 4630704 - DNA, 25 bp, Homo sapien
cataataggatggatttaggctctc

SEQ ID NO: 4630705 - DNA, 25 bp, Homo sapien
tcattatagagattaagcagcccat

SEQ ID NO: 4630706 - DNA, 25 bp, Homo sapien
gtagctggccaacaaatcattatag

SEQ ID NO: 4630707 - DNA, 25 bp, Homo sapien
tccaatccacaggagttaaagagtg

SEQ ID NO: 4630708 - DNA, 25 bp, Homo sapien
cattagccttctgaaacataccgga

SEQ ID NO: 4630709 - DNA, 25 bp, Homo sapien
actccaagggagcaaggacattgtc

SEQ ID NO: 4630710 - DNA, 25 bp, Homo sapien
ctttgtgacctggtgtaagggaaga

SEQ ID NO: 4630711 - DNA, 25 bp, Homo sapien
taagcatgcgatcaaaatggatcat

SEQ ID NO: 4630712 - DNA, 25 bp, Homo sapien
gcctgactcagagtaggtaatctat

SEQ ID NO: 4630713 - DNA, 25 bp, Homo sapien
gagttaatccataaccatgccgtca

SEQ ID NO: 4630714 - DNA, 25 bp, Homo sapien
aatatccagctgatgtctccccgtg

SEQ ID NO: 4630715 - DNA, 25 bp, Homo sapien
taatagctcatactcatagtcatcc

SEQ ID NO: 4630716 - DNA, 25 bp, Homo sapien
caggctctagtcctcagatttctgc

SEQ ID NO: 4630717 - DNA, 25 bp, Homo sapien
gactcagtccgatatggcttaaaac

SEQ ID NO: 4630718 - DNA, 25 bp, Homo sapien
cagggatagatttcgtgacggataa

SEQ ID NO: 4630719 - DNA, 25 bp, Homo sapien
tgcagaactcatcttaagccatggc

SEQ ID NO: 4630720 - DNA, 25 bp, Homo sapien
taaaactccagtctcaggtccaatg

SEQ ID NO: 4630721 - DNA, 25 bp, Homo sapien
ttgtttcatagatggccaaagattc

SEQ ID NO: 4630722 - DNA, 25 bp, Homo sapien
tgttttttagacaaacaggtatcat

SEQ ID NO: 4630723 - DNA, 25 bp, Homo sapien
cagctttgtgaaaatacagtccaaa

SEQ ID NO: 4630724 - DNA, 25 bp, Homo sapien
ggtatcatattctaagggccagaaa

SEQ ID NO: 4630725 - DNA, 25 bp, Homo sapien
agaacttcggttatgtatatatccc

SEQ ID NO: 4630726 - DNA, 25 bp, Homo sapien
atgtttgagggaaagctgaaaatat

SEQ ID NO: 4630727 - DNA, 25 bp, Homo sapien
tgagaacttcggttatgtatatatc

SEQ ID NO: 4630728 - DNA, 25 bp, Homo sapien
cttcggttatgtatatatcccacta

SEQ ID NO: 4630729 - DNA, 25 bp, Homo sapien
gatttttaagcaactacacattgtt

SEQ ID NO: 4630730 - DNA, 25 bp, Homo sapien
gacaacatgagaaatactttagacc

SEQ ID NO: 4630731 - DNA, 25 bp, Homo sapien
tacagaatggcagggctaagaggat

SEQ ID NO: 4630732 - DNA, 25 bp, Homo sapien
caaaagaatgacgagacaacatgag

SEQ ID NO: 4630733 - DNA, 25 bp, Homo sapien
gaaagccgaatgatacagcccttac

SEQ ID NO: 4630734 - DNA, 25 bp, Homo sapien
ttgaacaccggctgcctagcacaag

SEQ ID NO: 4630735 - DNA, 25 bp, Homo sapien
caggccgtccctaacaatgttcttg

SEQ ID NO: 4630736 - DNA, 25 bp, Homo sapien
tgcctcaagcccagtagagatggaa

SEQ ID NO: 4630737 - DNA, 25 bp, Homo sapien
ggagtgggctaccagcctagggcaa

SEQ ID NO: 4630738 - DNA, 25 bp, Homo sapien
aggaggagtaggctaggtaggctgg

SEQ ID NO: 4630739 - DNA, 25 bp, Homo sapien
aggctaggtaggctgggatgcagaa

SEQ ID NO: 4630740 - DNA, 25 bp, Homo sapien
gggcgggcaaggagtgggctaccag

SEQ ID NO: 4630741 - DNA, 25 bp, Homo sapien
ccaccgcccccagaacttggggctg

SEQ ID NO: 4630742 - DNA, 25 bp, Homo sapien
gccaccaacagcagaagtgatggca

SEQ ID NO: 4630743 - DNA, 25 bp, Homo sapien
caccaacagcagaagtgatggcagc

SEQ ID NO: 4630744 - DNA, 25 bp, Homo sapien
caacagcagaagtgatggcagcgcc

SEQ ID NO: 4630745 - DNA, 25 bp, Homo sapien
acagcagaagtgatggcagcgccat

SEQ ID NO: 4630746 - DNA, 25 bp, Homo sapien
gcccaggcatagctcaggttgtgtt

SEQ ID NO: 4630747 - DNA, 25 bp, Homo sapien
acagcgggtcccacccgtggccagg

SEQ ID NO: 4630748 - DNA, 25 bp, Homo sapien
ctccacagctagtgccacagcgggt

SEQ ID NO: 4630749 - DNA, 25 bp, Homo sapien
ctgacaaaccgcaggtccacgggca

SEQ ID NO: 4630750 - DNA, 25 bp, Homo sapien
tggctctcgggcatacacctggtgc

SEQ ID NO: 4630751 - DNA, 25 bp, Homo sapien
atccaggtacagcaaggcagcacgg

SEQ ID NO: 4630752 - DNA, 25 bp, Homo sapien
gaagtgcccgtgtagtgtcaccaca

SEQ ID NO: 4630753 - DNA, 25 bp, Homo sapien
gcagcacgggcagtccaattgaagt

SEQ ID NO: 4630754 - DNA, 25 bp, Homo sapien
gcctgttcccgggtgcgattgtcct

SEQ ID NO: 4630755 - DNA, 25 bp, Homo sapien
cattggtcagattctccctctgggc

SEQ ID NO: 4630756 - DNA, 25 bp, Homo sapien
agaagacataatccccattggtcag

SEQ ID NO: 4630757 - DNA, 25 bp, Homo sapien
tccagagggccgcagatatacacaa

SEQ ID NO: 4630758 - DNA, 25 bp, Homo sapien
ccttcagatttggctcaaatgatac

SEQ ID NO: 4630759 - DNA, 25 bp, Homo sapien
tatcagcagacgattctggaattcc

SEQ ID NO: 4630760 - DNA, 25 bp, Homo sapien
gggttctcggtacgtgatcaccaat

SEQ ID NO: 4630761 - DNA, 25 bp, Homo sapien
gtcttcccgggctcttatcagcaga

SEQ ID NO: 4630762 - DNA, 25 bp, Homo sapien
gaattcctgatactcaggatttggg

SEQ ID NO: 4630763 - DNA, 25 bp, Homo sapien
cctgcatcttttccacaattcgaag

SEQ ID NO: 4630764 - DNA, 25 bp, Homo sapien
acaattcgaagtccatcctcccggg

SEQ ID NO: 4630765 - DNA, 25 bp, Homo sapien
tcagcatatagcaggatcccatcat

SEQ ID NO: 4630766 - DNA, 25 bp, Homo sapien
tattgtctcattcaggacttcagca

SEQ ID NO: 4630767 - DNA, 25 bp, Homo sapien
ctgaaagtccccagaatccaggtct

SEQ ID NO: 4630768 - DNA, 25 bp, Homo sapien
ttgtccatgacaaccagcccagtta

SEQ ID NO: 4630769 - DNA, 25 bp, Homo sapien
cattgttcttgtccatgacaaccag

SEQ ID NO: 4630770 - DNA, 25 bp, Homo sapien
gacaaagtcagtctctcggtcattg

SEQ ID NO: 4630771 - DNA, 25 bp, Homo sapien
taaggaagcaaaaagctgggcccac

SEQ ID NO: 4630772 - DNA, 25 bp, Homo sapien
ctgtaaggaagcaaaaagctgggcc

SEQ ID NO: 4630773 - DNA, 25 bp, Homo sapien
tgtaaggaagcaaaaagctgggccc

SEQ ID NO: 4630774 - DNA, 25 bp, Homo sapien
ggaagcaaaaagctgggcccacagg

SEQ ID NO: 4630775 - DNA, 25 bp, Homo sapien
ggatgggtcgtccaagtcaaaggca

SEQ ID NO: 4630776 - DNA, 25 bp, Homo sapien
ataggccgtcccgtccaccaaatct

SEQ ID NO: 4630777 - DNA, 25 bp, Homo sapien
ttttatcacaggatgggtcgtccaa

SEQ ID NO: 4630778 - DNA, 25 bp, Homo sapien
ttgtccgagggaggagcccccttca

SEQ ID NO: 4630779 - DNA, 25 bp, Homo sapien
cacaattgccagggttgaaagtgga

SEQ ID NO: 4630780 - DNA, 25 bp, Homo sapien
aaacaccaaacatgatgaaggtgat

SEQ ID NO: 4630781 - DNA, 25 bp, Homo sapien
acaattgccagggttgaaagtggag

SEQ ID NO: 4630782 - DNA, 25 bp, Homo sapien
gaaacaccaaacatgatgaaggtga

SEQ ID NO: 4630783 - DNA, 25 bp, Homo sapien
aacagcagggttgcaggggcttccc

SEQ ID NO: 4630784 - DNA, 25 bp, Homo sapien
ccccaagccaacagcagggttgcag

SEQ ID NO: 4630785 - DNA, 25 bp, Homo sapien
gctcctgaagctgcaactgttacac

SEQ ID NO: 4630786 - DNA, 25 bp, Homo sapien
agctcctgaagctgcaactgttaca

SEQ ID NO: 4630787 - DNA, 25 bp, Homo sapien
acacctcagttgactggcaagccga

SEQ ID NO: 4630788 - DNA, 25 bp, Homo sapien
cctcagttgactggcaagccgaatc

SEQ ID NO: 4630789 - DNA, 25 bp, Homo sapien
gactgcacacctcagttgactggca

SEQ ID NO: 4630790 - DNA, 25 bp, Homo sapien
ctgtaaggactgcacacctcagttg

SEQ ID NO: 4630791 - DNA, 25 bp, Homo sapien
gataacgctctgagttgccaaactg

SEQ ID NO: 4630792 - DNA, 25 bp, Homo sapien
cagcgacagtgtgaggcgactgcct

SEQ ID NO: 4630793 - DNA, 25 bp, Homo sapien
gaatacgccacaacatgctagccag

SEQ ID NO: 4630794 - DNA, 25 bp, Homo sapien
gaggcgactgcctgcacctttgtga

SEQ ID NO: 4630795 - DNA, 25 bp, Homo sapien
gggctgtcatgagcgagccgtaact

SEQ ID NO: 4630796 - DNA, 25 bp, Homo sapien
tgaagtgaccggtgttggcaaagat

SEQ ID NO: 4630797 - DNA, 25 bp, Homo sapien
ttgaagtgaccggtgttggcaaaga

SEQ ID NO: 4630798 - DNA, 25 bp, Homo sapien
atgagcgagccgtaactggatcccc

SEQ ID NO: 4630799 - DNA, 25 bp, Homo sapien
tgccgggtcagctcaatgcgcttct

SEQ ID NO: 4630800 - DNA, 25 bp, Homo sapien
attcacatgtttgatggcgacaaca

SEQ ID NO: 4630801 - DNA, 25 bp, Homo sapien
cacatgtttgatggcgacaacattt

SEQ ID NO: 4630802 - DNA, 25 bp, Homo sapien
cagctcaatgcgcttcttattcaca

SEQ ID NO: 4630803 - DNA, 25 bp, Homo sapien
gcagaaaaaaacaatgggaaggata

SEQ ID NO: 4630804 - DNA, 25 bp, Homo sapien
ctggcagaaaaaaacaatgggaagg

SEQ ID NO: 4630805 - DNA, 25 bp, Homo sapien
tggcagaaaaaaacaatgggaagga

SEQ ID NO: 4630806 - DNA, 25 bp, Homo sapien
ctgtaaactcccacgaggacagtat

SEQ ID NO: 4630807 - DNA, 25 bp, Homo sapien
caatgcaaatgttgggagggtctat

SEQ ID NO: 4630808 - DNA, 25 bp, Homo sapien
cgccaatgaagcgagtgagatggtt

SEQ ID NO: 4630809 - DNA, 25 bp, Homo sapien
gagggtctatgcaggcgccaatgaa

SEQ ID NO: 4630810 - DNA, 25 bp, Homo sapien
tcattaatgagtgaataacgaaaca

SEQ ID NO: 4630811 - DNA, 25 bp, Homo sapien
caaggtcattaatgagtgaataacg

SEQ ID NO: 4630812 - DNA, 25 bp, Homo sapien
tgagtgaataacgaaacatccagtc

SEQ ID NO: 4630813 - DNA, 25 bp, Homo sapien
gaataacgaaacatccagtccaagt

SEQ ID NO: 4630814 - DNA, 25 bp, Homo sapien
gactcccatgcgatgaaataatgct

SEQ ID NO: 4630815 - DNA, 25 bp, Homo sapien
tcagcagttgatcggaagctggcca

SEQ ID NO: 4630816 - DNA, 25 bp, Homo sapien
tgctgttgtggagaaaggccatgcc

SEQ ID NO: 4630817 - DNA, 25 bp, Homo sapien
gctggccaggccatagtctgtgatt

SEQ ID NO: 4630818 - DNA, 25 bp, Homo sapien
cgaagtgctatctcctgcaggatga

SEQ ID NO: 4630819 - DNA, 25 bp, Homo sapien
tagaaaggaccactgcgaagtgcta

SEQ ID NO: 4630820 - DNA, 25 bp, Homo sapien
tgatcccaaagctatagacgtcagc

SEQ ID NO: 4630821 - DNA, 25 bp, Homo sapien
tgaggtccaggccctccaagtagaa

SEQ ID NO: 4630822 - DNA, 25 bp, Homo sapien
taatctgtccaaagtctggccgctc

SEQ ID NO: 4630823 - DNA, 25 bp, Homo sapien
tgttaaagcgccgaatgaagccctt

SEQ ID NO: 4630824 - DNA, 25 bp, Homo sapien
aatgcttggccggaaatatggccgc

SEQ ID NO: 4630825 - DNA, 25 bp, Homo sapien
cagttgggtccggtcaatgcttggc

SEQ ID NO: 4630826 - DNA, 25 bp, Homo sapien
gataggcctgtgtgcgttcctccac

SEQ ID NO: 4630827 - DNA, 25 bp, Homo sapien
gaggttgtccaatatgctggtgcca

SEQ ID NO: 4630828 - DNA, 25 bp, Homo sapien
catactgttccatgcgcagcaggag

SEQ ID NO: 4630829 - DNA, 25 bp, Homo sapien
taggatttggtagagcagagcttca

SEQ ID NO: 4630830 - DNA, 25 bp, Homo sapien
tgctgacaatgctgtgaagccaaca

SEQ ID NO: 4630831 - DNA, 25 bp, Homo sapien
ctctgctgacaatgctgtgaagcca

SEQ ID NO: 4630832 - DNA, 25 bp, Homo sapien
gcctgtacagtctctccccgtttta

SEQ ID NO: 4630833 - DNA, 25 bp, Homo sapien
tgtcaaaggcctcagcctgtacagt

SEQ ID NO: 4630834 - DNA, 25 bp, Homo sapien
tatacaggtcattaagaagtgtcac

SEQ ID NO: 4630835 - DNA, 25 bp, Homo sapien
acaggtcattaagaagtgtcactac

SEQ ID NO: 4630836 - DNA, 25 bp, Homo sapien
atcaaagcaggtatacaggtcatta

SEQ ID NO: 4630837 - DNA, 25 bp, Homo sapien
gcaggtatacaggtcattaagaagt

SEQ ID NO: 4630838 - DNA, 25 bp, Homo sapien
tctatttatatccatggggatggga

SEQ ID NO: 4630839 - DNA, 25 bp, Homo sapien
gggagacaagcttgacaccatcatt

SEQ ID NO: 4630840 - DNA, 25 bp, Homo sapien
gattaaaaggtcacctctatttata

SEQ ID NO: 4630841 - DNA, 25 bp, Homo sapien
agtagagggagacaagcttgacacc

SEQ ID NO: 4630842 - DNA, 25 bp, Homo sapien
caatttctggtgcatggcgttgacc

SEQ ID NO: 4630843 - DNA, 25 bp, Homo sapien
gcggatgcgaaaggaagaaactgca

SEQ ID NO: 4630844 - DNA, 25 bp, Homo sapien
catctagtaatgctagggccatacg

SEQ ID NO: 4630845 - DNA, 25 bp, Homo sapien
cagtatggacccctatgcgtagcct

SEQ ID NO: 4630846 - DNA, 25 bp, Homo sapien
gggaaaggtggagactagggctgga

SEQ ID NO: 4630847 - DNA, 25 bp, Homo sapien
gggctggagtgagagtcagccttac

SEQ ID NO: 4630848 - DNA, 25 bp, Homo sapien
tagggctggagtgagagtcagcctt

SEQ ID NO: 4630849 - DNA, 25 bp, Homo sapien
agggctggagtgagagtcagcctta

SEQ ID NO: 4630850 - DNA, 25 bp, Homo sapien
ctttgagaagaaacaggttgggaga

SEQ ID NO: 4630851 - DNA, 25 bp, Homo sapien
ttgagaagaaacaggttgggagagt

SEQ ID NO: 4630852 - DNA, 25 bp, Homo sapien
tttgagaagaaacaggttgggagag

SEQ ID NO: 4630853 - DNA, 25 bp, Homo sapien
ccaacaaccccagcacagactggcc

SEQ ID NO: 4630854 - DNA, 25 bp, Homo sapien
ggccaacaaccccagcacagactgg

SEQ ID NO: 4630855 - DNA, 25 bp, Homo sapien
tcaggccaacaaccccagcacagac

SEQ ID NO: 4630856 - DNA, 25 bp, Homo sapien
aggccaacaaccccagcacagactg

SEQ ID NO: 4630857 - DNA, 25 bp, Homo sapien
ttagactccattcgagaagcagtgt

SEQ ID NO: 4630858 - DNA, 25 bp, Homo sapien
gtgttcactgtgtctccaaaaagac

SEQ ID NO: 4630859 - DNA, 25 bp, Homo sapien
gactccattcgagaagcagtgttca

SEQ ID NO: 4630860 - DNA, 25 bp, Homo sapien
tccaaaaagacaataacggggcatc

SEQ ID NO: 4630861 - DNA, 25 bp, Homo sapien
gtagaggagacatggatcttcagcg

SEQ ID NO: 4630862 - DNA, 25 bp, Homo sapien
atctagggcatccttggtggtagag

SEQ ID NO: 4630863 - DNA, 25 bp, Homo sapien
gaagcatcctagctcatctagggca

SEQ ID NO: 4630864 - DNA, 25 bp, Homo sapien
ccccgaagctctagctggaagcatc

SEQ ID NO: 4630865 - DNA, 25 bp, Homo sapien
gcttcgatgttagtccctttgtctc

SEQ ID NO: 4630866 - DNA, 25 bp, Homo sapien
tgattcccataatcactttcaccct

SEQ ID NO: 4630867 - DNA, 25 bp, Homo sapien
ctggaagtgggagagtggacatgat

SEQ ID NO: 4630868 - DNA, 25 bp, Homo sapien
ctctctttccctatgattcccataa

SEQ ID NO: 4630869 - DNA, 25 bp, Homo sapien
gctctcctaagagccagtatgttcg

SEQ ID NO: 4630870 - DNA, 25 bp, Homo sapien
gagccagtatgttcgcatctttcct

SEQ ID NO: 4630871 - DNA, 25 bp, Homo sapien
tcctaagagccagtatgttcgcatc

SEQ ID NO: 4630872 - DNA, 25 bp, Homo sapien
ctttccgctctcctaagagccagta

SEQ ID NO: 4630873 - DNA, 25 bp, Homo sapien
tccatttctggtgtgtgcagacatg

SEQ ID NO: 4630874 - DNA, 25 bp, Homo sapien
gctacaacttccatataaggtaggt

SEQ ID NO: 4630875 - DNA, 25 bp, Homo sapien
gctgcagagggctacaacttccata

SEQ ID NO: 4630876 - DNA, 25 bp, Homo sapien
atggtggccattgcccacccaggta

SEQ ID NO: 4630877 - DNA, 25 bp, Homo sapien
tgtcctcgcgttggtagaagcagcc

SEQ ID NO: 4630878 - DNA, 25 bp, Homo sapien
agaacgagctggtgctgattcccgc

SEQ ID NO: 4630879 - DNA, 25 bp, Homo sapien
tcacacggactagaagacgaaacca

SEQ ID NO: 4630880 - DNA, 25 bp, Homo sapien
ctgcacttgccagaagcggctcgga

SEQ ID NO: 4630881 - DNA, 25 bp, Homo sapien
ccagggtctgtagtcagaaggccag

SEQ ID NO: 4630882 - DNA, 25 bp, Homo sapien
ctgtgctccgagaagccatcctcag

SEQ ID NO: 4630883 - DNA, 25 bp, Homo sapien
ccttttgcagagatggctgtgctcc

SEQ ID NO: 4630884 - DNA, 25 bp, Homo sapien
ggagcagactatgtaccttttgcag

SEQ ID NO: 4630885 - DNA, 25 bp, Homo sapien
cccttcccagatagcagactttcag

SEQ ID NO: 4630886 - DNA, 25 bp, Homo sapien
gatagcagactttcaggcaaggcat

SEQ ID NO: 4630887 - DNA, 25 bp, Homo sapien
gaagttctgcagatatccaagtccc

SEQ ID NO: 4630888 - DNA, 25 bp, Homo sapien
cccaggtcatgccagagctcctttg

SEQ ID NO: 4630889 - DNA, 25 bp, Homo sapien
gatctccgcagatcctacccaaaca

SEQ ID NO: 4630890 - DNA, 25 bp, Homo sapien
gactcccccggacgtacgcacagat

SEQ ID NO: 4630891 - DNA, 25 bp, Homo sapien
cacagagcccgaggtcccctcagat

SEQ ID NO: 4630892 - DNA, 25 bp, Homo sapien
tcaaaggaaccctatcctcacaatc

SEQ ID NO: 4630893 - DNA, 25 bp, Homo sapien
ctccgggctgcgctgaaccggcgat

SEQ ID NO: 4630894 - DNA, 25 bp, Homo sapien
gcgactccgggctgcgctgaaccgg

SEQ ID NO: 4630895 - DNA, 25 bp, Homo sapien
ggctgcgctgaaccggcgataacca

SEQ ID NO: 4630896 - DNA, 25 bp, Homo sapien
gagttcaggcctgggcgactccggg

SEQ ID NO: 4630897 - DNA, 25 bp, Homo sapien
gtggcctccggtgtcctcgcgggcc

SEQ ID NO: 4630898 - DNA, 25 bp, Homo sapien
ggtggcctccggtgtcctcgcgggc

SEQ ID NO: 4630899 - DNA, 25 bp, Homo sapien
caaaggctgagataatgggttgggc

SEQ ID NO: 4630900 - DNA, 25 bp, Homo sapien
tgtgacagggggtggaacgagggcc

SEQ ID NO: 4630901 - DNA, 25 bp, Homo sapien
agatgagggcaaaggctgagataat

SEQ ID NO: 4630902 - DNA, 25 bp, Homo sapien
gccttaagcaaacactgggaatggg

SEQ ID NO: 4630903 - DNA, 25 bp, Homo sapien
ggcagagtatgagagatagggggga

SEQ ID NO: 4630904 - DNA, 25 bp, Homo sapien
cctgggccaaggacagagaacagca

SEQ ID NO: 4630905 - DNA, 25 bp, Homo sapien
caacagcagcaatagggctggcggc

SEQ ID NO: 4630906 - DNA, 25 bp, Homo sapien
ggctggcggcagctgaaacccagac

SEQ ID NO: 4630907 - DNA, 25 bp, Homo sapien
caaggacagagaacagcaacagcag

SEQ ID NO: 4630908 - DNA, 25 bp, Homo sapien
acagccaggaatgtgtcctcaggaa

SEQ ID NO: 4630909 - DNA, 25 bp, Homo sapien
catggaagtggaagagctcggtgct

SEQ ID NO: 4630910 - DNA, 25 bp, Homo sapien
gcaaaggagcggaaaggactcagct

SEQ ID NO: 4630911 - DNA, 25 bp, Homo sapien
gagtaatcagtcaggaaaaggcctc

SEQ ID NO: 4630912 - DNA, 25 bp, Homo sapien
ctgaggtgcggttgggcagtgtcca

SEQ ID NO: 4630913 - DNA, 25 bp, Homo sapien
cagctgagggtcagtgagaaaaccc

SEQ ID NO: 4630914 - DNA, 25 bp, Homo sapien
tgacgttaaagatgcctgaggtgcg

SEQ ID NO: 4630915 - DNA, 25 bp, Homo sapien
gtgggcagccaagaaccagtcccca

SEQ ID NO: 4630916 - DNA, 25 bp, Homo sapien
ctgacacaaggctggtgtgccagag

SEQ ID NO: 4630917 - DNA, 25 bp, Homo sapien
acacaaggctggtgtgccagagagc

SEQ ID NO: 4630918 - DNA, 25 bp, Homo sapien
caagttgcctcctccagatcatggc

SEQ ID NO: 4630919 - DNA, 25 bp, Homo sapien
tgacctgctggcctttagccatgcc

SEQ ID NO: 4630920 - DNA, 25 bp, Homo sapien
cgtggccatcccactctgacaacag

SEQ ID NO: 4630921 - DNA, 25 bp, Homo sapien
ctcctccagtgaacaggaataggag

SEQ ID NO: 4630922 - DNA, 25 bp, Homo sapien
aggccccatgcacgtggccatccca

SEQ ID NO: 4630923 - DNA, 25 bp, Homo sapien
aacaggaataggagacctgtctggc

SEQ ID NO: 4630924 - DNA, 25 bp, Homo sapien
atgttgtaccaggtgcatggattgc

SEQ ID NO: 4630925 - DNA, 25 bp, Homo sapien
ttgaatgttgtaccaggtgcatgga

SEQ ID NO: 4630926 - DNA, 25 bp, Homo sapien
cttttgaatgttgtaccaggtgcat

SEQ ID NO: 4630927 - DNA, 25 bp, Homo sapien
gaatgttgtaccaggtgcatggatt

SEQ ID NO: 4630928 - DNA, 25 bp, Homo sapien
aggaaccagcacagcgacgtccagc

SEQ ID NO: 4630929 - DNA, 25 bp, Homo sapien
gacgtccagcaaacgccggacaatc

SEQ ID NO: 4630930 - DNA, 25 bp, Homo sapien
tgtacagggctgagcgattgtgtgg

SEQ ID NO: 4630931 - DNA, 25 bp, Homo sapien
ggtactgacactcatcctggagacc

SEQ ID NO: 4630932 - DNA, 25 bp, Homo sapien
caggtgtggggagtctttgacttac

SEQ ID NO: 4630933 - DNA, 25 bp, Homo sapien
ctgtaagtgaagctgggcacaaaga

SEQ ID NO: 4630934 - DNA, 25 bp, Homo sapien
tgtaagtgaagctgggcacaaagac

SEQ ID NO: 4630935 - DNA, 25 bp, Homo sapien
gtaagtgaagctgggcacaaagacc

SEQ ID NO: 4630936 - DNA, 25 bp, Homo sapien
tttccacacgcacgtagacccagtg

SEQ ID NO: 4630937 - DNA, 25 bp, Homo sapien
ttgcaaccgcacacacagctggaag

SEQ ID NO: 4630938 - DNA, 25 bp, Homo sapien
gaagcggatggtcctaccagggccc

SEQ ID NO: 4630939 - DNA, 25 bp, Homo sapien
cagggccccgggatgatgtttccac

SEQ ID NO: 4630940 - DNA, 25 bp, Homo sapien
cggagcaggccgggctgtgggcact

SEQ ID NO: 4630941 - DNA, 25 bp, Homo sapien
gctccagggaccagggctcggagca

SEQ ID NO: 4630942 - DNA, 25 bp, Homo sapien
gctcggagcaggccgggctgtgggc

SEQ ID NO: 4630943 - DNA, 25 bp, Homo sapien
gcagctccagggaccagggctcgga

SEQ ID NO: 4630944 - DNA, 25 bp, Homo sapien
ccctccgcaggggttccaagggatg

SEQ ID NO: 4630945 - DNA, 25 bp, Homo sapien
ctcgttgcgcagagtcgggcgcact

SEQ ID NO: 4630946 - DNA, 25 bp, Homo sapien
aaggtgtccagctcgttgcgcagag

SEQ ID NO: 4630947 - DNA, 25 bp, Homo sapien
caacagcctcatggcgaacacggct

SEQ ID NO: 4630948 - DNA, 25 bp, Homo sapien
taaagtctgtccctaaggtaggcca

SEQ ID NO: 4630949 - DNA, 25 bp, Homo sapien
taaggctgtcctctaattcagggtc

SEQ ID NO: 4630950 - DNA, 25 bp, Homo sapien
tcagggtctacggtttcaaggtcga

SEQ ID NO: 4630951 - DNA, 25 bp, Homo sapien
tagaaagttctaagccgtgtcccat

SEQ ID NO: 4630952 - DNA, 25 bp, Homo sapien
caaacaccgtcacgttttcctggcg

SEQ ID NO: 4630953 - DNA, 25 bp, Homo sapien
tcgtgagtcaagcatccaaacaccg

SEQ ID NO: 4630954 - DNA, 25 bp, Homo sapien
gtcaagcatccaaacaccgtcacgt

SEQ ID NO: 4630955 - DNA, 25 bp, Homo sapien
tcacgttttcctggcgcacggagct

SEQ ID NO: 4630956 - DNA, 25 bp, Homo sapien
ctttggaacaggtcactgctgcatc

SEQ ID NO: 4630957 - DNA, 25 bp, Homo sapien
tgctgcatcccccaggctcaagggc

SEQ ID NO: 4630958 - DNA, 25 bp, Homo sapien
ttggaacaggtcactgctgcatccc

SEQ ID NO: 4630959 - DNA, 25 bp, Homo sapien
ctgcatcccccaggctcaagggcac

SEQ ID NO: 4630960 - DNA, 25 bp, Homo sapien
caggaaccaggtccccgtctgcggg

SEQ ID NO: 4630961 - DNA, 25 bp, Homo sapien
aaccaggtccccgtctgcgggaatg

SEQ ID NO: 4630962 - DNA, 25 bp, Homo sapien
ggattcgcagcctggcaaccctggt

SEQ ID NO: 4630963 - DNA, 25 bp, Homo sapien
tgcgggaatgggattcgcagcctgg

SEQ ID NO: 4630964 - DNA, 25 bp, Homo sapien
agcagcttgcactggccgtagggcc

SEQ ID NO: 4630965 - DNA, 25 bp, Homo sapien
cggccttgcactcgcaggctgcgta

SEQ ID NO: 4630966 - DNA, 25 bp, Homo sapien
gtagggcccgcagtcgtccacgcat

SEQ ID NO: 4630967 - DNA, 25 bp, Homo sapien
tacagataattgtgtgtgcgcagca

SEQ ID NO: 4630968 - DNA, 25 bp, Homo sapien
gcttccagcacatatcgactccgaa

SEQ ID NO: 4630969 - DNA, 25 bp, Homo sapien
catatcgactccgaatggccaggac

SEQ ID NO: 4630970 - DNA, 25 bp, Homo sapien
aatccataggtgagcgcatctgcac

SEQ ID NO: 4630971 - DNA, 25 bp, Homo sapien
aaacatgaggttgctcaggcagagc

SEQ ID NO: 4630972 - DNA, 25 bp, Homo sapien
cacccagtgataagatgcagacacc

SEQ ID NO: 4630973 - DNA, 25 bp, Homo sapien
acagacattcccaaaccctcggaga

SEQ ID NO: 4630974 - DNA, 25 bp, Homo sapien
tgtctgtagaagacacagtgaaggc

SEQ ID NO: 4630975 - DNA, 25 bp, Homo sapien
cggagaacgtggtggaaatacagac

SEQ ID NO: 4630976 - DNA, 25 bp, Homo sapien
ctttattaagttgcaaacagttttg

SEQ ID NO: 4630977 - DNA, 25 bp, Homo sapien
gaactgcagcacatcgtagtccatg

SEQ ID NO: 4630978 - DNA, 25 bp, Homo sapien
tgatgcagaaaaccacgatgcctgg

SEQ ID NO: 4630979 - DNA, 25 bp, Homo sapien
cacacggacattaaggagcccagga

SEQ ID NO: 4630980 - DNA, 25 bp, Homo sapien
ttgaccacgggctgtaaacgagcca

SEQ ID NO: 4630981 - DNA, 25 bp, Homo sapien
cccagggcgaagagactgggtccaa

SEQ ID NO: 4630982 - DNA, 25 bp, Homo sapien
atggacagcagcatagctcccagca

SEQ ID NO: 4630983 - DNA, 25 bp, Homo sapien
ccatgtcggtcaagctgcagagcca

SEQ ID NO: 4630984 - DNA, 25 bp, Homo sapien
tccagagtccatgtcggtcaagctg

SEQ ID NO: 4630985 - DNA, 25 bp, Homo sapien
tgcaataaggctgccagggcacaag

SEQ ID NO: 4630986 - DNA, 25 bp, Homo sapien
caaaagcataaagcaggacggcact

SEQ ID NO: 4630987 - DNA, 25 bp, Homo sapien
cgttgatgcatagctggtaaccaca

SEQ ID NO: 4630988 - DNA, 25 bp, Homo sapien
tgtgaatgtagaagtagttgtcccg

SEQ ID NO: 4630989 - DNA, 25 bp, Homo sapien
cagactccacctgtatcaaacgagg

SEQ ID NO: 4630990 - DNA, 25 bp, Homo sapien
ggaagcattcatatcccctcagggc

SEQ ID NO: 4630991 - DNA, 25 bp, Homo sapien
tgatcagtgagaatgctctcccaac

SEQ ID NO: 4630992 - DNA, 25 bp, Homo sapien
gatactgcaaatcgggctcaatagg

SEQ ID NO: 4630993 - DNA, 25 bp, Homo sapien
caccccaggccaagatagatttgca

SEQ ID NO: 4630994 - DNA, 25 bp, Homo sapien
tgggtttcaaaagcctaggtcctga

SEQ ID NO: 4630995 - DNA, 25 bp, Homo sapien
tgccccatggaagagacgtgattgc

SEQ ID NO: 4630996 - DNA, 25 bp, Homo sapien
cagtgacctggctctatacgtctta

SEQ ID NO: 4630997 - DNA, 25 bp, Homo sapien
tgacagtgtcaacccaagagctatg

SEQ ID NO: 4630998 - DNA, 25 bp, Homo sapien
cactatcgtgtgtctggatggcaaa

SEQ ID NO: 4630999 - DNA, 25 bp, Homo sapien
gctgctgccaagttaatcgtcccaa

SEQ ID NO: 4631000 - DNA, 25 bp, Homo sapien
tacacgagcactgtaacctggaggt

SEQ ID NO: 4631001 - DNA, 25 bp, Homo sapien
tcctgtgaccagtaactctattgag

SEQ ID NO: 4631002 - DNA, 25 bp, Homo sapien
gaaatcaagcttacacatcctatgg

SEQ ID NO: 4631003 - DNA, 25 bp, Homo sapien
gaatggtccatgattccttaaggag

SEQ ID NO: 4631004 - DNA, 25 bp, Homo sapien
taagttgcttggctttcatgaccac

SEQ ID NO: 4631005 - DNA, 25 bp, Homo sapien
tacagacatttaggccatggccagt

SEQ ID NO: 4631006 - DNA, 25 bp, Homo sapien
tgcttctcaagaggcgtaaaaccgg

SEQ ID NO: 4631007 - DNA, 25 bp, Homo sapien
tagcttgcaaagtaaccctgggtct

SEQ ID NO: 4631008 - DNA, 25 bp, Homo sapien
gggtgagccctgcaactcgacaaat

SEQ ID NO: 4631009 - DNA, 25 bp, Homo sapien
ggtatgtggaagaccaccttgcccg

SEQ ID NO: 4631010 - DNA, 25 bp, Homo sapien
taggaaatactggaaaacgatgacc

SEQ ID NO: 4631011 - DNA, 25 bp, Homo sapien
tcctttgggtgacagggttacagat

SEQ ID NO: 4631012 - DNA, 25 bp, Homo sapien
accttgcccgcagtagacgacagat

SEQ ID NO: 4631013 - DNA, 25 bp, Homo sapien
ggaaatatgaatcaagggccttcaa

SEQ ID NO: 4631014 - DNA, 25 bp, Homo sapien
taataaagggcacaaagatttggac

SEQ ID NO: 4631015 - DNA, 25 bp, Homo sapien
acacaatgtccactgttaggtacca

SEQ ID NO: 4631016 - DNA, 25 bp, Homo sapien
ggtcactgattagataccattctct

SEQ ID NO: 4631017 - DNA, 25 bp, Homo sapien
cttggagtccattgttcaagggacg

SEQ ID NO: 4631018 - DNA, 25 bp, Homo sapien
cattgttcaagggacggaaacatcc

SEQ ID NO: 4631019 - DNA, 25 bp, Homo sapien
gagtccattgttcaagggacggaaa

SEQ ID NO: 4631020 - DNA, 25 bp, Homo sapien
tccattgttcaagggacggaaacat

SEQ ID NO: 4631021 - DNA, 25 bp, Homo sapien
tcagtcactgaactttgttgtctct

SEQ ID NO: 4631022 - DNA, 25 bp, Homo sapien
aatgtgggcgaagcctgtttggact

SEQ ID NO: 4631023 - DNA, 25 bp, Homo sapien
aactttgttgtctctgctgcgggct

SEQ ID NO: 4631024 - DNA, 25 bp, Homo sapien
gccctctcagtcactgaactttgtt

SEQ ID NO: 4631025 - DNA, 25 bp, Homo sapien
gcagctgtacggttcctctccacgt

SEQ ID NO: 4631026 - DNA, 25 bp, Homo sapien
agcagcacctgtgatccatcccacg

SEQ ID NO: 4631027 - DNA, 25 bp, Homo sapien
catgagatacgtggccaggatgacg

SEQ ID NO: 4631028 - DNA, 25 bp, Homo sapien
cccctgcagctgtacggttcctctc

SEQ ID NO: 4631029 - DNA, 25 bp, Homo sapien
tcagcgagcgtggcggggatggtgg

SEQ ID NO: 4631030 - DNA, 25 bp, Homo sapien
tggaggtggtgaggggtgtggcggg

SEQ ID NO: 4631031 - DNA, 25 bp, Homo sapien
gcgtggcggggatggtggcggtggg

SEQ ID NO: 4631032 - DNA, 25 bp, Homo sapien
gagcgtggcggggatggtggcggtg

SEQ ID NO: 4631033 - DNA, 25 bp, Homo sapien
caaaaggacattctcagggcctctc

SEQ ID NO: 4631034 - DNA, 25 bp, Homo sapien
ttctctgctgccatagtacactggg

SEQ ID NO: 4631035 - DNA, 25 bp, Homo sapien
ttattttcttggactaaggcaccga

SEQ ID NO: 4631036 - DNA, 25 bp, Homo sapien
accgatgaattgactgtgcagcctc

SEQ ID NO: 4631037 - DNA, 25 bp, Homo sapien
tgaaaaaagtacaggggcagagccc

SEQ ID NO: 4631038 - DNA, 25 bp, Homo sapien
tgggcagggttttgtgcaaaccctg

SEQ ID NO: 4631039 - DNA, 25 bp, Homo sapien
gactgtcccgcggaaggccagagcc

SEQ ID NO: 4631040 - DNA, 25 bp, Homo sapien
cttcccatcagagagggaggtccca

SEQ ID NO: 4631041 - DNA, 25 bp, Homo sapien
ttcacagagcatattccaacgagcc

SEQ ID NO: 4631042 - DNA, 25 bp, Homo sapien
ctgatccaattaccaaggaaactgg

SEQ ID NO: 4631043 - DNA, 25 bp, Homo sapien
caggatggctgaaaacgcaaggctt

SEQ ID NO: 4631044 - DNA, 25 bp, Homo sapien
caggcttcggcacgtgggcatctct

SEQ ID NO: 4631045 - DNA, 25 bp, Homo sapien
gaccacggcgttcctccctgggtgc

SEQ ID NO: 4631046 - DNA, 25 bp, Homo sapien
ggcgttcctccctgggtgctgcagc

SEQ ID NO: 4631047 - DNA, 25 bp, Homo sapien
cagggaccacggcgttcctccctgg

SEQ ID NO: 4631048 - DNA, 25 bp, Homo sapien
acggcgttcctccctgggtgctgca

SEQ ID NO: 4631049 - DNA, 25 bp, Homo sapien
tgggctccccaaaggccagccctgg

SEQ ID NO: 4631050 - DNA, 25 bp, Homo sapien
ccccaaaggccagccctggctgtac

SEQ ID NO: 4631051 - DNA, 25 bp, Homo sapien
tccccaaaggccagccctggctgta

SEQ ID NO: 4631052 - DNA, 25 bp, Homo sapien
gctccccaaaggccagccctggctg

SEQ ID NO: 4631053 - DNA, 25 bp, Homo sapien
agcgctggccctccggtgacgccta

SEQ ID NO: 4631054 - DNA, 25 bp, Homo sapien
acagagacagcctagccagcgctgg

SEQ ID NO: 4631055 - DNA, 25 bp, Homo sapien
cacagagacagcctagccagcgctg

SEQ ID NO: 4631056 - DNA, 25 bp, Homo sapien
gccctccggtgacgcctacagattt

SEQ ID NO: 4631057 - DNA, 25 bp, Homo sapien
acaggaggctcttcgcgatcgcagg

SEQ ID NO: 4631058 - DNA, 25 bp, Homo sapien
cttctagaagaagcactgtcctgga

SEQ ID NO: 4631059 - DNA, 25 bp, Homo sapien
tctgagtccctgggtcgctcctgct

SEQ ID NO: 4631060 - DNA, 25 bp, Homo sapien
tccgtctcctaagaagatgctgctc

SEQ ID NO: 4631061 - DNA, 25 bp, Homo sapien
ctgagcaaccttaggtcctctcgga

SEQ ID NO: 4631062 - DNA, 25 bp, Homo sapien
cttaggtcctctcggagccttcgct

SEQ ID NO: 4631063 - DNA, 25 bp, Homo sapien
gcccactgagcaaccttaggtcctc

SEQ ID NO: 4631064 - DNA, 25 bp, Homo sapien
gcaaccttaggtcctctcggagcct

SEQ ID NO: 4631065 - DNA, 25 bp, Homo sapien
tgatggccacagtcaccacgaacag

SEQ ID NO: 4631066 - DNA, 25 bp, Homo sapien
ctggcgaaacgtggccaccgtgaag

SEQ ID NO: 4631067 - DNA, 25 bp, Homo sapien
cacatgaaggtccagaagtcctggg

SEQ ID NO: 4631068 - DNA, 25 bp, Homo sapien
gcatggcgaacaggccccgtgaaga

SEQ ID NO: 4631069 - DNA, 25 bp, Homo sapien
gaaccagcatcataggcacaccgtt

SEQ ID NO: 4631070 - DNA, 25 bp, Homo sapien
ttaggagcaagtaagaagcggtttc

SEQ ID NO: 4631071 - DNA, 25 bp, Homo sapien
tgggctgtcccaataacaaggatcc

SEQ ID NO: 4631072 - DNA, 25 bp, Homo sapien
gagtctgacccatcagcacagcaaa

SEQ ID NO: 4631073 - DNA, 25 bp, Homo sapien
ccaggaggctcacaattttgcaccc

SEQ ID NO: 4631074 - DNA, 25 bp, Homo sapien
gcaacacatgcttgttcaaataagg

SEQ ID NO: 4631075 - DNA, 25 bp, Homo sapien
gacattttcctaggttcatacaaac

SEQ ID NO: 4631076 - DNA, 25 bp, Homo sapien
tacgcatatgtgtaatttaggaggt

SEQ ID NO: 4631077 - DNA, 25 bp, Homo sapien
tgttgaacttagttagtctaaggat

SEQ ID NO: 4631078 - DNA, 25 bp, Homo sapien
tctggtgcggcctctctgaaaaatc

SEQ ID NO: 4631079 - DNA, 25 bp, Homo sapien
taggagacaagtagacccctgtgca

SEQ ID NO: 4631080 - DNA, 25 bp, Homo sapien
gatcaatgaaaatgagcggtggcca

SEQ ID NO: 4631081 - DNA, 25 bp, Homo sapien
gatcacgatcagtcaagcaaatagg

SEQ ID NO: 4631082 - DNA, 25 bp, Homo sapien
ttggcagttagcacaggtgactctg

SEQ ID NO: 4631083 - DNA, 25 bp, Homo sapien
caaagtccggtttgatgacttggca

SEQ ID NO: 4631084 - DNA, 25 bp, Homo sapien
gctttatggataaaagagggctgaa

SEQ ID NO: 4631085 - DNA, 25 bp, Homo sapien
agtattccagtgaagtgggcagaga

SEQ ID NO: 4631086 - DNA, 25 bp, Homo sapien
taggggaccctggacacgatgccca

SEQ ID NO: 4631087 - DNA, 25 bp, Homo sapien
tcctaggggaccctggacacgatgc

SEQ ID NO: 4631088 - DNA, 25 bp, Homo sapien
aaggggctgtgaactttgctcccct

SEQ ID NO: 4631089 - DNA, 25 bp, Homo sapien
gaccctggacacgatgcccaaaggg

SEQ ID NO: 4631090 - DNA, 25 bp, Homo sapien
ctgaatggagatgatttcaaatggg

SEQ ID NO: 4631091 - DNA, 25 bp, Homo sapien
ggtggccagtcactgggttccatct

SEQ ID NO: 4631092 - DNA, 25 bp, Homo sapien
tggccagtcactgggttccatcttg

SEQ ID NO: 4631093 - DNA, 25 bp, Homo sapien
gccagtcactgggttccatcttgtt

SEQ ID NO: 4631094 - DNA, 25 bp, Homo sapien
gtcactgggttccatcttgttttct

SEQ ID NO: 4631095 - DNA, 25 bp, Homo sapien
ttctccttctcccttgcatgtgtcc

SEQ ID NO: 4631096 - DNA, 25 bp, Homo sapien
gacttctccttctcccttgcatgtg

SEQ ID NO: 4631097 - DNA, 25 bp, Homo sapien
ctccttctcccttgcatgtgtccat

SEQ ID NO: 4631098 - DNA, 25 bp, Homo sapien
ttcctactggggacttctccttctc

SEQ ID NO: 4631099 - DNA, 25 bp, Homo sapien
gacaatctaggctcaaagtgcccta

SEQ ID NO: 4631100 - DNA, 25 bp, Homo sapien
gccctaggtgggttcataaagatta

SEQ ID NO: 4631101 - DNA, 25 bp, Homo sapien
tagtgacctggccatactgagagcc

SEQ ID NO: 4631102 - DNA, 25 bp, Homo sapien
taaatgtagccggtaagaccctgac

SEQ ID NO: 4631103 - DNA, 25 bp, Homo sapien
tcactgccagtagctgggaaatcca

SEQ ID NO: 4631104 - DNA, 25 bp, Homo sapien
actgccagtagctgggaaatccatg

SEQ ID NO: 4631105 - DNA, 25 bp, Homo sapien
ctgggaaatccatggttggaattca

SEQ ID NO: 4631106 - DNA, 25 bp, Homo sapien
ccatggttggaattcaaaaacagcc

SEQ ID NO: 4631107 - DNA, 25 bp, Homo sapien
caggctgtacaagtttggtaccagc

SEQ ID NO: 4631108 - DNA, 25 bp, Homo sapien
agacaaagggggacaggcgtgtcac

SEQ ID NO: 4631109 - DNA, 25 bp, Homo sapien
tacaggctgtacaagtttggtacca

SEQ ID NO: 4631110 - DNA, 25 bp, Homo sapien
tgtacaagtttggtaccagcatctg

SEQ ID NO: 4631111 - DNA, 25 bp, Homo sapien
tgtaacagggatacttggggggcca

SEQ ID NO: 4631112 - DNA, 25 bp, Homo sapien
ggctgaccacacctcgggatttgac

SEQ ID NO: 4631113 - DNA, 25 bp, Homo sapien
ctgggccctccaaaattcttctgtg

SEQ ID NO: 4631114 - DNA, 25 bp, Homo sapien
tggatgatcgcaggttttaatgtcc

SEQ ID NO: 4631115 - DNA, 25 bp, Homo sapien
ttccttggcttcttcctcatacttc

SEQ ID NO: 4631116 - DNA, 25 bp, Homo sapien
ttctttccttggcttcttcctcata

SEQ ID NO: 4631117 - DNA, 25 bp, Homo sapien
ctttccttggcttcttcctcatact

SEQ ID NO: 4631118 - DNA, 25 bp, Homo sapien
ccttggcttcttcctcatacttcat

SEQ ID NO: 4631119 - DNA, 25 bp, Homo sapien
tctccttttgggatggactctcaaa

SEQ ID NO: 4631120 - DNA, 25 bp, Homo sapien
actctcaaagggcagcaccatagga

SEQ ID NO: 4631121 - DNA, 25 bp, Homo sapien
ggcagcaccataggaataagggcaa

SEQ ID NO: 4631122 - DNA, 25 bp, Homo sapien
tgaaaggcccctcactaaatgttct

SEQ ID NO: 4631123 - DNA, 25 bp, Homo sapien
aggaactcagaggtcaacctcagca

SEQ ID NO: 4631124 - DNA, 25 bp, Homo sapien
ggaactcagaggtcaacctcagcat

SEQ ID NO: 4631125 - DNA, 25 bp, Homo sapien
gaggaactcagaggtcaacctcagc

SEQ ID NO: 4631126 - DNA, 25 bp, Homo sapien
ggaggaactcagaggtcaacctcag

SEQ ID NO: 4631127 - DNA, 25 bp, Homo sapien
aacacaggggaggcctcattggacc

SEQ ID NO: 4631128 - DNA, 25 bp, Homo sapien
caggggaggcctcattggacctgtt

SEQ ID NO: 4631129 - DNA, 25 bp, Homo sapien
aggggaggcctcattggacctgttc

SEQ ID NO: 4631130 - DNA, 25 bp, Homo sapien
cacaggggaggcctcattggacctg

SEQ ID NO: 4631131 - DNA, 25 bp, Homo sapien
aggcgggagtcaaggatggtcacca

SEQ ID NO: 4631132 - DNA, 25 bp, Homo sapien
caggcgggagtcaaggatggtcacc

SEQ ID NO: 4631133 - DNA, 25 bp, Homo sapien
cgggagtcaaggatggtcaccagga

SEQ ID NO: 4631134 - DNA, 25 bp, Homo sapien
gtgcaggcgggagtcaaggatggtc

SEQ ID NO: 4631135 - DNA, 25 bp, Homo sapien
ctgtcaaggatgaggaggttgtata

SEQ ID NO: 4631136 - DNA, 25 bp, Homo sapien
gatgaggaggttgtatagcagatgt

SEQ ID NO: 4631137 - DNA, 25 bp, Homo sapien
aggatgaggaggttgtatagcagat

SEQ ID NO: 4631138 - DNA, 25 bp, Homo sapien
tgaggaggttgtatagcagatgtcc

SEQ ID NO: 4631139 - DNA, 25 bp, Homo sapien
cacatgtccaggtagtgatcaaaag

SEQ ID NO: 4631140 - DNA, 25 bp, Homo sapien
gttgcacatgtccaggtagtgatca

SEQ ID NO: 4631141 - DNA, 25 bp, Homo sapien
catgtccaggtagtgatcaaaagcc

SEQ ID NO: 4631142 - DNA, 25 bp, Homo sapien
tgcacatgtccaggtagtgatcaaa

SEQ ID NO: 4631143 - DNA, 25 bp, Homo sapien
cacattgctagggatatctgtacta

SEQ ID NO: 4631144 - DNA, 25 bp, Homo sapien
acattgctagggatatctgtactac

SEQ ID NO: 4631145 - DNA, 25 bp, Homo sapien
gtcacattgctagggatatctgtac

SEQ ID NO: 4631146 - DNA, 25 bp, Homo sapien
agtcacattgctagggatatctgta

SEQ ID NO: 4631147 - DNA, 25 bp, Homo sapien
gctgatcacgttgatgcagatgtca

SEQ ID NO: 4631148 - DNA, 25 bp, Homo sapien
ctgatcacgttgatgcagatgtcag

SEQ ID NO: 4631149 - DNA, 25 bp, Homo sapien
tgatcacgttgatgcagatgtcagc

SEQ ID NO: 4631150 - DNA, 25 bp, Homo sapien
ggaagatcatgttggtcacaaccat

SEQ ID NO: 4631151 - DNA, 25 bp, Homo sapien
caggactgggagtgcaaggaagatc

SEQ ID NO: 4631152 - DNA, 25 bp, Homo sapien
aaacaggactgggagtgcaaggaag

SEQ ID NO: 4631153 - DNA, 25 bp, Homo sapien
ataaacaggactgggagtgcaagga

SEQ ID NO: 4631154 - DNA, 25 bp, Homo sapien
aggttatgcattctcgcagtctggg

SEQ ID NO: 4631155 - DNA, 25 bp, Homo sapien
aggaatttggaggttatgcattctc

SEQ ID NO: 4631156 - DNA, 25 bp, Homo sapien
ttggaggttatgcattctcgcagtc

SEQ ID NO: 4631157 - DNA, 25 bp, Homo sapien
aatttggaggttatgcattctcgca

SEQ ID NO: 4631158 - DNA, 25 bp, Homo sapien
ggcagatgggccaagaactcctctg

SEQ ID NO: 4631159 - DNA, 25 bp, Homo sapien
cttagggcagatgggccaagaactc

SEQ ID NO: 4631160 - DNA, 25 bp, Homo sapien
agggcagatgggccaagaactcctc

SEQ ID NO: 4631161 - DNA, 25 bp, Homo sapien
cagatgggccaagaactcctctgct

SEQ ID NO: 4631162 - DNA, 25 bp, Homo sapien
tgtccccatagaagggcaggtgact

SEQ ID NO: 4631163 - DNA, 25 bp, Homo sapien
ttgatgatgtccccatagaagggca

SEQ ID NO: 4631164 - DNA, 25 bp, Homo sapien
ccatgcgtgaagaggatggtcctgt

SEQ ID NO: 4631165 - DNA, 25 bp, Homo sapien
catgcgtgaagaggatggtcctgta

SEQ ID NO: 4631166 - DNA, 25 bp, Homo sapien
gtgaccactccataggagagggaga

SEQ ID NO: 4631167 - DNA, 25 bp, Homo sapien
atgggggtgaccactccataggaga

SEQ ID NO: 4631168 - DNA, 25 bp, Homo sapien
cctctgagttatcatttccccatga

SEQ ID NO: 4631169 - DNA, 25 bp, Homo sapien
ctctgagttatcatttccccatgag

SEQ ID NO: 4631170 - DNA, 25 bp, Homo sapien
gcttcagcaatgtccaccaggtggc

SEQ ID NO: 4631171 - DNA, 25 bp, Homo sapien
cagcttcagcaatgtccaccaggtg

SEQ ID NO: 4631172 - DNA, 25 bp, Homo sapien
ttgcagcaggcacaggtagctagag

SEQ ID NO: 4631173 - DNA, 25 bp, Homo sapien
ggtagctagagctgcaaccagccac

SEQ ID NO: 4631174 - DNA, 25 bp, Homo sapien
agtccttctgggcttgtagcatcca

SEQ ID NO: 4631175 - DNA, 25 bp, Homo sapien
tggtctgttgcaggcccagtccttc

SEQ ID NO: 4631176 - DNA, 25 bp, Homo sapien
gataatatgtccaaccacccctgta

SEQ ID NO: 4631177 - DNA, 25 bp, Homo sapien
tggacccctttcatgtgccatcggg

SEQ ID NO: 4631178 - DNA, 25 bp, Homo sapien
tccagcttccgatttatttaacgca

SEQ ID NO: 4631179 - DNA, 25 bp, Homo sapien
tgagtaccttgccaagggtcaccgt

SEQ ID NO: 4631180 - DNA, 25 bp, Homo sapien
gaaaaaagttgtgttgtattgctac

SEQ ID NO: 4631181 - DNA, 25 bp, Homo sapien
tgaattctggaattatggatgactg

SEQ ID NO: 4631182 - DNA, 25 bp, Homo sapien
ggctctttgttatggcccaactgtg

SEQ ID NO: 4631183 - DNA, 25 bp, Homo sapien
accagcccacgttctcccagagtga

SEQ ID NO: 4631184 - DNA, 25 bp, Homo sapien
acgtgccccgtaccagggctctttg

SEQ ID NO: 4631185 - DNA, 25 bp, Homo sapien
tatggcccaactgtgtgtcggcttc

SEQ ID NO: 4631186 - DNA, 25 bp, Homo sapien
tccagagccgcgggatgctcggacc

SEQ ID NO: 4631187 - DNA, 25 bp, Homo sapien
cagagccgcgggatgctcggaccca

SEQ ID NO: 4631188 - DNA, 25 bp, Homo sapien
gatgctcggacccagcttggccgca

SEQ ID NO: 4631189 - DNA, 25 bp, Homo sapien
ccgcgggatgctcggacccagcttg

SEQ ID NO: 4631190 - DNA, 25 bp, Homo sapien
ctcgcagagaggcccggacggtcgc

SEQ ID NO: 4631191 - DNA, 25 bp, Homo sapien
tcgcagagaggcccggacggtcgcc

SEQ ID NO: 4631192 - DNA, 25 bp, Homo sapien
cgcagagaggcccggacggtcgcca

SEQ ID NO: 4631193 - DNA, 25 bp, Homo sapien
gcagagaggcccggacggtcgccat

SEQ ID NO: 4631194 - DNA, 25 bp, Homo sapien
cgcactgcccggagccaggccccct

SEQ ID NO: 4631195 - DNA, 25 bp, Homo sapien
ccgcactgcccggagccaggccccc

SEQ ID NO: 4631196 - DNA, 25 bp, Homo sapien
cacggccagcagaaggagcagcgca

SEQ ID NO: 4631197 - DNA, 25 bp, Homo sapien
ccccgccacggccagcagaaggagc

SEQ ID NO: 4631198 - DNA, 25 bp, Homo sapien
gaaccgttgctctggaggttactca

SEQ ID NO: 4631199 - DNA, 25 bp, Homo sapien
aaccgttgctctggaggttactcac

SEQ ID NO: 4631200 - DNA, 25 bp, Homo sapien
ttctgccttgaattcgagttacttc

SEQ ID NO: 4631201 - DNA, 25 bp, Homo sapien
aattcgagttacttcaatctcctgc

SEQ ID NO: 4631202 - DNA, 25 bp, Homo sapien
gccttgaattcgagttacttcaatc

SEQ ID NO: 4631203 - DNA, 25 bp, Homo sapien
tgaattcgagttacttcaatctcct

SEQ ID NO: 4631204 - DNA, 25 bp, Homo sapien
ttacaggggagagcctaccgcaccc

SEQ ID NO: 4631205 - DNA, 25 bp, Homo sapien
agcaatgcacttcaccacttttgca

SEQ ID NO: 4631206 - DNA, 25 bp, Homo sapien
gtctccctgtaagcaatgcacttca

SEQ ID NO: 4631207 - DNA, 25 bp, Homo sapien
cttttgcatgcacacgtcctagcca

SEQ ID NO: 4631208 - DNA, 25 bp, Homo sapien
gtcagccaaggaagcgccaaatagt

SEQ ID NO: 4631209 - DNA, 25 bp, Homo sapien
tgtagtaccaatatgactgccagat

SEQ ID NO: 4631210 - DNA, 25 bp, Homo sapien
gccaaatagtgagaggattacccac

SEQ ID NO: 4631211 - DNA, 25 bp, Homo sapien
gcttgcctcatattgcactgctgca

SEQ ID NO: 4631212 - DNA, 25 bp, Homo sapien
tagaaacatcgagtttcagctgctg

SEQ ID NO: 4631213 - DNA, 25 bp, Homo sapien
agtaagcaggaagcacatgctccag

SEQ ID NO: 4631214 - DNA, 25 bp, Homo sapien
catatgacttcgttatcaatgggag

SEQ ID NO: 4631215 - DNA, 25 bp, Homo sapien
tcccaggcctaatgctttctataag

SEQ ID NO: 4631216 - DNA, 25 bp, Homo sapien
ggaggaccgaagcactcataagggt

SEQ ID NO: 4631217 - DNA, 25 bp, Homo sapien
tgaagggctaacacaagggaggacc

SEQ ID NO: 4631218 - DNA, 25 bp, Homo sapien
cctggccgacgctttcttataacaa

SEQ ID NO: 4631219 - DNA, 25 bp, Homo sapien
gaagttggcactttctactactagc

SEQ ID NO: 4631220 - DNA, 25 bp, Homo sapien
atttggttatcctttgaatgattac

SEQ ID NO: 4631221 - DNA, 25 bp, Homo sapien
ttggttatcctttgaatgattacaa

SEQ ID NO: 4631222 - DNA, 25 bp, Homo sapien
catttggttatcctttgaatgatta

SEQ ID NO: 4631223 - DNA, 25 bp, Homo sapien
tttggttatcctttgaatgattaca

SEQ ID NO: 4631224 - DNA, 25 bp, Homo sapien
ctgcaaatagctgagacggtaaaat

SEQ ID NO: 4631225 - DNA, 25 bp, Homo sapien
caaatagctgagacggtaaaatcca

SEQ ID NO: 4631226 - DNA, 25 bp, Homo sapien
atagctgagacggtaaaatccatga

SEQ ID NO: 4631227 - DNA, 25 bp, Homo sapien
gctgagacggtaaaatccatgaatg

SEQ ID NO: 4631228 - DNA, 25 bp, Homo sapien
tctggggctcgctgcaacagatgtt

SEQ ID NO: 4631229 - DNA, 25 bp, Homo sapien
caacagatgttttagtcgggattca

SEQ ID NO: 4631230 - DNA, 25 bp, Homo sapien
cagatgttttagtcgggattcactt

SEQ ID NO: 4631231 - DNA, 25 bp, Homo sapien
ggggctcgctgcaacagatgtttta

SEQ ID NO: 4631232 - DNA, 25 bp, Homo sapien
ggcttttatgtagataaccagttcc

SEQ ID NO: 4631233 - DNA, 25 bp, Homo sapien
tatgtagataaccagttcctaaata

SEQ ID NO: 4631234 - DNA, 25 bp, Homo sapien
agataaccagttcctaaatatgaca

SEQ ID NO: 4631235 - DNA, 25 bp, Homo sapien
cttttatgtagataaccagttccta

SEQ ID NO: 4631236 - DNA, 25 bp, Homo sapien
aaagatgaattcatacaattccaaa

SEQ ID NO: 4631237 - DNA, 25 bp, Homo sapien
tatgtacaaggcactctgttaggtg

SEQ ID NO: 4631238 - DNA, 25 bp, Homo sapien
taatcctgggagatcatgagtgtca

SEQ ID NO: 4631239 - DNA, 25 bp, Homo sapien
taaacagtgcgatagcctctagaat

SEQ ID NO: 4631240 - DNA, 25 bp, Homo sapien
ttaagaaattagctctatccagggc

SEQ ID NO: 4631241 - DNA, 25 bp, Homo sapien
tgttttggtcataagtagcaataaa

SEQ ID NO: 4631242 - DNA, 25 bp, Homo sapien
ataaaaagagatagcatgccagatg

SEQ ID NO: 4631243 - DNA, 25 bp, Homo sapien
aataaaaagagatagcatgccagat

SEQ ID NO: 4631244 - DNA, 25 bp, Homo sapien
tgcttgcatgcctgtcgacactcca

SEQ ID NO: 4631245 - DNA, 25 bp, Homo sapien
aaggcaatagccagttcacagcagc

SEQ ID NO: 4631246 - DNA, 25 bp, Homo sapien
tgtcgacactccaaggcaatagcca

SEQ ID NO: 4631247 - DNA, 25 bp, Homo sapien
ctaagccaacccagccatcagactt

SEQ ID NO: 4631248 - DNA, 25 bp, Homo sapien
tgggcaaggcccaagacatgtgcac

SEQ ID NO: 4631249 - DNA, 25 bp, Homo sapien
tgatgtttgagagcctgactaccca

SEQ ID NO: 4631250 - DNA, 25 bp, Homo sapien
tacgggttacctctgcaaagctagg

SEQ ID NO: 4631251 - DNA, 25 bp, Homo sapien
caagacatgtgcacagctaaaacca

SEQ ID NO: 4631252 - DNA, 25 bp, Homo sapien
actggtgcttagagaagtagcaagc

SEQ ID NO: 4631253 - DNA, 25 bp, Homo sapien
aacttgctgagtatataacggaggg

SEQ ID NO: 4631254 - DNA, 25 bp, Homo sapien
agatactaacccctctacagatgag

SEQ ID NO: 4631255 - DNA, 25 bp, Homo sapien
aatagggaagaggtactatgccagg

SEQ ID NO: 4631256 - DNA, 25 bp, Homo sapien
atattcttttctgcaaactttggaa

SEQ ID NO: 4631257 - DNA, 25 bp, Homo sapien
tggaaatatcattctttgaagatgc

SEQ ID NO: 4631258 - DNA, 25 bp, Homo sapien
ttctgcaaactttggaaatatcatt

SEQ ID NO: 4631259 - DNA, 25 bp, Homo sapien
aaactttggaaatatcattctttga

SEQ ID NO: 4631260 - DNA, 25 bp, Homo sapien
tgcagaaatccagacaagagaagga

SEQ ID NO: 4631261 - DNA, 25 bp, Homo sapien
agggcaatgcagaaatccagacaag

SEQ ID NO: 4631262 - DNA, 25 bp, Homo sapien
ctagggcaatgcagaaatccagaca

SEQ ID NO: 4631263 - DNA, 25 bp, Homo sapien
aaatccagacaagagaaggaagcac

SEQ ID NO: 4631264 - DNA, 25 bp, Homo sapien
gtccttcatcaacacatactggcag

SEQ ID NO: 4631265 - DNA, 25 bp, Homo sapien
tcatcaacacatactggcagacttc

SEQ ID NO: 4631266 - DNA, 25 bp, Homo sapien
tcttgtccttcatcaacacatactg

SEQ ID NO: 4631267 - DNA, 25 bp, Homo sapien
cctgtcttgtccttcatcaacacat

SEQ ID NO: 4631268 - DNA, 25 bp, Homo sapien
tctagtactccagttagagaggatt

SEQ ID NO: 4631269 - DNA, 25 bp, Homo sapien
cggaaccatttaggaatcattctac

SEQ ID NO: 4631270 - DNA, 25 bp, Homo sapien
gttggtcttctttgaaggcaatgcc

SEQ ID NO: 4631271 - DNA, 25 bp, Homo sapien
gctactgggaaatcagtcgttggtc

SEQ ID NO: 4631272 - DNA, 25 bp, Homo sapien
catcaaaaaagtgtattgaagaaag

SEQ ID NO: 4631273 - DNA, 25 bp, Homo sapien
taatgatataacatcaaaaaagtgt

SEQ ID NO: 4631274 - DNA, 25 bp, Homo sapien
tccttaatgatataacatcaaaaaa

SEQ ID NO: 4631275 - DNA, 25 bp, Homo sapien
tgatataacatcaaaaaagtgtatt

SEQ ID NO: 4631276 - DNA, 25 bp, Homo sapien
tctgctaatgcaactgaaaagagca

SEQ ID NO: 4631277 - DNA, 25 bp, Homo sapien
tgctaatgcaactgaaaagagcatt

SEQ ID NO: 4631278 - DNA, 25 bp, Homo sapien
ttctgctaatgcaactgaaaagagc

SEQ ID NO: 4631279 - DNA, 25 bp, Homo sapien
ctgctaatgcaactgaaaagagcat

SEQ ID NO: 4631280 - DNA, 25 bp, Homo sapien
ggacataagattacatgcctgagac

SEQ ID NO: 4631281 - DNA, 25 bp, Homo sapien
cacataggaacaggacaagatgcct

SEQ ID NO: 4631282 - DNA, 25 bp, Homo sapien
ggaaaatcttgaactaagcctcagt

SEQ ID NO: 4631283 - DNA, 25 bp, Homo sapien
tggtgaggacatataagaacagaca

SEQ ID NO: 4631284 - DNA, 25 bp, Homo sapien
gagtctgttcgaaaaatggcttgac

SEQ ID NO: 4631285 - DNA, 25 bp, Homo sapien
tttgtgtgatgacctgcataactgc

SEQ ID NO: 4631286 - DNA, 25 bp, Homo sapien
tctgagatggaccaggagaagagtc

SEQ ID NO: 4631287 - DNA, 25 bp, Homo sapien
gcttgacagtattctcggcagtttg

SEQ ID NO: 4631288 - DNA, 25 bp, Homo sapien
tccgttgggttcctcattggataag

SEQ ID NO: 4631289 - DNA, 25 bp, Homo sapien
gaggcgcaataattttccactgctt

SEQ ID NO: 4631290 - DNA, 25 bp, Homo sapien
tattaattgtggactaatagaggcg

SEQ ID NO: 4631291 - DNA, 25 bp, Homo sapien
cctcattggataagattgagtataa

SEQ ID NO: 4631292 - DNA, 25 bp, Homo sapien
aaatatataaagtgaaacaattagg

SEQ ID NO: 4631293 - DNA, 25 bp, Homo sapien
tatatcacactatatttttagttct

SEQ ID NO: 4631294 - DNA, 25 bp, Homo sapien
ttttttttgcttaatacatcttgga

SEQ ID NO: 4631295 - DNA, 25 bp, Homo sapien
ttttgcttaatacatcttggacttc

SEQ ID NO: 4631296 - DNA, 25 bp, Homo sapien
aaagtaataattgctcattggcaaa

SEQ ID NO: 4631297 - DNA, 25 bp, Homo sapien
gtaataattgctcattggcaaaaaa

SEQ ID NO: 4631298 - DNA, 25 bp, Homo sapien
acaaaagtaataattgctcattggc

SEQ ID NO: 4631299 - DNA, 25 bp, Homo sapien
aattgctcattggcaaaaaattcaa

SEQ ID NO: 4631300 - DNA, 25 bp, Homo sapien
aaaagatatcaggctctcttctcat

SEQ ID NO: 4631301 - DNA, 25 bp, Homo sapien
tttaaaagatatcaggctctcttct

SEQ ID NO: 4631302 - DNA, 25 bp, Homo sapien
aaagatatcaggctctcttctcatt

SEQ ID NO: 4631303 - DNA, 25 bp, Homo sapien
taaaagatatcaggctctcttctca

SEQ ID NO: 4631304 - DNA, 25 bp, Homo sapien
tagatggtggccaaacaaggcacac

SEQ ID NO: 4631305 - DNA, 25 bp, Homo sapien
tgaccacacagctacaccaaaggat

SEQ ID NO: 4631306 - DNA, 25 bp, Homo sapien
catttcaggtgcagcttcatcagga

SEQ ID NO: 4631307 - DNA, 25 bp, Homo sapien
tacaaagcggagactctgaagagcc

SEQ ID NO: 4631308 - DNA, 25 bp, Homo sapien
tagctccagcagtatctcgtataga

SEQ ID NO: 4631309 - DNA, 25 bp, Homo sapien
tgtgcatatctgtttggcgccttct

SEQ ID NO: 4631310 - DNA, 25 bp, Homo sapien
caaagatggagacggttgttctacc

SEQ ID NO: 4631311 - DNA, 25 bp, Homo sapien
tgcttttttattgagctgccatctc

SEQ ID NO: 4631312 - DNA, 25 bp, Homo sapien
tagtacagtagcgaactctgacaag

SEQ ID NO: 4631313 - DNA, 25 bp, Homo sapien
ataaatagtacagtagcgaactctg

SEQ ID NO: 4631314 - DNA, 25 bp, Homo sapien
aaatagtacagtagcgaactctgac

SEQ ID NO: 4631315 - DNA, 25 bp, Homo sapien
agtacagtagcgaactctgacaaga

SEQ ID NO: 4631316 - DNA, 25 bp, Homo sapien
tcacaggagaggtatttgatattcc

SEQ ID NO: 4631317 - DNA, 25 bp, Homo sapien
aaagggattatgttcttgacatgag

SEQ ID NO: 4631318 - DNA, 25 bp, Homo sapien
cctacacctaagaagtcctcacagg

SEQ ID NO: 4631319 - DNA, 25 bp, Homo sapien
tatttcctgctagaaacaattacct

SEQ ID NO: 4631320 - DNA, 25 bp, Homo sapien
ccactgtctccaatcatgggatctt

SEQ ID NO: 4631321 - DNA, 25 bp, Homo sapien
atcatgggatctttagcaccatcct

SEQ ID NO: 4631322 - DNA, 25 bp, Homo sapien
gggatctttagcaccatccttacaa

SEQ ID NO: 4631323 - DNA, 25 bp, Homo sapien
caccactgtctccaatcatgggatc

SEQ ID NO: 4631324 - DNA, 25 bp, Homo sapien
ggcagtgtagtggaagccattacta

SEQ ID NO: 4631325 - DNA, 25 bp, Homo sapien
gagctttaggtggacaaggtatcta

SEQ ID NO: 4631326 - DNA, 25 bp, Homo sapien
ttctctattactttgcagtgtagca

SEQ ID NO: 4631327 - DNA, 25 bp, Homo sapien
gaatacaggccctaccaaattctct

SEQ ID NO: 4631328 - DNA, 25 bp, Homo sapien
aaccctcgatgagaccatcaacaat

SEQ ID NO: 4631329 - DNA, 25 bp, Homo sapien
ctcgatgagaccatcaacaatctcc

SEQ ID NO: 4631330 - DNA, 25 bp, Homo sapien
attttggcaagcatggtcttcagct

SEQ ID NO: 4631331 - DNA, 25 bp, Homo sapien
ccatttccgttttcttggacatcag

SEQ ID NO: 4631332 - DNA, 25 bp, Homo sapien
tacagtgactccagggtgaacagat

SEQ ID NO: 4631333 - DNA, 25 bp, Homo sapien
gaggagggtgtacagtgactccagg

SEQ ID NO: 4631334 - DNA, 25 bp, Homo sapien
agtgactccagggtgaacagattgt

SEQ ID NO: 4631335 - DNA, 25 bp, Homo sapien
ggtgtacagtgactccagggtgaac

SEQ ID NO: 4631336 - DNA, 25 bp, Homo sapien
acaatgcaatttagccccatcgagg

SEQ ID NO: 4631337 - DNA, 25 bp, Homo sapien
caacaatgcaatttagccccatcga

SEQ ID NO: 4631338 - DNA, 25 bp, Homo sapien
caatgcaatttagccccatcgaggc

SEQ ID NO: 4631339 - DNA, 25 bp, Homo sapien
aacaatgcaatttagccccatcgag

SEQ ID NO: 4631340 - DNA, 25 bp, Homo sapien
gctgtaaagtttagtgcagagttcc

SEQ ID NO: 4631341 - DNA, 25 bp, Homo sapien
cacttccactggattatattcacaa

SEQ ID NO: 4631342 - DNA, 25 bp, Homo sapien
cacaaaagcgatcaaactcttgcca

SEQ ID NO: 4631343 - DNA, 25 bp, Homo sapien
gacatccgctaaacaggtcaacatg

SEQ ID NO: 4631344 - DNA, 25 bp, Homo sapien
tctacagcccaactggcaaggttcc

SEQ ID NO: 4631345 - DNA, 25 bp, Homo sapien
tttccattccatgtataataatttg

SEQ ID NO: 4631346 - DNA, 25 bp, Homo sapien
tatttccattccatgtataataatt

SEQ ID NO: 4631347 - DNA, 25 bp, Homo sapien
cattccatgtataataatttgtctt

SEQ ID NO: 4631348 - DNA, 25 bp, Homo sapien
tccattccatgtataataatttgtc

SEQ ID NO: 4631349 - DNA, 25 bp, Homo sapien
tccccgagatttactatgacaaggt

SEQ ID NO: 4631350 - DNA, 25 bp, Homo sapien
aagctattgctttccacatctctgg

SEQ ID NO: 4631351 - DNA, 25 bp, Homo sapien
ggctccttgatctgactgtgcatta

SEQ ID NO: 4631352 - DNA, 25 bp, Homo sapien
tgacaaggtttaatctgcagtgaac

SEQ ID NO: 4631353 - DNA, 25 bp, Homo sapien
gtatgtatccaaaggtatacaattc

SEQ ID NO: 4631354 - DNA, 25 bp, Homo sapien
tggtcttcagggaatttgttctggt

SEQ ID NO: 4631355 - DNA, 25 bp, Homo sapien
ccaaaggtatacaattcttcagatc

SEQ ID NO: 4631356 - DNA, 25 bp, Homo sapien
tcttcagatcatctgtaggtgacag

SEQ ID NO: 4631357 - DNA, 25 bp, Homo sapien
gaagacagggatctccagatggaca

SEQ ID NO: 4631358 - DNA, 25 bp, Homo sapien
cagatggacatccttttcggtttac

SEQ ID NO: 4631359 - DNA, 25 bp, Homo sapien
tacagggatgagtcacttcttctac

SEQ ID NO: 4631360 - DNA, 25 bp, Homo sapien
tttacttcacagagctcattggcag

SEQ ID NO: 4631361 - DNA, 25 bp, Homo sapien
ctgaatatttgggtgggcttatgga

SEQ ID NO: 4631362 - DNA, 25 bp, Homo sapien
aaactgaatatttgggtgggcttat

SEQ ID NO: 4631363 - DNA, 25 bp, Homo sapien
aactgaatatttgggtgggcttatg

SEQ ID NO: 4631364 - DNA, 25 bp, Homo sapien
gaatatttgggtgggcttatggaaa

SEQ ID NO: 4631365 - DNA, 25 bp, Homo sapien
caacaatacaagacttctggaggtc

SEQ ID NO: 4631366 - DNA, 25 bp, Homo sapien
gatgatggcacctggattagtgtcc

SEQ ID NO: 4631367 - DNA, 25 bp, Homo sapien
tagtgtcccttgacggacaatgaaa

SEQ ID NO: 4631368 - DNA, 25 bp, Homo sapien
tctggaggtctatacagtgcatttc

SEQ ID NO: 4631369 - DNA, 25 bp, Homo sapien
aagggatttggagtcaactagacct

SEQ ID NO: 4631370 - DNA, 25 bp, Homo sapien
tccttggcctgtgaagcgtaaggga

SEQ ID NO: 4631371 - DNA, 25 bp, Homo sapien
tactagctgggtgaactctttaagc

SEQ ID NO: 4631372 - DNA, 25 bp, Homo sapien
gacctggagcagaatccagctttgg

SEQ ID NO: 4631373 - DNA, 25 bp, Homo sapien
gatgacttctgaatataccaactag

SEQ ID NO: 4631374 - DNA, 25 bp, Homo sapien
agcccctgaagtgctggtcttacca

SEQ ID NO: 4631375 - DNA, 25 bp, Homo sapien
agctcccagaagagcacttggtctg

SEQ ID NO: 4631376 - DNA, 25 bp, Homo sapien
taccaactagagtaaaatctgtggg

SEQ ID NO: 4631377 - DNA, 25 bp, Homo sapien
ggtacgacggtcatcttctgaactg

SEQ ID NO: 4631378 - DNA, 25 bp, Homo sapien
ggtagagcacaccaaattgccagca

SEQ ID NO: 4631379 - DNA, 25 bp, Homo sapien
gcaaaggcgggtagagcacaccaaa

SEQ ID NO: 4631380 - DNA, 25 bp, Homo sapien
cattgcagtcaatactaaaggatgt

SEQ ID NO: 4631381 - DNA, 25 bp, Homo sapien
gagacccctattaacaaggctatag

SEQ ID NO: 4631382 - DNA, 25 bp, Homo sapien
ttattgccaactagttgagggcccc

SEQ ID NO: 4631383 - DNA, 25 bp, Homo sapien
ccctagactttgatcccaggtagag

SEQ ID NO: 4631384 - DNA, 25 bp, Homo sapien
aatgctctgaatagctcatctgcaa

SEQ ID NO: 4631385 - DNA, 25 bp, Homo sapien
acacagcgagcaatgcaggcactgg

SEQ ID NO: 4631386 - DNA, 25 bp, Homo sapien
tgatccaaactcaaactgatggtct

SEQ ID NO: 4631387 - DNA, 25 bp, Homo sapien
catggatcctttgacatgcatgatc

SEQ ID NO: 4631388 - DNA, 25 bp, Homo sapien
gcagggattaggattacatggatcc

SEQ ID NO: 4631389 - DNA, 25 bp, Homo sapien
cagatggatttgcaggggctcttta

SEQ ID NO: 4631390 - DNA, 25 bp, Homo sapien
aggggctctttatattacaaggaca

SEQ ID NO: 4631391 - DNA, 25 bp, Homo sapien
tttctattaggttattgatctctgt

SEQ ID NO: 4631392 - DNA, 25 bp, Homo sapien
ggacatcagcgctttctctgtgata

SEQ ID NO: 4631393 - DNA, 25 bp, Homo sapien
tatcaaaagtcgtcaggcagacctg

SEQ ID NO: 4631394 - DNA, 25 bp, Homo sapien
gcagggacctttgtaagagaggctt

SEQ ID NO: 4631395 - DNA, 25 bp, Homo sapien
cacacgcgagctgtcttggtacaca

SEQ ID NO: 4631396 - DNA, 25 bp, Homo sapien
gcagacctgtggtttgggtatgcac

SEQ ID NO: 4631397 - DNA, 25 bp, Homo sapien
cgtgggcagcaatatgggtgtctcc

SEQ ID NO: 4631398 - DNA, 25 bp, Homo sapien
ttcccaaccaagagtacacagcatg

SEQ ID NO: 4631399 - DNA, 25 bp, Homo sapien
gcatgcctccctattttcaggaagg

SEQ ID NO: 4631400 - DNA, 25 bp, Homo sapien
gatcaatcttcatgcaaatgcagag

SEQ ID NO: 4631401 - DNA, 25 bp, Homo sapien
tagtaatcgactgccacgcgatccg

SEQ ID NO: 4631402 - DNA, 25 bp, Homo sapien
gctgtgctctgagaggactccgacg

SEQ ID NO: 4631403 - DNA, 25 bp, Homo sapien
gctgtaggtctcaccattgtgccca

SEQ ID NO: 4631404 - DNA, 25 bp, Homo sapien
tacgggctcggttgctctgcaaaag

SEQ ID NO: 4631405 - DNA, 25 bp, Homo sapien
taaaactcttaacatcccagcacat

SEQ ID NO: 4631406 - DNA, 25 bp, Homo sapien
ttaacatcccagcacataatgggca

SEQ ID NO: 4631407 - DNA, 25 bp, Homo sapien
ctcttaacatcccagcacataatgg

SEQ ID NO: 4631408 - DNA, 25 bp, Homo sapien
aacatcccagcacataatgggcaac

SEQ ID NO: 4631409 - DNA, 25 bp, Homo sapien
cagaaccacttttgcaaaaagtgac

SEQ ID NO: 4631410 - DNA, 25 bp, Homo sapien
caccagaaccacttttgcaaaaagt

SEQ ID NO: 4631411 - DNA, 25 bp, Homo sapien
tcaccagaaccacttttgcaaaaag

SEQ ID NO: 4631412 - DNA, 25 bp, Homo sapien
tttcaccagaaccacttttgcaaaa

SEQ ID NO: 4631413 - DNA, 25 bp, Homo sapien
actgtgggacagacacgtgcatgcg

SEQ ID NO: 4631414 - DNA, 25 bp, Homo sapien
gatcgacgggaatgatcaggatcac

SEQ ID NO: 4631415 - DNA, 25 bp, Homo sapien
cgtgcatgcggattttctgaagtat

SEQ ID NO: 4631416 - DNA, 25 bp, Homo sapien
aagtatttccagaactgttattggc

SEQ ID NO: 4631417 - DNA, 25 bp, Homo sapien
gccaaagtcgggctgtcagagttga

SEQ ID NO: 4631418 - DNA, 25 bp, Homo sapien
catgggacgccaaagtcgggctgtc

SEQ ID NO: 4631419 - DNA, 25 bp, Homo sapien
agagagggacatgggacgccaaagt

SEQ ID NO: 4631420 - DNA, 25 bp, Homo sapien
aagtcgggctgtcagagttgataag

SEQ ID NO: 4631421 - DNA, 25 bp, Homo sapien
cgatggcacactgctggagacctgt

SEQ ID NO: 4631422 - DNA, 25 bp, Homo sapien
atggcacactgctggagacctgtac

SEQ ID NO: 4631423 - DNA, 25 bp, Homo sapien
cggccgatggcacactgctggagac

SEQ ID NO: 4631424 - DNA, 25 bp, Homo sapien
gccgatggcacactgctggagacct

SEQ ID NO: 4631425 - DNA, 25 bp, Homo sapien
agggagtggcaagaaggcctggccc

SEQ ID NO: 4631426 - DNA, 25 bp, Homo sapien
agagcaagtgcaaggcaaggcccaa

SEQ ID NO: 4631427 - DNA, 25 bp, Homo sapien
tatatgtccagagcaagtgcaaggc

SEQ ID NO: 4631428 - DNA, 25 bp, Homo sapien
ttatatgtccagagcaagtgcaagg

SEQ ID NO: 4631429 - DNA, 25 bp, Homo sapien
atgtccagagcaagtgcaaggcaag

SEQ ID NO: 4631430 - DNA, 25 bp, Homo sapien
tacaaaccagcagtcctgaatgtct

SEQ ID NO: 4631431 - DNA, 25 bp, Homo sapien
gaagtttgtgaacctgatagtacag

SEQ ID NO: 4631432 - DNA, 25 bp, Homo sapien
gagcattctgcactttccgtgggca

SEQ ID NO: 4631433 - DNA, 25 bp, Homo sapien
aatcatatggcagtggtctaccagg

SEQ ID NO: 4631434 - DNA, 25 bp, Homo sapien
tgttttcacgaatggaaagcactgg

SEQ ID NO: 4631435 - DNA, 25 bp, Homo sapien
gacacaaatccgtgaccagtgagcc

SEQ ID NO: 4631436 - DNA, 25 bp, Homo sapien
tgcttttgcataacacagtagttgg

SEQ ID NO: 4631437 - DNA, 25 bp, Homo sapien
ggcaattgcaacaagcatgctacat

SEQ ID NO: 4631438 - DNA, 25 bp, Homo sapien
ttctgagaagtacaaatcctgcctg

SEQ ID NO: 4631439 - DNA, 25 bp, Homo sapien
ctaccttcatggcaacctcctttat

SEQ ID NO: 4631440 - DNA, 25 bp, Homo sapien
taccttcatggcaacctcctttatg

SEQ ID NO: 4631441 - DNA, 25 bp, Homo sapien
ccttcatggcaacctcctttatggc

SEQ ID NO: 4631442 - DNA, 25 bp, Homo sapien
cttcatggcaacctcctttatggcc

SEQ ID NO: 4631443 - DNA, 25 bp, Homo sapien
cagttctgctctaggcttttggtca

SEQ ID NO: 4631444 - DNA, 25 bp, Homo sapien
ttttggtcagaagagtgccagcaag

SEQ ID NO: 4631445 - DNA, 25 bp, Homo sapien
gagccagcaaatcccgggcagaagg

SEQ ID NO: 4631446 - DNA, 25 bp, Homo sapien
gtttctgcaatagcctgcactagtg

SEQ ID NO: 4631447 - DNA, 25 bp, Homo sapien
ggtactggggagatgtggtcccacc

SEQ ID NO: 4631448 - DNA, 25 bp, Homo sapien
tactggggagatgtggtcccaccca

SEQ ID NO: 4631449 - DNA, 25 bp, Homo sapien
caggtactggggagatgtggtccca

SEQ ID NO: 4631450 - DNA, 25 bp, Homo sapien
actggggagatgtggtcccacccat

SEQ ID NO: 4631451 - DNA, 25 bp, Homo sapien
ctaggacacgccctctaatgccagt

SEQ ID NO: 4631452 - DNA, 25 bp, Homo sapien
tccggtgactctgggctccggaggg

SEQ ID NO: 4631453 - DNA, 25 bp, Homo sapien
gggtggctgctctgcgccgacgcgc

SEQ ID NO: 4631454 - DNA, 25 bp, Homo sapien
tgacccgtccactcgcccctcattg

SEQ ID NO: 4631455 - DNA, 25 bp, Homo sapien
tgggaagcagctccgcgactgccga

SEQ ID NO: 4631456 - DNA, 25 bp, Homo sapien
agcgacagctgagggcggaggcgcc

SEQ ID NO: 4631457 - DNA, 25 bp, Homo sapien
ctgggaagcagctccgcgactgccg

SEQ ID NO: 4631458 - DNA, 25 bp, Homo sapien
ggcccccgccttataaggagcgaca

SEQ ID NO: 4631459 - DNA, 25 bp, Homo sapien
ggccggctccgcgcgctcctcgctc

SEQ ID NO: 4631460 - DNA, 25 bp, Homo sapien
cctcgctccccgcggctgcgctgca

SEQ ID NO: 4631461 - DNA, 25 bp, Homo sapien
gcgcgctcctcgctccccgcggctg

SEQ ID NO: 4631462 - DNA, 25 bp, Homo sapien
gccggctccgcgcgctcctcgctcc

SEQ ID NO: 4631463 - DNA, 25 bp, Homo sapien
gagacggcgaggtccgggagcgcgg

SEQ ID NO: 4631464 - DNA, 25 bp, Homo sapien
cggacgagggagacggcgaggtccg

SEQ ID NO: 4631465 - DNA, 25 bp, Homo sapien
tgcggcggacgagggagacggcgag

SEQ ID NO: 4631466 - DNA, 25 bp, Homo sapien
agggagacggcgaggtccgggagcg

SEQ ID NO: 4631467 - DNA, 25 bp, Homo sapien
tggacaatccggatgaagcaggact

SEQ ID NO: 4631468 - DNA, 25 bp, Homo sapien
gaagcaggacttctgaatcctgttc

SEQ ID NO: 4631469 - DNA, 25 bp, Homo sapien
gacttctgaatcctgttcaacagct

SEQ ID NO: 4631470 - DNA, 25 bp, Homo sapien
tctgaagtggacaatccggatgaag

SEQ ID NO: 4631471 - DNA, 25 bp, Homo sapien
tgttatgccaagcagctctggggtg

SEQ ID NO: 4631472 - DNA, 25 bp, Homo sapien
ctgttatgccaagcagctctggggt

SEQ ID NO: 4631473 - DNA, 25 bp, Homo sapien
ttatgccaagcagctctggggtgta

SEQ ID NO: 4631474 - DNA, 25 bp, Homo sapien
tatgccaagcagctctggggtgtat

SEQ ID NO: 4631475 - DNA, 25 bp, Homo sapien
gaatttcaactgtgccagctgtgtg

SEQ ID NO: 4631476 - DNA, 25 bp, Homo sapien
agtcttcgatcactaggccaagcgt

SEQ ID NO: 4631477 - DNA, 25 bp, Homo sapien
ggaatttcaactgtgccagctgtgt

SEQ ID NO: 4631478 - DNA, 25 bp, Homo sapien
cttcgatcactaggccaagcgtctt

SEQ ID NO: 4631479 - DNA, 25 bp, Homo sapien
gcctttacattgacgtttgatggcc

SEQ ID NO: 4631480 - DNA, 25 bp, Homo sapien
tggctttagaagaacctgttcctgc

SEQ ID NO: 4631481 - DNA, 25 bp, Homo sapien
tgctccttccgggtcaggtcccctc

SEQ ID NO: 4631482 - DNA, 25 bp, Homo sapien
tacattgacgtttgatggccttttt

SEQ ID NO: 4631483 - DNA, 25 bp, Homo sapien
caaagatttcaggtctacagtggag

SEQ ID NO: 4631484 - DNA, 25 bp, Homo sapien
ggagctacaacctgaagtatcggga

SEQ ID NO: 4631485 - DNA, 25 bp, Homo sapien
gcttagacaaagagtacgcggcgca

SEQ ID NO: 4631486 - DNA, 25 bp, Homo sapien
cccgagactgaggagatgatgcaac

SEQ ID NO: 4631487 - DNA, 25 bp, Homo sapien
ccttctgctcttccatgggataatg

SEQ ID NO: 4631488 - DNA, 25 bp, Homo sapien
tgggataatgcagcatgagggcctc

SEQ ID NO: 4631489 - DNA, 25 bp, Homo sapien
ttctgctcttccatgggataatgca

SEQ ID NO: 4631490 - DNA, 25 bp, Homo sapien
atgggataatgcagcatgagggcct

SEQ ID NO: 4631491 - DNA, 25 bp, Homo sapien
gccgtgcttctgccggtactcattg

SEQ ID NO: 4631492 - DNA, 25 bp, Homo sapien
ctgccggtactcattgtgggccttc

SEQ ID NO: 4631493 - DNA, 25 bp, Homo sapien
aggacctcattatgaaactgtttgg

SEQ ID NO: 4631494 - DNA, 25 bp, Homo sapien
gacctcattatgaaactgtttggaa

SEQ ID NO: 4631495 - DNA, 25 bp, Homo sapien
taggatgcccatgcaaggttctccc

SEQ ID NO: 4631496 - DNA, 25 bp, Homo sapien
actccgggctgtgcttgaggatcct

SEQ ID NO: 4631497 - DNA, 25 bp, Homo sapien
gctgtgcttgaggatcctcgtgctg

SEQ ID NO: 4631498 - DNA, 25 bp, Homo sapien
ggatgcccatgcaaggttctcccca

SEQ ID NO: 4631499 - DNA, 25 bp, Homo sapien
gggcccatcgagggccacagcctgg

SEQ ID NO: 4631500 - DNA, 25 bp, Homo sapien
ctcccggggcccatcgagggccaca

SEQ ID NO: 4631501 - DNA, 25 bp, Homo sapien
tggtaagccacggatctccactgtg

SEQ ID NO: 4631502 - DNA, 25 bp, Homo sapien
tgaatgcaatgtactgcaagggcct

SEQ ID NO: 4631503 - DNA, 25 bp, Homo sapien
gaaagacaatcaggctggtaagcca

SEQ ID NO: 4631504 - DNA, 25 bp, Homo sapien
taacaaatactaatgcctgggtcct

SEQ ID NO: 4631505 - DNA, 25 bp, Homo sapien
tgtaccatctatcagccacctcctt

SEQ ID NO: 4631506 - DNA, 25 bp, Homo sapien
gtaccatctatcagccacctccttt

SEQ ID NO: 4631507 - DNA, 25 bp, Homo sapien
taccatctatcagccacctcctttc

SEQ ID NO: 4631508 - DNA, 25 bp, Homo sapien
gccaggctgctggaagttatagttc

SEQ ID NO: 4631509 - DNA, 25 bp, Homo sapien
gctgctggaagttatagttcttgat

SEQ ID NO: 4631510 - DNA, 25 bp, Homo sapien
tggaagttatagttcttgatttcac

SEQ ID NO: 4631511 - DNA, 25 bp, Homo sapien
caggctgctggaagttatagttctt

SEQ ID NO: 4631512 - DNA, 25 bp, Homo sapien
tttagagggctggttcctccctgaa

SEQ ID NO: 4631513 - DNA, 25 bp, Homo sapien
caagactagacacagggtgaccagt

SEQ ID NO: 4631514 - DNA, 25 bp, Homo sapien
tggcagttggatcaggagagcacca

SEQ ID NO: 4631515 - DNA, 25 bp, Homo sapien
gatgtaatgcggaaaggagagcttt

SEQ ID NO: 4631516 - DNA, 25 bp, Homo sapien
gaatagaggataaagactgtttgcc

SEQ ID NO: 4631517 - DNA, 25 bp, Homo sapien
gcagcctggtgtccctacttctaca

SEQ ID NO: 4631518 - DNA, 25 bp, Homo sapien
tctacaggccgtttccaaaggctca

SEQ ID NO: 4631519 - DNA, 25 bp, Homo sapien
ttcttaatacgtttgggtcacagct

SEQ ID NO: 4631520 - DNA, 25 bp, Homo sapien
gctgggaagtatctggccaccacaa

SEQ ID NO: 4631521 - DNA, 25 bp, Homo sapien
ggtgttcttccataccatggccgtg

SEQ ID NO: 4631522 - DNA, 25 bp, Homo sapien
tcattgacaacattccccgctggga

SEQ ID NO: 4631523 - DNA, 25 bp, Homo sapien
gcggcaggacgttttcttcgaagaa

SEQ ID NO: 4631524 - DNA, 25 bp, Homo sapien
ggttctaggcacttcatatccacgt

SEQ ID NO: 4631525 - DNA, 25 bp, Homo sapien
aactgtatgtccaagtgtgtgtgcc

SEQ ID NO: 4631526 - DNA, 25 bp, Homo sapien
tgtgtgtgccagagacgctcacatg

SEQ ID NO: 4631527 - DNA, 25 bp, Homo sapien
gaatgagcgcacacagaactgtatg

SEQ ID NO: 4631528 - DNA, 25 bp, Homo sapien
gtccagggatggatattagaagtaa

SEQ ID NO: 4631529 - DNA, 25 bp, Homo sapien
ccagggatggatattagaagtaaga

SEQ ID NO: 4631530 - DNA, 25 bp, Homo sapien
catcacaaacatttggaatacaaaa

SEQ ID NO: 4631531 - DNA, 25 bp, Homo sapien
cacaaacatttggaatacaaaaagt

SEQ ID NO: 4631532 - DNA, 25 bp, Homo sapien
taccaaaagtagattacgacgcatg

SEQ ID NO: 4631533 - DNA, 25 bp, Homo sapien
tatctaccaaaagtagattacgacg

SEQ ID NO: 4631534 - DNA, 25 bp, Homo sapien
caaaagtagattacgacgcatgaag

SEQ ID NO: 4631535 - DNA, 25 bp, Homo sapien
aattatctaccaaaagtagattacg

SEQ ID NO: 4631536 - DNA, 25 bp, Homo sapien
ggaacctggtatcgtttcaggcaaa

SEQ ID NO: 4631537 - DNA, 25 bp, Homo sapien
tctgtaaaatggagtccctgcctgc

SEQ ID NO: 4631538 - DNA, 25 bp, Homo sapien
tgttgtttggcgaccccattggaga

SEQ ID NO: 4631539 - DNA, 25 bp, Homo sapien
tgggcttgtcgcacattccaggagg

SEQ ID NO: 4631540 - DNA, 25 bp, Homo sapien
aggctggcagatctcgcctcctggg

SEQ ID NO: 4631541 - DNA, 25 bp, Homo sapien
ttctggctcccatggacatgcaggc

SEQ ID NO: 4631542 - DNA, 25 bp, Homo sapien
ctggctcccatggacatgcaggctg

SEQ ID NO: 4631543 - DNA, 25 bp, Homo sapien
gctggcagatctcgcctcctgggac

SEQ ID NO: 4631544 - DNA, 25 bp, Homo sapien
ggatcagattgatggttgtttgcag

SEQ ID NO: 4631545 - DNA, 25 bp, Homo sapien
cagattgatggttgtttgcagagcg

SEQ ID NO: 4631546 - DNA, 25 bp, Homo sapien
tcagattgatggttgtttgcagagc

SEQ ID NO: 4631547 - DNA, 25 bp, Homo sapien
tttgcagagcggttgaccagggaga

SEQ ID NO: 4631548 - DNA, 25 bp, Homo sapien
tgcctcttgtcggctgaaacagatc

SEQ ID NO: 4631549 - DNA, 25 bp, Homo sapien
cctcttgtcggctgaaacagatcag

SEQ ID NO: 4631550 - DNA, 25 bp, Homo sapien
gcctcttgtcggctgaaacagatca

SEQ ID NO: 4631551 - DNA, 25 bp, Homo sapien
ggtgcctcttgtcggctgaaacaga

SEQ ID NO: 4631552 - DNA, 25 bp, Homo sapien
ccaattgatgagtgcgctgagcgcc

SEQ ID NO: 4631553 - DNA, 25 bp, Homo sapien
gaaggttttcatcacggagcaggcg

SEQ ID NO: 4631554 - DNA, 25 bp, Homo sapien
tcagccaagaagaggtagcgcaagc

SEQ ID NO: 4631555 - DNA, 25 bp, Homo sapien
gaagttgtcccgaatgccagagtaa

SEQ ID NO: 4631556 - DNA, 25 bp, Homo sapien
aaatcgtgaataataatgcatttac

SEQ ID NO: 4631557 - DNA, 25 bp, Homo sapien
gcatttacttattctcccacttaaa

SEQ ID NO: 4631558 - DNA, 25 bp, Homo sapien
caccttcagggccaagcatggactg

SEQ ID NO: 4631559 - DNA, 25 bp, Homo sapien
caagcatggactggaacactaagaa

SEQ ID NO: 4631560 - DNA, 25 bp, Homo sapien
gacaccaacggtgagacaaaaacca

SEQ ID NO: 4631561 - DNA, 25 bp, Homo sapien
agaggaggacaagcgccaggaggga

SEQ ID NO: 4631562 - DNA, 25 bp, Homo sapien
gcgggcaactgaacggcacggacac

SEQ ID NO: 4631563 - DNA, 25 bp, Homo sapien
cgctgtggtgccgactgggagagga

SEQ ID NO: 4631564 - DNA, 25 bp, Homo sapien
gaaggcctcgtcgttctcgatgccc

SEQ ID NO: 4631565 - DNA, 25 bp, Homo sapien
ccgccgtccaggatggcgaaggcct

SEQ ID NO: 4631566 - DNA, 25 bp, Homo sapien
tcgctctcttgctgcgccaagaagg

SEQ ID NO: 4631567 - DNA, 25 bp, Homo sapien
tcgatgcccgcaatctcgctctctt

SEQ ID NO: 4631568 - DNA, 25 bp, Homo sapien
tcacatgctgtctgaaggctcctcc

SEQ ID NO: 4631569 - DNA, 25 bp, Homo sapien
tacagtggctagtctggccaggcct

SEQ ID NO: 4631570 - DNA, 25 bp, Homo sapien
tacaagaatcaactggctcaagcca

SEQ ID NO: 4631571 - DNA, 25 bp, Homo sapien
tcaagccaagggatcgtctgttgct

SEQ ID NO: 4631572 - DNA, 25 bp, Homo sapien
gatactttcaggctctgactgcaat

SEQ ID NO: 4631573 - DNA, 25 bp, Homo sapien
tctccatttacggatactttcaggc

SEQ ID NO: 4631574 - DNA, 25 bp, Homo sapien
tcttctctccatttacggatacttt

SEQ ID NO: 4631575 - DNA, 25 bp, Homo sapien
tttacggatactttcaggctctgac

SEQ ID NO: 4631576 - DNA, 25 bp, Homo sapien
agaagatatcttcccaaagaccaga

SEQ ID NO: 4631577 - DNA, 25 bp, Homo sapien
ccaaagaccagacaatgacactggt

SEQ ID NO: 4631578 - DNA, 25 bp, Homo sapien
cctgtgattaggcatctctgtgcag

SEQ ID NO: 4631579 - DNA, 25 bp, Homo sapien
ccttgtaaccttcaggctgagaaga

SEQ ID NO: 4631580 - DNA, 25 bp, Homo sapien
ttgtggtgggtgcaggtccatgtct

SEQ ID NO: 4631581 - DNA, 25 bp, Homo sapien
caattgaggcaaagtgcaaactgaa

SEQ ID NO: 4631582 - DNA, 25 bp, Homo sapien
ttgaggcaaagtgcaaactgaagtt

SEQ ID NO: 4631583 - DNA, 25 bp, Homo sapien
cttgtggtgggtgcaggtccatgtc

SEQ ID NO: 4631584 - DNA, 25 bp, Homo sapien
tcctgtcttgcataccattcttcta

SEQ ID NO: 4631585 - DNA, 25 bp, Homo sapien
gctcgtcctgtcttgcataccattc

SEQ ID NO: 4631586 - DNA, 25 bp, Homo sapien
cgtcctgtcttgcataccattcttc

SEQ ID NO: 4631587 - DNA, 25 bp, Homo sapien
agctgctcgtcctgtcttgcatacc

SEQ ID NO: 4631588 - DNA, 25 bp, Homo sapien
gtgtgctacaaccaccacggactga

SEQ ID NO: 4631589 - DNA, 25 bp, Homo sapien
acaaagtgtgctacaaccaccacgg

SEQ ID NO: 4631590 - DNA, 25 bp, Homo sapien
aaagtgtgctacaaccaccacggac

SEQ ID NO: 4631591 - DNA, 25 bp, Homo sapien
agtgtgctacaaccaccacggactg

SEQ ID NO: 4631592 - DNA, 25 bp, Homo sapien
tgtcaaggttgcaggcccagaacaa

SEQ ID NO: 4631593 - DNA, 25 bp, Homo sapien
tgggtttccctccacaagaagagta

SEQ ID NO: 4631594 - DNA, 25 bp, Homo sapien
cctaggacaagctctggaggcacga

SEQ ID NO: 4631595 - DNA, 25 bp, Homo sapien
gagcaaactcatccagctgcaggag

SEQ ID NO: 4631596 - DNA, 25 bp, Homo sapien
aagaggtccaaaaggcaggcaagca

SEQ ID NO: 4631597 - DNA, 25 bp, Homo sapien
ctagacagcaagaggtccaaaaggc

SEQ ID NO: 4631598 - DNA, 25 bp, Homo sapien
gcaagcaggcaggaaaaaagagaga

SEQ ID NO: 4631599 - DNA, 25 bp, Homo sapien
gagagaacattgagaagcagaaaca

SEQ ID NO: 4631600 - DNA, 25 bp, Homo sapien
tcagcgaagggttgtttgtagaaag

SEQ ID NO: 4631601 - DNA, 25 bp, Homo sapien
taaccaatcacgtcagcgaagggtt

SEQ ID NO: 4631602 - DNA, 25 bp, Homo sapien
agggttgtttgtagaaagcttcatc

SEQ ID NO: 4631603 - DNA, 25 bp, Homo sapien
acataaccaatcacgtcagcgaagg

SEQ ID NO: 4631604 - DNA, 25 bp, Homo sapien
gctgtagcaaggatggtttatgttt

SEQ ID NO: 4631605 - DNA, 25 bp, Homo sapien
gtagcaaggatggtttatgtttgtg

SEQ ID NO: 4631606 - DNA, 25 bp, Homo sapien
tgtagcaaggatggtttatgtttgt

SEQ ID NO: 4631607 - DNA, 25 bp, Homo sapien
ctgtagcaaggatggtttatgtttg

SEQ ID NO: 4631608 - DNA, 25 bp, Homo sapien
acactgcgacttcatggcacacaca

SEQ ID NO: 4631609 - DNA, 25 bp, Homo sapien
cagagccactacaacactgcgactt

SEQ ID NO: 4631610 - DNA, 25 bp, Homo sapien
atggccgtggcaaacaccgctgaag

SEQ ID NO: 4631611 - DNA, 25 bp, Homo sapien
cactacaacactgcgacttcatggc

SEQ ID NO: 4631612 - DNA, 25 bp, Homo sapien
tcttaatgacattctggctttccca

SEQ ID NO: 4631613 - DNA, 25 bp, Homo sapien
tcagactcaggtagacacgtagctg

SEQ ID NO: 4631614 - DNA, 25 bp, Homo sapien
cccctttgagcaacctggtggctgc

SEQ ID NO: 4631615 - DNA, 25 bp, Homo sapien
ggtggctgccttgctacacaagcaa

SEQ ID NO: 4631616 - DNA, 25 bp, Homo sapien
ctttggcctgcttgctagacttggg

SEQ ID NO: 4631617 - DNA, 25 bp, Homo sapien
gactgagcgcatgcgggagacatct

SEQ ID NO: 4631618 - DNA, 25 bp, Homo sapien
catctttggcctgcttgctagactt

SEQ ID NO: 4631619 - DNA, 25 bp, Homo sapien
gggccacccgttcccactcagtgcc

SEQ ID NO: 4631620 - DNA, 25 bp, Homo sapien
gaggctactcttgggaagcttccct

SEQ ID NO: 4631621 - DNA, 25 bp, Homo sapien
cagaagcacaggttgaggctactct

SEQ ID NO: 4631622 - DNA, 25 bp, Homo sapien
aacatgcaatcacaaacaatgaaca

SEQ ID NO: 4631623 - DNA, 25 bp, Homo sapien
gaagagcttcactgagtaggattaa

SEQ ID NO: 4631624 - DNA, 25 bp, Homo sapien
tgccagccctgcagtaatctccagg

SEQ ID NO: 4631625 - DNA, 25 bp, Homo sapien
ttttattaaactcatgggaaggcta

SEQ ID NO: 4631626 - DNA, 25 bp, Homo sapien
tctgtacatcagacaattgcattgc

SEQ ID NO: 4631627 - DNA, 25 bp, Homo sapien
taatctctcatggtgaaatctgctc

SEQ ID NO: 4631628 - DNA, 25 bp, Homo sapien
aataatccttccagctgggcgcagt

SEQ ID NO: 4631629 - DNA, 25 bp, Homo sapien
aataataatccttccagctgggcgc

SEQ ID NO: 4631630 - DNA, 25 bp, Homo sapien
taataatccttccagctgggcgcag

SEQ ID NO: 4631631 - DNA, 25 bp, Homo sapien
ataataataatccttccagctgggc

SEQ ID NO: 4631632 - DNA, 25 bp, Homo sapien
gaagcatacgcctctggaatggcct

SEQ ID NO: 4631633 - DNA, 25 bp, Homo sapien
tatccctcgctgtaggaatcggtgg

SEQ ID NO: 4631634 - DNA, 25 bp, Homo sapien
tcagcatgaattgatccacggaagc

SEQ ID NO: 4631635 - DNA, 25 bp, Homo sapien
tgtttcaggtaaagcaccctcagtg

SEQ ID NO: 4631636 - DNA, 25 bp, Homo sapien
aaacttgtatgtgcttaaactctac

SEQ ID NO: 4631637 - DNA, 25 bp, Homo sapien
gaatggacctttggagttccctgct

SEQ ID NO: 4631638 - DNA, 25 bp, Homo sapien
tacattacaccactatccctttaag

SEQ ID NO: 4631639 - DNA, 25 bp, Homo sapien
taataagcggttaagccagcatctg

SEQ ID NO: 4631640 - DNA, 25 bp, Homo sapien
tgctctcagtttaggtagaataacc

SEQ ID NO: 4631641 - DNA, 25 bp, Homo sapien
ctcaaatttgatcactggaagaagg

SEQ ID NO: 4631642 - DNA, 25 bp, Homo sapien
cacttacgacaaccatttttggaag

SEQ ID NO: 4631643 - DNA, 25 bp, Homo sapien
gcattttagtactgccagatggaac

SEQ ID NO: 4631644 - DNA, 25 bp, Homo sapien
tggccgcgctacacgacagtatagt

SEQ ID NO: 4631645 - DNA, 25 bp, Homo sapien
ttatcttcaggagctgcgcaagccc

SEQ ID NO: 4631646 - DNA, 25 bp, Homo sapien
gaggccgccgctgaactgattataa

SEQ ID NO: 4631647 - DNA, 25 bp, Homo sapien
tgtcttctagcagtcacggcaaggg

SEQ ID NO: 4631648 - DNA, 25 bp, Homo sapien
gagatttgaaatttgctgtacagca

SEQ ID NO: 4631649 - DNA, 25 bp, Homo sapien
ccttttcgtggctccaagctagcca

SEQ ID NO: 4631650 - DNA, 25 bp, Homo sapien
ctagccacaggagaactaagagttc

SEQ ID NO: 4631651 - DNA, 25 bp, Homo sapien
ttgaaatgcatcacaaactgcagtt

SEQ ID NO: 4631652 - DNA, 25 bp, Homo sapien
gaattgctcagtttattccacctct

SEQ ID NO: 4631653 - DNA, 25 bp, Homo sapien
attgctcagtttattccacctcttg

SEQ ID NO: 4631654 - DNA, 25 bp, Homo sapien
atgaattgctcagtttattccacct

SEQ ID NO: 4631655 - DNA, 25 bp, Homo sapien
tgaattgctcagtttattccacctc

SEQ ID NO: 4631656 - DNA, 25 bp, Homo sapien
aataatcgcaccttggataaacctc

SEQ ID NO: 4631657 - DNA, 25 bp, Homo sapien
tagcaataatcgcaccttggataaa

SEQ ID NO: 4631658 - DNA, 25 bp, Homo sapien
gcaataatcgcaccttggataaacc

SEQ ID NO: 4631659 - DNA, 25 bp, Homo sapien
caattagcaataatcgcaccttgga

SEQ ID NO: 4631660 - DNA, 25 bp, Homo sapien
tcctagctgtatcaccaatgcatac

SEQ ID NO: 4631661 - DNA, 25 bp, Homo sapien
caatgcatactttctatctgccttc

SEQ ID NO: 4631662 - DNA, 25 bp, Homo sapien
ttcctgcaattattgccaacacagt

SEQ ID NO: 4631663 - DNA, 25 bp, Homo sapien
caatcagatgatattattcctgcaa

SEQ ID NO: 4631664 - DNA, 25 bp, Homo sapien
ttgttgagggttatgtataccttta

SEQ ID NO: 4631665 - DNA, 25 bp, Homo sapien
aaaatgttgttgagggttatgtata

SEQ ID NO: 4631666 - DNA, 25 bp, Homo sapien
tgttgttgagggttatgtatacctt

SEQ ID NO: 4631667 - DNA, 25 bp, Homo sapien
aaatgttgttgagggttatgtatac

SEQ ID NO: 4631668 - DNA, 25 bp, Homo sapien
gaagttgattccaacgctcatagtt

SEQ ID NO: 4631669 - DNA, 25 bp, Homo sapien
aatagccacattaacaggatttggg

SEQ ID NO: 4631670 - DNA, 25 bp, Homo sapien
ttagggggctcaagacttctgtgga

SEQ ID NO: 4631671 - DNA, 25 bp, Homo sapien
cacagcaagagaagtacagttagaa

SEQ ID NO: 4631672 - DNA, 25 bp, Homo sapien
gttgaaagtgtcactccagggaaca

SEQ ID NO: 4631673 - DNA, 25 bp, Homo sapien
gagttatgctaaagctggccaggcg

SEQ ID NO: 4631674 - DNA, 25 bp, Homo sapien
aaggcggctgcgctaaacaacagat

SEQ ID NO: 4631675 - DNA, 25 bp, Homo sapien
catgtaggaccctcatagctagaga

SEQ ID NO: 4631676 - DNA, 25 bp, Homo sapien
cctggagcaaggctatcggtgccat

SEQ ID NO: 4631677 - DNA, 25 bp, Homo sapien
gatactgcacgttttacaaatggaa

SEQ ID NO: 4631678 - DNA, 25 bp, Homo sapien
tccccgtgttatgctctgtgagtcc

SEQ ID NO: 4631679 - DNA, 25 bp, Homo sapien
cgtggtgcgaccactgtagcctcaa

SEQ ID NO: 4631680 - DNA, 25 bp, Homo sapien
ccagcggccttgtcaggaggtttct

SEQ ID NO: 4631681 - DNA, 25 bp, Homo sapien
ttcccattgaacttgccagcggcct

SEQ ID NO: 4631682 - DNA, 25 bp, Homo sapien
tttagttctcggctccgtgagggat

SEQ ID NO: 4631683 - DNA, 25 bp, Homo sapien
tgagactggaacacgatgctgcagc

SEQ ID NO: 4631684 - DNA, 25 bp, Homo sapien
gggatgcccgcatggtttccccaag

SEQ ID NO: 4631685 - DNA, 25 bp, Homo sapien
tgcggttaccaaatcagaccctggg

SEQ ID NO: 4631686 - DNA, 25 bp, Homo sapien
gtcatttgaaggaatctgggcctcc

SEQ ID NO: 4631687 - DNA, 25 bp, Homo sapien
cagggcgcctgcttgctgaacagga

SEQ ID NO: 4631688 - DNA, 25 bp, Homo sapien
tgtcacccaggctagagtgcaatgg

SEQ ID NO: 4631689 - DNA, 25 bp, Homo sapien
ctcaagtgatacacctgcctcggcc

SEQ ID NO: 4631690 - DNA, 25 bp, Homo sapien
ccagcctccagctgctctttttttg

SEQ ID NO: 4631691 - DNA, 25 bp, Homo sapien
tttgtttgagacagagtctcgctct

SEQ ID NO: 4631692 - DNA, 25 bp, Homo sapien
caaattcttatccatagcaatgcaa

SEQ ID NO: 4631693 - DNA, 25 bp, Homo sapien
cctggcttggtaaagcaaattctta

SEQ ID NO: 4631694 - DNA, 25 bp, Homo sapien
ccgcgcctggcttggtaaagcaaat

SEQ ID NO: 4631695 - DNA, 25 bp, Homo sapien
ggtaaagcaaattcttatccatagc

SEQ ID NO: 4631696 - DNA, 25 bp, Homo sapien
gagcctaggtgtccagatgtaggca

SEQ ID NO: 4631697 - DNA, 25 bp, Homo sapien
tgtggttccacaatccagagtgaga

SEQ ID NO: 4631698 - DNA, 25 bp, Homo sapien
tctgacaggagcctaggtgtccaga

SEQ ID NO: 4631699 - DNA, 25 bp, Homo sapien
ggagaggagaatcccagtaatgagt

SEQ ID NO: 4631700 - DNA, 25 bp, Homo sapien
gctgcacagatttaagccagagcca

SEQ ID NO: 4631701 - DNA, 25 bp, Homo sapien
gagacttccgatcaagcgtggtggc

SEQ ID NO: 4631702 - DNA, 25 bp, Homo sapien
acaagactgaggtttgctgcacaga

SEQ ID NO: 4631703 - DNA, 25 bp, Homo sapien
cctagtgatttagaatcatcctgct

SEQ ID NO: 4631704 - DNA, 25 bp, Homo sapien
attgtcagcaaagtgaagagccact

SEQ ID NO: 4631705 - DNA, 25 bp, Homo sapien
cttaaacacgatttgcaacattttt

SEQ ID NO: 4631706 - DNA, 25 bp, Homo sapien
cattgtcagcaaagtgaagagccac

SEQ ID NO: 4631707 - DNA, 25 bp, Homo sapien
tacttaaacacgatttgcaacattt

SEQ ID NO: 4631708 - DNA, 25 bp, Homo sapien
gagccatgaacaaagagtcaagcta

SEQ ID NO: 4631709 - DNA, 25 bp, Homo sapien
atgaacaaagagtcaagctaccttt

SEQ ID NO: 4631710 - DNA, 25 bp, Homo sapien
gccatgaacaaagagtcaagctacc

SEQ ID NO: 4631711 - DNA, 25 bp, Homo sapien
ctgagccatgaacaaagagtcaagc

SEQ ID NO: 4631712 - DNA, 25 bp, Homo sapien
gctgcttgaccctgcaaaataaaag

SEQ ID NO: 4631713 - DNA, 25 bp, Homo sapien
tttcaggcctgtccaaacattacac

SEQ ID NO: 4631714 - DNA, 25 bp, Homo sapien
catatcatgagcagaaagtctgagc

SEQ ID NO: 4631715 - DNA, 25 bp, Homo sapien
gaggcacaataaactgactatcaag

SEQ ID NO: 4631716 - DNA, 25 bp, Homo sapien
tgttcatgcagtgccattttaatcc

SEQ ID NO: 4631717 - DNA, 25 bp, Homo sapien
ggtcatcctgcttggagttccccac

SEQ ID NO: 4631718 - DNA, 25 bp, Homo sapien
tctgtcttgaaagcggtcatcctgc

SEQ ID NO: 4631719 - DNA, 25 bp, Homo sapien
gcccagccgacacttctgtcttgaa

SEQ ID NO: 4631720 - DNA, 25 bp, Homo sapien
cttccgggctatcggcgcagctcat

SEQ ID NO: 4631721 - DNA, 25 bp, Homo sapien
gcaacgctagttccgcttccgggct

SEQ ID NO: 4631722 - DNA, 25 bp, Homo sapien
gctgctgatctgcaacgctagttcc

SEQ ID NO: 4631723 - DNA, 25 bp, Homo sapien
taatgactctatccgctgaggccct

SEQ ID NO: 4631724 - DNA, 25 bp, Homo sapien
gcaatccacccgtaggaagtccctg

SEQ ID NO: 4631725 - DNA, 25 bp, Homo sapien
cgtaggaagtccctggccgacctca

SEQ ID NO: 4631726 - DNA, 25 bp, Homo sapien
gtaggaagtccctggccgacctcac

SEQ ID NO: 4631727 - DNA, 25 bp, Homo sapien
tcacagcaatccacccgtaggaagt

SEQ ID NO: 4631728 - DNA, 25 bp, Homo sapien
tatttcttgaagctcctcagtgcac

SEQ ID NO: 4631729 - DNA, 25 bp, Homo sapien
tgcactcggtgaattgcacaataag

SEQ ID NO: 4631730 - DNA, 25 bp, Homo sapien
ggacaaaatggctgtgatgagagaa

SEQ ID NO: 4631731 - DNA, 25 bp, Homo sapien
aattgcacaataagtagccgtaggg

SEQ ID NO: 4631732 - DNA, 25 bp, Homo sapien
tctcacaaagatgtggacggaaacc

SEQ ID NO: 4631733 - DNA, 25 bp, Homo sapien
ctcacaaagatgtggacggaaaccc

SEQ ID NO: 4631734 - DNA, 25 bp, Homo sapien
tgtaaccaaatcatttgaaggcttg

SEQ ID NO: 4631735 - DNA, 25 bp, Homo sapien
cctgttggtacatttggttacctca

SEQ ID NO: 4631736 - DNA, 25 bp, Homo sapien
tccctgtgcccaattttggagttga

SEQ ID NO: 4631737 - DNA, 25 bp, Homo sapien
ggttacctcattttgccgtttcaga

SEQ ID NO: 4631738 - DNA, 25 bp, Homo sapien
gaaaccctggtttcaggatggatca

SEQ ID NO: 4631739 - DNA, 25 bp, Homo sapien
taagaagaccactagtcccatgaag

SEQ ID NO: 4631740 - DNA, 25 bp, Homo sapien
cacgtgcttctcatcgaaaccctgg

SEQ ID NO: 4631741 - DNA, 25 bp, Homo sapien
gctcctgtgggcaactcaattgttt

SEQ ID NO: 4631742 - DNA, 25 bp, Homo sapien
ctgatggctaatgatcttgagtgtg

SEQ ID NO: 4631743 - DNA, 25 bp, Homo sapien
tttgggattgaataatgccaaagct

SEQ ID NO: 4631744 - DNA, 25 bp, Homo sapien
ggctttgaatcactctatattgtct

SEQ ID NO: 4631745 - DNA, 25 bp, Homo sapien
ttattgagttgtagaggttttatac

SEQ ID NO: 4631746 - DNA, 25 bp, Homo sapien
tctatatagattacacataaatggg

SEQ ID NO: 4631747 - DNA, 25 bp, Homo sapien
tatagggtctttttgtgtctagcat

SEQ ID NO: 4631748 - DNA, 25 bp, Homo sapien
cccagtctacactgtgtctatatag

SEQ ID NO: 4631749 - DNA, 25 bp, Homo sapien
aatggggtcatacaatatagggtct

SEQ ID NO: 4631750 - DNA, 25 bp, Homo sapien
tattttgggacactgggagatataa

SEQ ID NO: 4631751 - DNA, 25 bp, Homo sapien
ggtccagttgttttgataggccagg

SEQ ID NO: 4631752 - DNA, 25 bp, Homo sapien
cagatgaggtagtctgttaacatag

SEQ ID NO: 4631753 - DNA, 25 bp, Homo sapien
ttaattctgtcttgggactgggata

SEQ ID NO: 4631754 - DNA, 25 bp, Homo sapien
cttgaaagacagaaccgtgatattc

SEQ ID NO: 4631755 - DNA, 25 bp, Homo sapien
gacagaaccgtgatattcaacgtaa

SEQ ID NO: 4631756 - DNA, 25 bp, Homo sapien
cataatgtttctgggtataaaaagt

SEQ ID NO: 4631757 - DNA, 25 bp, Homo sapien
gatattcaacgtaatggcataatgt

SEQ ID NO: 4631758 - DNA, 25 bp, Homo sapien
ttgtgcgagtcaggattgcgccact

SEQ ID NO: 4631759 - DNA, 25 bp, Homo sapien
agtcaggattgtgcgagtcaggatt

SEQ ID NO: 4631760 - DNA, 25 bp, Homo sapien
gaaaccagcctgaataatatgatga

SEQ ID NO: 4631761 - DNA, 25 bp, Homo sapien
gaatggtttctcctaatactgccta

SEQ ID NO: 4631762 - DNA, 25 bp, Homo sapien
tgtaatggatagaggatttctttcg

SEQ ID NO: 4631763 - DNA, 25 bp, Homo sapien
cattctctgtgtaatggatagagga

SEQ ID NO: 4631764 - DNA, 25 bp, Homo sapien
ggatagaggatttctttcgttgcat

SEQ ID NO: 4631765 - DNA, 25 bp, Homo sapien
tttctgcattctctgtgtaatggat

SEQ ID NO: 4631766 - DNA, 25 bp, Homo sapien
gggtcatgtacacagtctcttccca

SEQ ID NO: 4631767 - DNA, 25 bp, Homo sapien
cctgttattaattgtccctcactag

SEQ ID NO: 4631768 - DNA, 25 bp, Homo sapien
tcttctatctaggttatggagccct

SEQ ID NO: 4631769 - DNA, 25 bp, Homo sapien
ctagactgagttgctttaagggtaa

SEQ ID NO: 4631770 - DNA, 25 bp, Homo sapien
ggacgggctgcgggccgttgagagc

SEQ ID NO: 4631771 - DNA, 25 bp, Homo sapien
gcgggctgggcgagcagtcacaata

SEQ ID NO: 4631772 - DNA, 25 bp, Homo sapien
aggatccgcgggagctgcccggcag

SEQ ID NO: 4631773 - DNA, 25 bp, Homo sapien
cagtcacaataggaggcggcggccc

SEQ ID NO: 4631774 - DNA, 25 bp, Homo sapien
gacggcggatctggcgagctggccg

SEQ ID NO: 4631775 - DNA, 25 bp, Homo sapien
tctgggcgtgcagccgtcgtttcct

SEQ ID NO: 4631776 - DNA, 25 bp, Homo sapien
ctggcgcggcccgtgtgatggtgcc

SEQ ID NO: 4631777 - DNA, 25 bp, Homo sapien
tgcagccgtcgtttcctggcgcggc

SEQ ID NO: 4631778 - DNA, 25 bp, Homo sapien
tcatctctgggcgtgcagccgtcgt

SEQ ID NO: 4631779 - DNA, 25 bp, Homo sapien
gctgttgaatcatgcctttcaatgc

SEQ ID NO: 4631780 - DNA, 25 bp, Homo sapien
tgaatcatgcctttcaatgccttaa

SEQ ID NO: 4631781 - DNA, 25 bp, Homo sapien
ctgtagctgttgaatcatgcctttc

SEQ ID NO: 4631782 - DNA, 25 bp, Homo sapien
gtagctgttgaatcatgcctttcaa

SEQ ID NO: 4631783 - DNA, 25 bp, Homo sapien
cttttcagtgccagtccatccatca

SEQ ID NO: 4631784 - DNA, 25 bp, Homo sapien
ttgtaggtagtgttggtgcttcttt

SEQ ID NO: 4631785 - DNA, 25 bp, Homo sapien
tgacaaggtgaggttcgtgttgatg

SEQ ID NO: 4631786 - DNA, 25 bp, Homo sapien
ttcagtgccagtccatccatcacga

SEQ ID NO: 4631787 - DNA, 25 bp, Homo sapien
taagtcagctagaacatacagctct

SEQ ID NO: 4631788 - DNA, 25 bp, Homo sapien
gaagtctggttaagaagattctgct

SEQ ID NO: 4631789 - DNA, 25 bp, Homo sapien
tggtaaccagaagattaagtcagct

SEQ ID NO: 4631790 - DNA, 25 bp, Homo sapien
aagtcacctccccttttgtgcttgg

SEQ ID NO: 4631791 - DNA, 25 bp, Homo sapien
taaggcttgcatttcatctacataa

SEQ ID NO: 4631792 - DNA, 25 bp, Homo sapien
aaggcttgcatttcatctacataat

SEQ ID NO: 4631793 - DNA, 25 bp, Homo sapien
tatatcaaccattctacgtcatgat

SEQ ID NO: 4631794 - DNA, 25 bp, Homo sapien
ccacgcctggtaataaacacttata

SEQ ID NO: 4631795 - DNA, 25 bp, Homo sapien
tcttgttggcaatcttttagtgaaa

SEQ ID NO: 4631796 - DNA, 25 bp, Homo sapien
ctacgtcatgatgtgcttctaagaa

SEQ ID NO: 4631797 - DNA, 25 bp, Homo sapien
gggtcaccaactcgcagaattcttc

SEQ ID NO: 4631798 - DNA, 25 bp, Homo sapien
taagtcttctaacaacaagggcatg

SEQ ID NO: 4631799 - DNA, 25 bp, Homo sapien
tcttttgagactaggcccagctggg

SEQ ID NO: 4631800 - DNA, 25 bp, Homo sapien
caaacatgaggaggaaacggtttca

SEQ ID NO: 4631801 - DNA, 25 bp, Homo sapien
tcccgcttcccttgggagttgaaca

SEQ ID NO: 4631802 - DNA, 25 bp, Homo sapien
caggctgctttcccgcttcccttgg

SEQ ID NO: 4631803 - DNA, 25 bp, Homo sapien
cccgcttcccttgggagttgaacat

SEQ ID NO: 4631804 - DNA, 25 bp, Homo sapien
cctgctcgcttcttatacgctgcaa

SEQ ID NO: 4631805 - DNA, 25 bp, Homo sapien
ctcctgctcgcttcttatacgctgc

SEQ ID NO: 4631806 - DNA, 25 bp, Homo sapien
tgctcgcttcttatacgctgcaatc

SEQ ID NO: 4631807 - DNA, 25 bp, Homo sapien
gctcgcttcttatacgctgcaatct

SEQ ID NO: 4631808 - DNA, 25 bp, Homo sapien
tggctgagatgagaatgggcacagg

SEQ ID NO: 4631809 - DNA, 25 bp, Homo sapien
tcactacagaaggtctctgtacttt

SEQ ID NO: 4631810 - DNA, 25 bp, Homo sapien
ctgagatgagaatgggcacaggcac

SEQ ID NO: 4631811 - DNA, 25 bp, Homo sapien
gaaggtctctgtactttggctgaga

SEQ ID NO: 4631812 - DNA, 25 bp, Homo sapien
ttcgatcgccgggttgtggccgctt

SEQ ID NO: 4631813 - DNA, 25 bp, Homo sapien
ctggtacggcgttcctaagaatctt

SEQ ID NO: 4631814 - DNA, 25 bp, Homo sapien
tgctgtcctgagagacgcggctggt

SEQ ID NO: 4631815 - DNA, 25 bp, Homo sapien
tgagcggcgcccgacagaaggacag

SEQ ID NO: 4631816 - DNA, 25 bp, Homo sapien
cgcgggtcggaaaggtcaaatatct

SEQ ID NO: 4631817 - DNA, 25 bp, Homo sapien
tgaaatcctccagtctcccgagagc

SEQ ID NO: 4631818 - DNA, 25 bp, Homo sapien
aatatcttatccagggaacagggct

SEQ ID NO: 4631819 - DNA, 25 bp, Homo sapien
tcccgagagccaggagcaaactggg

SEQ ID NO: 4631820 - DNA, 25 bp, Homo sapien
agtcctcttgcaagtttatttggaa

SEQ ID NO: 4631821 - DNA, 25 bp, Homo sapien
cttgcaagtttatttggaattagaa

SEQ ID NO: 4631822 - DNA, 25 bp, Homo sapien
cctcttgcaagtttatttggaatta

SEQ ID NO: 4631823 - DNA, 25 bp, Homo sapien
gtcctcttgcaagtttatttggaat

SEQ ID NO: 4631824 - DNA, 25 bp, Homo sapien
ttgagaagttcatcataatctttca

SEQ ID NO: 4631825 - DNA, 25 bp, Homo sapien
cataatatttgagaagttcatcata

SEQ ID NO: 4631826 - DNA, 25 bp, Homo sapien
gtaattcataatatttgagaagttc

SEQ ID NO: 4631827 - DNA, 25 bp, Homo sapien
ttcatgtaattcataatatttgaga

SEQ ID NO: 4631828 - DNA, 25 bp, Homo sapien
catctctccagtaaggatatggcag

SEQ ID NO: 4631829 - DNA, 25 bp, Homo sapien
gatttttatagctaccatctctcca

SEQ ID NO: 4631830 - DNA, 25 bp, Homo sapien
gatatggcaggcaagtttgaccttt

SEQ ID NO: 4631831 - DNA, 25 bp, Homo sapien
ccagtaaggatatggcaggcaagtt

SEQ ID NO: 4631832 - DNA, 25 bp, Homo sapien
gcctcaatctccgttttgatccggg

SEQ ID NO: 4631833 - DNA, 25 bp, Homo sapien
gctgatgtctcaggttcttcaaggc

SEQ ID NO: 4631834 - DNA, 25 bp, Homo sapien
tctagcacatggtagagttgacata

SEQ ID NO: 4631835 - DNA, 25 bp, Homo sapien
caagaaccatgaatattttgttggc

SEQ ID NO: 4631836 - DNA, 25 bp, Homo sapien
agtcaaacagctctcctccagggca

SEQ ID NO: 4631837 - DNA, 25 bp, Homo sapien
tgggaaattatatagtcaaacagct

SEQ ID NO: 4631838 - DNA, 25 bp, Homo sapien
caaacagctctcctccagggcagta

SEQ ID NO: 4631839 - DNA, 25 bp, Homo sapien
ctgggaaattatatagtcaaacagc

SEQ ID NO: 4631840 - DNA, 25 bp, Homo sapien
aagacaacccgggtctcctcttctg

SEQ ID NO: 4631841 - DNA, 25 bp, Homo sapien
gcaacagcagatactatctgacgga

SEQ ID NO: 4631842 - DNA, 25 bp, Homo sapien
gccctggctgtgcacataagcaaca

SEQ ID NO: 4631843 - DNA, 25 bp, Homo sapien
tatctgacggaagacaacccgggtc

SEQ ID NO: 4631844 - DNA, 25 bp, Homo sapien
tatgatattcatcaaacagcaaatt

SEQ ID NO: 4631845 - DNA, 25 bp, Homo sapien
gagaccaaagtcaatcagctttaat

SEQ ID NO: 4631846 - DNA, 25 bp, Homo sapien
cttgggttttgcacagagaccaaag

SEQ ID NO: 4631847 - DNA, 25 bp, Homo sapien
cagctttaatttatgatattcatca

SEQ ID NO: 4631848 - DNA, 25 bp, Homo sapien
ccttgtattaactcaggtgctgcat

SEQ ID NO: 4631849 - DNA, 25 bp, Homo sapien
gatatgatttgccttgtattaactc

SEQ ID NO: 4631850 - DNA, 25 bp, Homo sapien
cccacagcatgtctgtagatggtaa

SEQ ID NO: 4631851 - DNA, 25 bp, Homo sapien
catgtctgtagatggtaatccttgt

SEQ ID NO: 4631852 - DNA, 25 bp, Homo sapien
taacagtatgcccatgctccaaaca

SEQ ID NO: 4631853 - DNA, 25 bp, Homo sapien
taagaacatataacagtatgcccat

SEQ ID NO: 4631854 - DNA, 25 bp, Homo sapien
gtatgcccatgctccaaacatctgc

SEQ ID NO: 4631855 - DNA, 25 bp, Homo sapien
catataacagtatgcccatgctcca

SEQ ID NO: 4631856 - DNA, 25 bp, Homo sapien
cagcttttagtgtataacctagcca

SEQ ID NO: 4631857 - DNA, 25 bp, Homo sapien
caattctgcgatgaatgtaaccctt

SEQ ID NO: 4631858 - DNA, 25 bp, Homo sapien
taacctagaacccttattcagtgca

SEQ ID NO: 4631859 - DNA, 25 bp, Homo sapien
gaagtctcacggcacaatcttcgct

SEQ ID NO: 4631860 - DNA, 25 bp, Homo sapien
tccacttcacctttaaggtggactg

SEQ ID NO: 4631861 - DNA, 25 bp, Homo sapien
ttgaagaagcagaatgctactggga

SEQ ID NO: 4631862 - DNA, 25 bp, Homo sapien
gaagaagcagaatgctactgggaga

SEQ ID NO: 4631863 - DNA, 25 bp, Homo sapien
aagcagaatgctactgggagagagc

SEQ ID NO: 4631864 - DNA, 25 bp, Homo sapien
gaatgctactgggagagagccactt

SEQ ID NO: 4631865 - DNA, 25 bp, Homo sapien
tcatagaaatccgtttctttgggtc

SEQ ID NO: 4631866 - DNA, 25 bp, Homo sapien
gctttgccactcaacaggatagttg

SEQ ID NO: 4631867 - DNA, 25 bp, Homo sapien
gccactcaacaggatagttgtaatc

SEQ ID NO: 4631868 - DNA, 25 bp, Homo sapien
ctcaacaggatagttgtaatcttgc

SEQ ID NO: 4631869 - DNA, 25 bp, Homo sapien
tcttgctttgccactcaacaggata

SEQ ID NO: 4631870 - DNA, 25 bp, Homo sapien
cctccattgtttgcctgttgtttct

SEQ ID NO: 4631871 - DNA, 25 bp, Homo sapien
cagaaagttctgttacgcaatcatc

SEQ ID NO: 4631872 - DNA, 25 bp, Homo sapien
cgcaatcatcatcgaggtgaataaa

SEQ ID NO: 4631873 - DNA, 25 bp, Homo sapien
aatcctccattgtttgcctgttgtt

SEQ ID NO: 4631874 - DNA, 25 bp, Homo sapien
cttggctagaagcagaagataggta

SEQ ID NO: 4631875 - DNA, 25 bp, Homo sapien
gataggtagccgtgaggtgatcata

SEQ ID NO: 4631876 - DNA, 25 bp, Homo sapien
tagccgtgaggtgatcatactgcca

SEQ ID NO: 4631877 - DNA, 25 bp, Homo sapien
agcactggcttgtccacaggagaaa

SEQ ID NO: 4631878 - DNA, 25 bp, Homo sapien
ctggacccagatgtgttacttgcac

SEQ ID NO: 4631879 - DNA, 25 bp, Homo sapien
gcaaaattcagggttttgcattttc

SEQ ID NO: 4631880 - DNA, 25 bp, Homo sapien
atgcaaaattcagggttttgcattt

SEQ ID NO: 4631881 - DNA, 25 bp, Homo sapien
agatgcaaaattcagggttttgcat

SEQ ID NO: 4631882 - DNA, 25 bp, Homo sapien
aatcatagtctattaatcccgccac

SEQ ID NO: 4631883 - DNA, 25 bp, Homo sapien
tgatgttcggggagtagcagcacct

SEQ ID NO: 4631884 - DNA, 25 bp, Homo sapien
tagcagcacctgttgataaatcatc

SEQ ID NO: 4631885 - DNA, 25 bp, Homo sapien
ttatcacttgcggtcacatcttcca

SEQ ID NO: 4631886 - DNA, 25 bp, Homo sapien
gagttaatgatttagattccacccc

SEQ ID NO: 4631887 - DNA, 25 bp, Homo sapien
tattaactggagtctttggctcagg

SEQ ID NO: 4631888 - DNA, 25 bp, Homo sapien
ctttacagcagacttaggagtatat

SEQ ID NO: 4631889 - DNA, 25 bp, Homo sapien
tggctcaggaaacataaagtactct

SEQ ID NO: 4631890 - DNA, 25 bp, Homo sapien
cacctgtcattaacttgtctgttcc

SEQ ID NO: 4631891 - DNA, 25 bp, Homo sapien
gggctaatgacacctgtcattaact

SEQ ID NO: 4631892 - DNA, 25 bp, Homo sapien
attggagtttctttcaggcactggt

SEQ ID NO: 4631893 - DNA, 25 bp, Homo sapien
ggagtttctttcaggcactggtttc

SEQ ID NO: 4631894 - DNA, 25 bp, Homo sapien
tctggcagaacccttccttttgctc

SEQ ID NO: 4631895 - DNA, 25 bp, Homo sapien
tcttctgggcccgtctctggcagaa

SEQ ID NO: 4631896 - DNA, 25 bp, Homo sapien
tccatatgtgcttggttgagatcca

SEQ ID NO: 4631897 - DNA, 25 bp, Homo sapien
tcctggtgagcacagtgataacctt

SEQ ID NO: 4631898 - DNA, 25 bp, Homo sapien
ccttgcaactcttccggtaagtgta

SEQ ID NO: 4631899 - DNA, 25 bp, Homo sapien
tagagcaaatgtcgtgaaactgagt

SEQ ID NO: 4631900 - DNA, 25 bp, Homo sapien
tagtgcacccaatacacccatagag

SEQ ID NO: 4631901 - DNA, 25 bp, Homo sapien
tgagtgttaacgaagggaccctctc

SEQ ID NO: 4631902 - DNA, 25 bp, Homo sapien
tcaacagttgatctggattcactaa

SEQ ID NO: 4631903 - DNA, 25 bp, Homo sapien
tctggattcactaatctagttgtag

SEQ ID NO: 4631904 - DNA, 25 bp, Homo sapien
tagttgtagtcacgttatagtgaag

SEQ ID NO: 4631905 - DNA, 25 bp, Homo sapien
cactaatctagttgtagtcacgtta

SEQ ID NO: 4631906 - DNA, 25 bp, Homo sapien
gattaagtgctgttccacagatgtg

SEQ ID NO: 4631907 - DNA, 25 bp, Homo sapien
aaacacatcttaagacatacgtatg

SEQ ID NO: 4631908 - DNA, 25 bp, Homo sapien
taccaatcttcaataaataggactg

SEQ ID NO: 4631909 - DNA, 25 bp, Homo sapien
catacgtatgatcctgcaaagctgt

SEQ ID NO: 4631910 - DNA, 25 bp, Homo sapien
caaaatctgactgtgtttgacactt

SEQ ID NO: 4631911 - DNA, 25 bp, Homo sapien
tttttgaagctggcacacttctaat

SEQ ID NO: 4631912 - DNA, 25 bp, Homo sapien
ctaattcaaattgcattgtcacttt

SEQ ID NO: 4631913 - DNA, 25 bp, Homo sapien
gactgtgtttgacacttcagtgtat

SEQ ID NO: 4631914 - DNA, 25 bp, Homo sapien
tgtaaacccaggcatcgcccttaag

SEQ ID NO: 4631915 - DNA, 25 bp, Homo sapien
tgcagctagataggatgtcttccac

SEQ ID NO: 4631916 - DNA, 25 bp, Homo sapien
tgtcttccactaatcttttgtaaac

SEQ ID NO: 4631917 - DNA, 25 bp, Homo sapien
cactaatcttttgtaaacccaggca

SEQ ID NO: 4631918 - DNA, 25 bp, Homo sapien
taaaatcaaagcgatcataacagtc

SEQ ID NO: 4631919 - DNA, 25 bp, Homo sapien
catccggcaggatggaagaatccat

SEQ ID NO: 4631920 - DNA, 25 bp, Homo sapien
tatgtaggctgtatcacacccacac

SEQ ID NO: 4631921 - DNA, 25 bp, Homo sapien
gacagtaacataatgacagatgggc

SEQ ID NO: 4631922 - DNA, 25 bp, Homo sapien
taatagtcaggaagccatttgaggt

SEQ ID NO: 4631923 - DNA, 25 bp, Homo sapien
aacttgagttctagcctttggagac

SEQ ID NO: 4631924 - DNA, 25 bp, Homo sapien
tgcccaaggcatatttgataacaga

SEQ ID NO: 4631925 - DNA, 25 bp, Homo sapien
gggccaacattgagacttagggaaa

SEQ ID NO: 4631926 - DNA, 25 bp, Homo sapien
cttctacaaacacactgaccacagg

SEQ ID NO: 4631927 - DNA, 25 bp, Homo sapien
gctaataactgttggtagttccttc

SEQ ID NO: 4631928 - DNA, 25 bp, Homo sapien
aaaaaacctctcatatgtgctaata

SEQ ID NO: 4631929 - DNA, 25 bp, Homo sapien
cactgaccacaggatccattaattc

SEQ ID NO: 4631930 - DNA, 25 bp, Homo sapien
ttaaaaagtgttcaaaagcatcagg

SEQ ID NO: 4631931 - DNA, 25 bp, Homo sapien
tcaaaagcatcagggagctgctgaa

SEQ ID NO: 4631932 - DNA, 25 bp, Homo sapien
gggagctgctgaagcaatgaggatg

SEQ ID NO: 4631933 - DNA, 25 bp, Homo sapien
catcagggagctgctgaagcaatga

SEQ ID NO: 4631934 - DNA, 25 bp, Homo sapien
tactccaaatactgttagacgtggc

SEQ ID NO: 4631935 - DNA, 25 bp, Homo sapien
ttctcagggttcagcagttcacact

SEQ ID NO: 4631936 - DNA, 25 bp, Homo sapien
tatgtgctccagatgccgcattaca

SEQ ID NO: 4631937 - DNA, 25 bp, Homo sapien
acatcatcaagtcgcctgggttctg

SEQ ID NO: 4631938 - DNA, 25 bp, Homo sapien
gaccttccagatacctcaaaccatt

SEQ ID NO: 4631939 - DNA, 25 bp, Homo sapien
gcaccaggttaaagcccagaccaga

SEQ ID NO: 4631940 - DNA, 25 bp, Homo sapien
acccgtcaggggcatgaactcttcc

SEQ ID NO: 4631941 - DNA, 25 bp, Homo sapien
tcaaaccattcacccgtcaggggca

SEQ ID NO: 4631942 - DNA, 25 bp, Homo sapien
atcctgaagaatagatcggaccaat

SEQ ID NO: 4631943 - DNA, 25 bp, Homo sapien
agaatagatcggaccaataagacca

SEQ ID NO: 4631944 - DNA, 25 bp, Homo sapien
tgaagaatagatcggaccaataaga

SEQ ID NO: 4631945 - DNA, 25 bp, Homo sapien
cctgaagaatagatcggaccaataa

SEQ ID NO: 4631946 - DNA, 25 bp, Homo sapien
aattggtggccaatgaacaccagct

SEQ ID NO: 4631947 - DNA, 25 bp, Homo sapien
tgcagacacgcagccatatgtggcc

SEQ ID NO: 4631948 - DNA, 25 bp, Homo sapien
gctgcacggccatccgtcctgcaga

SEQ ID NO: 4631949 - DNA, 25 bp, Homo sapien
gggtaaattggtggccaatgaacac

SEQ ID NO: 4631950 - DNA, 25 bp, Homo sapien
tctacaaggcttcccggcgctgtca

SEQ ID NO: 4631951 - DNA, 25 bp, Homo sapien
aggcccacaaatccccagaaggtga

SEQ ID NO: 4631952 - DNA, 25 bp, Homo sapien
caaggatcattgttcaaggccatcc

SEQ ID NO: 4631953 - DNA, 25 bp, Homo sapien
ttagagcgagcgagagccttgacaa

SEQ ID NO: 4631954 - DNA, 25 bp, Homo sapien
aattctccgttatgaaatgccgccg

SEQ ID NO: 4631955 - DNA, 25 bp, Homo sapien
ggtttatcacactcgctgagagaag

SEQ ID NO: 4631956 - DNA, 25 bp, Homo sapien
tgccacgcagggagtgaacctggcc

SEQ ID NO: 4631957 - DNA, 25 bp, Homo sapien
tccgcagtggctcggcagcaggttt

SEQ ID NO: 4631958 - DNA, 25 bp, Homo sapien
ccaatctgcctggatattgagagga

SEQ ID NO: 4631959 - DNA, 25 bp, Homo sapien
gggtggaaaccccaatctgcctgga

SEQ ID NO: 4631960 - DNA, 25 bp, Homo sapien
agacgagttgattaggtgaagtttc

SEQ ID NO: 4631961 - DNA, 25 bp, Homo sapien
gattccaggagatcccgggtctgga

SEQ ID NO: 4631962 - DNA, 25 bp, Homo sapien
ttgctgggagtccagcaaatttccg

SEQ ID NO: 4631963 - DNA, 25 bp, Homo sapien
tgctttcacagtgggcaactgactt

SEQ ID NO: 4631964 - DNA, 25 bp, Homo sapien
tctcatactcttgtagcctcctgct

SEQ ID NO: 4631965 - DNA, 25 bp, Homo sapien
gcaactgacttgctgggagtccagc

SEQ ID NO: 4631966 - DNA, 25 bp, Homo sapien
attttagctgatcccccttggagag

SEQ ID NO: 4631967 - DNA, 25 bp, Homo sapien
gcattttagctgatcccccttggag

SEQ ID NO: 4631968 - DNA, 25 bp, Homo sapien
aggcattttagctgatcccccttgg

SEQ ID NO: 4631969 - DNA, 25 bp, Homo sapien
atggaaggcattttagctgatcccc

SEQ ID NO: 4631970 - DNA, 25 bp, Homo sapien
tcagctttacattccgaatatttcc

SEQ ID NO: 4631971 - DNA, 25 bp, Homo sapien
ccgaatagacgtgtatccccttttg

SEQ ID NO: 4631972 - DNA, 25 bp, Homo sapien
cattccgaatatttccgaatagacg

SEQ ID NO: 4631973 - DNA, 25 bp, Homo sapien
tatttccgaatagacgtgtatcccc

SEQ ID NO: 4631974 - DNA, 25 bp, Homo sapien
tggtaatgacacctctgacgctgca

SEQ ID NO: 4631975 - DNA, 25 bp, Homo sapien
tggcccaaaaaatggtaatgacacc

SEQ ID NO: 4631976 - DNA, 25 bp, Homo sapien
aaaaatggtaatgacacctctgacg

SEQ ID NO: 4631977 - DNA, 25 bp, Homo sapien
tgcagtggggattcatacacttcaa

SEQ ID NO: 4631978 - DNA, 25 bp, Homo sapien
tcctgttgattcctccggagccatt

SEQ ID NO: 4631979 - DNA, 25 bp, Homo sapien
ctgttgattcctccggagccattac

SEQ ID NO: 4631980 - DNA, 25 bp, Homo sapien
cctgttgattcctccggagccatta

SEQ ID NO: 4631981 - DNA, 25 bp, Homo sapien
gcttcaggacaacagcatttcccag

SEQ ID NO: 4631982 - DNA, 25 bp, Homo sapien
gcccctctcttgacccagcagttgc

SEQ ID NO: 4631983 - DNA, 25 bp, Homo sapien
ggattcatttgtggcaatgggagct

SEQ ID NO: 4631984 - DNA, 25 bp, Homo sapien
actgccatcaatttctgctcatcag

SEQ ID NO: 4631985 - DNA, 25 bp, Homo sapien
atggattcatttgtggcaatgggag

SEQ ID NO: 4631986 - DNA, 25 bp, Homo sapien
ggactgccatcaatttctgctcatc

SEQ ID NO: 4631987 - DNA, 25 bp, Homo sapien
gaactgggcatcaaccaaggcttgg

SEQ ID NO: 4631988 - DNA, 25 bp, Homo sapien
gggaactgggcatcaaccaaggctt

SEQ ID NO: 4631989 - DNA, 25 bp, Homo sapien
aactgggcatcaaccaaggcttggg

SEQ ID NO: 4631990 - DNA, 25 bp, Homo sapien
tgggcatcaaccaaggcttgggggt

SEQ ID NO: 4631991 - DNA, 25 bp, Homo sapien
tgatgatgatgactaaaggcttggc

SEQ ID NO: 4631992 - DNA, 25 bp, Homo sapien
gctgatgatgatgactaaaggcttg

SEQ ID NO: 4631993 - DNA, 25 bp, Homo sapien
ctgatgatgatgactaaaggcttgg

SEQ ID NO: 4631994 - DNA, 25 bp, Homo sapien
agaactcattaactagcaggtcttt

SEQ ID NO: 4631995 - DNA, 25 bp, Homo sapien
actcattaactagcaggtctttggg

SEQ ID NO: 4631996 - DNA, 25 bp, Homo sapien
ctcattaactagcaggtctttgggg

SEQ ID NO: 4631997 - DNA, 25 bp, Homo sapien
ttccaagccttgctggacaggcccc

SEQ ID NO: 4631998 - DNA, 25 bp, Homo sapien
atatattttatacccacctgcccca

SEQ ID NO: 4631999 - DNA, 25 bp, Homo sapien
taggcatacggacaaattttccaac

SEQ ID NO: 4632000 - DNA, 25 bp, Homo sapien
ctgtaggcatacggacaaattttcc

SEQ ID NO: 4632001 - DNA, 25 bp, Homo sapien
ggcatacggacaaattttccaacca

SEQ ID NO: 4632002 - DNA, 25 bp, Homo sapien
aggaaagcgtccacgaagccgttca

SEQ ID NO: 4632003 - DNA, 25 bp, Homo sapien
tcattccggaattgacccttgagtc

SEQ ID NO: 4632004 - DNA, 25 bp, Homo sapien
tctgtccgtaaggaaagcgtccacg

SEQ ID NO: 4632005 - DNA, 25 bp, Homo sapien
gtagaaagcgggctcgttcattccg

SEQ ID NO: 4632006 - DNA, 25 bp, Homo sapien
tgcctggaacaaccgtgactgtgca

SEQ ID NO: 4632007 - DNA, 25 bp, Homo sapien
gcactgcctggaacaaccgtgactg

SEQ ID NO: 4632008 - DNA, 25 bp, Homo sapien
aagggcactgcctggaacaaccgtg

SEQ ID NO: 4632009 - DNA, 25 bp, Homo sapien
tggaacaaccgtgactgtgcagctg

SEQ ID NO: 4632010 - DNA, 25 bp, Homo sapien
gccaccatgtggttgtacatcacac

SEQ ID NO: 4632011 - DNA, 25 bp, Homo sapien
atgtggttgtacatcacacagggcc

SEQ ID NO: 4632012 - DNA, 25 bp, Homo sapien
tcacacagggcccaaacatcaacag

SEQ ID NO: 4632013 - DNA, 25 bp, Homo sapien
ccatgtggttgtacatcacacaggg

SEQ ID NO: 4632014 - DNA, 25 bp, Homo sapien
gtcaacatttaacacaatcagagct

SEQ ID NO: 4632015 - DNA, 25 bp, Homo sapien
cccgaggggctgtggcacgaaaata

SEQ ID NO: 4632016 - DNA, 25 bp, Homo sapien
ctgctttcccactccaagctctatc

SEQ ID NO: 4632017 - DNA, 25 bp, Homo sapien
tttaacacaatcagagcttgttcca

SEQ ID NO: 4632018 - DNA, 25 bp, Homo sapien
ggtcagcagccatgccatgaatctt

SEQ ID NO: 4632019 - DNA, 25 bp, Homo sapien
atcttgcccgagagcccaaggtgca

SEQ ID NO: 4632020 - DNA, 25 bp, Homo sapien
atgccatgaatcttgcccgagagcc

SEQ ID NO: 4632021 - DNA, 25 bp, Homo sapien
aaggtgcacggtcgctgacctcagg

SEQ ID NO: 4632022 - DNA, 25 bp, Homo sapien
ccttgtaggggcatccagggctcgt

SEQ ID NO: 4632023 - DNA, 25 bp, Homo sapien
ctgttccttgtaggggcatccaggg

SEQ ID NO: 4632024 - DNA, 25 bp, Homo sapien
gttccttgtaggggcatccagggct

SEQ ID NO: 4632025 - DNA, 25 bp, Homo sapien
tgtaggggcatccagggctcgtggg

SEQ ID NO: 4632026 - DNA, 25 bp, Homo sapien
atatgtgaacttcccgacgcaggcc

SEQ ID NO: 4632027 - DNA, 25 bp, Homo sapien
taaactaatagctgcactaatgccc

SEQ ID NO: 4632028 - DNA, 25 bp, Homo sapien
ccagccgcggccacatgatgaatgg

SEQ ID NO: 4632029 - DNA, 25 bp, Homo sapien
tagtgacaaggataaacgaagcttg

SEQ ID NO: 4632030 - DNA, 25 bp, Homo sapien
tccaccctgcgcgtcctgcgctgtc

SEQ ID NO: 4632031 - DNA, 25 bp, Homo sapien
ctggctgtaatctacatttcaaatg

SEQ ID NO: 4632032 - DNA, 25 bp, Homo sapien
gtctggctgtaatctacatttcaaa

SEQ ID NO: 4632033 - DNA, 25 bp, Homo sapien
gtcctgcgctgtcccatttgtctgg

SEQ ID NO: 4632034 - DNA, 25 bp, Homo sapien
gatttatgtttcacaacttccatgg

SEQ ID NO: 4632035 - DNA, 25 bp, Homo sapien
ttgggatttatgtttcacaacttcc

SEQ ID NO: 4632036 - DNA, 25 bp, Homo sapien
catatgtctttgacagtcctatcac

SEQ ID NO: 4632037 - DNA, 25 bp, Homo sapien
ctgtcgtagaacaaatagaattggg

SEQ ID NO: 4632038 - DNA, 25 bp, Homo sapien
tccccagcaatgctgagcctggcga

SEQ ID NO: 4632039 - DNA, 25 bp, Homo sapien
tccagtccacggttcagaagcatct

SEQ ID NO: 4632040 - DNA, 25 bp, Homo sapien
agaagcatctttcagtcccaggcca

SEQ ID NO: 4632041 - DNA, 25 bp, Homo sapien
cttctgccaggacactagggtttct

SEQ ID NO: 4632042 - DNA, 25 bp, Homo sapien
gtgaacactagcatctacccaaaga

SEQ ID NO: 4632043 - DNA, 25 bp, Homo sapien
tgctgagccaaagagctaggtctca

SEQ ID NO: 4632044 - DNA, 25 bp, Homo sapien
gactcatagtcaagggaccaagcat

SEQ ID NO: 4632045 - DNA, 25 bp, Homo sapien
tcaaaggcgagagttcaaagacacc

SEQ ID NO: 4632046 - DNA, 25 bp, Homo sapien
gagaaggaggatagttccatgtagc

SEQ ID NO: 4632047 - DNA, 25 bp, Homo sapien
aggaggatagttccatgtagcacag

SEQ ID NO: 4632048 - DNA, 25 bp, Homo sapien
gaaggaggatagttccatgtagcac

SEQ ID NO: 4632049 - DNA, 25 bp, Homo sapien
cgagaaggaggatagttccatgtag

SEQ ID NO: 4632050 - DNA, 25 bp, Homo sapien
caacagatttggtaacctgccctta

SEQ ID NO: 4632051 - DNA, 25 bp, Homo sapien
caccttctgtatgggcatctgcttg

SEQ ID NO: 4632052 - DNA, 25 bp, Homo sapien
tttcaccttctgtatgggcatctgc

SEQ ID NO: 4632053 - DNA, 25 bp, Homo sapien
atttcaccttctgtatgggcatctg

SEQ ID NO: 4632054 - DNA, 25 bp, Homo sapien
atttctgcaatggatggtggcgaag

SEQ ID NO: 4632055 - DNA, 25 bp, Homo sapien
gagtgaccgcgtgggggccgtggac

SEQ ID NO: 4632056 - DNA, 25 bp, Homo sapien
cagagatggagtgggcgagtgaccg

SEQ ID NO: 4632057 - DNA, 25 bp, Homo sapien
tcagtaattgccagagatggagtgg

SEQ ID NO: 4632058 - DNA, 25 bp, Homo sapien
gggcctccaaggttgggctgaggat

SEQ ID NO: 4632059 - DNA, 25 bp, Homo sapien
tgagggcctggcgttgcctgggccc

SEQ ID NO: 4632060 - DNA, 25 bp, Homo sapien
gctgggcctccaaggttgggctgag

SEQ ID NO: 4632061 - DNA, 25 bp, Homo sapien
gagggcctggcgttgcctgggcccc

SEQ ID NO: 4632062 - DNA, 25 bp, Homo sapien
tcttgcctgctgtcttcgacttggg

SEQ ID NO: 4632063 - DNA, 25 bp, Homo sapien
tgtcttcgacttgggtcagagaagg

SEQ ID NO: 4632064 - DNA, 25 bp, Homo sapien
gaaacagcactgagtctccccatgc

SEQ ID NO: 4632065 - DNA, 25 bp, Homo sapien
cagagaaggtgagcagacccggcag

SEQ ID NO: 4632066 - DNA, 25 bp, Homo sapien
aacactgcaaaaagttcagagcctc

SEQ ID NO: 4632067 - DNA, 25 bp, Homo sapien
cccctccataaggtgcacgagcatg

SEQ ID NO: 4632068 - DNA, 25 bp, Homo sapien
tgaacattccaaccaatcaatagcc

SEQ ID NO: 4632069 - DNA, 25 bp, Homo sapien
tggcgcccttcttttcaagcatgaa

SEQ ID NO: 4632070 - DNA, 25 bp, Homo sapien
agcttccggtggctgatcggggccc

SEQ ID NO: 4632071 - DNA, 25 bp, Homo sapien
ccggtggctgatcggggcccaggga

SEQ ID NO: 4632072 - DNA, 25 bp, Homo sapien
gaagcaggtgaaacagcagggtggg

SEQ ID NO: 4632073 - DNA, 25 bp, Homo sapien
cagggagggaagcaggtgaaacagc

SEQ ID NO: 4632074 - DNA, 25 bp, Homo sapien
tggaaaacacaagtccggggcctca

SEQ ID NO: 4632075 - DNA, 25 bp, Homo sapien
tgaatggaaaacacaagtccggggc

SEQ ID NO: 4632076 - DNA, 25 bp, Homo sapien
ctgaatggaaaacacaagtccgggg

SEQ ID NO: 4632077 - DNA, 25 bp, Homo sapien
aggacacaagccgttgagtagatgc

SEQ ID NO: 4632078 - DNA, 25 bp, Homo sapien
ggacacaagccgttgagtagatgcc

SEQ ID NO: 4632079 - DNA, 25 bp, Homo sapien
caaaggacacaagccgttgagtaga

SEQ ID NO: 4632080 - DNA, 25 bp, Homo sapien
ctccaaaggacacaagccgttgagt

SEQ ID NO: 4632081 - DNA, 25 bp, Homo sapien
acatgcacccccgcccccacccaga

SEQ ID NO: 4632082 - DNA, 25 bp, Homo sapien
gcacatgcacccccgcccccaccca

SEQ ID NO: 4632083 - DNA, 25 bp, Homo sapien
agcaggcacatgcacccccgccccc

SEQ ID NO: 4632084 - DNA, 25 bp, Homo sapien
cacatgcacccccgcccccacccag

SEQ ID NO: 4632085 - DNA, 25 bp, Homo sapien
ggagaactcactgtgggctagggtg

SEQ ID NO: 4632086 - DNA, 25 bp, Homo sapien
ctgttgatctaaggggccgcgatgg

SEQ ID NO: 4632087 - DNA, 25 bp, Homo sapien
ggccgcgatggtcagggccacggcc

SEQ ID NO: 4632088 - DNA, 25 bp, Homo sapien
gagaactcactgtgggctagggtgg

SEQ ID NO: 4632089 - DNA, 25 bp, Homo sapien
cactgatggcacctattgagggtga

SEQ ID NO: 4632090 - DNA, 25 bp, Homo sapien
caggcgggcaccaaacactgatggc

SEQ ID NO: 4632091 - DNA, 25 bp, Homo sapien
tggcacctattgagggtgacagcca

SEQ ID NO: 4632092 - DNA, 25 bp, Homo sapien
tatgaccgtcactgacccttggagc

SEQ ID NO: 4632093 - DNA, 25 bp, Homo sapien
gcggctgcagcccactgtcatcggg

SEQ ID NO: 4632094 - DNA, 25 bp, Homo sapien
tggtgctgatggatatgccggagcc

SEQ ID NO: 4632095 - DNA, 25 bp, Homo sapien
tgctgatggatatgccggagccggg

SEQ ID NO: 4632096 - DNA, 25 bp, Homo sapien
tctccctctgcatgccagaacctga

SEQ ID NO: 4632097 - DNA, 25 bp, Homo sapien
ccacgtacaacggattcccctgcag

SEQ ID NO: 4632098 - DNA, 25 bp, Homo sapien
agcatgcccacgtacaacggattcc

SEQ ID NO: 4632099 - DNA, 25 bp, Homo sapien
ccaagcatgcccacgtacaacggat

SEQ ID NO: 4632100 - DNA, 25 bp, Homo sapien
cacgtacaacggattcccctgcagg

SEQ ID NO: 4632101 - DNA, 25 bp, Homo sapien
aggtgcagagaggaatccaacggac

SEQ ID NO: 4632102 - DNA, 25 bp, Homo sapien
ggtgagggtggcacacaggtgcaga

SEQ ID NO: 4632103 - DNA, 25 bp, Homo sapien
caggtgcagagaggaatccaacgga

SEQ ID NO: 4632104 - DNA, 25 bp, Homo sapien
ctggggtgagggtggcacacaggtg

SEQ ID NO: 4632105 - DNA, 25 bp, Homo sapien
ggtgagcaaccaggaattgttcaga

SEQ ID NO: 4632106 - DNA, 25 bp, Homo sapien
gagagctggtgagcaaccaggaatt

SEQ ID NO: 4632107 - DNA, 25 bp, Homo sapien
gcaaccaggaattgttcagacactc

SEQ ID NO: 4632108 - DNA, 25 bp, Homo sapien
ttcagacactcattgtctgctgtgg

SEQ ID NO: 4632109 - DNA, 25 bp, Homo sapien
ctgagaattttaggaaactttgact

SEQ ID NO: 4632110 - DNA, 25 bp, Homo sapien
cacttctgagaattttaggaaactt

SEQ ID NO: 4632111 - DNA, 25 bp, Homo sapien
cttctgagaattttaggaaactttg

SEQ ID NO: 4632112 - DNA, 25 bp, Homo sapien
gtcacttctgagaattttaggaaac

SEQ ID NO: 4632113 - DNA, 25 bp, Homo sapien
cgggtagccgccgatccctgagcca

SEQ ID NO: 4632114 - DNA, 25 bp, Homo sapien
ttggtcccgcaacatcccgggtagc

SEQ ID NO: 4632115 - DNA, 25 bp, Homo sapien
tcaacagtttggtcccgcaacatcc

SEQ ID NO: 4632116 - DNA, 25 bp, Homo sapien
tctggtcgtcaacagtttggtcccg

SEQ ID NO: 4632117 - DNA, 25 bp, Homo sapien
agagaggaacggtgagaagccttgg

SEQ ID NO: 4632118 - DNA, 25 bp, Homo sapien
gagaggaacggtgagaagccttggc

SEQ ID NO: 4632119 - DNA, 25 bp, Homo sapien
caatggatcgatgcacggctgtcgg

SEQ ID NO: 4632120 - DNA, 25 bp, Homo sapien
ttactgagctcaggttttcatctcc

SEQ ID NO: 4632121 - DNA, 25 bp, Homo sapien
tttctgaaggccctcgtggctggcc

SEQ ID NO: 4632122 - DNA, 25 bp, Homo sapien
gggccgacaggctgacctttactga

SEQ ID NO: 4632123 - DNA, 25 bp, Homo sapien
tatatcctcaggacctggtacctag

SEQ ID NO: 4632124 - DNA, 25 bp, Homo sapien
gacctggtgtcaaggcagatgccac

SEQ ID NO: 4632125 - DNA, 25 bp, Homo sapien
ttgcgactgtctgcagtggacctgg

SEQ ID NO: 4632126 - DNA, 25 bp, Homo sapien
ttggcctcccaagatatctttcctc

SEQ ID NO: 4632127 - DNA, 25 bp, Homo sapien
gatctgtgacagcagtgtgaagcag

SEQ ID NO: 4632128 - DNA, 25 bp, Homo sapien
gtttttctcctgatctgtgacagca

SEQ ID NO: 4632129 - DNA, 25 bp, Homo sapien
ctcctgatctgtgacagcagtgtga

SEQ ID NO: 4632130 - DNA, 25 bp, Homo sapien
cctgatctgtgacagcagtgtgaag

SEQ ID NO: 4632131 - DNA, 25 bp, Homo sapien
tgcacttttatggtctttttcccag

SEQ ID NO: 4632132 - DNA, 25 bp, Homo sapien
ctcagcctgcacttttatggtcttt

SEQ ID NO: 4632133 - DNA, 25 bp, Homo sapien
agcctgcacttttatggtctttttc

SEQ ID NO: 4632134 - DNA, 25 bp, Homo sapien
ctgcacttttatggtctttttccca

SEQ ID NO: 4632135 - DNA, 25 bp, Homo sapien
gaagatgaggttggtgtcccagcca

SEQ ID NO: 4632136 - DNA, 25 bp, Homo sapien
gtgtcccagccaagacttcccacag

SEQ ID NO: 4632137 - DNA, 25 bp, Homo sapien
ctccaccagacttgagctcctggaa

SEQ ID NO: 4632138 - DNA, 25 bp, Homo sapien
tcctggaagatgaggttggtgtccc

SEQ ID NO: 4632139 - DNA, 25 bp, Homo sapien
gggcccacggagtggcagcagaagc

SEQ ID NO: 4632140 - DNA, 25 bp, Homo sapien
tccaggagataaacgccgaggactg

SEQ ID NO: 4632141 - DNA, 25 bp, Homo sapien
gacgaggactgcagcccgggtatgc

SEQ ID NO: 4632142 - DNA, 25 bp, Homo sapien
agacagagtgggcatgaatccagga

SEQ ID NO: 4632143 - DNA, 25 bp, Homo sapien
tgctcgttcctgactctttgctgcc

SEQ ID NO: 4632144 - DNA, 25 bp, Homo sapien
gttgctcgttcctgactctttgctg

SEQ ID NO: 4632145 - DNA, 25 bp, Homo sapien
gctcgttcctgactctttgctgccc

SEQ ID NO: 4632146 - DNA, 25 bp, Homo sapien
ctgttgctcgttcctgactctttgc

SEQ ID NO: 4632147 - DNA, 25 bp, Homo sapien
aattgtgacggtgctgaagatgatg

SEQ ID NO: 4632148 - DNA, 25 bp, Homo sapien
ggcatccactgaattgtgacggtgc

SEQ ID NO: 4632149 - DNA, 25 bp, Homo sapien
tgatgccattgcattgaccccgagg

SEQ ID NO: 4632150 - DNA, 25 bp, Homo sapien
tctcgggcttctgaatcctgaaggc

SEQ ID NO: 4632151 - DNA, 25 bp, Homo sapien
tcaactcagtgtttgttcagatgct

SEQ ID NO: 4632152 - DNA, 25 bp, Homo sapien
caactcagtgtttgttcagatgctg

SEQ ID NO: 4632153 - DNA, 25 bp, Homo sapien
cagtgtttgttcagatgctgatttg

SEQ ID NO: 4632154 - DNA, 25 bp, Homo sapien
actcagtgtttgttcagatgctgat

SEQ ID NO: 4632155 - DNA, 25 bp, Homo sapien
cagtgggaatggatggcgactcttt

SEQ ID NO: 4632156 - DNA, 25 bp, Homo sapien
gaatggatggcgactctttgcccat

SEQ ID NO: 4632157 - DNA, 25 bp, Homo sapien
tttgcccattaacagggcagcagga

SEQ ID NO: 4632158 - DNA, 25 bp, Homo sapien
ctctttgcccattaacagggcagca

SEQ ID NO: 4632159 - DNA, 25 bp, Homo sapien
tagaacacggacttcccctgagtgc

SEQ ID NO: 4632160 - DNA, 25 bp, Homo sapien
gatggcccgtcgcatttatgtagtg

SEQ ID NO: 4632161 - DNA, 25 bp, Homo sapien
ccctgagtgctatgacgcaacagtc

SEQ ID NO: 4632162 - DNA, 25 bp, Homo sapien
ttgggagatggaccccaagccgcgt

SEQ ID NO: 4632163 - DNA, 25 bp, Homo sapien
caggcagaggtctgcactctctgca

SEQ ID NO: 4632164 - DNA, 25 bp, Homo sapien
gactgtcactcaaacaggccttgtt

SEQ ID NO: 4632165 - DNA, 25 bp, Homo sapien
acaggccttgttggccacgtacaga

SEQ ID NO: 4632166 - DNA, 25 bp, Homo sapien
gggagggtctttgactgtcactcaa

SEQ ID NO: 4632167 - DNA, 25 bp, Homo sapien
tgcttccctctgcgcctctcgtctt

SEQ ID NO: 4632168 - DNA, 25 bp, Homo sapien
cacaggcatggggtgaaccgctcca

SEQ ID NO: 4632169 - DNA, 25 bp, Homo sapien
ggggtgaaccgctccagaggcctcc

SEQ ID NO: 4632170 - DNA, 25 bp, Homo sapien
tgcattcggcggattcggcggcaca

SEQ ID NO: 4632171 - DNA, 25 bp, Homo sapien
gatgactatggattcctcctgtctc

SEQ ID NO: 4632172 - DNA, 25 bp, Homo sapien
gcagcattagctgatctccctctgg

SEQ ID NO: 4632173 - DNA, 25 bp, Homo sapien
tatgagctgtcagccggtcctggac

SEQ ID NO: 4632174 - DNA, 25 bp, Homo sapien
cagagaagccgatgactatggattc

SEQ ID NO: 4632175 - DNA, 25 bp, Homo sapien
tctcgtatgggcctccttgctgctt

SEQ ID NO: 4632176 - DNA, 25 bp, Homo sapien
tgtgacatcgactatcccgttgccc

SEQ ID NO: 4632177 - DNA, 25 bp, Homo sapien
tggcgttacaaaatatcagcgttgt

SEQ ID NO: 4632178 - DNA, 25 bp, Homo sapien
tcagcctgcctgtctcgtatgggcc

SEQ ID NO: 4632179 - DNA, 25 bp, Homo sapien
tgttgtaattctcgtcatcagggac

SEQ ID NO: 4632180 - DNA, 25 bp, Homo sapien
tcagggacatgagcgccctggacta

SEQ ID NO: 4632181 - DNA, 25 bp, Homo sapien
ccctggactactggaagaaaattga

SEQ ID NO: 4632182 - DNA, 25 bp, Homo sapien
caaaagaaagtgttgtaattctcgt

SEQ ID NO: 4632183 - DNA, 25 bp, Homo sapien
tgacccaggtggctgtaaaagccca

SEQ ID NO: 4632184 - DNA, 25 bp, Homo sapien
aagcccaggagagaacggatgagga

SEQ ID NO: 4632185 - DNA, 25 bp, Homo sapien
cccaggagagaacggatgaggacct

SEQ ID NO: 4632186 - DNA, 25 bp, Homo sapien
caggtggctgtaaaagcccaggaga

SEQ ID NO: 4632187 - DNA, 25 bp, Homo sapien
tcagagttggcgatttggtatgtgt

SEQ ID NO: 4632188 - DNA, 25 bp, Homo sapien
ccattctgtagatgtcatcagagtt

SEQ ID NO: 4632189 - DNA, 25 bp, Homo sapien
tgtagatgtcatcagagttggcgat

SEQ ID NO: 4632190 - DNA, 25 bp, Homo sapien
tggcgatttggtatgtgttcttcca

SEQ ID NO: 4632191 - DNA, 25 bp, Homo sapien
ctaattatctgcaggtgtctcattg

SEQ ID NO: 4632192 - DNA, 25 bp, Homo sapien
atctgcaggtgtctcattgggccac

SEQ ID NO: 4632193 - DNA, 25 bp, Homo sapien
tcattgggccacaggcctgctgatg

SEQ ID NO: 4632194 - DNA, 25 bp, Homo sapien
caggtgtctcattgggccacaggcc

SEQ ID NO: 4632195 - DNA, 25 bp, Homo sapien
ttgctcttggagctccaacgtgcat

SEQ ID NO: 4632196 - DNA, 25 bp, Homo sapien
tggagctccaacgtgcattctgcat

SEQ ID NO: 4632197 - DNA, 25 bp, Homo sapien
gctcttggagctccaacgtgcattc

SEQ ID NO: 4632198 - DNA, 25 bp, Homo sapien
tcttggagctccaacgtgcattctg

SEQ ID NO: 4632199 - DNA, 25 bp, Homo sapien
gggcagcggagcagatgatgcgcgc

SEQ ID NO: 4632200 - DNA, 25 bp, Homo sapien
caggagaggcccgtaatgaatgact

SEQ ID NO: 4632201 - DNA, 25 bp, Homo sapien
tgttatgctaacaacggatgccagc

SEQ ID NO: 4632202 - DNA, 25 bp, Homo sapien
gccccgctgagaacaattgagtttg

SEQ ID NO: 4632203 - DNA, 25 bp, Homo sapien
gggctcgggctccgacggaggagtc

SEQ ID NO: 4632204 - DNA, 25 bp, Homo sapien
cggagggcagacgacttccaggagg

SEQ ID NO: 4632205 - DNA, 25 bp, Homo sapien
cgggctccgacggaggagtccccag

SEQ ID NO: 4632206 - DNA, 25 bp, Homo sapien
ggagggcagacgacttccaggaggt

SEQ ID NO: 4632207 - DNA, 25 bp, Homo sapien
acctttctgggagtagagtccttgg

SEQ ID NO: 4632208 - DNA, 25 bp, Homo sapien
tgtgtaccggccattcatgagcttg

SEQ ID NO: 4632209 - DNA, 25 bp, Homo sapien
aatgccttgatataaacctttctgg

SEQ ID NO: 4632210 - DNA, 25 bp, Homo sapien
tcttcagcagcattcagtcagggag

SEQ ID NO: 4632211 - DNA, 25 bp, Homo sapien
cgaaagtgatgagggagtcagacac

SEQ ID NO: 4632212 - DNA, 25 bp, Homo sapien
gcaaaattaactgatctatgagagg

SEQ ID NO: 4632213 - DNA, 25 bp, Homo sapien
gaaaggcatagcctcttgagggact

SEQ ID NO: 4632214 - DNA, 25 bp, Homo sapien
ctgaacagtggaggacgaaagtgat

SEQ ID NO: 4632215 - DNA, 25 bp, Homo sapien
tgggaagaaaacctagcaatgctat

SEQ ID NO: 4632216 - DNA, 25 bp, Homo sapien
tgtgtgtgcccgcatgtgtttaatt

SEQ ID NO: 4632217 - DNA, 25 bp, Homo sapien
gcatttgaggaaaagcaggtctaaa

SEQ ID NO: 4632218 - DNA, 25 bp, Homo sapien
catccagcttagctctgtactagcc

SEQ ID NO: 4632219 - DNA, 25 bp, Homo sapien
agggagtgacaagacacactgggtt

SEQ ID NO: 4632220 - DNA, 25 bp, Homo sapien
gaaatcctccactagccgattggga

SEQ ID NO: 4632221 - DNA, 25 bp, Homo sapien
cttcccagcagattgttggtagggc

SEQ ID NO: 4632222 - DNA, 25 bp, Homo sapien
ggttgagctcccacggaaagacata

SEQ ID NO: 4632223 - DNA, 25 bp, Homo sapien
taaggtgagcaattaagtggtttca

SEQ ID NO: 4632224 - DNA, 25 bp, Homo sapien
acagatcacctgaaagtatcttggg

SEQ ID NO: 4632225 - DNA, 25 bp, Homo sapien
gaacttgcctacttatcactcatat

SEQ ID NO: 4632226 - DNA, 25 bp, Homo sapien
gaaaggtgtcatcagtcatttctcc

SEQ ID NO: 4632227 - DNA, 25 bp, Homo sapien
tagctgctgctgtattcactccgtt

SEQ ID NO: 4632228 - DNA, 25 bp, Homo sapien
aaaatttagtatgaatggcattggc

SEQ ID NO: 4632229 - DNA, 25 bp, Homo sapien
ttgtgatggaacacatcttacagct

SEQ ID NO: 4632230 - DNA, 25 bp, Homo sapien
aacagctggactctcatagctgctg

SEQ ID NO: 4632231 - DNA, 25 bp, Homo sapien
gtctttctccgcgcagtgtccactg

SEQ ID NO: 4632232 - DNA, 25 bp, Homo sapien
ccactggctccgtgacgcaggtgtc

SEQ ID NO: 4632233 - DNA, 25 bp, Homo sapien
tgagcacggattcggccggctcgtc

SEQ ID NO: 4632234 - DNA, 25 bp, Homo sapien
tgtcctcggtgagcacggattcggc

SEQ ID NO: 4632235 - DNA, 25 bp, Homo sapien
gaaggatgttagagcggtcagatgg

SEQ ID NO: 4632236 - DNA, 25 bp, Homo sapien
gctattatctcttttatgtacgggg

SEQ ID NO: 4632237 - DNA, 25 bp, Homo sapien
tcagatggccaagggaaggcagtac

SEQ ID NO: 4632238 - DNA, 25 bp, Homo sapien
tggccaagggaaggcagtactgcta

SEQ ID NO: 4632239 - DNA, 25 bp, Homo sapien
tccgaaggagcttttcgcgtggccc

SEQ ID NO: 4632240 - DNA, 25 bp, Homo sapien
gaaggagctttctggtagatccgaa

SEQ ID NO: 4632241 - DNA, 25 bp, Homo sapien
tcagatgcgccggacttgctgtctt

SEQ ID NO: 4632242 - DNA, 25 bp, Homo sapien
tgcgcatgcgtggtccttgctggac

SEQ ID NO: 4632243 - DNA, 25 bp, Homo sapien
tggagcgccccgatggaaatacact

SEQ ID NO: 4632244 - DNA, 25 bp, Homo sapien
gtttgtcaatgaacgtggcgccgcc

SEQ ID NO: 4632245 - DNA, 25 bp, Homo sapien
catccatgcatagtaagtaggcggc

SEQ ID NO: 4632246 - DNA, 25 bp, Homo sapien
tactaaggccggaaggatctcggac

SEQ ID NO: 4632247 - DNA, 25 bp, Homo sapien
gtcagaactggcagatatgcacaca

SEQ ID NO: 4632248 - DNA, 25 bp, Homo sapien
taaaatctagttaaccccactctgc

SEQ ID NO: 4632249 - DNA, 25 bp, Homo sapien
aagtgaggtcagaactggcagatat

SEQ ID NO: 4632250 - DNA, 25 bp, Homo sapien
agaggaaagtgaggtcagaactggc

SEQ ID NO: 4632251 - DNA, 25 bp, Homo sapien
aagagtcgaccccagtgtaggagtt

SEQ ID NO: 4632252 - DNA, 25 bp, Homo sapien
gactcgctagtcaaagatcccttgt

SEQ ID NO: 4632253 - DNA, 25 bp, Homo sapien
tacatagggacaggaacttcccctg

SEQ ID NO: 4632254 - DNA, 25 bp, Homo sapien
tgagtcttcggaccactcccatgag

SEQ ID NO: 4632255 - DNA, 25 bp, Homo sapien
tgtagatcagagtgaggcccgactg

SEQ ID NO: 4632256 - DNA, 25 bp, Homo sapien
tgaagccacggtaatgcagtgcgct

SEQ ID NO: 4632257 - DNA, 25 bp, Homo sapien
tgggagaaagaaagcgcatcactgt

SEQ ID NO: 4632258 - DNA, 25 bp, Homo sapien
tgtgtccccagtgaaacgaggtctc

SEQ ID NO: 4632259 - DNA, 25 bp, Homo sapien
tgcaggacatgctggtaatgataac

SEQ ID NO: 4632260 - DNA, 25 bp, Homo sapien
ctcacagagcctaagaagtcacatc

SEQ ID NO: 4632261 - DNA, 25 bp, Homo sapien
taatgataacacaccccgactaagg

SEQ ID NO: 4632262 - DNA, 25 bp, Homo sapien
tcaagtagagcagactcctgatcca

SEQ ID NO: 4632263 - DNA, 25 bp, Homo sapien
tctaagcccaaaataaggtcaggtc

SEQ ID NO: 4632264 - DNA, 25 bp, Homo sapien
taagcagggagccacttaaggacct

SEQ ID NO: 4632265 - DNA, 25 bp, Homo sapien
cttaaaatctagagagccacgcccc

SEQ ID NO: 4632266 - DNA, 25 bp, Homo sapien
cctgcctggaaaagggcgacagttc

SEQ ID NO: 4632267 - DNA, 25 bp, Homo sapien
gatgttggcgagaacaggacatgat

SEQ ID NO: 4632268 - DNA, 25 bp, Homo sapien
tctggggacatcttgtgatgttggc

SEQ ID NO: 4632269 - DNA, 25 bp, Homo sapien
ggcgcggcgtgtctggggacatctt

SEQ ID NO: 4632270 - DNA, 25 bp, Homo sapien
ggccggcagtgtggggcggcgcgct

SEQ ID NO: 4632271 - DNA, 25 bp, Homo sapien
gagaccgactcacaggggagagggt

SEQ ID NO: 4632272 - DNA, 25 bp, Homo sapien
cccttgggccaacgctgcgggagtc

SEQ ID NO: 4632273 - DNA, 25 bp, Homo sapien
gagtccggacggtccgaagcatgct

SEQ ID NO: 4632274 - DNA, 25 bp, Homo sapien
ccaggcgcaaggggagaccgactca

SEQ ID NO: 4632275 - DNA, 25 bp, Homo sapien
ccgtgtcctccgaagtggttcgtca

SEQ ID NO: 4632276 - DNA, 25 bp, Homo sapien
tgagcctagactccccgcgttctgg

SEQ ID NO: 4632277 - DNA, 25 bp, Homo sapien
tctagggccgcagtgtcaattccgt

SEQ ID NO: 4632278 - DNA, 25 bp, Homo sapien
gatcccgactccgatctgagcctag

SEQ ID NO: 4632279 - DNA, 25 bp, Homo sapien
ggcgggctctccaaaccgaaagctg

SEQ ID NO: 4632280 - DNA, 25 bp, Homo sapien
gctgtctcgctctctggcggtgtct

SEQ ID NO: 4632281 - DNA, 25 bp, Homo sapien
gacatttccggtcactacagttcgg

SEQ ID NO: 4632282 - DNA, 25 bp, Homo sapien
tatctgtgcttgcaaaccagggcgg

SEQ ID NO: 4632283 - DNA, 25 bp, Homo sapien
gattgagccagcatgtgtctctgcc

SEQ ID NO: 4632284 - DNA, 25 bp, Homo sapien
caaaccaaggtgtgttgagctggag

SEQ ID NO: 4632285 - DNA, 25 bp, Homo sapien
tagactctgctcgtatttcctcgcc

SEQ ID NO: 4632286 - DNA, 25 bp, Homo sapien
cctggcaacgtggacagaaggaatg

SEQ ID NO: 4632287 - DNA, 25 bp, Homo sapien
gcccctcgcctggcgatgtcggcct

SEQ ID NO: 4632288 - DNA, 25 bp, Homo sapien
ccctcccttgcccgcagcgtcttag

SEQ ID NO: 4632289 - DNA, 25 bp, Homo sapien
tggcccctcgcctggcgatgtcggc

SEQ ID NO: 4632290 - DNA, 25 bp, Homo sapien
cccctcccttgcccgcagcgtctta

SEQ ID NO: 4632291 - DNA, 25 bp, Homo sapien
ggacggcgatggcccagcctttgct

SEQ ID NO: 4632292 - DNA, 25 bp, Homo sapien
gctctgcgctagctccggggccgag

SEQ ID NO: 4632293 - DNA, 25 bp, Homo sapien
gagggaggcccagtggcggacggcg

SEQ ID NO: 4632294 - DNA, 25 bp, Homo sapien
ggggccgagccccagtgccagagtc

SEQ ID NO: 4632295 - DNA, 25 bp, Homo sapien
cagacccattgcgtattctagcgca

SEQ ID NO: 4632296 - DNA, 25 bp, Homo sapien
caatagtaataacccaccatgagca

SEQ ID NO: 4632297 - DNA, 25 bp, Homo sapien
gaccccaggtctgcgctctttgagg

SEQ ID NO: 4632298 - DNA, 25 bp, Homo sapien
agcaccaggttacccgaacacagac

SEQ ID NO: 4632299 - DNA, 25 bp, Homo sapien
catgtgtacctgtgcgctggaaact

SEQ ID NO: 4632300 - DNA, 25 bp, Homo sapien
gacgtctaccatgtgtacctgtgcg

SEQ ID NO: 4632301 - DNA, 25 bp, Homo sapien
tgtgcgctggaaactagtcgtggaa

SEQ ID NO: 4632302 - DNA, 25 bp, Homo sapien
ggcatacacttgacgtctaccatgt

SEQ ID NO: 4632303 - DNA, 25 bp, Homo sapien
aaatagcgtctctgtgcatatgcat

SEQ ID NO: 4632304 - DNA, 25 bp, Homo sapien
catatattgcgaatgtaactccagg

SEQ ID NO: 4632305 - DNA, 25 bp, Homo sapien
gctgggacgtgttggcaaattttaa

SEQ ID NO: 4632306 - DNA, 25 bp, Homo sapien
tctcaaaattctccaagagttgcct

SEQ ID NO: 4632307 - DNA, 25 bp, Homo sapien
cacttggcgatttgcaggttcacaa

SEQ ID NO: 4632308 - DNA, 25 bp, Homo sapien
tgatggctaaacactgagactggct

SEQ ID NO: 4632309 - DNA, 25 bp, Homo sapien
ccacctccagtacaaagtgaaggaa

SEQ ID NO: 4632310 - DNA, 25 bp, Homo sapien
tagagcacagttttatttccggcac

SEQ ID NO: 4632311 - DNA, 25 bp, Homo sapien
acagttctcccagatctctcttgct

SEQ ID NO: 4632312 - DNA, 25 bp, Homo sapien
ccagatctctcttgcttgcacacat

SEQ ID NO: 4632313 - DNA, 25 bp, Homo sapien
tcccagatctctcttgcttgcacac

SEQ ID NO: 4632314 - DNA, 25 bp, Homo sapien
ttctcccagatctctcttgcttgca

SEQ ID NO: 4632315 - DNA, 25 bp, Homo sapien
ttctctgaatcctgttgtcaatacc

SEQ ID NO: 4632316 - DNA, 25 bp, Homo sapien
cttctctgaatcctgttgtcaatac

SEQ ID NO: 4632317 - DNA, 25 bp, Homo sapien
ggaacttctgtaagctactgggcag

SEQ ID NO: 4632318 - DNA, 25 bp, Homo sapien
acttctgtaagctactgggcagcat

SEQ ID NO: 4632319 - DNA, 25 bp, Homo sapien
tctgtaagctactgggcagcatgtg

SEQ ID NO: 4632320 - DNA, 25 bp, Homo sapien
ggaccaggaacttctgtaagctact

SEQ ID NO: 4632321 - DNA, 25 bp, Homo sapien
ttttctttgctgcatagccttgctt

SEQ ID NO: 4632322 - DNA, 25 bp, Homo sapien
ctttgtgactggtgagtctgatggc

SEQ ID NO: 4632323 - DNA, 25 bp, Homo sapien
gctgcatagccttgctttgtgactg

SEQ ID NO: 4632324 - DNA, 25 bp, Homo sapien
ttccacaattgctttgtggttcttg

SEQ ID NO: 4632325 - DNA, 25 bp, Homo sapien
tgtaaacacgtttcccagcttctcc

SEQ ID NO: 4632326 - DNA, 25 bp, Homo sapien
gatgtaaacacgtttcccagcttct

SEQ ID NO: 4632327 - DNA, 25 bp, Homo sapien
tgatgtaaacacgtttcccagcttc

SEQ ID NO: 4632328 - DNA, 25 bp, Homo sapien
ctgatgtaaacacgtttcccagctt

SEQ ID NO: 4632329 - DNA, 25 bp, Homo sapien
aaaagattcctagccatgctgccag

SEQ ID NO: 4632330 - DNA, 25 bp, Homo sapien
tacctagactaacccaacatgagag

SEQ ID NO: 4632331 - DNA, 25 bp, Homo sapien
ccgggtgggacatgatttgctgcca

SEQ ID NO: 4632332 - DNA, 25 bp, Homo sapien
cataaacctggattgccgggtggga

SEQ ID NO: 4632333 - DNA, 25 bp, Homo sapien
atatattctaggtgtggtcaaggaa

SEQ ID NO: 4632334 - DNA, 25 bp, Homo sapien
ggtctccctgaggagacgacattaa

SEQ ID NO: 4632335 - DNA, 25 bp, Homo sapien
aaatatattctaggtgtggtcaagg

SEQ ID NO: 4632336 - DNA, 25 bp, Homo sapien
aatatattctaggtgtggtcaagga

SEQ ID NO: 4632337 - DNA, 25 bp, Homo sapien
ttcgtatcccaatcagagttgctga

SEQ ID NO: 4632338 - DNA, 25 bp, Homo sapien
agagatgcaacttgcataaaccgta

SEQ ID NO: 4632339 - DNA, 25 bp, Homo sapien
ccgtaaaacttcgtatcccaatcag

SEQ ID NO: 4632340 - DNA, 25 bp, Homo sapien
tgcataaaccgtaaaacttcgtatc

SEQ ID NO: 4632341 - DNA, 25 bp, Homo sapien
tttctcttttctgtgcctacgctca

SEQ ID NO: 4632342 - DNA, 25 bp, Homo sapien
aactttctcttttctgtgcctacgc

SEQ ID NO: 4632343 - DNA, 25 bp, Homo sapien
cccctggaactttctcttttctgtg

SEQ ID NO: 4632344 - DNA, 25 bp, Homo sapien
ttctcttttctgtgcctacgctcag

SEQ ID NO: 4632345 - DNA, 25 bp, Homo sapien
cattgtgctatgccgttgctctcag

SEQ ID NO: 4632346 - DNA, 25 bp, Homo sapien
tcattgtgctatgccgttgctctca

SEQ ID NO: 4632347 - DNA, 25 bp, Homo sapien
acggcccgcacggctagctgcttgg

SEQ ID NO: 4632348 - DNA, 25 bp, Homo sapien
cctggagcttggtggacgccttccc

SEQ ID NO: 4632349 - DNA, 25 bp, Homo sapien
ggagctgatctgatcgcgggcgtga

SEQ ID NO: 4632350 - DNA, 25 bp, Homo sapien
ggtggacgccttcccagtgccacgt

SEQ ID NO: 4632351 - DNA, 25 bp, Homo sapien
taaggaggccgcgtccgcgcagacc

SEQ ID NO: 4632352 - DNA, 25 bp, Homo sapien
tgccgtagctgcaaacagaaagcac

SEQ ID NO: 4632353 - DNA, 25 bp, Homo sapien
aacagaaagcaccaaacagggacca

SEQ ID NO: 4632354 - DNA, 25 bp, Homo sapien
agcaccaaacagggaccaaaacgcg

SEQ ID NO: 4632355 - DNA, 25 bp, Homo sapien
cctagaatcacgaccttagcccttg

SEQ ID NO: 4632356 - DNA, 25 bp, Homo sapien
tagttccacagctcggctggcgaga

SEQ ID NO: 4632357 - DNA, 25 bp, Homo sapien
gtggcccaggactactcggtcctca

SEQ ID NO: 4632358 - DNA, 25 bp, Homo sapien
tcggtcctcaaagactggactctct

SEQ ID NO: 4632359 - DNA, 25 bp, Homo sapien
aaattttggattccacggcggcagc

SEQ ID NO: 4632360 - DNA, 25 bp, Homo sapien
cgaaattttggattccacggcggca

SEQ ID NO: 4632361 - DNA, 25 bp, Homo sapien
agctcccgaaattttggattccacg

SEQ ID NO: 4632362 - DNA, 25 bp, Homo sapien
tcacagctcccgaaattttggattc

SEQ ID NO: 4632363 - DNA, 25 bp, Homo sapien
ccaagactactcgttttacatgagg

SEQ ID NO: 4632364 - DNA, 25 bp, Homo sapien
caagactactcgttttacatgagga

SEQ ID NO: 4632365 - DNA, 25 bp, Homo sapien
agactactcgttttacatgaggaaa

SEQ ID NO: 4632366 - DNA, 25 bp, Homo sapien
cgtccaagactactcgttttacatg

SEQ ID NO: 4632367 - DNA, 25 bp, Homo sapien
gtaatagaaccagcttaatcccaag

SEQ ID NO: 4632368 - DNA, 25 bp, Homo sapien
cattaggtactgatggactactgac

SEQ ID NO: 4632369 - DNA, 25 bp, Homo sapien
ctactgactaaaatgagagctctgg

SEQ ID NO: 4632370 - DNA, 25 bp, Homo sapien
gaattataacaccaggccatttgtc

SEQ ID NO: 4632371 - DNA, 25 bp, Homo sapien
caagtgttcaaagttgacagtgagc

SEQ ID NO: 4632372 - DNA, 25 bp, Homo sapien
agtgttcaaagttgacagtgagcta

SEQ ID NO: 4632373 - DNA, 25 bp, Homo sapien
cccaagtgttcaaagttgacagtga

SEQ ID NO: 4632374 - DNA, 25 bp, Homo sapien
ccaagtgttcaaagttgacagtgag

SEQ ID NO: 4632375 - DNA, 25 bp, Homo sapien
tctcagtgggtacccagggcattgc

SEQ ID NO: 4632376 - DNA, 25 bp, Homo sapien
tatgagctttcagcctcctgggaag

SEQ ID NO: 4632377 - DNA, 25 bp, Homo sapien
gcaaactacagtctgagccagccac

SEQ ID NO: 4632378 - DNA, 25 bp, Homo sapien
tcaaaatactggtaacaactgcctg

SEQ ID NO: 4632379 - DNA, 25 bp, Homo sapien
cctccatgatgaacaatggtcttga

SEQ ID NO: 4632380 - DNA, 25 bp, Homo sapien
tgctgcccagtgaatggtaatgcag

SEQ ID NO: 4632381 - DNA, 25 bp, Homo sapien
tgccacttggctcaaaagactgctg

SEQ ID NO: 4632382 - DNA, 25 bp, Homo sapien
catctgcatcgatggatactgtcca

SEQ ID NO: 4632383 - DNA, 25 bp, Homo sapien
tatgtaccgaggaaggctagactgt

SEQ ID NO: 4632384 - DNA, 25 bp, Homo sapien
taactgaagtcatgaggtatgcctc

SEQ ID NO: 4632385 - DNA, 25 bp, Homo sapien
tctgaacctggagactgctggcacg

SEQ ID NO: 4632386 - DNA, 25 bp, Homo sapien
tatacggtctcaatggagcctcagg

SEQ ID NO: 4632387 - DNA, 25 bp, Homo sapien
tgttcacttaaggaccaggcgcagt

SEQ ID NO: 4632388 - DNA, 25 bp, Homo sapien
aaactgttcacttaaggaccaggcg

SEQ ID NO: 4632389 - DNA, 25 bp, Homo sapien
actgttcacttaaggaccaggcgca

SEQ ID NO: 4632390 - DNA, 25 bp, Homo sapien
aactgttcacttaaggaccaggcgc

SEQ ID NO: 4632391 - DNA, 25 bp, Homo sapien
tttccagccaaactttgtatctctt

SEQ ID NO: 4632392 - DNA, 25 bp, Homo sapien
gtttccagccaaactttgtatctct

SEQ ID NO: 4632393 - DNA, 25 bp, Homo sapien
aaaccagctgagatgatctcttttc

SEQ ID NO: 4632394 - DNA, 25 bp, Homo sapien
gctgagatgatctcttttctcttct

SEQ ID NO: 4632395 - DNA, 25 bp, Homo sapien
ccaaaaccagctgagatgatctctt

SEQ ID NO: 4632396 - DNA, 25 bp, Homo sapien
ccagctgagatgatctcttttctct

SEQ ID NO: 4632397 - DNA, 25 bp, Homo sapien
gcagcagacagcttctcagttctca

SEQ ID NO: 4632398 - DNA, 25 bp, Homo sapien
tctcagttctcaggtttgagctcat

SEQ ID NO: 4632399 - DNA, 25 bp, Homo sapien
cagcttctcagttctcaggtttgag

SEQ ID NO: 4632400 - DNA, 25 bp, Homo sapien
cagcagacagcttctcagttctcag

SEQ ID NO: 4632401 - DNA, 25 bp, Homo sapien
catgaataactgcttgtcactgtcc

SEQ ID NO: 4632402 - DNA, 25 bp, Homo sapien
tgttgaccagattcacacatgaata

SEQ ID NO: 4632403 - DNA, 25 bp, Homo sapien
aaatgttcatgttgaccagattcac

SEQ ID NO: 4632404 - DNA, 25 bp, Homo sapien
tcacacatgaataactgcttgtcac

SEQ ID NO: 4632405 - DNA, 25 bp, Homo sapien
taaggtatcggggatctttcataga

SEQ ID NO: 4632406 - DNA, 25 bp, Homo sapien
atttactgtgtaggggatctctggg

SEQ ID NO: 4632407 - DNA, 25 bp, Homo sapien
agatcttgtcttggaggaacaggaa

SEQ ID NO: 4632408 - DNA, 25 bp, Homo sapien
tcagatacttttggggatttactgt

SEQ ID NO: 4632409 - DNA, 25 bp, Homo sapien
tctgtatcccaatcagaattgctga

SEQ ID NO: 4632410 - DNA, 25 bp, Homo sapien
actgtaaaattctgtatcccaatca

SEQ ID NO: 4632411 - DNA, 25 bp, Homo sapien
gatgcaacttgcataaactgtaaaa

SEQ ID NO: 4632412 - DNA, 25 bp, Homo sapien
gagatgcaacttgcataaactgtaa

SEQ ID NO: 4632413 - DNA, 25 bp, Homo sapien
tgaacatatataagtctgtgactgg

SEQ ID NO: 4632414 - DNA, 25 bp, Homo sapien
aagtctgtgactgggtatgcggtag

SEQ ID NO: 4632415 - DNA, 25 bp, Homo sapien
cggtaggaggagtttggtgagaaca

SEQ ID NO: 4632416 - DNA, 25 bp, Homo sapien
ctgggtatgcggtaggaggagtttg

SEQ ID NO: 4632417 - DNA, 25 bp, Homo sapien
cccctggaactttctcttttctgtg

SEQ ID NO: 4632418 - DNA, 25 bp, Homo sapien
ttctcttttctgtgcctatgctcag

SEQ ID NO: 4632419 - DNA, 25 bp, Homo sapien
ggaactttctcttttctgtgcctat

SEQ ID NO: 4632420 - DNA, 25 bp, Homo sapien
ctttctcttttctgtgcctatgctc

SEQ ID NO: 4632421 - DNA, 25 bp, Homo sapien
tcttttaggcggaacacagttcaca

SEQ ID NO: 4632422 - DNA, 25 bp, Homo sapien
ctgggcgcctccaactctctggaat

SEQ ID NO: 4632423 - DNA, 25 bp, Homo sapien
cgggaaacgcgtacttgagagcgca

SEQ ID NO: 4632424 - DNA, 25 bp, Homo sapien
tctcccttgcgctcatgatcttagg

SEQ ID NO: 4632425 - DNA, 25 bp, Homo sapien
cgtgcatgacgagggccagcgtggc

SEQ ID NO: 4632426 - DNA, 25 bp, Homo sapien
ctagctgatcgcgtgcatgacgagg

SEQ ID NO: 4632427 - DNA, 25 bp, Homo sapien
gtggctggctgcttggcccgcagac

SEQ ID NO: 4632428 - DNA, 25 bp, Homo sapien
gcgtggctggctgcttggcccgcag

SEQ ID NO: 4632429 - DNA, 25 bp, Homo sapien
gggcgaggttgaggccgggctccgc

SEQ ID NO: 4632430 - DNA, 25 bp, Homo sapien
cccatgaggacacgggcgaggttga

SEQ ID NO: 4632431 - DNA, 25 bp, Homo sapien
actacaacccccatgaggacacggg

SEQ ID NO: 4632432 - DNA, 25 bp, Homo sapien
gcgaggaaaactacaacccccatga

SEQ ID NO: 4632433 - DNA, 25 bp, Homo sapien
ccgcagctgcgaacaggaagcacca

SEQ ID NO: 4632434 - DNA, 25 bp, Homo sapien
tgccgcagctgcgaacaggaagcac

SEQ ID NO: 4632435 - DNA, 25 bp, Homo sapien
gccgcagctgcgaacaggaagcacc

SEQ ID NO: 4632436 - DNA, 25 bp, Homo sapien
cacagcccggcgggcaagaaggagg

SEQ ID NO: 4632437 - DNA, 25 bp, Homo sapien
aggagctgcgccctgccacgagtga

SEQ ID NO: 4632438 - DNA, 25 bp, Homo sapien
gagtgaggggcggacgggagacgtc

SEQ ID NO: 4632439 - DNA, 25 bp, Homo sapien
acgggagacgtcgaggccggcgagg

SEQ ID NO: 4632440 - DNA, 25 bp, Homo sapien
gcccagccgctctagaatcacggca

SEQ ID NO: 4632441 - DNA, 25 bp, Homo sapien
gccgctctagaatcacggcattagc

SEQ ID NO: 4632442 - DNA, 25 bp, Homo sapien
gctctagaatcacggcattagccct

SEQ ID NO: 4632443 - DNA, 25 bp, Homo sapien
cagccgctctagaatcacggcatta

SEQ ID NO: 4632444 - DNA, 25 bp, Homo sapien
tatacacacaatccatttaaaagtc

SEQ ID NO: 4632445 - DNA, 25 bp, Homo sapien
tctttgtatgcgacagcctaactat

SEQ ID NO: 4632446 - DNA, 25 bp, Homo sapien
ctgaaagcataacgctttcctaagt

SEQ ID NO: 4632447 - DNA, 25 bp, Homo sapien
taaaagtctttgtatgcgacagcct

SEQ ID NO: 4632448 - DNA, 25 bp, Homo sapien
taatcctcacttgcgatccttcctg

SEQ ID NO: 4632449 - DNA, 25 bp, Homo sapien
ctttattccccatgctcagattctc

SEQ ID NO: 4632450 - DNA, 25 bp, Homo sapien
gactttattccccatgctcagattc

SEQ ID NO: 4632451 - DNA, 25 bp, Homo sapien
ttaatataatcctcacttgcgatcc

SEQ ID NO: 4632452 - DNA, 25 bp, Homo sapien
tatcaatcccatgaccagaaaagat

SEQ ID NO: 4632453 - DNA, 25 bp, Homo sapien
tgtaaggaaaacacacgtttgtcag

SEQ ID NO: 4632454 - DNA, 25 bp, Homo sapien
tattaccattcaaaagagggagcag

SEQ ID NO: 4632455 - DNA, 25 bp, Homo sapien
catgcaaatgaaacttatctaagaa

SEQ ID NO: 4632456 - DNA, 25 bp, Homo sapien
ccgcacatggcccaaaataaaattt

SEQ ID NO: 4632457 - DNA, 25 bp, Homo sapien
cacatggcccaaaataaaattttca

SEQ ID NO: 4632458 - DNA, 25 bp, Homo sapien
ttcattgcaatatttgcattggttc

SEQ ID NO: 4632459 - DNA, 25 bp, Homo sapien
tgcattggttctaacacctaaattt

SEQ ID NO: 4632460 - DNA, 25 bp, Homo sapien
gaaacgcagatcacaaatcccagga

SEQ ID NO: 4632461 - DNA, 25 bp, Homo sapien
aatttccaagaaacgcagatcacaa

SEQ ID NO: 4632462 - DNA, 25 bp, Homo sapien
tccaagaaacgcagatcacaaatcc

SEQ ID NO: 4632463 - DNA, 25 bp, Homo sapien
tataaatttccaagaaacgcagatc

SEQ ID NO: 4632464 - DNA, 25 bp, Homo sapien
actgtcttcatcagacaaagtgatg

SEQ ID NO: 4632465 - DNA, 25 bp, Homo sapien
tcgataaagatcatcttcgtatgct

SEQ ID NO: 4632466 - DNA, 25 bp, Homo sapien
cagttcactagatgactcatctcga

SEQ ID NO: 4632467 - DNA, 25 bp, Homo sapien
atactgtcttcatcagacaaagtga

SEQ ID NO: 4632468 - DNA, 25 bp, Homo sapien
tcacatcccagtagcatccagcttt

SEQ ID NO: 4632469 - DNA, 25 bp, Homo sapien
tcagtaacagagttttcacatccca

SEQ ID NO: 4632470 - DNA, 25 bp, Homo sapien
ttcacatcccagtagcatccagctt

SEQ ID NO: 4632471 - DNA, 25 bp, Homo sapien
cctccttatgaaagatgatactact

SEQ ID NO: 4632472 - DNA, 25 bp, Homo sapien
agagagtcgcatgagaaacaaacca

SEQ ID NO: 4632473 - DNA, 25 bp, Homo sapien
gagtagaccctattggtcttttctc

SEQ ID NO: 4632474 - DNA, 25 bp, Homo sapien
ctggtaagagagtcgcatgagaaac

SEQ ID NO: 4632475 - DNA, 25 bp, Homo sapien
ggctctagccaaacaggaagaagca

SEQ ID NO: 4632476 - DNA, 25 bp, Homo sapien
gcagagtgtctttggtattctgaca

SEQ ID NO: 4632477 - DNA, 25 bp, Homo sapien
taagatttcaggtccagaactggct

SEQ ID NO: 4632478 - DNA, 25 bp, Homo sapien
gaatctgcttacagcagaagcagag

SEQ ID NO: 4632479 - DNA, 25 bp, Homo sapien
tgccagaggtggatggagtactcac

SEQ ID NO: 4632480 - DNA, 25 bp, Homo sapien
taatgccagaggtggatggagtact

SEQ ID NO: 4632481 - DNA, 25 bp, Homo sapien
ctaatgccagaggtggatggagtac

SEQ ID NO: 4632482 - DNA, 25 bp, Homo sapien
aatgccagaggtggatggagtactc

SEQ ID NO: 4632483 - DNA, 25 bp, Homo sapien
tacagggtagatataaaagaagact

SEQ ID NO: 4632484 - DNA, 25 bp, Homo sapien
tggagcagcaataaagtactatgag

SEQ ID NO: 4632485 - DNA, 25 bp, Homo sapien
ggggctccaagcacaatctacattc

SEQ ID NO: 4632486 - DNA, 25 bp, Homo sapien
gaaactagtgcaagagactgagcat

SEQ ID NO: 4632487 - DNA, 25 bp, Homo sapien
tgtaagtcacgagtactacctcagc

SEQ ID NO: 4632488 - DNA, 25 bp, Homo sapien
tgctctcggcctaaaacttaagtct

SEQ ID NO: 4632489 - DNA, 25 bp, Homo sapien
tcagcattacttataccctacatag

SEQ ID NO: 4632490 - DNA, 25 bp, Homo sapien
gtcttttaccactgtaagtcacgag

SEQ ID NO: 4632491 - DNA, 25 bp, Homo sapien
tttcacagataaagaggtagtgctg

SEQ ID NO: 4632492 - DNA, 25 bp, Homo sapien
tgtgcccagctcagattagtgtaga

SEQ ID NO: 4632493 - DNA, 25 bp, Homo sapien
tgccaaatgctgacgaactaaaggg

SEQ ID NO: 4632494 - DNA, 25 bp, Homo sapien
taggtatccccgatgtgccaaatgc

SEQ ID NO: 4632495 - DNA, 25 bp, Homo sapien
tacataggactatggattgatcgcc

SEQ ID NO: 4632496 - DNA, 25 bp, Homo sapien
agctataagctcatgtttgccacaa

SEQ ID NO: 4632497 - DNA, 25 bp, Homo sapien
tttcctgtgacattaagcctaccca

SEQ ID NO: 4632498 - DNA, 25 bp, Homo sapien
gaacctatcgtgtaactatgaagac

SEQ ID NO: 4632499 - DNA, 25 bp, Homo sapien
gtgacctttcaaactaagaactgag

SEQ ID NO: 4632500 - DNA, 25 bp, Homo sapien
caaccatgaggtacaatcaaaggaa

SEQ ID NO: 4632501 - DNA, 25 bp, Homo sapien
gatgttgggaacagagacctctact

SEQ ID NO: 4632502 - DNA, 25 bp, Homo sapien
taaattgccatagcacttcaaggac

SEQ ID NO: 4632503 - DNA, 25 bp, Homo sapien
aaatgttactgtatgacaccagcct

SEQ ID NO: 4632504 - DNA, 25 bp, Homo sapien
ctctctggaccactgggctaaaata

SEQ ID NO: 4632505 - DNA, 25 bp, Homo sapien
atcctagtggtcttaaaatgaaact

SEQ ID NO: 4632506 - DNA, 25 bp, Homo sapien
tattatcctagtggtcttaaaatga

SEQ ID NO: 4632507 - DNA, 25 bp, Homo sapien
ttccattacattacaatgtctatta

SEQ ID NO: 4632508 - DNA, 25 bp, Homo sapien
ttatcctagtggtcttaaaatgaaa

SEQ ID NO: 4632509 - DNA, 25 bp, Homo sapien
ctctacatcagccaatattagacac

SEQ ID NO: 4632510 - DNA, 25 bp, Homo sapien
ctctttctgtatttgctaggtatta

SEQ ID NO: 4632511 - DNA, 25 bp, Homo sapien
tagctctacatcagccaatattaga

SEQ ID NO: 4632512 - DNA, 25 bp, Homo sapien
tctttctgtatttgctaggtattac

SEQ ID NO: 4632513 - DNA, 25 bp, Homo sapien
tgtcttccaataaccagtgtagcca

SEQ ID NO: 4632514 - DNA, 25 bp, Homo sapien
cccgccatctttaaatgtcttccaa

SEQ ID NO: 4632515 - DNA, 25 bp, Homo sapien
tctaattaacgaccgggtgcagtgg

SEQ ID NO: 4632516 - DNA, 25 bp, Homo sapien
tttaaacaatccaactgagatcagg

SEQ ID NO: 4632517 - DNA, 25 bp, Homo sapien
aatttctcagaacaccaatggccag

SEQ ID NO: 4632518 - DNA, 25 bp, Homo sapien
taatgtcaattcacgcatctggaga

SEQ ID NO: 4632519 - DNA, 25 bp, Homo sapien
tactagtacagactggtgtcacagc

SEQ ID NO: 4632520 - DNA, 25 bp, Homo sapien
gccatttgggctatcctgctatgaa

SEQ ID NO: 4632521 - DNA, 25 bp, Homo sapien
ctcattctgtaggttaacttctttt

SEQ ID NO: 4632522 - DNA, 25 bp, Homo sapien
cctatcagatacgtgggttataaat

SEQ ID NO: 4632523 - DNA, 25 bp, Homo sapien
gtattatgagttccttatacatttt

SEQ ID NO: 4632524 - DNA, 25 bp, Homo sapien
tattagtcccctatcagatacgtgg

SEQ ID NO: 4632525 - DNA, 25 bp, Homo sapien
catcaagtatgtctgcctagagtcg

SEQ ID NO: 4632526 - DNA, 25 bp, Homo sapien
caaggatgttgtacagactcaaact

SEQ ID NO: 4632527 - DNA, 25 bp, Homo sapien
caaactgtcacaataaatgctctct

SEQ ID NO: 4632528 - DNA, 25 bp, Homo sapien
gaagaagtaactacatacgtatcca

SEQ ID NO: 4632529 - DNA, 25 bp, Homo sapien
ttttttatgccacttgcaaaccagg

SEQ ID NO: 4632530 - DNA, 25 bp, Homo sapien
gatctttcacacatagtgtacaaaa

SEQ ID NO: 4632531 - DNA, 25 bp, Homo sapien
ttcagcagacaaactaatatttttt

SEQ ID NO: 4632532 - DNA, 25 bp, Homo sapien
caaaataattcttctactgatggat

SEQ ID NO: 4632533 - DNA, 25 bp, Homo sapien
taatgtcagctataacagcagacca

SEQ ID NO: 4632534 - DNA, 25 bp, Homo sapien
tatatagccatgttaggtaaccaca

SEQ ID NO: 4632535 - DNA, 25 bp, Homo sapien
tataggaacagaacggcaaagattt

SEQ ID NO: 4632536 - DNA, 25 bp, Homo sapien
cagcgcttgggagtgaaacattaaa

SEQ ID NO: 4632537 - DNA, 25 bp, Homo sapien
cagtggtagtttgaataaggtgaca

SEQ ID NO: 4632538 - DNA, 25 bp, Homo sapien
acaccacagaaggtcctaatgttta

SEQ ID NO: 4632539 - DNA, 25 bp, Homo sapien
caagtttaagttttgagcctagtct

SEQ ID NO: 4632540 - DNA, 25 bp, Homo sapien
tactcttgattaaccactacattct

SEQ ID NO: 4632541 - DNA, 25 bp, Homo sapien
ccaacaggatccttcaagtagggtg

SEQ ID NO: 4632542 - DNA, 25 bp, Homo sapien
gctgcaacgttcttgtaagtattat

SEQ ID NO: 4632543 - DNA, 25 bp, Homo sapien
tagctgcaacgttcttgtaagtatt

SEQ ID NO: 4632544 - DNA, 25 bp, Homo sapien
ggatccttcaagtagggtgtctggc

SEQ ID NO: 4632545 - DNA, 25 bp, Homo sapien
aatccgtgactggttgtgatccatt

SEQ ID NO: 4632546 - DNA, 25 bp, Homo sapien
gatccattagttgtaacaccactgc

SEQ ID NO: 4632547 - DNA, 25 bp, Homo sapien
tggaacaaagaaatccgtgactggt

SEQ ID NO: 4632548 - DNA, 25 bp, Homo sapien
agaaatccgtgactggttgtgatcc

SEQ ID NO: 4632549 - DNA, 25 bp, Homo sapien
ttctgtctgagcctcccttagtgct

SEQ ID NO: 4632550 - DNA, 25 bp, Homo sapien
tctgtctgagcctcccttagtgctg

SEQ ID NO: 4632551 - DNA, 25 bp, Homo sapien
tccttctgtctgagcctcccttagt

SEQ ID NO: 4632552 - DNA, 25 bp, Homo sapien
tgatccttctgtctgagcctccctt

SEQ ID NO: 4632553 - DNA, 25 bp, Homo sapien
catacatctgtggtagagattaaga

SEQ ID NO: 4632554 - DNA, 25 bp, Homo sapien
acatctgtggtagagattaagaaca

SEQ ID NO: 4632555 - DNA, 25 bp, Homo sapien
cctgcatacatctgtggtagagatt

SEQ ID NO: 4632556 - DNA, 25 bp, Homo sapien
cacctgcatacatctgtggtagaga

SEQ ID NO: 4632557 - DNA, 25 bp, Homo sapien
caagaagtgttgtctgccatgccac

SEQ ID NO: 4632558 - DNA, 25 bp, Homo sapien
gccatgccacggtcttcaagagtca

SEQ ID NO: 4632559 - DNA, 25 bp, Homo sapien
gcagaactgctagctcttgatgggc

SEQ ID NO: 4632560 - DNA, 25 bp, Homo sapien
cgcgtgatcttccaactaaaggagt

SEQ ID NO: 4632561 - DNA, 25 bp, Homo sapien
ccatcgcacctggcctggaactgtt

SEQ ID NO: 4632562 - DNA, 25 bp, Homo sapien
agccacagtacccggcctgtatttt

SEQ ID NO: 4632563 - DNA, 25 bp, Homo sapien
tcgcacctggcctggaactgttgtt

SEQ ID NO: 4632564 - DNA, 25 bp, Homo sapien
gagccacagtacccggcctgtattt

SEQ ID NO: 4632565 - DNA, 25 bp, Homo sapien
ggtgctagaagttagatatctccat

SEQ ID NO: 4632566 - DNA, 25 bp, Homo sapien
caagactgttcgtagggttagcaag

SEQ ID NO: 4632567 - DNA, 25 bp, Homo sapien
gagattcaaccccaaaagcatgatc

SEQ ID NO: 4632568 - DNA, 25 bp, Homo sapien
tcatctgctgcagtatgagtgcaaa

SEQ ID NO: 4632569 - DNA, 25 bp, Homo sapien
accatgactggccagaagatcctct

SEQ ID NO: 4632570 - DNA, 25 bp, Homo sapien
taccatgactggccagaagatcctc

SEQ ID NO: 4632571 - DNA, 25 bp, Homo sapien
ccgtgttcacgatctggaatactaa

SEQ ID NO: 4632572 - DNA, 25 bp, Homo sapien
gacctaaatagacagatataccgtg

SEQ ID NO: 4632573 - DNA, 25 bp, Homo sapien
aaacactcagggataaatttgacag

SEQ ID NO: 4632574 - DNA, 25 bp, Homo sapien
ctttctggaagaaacggactacact

SEQ ID NO: 4632575 - DNA, 25 bp, Homo sapien
taggcgttatggaggaaataccgaa

SEQ ID NO: 4632576 - DNA, 25 bp, Homo sapien
taggtgaattctagcactgcccaaa

SEQ ID NO: 4632577 - DNA, 25 bp, Homo sapien
tcaagagtgagtagcagacttccac

SEQ ID NO: 4632578 - DNA, 25 bp, Homo sapien
aactcctggagtttagcagaaaggg

SEQ ID NO: 4632579 - DNA, 25 bp, Homo sapien
gcagtatcctgactatgacccctgt

SEQ ID NO: 4632580 - DNA, 25 bp, Homo sapien
caaacggcagagaattagaatgtct

SEQ ID NO: 4632581 - DNA, 25 bp, Homo sapien
tagctgccttcctgacatcaatgga

SEQ ID NO: 4632582 - DNA, 25 bp, Homo sapien
gattatatcctagtagacccagaaa

SEQ ID NO: 4632583 - DNA, 25 bp, Homo sapien
ggactgcaggcataagttgccagag

SEQ ID NO: 4632584 - DNA, 25 bp, Homo sapien
gactgcaggcataagttgccagagc

SEQ ID NO: 4632585 - DNA, 25 bp, Homo sapien
gggactgcaggcataagttgccaga

SEQ ID NO: 4632586 - DNA, 25 bp, Homo sapien
acaatgctatagctggaattctgcc

SEQ ID NO: 4632587 - DNA, 25 bp, Homo sapien
gaagtagcaccattttatcacccca

SEQ ID NO: 4632588 - DNA, 25 bp, Homo sapien
tgtgttaccctatagataaggcctc

SEQ ID NO: 4632589 - DNA, 25 bp, Homo sapien
ttctaacaactacacatacaagggc

SEQ ID NO: 4632590 - DNA, 25 bp, Homo sapien
tcacccatgaatagagtaaactgct

SEQ ID NO: 4632591 - DNA, 25 bp, Homo sapien
gcaatattagaaaaggtaaccatgt

SEQ ID NO: 4632592 - DNA, 25 bp, Homo sapien
tcgcctcatttattaaaccaagtgt

SEQ ID NO: 4632593 - DNA, 25 bp, Homo sapien
taagagacacaggtcccataaaaac

SEQ ID NO: 4632594 - DNA, 25 bp, Homo sapien
cactcacacggtattgataggaatg

SEQ ID NO: 4632595 - DNA, 25 bp, Homo sapien
tatgcttagagatgttacggctttc

SEQ ID NO: 4632596 - DNA, 25 bp, Homo sapien
cagcctaactcatcgaatttttgta

SEQ ID NO: 4632597 - DNA, 25 bp, Homo sapien
tctgatgactcacacagtcttccaa

SEQ ID NO: 4632598 - DNA, 25 bp, Homo sapien
cagtgaatactccaaacccttaaat

SEQ ID NO: 4632599 - DNA, 25 bp, Homo sapien
ctccttttctactgaagggtaccat

SEQ ID NO: 4632600 - DNA, 25 bp, Homo sapien
atgcccggccaggatcgaatattct

SEQ ID NO: 4632601 - DNA, 25 bp, Homo sapien
tactccaaacccttaaatagtgaca

SEQ ID NO: 4632602 - DNA, 25 bp, Homo sapien
tacaacgagttctcatgtgcaccac

SEQ ID NO: 4632603 - DNA, 25 bp, Homo sapien
ttctacagaatgtcccaaattggga

SEQ ID NO: 4632604 - DNA, 25 bp, Homo sapien
tacaaatggtatgtgacgctgggat

SEQ ID NO: 4632605 - DNA, 25 bp, Homo sapien
gaagtgaacctaccctgattttcca

SEQ ID NO: 4632606 - DNA, 25 bp, Homo sapien
aaaactgtcaatcatcttgatgagc

SEQ ID NO: 4632607 - DNA, 25 bp, Homo sapien
tctgtagggcactcatcattgaggg

SEQ ID NO: 4632608 - DNA, 25 bp, Homo sapien
tccatcaactcaacatcaacaggta

SEQ ID NO: 4632609 - DNA, 25 bp, Homo sapien
taaatgtttatactcgacagccatc

SEQ ID NO: 4632610 - DNA, 25 bp, Homo sapien
ttgctaagaatgtccatgaggccca

SEQ ID NO: 4632611 - DNA, 25 bp, Homo sapien
tcagcgtgtagactctggagcaaga

SEQ ID NO: 4632612 - DNA, 25 bp, Homo sapien
cctctctactgtgcagggaaaggag

SEQ ID NO: 4632613 - DNA, 25 bp, Homo sapien
tacagaaggcttccaaaacgtacaa

SEQ ID NO: 4632614 - DNA, 25 bp, Homo sapien
ggttacagagtaggtgcaaattcag

SEQ ID NO: 4632615 - DNA, 25 bp, Homo sapien
tataaatcgcagttaggttacagag

SEQ ID NO: 4632616 - DNA, 25 bp, Homo sapien
gaatgacaagatattcgtgacagaa

SEQ ID NO: 4632617 - DNA, 25 bp, Homo sapien
tttaaagtcaaagcacctatcaagt

SEQ ID NO: 4632618 - DNA, 25 bp, Homo sapien
acaatcagtaccagttcgtggcctg

SEQ ID NO: 4632619 - DNA, 25 bp, Homo sapien
atcagtaccagttcgtggcctgtta

SEQ ID NO: 4632620 - DNA, 25 bp, Homo sapien
tgtgcatgatactgtcaagacaagg

SEQ ID NO: 4632621 - DNA, 25 bp, Homo sapien
caagacaaggggtccccaaactctg

SEQ ID NO: 4632622 - DNA, 25 bp, Homo sapien
gggcatggtgtctcacacctaattc

SEQ ID NO: 4632623 - DNA, 25 bp, Homo sapien
tggtgtctcacacctaattccagca

SEQ ID NO: 4632624 - DNA, 25 bp, Homo sapien
gcatggtgtctcacacctaattcca

SEQ ID NO: 4632625 - DNA, 25 bp, Homo sapien
catggtgtctcacacctaattccag

SEQ ID NO: 4632626 - DNA, 25 bp, Homo sapien
gcataaagcagctagttaaggcaga

SEQ ID NO: 4632627 - DNA, 25 bp, Homo sapien
gatttccaaatataccaggagttcc

SEQ ID NO: 4632628 - DNA, 25 bp, Homo sapien
acctggatgatgcataaagcagcta

SEQ ID NO: 4632629 - DNA, 25 bp, Homo sapien
taagatggaataagcacacactacc

SEQ ID NO: 4632630 - DNA, 25 bp, Homo sapien
ttggcctgctagatgtcaaaatgca

SEQ ID NO: 4632631 - DNA, 25 bp, Homo sapien
tgtagaacctgccagactgtagtac

SEQ ID NO: 4632632 - DNA, 25 bp, Homo sapien
tacagtggcaggcaacttacatccc

SEQ ID NO: 4632633 - DNA, 25 bp, Homo sapien
gggataattattggtctgagacaga

SEQ ID NO: 4632634 - DNA, 25 bp, Homo sapien
taatgactaaaatactacccagtac

SEQ ID NO: 4632635 - DNA, 25 bp, Homo sapien
tgttgtcattaatacaagagcttta

SEQ ID NO: 4632636 - DNA, 25 bp, Homo sapien
aacagcactatgtattcaaatgatg

SEQ ID NO: 4632637 - DNA, 25 bp, Homo sapien
gatgaactcaacacatactcaaatg

SEQ ID NO: 4632638 - DNA, 25 bp, Homo sapien
tctcatgaggattaggcaaccacca

SEQ ID NO: 4632639 - DNA, 25 bp, Homo sapien
gaattctcatgaggattaggcaacc

SEQ ID NO: 4632640 - DNA, 25 bp, Homo sapien
ggcaaccaccatctggggctccaga

SEQ ID NO: 4632641 - DNA, 25 bp, Homo sapien
ttctcatgaggattaggcaaccacc

SEQ ID NO: 4632642 - DNA, 25 bp, Homo sapien
cctgcacgctgttggcattgttgta

SEQ ID NO: 4632643 - DNA, 25 bp, Homo sapien
acaaaccagttaagggcaagattct

SEQ ID NO: 4632644 - DNA, 25 bp, Homo sapien
cattgttgtaaacaaaccagttaag

SEQ ID NO: 4632645 - DNA, 25 bp, Homo sapien
tcttgccaagagaattaacctgcat

SEQ ID NO: 4632646 - DNA, 25 bp, Homo sapien
ttttggccacatacacgtgaagcta

SEQ ID NO: 4632647 - DNA, 25 bp, Homo sapien
tgttcttttggccacatacacgtga

SEQ ID NO: 4632648 - DNA, 25 bp, Homo sapien
ttcttttggccacatacacgtgaag

SEQ ID NO: 4632649 - DNA, 25 bp, Homo sapien
tcttttggccacatacacgtgaagc

SEQ ID NO: 4632650 - DNA, 25 bp, Homo sapien
ttgagtccagcaggttgcgctgagc

SEQ ID NO: 4632651 - DNA, 25 bp, Homo sapien
ttgcttgagtccagcaggttgcgct

SEQ ID NO: 4632652 - DNA, 25 bp, Homo sapien
tgagtccagcaggttgcgctgagcc

SEQ ID NO: 4632653 - DNA, 25 bp, Homo sapien
gcttgagtccagcaggttgcgctga

SEQ ID NO: 4632654 - DNA, 25 bp, Homo sapien
cattctccgtgtcaagtggcagcca

SEQ ID NO: 4632655 - DNA, 25 bp, Homo sapien
gagtctcttgaaggtccacggctgc

SEQ ID NO: 4632656 - DNA, 25 bp, Homo sapien
cattcagggataaagtgcacataca

SEQ ID NO: 4632657 - DNA, 25 bp, Homo sapien
gacaagtcctctcttagcattcagg

SEQ ID NO: 4632658 - DNA, 25 bp, Homo sapien
gattaacttaatgcagcatggctca

SEQ ID NO: 4632659 - DNA, 25 bp, Homo sapien
gcttcattattaccaatgctgagga

SEQ ID NO: 4632660 - DNA, 25 bp, Homo sapien
gagaaacaacacgacagaaacatag

SEQ ID NO: 4632661 - DNA, 25 bp, Homo sapien
tgtatctagaaaaaccgaatctggg

SEQ ID NO: 4632662 - DNA, 25 bp, Homo sapien
tatatgtgtgcagtaaaggctttac

SEQ ID NO: 4632663 - DNA, 25 bp, Homo sapien
caaataggtgacagtcattcagaga

SEQ ID NO: 4632664 - DNA, 25 bp, Homo sapien
caaaatcaacccctcataggccaag

SEQ ID NO: 4632665 - DNA, 25 bp, Homo sapien
gtatggcccttccacttaggtatca

SEQ ID NO: 4632666 - DNA, 25 bp, Homo sapien
taacagcttcttaaggcttagtgca

SEQ ID NO: 4632667 - DNA, 25 bp, Homo sapien
caataagggtgctactgatgtgcct

SEQ ID NO: 4632668 - DNA, 25 bp, Homo sapien
cagtatttctctaggcctgccctaa

SEQ ID NO: 4632669 - DNA, 25 bp, Homo sapien
agttactatcatgctcaattcagag

SEQ ID NO: 4632670 - DNA, 25 bp, Homo sapien
gtactcgtatttcatgttcctccca

SEQ ID NO: 4632671 - DNA, 25 bp, Homo sapien
gaataactactggtttcacatttac

SEQ ID NO: 4632672 - DNA, 25 bp, Homo sapien
gctggcatctcaataatgtctcttc

SEQ ID NO: 4632673 - DNA, 25 bp, Homo sapien
tcgattattttgtggaaagctggca

SEQ ID NO: 4632674 - DNA, 25 bp, Homo sapien
taaaaatctcacctgtataatgtac

SEQ ID NO: 4632675 - DNA, 25 bp, Homo sapien
tattttgatgtatagtatggagcag

SEQ ID NO: 4632676 - DNA, 25 bp, Homo sapien
tttatgtcatacttaggaagtcctc

SEQ ID NO: 4632677 - DNA, 25 bp, Homo sapien
gcagatgtagttaagtcctaccagt

SEQ ID NO: 4632678 - DNA, 25 bp, Homo sapien
ctttactgccaaaacatggaatgca

SEQ ID NO: 4632679 - DNA, 25 bp, Homo sapien
ggacttggatgtttctctactggaa

SEQ ID NO: 4632680 - DNA, 25 bp, Homo sapien
tactactaatgctatctggacttgg

SEQ ID NO: 4632681 - DNA, 25 bp, Homo sapien
tgtgtgatgttcctccttgcattac

SEQ ID NO: 4632682 - DNA, 25 bp, Homo sapien
cactgcaggtaaaacgacatagcag

SEQ ID NO: 4632683 - DNA, 25 bp, Homo sapien
tctattagatgacacaagtactagg

SEQ ID NO: 4632684 - DNA, 25 bp, Homo sapien
tggtgataagggatggttaaccacc

SEQ ID NO: 4632685 - DNA, 25 bp, Homo sapien
cagaaaatctatccatagggtatgg

SEQ ID NO: 4632686 - DNA, 25 bp, Homo sapien
tgtacagagactaagggatggccaa

SEQ ID NO: 4632687 - DNA, 25 bp, Homo sapien
aaaatgacagtgtggtggcctagcc

SEQ ID NO: 4632688 - DNA, 25 bp, Homo sapien
tagaccgagctgagatatacctgct

SEQ ID NO: 4632689 - DNA, 25 bp, Homo sapien
catcacagggcaaagagcaaacgca

SEQ ID NO: 4632690 - DNA, 25 bp, Homo sapien
gctgggcagcaaccatatggcatta

SEQ ID NO: 4632691 - DNA, 25 bp, Homo sapien
tggcattacaaaggaccactaggag

SEQ ID NO: 4632692 - DNA, 25 bp, Homo sapien
aagtttgtaagtcgagctgggcagc

SEQ ID NO: 4632693 - DNA, 25 bp, Homo sapien
gtacttgacctgtaccacaaagcag

SEQ ID NO: 4632694 - DNA, 25 bp, Homo sapien
agtgaattcagagtcctagacgtcc

SEQ ID NO: 4632695 - DNA, 25 bp, Homo sapien
aattcagagtcctagacgtccccat

SEQ ID NO: 4632696 - DNA, 25 bp, Homo sapien
tgaattcagagtcctagacgtcccc

SEQ ID NO: 4632697 - DNA, 25 bp, Homo sapien
ctgatttcccaaaagtgaattcaga

SEQ ID NO: 4632698 - DNA, 25 bp, Homo sapien
aacagtacaacattctggtactgat

SEQ ID NO: 4632699 - DNA, 25 bp, Homo sapien
cattctggtactgataccacatcac

SEQ ID NO: 4632700 - DNA, 25 bp, Homo sapien
aaactggaccaatggctttgaagcc

SEQ ID NO: 4632701 - DNA, 25 bp, Homo sapien
tggctttgaagccttaatgtcctta

SEQ ID NO: 4632702 - DNA, 25 bp, Homo sapien
ttcccgggcttagcagagaactact

SEQ ID NO: 4632703 - DNA, 25 bp, Homo sapien
tagcagagaactacttagttgggac

SEQ ID NO: 4632704 - DNA, 25 bp, Homo sapien
cccgggcttagcagagaactactta

SEQ ID NO: 4632705 - DNA, 25 bp, Homo sapien
acttcccgggcttagcagagaacta

SEQ ID NO: 4632706 - DNA, 25 bp, Homo sapien
ctttcaagatcttgacataagacca

SEQ ID NO: 4632707 - DNA, 25 bp, Homo sapien
caagatcttgacataagaccatgac

SEQ ID NO: 4632708 - DNA, 25 bp, Homo sapien
agatcttgacataagaccatgacat

SEQ ID NO: 4632709 - DNA, 25 bp, Homo sapien
ttcaagatcttgacataagaccatg

SEQ ID NO: 4632710 - DNA, 25 bp, Homo sapien
tcggcaagcataaaaggccagcctg

SEQ ID NO: 4632711 - DNA, 25 bp, Homo sapien
gcctgtgggcccgtcactctgaaca

SEQ ID NO: 4632712 - DNA, 25 bp, Homo sapien
tctgggaccatctgcgtcggcaagc

SEQ ID NO: 4632713 - DNA, 25 bp, Homo sapien
ttctcttcacttagctgaatgctct

SEQ ID NO: 4632714 - DNA, 25 bp, Homo sapien
aacagttttcttgccgtatctatag

SEQ ID NO: 4632715 - DNA, 25 bp, Homo sapien
caccataagtgatacagatgtattt

SEQ ID NO: 4632716 - DNA, 25 bp, Homo sapien
taaatcctggtaagccaacctcacc

SEQ ID NO: 4632717 - DNA, 25 bp, Homo sapien
gtgtttcagtcacatctgtatcatg

SEQ ID NO: 4632718 - DNA, 25 bp, Homo sapien
tgtggctgggcaaagctcattcact

SEQ ID NO: 4632719 - DNA, 25 bp, Homo sapien
tcccaaagggctgatagagcactat

SEQ ID NO: 4632720 - DNA, 25 bp, Homo sapien
tacagtagccttccattatcggtgg

SEQ ID NO: 4632721 - DNA, 25 bp, Homo sapien
tgataggttactcatggtctcccaa

SEQ ID NO: 4632722 - DNA, 25 bp, Homo sapien
tccaaaatttactacggctacagat

SEQ ID NO: 4632723 - DNA, 25 bp, Homo sapien
tgcaaagacaaaaggtatcctgccc

SEQ ID NO: 4632724 - DNA, 25 bp, Homo sapien
tactgaaggtagttttgaaggagca

SEQ ID NO: 4632725 - DNA, 25 bp, Homo sapien
ggagcagatgcaagaaacctctctg

SEQ ID NO: 4632726 - DNA, 25 bp, Homo sapien
gctagctctgtacttaggaggaaat

SEQ ID NO: 4632727 - DNA, 25 bp, Homo sapien
taaattctgctgtggtgtgttcaca

SEQ ID NO: 4632728 - DNA, 25 bp, Homo sapien
tagtcctctgcaatctgaagttaag

SEQ ID NO: 4632729 - DNA, 25 bp, Homo sapien
cttgtaatttatggtgctagctctg

SEQ ID NO: 4632730 - DNA, 25 bp, Homo sapien
tgaaactgggcctgaatggataaat

SEQ ID NO: 4632731 - DNA, 25 bp, Homo sapien
taaaactgagtctagtgccaacatg

SEQ ID NO: 4632732 - DNA, 25 bp, Homo sapien
cagtatgcatgggaaaagtctcaag

SEQ ID NO: 4632733 - DNA, 25 bp, Homo sapien
tcccacagactgtattccggatagt

SEQ ID NO: 4632734 - DNA, 25 bp, Homo sapien
gagagcacattagagataccaagag

SEQ ID NO: 4632735 - DNA, 25 bp, Homo sapien
tggaacttctgcaaaccttattggc

SEQ ID NO: 4632736 - DNA, 25 bp, Homo sapien
taggctctgtgttaagcactgtggg

SEQ ID NO: 4632737 - DNA, 25 bp, Homo sapien
gacagggctcaagagtacattcatg

SEQ ID NO: 4632738 - DNA, 25 bp, Homo sapien
tataggcacgcactgcaacactcag

SEQ ID NO: 4632739 - DNA, 25 bp, Homo sapien
tcttttaacaatggaaatctgctcc

SEQ ID NO: 4632740 - DNA, 25 bp, Homo sapien
tagatagggtgcacatgttatttcc

SEQ ID NO: 4632741 - DNA, 25 bp, Homo sapien
cacaatggcctaccttcaggacagc

SEQ ID NO: 4632742 - DNA, 25 bp, Homo sapien
tccattgtaataaactaagtccctg

SEQ ID NO: 4632743 - DNA, 25 bp, Homo sapien
taagtccctgaatctgtagtttccc

SEQ ID NO: 4632744 - DNA, 25 bp, Homo sapien
aatatatatgctttataagatccca

SEQ ID NO: 4632745 - DNA, 25 bp, Homo sapien
caataactaatcagatgttcatcag

SEQ ID NO: 4632746 - DNA, 25 bp, Homo sapien
cagtcctttctgatatagttgccat

SEQ ID NO: 4632747 - DNA, 25 bp, Homo sapien
tttctactagtggagggtagctggc

SEQ ID NO: 4632748 - DNA, 25 bp, Homo sapien
ggatgtagaattcttgattcccagc

SEQ ID NO: 4632749 - DNA, 25 bp, Homo sapien
gattctatttacctgcccatcccag

SEQ ID NO: 4632750 - DNA, 25 bp, Homo sapien
gaggagatcctttaatcccgtcaaa

SEQ ID NO: 4632751 - DNA, 25 bp, Homo sapien
tgattccagtaccttcgttgtttac

SEQ ID NO: 4632752 - DNA, 25 bp, Homo sapien
atgccaattatgtcaaggtgggtgg

SEQ ID NO: 4632753 - DNA, 25 bp, Homo sapien
ctcctaagtagtgcctgacgccagg

SEQ ID NO: 4632754 - DNA, 25 bp, Homo sapien
taaaaaatcatggtgaaatatagaa

SEQ ID NO: 4632755 - DNA, 25 bp, Homo sapien
gaaaacataatatttaccatcttta

SEQ ID NO: 4632756 - DNA, 25 bp, Homo sapien
aaaatcatggtgaaatatagaaaac

SEQ ID NO: 4632757 - DNA, 25 bp, Homo sapien
aatcatggtgaaatatagaaaacat

SEQ ID NO: 4632758 - DNA, 25 bp, Homo sapien
caagaggaactattagtagtagcat

SEQ ID NO: 4632759 - DNA, 25 bp, Homo sapien
taatttggaggctactcttgcctct

SEQ ID NO: 4632760 - DNA, 25 bp, Homo sapien
cacatctccatctggcattctacta

SEQ ID NO: 4632761 - DNA, 25 bp, Homo sapien
tagcatgattgagttgcttcaacac

SEQ ID NO: 4632762 - DNA, 25 bp, Homo sapien
atggctggtctaccacacagtcggg

SEQ ID NO: 4632763 - DNA, 25 bp, Homo sapien
tgcagaacaaagtcgctttctctct

SEQ ID NO: 4632764 - DNA, 25 bp, Homo sapien
aacagttaaattcatggcatggctg

SEQ ID NO: 4632765 - DNA, 25 bp, Homo sapien
gggaattctttaaatagagcctgtc

SEQ ID NO: 4632766 - DNA, 25 bp, Homo sapien
gcctctgttactgtctaacttgaat

SEQ ID NO: 4632767 - DNA, 25 bp, Homo sapien
ttcacaaaactcaatggctcatggt

SEQ ID NO: 4632768 - DNA, 25 bp, Homo sapien
ccttttcagatattgttcgcttaga

SEQ ID NO: 4632769 - DNA, 25 bp, Homo sapien
tgttcgcttagagtcttggcctctg

SEQ ID NO: 4632770 - DNA, 25 bp, Homo sapien
caagcgctggatatctggacaattt

SEQ ID NO: 4632771 - DNA, 25 bp, Homo sapien
taagccacccatgctagaaagaatg

SEQ ID NO: 4632772 - DNA, 25 bp, Homo sapien
taaataaatgaaacgctcccctcca

SEQ ID NO: 4632773 - DNA, 25 bp, Homo sapien
tatgcactattgaggcctacaggga

SEQ ID NO: 4632774 - DNA, 25 bp, Homo sapien
tacctagactacgtgtttctttgca

SEQ ID NO: 4632775 - DNA, 25 bp, Homo sapien
cattacatcattaggttctagtacc

SEQ ID NO: 4632776 - DNA, 25 bp, Homo sapien
tatccactgaaaaatcgtagtctga

SEQ ID NO: 4632777 - DNA, 25 bp, Homo sapien
tgtcactcctgcattatccttctag

SEQ ID NO: 4632778 - DNA, 25 bp, Homo sapien
tgatacataccagcgagattctctc

SEQ ID NO: 4632779 - DNA, 25 bp, Homo sapien
cccattgtccaatcagaataggtct

SEQ ID NO: 4632780 - DNA, 25 bp, Homo sapien
tatgagtgcctcaaaacaggtttgt

SEQ ID NO: 4632781 - DNA, 25 bp, Homo sapien
aacgttcagtcagtgaaccacctgg

SEQ ID NO: 4632782 - DNA, 25 bp, Homo sapien
tatgtcctggccgaatctcatgttg

SEQ ID NO: 4632783 - DNA, 25 bp, Homo sapien
tatatgtgcatggtgatccagggct

SEQ ID NO: 4632784 - DNA, 25 bp, Homo sapien
ccccatttgtggaactattctgcta

SEQ ID NO: 4632785 - DNA, 25 bp, Homo sapien
gggtgacccataacctacagtctat

SEQ ID NO: 4632786 - DNA, 25 bp, Homo sapien
ctttgcaactagcacaaggtaattc

SEQ ID NO: 4632787 - DNA, 25 bp, Homo sapien
aaagaggactttccatacggcccag

SEQ ID NO: 4632788 - DNA, 25 bp, Homo sapien
cacaaggtaattcgccttaaagagg

SEQ ID NO: 4632789 - DNA, 25 bp, Homo sapien
catacggcccaggaacactcatctt

SEQ ID NO: 4632790 - DNA, 25 bp, Homo sapien
ctgatggaccagtttataccatctt

SEQ ID NO: 4632791 - DNA, 25 bp, Homo sapien
gatggaccagtttataccatcttct

SEQ ID NO: 4632792 - DNA, 25 bp, Homo sapien
tgatggaccagtttataccatcttc

SEQ ID NO: 4632793 - DNA, 25 bp, Homo sapien
atggaccagtttataccatcttctc

SEQ ID NO: 4632794 - DNA, 25 bp, Homo sapien
gttggctgaatagtaccgctgggtc

SEQ ID NO: 4632795 - DNA, 25 bp, Homo sapien
tcttccaggtgttcggttattagct

SEQ ID NO: 4632796 - DNA, 25 bp, Homo sapien
aaatgaccacgtttgtcacaatttc

SEQ ID NO: 4632797 - DNA, 25 bp, Homo sapien
tttttgataaatgaccacgtttgtc

SEQ ID NO: 4632798 - DNA, 25 bp, Homo sapien
gacatgagtggtccaacatcttagg

SEQ ID NO: 4632799 - DNA, 25 bp, Homo sapien
acatgagtggtccaacatcttaggc

SEQ ID NO: 4632800 - DNA, 25 bp, Homo sapien
agacatgagtggtccaacatcttag

SEQ ID NO: 4632801 - DNA, 25 bp, Homo sapien
aagacatgagtggtccaacatctta

SEQ ID NO: 4632802 - DNA, 25 bp, Homo sapien
tgatgattccttgattgccaatatg

SEQ ID NO: 4632803 - DNA, 25 bp, Homo sapien
ttttggtaaagagtgggagtctcac

SEQ ID NO: 4632804 - DNA, 25 bp, Homo sapien
gaaagttgagagatcctccgagtag

SEQ ID NO: 4632805 - DNA, 25 bp, Homo sapien
tagcttttagaccttagacttatta

SEQ ID NO: 4632806 - DNA, 25 bp, Homo sapien
gaagaaacatcattgagcactcacg

SEQ ID NO: 4632807 - DNA, 25 bp, Homo sapien
cagtgctccttggagtacactaaaa

SEQ ID NO: 4632808 - DNA, 25 bp, Homo sapien
tcatatgaatactactcagtgctcc

SEQ ID NO: 4632809 - DNA, 25 bp, Homo sapien
tccattctggatttgacaagtatga

SEQ ID NO: 4632810 - DNA, 25 bp, Homo sapien
tctggccagtcatatctgagtaaga

SEQ ID NO: 4632811 - DNA, 25 bp, Homo sapien
ttctggccagtcatatctgagtaag

SEQ ID NO: 4632812 - DNA, 25 bp, Homo sapien
tactgtctggcatataagaggcaac

SEQ ID NO: 4632813 - DNA, 25 bp, Homo sapien
gaaccgccattacacaaaatatgtg

SEQ ID NO: 4632814 - DNA, 25 bp, Homo sapien
aaatcttggcttagttattcagcac

SEQ ID NO: 4632815 - DNA, 25 bp, Homo sapien
gaacactggagatgtttttgaataa

SEQ ID NO: 4632816 - DNA, 25 bp, Homo sapien
tacatgatggacttttatacctgga

SEQ ID NO: 4632817 - DNA, 25 bp, Homo sapien
cctttgatgaaaggtaagggtctgc

SEQ ID NO: 4632818 - DNA, 25 bp, Homo sapien
tcctcagtgccataagattctcagt

SEQ ID NO: 4632819 - DNA, 25 bp, Homo sapien
tgaagagtaagtcagtccattcctc

SEQ ID NO: 4632820 - DNA, 25 bp, Homo sapien
tgccttacaacaaacgaagatcacg

SEQ ID NO: 4632821 - DNA, 25 bp, Homo sapien
gaataactgcatattgggttcgacc

SEQ ID NO: 4632822 - DNA, 25 bp, Homo sapien
gctggcaaacagatccctataagta

SEQ ID NO: 4632823 - DNA, 25 bp, Homo sapien
gggttcgaccagatcatacctagga

SEQ ID NO: 4632824 - DNA, 25 bp, Homo sapien
cctgtcttcataactttcagctcac

SEQ ID NO: 4632825 - DNA, 25 bp, Homo sapien
tgtcttcataactttcagctcactc

SEQ ID NO: 4632826 - DNA, 25 bp, Homo sapien
gtcttcataactttcagctcactca

SEQ ID NO: 4632827 - DNA, 25 bp, Homo sapien
ctgtcttcataactttcagctcact

SEQ ID NO: 4632828 - DNA, 25 bp, Homo sapien
catgtagatgtagatccctataatt

SEQ ID NO: 4632829 - DNA, 25 bp, Homo sapien
gtagatgtagatccctataattctg

SEQ ID NO: 4632830 - DNA, 25 bp, Homo sapien
gatgtagatccctataattctggga

SEQ ID NO: 4632831 - DNA, 25 bp, Homo sapien
tagatccctataattctgggaacca

SEQ ID NO: 4632832 - DNA, 25 bp, Homo sapien
ctgactgttaacaaccaagtgagat

SEQ ID NO: 4632833 - DNA, 25 bp, Homo sapien
actgttaacaaccaagtgagataat

SEQ ID NO: 4632834 - DNA, 25 bp, Homo sapien
ataattcattaccttcaaaccagac

SEQ ID NO: 4632835 - DNA, 25 bp, Homo sapien
actgactgttaacaaccaagtgaga

SEQ ID NO: 4632836 - DNA, 25 bp, Homo sapien
ctagcatttgccgtcaatcaaaatt

SEQ ID NO: 4632837 - DNA, 25 bp, Homo sapien
aattccacataaagactgctctgag

SEQ ID NO: 4632838 - DNA, 25 bp, Homo sapien
catttgccgtcaatcaaaattccac

SEQ ID NO: 4632839 - DNA, 25 bp, Homo sapien
tcaaaattccacataaagactgctc

SEQ ID NO: 4632840 - DNA, 25 bp, Homo sapien
cataagtgagtgtcagaaagctgca

SEQ ID NO: 4632841 - DNA, 25 bp, Homo sapien
tcacagacagtgaaggccatgacct

SEQ ID NO: 4632842 - DNA, 25 bp, Homo sapien
tatgagctgacaagagaccaggaca

SEQ ID NO: 4632843 - DNA, 25 bp, Homo sapien
gaatgcacgtcacatacatgctgaa

SEQ ID NO: 4632844 - DNA, 25 bp, Homo sapien
gtctgccttgtactagagagagccc

SEQ ID NO: 4632845 - DNA, 25 bp, Homo sapien
agagagagcccttgaacgcagccct

SEQ ID NO: 4632846 - DNA, 25 bp, Homo sapien
actagagagagcccttgaacgcagc

SEQ ID NO: 4632847 - DNA, 25 bp, Homo sapien
tgtctgccttgtactagagagagcc

SEQ ID NO: 4632848 - DNA, 25 bp, Homo sapien
tatcaaatagaatgccatggcaccc

SEQ ID NO: 4632849 - DNA, 25 bp, Homo sapien
cagctgtggaactcatctaagatgc

SEQ ID NO: 4632850 - DNA, 25 bp, Homo sapien
tttaccattccctagtcgttgcacg

SEQ ID NO: 4632851 - DNA, 25 bp, Homo sapien
cttactggtacttagatggatggca

SEQ ID NO: 4632852 - DNA, 25 bp, Homo sapien
taatttgagttggattattgtagaa

SEQ ID NO: 4632853 - DNA, 25 bp, Homo sapien
tacattagttatggatagttcttga

SEQ ID NO: 4632854 - DNA, 25 bp, Homo sapien
taagcaagcagttatttatacatta

SEQ ID NO: 4632855 - DNA, 25 bp, Homo sapien
cttctatcataagctttttgctgtg

SEQ ID NO: 4632856 - DNA, 25 bp, Homo sapien
caagctgcttatgtatagttgatca

SEQ ID NO: 4632857 - DNA, 25 bp, Homo sapien
ttttctaaccaagctgcttatgtat

SEQ ID NO: 4632858 - DNA, 25 bp, Homo sapien
gtatagttgatcagtttaccatctt

SEQ ID NO: 4632859 - DNA, 25 bp, Homo sapien
cttatgtatagttgatcagtttacc

SEQ ID NO: 4632860 - DNA, 25 bp, Homo sapien
ctttggtagtaagatggaaaacaat

SEQ ID NO: 4632861 - DNA, 25 bp, Homo sapien
ctttaagaagacttcactgttatta

SEQ ID NO: 4632862 - DNA, 25 bp, Homo sapien
ttaagaagacttcactgttattaca

SEQ ID NO: 4632863 - DNA, 25 bp, Homo sapien
aagaagacttcactgttattacata

SEQ ID NO: 4632864 - DNA, 25 bp, Homo sapien
tattgatcagctgggagcatgaaac

SEQ ID NO: 4632865 - DNA, 25 bp, Homo sapien
tggtttaacacactccccgccattg

SEQ ID NO: 4632866 - DNA, 25 bp, Homo sapien
cccgccattgtcagaaagccagtaa

SEQ ID NO: 4632867 - DNA, 25 bp, Homo sapien
catccaccggtgtcggtcacaggaa

SEQ ID NO: 4632868 - DNA, 25 bp, Homo sapien
ttaggtgatactgcctccagatttc

SEQ ID NO: 4632869 - DNA, 25 bp, Homo sapien
tgatactgcctccagatttctgtgc

SEQ ID NO: 4632870 - DNA, 25 bp, Homo sapien
ggtgatactgcctccagatttctgt

SEQ ID NO: 4632871 - DNA, 25 bp, Homo sapien
gatactgcctccagatttctgtgca

SEQ ID NO: 4632872 - DNA, 25 bp, Homo sapien
aataatggtctgttgcttagcacaa

SEQ ID NO: 4632873 - DNA, 25 bp, Homo sapien
gattattactctttaaggctcccag

SEQ ID NO: 4632874 - DNA, 25 bp, Homo sapien
ctgaagatactgtggactgaatgct

SEQ ID NO: 4632875 - DNA, 25 bp, Homo sapien
ttatggtcagcagttcagagaaggg

SEQ ID NO: 4632876 - DNA, 25 bp, Homo sapien
atgataggataaaaaaactgctaca

SEQ ID NO: 4632877 - DNA, 25 bp, Homo sapien
tgcaatgtcaaatctataaggatat

SEQ ID NO: 4632878 - DNA, 25 bp, Homo sapien
acaaagagtagctctgtcatcttga

SEQ ID NO: 4632879 - DNA, 25 bp, Homo sapien
taaggatattactttatacagttac

SEQ ID NO: 4632880 - DNA, 25 bp, Homo sapien
catgtgtgagggctactaggagtca

SEQ ID NO: 4632881 - DNA, 25 bp, Homo sapien
ctaggagtcaatagatggcagtcca

SEQ ID NO: 4632882 - DNA, 25 bp, Homo sapien
cagtccatcgcctagtaaaagagct

SEQ ID NO: 4632883 - DNA, 25 bp, Homo sapien
ggcttcattacttggtcactgcgct

SEQ ID NO: 4632884 - DNA, 25 bp, Homo sapien
taagtcgttctgtaaatgaccctct

SEQ ID NO: 4632885 - DNA, 25 bp, Homo sapien
ttaagtcgttctgtaaatgaccctc

SEQ ID NO: 4632886 - DNA, 25 bp, Homo sapien
agtcgttctgtaaatgaccctctag

SEQ ID NO: 4632887 - DNA, 25 bp, Homo sapien
aagtcgttctgtaaatgaccctcta

SEQ ID NO: 4632888 - DNA, 25 bp, Homo sapien
ggttgtaaaactctgttggtggcca

SEQ ID NO: 4632889 - DNA, 25 bp, Homo sapien
gaacattaaaagtcaggctctacaa

SEQ ID NO: 4632890 - DNA, 25 bp, Homo sapien
gcatgaaccctttagaatgatggtc

SEQ ID NO: 4632891 - DNA, 25 bp, Homo sapien
gaagggacattctttctcgaataaa

SEQ ID NO: 4632892 - DNA, 25 bp, Homo sapien
tgcatagctatagtctcagaaccaa

SEQ ID NO: 4632893 - DNA, 25 bp, Homo sapien
tacatcacaatctcaggataaaggc

SEQ ID NO: 4632894 - DNA, 25 bp, Homo sapien
tcttaggccagaaaggaagtcaagc

SEQ ID NO: 4632895 - DNA, 25 bp, Homo sapien
taagatataccctgacaaactgtgg

SEQ ID NO: 4632896 - DNA, 25 bp, Homo sapien
gaaaccatttagtacatggatggag

SEQ ID NO: 4632897 - DNA, 25 bp, Homo sapien
tacaaagaaaccatttagtacatgg

SEQ ID NO: 4632898 - DNA, 25 bp, Homo sapien
ctttgatgcaggatagagggatgaa

SEQ ID NO: 4632899 - DNA, 25 bp, Homo sapien
ggagaaggaccacaagctttgatgc

SEQ ID NO: 4632900 - DNA, 25 bp, Homo sapien
tgtacacaacagaccggaacgtctc

SEQ ID NO: 4632901 - DNA, 25 bp, Homo sapien
gaaaagctgcgaatgaccaatcact

SEQ ID NO: 4632902 - DNA, 25 bp, Homo sapien
aaaaccatatatgaggctgagccac

SEQ ID NO: 4632903 - DNA, 25 bp, Homo sapien
aaaagcagtcattaccaggcgagct

SEQ ID NO: 4632904 - DNA, 25 bp, Homo sapien
ctagtggacattgctactaattttc

SEQ ID NO: 4632905 - DNA, 25 bp, Homo sapien
tattctagtggacattgctactaat

SEQ ID NO: 4632906 - DNA, 25 bp, Homo sapien
agtggacattgctactaattttcct

SEQ ID NO: 4632907 - DNA, 25 bp, Homo sapien
ttctagtggacattgctactaattt

SEQ ID NO: 4632908 - DNA, 25 bp, Homo sapien
ataagcctaccacgccacggattta

SEQ ID NO: 4632909 - DNA, 25 bp, Homo sapien
gcagcccgatgcaacgattacaaat

SEQ ID NO: 4632910 - DNA, 25 bp, Homo sapien
tatgaaaggtccatcccatctgcta

SEQ ID NO: 4632911 - DNA, 25 bp, Homo sapien
aatgtctcctcaaagtgcagcccga

SEQ ID NO: 4632912 - DNA, 25 bp, Homo sapien
aaagagatccttcttaatcgagatt

SEQ ID NO: 4632913 - DNA, 25 bp, Homo sapien
agatccttcttaatcgagattttga

SEQ ID NO: 4632914 - DNA, 25 bp, Homo sapien
cttcttaatcgagattttgaaagca

SEQ ID NO: 4632915 - DNA, 25 bp, Homo sapien
tccttcttaatcgagattttgaaag

SEQ ID NO: 4632916 - DNA, 25 bp, Homo sapien
catcagggagatttaccagagtgct

SEQ ID NO: 4632917 - DNA, 25 bp, Homo sapien
tcattgctcacatctccagtggtgg

SEQ ID NO: 4632918 - DNA, 25 bp, Homo sapien
ttaacaggtacgcatgtaagccatg

SEQ ID NO: 4632919 - DNA, 25 bp, Homo sapien
gaaactaggctgtgtatgcaagaag

SEQ ID NO: 4632920 - DNA, 25 bp, Homo sapien
catggtaagaacaattcttttactc

SEQ ID NO: 4632921 - DNA, 25 bp, Homo sapien
ttcaggcgattccatatattaaagt

SEQ ID NO: 4632922 - DNA, 25 bp, Homo sapien
tttgtatggagacctgtattcaggc

SEQ ID NO: 4632923 - DNA, 25 bp, Homo sapien
gaagtttcttagagttttgtatgga

SEQ ID NO: 4632924 - DNA, 25 bp, Homo sapien
ggctgatggtcttgaaggggtcttc

SEQ ID NO: 4632925 - DNA, 25 bp, Homo sapien
tttgcgcgcagtgatagcaatatgc

SEQ ID NO: 4632926 - DNA, 25 bp, Homo sapien
cgcgcagtgatagcaatatgctaag

SEQ ID NO: 4632927 - DNA, 25 bp, Homo sapien
tggcctttttgcgcgcagtgatagc

SEQ ID NO: 4632928 - DNA, 25 bp, Homo sapien
gctgctgccccaatatggaagataa

SEQ ID NO: 4632929 - DNA, 25 bp, Homo sapien
tgccctacaatgtaggtctccagct

SEQ ID NO: 4632930 - DNA, 25 bp, Homo sapien
ctgtttatggattctgttcagcact

SEQ ID NO: 4632931 - DNA, 25 bp, Homo sapien
cagctcccaagatctacaccagtga

SEQ ID NO: 4632932 - DNA, 25 bp, Homo sapien
gggtcctagaggttatatggcaaac

SEQ ID NO: 4632933 - DNA, 25 bp, Homo sapien
ttatctgttgtgactacctggatta

SEQ ID NO: 4632934 - DNA, 25 bp, Homo sapien
tatttcaataagttcggttctaatc

SEQ ID NO: 4632935 - DNA, 25 bp, Homo sapien
cataaagaaacgcttttggcagggc

SEQ ID NO: 4632936 - DNA, 25 bp, Homo sapien
taagccaagtctgaactagccaagc

SEQ ID NO: 4632937 - DNA, 25 bp, Homo sapien
ctttcacagtctgaggtagcagcct

SEQ ID NO: 4632938 - DNA, 25 bp, Homo sapien
gaaatgagccccatgtcactggtac

SEQ ID NO: 4632939 - DNA, 25 bp, Homo sapien
tcatcaagttgaagtcggccattct

SEQ ID NO: 4632940 - DNA, 25 bp, Homo sapien
tagcagatgaatggagatactggag

SEQ ID NO: 4632941 - DNA, 25 bp, Homo sapien
agtagcagatgaatggagatactgg

SEQ ID NO: 4632942 - DNA, 25 bp, Homo sapien
gtagcagatgaatggagatactgga

SEQ ID NO: 4632943 - DNA, 25 bp, Homo sapien
gcagatgaatggagatactggagac

SEQ ID NO: 4632944 - DNA, 25 bp, Homo sapien
gagcttgacacgcttaatacggatc

SEQ ID NO: 4632945 - DNA, 25 bp, Homo sapien
gacacgcttaatacggatctctgat

SEQ ID NO: 4632946 - DNA, 25 bp, Homo sapien
tcagagcttgacacgcttaatacgg

SEQ ID NO: 4632947 - DNA, 25 bp, Homo sapien
gcttaatacggatctctgatagtga

SEQ ID NO: 4632948 - DNA, 25 bp, Homo sapien
agtatttttgcatattcagcagcta

SEQ ID NO: 4632949 - DNA, 25 bp, Homo sapien
tgcatattcagcagctaaacagtcc

SEQ ID NO: 4632950 - DNA, 25 bp, Homo sapien
ttttgcatattcagcagctaaacag

SEQ ID NO: 4632951 - DNA, 25 bp, Homo sapien
catattcagcagctaaacagtccat

SEQ ID NO: 4632952 - DNA, 25 bp, Homo sapien
ttttccatgaggcacggcccttcct

SEQ ID NO: 4632953 - DNA, 25 bp, Homo sapien
ggcacggcccttccttatatcatgg

SEQ ID NO: 4632954 - DNA, 25 bp, Homo sapien
ctcttgacgtgtggtaatgtgatga

SEQ ID NO: 4632955 - DNA, 25 bp, Homo sapien
tgatgaacggtgaaagggcttagaa

SEQ ID NO: 4632956 - DNA, 25 bp, Homo sapien
tctctgcttaataagaaataagtta

SEQ ID NO: 4632957 - DNA, 25 bp, Homo sapien
ttttctctgcttaataagaaataag

SEQ ID NO: 4632958 - DNA, 25 bp, Homo sapien
tctgcttaataagaaataagttatc

SEQ ID NO: 4632959 - DNA, 25 bp, Homo sapien
taagaaataagttatcattgtcatc

SEQ ID NO: 4632960 - DNA, 25 bp, Homo sapien
aggttatagacacaaaggccaaatg

SEQ ID NO: 4632961 - DNA, 25 bp, Homo sapien
gaacaatgaaaagccacatcagagg

SEQ ID NO: 4632962 - DNA, 25 bp, Homo sapien
gataataaacacagtgccagaaggt

SEQ ID NO: 4632963 - DNA, 25 bp, Homo sapien
aatgaacaatgaaaagccacatcag

SEQ ID NO: 4632964 - DNA, 25 bp, Homo sapien
tctgtatagctttgcggtagttgaa

SEQ ID NO: 4632965 - DNA, 25 bp, Homo sapien
agtccgcttgaaacaccgctgtaaa

SEQ ID NO: 4632966 - DNA, 25 bp, Homo sapien
tccatggatattcagtaactctagg

SEQ ID NO: 4632967 - DNA, 25 bp, Homo sapien
aaagatgaattcttctacctatccc

SEQ ID NO: 4632968 - DNA, 25 bp, Homo sapien
tgcactagcactgatttgagaggac

SEQ ID NO: 4632969 - DNA, 25 bp, Homo sapien
caagtcctactggagaataatgcca

SEQ ID NO: 4632970 - DNA, 25 bp, Homo sapien
tgcagcaacagggaaagtggtagac

SEQ ID NO: 4632971 - DNA, 25 bp, Homo sapien
taagccatgtttgcctcaagtccta

SEQ ID NO: 4632972 - DNA, 25 bp, Homo sapien
cttaactgaacatttggtgtaacag

SEQ ID NO: 4632973 - DNA, 25 bp, Homo sapien
cagtccagctgactaagttgtccag

SEQ ID NO: 4632974 - DNA, 25 bp, Homo sapien
tccatttgaatgacaggccctctat

SEQ ID NO: 4632975 - DNA, 25 bp, Homo sapien
tgacagagcgtaagggcaagcaaca

SEQ ID NO: 4632976 - DNA, 25 bp, Homo sapien
aaagcctataatgcgagccccacat

SEQ ID NO: 4632977 - DNA, 25 bp, Homo sapien
aagtgccggaatcatagccattatc

SEQ ID NO: 4632978 - DNA, 25 bp, Homo sapien
tgaagagggctatgcactgtgcctg

SEQ ID NO: 4632979 - DNA, 25 bp, Homo sapien
gaaaatgaaaccacactctttagct

SEQ ID NO: 4632980 - DNA, 25 bp, Homo sapien
gaaccagaagactaccagaagaagg

SEQ ID NO: 4632981 - DNA, 25 bp, Homo sapien
aatttggccaagcttctgtgtcagt

SEQ ID NO: 4632982 - DNA, 25 bp, Homo sapien
tctaggaattctaatttggccaagc

SEQ ID NO: 4632983 - DNA, 25 bp, Homo sapien
gctggcgtcaaacctctgaggggcc

SEQ ID NO: 4632984 - DNA, 25 bp, Homo sapien
agggctggcgtcaaacctctgaggg

SEQ ID NO: 4632985 - DNA, 25 bp, Homo sapien
cagagggctggcgtcaaacctctga

SEQ ID NO: 4632986 - DNA, 25 bp, Homo sapien
tggcgtcaaacctctgaggggccag

SEQ ID NO: 4632987 - DNA, 25 bp, Homo sapien
cgtgccctcggtggcgcatcctgca

SEQ ID NO: 4632988 - DNA, 25 bp, Homo sapien
gagaggcggccgtgccctcggtggc

SEQ ID NO: 4632989 - DNA, 25 bp, Homo sapien
ctcggtggcgcatcctgcacgtgga

SEQ ID NO: 4632990 - DNA, 25 bp, Homo sapien
cagggcagagtgaaggcctcgggtg

SEQ ID NO: 4632991 - DNA, 25 bp, Homo sapien
ccctcgctgggacggcatggtctcc

SEQ ID NO: 4632992 - DNA, 25 bp, Homo sapien
tgggacggcatggtctcccccaagg

SEQ ID NO: 4632993 - DNA, 25 bp, Homo sapien
gctgggacggcatggtctcccccaa

SEQ ID NO: 4632994 - DNA, 25 bp, Homo sapien
ggacggcatggtctcccccaaggct

SEQ ID NO: 4632995 - DNA, 25 bp, Homo sapien
actttagtgtttgttgttctgaagc

SEQ ID NO: 4632996 - DNA, 25 bp, Homo sapien
gccagtgccgggatgaggtggcccc

SEQ ID NO: 4632997 - DNA, 25 bp, Homo sapien
tctgaagcaaagcatacaaatgtgt

SEQ ID NO: 4632998 - DNA, 25 bp, Homo sapien
agcaaagcatacaaatgtgtgaagt

SEQ ID NO: 4632999 - DNA, 25 bp, Homo sapien
ctgcagcgtttgtttaggccactcc

SEQ ID NO: 4633000 - DNA, 25 bp, Homo sapien
agcgtttgtttaggccactcctctg

SEQ ID NO: 4633001 - DNA, 25 bp, Homo sapien
gccactcctctgagtgacggtggag

SEQ ID NO: 4633002 - DNA, 25 bp, Homo sapien
ttgtttaggccactcctctgagtga

SEQ ID NO: 4633003 - DNA, 25 bp, Homo sapien
tttcgcctgttggtagggtgatgcc

SEQ ID NO: 4633004 - DNA, 25 bp, Homo sapien
ggcagacgtgtccatgagcagcatg

SEQ ID NO: 4633005 - DNA, 25 bp, Homo sapien
gagatgcgcagcagtagcccgtgcc

SEQ ID NO: 4633006 - DNA, 25 bp, Homo sapien
gacagcagggcagacgtgtccatga

SEQ ID NO: 4633007 - DNA, 25 bp, Homo sapien
cgtgcccctcataccagggaaaatt

SEQ ID NO: 4633008 - DNA, 25 bp, Homo sapien
tagatcgttacatagcaatagctgc

SEQ ID NO: 4633009 - DNA, 25 bp, Homo sapien
tacatagcaatagctgctggatatg

SEQ ID NO: 4633010 - DNA, 25 bp, Homo sapien
ctattgagcctggagagggaagcac

SEQ ID NO: 4633011 - DNA, 25 bp, Homo sapien
ctggatatggaggtactattgagcc

SEQ ID NO: 4633012 - DNA, 25 bp, Homo sapien
tcaccggcgctctccatagggggca

SEQ ID NO: 4633013 - DNA, 25 bp, Homo sapien
cgccaggagataaggaaaggtaatt

SEQ ID NO: 4633014 - DNA, 25 bp, Homo sapien
ttttctcgccaggagataaggaaag

SEQ ID NO: 4633015 - DNA, 25 bp, Homo sapien
aatggtccttttttctcgccaggag

SEQ ID NO: 4633016 - DNA, 25 bp, Homo sapien
gaatggaagatgtccacgcttcctc

SEQ ID NO: 4633017 - DNA, 25 bp, Homo sapien
tccatggaatggaagatgtccacgc

SEQ ID NO: 4633018 - DNA, 25 bp, Homo sapien
gatgagaattagaacaaaagcgtgt

SEQ ID NO: 4633019 - DNA, 25 bp, Homo sapien
ctcctggccctgatgagctaagatg

SEQ ID NO: 4633020 - DNA, 25 bp, Homo sapien
cgtcagtgggaaccggaacatgatg

SEQ ID NO: 4633021 - DNA, 25 bp, Homo sapien
gatcatggatccgaatggcactgga

SEQ ID NO: 4633022 - DNA, 25 bp, Homo sapien
aaaggatcatggatccgaatggcac

SEQ ID NO: 4633023 - DNA, 25 bp, Homo sapien
ggattctttaacagcgtcagtggga

SEQ ID NO: 4633024 - DNA, 25 bp, Homo sapien
catggctggctgtgtatgtcttgtg

SEQ ID NO: 4633025 - DNA, 25 bp, Homo sapien
catggcatccttatatgtcttgtgt

SEQ ID NO: 4633026 - DNA, 25 bp, Homo sapien
tataaacaacgttgccatagcattc

SEQ ID NO: 4633027 - DNA, 25 bp, Homo sapien
atgtcttgtgtatgtcatggcatcc

SEQ ID NO: 4633028 - DNA, 25 bp, Homo sapien
tggaagactcttgggtgtcccttcc

SEQ ID NO: 4633029 - DNA, 25 bp, Homo sapien
tatgtgaggcaccaacctaagccct

SEQ ID NO: 4633030 - DNA, 25 bp, Homo sapien
tctctattgccctgcttaggaaata

SEQ ID NO: 4633031 - DNA, 25 bp, Homo sapien
cctgaactgcgtgtttatccataaa

SEQ ID NO: 4633032 - DNA, 25 bp, Homo sapien
tacaggatcgttttgaattcagcag

SEQ ID NO: 4633033 - DNA, 25 bp, Homo sapien
gctctccacgagaacgcaggtttgg

SEQ ID NO: 4633034 - DNA, 25 bp, Homo sapien
tcgccacaggtaagaagagccctgg

SEQ ID NO: 4633035 - DNA, 25 bp, Homo sapien
ggtgaatctcaaacggctctccacg

SEQ ID NO: 4633036 - DNA, 25 bp, Homo sapien
gtgtaaccacagcacgcatgggcgg

SEQ ID NO: 4633037 - DNA, 25 bp, Homo sapien
gaccgtgtaaccacagcacgcatgg

SEQ ID NO: 4633038 - DNA, 25 bp, Homo sapien
cacagcacgcatgggcgggccgctt

SEQ ID NO: 4633039 - DNA, 25 bp, Homo sapien
gccagcatgaagaccgtgtaaccac

SEQ ID NO: 4633040 - DNA, 25 bp, Homo sapien
acacctggtgtcacagtggagtgga

SEQ ID NO: 4633041 - DNA, 25 bp, Homo sapien
gccgaattcacagtcagtgctcaac

SEQ ID NO: 4633042 - DNA, 25 bp, Homo sapien
cacagctgccgaattcacagtcagt

SEQ ID NO: 4633043 - DNA, 25 bp, Homo sapien
gctgccgaattcacagtcagtgctc

SEQ ID NO: 4633044 - DNA, 25 bp, Homo sapien
ttgaattatgtctgtcattgacaga

SEQ ID NO: 4633045 - DNA, 25 bp, Homo sapien
gaattatgtctgtcattgacagagg

SEQ ID NO: 4633046 - DNA, 25 bp, Homo sapien
tatgtctgtcattgacagagggaag

SEQ ID NO: 4633047 - DNA, 25 bp, Homo sapien
ctgtcattgacagagggaagtctgg

SEQ ID NO: 4633048 - DNA, 25 bp, Homo sapien
ggggtgcagtcaaggaggatccgtc

SEQ ID NO: 4633049 - DNA, 25 bp, Homo sapien
ataggggtgcagtcaaggaggatcc

SEQ ID NO: 4633050 - DNA, 25 bp, Homo sapien
tgcagtcaaggaggatccgtccaag

SEQ ID NO: 4633051 - DNA, 25 bp, Homo sapien
ggtgcagtcaaggaggatccgtcca

SEQ ID NO: 4633052 - DNA, 25 bp, Homo sapien
caggaacagggcctgccaaggtgtc

SEQ ID NO: 4633053 - DNA, 25 bp, Homo sapien
cgaggccagtcttcgggcaccagga

SEQ ID NO: 4633054 - DNA, 25 bp, Homo sapien
aaggtgtcatgggacctcagtgcag

SEQ ID NO: 4633055 - DNA, 25 bp, Homo sapien
caggaccgaggccagtcttcgggca

SEQ ID NO: 4633056 - DNA, 25 bp, Homo sapien
gaacaaacggtgagcaaaggcctgg

SEQ ID NO: 4633057 - DNA, 25 bp, Homo sapien
cccacaaaggccagtgaagttgatt

SEQ ID NO: 4633058 - DNA, 25 bp, Homo sapien
caacggaagggaacttgcgctgaga

SEQ ID NO: 4633059 - DNA, 25 bp, Homo sapien
agagtgagtgatccgtgccaggcac

SEQ ID NO: 4633060 - DNA, 25 bp, Homo sapien
agtgcagccgccgacccggacctgg

SEQ ID NO: 4633061 - DNA, 25 bp, Homo sapien
gccgccgacccggacctggcagtac

SEQ ID NO: 4633062 - DNA, 25 bp, Homo sapien
cagtacagaagctggcccgggaatg

SEQ ID NO: 4633063 - DNA, 25 bp, Homo sapien
cgacccggacctggcagtacagaag

SEQ ID NO: 4633064 - DNA, 25 bp, Homo sapien
accttcatgagtcgcaccggtctca

SEQ ID NO: 4633065 - DNA, 25 bp, Homo sapien
ggtgacgaacaccttcatgagtcgc

SEQ ID NO: 4633066 - DNA, 25 bp, Homo sapien
tatcctgcgggtgacgaacaccttc

SEQ ID NO: 4633067 - DNA, 25 bp, Homo sapien
cctcggcgggtatcctgcgggtgac

SEQ ID NO: 4633068 - DNA, 25 bp, Homo sapien
tgccgcccgggcgagcgcgacccta

SEQ ID NO: 4633069 - DNA, 25 bp, Homo sapien
ctgccgcccgggcgagcgcgaccct

SEQ ID NO: 4633070 - DNA, 25 bp, Homo sapien
gccgcccgggcgagcgcgaccctac

SEQ ID NO: 4633071 - DNA, 25 bp, Homo sapien
tctgccgcccgggcgagcgcgaccc

SEQ ID NO: 4633072 - DNA, 25 bp, Homo sapien
ctgcagcatccaggatcctcttgtc

SEQ ID NO: 4633073 - DNA, 25 bp, Homo sapien
tgggctcatccgagtcccactgctc

SEQ ID NO: 4633074 - DNA, 25 bp, Homo sapien
ctcttgtccacgtggtcggagagga

SEQ ID NO: 4633075 - DNA, 25 bp, Homo sapien
acctcgctctagctccttggcaggg

SEQ ID NO: 4633076 - DNA, 25 bp, Homo sapien
tggctgcggttgaggaaagacatcc

SEQ ID NO: 4633077 - DNA, 25 bp, Homo sapien
gagctaggtcctccctcatactacg

SEQ ID NO: 4633078 - DNA, 25 bp, Homo sapien
ggctcagcactgactcacaagggtc

SEQ ID NO: 4633079 - DNA, 25 bp, Homo sapien
gacacctctgagagtgccaagaagg

SEQ ID NO: 4633080 - DNA, 25 bp, Homo sapien
ggtgctgatgactttgagattggcc

SEQ ID NO: 4633081 - DNA, 25 bp, Homo sapien
gtgctgatgactttgagattggccc

SEQ ID NO: 4633082 - DNA, 25 bp, Homo sapien
aagccaagtggtcgatgcccacaga

SEQ ID NO: 4633083 - DNA, 25 bp, Homo sapien
tccaaagccaagtggtcgatgccca

SEQ ID NO: 4633084 - DNA, 25 bp, Homo sapien
ccaagtggtcgatgcccacagacat

SEQ ID NO: 4633085 - DNA, 25 bp, Homo sapien
catccaaagccaagtggtcgatgcc

SEQ ID NO: 4633086 - DNA, 25 bp, Homo sapien
tgagcactcaaaaacgggcagtcct

SEQ ID NO: 4633087 - DNA, 25 bp, Homo sapien
tggccgagggatatgcagtaaaaac

SEQ ID NO: 4633088 - DNA, 25 bp, Homo sapien
tagattatctcccactttggaagga

SEQ ID NO: 4633089 - DNA, 25 bp, Homo sapien
taatgaatgtgaaagggtgccacct

SEQ ID NO: 4633090 - DNA, 25 bp, Homo sapien
tggtggtaacatcagcctcaaccat

SEQ ID NO: 4633091 - DNA, 25 bp, Homo sapien
ctggtggtaacatcagcctcaacca

SEQ ID NO: 4633092 - DNA, 25 bp, Homo sapien
tggggtgtagccaactcggatccca

SEQ ID NO: 4633093 - DNA, 25 bp, Homo sapien
tcggcggtggtatctgtcaggacat

SEQ ID NO: 4633094 - DNA, 25 bp, Homo sapien
aaccggcggcaggtggtaagtagca

SEQ ID NO: 4633095 - DNA, 25 bp, Homo sapien
taagtagcagggagactgcgagttc

SEQ ID NO: 4633096 - DNA, 25 bp, Homo sapien
ccgcacctggtctgcgttcacttac

SEQ ID NO: 4633097 - DNA, 25 bp, Homo sapien
ttagggcagcaacaaagagtacagc

SEQ ID NO: 4633098 - DNA, 25 bp, Homo sapien
tctaactcttgatatacaggccgaa

SEQ ID NO: 4633099 - DNA, 25 bp, Homo sapien
gactgtggtccaaggtataaaccca

SEQ ID NO: 4633100 - DNA, 25 bp, Homo sapien
accagagacatagaacttgagggcg

SEQ ID NO: 4633101 - DNA, 25 bp, Homo sapien
ccagcccgatgatgccgacagtgct

SEQ ID NO: 4633102 - DNA, 25 bp, Homo sapien
gatgccgacagtgctctgcgtgagt

SEQ ID NO: 4633103 - DNA, 25 bp, Homo sapien
cgtgagtccatagccacacagccag

SEQ ID NO: 4633104 - DNA, 25 bp, Homo sapien
gggcttccacgaggtccagccacca

SEQ ID NO: 4633105 - DNA, 25 bp, Homo sapien
gattttcaggctcagaacgtgcccc

SEQ ID NO: 4633106 - DNA, 25 bp, Homo sapien
ccgagttagggctttgtgagtcaca

SEQ ID NO: 4633107 - DNA, 25 bp, Homo sapien
tatggagccggaatcatgaagcccc

SEQ ID NO: 4633108 - DNA, 25 bp, Homo sapien
gggaatgggctctctcacggtaacc

SEQ ID NO: 4633109 - DNA, 25 bp, Homo sapien
aaagggtagggacaccacccagcat

SEQ ID NO: 4633110 - DNA, 25 bp, Homo sapien
cgcaaagggtagggacaccacccag

SEQ ID NO: 4633111 - DNA, 25 bp, Homo sapien
agagtccatgtctcgttcccagtcc

SEQ ID NO: 4633112 - DNA, 25 bp, Homo sapien
gagagtccatgtctcgttcccagtc

SEQ ID NO: 4633113 - DNA, 25 bp, Homo sapien
tgggctggcgccctgtgtacagaaa

SEQ ID NO: 4633114 - DNA, 25 bp, Homo sapien
tttcagacgccgagcaatggcctgg

SEQ ID NO: 4633115 - DNA, 25 bp, Homo sapien
gaaatctctggacaccgaatggttt

SEQ ID NO: 4633116 - DNA, 25 bp, Homo sapien
gctggcgccctgtgtacagaaatct

SEQ ID NO: 4633117 - DNA, 25 bp, Homo sapien
tctcaactgggcacagataggctcc

SEQ ID NO: 4633118 - DNA, 25 bp, Homo sapien
gataggctcctgtggaaatcaaggc

SEQ ID NO: 4633119 - DNA, 25 bp, Homo sapien
gaaggccgagtctctacctggacaa

SEQ ID NO: 4633120 - DNA, 25 bp, Homo sapien
caaaggactctgaaagacgggagcc

SEQ ID NO: 4633121 - DNA, 25 bp, Homo sapien
caggccacgacgatgaaatcagatt

SEQ ID NO: 4633122 - DNA, 25 bp, Homo sapien
tccttgttgcagagtccctcggttg

SEQ ID NO: 4633123 - DNA, 25 bp, Homo sapien
ctcggttgcaggtgttaaggagcag

SEQ ID NO: 4633124 - DNA, 25 bp, Homo sapien
taaggagcaggccacgacgatgaaa

SEQ ID NO: 4633125 - DNA, 25 bp, Homo sapien
tcaagtccagccctttgtggtggag

SEQ ID NO: 4633126 - DNA, 25 bp, Homo sapien
cacgtgagttttagggtctgtccgc

SEQ ID NO: 4633127 - DNA, 25 bp, Homo sapien
ttcttccctgtacggaggtctcgtg

SEQ ID NO: 4633128 - DNA, 25 bp, Homo sapien
tccgcccaggagcataaggttcaaa

SEQ ID NO: 4633129 - DNA, 25 bp, Homo sapien
gtggcctgaaggcacccctagggac

SEQ ID NO: 4633130 - DNA, 25 bp, Homo sapien
tgaaggcacccctagggacagtgtg

SEQ ID NO: 4633131 - DNA, 25 bp, Homo sapien
aaggcacccctagggacagtgtgag

SEQ ID NO: 4633132 - DNA, 25 bp, Homo sapien
cctgaaggcacccctagggacagtg

SEQ ID NO: 4633133 - DNA, 25 bp, Homo sapien
tgttaggccccatccaagtgtttct

SEQ ID NO: 4633134 - DNA, 25 bp, Homo sapien
ggtacctgtctaaaccagggcagag

SEQ ID NO: 4633135 - DNA, 25 bp, Homo sapien
gccatcaaagggagcggcgactgaa

SEQ ID NO: 4633136 - DNA, 25 bp, Homo sapien
taatgagtaatacacggtcctgggc

SEQ ID NO: 4633137 - DNA, 25 bp, Homo sapien
caaggcctggtacaggtcgtcctgg

SEQ ID NO: 4633138 - DNA, 25 bp, Homo sapien
gggctcgtcacatccagtccagcag

SEQ ID NO: 4633139 - DNA, 25 bp, Homo sapien
gcagctgcaatcttaccactggcca

SEQ ID NO: 4633140 - DNA, 25 bp, Homo sapien
aggcagtggttctgggctcgtcaca

SEQ ID NO: 4633141 - DNA, 25 bp, Homo sapien
agtccccaggccgtgagctgaattc

SEQ ID NO: 4633142 - DNA, 25 bp, Homo sapien
tgccttttgaagcagtccccaggcc

SEQ ID NO: 4633143 - DNA, 25 bp, Homo sapien
cttcatgccctgactgccctctcct

SEQ ID NO: 4633144 - DNA, 25 bp, Homo sapien
catgccctgactgccctctcctcag

SEQ ID NO: 4633145 - DNA, 25 bp, Homo sapien
aggaaaagtccagcttgaattgttc

SEQ ID NO: 4633146 - DNA, 25 bp, Homo sapien
ggaaaagtccagcttgaattgttcc

SEQ ID NO: 4633147 - DNA, 25 bp, Homo sapien
tgcatggccccaattggtctacaca

SEQ ID NO: 4633148 - DNA, 25 bp, Homo sapien
tcttggggacaaagatctgggtatt

SEQ ID NO: 4633149 - DNA, 25 bp, Homo sapien
gggacaaagatctgggtatttctgc

SEQ ID NO: 4633150 - DNA, 25 bp, Homo sapien
ctgcatggccccaattggtctacac

SEQ ID NO: 4633151 - DNA, 25 bp, Homo sapien
caaaaggtccgtgtcactctgaagg

SEQ ID NO: 4633152 - DNA, 25 bp, Homo sapien
tcagggccatctaggagaattcaaa

SEQ ID NO: 4633153 - DNA, 25 bp, Homo sapien
tatatgtcaagaggccaagaccccg

SEQ ID NO: 4633154 - DNA, 25 bp, Homo sapien
tgccgacaggtttacacaggacaca

SEQ ID NO: 4633155 - DNA, 25 bp, Homo sapien
cagatgccgagatgcaaggttcgct

SEQ ID NO: 4633156 - DNA, 25 bp, Homo sapien
ccaaagaaccgtcagctgggtgcag

SEQ ID NO: 4633157 - DNA, 25 bp, Homo sapien
tgatgccacatgaccacaaggtttc

SEQ ID NO: 4633158 - DNA, 25 bp, Homo sapien
aacgcataggagtttagcactggcc

SEQ ID NO: 4633159 - DNA, 25 bp, Homo sapien
gagagagggagataagaagggtggt

SEQ ID NO: 4633160 - DNA, 25 bp, Homo sapien
agggagataagaagggtggttcagc

SEQ ID NO: 4633161 - DNA, 25 bp, Homo sapien
agataagaagggtggttcagcagcc

SEQ ID NO: 4633162 - DNA, 25 bp, Homo sapien
aagaagggtggttcagcagccttca

SEQ ID NO: 4633163 - DNA, 25 bp, Homo sapien
agccagcaagttgttagctgccaac

SEQ ID NO: 4633164 - DNA, 25 bp, Homo sapien
ccaacaaggacatggtgttgcgggt

SEQ ID NO: 4633165 - DNA, 25 bp, Homo sapien
aagttgttagctgccaacaaggaca

SEQ ID NO: 4633166 - DNA, 25 bp, Homo sapien
acaaggacatggtgttgcgggttct

SEQ ID NO: 4633167 - DNA, 25 bp, Homo sapien
cagcttgagttcactaggcatcggc

SEQ ID NO: 4633168 - DNA, 25 bp, Homo sapien
gcttgagttcactaggcatcggctc

SEQ ID NO: 4633169 - DNA, 25 bp, Homo sapien
ctacagcttgagttcactaggcatc

SEQ ID NO: 4633170 - DNA, 25 bp, Homo sapien
ttgagttcactaggcatcggctccc

SEQ ID NO: 4633171 - DNA, 25 bp, Homo sapien
tgcctgtggatccaaatcaagcctg

SEQ ID NO: 4633172 - DNA, 25 bp, Homo sapien
ttcccggccctccatctctactgtt

SEQ ID NO: 4633173 - DNA, 25 bp, Homo sapien
tgtgtctgacaataccagggcacgg

SEQ ID NO: 4633174 - DNA, 25 bp, Homo sapien
caataccagggcacggtttgcttcc

SEQ ID NO: 4633175 - DNA, 25 bp, Homo sapien
tatcagaatcactctttcctcagag

SEQ ID NO: 4633176 - DNA, 25 bp, Homo sapien
tagaattaccatacttttggcgcaa

SEQ ID NO: 4633177 - DNA, 25 bp, Homo sapien
tgtgacaagtacatatatcagaatc

SEQ ID NO: 4633178 - DNA, 25 bp, Homo sapien
ttggcgcaaatgtgtccaacaccaa

SEQ ID NO: 4633179 - DNA, 25 bp, Homo sapien
gatggtctaggtatcaagattcaag

SEQ ID NO: 4633180 - DNA, 25 bp, Homo sapien
tcacaactgggttctgtttgtcccg

SEQ ID NO: 4633181 - DNA, 25 bp, Homo sapien
tgtcccgtccttggtgagggacaag

SEQ ID NO: 4633182 - DNA, 25 bp, Homo sapien
ttcaagtgccatggtcacaactggg

SEQ ID NO: 4633183 - DNA, 25 bp, Homo sapien
tgtctttgagctacgcacatgcatg

SEQ ID NO: 4633184 - DNA, 25 bp, Homo sapien
tgagggcctgcgtaatcttgtgctg

SEQ ID NO: 4633185 - DNA, 25 bp, Homo sapien
cagttaattggtcgttcctctcaaa

SEQ ID NO: 4633186 - DNA, 25 bp, Homo sapien
gaagctgattccttgagcacagagc

SEQ ID NO: 4633187 - DNA, 25 bp, Homo sapien
tgtagagggagctcgcaagtatgcc

SEQ ID NO: 4633188 - DNA, 25 bp, Homo sapien
tgtgcagacttcaggctaccaagga

SEQ ID NO: 4633189 - DNA, 25 bp, Homo sapien
caagaaggccttatcagagcacaat

SEQ ID NO: 4633190 - DNA, 25 bp, Homo sapien
taacttccgtcaggagctcacagat

SEQ ID NO: 4633191 - DNA, 25 bp, Homo sapien
tgtatacctccaccctcatgctggg

SEQ ID NO: 4633192 - DNA, 25 bp, Homo sapien
ttacttaacgacaaggacgctgccc

SEQ ID NO: 4633193 - DNA, 25 bp, Homo sapien
gatgttacaccggagaatgggcctt

SEQ ID NO: 4633194 - DNA, 25 bp, Homo sapien
gagctcttccatgcgcagtaacctg

SEQ ID NO: 4633195 - DNA, 25 bp, Homo sapien
tacaatcttagtcgcctcctgagaa

SEQ ID NO: 4633196 - DNA, 25 bp, Homo sapien
gcctgctgcctagttgtcatctgga

SEQ ID NO: 4633197 - DNA, 25 bp, Homo sapien
agcactcccagtcacatcaggttat

SEQ ID NO: 4633198 - DNA, 25 bp, Homo sapien
tctgcacacttggataggactggta

SEQ ID NO: 4633199 - DNA, 25 bp, Homo sapien
gtgtttagctacctcagtagcctct

SEQ ID NO: 4633200 - DNA, 25 bp, Homo sapien
tgttttgagaggaatgtggagaact

SEQ ID NO: 4633201 - DNA, 25 bp, Homo sapien
taaaagattgtaggtactgtttgcc

SEQ ID NO: 4633202 - DNA, 25 bp, Homo sapien
gatctagtgtagagctgaggatctc

SEQ ID NO: 4633203 - DNA, 25 bp, Homo sapien
taccgtacacattgctgaaaaagag

SEQ ID NO: 4633204 - DNA, 25 bp, Homo sapien
ctgaaaggaaacgaccagccggtgg

SEQ ID NO: 4633205 - DNA, 25 bp, Homo sapien
gatcacgtgtgacgtttatatagca

SEQ ID NO: 4633206 - DNA, 25 bp, Homo sapien
tctctctagtgagacagaggagctt

SEQ ID NO: 4633207 - DNA, 25 bp, Homo sapien
gtagtgatatacactgctatttcca

SEQ ID NO: 4633208 - DNA, 25 bp, Homo sapien
gggatggccaaaacatatatcaaaa

SEQ ID NO: 4633209 - DNA, 25 bp, Homo sapien
gctatttccaactaattcttggaat

SEQ ID NO: 4633210 - DNA, 25 bp, Homo sapien
ttttgagcttcatattagtagtgat

SEQ ID NO: 4633211 - DNA, 25 bp, Homo sapien
tactgtgtagctctgaccagatccc

SEQ ID NO: 4633212 - DNA, 25 bp, Homo sapien
gttctgtgcacccatcctatagcta

SEQ ID NO: 4633213 - DNA, 25 bp, Homo sapien
tgatccctattaccggttctgtgca

SEQ ID NO: 4633214 - DNA, 25 bp, Homo sapien
catcactttgtgcatgggcccagag

SEQ ID NO: 4633215 - DNA, 25 bp, Homo sapien
ttctagccatactattttccagcca

SEQ ID NO: 4633216 - DNA, 25 bp, Homo sapien
actattttccagccaaatcgaatac

SEQ ID NO: 4633217 - DNA, 25 bp, Homo sapien
tattttccagccaaatcgaatacat

SEQ ID NO: 4633218 - DNA, 25 bp, Homo sapien
ctttctagccatactattttccagc

SEQ ID NO: 4633219 - DNA, 25 bp, Homo sapien
caagtaaaaatagtgtcccatgaga

SEQ ID NO: 4633220 - DNA, 25 bp, Homo sapien
tcaccaatgatctgtcagaagaatt

SEQ ID NO: 4633221 - DNA, 25 bp, Homo sapien
agaagaatttgagcatgtgggaagc

SEQ ID NO: 4633222 - DNA, 25 bp, Homo sapien
agccacctcaaaaactgcacaagtg

SEQ ID NO: 4633223 - DNA, 25 bp, Homo sapien
gcattgttaccgttggagccaaggg

SEQ ID NO: 4633224 - DNA, 25 bp, Homo sapien
tctttcggaggggagcattgttacc

SEQ ID NO: 4633225 - DNA, 25 bp, Homo sapien
gggccaggcgggttcttctgcgcag

SEQ ID NO: 4633226 - DNA, 25 bp, Homo sapien
ggtgcccccggactactctggctgt

SEQ ID NO: 4633227 - DNA, 25 bp, Homo sapien
gagaagagccctgggtcactaaagc

SEQ ID NO: 4633228 - DNA, 25 bp, Homo sapien
ttgattggttgcagcgaacagccgc

SEQ ID NO: 4633229 - DNA, 25 bp, Homo sapien
tccttcagaaccagccaatggcggt

SEQ ID NO: 4633230 - DNA, 25 bp, Homo sapien
gatttaggcggaaagcccgctagcc

SEQ ID NO: 4633231 - DNA, 25 bp, Homo sapien
cagacagcaaatcacatgaagttcc

SEQ ID NO: 4633232 - DNA, 25 bp, Homo sapien
aaatcacatgaagttccatatgcag

SEQ ID NO: 4633233 - DNA, 25 bp, Homo sapien
cagcaaatcacatgaagttccatat

SEQ ID NO: 4633234 - DNA, 25 bp, Homo sapien
gacagcaaatcacatgaagttccat

SEQ ID NO: 4633235 - DNA, 25 bp, Homo sapien
cctcacacacaaataaaacatcatc

SEQ ID NO: 4633236 - DNA, 25 bp, Homo sapien
ggatcaataaatggctctccctcac

SEQ ID NO: 4633237 - DNA, 25 bp, Homo sapien
tccctgatcaaaacaatatcatcat

SEQ ID NO: 4633238 - DNA, 25 bp, Homo sapien
tctccctcacacacaaataaaacat

SEQ ID NO: 4633239 - DNA, 25 bp, Homo sapien
tctgtgtggaatcctagcaatcctt

SEQ ID NO: 4633240 - DNA, 25 bp, Homo sapien
tgtaatgttagccagtctgtgtgga

SEQ ID NO: 4633241 - DNA, 25 bp, Homo sapien
ggaatcctagcaatccttcaggagg

SEQ ID NO: 4633242 - DNA, 25 bp, Homo sapien
tagccagtctgtgtggaatcctagc

SEQ ID NO: 4633243 - DNA, 25 bp, Homo sapien
tccaggtagttgtaaagtactgccc

SEQ ID NO: 4633244 - DNA, 25 bp, Homo sapien
tgctccaggtagttgtaaagtactg

SEQ ID NO: 4633245 - DNA, 25 bp, Homo sapien
caggtagttgtaaagtactgccctc

SEQ ID NO: 4633246 - DNA, 25 bp, Homo sapien
ctccaggtagttgtaaagtactgcc

SEQ ID NO: 4633247 - DNA, 25 bp, Homo sapien
gattgcagcagtttaaattggtgat

SEQ ID NO: 4633248 - DNA, 25 bp, Homo sapien
attgcagcagtttaaattggtgatt

SEQ ID NO: 4633249 - DNA, 25 bp, Homo sapien
ttgcagcagtttaaattggtgattt

SEQ ID NO: 4633250 - DNA, 25 bp, Homo sapien
ctgcattagaacagagcatttgact

SEQ ID NO: 4633251 - DNA, 25 bp, Homo sapien
tgcattagaacagagcatttgactc

SEQ ID NO: 4633252 - DNA, 25 bp, Homo sapien
gcattagaacagagcatttgactcc

SEQ ID NO: 4633253 - DNA, 25 bp, Homo sapien
cgacatgtgtagtggtgtcagcatc

SEQ ID NO: 4633254 - DNA, 25 bp, Homo sapien
tcaaatctagctcccctcacgttgg

SEQ ID NO: 4633255 - DNA, 25 bp, Homo sapien
ttgcgacatgtgtagtggtgtcagc

SEQ ID NO: 4633256 - DNA, 25 bp, Homo sapien
tctcttcaaatctagctcccctcac

SEQ ID NO: 4633257 - DNA, 25 bp, Homo sapien
cagccacaagcgcacttttaaacac

SEQ ID NO: 4633258 - DNA, 25 bp, Homo sapien
cacaagcgcacttttaaacacgcgg

SEQ ID NO: 4633259 - DNA, 25 bp, Homo sapien
gcacttttaaacacgcgggagccca

SEQ ID NO: 4633260 - DNA, 25 bp, Homo sapien
caagcgcacttttaaacacgcggga

SEQ ID NO: 4633261 - DNA, 25 bp, Homo sapien
agctctctggctcccgtcgggcgcc

SEQ ID NO: 4633262 - DNA, 25 bp, Homo sapien
aatactgccacctcgcactcggcaa

SEQ ID NO: 4633263 - DNA, 25 bp, Homo sapien
ctcgcactcggcaacacctccgccg

SEQ ID NO: 4633264 - DNA, 25 bp, Homo sapien
gtcgggcgccccacaatactgccac

SEQ ID NO: 4633265 - DNA, 25 bp, Homo sapien
tacggtgggactagactgtcactgg

SEQ ID NO: 4633266 - DNA, 25 bp, Homo sapien
cccaatctggctgggaggtagtgac

SEQ ID NO: 4633267 - DNA, 25 bp, Homo sapien
gagcagaaggccacacaatgtacca

SEQ ID NO: 4633268 - DNA, 25 bp, Homo sapien
aatgtctcgcggaaggaggctgaca

SEQ ID NO: 4633269 - DNA, 25 bp, Homo sapien
actctgtagcttcccgttggagaac

SEQ ID NO: 4633270 - DNA, 25 bp, Homo sapien
ggactctgtagcttcccgttggaga

SEQ ID NO: 4633271 - DNA, 25 bp, Homo sapien
ctgtagcttcccgttggagaactgg

SEQ ID NO: 4633272 - DNA, 25 bp, Homo sapien
tctgtagcttcccgttggagaactg

SEQ ID NO: 4633273 - DNA, 25 bp, Homo sapien
ggtggaatctttgttctcatacaag

SEQ ID NO: 4633274 - DNA, 25 bp, Homo sapien
tgttctcatacaaggtaaagcgcat

SEQ ID NO: 4633275 - DNA, 25 bp, Homo sapien
caggatccgttgattcctcttcctg

SEQ ID NO: 4633276 - DNA, 25 bp, Homo sapien
gggttggtggaatctttgttctcat

SEQ ID NO: 4633277 - DNA, 25 bp, Homo sapien
aggagagcctatctgtttcagctgc

SEQ ID NO: 4633278 - DNA, 25 bp, Homo sapien
ccacataggagagcctatctgtttc

SEQ ID NO: 4633279 - DNA, 25 bp, Homo sapien
gcatttgagggctccagtcccaaaa

SEQ ID NO: 4633280 - DNA, 25 bp, Homo sapien
gtgttgcatttgagggctccagtcc

SEQ ID NO: 4633281 - DNA, 25 bp, Homo sapien
gcatcatatacttccatttggccag

SEQ ID NO: 4633282 - DNA, 25 bp, Homo sapien
gttgaacaattcagcatcatatact

SEQ ID NO: 4633283 - DNA, 25 bp, Homo sapien
tggccagaggtcttgttcaaaattc

SEQ ID NO: 4633284 - DNA, 25 bp, Homo sapien
cttgttcaaaattcccacaaagtgc

SEQ ID NO: 4633285 - DNA, 25 bp, Homo sapien
tataacagttaagaattaagaaaga

SEQ ID NO: 4633286 - DNA, 25 bp, Homo sapien
ctataacagttaagaattaagaaag

SEQ ID NO: 4633287 - DNA, 25 bp, Homo sapien
aaccctttcggccagaactgccatc

SEQ ID NO: 4633288 - DNA, 25 bp, Homo sapien
caggtcagttcaccaggtagtggca

SEQ ID NO: 4633289 - DNA, 25 bp, Homo sapien
tagccaaatcaagcggtcatccagc

SEQ ID NO: 4633290 - DNA, 25 bp, Homo sapien
tatgtggtacttaccgatgctctcc

SEQ ID NO: 4633291 - DNA, 25 bp, Homo sapien
caacagtacaagctctggagtggcc

SEQ ID NO: 4633292 - DNA, 25 bp, Homo sapien
tttggtctgactctctagcgccagt

SEQ ID NO: 4633293 - DNA, 25 bp, Homo sapien
tagcgccagttcactctcaactgat

SEQ ID NO: 4633294 - DNA, 25 bp, Homo sapien
ctgtaagttttggtctgactctcta

SEQ ID NO: 4633295 - DNA, 25 bp, Homo sapien
ggtctgactctctagcgccagttca

SEQ ID NO: 4633296 - DNA, 25 bp, Homo sapien
tttagccactgcacgattcaaagat

SEQ ID NO: 4633297 - DNA, 25 bp, Homo sapien
caaaggcttcaatacaagaatccat

SEQ ID NO: 4633298 - DNA, 25 bp, Homo sapien
agctcgcttctgtttggtggtacca

SEQ ID NO: 4633299 - DNA, 25 bp, Homo sapien
gtcacacccttcgtatcaatgatag

SEQ ID NO: 4633300 - DNA, 25 bp, Homo sapien
cattgtggatagcatcgctgaccag

SEQ ID NO: 4633301 - DNA, 25 bp, Homo sapien
gcaagtcattgtggatagcatcgct

SEQ ID NO: 4633302 - DNA, 25 bp, Homo sapien
aagtcattgtggatagcatcgctga

SEQ ID NO: 4633303 - DNA, 25 bp, Homo sapien
ttgtggatagcatcgctgaccagag

SEQ ID NO: 4633304 - DNA, 25 bp, Homo sapien
tcagagaacctgactgcacacacgt

SEQ ID NO: 4633305 - DNA, 25 bp, Homo sapien
gagtgagccccacaggtctaagctg

SEQ ID NO: 4633306 - DNA, 25 bp, Homo sapien
tgaggaagccaagttaacctcctgg

SEQ ID NO: 4633307 - DNA, 25 bp, Homo sapien
gagcactgagcaactgcaaaggttt

SEQ ID NO: 4633308 - DNA, 25 bp, Homo sapien
agtatttcttctgacgtgacgttcc

SEQ ID NO: 4633309 - DNA, 25 bp, Homo sapien
tctgaagagcttcatactccgcagg

SEQ ID NO: 4633310 - DNA, 25 bp, Homo sapien
gttcctgaaagcttcagatgggctc

SEQ ID NO: 4633311 - DNA, 25 bp, Homo sapien
ctgaagagcttcatactccgcaggg

SEQ ID NO: 4633312 - DNA, 25 bp, Homo sapien
ccctatgagctcgaaatttgatgag

SEQ ID NO: 4633313 - DNA, 25 bp, Homo sapien
atatgcatcgggcctggcggtctcg

SEQ ID NO: 4633314 - DNA, 25 bp, Homo sapien
tggcaaagacttcaacgcttctatg

SEQ ID NO: 4633315 - DNA, 25 bp, Homo sapien
ggtctcggctctccacatctgatgg

SEQ ID NO: 4633316 - DNA, 25 bp, Homo sapien
gcaagtaaagtgcttcagcagtttg

SEQ ID NO: 4633317 - DNA, 25 bp, Homo sapien
tgatgatgtggggaactccaggtcc

SEQ ID NO: 4633318 - DNA, 25 bp, Homo sapien
tggtgttgatgatgtggggaactcc

SEQ ID NO: 4633319 - DNA, 25 bp, Homo sapien
caagcaagtaaagtgcttcagcagt

SEQ ID NO: 4633320 - DNA, 25 bp, Homo sapien
gatcacatatgcagtaatcttcgcc

SEQ ID NO: 4633321 - DNA, 25 bp, Homo sapien
taacactgtcaggtcaatttggaag

SEQ ID NO: 4633322 - DNA, 25 bp, Homo sapien
tttggaagtcatgtatgtgcaaggc

SEQ ID NO: 4633323 - DNA, 25 bp, Homo sapien
tgagcttcaagtccctctgtaacac

SEQ ID NO: 4633324 - DNA, 25 bp, Homo sapien
tccgctttgccaggcggtctgaggt

SEQ ID NO: 4633325 - DNA, 25 bp, Homo sapien
gtgcccagcttgtgatcttcttcac

SEQ ID NO: 4633326 - DNA, 25 bp, Homo sapien
tgtgatcttcttcactgccggcggc

SEQ ID NO: 4633327 - DNA, 25 bp, Homo sapien
agcctcatggctttggctatctcca

SEQ ID NO: 4633328 - DNA, 25 bp, Homo sapien
gtccaacctggccatcgctttatat

SEQ ID NO: 4633329 - DNA, 25 bp, Homo sapien
ccagtggctgtgatgcagccaaaac

SEQ ID NO: 4633330 - DNA, 25 bp, Homo sapien
ctggccatcgctttatatttctgca

SEQ ID NO: 4633331 - DNA, 25 bp, Homo sapien
gatgcagccaaaacgccctgtctgg

SEQ ID NO: 4633332 - DNA, 25 bp, Homo sapien
aatcagcagcccagtgttgaatctt

SEQ ID NO: 4633333 - DNA, 25 bp, Homo sapien
gaaagcatgggtagctgaaatcagc

SEQ ID NO: 4633334 - DNA, 25 bp, Homo sapien
gtagctgaaatcagcagcccagtgt

SEQ ID NO: 4633335 - DNA, 25 bp, Homo sapien
cccagtgttgaatcttcagctgcat

SEQ ID NO: 4633336 - DNA, 25 bp, Homo sapien
tcccacttgaagcaggaccctgaga

SEQ ID NO: 4633337 - DNA, 25 bp, Homo sapien
tatatatgcgcaccagaaggaagca

SEQ ID NO: 4633338 - DNA, 25 bp, Homo sapien
tcagtggcacatacaattggttggc

SEQ ID NO: 4633339 - DNA, 25 bp, Homo sapien
tatagcaccgctctggacacagctt

SEQ ID NO: 4633340 - DNA, 25 bp, Homo sapien
gaaaataaggtgcacctgccccaaa

SEQ ID NO: 4633341 - DNA, 25 bp, Homo sapien
gacaaagtatgctccaagtgcctcc

SEQ ID NO: 4633342 - DNA, 25 bp, Homo sapien
cggaaacacattctaccctgaggat

SEQ ID NO: 4633343 - DNA, 25 bp, Homo sapien
tgtgactcccaaatggagggcccca

SEQ ID NO: 4633344 - DNA, 25 bp, Homo sapien
tattgtgctaggtggagccctcttc

SEQ ID NO: 4633345 - DNA, 25 bp, Homo sapien
ccctgccaaggaaagtacggttcat

SEQ ID NO: 4633346 - DNA, 25 bp, Homo sapien
tccactaggtcagaggttgttcaga

SEQ ID NO: 4633347 - DNA, 25 bp, Homo sapien
ttgacacacgacaagtatttgcccg

SEQ ID NO: 4633348 - DNA, 25 bp, Homo sapien
catgctagaaagtaaggaagcaccc

SEQ ID NO: 4633349 - DNA, 25 bp, Homo sapien
tgtaaatcctgaatccgatcacggg

SEQ ID NO: 4633350 - DNA, 25 bp, Homo sapien
cgatcacgggaaagccccaaatgta

SEQ ID NO: 4633351 - DNA, 25 bp, Homo sapien
tccaaaatgtcaaagccgagaaagt

SEQ ID NO: 4633352 - DNA, 25 bp, Homo sapien
tgaagtcaaacctagcatggcctcc

SEQ ID NO: 4633353 - DNA, 25 bp, Homo sapien
cagtcaggcccaaacacggatgtct

SEQ ID NO: 4633354 - DNA, 25 bp, Homo sapien
gatttcatcatctaggcctccaggt

SEQ ID NO: 4633355 - DNA, 25 bp, Homo sapien
tattctccgctaaaaggccagagct

SEQ ID NO: 4633356 - DNA, 25 bp, Homo sapien
tgcgggtgctttgcacaacaggcca

SEQ ID NO: 4633357 - DNA, 25 bp, Homo sapien
gaggaacagaacacccaccttagct

SEQ ID NO: 4633358 - DNA, 25 bp, Homo sapien
tatctcaggaggaatggcccagctc

SEQ ID NO: 4633359 - DNA, 25 bp, Homo sapien
tgttgattctctatgcccagcacag

SEQ ID NO: 4633360 - DNA, 25 bp, Homo sapien
ttagcctaaccagcagaacacaagt

SEQ ID NO: 4633361 - DNA, 25 bp, Homo sapien
gaaaccagacatttgagggccattt

SEQ ID NO: 4633362 - DNA, 25 bp, Homo sapien
ggtagaagctttaagggccagcaga

SEQ ID NO: 4633363 - DNA, 25 bp, Homo sapien
tcacgttgccatgggacctgatttg

SEQ ID NO: 4633364 - DNA, 25 bp, Homo sapien
gacctcctcaggctcactcaggtga

SEQ ID NO: 4633365 - DNA, 25 bp, Homo sapien
ccttgacctcctcaggctcactcag

SEQ ID NO: 4633366 - DNA, 25 bp, Homo sapien
ttgacctcctcaggctcactcaggt

SEQ ID NO: 4633367 - DNA, 25 bp, Homo sapien
acctcctcaggctcactcaggtgat

SEQ ID NO: 4633368 - DNA, 25 bp, Homo sapien
gctgggcatcatggcacgcaactgt

SEQ ID NO: 4633369 - DNA, 25 bp, Homo sapien
gggcatcatggcacgcaactgtagt

SEQ ID NO: 4633370 - DNA, 25 bp, Homo sapien
tagctgggcatcatggcacgcaact

SEQ ID NO: 4633371 - DNA, 25 bp, Homo sapien
tgggcatcatggcacgcaactgtag

SEQ ID NO: 4633372 - DNA, 25 bp, Homo sapien
cagtgcagtggtgcgatcttggctc

SEQ ID NO: 4633373 - DNA, 25 bp, Homo sapien
actgcaacctcttcctcccagattc

SEQ ID NO: 4633374 - DNA, 25 bp, Homo sapien
tatttatttagagaccaagtctcac

SEQ ID NO: 4633375 - DNA, 25 bp, Homo sapien
actctgttgcccaggctgcagtgca

SEQ ID NO: 4633376 - DNA, 25 bp, Homo sapien
ccaggtgccagggatcaagcctgta

SEQ ID NO: 4633377 - DNA, 25 bp, Homo sapien
agacaaagaactgaagcccacccag

SEQ ID NO: 4633378 - DNA, 25 bp, Homo sapien
tccccactggcacttgttatgaggc

SEQ ID NO: 4633379 - DNA, 25 bp, Homo sapien
gaggcctcgcgactgtatttatttc

SEQ ID NO: 4633380 - DNA, 25 bp, Homo sapien
tgcagggcctggtatgaactgatcc

SEQ ID NO: 4633381 - DNA, 25 bp, Homo sapien
gccagcctgtatgaccgaattgtgc

SEQ ID NO: 4633382 - DNA, 25 bp, Homo sapien
tcccaggtgtgtacgaagagcaagg

SEQ ID NO: 4633383 - DNA, 25 bp, Homo sapien
acgacgtaccctgagtgttgggcca

SEQ ID NO: 4633384 - DNA, 25 bp, Homo sapien
tatcacatccaataggccagtcatt

SEQ ID NO: 4633385 - DNA, 25 bp, Homo sapien
ccaccagtgagtagggcttgcaccc

SEQ ID NO: 4633386 - DNA, 25 bp, Homo sapien
gcccaggcccatggaaccatttttc

SEQ ID NO: 4633387 - DNA, 25 bp, Homo sapien
tccggttcctaagaagtggcttatc

SEQ ID NO: 4633388 - DNA, 25 bp, Homo sapien
taaaactaccggacgcggagcatgt

SEQ ID NO: 4633389 - DNA, 25 bp, Homo sapien
gaagagccttcacctaggaacgcag

SEQ ID NO: 4633390 - DNA, 25 bp, Homo sapien
ggagcatgtatctccgcggtgcctc

SEQ ID NO: 4633391 - DNA, 25 bp, Homo sapien
ccagccctgagatttttcgagtgtg

SEQ ID NO: 4633392 - DNA, 25 bp, Homo sapien
catttctgctgaacattaggtgcca

SEQ ID NO: 4633393 - DNA, 25 bp, Homo sapien
tgcacagaaccctggatcatggcag

SEQ ID NO: 4633394 - DNA, 25 bp, Homo sapien
gaattaggcttggagagtaggcaac

SEQ ID NO: 4633395 - DNA, 25 bp, Homo sapien
gataacagggagttcagtatcacca

SEQ ID NO: 4633396 - DNA, 25 bp, Homo sapien
tacccttatccctgtgacgtttggc

SEQ ID NO: 4633397 - DNA, 25 bp, Homo sapien
gacgtttggcctctgacaatactgg

SEQ ID NO: 4633398 - DNA, 25 bp, Homo sapien
tgtctcgtgatctggtgtaccctta

SEQ ID NO: 4633399 - DNA, 25 bp, Homo sapien
gcccagagtgtatttgtgaagagtc

SEQ ID NO: 4633400 - DNA, 25 bp, Homo sapien
cacacagtttccttagcctagaggg

SEQ ID NO: 4633401 - DNA, 25 bp, Homo sapien
tcaaggttcagcgaaaaggctgccc

SEQ ID NO: 4633402 - DNA, 25 bp, Homo sapien
cccctgcctgaagattgtctgtttc

SEQ ID NO: 4633403 - DNA, 25 bp, Homo sapien
tatgtcttctgtgctctctagtccc

SEQ ID NO: 4633404 - DNA, 25 bp, Homo sapien
aagagcgacctcaccaccaagaagg

SEQ ID NO: 4633405 - DNA, 25 bp, Homo sapien
caagaaggtggtggacaacaccaca

SEQ ID NO: 4633406 - DNA, 25 bp, Homo sapien
gaatcctatgccaacgtgaagcagt

SEQ ID NO: 4633407 - DNA, 25 bp, Homo sapien
tgccagcgagaacgtcaataagctc

SEQ ID NO: 4633408 - DNA, 25 bp, Homo sapien
atcgagctggatggcaaaactatca

SEQ ID NO: 4633409 - DNA, 25 bp, Homo sapien
ccatcgagctggatggcaaaactat

SEQ ID NO: 4633410 - DNA, 25 bp, Homo sapien
catcgagctggatggcaaaactatc

SEQ ID NO: 4633411 - DNA, 25 bp, Homo sapien
aaccatcgagctggatggcaaaact

SEQ ID NO: 4633412 - DNA, 25 bp, Homo sapien
caggcgtgggcaagtcatgcctgct

SEQ ID NO: 4633413 - DNA, 25 bp, Homo sapien
cgtgggcaagtcatgcctgctcctg

SEQ ID NO: 4633414 - DNA, 25 bp, Homo sapien
ggcgtgggcaagtcatgcctgctcc

SEQ ID NO: 4633415 - DNA, 25 bp, Homo sapien
ctcaggcgtgggcaagtcatgcctg

SEQ ID NO: 4633416 - DNA, 25 bp, Homo sapien
gcacggtcgcggccaaggctcggga

SEQ ID NO: 4633417 - DNA, 25 bp, Homo sapien
ggtcgcggccaaggctcgggaagca

SEQ ID NO: 4633418 - DNA, 25 bp, Homo sapien
ggcgggcacggtcgcggccaaggct

SEQ ID NO: 4633419 - DNA, 25 bp, Homo sapien
acggtcgcggccaaggctcgggaag

SEQ ID NO: 4633420 - DNA, 25 bp, Homo sapien
tgcagaggaggtgccgcccgcgcgg

SEQ ID NO: 4633421 - DNA, 25 bp, Homo sapien
acgctctcggagaagggcggccccg

SEQ ID NO: 4633422 - DNA, 25 bp, Homo sapien
gcccgcgcggacaaggacctagcgg

SEQ ID NO: 4633423 - DNA, 25 bp, Homo sapien
ctagcgggctgacgctctcggagaa

SEQ ID NO: 4633424 - DNA, 25 bp, Homo sapien
tctccaatgcagactcctccaaaag

SEQ ID NO: 4633425 - DNA, 25 bp, Homo sapien
caaagttgggtggtatctctgtggc

SEQ ID NO: 4633426 - DNA, 25 bp, Homo sapien
agtaaaaccgactgccaggccatgt

SEQ ID NO: 4633427 - DNA, 25 bp, Homo sapien
tcgagagaggaaaccctagaggtcc

SEQ ID NO: 4633428 - DNA, 25 bp, Homo sapien
tcaaccacttgagccagtcgagaga

SEQ ID NO: 4633429 - DNA, 25 bp, Homo sapien
tggggtgttgctgaaaagatacccc

SEQ ID NO: 4633430 - DNA, 25 bp, Homo sapien
ccccaaaatgtggaagcgactttag

SEQ ID NO: 4633431 - DNA, 25 bp, Homo sapien
gctttgactgaaatgctgatagcaa

SEQ ID NO: 4633432 - DNA, 25 bp, Homo sapien
gaatggctttgactgaaatgctgat

SEQ ID NO: 4633433 - DNA, 25 bp, Homo sapien
caccatgatctcttccttacgtgga

SEQ ID NO: 4633434 - DNA, 25 bp, Homo sapien
gccaccactccgattcatttttata

SEQ ID NO: 4633435 - DNA, 25 bp, Homo sapien
gtgcgccaccactccgattcatttt

SEQ ID NO: 4633436 - DNA, 25 bp, Homo sapien
tggatcattgtagcacccggtctcc

SEQ ID NO: 4633437 - DNA, 25 bp, Homo sapien
ccatgggtttgcgggcccctagact

SEQ ID NO: 4633438 - DNA, 25 bp, Homo sapien
tggccatgggtttgcgggcccctag

SEQ ID NO: 4633439 - DNA, 25 bp, Homo sapien
tgggtttgcgggcccctagactctg

SEQ ID NO: 4633440 - DNA, 25 bp, Homo sapien
gtttgcgggcccctagactctgcat

SEQ ID NO: 4633441 - DNA, 25 bp, Homo sapien
tagaagactggaagttggtcacaca

SEQ ID NO: 4633442 - DNA, 25 bp, Homo sapien
tcatccactttaccagataaacagt

SEQ ID NO: 4633443 - DNA, 25 bp, Homo sapien
tggaagttggtcacacaagtcatcc

SEQ ID NO: 4633444 - DNA, 25 bp, Homo sapien
ctagtagaagactggaagttggtca

SEQ ID NO: 4633445 - DNA, 25 bp, Homo sapien
gtaggttatagtgtcctgacaaaac

SEQ ID NO: 4633446 - DNA, 25 bp, Homo sapien
tgtaggttatagtgtcctgacaaaa

SEQ ID NO: 4633447 - DNA, 25 bp, Homo sapien
aggttatagtgtcctgacaaaacag

SEQ ID NO: 4633448 - DNA, 25 bp, Homo sapien
atgtaggttatagtgtcctgacaaa

SEQ ID NO: 4633449 - DNA, 25 bp, Homo sapien
tctggaataaactggtctccagctc

SEQ ID NO: 4633450 - DNA, 25 bp, Homo sapien
tctatgtgctttccgtgtctggaat

SEQ ID NO: 4633451 - DNA, 25 bp, Homo sapien
gctttccgtgtctggaataaactgg

SEQ ID NO: 4633452 - DNA, 25 bp, Homo sapien
tccgtgtctggaataaactggtctc

SEQ ID NO: 4633453 - DNA, 25 bp, Homo sapien
cgggagcgccgaagccatcttgcca

SEQ ID NO: 4633454 - DNA, 25 bp, Homo sapien
gtcccgggagcgccgaagccatctt

SEQ ID NO: 4633455 - DNA, 25 bp, Homo sapien
gggagcgccgaagccatcttgccac

SEQ ID NO: 4633456 - DNA, 25 bp, Homo sapien
cccgggagcgccgaagccatcttgc

SEQ ID NO: 4633457 - DNA, 25 bp, Homo sapien
aagctaaatctggtataaactggat

SEQ ID NO: 4633458 - DNA, 25 bp, Homo sapien
taaactggatttcataacgtaaaga

SEQ ID NO: 4633459 - DNA, 25 bp, Homo sapien
cgtaaagacgattcaaagaaaccag

SEQ ID NO: 4633460 - DNA, 25 bp, Homo sapien
actttattatgttcagcttgagtga

SEQ ID NO: 4633461 - DNA, 25 bp, Homo sapien
tgtctatctttactgtgtgtcgcac

SEQ ID NO: 4633462 - DNA, 25 bp, Homo sapien
tttactgtgtgtcgcacagggatga

SEQ ID NO: 4633463 - DNA, 25 bp, Homo sapien
gtctttgtctatctttactgtgtgt

SEQ ID NO: 4633464 - DNA, 25 bp, Homo sapien
gacagccaccactgtaaggggaagg

SEQ ID NO: 4633465 - DNA, 25 bp, Homo sapien
ttggaggatctgatcaccagggaaa

SEQ ID NO: 4633466 - DNA, 25 bp, Homo sapien
caggctcattgttcatttggaggat

SEQ ID NO: 4633467 - DNA, 25 bp, Homo sapien
gaaaagcttgccgtgagcagagcct

SEQ ID NO: 4633468 - DNA, 25 bp, Homo sapien
agaatatcgactgctcgttcccagg

SEQ ID NO: 4633469 - DNA, 25 bp, Homo sapien
gacgtgcagcgaacaactgtgattg

SEQ ID NO: 4633470 - DNA, 25 bp, Homo sapien
cgtgcagcgaacaactgtgattgaa

SEQ ID NO: 4633471 - DNA, 25 bp, Homo sapien
acgtgcagcgaacaactgtgattga

SEQ ID NO: 4633472 - DNA, 25 bp, Homo sapien
cgacgtgcagcgaacaactgtgatt

SEQ ID NO: 4633473 - DNA, 25 bp, Homo sapien
atttaaaggattcagctctatgctg

SEQ ID NO: 4633474 - DNA, 25 bp, Homo sapien
tttaaaggattcagctctatgctgt

SEQ ID NO: 4633475 - DNA, 25 bp, Homo sapien
gctgttgcccttgctccctacatta

SEQ ID NO: 4633476 - DNA, 25 bp, Homo sapien
agctctatgctgttgcccttgctcc

SEQ ID NO: 4633477 - DNA, 25 bp, Homo sapien
ggctccacttcgctcttatcttttg

SEQ ID NO: 4633478 - DNA, 25 bp, Homo sapien
tccacttcgctcttatcttttggaa

SEQ ID NO: 4633479 - DNA, 25 bp, Homo sapien
cacttcgctcttatcttttggaagg

SEQ ID NO: 4633480 - DNA, 25 bp, Homo sapien
cttggctccacttcgctcttatctt

SEQ ID NO: 4633481 - DNA, 25 bp, Homo sapien
ccactgatgagcacttcttcagcaa

SEQ ID NO: 4633482 - DNA, 25 bp, Homo sapien
cttcacggggttggtcttcagtctg

SEQ ID NO: 4633483 - DNA, 25 bp, Homo sapien
tcagcaaagtgcaccttcacggggt

SEQ ID NO: 4633484 - DNA, 25 bp, Homo sapien
tcaggaaggacgatttagggactcc

SEQ ID NO: 4633485 - DNA, 25 bp, Homo sapien
catgctttgtcaagggatacccatg

SEQ ID NO: 4633486 - DNA, 25 bp, Homo sapien
caggcatgctttgtcaagggatacc

SEQ ID NO: 4633487 - DNA, 25 bp, Homo sapien
gcacaggcatgctttgtcaagggat

SEQ ID NO: 4633488 - DNA, 25 bp, Homo sapien
ctttgtcaagggatacccatgagga

SEQ ID NO: 4633489 - DNA, 25 bp, Homo sapien
tgttgtatcccagtcacagctttcc

SEQ ID NO: 4633490 - DNA, 25 bp, Homo sapien
gtctgtccattctccaagtatagct

SEQ ID NO: 4633491 - DNA, 25 bp, Homo sapien
caagtatagcttgagcacgttgggc

SEQ ID NO: 4633492 - DNA, 25 bp, Homo sapien
cattctccaagtatagcttgagcac

SEQ ID NO: 4633493 - DNA, 25 bp, Homo sapien
cttgagcacgttgggcatacacagc

SEQ ID NO: 4633494 - DNA, 25 bp, Homo sapien
ctcactatgcaactgagtgaaactt

SEQ ID NO: 4633495 - DNA, 25 bp, Homo sapien
tgcttactagacagaatcccaccac

SEQ ID NO: 4633496 - DNA, 25 bp, Homo sapien
gtatctttgactgcttactagacag

SEQ ID NO: 4633497 - DNA, 25 bp, Homo sapien
cacccactcactatgcaactgagtg

SEQ ID NO: 4633498 - DNA, 25 bp, Homo sapien
gggccagtgcaaagtactcgatact

SEQ ID NO: 4633499 - DNA, 25 bp, Homo sapien
gctggatgagttcctcttcgtgcag

SEQ ID NO: 4633500 - DNA, 25 bp, Homo sapien
ttcggatggacagcttctccttcac

SEQ ID NO: 4633501 - DNA, 25 bp, Homo sapien
agttcctcttcgtgcagcaggtgca

SEQ ID NO: 4633502 - DNA, 25 bp, Homo sapien
ctgaagaggcagcggtagtcatgtg

SEQ ID NO: 4633503 - DNA, 25 bp, Homo sapien
gaggcagcggtagtcatgtgactcc

SEQ ID NO: 4633504 - DNA, 25 bp, Homo sapien
aagaggcagcggtagtcatgtgact

SEQ ID NO: 4633505 - DNA, 25 bp, Homo sapien
gaagaggcagcggtagtcatgtgac

SEQ ID NO: 4633506 - DNA, 25 bp, Homo sapien
caaccactgttattttaggaagcac

SEQ ID NO: 4633507 - DNA, 25 bp, Homo sapien
gaattctgagcgatgatcaggccca

SEQ ID NO: 4633508 - DNA, 25 bp, Homo sapien
taatggcctcgagctcacgttcaaa

SEQ ID NO: 4633509 - DNA, 25 bp, Homo sapien
gcaccatctttgagaacaaccactg

SEQ ID NO: 4633510 - DNA, 25 bp, Homo sapien
agcgctcctggagcacatcgctgca

SEQ ID NO: 4633511 - DNA, 25 bp, Homo sapien
cgcgagtcggagtgcagagctacat

SEQ ID NO: 4633512 - DNA, 25 bp, Homo sapien
ctgggcacaggcgtagatccgttcc

SEQ ID NO: 4633513 - DNA, 25 bp, Homo sapien
gcgtagatccgttcctggatgtgca

SEQ ID NO: 4633514 - DNA, 25 bp, Homo sapien
cttcatgtggaagctaatggctttc

SEQ ID NO: 4633515 - DNA, 25 bp, Homo sapien
gttggagatataaagttctctattc

SEQ ID NO: 4633516 - DNA, 25 bp, Homo sapien
ttgcctttcatgtttcggagtaaag

SEQ ID NO: 4633517 - DNA, 25 bp, Homo sapien
catgtttcggagtaaagttggagat

SEQ ID NO: 4633518 - DNA, 25 bp, Homo sapien
gataatttaaacgtagctgggcagc

SEQ ID NO: 4633519 - DNA, 25 bp, Homo sapien
cttccaccatatgtcttgagttctc

SEQ ID NO: 4633520 - DNA, 25 bp, Homo sapien
gtagctgggcagcagaaataagttg

SEQ ID NO: 4633521 - DNA, 25 bp, Homo sapien
ccgaggatctgtagataatttaaac

SEQ ID NO: 4633522 - DNA, 25 bp, Homo sapien
gttagctctacacggctgatgtttg

SEQ ID NO: 4633523 - DNA, 25 bp, Homo sapien
gaagatacactttgacgacgctcac

SEQ ID NO: 4633524 - DNA, 25 bp, Homo sapien
gctattgataacctggctaatccca

SEQ ID NO: 4633525 - DNA, 25 bp, Homo sapien
catacttggctccaactagaagggc

SEQ ID NO: 4633526 - DNA, 25 bp, Homo sapien
caatcaggcaggctaggtcttttgc

SEQ ID NO: 4633527 - DNA, 25 bp, Homo sapien
gaggtaactgggtcaaccaacagcc

SEQ ID NO: 4633528 - DNA, 25 bp, Homo sapien
accaacagcctgtagtacccagcaa

SEQ ID NO: 4633529 - DNA, 25 bp, Homo sapien
ttcttctgcagatacccggtgcgct

SEQ ID NO: 4633530 - DNA, 25 bp, Homo sapien
cagagagaggttcgagtacgcagtc

SEQ ID NO: 4633531 - DNA, 25 bp, Homo sapien
gagtcaatgctctctgcgaggcctg

SEQ ID NO: 4633532 - DNA, 25 bp, Homo sapien
gaagctgtactctcggaactgtcac

SEQ ID NO: 4633533 - DNA, 25 bp, Homo sapien
gaactgtcactcaggtagctggccg

SEQ ID NO: 4633534 - DNA, 25 bp, Homo sapien
aaggcctcctttaatgcagcctcag

SEQ ID NO: 4633535 - DNA, 25 bp, Homo sapien
cagggccacagacggcctgtctgtc

SEQ ID NO: 4633536 - DNA, 25 bp, Homo sapien
tctgatgtcagggtcccttggaccc

SEQ ID NO: 4633537 - DNA, 25 bp, Homo sapien
tgatgacatagccacttcgctctgc

SEQ ID NO: 4633538 - DNA, 25 bp, Homo sapien
cagggctagaagtgctggccttatt

SEQ ID NO: 4633539 - DNA, 25 bp, Homo sapien
cttattctgcaagcttgtggcactg

SEQ ID NO: 4633540 - DNA, 25 bp, Homo sapien
tggccttattctgcaagcttgtggc

SEQ ID NO: 4633541 - DNA, 25 bp, Homo sapien
ttctcagggctagaagtgctggcct

SEQ ID NO: 4633542 - DNA, 25 bp, Homo sapien
ttggtttccatggtctcgggctcca

SEQ ID NO: 4633543 - DNA, 25 bp, Homo sapien
gagtcgatgactgatttggtttcca

SEQ ID NO: 4633544 - DNA, 25 bp, Homo sapien
tagggctccctgtcatagtagcaca

SEQ ID NO: 4633545 - DNA, 25 bp, Homo sapien
tagtcggtctgtaggaaagaccttc

SEQ ID NO: 4633546 - DNA, 25 bp, Homo sapien
ggtcaatccggaagcgaatggcaga

SEQ ID NO: 4633547 - DNA, 25 bp, Homo sapien
gcagcagggacaacaccagaattct

SEQ ID NO: 4633548 - DNA, 25 bp, Homo sapien
cattatttagtcctgggttgctggc

SEQ ID NO: 4633549 - DNA, 25 bp, Homo sapien
tagactcctcctgaaatacgttggt

SEQ ID NO: 4633550 - DNA, 25 bp, Homo sapien
ctggagagctaatatcaagagtctg

SEQ ID NO: 4633551 - DNA, 25 bp, Homo sapien
cattatttgacacatcacccgggga

SEQ ID NO: 4633552 - DNA, 25 bp, Homo sapien
cagctggagagctaatatcaagagt

SEQ ID NO: 4633553 - DNA, 25 bp, Homo sapien
tatttgacacatcacccggggagtc

SEQ ID NO: 4633554 - DNA, 25 bp, Homo sapien
agaaatcagggtctaaatccaactc

SEQ ID NO: 4633555 - DNA, 25 bp, Homo sapien
tggagggacggctggtgaaactgtc

SEQ ID NO: 4633556 - DNA, 25 bp, Homo sapien
tctgctcggtccctgttacaggagc

SEQ ID NO: 4633557 - DNA, 25 bp, Homo sapien
aatccaactctacgaatagtttttg

SEQ ID NO: 4633558 - DNA, 25 bp, Homo sapien
atggttaggtgcctctgccttgatc

SEQ ID NO: 4633559 - DNA, 25 bp, Homo sapien
tggttaggtgcctctgccttgatcc

SEQ ID NO: 4633560 - DNA, 25 bp, Homo sapien
ttaggtgcctctgccttgatcccct

SEQ ID NO: 4633561 - DNA, 25 bp, Homo sapien
ggttaggtgcctctgccttgatccc

SEQ ID NO: 4633562 - DNA, 25 bp, Homo sapien
ttgaagtttctaagtgaggatcctc

SEQ ID NO: 4633563 - DNA, 25 bp, Homo sapien
ctgagagtaagcaatggtttgaagt

SEQ ID NO: 4633564 - DNA, 25 bp, Homo sapien
gaggatcctcttgtggacatggtag

SEQ ID NO: 4633565 - DNA, 25 bp, Homo sapien
gctcaggattaaaacagacccactc

SEQ ID NO: 4633566 - DNA, 25 bp, Homo sapien
ttctcagcagaaaggcagatgctag

SEQ ID NO: 4633567 - DNA, 25 bp, Homo sapien
gggcaaagcacagaaaagacttctc

SEQ ID NO: 4633568 - DNA, 25 bp, Homo sapien
gatgctagagctgtcacttttgcct

SEQ ID NO: 4633569 - DNA, 25 bp, Homo sapien
ggcagatgctagagctgtcactttt

SEQ ID NO: 4633570 - DNA, 25 bp, Homo sapien
gatgtggccaccctgagactggcag

SEQ ID NO: 4633571 - DNA, 25 bp, Homo sapien
cagatgtggcttttcctcgacaggg

SEQ ID NO: 4633572 - DNA, 25 bp, Homo sapien
catgtggcataggagaactgacagc

SEQ ID NO: 4633573 - DNA, 25 bp, Homo sapien
gctttcggtaaagtgccaggtgcac

SEQ ID NO: 4633574 - DNA, 25 bp, Homo sapien
tctccatgagttggatgaagccctc

SEQ ID NO: 4633575 - DNA, 25 bp, Homo sapien
gagtttcacactcaggtcgtggtag

SEQ ID NO: 4633576 - DNA, 25 bp, Homo sapien
gcaggtcgatttagcagcctctata

SEQ ID NO: 4633577 - DNA, 25 bp, Homo sapien
tcgtggtagcctctctcgcaggtcg

SEQ ID NO: 4633578 - DNA, 25 bp, Homo sapien
taaactgatggtaggtgtacaccac

SEQ ID NO: 4633579 - DNA, 25 bp, Homo sapien
aagcagcagtttatttgaatactct

SEQ ID NO: 4633580 - DNA, 25 bp, Homo sapien
caggaggcccttgggccgttgacct

SEQ ID NO: 4633581 - DNA, 25 bp, Homo sapien
cttctcagggaagtgtccaaggcag

SEQ ID NO: 4633582 - DNA, 25 bp, Homo sapien
tatagtaaacatttgaagagggtgg

SEQ ID NO: 4633583 - DNA, 25 bp, Homo sapien
gctgcttgctcgggcagcctgtttt

SEQ ID NO: 4633584 - DNA, 25 bp, Homo sapien
aggcaaccccaacgggttgccgctg

SEQ ID NO: 4633585 - DNA, 25 bp, Homo sapien
acgggttgccgctgcttgctcgggc

SEQ ID NO: 4633586 - DNA, 25 bp, Homo sapien
cacagtccagaaaggcaaccccaac

SEQ ID NO: 4633587 - DNA, 25 bp, Homo sapien
ccctcacccccacgcagcggcagcg

SEQ ID NO: 4633588 - DNA, 25 bp, Homo sapien
ctcacccccacgcagcggcagcggc

SEQ ID NO: 4633589 - DNA, 25 bp, Homo sapien
cctcacccccacgcagcggcagcgg

SEQ ID NO: 4633590 - DNA, 25 bp, Homo sapien
caacttcattgtattagggtgagaa

SEQ ID NO: 4633591 - DNA, 25 bp, Homo sapien
agttaatagccatgtgatctcttcc

SEQ ID NO: 4633592 - DNA, 25 bp, Homo sapien
caccaagctcctactgtatgccggg

SEQ ID NO: 4633593 - DNA, 25 bp, Homo sapien
gatttctctggaggtagtctggcta

SEQ ID NO: 4633594 - DNA, 25 bp, Homo sapien
gttgctattagaaggtaaatcttct

SEQ ID NO: 4633595 - DNA, 25 bp, Homo sapien
tagaaggtaaatcttctgagcagtt

SEQ ID NO: 4633596 - DNA, 25 bp, Homo sapien
ttagaaggtaaatcttctgagcagt

SEQ ID NO: 4633597 - DNA, 25 bp, Homo sapien
agaaggtaaatcttctgagcagttt

SEQ ID NO: 4633598 - DNA, 25 bp, Homo sapien
tgtttaatatccctcagaagtgctg

SEQ ID NO: 4633599 - DNA, 25 bp, Homo sapien
tatggctggtcctccgggtgtagtc

SEQ ID NO: 4633600 - DNA, 25 bp, Homo sapien
gcagtagaaagccagtcaccactga

SEQ ID NO: 4633601 - DNA, 25 bp, Homo sapien
gatgtgaccattacctatggctggt

SEQ ID NO: 4633602 - DNA, 25 bp, Homo sapien
ttagtcctctgtcctttccaccaga

SEQ ID NO: 4633603 - DNA, 25 bp, Homo sapien
acttagtcctctgtcctttccacca

SEQ ID NO: 4633604 - DNA, 25 bp, Homo sapien
ggacttagtcctctgtcctttccac

SEQ ID NO: 4633605 - DNA, 25 bp, Homo sapien
gacttagtcctctgtcctttccacc

SEQ ID NO: 4633606 - DNA, 25 bp, Homo sapien
gagtactcccttccaatttccagtc

SEQ ID NO: 4633607 - DNA, 25 bp, Homo sapien
gactctactttctgagtactccctt

SEQ ID NO: 4633608 - DNA, 25 bp, Homo sapien
ctcctctaggatgccttcttgcccc

SEQ ID NO: 4633609 - DNA, 25 bp, Homo sapien
tcgccttccgcatcgatctgcagaa

SEQ ID NO: 4633610 - DNA, 25 bp, Homo sapien
gcctggagtttagatttcctgaccc

SEQ ID NO: 4633611 - DNA, 25 bp, Homo sapien
aaaaacaaacctagactggatcgtg

SEQ ID NO: 4633612 - DNA, 25 bp, Homo sapien
aaagagacatgacctggtcaaggtc

SEQ ID NO: 4633613 - DNA, 25 bp, Homo sapien
aattcattagtgacagggcctggag

SEQ ID NO: 4633614 - DNA, 25 bp, Homo sapien
cttatattatccagaaaacaaaatt

SEQ ID NO: 4633615 - DNA, 25 bp, Homo sapien
tccagaaaacaaaattgtttgagaa

SEQ ID NO: 4633616 - DNA, 25 bp, Homo sapien
tatccagaaaacaaaattgtttgag

SEQ ID NO: 4633617 - DNA, 25 bp, Homo sapien
attatccagaaaacaaaattgtttg

SEQ ID NO: 4633618 - DNA, 25 bp, Homo sapien
ttgctcttctttgctgcaactatct

SEQ ID NO: 4633619 - DNA, 25 bp, Homo sapien
tggattttctgcacgattggctttt

SEQ ID NO: 4633620 - DNA, 25 bp, Homo sapien
gcacgattggcttttcttcgttctt

SEQ ID NO: 4633621 - DNA, 25 bp, Homo sapien
cttctttgctgcaactatcttttcc

SEQ ID NO: 4633622 - DNA, 25 bp, Homo sapien
taaatattattataccaacagtctc

SEQ ID NO: 4633623 - DNA, 25 bp, Homo sapien
gaacatgcagacacgtttgctaaaa

SEQ ID NO: 4633624 - DNA, 25 bp, Homo sapien
aaattcctactctcattggaacatg

SEQ ID NO: 4633625 - DNA, 25 bp, Homo sapien
gattcccaagaaaatagggcagtgg

SEQ ID NO: 4633626 - DNA, 25 bp, Homo sapien
ctcaaatcgatacatagtcttggtc

SEQ ID NO: 4633627 - DNA, 25 bp, Homo sapien
tttggttagagctctcaggaaacgt

SEQ ID NO: 4633628 - DNA, 25 bp, Homo sapien
gagctctcaggaaacgtttgctgtg

SEQ ID NO: 4633629 - DNA, 25 bp, Homo sapien
cttctttgacatgtagtgggtcata

SEQ ID NO: 4633630 - DNA, 25 bp, Homo sapien
ccctcatggcgagcaggaattccag

SEQ ID NO: 4633631 - DNA, 25 bp, Homo sapien
ggcctccctcatggcgagcaggaat

SEQ ID NO: 4633632 - DNA, 25 bp, Homo sapien
ggaattccaggcttagtggatgttc

SEQ ID NO: 4633633 - DNA, 25 bp, Homo sapien
attccaggcttagtggatgttctac

SEQ ID NO: 4633634 - DNA, 25 bp, Homo sapien
gttgaccatattcttcggaaagctg

SEQ ID NO: 4633635 - DNA, 25 bp, Homo sapien
tgaccatattcttcggaaagctgta

SEQ ID NO: 4633636 - DNA, 25 bp, Homo sapien
agttgaccatattcttcggaaagct

SEQ ID NO: 4633637 - DNA, 25 bp, Homo sapien
gaccatattcttcggaaagctgtac

SEQ ID NO: 4633638 - DNA, 25 bp, Homo sapien
tcaagggtccaaggcataatctctt

SEQ ID NO: 4633639 - DNA, 25 bp, Homo sapien
tctgctcccgtagataaggtctcct

SEQ ID NO: 4633640 - DNA, 25 bp, Homo sapien
cccacgtggccctgtatggtataca

SEQ ID NO: 4633641 - DNA, 25 bp, Homo sapien
tttcaggtaggaacctcagatctgc

SEQ ID NO: 4633642 - DNA, 25 bp, Homo sapien
tgtgaatccagtgaggcagatccaa

SEQ ID NO: 4633643 - DNA, 25 bp, Homo sapien
tctgtccagccagtctacttaattc

SEQ ID NO: 4633644 - DNA, 25 bp, Homo sapien
caggtaactagaaaatccatcattc

SEQ ID NO: 4633645 - DNA, 25 bp, Homo sapien
tgtttgaaccatacaaccttcgaat

SEQ ID NO: 4633646 - DNA, 25 bp, Homo sapien
tcaaagctgagggactaagaaaggc

SEQ ID NO: 4633647 - DNA, 25 bp, Homo sapien
gggaaggtcacaactgctcagtctc

SEQ ID NO: 4633648 - DNA, 25 bp, Homo sapien
agaaaactggaactagctgcactac

SEQ ID NO: 4633649 - DNA, 25 bp, Homo sapien
gctgcactacaagagagactgtgaa

SEQ ID NO: 4633650 - DNA, 25 bp, Homo sapien
ttaaaacagctcacggctgggtggg

SEQ ID NO: 4633651 - DNA, 25 bp, Homo sapien
accccgctcaaaattcaacgactag

SEQ ID NO: 4633652 - DNA, 25 bp, Homo sapien
cccagctataatacttaggagtgag

SEQ ID NO: 4633653 - DNA, 25 bp, Homo sapien
caacgactagttactgggcttcaag

SEQ ID NO: 4633654 - DNA, 25 bp, Homo sapien
gtcaggagtcaggtacacaagggtt

SEQ ID NO: 4633655 - DNA, 25 bp, Homo sapien
tcaggagtcaggtacacaagggttt

SEQ ID NO: 4633656 - DNA, 25 bp, Homo sapien
taaggatggaaaccctaagtctgca

SEQ ID NO: 4633657 - DNA, 25 bp, Homo sapien
ggtaagacacatcgaagcatccagt

SEQ ID NO: 4633658 - DNA, 25 bp, Homo sapien
taacattgatccaagaagggctagt

SEQ ID NO: 4633659 - DNA, 25 bp, Homo sapien
taatcacgaaaaagggtagcagacc

SEQ ID NO: 4633660 - DNA, 25 bp, Homo sapien
acaagcccaccgaggatgtaaactt

SEQ ID NO: 4633661 - DNA, 25 bp, Homo sapien
atccacaagcccaccgaggatgtaa

SEQ ID NO: 4633662 - DNA, 25 bp, Homo sapien
agcccaccgaggatgtaaactttgt

SEQ ID NO: 4633663 - DNA, 25 bp, Homo sapien
caccgaggatgtaaactttgtttag

SEQ ID NO: 4633664 - DNA, 25 bp, Homo sapien
caatatcagagttatccttgcagaa

SEQ ID NO: 4633665 - DNA, 25 bp, Homo sapien
tcaatatcagagttatccttgcaga

SEQ ID NO: 4633666 - DNA, 25 bp, Homo sapien
tctgtagggtgatactttgagacca

SEQ ID NO: 4633667 - DNA, 25 bp, Homo sapien
tgagaccatgtaaatagccggttcc

SEQ ID NO: 4633668 - DNA, 25 bp, Homo sapien
tggtgaccaccagaatgctttactg

SEQ ID NO: 4633669 - DNA, 25 bp, Homo sapien
caagaatactacacctcaggaggca

SEQ ID NO: 4633670 - DNA, 25 bp, Homo sapien
ctccagccctccagactttgtgtgt

SEQ ID NO: 4633671 - DNA, 25 bp, Homo sapien
tcctccagccctccagactttgtgt

SEQ ID NO: 4633672 - DNA, 25 bp, Homo sapien
cctccagccctccagactttgtgtg

SEQ ID NO: 4633673 - DNA, 25 bp, Homo sapien
agccctccagactttgtgtgtgtat

SEQ ID NO: 4633674 - DNA, 25 bp, Homo sapien
taccttttcggtgctgacacctgcc

SEQ ID NO: 4633675 - DNA, 25 bp, Homo sapien
catgagtatggtctaaccaggtgga

SEQ ID NO: 4633676 - DNA, 25 bp, Homo sapien
tgggtgttgccctagaagagcttac

SEQ ID NO: 4633677 - DNA, 25 bp, Homo sapien
tgtgaagtggacctagtaccttttc

SEQ ID NO: 4633678 - DNA, 25 bp, Homo sapien
gacaagattcaagacaggtgcacca

SEQ ID NO: 4633679 - DNA, 25 bp, Homo sapien
aaaaggtagacaagattcaagacag

SEQ ID NO: 4633680 - DNA, 25 bp, Homo sapien
caacaagtggcattagggtgtgaga

SEQ ID NO: 4633681 - DNA, 25 bp, Homo sapien
ggtgcaccactgcaacaagtggcat

SEQ ID NO: 4633682 - DNA, 25 bp, Homo sapien
gattggcaagcgtgcggtcttgaca

SEQ ID NO: 4633683 - DNA, 25 bp, Homo sapien
gcgtgcggtcttgacagagtattcc

SEQ ID NO: 4633684 - DNA, 25 bp, Homo sapien
ggtcttgacagagtattcccgggcc

SEQ ID NO: 4633685 - DNA, 25 bp, Homo sapien
cttgacagagtattcccgggccttt

SEQ ID NO: 4633686 - DNA, 25 bp, Homo sapien
ttgattgatggccagtatctctgaa

SEQ ID NO: 4633687 - DNA, 25 bp, Homo sapien
tggccagtatctctgaatgatagtt

SEQ ID NO: 4633688 - DNA, 25 bp, Homo sapien
tgatggccagtatctctgaatgata

SEQ ID NO: 4633689 - DNA, 25 bp, Homo sapien
ccattctggtttctgaccatgtatt

SEQ ID NO: 4633690 - DNA, 25 bp, Homo sapien
tggatgggggccgtgtaagaagtac

SEQ ID NO: 4633691 - DNA, 25 bp, Homo sapien
ctggatgggggccgtgtaagaagta

SEQ ID NO: 4633692 - DNA, 25 bp, Homo sapien
cctggatgggggccgtgtaagaagt

SEQ ID NO: 4633693 - DNA, 25 bp, Homo sapien
tagttggtgacgaagaaaacagaat

SEQ ID NO: 4633694 - DNA, 25 bp, Homo sapien
gtcatgacgtacatgcaataaagtc

SEQ ID NO: 4633695 - DNA, 25 bp, Homo sapien
gaatatatgtcatgacgtacatgca

SEQ ID NO: 4633696 - DNA, 25 bp, Homo sapien
gagactgactcaaaggccacttaaa

SEQ ID NO: 4633697 - DNA, 25 bp, Homo sapien
gagacagagtatcactgtcacccag

SEQ ID NO: 4633698 - DNA, 25 bp, Homo sapien
ttttgagacagagtatcactgtcac

SEQ ID NO: 4633699 - DNA, 25 bp, Homo sapien
gtttttgagacagagtatcactgtc

SEQ ID NO: 4633700 - DNA, 25 bp, Homo sapien
gaggcggagttgcactcttgttgct

SEQ ID NO: 4633701 - DNA, 25 bp, Homo sapien
tgagtctctaagtaagtggacagga

SEQ ID NO: 4633702 - DNA, 25 bp, Homo sapien
cactgagttccgaagaatatagcct

SEQ ID NO: 4633703 - DNA, 25 bp, Homo sapien
gcttcaggccagttgtgagtctcta

SEQ ID NO: 4633704 - DNA, 25 bp, Homo sapien
gaagaaactcctttcttcaatgctt

SEQ ID NO: 4633705 - DNA, 25 bp, Homo sapien
caacaacgagcatgatcagacaagg

SEQ ID NO: 4633706 - DNA, 25 bp, Homo sapien
tttcccctcgagacaagagtctggc

SEQ ID NO: 4633707 - DNA, 25 bp, Homo sapien
tcagtagggataggtcagaacaggc

SEQ ID NO: 4633708 - DNA, 25 bp, Homo sapien
tattactgagctgggcaacaacgag

SEQ ID NO: 4633709 - DNA, 25 bp, Homo sapien
tgttaggatcctaccattaggaagg

SEQ ID NO: 4633710 - DNA, 25 bp, Homo sapien
gaagaatctagttggtacaggctca

SEQ ID NO: 4633711 - DNA, 25 bp, Homo sapien
tcagggaggatagaaagataggtac

SEQ ID NO: 4633712 - DNA, 25 bp, Homo sapien
aagagaagccctccatgcccatact

SEQ ID NO: 4633713 - DNA, 25 bp, Homo sapien
cagagtaactgaagcaaatatgtcc

SEQ ID NO: 4633714 - DNA, 25 bp, Homo sapien
gcttccaatactatccaagttgctg

SEQ ID NO: 4633715 - DNA, 25 bp, Homo sapien
gcaagttaacccaaactgtcagagt

SEQ ID NO: 4633716 - DNA, 25 bp, Homo sapien
tacatgtcccaaatttgctagctgc

SEQ ID NO: 4633717 - DNA, 25 bp, Homo sapien
tgccaggtgatccacatcagtgatt

SEQ ID NO: 4633718 - DNA, 25 bp, Homo sapien
gaatatgtgagatacagatcccctg

SEQ ID NO: 4633719 - DNA, 25 bp, Homo sapien
taaaatcatttcctaggagctaagc

SEQ ID NO: 4633720 - DNA, 25 bp, Homo sapien
gattcttggtttctagacctctgag

SEQ ID NO: 4633721 - DNA, 25 bp, Homo sapien
ttataacagtaagccaggttcacca

SEQ ID NO: 4633722 - DNA, 25 bp, Homo sapien
tccataattaactggaggtcagcag

SEQ ID NO: 4633723 - DNA, 25 bp, Homo sapien
cagcgggtgagtatataacaacgaa

SEQ ID NO: 4633724 - DNA, 25 bp, Homo sapien
tgtagtcccattattcagcgggtga

SEQ ID NO: 4633725 - DNA, 25 bp, Homo sapien
tttcacccacgcttttgtgggagag

SEQ ID NO: 4633726 - DNA, 25 bp, Homo sapien
tacaggtcagttgaggcaaaaaact

SEQ ID NO: 4633727 - DNA, 25 bp, Homo sapien
gaaaacagatcttctccagattggc

SEQ ID NO: 4633728 - DNA, 25 bp, Homo sapien
cttgtgaacacatgacgtcagatca

SEQ ID NO: 4633729 - DNA, 25 bp, Homo sapien
gacacttggtcatactgaggcatac

SEQ ID NO: 4633730 - DNA, 25 bp, Homo sapien
tcctagagccagtgaagttgagagc

SEQ ID NO: 4633731 - DNA, 25 bp, Homo sapien
tattaaccaagcaccacccttatgg

SEQ ID NO: 4633732 - DNA, 25 bp, Homo sapien
attaaagtgctctgaccatctaggg

SEQ ID NO: 4633733 - DNA, 25 bp, Homo sapien
tatagtgcagtcagtcccttagcca

SEQ ID NO: 4633734 - DNA, 25 bp, Homo sapien
tgtaattctctagggtagtgcgacc

SEQ ID NO: 4633735 - DNA, 25 bp, Homo sapien
gaataatttgcatgccggagttcct

SEQ ID NO: 4633736 - DNA, 25 bp, Homo sapien
cacagaactgtaggtggctggcatt

SEQ ID NO: 4633737 - DNA, 25 bp, Homo sapien
ccatgtgattggcatagtgacagct

SEQ ID NO: 4633738 - DNA, 25 bp, Homo sapien
catgtgattggcatagtgacagcta

SEQ ID NO: 4633739 - DNA, 25 bp, Homo sapien
tgcaggtaattacgggagcctttgg

SEQ ID NO: 4633740 - DNA, 25 bp, Homo sapien
accaaatgtgcaggtaattacggga

SEQ ID NO: 4633741 - DNA, 25 bp, Homo sapien
cagagctgaagccaaacgctaagac

SEQ ID NO: 4633742 - DNA, 25 bp, Homo sapien
aagccaaacgctaagacacaggtgc

SEQ ID NO: 4633743 - DNA, 25 bp, Homo sapien
gctgaagccaaacgctaagacacag

SEQ ID NO: 4633744 - DNA, 25 bp, Homo sapien
tgaagccaaacgctaagacacaggt

SEQ ID NO: 4633745 - DNA, 25 bp, Homo sapien
cattggtaccaatggagttgtggct

SEQ ID NO: 4633746 - DNA, 25 bp, Homo sapien
tcttgcttagtcgtctccgttggag

SEQ ID NO: 4633747 - DNA, 25 bp, Homo sapien
aacaaagggtgccatgacacaggca

SEQ ID NO: 4633748 - DNA, 25 bp, Homo sapien
tgctggtactcctactgtatgctgt

SEQ ID NO: 4633749 - DNA, 25 bp, Homo sapien
aatagcatcatgacacacagttttc

SEQ ID NO: 4633750 - DNA, 25 bp, Homo sapien
tcttaagcttttccatggatccatc

SEQ ID NO: 4633751 - DNA, 25 bp, Homo sapien
caatgaatacagtcccttaatagca

SEQ ID NO: 4633752 - DNA, 25 bp, Homo sapien
tggatccatctatgcctggaccttg

SEQ ID NO: 4633753 - DNA, 25 bp, Homo sapien
agcatctgggcacctgatctgggtg

SEQ ID NO: 4633754 - DNA, 25 bp, Homo sapien
tgatctgggtggcagagtcggtctg

SEQ ID NO: 4633755 - DNA, 25 bp, Homo sapien
gagcatctgggcacctgatctgggt

SEQ ID NO: 4633756 - DNA, 25 bp, Homo sapien
tggcagagtcggtctgtagttgtca

SEQ ID NO: 4633757 - DNA, 25 bp, Homo sapien
cactgccccgccggccgacacctca

SEQ ID NO: 4633758 - DNA, 25 bp, Homo sapien
cgggccactgccccgccggccgaca

SEQ ID NO: 4633759 - DNA, 25 bp, Homo sapien
ctccgggccactgccccgccggccg

SEQ ID NO: 4633760 - DNA, 25 bp, Homo sapien
cccgctccgggccactgccccgccg

SEQ ID NO: 4633761 - DNA, 25 bp, Homo sapien
gcagccctagctctccggagcgcgg

SEQ ID NO: 4633762 - DNA, 25 bp, Homo sapien
catcagccccgggatgtagtggcga

SEQ ID NO: 4633763 - DNA, 25 bp, Homo sapien
gcagttgaggactccggagctccag

SEQ ID NO: 4633764 - DNA, 25 bp, Homo sapien
cggcgagggcttcgggcgggtggag

SEQ ID NO: 4633765 - DNA, 25 bp, Homo sapien
tgcgctctttcagccacccgaacag

SEQ ID NO: 4633766 - DNA, 25 bp, Homo sapien
ggtccacgaacagcccgcggcccag

SEQ ID NO: 4633767 - DNA, 25 bp, Homo sapien
cccaggctgcgctctttcagccacc

SEQ ID NO: 4633768 - DNA, 25 bp, Homo sapien
tcccgcgccgggtccacgaacagcc

SEQ ID NO: 4633769 - DNA, 25 bp, Homo sapien
ccgtcgggcgagtactcgaggttga

SEQ ID NO: 4633770 - DNA, 25 bp, Homo sapien
tgctgaggtacaccgagtccgcggg

SEQ ID NO: 4633771 - DNA, 25 bp, Homo sapien
tactcgaggttgaagacggcgccgt

SEQ ID NO: 4633772 - DNA, 25 bp, Homo sapien
tccgcggggtggatggaaccgtaga

SEQ ID NO: 4633773 - DNA, 25 bp, Homo sapien
tcagggaatccgtgaacacagtgtc

SEQ ID NO: 4633774 - DNA, 25 bp, Homo sapien
gaggctgcgaggttccatgaataag

SEQ ID NO: 4633775 - DNA, 25 bp, Homo sapien
gaccccagcaccacgtgtgattagg

SEQ ID NO: 4633776 - DNA, 25 bp, Homo sapien
tatgctgcccttctacgacctttga

SEQ ID NO: 4633777 - DNA, 25 bp, Homo sapien
atgcagtggcaacctcaaactctga

SEQ ID NO: 4633778 - DNA, 25 bp, Homo sapien
gaatgcagtggcaacctcaaactct

SEQ ID NO: 4633779 - DNA, 25 bp, Homo sapien
ggcaacctcaaactctgaagctcaa

SEQ ID NO: 4633780 - DNA, 25 bp, Homo sapien
tagaatgcagtggcaacctcaaact

SEQ ID NO: 4633781 - DNA, 25 bp, Homo sapien
tagaggtgccggcaatctgaggtct

SEQ ID NO: 4633782 - DNA, 25 bp, Homo sapien
gaagctggcctttagtccccatgag

SEQ ID NO: 4633783 - DNA, 25 bp, Homo sapien
gagtactgtcgattctggattcacc

SEQ ID NO: 4633784 - DNA, 25 bp, Homo sapien
gaggtcttcttaatctacgtaggga

SEQ ID NO: 4633785 - DNA, 25 bp, Homo sapien
catatggcccatgcctaccttctgt

SEQ ID NO: 4633786 - DNA, 25 bp, Homo sapien
gccatcgcgcgtggcccaaaaagtt

SEQ ID NO: 4633787 - DNA, 25 bp, Homo sapien
tggctttgcttattgctggtataca

SEQ ID NO: 4633788 - DNA, 25 bp, Homo sapien
gttgaacttattcctgggcacttga

SEQ ID NO: 4633789 - DNA, 25 bp, Homo sapien
ttcacaagcaactgtcagcactgac

SEQ ID NO: 4633790 - DNA, 25 bp, Homo sapien
tcagtttgttcacaagcaactgtca

SEQ ID NO: 4633791 - DNA, 25 bp, Homo sapien
gtttgttcacaagcaactgtcagca

SEQ ID NO: 4633792 - DNA, 25 bp, Homo sapien
gcagaacttcagtttgttcacaagc

SEQ ID NO: 4633793 - DNA, 25 bp, Homo sapien
catggctgaggttcataatgatgac

SEQ ID NO: 4633794 - DNA, 25 bp, Homo sapien
gggactgccatcattctacacaaat

SEQ ID NO: 4633795 - DNA, 25 bp, Homo sapien
gcacaaaggcattacaggactagca

SEQ ID NO: 4633796 - DNA, 25 bp, Homo sapien
gaggtgctaagcaatgggactgcca

SEQ ID NO: 4633797 - DNA, 25 bp, Homo sapien
tacctttgaattttgtactacatgc

SEQ ID NO: 4633798 - DNA, 25 bp, Homo sapien
acctttgaattttgtactacatgca

SEQ ID NO: 4633799 - DNA, 25 bp, Homo sapien
cacaccagcatctactgttttttga

SEQ ID NO: 4633800 - DNA, 25 bp, Homo sapien
tgggttggttccacgatttggctat

SEQ ID NO: 4633801 - DNA, 25 bp, Homo sapien
acaggagtaaggcggtatcgcatta

SEQ ID NO: 4633802 - DNA, 25 bp, Homo sapien
gtgtagaagtgttcctgatcaccac

SEQ ID NO: 4633803 - DNA, 25 bp, Homo sapien
ctcatccaggtcattgcaaatgctg

SEQ ID NO: 4633804 - DNA, 25 bp, Homo sapien
tgagtaatattccatcatatatata

SEQ ID NO: 4633805 - DNA, 25 bp, Homo sapien
catccaggtcattgcaaatgctgtt

SEQ ID NO: 4633806 - DNA, 25 bp, Homo sapien
tccaatctcatccaggtcattgcaa

SEQ ID NO: 4633807 - DNA, 25 bp, Homo sapien
tgttactatctagaaccacactgtc

SEQ ID NO: 4633808 - DNA, 25 bp, Homo sapien
tgagtcattgataggcaggcagtct

SEQ ID NO: 4633809 - DNA, 25 bp, Homo sapien
gatgtgctctaatgactgggcacgg

SEQ ID NO: 4633810 - DNA, 25 bp, Homo sapien
ggcagtctgaattaagatgtgctct

SEQ ID NO: 4633811 - DNA, 25 bp, Homo sapien
tctctcattgatggtgggcactcag

SEQ ID NO: 4633812 - DNA, 25 bp, Homo sapien
cttgtggatcctatgagaatgtctc

SEQ ID NO: 4633813 - DNA, 25 bp, Homo sapien
cattgccgaacatcaccctggtgtc

SEQ ID NO: 4633814 - DNA, 25 bp, Homo sapien
ggcattatctaatctgggttcccat

SEQ ID NO: 4633815 - DNA, 25 bp, Homo sapien
tgcacctggcagacttatatttgtt

SEQ ID NO: 4633816 - DNA, 25 bp, Homo sapien
gcttgaggtcagcagcgtcagacca

SEQ ID NO: 4633817 - DNA, 25 bp, Homo sapien
ggttagatattcacagaggagggcc

SEQ ID NO: 4633818 - DNA, 25 bp, Homo sapien
aatttgggtcccacacatgcacgag

SEQ ID NO: 4633819 - DNA, 25 bp, Homo sapien
ttctcccaccaactatagcctatct

SEQ ID NO: 4633820 - DNA, 25 bp, Homo sapien
tcattgtagtttatcttaggtgatt

SEQ ID NO: 4633821 - DNA, 25 bp, Homo sapien
cctcttttgctaaagggctattatc

SEQ ID NO: 4633822 - DNA, 25 bp, Homo sapien
tctggttatgtacattgaaaatacc

SEQ ID NO: 4633823 - DNA, 25 bp, Homo sapien
aatgaccgtctagattcaaaccaga

SEQ ID NO: 4633824 - DNA, 25 bp, Homo sapien
ctagaagacattaccaagtatgtac

SEQ ID NO: 4633825 - DNA, 25 bp, Homo sapien
cagtacagtgaggtgatctaatgga

SEQ ID NO: 4633826 - DNA, 25 bp, Homo sapien
tggaactgagtatgaattccagctc

SEQ ID NO: 4633827 - DNA, 25 bp, Homo sapien
tcctatttaactacagacgatcccc

SEQ ID NO: 4633828 - DNA, 25 bp, Homo sapien
gttgttgagtctatatcttaaaaaa

SEQ ID NO: 4633829 - DNA, 25 bp, Homo sapien
tgaaagtgttgttgagtctatatct

SEQ ID NO: 4633830 - DNA, 25 bp, Homo sapien
gggagataatcccatcagaagttga

SEQ ID NO: 4633831 - DNA, 25 bp, Homo sapien
tatagatttacctttactgataatg

SEQ ID NO: 4633832 - DNA, 25 bp, Homo sapien
caccaaacctgtgataacaatctct

SEQ ID NO: 4633833 - DNA, 25 bp, Homo sapien
cttatagatttacctttactgataa

SEQ ID NO: 4633834 - DNA, 25 bp, Homo sapien
ttcaccaaacctgtgataacaatct

SEQ ID NO: 4633835 - DNA, 25 bp, Homo sapien
gcgtttggggccgtgtgccggcgcc

SEQ ID NO: 4633836 - DNA, 25 bp, Homo sapien
gccggcgcctctggcagggattggg

SEQ ID NO: 4633837 - DNA, 25 bp, Homo sapien
cctctggcagggattggggaatttt

SEQ ID NO: 4633838 - DNA, 25 bp, Homo sapien
gtgtgccggcgcctctggcagggat

SEQ ID NO: 4633839 - DNA, 25 bp, Homo sapien
ttaatagagataccaagttctttag

SEQ ID NO: 4633840 - DNA, 25 bp, Homo sapien
tctgctgtgcttccagttagatgtt

SEQ ID NO: 4633841 - DNA, 25 bp, Homo sapien
gatgtgttctggtaactgttctaat

SEQ ID NO: 4633842 - DNA, 25 bp, Homo sapien
ggtaagtttcgctgaatatattcca

SEQ ID NO: 4633843 - DNA, 25 bp, Homo sapien
tcttctttttcttctgatagtgttt

SEQ ID NO: 4633844 - DNA, 25 bp, Homo sapien
cttctttttcttctgatagtgtttc

SEQ ID NO: 4633845 - DNA, 25 bp, Homo sapien
tgtgaacacttcaagcacttatttt

SEQ ID NO: 4633846 - DNA, 25 bp, Homo sapien
gtgaacacttcaagcacttattttc

SEQ ID NO: 4633847 - DNA, 25 bp, Homo sapien
tggacctgcttctactataaaaaga

SEQ ID NO: 4633848 - DNA, 25 bp, Homo sapien
catggacctgcttctactataaaaa

SEQ ID NO: 4633849 - DNA, 25 bp, Homo sapien
atggacctgcttctactataaaaag

SEQ ID NO: 4633850 - DNA, 25 bp, Homo sapien
ggacctgcttctactataaaaagaa

SEQ ID NO: 4633851 - DNA, 25 bp, Homo sapien
tttttttgacacacaagcagtatgt

SEQ ID NO: 4633852 - DNA, 25 bp, Homo sapien
gaaaagagaacaggcaatgcagttt

SEQ ID NO: 4633853 - DNA, 25 bp, Homo sapien
ggaaaaactgagaagtcataactac

SEQ ID NO: 4633854 - DNA, 25 bp, Homo sapien
tacctgatagcatgtcaggaaaaga

SEQ ID NO: 4633855 - DNA, 25 bp, Homo sapien
tcatcagagcaggtagcaaacagcc

SEQ ID NO: 4633856 - DNA, 25 bp, Homo sapien
tcaaatcctgatgttactaagagtc

SEQ ID NO: 4633857 - DNA, 25 bp, Homo sapien
cagctagtgtgaccatgtaaagtgc

SEQ ID NO: 4633858 - DNA, 25 bp, Homo sapien
cccatagtgctattgtagtgtcatc

SEQ ID NO: 4633859 - DNA, 25 bp, Homo sapien
gacaactagtccactgtgcacactg

SEQ ID NO: 4633860 - DNA, 25 bp, Homo sapien
taactggcattttaggtgggacaac

SEQ ID NO: 4633861 - DNA, 25 bp, Homo sapien
tgcacactgacctgtgtactgcagg

SEQ ID NO: 4633862 - DNA, 25 bp, Homo sapien
tgttgcacaacagaggcataactgg

SEQ ID NO: 4633863 - DNA, 25 bp, Homo sapien
ttaacagtacttcagctgaaccagt

SEQ ID NO: 4633864 - DNA, 25 bp, Homo sapien
ggcagtgcctatttacgaattggta

SEQ ID NO: 4633865 - DNA, 25 bp, Homo sapien
tcagaatagatgcagatggctgtgc

SEQ ID NO: 4633866 - DNA, 25 bp, Homo sapien
cagggtcctggaatcgccatattgt

SEQ ID NO: 4633867 - DNA, 25 bp, Homo sapien
tggtagaagtcacctgtaaaactga

SEQ ID NO: 4633868 - DNA, 25 bp, Homo sapien
gttaagttcgggtatcaaggtcata

SEQ ID NO: 4633869 - DNA, 25 bp, Homo sapien
tttatacatgatgtaagaattccct

SEQ ID NO: 4633870 - DNA, 25 bp, Homo sapien
ccctttttcaataatctgatcagtt

SEQ ID NO: 4633871 - DNA, 25 bp, Homo sapien
agccttgcttcccatcttaggggga

SEQ ID NO: 4633872 - DNA, 25 bp, Homo sapien
cttgattatcatatgggttttgacc

SEQ ID NO: 4633873 - DNA, 25 bp, Homo sapien
aatgcattcagtctttcaatgttaa

SEQ ID NO: 4633874 - DNA, 25 bp, Homo sapien
tcagtctttcaatgttaagcaagat

SEQ ID NO: 4633875 - DNA, 25 bp, Homo sapien
gcaatgtgggtttcagcaatcaggg

SEQ ID NO: 4633876 - DNA, 25 bp, Homo sapien
acttcttatattccctttagcaatg

SEQ ID NO: 4633877 - DNA, 25 bp, Homo sapien
ccagcaatgtgggtttcagcaatca

SEQ ID NO: 4633878 - DNA, 25 bp, Homo sapien
tcttatattccctttagcaatgttt

SEQ ID NO: 4633879 - DNA, 25 bp, Homo sapien
aatcgtacagtaagtagtcttttgc

SEQ ID NO: 4633880 - DNA, 25 bp, Homo sapien
atcaccttaagagattcctcctgcc

SEQ ID NO: 4633881 - DNA, 25 bp, Homo sapien
catgccaggccgcaattaagtaatt

SEQ ID NO: 4633882 - DNA, 25 bp, Homo sapien
taagagattcctcctgcccattagc

SEQ ID NO: 4633883 - DNA, 25 bp, Homo sapien
tcttatgtggacacccatcttctgt

SEQ ID NO: 4633884 - DNA, 25 bp, Homo sapien
agaaaacgtgtgtgaaagaatttct

SEQ ID NO: 4633885 - DNA, 25 bp, Homo sapien
agaatttcttatgtggacacccatc

SEQ ID NO: 4633886 - DNA, 25 bp, Homo sapien
atgtggacacccatcttctgtatac

SEQ ID NO: 4633887 - DNA, 25 bp, Homo sapien
tttggaacaatctggtgttaacctc

SEQ ID NO: 4633888 - DNA, 25 bp, Homo sapien
aacaatctggtgttaacctcattcg

SEQ ID NO: 4633889 - DNA, 25 bp, Homo sapien
ggaacaatctggtgttaacctcatt

SEQ ID NO: 4633890 - DNA, 25 bp, Homo sapien
aatctggtgttaacctcattcgcat

SEQ ID NO: 4633891 - DNA, 25 bp, Homo sapien
aaaatgggatagctgcctacttcta

SEQ ID NO: 4633892 - DNA, 25 bp, Homo sapien
tagctgcctacttctaaagacttag

SEQ ID NO: 4633893 - DNA, 25 bp, Homo sapien
tgggatagctgcctacttctaaaga

SEQ ID NO: 4633894 - DNA, 25 bp, Homo sapien
tatccagaggacgttgaaatcaaca

SEQ ID NO: 4633895 - DNA, 25 bp, Homo sapien
gatgacaaggtgagccagaaactct

SEQ ID NO: 4633896 - DNA, 25 bp, Homo sapien
gaggctcgtgacatgtgtttctcag

SEQ ID NO: 4633897 - DNA, 25 bp, Homo sapien
tctaggaccagatgaacttgatgaa

SEQ ID NO: 4633898 - DNA, 25 bp, Homo sapien
ctcagaagaattagaatcactatga

SEQ ID NO: 4633899 - DNA, 25 bp, Homo sapien
tcccatgttttccctctcttttcac

SEQ ID NO: 4633900 - DNA, 25 bp, Homo sapien
catgttttccctctcttttcaccct

SEQ ID NO: 4633901 - DNA, 25 bp, Homo sapien
tctcccatgttttccctctcttttc

SEQ ID NO: 4633902 - DNA, 25 bp, Homo sapien
cttctcccatgttttccctctcttt

SEQ ID NO: 4633903 - DNA, 25 bp, Homo sapien
ggctggagggtcaagagcctcccta

SEQ ID NO: 4633904 - DNA, 25 bp, Homo sapien
ggtttgctaactgtgctcctttggg

SEQ ID NO: 4633905 - DNA, 25 bp, Homo sapien
tagagcaacttcacctataagcccc

SEQ ID NO: 4633906 - DNA, 25 bp, Homo sapien
gctgaaatgcatttgaaagcctctg

SEQ ID NO: 4633907 - DNA, 25 bp, Homo sapien
tactccccaatgtatggtgtgtgag

SEQ ID NO: 4633908 - DNA, 25 bp, Homo sapien
aattgtcactgacctaaggctaagg

SEQ ID NO: 4633909 - DNA, 25 bp, Homo sapien
tgttaaagagcgtggtactccccaa

SEQ ID NO: 4633910 - DNA, 25 bp, Homo sapien
cttggaagccatgaggattgccttt

SEQ ID NO: 4633911 - DNA, 25 bp, Homo sapien
tgagcaccgaagaagagtggcccag

SEQ ID NO: 4633912 - DNA, 25 bp, Homo sapien
taaggacgtgatgcagtttccgtgg

SEQ ID NO: 4633913 - DNA, 25 bp, Homo sapien
gtttccgtggtcactctcaccaaga

SEQ ID NO: 4633914 - DNA, 25 bp, Homo sapien
tcaagactatttcgtggtgaaactc

SEQ ID NO: 4633915 - DNA, 25 bp, Homo sapien
aacaggagagtcgagaagcaggatc

SEQ ID NO: 4633916 - DNA, 25 bp, Homo sapien
tttgtccaatgagccctgttgaagg

SEQ ID NO: 4633917 - DNA, 25 bp, Homo sapien
tgcagtcagcgatcggcctaagctc

SEQ ID NO: 4633918 - DNA, 25 bp, Homo sapien
taagctctgcacacacggcaatggc

SEQ ID NO: 4633919 - DNA, 25 bp, Homo sapien
gatgctggcctttaaagtacctccc

SEQ ID NO: 4633920 - DNA, 25 bp, Homo sapien
atgaaagaggcaagatttaagaagc

SEQ ID NO: 4633921 - DNA, 25 bp, Homo sapien
aaattatgatactcaattggcttag

SEQ ID NO: 4633922 - DNA, 25 bp, Homo sapien
aaatctcacatttagccagcttagc

SEQ ID NO: 4633923 - DNA, 25 bp, Homo sapien
tctaggaccagtgagatccttggaa

SEQ ID NO: 4633924 - DNA, 25 bp, Homo sapien
cctttcagttgtggcctctaggacc

SEQ ID NO: 4633925 - DNA, 25 bp, Homo sapien
tgtggcctctaggaccagtgagatc

SEQ ID NO: 4633926 - DNA, 25 bp, Homo sapien
tctctcctttcagttgtggcctcta

SEQ ID NO: 4633927 - DNA, 25 bp, Homo sapien
gagcccaaatagtgctacagatatt

SEQ ID NO: 4633928 - DNA, 25 bp, Homo sapien
tgaggctgcctgtgacttttgcagt

SEQ ID NO: 4633929 - DNA, 25 bp, Homo sapien
gctcaacagattgccaaagccacag

SEQ ID NO: 4633930 - DNA, 25 bp, Homo sapien
tctaagggcaacaacaatgttgata

SEQ ID NO: 4633931 - DNA, 25 bp, Homo sapien
aacagcgaggtgagacaggtcgcac

SEQ ID NO: 4633932 - DNA, 25 bp, Homo sapien
acaagcgaatcccatagccatgtgg

SEQ ID NO: 4633933 - DNA, 25 bp, Homo sapien
taatgagtcagtcgtagagaacagc

SEQ ID NO: 4633934 - DNA, 25 bp, Homo sapien
ttgggcaagcagtcaacaagttcac

SEQ ID NO: 4633935 - DNA, 25 bp, Homo sapien
cacatcattatgagagtacagagaa

SEQ ID NO: 4633936 - DNA, 25 bp, Homo sapien
tatgagagtacagagaacggatcac

SEQ ID NO: 4633937 - DNA, 25 bp, Homo sapien
cattatgagagtacagagaacggat

SEQ ID NO: 4633938 - DNA, 25 bp, Homo sapien
catcattatgagagtacagagaacg

SEQ ID NO: 4633939 - DNA, 25 bp, Homo sapien
tgatacaaagaaacccgtccactaa

SEQ ID NO: 4633940 - DNA, 25 bp, Homo sapien
tttggctgatacaaagaaacccgtc

SEQ ID NO: 4633941 - DNA, 25 bp, Homo sapien
tgtgttggagagaactttgttgtca

SEQ ID NO: 4633942 - DNA, 25 bp, Homo sapien
actaaggcaccctgaggcaatctga

SEQ ID NO: 4633943 - DNA, 25 bp, Homo sapien
cacaagtgtgttcatggacccataa

SEQ ID NO: 4633944 - DNA, 25 bp, Homo sapien
cgtgacaagagctaccatgcaaaat

SEQ ID NO: 4633945 - DNA, 25 bp, Homo sapien
catagagtctaacttggagatgcct

SEQ ID NO: 4633946 - DNA, 25 bp, Homo sapien
gcctgtatgatgctggatgaccaag

SEQ ID NO: 4633947 - DNA, 25 bp, Homo sapien
tttttcaacaaccaatatgccaata

SEQ ID NO: 4633948 - DNA, 25 bp, Homo sapien
aatttatttttcaacaaccaatatg

SEQ ID NO: 4633949 - DNA, 25 bp, Homo sapien
tttatttttcaacaaccaatatgcc

SEQ ID NO: 4633950 - DNA, 25 bp, Homo sapien
tatttttcaacaaccaatatgccaa

SEQ ID NO: 4633951 - DNA, 25 bp, Homo sapien
tgtttttcaacctgcaatcccgaga

SEQ ID NO: 4633952 - DNA, 25 bp, Homo sapien
taaagagaatgcaacctaagagggc

SEQ ID NO: 4633953 - DNA, 25 bp, Homo sapien
gcgcctggccgagtagagaagaatt

SEQ ID NO: 4633954 - DNA, 25 bp, Homo sapien
gcaactctcccctcacgaatggtga

SEQ ID NO: 4633955 - DNA, 25 bp, Homo sapien
gaaattgccctgaccaaggaattag

SEQ ID NO: 4633956 - DNA, 25 bp, Homo sapien
gaatagttagttggcaggtcctaca

SEQ ID NO: 4633957 - DNA, 25 bp, Homo sapien
tttctaacagacagcataacacagt

SEQ ID NO: 4633958 - DNA, 25 bp, Homo sapien
tctagagccaagatccttataacct

SEQ ID NO: 4633959 - DNA, 25 bp, Homo sapien
gagtgaattttcacagcgctcagtg

SEQ ID NO: 4633960 - DNA, 25 bp, Homo sapien
gatcttggttctagacacagcagtg

SEQ ID NO: 4633961 - DNA, 25 bp, Homo sapien
tgtagacactctgaacaggcacggt

SEQ ID NO: 4633962 - DNA, 25 bp, Homo sapien
taaaagcatgatagacccctctgca

SEQ ID NO: 4633963 - DNA, 25 bp, Homo sapien
aacacagttgggcaattgaagatgc

SEQ ID NO: 4633964 - DNA, 25 bp, Homo sapien
tactctgtgtcaagtcctgtaccag

SEQ ID NO: 4633965 - DNA, 25 bp, Homo sapien
ctgggtatctagtatattgtctgga

SEQ ID NO: 4633966 - DNA, 25 bp, Homo sapien
acttaaaacacctcagaacctactg

SEQ ID NO: 4633967 - DNA, 25 bp, Homo sapien
tggaataccaagacgatagttatct

SEQ ID NO: 4633968 - DNA, 25 bp, Homo sapien
gtatgggacactatgtaactgcaca

SEQ ID NO: 4633969 - DNA, 25 bp, Homo sapien
tgagttcccagtactaaactaggca

SEQ ID NO: 4633970 - DNA, 25 bp, Homo sapien
tagttatctttgtcccttgagttcc

SEQ ID NO: 4633971 - DNA, 25 bp, Homo sapien
gaagtcagacagaaccaggtagaag

SEQ ID NO: 4633972 - DNA, 25 bp, Homo sapien
gtaagcaaacagaacagtagcccct

SEQ ID NO: 4633973 - DNA, 25 bp, Homo sapien
gaagcgctaaggctagtacccaaca

SEQ ID NO: 4633974 - DNA, 25 bp, Homo sapien
tactggccctatacacataagcgga

SEQ ID NO: 4633975 - DNA, 25 bp, Homo sapien
gatgcatagacaccagataaccact

SEQ ID NO: 4633976 - DNA, 25 bp, Homo sapien
gggacacactgccaaatagagatga

SEQ ID NO: 4633977 - DNA, 25 bp, Homo sapien
gcagatgcttctaatacttggtgag

SEQ ID NO: 4633978 - DNA, 25 bp, Homo sapien
gaatgacactccctgactaggacaa

SEQ ID NO: 4633979 - DNA, 25 bp, Homo sapien
tctgtgccaagtgataactgtttct

SEQ ID NO: 4633980 - DNA, 25 bp, Homo sapien
tgttgtaaaactgccatttcaggac

SEQ ID NO: 4633981 - DNA, 25 bp, Homo sapien
ggacaatgtgatctcctcgagggca

SEQ ID NO: 4633982 - DNA, 25 bp, Homo sapien
tatttagcgagtttgtgttacacct

SEQ ID NO: 4633983 - DNA, 25 bp, Homo sapien
ttcagtacctcagctctcactatta

SEQ ID NO: 4633984 - DNA, 25 bp, Homo sapien
ctcactattatcctgagtgggatga

SEQ ID NO: 4633985 - DNA, 25 bp, Homo sapien
tacctcagctctcactattatcctg

SEQ ID NO: 4633986 - DNA, 25 bp, Homo sapien
tcagctctcactattatcctgagtg

SEQ ID NO: 4633987 - DNA, 25 bp, Homo sapien
ctttcgagtgaagaaccagttggta

SEQ ID NO: 4633988 - DNA, 25 bp, Homo sapien
cgagtgaagaaccagttggtattct

SEQ ID NO: 4633989 - DNA, 25 bp, Homo sapien
ttctttcgagtgaagaaccagttgg

SEQ ID NO: 4633990 - DNA, 25 bp, Homo sapien
gatttctttcgagtgaagaaccagt

SEQ ID NO: 4633991 - DNA, 25 bp, Homo sapien
gctgttgcctagaccactgtgggtc

SEQ ID NO: 4633992 - DNA, 25 bp, Homo sapien
ttagctgttgcctagaccactgtgg

SEQ ID NO: 4633993 - DNA, 25 bp, Homo sapien
tccactttaggtgggcaaaactcac

SEQ ID NO: 4633994 - DNA, 25 bp, Homo sapien
tagctgttgcctagaccactgtggg

SEQ ID NO: 4633995 - DNA, 25 bp, Homo sapien
ttctttgctggtcacatgaacacca

SEQ ID NO: 4633996 - DNA, 25 bp, Homo sapien
tttctttgctggtcacatgaacacc

SEQ ID NO: 4633997 - DNA, 25 bp, Homo sapien
tctttgctggtcacatgaacaccaa

SEQ ID NO: 4633998 - DNA, 25 bp, Homo sapien
aaatacagtacgactgccacccctt

SEQ ID NO: 4633999 - DNA, 25 bp, Homo sapien
gatgtgtagtgttcccaaacatcac

SEQ ID NO: 4634000 - DNA, 25 bp, Homo sapien
gccacaaatacagtacgactgccac

SEQ ID NO: 4634001 - DNA, 25 bp, Homo sapien
aggacaatagataactggatgtgta

SEQ ID NO: 4634002 - DNA, 25 bp, Homo sapien
tagccgagaccactgagtagtcgca

SEQ ID NO: 4634003 - DNA, 25 bp, Homo sapien
tgaatagccgagaccactgagtagt

SEQ ID NO: 4634004 - DNA, 25 bp, Homo sapien
gaccactgagtagtcgcagagaaga

SEQ ID NO: 4634005 - DNA, 25 bp, Homo sapien
tatggttgaatagccgagaccactg

SEQ ID NO: 4634006 - DNA, 25 bp, Homo sapien
atctctagctaaaactgcgctgctg

SEQ ID NO: 4634007 - DNA, 25 bp, Homo sapien
gagacaggatgatccagcccttgcc

SEQ ID NO: 4634008 - DNA, 25 bp, Homo sapien
ggaagctggcttacactctcaggac

SEQ ID NO: 4634009 - DNA, 25 bp, Homo sapien
cactggcacttcctgattacttggg

SEQ ID NO: 4634010 - DNA, 25 bp, Homo sapien
tgtaatgctcagtataaggctgtgc

SEQ ID NO: 4634011 - DNA, 25 bp, Homo sapien
tcgagtgaagccaatcatgttgaac

SEQ ID NO: 4634012 - DNA, 25 bp, Homo sapien
tagagtgaggcgtatgcagtcataa

SEQ ID NO: 4634013 - DNA, 25 bp, Homo sapien
ggatacctgaaattcccaagcttgg

SEQ ID NO: 4634014 - DNA, 25 bp, Homo sapien
aaacataagtggctgtgaccggcca

SEQ ID NO: 4634015 - DNA, 25 bp, Homo sapien
gaaactaagcacctattggataggc

SEQ ID NO: 4634016 - DNA, 25 bp, Homo sapien
gaaatcgcctgcattgaaacataag

SEQ ID NO: 4634017 - DNA, 25 bp, Homo sapien
gcctggtaaatagctgtccatctga

SEQ ID NO: 4634018 - DNA, 25 bp, Homo sapien
tggatctgcggttcttcatcatcac

SEQ ID NO: 4634019 - DNA, 25 bp, Homo sapien
tcacaatggcactgagaaacatcag

SEQ ID NO: 4634020 - DNA, 25 bp, Homo sapien
gaaaatgttgcctatatgttgctcc

SEQ ID NO: 4634021 - DNA, 25 bp, Homo sapien
gtaaagtaggcccatgcgaatatcc

SEQ ID NO: 4634022 - DNA, 25 bp, Homo sapien
gggggggtttgcacgtcatcaggaa

SEQ ID NO: 4634023 - DNA, 25 bp, Homo sapien
ggggggtttgcacgtcatcaggaac

SEQ ID NO: 4634024 - DNA, 25 bp, Homo sapien
gggggtttgcacgtcatcaggaaca

SEQ ID NO: 4634025 - DNA, 25 bp, Homo sapien
agtacttgatatactcagggcccat

SEQ ID NO: 4634026 - DNA, 25 bp, Homo sapien
tatcattgaagtacttgatatactc

SEQ ID NO: 4634027 - DNA, 25 bp, Homo sapien
tgaagtacttgatatactcagggcc

SEQ ID NO: 4634028 - DNA, 25 bp, Homo sapien
tggcaaagaactccacaatccaagt

SEQ ID NO: 4634029 - DNA, 25 bp, Homo sapien
caaaatttagccctgtacagttgta

SEQ ID NO: 4634030 - DNA, 25 bp, Homo sapien
gataggggcaaatgattggcagtca

SEQ ID NO: 4634031 - DNA, 25 bp, Homo sapien
agaggtcagcatagataggggcaaa

SEQ ID NO: 4634032 - DNA, 25 bp, Homo sapien
cgtactaacatcagtatagcgtcca

SEQ ID NO: 4634033 - DNA, 25 bp, Homo sapien
taagttaaattctcggatcacattc

SEQ ID NO: 4634034 - DNA, 25 bp, Homo sapien
tggcccgctggtatagctcatttaa

SEQ ID NO: 4634035 - DNA, 25 bp, Homo sapien
aaggtccatgagacagcccgtcctt

SEQ ID NO: 4634036 - DNA, 25 bp, Homo sapien
cagggatattgtctccagcctttga

SEQ ID NO: 4634037 - DNA, 25 bp, Homo sapien
ggtctaaccaggctgtgcaggttga

SEQ ID NO: 4634038 - DNA, 25 bp, Homo sapien
aaaatcagaagctgcgcactgcccc

SEQ ID NO: 4634039 - DNA, 25 bp, Homo sapien
taaccaggctgtgcaggttgactaa

SEQ ID NO: 4634040 - DNA, 25 bp, Homo sapien
caggctgtgcaggttgactaagaag

SEQ ID NO: 4634041 - DNA, 25 bp, Homo sapien
atcccaatcttattatggaaagcca

SEQ ID NO: 4634042 - DNA, 25 bp, Homo sapien
gaaatcccaatcttattatggaaag

SEQ ID NO: 4634043 - DNA, 25 bp, Homo sapien
ggaaatcccaatcttattatggaaa

SEQ ID NO: 4634044 - DNA, 25 bp, Homo sapien
aaatcccaatcttattatggaaagc

SEQ ID NO: 4634045 - DNA, 25 bp, Homo sapien
tgatgcagaagacaactacgcttgc

SEQ ID NO: 4634046 - DNA, 25 bp, Homo sapien
cagaagctcatgaaaagaggccacc

SEQ ID NO: 4634047 - DNA, 25 bp, Homo sapien
gaaggtcctctttcgacaacagctg

SEQ ID NO: 4634048 - DNA, 25 bp, Homo sapien
caaaacccgggatgcaatacttcag

SEQ ID NO: 4634049 - DNA, 25 bp, Homo sapien
ggaaacgcgctgaagggcccgctgg

SEQ ID NO: 4634050 - DNA, 25 bp, Homo sapien
acctcggggtcggtcacagtctgcg

SEQ ID NO: 4634051 - DNA, 25 bp, Homo sapien
gcaccgggctttcttcgcatgaggt

SEQ ID NO: 4634052 - DNA, 25 bp, Homo sapien
tgatgggtgagtgtgggacgagcgt

SEQ ID NO: 4634053 - DNA, 25 bp, Homo sapien
cggccaggagaagtaggctggcgac

SEQ ID NO: 4634054 - DNA, 25 bp, Homo sapien
gccaggagaagtaggctggcgacat

SEQ ID NO: 4634055 - DNA, 25 bp, Homo sapien
ggccaggagaagtaggctggcgaca

SEQ ID NO: 4634056 - DNA, 25 bp, Homo sapien
tgcggccaggagaagtaggctggcg

SEQ ID NO: 4634057 - DNA, 25 bp, Homo sapien
ctttggagttttccgcgaaggcgct

SEQ ID NO: 4634058 - DNA, 25 bp, Homo sapien
gggtcgctgataaaaggtccctctg

SEQ ID NO: 4634059 - DNA, 25 bp, Homo sapien
tgtaaactgcggcatgggtcgctga

SEQ ID NO: 4634060 - DNA, 25 bp, Homo sapien
gaagatactcaacaaggctccacag

SEQ ID NO: 4634061 - DNA, 25 bp, Homo sapien
ccgaggacgcatacaaggcatgggt

SEQ ID NO: 4634062 - DNA, 25 bp, Homo sapien
tcacccaaggtcactctcaagaagt

SEQ ID NO: 4634063 - DNA, 25 bp, Homo sapien
gcatgggttacttttcagacggaga

SEQ ID NO: 4634064 - DNA, 25 bp, Homo sapien
cccgcaagctgtctgagcttcaaag

SEQ ID NO: 4634065 - DNA, 25 bp, Homo sapien
tcagtgtctacaaagtgctctcggg

SEQ ID NO: 4634066 - DNA, 25 bp, Homo sapien
gaccagacccgcttttggagtcagt

SEQ ID NO: 4634067 - DNA, 25 bp, Homo sapien
tctgttgtgtgcgttccagtttcca

SEQ ID NO: 4634068 - DNA, 25 bp, Homo sapien
cccaagaacgcttcactcgggtggg

SEQ ID NO: 4634069 - DNA, 25 bp, Homo sapien
atgggggagggtggtctccagcttc

SEQ ID NO: 4634070 - DNA, 25 bp, Homo sapien
ctggaatgggggagggtggtctcca

SEQ ID NO: 4634071 - DNA, 25 bp, Homo sapien
tggtctccagcttcccgagaggcac

SEQ ID NO: 4634072 - DNA, 25 bp, Homo sapien
ggtggtctccagcttcccgagaggc

SEQ ID NO: 4634073 - DNA, 25 bp, Homo sapien
tatccttcatcagacgctaagctcc

SEQ ID NO: 4634074 - DNA, 25 bp, Homo sapien
ttcatcagacgctaagctccccagg

SEQ ID NO: 4634075 - DNA, 25 bp, Homo sapien
cagtaggttcctcaatggagcgttt

SEQ ID NO: 4634076 - DNA, 25 bp, Homo sapien
ccaggacctggcacgcagtaggttc

SEQ ID NO: 4634077 - DNA, 25 bp, Homo sapien
tatccctcgcgtactaattagatgg

SEQ ID NO: 4634078 - DNA, 25 bp, Homo sapien
tgctatgactttctccactgggcca

SEQ ID NO: 4634079 - DNA, 25 bp, Homo sapien
tgaataggcattcacacaagacagg

SEQ ID NO: 4634080 - DNA, 25 bp, Homo sapien
tcaagattcgcattatccagcccca

SEQ ID NO: 4634081 - DNA, 25 bp, Homo sapien
agtgagccagcatggcaccactgca

SEQ ID NO: 4634082 - DNA, 25 bp, Homo sapien
ccactgcactccagcttcggcaaca

SEQ ID NO: 4634083 - DNA, 25 bp, Homo sapien
ctgcactccagcttcggcaacagaa

SEQ ID NO: 4634084 - DNA, 25 bp, Homo sapien
ttgcagtgagccagcatggcaccac

SEQ ID NO: 4634085 - DNA, 25 bp, Homo sapien
caaagagggtctagggtgccagaaa

SEQ ID NO: 4634086 - DNA, 25 bp, Homo sapien
tacacgcggtgttgaatgactgccc

SEQ ID NO: 4634087 - DNA, 25 bp, Homo sapien
tggtcccagcaagccggaacagttg

SEQ ID NO: 4634088 - DNA, 25 bp, Homo sapien
tctgagggctaacaccaggatggtc

SEQ ID NO: 4634089 - DNA, 25 bp, Homo sapien
taatgcctgcccacttgagcaactc

SEQ ID NO: 4634090 - DNA, 25 bp, Homo sapien
agcgctgaggagtcaagggcccttc

SEQ ID NO: 4634091 - DNA, 25 bp, Homo sapien
gccagtcccgtcctgaagtcagaag

SEQ ID NO: 4634092 - DNA, 25 bp, Homo sapien
caggatggcgcccacagaaagaaag

SEQ ID NO: 4634093 - DNA, 25 bp, Homo sapien
cctggataaagacagaagggcggca

SEQ ID NO: 4634094 - DNA, 25 bp, Homo sapien
ctctgtgacagagcctgagacttgg

SEQ ID NO: 4634095 - DNA, 25 bp, Homo sapien
cacctctgtacagggcaaagttttc

SEQ ID NO: 4634096 - DNA, 25 bp, Homo sapien
gctccctggctgacatctctttgtt

SEQ ID NO: 4634097 - DNA, 25 bp, Homo sapien
gcaacgtcgtgagacctcattacta

SEQ ID NO: 4634098 - DNA, 25 bp, Homo sapien
caggcatttggggttacagagtgag

SEQ ID NO: 4634099 - DNA, 25 bp, Homo sapien
ggcatttggggttacagagtgagct

SEQ ID NO: 4634100 - DNA, 25 bp, Homo sapien
catttggggttacagagtgagctgt

SEQ ID NO: 4634101 - DNA, 25 bp, Homo sapien
cactgtgagcatgacctagctctgg

SEQ ID NO: 4634102 - DNA, 25 bp, Homo sapien
aagaggtggtgttactgcctatcgc

SEQ ID NO: 4634103 - DNA, 25 bp, Homo sapien
gcctatcgcagctttggaaactttc

SEQ ID NO: 4634104 - DNA, 25 bp, Homo sapien
tgcagatgagtaaacaggttcacgg

SEQ ID NO: 4634105 - DNA, 25 bp, Homo sapien
cttctccacattcccatgggcagac

SEQ ID NO: 4634106 - DNA, 25 bp, Homo sapien
ccacattcccatgggcagaccccgc

SEQ ID NO: 4634107 - DNA, 25 bp, Homo sapien
tctccacattcccatgggcagaccc

SEQ ID NO: 4634108 - DNA, 25 bp, Homo sapien
cattcccatgggcagaccccgccat

SEQ ID NO: 4634109 - DNA, 25 bp, Homo sapien
gacttgactttgaattgatccagtc

SEQ ID NO: 4634110 - DNA, 25 bp, Homo sapien
gataaagataattcctcatagactt

SEQ ID NO: 4634111 - DNA, 25 bp, Homo sapien
gggcagacggatccctctgtattgt

SEQ ID NO: 4634112 - DNA, 25 bp, Homo sapien
ctttgaattgatccagtctttgcag

SEQ ID NO: 4634113 - DNA, 25 bp, Homo sapien
tgtccacagcgatgggtggttggtc

SEQ ID NO: 4634114 - DNA, 25 bp, Homo sapien
ccacagcgatgggtggttggtcctt

SEQ ID NO: 4634115 - DNA, 25 bp, Homo sapien
taagaggaaagttagtggtataggc

SEQ ID NO: 4634116 - DNA, 25 bp, Homo sapien
agagctgtccacagcgatgggtggt

SEQ ID NO: 4634117 - DNA, 25 bp, Homo sapien
cactggaagttattcttactgtaca

SEQ ID NO: 4634118 - DNA, 25 bp, Homo sapien
gagcacactggaagttattcttact

SEQ ID NO: 4634119 - DNA, 25 bp, Homo sapien
ttacatacttttcctgtgagcacac

SEQ ID NO: 4634120 - DNA, 25 bp, Homo sapien
ggctcacaggcgctgctgttttgct

SEQ ID NO: 4634121 - DNA, 25 bp, Homo sapien
gcagctgatcattaaaaggcactgt

SEQ ID NO: 4634122 - DNA, 25 bp, Homo sapien
ttagtgcgggttcccgcgcctctgc

SEQ ID NO: 4634123 - DNA, 25 bp, Homo sapien
ctgcagctgatcattaaaaggcact

SEQ ID NO: 4634124 - DNA, 25 bp, Homo sapien
actgtgctggcccgatctcgtgctc

SEQ ID NO: 4634125 - DNA, 25 bp, Homo sapien
ctggggtaatgcttccctagaaagc

SEQ ID NO: 4634126 - DNA, 25 bp, Homo sapien
tggggtaatgcttccctagaaagca

SEQ ID NO: 4634127 - DNA, 25 bp, Homo sapien
ggggtaatgcttccctagaaagcat

SEQ ID NO: 4634128 - DNA, 25 bp, Homo sapien
tgtttcatggaaaccagctcccgtg

SEQ ID NO: 4634129 - DNA, 25 bp, Homo sapien
tggaaaccagctcccgtgatggtct

SEQ ID NO: 4634130 - DNA, 25 bp, Homo sapien
agtgctgtgttggtgtttcatggaa

SEQ ID NO: 4634131 - DNA, 25 bp, Homo sapien
tcatacagccgttgtcaagtgctgt

SEQ ID NO: 4634132 - DNA, 25 bp, Homo sapien
gggcattgctgaacttcaggatgtg

SEQ ID NO: 4634133 - DNA, 25 bp, Homo sapien
gctgaacttcaggatgtgattctgt

SEQ ID NO: 4634134 - DNA, 25 bp, Homo sapien
aacttcaggatgtgattctgtgctt

SEQ ID NO: 4634135 - DNA, 25 bp, Homo sapien
cgtgggcattgctgaacttcaggat

SEQ ID NO: 4634136 - DNA, 25 bp, Homo sapien
tgttagagtgtgacagaatgtgaaa

SEQ ID NO: 4634137 - DNA, 25 bp, Homo sapien
gtcatgcctatttgtgagcctgtgg

SEQ ID NO: 4634138 - DNA, 25 bp, Homo sapien
ggctgaatcgatgataatgacacac

SEQ ID NO: 4634139 - DNA, 25 bp, Homo sapien
agagaggctcacttctagcggaggt

SEQ ID NO: 4634140 - DNA, 25 bp, Homo sapien
cgaagttttatacctctgcacttgc

SEQ ID NO: 4634141 - DNA, 25 bp, Homo sapien
ctgcacttgcctgtgcccatttctg

SEQ ID NO: 4634142 - DNA, 25 bp, Homo sapien
catttctgaagcaggcatgcccttc

SEQ ID NO: 4634143 - DNA, 25 bp, Homo sapien
gtgcccatttctgaagcaggcatgc

SEQ ID NO: 4634144 - DNA, 25 bp, Homo sapien
gacgaagggatttttactgtcaggc

SEQ ID NO: 4634145 - DNA, 25 bp, Homo sapien
tcttgtaagaggtagtcataagcca

SEQ ID NO: 4634146 - DNA, 25 bp, Homo sapien
tggaatgtggtttgtcttgtaagag

SEQ ID NO: 4634147 - DNA, 25 bp, Homo sapien
tcataagccacaagcgacgaaggga

SEQ ID NO: 4634148 - DNA, 25 bp, Homo sapien
tgactgtgaagtgacgagatggtgg

SEQ ID NO: 4634149 - DNA, 25 bp, Homo sapien
tgaaggttgtcaaagtgcagacact

SEQ ID NO: 4634150 - DNA, 25 bp, Homo sapien
tgtcacagcctggatgatattccca

SEQ ID NO: 4634151 - DNA, 25 bp, Homo sapien
gaaagccatctgtggtgtgactgtg

SEQ ID NO: 4634152 - DNA, 25 bp, Homo sapien
tgacactgggcaatcgagagaaatt

SEQ ID NO: 4634153 - DNA, 25 bp, Homo sapien
gaaattgaccgagcgcttgtcagga

SEQ ID NO: 4634154 - DNA, 25 bp, Homo sapien
tcaatagccgaaacgtcctctgtgg

SEQ ID NO: 4634155 - DNA, 25 bp, Homo sapien
tgagttactcagtccatcagagcat

SEQ ID NO: 4634156 - DNA, 25 bp, Homo sapien
tcatccgcgcctaccgcgcgcagaa

SEQ ID NO: 4634157 - DNA, 25 bp, Homo sapien
gcggccagactaccgcgagcagcgg

SEQ ID NO: 4634158 - DNA, 25 bp, Homo sapien
tcgctgcccgacgacagcggcagca

SEQ ID NO: 4634159 - DNA, 25 bp, Homo sapien
ggcagcaccagcgacctcatccgcg

SEQ ID NO: 4634160 - DNA, 25 bp, Homo sapien
gcaggagcgcgatccacggcgaggg

SEQ ID NO: 4634161 - DNA, 25 bp, Homo sapien
cccagcgctcgcaggaaggaagaag

SEQ ID NO: 4634162 - DNA, 25 bp, Homo sapien
aggacgccgagaagttcccgcggca

SEQ ID NO: 4634163 - DNA, 25 bp, Homo sapien
cggccaaagggtccgcggcgtggag

SEQ ID NO: 4634164 - DNA, 25 bp, Homo sapien
tcaggtgcccacatcttagagttaa

SEQ ID NO: 4634165 - DNA, 25 bp, Homo sapien
gcagctacttcatctttaggcagca

SEQ ID NO: 4634166 - DNA, 25 bp, Homo sapien
tggtgccacccgacttaggaactgg

SEQ ID NO: 4634167 - DNA, 25 bp, Homo sapien
ggttgcccaggcaaattcaaagcag

SEQ ID NO: 4634168 - DNA, 25 bp, Homo sapien
ccaggacagagtgcatggtgcgatc

SEQ ID NO: 4634169 - DNA, 25 bp, Homo sapien
gcatgagcacccagcataattttat

SEQ ID NO: 4634170 - DNA, 25 bp, Homo sapien
cttgctctgtcgtcacccaggacag

SEQ ID NO: 4634171 - DNA, 25 bp, Homo sapien
caggcatgagcacccagcataattt

SEQ ID NO: 4634172 - DNA, 25 bp, Homo sapien
tgagcaccagtcaaaggcgatcaat

SEQ ID NO: 4634173 - DNA, 25 bp, Homo sapien
cagtcaaaggcgatcaatctgtgga

SEQ ID NO: 4634174 - DNA, 25 bp, Homo sapien
caactcccaaggattcttgagcacc

SEQ ID NO: 4634175 - DNA, 25 bp, Homo sapien
gattcttgagcaccagtcaaaggcg

SEQ ID NO: 4634176 - DNA, 25 bp, Homo sapien
gcttcacggggacctttatgaactg

SEQ ID NO: 4634177 - DNA, 25 bp, Homo sapien
tggtgtcactttgttattaacggtc

SEQ ID NO: 4634178 - DNA, 25 bp, Homo sapien
cacggggacctttatgaactgtcag

SEQ ID NO: 4634179 - DNA, 25 bp, Homo sapien
cattcttgactctgggcttcacggg

SEQ ID NO: 4634180 - DNA, 25 bp, Homo sapien
tccatcccctgggatggctcgggca

SEQ ID NO: 4634181 - DNA, 25 bp, Homo sapien
tcgggcaatgctccggccgcagtct

SEQ ID NO: 4634182 - DNA, 25 bp, Homo sapien
ccctgggatggctcgggcaatgctc

SEQ ID NO: 4634183 - DNA, 25 bp, Homo sapien
atggctcgggcaatgctccggccgc

SEQ ID NO: 4634184 - DNA, 25 bp, Homo sapien
tatgtgaccttaggaaagtctcctt

SEQ ID NO: 4634185 - DNA, 25 bp, Homo sapien
caccacattaggttgcagtctagct

SEQ ID NO: 4634186 - DNA, 25 bp, Homo sapien
cacgagctccagtatgtgaccttag

SEQ ID NO: 4634187 - DNA, 25 bp, Homo sapien
tgcagtctagctgcaccacgagctc

SEQ ID NO: 4634188 - DNA, 25 bp, Homo sapien
caaagtgacttgaatgatgaatcca

SEQ ID NO: 4634189 - DNA, 25 bp, Homo sapien
tatgaattggaaagacaaacaaggc

SEQ ID NO: 4634190 - DNA, 25 bp, Homo sapien
tcaaatctccatcaagtctgtgtct

SEQ ID NO: 4634191 - DNA, 25 bp, Homo sapien
caaggcattctccagtagctcaaag

SEQ ID NO: 4634192 - DNA, 25 bp, Homo sapien
tcgaagtcagactcatctttagtca

SEQ ID NO: 4634193 - DNA, 25 bp, Homo sapien
ccattcccgcactttgctggtcgaa

SEQ ID NO: 4634194 - DNA, 25 bp, Homo sapien
tttgctggtcgaagtcagactcatc

SEQ ID NO: 4634195 - DNA, 25 bp, Homo sapien
tcccgcactttgctggtcgaagtca

SEQ ID NO: 4634196 - DNA, 25 bp, Homo sapien
actggtatctcagacagacactctc

SEQ ID NO: 4634197 - DNA, 25 bp, Homo sapien
tggtatctcagacagacactctcct

SEQ ID NO: 4634198 - DNA, 25 bp, Homo sapien
aactggtatctcagacagacactct

SEQ ID NO: 4634199 - DNA, 25 bp, Homo sapien
ctggtatctcagacagacactctcc

SEQ ID NO: 4634200 - DNA, 25 bp, Homo sapien
tccccgaacagctgatcctgttaaa

SEQ ID NO: 4634201 - DNA, 25 bp, Homo sapien
tgttaaatgaacctctgctccatca

SEQ ID NO: 4634202 - DNA, 25 bp, Homo sapien
cacagtgaggagctcccgtcctatg

SEQ ID NO: 4634203 - DNA, 25 bp, Homo sapien
ccgtcctatgcattgttaagccaca

SEQ ID NO: 4634204 - DNA, 25 bp, Homo sapien
ccttctccgcagagtgaataacatt

SEQ ID NO: 4634205 - DNA, 25 bp, Homo sapien
gaaagaaaatgatccttctccgcag

SEQ ID NO: 4634206 - DNA, 25 bp, Homo sapien
tccttctccgcagagtgaataacat

SEQ ID NO: 4634207 - DNA, 25 bp, Homo sapien
agaaagaaaatgatccttctccgca

SEQ ID NO: 4634208 - DNA, 25 bp, Homo sapien
cagtgatgaagcctcaggccacgtc

SEQ ID NO: 4634209 - DNA, 25 bp, Homo sapien
tgcacttgcctttgaaggatttccc

SEQ ID NO: 4634210 - DNA, 25 bp, Homo sapien
cagagctggcaacagctgcacttgc

SEQ ID NO: 4634211 - DNA, 25 bp, Homo sapien
acgtcatcctatgggccccacagaa

SEQ ID NO: 4634212 - DNA, 25 bp, Homo sapien
tgaaattggacagtccaagtggctc

SEQ ID NO: 4634213 - DNA, 25 bp, Homo sapien
agcctcctctaagactatgcccaga

SEQ ID NO: 4634214 - DNA, 25 bp, Homo sapien
ccagaggactggccggcctttgaga

SEQ ID NO: 4634215 - DNA, 25 bp, Homo sapien
attgaaggggtagtgagcagccagc

SEQ ID NO: 4634216 - DNA, 25 bp, Homo sapien
tagatctggtaatagccctggggct

SEQ ID NO: 4634217 - DNA, 25 bp, Homo sapien
atctggtaatagccctggggcttca

SEQ ID NO: 4634218 - DNA, 25 bp, Homo sapien
ctagatctggtaatagccctggggc

SEQ ID NO: 4634219 - DNA, 25 bp, Homo sapien
gatctggtaatagccctggggcttc

SEQ ID NO: 4634220 - DNA, 25 bp, Homo sapien
aaggcacccctcctaagtgctagga

SEQ ID NO: 4634221 - DNA, 25 bp, Homo sapien
ctaagtgctaggacatgtagaaaac

SEQ ID NO: 4634222 - DNA, 25 bp, Homo sapien
tctgataagattccagccactttgt

SEQ ID NO: 4634223 - DNA, 25 bp, Homo sapien
ctcaaggcacccctcctaagtgcta

SEQ ID NO: 4634224 - DNA, 25 bp, Homo sapien
gaggcttggatcaccctggaccctt

SEQ ID NO: 4634225 - DNA, 25 bp, Homo sapien
gaagaggattacttcctcattatct

SEQ ID NO: 4634226 - DNA, 25 bp, Homo sapien
cctgaggcttggatcaccctggacc

SEQ ID NO: 4634227 - DNA, 25 bp, Homo sapien
ctctgaagaggattacttcctcatt

SEQ ID NO: 4634228 - DNA, 25 bp, Homo sapien
cagagaggagtactcagggtgttgc

SEQ ID NO: 4634229 - DNA, 25 bp, Homo sapien
tcagagaggagtactcagggtgttg

SEQ ID NO: 4634230 - DNA, 25 bp, Homo sapien
agaggagtactcagggtgttgcaag

SEQ ID NO: 4634231 - DNA, 25 bp, Homo sapien
tgattaggcagaggcattaatcaca

SEQ ID NO: 4634232 - DNA, 25 bp, Homo sapien
agtcttgactttgcccctagctgtg

SEQ ID NO: 4634233 - DNA, 25 bp, Homo sapien
tgtgtgatcgatgcaaatgacatgc

SEQ ID NO: 4634234 - DNA, 25 bp, Homo sapien
catctctggctagtacagcgatcaa

SEQ ID NO: 4634235 - DNA, 25 bp, Homo sapien
gttcacacacttgctttgggtcata

SEQ ID NO: 4634236 - DNA, 25 bp, Homo sapien
aactcaggctctcgtgccctgaggg

SEQ ID NO: 4634237 - DNA, 25 bp, Homo sapien
gagggggtcgtaggtctgttgggca

SEQ ID NO: 4634238 - DNA, 25 bp, Homo sapien
aaataactcaggctctcgtgccctg

SEQ ID NO: 4634239 - DNA, 25 bp, Homo sapien
aataactcaggctctcgtgccctga

SEQ ID NO: 4634240 - DNA, 25 bp, Homo sapien
ggggtgccatccctaaagaacaggc

SEQ ID NO: 4634241 - DNA, 25 bp, Homo sapien
caggggtgccatccctaaagaacag

SEQ ID NO: 4634242 - DNA, 25 bp, Homo sapien
catccctaaagaacaggcagctaca

SEQ ID NO: 4634243 - DNA, 25 bp, Homo sapien
ctccaggggtgccatccctaaagaa

SEQ ID NO: 4634244 - DNA, 25 bp, Homo sapien
caacgtcgtatcaaggttcacaagg

SEQ ID NO: 4634245 - DNA, 25 bp, Homo sapien
acgtgccaacgtcgtatcaaggttc

SEQ ID NO: 4634246 - DNA, 25 bp, Homo sapien
caaggttcacaagggtgacatctca

SEQ ID NO: 4634247 - DNA, 25 bp, Homo sapien
aggttcacaagggtgacatctcaca

SEQ ID NO: 4634248 - DNA, 25 bp, Homo sapien
agtggccctggtagatctgatgtgg

SEQ ID NO: 4634249 - DNA, 25 bp, Homo sapien
tctgatgtggtgagtgcgggccagc

SEQ ID NO: 4634250 - DNA, 25 bp, Homo sapien
cctctgcctgactgatcttcatcag

SEQ ID NO: 4634251 - DNA, 25 bp, Homo sapien
tgactgatcttcatcagtggccctg

SEQ ID NO: 4634252 - DNA, 25 bp, Homo sapien
cagaagaaaatcgtttttacagaca

SEQ ID NO: 4634253 - DNA, 25 bp, Homo sapien
tcccaaataggtgttttacagataa

SEQ ID NO: 4634254 - DNA, 25 bp, Homo sapien
atcccaaataggtgttttacagata

SEQ ID NO: 4634255 - DNA, 25 bp, Homo sapien
tctacagaagaaaatcgtttttaca

SEQ ID NO: 4634256 - DNA, 25 bp, Homo sapien
tcatgcaggtagaggagccagcaca

SEQ ID NO: 4634257 - DNA, 25 bp, Homo sapien
caggcttggtccctttgagcaggaa

SEQ ID NO: 4634258 - DNA, 25 bp, Homo sapien
tgtgcacacggattgggagctccca

SEQ ID NO: 4634259 - DNA, 25 bp, Homo sapien
gaggagtctcgtgcacacaagcaag

SEQ ID NO: 4634260 - DNA, 25 bp, Homo sapien
taagttcacagcaacggcttctggg

SEQ ID NO: 4634261 - DNA, 25 bp, Homo sapien
cccttttctggaggataactgctca

SEQ ID NO: 4634262 - DNA, 25 bp, Homo sapien
ccttttctggaggataactgctcat

SEQ ID NO: 4634263 - DNA, 25 bp, Homo sapien
aggagtccctggaggcactgtccgc

SEQ ID NO: 4634264 - DNA, 25 bp, Homo sapien
aaaccaggagtccctggaggcactg

SEQ ID NO: 4634265 - DNA, 25 bp, Homo sapien
ccaggagtccctggaggcactgtcc

SEQ ID NO: 4634266 - DNA, 25 bp, Homo sapien
aaccaggagtccctggaggcactgt

SEQ ID NO: 4634267 - DNA, 25 bp, Homo sapien
cttgggctgtgcaaggagatgaagc

SEQ ID NO: 4634268 - DNA, 25 bp, Homo sapien
gaagctgcaagggatagaagccttg

SEQ ID NO: 4634269 - DNA, 25 bp, Homo sapien
aactctactggtttgtttggcctca

SEQ ID NO: 4634270 - DNA, 25 bp, Homo sapien
tactggtttgtttggcctcaggcat

SEQ ID NO: 4634271 - DNA, 25 bp, Homo sapien
taggtgaccaactctactggtttgt

SEQ ID NO: 4634272 - DNA, 25 bp, Homo sapien
tcatcactctgcagtaggtgaccaa

SEQ ID NO: 4634273 - DNA, 25 bp, Homo sapien
tcaaattccccaaattctttacatc

SEQ ID NO: 4634274 - DNA, 25 bp, Homo sapien
attctttacatcctttaaggtctat

SEQ ID NO: 4634275 - DNA, 25 bp, Homo sapien
ctgcagagccccagtgcaagaaagt

SEQ ID NO: 4634276 - DNA, 25 bp, Homo sapien
tgcagagccccagtgcaagaaagtg

SEQ ID NO: 4634277 - DNA, 25 bp, Homo sapien
attccagagcggggactggacaaag

SEQ ID NO: 4634278 - DNA, 25 bp, Homo sapien
caaaattccagagcggggactggac

SEQ ID NO: 4634279 - DNA, 25 bp, Homo sapien
tgcaaaattccagagcggggactgg

SEQ ID NO: 4634280 - DNA, 25 bp, Homo sapien
aaattccagagcggggactggacaa

SEQ ID NO: 4634281 - DNA, 25 bp, Homo sapien
ggtgccccaccctgggtatgtcctg

SEQ ID NO: 4634282 - DNA, 25 bp, Homo sapien
caggcacagctgcactcggatggga

SEQ ID NO: 4634283 - DNA, 25 bp, Homo sapien
cttgtgtacactcggtagacccagg

SEQ ID NO: 4634284 - DNA, 25 bp, Homo sapien
tagacccaggcaggcaaaggtaggt

SEQ ID NO: 4634285 - DNA, 25 bp, Homo sapien
gacgtctaagctgatatccatggaa

SEQ ID NO: 4634286 - DNA, 25 bp, Homo sapien
agtagagttgcctgcgttctgggca

SEQ ID NO: 4634287 - DNA, 25 bp, Homo sapien
ggaatgtgtcttaatgacctctcta

SEQ ID NO: 4634288 - DNA, 25 bp, Homo sapien
gaagaagacttagaccctgagactc

SEQ ID NO: 4634289 - DNA, 25 bp, Homo sapien
ttggcacaggtgcagaaatataccc

SEQ ID NO: 4634290 - DNA, 25 bp, Homo sapien
ggccacatacggcattctgacaaat

SEQ ID NO: 4634291 - DNA, 25 bp, Homo sapien
ctcctcaaccctcttgtttttggct

SEQ ID NO: 4634292 - DNA, 25 bp, Homo sapien
aagggagttaacctctcacagggca

SEQ ID NO: 4634293 - DNA, 25 bp, Homo sapien
aaaaagtcaggtgaccgactagctg

SEQ ID NO: 4634294 - DNA, 25 bp, Homo sapien
cctgaagtcaggtacgtggagaaaa

SEQ ID NO: 4634295 - DNA, 25 bp, Homo sapien
gagaaaaagtcaggtgaccgactag

SEQ ID NO: 4634296 - DNA, 25 bp, Homo sapien
agtcaggtacgtggagaaaaagtca

SEQ ID NO: 4634297 - DNA, 25 bp, Homo sapien
gggtgtcagacccatcagcatttat

SEQ ID NO: 4634298 - DNA, 25 bp, Homo sapien
atcagcatttatcctggtgcaagtg

SEQ ID NO: 4634299 - DNA, 25 bp, Homo sapien
tatcctggtgcaagtgaattcttcc

SEQ ID NO: 4634300 - DNA, 25 bp, Homo sapien
tcaggaagcactatcaggggtgtca

SEQ ID NO: 4634301 - DNA, 25 bp, Homo sapien
tctccctcccttcgtgaattctgtg

SEQ ID NO: 4634302 - DNA, 25 bp, Homo sapien
ccttcgtgaattctgtgtggagtcc

SEQ ID NO: 4634303 - DNA, 25 bp, Homo sapien
gtgtagatgtaagccagctggtgcc

SEQ ID NO: 4634304 - DNA, 25 bp, Homo sapien
atcctttgcctcagtgtagatgtaa

SEQ ID NO: 4634305 - DNA, 25 bp, Homo sapien
cagcctgcgtgactctggctgtctt

SEQ ID NO: 4634306 - DNA, 25 bp, Homo sapien
catctgcctcgcaggaatctccctg

SEQ ID NO: 4634307 - DNA, 25 bp, Homo sapien
agcctgcgtgactctggctgtcttt

SEQ ID NO: 4634308 - DNA, 25 bp, Homo sapien
acaggagattgaagtgtgtattgca

SEQ ID NO: 4634309 - DNA, 25 bp, Homo sapien
aagatcacctttgcaagatcacttg

SEQ ID NO: 4634310 - DNA, 25 bp, Homo sapien
ttgcaagatcacttgcaaaacagga

SEQ ID NO: 4634311 - DNA, 25 bp, Homo sapien
caaaacaggaagttataaacaggag

SEQ ID NO: 4634312 - DNA, 25 bp, Homo sapien
gcgatcttgggtattacttgtcctc

SEQ ID NO: 4634313 - DNA, 25 bp, Homo sapien
ctgcgatcttgggtattacttgtcc

SEQ ID NO: 4634314 - DNA, 25 bp, Homo sapien
gatcttgggtattacttgtcctcac

SEQ ID NO: 4634315 - DNA, 25 bp, Homo sapien
cgatcttgggtattacttgtcctca

SEQ ID NO: 4634316 - DNA, 25 bp, Homo sapien
ccacactcgtgcaggtggtcatcca

SEQ ID NO: 4634317 - DNA, 25 bp, Homo sapien
gatgtacccacactcgtgcaggtgg

SEQ ID NO: 4634318 - DNA, 25 bp, Homo sapien
tcatcccacaggtagatgggaagag

SEQ ID NO: 4634319 - DNA, 25 bp, Homo sapien
agatgggaagagatgtacccacact

SEQ ID NO: 4634320 - DNA, 25 bp, Homo sapien
gcttttgctttaccaaaagcctgag

SEQ ID NO: 4634321 - DNA, 25 bp, Homo sapien
ttttgctttaccaaaagcctgagct

SEQ ID NO: 4634322 - DNA, 25 bp, Homo sapien
tggcttttgctttaccaaaagcctg

SEQ ID NO: 4634323 - DNA, 25 bp, Homo sapien
tttgctttaccaaaagcctgagctg

SEQ ID NO: 4634324 - DNA, 25 bp, Homo sapien
gtgactggggcgaggcccggctgtc

SEQ ID NO: 4634325 - DNA, 25 bp, Homo sapien
catgcttccgtgcttgtgtgcttgt

SEQ ID NO: 4634326 - DNA, 25 bp, Homo sapien
tgcctgcatgcttccgtgcttgtgt

SEQ ID NO: 4634327 - DNA, 25 bp, Homo sapien
ttgtgtgcttgtgtactgctgtccc

SEQ ID NO: 4634328 - DNA, 25 bp, Homo sapien
ctccctgcagtgaaaccctattagc

SEQ ID NO: 4634329 - DNA, 25 bp, Homo sapien
tgagtcccagtcctgatttattctc

SEQ ID NO: 4634330 - DNA, 25 bp, Homo sapien
cacactgagtcccagtcctgattta

SEQ ID NO: 4634331 - DNA, 25 bp, Homo sapien
tccctgcagtgaaaccctattagcc

SEQ ID NO: 4634332 - DNA, 25 bp, Homo sapien
gatgtttttatctgtctgctgctga

SEQ ID NO: 4634333 - DNA, 25 bp, Homo sapien
ctgaattcctctggggcctatcgcc

SEQ ID NO: 4634334 - DNA, 25 bp, Homo sapien
tgaagctggaacaggccttgatgtt

SEQ ID NO: 4634335 - DNA, 25 bp, Homo sapien
taaattccaggatctggtgtgaagc

SEQ ID NO: 4634336 - DNA, 25 bp, Homo sapien
cttcagtgtggccagttaaagggac

SEQ ID NO: 4634337 - DNA, 25 bp, Homo sapien
tataaagggcctgttgtgcaggcct

SEQ ID NO: 4634338 - DNA, 25 bp, Homo sapien
tggccagttaaagggacagtcctca

SEQ ID NO: 4634339 - DNA, 25 bp, Homo sapien
tctataaagggcctgttgtgcaggc

SEQ ID NO: 4634340 - DNA, 25 bp, Homo sapien
tccagaacacctcaggggacaaggg

SEQ ID NO: 4634341 - DNA, 25 bp, Homo sapien
gggacaagggcttcgtgaagtacat

SEQ ID NO: 4634342 - DNA, 25 bp, Homo sapien
tccgtttttactccagaacacctca

SEQ ID NO: 4634343 - DNA, 25 bp, Homo sapien
cgtttttactccagaacacctcagg

SEQ ID NO: 4634344 - DNA, 25 bp, Homo sapien
tcttgtccacatagggccacagtgt

SEQ ID NO: 4634345 - DNA, 25 bp, Homo sapien
tgactctagtgagcaggcatctctg

SEQ ID NO: 4634346 - DNA, 25 bp, Homo sapien
tacatggaaaattcagcaagggatg

SEQ ID NO: 4634347 - DNA, 25 bp, Homo sapien
cgttctgggctcctttggaacctct

SEQ ID NO: 4634348 - DNA, 25 bp, Homo sapien
tcccacgtgccagctagtggcagaa

SEQ ID NO: 4634349 - DNA, 25 bp, Homo sapien
cagctgacagcccatccttgtgggc

SEQ ID NO: 4634350 - DNA, 25 bp, Homo sapien
tagccaagagggtcagctcagcttc

SEQ ID NO: 4634351 - DNA, 25 bp, Homo sapien
gcttctaacacatggcagctgacag

SEQ ID NO: 4634352 - DNA, 25 bp, Homo sapien
tctggtgccatcacctgtagccaag

SEQ ID NO: 4634353 - DNA, 25 bp, Homo sapien
caacatctccaggtttgtgacttca

SEQ ID NO: 4634354 - DNA, 25 bp, Homo sapien
ggtggtgcaggtaagcattgtctct

SEQ ID NO: 4634355 - DNA, 25 bp, Homo sapien
tttccacaataccagcagcctgcgg

SEQ ID NO: 4634356 - DNA, 25 bp, Homo sapien
cctgcggaggagtaagaaaacatct

SEQ ID NO: 4634357 - DNA, 25 bp, Homo sapien
cagtggtgattagggtgataggagc

SEQ ID NO: 4634358 - DNA, 25 bp, Homo sapien
aatttgggacagtggtgattagggt

SEQ ID NO: 4634359 - DNA, 25 bp, Homo sapien
cgtagggcatgtagtgatagtggga

SEQ ID NO: 4634360 - DNA, 25 bp, Homo sapien
caataagtcaatggctggagcgtag

SEQ ID NO: 4634361 - DNA, 25 bp, Homo sapien
gaaacacaactcgagttgccctcca

SEQ ID NO: 4634362 - DNA, 25 bp, Homo sapien
cttgggatttcaaagcagcctgtga

SEQ ID NO: 4634363 - DNA, 25 bp, Homo sapien
cttcttgccaccaggtttagggttg

SEQ ID NO: 4634364 - DNA, 25 bp, Homo sapien
tgccaccaggtttagggttggccat

SEQ ID NO: 4634365 - DNA, 25 bp, Homo sapien
gggttcacatgagtgcgggaggaag

SEQ ID NO: 4634366 - DNA, 25 bp, Homo sapien
ggttcacatgagtgcgggaggaaga

SEQ ID NO: 4634367 - DNA, 25 bp, Homo sapien
gttcacatgagtgcgggaggaagag

SEQ ID NO: 4634368 - DNA, 25 bp, Homo sapien
tgggttcacatgagtgcgggaggaa

SEQ ID NO: 4634369 - DNA, 25 bp, Homo sapien
cttcatgtcaacaagccagacagtg

SEQ ID NO: 4634370 - DNA, 25 bp, Homo sapien
gcttcatgtcaacaagccagacagt

SEQ ID NO: 4634371 - DNA, 25 bp, Homo sapien
agcttcatgtcaacaagccagacag

SEQ ID NO: 4634372 - DNA, 25 bp, Homo sapien
ttcactgccagtgctgtccagtgag

SEQ ID NO: 4634373 - DNA, 25 bp, Homo sapien
ggaactcgtggctctggtgtggaga

SEQ ID NO: 4634374 - DNA, 25 bp, Homo sapien
gaactcgtggctctggtgtggagat

SEQ ID NO: 4634375 - DNA, 25 bp, Homo sapien
tggaactcgtggctctggtgtggag

SEQ ID NO: 4634376 - DNA, 25 bp, Homo sapien
ctggaactcgtggctctggtgtgga

SEQ ID NO: 4634377 - DNA, 25 bp, Homo sapien
tctttggcatggtgagaaattgtgt

SEQ ID NO: 4634378 - DNA, 25 bp, Homo sapien
tggcatggtgagaaattgtgtcaaa

SEQ ID NO: 4634379 - DNA, 25 bp, Homo sapien
agatttctttggcatggtgagaaat

SEQ ID NO: 4634380 - DNA, 25 bp, Homo sapien
gaaattgtgtcaaatgtagagctac

SEQ ID NO: 4634381 - DNA, 25 bp, Homo sapien
ttcagcttcatggtgcagatggttc

SEQ ID NO: 4634382 - DNA, 25 bp, Homo sapien
aatacggacgcgttctgagaaaggc

SEQ ID NO: 4634383 - DNA, 25 bp, Homo sapien
acatatggatgcacacagactcaca

SEQ ID NO: 4634384 - DNA, 25 bp, Homo sapien
cacactgaggctgtacggaatagcc

SEQ ID NO: 4634385 - DNA, 25 bp, Homo sapien
acacacgtgtgcctatgttcagaca

SEQ ID NO: 4634386 - DNA, 25 bp, Homo sapien
gaggagtagttattctcccctggac

SEQ ID NO: 4634387 - DNA, 25 bp, Homo sapien
tgcagaagggactcagatactggaa

SEQ ID NO: 4634388 - DNA, 25 bp, Homo sapien
gaccccagcttgattgtgcagaagg

SEQ ID NO: 4634389 - DNA, 25 bp, Homo sapien
gctgtgctgaggagtagttattctc

SEQ ID NO: 4634390 - DNA, 25 bp, Homo sapien
ctgaatccagatcgcactctgcctg

SEQ ID NO: 4634391 - DNA, 25 bp, Homo sapien
ttcctgttgctgaatccagatcgca

SEQ ID NO: 4634392 - DNA, 25 bp, Homo sapien
tcatctgtacactgactcagtggat

SEQ ID NO: 4634393 - DNA, 25 bp, Homo sapien
ggatccttcaaagcgaccttgactc

SEQ ID NO: 4634394 - DNA, 25 bp, Homo sapien
agaccgccgtgaagatttactaata

SEQ ID NO: 4634395 - DNA, 25 bp, Homo sapien
atgtctgcacatcagccagtgaaga

SEQ ID NO: 4634396 - DNA, 25 bp, Homo sapien
tgtctgcacatcagccagtgaagag

SEQ ID NO: 4634397 - DNA, 25 bp, Homo sapien
aatgtctgcacatcagccagtgaag

SEQ ID NO: 4634398 - DNA, 25 bp, Homo sapien
cttggtgtcagctgtttatttgcaa

SEQ ID NO: 4634399 - DNA, 25 bp, Homo sapien
cgatgaacagcgctcagtcaaaggc

SEQ ID NO: 4634400 - DNA, 25 bp, Homo sapien
cctgtggcctcagccgtgttgcttc

SEQ ID NO: 4634401 - DNA, 25 bp, Homo sapien
gctggactcgatgaacagcgctcag

SEQ ID NO: 4634402 - DNA, 25 bp, Homo sapien
tgtcttcctcgtttccagatgactg

SEQ ID NO: 4634403 - DNA, 25 bp, Homo sapien
tcttgcaattctagaggctgcaagt

SEQ ID NO: 4634404 - DNA, 25 bp, Homo sapien
cttgcaattctagaggctgcaagtc

SEQ ID NO: 4634405 - DNA, 25 bp, Homo sapien
tttcttgcaattctagaggctgcaa

SEQ ID NO: 4634406 - DNA, 25 bp, Homo sapien
ttcttgcaattctagaggctgcaag

SEQ ID NO: 4634407 - DNA, 25 bp, Homo sapien
gtgctttgaatgtggcactagaatc

SEQ ID NO: 4634408 - DNA, 25 bp, Homo sapien
ctgtgctttgaatgtggcactagaa

SEQ ID NO: 4634409 - DNA, 25 bp, Homo sapien
tggcccaggcgcctgttctgtgctt

SEQ ID NO: 4634410 - DNA, 25 bp, Homo sapien
tgtgctttgaatgtggcactagaat

SEQ ID NO: 4634411 - DNA, 25 bp, Homo sapien
acgaagggtccttcacaggaggatg

SEQ ID NO: 4634412 - DNA, 25 bp, Homo sapien
tcacgaagggtccttcacaggagga

SEQ ID NO: 4634413 - DNA, 25 bp, Homo sapien
cacgaagggtccttcacaggaggat

SEQ ID NO: 4634414 - DNA, 25 bp, Homo sapien
acaaagatgcttcccgttgtctatc

SEQ ID NO: 4634415 - DNA, 25 bp, Homo sapien
gttggaataacaaagatgcttcccg

SEQ ID NO: 4634416 - DNA, 25 bp, Homo sapien
tgttcacacggattatgggccatgg

SEQ ID NO: 4634417 - DNA, 25 bp, Homo sapien
cccgttgtctatctgttcacacgga

SEQ ID NO: 4634418 - DNA, 25 bp, Homo sapien
agggctggccgcaggtcccgcctcc

SEQ ID NO: 4634419 - DNA, 25 bp, Homo sapien
cggttcaggatcacgcttgggttct

SEQ ID NO: 4634420 - DNA, 25 bp, Homo sapien
ggctccggttcaggatcacgcttgg

SEQ ID NO: 4634421 - DNA, 25 bp, Homo sapien
caggatcacgcttgggttctggttc

SEQ ID NO: 4634422 - DNA, 25 bp, Homo sapien
tccggttcaggatcacgcttgggtt

SEQ ID NO: 4634423 - DNA, 25 bp, Homo sapien
tttgtcaacatccacgtgctgggcg

SEQ ID NO: 4634424 - DNA, 25 bp, Homo sapien
tccaaggtctcgagtgaggccaagt

SEQ ID NO: 4634425 - DNA, 25 bp, Homo sapien
tgtagcctaggactcgttcaaactg

SEQ ID NO: 4634426 - DNA, 25 bp, Homo sapien
gactctcttgaggttggaatcgcca

SEQ ID NO: 4634427 - DNA, 25 bp, Homo sapien
ctggtgttgttggccctctcaacca

SEQ ID NO: 4634428 - DNA, 25 bp, Homo sapien
tggtgttgttggccctctcaaccac

SEQ ID NO: 4634429 - DNA, 25 bp, Homo sapien
ctccaaatggcgtgtggcaggtgac

SEQ ID NO: 4634430 - DNA, 25 bp, Homo sapien
agatcccgggtgaacacagccgcag

SEQ ID NO: 4634431 - DNA, 25 bp, Homo sapien
ggtgaagtacatggccttgtccaga

SEQ ID NO: 4634432 - DNA, 25 bp, Homo sapien
caggtgacgatgttgtaggtgttta

SEQ ID NO: 4634433 - DNA, 25 bp, Homo sapien
tgatggtgaccgtctttacctctgt

SEQ ID NO: 4634434 - DNA, 25 bp, Homo sapien
tacctctgtgtaggccttaagccca

SEQ ID NO: 4634435 - DNA, 25 bp, Homo sapien
accttgatggtgaccgtctttacct

SEQ ID NO: 4634436 - DNA, 25 bp, Homo sapien
ctttacctctgtgtaggccttaagc

SEQ ID NO: 4634437 - DNA, 25 bp, Homo sapien
gactgtgactgggcctccctgacag

SEQ ID NO: 4634438 - DNA, 25 bp, Homo sapien
tgtgactgggcctccctgacagctg

SEQ ID NO: 4634439 - DNA, 25 bp, Homo sapien
ctggactgtgactgggcctccctga

SEQ ID NO: 4634440 - DNA, 25 bp, Homo sapien
tggactgtgactgggcctccctgac

SEQ ID NO: 4634441 - DNA, 25 bp, Homo sapien
ttggcaagcattcgtcaaggtggtt

SEQ ID NO: 4634442 - DNA, 25 bp, Homo sapien
caagcattcgtcaaggtggttgtgg

SEQ ID NO: 4634443 - DNA, 25 bp, Homo sapien
cattcgtcaaggtggttgtggaatt

SEQ ID NO: 4634444 - DNA, 25 bp, Homo sapien
acagcttggcaagcattcgtcaagg

SEQ ID NO: 4634445 - DNA, 25 bp, Homo sapien
tcctaagatttcatggaagcaactc

SEQ ID NO: 4634446 - DNA, 25 bp, Homo sapien
tcctccagagactcctaagatttca

SEQ ID NO: 4634447 - DNA, 25 bp, Homo sapien
taggtagaactctgagcctggtccc

SEQ ID NO: 4634448 - DNA, 25 bp, Homo sapien
gggttagataggtagaactctgagc

SEQ ID NO: 4634449 - DNA, 25 bp, Homo sapien
tctgagttgagtcgatccactaaac

SEQ ID NO: 4634450 - DNA, 25 bp, Homo sapien
accatcaagcgcacccatgggaaag

SEQ ID NO: 4634451 - DNA, 25 bp, Homo sapien
gggccgagatttagtatccacctag

SEQ ID NO: 4634452 - DNA, 25 bp, Homo sapien
gaagggcaagcaactaaaacagcca

SEQ ID NO: 4634453 - DNA, 25 bp, Homo sapien
ctgatgtcacagcatgtgtcagtac

SEQ ID NO: 4634454 - DNA, 25 bp, Homo sapien
aacggagttaattcatggccgggtg

SEQ ID NO: 4634455 - DNA, 25 bp, Homo sapien
tgttttcagggttcactgatgtcac

SEQ ID NO: 4634456 - DNA, 25 bp, Homo sapien
taacaattactcctctatcccctgg

SEQ ID NO: 4634457 - DNA, 25 bp, Homo sapien
cttcagaggctaagagagcatgcgc

SEQ ID NO: 4634458 - DNA, 25 bp, Homo sapien
aaactgaagggctggatgtagaccc

SEQ ID NO: 4634459 - DNA, 25 bp, Homo sapien
tgaagaaggtagtagaacatcccac

SEQ ID NO: 4634460 - DNA, 25 bp, Homo sapien
gaagtgaactttccgcctgtaagcc

SEQ ID NO: 4634461 - DNA, 25 bp, Homo sapien
gcagcgagacccctgggcatttgag

SEQ ID NO: 4634462 - DNA, 25 bp, Homo sapien
caattctagggctattgctggcaca

SEQ ID NO: 4634463 - DNA, 25 bp, Homo sapien
tgcgaggctgcggtcatcatcttca

SEQ ID NO: 4634464 - DNA, 25 bp, Homo sapien
ccttcaccccaaggatgcgaggctg

SEQ ID NO: 4634465 - DNA, 25 bp, Homo sapien
cccaagtgtggtccgtgccggccag

SEQ ID NO: 4634466 - DNA, 25 bp, Homo sapien
tgtccccgagccttgggatccgcga

SEQ ID NO: 4634467 - DNA, 25 bp, Homo sapien
atctcggcgctcgacgagtgcggct

SEQ ID NO: 4634468 - DNA, 25 bp, Homo sapien
ggagcaagccatgccgcgcttgtct

SEQ ID NO: 4634469 - DNA, 25 bp, Homo sapien
cagtgcaggtgtcatctctgtagct

SEQ ID NO: 4634470 - DNA, 25 bp, Homo sapien
tcagtgcaggtgtcatctctgtagc

SEQ ID NO: 4634471 - DNA, 25 bp, Homo sapien
actcagtgcaggtgtcatctctgta

SEQ ID NO: 4634472 - DNA, 25 bp, Homo sapien
tgactcagtgcaggtgtcatctctg

SEQ ID NO: 4634473 - DNA, 25 bp, Homo sapien
gatgttctgcccagttctcgtcaca

SEQ ID NO: 4634474 - DNA, 25 bp, Homo sapien
ccctggtgggcaacgcgttggcaaa

SEQ ID NO: 4634475 - DNA, 25 bp, Homo sapien
cttggagcaagggtaccacgtgcag

SEQ ID NO: 4634476 - DNA, 25 bp, Homo sapien
ccagttctcgtcacagcactgaaaa

SEQ ID NO: 4634477 - DNA, 25 bp, Homo sapien
gattaattccatgggactctctgcc

SEQ ID NO: 4634478 - DNA, 25 bp, Homo sapien
gcgctgaccaccttgtgggcacaga

SEQ ID NO: 4634479 - DNA, 25 bp, Homo sapien
tgggcacagaagaaacggttcccac

SEQ ID NO: 4634480 - DNA, 25 bp, Homo sapien
tgctcattgagcagggcgctgacca

SEQ ID NO: 4634481 - DNA, 25 bp, Homo sapien
aagcaagtgtgggagtcaggctccc

SEQ ID NO: 4634482 - DNA, 25 bp, Homo sapien
tattgtgtccctatgtcccaggtac

SEQ ID NO: 4634483 - DNA, 25 bp, Homo sapien
catgtgccactgatcgtctttgccg

SEQ ID NO: 4634484 - DNA, 25 bp, Homo sapien
ttttggtcctaacatgatcactctg

SEQ ID NO: 4634485 - DNA, 25 bp, Homo sapien
gtacaagtgccatttaactgcctgg

SEQ ID NO: 4634486 - DNA, 25 bp, Homo sapien
tgtccaccgagctggtacaagtgcc

SEQ ID NO: 4634487 - DNA, 25 bp, Homo sapien
taactgcctggtcctgcaaaatggc

SEQ ID NO: 4634488 - DNA, 25 bp, Homo sapien
gagctccatgtccaccgagctggta

SEQ ID NO: 4634489 - DNA, 25 bp, Homo sapien
tccccagcaggtaagaggtatcatc

SEQ ID NO: 4634490 - DNA, 25 bp, Homo sapien
gataatgccaaagcagttccccagc

SEQ ID NO: 4634491 - DNA, 25 bp, Homo sapien
cagttccccagcaggtaagaggtat

SEQ ID NO: 4634492 - DNA, 25 bp, Homo sapien
atgataatgccaaagcagttcccca

SEQ ID NO: 4634493 - DNA, 25 bp, Homo sapien
tcagttctgacatctgtgctttctc

SEQ ID NO: 4634494 - DNA, 25 bp, Homo sapien
aggtcaccccttgcctcagttctga

SEQ ID NO: 4634495 - DNA, 25 bp, Homo sapien
tgcagctcaggtcaccccttgcctc

SEQ ID NO: 4634496 - DNA, 25 bp, Homo sapien
agagcccttggctgagacctcagca

SEQ ID NO: 4634497 - DNA, 25 bp, Homo sapien
catgaccttattagctgtggcccca

SEQ ID NO: 4634498 - DNA, 25 bp, Homo sapien
tgtggccccaaaggtgattccatag

SEQ ID NO: 4634499 - DNA, 25 bp, Homo sapien
gattccataggaccatcggttactg

SEQ ID NO: 4634500 - DNA, 25 bp, Homo sapien
gggctggtagccttctgagaacaaa

SEQ ID NO: 4634501 - DNA, 25 bp, Homo sapien
tctaggtgacaagacccatttgacg

SEQ ID NO: 4634502 - DNA, 25 bp, Homo sapien
agacaacatctgcaacaaatctagg

SEQ ID NO: 4634503 - DNA, 25 bp, Homo sapien
caacaaatctaggtgacaagaccca

SEQ ID NO: 4634504 - DNA, 25 bp, Homo sapien
gacaagacccatttgacgtcaatgt

SEQ ID NO: 4634505 - DNA, 25 bp, Homo sapien
gggacaggccgacttcaatgcctcc

SEQ ID NO: 4634506 - DNA, 25 bp, Homo sapien
cagctggaattccgacgagaggcag

SEQ ID NO: 4634507 - DNA, 25 bp, Homo sapien
aggccgacttcaatgcctccaatca

SEQ ID NO: 4634508 - DNA, 25 bp, Homo sapien
aattccgacgagaggcaggcaaaga

SEQ ID NO: 4634509 - DNA, 25 bp, Homo sapien
cagatcagagtagcagaagcccaag

SEQ ID NO: 4634510 - DNA, 25 bp, Homo sapien
agagtagcagaagcccaagatggag

SEQ ID NO: 4634511 - DNA, 25 bp, Homo sapien
gagtagcagaagcccaagatggagc

SEQ ID NO: 4634512 - DNA, 25 bp, Homo sapien
tggcagcaccgatgaaaagccttga

SEQ ID NO: 4634513 - DNA, 25 bp, Homo sapien
gccacagatcaggtacagtgtccac

SEQ ID NO: 4634514 - DNA, 25 bp, Homo sapien
cactactaggctgacaggtgcacta

SEQ ID NO: 4634515 - DNA, 25 bp, Homo sapien
tgtgggtgcacaaaagcatacagag

SEQ ID NO: 4634516 - DNA, 25 bp, Homo sapien
tgcccaaggtgctgatcgattccca

SEQ ID NO: 4634517 - DNA, 25 bp, Homo sapien
tctctcctgggcaaacgtctgtcag

SEQ ID NO: 4634518 - DNA, 25 bp, Homo sapien
ccagggttggcaagggatttatcca

SEQ ID NO: 4634519 - DNA, 25 bp, Homo sapien
tatccaagtcacacatgggcatggg

SEQ ID NO: 4634520 - DNA, 25 bp, Homo sapien
atggacatctctccccagtcggtca

SEQ ID NO: 4634521 - DNA, 25 bp, Homo sapien
tccatggacatctctccccagtcgg

SEQ ID NO: 4634522 - DNA, 25 bp, Homo sapien
catggacatctctccccagtcggtc

SEQ ID NO: 4634523 - DNA, 25 bp, Homo sapien
cctccatggacatctctccccagtc

SEQ ID NO: 4634524 - DNA, 25 bp, Homo sapien
gtgaaacttgaataatggtgacagc

SEQ ID NO: 4634525 - DNA, 25 bp, Homo sapien
ctgtgaaacttgaataatggtgaca

SEQ ID NO: 4634526 - DNA, 25 bp, Homo sapien
gaaacttgaataatggtgacagcaa

SEQ ID NO: 4634527 - DNA, 25 bp, Homo sapien
aacttgaataatggtgacagcaaac

SEQ ID NO: 4634528 - DNA, 25 bp, Homo sapien
catggtgataggactgaaaacccca

SEQ ID NO: 4634529 - DNA, 25 bp, Homo sapien
tacaaatggaagcatcacgaacgac

SEQ ID NO: 4634530 - DNA, 25 bp, Homo sapien
gaaaacacctgtctgtgaatgcaca

SEQ ID NO: 4634531 - DNA, 25 bp, Homo sapien
gaatgcacaccttgatgaacatggg

SEQ ID NO: 4634532 - DNA, 25 bp, Homo sapien
tatctcgtccatcttcttagcactg

SEQ ID NO: 4634533 - DNA, 25 bp, Homo sapien
tccagaacattctgaagctcggtta

SEQ ID NO: 4634534 - DNA, 25 bp, Homo sapien
tgcactatctcgtccatcttcttag

SEQ ID NO: 4634535 - DNA, 25 bp, Homo sapien
agaacattctgaagctcggttaaca

SEQ ID NO: 4634536 - DNA, 25 bp, Homo sapien
gttgatggctcatctggtaacgttt

SEQ ID NO: 4634537 - DNA, 25 bp, Homo sapien
tcattgcaggttctattcgcttttc

SEQ ID NO: 4634538 - DNA, 25 bp, Homo sapien
agttgatggctcatctggtaacgtt

SEQ ID NO: 4634539 - DNA, 25 bp, Homo sapien
gctgcttacgttgccgctggagcta

SEQ ID NO: 4634540 - DNA, 25 bp, Homo sapien
ctgcttacgttgccgctggagctac

SEQ ID NO: 4634541 - DNA, 25 bp, Homo sapien
tctgctgcttacgttgccgctggag

SEQ ID NO: 4634542 - DNA, 25 bp, Homo sapien
gctagccatttcttctgcggacatt

SEQ ID NO: 4634543 - DNA, 25 bp, Homo sapien
catcgctagccatttcttctgcgga

SEQ ID NO: 4634544 - DNA, 25 bp, Homo sapien
aggaatattcccacacgatgcattt

SEQ ID NO: 4634545 - DNA, 25 bp, Homo sapien
gtacttcatccgcacagaattagaa

SEQ ID NO: 4634546 - DNA, 25 bp, Homo sapien
ttggtgcccgcagcgaggatgaggc

SEQ ID NO: 4634547 - DNA, 25 bp, Homo sapien
actctgaggacagtgactcctcagc

SEQ ID NO: 4634548 - DNA, 25 bp, Homo sapien
gaggacagtgactcctcagctttct

SEQ ID NO: 4634549 - DNA, 25 bp, Homo sapien
cgcatccccgctcctactctgagga

SEQ ID NO: 4634550 - DNA, 25 bp, Homo sapien
gctgggttgtgtaacccatccagtc

SEQ ID NO: 4634551 - DNA, 25 bp, Homo sapien
gccgctgggttgtgtaacccatcca

SEQ ID NO: 4634552 - DNA, 25 bp, Homo sapien
ctgggttgtgtaacccatccagtca

SEQ ID NO: 4634553 - DNA, 25 bp, Homo sapien
caggccgctgggttgtgtaacccat

SEQ ID NO: 4634554 - DNA, 25 bp, Homo sapien
gtcataatggacttcttgcaactag

SEQ ID NO: 4634555 - DNA, 25 bp, Homo sapien
gatttgatttcctcgtgttacccca

SEQ ID NO: 4634556 - DNA, 25 bp, Homo sapien
ggcatcagttgtggaccgtctcaga

SEQ ID NO: 4634557 - DNA, 25 bp, Homo sapien
gagaaagtcgtcttatcccatagat

SEQ ID NO: 4634558 - DNA, 25 bp, Homo sapien
tgtgaacaactcgtgccacagcatt

SEQ ID NO: 4634559 - DNA, 25 bp, Homo sapien
tgtgtttaatgtgaacaactcgtgc

SEQ ID NO: 4634560 - DNA, 25 bp, Homo sapien
ttaatgtgaacaactcgtgccacag

SEQ ID NO: 4634561 - DNA, 25 bp, Homo sapien
tgaacaactcgtgccacagcattta

SEQ ID NO: 4634562 - DNA, 25 bp, Homo sapien
tcccatgagaccggaaccatcacaa

SEQ ID NO: 4634563 - DNA, 25 bp, Homo sapien
ccatgagaccggaaccatcacaact

SEQ ID NO: 4634564 - DNA, 25 bp, Homo sapien
ctcccatgagaccggaaccatcaca

SEQ ID NO: 4634565 - DNA, 25 bp, Homo sapien
atgagaccggaaccatcacaactgc

SEQ ID NO: 4634566 - DNA, 25 bp, Homo sapien
tttttgggctgtggttcagctctcc

SEQ ID NO: 4634567 - DNA, 25 bp, Homo sapien
cagctctcccttgatctttaaatgc

SEQ ID NO: 4634568 - DNA, 25 bp, Homo sapien
gctctcccttgatctttaaatgctt

SEQ ID NO: 4634569 - DNA, 25 bp, Homo sapien
tcagctctcccttgatctttaaatg

SEQ ID NO: 4634570 - DNA, 25 bp, Homo sapien
agaggtttgggatgaaagtgggcat

SEQ ID NO: 4634571 - DNA, 25 bp, Homo sapien
atttgataggcataaagtgttacaa

SEQ ID NO: 4634572 - DNA, 25 bp, Homo sapien
ccaatttgataggcataaagtgtta

SEQ ID NO: 4634573 - DNA, 25 bp, Homo sapien
caatttgataggcataaagtgttac

SEQ ID NO: 4634574 - DNA, 25 bp, Homo sapien
ttgataggcataaagtgttacaaaa

SEQ ID NO: 4634575 - DNA, 25 bp, Homo sapien
cgccgccatatagagcacccaccac

SEQ ID NO: 4634576 - DNA, 25 bp, Homo sapien
cgccgcgtcgctgcggccactggcc

SEQ ID NO: 4634577 - DNA, 25 bp, Homo sapien
cgcgccgcgtcgctgcggccactgg

SEQ ID NO: 4634578 - DNA, 25 bp, Homo sapien
tccgcgccgcgtcgctgcggccact

SEQ ID NO: 4634579 - DNA, 25 bp, Homo sapien
cttgcagaagaccccacgggggcgg

SEQ ID NO: 4634580 - DNA, 25 bp, Homo sapien
tgcagaagaccccacgggggcgggc

SEQ ID NO: 4634581 - DNA, 25 bp, Homo sapien
tctcaatatgaacctgcaggcggac

SEQ ID NO: 4634582 - DNA, 25 bp, Homo sapien
gatctcaatatgaacctgcaggcgg

SEQ ID NO: 4634583 - DNA, 25 bp, Homo sapien
atctcaatatgaacctgcaggcgga

SEQ ID NO: 4634584 - DNA, 25 bp, Homo sapien
ctcaatatgaacctgcaggcggacg

SEQ ID NO: 4634585 - DNA, 25 bp, Homo sapien
cctttttcagtaggcgaagagttct

SEQ ID NO: 4634586 - DNA, 25 bp, Homo sapien
tccacctaggtagacaggttcttta

SEQ ID NO: 4634587 - DNA, 25 bp, Homo sapien
ggttctttactggagcttcttagag

SEQ ID NO: 4634588 - DNA, 25 bp, Homo sapien
ccctgtgtcggttttacatccgaat

SEQ ID NO: 4634589 - DNA, 25 bp, Homo sapien
ccctcaggcgggaagggatgcactc

SEQ ID NO: 4634590 - DNA, 25 bp, Homo sapien
aagggatgcactcctgggattccgg

SEQ ID NO: 4634591 - DNA, 25 bp, Homo sapien
ggaggagcgggtcgggagtcagggc

SEQ ID NO: 4634592 - DNA, 25 bp, Homo sapien
ggagcgggtcgggagtcagggccag

SEQ ID NO: 4634593 - DNA, 25 bp, Homo sapien
aggtgcactcgcgatccagaggccg

SEQ ID NO: 4634594 - DNA, 25 bp, Homo sapien
gctgagctaggtggtctgccctgca

SEQ ID NO: 4634595 - DNA, 25 bp, Homo sapien
cagagggccactggctagaggtccc

SEQ ID NO: 4634596 - DNA, 25 bp, Homo sapien
agcttcagcagacgaggagccgagc

SEQ ID NO: 4634597 - DNA, 25 bp, Homo sapien
gcgctggcgatcccgaggccgacca

SEQ ID NO: 4634598 - DNA, 25 bp, Homo sapien
cgctggcgatcccgaggccgaccag

SEQ ID NO: 4634599 - DNA, 25 bp, Homo sapien
agccagacaaggcaaccgaagttca

SEQ ID NO: 4634600 - DNA, 25 bp, Homo sapien
aggcaaccgaagttcatcctgtctg

SEQ ID NO: 4634601 - DNA, 25 bp, Homo sapien
gacaaggcaaccgaagttcatcctg

SEQ ID NO: 4634602 - DNA, 25 bp, Homo sapien
cctgcgcgccggaggccgacaagcc

SEQ ID NO: 4634603 - DNA, 25 bp, Homo sapien
ctgctgcttctccgacgtcagggcg

SEQ ID NO: 4634604 - DNA, 25 bp, Homo sapien
tccgacgtcagggcgccgccaggat

SEQ ID NO: 4634605 - DNA, 25 bp, Homo sapien
tcagggcgccgccaggatgacaggt

SEQ ID NO: 4634606 - DNA, 25 bp, Homo sapien
agatgtggtttccagccccaggtcc

SEQ ID NO: 4634607 - DNA, 25 bp, Homo sapien
cgcctgcgccgggtcgggttgctgc

SEQ ID NO: 4634608 - DNA, 25 bp, Homo sapien
cgccgggtcgggttgctgcagcggt

SEQ ID NO: 4634609 - DNA, 25 bp, Homo sapien
cctgcgccgggtcgggttgctgcag

SEQ ID NO: 4634610 - DNA, 25 bp, Homo sapien
tgccgcctgcgccgggtcgggttgc

SEQ ID NO: 4634611 - DNA, 25 bp, Homo sapien
ccagggagggcaatatccacgagac

SEQ ID NO: 4634612 - DNA, 25 bp, Homo sapien
gtttaccaacaagaagaggagcagg

SEQ ID NO: 4634613 - DNA, 25 bp, Homo sapien
cacaaaatagttaaggcaatccctc

SEQ ID NO: 4634614 - DNA, 25 bp, Homo sapien
ttgaattacacaccaagaccaagtg

SEQ ID NO: 4634615 - DNA, 25 bp, Homo sapien
agatgctttcccttcgacagtgcga

SEQ ID NO: 4634616 - DNA, 25 bp, Homo sapien
cagtgcgatgctgtacaatgctaca

SEQ ID NO: 4634617 - DNA, 25 bp, Homo sapien
tacaatgctacagcaacagtgccca

SEQ ID NO: 4634618 - DNA, 25 bp, Homo sapien
tctcattgtagagatgctttccctt

SEQ ID NO: 4634619 - DNA, 25 bp, Homo sapien
ctccgtgcgctggctttacttctct

SEQ ID NO: 4634620 - DNA, 25 bp, Homo sapien
tgtgtttcccgaaccacaagggaga

SEQ ID NO: 4634621 - DNA, 25 bp, Homo sapien
tacttctcttcgtctcttggtcagc

SEQ ID NO: 4634622 - DNA, 25 bp, Homo sapien
tcttcgtctcttggtcagctgaatt

SEQ ID NO: 4634623 - DNA, 25 bp, Homo sapien
tcagcctgctcagcgggcctggctt

SEQ ID NO: 4634624 - DNA, 25 bp, Homo sapien
agccacatcatcaccgcgctcagcc

SEQ ID NO: 4634625 - DNA, 25 bp, Homo sapien
gccacatcatcaccgcgctcagcct

SEQ ID NO: 4634626 - DNA, 25 bp, Homo sapien
ctggctttctgtaccagcacacttt

SEQ ID NO: 4634627 - DNA, 25 bp, Homo sapien
gctgtcttcagctgggggcgcatgc

SEQ ID NO: 4634628 - DNA, 25 bp, Homo sapien
agagggcagattgctgtcttcagct

SEQ ID NO: 4634629 - DNA, 25 bp, Homo sapien
gctgggggcgcatgcccctgtggca

SEQ ID NO: 4634630 - DNA, 25 bp, Homo sapien
gagggcagattgctgtcttcagctg

SEQ ID NO: 4634631 - DNA, 25 bp, Homo sapien
cccagaaagatacccgaaacaatct

SEQ ID NO: 4634632 - DNA, 25 bp, Homo sapien
gacttgtccaacagctccggaacct

SEQ ID NO: 4634633 - DNA, 25 bp, Homo sapien
tagcatggggaataagagacttgtc

SEQ ID NO: 4634634 - DNA, 25 bp, Homo sapien
ctgggagttcaacagtgtggtttgt

SEQ ID NO: 4634635 - DNA, 25 bp, Homo sapien
caggcccagtcgaattgggtgtgta

SEQ ID NO: 4634636 - DNA, 25 bp, Homo sapien
gaaattaagtgccaggcccagtcga

SEQ ID NO: 4634637 - DNA, 25 bp, Homo sapien
aagtgccaggcccagtcgaattggg

SEQ ID NO: 4634638 - DNA, 25 bp, Homo sapien
aattaagtgccaggcccagtcgaat

SEQ ID NO: 4634639 - DNA, 25 bp, Homo sapien
ggagagtttagaatcccgtagcaaa

SEQ ID NO: 4634640 - DNA, 25 bp, Homo sapien
gagtttagaatcccgtagcaaaaga

SEQ ID NO: 4634641 - DNA, 25 bp, Homo sapien
tgcatggtgggagtgctgtctttat

SEQ ID NO: 4634642 - DNA, 25 bp, Homo sapien
ctgcatggtgggagtgctgtcttta

SEQ ID NO: 4634643 - DNA, 25 bp, Homo sapien
tcactgcatggtgggagtgctgtct

SEQ ID NO: 4634644 - DNA, 25 bp, Homo sapien
ttgtcaccacagctactggcctctt

SEQ ID NO: 4634645 - DNA, 25 bp, Homo sapien
gcctcttccaggctacaatctgcaa

SEQ ID NO: 4634646 - DNA, 25 bp, Homo sapien
gtgtctctccaacatatccacctgg

SEQ ID NO: 4634647 - DNA, 25 bp, Homo sapien
tatccacctggtgtccattgtcacc

SEQ ID NO: 4634648 - DNA, 25 bp, Homo sapien
tgaaagacatactcaaaatccctgc

SEQ ID NO: 4634649 - DNA, 25 bp, Homo sapien
gaatctcattctcatgatcgtcctt

SEQ ID NO: 4634650 - DNA, 25 bp, Homo sapien
cagctctgaaagacatactcaaaat

SEQ ID NO: 4634651 - DNA, 25 bp, Homo sapien
catgatcgtcctttgaaacgctctg

SEQ ID NO: 4634652 - DNA, 25 bp, Homo sapien
tcagattaagttcagacccgttcac

SEQ ID NO: 4634653 - DNA, 25 bp, Homo sapien
gattaagttcagacccgttcaccat

SEQ ID NO: 4634654 - DNA, 25 bp, Homo sapien
ctctcagattaagttcagacccgtt

SEQ ID NO: 4634655 - DNA, 25 bp, Homo sapien
cagattaagttcagacccgttcacc

SEQ ID NO: 4634656 - DNA, 25 bp, Homo sapien
gcaggaccatcaacaaagacatgca

SEQ ID NO: 4634657 - DNA, 25 bp, Homo sapien
aattgtgggcaggaccatcaacaaa

SEQ ID NO: 4634658 - DNA, 25 bp, Homo sapien
tgggcaggaccatcaacaaagacat

SEQ ID NO: 4634659 - DNA, 25 bp, Homo sapien
agatgaaaattgtgggcaggaccat

SEQ ID NO: 4634660 - DNA, 25 bp, Homo sapien
aggattctcagcaacaccaggtaca

SEQ ID NO: 4634661 - DNA, 25 bp, Homo sapien
gattctcagcaacaccaggtacaaa

SEQ ID NO: 4634662 - DNA, 25 bp, Homo sapien
ctcagcaacaccaggtacaaatcat

SEQ ID NO: 4634663 - DNA, 25 bp, Homo sapien
ttctcagcaacaccaggtacaaatc

SEQ ID NO: 4634664 - DNA, 25 bp, Homo sapien
tactccagtctgggtgacagagtga

SEQ ID NO: 4634665 - DNA, 25 bp, Homo sapien
cgagatcacaccagtgtactccagt

SEQ ID NO: 4634666 - DNA, 25 bp, Homo sapien
ctccagtctgggtgacagagtgaga

SEQ ID NO: 4634667 - DNA, 25 bp, Homo sapien
ccagtctgggtgacagagtgagacc

SEQ ID NO: 4634668 - DNA, 25 bp, Homo sapien
tctttccgggattgctccaatttta

SEQ ID NO: 4634669 - DNA, 25 bp, Homo sapien
tgaaacgcttcacgagtcctccttg

SEQ ID NO: 4634670 - DNA, 25 bp, Homo sapien
tagtatacatgttgccgaaatgagc

SEQ ID NO: 4634671 - DNA, 25 bp, Homo sapien
gggccatgcgaatctttccgggatt

SEQ ID NO: 4634672 - DNA, 25 bp, Homo sapien
ttttattggaatggtgcgccctgga

SEQ ID NO: 4634673 - DNA, 25 bp, Homo sapien
gatgtttacttagggctggcgttca

SEQ ID NO: 4634674 - DNA, 25 bp, Homo sapien
cattctgtttgcactcgggtgtgtc

SEQ ID NO: 4634675 - DNA, 25 bp, Homo sapien
tgaagagcaccggaaacaaacagtc

SEQ ID NO: 4634676 - DNA, 25 bp, Homo sapien
aaggagattgctgggtcggcagtaa

SEQ ID NO: 4634677 - DNA, 25 bp, Homo sapien
cagtgccagcgattggctcagggat

SEQ ID NO: 4634678 - DNA, 25 bp, Homo sapien
actccacccctaggtgcttgataca

SEQ ID NO: 4634679 - DNA, 25 bp, Homo sapien
cctgacccaattgagtccaggaaga

SEQ ID NO: 4634680 - DNA, 25 bp, Homo sapien
tgaaatcaaaaaagagctctcgact

SEQ ID NO: 4634681 - DNA, 25 bp, Homo sapien
cagaccagttcacaagtcctcaggc

SEQ ID NO: 4634682 - DNA, 25 bp, Homo sapien
tttttggtgcagaggagatgaaatg

SEQ ID NO: 4634683 - DNA, 25 bp, Homo sapien
aggagatgaaatgcgcttgcccagc

SEQ ID NO: 4634684 - DNA, 25 bp, Homo sapien
tcgagaagtcttctgctgtggaact

SEQ ID NO: 4634685 - DNA, 25 bp, Homo sapien
ggaacttgtcatgagctcaaaagct

SEQ ID NO: 4634686 - DNA, 25 bp, Homo sapien
tacatccgtcgagaagtcttctgct

SEQ ID NO: 4634687 - DNA, 25 bp, Homo sapien
gatgaacaatcaatacatccgtcga

SEQ ID NO: 4634688 - DNA, 25 bp, Homo sapien
taaaagcaagcactgtcttcttatc

SEQ ID NO: 4634689 - DNA, 25 bp, Homo sapien
gagatgccttagatgttcctggagc

SEQ ID NO: 4634690 - DNA, 25 bp, Homo sapien
caccttcctcgcagttaaaagcaag

SEQ ID NO: 4634691 - DNA, 25 bp, Homo sapien
ttgtacatcaggaaaatgagatgcc

SEQ ID NO: 4634692 - DNA, 25 bp, Homo sapien
ctgcagatagagaatgcatccacta

SEQ ID NO: 4634693 - DNA, 25 bp, Homo sapien
atagagaatgcatccactaggaggg

SEQ ID NO: 4634694 - DNA, 25 bp, Homo sapien
gatagagaatgcatccactaggagg

SEQ ID NO: 4634695 - DNA, 25 bp, Homo sapien
cagatagagaatgcatccactagga

SEQ ID NO: 4634696 - DNA, 25 bp, Homo sapien
tcatctccacttcatggctaagcaa

SEQ ID NO: 4634697 - DNA, 25 bp, Homo sapien
ggctccgagcaagtgaagggctttc

SEQ ID NO: 4634698 - DNA, 25 bp, Homo sapien
tggctaagcaaaggggctccgagca

SEQ ID NO: 4634699 - DNA, 25 bp, Homo sapien
aagtgaagggctttcttgctcaaag

SEQ ID NO: 4634700 - DNA, 25 bp, Homo sapien
ctaagtgatgtaagggtgaaactca

SEQ ID NO: 4634701 - DNA, 25 bp, Homo sapien
cactggacgtggtccagcactgggt

SEQ ID NO: 4634702 - DNA, 25 bp, Homo sapien
tttgctaaaggcttcactggacgtg

SEQ ID NO: 4634703 - DNA, 25 bp, Homo sapien
tgatgtaagggtgaaactcatcacc

SEQ ID NO: 4634704 - DNA, 25 bp, Homo sapien
gttcttgcacctgctgaagttcaga

SEQ ID NO: 4634705 - DNA, 25 bp, Homo sapien
acctgctgaagttcagattcaccag

SEQ ID NO: 4634706 - DNA, 25 bp, Homo sapien
agttttcagcaaaacaagcagtgag

SEQ ID NO: 4634707 - DNA, 25 bp, Homo sapien
gttttcagcaaaacaagcagtgagg

SEQ ID NO: 4634708 - DNA, 25 bp, Homo sapien
gagtgtgccgttcttccagatgcct

SEQ ID NO: 4634709 - DNA, 25 bp, Homo sapien
cagatgcctaactgcgtcctccggg

SEQ ID NO: 4634710 - DNA, 25 bp, Homo sapien
cgttcttccagatgcctaactgcgt

SEQ ID NO: 4634711 - DNA, 25 bp, Homo sapien
cttcccgagggtgccgagtgtgccg

SEQ ID NO: 4634712 - DNA, 25 bp, Homo sapien
tagagaactcagcagaccatgatat

SEQ ID NO: 4634713 - DNA, 25 bp, Homo sapien
gggtcaattcctgctccaactggta

SEQ ID NO: 4634714 - DNA, 25 bp, Homo sapien
tgctccaactggtagagaactcagc

SEQ ID NO: 4634715 - DNA, 25 bp, Homo sapien
gaactcagcagaccatgatatgtca

SEQ ID NO: 4634716 - DNA, 25 bp, Homo sapien
cccagcatcactgacgtcctgccag

SEQ ID NO: 4634717 - DNA, 25 bp, Homo sapien
ccagcatcactgacgtcctgccagt

SEQ ID NO: 4634718 - DNA, 25 bp, Homo sapien
tcactgacgtcctgccagtccttgg

SEQ ID NO: 4634719 - DNA, 25 bp, Homo sapien
gcatcactgacgtcctgccagtcct

SEQ ID NO: 4634720 - DNA, 25 bp, Homo sapien
cagagtctcctcagactctggtagc

SEQ ID NO: 4634721 - DNA, 25 bp, Homo sapien
caggcggcttcactatgtctgtgtc

SEQ ID NO: 4634722 - DNA, 25 bp, Homo sapien
cggtcttgttactcttttgcacaga

SEQ ID NO: 4634723 - DNA, 25 bp, Homo sapien
tctgtgtcagaattgactagcagca

SEQ ID NO: 4634724 - DNA, 25 bp, Homo sapien
cacagacagcggctgttgcctccat

SEQ ID NO: 4634725 - DNA, 25 bp, Homo sapien
taagcagggccaagcctccacagac

SEQ ID NO: 4634726 - DNA, 25 bp, Homo sapien
aagcagggccaagcctccacagaca

SEQ ID NO: 4634727 - DNA, 25 bp, Homo sapien
agacagcggctgttgcctccatacc

SEQ ID NO: 4634728 - DNA, 25 bp, Homo sapien
tactatggcccaaaagctccagcag

SEQ ID NO: 4634729 - DNA, 25 bp, Homo sapien
tatggtcattgatatggatgggagc

SEQ ID NO: 4634730 - DNA, 25 bp, Homo sapien
cctcgtataggaagggtcccagtgc

SEQ ID NO: 4634731 - DNA, 25 bp, Homo sapien
catctgggcctcagatatggtcatt

SEQ ID NO: 4634732 - DNA, 25 bp, Homo sapien
gcaggtgccaaccagggttcctgca

SEQ ID NO: 4634733 - DNA, 25 bp, Homo sapien
ggagacaatacaaaaccaacttgcg

SEQ ID NO: 4634734 - DNA, 25 bp, Homo sapien
gcagccaaccaggagacaatacaaa

SEQ ID NO: 4634735 - DNA, 25 bp, Homo sapien
caaaaccaacttgcgcaggtgccaa

SEQ ID NO: 4634736 - DNA, 25 bp, Homo sapien
ctttacaacgatcatcgaaaataaa

SEQ ID NO: 4634737 - DNA, 25 bp, Homo sapien
ttacaacgatcatcgaaaataaaat

SEQ ID NO: 4634738 - DNA, 25 bp, Homo sapien
aacgatcatcgaaaataaaatccaa

SEQ ID NO: 4634739 - DNA, 25 bp, Homo sapien
acaacgatcatcgaaaataaaatcc

SEQ ID NO: 4634740 - DNA, 25 bp, Homo sapien
caaatgaacaggtggctaaaggcaa

SEQ ID NO: 4634741 - DNA, 25 bp, Homo sapien
cacagggagcctataggagaattcc

SEQ ID NO: 4634742 - DNA, 25 bp, Homo sapien
tcacctataagagagatcattggct

SEQ ID NO: 4634743 - DNA, 25 bp, Homo sapien
cccggaactgagatgatggaaaacc

SEQ ID NO: 4634744 - DNA, 25 bp, Homo sapien
cagtaagatctggacagtgccagac

SEQ ID NO: 4634745 - DNA, 25 bp, Homo sapien
tgtgcctgggactgaggttatactc

SEQ ID NO: 4634746 - DNA, 25 bp, Homo sapien
gtgcagggctatcggcagtaagatc

SEQ ID NO: 4634747 - DNA, 25 bp, Homo sapien
gatctggagaatctgttaaagagcc

SEQ ID NO: 4634748 - DNA, 25 bp, Homo sapien
ctgccaaagcagttcttcacaaata

SEQ ID NO: 4634749 - DNA, 25 bp, Homo sapien
taaaagtgagataaagacttttcca

SEQ ID NO: 4634750 - DNA, 25 bp, Homo sapien
aataaaagctgacttgtctcacaag

SEQ ID NO: 4634751 - DNA, 25 bp, Homo sapien
aagctgacttgtctcacaagaaatc

SEQ ID NO: 4634752 - DNA, 25 bp, Homo sapien
taaataatatgcctctagcaagaag

SEQ ID NO: 4634753 - DNA, 25 bp, Homo sapien
ataattacactgcaagaaactcaag

SEQ ID NO: 4634754 - DNA, 25 bp, Homo sapien
tgaacaaagtacctaattctggcca

SEQ ID NO: 4634755 - DNA, 25 bp, Homo sapien
tgttttagtattcccaaacagacaa

SEQ ID NO: 4634756 - DNA, 25 bp, Homo sapien
gagtttgagtggatcttgggacctc

SEQ ID NO: 4634757 - DNA, 25 bp, Homo sapien
caaatcaaggtagcacagcaagttc

SEQ ID NO: 4634758 - DNA, 25 bp, Homo sapien
ccaggaggaacttttagtcaaagca

SEQ ID NO: 4634759 - DNA, 25 bp, Homo sapien
taaaatgcccgtgccttgggataga

SEQ ID NO: 4634760 - DNA, 25 bp, Homo sapien
cataaacttcccatggagtatatga

SEQ ID NO: 4634761 - DNA, 25 bp, Homo sapien
gcatttgcctcagacacataaactt

SEQ ID NO: 4634762 - DNA, 25 bp, Homo sapien
tatgagtaagctctgacagctccat

SEQ ID NO: 4634763 - DNA, 25 bp, Homo sapien
tcccatggagtatatgagtaagctc

SEQ ID NO: 4634764 - DNA, 25 bp, Homo sapien
tctcatcaaaaagcctcaacacttc

SEQ ID NO: 4634765 - DNA, 25 bp, Homo sapien
tctctcatcaaaaagcctcaacact

SEQ ID NO: 4634766 - DNA, 25 bp, Homo sapien
ctctcatcaaaaagcctcaacactt

SEQ ID NO: 4634767 - DNA, 25 bp, Homo sapien
tcaatagtcgtaacctggaagtgct

SEQ ID NO: 4634768 - DNA, 25 bp, Homo sapien
ggagctggaggtcaatagtcgtaac

SEQ ID NO: 4634769 - DNA, 25 bp, Homo sapien
caggctcatataagggtggttggaa

SEQ ID NO: 4634770 - DNA, 25 bp, Homo sapien
tggagcaggctcatataagggtggt

SEQ ID NO: 4634771 - DNA, 25 bp, Homo sapien
tgccataagctactggcaaagtgca

SEQ ID NO: 4634772 - DNA, 25 bp, Homo sapien
tactggcaaagtgcaaccaccaggg

SEQ ID NO: 4634773 - DNA, 25 bp, Homo sapien
taagctactggcaaagtgcaaccac

SEQ ID NO: 4634774 - DNA, 25 bp, Homo sapien
gggttgccataagctactggcaaag

SEQ ID NO: 4634775 - DNA, 25 bp, Homo sapien
gactcgaaggttgtctaccaaacag

SEQ ID NO: 4634776 - DNA, 25 bp, Homo sapien
caaggaattttagtcccatgggcca

SEQ ID NO: 4634777 - DNA, 25 bp, Homo sapien
ggtatacccacagtatgaaggcaga

SEQ ID NO: 4634778 - DNA, 25 bp, Homo sapien
gaatggtactaagtggccaaggaac

SEQ ID NO: 4634779 - DNA, 25 bp, Homo sapien
tgtggcccaagaaaactcaccaaga

SEQ ID NO: 4634780 - DNA, 25 bp, Homo sapien
aactgtggcccaagaaaactcacca

SEQ ID NO: 4634781 - DNA, 25 bp, Homo sapien
taactgtggcccaagaaaactcacc

SEQ ID NO: 4634782 - DNA, 25 bp, Homo sapien
tggcccaagaaaactcaccaagatc

SEQ ID NO: 4634783 - DNA, 25 bp, Homo sapien
ttttatgtcggtgcggaactctttc

SEQ ID NO: 4634784 - DNA, 25 bp, Homo sapien
atgtcggtgcggaactctttctcag

SEQ ID NO: 4634785 - DNA, 25 bp, Homo sapien
tatgtcggtgcggaactctttctca

SEQ ID NO: 4634786 - DNA, 25 bp, Homo sapien
ttatgtcggtgcggaactctttctc

SEQ ID NO: 4634787 - DNA, 25 bp, Homo sapien
ttaaaaatcactgtccacagacttc

SEQ ID NO: 4634788 - DNA, 25 bp, Homo sapien
ggggcacatgggacgcaggtccctc

SEQ ID NO: 4634789 - DNA, 25 bp, Homo sapien
tctgctacaagcttgactgccatcg

SEQ ID NO: 4634790 - DNA, 25 bp, Homo sapien
tccctctgctacaagcttgactgcc

SEQ ID NO: 4634791 - DNA, 25 bp, Homo sapien
gctacaagcttgactgccatcggaa

SEQ ID NO: 4634792 - DNA, 25 bp, Homo sapien
acttggtgggtgaattcttgtggca

SEQ ID NO: 4634793 - DNA, 25 bp, Homo sapien
tgaacacgatcagaaccaaagagaa

SEQ ID NO: 4634794 - DNA, 25 bp, Homo sapien
gcatgtggagagtgctgatgaacac

SEQ ID NO: 4634795 - DNA, 25 bp, Homo sapien
caggaacgggaaaagtcatggttgt

SEQ ID NO: 4634796 - DNA, 25 bp, Homo sapien
tgtgatctgctatcaaacaaggtag

SEQ ID NO: 4634797 - DNA, 25 bp, Homo sapien
tgtaaagcaggaccgctctggaacc

SEQ ID NO: 4634798 - DNA, 25 bp, Homo sapien
cacacggaaaggcaaggaaggttag

SEQ ID NO: 4634799 - DNA, 25 bp, Homo sapien
tctggaaccagggtcttgtgatctg

SEQ ID NO: 4634800 - DNA, 25 bp, Homo sapien
gatcagtgttgcaggcattgtagac

SEQ ID NO: 4634801 - DNA, 25 bp, Homo sapien
cctctgatcagtgttgcaggcattg

SEQ ID NO: 4634802 - DNA, 25 bp, Homo sapien
cagtgttgcaggcattgtagacgtg

SEQ ID NO: 4634803 - DNA, 25 bp, Homo sapien
tgttgcaggcattgtagacgtgata

SEQ ID NO: 4634804 - DNA, 25 bp, Homo sapien
gaagccaggcatctcactgttctgc

SEQ ID NO: 4634805 - DNA, 25 bp, Homo sapien
gaaaatgtgttctgggtgtacggaa

SEQ ID NO: 4634806 - DNA, 25 bp, Homo sapien
gaaaaagtgagagtcccatggaatg

SEQ ID NO: 4634807 - DNA, 25 bp, Homo sapien
tgtacggaagggctaactgtctgaa

SEQ ID NO: 4634808 - DNA, 25 bp, Homo sapien
tcagcactggtcataaattccgtgg

SEQ ID NO: 4634809 - DNA, 25 bp, Homo sapien
agcactggtcataaattccgtggtc

SEQ ID NO: 4634810 - DNA, 25 bp, Homo sapien
cagcactggtcataaattccgtggt

SEQ ID NO: 4634811 - DNA, 25 bp, Homo sapien
tgtaccatgttttcaactgctgatg

SEQ ID NO: 4634812 - DNA, 25 bp, Homo sapien
ccatgttttcaactgctgatggtca

SEQ ID NO: 4634813 - DNA, 25 bp, Homo sapien
cagtgaacatagatgagcatgtatc

SEQ ID NO: 4634814 - DNA, 25 bp, Homo sapien
tgcagtgaacatagatgagcatgta

SEQ ID NO: 4634815 - DNA, 25 bp, Homo sapien
tgatgtgaccggtgcatgtcttcag

SEQ ID NO: 4634816 - DNA, 25 bp, Homo sapien
tgatgactgatgtgatgatgtgacc

SEQ ID NO: 4634817 - DNA, 25 bp, Homo sapien
tgtcttcagtgaactgtcggaaagc

SEQ ID NO: 4634818 - DNA, 25 bp, Homo sapien
tcagcatggttgtctcaatttgatg

SEQ ID NO: 4634819 - DNA, 25 bp, Homo sapien
tcatatagtaagttttactcattct

SEQ ID NO: 4634820 - DNA, 25 bp, Homo sapien
aaacaacctgattacactctgtatt

SEQ ID NO: 4634821 - DNA, 25 bp, Homo sapien
caaacaacctgattacactctgtat

SEQ ID NO: 4634822 - DNA, 25 bp, Homo sapien
tgttgccatcagggtgcacacaagc

SEQ ID NO: 4634823 - DNA, 25 bp, Homo sapien
ctgttgccatcagggtgcacacaag

SEQ ID NO: 4634824 - DNA, 25 bp, Homo sapien
gccatcagggtgcacacaagcaggt

SEQ ID NO: 4634825 - DNA, 25 bp, Homo sapien
gctgttgccatcagggtgcacacaa

SEQ ID NO: 4634826 - DNA, 25 bp, Homo sapien
tctctccctaggtgtgatagcagtg

SEQ ID NO: 4634827 - DNA, 25 bp, Homo sapien
gagaaagttacgcaaagaaaatgag

SEQ ID NO: 4634828 - DNA, 25 bp, Homo sapien
cactgccatagccatacgcatctat

SEQ ID NO: 4634829 - DNA, 25 bp, Homo sapien
aaaaaagaagagtgctaggacagct

SEQ ID NO: 4634830 - DNA, 25 bp, Homo sapien
tagacttcacgtatgcttagggcag

SEQ ID NO: 4634831 - DNA, 25 bp, Homo sapien
tagacaggtctatccaacagtaaga

SEQ ID NO: 4634832 - DNA, 25 bp, Homo sapien
cttagggcagtaaccagaggaacgt

SEQ ID NO: 4634833 - DNA, 25 bp, Homo sapien
cttggagccacctgtattgagtgac

SEQ ID NO: 4634834 - DNA, 25 bp, Homo sapien
taattctgaggtatagttgccatga

SEQ ID NO: 4634835 - DNA, 25 bp, Homo sapien
tcaatagcacgcagaattcagattc

SEQ ID NO: 4634836 - DNA, 25 bp, Homo sapien
taactgccgcatagcttaagaaaaa

SEQ ID NO: 4634837 - DNA, 25 bp, Homo sapien
tacagaatgcttatgggaaaatacc

SEQ ID NO: 4634838 - DNA, 25 bp, Homo sapien
cagaagtttgatgttttggaaccag

SEQ ID NO: 4634839 - DNA, 25 bp, Homo sapien
gaagtttgatgttttggaaccagcc

SEQ ID NO: 4634840 - DNA, 25 bp, Homo sapien
actgcagaagtttgatgttttggaa

SEQ ID NO: 4634841 - DNA, 25 bp, Homo sapien
ttgatgttttggaaccagccttctg

SEQ ID NO: 4634842 - DNA, 25 bp, Homo sapien
ttccctgagtgagagctgccttcct

SEQ ID NO: 4634843 - DNA, 25 bp, Homo sapien
tggctctttccctgagtgagagctg

SEQ ID NO: 4634844 - DNA, 25 bp, Homo sapien
tctttccctgagtgagagctgcctt

SEQ ID NO: 4634845 - DNA, 25 bp, Homo sapien
ttggctctttccctgagtgagagct

SEQ ID NO: 4634846 - DNA, 25 bp, Homo sapien
cataaggaaaatctcggggtgactc

SEQ ID NO: 4634847 - DNA, 25 bp, Homo sapien
ctttggaagaccatgactgaggtct

SEQ ID NO: 4634848 - DNA, 25 bp, Homo sapien
gactgaggtcttgaatcctcttcat

SEQ ID NO: 4634849 - DNA, 25 bp, Homo sapien
aatctcggggtgactcttggtcttt

SEQ ID NO: 4634850 - DNA, 25 bp, Homo sapien
caccgttcccaccacgttagcgagg

SEQ ID NO: 4634851 - DNA, 25 bp, Homo sapien
ttcccaccacgttagcgaggaagga

SEQ ID NO: 4634852 - DNA, 25 bp, Homo sapien
tgctagtcttccccaccggaaaggc

SEQ ID NO: 4634853 - DNA, 25 bp, Homo sapien
aatgcatctttctctgcggcgtcgc

SEQ ID NO: 4634854 - DNA, 25 bp, Homo sapien
tctctggtttcaacttccaagtctt

SEQ ID NO: 4634855 - DNA, 25 bp, Homo sapien
tcaccaaccatgttccttagtagga

SEQ ID NO: 4634856 - DNA, 25 bp, Homo sapien
ctatgtctcataggaaaccatatca

SEQ ID NO: 4634857 - DNA, 25 bp, Homo sapien
tgaaaaatatgtcatcacacattct

SEQ ID NO: 4634858 - DNA, 25 bp, Homo sapien
aattctaaaaaggtctgtactgctt

SEQ ID NO: 4634859 - DNA, 25 bp, Homo sapien
aaaaaggtctgtactgcttcatcat

SEQ ID NO: 4634860 - DNA, 25 bp, Homo sapien
atggactttatccatcaagcctgtt

SEQ ID NO: 4634861 - DNA, 25 bp, Homo sapien
aatttcacatatcacacgttttcca

SEQ ID NO: 4634862 - DNA, 25 bp, Homo sapien
taagagcattactaccagatgcatg

SEQ ID NO: 4634863 - DNA, 25 bp, Homo sapien
tttgacaaactgtgcaagatcacca

SEQ ID NO: 4634864 - DNA, 25 bp, Homo sapien
cacaagtgatagttactctgggaca

SEQ ID NO: 4634865 - DNA, 25 bp, Homo sapien
gccatgcagagcaatggaattctac

SEQ ID NO: 4634866 - DNA, 25 bp, Homo sapien
gagatcaccatttgatgctaaaatt

SEQ ID NO: 4634867 - DNA, 25 bp, Homo sapien
tggtcctccgctcggagagatcacc

SEQ ID NO: 4634868 - DNA, 25 bp, Homo sapien
tgacctgcttcatttgggagcaggg

SEQ ID NO: 4634869 - DNA, 25 bp, Homo sapien
tgggagcagggctagttcactcttc

SEQ ID NO: 4634870 - DNA, 25 bp, Homo sapien
gaaactccaaaactgagctgaagtc

SEQ ID NO: 4634871 - DNA, 25 bp, Homo sapien
aggaaactccaaaactgagctgaag

SEQ ID NO: 4634872 - DNA, 25 bp, Homo sapien
ggaaactccaaaactgagctgaagt

SEQ ID NO: 4634873 - DNA, 25 bp, Homo sapien
gctggagccgtggcctcacagtcct

SEQ ID NO: 4634874 - DNA, 25 bp, Homo sapien
tattcttattcccaatgctggcaat

SEQ ID NO: 4634875 - DNA, 25 bp, Homo sapien
cattcagtattcttattcccaatgc

SEQ ID NO: 4634876 - DNA, 25 bp, Homo sapien
gctggcaatattgttcattgatgga

SEQ ID NO: 4634877 - DNA, 25 bp, Homo sapien
tattcccaatgctggcaatattgtt

SEQ ID NO: 4634878 - DNA, 25 bp, Homo sapien
agtcgtgtaaagtctctgggcccca

SEQ ID NO: 4634879 - DNA, 25 bp, Homo sapien
tcggttgtcctcaggagtcgtgtaa

SEQ ID NO: 4634880 - DNA, 25 bp, Homo sapien
gatctgaatttcttcggaccccgtc

SEQ ID NO: 4634881 - DNA, 25 bp, Homo sapien
tgtttcctagtccagggagtgccgg

SEQ ID NO: 4634882 - DNA, 25 bp, Homo sapien
caacggcatacgatttgaggacatg

SEQ ID NO: 4634883 - DNA, 25 bp, Homo sapien
catacgatttgaggacatgtccggg

SEQ ID NO: 4634884 - DNA, 25 bp, Homo sapien
gaggatcaacggcatacgatttgag

SEQ ID NO: 4634885 - DNA, 25 bp, Homo sapien
ccggggatgacagggatgagaggcc

SEQ ID NO: 4634886 - DNA, 25 bp, Homo sapien
tcataaatagcaggacctgaacaac

SEQ ID NO: 4634887 - DNA, 25 bp, Homo sapien
cataaatagcaggacctgaacaaca

SEQ ID NO: 4634888 - DNA, 25 bp, Homo sapien
ataaatagcaggacctgaacaacat

SEQ ID NO: 4634889 - DNA, 25 bp, Homo sapien
gctgtctggactgactcggtacctg

SEQ ID NO: 4634890 - DNA, 25 bp, Homo sapien
gcagcagctgtctggactgactcgg

SEQ ID NO: 4634891 - DNA, 25 bp, Homo sapien
cagcagctgtctggactgactcggt

SEQ ID NO: 4634892 - DNA, 25 bp, Homo sapien
cagctgtctggactgactcggtacc

SEQ ID NO: 4634893 - DNA, 25 bp, Homo sapien
tgtgtgagacttgccccagtttccc

SEQ ID NO: 4634894 - DNA, 25 bp, Homo sapien
agagagcagagtgcaccagaacctg

SEQ ID NO: 4634895 - DNA, 25 bp, Homo sapien
tgtccaaggtggatgagcactgtgt

SEQ ID NO: 4634896 - DNA, 25 bp, Homo sapien
tcagatttggcattggtcagagcaa

SEQ ID NO: 4634897 - DNA, 25 bp, Homo sapien
caatgtcatcgggtgagcggtcaag

SEQ ID NO: 4634898 - DNA, 25 bp, Homo sapien
gagacagacctcagtatttcagaag

SEQ ID NO: 4634899 - DNA, 25 bp, Homo sapien
taagtgatgggaactcgcagacagg

SEQ ID NO: 4634900 - DNA, 25 bp, Homo sapien
gagacaaaacttgagttgagccctg

SEQ ID NO: 4634901 - DNA, 25 bp, Homo sapien
ggggatctggcagcaaccgttcctc

SEQ ID NO: 4634902 - DNA, 25 bp, Homo sapien
gggatctggcagcaaccgttcctcc

SEQ ID NO: 4634903 - DNA, 25 bp, Homo sapien
tctgctagtgcttgtctttggttgc

SEQ ID NO: 4634904 - DNA, 25 bp, Homo sapien
taagatatcagtaatgttattcact

SEQ ID NO: 4634905 - DNA, 25 bp, Homo sapien
gtcatgatgtttacctctattctct

SEQ ID NO: 4634906 - DNA, 25 bp, Homo sapien
gctctttgagggtcatgatgtttac

SEQ ID NO: 4634907 - DNA, 25 bp, Homo sapien
ctttctgtccacaaacatctaagat

SEQ ID NO: 4634908 - DNA, 25 bp, Homo sapien
tcagcatcgggcttcgttctcccat

SEQ ID NO: 4634909 - DNA, 25 bp, Homo sapien
ctggcaaagcatgctcagcatcggg

SEQ ID NO: 4634910 - DNA, 25 bp, Homo sapien
ggcaaagcatgctcagcatcgggct

SEQ ID NO: 4634911 - DNA, 25 bp, Homo sapien
gctcagcatcgggcttcgttctccc

SEQ ID NO: 4634912 - DNA, 25 bp, Homo sapien
gggcaaagtgcaagacactggctga

SEQ ID NO: 4634913 - DNA, 25 bp, Homo sapien
ctgagagggcaaagtgcaagacact

SEQ ID NO: 4634914 - DNA, 25 bp, Homo sapien
gaacacactggggaaacaaacattc

SEQ ID NO: 4634915 - DNA, 25 bp, Homo sapien
acactggctgaaatatatgaacaca

SEQ ID NO: 4634916 - DNA, 25 bp, Homo sapien
ctacagccgtttctcacatgttggg

SEQ ID NO: 4634917 - DNA, 25 bp, Homo sapien
caccggaaggaaccaactctggaca

SEQ ID NO: 4634918 - DNA, 25 bp, Homo sapien
tcagggagaccacgaacccaccgga

SEQ ID NO: 4634919 - DNA, 25 bp, Homo sapien
tgcattcttgaagtcagggagacca

SEQ ID NO: 4634920 - DNA, 25 bp, Homo sapien
caggaaggtccacagctgcattctt

SEQ ID NO: 4634921 - DNA, 25 bp, Homo sapien
cactgcacttggtcggagtttcaca

SEQ ID NO: 4634922 - DNA, 25 bp, Homo sapien
actgcacttggtcggagtttcacat

SEQ ID NO: 4634923 - DNA, 25 bp, Homo sapien
tgcacttggtcggagtttcacattt

SEQ ID NO: 4634924 - DNA, 25 bp, Homo sapien
ccactgcacttggtcggagtttcac

SEQ ID NO: 4634925 - DNA, 25 bp, Homo sapien
acaaatcaaatcacgccacctgcga

SEQ ID NO: 4634926 - DNA, 25 bp, Homo sapien
gaggcttcggtgtatctgtgtatca

SEQ ID NO: 4634927 - DNA, 25 bp, Homo sapien
taaaattgatggcacatagtaaaaa

SEQ ID NO: 4634928 - DNA, 25 bp, Homo sapien
tcttggaaccaggattcttttggga

SEQ ID NO: 4634929 - DNA, 25 bp, Homo sapien
tcttcttaggcagactccaggtgct

SEQ ID NO: 4634930 - DNA, 25 bp, Homo sapien
ttcttaggcagactccaggtgctgt

SEQ ID NO: 4634931 - DNA, 25 bp, Homo sapien
gtcttcttaggcagactccaggtgc

SEQ ID NO: 4634932 - DNA, 25 bp, Homo sapien
caccggctagacccgcagtaatggc

SEQ ID NO: 4634933 - DNA, 25 bp, Homo sapien
aagatatccaacacccatggtgtgg

SEQ ID NO: 4634934 - DNA, 25 bp, Homo sapien
ggaagatatccaacacccatggtgt

SEQ ID NO: 4634935 - DNA, 25 bp, Homo sapien
gaggaagatatccaacacccatggt

SEQ ID NO: 4634936 - DNA, 25 bp, Homo sapien
gaagatatccaacacccatggtgtg

SEQ ID NO: 4634937 - DNA, 25 bp, Homo sapien
gagacttcccatcatagaaggctct

SEQ ID NO: 4634938 - DNA, 25 bp, Homo sapien
acttcccatcatagaaggctctcca

SEQ ID NO: 4634939 - DNA, 25 bp, Homo sapien
tgagacttcccatcatagaaggctc

SEQ ID NO: 4634940 - DNA, 25 bp, Homo sapien
gacttcccatcatagaaggctctcc

SEQ ID NO: 4634941 - DNA, 25 bp, Homo sapien
ctgctgggtaacgcccagtccctgg

SEQ ID NO: 4634942 - DNA, 25 bp, Homo sapien
tgccccctgctgggtaacgcccagt

SEQ ID NO: 4634943 - DNA, 25 bp, Homo sapien
gccccctgctgggtaacgcccagtc

SEQ ID NO: 4634944 - DNA, 25 bp, Homo sapien
ccctgctgggtaacgcccagtccct

SEQ ID NO: 4634945 - DNA, 25 bp, Homo sapien
gtgaaagcaggtccgaagtctcctg

SEQ ID NO: 4634946 - DNA, 25 bp, Homo sapien
gttgtgaaagcaggtccgaagtctc

SEQ ID NO: 4634947 - DNA, 25 bp, Homo sapien
caggtccgaagtctcctgcaggcct

SEQ ID NO: 4634948 - DNA, 25 bp, Homo sapien
ctgcagttgtgaaagcaggtccgaa

SEQ ID NO: 4634949 - DNA, 25 bp, Homo sapien
ctcctgctacccctcgccccagggt

SEQ ID NO: 4634950 - DNA, 25 bp, Homo sapien
gagttatcagtgtggagtcccgcag

SEQ ID NO: 4634951 - DNA, 25 bp, Homo sapien
gagtcacagtgagatggagttatca

SEQ ID NO: 4634952 - DNA, 25 bp, Homo sapien
gaggatgcttggcttgaggatccgg

SEQ ID NO: 4634953 - DNA, 25 bp, Homo sapien
gtggctgggaggcacttagggagga

SEQ ID NO: 4634954 - DNA, 25 bp, Homo sapien
taaaggcgcacgaggttctggcagt

SEQ ID NO: 4634955 - DNA, 25 bp, Homo sapien
tgccccagtgttggatgatccactt

SEQ ID NO: 4634956 - DNA, 25 bp, Homo sapien
tccgggcagctgtttcgagttctct

SEQ ID NO: 4634957 - DNA, 25 bp, Homo sapien
tgtcagttacccaggcgttagccac

SEQ ID NO: 4634958 - DNA, 25 bp, Homo sapien
ggctttctaaggaacatgtccacct

SEQ ID NO: 4634959 - DNA, 25 bp, Homo sapien
cctagacttctcactcttgtgaata

SEQ ID NO: 4634960 - DNA, 25 bp, Homo sapien
caagatgggattcctcgcggtgccc

SEQ ID NO: 4634961 - DNA, 25 bp, Homo sapien
gcatttgtccaactgccgtcatgag

SEQ ID NO: 4634962 - DNA, 25 bp, Homo sapien
accggatgtcttcggccagtgctga

SEQ ID NO: 4634963 - DNA, 25 bp, Homo sapien
gtggctagaggcaccggatgtcttc

SEQ ID NO: 4634964 - DNA, 25 bp, Homo sapien
gaggcaccggatgtcttcggccagt

SEQ ID NO: 4634965 - DNA, 25 bp, Homo sapien
ggtgatggtggctagaggcaccgga

SEQ ID NO: 4634966 - DNA, 25 bp, Homo sapien
ctacatagagtgaattttttcttgg

SEQ ID NO: 4634967 - DNA, 25 bp, Homo sapien
tctacatagagtgaattttttcttg

SEQ ID NO: 4634968 - DNA, 25 bp, Homo sapien
ctctacatagagtgaattttttctt

SEQ ID NO: 4634969 - DNA, 25 bp, Homo sapien
tctccgtgggtctctccattgctgg

SEQ ID NO: 4634970 - DNA, 25 bp, Homo sapien
cacatcccagaactcgcatcttggt

SEQ ID NO: 4634971 - DNA, 25 bp, Homo sapien
acgagatatctctgtgaggttcctg

SEQ ID NO: 4634972 - DNA, 25 bp, Homo sapien
ttcctgtgggaggtctccgtgggtc

SEQ ID NO: 4634973 - DNA, 25 bp, Homo sapien
tctgggatttacagttggcatcatt

SEQ ID NO: 4634974 - DNA, 25 bp, Homo sapien
gaagtgggctcttctggttgcaaca

SEQ ID NO: 4634975 - DNA, 25 bp, Homo sapien
tttcttaggaaagacgttagcatcc

SEQ ID NO: 4634976 - DNA, 25 bp, Homo sapien
tgtgcctggcgcagcattattttgc

SEQ ID NO: 4634977 - DNA, 25 bp, Homo sapien
tctctccacgtcttctctgggacat

SEQ ID NO: 4634978 - DNA, 25 bp, Homo sapien
gagctctttccacgtcttctctggg

SEQ ID NO: 4634979 - DNA, 25 bp, Homo sapien
gctctccacgtcttctctgggacag

SEQ ID NO: 4634980 - DNA, 25 bp, Homo sapien
ctctgagctgtctccacgtctcctc

SEQ ID NO: 4634981 - DNA, 25 bp, Homo sapien
tgtcttctccgggacagtctctgag

SEQ ID NO: 4634982 - DNA, 25 bp, Homo sapien
gcttgactgtgatttaacacctgaa

SEQ ID NO: 4634983 - DNA, 25 bp, Homo sapien
cactaggtaaataggtgcttgactg

SEQ ID NO: 4634984 - DNA, 25 bp, Homo sapien
gagctctttccacgtcttctccggg

SEQ ID NO: 4634985 - DNA, 25 bp, Homo sapien
aagagcagctgacaaaggggcccac

SEQ ID NO: 4634986 - DNA, 25 bp, Homo sapien
gaagagcagctgacaaaggggccca

SEQ ID NO: 4634987 - DNA, 25 bp, Homo sapien
tgcgtctccaatctccatccggaca

SEQ ID NO: 4634988 - DNA, 25 bp, Homo sapien
tatgatgctgcgtctccaatctcca

SEQ ID NO: 4634989 - DNA, 25 bp, Homo sapien
gtatatgatgctgcgtctccaatct

SEQ ID NO: 4634990 - DNA, 25 bp, Homo sapien
ctgtatatgatgctgcgtctccaat

SEQ ID NO: 4634991 - DNA, 25 bp, Homo sapien
gcgaacactagattcagcttctccc

SEQ ID NO: 4634992 - DNA, 25 bp, Homo sapien
tcactcactgcgaacactagattca

SEQ ID NO: 4634993 - DNA, 25 bp, Homo sapien
actcactgcgaacactagattcagc

SEQ ID NO: 4634994 - DNA, 25 bp, Homo sapien
ttctccccctgctgtttgactcatt

SEQ ID NO: 4634995 - DNA, 25 bp, Homo sapien
ctgattgagtgcagtatgcaacttg

SEQ ID NO: 4634996 - DNA, 25 bp, Homo sapien
gtctgattgagtgcagtatgcaact

SEQ ID NO: 4634997 - DNA, 25 bp, Homo sapien
tctgattgagtgcagtatgcaactt

SEQ ID NO: 4634998 - DNA, 25 bp, Homo sapien
tgattgagtgcagtatgcaacttgg

SEQ ID NO: 4634999 - DNA, 25 bp, Homo sapien
cttagaatatttaagtttgggatcg

SEQ ID NO: 4635000 - DNA, 25 bp, Homo sapien
gggatcgttggtgcttccatattta

SEQ ID NO: 4635001 - DNA, 25 bp, Homo sapien
atttaagtttgggatcgttggtgct

SEQ ID NO: 4635002 - DNA, 25 bp, Homo sapien
ttccatatttaaccagcagcttaga

SEQ ID NO: 4635003 - DNA, 25 bp, Homo sapien
tttccatcagcagcaatgctcctag

SEQ ID NO: 4635004 - DNA, 25 bp, Homo sapien
catcagcagcaatgctcctagcaag

SEQ ID NO: 4635005 - DNA, 25 bp, Homo sapien
aatgctcctagcaagaacatctttt

SEQ ID NO: 4635006 - DNA, 25 bp, Homo sapien
gcagcaatgctcctagcaagaacat

SEQ ID NO: 4635007 - DNA, 25 bp, Homo sapien
tttagcaaaaacatccaacaacaac

SEQ ID NO: 4635008 - DNA, 25 bp, Homo sapien
ttagcaaaaacatccaacaacaaca

SEQ ID NO: 4635009 - DNA, 25 bp, Homo sapien
ctttagcaaaaacatccaacaacaa

SEQ ID NO: 4635010 - DNA, 25 bp, Homo sapien
tagcaaaaacatccaacaacaacat

SEQ ID NO: 4635011 - DNA, 25 bp, Homo sapien
ggccacaatgttcttagtaacagca

SEQ ID NO: 4635012 - DNA, 25 bp, Homo sapien
gccacaatgttcttagtaacagcac

SEQ ID NO: 4635013 - DNA, 25 bp, Homo sapien
gcaacagtagcctctgcaatagtgg

SEQ ID NO: 4635014 - DNA, 25 bp, Homo sapien
acagtagcctctgcaatagtggcca

SEQ ID NO: 4635015 - DNA, 25 bp, Homo sapien
gcaacatcattagtaaccacagctt

SEQ ID NO: 4635016 - DNA, 25 bp, Homo sapien
gaccttactatcgatgccaattgaa

SEQ ID NO: 4635017 - DNA, 25 bp, Homo sapien
tgaacatcacccataactacaatgg

SEQ ID NO: 4635018 - DNA, 25 bp, Homo sapien
taactacaatggctccaggaacaat

SEQ ID NO: 4635019 - DNA, 25 bp, Homo sapien
cattatagggacttccagatccagc

SEQ ID NO: 4635020 - DNA, 25 bp, Homo sapien
cagtcccaacttgccgagatgcaga

SEQ ID NO: 4635021 - DNA, 25 bp, Homo sapien
gcccaataggcagcacagcatttgc

SEQ ID NO: 4635022 - DNA, 25 bp, Homo sapien
aataatggctactccgcccaatagg

SEQ ID NO: 4635023 - DNA, 25 bp, Homo sapien
cagcaacgcgagtcaagaagcgagc

SEQ ID NO: 4635024 - DNA, 25 bp, Homo sapien
gttcaggcgcgtcccggacactagg

SEQ ID NO: 4635025 - DNA, 25 bp, Homo sapien
ttgaggacggcccaggccactgaag

SEQ ID NO: 4635026 - DNA, 25 bp, Homo sapien
ggactcgcgccgcagctttctggag

SEQ ID NO: 4635027 - DNA, 25 bp, Homo sapien
cacacagcagccacgtgcggcggca

SEQ ID NO: 4635028 - DNA, 25 bp, Homo sapien
cacagcagccacgtgcggcggcaga

SEQ ID NO: 4635029 - DNA, 25 bp, Homo sapien
acacagcagccacgtgcggcggcag

SEQ ID NO: 4635030 - DNA, 25 bp, Homo sapien
ttcttcaggccacgtctggatgttc

SEQ ID NO: 4635031 - DNA, 25 bp, Homo sapien
cttcttcaggccacgtctggatgtt

SEQ ID NO: 4635032 - DNA, 25 bp, Homo sapien
cttcaggccacgtctggatgttcat

SEQ ID NO: 4635033 - DNA, 25 bp, Homo sapien
tcttcaggccacgtctggatgttca

SEQ ID NO: 4635034 - DNA, 25 bp, Homo sapien
aacaaaaccagcctctgaaagagca

SEQ ID NO: 4635035 - DNA, 25 bp, Homo sapien
tactagggagagatgcgtataaaag

SEQ ID NO: 4635036 - DNA, 25 bp, Homo sapien
acaaaaccagcctctgaaagagcaa

SEQ ID NO: 4635037 - DNA, 25 bp, Homo sapien
gggagagatgcgtataaaagtgctt

SEQ ID NO: 4635038 - DNA, 25 bp, Homo sapien
gcagaggccagtggagcatcacagt

SEQ ID NO: 4635039 - DNA, 25 bp, Homo sapien
ctaggcaaggcagaggccagtggag

SEQ ID NO: 4635040 - DNA, 25 bp, Homo sapien
taggcaaggcagaggccagtggagc

SEQ ID NO: 4635041 - DNA, 25 bp, Homo sapien
gaggccagtggagcatcacagtcag

SEQ ID NO: 4635042 - DNA, 25 bp, Homo sapien
gccgtggctgctggacagctctgag

SEQ ID NO: 4635043 - DNA, 25 bp, Homo sapien
atctcttcgattaagccttgaaaac

SEQ ID NO: 4635044 - DNA, 25 bp, Homo sapien
tgaaaaccccgggccgtggctgctg

SEQ ID NO: 4635045 - DNA, 25 bp, Homo sapien
catctcttcgattaagccttgaaaa

SEQ ID NO: 4635046 - DNA, 25 bp, Homo sapien
ctgcagcaatagaatctaaagtaac

SEQ ID NO: 4635047 - DNA, 25 bp, Homo sapien
cactgaggctctgcagcaatagaat

SEQ ID NO: 4635048 - DNA, 25 bp, Homo sapien
gaggctctgcagcaatagaatctaa

SEQ ID NO: 4635049 - DNA, 25 bp, Homo sapien
ttcagtgataatgaccatccactga

SEQ ID NO: 4635050 - DNA, 25 bp, Homo sapien
tgagatctttacactccactggaga

SEQ ID NO: 4635051 - DNA, 25 bp, Homo sapien
tgggctgcacaacagggaaactact

SEQ ID NO: 4635052 - DNA, 25 bp, Homo sapien
ttgactctttacactgggacagacg

SEQ ID NO: 4635053 - DNA, 25 bp, Homo sapien
gacagacgggatgcatagctacctt

SEQ ID NO: 4635054 - DNA, 25 bp, Homo sapien
gatccctgagcttcagtgaagactt

SEQ ID NO: 4635055 - DNA, 25 bp, Homo sapien
agatccctgagcttcagtgaagact

SEQ ID NO: 4635056 - DNA, 25 bp, Homo sapien
tcagatccctgagcttcagtgaaga

SEQ ID NO: 4635057 - DNA, 25 bp, Homo sapien
cagatccctgagcttcagtgaagac

SEQ ID NO: 4635058 - DNA, 25 bp, Homo sapien
gggctgtcctcaccggccaccagag

SEQ ID NO: 4635059 - DNA, 25 bp, Homo sapien
agtcctgtcactgaatgtgccgcag

SEQ ID NO: 4635060 - DNA, 25 bp, Homo sapien
ctgcctttggtacctcagggtgtcc

SEQ ID NO: 4635061 - DNA, 25 bp, Homo sapien
ctcagggtgtccttggataactggg

SEQ ID NO: 4635062 - DNA, 25 bp, Homo sapien
ctttcttgccaagaattgcatgaca

SEQ ID NO: 4635063 - DNA, 25 bp, Homo sapien
cagttgagctgtcacatgtatcact

SEQ ID NO: 4635064 - DNA, 25 bp, Homo sapien
ccaagaattgcatgacagttgagct

SEQ ID NO: 4635065 - DNA, 25 bp, Homo sapien
aattgcatgacagttgagctgtcac

SEQ ID NO: 4635066 - DNA, 25 bp, Homo sapien
acaaatgcattggagagttgagctt

SEQ ID NO: 4635067 - DNA, 25 bp, Homo sapien
caaatgcattggagagttgagcttg

SEQ ID NO: 4635068 - DNA, 25 bp, Homo sapien
aatgcattggagagttgagcttgca

SEQ ID NO: 4635069 - DNA, 25 bp, Homo sapien
gcattggagagttgagcttgcagaa

SEQ ID NO: 4635070 - DNA, 25 bp, Homo sapien
tctgtgtgcctttgttaaaggcagc

SEQ ID NO: 4635071 - DNA, 25 bp, Homo sapien
tgtgcactgctggatagcactagtc

SEQ ID NO: 4635072 - DNA, 25 bp, Homo sapien
gctggatagcactagtctgtgtgcc

SEQ ID NO: 4635073 - DNA, 25 bp, Homo sapien
ctttgatggttggtatagaaggcca

SEQ ID NO: 4635074 - DNA, 25 bp, Homo sapien
tcttctcggcatccctcacagtttg

SEQ ID NO: 4635075 - DNA, 25 bp, Homo sapien
tcggcatccctcacagtttgttagt

SEQ ID NO: 4635076 - DNA, 25 bp, Homo sapien
ttctcggcatccctcacagtttgtt

SEQ ID NO: 4635077 - DNA, 25 bp, Homo sapien
gccatccctcttctcggcatccctc

SEQ ID NO: 4635078 - DNA, 25 bp, Homo sapien
gttgggtattgaagaagatgcatgc

SEQ ID NO: 4635079 - DNA, 25 bp, Homo sapien
tgttgggtattgaagaagatgcatg

SEQ ID NO: 4635080 - DNA, 25 bp, Homo sapien
ctgttgggtattgaagaagatgcat

SEQ ID NO: 4635081 - DNA, 25 bp, Homo sapien
aagcaggttctggtgcactctgctc

SEQ ID NO: 4635082 - DNA, 25 bp, Homo sapien
caggttctggtgcactctgctctct

SEQ ID NO: 4635083 - DNA, 25 bp, Homo sapien
agcaggttctggtgcactctgctct

SEQ ID NO: 4635084 - DNA, 25 bp, Homo sapien
ggcgatactgcttccagtttctccc

SEQ ID NO: 4635085 - DNA, 25 bp, Homo sapien
tttcttctcggcgatactgcttcca

SEQ ID NO: 4635086 - DNA, 25 bp, Homo sapien
ccatatcctccttgggtggcgacag

SEQ ID NO: 4635087 - DNA, 25 bp, Homo sapien
catatcctccttgggtggcgacagc

SEQ ID NO: 4635088 - DNA, 25 bp, Homo sapien
tcctggtacaggaaggttaatacga

SEQ ID NO: 4635089 - DNA, 25 bp, Homo sapien
gctggaaatgcattctgttctcctg

SEQ ID NO: 4635090 - DNA, 25 bp, Homo sapien
gtacaggaaggttaatacgatgacc

SEQ ID NO: 4635091 - DNA, 25 bp, Homo sapien
ctaggagagagctggaaatgcattc

SEQ ID NO: 4635092 - DNA, 25 bp, Homo sapien
tccataagcattcttcattacttta

SEQ ID NO: 4635093 - DNA, 25 bp, Homo sapien
cataagcattcttcattactttata

SEQ ID NO: 4635094 - DNA, 25 bp, Homo sapien
ccataagcattcttcattactttat

SEQ ID NO: 4635095 - DNA, 25 bp, Homo sapien
tgaatctgattagagacctttgacc

SEQ ID NO: 4635096 - DNA, 25 bp, Homo sapien
gcagaatactctttttgtccttgaa

SEQ ID NO: 4635097 - DNA, 25 bp, Homo sapien
acttgaatacaacttaaccgtgatc

SEQ ID NO: 4635098 - DNA, 25 bp, Homo sapien
taagacacttctgagagtaatgaac

SEQ ID NO: 4635099 - DNA, 25 bp, Homo sapien
tcccttgggaactctttcaactgcg

SEQ ID NO: 4635100 - DNA, 25 bp, Homo sapien
aaaacttttgccagagtgtagcaca

SEQ ID NO: 4635101 - DNA, 25 bp, Homo sapien
gtgtagcacaatagctcccttggga

SEQ ID NO: 4635102 - DNA, 25 bp, Homo sapien
tacaataaatagaagccgttcctaa

SEQ ID NO: 4635103 - DNA, 25 bp, Homo sapien
caacaggcctacacataccacagaa

SEQ ID NO: 4635104 - DNA, 25 bp, Homo sapien
caagtctgcagagggtcagtttcct

SEQ ID NO: 4635105 - DNA, 25 bp, Homo sapien
gtgtctggtcctactcaagtctgca

SEQ ID NO: 4635106 - DNA, 25 bp, Homo sapien
gcagctgggtgtttcatagccaaca

SEQ ID NO: 4635107 - DNA, 25 bp, Homo sapien
ggaggacagtcagaattctctgctg

SEQ ID NO: 4635108 - DNA, 25 bp, Homo sapien
gggtagatggaggacagtcagaatt

SEQ ID NO: 4635109 - DNA, 25 bp, Homo sapien
tggaactgtccaacagagtcctgca

SEQ ID NO: 4635110 - DNA, 25 bp, Homo sapien
aactgggagaacaacaggggccact

SEQ ID NO: 4635111 - DNA, 25 bp, Homo sapien
cgtcttccaagttggagcaactggg

SEQ ID NO: 4635112 - DNA, 25 bp, Homo sapien
tgtcctctgggattccgtcttccaa

SEQ ID NO: 4635113 - DNA, 25 bp, Homo sapien
gttaaacacagaatagcaatctgca

SEQ ID NO: 4635114 - DNA, 25 bp, Homo sapien
cagcttgacattcacaccttgaaga

SEQ ID NO: 4635115 - DNA, 25 bp, Homo sapien
aatcacaaactgagttggtctaatg

SEQ ID NO: 4635116 - DNA, 25 bp, Homo sapien
tgaggagcttagaggcccaatagca

SEQ ID NO: 4635117 - DNA, 25 bp, Homo sapien
gtattacattcattgaaaaagtctt

SEQ ID NO: 4635118 - DNA, 25 bp, Homo sapien
acattcattgaaaaagtcttatgca

SEQ ID NO: 4635119 - DNA, 25 bp, Homo sapien
ttacattcattgaaaaagtcttatg

SEQ ID NO: 4635120 - DNA, 25 bp, Homo sapien
tattacattcattgaaaaagtctta

SEQ ID NO: 4635121 - DNA, 25 bp, Homo sapien
tctgtggacttaacaagaaaaggaa

SEQ ID NO: 4635122 - DNA, 25 bp, Homo sapien
tttacacgactcctgaggacaaccg

SEQ ID NO: 4635123 - DNA, 25 bp, Homo sapien
tccctggactaggaaacaaggagcg

SEQ ID NO: 4635124 - DNA, 25 bp, Homo sapien
gggtccgaagaaattcagatcggtg

SEQ ID NO: 4635125 - DNA, 25 bp, Homo sapien
aggcacaccagcgatgccgaggatg

SEQ ID NO: 4635126 - DNA, 25 bp, Homo sapien
tctggaatctgaagcttgcagactg

SEQ ID NO: 4635127 - DNA, 25 bp, Homo sapien
tccccaagggtgttgtgtggtcgct

SEQ ID NO: 4635128 - DNA, 25 bp, Homo sapien
tgtggtcgctgtctcccatgacact

SEQ ID NO: 4635129 - DNA, 25 bp, Homo sapien
gcgattatgcgaaaaccaagcctct

SEQ ID NO: 4635130 - DNA, 25 bp, Homo sapien
cacagcgattatgcgaaaaccaagc

SEQ ID NO: 4635131 - DNA, 25 bp, Homo sapien
aaaccaagcctcttaacatcatacc

SEQ ID NO: 4635132 - DNA, 25 bp, Homo sapien
cttcccacagcgattatgcgaaaac

SEQ ID NO: 4635133 - DNA, 25 bp, Homo sapien
caggtttccaattcatccaagagac

SEQ ID NO: 4635134 - DNA, 25 bp, Homo sapien
gttttgcatattcagtttagaggga

SEQ ID NO: 4635135 - DNA, 25 bp, Homo sapien
cagaactagggcatccaatatcagg

SEQ ID NO: 4635136 - DNA, 25 bp, Homo sapien
agggaatcacagagatgggatcaga

SEQ ID NO: 4635137 - DNA, 25 bp, Homo sapien
tccgtacacttcgatccgcatccca

SEQ ID NO: 4635138 - DNA, 25 bp, Homo sapien
atccgtacacttcgatccgcatccc

SEQ ID NO: 4635139 - DNA, 25 bp, Homo sapien
catccgtacacttcgatccgcatcc

SEQ ID NO: 4635140 - DNA, 25 bp, Homo sapien
acatccgtacacttcgatccgcatc

SEQ ID NO: 4635141 - DNA, 25 bp, Homo sapien
tcacacagggaataaaggccactta

SEQ ID NO: 4635142 - DNA, 25 bp, Homo sapien
cacacagggaataaaggccacttac

SEQ ID NO: 4635143 - DNA, 25 bp, Homo sapien
cactctcaggccatcgtatgggggc

SEQ ID NO: 4635144 - DNA, 25 bp, Homo sapien
actctcaggccatcgtatgggggca

SEQ ID NO: 4635145 - DNA, 25 bp, Homo sapien
tccactctcaggccatcgtatgggg

SEQ ID NO: 4635146 - DNA, 25 bp, Homo sapien
ctctcaggccatcgtatgggggcat

SEQ ID NO: 4635147 - DNA, 25 bp, Homo sapien
gagccgcctggccttaggtcaatga

SEQ ID NO: 4635148 - DNA, 25 bp, Homo sapien
gcctggccttaggtcaatgactggc

SEQ ID NO: 4635149 - DNA, 25 bp, Homo sapien
gcactgtttctaactttggctcttt

SEQ ID NO: 4635150 - DNA, 25 bp, Homo sapien
gctgcatgccgtggtgtgtccccaa

SEQ ID NO: 4635151 - DNA, 25 bp, Homo sapien
aggaaaatctcggggtgactcttgg

SEQ ID NO: 4635152 - DNA, 25 bp, Homo sapien
atctcggggtgactcttggtctttc

SEQ ID NO: 4635153 - DNA, 25 bp, Homo sapien
aaaatctcggggtgactcttggtct

SEQ ID NO: 4635154 - DNA, 25 bp, Homo sapien
tcataaggaaaatctcggggtgact

SEQ ID NO: 4635155 - DNA, 25 bp, Homo sapien
gcgcttctgcatgatgttgtgcacc

SEQ ID NO: 4635156 - DNA, 25 bp, Homo sapien
gatgatcttgccgcctgatttgcta

SEQ ID NO: 4635157 - DNA, 25 bp, Homo sapien
gcttctgcatgatgttgtgcaccac

SEQ ID NO: 4635158 - DNA, 25 bp, Homo sapien
tgatcttgccgcctgatttgctagt

SEQ ID NO: 4635159 - DNA, 25 bp, Homo sapien
atgcatctttctctgcggcgtcgcc

SEQ ID NO: 4635160 - DNA, 25 bp, Homo sapien
aatgcatctttctctgcggcgtcgc

SEQ ID NO: 4635161 - DNA, 25 bp, Homo sapien
tcaccaaccatgttccttagtagga

SEQ ID NO: 4635162 - DNA, 25 bp, Homo sapien
ctatgtctcataggaaaccatatca

SEQ ID NO: 4635163 - DNA, 25 bp, Homo sapien
tgaaaaatatgtcatcacacattct

SEQ ID NO: 4635164 - DNA, 25 bp, Homo sapien
tctctggtttcaacttccaagtctt

SEQ ID NO: 4635165 - DNA, 25 bp, Homo sapien
taagagcattactaccagatgcatg

SEQ ID NO: 4635166 - DNA, 25 bp, Homo sapien
tttgacaaactgtgcaagatcacca

SEQ ID NO: 4635167 - DNA, 25 bp, Homo sapien
cacaagtgatagttactctgggaca

SEQ ID NO: 4635168 - DNA, 25 bp, Homo sapien
gccatgcagagcaatggaattctac

SEQ ID NO: 4635169 - DNA, 25 bp, Homo sapien
tggtcctccgctcggagagatcacc

SEQ ID NO: 4635170 - DNA, 25 bp, Homo sapien
gagatcaccatttgatgctaaaatt

SEQ ID NO: 4635171 - DNA, 25 bp, Homo sapien
tgggagcagggctagttcactcttc

SEQ ID NO: 4635172 - DNA, 25 bp, Homo sapien
tgacctgcttcatttgggagcaggg

SEQ ID NO: 4635173 - DNA, 25 bp, Homo sapien
aattagcatctgcaggtatgccgac

SEQ ID NO: 4635174 - DNA, 25 bp, Homo sapien
agaattagcatctgcaggtatgccg

SEQ ID NO: 4635175 - DNA, 25 bp, Homo sapien
gaattagcatctgcaggtatgccga

SEQ ID NO: 4635176 - DNA, 25 bp, Homo sapien
ttagcatctgcaggtatgccgacat

SEQ ID NO: 4635177 - DNA, 25 bp, Homo sapien
cagagctgcagaacactgggtactg

SEQ ID NO: 4635178 - DNA, 25 bp, Homo sapien
tccagagctgcagaacactgggtac

SEQ ID NO: 4635179 - DNA, 25 bp, Homo sapien
cagaacactgggtactgagctggtc

SEQ ID NO: 4635180 - DNA, 25 bp, Homo sapien
cttccagagctgcagaacactgggt

SEQ ID NO: 4635181 - DNA, 25 bp, Homo sapien
tagtgttaagatcactggtgagcca

SEQ ID NO: 4635182 - DNA, 25 bp, Homo sapien
tggaacaccgttctggacattggcc

SEQ ID NO: 4635183 - DNA, 25 bp, Homo sapien
ggttacagtaacctcaacagtctgg

SEQ ID NO: 4635184 - DNA, 25 bp, Homo sapien
gacaagtgggatccggctagactaa

SEQ ID NO: 4635185 - DNA, 25 bp, Homo sapien
ggagatctgccgatcagcactgagc

SEQ ID NO: 4635186 - DNA, 25 bp, Homo sapien
tcagaggttggagatctgccgatca

SEQ ID NO: 4635187 - DNA, 25 bp, Homo sapien
agcagctgtctggactgactcagta

SEQ ID NO: 4635188 - DNA, 25 bp, Homo sapien
gcagcagctgtctggactgactcag

SEQ ID NO: 4635189 - DNA, 25 bp, Homo sapien
tcatgccactgttacggactaggaa

SEQ ID NO: 4635190 - DNA, 25 bp, Homo sapien
gaagcagatattggatccacacagc

SEQ ID NO: 4635191 - DNA, 25 bp, Homo sapien
cacacagccatcgttgaaggtggca

SEQ ID NO: 4635192 - DNA, 25 bp, Homo sapien
atcaaaaacttctgtgcgggaccgg

SEQ ID NO: 4635193 - DNA, 25 bp, Homo sapien
tgtctttggttgccacaaggtcacc

SEQ ID NO: 4635194 - DNA, 25 bp, Homo sapien
gcgcctctgctgtaggtggtaaagg

SEQ ID NO: 4635195 - DNA, 25 bp, Homo sapien
gtctttggttgccacaaggtcacct

SEQ ID NO: 4635196 - DNA, 25 bp, Homo sapien
tcctgtttccaggttctgacaacaa

SEQ ID NO: 4635197 - DNA, 25 bp, Homo sapien
tgtttccaggttctgacaacaaatt

SEQ ID NO: 4635198 - DNA, 25 bp, Homo sapien
cctgtttccaggttctgacaacaaa

SEQ ID NO: 4635199 - DNA, 25 bp, Homo sapien
ctgtttccaggttctgacaacaaat

SEQ ID NO: 4635200 - DNA, 25 bp, Homo sapien
gatattcttagggagctatcctgca

SEQ ID NO: 4635201 - DNA, 25 bp, Homo sapien
ttatacccggcagcagtttctttga

SEQ ID NO: 4635202 - DNA, 25 bp, Homo sapien
cagtgtagactaccacaatcctgga

SEQ ID NO: 4635203 - DNA, 25 bp, Homo sapien
tcatgtaggcatactcagtgtagac

SEQ ID NO: 4635204 - DNA, 25 bp, Homo sapien
gctcagcatcgggcttcgttctccc

SEQ ID NO: 4635205 - DNA, 25 bp, Homo sapien
ctggcaaagcatgctcagcatcggg

SEQ ID NO: 4635206 - DNA, 25 bp, Homo sapien
tcagcatcgggcttcgttctcccat

SEQ ID NO: 4635207 - DNA, 25 bp, Homo sapien
ggcaaagcatgctcagcatcgggct

SEQ ID NO: 4635208 - DNA, 25 bp, Homo sapien
ctacagccgtttctcacatgttggg

SEQ ID NO: 4635209 - DNA, 25 bp, Homo sapien
acagctgcattcttgaagtcaggga

SEQ ID NO: 4635210 - DNA, 25 bp, Homo sapien
gaaggtccacagctgcattcttgaa

SEQ ID NO: 4635211 - DNA, 25 bp, Homo sapien
gcattcttgaagtcagggagaccac

SEQ ID NO: 4635212 - DNA, 25 bp, Homo sapien
ccacagctgcattcttgaagtcagg

SEQ ID NO: 4635213 - DNA, 25 bp, Homo sapien
tgcacttggtcggagtttcacattt

SEQ ID NO: 4635214 - DNA, 25 bp, Homo sapien
cactgcacttggtcggagtttcaca

SEQ ID NO: 4635215 - DNA, 25 bp, Homo sapien
ccactgcacttggtcggagtttcac

SEQ ID NO: 4635216 - DNA, 25 bp, Homo sapien
actgcacttggtcggagtttcacat

SEQ ID NO: 4635217 - DNA, 25 bp, Homo sapien
acaaatcaaatcacgccacctgcga

SEQ ID NO: 4635218 - DNA, 25 bp, Homo sapien
gaggcttcggtgtatctgtgtatca

SEQ ID NO: 4635219 - DNA, 25 bp, Homo sapien
taaaattgatggcacatagtaaaaa

SEQ ID NO: 4635220 - DNA, 25 bp, Homo sapien
tcttggaaccaggattcttttggga

SEQ ID NO: 4635221 - DNA, 25 bp, Homo sapien
ttcttaggcagactccaagtgctgt

SEQ ID NO: 4635222 - DNA, 25 bp, Homo sapien
caccggctagacccgcagtaatggt

SEQ ID NO: 4635223 - DNA, 25 bp, Homo sapien
cttcttaggcagactccaagtgctg

SEQ ID NO: 4635224 - DNA, 25 bp, Homo sapien
ggaagatatccaacacccatggtgt

SEQ ID NO: 4635225 - DNA, 25 bp, Homo sapien
gaggaagatatccaacacccatggt

SEQ ID NO: 4635226 - DNA, 25 bp, Homo sapien
gaagatatccaacacccatggtgtg

SEQ ID NO: 4635227 - DNA, 25 bp, Homo sapien
aagatatccaacacccatggtgtgg

SEQ ID NO: 4635228 - DNA, 25 bp, Homo sapien
gagacttcccatcatagaaggctct

SEQ ID NO: 4635229 - DNA, 25 bp, Homo sapien
tgagacttcccatcatagaaggctc

SEQ ID NO: 4635230 - DNA, 25 bp, Homo sapien
acttcccatcatagaaggctctcca

SEQ ID NO: 4635231 - DNA, 25 bp, Homo sapien
gacttcccatcatagaaggctctcc

SEQ ID NO: 4635232 - DNA, 25 bp, Homo sapien
cctgcctctgggcctccgcctccgc

SEQ ID NO: 4635233 - DNA, 25 bp, Homo sapien
gggcctccgcctccgccctactgga

SEQ ID NO: 4635234 - DNA, 25 bp, Homo sapien
ctgggcctccgcctccgccctactg

SEQ ID NO: 4635235 - DNA, 25 bp, Homo sapien
gcctccgcctccgccctactggaca

SEQ ID NO: 4635236 - DNA, 25 bp, Homo sapien
gttgtgaaagcaggtccgaagtctc

SEQ ID NO: 4635237 - DNA, 25 bp, Homo sapien
ctgcagttgtgaaagcaggtccgaa

SEQ ID NO: 4635238 - DNA, 25 bp, Homo sapien
aggcctctccggcactctctaccag

SEQ ID NO: 4635239 - DNA, 25 bp, Homo sapien
aagcaggtccgaagtctcctccagg

SEQ ID NO: 4635240 - DNA, 25 bp, Homo sapien
cctgattgcccaattctcctgctac

SEQ ID NO: 4635241 - DNA, 25 bp, Homo sapien
ctcctgctacccctcgccccagggt

SEQ ID NO: 4635242 - DNA, 25 bp, Homo sapien
cccacaccctgattgcccaattctc

SEQ ID NO: 4635243 - DNA, 25 bp, Homo sapien
tgattgcccaattctcctgctaccc

SEQ ID NO: 4635244 - DNA, 25 bp, Homo sapien
ggtctggaccggagagctgaccaaa

SEQ ID NO: 4635245 - DNA, 25 bp, Homo sapien
aagtcacctttgtcaaggtgtggcc

SEQ ID NO: 4635246 - DNA, 25 bp, Homo sapien
tctggaccggagagctgaccaaagt

SEQ ID NO: 4635247 - DNA, 25 bp, Homo sapien
cctttgtcaaggtgtggccccagga

SEQ ID NO: 4635248 - DNA, 25 bp, Homo sapien
gagttatcagtgtggagtcccgcag

SEQ ID NO: 4635249 - DNA, 25 bp, Homo sapien
gagtcacagtgagatggagttatca

SEQ ID NO: 4635250 - DNA, 25 bp, Homo sapien
gaggatgcttggcttgaggatccgg

SEQ ID NO: 4635251 - DNA, 25 bp, Homo sapien
gtggctgggaggcacttagggagga

SEQ ID NO: 4635252 - DNA, 25 bp, Homo sapien
taaaggcgcacgaggttctggcagt

SEQ ID NO: 4635253 - DNA, 25 bp, Homo sapien
tgccccagtgttggatgatccactt

SEQ ID NO: 4635254 - DNA, 25 bp, Homo sapien
tccgggcagctgtttcgagttctct

SEQ ID NO: 4635255 - DNA, 25 bp, Homo sapien
tgtcagttacccaggcgttagccac

SEQ ID NO: 4635256 - DNA, 25 bp, Homo sapien
gcatttgtccaactgccgtcatgag

SEQ ID NO: 4635257 - DNA, 25 bp, Homo sapien
ggctttctaaggaacatgtccacct

SEQ ID NO: 4635258 - DNA, 25 bp, Homo sapien
caagatgggattcctcgcggtgccc

SEQ ID NO: 4635259 - DNA, 25 bp, Homo sapien
gccatgaggtcatgtagctcctggg

SEQ ID NO: 4635260 - DNA, 25 bp, Homo sapien
gtggctagaggcaccggatgtcttc

SEQ ID NO: 4635261 - DNA, 25 bp, Homo sapien
gaggcaccggatgtcttcggccagt

SEQ ID NO: 4635262 - DNA, 25 bp, Homo sapien
ggtgatggtggctagaggcaccgga

SEQ ID NO: 4635263 - DNA, 25 bp, Homo sapien
accggatgtcttcggccagtgctga

SEQ ID NO: 4635264 - DNA, 25 bp, Homo sapien
ctacatagagtgaattttttcttgg

SEQ ID NO: 4635265 - DNA, 25 bp, Homo sapien
ctctacatagagtgaattttttctt

SEQ ID NO: 4635266 - DNA, 25 bp, Homo sapien
tctacatagagtgaattttttcttg

SEQ ID NO: 4635267 - DNA, 25 bp, Homo sapien
gcaaacctctgagcaaccaagatga

SEQ ID NO: 4635268 - DNA, 25 bp, Homo sapien
gggaagatgccacagcaaacctctg

SEQ ID NO: 4635269 - DNA, 25 bp, Homo sapien
gatgccacagcaaacctctgagcaa

SEQ ID NO: 4635270 - DNA, 25 bp, Homo sapien
caggtgagggaagatgccacagcaa

SEQ ID NO: 4635271 - DNA, 25 bp, Homo sapien
tctgggatttacagttggcatcatt

SEQ ID NO: 4635272 - DNA, 25 bp, Homo sapien
tgtgcctggcgcagcattattttgc

SEQ ID NO: 4635273 - DNA, 25 bp, Homo sapien
tctgtccccacggaagtgggctctt

SEQ ID NO: 4635274 - DNA, 25 bp, Homo sapien
aagtgggctcttctggttgcaacat

SEQ ID NO: 4635275 - DNA, 25 bp, Homo sapien
tcttaggaaagacgttagcatcctc

SEQ ID NO: 4635276 - DNA, 25 bp, Homo sapien
gtttcttaggaaagacgttagcatc

SEQ ID NO: 4635277 - DNA, 25 bp, Homo sapien
ggaaagacgttagcatcctctaaat

SEQ ID NO: 4635278 - DNA, 25 bp, Homo sapien
gacgttagcatcctctaaatcctca

SEQ ID NO: 4635279 - DNA, 25 bp, Homo sapien
gagggtgaggccctccgaaaactga

SEQ ID NO: 4635280 - DNA, 25 bp, Homo sapien
taattccggattttcggcatagagg

SEQ ID NO: 4635281 - DNA, 25 bp, Homo sapien
tggctgtgtgaattgaagtggtcac

SEQ ID NO: 4635282 - DNA, 25 bp, Homo sapien
ttgaagtggtcactggagaaacgtg

SEQ ID NO: 4635283 - DNA, 25 bp, Homo sapien
caatagttgaactgagggatggctg

SEQ ID NO: 4635284 - DNA, 25 bp, Homo sapien
cagaaatacaaagagccgtggtctt

SEQ ID NO: 4635285 - DNA, 25 bp, Homo sapien
atataatctgtaactggtgtgaaac

SEQ ID NO: 4635286 - DNA, 25 bp, Homo sapien
tgacgtgaagaatgtatataatctg

SEQ ID NO: 4635287 - DNA, 25 bp, Homo sapien
tggtgtgaaactgtggcagaaatac

SEQ ID NO: 4635288 - DNA, 25 bp, Homo sapien
tctttccacgtcttctccgggacag

SEQ ID NO: 4635289 - DNA, 25 bp, Homo sapien
gagctctttccacgtcttctccggg

SEQ ID NO: 4635290 - DNA, 25 bp, Homo sapien
tgtcttctccgggacagtctctgag

SEQ ID NO: 4635291 - DNA, 25 bp, Homo sapien
gcttgactgtgatttaacacctgaa

SEQ ID NO: 4635292 - DNA, 25 bp, Homo sapien
cactaggtaaataggtgcttgactg

SEQ ID NO: 4635293 - DNA, 25 bp, Homo sapien
gagctctttccacgtcttctccggg

SEQ ID NO: 4635294 - DNA, 25 bp, Homo sapien
aagagcagctgacaaaggggcccac

SEQ ID NO: 4635295 - DNA, 25 bp, Homo sapien
gaagagcagctgacaaaggggccca

SEQ ID NO: 4635296 - DNA, 25 bp, Homo sapien
tgcgtctccaatctccatccggaca

SEQ ID NO: 4635297 - DNA, 25 bp, Homo sapien
ttaacacctgtcagctgtatatgat

SEQ ID NO: 4635298 - DNA, 25 bp, Homo sapien
aacacctgtcagctgtatatgatgc

SEQ ID NO: 4635299 - DNA, 25 bp, Homo sapien
ctgtatatgatgctgcgtctccaat

SEQ ID NO: 4635300 - DNA, 25 bp, Homo sapien
agtatgcaacttggatgagcgtgtg

SEQ ID NO: 4635301 - DNA, 25 bp, Homo sapien
caacttggatgagcgtgtgtatgca

SEQ ID NO: 4635302 - DNA, 25 bp, Homo sapien
tatgcaacttggatgagcgtgtgta

SEQ ID NO: 4635303 - DNA, 25 bp, Homo sapien
tgcaacttggatgagcgtgtgtatg

SEQ ID NO: 4635304 - DNA, 25 bp, Homo sapien
caagaggaagtcgtgggcagaggca

SEQ ID NO: 4635305 - DNA, 25 bp, Homo sapien
gagctttaagagctgaactgttggg

SEQ ID NO: 4635306 - DNA, 25 bp, Homo sapien
tatgagctttaagagctgaactgtt

SEQ ID NO: 4635307 - DNA, 25 bp, Homo sapien
gtatatgagctttaagagctgaact

SEQ ID NO: 4635308 - DNA, 25 bp, Homo sapien
atttaagtttgggatcgttggtgct

SEQ ID NO: 4635309 - DNA, 25 bp, Homo sapien
ttccatatttaaccagcagcttaga

SEQ ID NO: 4635310 - DNA, 25 bp, Homo sapien
cttagaatatttaagtttgggatcg

SEQ ID NO: 4635311 - DNA, 25 bp, Homo sapien
gggatcgttggtgcttccatattta

SEQ ID NO: 4635312 - DNA, 25 bp, Homo sapien
ggccacaatgttcttagtaacagca

SEQ ID NO: 4635313 - DNA, 25 bp, Homo sapien
gccacaatgttcttagtaacagcac

SEQ ID NO: 4635314 - DNA, 25 bp, Homo sapien
cagtagcctctgcaatagtggccat

SEQ ID NO: 4635315 - DNA, 25 bp, Homo sapien
tgaacatcacccataactacaatgg

SEQ ID NO: 4635316 - DNA, 25 bp, Homo sapien
taactacaatggctccaggaacaat

SEQ ID NO: 4635317 - DNA, 25 bp, Homo sapien
gcaacatcattagtaaccacagctt

SEQ ID NO: 4635318 - DNA, 25 bp, Homo sapien
gaccttactatcgatgccaattgaa

SEQ ID NO: 4635319 - DNA, 25 bp, Homo sapien
caatgcccttaggaacaatggtatg

SEQ ID NO: 4635320 - DNA, 25 bp, Homo sapien
cagccttagcataattgcctgtaga

SEQ ID NO: 4635321 - DNA, 25 bp, Homo sapien
tatgccaattgcaacaatgccgttg

SEQ ID NO: 4635322 - DNA, 25 bp, Homo sapien
tcaatgtccatagcaacaatgccct

SEQ ID NO: 4635323 - DNA, 25 bp, Homo sapien
tgaacaccctcagttaatgctttgc

SEQ ID NO: 4635324 - DNA, 25 bp, Homo sapien
gatgaattcctgaaccagaggtacc

SEQ ID NO: 4635325 - DNA, 25 bp, Homo sapien
tctttagagggagagcacctttgaa

SEQ ID NO: 4635326 - DNA, 25 bp, Homo sapien
taaacccaaggtgatctccaagttg

SEQ ID NO: 4635327 - DNA, 25 bp, Homo sapien
tcatcccgatactcagtaacctcat

SEQ ID NO: 4635328 - DNA, 25 bp, Homo sapien
catcccgatactcagtaacctcatt

SEQ ID NO: 4635329 - DNA, 25 bp, Homo sapien
tctgcgtggcgcgaaatttttccgg

SEQ ID NO: 4635330 - DNA, 25 bp, Homo sapien
aatttttccgggagatggcgcaggc

SEQ ID NO: 4635331 - DNA, 25 bp, Homo sapien
tggcgcgaaatttttccgggagatg

SEQ ID NO: 4635332 - DNA, 25 bp, Homo sapien
ggcgcaggcgcgagtgcactctggg

SEQ ID NO: 4635333 - DNA, 25 bp, Homo sapien
gctgcgccgcactctcggtcgcctt

SEQ ID NO: 4635334 - DNA, 25 bp, Homo sapien
ggctgcgccgcactctcggtcgcct

SEQ ID NO: 4635335 - DNA, 25 bp, Homo sapien
cggctgcgccgcactctcggtcgcc

SEQ ID NO: 4635336 - DNA, 25 bp, Homo sapien
gtcttgatgactttcagcactcctt

SEQ ID NO: 4635337 - DNA, 25 bp, Homo sapien
atattctggtttgcaggtgatgtgg

SEQ ID NO: 4635338 - DNA, 25 bp, Homo sapien
tctggtttgcaggtgatgtggccca

SEQ ID NO: 4635339 - DNA, 25 bp, Homo sapien
tctaggcatattctggtttgcaggt

SEQ ID NO: 4635340 - DNA, 25 bp, Homo sapien
ctctaggcatattctggtttgcagg

SEQ ID NO: 4635341 - DNA, 25 bp, Homo sapien
accatagcgccctcatcgggcttga

SEQ ID NO: 4635342 - DNA, 25 bp, Homo sapien
atcgggcttgacatagccttcaccg

SEQ ID NO: 4635343 - DNA, 25 bp, Homo sapien
tcaaacacaagcgtggcgttatggg

SEQ ID NO: 4635344 - DNA, 25 bp, Homo sapien
gagtccctattctgcggatgattcc

SEQ ID NO: 4635345 - DNA, 25 bp, Homo sapien
cccctcactaacctcaaagcggagc

SEQ ID NO: 4635346 - DNA, 25 bp, Homo sapien
ccctcactaacctcaaagcggagcg

SEQ ID NO: 4635347 - DNA, 25 bp, Homo sapien
cctcactaacctcaaagcggagcgc

SEQ ID NO: 4635348 - DNA, 25 bp, Homo sapien
ctcactaacctcaaagcggagcgcc

SEQ ID NO: 4635349 - DNA, 25 bp, Homo sapien
tgctctttcactacggtgttctgtt

SEQ ID NO: 4635350 - DNA, 25 bp, Homo sapien
cctgctctttcactacggtgttctg

SEQ ID NO: 4635351 - DNA, 25 bp, Homo sapien
atctcccaagattccttggcctttt

SEQ ID NO: 4635352 - DNA, 25 bp, Homo sapien
ccctgctctttcactacggtgttct

SEQ ID NO: 4635353 - DNA, 25 bp, Homo sapien
tccagccaggacacaatcttcttac

SEQ ID NO: 4635354 - DNA, 25 bp, Homo sapien
ctttcaatggcagcagagaaggcct

SEQ ID NO: 4635355 - DNA, 25 bp, Homo sapien
ggtcgaggtgagaggccagtggagg

SEQ ID NO: 4635356 - DNA, 25 bp, Homo sapien
gtagtttcagctgacacatggccag

SEQ ID NO: 4635357 - DNA, 25 bp, Homo sapien
cagttctagggccttgttacagctt

SEQ ID NO: 4635358 - DNA, 25 bp, Homo sapien
atagaacttcttccgggcaagctgc

SEQ ID NO: 4635359 - DNA, 25 bp, Homo sapien
ctgcctgtggatccgctgctgacac

SEQ ID NO: 4635360 - DNA, 25 bp, Homo sapien
ggcatagaacttcttccgggcaagc

SEQ ID NO: 4635361 - DNA, 25 bp, Homo sapien
cttcttccgggcaagctgcctgtgg

SEQ ID NO: 4635362 - DNA, 25 bp, Homo sapien
tcttccactccgccttcatctctgt

SEQ ID NO: 4635363 - DNA, 25 bp, Homo sapien
gtgttgctcttccactccgccttca

SEQ ID NO: 4635364 - DNA, 25 bp, Homo sapien
tgttgctcttccactccgccttcat

SEQ ID NO: 4635365 - DNA, 25 bp, Homo sapien
ttccactccgccttcatctctgtgt

SEQ ID NO: 4635366 - DNA, 25 bp, Homo sapien
gcctcaggagtagggctggtgagag

SEQ ID NO: 4635367 - DNA, 25 bp, Homo sapien
gcagcctcaggagtagggctggtga

SEQ ID NO: 4635368 - DNA, 25 bp, Homo sapien
gcaggcagcctcaggagtagggctg

SEQ ID NO: 4635369 - DNA, 25 bp, Homo sapien
tcaggagtagggctggtgagaggcg

SEQ ID NO: 4635370 - DNA, 25 bp, Homo sapien
tttagagacaatggcaaacatgttt

SEQ ID NO: 4635371 - DNA, 25 bp, Homo sapien
ccatgggagagtattttagagacaa

SEQ ID NO: 4635372 - DNA, 25 bp, Homo sapien
actggctgttccatgggagagtatt

SEQ ID NO: 4635373 - DNA, 25 bp, Homo sapien
gagtattttagagacaatggcaaac

SEQ ID NO: 4635374 - DNA, 25 bp, Homo sapien
aatgaccatgtatctcgagaagaga

SEQ ID NO: 4635375 - DNA, 25 bp, Homo sapien
atggtgaaatgaccatgtatctcga

SEQ ID NO: 4635376 - DNA, 25 bp, Homo sapien
gaaatgaccatgtatctcgagaaga

SEQ ID NO: 4635377 - DNA, 25 bp, Homo sapien
aattcatggtgaaatgaccatgtat

SEQ ID NO: 4635378 - DNA, 25 bp, Homo sapien
cctccttcaattgtagatgctgcag

SEQ ID NO: 4635379 - DNA, 25 bp, Homo sapien
ccatattctacaccgtttctccaaa

SEQ ID NO: 4635380 - DNA, 25 bp, Homo sapien
tagatgcattgagttttacagtggt

SEQ ID NO: 4635381 - DNA, 25 bp, Homo sapien
ggattcagaatgcaggccagtggtc

SEQ ID NO: 4635382 - DNA, 25 bp, Homo sapien
attcagaatgcaggccagtggtccg

SEQ ID NO: 4635383 - DNA, 25 bp, Homo sapien
tggacatcggtatgatgcgatgagc

SEQ ID NO: 4635384 - DNA, 25 bp, Homo sapien
tatgatgcgatgagcttcaccattc

SEQ ID NO: 4635385 - DNA, 25 bp, Homo sapien
cgcttgtttatggacatcggtatga

SEQ ID NO: 4635386 - DNA, 25 bp, Homo sapien
ctgctgctcccgcttgtttatggac

SEQ ID NO: 4635387 - DNA, 25 bp, Homo sapien
agagccagagctgttgcccaggcag

SEQ ID NO: 4635388 - DNA, 25 bp, Homo sapien
gggcttttacatccagagccagagc

SEQ ID NO: 4635389 - DNA, 25 bp, Homo sapien
cctcccagggggcttttacatccag

SEQ ID NO: 4635390 - DNA, 25 bp, Homo sapien
gggggcttttacatccagagccaga

SEQ ID NO: 4635391 - DNA, 25 bp, Homo sapien
gatccaccgctttgtcaccaatggt

SEQ ID NO: 4635392 - DNA, 25 bp, Homo sapien
agcgccccctgctgtactaagatgg

SEQ ID NO: 4635393 - DNA, 25 bp, Homo sapien
ctaagatgggatccaccgctttgtc

SEQ ID NO: 4635394 - DNA, 25 bp, Homo sapien
cccctgctgtactaagatgggatcc

SEQ ID NO: 4635395 - DNA, 25 bp, Homo sapien
ccaggccgtgagggacatcatagtc

SEQ ID NO: 4635396 - DNA, 25 bp, Homo sapien
aggccgtgagggacatcatagtcca

SEQ ID NO: 4635397 - DNA, 25 bp, Homo sapien
ggccgtgagggacatcatagtccat

SEQ ID NO: 4635398 - DNA, 25 bp, Homo sapien
caggccgtgagggacatcatagtcc

SEQ ID NO: 4635399 - DNA, 25 bp, Homo sapien
tcccactgctgagtacacagctaag

SEQ ID NO: 4635400 - DNA, 25 bp, Homo sapien
cttgagcagggttggatctcagcct

SEQ ID NO: 4635401 - DNA, 25 bp, Homo sapien
taaggacctggtaaagagtgaagat

SEQ ID NO: 4635402 - DNA, 25 bp, Homo sapien
tgagcagggttggatctcagcctct

SEQ ID NO: 4635403 - DNA, 25 bp, Homo sapien
aatggcaggtctcgcccgtatagcc

SEQ ID NO: 4635404 - DNA, 25 bp, Homo sapien
aggtctcgcccgtatagcctgtgcc

SEQ ID NO: 4635405 - DNA, 25 bp, Homo sapien
acgactgggaacactcgcccccatg

SEQ ID NO: 4635406 - DNA, 25 bp, Homo sapien
aggaatggcaggtctcgcccgtata

SEQ ID NO: 4635407 - DNA, 25 bp, Homo sapien
agatgctgacagaaacgagagggag

SEQ ID NO: 4635408 - DNA, 25 bp, Homo sapien
agagatgctgacagaaacgagaggg

SEQ ID NO: 4635409 - DNA, 25 bp, Homo sapien
gatgctgacagaaacgagagggagg

SEQ ID NO: 4635410 - DNA, 25 bp, Homo sapien
gagatgctgacagaaacgagaggga

SEQ ID NO: 4635411 - DNA, 25 bp, Homo sapien
ggaactgaggactttgcatctctgt

SEQ ID NO: 4635412 - DNA, 25 bp, Homo sapien
actcaggatgagcaagtggaactga

SEQ ID NO: 4635413 - DNA, 25 bp, Homo sapien
cttgaagacccagggatgggcgaaa

SEQ ID NO: 4635414 - DNA, 25 bp, Homo sapien
agacccagggatgggcgaaatattc

SEQ ID NO: 4635415 - DNA, 25 bp, Homo sapien
tgttgagtcagtgtccaaaggtttg

SEQ ID NO: 4635416 - DNA, 25 bp, Homo sapien
tctccagatgttgagtcagtgtcca

SEQ ID NO: 4635417 - DNA, 25 bp, Homo sapien
tccagatgttgagtcagtgtccaaa

SEQ ID NO: 4635418 - DNA, 25 bp, Homo sapien
cagatgttgagtcagtgtccaaagg

SEQ ID NO: 4635419 - DNA, 25 bp, Homo sapien
tcatattgcagtacacaagaaatgg

SEQ ID NO: 4635420 - DNA, 25 bp, Homo sapien
tgcttgtgggcttcacaagactgct

SEQ ID NO: 4635421 - DNA, 25 bp, Homo sapien
ctgtcatattgcagtacacaagaaa

SEQ ID NO: 4635422 - DNA, 25 bp, Homo sapien
ttgcagtacacaagaaatggtccca

SEQ ID NO: 4635423 - DNA, 25 bp, Homo sapien
atgcgcagcccaagcagtgttcatt

SEQ ID NO: 4635424 - DNA, 25 bp, Homo sapien
accatgcgcagcccaagcagtgttc

SEQ ID NO: 4635425 - DNA, 25 bp, Homo sapien
ccaccatgcgcagcccaagcagtgt

SEQ ID NO: 4635426 - DNA, 25 bp, Homo sapien
catgcgcagcccaagcagtgttcat

SEQ ID NO: 4635427 - DNA, 25 bp, Homo sapien
gaggcctgcagtactataagtaaca

SEQ ID NO: 4635428 - DNA, 25 bp, Homo sapien
tgtaactgctgtaaagaggcctgca

SEQ ID NO: 4635429 - DNA, 25 bp, Homo sapien
ttaggtctgagtcctttagggagcc

SEQ ID NO: 4635430 - DNA, 25 bp, Homo sapien
acccttacatgggacaggatggcca

SEQ ID NO: 4635431 - DNA, 25 bp, Homo sapien
gaactgttgagaatacatctgtaaa

SEQ ID NO: 4635432 - DNA, 25 bp, Homo sapien
gatggtccggagtagttcacatagg

SEQ ID NO: 4635433 - DNA, 25 bp, Homo sapien
ggcattgaagatgatcaaccacatg

SEQ ID NO: 4635434 - DNA, 25 bp, Homo sapien
catgccatttttggccatgtgttca

SEQ ID NO: 4635435 - DNA, 25 bp, Homo sapien
ctatggaacactaagttgggcattg

SEQ ID NO: 4635436 - DNA, 25 bp, Homo sapien
ctgagcagaaacgggcaaaggagag

SEQ ID NO: 4635437 - DNA, 25 bp, Homo sapien
gcccgctgcgtacgcgaaggacaca

SEQ ID NO: 4635438 - DNA, 25 bp, Homo sapien
cccgcgcccgctgcgtacgcgaagg

SEQ ID NO: 4635439 - DNA, 25 bp, Homo sapien
aaggacacagccgagcgcgggtgcc

SEQ ID NO: 4635440 - DNA, 25 bp, Homo sapien
gggcacctcggagggtcaccgcgtc

SEQ ID NO: 4635441 - DNA, 25 bp, Homo sapien
gcgccgcgctgtcccgcagagcaga

SEQ ID NO: 4635442 - DNA, 25 bp, Homo sapien
gcgctgtcccgcagagcagagccag

SEQ ID NO: 4635443 - DNA, 25 bp, Homo sapien
agccgctgccctcagcgctccgcca

SEQ ID NO: 4635444 - DNA, 25 bp, Homo sapien
gccctcagcgctccgccaggttcac

SEQ ID NO: 4635445 - DNA, 25 bp, Homo sapien
ttgagcatcaggcagagaacctccc

SEQ ID NO: 4635446 - DNA, 25 bp, Homo sapien
taatccacaagtacacttttgagca

SEQ ID NO: 4635447 - DNA, 25 bp, Homo sapien
cacttttgagcatcaggcagagaac

SEQ ID NO: 4635448 - DNA, 25 bp, Homo sapien
cacaagtacacttttgagcatcagg

SEQ ID NO: 4635449 - DNA, 25 bp, Homo sapien
tgcgtctgtcatcacaatctgagtg

SEQ ID NO: 4635450 - DNA, 25 bp, Homo sapien
ggcctgcgtctgtcatcacaatctg

SEQ ID NO: 4635451 - DNA, 25 bp, Homo sapien
ttttgggaaaggactattgtgtcac

SEQ ID NO: 4635452 - DNA, 25 bp, Homo sapien
ggaaaggactattgtgtcactagtc

SEQ ID NO: 4635453 - DNA, 25 bp, Homo sapien
atcttgtccgggcttgtgttgaact

SEQ ID NO: 4635454 - DNA, 25 bp, Homo sapien
tcttgtccgggcttgtgttgaactc

SEQ ID NO: 4635455 - DNA, 25 bp, Homo sapien
cttgtccgggcttgtgttgaactcc

SEQ ID NO: 4635456 - DNA, 25 bp, Homo sapien
catcttgtccgggcttgtgttgaac

SEQ ID NO: 4635457 - DNA, 25 bp, Homo sapien
ttaaaaaagaagcacacgtcagcag

SEQ ID NO: 4635458 - DNA, 25 bp, Homo sapien
gaaggtatgaagtctcagtgttgaa

SEQ ID NO: 4635459 - DNA, 25 bp, Homo sapien
acgtcagcagtgagttctccgtgga

SEQ ID NO: 4635460 - DNA, 25 bp, Homo sapien
atgaagtctcagtgttgaaggaagc

SEQ ID NO: 4635461 - DNA, 25 bp, Homo sapien
taatgggtatcctgtgacttgtcca

SEQ ID NO: 4635462 - DNA, 25 bp, Homo sapien
tgacttgtccagagtggccagctta

SEQ ID NO: 4635463 - DNA, 25 bp, Homo sapien
tattgctaaataatgggtatcctgt

SEQ ID NO: 4635464 - DNA, 25 bp, Homo sapien
tttgttgagttaaagcttttattgc

SEQ ID NO: 4635465 - DNA, 25 bp, Homo sapien
tgttgagctgtaaacgaacgtgccc

SEQ ID NO: 4635466 - DNA, 25 bp, Homo sapien
tgatcaacttgaagagacgctcctt

SEQ ID NO: 4635467 - DNA, 25 bp, Homo sapien
ggtccattccccacatcgaaggaaa

SEQ ID NO: 4635468 - DNA, 25 bp, Homo sapien
cattaaagggagtgggtgactgcac

SEQ ID NO: 4635469 - DNA, 25 bp, Homo sapien
caagtgtccataggtgctgcagtgt

SEQ ID NO: 4635470 - DNA, 25 bp, Homo sapien
tctccctccattgcgacacaagtgt

SEQ ID NO: 4635471 - DNA, 25 bp, Homo sapien
agtcacaggtgacccccctgcgttt

SEQ ID NO: 4635472 - DNA, 25 bp, Homo sapien
gaaggcacagtcacaggtgaccccc

SEQ ID NO: 4635473 - DNA, 25 bp, Homo sapien
tttccctataacctgctccttggtc

SEQ ID NO: 4635474 - DNA, 25 bp, Homo sapien
ctataacctgctccttggtcacact

SEQ ID NO: 4635475 - DNA, 25 bp, Homo sapien
taacctgctccttggtcacacttac

SEQ ID NO: 4635476 - DNA, 25 bp, Homo sapien
ttccctataacctgctccttggtca

SEQ ID NO: 4635477 - DNA, 25 bp, Homo sapien
gctcacatacagcaataagctcgga

SEQ ID NO: 4635478 - DNA, 25 bp, Homo sapien
tgtggttcggaagctcagtgtgatc

SEQ ID NO: 4635479 - DNA, 25 bp, Homo sapien
cattgttggcgaggataactgaaag

SEQ ID NO: 4635480 - DNA, 25 bp, Homo sapien
ggtattcctcatagaaagagctcac

SEQ ID NO: 4635481 - DNA, 25 bp, Homo sapien
gaaatataactgcatatcaactccg

SEQ ID NO: 4635482 - DNA, 25 bp, Homo sapien
cccattggagggcatacagttttct

SEQ ID NO: 4635483 - DNA, 25 bp, Homo sapien
aataaccattaagggaggcactgaa

SEQ ID NO: 4635484 - DNA, 25 bp, Homo sapien
gctgaaaagacccatgtcattacag

SEQ ID NO: 4635485 - DNA, 25 bp, Homo sapien
tatctagcttgtacctaatctgcaa

SEQ ID NO: 4635486 - DNA, 25 bp, Homo sapien
tgatgtctatctagcttgtacctaa

SEQ ID NO: 4635487 - DNA, 25 bp, Homo sapien
tcaggattttgatgtctatctagct

SEQ ID NO: 4635488 - DNA, 25 bp, Homo sapien
gattttgatgtctatctagcttgta

SEQ ID NO: 4635489 - DNA, 25 bp, Homo sapien
gaaggatctataattggcagaatcc

SEQ ID NO: 4635490 - DNA, 25 bp, Homo sapien
tatgagagatttgacggcgttgaat

SEQ ID NO: 4635491 - DNA, 25 bp, Homo sapien
agatttgacggcgttgaattctgtc

SEQ ID NO: 4635492 - DNA, 25 bp, Homo sapien
tttgacggcgttgaattctgtccct

SEQ ID NO: 4635493 - DNA, 25 bp, Homo sapien
tgagagatttgacggcgttgaattc

SEQ ID NO: 4635494 - DNA, 25 bp, Homo sapien
tagacaatatgatagacaattactg

SEQ ID NO: 4635495 - DNA, 25 bp, Homo sapien
gatatttatgaatatgcctccccat

SEQ ID NO: 4635496 - DNA, 25 bp, Homo sapien
tactgtaactttctaccttgcgtaa

SEQ ID NO: 4635497 - DNA, 25 bp, Homo sapien
tcttaattgagttacataagatggg

SEQ ID NO: 4635498 - DNA, 25 bp, Homo sapien
aaatttatcagctgttgcctgctag

SEQ ID NO: 4635499 - DNA, 25 bp, Homo sapien
gtttgagagctcaacttccctagcc

SEQ ID NO: 4635500 - DNA, 25 bp, Homo sapien
tagccctcacaatcaaaatcatgcc

SEQ ID NO: 4635501 - DNA, 25 bp, Homo sapien
tagttcttggcatgccccttcattt

SEQ ID NO: 4635502 - DNA, 25 bp, Homo sapien
gccagtgaagccactagtcgccgcc

SEQ ID NO: 4635503 - DNA, 25 bp, Homo sapien
ttgtgtccgggtccgcgccggcagc

SEQ ID NO: 4635504 - DNA, 25 bp, Homo sapien
gcaccgccgagaggcagccagtgaa

SEQ ID NO: 4635505 - DNA, 25 bp, Homo sapien
cgcccgccttgtgtccgggtccgcg

SEQ ID NO: 4635506 - DNA, 25 bp, Homo sapien
agccagttcccgcgccggggagccg

SEQ ID NO: 4635507 - DNA, 25 bp, Homo sapien
caacagggaaaggaagaatgatgtt

SEQ ID NO: 4635508 - DNA, 25 bp, Homo sapien
ctacaacagggaaaggaagaatgat

SEQ ID NO: 4635509 - DNA, 25 bp, Homo sapien
cagggaaaggaagaatgatgtttaa

SEQ ID NO: 4635510 - DNA, 25 bp, Homo sapien
ggaaaggaagaatgatgtttaatag

SEQ ID NO: 4635511 - DNA, 25 bp, Homo sapien
gtctgcattaaccaagggctctccc

SEQ ID NO: 4635512 - DNA, 25 bp, Homo sapien
tgcattaaccaagggctctccctca

SEQ ID NO: 4635513 - DNA, 25 bp, Homo sapien
tctgcattaaccaagggctctccct

SEQ ID NO: 4635514 - DNA, 25 bp, Homo sapien
gcgataatgacaagcaccaggtcat

SEQ ID NO: 4635515 - DNA, 25 bp, Homo sapien
tatcattatctaaagcgataatgac

SEQ ID NO: 4635516 - DNA, 25 bp, Homo sapien
tatctaaagcgataatgacaagcac

SEQ ID NO: 4635517 - DNA, 25 bp, Homo sapien
taaagcgataatgacaagcaccagg

SEQ ID NO: 4635518 - DNA, 25 bp, Homo sapien
tttctttgcgtaactttctctgttg

SEQ ID NO: 4635519 - DNA, 25 bp, Homo sapien
ctttgcgtaactttctctgttgata

SEQ ID NO: 4635520 - DNA, 25 bp, Homo sapien
agatgcgtatggctatggcagtgat

SEQ ID NO: 4635521 - DNA, 25 bp, Homo sapien
ttctctgttgatagatgcgtatggc

SEQ ID NO: 4635522 - DNA, 25 bp, Homo sapien
cactcttctttttttgagacttttg

SEQ ID NO: 4635523 - DNA, 25 bp, Homo sapien
tctttttttgagacttttgactcat

SEQ ID NO: 4635524 - DNA, 25 bp, Homo sapien
ttctttttttgagacttttgactca

SEQ ID NO: 4635525 - DNA, 25 bp, Homo sapien
ctagcactcttctttttttgagact

SEQ ID NO: 4635526 - DNA, 25 bp, Homo sapien
tctggttttcatggactgcgttttg

SEQ ID NO: 4635527 - DNA, 25 bp, Homo sapien
catcgagctcactgtttagagctgt

SEQ ID NO: 4635528 - DNA, 25 bp, Homo sapien
tgcgttttgcacatcgagctcactg

SEQ ID NO: 4635529 - DNA, 25 bp, Homo sapien
catggactgcgttttgcacatcgag

SEQ ID NO: 4635530 - DNA, 25 bp, Homo sapien
taaaccttaatgagacatgttccag

SEQ ID NO: 4635531 - DNA, 25 bp, Homo sapien
cataaacctttgatcagactggcag

SEQ ID NO: 4635532 - DNA, 25 bp, Homo sapien
tgggtaatctatgggaatttggccc

SEQ ID NO: 4635533 - DNA, 25 bp, Homo sapien
tagtccttggtaggcagttggtatc

SEQ ID NO: 4635534 - DNA, 25 bp, Homo sapien
aaatacagagtgtaatcaggttgtt

SEQ ID NO: 4635535 - DNA, 25 bp, Homo sapien
taaaatacagagtgtaatcaggttg

SEQ ID NO: 4635536 - DNA, 25 bp, Homo sapien
acagagtgtaatcaggttgtttgta

SEQ ID NO: 4635537 - DNA, 25 bp, Homo sapien
atacagagtgtaatcaggttgtttg

SEQ ID NO: 4635538 - DNA, 25 bp, Homo sapien
gatttggaaacaccctaagtgttca

SEQ ID NO: 4635539 - DNA, 25 bp, Homo sapien
tttggaaacaccctaagtgttcatc

SEQ ID NO: 4635540 - DNA, 25 bp, Homo sapien
caatactgtttataacagctaagat

SEQ ID NO: 4635541 - DNA, 25 bp, Homo sapien
tatataacggcacaataaaatgcaa

SEQ ID NO: 4635542 - DNA, 25 bp, Homo sapien
tcaacctataggcaataaactatgt

SEQ ID NO: 4635543 - DNA, 25 bp, Homo sapien
aaatgcaaccatgtgaacctcacat

SEQ ID NO: 4635544 - DNA, 25 bp, Homo sapien
cacaggaagtagtgcttcagtacat

SEQ ID NO: 4635545 - DNA, 25 bp, Homo sapien
gggtttccaccttgttagcaggatg

SEQ ID NO: 4635546 - DNA, 25 bp, Homo sapien
gacattgtgattttacctcgttggg

SEQ ID NO: 4635547 - DNA, 25 bp, Homo sapien
ctaacatctgtgtatgtgctgggtc

SEQ ID NO: 4635548 - DNA, 25 bp, Homo sapien
taagccttttcttgtcacatcctaa

SEQ ID NO: 4635549 - DNA, 25 bp, Homo sapien
tgcagaactcacatgacactgctat

SEQ ID NO: 4635550 - DNA, 25 bp, Homo sapien
tacttttactcatgctgcagaactc

SEQ ID NO: 4635551 - DNA, 25 bp, Homo sapien
cctgaaaggcttttacactgttctc

SEQ ID NO: 4635552 - DNA, 25 bp, Homo sapien
tagcatttgctttagggattacacc

SEQ ID NO: 4635553 - DNA, 25 bp, Homo sapien
agtgcacacgagctccgctttccga

SEQ ID NO: 4635554 - DNA, 25 bp, Homo sapien
aggaatacactctgcagtgcacacg

SEQ ID NO: 4635555 - DNA, 25 bp, Homo sapien
tctgcagtgcacacgagctccgctt

SEQ ID NO: 4635556 - DNA, 25 bp, Homo sapien
tacactctgcagtgcacacgagctc

SEQ ID NO: 4635557 - DNA, 25 bp, Homo sapien
tggaagggaacaggaatacactcac

SEQ ID NO: 4635558 - DNA, 25 bp, Homo sapien
ctggaagggaacaggaatacactca

SEQ ID NO: 4635559 - DNA, 25 bp, Homo sapien
tgtagaagtttggagccttaggcca

SEQ ID NO: 4635560 - DNA, 25 bp, Homo sapien
tttggagccttaggccagtgctgga

SEQ ID NO: 4635561 - DNA, 25 bp, Homo sapien
tagaagtttggagccttaggccagt

SEQ ID NO: 4635562 - DNA, 25 bp, Homo sapien
gaagtttggagccttaggccagtgc

SEQ ID NO: 4635563 - DNA, 25 bp, Homo sapien
tgtaacatagcaccaaagggaaggt

SEQ ID NO: 4635564 - DNA, 25 bp, Homo sapien
tgtgtaacatagcaccaaagggaag

SEQ ID NO: 4635565 - DNA, 25 bp, Homo sapien
aacatagcaccaaagggaaggtcat

SEQ ID NO: 4635566 - DNA, 25 bp, Homo sapien
ctgtgtaacatagcaccaaagggaa

SEQ ID NO: 4635567 - DNA, 25 bp, Homo sapien
actggggagcttcatcttggctttc

SEQ ID NO: 4635568 - DNA, 25 bp, Homo sapien
ctggggagcttcatcttggctttcc

SEQ ID NO: 4635569 - DNA, 25 bp, Homo sapien
tgcgttagctaaaactatcactgtg

SEQ ID NO: 4635570 - DNA, 25 bp, Homo sapien
tatcactgtgcttatagcctgtaag

SEQ ID NO: 4635571 - DNA, 25 bp, Homo sapien
cctgtaaggctacagcatcagagag

SEQ ID NO: 4635572 - DNA, 25 bp, Homo sapien
ggagtatttagcacagttattttca

SEQ ID NO: 4635573 - DNA, 25 bp, Homo sapien
catgaagtatggagaataggtggac

SEQ ID NO: 4635574 - DNA, 25 bp, Homo sapien
tcatgaagtatggagaataggtgga

SEQ ID NO: 4635575 - DNA, 25 bp, Homo sapien
gaagtatggagaataggtggacaat

SEQ ID NO: 4635576 - DNA, 25 bp, Homo sapien
tgaagtatggagaataggtggacaa

SEQ ID NO: 4635577 - DNA, 25 bp, Homo sapien
ctgcccgcttgcactgtaactccaa

SEQ ID NO: 4635578 - DNA, 25 bp, Homo sapien
tctgctaataatccatcactgtggt

SEQ ID NO: 4635579 - DNA, 25 bp, Homo sapien
aaggaagctttcacctaaagcttgg

SEQ ID NO: 4635580 - DNA, 25 bp, Homo sapien
tcacctaaagcttgggagaaatgat

SEQ ID NO: 4635581 - DNA, 25 bp, Homo sapien
tcaggacatggaaaatacggacttg

SEQ ID NO: 4635582 - DNA, 25 bp, Homo sapien
ctcaggacatggaaaatacggactt

SEQ ID NO: 4635583 - DNA, 25 bp, Homo sapien
ttctcaggacatggaaaatacggac

SEQ ID NO: 4635584 - DNA, 25 bp, Homo sapien
tctcaggacatggaaaatacggact

SEQ ID NO: 4635585 - DNA, 25 bp, Homo sapien
atcagtaaagctgtcattgcagatt

SEQ ID NO: 4635586 - DNA, 25 bp, Homo sapien
cagaaatcagtaaagctgtcattgc

SEQ ID NO: 4635587 - DNA, 25 bp, Homo sapien
caggggttaaatggattcaaaacag

SEQ ID NO: 4635588 - DNA, 25 bp, Homo sapien
tcaggggttaaatggattcaaaaca

SEQ ID NO: 4635589 - DNA, 25 bp, Homo sapien
agagttctcttttcataagaaacct

SEQ ID NO: 4635590 - DNA, 25 bp, Homo sapien
tcactatcaccatgaaaatctcagt

SEQ ID NO: 4635591 - DNA, 25 bp, Homo sapien
tagagcaacagtgatcagcttgtga

SEQ ID NO: 4635592 - DNA, 25 bp, Homo sapien
tgagtaaaagccaaataccaggcac

SEQ ID NO: 4635593 - DNA, 25 bp, Homo sapien
ggaagatatccaacacccatggtgt

SEQ ID NO: 4635594 - DNA, 25 bp, Homo sapien
gaggaagatatccaacacccatggt

SEQ ID NO: 4635595 - DNA, 25 bp, Homo sapien
gaagatatccaacacccatggtgtg

SEQ ID NO: 4635596 - DNA, 25 bp, Homo sapien
aagatatccaacacccatggtgtgg

SEQ ID NO: 4635597 - DNA, 25 bp, Homo sapien
catagaaggctctccactggatttg

SEQ ID NO: 4635598 - DNA, 25 bp, Homo sapien
tgagacttcccatcatagaaggctc

SEQ ID NO: 4635599 - DNA, 25 bp, Homo sapien
tcccatcatagaaggctctccactg

SEQ ID NO: 4635600 - DNA, 25 bp, Homo sapien
agaaggctctccactggatttggaa

SEQ ID NO: 4635601 - DNA, 25 bp, Homo sapien
cagatcaccccacacaggggaggct

SEQ ID NO: 4635602 - DNA, 25 bp, Homo sapien
gctatcaggtaggattctgcttccc

SEQ ID NO: 4635603 - DNA, 25 bp, Homo sapien
tgctccaggaacacccaagttcagg

SEQ ID NO: 4635604 - DNA, 25 bp, Homo sapien
aggcactgctgagctatcaggtagg

SEQ ID NO: 4635605 - DNA, 25 bp, Homo sapien
cctgcctctgggcctccgcctccgc

SEQ ID NO: 4635606 - DNA, 25 bp, Homo sapien
gggcctccgcctccgccctactgga

SEQ ID NO: 4635607 - DNA, 25 bp, Homo sapien
ctgggcctccgcctccgccctactg

SEQ ID NO: 4635608 - DNA, 25 bp, Homo sapien
gcctccgcctccgccctactggaca

SEQ ID NO: 4635609 - DNA, 25 bp, Homo sapien
gttgtgaaagcaggtccgaagtctc

SEQ ID NO: 4635610 - DNA, 25 bp, Homo sapien
ctgcagttgtgaaagcaggtccgaa

SEQ ID NO: 4635611 - DNA, 25 bp, Homo sapien
aggcctctccggcactctctaccag

SEQ ID NO: 4635612 - DNA, 25 bp, Homo sapien
aagcaggtccgaagtctcctccagg

SEQ ID NO: 4635613 - DNA, 25 bp, Homo sapien
cctgattgcccaattctcctgctac

SEQ ID NO: 4635614 - DNA, 25 bp, Homo sapien
ctcctgctacccctcgccccagggt

SEQ ID NO: 4635615 - DNA, 25 bp, Homo sapien
cccacaccctgattgcccaattctc

SEQ ID NO: 4635616 - DNA, 25 bp, Homo sapien
tgattgcccaattctcctgctaccc

SEQ ID NO: 4635617 - DNA, 25 bp, Homo sapien
ggtctggaccggagagctgaccaaa

SEQ ID NO: 4635618 - DNA, 25 bp, Homo sapien
aagtcacctttgtcaaggtgtggcc

SEQ ID NO: 4635619 - DNA, 25 bp, Homo sapien
tctggaccggagagctgaccaaagt

SEQ ID NO: 4635620 - DNA, 25 bp, Homo sapien
cctttgtcaaggtgtggccccagga

SEQ ID NO: 4635621 - DNA, 25 bp, Homo sapien
gagttatcagtgtggagtcccgcag

SEQ ID NO: 4635622 - DNA, 25 bp, Homo sapien
gagtcacagtgagatggagttatca

SEQ ID NO: 4635623 - DNA, 25 bp, Homo sapien
gaggatgcttggcttgaggatccgg

SEQ ID NO: 4635624 - DNA, 25 bp, Homo sapien
gtggctgggaggcacttagggagga

SEQ ID NO: 4635625 - DNA, 25 bp, Homo sapien
tgtcagttacccaggcgttagccac

SEQ ID NO: 4635626 - DNA, 25 bp, Homo sapien
tgccccagtgttggatgatccactt

SEQ ID NO: 4635627 - DNA, 25 bp, Homo sapien
taaaggcgcacgaggttctggcagt

SEQ ID NO: 4635628 - DNA, 25 bp, Homo sapien
tccgggcagctgtttcgagttctct

SEQ ID NO: 4635629 - DNA, 25 bp, Homo sapien
ggctttctaaggaacatgtccacct

SEQ ID NO: 4635630 - DNA, 25 bp, Homo sapien
gccatgaggtcatgtagctcctggg

SEQ ID NO: 4635631 - DNA, 25 bp, Homo sapien
tccaagatgggattcctcgcggtgc

SEQ ID NO: 4635632 - DNA, 25 bp, Homo sapien
gcatttgtccaactgccgtcatgag

SEQ ID NO: 4635633 - DNA, 25 bp, Homo sapien
accggatgtcttcggccagtgctga

SEQ ID NO: 4635634 - DNA, 25 bp, Homo sapien
gtggctagaggcaccggatgtcttc

SEQ ID NO: 4635635 - DNA, 25 bp, Homo sapien
gaggcaccggatgtcttcggccagt

SEQ ID NO: 4635636 - DNA, 25 bp, Homo sapien
ggtgatggtggctagaggcaccgga

SEQ ID NO: 4635637 - DNA, 25 bp, Homo sapien
ctacatagagtgaattttttcttgg

SEQ ID NO: 4635638 - DNA, 25 bp, Homo sapien
tctacatagagtgaattttttcttg

SEQ ID NO: 4635639 - DNA, 25 bp, Homo sapien
ctctacatagagtgaattttttctt

SEQ ID NO: 4635640 - DNA, 25 bp, Homo sapien
tctgggatttacagttggcatcatt

SEQ ID NO: 4635641 - DNA, 25 bp, Homo sapien
tctgtccccacggaagtgggctctt

SEQ ID NO: 4635642 - DNA, 25 bp, Homo sapien
tgtgcctggcgcagcattattttgc

SEQ ID NO: 4635643 - DNA, 25 bp, Homo sapien
aagtgggctcttctggttgcaacat

SEQ ID NO: 4635644 - DNA, 25 bp, Homo sapien
tcttaggaaagacgttagcatcctc

SEQ ID NO: 4635645 - DNA, 25 bp, Homo sapien
gtttcttaggaaagacgttagcatc

SEQ ID NO: 4635646 - DNA, 25 bp, Homo sapien
gacgttagcatcctctaaatcctca

SEQ ID NO: 4635647 - DNA, 25 bp, Homo sapien
ggaaagacgttagcatcctctaaat

SEQ ID NO: 4635648 - DNA, 25 bp, Homo sapien
ttctgttgcccatcgtagtgcctac

SEQ ID NO: 4635649 - DNA, 25 bp, Homo sapien
tgagcagcccagttggctactctga

SEQ ID NO: 4635650 - DNA, 25 bp, Homo sapien
gaaaccaacctttctgttgcccatc

SEQ ID NO: 4635651 - DNA, 25 bp, Homo sapien
tacgtggcttagctggagccctacc

SEQ ID NO: 4635652 - DNA, 25 bp, Homo sapien
tgtcttctccgggacagtctctgag

SEQ ID NO: 4635653 - DNA, 25 bp, Homo sapien
acagcctttgagctctctccatgtc

SEQ ID NO: 4635654 - DNA, 25 bp, Homo sapien
gagctctttccacgtcttctccggg

SEQ ID NO: 4635655 - DNA, 25 bp, Homo sapien
tctttccacgtcttctccgggacag

SEQ ID NO: 4635656 - DNA, 25 bp, Homo sapien
taggtaaataggtgcttgactgtga

SEQ ID NO: 4635657 - DNA, 25 bp, Homo sapien
gcttgactgtgatttaacacctgaa

SEQ ID NO: 4635658 - DNA, 25 bp, Homo sapien
aataggtgcttgactgtgatttaac

SEQ ID NO: 4635659 - DNA, 25 bp, Homo sapien
cactaggtaaataggtgcttgactg

SEQ ID NO: 4635660 - DNA, 25 bp, Homo sapien
aagagcagctgacaaaggggcccac

SEQ ID NO: 4635661 - DNA, 25 bp, Homo sapien
gaagagcagctgacaaaggggccca

SEQ ID NO: 4635662 - DNA, 25 bp, Homo sapien
ttctccccctgctgtttgactcatt

SEQ ID NO: 4635663 - DNA, 25 bp, Homo sapien
gcgaacactagattcagcttctccc

SEQ ID NO: 4635664 - DNA, 25 bp, Homo sapien
agcttctccccctgctgtttgactc

SEQ ID NO: 4635665 - DNA, 25 bp, Homo sapien
tgcgaacactagattcagcttctcc

SEQ ID NO: 4635666 - DNA, 25 bp, Homo sapien
catcagcaatatgtgggagttctag

SEQ ID NO: 4635667 - DNA, 25 bp, Homo sapien
cagtcccttttgtggccaatgaatc

SEQ ID NO: 4635668 - DNA, 25 bp, Homo sapien
tacagttgtataattggtgccacca

SEQ ID NO: 4635669 - DNA, 25 bp, Homo sapien
gacagtccggactgcacaatttcgg

SEQ ID NO: 4635670 - DNA, 25 bp, Homo sapien
ctgattgagtgcagtatgcaacttg

SEQ ID NO: 4635671 - DNA, 25 bp, Homo sapien
gtctgattgagtgcagtatgcaact

SEQ ID NO: 4635672 - DNA, 25 bp, Homo sapien
tctgattgagtgcagtatgcaactt

SEQ ID NO: 4635673 - DNA, 25 bp, Homo sapien
tgattgagtgcagtatgcaacttgg

SEQ ID NO: 4635674 - DNA, 25 bp, Homo sapien
atttaagtttgggatcgttggtgct

SEQ ID NO: 4635675 - DNA, 25 bp, Homo sapien
ttccatatttaaccagcagcttaga

SEQ ID NO: 4635676 - DNA, 25 bp, Homo sapien
gggatcgttggtgcttccatattta

SEQ ID NO: 4635677 - DNA, 25 bp, Homo sapien
cttagaatatttaagtttgggatcg

SEQ ID NO: 4635678 - DNA, 25 bp, Homo sapien
aatgctcctagcaagaacatctttt

SEQ ID NO: 4635679 - DNA, 25 bp, Homo sapien
catcagcagcaatgctcctagcaag

SEQ ID NO: 4635680 - DNA, 25 bp, Homo sapien
tttccatcagcagcaatgctcctag

SEQ ID NO: 4635681 - DNA, 25 bp, Homo sapien
gcagcaatgctcctagcaagaacat

SEQ ID NO: 4635682 - DNA, 25 bp, Homo sapien
ttagcaaaaacatccaacaacaaca

SEQ ID NO: 4635683 - DNA, 25 bp, Homo sapien
ctttagcaaaaacatccaacaacaa

SEQ ID NO: 4635684 - DNA, 25 bp, Homo sapien
tttagcaaaaacatccaacaacaac

SEQ ID NO: 4635685 - DNA, 25 bp, Homo sapien
tagcaaaaacatccaacaacaacat

SEQ ID NO: 4635686 - DNA, 25 bp, Homo sapien
tttccttaggaacagcacctttagc

SEQ ID NO: 4635687 - DNA, 25 bp, Homo sapien
taggaacagcacctttagcaccaat

SEQ ID NO: 4635688 - DNA, 25 bp, Homo sapien
ggaacagcacctttagcaccaatga

SEQ ID NO: 4635689 - DNA, 25 bp, Homo sapien
tccttaggaacagcacctttagcac

SEQ ID NO: 4635690 - DNA, 25 bp, Homo sapien
tgaacatcacccataactacaatgg

SEQ ID NO: 4635691 - DNA, 25 bp, Homo sapien
taactacaatggctccaggaacaat

SEQ ID NO: 4635692 - DNA, 25 bp, Homo sapien
gcaacatcattagtaaccacagctt

SEQ ID NO: 4635693 - DNA, 25 bp, Homo sapien
gaccttactatcgatgccaattgaa

SEQ ID NO: 4635694 - DNA, 25 bp, Homo sapien
cattatagggacttccagatccagc

SEQ ID NO: 4635695 - DNA, 25 bp, Homo sapien
aataatggctactccgcccaatagg

SEQ ID NO: 4635696 - DNA, 25 bp, Homo sapien
cagtcccaacttgccgagatgcaga

SEQ ID NO: 4635697 - DNA, 25 bp, Homo sapien
gcccaataggcagcacagcatttgc

SEQ ID NO: 4635698 - DNA, 25 bp, Homo sapien
tcctgaatcctcttgtactgttccc

SEQ ID NO: 4635699 - DNA, 25 bp, Homo sapien
gcgatttgtcgggtctctgattcag

SEQ ID NO: 4635700 - DNA, 25 bp, Homo sapien
caagtggtagatacattctgcgatt

SEQ ID NO: 4635701 - DNA, 25 bp, Homo sapien
gaatcctcttgtactgttcccgctg

SEQ ID NO: 4635702 - DNA, 25 bp, Homo sapien
atcccagacaggagtatggtctgtt

SEQ ID NO: 4635703 - DNA, 25 bp, Homo sapien
caggagtatggtctgttcccctttc

SEQ ID NO: 4635704 - DNA, 25 bp, Homo sapien
cagacaggagtatggtctgttcccc

SEQ ID NO: 4635705 - DNA, 25 bp, Homo sapien
tcaaggaaacttgatgtctaagtag

SEQ ID NO: 4635706 - DNA, 25 bp, Homo sapien
tctcatactctgttctccaaagacc

SEQ ID NO: 4635707 - DNA, 25 bp, Homo sapien
tgggcatcctcctctcatactctgt

SEQ ID NO: 4635708 - DNA, 25 bp, Homo sapien
ctgttctccaaagaccctcaaacct

SEQ ID NO: 4635709 - DNA, 25 bp, Homo sapien
tcctctcatactctgttctccaaag

SEQ ID NO: 4635710 - DNA, 25 bp, Homo sapien
tccactagtggtcatgggtctccca

SEQ ID NO: 4635711 - DNA, 25 bp, Homo sapien
gtagaggcagagcacgaccagctcc

SEQ ID NO: 4635712 - DNA, 25 bp, Homo sapien
tcttgtgctacagaagaacccttcc

SEQ ID NO: 4635713 - DNA, 25 bp, Homo sapien
acaggacaatttggcggtacatacc

SEQ ID NO: 4635714 - DNA, 25 bp, Homo sapien
atttccattttgtgagatctgtctt

SEQ ID NO: 4635715 - DNA, 25 bp, Homo sapien
atggttctccttcatattctagact

SEQ ID NO: 4635716 - DNA, 25 bp, Homo sapien
ttcccatggttctccttcatattct

SEQ ID NO: 4635717 - DNA, 25 bp, Homo sapien
ctgtctttgtagttctttgcctcct

SEQ ID NO: 4635718 - DNA, 25 bp, Homo sapien
tgtcgtctagcaggcgtagctctgg

SEQ ID NO: 4635719 - DNA, 25 bp, Homo sapien
tgggggcaccgctgagcctgttggc

SEQ ID NO: 4635720 - DNA, 25 bp, Homo sapien
gctgtgtcgtctagcaggcgtagct

SEQ ID NO: 4635721 - DNA, 25 bp, Homo sapien
ttaagctgtgtcgtctagcaggcgt

SEQ ID NO: 4635722 - DNA, 25 bp, Homo sapien
gagtcacaggctacatgtcctatag

SEQ ID NO: 4635723 - DNA, 25 bp, Homo sapien
ctagctcttggaacatcatgcctga

SEQ ID NO: 4635724 - DNA, 25 bp, Homo sapien
gaaatgctgtcctgattccacaggg

SEQ ID NO: 4635725 - DNA, 25 bp, Homo sapien
gaaaacttaagacagccacatgcac

SEQ ID NO: 4635726 - DNA, 25 bp, Homo sapien
tcttttcatacacgggaccaggctg

SEQ ID NO: 4635727 - DNA, 25 bp, Homo sapien
tgtagtcatataagcaagccacgct

SEQ ID NO: 4635728 - DNA, 25 bp, Homo sapien
taagtattaaagtctccgggtcaga

SEQ ID NO: 4635729 - DNA, 25 bp, Homo sapien
tcacctggttatgtcagtggcaaac

SEQ ID NO: 4635730 - DNA, 25 bp, Homo sapien
cataaaacttctggagtcctggggt

SEQ ID NO: 4635731 - DNA, 25 bp, Homo sapien
aagaagcataaaacttctggagtcc

SEQ ID NO: 4635732 - DNA, 25 bp, Homo sapien
tcccactcctactcagaagacagac

SEQ ID NO: 4635733 - DNA, 25 bp, Homo sapien
ggagtcctggggtaacctgagcaaa

SEQ ID NO: 4635734 - DNA, 25 bp, Homo sapien
tctgcaatagtaaggccaatcctgc

SEQ ID NO: 4635735 - DNA, 25 bp, Homo sapien
gaagtctgtgcaatcactgtgaaac

SEQ ID NO: 4635736 - DNA, 25 bp, Homo sapien
ctgcagggaccgaagtctgtgcaat

SEQ ID NO: 4635737 - DNA, 25 bp, Homo sapien
ttttctttctgcaatagtaaggcca

SEQ ID NO: 4635738 - DNA, 25 bp, Homo sapien
aaattgtatgaggaagttattgtgg

SEQ ID NO: 4635739 - DNA, 25 bp, Homo sapien
gactaagagggtgcaagaagttggg

SEQ ID NO: 4635740 - DNA, 25 bp, Homo sapien
tgaggtggggtcatagagagaacag

SEQ ID NO: 4635741 - DNA, 25 bp, Homo sapien
tattgtggagaagcgatgaggtggg

SEQ ID NO: 4635742 - DNA, 25 bp, Homo sapien
tgcatatgccacattgattaatggc

SEQ ID NO: 4635743 - DNA, 25 bp, Homo sapien
gggacagtacgagatagttcattat

SEQ ID NO: 4635744 - DNA, 25 bp, Homo sapien
gcacatcgaacttgtaatacagcat

SEQ ID NO: 4635745 - DNA, 25 bp, Homo sapien
gcaaacaccacttgggccctatttc

SEQ ID NO: 4635746 - DNA, 25 bp, Homo sapien
tttataggagtctgccccagtactg

SEQ ID NO: 4635747 - DNA, 25 bp, Homo sapien
ttataggagtctgccccagtactgc

SEQ ID NO: 4635748 - DNA, 25 bp, Homo sapien
aacaaggacattgggtgttcttcta

SEQ ID NO: 4635749 - DNA, 25 bp, Homo sapien
aattcctgttgaacaaggacattgg

SEQ ID NO: 4635750 - DNA, 25 bp, Homo sapien
ctgttgaacaaggacattgggtgtt

SEQ ID NO: 4635751 - DNA, 25 bp, Homo sapien
tgaacaaggacattgggtgttcttc

SEQ ID NO: 4635752 - DNA, 25 bp, Homo sapien
tcagtgggacccttaagtggccgtc

SEQ ID NO: 4635753 - DNA, 25 bp, Homo sapien
tagctgtgtactgggcggggacccc

SEQ ID NO: 4635754 - DNA, 25 bp, Homo sapien
ccttaagtggccgtcaggacaggcg

SEQ ID NO: 4635755 - DNA, 25 bp, Homo sapien
ccctggacgggttcgagttctcttg

SEQ ID NO: 4635756 - DNA, 25 bp, Homo sapien
gtgtgtgtcgggaatcctgcgtgtc

SEQ ID NO: 4635757 - DNA, 25 bp, Homo sapien
ggctgcgtgtgttgcgctcccgtgt

SEQ ID NO: 4635758 - DNA, 25 bp, Homo sapien
gctgcgtgtgttgcgctcccgtgtg

SEQ ID NO: 4635759 - DNA, 25 bp, Homo sapien
gtgtcgggaatcctgcgtgtcgtgc

SEQ ID NO: 4635760 - DNA, 25 bp, Homo sapien
cttttgatgccaaaatctgagcccc

SEQ ID NO: 4635761 - DNA, 25 bp, Homo sapien
ctcaggtctgacttttgatgccaaa

SEQ ID NO: 4635762 - DNA, 25 bp, Homo sapien
gacttttgatgccaaaatctgagcc

SEQ ID NO: 4635763 - DNA, 25 bp, Homo sapien
ggtctgacttttgatgccaaaatct

SEQ ID NO: 4635764 - DNA, 25 bp, Homo sapien
ccaagacgcaatcgggccccactcg

SEQ ID NO: 4635765 - DNA, 25 bp, Homo sapien
acgcaatcgggccccactcgcagaa

SEQ ID NO: 4635766 - DNA, 25 bp, Homo sapien
ccactcgcagaaccgcctggaccct

SEQ ID NO: 4635767 - DNA, 25 bp, Homo sapien
cgccgtcccgcgcctgggtcccgcg

SEQ ID NO: 4635768 - DNA, 25 bp, Homo sapien
gcccaacctccgcatagccttggag

SEQ ID NO: 4635769 - DNA, 25 bp, Homo sapien
aacctccgcatagccttggagaccc

SEQ ID NO: 4635770 - DNA, 25 bp, Homo sapien
cctgggagccctgttaggccaccgg

SEQ ID NO: 4635771 - DNA, 25 bp, Homo sapien
gccctgttaggccaccggcattggg

SEQ ID NO: 4635772 - DNA, 25 bp, Homo sapien
gccctgtcataaccatgtcactgta

SEQ ID NO: 4635773 - DNA, 25 bp, Homo sapien
caggtcacatgcattgtcatgttga

SEQ ID NO: 4635774 - DNA, 25 bp, Homo sapien
tttgcagccctgtcataaccatgtc

SEQ ID NO: 4635775 - DNA, 25 bp, Homo sapien
gcttctcaattccttggcaggtcac

SEQ ID NO: 4635776 - DNA, 25 bp, Homo sapien
tgatgtttctgtagacagattttca

SEQ ID NO: 4635777 - DNA, 25 bp, Homo sapien
tttctgtagacagattttcaaactc

SEQ ID NO: 4635778 - DNA, 25 bp, Homo sapien
caaactcataattcttttcatgttc

SEQ ID NO: 4635779 - DNA, 25 bp, Homo sapien
tttcaaactcataattcttttcatg

SEQ ID NO: 4635780 - DNA, 25 bp, Homo sapien
gcttctcagagcaacgttcacgtcc

SEQ ID NO: 4635781 - DNA, 25 bp, Homo sapien
caccagcggcactgataactgactc

SEQ ID NO: 4635782 - DNA, 25 bp, Homo sapien
taactgactcctcagcactgtccag

SEQ ID NO: 4635783 - DNA, 25 bp, Homo sapien
tccagcgaatgctgcatggaggctc

SEQ ID NO: 4635784 - DNA, 25 bp, Homo sapien
caggattcctgggagtcgatgtgat

SEQ ID NO: 4635785 - DNA, 25 bp, Homo sapien
tgtgcgcttcgctggttcttcctac

SEQ ID NO: 4635786 - DNA, 25 bp, Homo sapien
taacctctccggtaactgtgcgctt

SEQ ID NO: 4635787 - DNA, 25 bp, Homo sapien
gaaatcatgaggaaatctccactca

SEQ ID NO: 4635788 - DNA, 25 bp, Homo sapien
tatgaccggtaatctcctacctcaa

SEQ ID NO: 4635789 - DNA, 25 bp, Homo sapien
acctatgaccggtaatctcctacct

SEQ ID NO: 4635790 - DNA, 25 bp, Homo sapien
tacctatgaccggtaatctcctacc

SEQ ID NO: 4635791 - DNA, 25 bp, Homo sapien
ctatgaccggtaatctcctacctca

SEQ ID NO: 4635792 - DNA, 25 bp, Homo sapien
tgttggcactttgaccttgcataat

SEQ ID NO: 4635793 - DNA, 25 bp, Homo sapien
gaagtatgttggcactttgaccttg

SEQ ID NO: 4635794 - DNA, 25 bp, Homo sapien
ggaacacattaacgttggtttcaga

SEQ ID NO: 4635795 - DNA, 25 bp, Homo sapien
tgtattcactgaagtattgaggaac

SEQ ID NO: 4635796 - DNA, 25 bp, Homo sapien
agcaggaaaatctggtgctttggga

SEQ ID NO: 4635797 - DNA, 25 bp, Homo sapien
cagcaggaaaatctggtgctttggg

SEQ ID NO: 4635798 - DNA, 25 bp, Homo sapien
gcaggaaaatctggtgctttgggaa

SEQ ID NO: 4635799 - DNA, 25 bp, Homo sapien
ctttgggaagaggtgtccacagggg

SEQ ID NO: 4635800 - DNA, 25 bp, Homo sapien
tttttttcagagtgttactctgtca

SEQ ID NO: 4635801 - DNA, 25 bp, Homo sapien
tttttcagagtgttactctgtcacc

SEQ ID NO: 4635802 - DNA, 25 bp, Homo sapien
tatacatatatgtatttttagcaga

SEQ ID NO: 4635803 - DNA, 25 bp, Homo sapien
ccacgcccagctacatatacatata

SEQ ID NO: 4635804 - DNA, 25 bp, Homo sapien
tctgcgtggcgcgaaatttttccgg

SEQ ID NO: 4635805 - DNA, 25 bp, Homo sapien
tggcgcgaaatttttccgggagatg

SEQ ID NO: 4635806 - DNA, 25 bp, Homo sapien
ggcgcaggcgcgagtgcactctggg

SEQ ID NO: 4635807 - DNA, 25 bp, Homo sapien
aatttttccgggagatggcgcaggc

SEQ ID NO: 4635808 - DNA, 25 bp, Homo sapien
ccagccagtgtagtggacaaagact

SEQ ID NO: 4635809 - DNA, 25 bp, Homo sapien
gccagccagtgtagtggacaaagac

SEQ ID NO: 4635810 - DNA, 25 bp, Homo sapien
ctggtttgcaggtgatgtggcccac

SEQ ID NO: 4635811 - DNA, 25 bp, Homo sapien
tcaaacacaagcgtggcgttatggg

SEQ ID NO: 4635812 - DNA, 25 bp, Homo sapien
gccctcatcgggcttgacatagcct

SEQ ID NO: 4635813 - DNA, 25 bp, Homo sapien
gagtccctattctgcggatgattcc

SEQ ID NO: 4635814 - DNA, 25 bp, Homo sapien
atcgggcttgacatagccttcaccg

SEQ ID NO: 4635815 - DNA, 25 bp, Homo sapien
catagcgccctcatcgggcttgaca

SEQ ID NO: 4635816 - DNA, 25 bp, Homo sapien
gtcaaagggctggtccttgcagcac

SEQ ID NO: 4635817 - DNA, 25 bp, Homo sapien
ctcgctaacctcaaagcggagcgcc

SEQ ID NO: 4635818 - DNA, 25 bp, Homo sapien
tgctgaatggccctctccagatcat

SEQ ID NO: 4635819 - DNA, 25 bp, Homo sapien
tccaagtgctgaatggccctctcca

SEQ ID NO: 4635820 - DNA, 25 bp, Homo sapien
atctcccaagattccttggcctttt

SEQ ID NO: 4635821 - DNA, 25 bp, Homo sapien
ggacacaatcttcttacactgtagt

SEQ ID NO: 4635822 - DNA, 25 bp, Homo sapien
gccaggacacaatcttcttacactg

SEQ ID NO: 4635823 - DNA, 25 bp, Homo sapien
ccagccaggacacaatcttcttaca

SEQ ID NO: 4635824 - DNA, 25 bp, Homo sapien
tccagccaggacacaatcttcttac

SEQ ID NO: 4635825 - DNA, 25 bp, Homo sapien
cccagttctagggcattgttacaac

SEQ ID NO: 4635826 - DNA, 25 bp, Homo sapien
tgttacaactttcaatggcagcaga

SEQ ID NO: 4635827 - DNA, 25 bp, Homo sapien
ctgcccagttctagggcattgttac

SEQ ID NO: 4635828 - DNA, 25 bp, Homo sapien
agcagagaaggcctgtagtttcagc

SEQ ID NO: 4635829 - DNA, 25 bp, Homo sapien
attttggcatagaacttctcccggg

SEQ ID NO: 4635830 - DNA, 25 bp, Homo sapien
gctgggccctggcggctttgtcgtt

SEQ ID NO: 4635831 - DNA, 25 bp, Homo sapien
cctgtggatccgctgctgacccaca

SEQ ID NO: 4635832 - DNA, 25 bp, Homo sapien
gctgcctgtggatccgctgctgacc

SEQ ID NO: 4635833 - DNA, 25 bp, Homo sapien
tcccgccgtgttgctcttgcactcc

SEQ ID NO: 4635834 - DNA, 25 bp, Homo sapien
gctcccgccgtgttgctcttgcact

SEQ ID NO: 4635835 - DNA, 25 bp, Homo sapien
ttgcactccgccttcatctctgtgt

SEQ ID NO: 4635836 - DNA, 25 bp, Homo sapien
tggctcccgccgtgttgctcttgca

SEQ ID NO: 4635837 - DNA, 25 bp, Homo sapien
gagtattttagagacaatggccaac

SEQ ID NO: 4635838 - DNA, 25 bp, Homo sapien
agacaatggccaacatgctttgacc

SEQ ID NO: 4635839 - DNA, 25 bp, Homo sapien
actggctgttccatgggagagtatt

SEQ ID NO: 4635840 - DNA, 25 bp, Homo sapien
ggagagtattttagagacaatggcc

SEQ ID NO: 4635841 - DNA, 25 bp, Homo sapien
aatgaccatgtatctcgagaagaga

SEQ ID NO: 4635842 - DNA, 25 bp, Homo sapien
atggtgaaatgaccatgtatctcga

SEQ ID NO: 4635843 - DNA, 25 bp, Homo sapien
aattcatggtgaaatgaccatgtat

SEQ ID NO: 4635844 - DNA, 25 bp, Homo sapien
gaaatgaccatgtatctcgagaaga

SEQ ID NO: 4635845 - DNA, 25 bp, Homo sapien
cctccttcaattgtagatgctgcag

SEQ ID NO: 4635846 - DNA, 25 bp, Homo sapien
agagaggactggaccaggcttggac

SEQ ID NO: 4635847 - DNA, 25 bp, Homo sapien
cccaggcagagaggactggaccagg

SEQ ID NO: 4635848 - DNA, 25 bp, Homo sapien
gcagagaggactggaccaggcttgg

SEQ ID NO: 4635849 - DNA, 25 bp, Homo sapien
aggcagagaggactggaccaggctt

SEQ ID NO: 4635850 - DNA, 25 bp, Homo sapien
tagatgcattgagttttacagtggt

SEQ ID NO: 4635851 - DNA, 25 bp, Homo sapien
ccatattctacaccgtttctccaaa

SEQ ID NO: 4635852 - DNA, 25 bp, Homo sapien
ggattcagaatgcaggccagtggtc

SEQ ID NO: 4635853 - DNA, 25 bp, Homo sapien
attcagaatgcaggccagtggtccg

SEQ ID NO: 4635854 - DNA, 25 bp, Homo sapien
cagacgttttatccttatgccttca

SEQ ID NO: 4635855 - DNA, 25 bp, Homo sapien
cagaactagagtccgtcttaaaata

SEQ ID NO: 4635856 - DNA, 25 bp, Homo sapien
gtccccaaatacaagagctctaatg

SEQ ID NO: 4635857 - DNA, 25 bp, Homo sapien
ggtatttccacattagagtccccaa

SEQ ID NO: 4635858 - DNA, 25 bp, Homo sapien
gcccagaagactcttgcagtggtga

SEQ ID NO: 4635859 - DNA, 25 bp, Homo sapien
gcagtggtgagccagtctctttatc

SEQ ID NO: 4635860 - DNA, 25 bp, Homo sapien
ggagaggcccagtaccaagatgatc

SEQ ID NO: 4635861 - DNA, 25 bp, Homo sapien
atgatcatccacaataacctgcaca

SEQ ID NO: 4635862 - DNA, 25 bp, Homo sapien
ctgttcatgcactgactcttctaac

SEQ ID NO: 4635863 - DNA, 25 bp, Homo sapien
gatagtctcatcgtggagcaccacc

SEQ ID NO: 4635864 - DNA, 25 bp, Homo sapien
tgtaacttgatgtagcatttgggat

SEQ ID NO: 4635865 - DNA, 25 bp, Homo sapien
cccagtgggccgatacctgtttctt

SEQ ID NO: 4635866 - DNA, 25 bp, Homo sapien
caaagcgcctttgggaaatcgtgcc

SEQ ID NO: 4635867 - DNA, 25 bp, Homo sapien
tcagaattccccagttacaaagtaa

SEQ ID NO: 4635868 - DNA, 25 bp, Homo sapien
gaagagtggtagaacctgagtacaa

SEQ ID NO: 4635869 - DNA, 25 bp, Homo sapien
gatggtgatctacaaaactttactt

SEQ ID NO: 4635870 - DNA, 25 bp, Homo sapien
tactatatccaatcaacagctttct

SEQ ID NO: 4635871 - DNA, 25 bp, Homo sapien
gaaactcggcagttgtaccttgctt

SEQ ID NO: 4635872 - DNA, 25 bp, Homo sapien
gtacaagaaccacgtgcataatatg

SEQ ID NO: 4635873 - DNA, 25 bp, Homo sapien
cattggccttgcatgcgaaactcgg

SEQ ID NO: 4635874 - DNA, 25 bp, Homo sapien
cataatatgatacggcacagtctag

SEQ ID NO: 4635875 - DNA, 25 bp, Homo sapien
tgagcttttgctttaaaatacattc

SEQ ID NO: 4635876 - DNA, 25 bp, Homo sapien
tttgagcttttgctttaaaatacat

SEQ ID NO: 4635877 - DNA, 25 bp, Homo sapien
ctttgagcttttgctttaaaataca

SEQ ID NO: 4635878 - DNA, 25 bp, Homo sapien
agcttttgctttaaaatacattcag

SEQ ID NO: 4635879 - DNA, 25 bp, Homo sapien
tgtcccagacgtttctgcattctga

SEQ ID NO: 4635880 - DNA, 25 bp, Homo sapien
ggttggagataggtccagcaaccaa

SEQ ID NO: 4635881 - DNA, 25 bp, Homo sapien
gcaaccaatacaggtttcagtaact

SEQ ID NO: 4635882 - DNA, 25 bp, Homo sapien
agagtatgctcgtgttgtcccagac

SEQ ID NO: 4635883 - DNA, 25 bp, Homo sapien
aatagtgaccaagaaatgcagcagc

SEQ ID NO: 4635884 - DNA, 25 bp, Homo sapien
tttaatcgactactatcccagacag

SEQ ID NO: 4635885 - DNA, 25 bp, Homo sapien
ggtgtgttcctcagcaagtcgtcca

SEQ ID NO: 4635886 - DNA, 25 bp, Homo sapien
tgcctcaggaaaaaaggtggctctg

SEQ ID NO: 4635887 - DNA, 25 bp, Homo sapien
tgttcttcccatacgcgaatggcag

SEQ ID NO: 4635888 - DNA, 25 bp, Homo sapien
gttcttcccatacgcgaatggcagg

SEQ ID NO: 4635889 - DNA, 25 bp, Homo sapien
ctctgttcttcccatacgcgaatgg

SEQ ID NO: 4635890 - DNA, 25 bp, Homo sapien
cttcccatacgcgaatggcaggcat

SEQ ID NO: 4635891 - DNA, 25 bp, Homo sapien
agactgccctgagaccgccctttga

SEQ ID NO: 4635892 - DNA, 25 bp, Homo sapien
ggatggggagctcttaagactgccc

SEQ ID NO: 4635893 - DNA, 25 bp, Homo sapien
tggagagtccttgccagttctttgg

SEQ ID NO: 4635894 - DNA, 25 bp, Homo sapien
agctcttaagactgccctgagaccg

SEQ ID NO: 4635895 - DNA, 25 bp, Homo sapien
gcccccggagaggagcgattaagtg

SEQ ID NO: 4635896 - DNA, 25 bp, Homo sapien
ccccggagaggagcgattaagtgca

SEQ ID NO: 4635897 - DNA, 25 bp, Homo sapien
cgcccccggagaggagcgattaagt

SEQ ID NO: 4635898 - DNA, 25 bp, Homo sapien
cccccggagaggagcgattaagtgc

SEQ ID NO: 4635899 - DNA, 25 bp, Homo sapien
tccagatctcgatcccaaactccct

SEQ ID NO: 4635900 - DNA, 25 bp, Homo sapien
tcctcttccagtctagtgctttttt

SEQ ID NO: 4635901 - DNA, 25 bp, Homo sapien
tccagtctagtgcttttttccagat

SEQ ID NO: 4635902 - DNA, 25 bp, Homo sapien
agaatctggacccgaatccacccat

SEQ ID NO: 4635903 - DNA, 25 bp, Homo sapien
agtcgcggtggccaccactgtgcgc

SEQ ID NO: 4635904 - DNA, 25 bp, Homo sapien
gcgacgcgtgcgcaggtaaagtcca

SEQ ID NO: 4635905 - DNA, 25 bp, Homo sapien
cactgtgcgcggagatggctgcgac

SEQ ID NO: 4635906 - DNA, 25 bp, Homo sapien
ggtaaagtccatccgtgccttgcct

SEQ ID NO: 4635907 - DNA, 25 bp, Homo sapien
tcccactgagatgacccatagtacc

SEQ ID NO: 4635908 - DNA, 25 bp, Homo sapien
ctcccactgagatgacccatagtac

SEQ ID NO: 4635909 - DNA, 25 bp, Homo sapien
gagatgacccatagtaccccattcc

SEQ ID NO: 4635910 - DNA, 25 bp, Homo sapien
actgagatgacccatagtaccccat

SEQ ID NO: 4635911 - DNA, 25 bp, Homo sapien
tgagcttaattgatacctatgtgta

SEQ ID NO: 4635912 - DNA, 25 bp, Homo sapien
tgttttggggcatcacaagccatgg

SEQ ID NO: 4635913 - DNA, 25 bp, Homo sapien
taattgatacctatgtgtattcgaa

SEQ ID NO: 4635914 - DNA, 25 bp, Homo sapien
tgatacctatgtgtattcgaatggt

SEQ ID NO: 4635915 - DNA, 25 bp, Homo sapien
tacaccgtggtgttagaattgaggg

SEQ ID NO: 4635916 - DNA, 25 bp, Homo sapien
gacaaagtgctgtcgtaacagagaa

SEQ ID NO: 4635917 - DNA, 25 bp, Homo sapien
gaattgagggttccagaatcaatgg

SEQ ID NO: 4635918 - DNA, 25 bp, Homo sapien
gaaagtaccaccttagacaaagtgc

SEQ ID NO: 4635919 - DNA, 25 bp, Homo sapien
actgcacctagcccatttaccccac

SEQ ID NO: 4635920 - DNA, 25 bp, Homo sapien
tgcacctagcccatttaccccactt

SEQ ID NO: 4635921 - DNA, 25 bp, Homo sapien
tcttcttctaaaactatatttccaa

SEQ ID NO: 4635922 - DNA, 25 bp, Homo sapien
tccaatttagtctttaatatataat

SEQ ID NO: 4635923 - DNA, 25 bp, Homo sapien
tcagttttaagtaatatcccttgac

SEQ ID NO: 4635924 - DNA, 25 bp, Homo sapien
taaattaaagcaacacatgtgcatg

SEQ ID NO: 4635925 - DNA, 25 bp, Homo sapien
catacaccattgactaaaggaaacc

SEQ ID NO: 4635926 - DNA, 25 bp, Homo sapien
tatgctattctcttgaactgtaaat

SEQ ID NO: 4635927 - DNA, 25 bp, Homo sapien
caaacagtgcccttcgaatctgttg

SEQ ID NO: 4635928 - DNA, 25 bp, Homo sapien
tacacattatcaataaggtcaaggc

SEQ ID NO: 4635929 - DNA, 25 bp, Homo sapien
tcccagttatttgcgatatttctcc

SEQ ID NO: 4635930 - DNA, 25 bp, Homo sapien
tgatagtggccatcacaagttacac

SEQ ID NO: 4635931 - DNA, 25 bp, Homo sapien
gtttgcagactcatctgagggctta

SEQ ID NO: 4635932 - DNA, 25 bp, Homo sapien
tgagggcttaggcagatctggacct

SEQ ID NO: 4635933 - DNA, 25 bp, Homo sapien
gatctggacctgttgatactgaagt

SEQ ID NO: 4635934 - DNA, 25 bp, Homo sapien
aatgttgacacaatgattgtttgca

SEQ ID NO: 4635935 - DNA, 25 bp, Homo sapien
tgtgctccgtgttctcccacaatag

SEQ ID NO: 4635936 - DNA, 25 bp, Homo sapien
cctgcctgatgtcagttatggacta

SEQ ID NO: 4635937 - DNA, 25 bp, Homo sapien
gggtcccctgcctcttagagctgct

SEQ ID NO: 4635938 - DNA, 25 bp, Homo sapien
tgtagcttagctagagacccgctgc

SEQ ID NO: 4635939 - DNA, 25 bp, Homo sapien
aagaagctgaccaccgagttacaga

SEQ ID NO: 4635940 - DNA, 25 bp, Homo sapien
caaggacagatgtgactaacttcag

SEQ ID NO: 4635941 - DNA, 25 bp, Homo sapien
cagattcatgggaaagacatcagga

SEQ ID NO: 4635942 - DNA, 25 bp, Homo sapien
tatgcgggaaaactccagcctggtg

SEQ ID NO: 4635943 - DNA, 25 bp, Homo sapien
gtcttgagtagttcttcataacagc

SEQ ID NO: 4635944 - DNA, 25 bp, Homo sapien
tgcccagccatgtcaaactatgagt

SEQ ID NO: 4635945 - DNA, 25 bp, Homo sapien
aattggtaccacagacatagggtgc

SEQ ID NO: 4635946 - DNA, 25 bp, Homo sapien
taggagtggttttctccacgctgtt

SEQ ID NO: 4635947 - DNA, 25 bp, Homo sapien
caggagtatggtctgttcccctttc

SEQ ID NO: 4635948 - DNA, 25 bp, Homo sapien
tggcaagagtgctgtatgtaacatc

SEQ ID NO: 4635949 - DNA, 25 bp, Homo sapien
tcaaggaaacttgatgtctaagtag

SEQ ID NO: 4635950 - DNA, 25 bp, Homo sapien
gtgctgtatgtaacatcaaggaaac

SEQ ID NO: 4635951 - DNA, 25 bp, Homo sapien
tcctctcatactctgttctccaaag

SEQ ID NO: 4635952 - DNA, 25 bp, Homo sapien
ctgttctccaaagaccctcaaacct

SEQ ID NO: 4635953 - DNA, 25 bp, Homo sapien
tgggcatcctcctctcatactctgt

SEQ ID NO: 4635954 - DNA, 25 bp, Homo sapien
tctcatactctgttctccaaagacc

SEQ ID NO: 4635955 - DNA, 25 bp, Homo sapien
gtagaggcagagcacgaccagctcc

SEQ ID NO: 4635956 - DNA, 25 bp, Homo sapien
tcttgtgctacagaagaacccttcc

SEQ ID NO: 4635957 - DNA, 25 bp, Homo sapien
acaggacaatttggcggtacatacc

SEQ ID NO: 4635958 - DNA, 25 bp, Homo sapien
tccactagtggtcatgggtctccca

SEQ ID NO: 4635959 - DNA, 25 bp, Homo sapien
atggttctccttcatattctagact

SEQ ID NO: 4635960 - DNA, 25 bp, Homo sapien
ttcccatggttctccttcatattct

SEQ ID NO: 4635961 - DNA, 25 bp, Homo sapien
ctgtctttgtagttctttgcctcct

SEQ ID NO: 4635962 - DNA, 25 bp, Homo sapien
atttccattttgtgagatctgtctt

SEQ ID NO: 4635963 - DNA, 25 bp, Homo sapien
gatgtgatgagtcatggattgtcct

SEQ ID NO: 4635964 - DNA, 25 bp, Homo sapien
ctgttaacatggctgtgggatgtga

SEQ ID NO: 4635965 - DNA, 25 bp, Homo sapien
tgatgagtcatggattgtcctggac

SEQ ID NO: 4635966 - DNA, 25 bp, Homo sapien
tgttaacatggctgtgggatgtgat

SEQ ID NO: 4635967 - DNA, 25 bp, Homo sapien
tgtcctctagcaggtgtagctctgg

SEQ ID NO: 4635968 - DNA, 25 bp, Homo sapien
agctgtgtcctctagcaggtgtagc

SEQ ID NO: 4635969 - DNA, 25 bp, Homo sapien
ttaagctgtgtcctctagcaggtgt

SEQ ID NO: 4635970 - DNA, 25 bp, Homo sapien
tgtgtcctctagcaggtgtagctct

SEQ ID NO: 4635971 - DNA, 25 bp, Homo sapien
catagattattgtatttcactttat

SEQ ID NO: 4635972 - DNA, 25 bp, Homo sapien
tcatagattattgtatttcacttta

SEQ ID NO: 4635973 - DNA, 25 bp, Homo sapien
gagtcacaggctacatgtcctatag

SEQ ID NO: 4635974 - DNA, 25 bp, Homo sapien
gaaatgctgtcctgattccacaggg

SEQ ID NO: 4635975 - DNA, 25 bp, Homo sapien
ctagctcttggaacatcatgcctga

SEQ ID NO: 4635976 - DNA, 25 bp, Homo sapien
gaaaacttaagacagccacatgcac

SEQ ID NO: 4635977 - DNA, 25 bp, Homo sapien
ggagtcctggggtaacctgagcaaa

SEQ ID NO: 4635978 - DNA, 25 bp, Homo sapien
cataaaacttctggagtcctggggt

SEQ ID NO: 4635979 - DNA, 25 bp, Homo sapien
aagaagcataaaacttctggagtcc

SEQ ID NO: 4635980 - DNA, 25 bp, Homo sapien
tcccactcctactcagaagacagac

SEQ ID NO: 4635981 - DNA, 25 bp, Homo sapien
tctgcaatagtaaggccaatcctgc

SEQ ID NO: 4635982 - DNA, 25 bp, Homo sapien
gaagtctgtgcaatcactgtgaaac

SEQ ID NO: 4635983 - DNA, 25 bp, Homo sapien
ttttctttctgcaatagtaaggcca

SEQ ID NO: 4635984 - DNA, 25 bp, Homo sapien
ctgcagggaccgaagtctgtgcaat

SEQ ID NO: 4635985 - DNA, 25 bp, Homo sapien
tgcatatgccacattgattaatggc

SEQ ID NO: 4635986 - DNA, 25 bp, Homo sapien
gggacagtacgagatagttcattat

SEQ ID NO: 4635987 - DNA, 25 bp, Homo sapien
gcaaacaccacttgggccctatttc

SEQ ID NO: 4635988 - DNA, 25 bp, Homo sapien
gcacatcgaacttgtaatacagcat

SEQ ID NO: 4635989 - DNA, 25 bp, Homo sapien
tttataggagtctgccccagtactg

SEQ ID NO: 4635990 - DNA, 25 bp, Homo sapien
ttataggagtctgccccagtactgc

SEQ ID NO: 4635991 - DNA, 25 bp, Homo sapien
aacaaggacattgggtgttcttcta

SEQ ID NO: 4635992 - DNA, 25 bp, Homo sapien
aattcctgttgaacaaggacattgg

SEQ ID NO: 4635993 - DNA, 25 bp, Homo sapien
ctgttgaacaaggacattgggtgtt

SEQ ID NO: 4635994 - DNA, 25 bp, Homo sapien
tgaacaaggacattgggtgttcttc

SEQ ID NO: 4635995 - DNA, 25 bp, Homo sapien
tcagtgggacccttaagtggccgtc

SEQ ID NO: 4635996 - DNA, 25 bp, Homo sapien
tagctgtgtactgggcggggacccc

SEQ ID NO: 4635997 - DNA, 25 bp, Homo sapien
ccttaagtggccgtcaggacaggcg

SEQ ID NO: 4635998 - DNA, 25 bp, Homo sapien
ccctggacgggttcgagttctcttg

SEQ ID NO: 4635999 - DNA, 25 bp, Homo sapien
gtgtgtgtcgggaatcctgcgtgtc

SEQ ID NO: 4636000 - DNA, 25 bp, Homo sapien
gctgcgtgtgttgcgctcccgtgtg

SEQ ID NO: 4636001 - DNA, 25 bp, Homo sapien
ggctgcgtgtgttgcgctcccgtgt

SEQ ID NO: 4636002 - DNA, 25 bp, Homo sapien
gtgtcgggaatcctgcgtgtcgtgc

SEQ ID NO: 4636003 - DNA, 25 bp, Homo sapien
cttttgatgccaaaatctgagcccc

SEQ ID NO: 4636004 - DNA, 25 bp, Homo sapien
ctcaggtctgacttttgatgccaaa

SEQ ID NO: 4636005 - DNA, 25 bp, Homo sapien
gacttttgatgccaaaatctgagcc

SEQ ID NO: 4636006 - DNA, 25 bp, Homo sapien
gccaaaatctgagcccctggggtac

SEQ ID NO: 4636007 - DNA, 25 bp, Homo sapien
ccaagacgcaatcgggccccactcg

SEQ ID NO: 4636008 - DNA, 25 bp, Homo sapien
acgcaatcgggccccactcgcagaa

SEQ ID NO: 4636009 - DNA, 25 bp, Homo sapien
ccactcgcagaaccgcctggaccct

SEQ ID NO: 4636010 - DNA, 25 bp, Homo sapien
cgccgtcccgcgcctgggtcccgcg

SEQ ID NO: 4636011 - DNA, 25 bp, Homo sapien
gccctgttaggccaccggcattggg

SEQ ID NO: 4636012 - DNA, 25 bp, Homo sapien
gcccaacctccgcatagccttggag

SEQ ID NO: 4636013 - DNA, 25 bp, Homo sapien
aacctccgcatagccttggagaccc

SEQ ID NO: 4636014 - DNA, 25 bp, Homo sapien
cctgggagccctgttaggccaccgg

SEQ ID NO: 4636015 - DNA, 25 bp, Homo sapien
tgactaaatcgaggccgagaaggga

SEQ ID NO: 4636016 - DNA, 25 bp, Homo sapien
gctccctgagttgtgcggtgactaa

SEQ ID NO: 4636017 - DNA, 25 bp, Homo sapien
tgagttgtgcggtgactaaatcgag

SEQ ID NO: 4636018 - DNA, 25 bp, Homo sapien
tgcggtgactaaatcgaggccgaga

SEQ ID NO: 4636019 - DNA, 25 bp, Homo sapien
gactcacaactagagtaaggaatat

SEQ ID NO: 4636020 - DNA, 25 bp, Homo sapien
ttggactcacaactagagtaaggaa

SEQ ID NO: 4636021 - DNA, 25 bp, Homo sapien
tcacaactagagtaaggaatataag

SEQ ID NO: 4636022 - DNA, 25 bp, Homo sapien
cttggactcacaactagagtaagga

SEQ ID NO: 4636023 - DNA, 25 bp, Homo sapien
accgcaccccgcctgtatttggatt

SEQ ID NO: 4636024 - DNA, 25 bp, Homo sapien
taataatttgatccactgttcaaca

SEQ ID NO: 4636025 - DNA, 25 bp, Homo sapien
aatcagcaaacatctatttactcag

SEQ ID NO: 4636026 - DNA, 25 bp, Homo sapien
aaccgagtcttgctcagtctcccag

SEQ ID NO: 4636027 - DNA, 25 bp, Homo sapien
catgaattgtgagtgtatcacacat

SEQ ID NO: 4636028 - DNA, 25 bp, Homo sapien
accatgaattgtgagtgtatcacac

SEQ ID NO: 4636029 - DNA, 25 bp, Homo sapien
caccatgaattgtgagtgtatcaca

SEQ ID NO: 4636030 - DNA, 25 bp, Homo sapien
tcaccatgaattgtgagtgtatcac

SEQ ID NO: 4636031 - DNA, 25 bp, Homo sapien
tcctcattgtccttttcaactctct

SEQ ID NO: 4636032 - DNA, 25 bp, Homo sapien
cctcattgtccttttcaactctctt

SEQ ID NO: 4636033 - DNA, 25 bp, Homo sapien
tttcaactctcttctcgagatacat

SEQ ID NO: 4636034 - DNA, 25 bp, Homo sapien
ttttcaactctcttctcgagataca

SEQ ID NO: 4636035 - DNA, 25 bp, Homo sapien
ggaatgtccacaatggctcctgtcc

SEQ ID NO: 4636036 - DNA, 25 bp, Homo sapien
ctggaatgtccacaatggctcctgt

SEQ ID NO: 4636037 - DNA, 25 bp, Homo sapien
gaatgtccacaatggctcctgtcct

SEQ ID NO: 4636038 - DNA, 25 bp, Homo sapien
tggaatgtccacaatggctcctgtc

SEQ ID NO: 4636039 - DNA, 25 bp, Homo sapien
ctatgggtcttggaaccaaatggac

SEQ ID NO: 4636040 - DNA, 25 bp, Homo sapien
accaaatggaccctttccaccaatg

SEQ ID NO: 4636041 - DNA, 25 bp, Homo sapien
ccaccaatgccattaccaagggcat

SEQ ID NO: 4636042 - DNA, 25 bp, Homo sapien
tggaccctttccaccaatgccatta

SEQ ID NO: 4636043 - DNA, 25 bp, Homo sapien
tccagggactttcagaccaactcgc

SEQ ID NO: 4636044 - DNA, 25 bp, Homo sapien
tgattccagggactttcagaccaac

SEQ ID NO: 4636045 - DNA, 25 bp, Homo sapien
actgaccatggccaattggcaccaa

SEQ ID NO: 4636046 - DNA, 25 bp, Homo sapien
gctatttacaaccttaatgccagtc

SEQ ID NO: 4636047 - DNA, 25 bp, Homo sapien
ccagtctgtccattaccaataatca

SEQ ID NO: 4636048 - DNA, 25 bp, Homo sapien
tcatcagatccatcattgaaacatt

SEQ ID NO: 4636049 - DNA, 25 bp, Homo sapien
tgaccaataacaacatagacacagt

SEQ ID NO: 4636050 - DNA, 25 bp, Homo sapien
cagtggatctcttttgaccaataac

SEQ ID NO: 4636051 - DNA, 25 bp, Homo sapien
aacaacatagacacagtacagcttc

SEQ ID NO: 4636052 - DNA, 25 bp, Homo sapien
ctgacaccacgatggtgtaattcat

SEQ ID NO: 4636053 - DNA, 25 bp, Homo sapien
tgacaccacgatggtgtaattcatg

SEQ ID NO: 4636054 - DNA, 25 bp, Homo sapien
gctgacaccacgatggtgtaattca

SEQ ID NO: 4636055 - DNA, 25 bp, Homo sapien
agctgacaccacgatggtgtaattc

SEQ ID NO: 4636056 - DNA, 25 bp, Homo sapien
agatccgacaggagacacagaccga

SEQ ID NO: 4636057 - DNA, 25 bp, Homo sapien
atccgacaggagacacagaccgaca

SEQ ID NO: 4636058 - DNA, 25 bp, Homo sapien
gcagatccgacaggagacacagacc

SEQ ID NO: 4636059 - DNA, 25 bp, Homo sapien
gaccgacatggcagggtggatacct

SEQ ID NO: 4636060 - DNA, 25 bp, Homo sapien
agaactgaactgggcaaaagtggtg

SEQ ID NO: 4636061 - DNA, 25 bp, Homo sapien
caactcagttagacacacaccacaa

SEQ ID NO: 4636062 - DNA, 25 bp, Homo sapien
gcaactcagttagacacacaccaca

SEQ ID NO: 4636063 - DNA, 25 bp, Homo sapien
tttatcaagatagcccctaataccc

SEQ ID NO: 4636064 - DNA, 25 bp, Homo sapien
ttggtgccagctgacatgagacaag

SEQ ID NO: 4636065 - DNA, 25 bp, Homo sapien
ggcttggtgccagctgacatgagac

SEQ ID NO: 4636066 - DNA, 25 bp, Homo sapien
cctaatacccacatggataacagcc

SEQ ID NO: 4636067 - DNA, 25 bp, Homo sapien
gatttctgtacataaggagtatgag

SEQ ID NO: 4636068 - DNA, 25 bp, Homo sapien
ggtatttgatgtaaatccacaggcg

SEQ ID NO: 4636069 - DNA, 25 bp, Homo sapien
tcacaaatgaaactaatctactaga

SEQ ID NO: 4636070 - DNA, 25 bp, Homo sapien
ggagtatgagagtaaccctttcaca

SEQ ID NO: 4636071 - DNA, 25 bp, Homo sapien
tttccaccctgacataacataaaag

SEQ ID NO: 4636072 - DNA, 25 bp, Homo sapien
tccaccctgacataacataaaagac

SEQ ID NO: 4636073 - DNA, 25 bp, Homo sapien
caccctgacataacataaaagacaa

SEQ ID NO: 4636074 - DNA, 25 bp, Homo sapien
ggtttgagcagggatacttatgtca

SEQ ID NO: 4636075 - DNA, 25 bp, Homo sapien
tatctaacattctttattctcaagg

SEQ ID NO: 4636076 - DNA, 25 bp, Homo sapien
ttcttcttgcataaacctctgctgg

SEQ ID NO: 4636077 - DNA, 25 bp, Homo sapien
gctggtatctaacattctttattct

SEQ ID NO: 4636078 - DNA, 25 bp, Homo sapien
aaacctctgctggtatctaacattc

SEQ ID NO: 4636079 - DNA, 25 bp, Homo sapien
cagagaacaactacttgcacgtata

SEQ ID NO: 4636080 - DNA, 25 bp, Homo sapien
tctttccaaaactggcgaactctgt

SEQ ID NO: 4636081 - DNA, 25 bp, Homo sapien
agtcccagaagaggttcagccacgc

SEQ ID NO: 4636082 - DNA, 25 bp, Homo sapien
tgctgtccgttgtccagtcccagaa

SEQ ID NO: 4636083 - DNA, 25 bp, Homo sapien
ctgtggtcgttaggaaacagaagaa

SEQ ID NO: 4636084 - DNA, 25 bp, Homo sapien
agaagaaagcagctagccacagctt

SEQ ID NO: 4636085 - DNA, 25 bp, Homo sapien
gaagaaagcagctagccacagcttc

SEQ ID NO: 4636086 - DNA, 25 bp, Homo sapien
aagaaagcagctagccacagcttca

SEQ ID NO: 4636087 - DNA, 25 bp, Homo sapien
tcagcggggaataatctccaccaag

SEQ ID NO: 4636088 - DNA, 25 bp, Homo sapien
cttgggcaaggacaagcaccttgac

SEQ ID NO: 4636089 - DNA, 25 bp, Homo sapien
acagaggttgtagagctctttgcag

SEQ ID NO: 4636090 - DNA, 25 bp, Homo sapien
ctccaccaagaacagtaatagcttg

SEQ ID NO: 4636091 - DNA, 25 bp, Homo sapien
atacgctgcaatagcccatgcacca

SEQ ID NO: 4636092 - DNA, 25 bp, Homo sapien
aagactttctcatacgctgcaatag

SEQ ID NO: 4636093 - DNA, 25 bp, Homo sapien
gactttctcatacgctgcaatagcc

SEQ ID NO: 4636094 - DNA, 25 bp, Homo sapien
ttctcatacgctgcaatagcccatg

SEQ ID NO: 4636095 - DNA, 25 bp, Homo sapien
gctgctgcgcttctgtctgggtctc

SEQ ID NO: 4636096 - DNA, 25 bp, Homo sapien
tctgcaatctgacccatgcaggtgg

SEQ ID NO: 4636097 - DNA, 25 bp, Homo sapien
tcacactgtggtcatgtcactgaag

SEQ ID NO: 4636098 - DNA, 25 bp, Homo sapien
gtcatgtcactgaagccacatctgc

SEQ ID NO: 4636099 - DNA, 25 bp, Homo sapien
catcgcgctgcacggtcttcccttc

SEQ ID NO: 4636100 - DNA, 25 bp, Homo sapien
gcgctgcaaggacgccctgtccctg

SEQ ID NO: 4636101 - DNA, 25 bp, Homo sapien
cctgatccccatcgcgctgcacggt

SEQ ID NO: 4636102 - DNA, 25 bp, Homo sapien
tcttcccttccaacaccgagggcgc

SEQ ID NO: 4636103 - DNA, 25 bp, Homo sapien
cctcttgacaaacgtttttgtgtct

SEQ ID NO: 4636104 - DNA, 25 bp, Homo sapien
ttgacaaacgtttttgtgtcttcca

SEQ ID NO: 4636105 - DNA, 25 bp, Homo sapien
gattactactagcttgttgctgatg

SEQ ID NO: 4636106 - DNA, 25 bp, Homo sapien
ttccatgaggatgattactactagc

SEQ ID NO: 4636107 - DNA, 25 bp, Homo sapien
gatgattagcaatagtcctacaaac

SEQ ID NO: 4636108 - DNA, 25 bp, Homo sapien
tgaactctgtatatcaaggcagtat

SEQ ID NO: 4636109 - DNA, 25 bp, Homo sapien
ccaagtttaattatttgggccatag

SEQ ID NO: 4636110 - DNA, 25 bp, Homo sapien
cagactcctgatttagatgattagc

SEQ ID NO: 4636111 - DNA, 25 bp, Homo sapien
agccagagcatctgccgaagtttgg

SEQ ID NO: 4636112 - DNA, 25 bp, Homo sapien
gccagagcatctgccgaagtttggg

SEQ ID NO: 4636113 - DNA, 25 bp, Homo sapien
tggtcctcgggctgatgggctccaa

SEQ ID NO: 4636114 - DNA, 25 bp, Homo sapien
cctcgggctgatgggctccaaagcc

SEQ ID NO: 4636115 - DNA, 25 bp, Homo sapien
taggccagccaccgaacatggcctt

SEQ ID NO: 4636116 - DNA, 25 bp, Homo sapien
ctaggccagccaccgaacatggcct

SEQ ID NO: 4636117 - DNA, 25 bp, Homo sapien
aggccagccaccgaacatggccttc

SEQ ID NO: 4636118 - DNA, 25 bp, Homo sapien
tggatgttcccatcaggagtgaact

SEQ ID NO: 4636119 - DNA, 25 bp, Homo sapien
gaatgaacagtcaagccatgcctcc

SEQ ID NO: 4636120 - DNA, 25 bp, Homo sapien
tgaatgaacagtcaagccatgcctc

SEQ ID NO: 4636121 - DNA, 25 bp, Homo sapien
tttgaatgaacagtcaagccatgcc

SEQ ID NO: 4636122 - DNA, 25 bp, Homo sapien
ttgaatgaacagtcaagccatgcct

SEQ ID NO: 4636123 - DNA, 25 bp, Homo sapien
tggccaagggtgacatttcctccag

SEQ ID NO: 4636124 - DNA, 25 bp, Homo sapien
ctgtgtggccaagggtgacatttcc

SEQ ID NO: 4636125 - DNA, 25 bp, Homo sapien
tgtggccaagggtgacatttcctcc

SEQ ID NO: 4636126 - DNA, 25 bp, Homo sapien
gccaagggtgacatttcctccaggc

SEQ ID NO: 4636127 - DNA, 25 bp, Homo sapien
tgcgagcctccatgcagcattcgct

SEQ ID NO: 4636128 - DNA, 25 bp, Homo sapien
gaggagtcagttatcagtgccgctg

SEQ ID NO: 4636129 - DNA, 25 bp, Homo sapien
tatcagtgccgctggtggacgtgaa

SEQ ID NO: 4636130 - DNA, 25 bp, Homo sapien
gagcctccatgcagcattcgctgga

SEQ ID NO: 4636131 - DNA, 25 bp, Homo sapien
cacgtcgtttatcctcgtgtatctg

SEQ ID NO: 4636132 - DNA, 25 bp, Homo sapien
ccctgtctctgtaagggcagcaata

SEQ ID NO: 4636133 - DNA, 25 bp, Homo sapien
cagagtcatgaagtagcacgtcgtt

SEQ ID NO: 4636134 - DNA, 25 bp, Homo sapien
ttggcagcaaatcctcagagtcatg

SEQ ID NO: 4636135 - DNA, 25 bp, Homo sapien
gggctgctgcacgggagacgctgcc

SEQ ID NO: 4636136 - DNA, 25 bp, Homo sapien
tcacaggagccatcggcttcctgcg

SEQ ID NO: 4636137 - DNA, 25 bp, Homo sapien
ggcttcctgcggcttcctccagagc

SEQ ID NO: 4636138 - DNA, 25 bp, Homo sapien
gctgctgcacgggagacgctgccct

SEQ ID NO: 4636139 - DNA, 25 bp, Homo sapien
tcttagtctgtgcttatgtctttgt

SEQ ID NO: 4636140 - DNA, 25 bp, Homo sapien
tgtgcttatgtctttgtgatgtttc

SEQ ID NO: 4636141 - DNA, 25 bp, Homo sapien
tttttcttagtctgtgcttatgtct

SEQ ID NO: 4636142 - DNA, 25 bp, Homo sapien
tagtctgtgcttatgtctttgtgat

SEQ ID NO: 4636143 - DNA, 25 bp, Homo sapien
cacgaaggtcagcttcaccgtgggc

SEQ ID NO: 4636144 - DNA, 25 bp, Homo sapien
ccttgacacgaaggtcagcttcacc

SEQ ID NO: 4636145 - DNA, 25 bp, Homo sapien
gaaggtcagcttcaccgtgggcaag

SEQ ID NO: 4636146 - DNA, 25 bp, Homo sapien
gacacgaaggtcagcttcaccgtgg

SEQ ID NO: 4636147 - DNA, 25 bp, Homo sapien
ctttgcaactagctgaaggatatca

SEQ ID NO: 4636148 - DNA, 25 bp, Homo sapien
taactttccaatattatcatttcat

SEQ ID NO: 4636149 - DNA, 25 bp, Homo sapien
atatcataactttccaatattatca

SEQ ID NO: 4636150 - DNA, 25 bp, Homo sapien
ttgcaactagctgaaggatatcata

SEQ ID NO: 4636151 - DNA, 25 bp, Homo sapien
gatattcaacatgacaatgcatgtg

SEQ ID NO: 4636152 - DNA, 25 bp, Homo sapien
atctttttcaggatgccactgatgt

SEQ ID NO: 4636153 - DNA, 25 bp, Homo sapien
aatactgatattcaacatgacaatg

SEQ ID NO: 4636154 - DNA, 25 bp, Homo sapien
tactgatattcaacatgacaatgca

SEQ ID NO: 4636155 - DNA, 25 bp, Homo sapien
tggattggtattgcaataaggtaaa

SEQ ID NO: 4636156 - DNA, 25 bp, Homo sapien
tattctcctctttttggattggtat

SEQ ID NO: 4636157 - DNA, 25 bp, Homo sapien
ggattggtattgcaataaggtaaaa

SEQ ID NO: 4636158 - DNA, 25 bp, Homo sapien
tcctctttttggattggtattgcaa

SEQ ID NO: 4636159 - DNA, 25 bp, Homo sapien
taggcactccaaactctgattgtaa

SEQ ID NO: 4636160 - DNA, 25 bp, Homo sapien
tcccagaaacaagtacatcgccctt

SEQ ID NO: 4636161 - DNA, 25 bp, Homo sapien
tgtaaggcctacctgattgctggca

SEQ ID NO: 4636162 - DNA, 25 bp, Homo sapien
gaaacaagtacatcgccctttgctg

SEQ ID NO: 4636163 - DNA, 25 bp, Homo sapien
catgagatctactctcttatgagat

SEQ ID NO: 4636164 - DNA, 25 bp, Homo sapien
ttgataagcaactcctcacttccct

SEQ ID NO: 4636165 - DNA, 25 bp, Homo sapien
taggcacagtattacacagcagatc

SEQ ID NO: 4636166 - DNA, 25 bp, Homo sapien
taagcaaattatacgggatttgtct

SEQ ID NO: 4636167 - DNA, 25 bp, Homo sapien
atacataggactggggcacttgctc

SEQ ID NO: 4636168 - DNA, 25 bp, Homo sapien
gacataaatacataggactggggca

SEQ ID NO: 4636169 - DNA, 25 bp, Homo sapien
cataaatacataggactggggcact

SEQ ID NO: 4636170 - DNA, 25 bp, Homo sapien
taaatacataggactggggcacttg

SEQ ID NO: 4636171 - DNA, 25 bp, Homo sapien
tacactaaattcatcccagtgggat

SEQ ID NO: 4636172 - DNA, 25 bp, Homo sapien
tatggaaacattgtggatccgtact

SEQ ID NO: 4636173 - DNA, 25 bp, Homo sapien
gatccgtacttacgccttacactaa

SEQ ID NO: 4636174 - DNA, 25 bp, Homo sapien
aatatgtgagtcatttagtaaaaag

SEQ ID NO: 4636175 - DNA, 25 bp, Homo sapien
gattctggctaaggacactgttaca

SEQ ID NO: 4636176 - DNA, 25 bp, Homo sapien
taaaggccattttagctaaaggcac

SEQ ID NO: 4636177 - DNA, 25 bp, Homo sapien
taagatctaatattgccaaggacag

SEQ ID NO: 4636178 - DNA, 25 bp, Homo sapien
taaaggcactgttgctaagtacact

SEQ ID NO: 4636179 - DNA, 25 bp, Homo sapien
ttggcaaagtatggtgcatccagcc

SEQ ID NO: 4636180 - DNA, 25 bp, Homo sapien
gggcttgataattgcctcctccata

SEQ ID NO: 4636181 - DNA, 25 bp, Homo sapien
ggtttataaccattcgtgtaacaca

SEQ ID NO: 4636182 - DNA, 25 bp, Homo sapien
tcctccatataccttctgaggtcgg

SEQ ID NO: 4636183 - DNA, 25 bp, Homo sapien
catactgctttcaacaaatcgggca

SEQ ID NO: 4636184 - DNA, 25 bp, Homo sapien
tcatactgctttcaacaaatcgggc

SEQ ID NO: 4636185 - DNA, 25 bp, Homo sapien
cacaaatcatggacaggaggagcca

SEQ ID NO: 4636186 - DNA, 25 bp, Homo sapien
tttcaatggtggagaggccagtgcc

SEQ ID NO: 4636187 - DNA, 25 bp, Homo sapien
tctgggccctgtccatatgggaaag

SEQ ID NO: 4636188 - DNA, 25 bp, Homo sapien
tagatgacaatggaaatggccctgc

SEQ ID NO: 4636189 - DNA, 25 bp, Homo sapien
aagtagttctgggtgaatggagtag

SEQ ID NO: 4636190 - DNA, 25 bp, Homo sapien
ggcttctgatggtgggactctgtag

SEQ ID NO: 4636191 - DNA, 25 bp, Homo sapien
tgggtgaatggagtagggtatgcct

SEQ ID NO: 4636192 - DNA, 25 bp, Homo sapien
gcttctgatggtgggactctgtaga

SEQ ID NO: 4636193 - DNA, 25 bp, Homo sapien
cactgaaccttatgtttccgtaata

SEQ ID NO: 4636194 - DNA, 25 bp, Homo sapien
tcactgaaccttatgtttccgtaat

SEQ ID NO: 4636195 - DNA, 25 bp, Homo sapien
atggaaggcaaagaatctctcgtgt

SEQ ID NO: 4636196 - DNA, 25 bp, Homo sapien
tggaaggcaaagaatctctcgtgtg

SEQ ID NO: 4636197 - DNA, 25 bp, Homo sapien
gaaggcaaagaatctctcgtgtgtc

SEQ ID NO: 4636198 - DNA, 25 bp, Homo sapien
aaggcaaagaatctctcgtgtgtca

SEQ ID NO: 4636199 - DNA, 25 bp, Homo sapien
gaagtgtagtttgagaatggagaaa

SEQ ID NO: 4636200 - DNA, 25 bp, Homo sapien
cacatggaaggattcatcaagagaa

SEQ ID NO: 4636201 - DNA, 25 bp, Homo sapien
tgcaaccacatgataaccaggaagt

SEQ ID NO: 4636202 - DNA, 25 bp, Homo sapien
gaggctaggactgtattatttcttg

SEQ ID NO: 4636203 - DNA, 25 bp, Homo sapien
ggtgcacaatttcagtatgaccttg

SEQ ID NO: 4636204 - DNA, 25 bp, Homo sapien
cttgttggttcgttccacctggtcg

SEQ ID NO: 4636205 - DNA, 25 bp, Homo sapien
tattttctcttggtcgttagggcac

SEQ ID NO: 4636206 - DNA, 25 bp, Homo sapien
tcttggtcgttagggcactggtgca

SEQ ID NO: 4636207 - DNA, 25 bp, Homo sapien
catagaaaggtcaaggagtgcagcc

SEQ ID NO: 4636208 - DNA, 25 bp, Homo sapien
tgtgcagcatagaaaggtcaaggag

SEQ ID NO: 4636209 - DNA, 25 bp, Homo sapien
cagcatagaaaggtcaaggagtgca

SEQ ID NO: 4636210 - DNA, 25 bp, Homo sapien
actgtgtgcagcatagaaaggtcaa

SEQ ID NO: 4636211 - DNA, 25 bp, Homo sapien
gccagaagtgacttttgaggttacc

SEQ ID NO: 4636212 - DNA, 25 bp, Homo sapien
cagaagtgacttttgaggttacccg

SEQ ID NO: 4636213 - DNA, 25 bp, Homo sapien
tcctgcggtctctggagggtgccct

SEQ ID NO: 4636214 - DNA, 25 bp, Homo sapien
gctgctggttctgtaccacaggcct

SEQ ID NO: 4636215 - DNA, 25 bp, Homo sapien
agagcaaggagtccgcccccttctc

SEQ ID NO: 4636216 - DNA, 25 bp, Homo sapien
ttctcctgcggtctctggagggtgc

SEQ ID NO: 4636217 - DNA, 25 bp, Homo sapien
catcggcgctaatggtggcagcagc

SEQ ID NO: 4636218 - DNA, 25 bp, Homo sapien
ccgtggaggccaagtggtaggagcc

SEQ ID NO: 4636219 - DNA, 25 bp, Homo sapien
ggttcctttggcatcggcgctaatg

SEQ ID NO: 4636220 - DNA, 25 bp, Homo sapien
gacagcagcgctggttcctttggca

SEQ ID NO: 4636221 - DNA, 25 bp, Homo sapien
cagtgagcctcgcaaggccattagc

SEQ ID NO: 4636222 - DNA, 25 bp, Homo sapien
gcctcgcaaggccattagcagcgcg

SEQ ID NO: 4636223 - DNA, 25 bp, Homo sapien
ccagaatccgcaatccagccgggtc

SEQ ID NO: 4636224 - DNA, 25 bp, Homo sapien
tgagcctcgcaaggccattagcagc

SEQ ID NO: 4636225 - DNA, 25 bp, Homo sapien
gtattttctgctatgcacaactggg

SEQ ID NO: 4636226 - DNA, 25 bp, Homo sapien
tccgtattttctgctatgcacaact

SEQ ID NO: 4636227 - DNA, 25 bp, Homo sapien
cacaactggggctcataggaaatgt

SEQ ID NO: 4636228 - DNA, 25 bp, Homo sapien
tgcttccgtattttctgctatgcac

SEQ ID NO: 4636229 - DNA, 25 bp, Homo sapien
tctctgtggaaacactcttgattct

SEQ ID NO: 4636230 - DNA, 25 bp, Homo sapien
tcagtggggatccattcagcagaga

SEQ ID NO: 4636231 - DNA, 25 bp, Homo sapien
ttgagggatactgcgtggtccattc

SEQ ID NO: 4636232 - DNA, 25 bp, Homo sapien
tcttccttgagggatactgcgtggt

SEQ ID NO: 4636233 - DNA, 25 bp, Homo sapien
gactcaggacctggtaacaatcccc

SEQ ID NO: 4636234 - DNA, 25 bp, Homo sapien
tgattttgactgaacaccagagggc

SEQ ID NO: 4636235 - DNA, 25 bp, Homo sapien
tgcaggtggacaccaagagcattgc

SEQ ID NO: 4636236 - DNA, 25 bp, Homo sapien
tgtgtttccaacactcagactcagg

SEQ ID NO: 4636237 - DNA, 25 bp, Homo sapien
tcagaaacttcagtatcaacaggtc

SEQ ID NO: 4636238 - DNA, 25 bp, Homo sapien
cagaaacttcagtatcaacaggtcc

SEQ ID NO: 4636239 - DNA, 25 bp, Homo sapien
gaaacttcagtatcaacaggtccat

SEQ ID NO: 4636240 - DNA, 25 bp, Homo sapien
cttcagaaacttcagtatcaacagg

SEQ ID NO: 4636241 - DNA, 25 bp, Homo sapien
tccacagggattccctgagagtgta

SEQ ID NO: 4636242 - DNA, 25 bp, Homo sapien
ccctgagagtgtatagctttggcat

SEQ ID NO: 4636243 - DNA, 25 bp, Homo sapien
agctttggcatgatggttgctgtaa

SEQ ID NO: 4636244 - DNA, 25 bp, Homo sapien
aaaccaaacaaagcgtggcccagca

SEQ ID NO: 4636245 - DNA, 25 bp, Homo sapien
tcttggaaatttccatccctttcga

SEQ ID NO: 4636246 - DNA, 25 bp, Homo sapien
cttggaaatttccatccctttcgag

SEQ ID NO: 4636247 - DNA, 25 bp, Homo sapien
ctcttggaaatttccatccctttcg

SEQ ID NO: 4636248 - DNA, 25 bp, Homo sapien
catgcccagcatcgggcttcgttct

SEQ ID NO: 4636249 - DNA, 25 bp, Homo sapien
aaagcatgcccagcatcgggcttcg

SEQ ID NO: 4636250 - DNA, 25 bp, Homo sapien
ctggcaaagcatgcccagcatcggg

SEQ ID NO: 4636251 - DNA, 25 bp, Homo sapien
gcaaagcatgcccagcatcgggctt

SEQ ID NO: 4636252 - DNA, 25 bp, Homo sapien
ctacagccgtttctcacatgttggg

SEQ ID NO: 4636253 - DNA, 25 bp, Homo sapien
tattggcaaggataaagaaccgtgg

SEQ ID NO: 4636254 - DNA, 25 bp, Homo sapien
tagagtacctcgcagcactaagagt

SEQ ID NO: 4636255 - DNA, 25 bp, Homo sapien
tacatagggaagaagaacaaacggc

SEQ ID NO: 4636256 - DNA, 25 bp, Homo sapien
tatgggaaatctatacctgctgctc

SEQ ID NO: 4636257 - DNA, 25 bp, Homo sapien
tctcacgagttctgtgaaatgtacc

SEQ ID NO: 4636258 - DNA, 25 bp, Homo sapien
cacgagttctgtgaaatgtaccaat

SEQ ID NO: 4636259 - DNA, 25 bp, Homo sapien
gagttctgtgaaatgtaccaatcag

SEQ ID NO: 4636260 - DNA, 25 bp, Homo sapien
ctgtctcacgagttctgtgaaatgt

SEQ ID NO: 4636261 - DNA, 25 bp, Homo sapien
aaagagacggtcgttagatgcaagt

SEQ ID NO: 4636262 - DNA, 25 bp, Homo sapien
gaatattaactaggctatcttggtg

SEQ ID NO: 4636263 - DNA, 25 bp, Homo sapien
catgcaagtgcacaggaaaattaac

SEQ ID NO: 4636264 - DNA, 25 bp, Homo sapien
ttgaatgtagggatgcgatgctgac

SEQ ID NO: 4636265 - DNA, 25 bp, Homo sapien
acccagtcagtgcccttcagttaaa

SEQ ID NO: 4636266 - DNA, 25 bp, Homo sapien
ttgggacaagtacagtaaccctcgc

SEQ ID NO: 4636267 - DNA, 25 bp, Homo sapien
gactcagttcctgcggggaacttca

SEQ ID NO: 4636268 - DNA, 25 bp, Homo sapien
tcgcccgtcaagacgggccagggct

SEQ ID NO: 4636269 - DNA, 25 bp, Homo sapien
ctccgcgcacagtggtggccaccgc

SEQ ID NO: 4636270 - DNA, 25 bp, Homo sapien
tggccaccgcgactggtgctgaagt

SEQ ID NO: 4636271 - DNA, 25 bp, Homo sapien
cacagtggtggccaccgcgactggt

SEQ ID NO: 4636272 - DNA, 25 bp, Homo sapien
ggtggccaccgcgactggtgctgaa

SEQ ID NO: 4636273 - DNA, 25 bp, Homo sapien
gacaaaaccagaggcggtggaaggc

SEQ ID NO: 4636274 - DNA, 25 bp, Homo sapien
caatgggtggattcgggtccagatt

SEQ ID NO: 4636275 - DNA, 25 bp, Homo sapien
ttaatcgctcctctccgggggcggc

SEQ ID NO: 4636276 - DNA, 25 bp, Homo sapien
tcaggaaccgccctgtgatgtcaga

SEQ ID NO: 4636277 - DNA, 25 bp, Homo sapien
cggcgcccgccagtaacaaacatgg

SEQ ID NO: 4636278 - DNA, 25 bp, Homo sapien
gccagtaacaaacatggctccctga

SEQ ID NO: 4636279 - DNA, 25 bp, Homo sapien
tggcgatcagggcacatagaatctc

SEQ ID NO: 4636280 - DNA, 25 bp, Homo sapien
tctccaggtgctcgtatgcgactgc

SEQ ID NO: 4636281 - DNA, 25 bp, Homo sapien
gtctcagggcagtcttaagagctcc

SEQ ID NO: 4636282 - DNA, 25 bp, Homo sapien
tgagaggcgaataacattgctaaac

SEQ ID NO: 4636283 - DNA, 25 bp, Homo sapien
tgaggacataggtggtggagtctct

SEQ ID NO: 4636284 - DNA, 25 bp, Homo sapien
ggagtctctcctaatcctctattct

SEQ ID NO: 4636285 - DNA, 25 bp, Homo sapien
tcctaatcctctattcttggagatc

SEQ ID NO: 4636286 - DNA, 25 bp, Homo sapien
tgccattcgcgtatgggaagaacag

SEQ ID NO: 4636287 - DNA, 25 bp, Homo sapien
aagatttattaatactccttgacac

SEQ ID NO: 4636288 - DNA, 25 bp, Homo sapien
aggcaaagatttattaatactcctt

SEQ ID NO: 4636289 - DNA, 25 bp, Homo sapien
caaagatttattaatactccttgac

SEQ ID NO: 4636290 - DNA, 25 bp, Homo sapien
aataggcaaagatttattaatactc

SEQ ID NO: 4636291 - DNA, 25 bp, Homo sapien
aggtactgggggttctgagttcagc

SEQ ID NO: 4636292 - DNA, 25 bp, Homo sapien
tactgggggttctgagttcagcata

SEQ ID NO: 4636293 - DNA, 25 bp, Homo sapien
gcccaccctattacagcatgacctc

SEQ ID NO: 4636294 - DNA, 25 bp, Homo sapien
ccaccctattacagcatgacctcat

SEQ ID NO: 4636295 - DNA, 25 bp, Homo sapien
ctgagatcaagttcttggcagggct

SEQ ID NO: 4636296 - DNA, 25 bp, Homo sapien
gcccacagtgtcctataatggacat

SEQ ID NO: 4636297 - DNA, 25 bp, Homo sapien
ttcatatggcatatcccctgtgtta

SEQ ID NO: 4636298 - DNA, 25 bp, Homo sapien
tattgtcttcatctcctagggctgc

SEQ ID NO: 4636299 - DNA, 25 bp, Homo sapien
cctgacacctctggcagtaggcagg

SEQ ID NO: 4636300 - DNA, 25 bp, Homo sapien
cagtaggcaggtgtgtcctgtgctg

SEQ ID NO: 4636301 - DNA, 25 bp, Homo sapien
ccctgacacctctggcagtaggcag

SEQ ID NO: 4636302 - DNA, 25 bp, Homo sapien
gcccctgacacctctggcagtaggc

SEQ ID NO: 4636303 - DNA, 25 bp, Homo sapien
tgccagatctgccggcactcagtca

SEQ ID NO: 4636304 - DNA, 25 bp, Homo sapien
gccagatctgccggcactcagtcat

SEQ ID NO: 4636305 - DNA, 25 bp, Homo sapien
ctgccagatctgccggcactcagtc

SEQ ID NO: 4636306 - DNA, 25 bp, Homo sapien
tccagtatagtcctttgctccagga

SEQ ID NO: 4636307 - DNA, 25 bp, Homo sapien
cagtatagtcctttgctccaggaca

SEQ ID NO: 4636308 - DNA, 25 bp, Homo sapien
ctattccagtatagtcctttgctcc

SEQ ID NO: 4636309 - DNA, 25 bp, Homo sapien
attccagtatagtcctttgctccag

SEQ ID NO: 4636310 - DNA, 25 bp, Homo sapien
gggtcgaccagcaacccccagtgcc

SEQ ID NO: 4636311 - DNA, 25 bp, Homo sapien
ggggcaacatgcgggtcgaccagca

SEQ ID NO: 4636312 - DNA, 25 bp, Homo sapien
ggtcgaccagcaacccccagtgcct

SEQ ID NO: 4636313 - DNA, 25 bp, Homo sapien
gcaacatgcgggtcgaccagcaacc

SEQ ID NO: 4636314 - DNA, 25 bp, Homo sapien
tgttcgtggaagcttggacctgcag

SEQ ID NO: 4636315 - DNA, 25 bp, Homo sapien
gaaatgcgatccgacatggactgca

SEQ ID NO: 4636316 - DNA, 25 bp, Homo sapien
gacctgcagcttaagctcggaggag

SEQ ID NO: 4636317 - DNA, 25 bp, Homo sapien
tgcagccctttgctccggttgtcgg

SEQ ID NO: 4636318 - DNA, 25 bp, Homo sapien
ctggagctccaagaggagccagacg

SEQ ID NO: 4636319 - DNA, 25 bp, Homo sapien
tggagctccaagaggagccagacgc

SEQ ID NO: 4636320 - DNA, 25 bp, Homo sapien
ggagtcacgtagggagagtctgtat

SEQ ID NO: 4636321 - DNA, 25 bp, Homo sapien
gagtcacgtagggagagtctgtatt

SEQ ID NO: 4636322 - DNA, 25 bp, Homo sapien
gtcacgtagggagagtctgtattct

SEQ ID NO: 4636323 - DNA, 25 bp, Homo sapien
gcccggcccgcaggctcgcggttag

SEQ ID NO: 4636324 - DNA, 25 bp, Homo sapien
gaagtctactctgtctgaaaactaa

SEQ ID NO: 4636325 - DNA, 25 bp, Homo sapien
caagcagtgcctatattcatccaga

SEQ ID NO: 4636326 - DNA, 25 bp, Homo sapien
ttttgcctcacgtattttaacactc

SEQ ID NO: 4636327 - DNA, 25 bp, Homo sapien
taattcacttttcgttatcaagcag

SEQ ID NO: 4636328 - DNA, 25 bp, Homo sapien
ctggtgcctctgatgacaggcactg

SEQ ID NO: 4636329 - DNA, 25 bp, Homo sapien
aaacagggagtacttagaacatatt

SEQ ID NO: 4636330 - DNA, 25 bp, Homo sapien
gtgcctctgatgacaggcactgctt

SEQ ID NO: 4636331 - DNA, 25 bp, Homo sapien
ctggtgcccacaaacagggagtact

SEQ ID NO: 4636332 - DNA, 25 bp, Homo sapien
tgattgcatacacaaacttttcact

SEQ ID NO: 4636333 - DNA, 25 bp, Homo sapien
aggcttttgctttacgactaccctg

SEQ ID NO: 4636334 - DNA, 25 bp, Homo sapien
cgactaccctgtggcttacataaaa

SEQ ID NO: 4636335 - DNA, 25 bp, Homo sapien
caaaaataataggcctcctcagcca

SEQ ID NO: 4636336 - DNA, 25 bp, Homo sapien
ggatcgtcccttcaactgcagaaaa

SEQ ID NO: 4636337 - DNA, 25 bp, Homo sapien
tctttctttcagatccgggatcgtc

SEQ ID NO: 4636338 - DNA, 25 bp, Homo sapien
tcagatccgggatcgtcccttcaac

SEQ ID NO: 4636339 - DNA, 25 bp, Homo sapien
ggctctttctttcagatccgggatc

SEQ ID NO: 4636340 - DNA, 25 bp, Homo sapien
agcgatccctctgtgtttctctcac

SEQ ID NO: 4636341 - DNA, 25 bp, Homo sapien
acaagcgatccctctgtgtttctct

SEQ ID NO: 4636342 - DNA, 25 bp, Homo sapien
tcacaagcgatccctctgtgtttct

SEQ ID NO: 4636343 - DNA, 25 bp, Homo sapien
aagcgatccctctgtgtttctctca

SEQ ID NO: 4636344 - DNA, 25 bp, Homo sapien
gcctattatactccataatgaaaag

SEQ ID NO: 4636345 - DNA, 25 bp, Homo sapien
gcccaacgatgcttaaatgatgcta

SEQ ID NO: 4636346 - DNA, 25 bp, Homo sapien
ttccttcgctgcagacaacttgtac

SEQ ID NO: 4636347 - DNA, 25 bp, Homo sapien
ttcttccttcgctgcagacaacttg

SEQ ID NO: 4636348 - DNA, 25 bp, Homo sapien
tataataaagctctcccttatttac

SEQ ID NO: 4636349 - DNA, 25 bp, Homo sapien
tacagatgcatcagcctgagtcaga

SEQ ID NO: 4636350 - DNA, 25 bp, Homo sapien
cacccccttgaaaatcaatagaagt

SEQ ID NO: 4636351 - DNA, 25 bp, Homo sapien
tggagaagtgaagctaagtatacag

SEQ ID NO: 4636352 - DNA, 25 bp, Homo sapien
gtacaatggctccaatcagccctac

SEQ ID NO: 4636353 - DNA, 25 bp, Homo sapien
tacaatggctccaatcagccctact

SEQ ID NO: 4636354 - DNA, 25 bp, Homo sapien
ctgtacaatggctccaatcagccct

SEQ ID NO: 4636355 - DNA, 25 bp, Homo sapien
tgtacaatggctccaatcagcccta

SEQ ID NO: 4636356 - DNA, 25 bp, Homo sapien
tccatggtccacacaaacatgcatg

SEQ ID NO: 4636357 - DNA, 25 bp, Homo sapien
acaaacatgcatgagtgtgtcctgg

SEQ ID NO: 4636358 - DNA, 25 bp, Homo sapien
ttcccctgccatcttccatggtcca

SEQ ID NO: 4636359 - DNA, 25 bp, Homo sapien
aacaacctgacagctcttcccctgc

SEQ ID NO: 4636360 - DNA, 25 bp, Homo sapien
ttccgggaagctgagatacaaatac

SEQ ID NO: 4636361 - DNA, 25 bp, Homo sapien
cgggaagctgagatacaaatacaga

SEQ ID NO: 4636362 - DNA, 25 bp, Homo sapien
tctttatcatatcttgcatggtcct

SEQ ID NO: 4636363 - DNA, 25 bp, Homo sapien
agaaccaaaattcagtgacatagat

SEQ ID NO: 4636364 - DNA, 25 bp, Homo sapien
tagtgtggtttcaccgttgtcaaca

SEQ ID NO: 4636365 - DNA, 25 bp, Homo sapien
tgtgaaatgcacaggatgatgtagg

SEQ ID NO: 4636366 - DNA, 25 bp, Homo sapien
gagcttcgtgtagtttttcattagg

SEQ ID NO: 4636367 - DNA, 25 bp, Homo sapien
gatatgtttatctatactttgagct

SEQ ID NO: 4636368 - DNA, 25 bp, Homo sapien
ctttgtcctggcataattttgtctc

SEQ ID NO: 4636369 - DNA, 25 bp, Homo sapien
tccttcattgatcctacatgtgctg

SEQ ID NO: 4636370 - DNA, 25 bp, Homo sapien
ttccgacaggtgttgctcttcttca

SEQ ID NO: 4636371 - DNA, 25 bp, Homo sapien
taggacatttccgacaggtgttgct

SEQ ID NO: 4636372 - DNA, 25 bp, Homo sapien
catgaaggctaagtactatttgatc

SEQ ID NO: 4636373 - DNA, 25 bp, Homo sapien
ggctaagtactatttgatcccctta

SEQ ID NO: 4636374 - DNA, 25 bp, Homo sapien
tttgcatgaaggctaagtactattt

SEQ ID NO: 4636375 - DNA, 25 bp, Homo sapien
gaaggctaagtactatttgatcccc

SEQ ID NO: 4636376 - DNA, 25 bp, Homo sapien
ttgttcagaacaaccatcgcatttc

SEQ ID NO: 4636377 - DNA, 25 bp, Homo sapien
tgttcagaacaaccatcgcatttca

SEQ ID NO: 4636378 - DNA, 25 bp, Homo sapien
cttgttcagaacaaccatcgcattt

SEQ ID NO: 4636379 - DNA, 25 bp, Homo sapien
gttcagaacaaccatcgcatttcat

SEQ ID NO: 4636380 - DNA, 25 bp, Homo sapien
ccaataaatgcacttggttgagacc

SEQ ID NO: 4636381 - DNA, 25 bp, Homo sapien
tatgccaataaatgcacttggttga

SEQ ID NO: 4636382 - DNA, 25 bp, Homo sapien
tgccaataaatgcacttggttgaga

SEQ ID NO: 4636383 - DNA, 25 bp, Homo sapien
ctatgccaataaatgcacttggttg

SEQ ID NO: 4636384 - DNA, 25 bp, Homo sapien
ctaaatcagatatgtacaatgtttt

SEQ ID NO: 4636385 - DNA, 25 bp, Homo sapien
ttggaaggtttggacgacttgctga

SEQ ID NO: 4636386 - DNA, 25 bp, Homo sapien
gtttggacgacttgctgaggaacac

SEQ ID NO: 4636387 - DNA, 25 bp, Homo sapien
gaagtgcttttgcttgtctaaatca

SEQ ID NO: 4636388 - DNA, 25 bp, Homo sapien
ctttctacgtgcaagtatctggtac

SEQ ID NO: 4636389 - DNA, 25 bp, Homo sapien
tttctacgtgcaagtatctggtact

SEQ ID NO: 4636390 - DNA, 25 bp, Homo sapien
ctctttctacgtgcaagtatctggt

SEQ ID NO: 4636391 - DNA, 25 bp, Homo sapien
ctacgtgcaagtatctggtactaac

SEQ ID NO: 4636392 - DNA, 25 bp, Homo sapien
cccattgctgtgaactagcatgaaa

SEQ ID NO: 4636393 - DNA, 25 bp, Homo sapien
tgctccccattgctgtgaactagca

SEQ ID NO: 4636394 - DNA, 25 bp, Homo sapien
ctccccattgctgtgaactagcatg

SEQ ID NO: 4636395 - DNA, 25 bp, Homo sapien
atgctccccattgctgtgaactagc

SEQ ID NO: 4636396 - DNA, 25 bp, Homo sapien
gtttgtccataatgaatgtagccat

SEQ ID NO: 4636397 - DNA, 25 bp, Homo sapien
tgtttgtccataatgaatgtagcca

SEQ ID NO: 4636398 - DNA, 25 bp, Homo sapien
ctgtttgtccataatgaatgtagcc

SEQ ID NO: 4636399 - DNA, 25 bp, Homo sapien
gagaaaggcataagtactttctttc

SEQ ID NO: 4636400 - DNA, 25 bp, Homo sapien
cgccttatgtgtgctaatgattgcc

SEQ ID NO: 4636401 - DNA, 25 bp, Homo sapien
tcaacttaaggctctctacgacagg

SEQ ID NO: 4636402 - DNA, 25 bp, Homo sapien
ctacgacaggcggaggcatgaccag

SEQ ID NO: 4636403 - DNA, 25 bp, Homo sapien
acatagcttcagcttctacatcccc

SEQ ID NO: 4636404 - DNA, 25 bp, Homo sapien
ctgtacatagcttcagcttctacat

SEQ ID NO: 4636405 - DNA, 25 bp, Homo sapien
gtacatagcttcagcttctacatcc

SEQ ID NO: 4636406 - DNA, 25 bp, Homo sapien
atagcttcagcttctacatccccaa

SEQ ID NO: 4636407 - DNA, 25 bp, Homo sapien
gtctgggacaacacgagcatactct

SEQ ID NO: 4636408 - DNA, 25 bp, Homo sapien
tcagaatgcagaaacgtctgggaca

SEQ ID NO: 4636409 - DNA, 25 bp, Homo sapien
tgggacaacacgagcatactctctc

SEQ ID NO: 4636410 - DNA, 25 bp, Homo sapien
agaaacgtctgggacaacacgagca

SEQ ID NO: 4636411 - DNA, 25 bp, Homo sapien
gggcacgtggcttgaactggcttga

SEQ ID NO: 4636412 - DNA, 25 bp, Homo sapien
ttaattcattagggggcacgtggct

SEQ ID NO: 4636413 - DNA, 25 bp, Homo sapien
cacgtggcttgaactggcttgaagg

SEQ ID NO: 4636414 - DNA, 25 bp, Homo sapien
gtcgctgtttgtgtttaattcatta

SEQ ID NO: 4636415 - DNA, 25 bp, Homo sapien
gcaatttcgaagaatccgaacaaaa

SEQ ID NO: 4636416 - DNA, 25 bp, Homo sapien
catgcaaggccaatgtacaaccctg

SEQ ID NO: 4636417 - DNA, 25 bp, Homo sapien
ggtacaactgccgagtttcgcatgc

SEQ ID NO: 4636418 - DNA, 25 bp, Homo sapien
aacaaaagctaagcgaagttcagga

SEQ ID NO: 4636419 - DNA, 25 bp, Homo sapien
ctgcgtgggcctgagcatgtttgga

SEQ ID NO: 4636420 - DNA, 25 bp, Homo sapien
gcgtgggcctgagcatgtttggaaa

SEQ ID NO: 4636421 - DNA, 25 bp, Homo sapien
ctctgcgtgggcctgagcatgtttg

SEQ ID NO: 4636422 - DNA, 25 bp, Homo sapien
cgtgggcctgagcatgtttggaaac

SEQ ID NO: 4636423 - DNA, 25 bp, Homo sapien
tgtagtaacactacccttcacattg

SEQ ID NO: 4636424 - DNA, 25 bp, Homo sapien
gtagtaacactacccttcacattgg

SEQ ID NO: 4636425 - DNA, 25 bp, Homo sapien
taacactacccttcacattggtcat

SEQ ID NO: 4636426 - DNA, 25 bp, Homo sapien
ccagtgtagtaacactacccttcac

SEQ ID NO: 4636427 - DNA, 25 bp, Homo sapien
ttttctctgtgatcatctgaagaga

SEQ ID NO: 4636428 - DNA, 25 bp, Homo sapien
tcttctgggctgacatatggtgagt

SEQ ID NO: 4636429 - DNA, 25 bp, Homo sapien
tgccataagttggtcagtgctgcct

SEQ ID NO: 4636430 - DNA, 25 bp, Homo sapien
ggtctgcgggatttattgccataag

SEQ ID NO: 4636431 - DNA, 25 bp, Homo sapien
tttgatgggtgcaattctggtctgc

SEQ ID NO: 4636432 - DNA, 25 bp, Homo sapien
caatcgaatcttttccgtggcagat

SEQ ID NO: 4636433 - DNA, 25 bp, Homo sapien
ctggcattgggttcgtatgcgtgca

SEQ ID NO: 4636434 - DNA, 25 bp, Homo sapien
cattgggttcgtatgcgtgcaatcg

SEQ ID NO: 4636435 - DNA, 25 bp, Homo sapien
cgtatgcgtgcaatcgaatcttttc

SEQ ID NO: 4636436 - DNA, 25 bp, Homo sapien
tccccgatggattcttccagggaat

SEQ ID NO: 4636437 - DNA, 25 bp, Homo sapien
tggcatctaaatccagcaaacagag

SEQ ID NO: 4636438 - DNA, 25 bp, Homo sapien
gaatggaggcacaagtcagcttcat

SEQ ID NO: 4636439 - DNA, 25 bp, Homo sapien
catttccccgatggattcttccagg

SEQ ID NO: 4636440 - DNA, 25 bp, Homo sapien
tctgatgtgggaagttgcttatttc

SEQ ID NO: 4636441 - DNA, 25 bp, Homo sapien
tgactcccgttctgccctcgctggc

SEQ ID NO: 4636442 - DNA, 25 bp, Homo sapien
ttctgatgtgggaagttgcttattt

SEQ ID NO: 4636443 - DNA, 25 bp, Homo sapien
atgagcgcaatgctgactcccgttc

SEQ ID NO: 4636444 - DNA, 25 bp, Homo sapien
ctcgtctctgaaggtggttgtgttt

SEQ ID NO: 4636445 - DNA, 25 bp, Homo sapien
cctgctttacagagcagctgcttac

SEQ ID NO: 4636446 - DNA, 25 bp, Homo sapien
aaggtggttgtgtttgaaacacctg

SEQ ID NO: 4636447 - DNA, 25 bp, Homo sapien
gaaacacctgctttacagagcagct

SEQ ID NO: 4636448 - DNA, 25 bp, Homo sapien
ctactttcgggactcttcagcatca

SEQ ID NO: 4636449 - DNA, 25 bp, Homo sapien
ctttcgggactcttcagcatcaaaa

SEQ ID NO: 4636450 - DNA, 25 bp, Homo sapien
tactttcgggactcttcagcatcaa

SEQ ID NO: 4636451 - DNA, 25 bp, Homo sapien
actttcgggactcttcagcatcaaa

SEQ ID NO: 4636452 - DNA, 25 bp, Homo sapien
accgcaccccgcctgtatttggatt

SEQ ID NO: 4636453 - DNA, 25 bp, Homo sapien
gaaaccgagtcttgctcagtctccc

SEQ ID NO: 4636454 - DNA, 25 bp, Homo sapien
taataatttgatccactgttcaaca

SEQ ID NO: 4636455 - DNA, 25 bp, Homo sapien
aatcagcaaacatctatttactcag

SEQ ID NO: 4636456 - DNA, 25 bp, Homo sapien
aataatggctactccgcccaatagg

SEQ ID NO: 4636457 - DNA, 25 bp, Homo sapien
cagtcccaacttgccgagatgcaga

SEQ ID NO: 4636458 - DNA, 25 bp, Homo sapien
gcccaataggcagcacagcatttgc

SEQ ID NO: 4636459 - DNA, 25 bp, Homo sapien
cattatagggacttccagatccagc

SEQ ID NO: 4636460 - DNA, 25 bp, Homo sapien
gcgatttgtcgggtctctgattcag

SEQ ID NO: 4636461 - DNA, 25 bp, Homo sapien
caagtggtagatacattctgcgatt

SEQ ID NO: 4636462 - DNA, 25 bp, Homo sapien
tcctgaatcctcttgtactgttccc

SEQ ID NO: 4636463 - DNA, 25 bp, Homo sapien
gaatcctcttgtactgttcccgctg

SEQ ID NO: 4636464 - DNA, 25 bp, Homo sapien
caggagtatggtctgttcccctttc

SEQ ID NO: 4636465 - DNA, 25 bp, Homo sapien
tggcaagagtgctgtatgtaacatc

SEQ ID NO: 4636466 - DNA, 25 bp, Homo sapien
tcaaggaaacttgatgtctaagtag

SEQ ID NO: 4636467 - DNA, 25 bp, Homo sapien
gtgctgtatgtaacatcaaggaaac

SEQ ID NO: 4636468 - DNA, 25 bp, Homo sapien
tcctctcatactctgttctccaaag

SEQ ID NO: 4636469 - DNA, 25 bp, Homo sapien
ctgttctccaaagaccctcaaacct

SEQ ID NO: 4636470 - DNA, 25 bp, Homo sapien
tctcatactctgttctccaaagacc

SEQ ID NO: 4636471 - DNA, 25 bp, Homo sapien
tgggcatcctcctctcatactctgt

SEQ ID NO: 4636472 - DNA, 25 bp, Homo sapien
tcttgtgctacagaagaacccttcc

SEQ ID NO: 4636473 - DNA, 25 bp, Homo sapien
acaggacaatttggcggtacatacc

SEQ ID NO: 4636474 - DNA, 25 bp, Homo sapien
catacctctcttgtgctacagaaga

SEQ ID NO: 4636475 - DNA, 25 bp, Homo sapien
gacaatttggcggtacatacctctc

SEQ ID NO: 4636476 - DNA, 25 bp, Homo sapien
agagcacgaccagctccactagtgg

SEQ ID NO: 4636477 - DNA, 25 bp, Homo sapien
gtagaggcagagcacgaccagctcc

SEQ ID NO: 4636478 - DNA, 25 bp, Homo sapien
aggcagagcacgaccagctccacta

SEQ ID NO: 4636479 - DNA, 25 bp, Homo sapien
tagaggcagagcacgaccagctcca

SEQ ID NO: 4636480 - DNA, 25 bp, Homo sapien
atggttctccttcatattctagact

SEQ ID NO: 4636481 - DNA, 25 bp, Homo sapien
ttcccatggttctccttcatattct

SEQ ID NO: 4636482 - DNA, 25 bp, Homo sapien
ctgtctttgtagttctttgcctcct

SEQ ID NO: 4636483 - DNA, 25 bp, Homo sapien
atttccattttgtgagatctgtctt

SEQ ID NO: 4636484 - DNA, 25 bp, Homo sapien
tgtcgtctagcaggcgtagctctgg

SEQ ID NO: 4636485 - DNA, 25 bp, Homo sapien
tgggggcaccgctgagcctgttggc

SEQ ID NO: 4636486 - DNA, 25 bp, Homo sapien
ttaagctgtgtcgtctagcaggcgt

SEQ ID NO: 4636487 - DNA, 25 bp, Homo sapien
gctgtgtcgtctagcaggcgtagct

SEQ ID NO: 4636488 - DNA, 25 bp, Homo sapien
gagtcacaggctacatgtcctatag

SEQ ID NO: 4636489 - DNA, 25 bp, Homo sapien
gaaatgctgtcctgattccacaggg

SEQ ID NO: 4636490 - DNA, 25 bp, Homo sapien
ctagctcttggaacatcatgcctga

SEQ ID NO: 4636491 - DNA, 25 bp, Homo sapien
gaaaacttaagacagccacatgcac

SEQ ID NO: 4636492 - DNA, 25 bp, Homo sapien
tcttttcatacacgggaccaggctg

SEQ ID NO: 4636493 - DNA, 25 bp, Homo sapien
tgtagtcatataagcaagccacgct

SEQ ID NO: 4636494 - DNA, 25 bp, Homo sapien
taagtattaaagtctccgggtcaga

SEQ ID NO: 4636495 - DNA, 25 bp, Homo sapien
tcacctggttatgtcagtggcaaac

SEQ ID NO: 4636496 - DNA, 25 bp, Homo sapien
cataaaacttctggagtcctggggt

SEQ ID NO: 4636497 - DNA, 25 bp, Homo sapien
aagaagcataaaacttctggagtcc

SEQ ID NO: 4636498 - DNA, 25 bp, Homo sapien
tcccactcctactcagaagacagac

SEQ ID NO: 4636499 - DNA, 25 bp, Homo sapien
ggagtcctggggtaacctgagcaaa

SEQ ID NO: 4636500 - DNA, 25 bp, Homo sapien
gaagtctgtgcaatcactgtgaaac

SEQ ID NO: 4636501 - DNA, 25 bp, Homo sapien
tctgcaatagtaaggccaatcctgc

SEQ ID NO: 4636502 - DNA, 25 bp, Homo sapien
ttttctttctgcaatagtaaggcca

SEQ ID NO: 4636503 - DNA, 25 bp, Homo sapien
ctgcagggaccgaagtctgtgcaat

SEQ ID NO: 4636504 - DNA, 25 bp, Homo sapien
aaattgtatgaggaagttattgtgg

SEQ ID NO: 4636505 - DNA, 25 bp, Homo sapien
tattgtggagaagcgatgaggtggg

SEQ ID NO: 4636506 - DNA, 25 bp, Homo sapien
gactaagagggtgcaagaagttggg

SEQ ID NO: 4636507 - DNA, 25 bp, Homo sapien
tgaggtggggtcatagagagaacag

SEQ ID NO: 4636508 - DNA, 25 bp, Homo sapien
tgcatatgccacattgattaatggc

SEQ ID NO: 4636509 - DNA, 25 bp, Homo sapien
gggacagtacgagatagttcattat

SEQ ID NO: 4636510 - DNA, 25 bp, Homo sapien
gcacatcgaacttgtaatacagcat

SEQ ID NO: 4636511 - DNA, 25 bp, Homo sapien
gcaaacaccacttgggccctatttc

SEQ ID NO: 4636512 - DNA, 25 bp, Homo sapien
tttataggagtctgccccagtactg

SEQ ID NO: 4636513 - DNA, 25 bp, Homo sapien
ttataggagtctgccccagtactgc

SEQ ID NO: 4636514 - DNA, 25 bp, Homo sapien
aattcctgttgaacaaggacattgg

SEQ ID NO: 4636515 - DNA, 25 bp, Homo sapien
aacaaggacattgggtgttcttcta

SEQ ID NO: 4636516 - DNA, 25 bp, Homo sapien
ctgttgaacaaggacattgggtgtt

SEQ ID NO: 4636517 - DNA, 25 bp, Homo sapien
tgaacaaggacattgggtgttcttc

SEQ ID NO: 4636518 - DNA, 25 bp, Homo sapien
tagctgtgtactgggcggggacccc

SEQ ID NO: 4636519 - DNA, 25 bp, Homo sapien
tcagtgggacccttaagtggccgtc

SEQ ID NO: 4636520 - DNA, 25 bp, Homo sapien
ccctggacgggttcgagttctcttg

SEQ ID NO: 4636521 - DNA, 25 bp, Homo sapien
ccttaagtggccgtcaggacaggcg

SEQ ID NO: 4636522 - DNA, 25 bp, Homo sapien
gtgtgtgtcgggaatcctgcgtgtc

SEQ ID NO: 4636523 - DNA, 25 bp, Homo sapien
ggctgcgtgtgttgcgctcccgtgt

SEQ ID NO: 4636524 - DNA, 25 bp, Homo sapien
gctgcgtgtgttgcgctcccgtgtg

SEQ ID NO: 4636525 - DNA, 25 bp, Homo sapien
gtgtcgggaatcctgcgtgtcgtgc

SEQ ID NO: 4636526 - DNA, 25 bp, Homo sapien
ggtctgacttttgatgccaaaatct

SEQ ID NO: 4636527 - DNA, 25 bp, Homo sapien
ctcaggtctgacttttgatgccaaa

SEQ ID NO: 4636528 - DNA, 25 bp, Homo sapien
cttttgatgccaaaatctgagcccc

SEQ ID NO: 4636529 - DNA, 25 bp, Homo sapien
gacttttgatgccaaaatctgagcc

SEQ ID NO: 4636530 - DNA, 25 bp, Homo sapien
ccaagacgcaatcgggccccactcg

SEQ ID NO: 4636531 - DNA, 25 bp, Homo sapien
acgcaatcgggccccactcgcagaa

SEQ ID NO: 4636532 - DNA, 25 bp, Homo sapien
ccactcgcagaaccgcctggaccct

SEQ ID NO: 4636533 - DNA, 25 bp, Homo sapien
cgccgtcccgcgcctgggtcccgcg

SEQ ID NO: 4636534 - DNA, 25 bp, Homo sapien
gcccaacctccgcatagccttggag

SEQ ID NO: 4636535 - DNA, 25 bp, Homo sapien
aacctccgcatagccttggagaccc

SEQ ID NO: 4636536 - DNA, 25 bp, Homo sapien
cctgggagccctgttaggccaccgg

SEQ ID NO: 4636537 - DNA, 25 bp, Homo sapien
gccctgttaggccaccggcattggg

SEQ ID NO: 4636538 - DNA, 25 bp, Homo sapien
caggtcacatgcattgtcatgttga

SEQ ID NO: 4636539 - DNA, 25 bp, Homo sapien
gccctgtcataaccatgtcactgta

SEQ ID NO: 4636540 - DNA, 25 bp, Homo sapien
gcttctcaattccttggcaggtcac

SEQ ID NO: 4636541 - DNA, 25 bp, Homo sapien
tttgcagccctgtcataaccatgtc

SEQ ID NO: 4636542 - DNA, 25 bp, Homo sapien
gcattatttcacgttaaaggaacta

SEQ ID NO: 4636543 - DNA, 25 bp, Homo sapien
aatcaatggagtgtacacatatggg

SEQ ID NO: 4636544 - DNA, 25 bp, Homo sapien
ttgagagatactggagaaattcttc

SEQ ID NO: 4636545 - DNA, 25 bp, Homo sapien
tatgcatccctcatccttgcatcaa

SEQ ID NO: 4636546 - DNA, 25 bp, Homo sapien
ggtagaaatgatcatccaatgtgca

SEQ ID NO: 4636547 - DNA, 25 bp, Homo sapien
gaagtagttattgcaaaaggtagaa

SEQ ID NO: 4636548 - DNA, 25 bp, Homo sapien
aattccttgtcatgaaaaccctcca

SEQ ID NO: 4636549 - DNA, 25 bp, Homo sapien
cacaacttgcaaataagaagtagtt

SEQ ID NO: 4636550 - DNA, 25 bp, Homo sapien
tttcctcatatgtaatgtgggattg

SEQ ID NO: 4636551 - DNA, 25 bp, Homo sapien
catctgcttgaaagaagacgggcaa

SEQ ID NO: 4636552 - DNA, 25 bp, Homo sapien
gtaatgtgggattgactcagtcatc

SEQ ID NO: 4636553 - DNA, 25 bp, Homo sapien
actcagtcatctgcttgaaagaaga

SEQ ID NO: 4636554 - DNA, 25 bp, Homo sapien
gatagtctagcaagaagaacacagc

SEQ ID NO: 4636555 - DNA, 25 bp, Homo sapien
ggacaaattgcaatcgtgtgcctcc

SEQ ID NO: 4636556 - DNA, 25 bp, Homo sapien
tggcctgtaatagaagtgtaaagtc

SEQ ID NO: 4636557 - DNA, 25 bp, Homo sapien
ggcaggcgccaccttaatcaagtaa

SEQ ID NO: 4636558 - DNA, 25 bp, Homo sapien
tgttggcactttgaccttgcataat

SEQ ID NO: 4636559 - DNA, 25 bp, Homo sapien
gaagtatgttggcactttgaccttg

SEQ ID NO: 4636560 - DNA, 25 bp, Homo sapien
tgtattcactgaagtattgaggaac

SEQ ID NO: 4636561 - DNA, 25 bp, Homo sapien
ggaacacattaacgttggtttcaga

SEQ ID NO: 4636562 - DNA, 25 bp, Homo sapien
tcatcccgatactcagtaacctcat

SEQ ID NO: 4636563 - DNA, 25 bp, Homo sapien
catcccgatactcagtaacctcatt

SEQ ID NO: 4636564 - DNA, 25 bp, Homo sapien
tggcgcgaaatttttccgggagatg

SEQ ID NO: 4636565 - DNA, 25 bp, Homo sapien
tctgcgtggcgcgaaatttttccgg

SEQ ID NO: 4636566 - DNA, 25 bp, Homo sapien
ggcgcaggcgcgagtgcactctggg

SEQ ID NO: 4636567 - DNA, 25 bp, Homo sapien
aatttttccgggagatggcgcaggc

SEQ ID NO: 4636568 - DNA, 25 bp, Homo sapien
gtcttgatgactttcagcactcctt

SEQ ID NO: 4636569 - DNA, 25 bp, Homo sapien
ggctgcgccgcactctcggtcgcct

SEQ ID NO: 4636570 - DNA, 25 bp, Homo sapien
gctgcgccgcactctcggtcgcctt

SEQ ID NO: 4636571 - DNA, 25 bp, Homo sapien
cggctgcgccgcactctcggtcgcc

SEQ ID NO: 4636572 - DNA, 25 bp, Homo sapien
tctaggcatattctggtttgcaggt

SEQ ID NO: 4636573 - DNA, 25 bp, Homo sapien
atattctggtttgcaggtgatgtgg

SEQ ID NO: 4636574 - DNA, 25 bp, Homo sapien
tctggtttgcaggtgatgtggccca

SEQ ID NO: 4636575 - DNA, 25 bp, Homo sapien
ctctaggcatattctggtttgcagg

SEQ ID NO: 4636576 - DNA, 25 bp, Homo sapien
gagtccctattctgcggatgattcc

SEQ ID NO: 4636577 - DNA, 25 bp, Homo sapien
atcgggcttgacatagccttcaccg

SEQ ID NO: 4636578 - DNA, 25 bp, Homo sapien
accatagcgccctcatcgggcttga

SEQ ID NO: 4636579 - DNA, 25 bp, Homo sapien
tcaaacacaagcgtggcgttatggg

SEQ ID NO: 4636580 - DNA, 25 bp, Homo sapien
cccctcactaacctcaaagcggagc

SEQ ID NO: 4636581 - DNA, 25 bp, Homo sapien
ccctcactaacctcaaagcggagcg

SEQ ID NO: 4636582 - DNA, 25 bp, Homo sapien
cctcactaacctcaaagcggagcgc

SEQ ID NO: 4636583 - DNA, 25 bp, Homo sapien
ctcactaacctcaaagcggagcgcc

SEQ ID NO: 4636584 - DNA, 25 bp, Homo sapien
cctgctctttcactacggtgttctg

SEQ ID NO: 4636585 - DNA, 25 bp, Homo sapien
atctcccaagattccttggcctttt

SEQ ID NO: 4636586 - DNA, 25 bp, Homo sapien
ccctgctctttcactacggtgttct

SEQ ID NO: 4636587 - DNA, 25 bp, Homo sapien
tgctctttcactacggtgttctgtt

SEQ ID NO: 4636588 - DNA, 25 bp, Homo sapien
tccagccaggacacaatcttcttac

SEQ ID NO: 4636589 - DNA, 25 bp, Homo sapien
ctttcaatggcagcagagaaggcct

SEQ ID NO: 4636590 - DNA, 25 bp, Homo sapien
ggtcgaggtgagaggccagtggagg

SEQ ID NO: 4636591 - DNA, 25 bp, Homo sapien
gtagtttcagctgacacatggccag

SEQ ID NO: 4636592 - DNA, 25 bp, Homo sapien
cagttctagggccttgttacagctt

SEQ ID NO: 4636593 - DNA, 25 bp, Homo sapien
atagaacttcttccgggcaagctgc

SEQ ID NO: 4636594 - DNA, 25 bp, Homo sapien
ctgcctgtggatccgctgctgacac

SEQ ID NO: 4636595 - DNA, 25 bp, Homo sapien
ggcatagaacttcttccgggcaagc

SEQ ID NO: 4636596 - DNA, 25 bp, Homo sapien
cttcttccgggcaagctgcctgtgg

SEQ ID NO: 4636597 - DNA, 25 bp, Homo sapien
tcttccactccgccttcatctctgt

SEQ ID NO: 4636598 - DNA, 25 bp, Homo sapien
gtgttgctcttccactccgccttca

SEQ ID NO: 4636599 - DNA, 25 bp, Homo sapien
tgttgctcttccactccgccttcat

SEQ ID NO: 4636600 - DNA, 25 bp, Homo sapien
ttccactccgccttcatctctgtgt

SEQ ID NO: 4636601 - DNA, 25 bp, Homo sapien
gcagcctcaggagtagggctggtga

SEQ ID NO: 4636602 - DNA, 25 bp, Homo sapien
tcaggagtagggctggtgagaggcg

SEQ ID NO: 4636603 - DNA, 25 bp, Homo sapien
gcaggcagcctcaggagtagggctg

SEQ ID NO: 4636604 - DNA, 25 bp, Homo sapien
gcctcaggagtagggctggtgagag

SEQ ID NO: 4636605 - DNA, 25 bp, Homo sapien
tttagagacaatggcaaacatgttt

SEQ ID NO: 4636606 - DNA, 25 bp, Homo sapien
actggctgttccatgggagagtatt

SEQ ID NO: 4636607 - DNA, 25 bp, Homo sapien
ccatgggagagtattttagagacaa

SEQ ID NO: 4636608 - DNA, 25 bp, Homo sapien
gagtattttagagacaatggcaaac

SEQ ID NO: 4636609 - DNA, 25 bp, Homo sapien
cctccttcaattgtagatgctgcag

SEQ ID NO: 4636610 - DNA, 25 bp, Homo sapien
tagatgcattgagttttacagtggt

SEQ ID NO: 4636611 - DNA, 25 bp, Homo sapien
ggattcagaatgcaggccagtggtc

SEQ ID NO: 4636612 - DNA, 25 bp, Homo sapien
ccatattctacaccgtttctccaaa

SEQ ID NO: 4636613 - DNA, 25 bp, Homo sapien
attcagaatgcaggccagtggtccg

SEQ ID NO: 4636614 - DNA, 25 bp, Homo sapien
caggagcagctggcgacagttcttc

SEQ ID NO: 4636615 - DNA, 25 bp, Homo sapien
gcaggagcagctggcgacagttctt

SEQ ID NO: 4636616 - DNA, 25 bp, Homo sapien
cagctccgcgtcgcaggccggtttt

SEQ ID NO: 4636617 - DNA, 25 bp, Homo sapien
agcttggtggtcctccttggaacca

SEQ ID NO: 4636618 - DNA, 25 bp, Homo sapien
ccagcagcttggtggtcctccttgg

SEQ ID NO: 4636619 - DNA, 25 bp, Homo sapien
agctccgcgtcgcaggccggttttg

SEQ ID NO: 4636620 - DNA, 25 bp, Homo sapien
gaaacaagaatggaagtggctttcg

SEQ ID NO: 4636621 - DNA, 25 bp, Homo sapien
aacaagaatggaagtggctttcgaa

SEQ ID NO: 4636622 - DNA, 25 bp, Homo sapien
tggaaacaagaatggaagtggcttt

SEQ ID NO: 4636623 - DNA, 25 bp, Homo sapien
caagaatggaagtggctttcgaagg

SEQ ID NO: 4636624 - DNA, 25 bp, Homo sapien
tccgccgtggtgacggcaagactgt

SEQ ID NO: 4636625 - DNA, 25 bp, Homo sapien
gctccgccgtggtgacggcaagact

SEQ ID NO: 4636626 - DNA, 25 bp, Homo sapien
tgcagctccgccgtggtgacggcaa

SEQ ID NO: 4636627 - DNA, 25 bp, Homo sapien
ttgcagctccgccgtggtgacggca

SEQ ID NO: 4636628 - DNA, 25 bp, Homo sapien
gctgcatggtcacgtgacattgcag

SEQ ID NO: 4636629 - DNA, 25 bp, Homo sapien
agctgcatggtcacgtgacattgca

SEQ ID NO: 4636630 - DNA, 25 bp, Homo sapien
gccgtccacgtggtatccagctgca

SEQ ID NO: 4636631 - DNA, 25 bp, Homo sapien
cgtccacgtggtatccagctgcacg

SEQ ID NO: 4636632 - DNA, 25 bp, Homo sapien
ccgccgtccacgtggtatccagctg

SEQ ID NO: 4636633 - DNA, 25 bp, Homo sapien
gtccacgtggtatccagctgcacgg

SEQ ID NO: 4636634 - DNA, 25 bp, Homo sapien
aggaccctttgcagatagtggtgtc

SEQ ID NO: 4636635 - DNA, 25 bp, Homo sapien
gagtttgcacattgagtgacacctg

SEQ ID NO: 4636636 - DNA, 25 bp, Homo sapien
gagagtttgcacattgagtgacacc

SEQ ID NO: 4636637 - DNA, 25 bp, Homo sapien
aagaagggggagagtttgcacattg

SEQ ID NO: 4636638 - DNA, 25 bp, Homo sapien
gggagagtttgcacattgagtgaca

SEQ ID NO: 4636639 - DNA, 25 bp, Homo sapien
tgggctcagcctgatgtctccattc

SEQ ID NO: 4636640 - DNA, 25 bp, Homo sapien
tcagcctgatgtctccattctcctt

SEQ ID NO: 4636641 - DNA, 25 bp, Homo sapien
ccagtgggctcagcctgatgtctcc

SEQ ID NO: 4636642 - DNA, 25 bp, Homo sapien
ctgaaggaggccagtgggctcagcc

SEQ ID NO: 4636643 - DNA, 25 bp, Homo sapien
agaagccctgagctgtgcggctgct

SEQ ID NO: 4636644 - DNA, 25 bp, Homo sapien
gcttactggcacccagggaggagaa

SEQ ID NO: 4636645 - DNA, 25 bp, Homo sapien
ctggcacccagggaggagaagccct

SEQ ID NO: 4636646 - DNA, 25 bp, Homo sapien
tgggcttactggcacccagggagga

SEQ ID NO: 4636647 - DNA, 25 bp, Homo sapien
actccaggctaccgagggccagctg

SEQ ID NO: 4636648 - DNA, 25 bp, Homo sapien
catttctcagatcacctcgctcagg

SEQ ID NO: 4636649 - DNA, 25 bp, Homo sapien
cactccaggctaccgagggccagct

SEQ ID NO: 4636650 - DNA, 25 bp, Homo sapien
tcagggactcctggcagttccccct

SEQ ID NO: 4636651 - DNA, 25 bp, Homo sapien
gctgtgtttgagtacttgcagtcat

SEQ ID NO: 4636652 - DNA, 25 bp, Homo sapien
cttgatctgtgcctccttagatgct

SEQ ID NO: 4636653 - DNA, 25 bp, Homo sapien
tgctggcttcgtccttgatctgtgc

SEQ ID NO: 4636654 - DNA, 25 bp, Homo sapien
tgcctccttagatgctgtgtttgag

SEQ ID NO: 4636655 - DNA, 25 bp, Homo sapien
atcatttcctgggtttcgtaggcgc

SEQ ID NO: 4636656 - DNA, 25 bp, Homo sapien
gtccctgtgggatggacgtggagcc

SEQ ID NO: 4636657 - DNA, 25 bp, Homo sapien
tgggatggacgtggagccctccagg

SEQ ID NO: 4636658 - DNA, 25 bp, Homo sapien
cctgtgggatggacgtggagccctc

SEQ ID NO: 4636659 - DNA, 25 bp, Homo sapien
tgtgggatggacgtggagccctcca

SEQ ID NO: 4636660 - DNA, 25 bp, Homo sapien
acatcaggctttgggatagagagac

SEQ ID NO: 4636661 - DNA, 25 bp, Homo sapien
ctttcccttgctccattaaggaaat

SEQ ID NO: 4636662 - DNA, 25 bp, Homo sapien
tacgtcccttgaaaccatccagggc

SEQ ID NO: 4636663 - DNA, 25 bp, Homo sapien
cggtacgtcccttgaaaccatccag

SEQ ID NO: 4636664 - DNA, 25 bp, Homo sapien
atatgacctgtgagatctttcctgc

SEQ ID NO: 4636665 - DNA, 25 bp, Homo sapien
ctgaagtagtggagggtttatctca

SEQ ID NO: 4636666 - DNA, 25 bp, Homo sapien
cagtgctggctgaacggggggcagg

SEQ ID NO: 4636667 - DNA, 25 bp, Homo sapien
ggagagcaccaggaacaacacatat

SEQ ID NO: 4636668 - DNA, 25 bp, Homo sapien
gccttgataacaggccacctgtact

SEQ ID NO: 4636669 - DNA, 25 bp, Homo sapien
ccaatggtcagccttgataacaggc

SEQ ID NO: 4636670 - DNA, 25 bp, Homo sapien
gtcagccttgataacaggccacctg

SEQ ID NO: 4636671 - DNA, 25 bp, Homo sapien
aatggtcagccttgataacaggcca

SEQ ID NO: 4636672 - DNA, 25 bp, Homo sapien
gggaggggtgcgaaacgcatgactt

SEQ ID NO: 4636673 - DNA, 25 bp, Homo sapien
tcttcagaattgtatcgtggtgtgg

SEQ ID NO: 4636674 - DNA, 25 bp, Homo sapien
gggtgcgaaacgcatgacttgtcca

SEQ ID NO: 4636675 - DNA, 25 bp, Homo sapien
tcctgccggacaatgagctgctgag

SEQ ID NO: 4636676 - DNA, 25 bp, Homo sapien
ccgggcggcctggtcattggccagc

SEQ ID NO: 4636677 - DNA, 25 bp, Homo sapien
tcccgggcggcctggtcattggcca

SEQ ID NO: 4636678 - DNA, 25 bp, Homo sapien
ggcggcctggtcattggccagcccc

SEQ ID NO: 4636679 - DNA, 25 bp, Homo sapien
atcccgggcggcctggtcattggcc

SEQ ID NO: 4636680 - DNA, 25 bp, Homo sapien
agccgcagcggccaacaggagtggg

SEQ ID NO: 4636681 - DNA, 25 bp, Homo sapien
gctttggagccgcagcggccaacag

SEQ ID NO: 4636682 - DNA, 25 bp, Homo sapien
gccaacaggagtgggcaaaggaccc

SEQ ID NO: 4636683 - DNA, 25 bp, Homo sapien
ctcgctttggagccgcagcggccaa

SEQ ID NO: 4636684 - DNA, 25 bp, Homo sapien
tcccctgtgtctacacctggcaata

SEQ ID NO: 4636685 - DNA, 25 bp, Homo sapien
tgtgtctacacctggcaataagagc

SEQ ID NO: 4636686 - DNA, 25 bp, Homo sapien
ctacacctggcaataagagcagctg

SEQ ID NO: 4636687 - DNA, 25 bp, Homo sapien
ctggcaataagagcagctgggaaat

SEQ ID NO: 4636688 - DNA, 25 bp, Homo sapien
aatccatcaggctttgaggacatgc

SEQ ID NO: 4636689 - DNA, 25 bp, Homo sapien
ccaatccatcaggctttgaggacat

SEQ ID NO: 4636690 - DNA, 25 bp, Homo sapien
tccatcaggctttgaggacatgctc

SEQ ID NO: 4636691 - DNA, 25 bp, Homo sapien
catcaggctttgaggacatgctcac

SEQ ID NO: 4636692 - DNA, 25 bp, Homo sapien
gtatcccctggtactccacacccat

SEQ ID NO: 4636693 - DNA, 25 bp, Homo sapien
ctcagccttgcccatctccacgggc

SEQ ID NO: 4636694 - DNA, 25 bp, Homo sapien
cagccttgcccatctccacgggcat

SEQ ID NO: 4636695 - DNA, 25 bp, Homo sapien
tcagccttgcccatctccacgggca

SEQ ID NO: 4636696 - DNA, 25 bp, Homo sapien
ccctcagccttgcccatctccacgg

SEQ ID NO: 4636697 - DNA, 25 bp, Homo sapien
cttgtgagcagatcagattcggtgt

SEQ ID NO: 4636698 - DNA, 25 bp, Homo sapien
tcacagactcggatagatcccctca

SEQ ID NO: 4636699 - DNA, 25 bp, Homo sapien
atcagattcggtgttgcttcttcca

SEQ ID NO: 4636700 - DNA, 25 bp, Homo sapien
tgtgagcagatcagattcggtgttg

SEQ ID NO: 4636701 - DNA, 25 bp, Homo sapien
cctcctcctctgccttggctaatgg

SEQ ID NO: 4636702 - DNA, 25 bp, Homo sapien
ctcctcctctgccttggctaatggg

SEQ ID NO: 4636703 - DNA, 25 bp, Homo sapien
cagtgctagggtaacaggaaggatc

SEQ ID NO: 4636704 - DNA, 25 bp, Homo sapien
aggaaggatcgggtgggctttcagg

SEQ ID NO: 4636705 - DNA, 25 bp, Homo sapien
gaagtcagtgctagggtaacaggaa

SEQ ID NO: 4636706 - DNA, 25 bp, Homo sapien
ttaggaagtcagtgctagggtaaca

SEQ ID NO: 4636707 - DNA, 25 bp, Homo sapien
gataaggcactaccttcggaacacc

SEQ ID NO: 4636708 - DNA, 25 bp, Homo sapien
acactgtaataccaagatcaatgac

SEQ ID NO: 4636709 - DNA, 25 bp, Homo sapien
gtgctccagttatgggcaattgctg

SEQ ID NO: 4636710 - DNA, 25 bp, Homo sapien
tccagttatgggcaattgctgacaa

SEQ ID NO: 4636711 - DNA, 25 bp, Homo sapien
caaattgatgaaacttgggcagcga

SEQ ID NO: 4636712 - DNA, 25 bp, Homo sapien
cctgataatgagaagtacctcctta

SEQ ID NO: 4636713 - DNA, 25 bp, Homo sapien
agggtctctccagatcgcattagcg

SEQ ID NO: 4636714 - DNA, 25 bp, Homo sapien
gctcagtgcggcactggctgctgag

SEQ ID NO: 4636715 - DNA, 25 bp, Homo sapien
cgacagggtctctccagatcgcatt

SEQ ID NO: 4636716 - DNA, 25 bp, Homo sapien
gctgctgagggagaggcgtggtggg

SEQ ID NO: 4636717 - DNA, 25 bp, Homo sapien
gataaatcacccctaggaacagaat

SEQ ID NO: 4636718 - DNA, 25 bp, Homo sapien
taggatacaagtttccaggatcttt

SEQ ID NO: 4636719 - DNA, 25 bp, Homo sapien
attaggatacaagtttccaggatct

SEQ ID NO: 4636720 - DNA, 25 bp, Homo sapien
agataaatcacccctaggaacagaa

SEQ ID NO: 4636721 - DNA, 25 bp, Homo sapien
cacagacagggagattgagggcggg

SEQ ID NO: 4636722 - DNA, 25 bp, Homo sapien
tcttccctctggaaccacagacagg

SEQ ID NO: 4636723 - DNA, 25 bp, Homo sapien
cagggagattgagggcgggagaagc

SEQ ID NO: 4636724 - DNA, 25 bp, Homo sapien
tcccccagcactgaaacagttctct

SEQ ID NO: 4636725 - DNA, 25 bp, Homo sapien
tccaggttctggtttggaagcagag

SEQ ID NO: 4636726 - DNA, 25 bp, Homo sapien
cccttctcacactttctgactgtgt

SEQ ID NO: 4636727 - DNA, 25 bp, Homo sapien
gggatgaacttaatggcctctggaa

SEQ ID NO: 4636728 - DNA, 25 bp, Homo sapien
taatgtctgtactgaagtccccttc

SEQ ID NO: 4636729 - DNA, 25 bp, Homo sapien
ggttccaatgactcagaccctattg

SEQ ID NO: 4636730 - DNA, 25 bp, Homo sapien
gttccaatgactcagaccctattgg

SEQ ID NO: 4636731 - DNA, 25 bp, Homo sapien
caatgactcagaccctattggagcc

SEQ ID NO: 4636732 - DNA, 25 bp, Homo sapien
tccaatgactcagaccctattggag

SEQ ID NO: 4636733 - DNA, 25 bp, Homo sapien
tgaagcaagcccagtcatataacag

SEQ ID NO: 4636734 - DNA, 25 bp, Homo sapien
gaagcaagcccagtcatataacagg

SEQ ID NO: 4636735 - DNA, 25 bp, Homo sapien
tctccagatgtgaacggatcagtag

SEQ ID NO: 4636736 - DNA, 25 bp, Homo sapien
tccagatgtgaacggatcagtagaa

SEQ ID NO: 4636737 - DNA, 25 bp, Homo sapien
ctctccagatgtgaacggatcagta

SEQ ID NO: 4636738 - DNA, 25 bp, Homo sapien
ctccagatgtgaacggatcagtaga

SEQ ID NO: 4636739 - DNA, 25 bp, Homo sapien
cactggtccggtcaaagcccaagct

SEQ ID NO: 4636740 - DNA, 25 bp, Homo sapien
caaagcccaagctgctgccagccgc

SEQ ID NO: 4636741 - DNA, 25 bp, Homo sapien
agcccaagctgctgccagccgccat

SEQ ID NO: 4636742 - DNA, 25 bp, Homo sapien
actggtccggtcaaagcccaagctg

SEQ ID NO: 4636743 - DNA, 25 bp, Homo sapien
atctcgaagaaatgtctccctgatg

SEQ ID NO: 4636744 - DNA, 25 bp, Homo sapien
ctcgaagaaatgtctccctgatgga

SEQ ID NO: 4636745 - DNA, 25 bp, Homo sapien
tctcgaagaaatgtctccctgatgg

SEQ ID NO: 4636746 - DNA, 25 bp, Homo sapien
cacacttcagacgaggacaagagtc

SEQ ID NO: 4636747 - DNA, 25 bp, Homo sapien
cacttcagacgaggacaagagtccc

SEQ ID NO: 4636748 - DNA, 25 bp, Homo sapien
tcagacgaggacaagagtcccacag

SEQ ID NO: 4636749 - DNA, 25 bp, Homo sapien
cttcagacgaggacaagagtcccac

SEQ ID NO: 4636750 - DNA, 25 bp, Homo sapien
aggtcatcagggaggcactcctcca

SEQ ID NO: 4636751 - DNA, 25 bp, Homo sapien
gcaggagcagctggcgacagtcctt

SEQ ID NO: 4636752 - DNA, 25 bp, Homo sapien
aggagcagctggcgacagtccttcc

SEQ ID NO: 4636753 - DNA, 25 bp, Homo sapien
caggagcagctggcgacagtccttc

SEQ ID NO: 4636754 - DNA, 25 bp, Homo sapien
cgcagctccgcgtcgcaggctggtt

SEQ ID NO: 4636755 - DNA, 25 bp, Homo sapien
agctccgcgtcgcaggctggttttg

SEQ ID NO: 4636756 - DNA, 25 bp, Homo sapien
gcagctccgcgtcgcaggctggttt

SEQ ID NO: 4636757 - DNA, 25 bp, Homo sapien
ccgcagctccgcgtcgcaggctggt

SEQ ID NO: 4636758 - DNA, 25 bp, Homo sapien
gaaacaagaatggaagtggctttcg

SEQ ID NO: 4636759 - DNA, 25 bp, Homo sapien
caagaatggaagtggctttcgaagg

SEQ ID NO: 4636760 - DNA, 25 bp, Homo sapien
aacaagaatggaagtggctttcgaa

SEQ ID NO: 4636761 - DNA, 25 bp, Homo sapien
tggaaacaagaatggaagtggcttt

SEQ ID NO: 4636762 - DNA, 25 bp, Homo sapien
ctgcacagtcacacgacattgcagc

SEQ ID NO: 4636763 - DNA, 25 bp, Homo sapien
tgcacagtcacacgacattgcagca

SEQ ID NO: 4636764 - DNA, 25 bp, Homo sapien
actgcacagtcacacgacattgcag

SEQ ID NO: 4636765 - DNA, 25 bp, Homo sapien
tccgccgtggtgacggcaagactgt

SEQ ID NO: 4636766 - DNA, 25 bp, Homo sapien
cagctgtgccgtggcgttggcaaga

SEQ ID NO: 4636767 - DNA, 25 bp, Homo sapien
tgcagctccgccgtggtgacggcaa

SEQ ID NO: 4636768 - DNA, 25 bp, Homo sapien
ttgcagctccgccgtggtgacggca

SEQ ID NO: 4636769 - DNA, 25 bp, Homo sapien
catgcggtgtccagctgcatggtca

SEQ ID NO: 4636770 - DNA, 25 bp, Homo sapien
atgcggtgtccagctgcatggtcac

SEQ ID NO: 4636771 - DNA, 25 bp, Homo sapien
tcatgcggtgtccagctgcatggtc

SEQ ID NO: 4636772 - DNA, 25 bp, Homo sapien
gggagggtttgcacattgagtggca

SEQ ID NO: 4636773 - DNA, 25 bp, Homo sapien
gaagggggagggtttgcacattgag

SEQ ID NO: 4636774 - DNA, 25 bp, Homo sapien
ttgcacattgagtggcacctgctcc

SEQ ID NO: 4636775 - DNA, 25 bp, Homo sapien
agggtttgcacattgagtggcacct

SEQ ID NO: 4636776 - DNA, 25 bp, Homo sapien
ggaaggcagttgatacagactccag

SEQ ID NO: 4636777 - DNA, 25 bp, Homo sapien
cttgaatgtggagagggcccaagac

SEQ ID NO: 4636778 - DNA, 25 bp, Homo sapien
gactccctagggaaggcagttgata

SEQ ID NO: 4636779 - DNA, 25 bp, Homo sapien
gcccaagactccctagggaaggcag

SEQ ID NO: 4636780 - DNA, 25 bp, Homo sapien
agaagccctgagctgtgcggctgct

SEQ ID NO: 4636781 - DNA, 25 bp, Homo sapien
gcttactggcacccagggaggagaa

SEQ ID NO: 4636782 - DNA, 25 bp, Homo sapien
ctggcacccagggaggagaagccct

SEQ ID NO: 4636783 - DNA, 25 bp, Homo sapien
tgggcttactggcacccagggagga

SEQ ID NO: 4636784 - DNA, 25 bp, Homo sapien
tcagggactcctggcagttccccct

SEQ ID NO: 4636785 - DNA, 25 bp, Homo sapien
actccaggctaccgagggccagctg

SEQ ID NO: 4636786 - DNA, 25 bp, Homo sapien
catttctcagatcacctcgctcagg

SEQ ID NO: 4636787 - DNA, 25 bp, Homo sapien
cactccaggctaccgagggccagct

SEQ ID NO: 4636788 - DNA, 25 bp, Homo sapien
ccttataaggtaacctccagacatt

SEQ ID NO: 4636789 - DNA, 25 bp, Homo sapien
cttataaggtaacctccagacattg

SEQ ID NO: 4636790 - DNA, 25 bp, Homo sapien
ctaattggcatataatgagccgtga

SEQ ID NO: 4636791 - DNA, 25 bp, Homo sapien
gtcttttagcagcaaatgcattcta

SEQ ID NO: 4636792 - DNA, 25 bp, Homo sapien
tgtgcctccttagatcctgcgtttg

SEQ ID NO: 4636793 - DNA, 25 bp, Homo sapien
gtgcctccttagatcctgcgtttga

SEQ ID NO: 4636794 - DNA, 25 bp, Homo sapien
gactcactgtgcagtctgccacatc

SEQ ID NO: 4636795 - DNA, 25 bp, Homo sapien
tggcactaataggattctttgcccc

SEQ ID NO: 4636796 - DNA, 25 bp, Homo sapien
actttacccgactcactgtgcagtc

SEQ ID NO: 4636797 - DNA, 25 bp, Homo sapien
ccccttgccaatcttgtaaagaaag

SEQ ID NO: 4636798 - DNA, 25 bp, Homo sapien
tgacaacaaagccattgcatggctc

SEQ ID NO: 4636799 - DNA, 25 bp, Homo sapien
tggtgacaacaaagccattgcatgg

SEQ ID NO: 4636800 - DNA, 25 bp, Homo sapien
acaacaaagccattgcatggctcca

SEQ ID NO: 4636801 - DNA, 25 bp, Homo sapien
ggtgacaacaaagccattgcatggc

SEQ ID NO: 4636802 - DNA, 25 bp, Homo sapien
ccacttcggatccagaacaggccta

SEQ ID NO: 4636803 - DNA, 25 bp, Homo sapien
cgtttctgcagatgcccgcatcatg

SEQ ID NO: 4636804 - DNA, 25 bp, Homo sapien
ggagagactcaggtgggatctgctg

SEQ ID NO: 4636805 - DNA, 25 bp, Homo sapien
cttcggatccagaacaggcctagga

SEQ ID NO: 4636806 - DNA, 25 bp, Homo sapien
ggtgggagtgaagtaatgcgatttc

SEQ ID NO: 4636807 - DNA, 25 bp, Homo sapien
gtaatgcgatttcggctccttgtaa

SEQ ID NO: 4636808 - DNA, 25 bp, Homo sapien
gaagtaatgcgatttcggctccttg

SEQ ID NO: 4636809 - DNA, 25 bp, Homo sapien
gtgaagtaatgcgatttcggctcct

SEQ ID NO: 4636810 - DNA, 25 bp, Homo sapien
cagctaattgggcacagcgaaagat

SEQ ID NO: 4636811 - DNA, 25 bp, Homo sapien
aaatctcgcgagacatggtattggc

SEQ ID NO: 4636812 - DNA, 25 bp, Homo sapien
taattgggcacagcgaaagattctg

SEQ ID NO: 4636813 - DNA, 25 bp, Homo sapien
ggtattggcccgcagaatcctccgg

SEQ ID NO: 4636814 - DNA, 25 bp, Homo sapien
gagagaagtctatagacagatcctg

SEQ ID NO: 4636815 - DNA, 25 bp, Homo sapien
gacagatcctggaacatgcccaacc

SEQ ID NO: 4636816 - DNA, 25 bp, Homo sapien
tccttctgagcagcgtccaggcact

SEQ ID NO: 4636817 - DNA, 25 bp, Homo sapien
tcagtccttctgagcagcgtccagg

SEQ ID NO: 4636818 - DNA, 25 bp, Homo sapien
aagtggtggaaggttgatctcagga

SEQ ID NO: 4636819 - DNA, 25 bp, Homo sapien
ctgaagtggtggaaggttgatctca

SEQ ID NO: 4636820 - DNA, 25 bp, Homo sapien
taggagagcaccaggaacaacacac

SEQ ID NO: 4636821 - DNA, 25 bp, Homo sapien
cagtgctggctgaacggggggtagg

SEQ ID NO: 4636822 - DNA, 25 bp, Homo sapien
cagagaagagccgtgcaggggtaca

SEQ ID NO: 4636823 - DNA, 25 bp, Homo sapien
gccgtgcaggggtacaaccatcttc

SEQ ID NO: 4636824 - DNA, 25 bp, Homo sapien
aagagccgtgcaggggtacaaccat

SEQ ID NO: 4636825 - DNA, 25 bp, Homo sapien
agaagagccgtgcaggggtacaacc

SEQ ID NO: 4636826 - DNA, 25 bp, Homo sapien
cttgccaccgccacaggcataaggg

SEQ ID NO: 4636827 - DNA, 25 bp, Homo sapien
taaggggaggggtgcgaaacgcatg

SEQ ID NO: 4636828 - DNA, 25 bp, Homo sapien
caggcataaggggaggggtgcgaaa

SEQ ID NO: 4636829 - DNA, 25 bp, Homo sapien
cacaggcataaggggaggggtgcga

SEQ ID NO: 4636830 - DNA, 25 bp, Homo sapien
gctttggagccgcagcggccaacag

SEQ ID NO: 4636831 - DNA, 25 bp, Homo sapien
gccaacaggagtgggcaaaggaccc

SEQ ID NO: 4636832 - DNA, 25 bp, Homo sapien
ccagtgcctgagtgataggggaaat

SEQ ID NO: 4636833 - DNA, 25 bp, Homo sapien
aggaccctgccagtgcctgagtgat

SEQ ID NO: 4636834 - DNA, 25 bp, Homo sapien
tgggaggaagttgttccagatagca

SEQ ID NO: 4636835 - DNA, 25 bp, Homo sapien
ctgggaggaagttgttccagatagc

SEQ ID NO: 4636836 - DNA, 25 bp, Homo sapien
gtatcccctggtactccacacccat

SEQ ID NO: 4636837 - DNA, 25 bp, Homo sapien
cccatacaggggttatactcacagg

SEQ ID NO: 4636838 - DNA, 25 bp, Homo sapien
gtcttccccaacactgtgtccaaca

SEQ ID NO: 4636839 - DNA, 25 bp, Homo sapien
caggggttatactcacaggatggca

SEQ ID NO: 4636840 - DNA, 25 bp, Homo sapien
gtgtccaacacccatacaggggtta

SEQ ID NO: 4636841 - DNA, 25 bp, Homo sapien
ccctcagccttgcccatctccacgg

SEQ ID NO: 4636842 - DNA, 25 bp, Homo sapien
ctcagccttgcccatctccacgggc

SEQ ID NO: 4636843 - DNA, 25 bp, Homo sapien
tcagccttgcccatctccacgggca

SEQ ID NO: 4636844 - DNA, 25 bp, Homo sapien
cagccttgcccatctccacgggcat

SEQ ID NO: 4636845 - DNA, 25 bp, Homo sapien
tctgagtaagaggaagatattcttt

SEQ ID NO: 4636846 - DNA, 25 bp, Homo sapien
gaggtcgttcctgccttattcaact

SEQ ID NO: 4636847 - DNA, 25 bp, Homo sapien
taagaggaagatattctttgccctc

SEQ ID NO: 4636848 - DNA, 25 bp, Homo sapien
tggttgatgctgtgaggtcgttcct

SEQ ID NO: 4636849 - DNA, 25 bp, Homo sapien
aattatatcataaccattggacctc

SEQ ID NO: 4636850 - DNA, 25 bp, Homo sapien
ttaacaaaacctcaagtctggatag

SEQ ID NO: 4636851 - DNA, 25 bp, Homo sapien
cactgaagccttataatgttatcca

SEQ ID NO: 4636852 - DNA, 25 bp, Homo sapien
tatatgatggtggtgcttctgaaag

SEQ ID NO: 4636853 - DNA, 25 bp, Homo sapien
ctcctcctctgccttggctaatggg

SEQ ID NO: 4636854 - DNA, 25 bp, Homo sapien
tcctcctcctctgccttggctaatg

SEQ ID NO: 4636855 - DNA, 25 bp, Homo sapien
ctcctcctcctctgccttggctaat

SEQ ID NO: 4636856 - DNA, 25 bp, Homo sapien
tcctcctcctcctctgccttggcta

SEQ ID NO: 4636857 - DNA, 25 bp, Homo sapien
gataaggcactaccttcggaacacc

SEQ ID NO: 4636858 - DNA, 25 bp, Homo sapien
tgtgctgtgcgccatcaatctcaga

SEQ ID NO: 4636859 - DNA, 25 bp, Homo sapien
aacttgggcagcgattatctggtgt

SEQ ID NO: 4636860 - DNA, 25 bp, Homo sapien
tgctgtgcgccatcaatctcagagc

SEQ ID NO: 4636861 - DNA, 25 bp, Homo sapien
ggcagcgattatctggtgtcaaaaa

SEQ ID NO: 4636862 - DNA, 25 bp, Homo sapien
ggacggggacatcgcggtggggcca

SEQ ID NO: 4636863 - DNA, 25 bp, Homo sapien
cagatcgcattagcattagcgtggg

SEQ ID NO: 4636864 - DNA, 25 bp, Homo sapien
tctccagatcgcattagcattagcg

SEQ ID NO: 4636865 - DNA, 25 bp, Homo sapien
gggtctctccagatcgcattagcat

SEQ ID NO: 4636866 - DNA, 25 bp, Homo sapien
gtctctccagatcgcattagcatta

SEQ ID NO: 4636867 - DNA, 25 bp, Homo sapien
gataaatcacccctaggaacagaat

SEQ ID NO: 4636868 - DNA, 25 bp, Homo sapien
taggatacaagtttccaggatcttt

SEQ ID NO: 4636869 - DNA, 25 bp, Homo sapien
attaggatacaagtttccaggatct

SEQ ID NO: 4636870 - DNA, 25 bp, Homo sapien
tggttgctacaataataggccaagc

SEQ ID NO: 4636871 - DNA, 25 bp, Homo sapien
gccgggctgcggaggccgagcagag

SEQ ID NO: 4636872 - DNA, 25 bp, Homo sapien
gctgcggaggccgagcagagtcgcc

SEQ ID NO: 4636873 - DNA, 25 bp, Homo sapien
gcagagtcgccagccggtgcctgac

SEQ ID NO: 4636874 - DNA, 25 bp, Homo sapien
tgcggaggccgagcagagtcgccag

SEQ ID NO: 4636875 - DNA, 25 bp, Homo sapien
tgtaagatattcctgaagcaagccc

SEQ ID NO: 4636876 - DNA, 25 bp, Homo sapien
taaatacaaccacagcacatttagg

SEQ ID NO: 4636877 - DNA, 25 bp, Homo sapien
tagaactagatgtaaacatgactcc

SEQ ID NO: 4636878 - DNA, 25 bp, Homo sapien
aacagagagttatagagggagttat

SEQ ID NO: 4636879 - DNA, 25 bp, Homo sapien
tgttggaaagcgaaagtacacccca

SEQ ID NO: 4636880 - DNA, 25 bp, Homo sapien
acgctcctcgccctgtccctgccta

SEQ ID NO: 4636881 - DNA, 25 bp, Homo sapien
ctttatctctgaagcccactctttg

SEQ ID NO: 4636882 - DNA, 25 bp, Homo sapien
ttacttgttggaaagcgaaagtaca

SEQ ID NO: 4636883 - DNA, 25 bp, Homo sapien
cctagcctggctagggtgcctgcta

SEQ ID NO: 4636884 - DNA, 25 bp, Homo sapien
ctatggtggtgtgcagagtgagggt

SEQ ID NO: 4636885 - DNA, 25 bp, Homo sapien
gtttttgtattgactgccattccgt

SEQ ID NO: 4636886 - DNA, 25 bp, Homo sapien
cattccgtttacctcaagaagtatg

SEQ ID NO: 4636887 - DNA, 25 bp, Homo sapien
caaagcccaagctgctgccagccac

SEQ ID NO: 4636888 - DNA, 25 bp, Homo sapien
cactggtccggtcaaagcccaagct

SEQ ID NO: 4636889 - DNA, 25 bp, Homo sapien
actggtccggtcaaagcccaagctg

SEQ ID NO: 4636890 - DNA, 25 bp, Homo sapien
agcccaagctgctgccagccaccat

SEQ ID NO: 4636891 - DNA, 25 bp, Homo sapien
tgccccatcctagactcaggatgct

SEQ ID NO: 4636892 - DNA, 25 bp, Homo sapien
aaagcagaagtgcactggggcggtg

SEQ ID NO: 4636893 - DNA, 25 bp, Homo sapien
gattccaggtgccttgctccagtcc

SEQ ID NO: 4636894 - DNA, 25 bp, Homo sapien
ctgccccatcctagactcaggatgc

SEQ ID NO: 4636895 - DNA, 25 bp, Homo sapien
cggactctgcgtcgggtttcctcac

SEQ ID NO: 4636896 - DNA, 25 bp, Homo sapien
cttctccggactctgcgtcgggttt

SEQ ID NO: 4636897 - DNA, 25 bp, Homo sapien
tctccggactctgcgtcgggtttcc

SEQ ID NO: 4636898 - DNA, 25 bp, Homo sapien
caccaacaccgtccagagaggcctg

SEQ ID NO: 4636899 - DNA, 25 bp, Homo sapien
gcggccaggcgggatatatcaccgt

SEQ ID NO: 4636900 - DNA, 25 bp, Homo sapien
cttccagaccgtattgtggtgtggc

SEQ ID NO: 4636901 - DNA, 25 bp, Homo sapien
ccagaccgtattgtggtgtggcttc

SEQ ID NO: 4636902 - DNA, 25 bp, Homo sapien
tccactgccagggtcataagggatg

SEQ ID NO: 4636903 - DNA, 25 bp, Homo sapien
tctcgaagaaatgtctccctgacgg

SEQ ID NO: 4636904 - DNA, 25 bp, Homo sapien
atctcgaagaaatgtctccctgacg

SEQ ID NO: 4636905 - DNA, 25 bp, Homo sapien
ctcgaagaaatgtctccctgacgga

SEQ ID NO: 4636906 - DNA, 25 bp, Homo sapien
catgcgcgaggctctagtggcttct

SEQ ID NO: 4636907 - DNA, 25 bp, Homo sapien
cccttcacagtggttccttcggttg

SEQ ID NO: 4636908 - DNA, 25 bp, Homo sapien
gccgccatccgagatctcgaggaca

SEQ ID NO: 4636909 - DNA, 25 bp, Homo sapien
gacgtgaacgtctccggattccagg

SEQ ID NO: 4636910 - DNA, 25 bp, Homo sapien
atgatgaaaccccaggcagagacgg

SEQ ID NO: 4636911 - DNA, 25 bp, Homo sapien
cagcctatctgtcaggagcggagcg

SEQ ID NO: 4636912 - DNA, 25 bp, Homo sapien
tcgcaaagggccgaccatgatgatg

SEQ ID NO: 4636913 - DNA, 25 bp, Homo sapien
tgcgcgaggcgcgagcggtttctcc

SEQ ID NO: 4636914 - DNA, 25 bp, Homo sapien
ttaattgggcaggtatcatgagccg

SEQ ID NO: 4636915 - DNA, 25 bp, Homo sapien
gatccgctttgggtgcctgaaagcc

SEQ ID NO: 4636916 - DNA, 25 bp, Homo sapien
gagtacactgcagccgagaacaaga

SEQ ID NO: 4636917 - DNA, 25 bp, Homo sapien
tggccaaatgccttcaaaaaagatg

SEQ ID NO: 4636918 - DNA, 25 bp, Homo sapien
ccatagtgagatatttctacacacc

SEQ ID NO: 4636919 - DNA, 25 bp, Homo sapien
catcatggacatgtcaaataaaacc

SEQ ID NO: 4636920 - DNA, 25 bp, Homo sapien
gacatcaatggacgttttaacaaga

SEQ ID NO: 4636921 - DNA, 25 bp, Homo sapien
tgcaaatgatccaattaggtaatgg

SEQ ID NO: 4636922 - DNA, 25 bp, Homo sapien
caaaatataggaaatacagctaagg

SEQ ID NO: 4636923 - DNA, 25 bp, Homo sapien
aacacagttccaaatgatctatgga

SEQ ID NO: 4636924 - DNA, 25 bp, Homo sapien
caataacttacacttgtatctcaag

SEQ ID NO: 4636925 - DNA, 25 bp, Homo sapien
ggctgtggtgggaaagaaatttata

SEQ ID NO: 4636926 - DNA, 25 bp, Homo sapien
agccttatctcagcaattgatagaa

SEQ ID NO: 4636927 - DNA, 25 bp, Homo sapien
tgtgggttttaacagccttatctca

SEQ ID NO: 4636928 - DNA, 25 bp, Homo sapien
cagcaattgatagaattattggaca

SEQ ID NO: 4636929 - DNA, 25 bp, Homo sapien
gaattattggacaaaaatttgacaa

SEQ ID NO: 4636930 - DNA, 25 bp, Homo sapien
gcacctgcactacctttgtggtgta

SEQ ID NO: 4636931 - DNA, 25 bp, Homo sapien
gacagcacccatgggaatgcacctg

SEQ ID NO: 4636932 - DNA, 25 bp, Homo sapien
catgaaagctcgagtagcacacagt

SEQ ID NO: 4636933 - DNA, 25 bp, Homo sapien
agggactgtcccaattatgtttcaa

SEQ ID NO: 4636934 - DNA, 25 bp, Homo sapien
ggaattttgaacatcaagaaagaag

SEQ ID NO: 4636935 - DNA, 25 bp, Homo sapien
ttttgaacatcaagaaagaaggaag

SEQ ID NO: 4636936 - DNA, 25 bp, Homo sapien
gcaagcttaccattaaatgtttact

SEQ ID NO: 4636937 - DNA, 25 bp, Homo sapien
gatatattaatagaattagcagaaa

SEQ ID NO: 4636938 - DNA, 25 bp, Homo sapien
aatttgtttagctcctgcatatggg

SEQ ID NO: 4636939 - DNA, 25 bp, Homo sapien
cgctagtcttatccatgattctgca

SEQ ID NO: 4636940 - DNA, 25 bp, Homo sapien
gaccagctatagagcactacaacag

SEQ ID NO: 4636941 - DNA, 25 bp, Homo sapien
tgcatatgggtaaggacagacagta

SEQ ID NO: 4636942 - DNA, 25 bp, Homo sapien
gaagcacctacacgctcccaccctg

SEQ ID NO: 4636943 - DNA, 25 bp, Homo sapien
ctttgtagctgcttcgggtgctccc

SEQ ID NO: 4636944 - DNA, 25 bp, Homo sapien
tgcttcgggtgctcccgaagcacct

SEQ ID NO: 4636945 - DNA, 25 bp, Homo sapien
tagctgcttcgggtgctcccgaagc

SEQ ID NO: 4636946 - DNA, 25 bp, Homo sapien
gattgtgtggaagcggacactgcgt

SEQ ID NO: 4636947 - DNA, 25 bp, Homo sapien
ttccctgtggcgctggaacaaggcg

SEQ ID NO: 4636948 - DNA, 25 bp, Homo sapien
ggtgtcctggtgactgccgcacctt

SEQ ID NO: 4636949 - DNA, 25 bp, Homo sapien
tattaggtaatgcagcagctgttgc

SEQ ID NO: 4636950 - DNA, 25 bp, Homo sapien
cgttgacatcgagagatgtcaggtt

SEQ ID NO: 4636951 - DNA, 25 bp, Homo sapien
tcgttgacatcgagagatgtcaggt

SEQ ID NO: 4636952 - DNA, 25 bp, Homo sapien
ctcgttgacatcgagagatgtcagg

SEQ ID NO: 4636953 - DNA, 25 bp, Homo sapien
gcggagacaggcgacacaggcaata

SEQ ID NO: 4636954 - DNA, 25 bp, Homo sapien
aggcgacacaggcaatacccagagg

SEQ ID NO: 4636955 - DNA, 25 bp, Homo sapien
atcagaactgcggagacaggcgaca

SEQ ID NO: 4636956 - DNA, 25 bp, Homo sapien
cttgcatcagaactgcggagacagg

SEQ ID NO: 4636957 - DNA, 25 bp, Homo sapien
ttattgataggactggagtgggaaa

SEQ ID NO: 4636958 - DNA, 25 bp, Homo sapien
gccactgttactgtggtccaagaag

SEQ ID NO: 4636959 - DNA, 25 bp, Homo sapien
ttcagggtggccactgttactgtgg

SEQ ID NO: 4636960 - DNA, 25 bp, Homo sapien
gaaagctagggaaggctgccactct

SEQ ID NO: 4636961 - DNA, 25 bp, Homo sapien
tgtaacatagcaccaaagggaaggt

SEQ ID NO: 4636962 - DNA, 25 bp, Homo sapien
tgtgtaacatagcaccaaagggaag

SEQ ID NO: 4636963 - DNA, 25 bp, Homo sapien
aacatagcaccaaagggaaggtcat

SEQ ID NO: 4636964 - DNA, 25 bp, Homo sapien
ctgtgtaacatagcaccaaagggaa

SEQ ID NO: 4636965 - DNA, 25 bp, Homo sapien
ctggggagcttcatcttggctttcc

SEQ ID NO: 4636966 - DNA, 25 bp, Homo sapien
actggggagcttcatcttggctttc

SEQ ID NO: 4636967 - DNA, 25 bp, Homo sapien
tgcgttagctaaaactatcactgtg

SEQ ID NO: 4636968 - DNA, 25 bp, Homo sapien
tatcactgtgcttatagcctgtaag

SEQ ID NO: 4636969 - DNA, 25 bp, Homo sapien
cctgtaaggctacagcatcagagag

SEQ ID NO: 4636970 - DNA, 25 bp, Homo sapien
ggagtatttagcacagttattttca

SEQ ID NO: 4636971 - DNA, 25 bp, Homo sapien
catgaagtatggagaataggtggac

SEQ ID NO: 4636972 - DNA, 25 bp, Homo sapien
tcatgaagtatggagaataggtgga

SEQ ID NO: 4636973 - DNA, 25 bp, Homo sapien
gaagtatggagaataggtggacaat

SEQ ID NO: 4636974 - DNA, 25 bp, Homo sapien
tgaagtatggagaataggtggacaa

SEQ ID NO: 4636975 - DNA, 25 bp, Homo sapien
tgactgtcacagtagatatgggcat

SEQ ID NO: 4636976 - DNA, 25 bp, Homo sapien
ctgcccgcttgcactgtaactccaa

SEQ ID NO: 4636977 - DNA, 25 bp, Homo sapien
tctgctaataatccatcactgtggt

SEQ ID NO: 4636978 - DNA, 25 bp, Homo sapien
aaggaagctttcacctaaagcttgg

SEQ ID NO: 4636979 - DNA, 25 bp, Homo sapien
tcacctaaagcttgggagaaatgat

SEQ ID NO: 4636980 - DNA, 25 bp, Homo sapien
ctcaggacatggaaaatacggactt

SEQ ID NO: 4636981 - DNA, 25 bp, Homo sapien
ttctcaggacatggaaaatacggac

SEQ ID NO: 4636982 - DNA, 25 bp, Homo sapien
tctcaggacatggaaaatacggact

SEQ ID NO: 4636983 - DNA, 25 bp, Homo sapien
tcaggacatggaaaatacggacttg

SEQ ID NO: 4636984 - DNA, 25 bp, Homo sapien
cagaaatcagtaaagctgtcattgc

SEQ ID NO: 4636985 - DNA, 25 bp, Homo sapien
atcagtaaagctgtcattgcagatt

SEQ ID NO: 4636986 - DNA, 25 bp, Homo sapien
tcaggggttaaatggattcaaaaca

SEQ ID NO: 4636987 - DNA, 25 bp, Homo sapien
caggggttaaatggattcaaaacag

SEQ ID NO: 4636988 - DNA, 25 bp, Homo sapien
tcagttgatacatcttttcagtaac

SEQ ID NO: 4636989 - DNA, 25 bp, Homo sapien
tgccaaagcctcatttgcaatttca

SEQ ID NO: 4636990 - DNA, 25 bp, Homo sapien
ctgccaaagcctcatttgcaatttc

SEQ ID NO: 4636991 - DNA, 25 bp, Homo sapien
ctgaactcagttgatacatcttttc

SEQ ID NO: 4636992 - DNA, 25 bp, Homo sapien
tatttaaggtgaacaagggagtctc

SEQ ID NO: 4636993 - DNA, 25 bp, Homo sapien
tctctatgtggtttatatttaaggt

SEQ ID NO: 4636994 - DNA, 25 bp, Homo sapien
tcagctttcaggcatgcaaatcccc

SEQ ID NO: 4636995 - DNA, 25 bp, Homo sapien
gaaagtcaccgtctgatatgatcca

SEQ ID NO: 4636996 - DNA, 25 bp, Homo sapien
gctaagggaacggttgttcttcatg

SEQ ID NO: 4636997 - DNA, 25 bp, Homo sapien
cggttgttcttcatgttcccaaggg

SEQ ID NO: 4636998 - DNA, 25 bp, Homo sapien
tggctaagggaacggttgttcttca

SEQ ID NO: 4636999 - DNA, 25 bp, Homo sapien
ggaacggttgttcttcatgttccca

SEQ ID NO: 4637000 - DNA, 25 bp, Homo sapien
tcctggaaaggcaatgtgagaggcc

SEQ ID NO: 4637001 - DNA, 25 bp, Homo sapien
tgtggtgtctcaggtcaattcctgg

SEQ ID NO: 4637002 - DNA, 25 bp, Homo sapien
tcctggtcagggtccactttggttc

SEQ ID NO: 4637003 - DNA, 25 bp, Homo sapien
ggccaaggctacaaggtgcctcaat

SEQ ID NO: 4637004 - DNA, 25 bp, Homo sapien
cgtattctttaaggtcagtgaactg

SEQ ID NO: 4637005 - DNA, 25 bp, Homo sapien
ttcgtattctttaaggtcagtgaac

SEQ ID NO: 4637006 - DNA, 25 bp, Homo sapien
tgttcgtattctttaaggtcagtga

SEQ ID NO: 4637007 - DNA, 25 bp, Homo sapien
ttgttcgtattctttaaggtcagtg

SEQ ID NO: 4637008 - DNA, 25 bp, Homo sapien
tgttctgtatatttaggatggctgg

SEQ ID NO: 4637009 - DNA, 25 bp, Homo sapien
ttctgtatatttaggatggctggtg

SEQ ID NO: 4637010 - DNA, 25 bp, Homo sapien
ctgtatatttaggatggctggtggg

SEQ ID NO: 4637011 - DNA, 25 bp, Homo sapien
gtgttctgtatatttaggatggctg

SEQ ID NO: 4637012 - DNA, 25 bp, Homo sapien
gttctggtaacaccgcaggccctgg

SEQ ID NO: 4637013 - DNA, 25 bp, Homo sapien
ggagcggaccgaccctaatctgctc

SEQ ID NO: 4637014 - DNA, 25 bp, Homo sapien
tggcagtgccaacagatggagatag

SEQ ID NO: 4637015 - DNA, 25 bp, Homo sapien
ttccagatccttgcttgtgagattt

SEQ ID NO: 4637016 - DNA, 25 bp, Homo sapien
agcgaggagcgagcccgagggcagg

SEQ ID NO: 4637017 - DNA, 25 bp, Homo sapien
gaggagcgagcccgagggcagggtg

SEQ ID NO: 4637018 - DNA, 25 bp, Homo sapien
gagcgagcccgagggcagggtgcgt

SEQ ID NO: 4637019 - DNA, 25 bp, Homo sapien
cagcgaggagcgagcccgagggcag

SEQ ID NO: 4637020 - DNA, 25 bp, Homo sapien
gagcagaggttcaccgctctccttc

SEQ ID NO: 4637021 - DNA, 25 bp, Homo sapien
tccactggtgctgtcctgactgacg

SEQ ID NO: 4637022 - DNA, 25 bp, Homo sapien
ctgagaaagagttccgcaccgacat

SEQ ID NO: 4637023 - DNA, 25 bp, Homo sapien
gggagcctctgaccgaattctggca

SEQ ID NO: 4637024 - DNA, 25 bp, Homo sapien
tttggctcatgtgtgctaagagaag

SEQ ID NO: 4637025 - DNA, 25 bp, Homo sapien
cttgctttggctcatgtgtgctaag

SEQ ID NO: 4637026 - DNA, 25 bp, Homo sapien
tgctttggctcatgtgtgctaagag

SEQ ID NO: 4637027 - DNA, 25 bp, Homo sapien
gctttggctcatgtgtgctaagaga

SEQ ID NO: 4637028 - DNA, 25 bp, Homo sapien
acaccacaggtagccaaggcaaggg

SEQ ID NO: 4637029 - DNA, 25 bp, Homo sapien
gtcgagaaaggggactgcacccaca

SEQ ID NO: 4637030 - DNA, 25 bp, Homo sapien
ctgccacacaaagggaacccatggc

SEQ ID NO: 4637031 - DNA, 25 bp, Homo sapien
gaacccatggccagtcgagaaaggg

SEQ ID NO: 4637032 - DNA, 25 bp, Homo sapien
cagttggcagagaagatgagctgct

SEQ ID NO: 4637033 - DNA, 25 bp, Homo sapien
aagagaacatagagggttgagaaag

SEQ ID NO: 4637034 - DNA, 25 bp, Homo sapien
ctaagctacacagttggcagagaag

SEQ ID NO: 4637035 - DNA, 25 bp, Homo sapien
gagcagccatttctagcctggggca

SEQ ID NO: 4637036 - DNA, 25 bp, Homo sapien
agacatctaacaaagaggttcctta

SEQ ID NO: 4637037 - DNA, 25 bp, Homo sapien
tcttatgttggacagattgctgaca

SEQ ID NO: 4637038 - DNA, 25 bp, Homo sapien
catgcatcaggcatcagacatctaa

SEQ ID NO: 4637039 - DNA, 25 bp, Homo sapien
taagttgaactgttgtcttgaacca

SEQ ID NO: 4637040 - DNA, 25 bp, Homo sapien
gctccaacggccctgttggactgag

SEQ ID NO: 4637041 - DNA, 25 bp, Homo sapien
tggcttctgtgctccaacggccctg

SEQ ID NO: 4637042 - DNA, 25 bp, Homo sapien
gcccatgaacatgtttgtttggcat

SEQ ID NO: 4637043 - DNA, 25 bp, Homo sapien
ttggactgagaaagtgatgcccatg

SEQ ID NO: 4637044 - DNA, 25 bp, Homo sapien
agtgtttttaaggcatagaagagga

SEQ ID NO: 4637045 - DNA, 25 bp, Homo sapien
ccacagcgtcagagtctattgatgt

SEQ ID NO: 4637046 - DNA, 25 bp, Homo sapien
cagagtctattgatgttggatgatg

SEQ ID NO: 4637047 - DNA, 25 bp, Homo sapien
tttcatcaggtttgatcttctcatc

SEQ ID NO: 4637048 - DNA, 25 bp, Homo sapien
gctttgaaactcacaacgaacgcag

SEQ ID NO: 4637049 - DNA, 25 bp, Homo sapien
aaactcacaacgaacgcagacgcac

SEQ ID NO: 4637050 - DNA, 25 bp, Homo sapien
cagctttgaaactcacaacgaacgc

SEQ ID NO: 4637051 - DNA, 25 bp, Homo sapien
tgaaactcacaacgaacgcagacgc

SEQ ID NO: 4637052 - DNA, 25 bp, Homo sapien
gaagtgatcagcattacaaacccgg

SEQ ID NO: 4637053 - DNA, 25 bp, Homo sapien
tcaagcactacagtttgctgattgg

SEQ ID NO: 4637054 - DNA, 25 bp, Homo sapien
gggctttgagtaacctcatgggcat

SEQ ID NO: 4637055 - DNA, 25 bp, Homo sapien
caaacccggtgcaagggcaacggtg

SEQ ID NO: 4637056 - DNA, 25 bp, Homo sapien
aatactatgtaagattcaagctttg

SEQ ID NO: 4637057 - DNA, 25 bp, Homo sapien
ttctcttcgacactgaggtcatcaa

SEQ ID NO: 4637058 - DNA, 25 bp, Homo sapien
cactgaggtcatcaaatactatgta

SEQ ID NO: 4637059 - DNA, 25 bp, Homo sapien
taagattcaagctttgtaacctcaa

SEQ ID NO: 4637060 - DNA, 25 bp, Homo sapien
cggtgtaacctatgtaacccataat

SEQ ID NO: 4637061 - DNA, 25 bp, Homo sapien
tcggaataccagaagtagaaggaag

SEQ ID NO: 4637062 - DNA, 25 bp, Homo sapien
cctgttggataatttcaaacggtgt

SEQ ID NO: 4637063 - DNA, 25 bp, Homo sapien
ttaatgacagacatgaaaccatagg

SEQ ID NO: 4637064 - DNA, 25 bp, Homo sapien
ttgagcatcaggcagagaacctccc

SEQ ID NO: 4637065 - DNA, 25 bp, Homo sapien
cacaagtacacttttgagcatcagg

SEQ ID NO: 4637066 - DNA, 25 bp, Homo sapien
taatccacaagtacacttttgagca

SEQ ID NO: 4637067 - DNA, 25 bp, Homo sapien
cacttttgagcatcaggcagagaac

SEQ ID NO: 4637068 - DNA, 25 bp, Homo sapien
gggactacaggcacacacagccaca

SEQ ID NO: 4637069 - DNA, 25 bp, Homo sapien
ctgggttaagcaattctactgtctc

SEQ ID NO: 4637070 - DNA, 25 bp, Homo sapien
tactgtctcaccctcctgagcagct

SEQ ID NO: 4637071 - DNA, 25 bp, Homo sapien
ccacagtgcctggcctaagtttttt

SEQ ID NO: 4637072 - DNA, 25 bp, Homo sapien
ggaaaggactattgtgtcactagtc

SEQ ID NO: 4637073 - DNA, 25 bp, Homo sapien
tgcgtctgtcatcacaatctgagtg

SEQ ID NO: 4637074 - DNA, 25 bp, Homo sapien
ttttgggaaaggactattgtgtcac

SEQ ID NO: 4637075 - DNA, 25 bp, Homo sapien
ggcctgcgtctgtcatcacaatctg

SEQ ID NO: 4637076 - DNA, 25 bp, Homo sapien
gaaggtatgaagtctcagtgttgaa

SEQ ID NO: 4637077 - DNA, 25 bp, Homo sapien
acgtcagcagtgagttctccgtgga

SEQ ID NO: 4637078 - DNA, 25 bp, Homo sapien
ttaaaaaagaagcacacgtcagcag

SEQ ID NO: 4637079 - DNA, 25 bp, Homo sapien
atgaagtctcagtgttgaaggaagc

SEQ ID NO: 4637080 - DNA, 25 bp, Homo sapien
gacttgtccagagtggccagcctac

SEQ ID NO: 4637081 - DNA, 25 bp, Homo sapien
tgacttgtccagagtggccagccta

SEQ ID NO: 4637082 - DNA, 25 bp, Homo sapien
cctgtgacttgtccagagtggccag

SEQ ID NO: 4637083 - DNA, 25 bp, Homo sapien
tgtgacttgtccagagtggccagcc

SEQ ID NO: 4637084 - DNA, 25 bp, Homo sapien
tgatcaacttgaagagacgctcctt

SEQ ID NO: 4637085 - DNA, 25 bp, Homo sapien
ggtccattccccacatcgaaggaaa

SEQ ID NO: 4637086 - DNA, 25 bp, Homo sapien
tgttgagctgtaaacgaacgtgccc

SEQ ID NO: 4637087 - DNA, 25 bp, Homo sapien
cattaaagggagtgggtgactgcac

SEQ ID NO: 4637088 - DNA, 25 bp, Homo sapien
ggataaatttcttacttggatggac

SEQ ID NO: 4637089 - DNA, 25 bp, Homo sapien
gagtctggcaaatagtccttctcaa

SEQ ID NO: 4637090 - DNA, 25 bp, Homo sapien
gggtgacaccataccccaggatctc

SEQ ID NO: 4637091 - DNA, 25 bp, Homo sapien
actttcaaacatggtgagtctggca

SEQ ID NO: 4637092 - DNA, 25 bp, Homo sapien
cctagaaagcctctctgtctggtgg

SEQ ID NO: 4637093 - DNA, 25 bp, Homo sapien
agatccagggccaccccattcaact

SEQ ID NO: 4637094 - DNA, 25 bp, Homo sapien
cagagaccgaatgcatcctagaaag

SEQ ID NO: 4637095 - DNA, 25 bp, Homo sapien
tggctccactcctggcgtcactgtg

SEQ ID NO: 4637096 - DNA, 25 bp, Homo sapien
agtcacaggtgacccccctgcgttt

SEQ ID NO: 4637097 - DNA, 25 bp, Homo sapien
gcgacacaagtgtccataggtgctg

SEQ ID NO: 4637098 - DNA, 25 bp, Homo sapien
gaaggcacagtcacaggtgaccccc

SEQ ID NO: 4637099 - DNA, 25 bp, Homo sapien
atctccctccattgcgacacaagtg

SEQ ID NO: 4637100 - DNA, 25 bp, Homo sapien
ctataacctgctccttggtcacact

SEQ ID NO: 4637101 - DNA, 25 bp, Homo sapien
taacctgctccttggtcacacttac

SEQ ID NO: 4637102 - DNA, 25 bp, Homo sapien
tttccctataacctgctccttggtc

SEQ ID NO: 4637103 - DNA, 25 bp, Homo sapien
ttccctataacctgctccttggtca

SEQ ID NO: 4637104 - DNA, 25 bp, Homo sapien
agaagcattcttcatactatttaag

SEQ ID NO: 4637105 - DNA, 25 bp, Homo sapien
gaagcattcttcatactatttaagt

SEQ ID NO: 4637106 - DNA, 25 bp, Homo sapien
ccagaagcattcttcatactattta

SEQ ID NO: 4637107 - DNA, 25 bp, Homo sapien
tgccagaagcattcttcatactatt

SEQ ID NO: 4637108 - DNA, 25 bp, Homo sapien
ctactaggttttggtatataggcct

SEQ ID NO: 4637109 - DNA, 25 bp, Homo sapien
ttcaatcatgaaaggttactggagt

SEQ ID NO: 4637110 - DNA, 25 bp, Homo sapien
tattttacggaagaagctttcacca

SEQ ID NO: 4637111 - DNA, 25 bp, Homo sapien
ttgttgaaccactcctgaaatcctg

SEQ ID NO: 4637112 - DNA, 25 bp, Homo sapien
aatgaagaaacgagagagctggagt

SEQ ID NO: 4637113 - DNA, 25 bp, Homo sapien
tgaagaaacgagagagctggagttt

SEQ ID NO: 4637114 - DNA, 25 bp, Homo sapien
ttcacttaaagtgtaatgttcttga

SEQ ID NO: 4637115 - DNA, 25 bp, Homo sapien
cacttaaagtgtaatgttcttgaaa

SEQ ID NO: 4637116 - DNA, 25 bp, Homo sapien
gctcacatacagcaataagctcgga

SEQ ID NO: 4637117 - DNA, 25 bp, Homo sapien
tgtggttcggaagctcagtgtgatc

SEQ ID NO: 4637118 - DNA, 25 bp, Homo sapien
cattgttggcgaggataactgaaag

SEQ ID NO: 4637119 - DNA, 25 bp, Homo sapien
gaaaggtattcctcatagaaagagc

SEQ ID NO: 4637120 - DNA, 25 bp, Homo sapien
tcagccactgacgagataaagaaca

SEQ ID NO: 4637121 - DNA, 25 bp, Homo sapien
tccagcctaatcagagattttgtag

SEQ ID NO: 4637122 - DNA, 25 bp, Homo sapien
aatgccccaattaccactgtttgag

SEQ ID NO: 4637123 - DNA, 25 bp, Homo sapien
actgtgaaaaccttgcaatgcccca

SEQ ID NO: 4637124 - DNA, 25 bp, Homo sapien
tatctagcttgtacctaatctgcaa

SEQ ID NO: 4637125 - DNA, 25 bp, Homo sapien
tgatgtctatctagcttgtacctaa

SEQ ID NO: 4637126 - DNA, 25 bp, Homo sapien
gattttgatgtctatctagcttgta

SEQ ID NO: 4637127 - DNA, 25 bp, Homo sapien
tcaggattttgatgtctatctagct

SEQ ID NO: 4637128 - DNA, 25 bp, Homo sapien
gaaggatctataattggcagaatcc

SEQ ID NO: 4637129 - DNA, 25 bp, Homo sapien
tatgagagatttgacggcgttgaat

SEQ ID NO: 4637130 - DNA, 25 bp, Homo sapien
agatttgacggcgttgaattctgtc

SEQ ID NO: 4637131 - DNA, 25 bp, Homo sapien
tttgacggcgttgaattctgtccct

SEQ ID NO: 4637132 - DNA, 25 bp, Homo sapien
tgagagatttgacggcgttgaattc

SEQ ID NO: 4637133 - DNA, 25 bp, Homo sapien
ttataccgtaagttacatgcctttg

SEQ ID NO: 4637134 - DNA, 25 bp, Homo sapien
tctgagtatatacttcgttgctgaa

SEQ ID NO: 4637135 - DNA, 25 bp, Homo sapien
ttttctgagatcaattgcttctgag

SEQ ID NO: 4637136 - DNA, 25 bp, Homo sapien
gaatataccatccttgaatgaaaac

SEQ ID NO: 4637137 - DNA, 25 bp, Homo sapien
gagaaatatattggtaacttagaac

SEQ ID NO: 4637138 - DNA, 25 bp, Homo sapien
gaagggatgaatcaaagatttacag

SEQ ID NO: 4637139 - DNA, 25 bp, Homo sapien
tcaaagatttacaggaactcaagag

SEQ ID NO: 4637140 - DNA, 25 bp, Homo sapien
gcttctctattagccaacttgttgg

SEQ ID NO: 4637141 - DNA, 25 bp, Homo sapien
atcttccatttttgcactctgtatt

SEQ ID NO: 4637142 - DNA, 25 bp, Homo sapien
atttttgcactctgtatttttgata

SEQ ID NO: 4637143 - DNA, 25 bp, Homo sapien
gcactctgtatttttgatatatata

SEQ ID NO: 4637144 - DNA, 25 bp, Homo sapien
tccatttttgcactctgtatttttg

SEQ ID NO: 4637145 - DNA, 25 bp, Homo sapien
gtttgagagctcaacttccctagcc

SEQ ID NO: 4637146 - DNA, 25 bp, Homo sapien
tagccctcacaatcaaaatcatgcc

SEQ ID NO: 4637147 - DNA, 25 bp, Homo sapien
aaatttatcagctgttgcctgctag

SEQ ID NO: 4637148 - DNA, 25 bp, Homo sapien
tagttcttggcatgccccttcattt

SEQ ID NO: 4637149 - DNA, 25 bp, Homo sapien
ttgtgtccgggtccgcgccggcagc

SEQ ID NO: 4637150 - DNA, 25 bp, Homo sapien
ccataggggccacgtggccgcggac

SEQ ID NO: 4637151 - DNA, 25 bp, Homo sapien
gcaccgccgagaggcagccagtgaa

SEQ ID NO: 4637152 - DNA, 25 bp, Homo sapien
gccagtgaagccactagtcgccgcc

SEQ ID NO: 4637153 - DNA, 25 bp, Homo sapien
gtctgcattaaccaagggctctccc

SEQ ID NO: 4637154 - DNA, 25 bp, Homo sapien
tgcattaaccaagggctctccctca

SEQ ID NO: 4637155 - DNA, 25 bp, Homo sapien
tctgcattaaccaagggctctccct

SEQ ID NO: 4637156 - DNA, 25 bp, Homo sapien
gcgataatgacaagcaccaggtcat

SEQ ID NO: 4637157 - DNA, 25 bp, Homo sapien
tatcattatctaaagcgataatgac

SEQ ID NO: 4637158 - DNA, 25 bp, Homo sapien
tatctaaagcgataatgacaagcac

SEQ ID NO: 4637159 - DNA, 25 bp, Homo sapien
taaagcgataatgacaagcaccagg

SEQ ID NO: 4637160 - DNA, 25 bp, Homo sapien
aatattgaaaccattagcagtgtcc

SEQ ID NO: 4637161 - DNA, 25 bp, Homo sapien
atattgaaaccattagcagtgtcca

SEQ ID NO: 4637162 - DNA, 25 bp, Homo sapien
tattgaaaccattagcagtgtccat

SEQ ID NO: 4637163 - DNA, 25 bp, Homo sapien
aaatattgaaaccattagcagtgtc

SEQ ID NO: 4637164 - DNA, 25 bp, Homo sapien
tgtgagttagcgtgcctggcctcaa

SEQ ID NO: 4637165 - DNA, 25 bp, Homo sapien
taactgtagccttgatcctcccaag

SEQ ID NO: 4637166 - DNA, 25 bp, Homo sapien
cactccaccgttcagcttatttgtt

SEQ ID NO: 4637167 - DNA, 25 bp, Homo sapien
tgagactataggcccactccaccgt

SEQ ID NO: 4637168 - DNA, 25 bp, Homo sapien
ctttgcgtaactttctctgttgata

SEQ ID NO: 4637169 - DNA, 25 bp, Homo sapien
tttctttgcgtaactttctctgttg

SEQ ID NO: 4637170 - DNA, 25 bp, Homo sapien
agatgcgtatggctatggcagtgat

SEQ ID NO: 4637171 - DNA, 25 bp, Homo sapien
ttctctgttgatagatgcgtatggc

SEQ ID NO: 4637172 - DNA, 25 bp, Homo sapien
ccagtgaaggtagtccaagaagcat

SEQ ID NO: 4637173 - DNA, 25 bp, Homo sapien
tgaacagtgatgaatggccatacct

SEQ ID NO: 4637174 - DNA, 25 bp, Homo sapien
tcacgatgatagagacagccacagc

SEQ ID NO: 4637175 - DNA, 25 bp, Homo sapien
catggactgcgttttgcacatcgag

SEQ ID NO: 4637176 - DNA, 25 bp, Homo sapien
taaaccttaatgagacatgttccag

SEQ ID NO: 4637177 - DNA, 25 bp, Homo sapien
tgggtaatctatgggaatttggccc

SEQ ID NO: 4637178 - DNA, 25 bp, Homo sapien
cataaacctttgatcagactggcag

SEQ ID NO: 4637179 - DNA, 25 bp, Homo sapien
tagtccttggtaggcagttggtatc

SEQ ID NO: 4637180 - DNA, 25 bp, Homo sapien
taggcaaacagagtatcaaacagcc

SEQ ID NO: 4637181 - DNA, 25 bp, Homo sapien
caaaagggtgttacttgcaactagc

SEQ ID NO: 4637182 - DNA, 25 bp, Homo sapien
cagaattattggtcagtctaggcaa

SEQ ID NO: 4637183 - DNA, 25 bp, Homo sapien
caggagttcagtccacgcatgacaa

SEQ ID NO: 4637184 - DNA, 25 bp, Homo sapien
tctcagtgagagtgatattgtcccc

SEQ ID NO: 4637185 - DNA, 25 bp, Homo sapien
ttgccaggactgaggcaagacccct

SEQ ID NO: 4637186 - DNA, 25 bp, Homo sapien
tgtaaagcccagatatacgtatagt

SEQ ID NO: 4637187 - DNA, 25 bp, Homo sapien
tacatggtctaggacttgccaggac

SEQ ID NO: 4637188 - DNA, 25 bp, Homo sapien
tgcagaactcacatgacactgctat

SEQ ID NO: 4637189 - DNA, 25 bp, Homo sapien
tacttttactcatgctgcagaactc

SEQ ID NO: 4637190 - DNA, 25 bp, Homo sapien
cctgaaaggcttttacactgttctc

SEQ ID NO: 4637191 - DNA, 25 bp, Homo sapien
tagcatttgctttagggattacacc

SEQ ID NO: 4637192 - DNA, 25 bp, Homo sapien
agtgcacacgagctccgctttccga

SEQ ID NO: 4637193 - DNA, 25 bp, Homo sapien
ctggaagggaacaggaatacactct

SEQ ID NO: 4637194 - DNA, 25 bp, Homo sapien
tctgcagtgcacacgagctccgctt

SEQ ID NO: 4637195 - DNA, 25 bp, Homo sapien
gaatacactctgcagtgcacacgag

SEQ ID NO: 4637196 - DNA, 25 bp, Homo sapien
tggctgctgggtcatccacacgcac

SEQ ID NO: 4637197 - DNA, 25 bp, Homo sapien
ctggctgctgggtcatccacacgca

SEQ ID NO: 4637198 - DNA, 25 bp, Homo sapien
tgtagaagtttggagccttaggcca

SEQ ID NO: 4637199 - DNA, 25 bp, Homo sapien
tttggagccttaggccagtgctgga

SEQ ID NO: 4637200 - DNA, 25 bp, Homo sapien
tagaagtttggagccttaggccagt

SEQ ID NO: 4637201 - DNA, 25 bp, Homo sapien
gaagtttggagccttaggccagtgc

SEQ ID NO: 4637202 - DNA, 25 bp, Homo sapien
tgtccaatcttctatacaaaactct

SEQ ID NO: 4637203 - DNA, 25 bp, Homo sapien
ttttgcatgtgtccaatcttctata

SEQ ID NO: 4637204 - DNA, 25 bp, Homo sapien
gcatgtgtccaatcttctatacaaa

SEQ ID NO: 4637205 - DNA, 25 bp, Homo sapien
tgtgtccaatcttctatacaaaact

SEQ ID NO: 4637206 - DNA, 25 bp, Homo sapien
ctgattgctatcctgcatttgttgg

SEQ ID NO: 4637207 - DNA, 25 bp, Homo sapien
tcctgtccactgattgctatcctgc

SEQ ID NO: 4637208 - DNA, 25 bp, Homo sapien
gatgtcacctccagggacattgtcc

SEQ ID NO: 4637209 - DNA, 25 bp, Homo sapien
cctgcatttgttggatgtcacctcc

SEQ ID NO: 4637210 - DNA, 25 bp, Homo sapien
tctgagacagcccatggaacgtgtc

SEQ ID NO: 4637211 - DNA, 25 bp, Homo sapien
ctatgtagctaatccctctggggac

SEQ ID NO: 4637212 - DNA, 25 bp, Homo sapien
gtagctaatccctctggggactctc

SEQ ID NO: 4637213 - DNA, 25 bp, Homo sapien
tatgtagctaatccctctggggact

SEQ ID NO: 4637214 - DNA, 25 bp, Homo sapien
tgtaacatagcaccaaagggaaggt

SEQ ID NO: 4637215 - DNA, 25 bp, Homo sapien
tgtgtaacatagcaccaaagggaag

SEQ ID NO: 4637216 - DNA, 25 bp, Homo sapien
aacatagcaccaaagggaaggtcat

SEQ ID NO: 4637217 - DNA, 25 bp, Homo sapien
ctgtgtaacatagcaccaaagggaa

SEQ ID NO: 4637218 - DNA, 25 bp, Homo sapien
actggggagcttcatcttggctttc

SEQ ID NO: 4637219 - DNA, 25 bp, Homo sapien
ctggggagcttcatcttggctttcc

SEQ ID NO: 4637220 - DNA, 25 bp, Homo sapien
ttggcatgggatcaaagagtgccat

SEQ ID NO: 4637221 - DNA, 25 bp, Homo sapien
ctctcaatgatgaggtattctttgc

SEQ ID NO: 4637222 - DNA, 25 bp, Homo sapien
caggactctcaatgatgaggtattc

SEQ ID NO: 4637223 - DNA, 25 bp, Homo sapien
caatgatgaggtattctttgccttc

SEQ ID NO: 4637224 - DNA, 25 bp, Homo sapien
tgcgttagctaaaactatcactgtg

SEQ ID NO: 4637225 - DNA, 25 bp, Homo sapien
tatcactgtgcttatagcctgtaag

SEQ ID NO: 4637226 - DNA, 25 bp, Homo sapien
cctgtaaggctacagcatcagagag

SEQ ID NO: 4637227 - DNA, 25 bp, Homo sapien
ggagtatttagcacagttattttca

SEQ ID NO: 4637228 - DNA, 25 bp, Homo sapien
gccagcatagctctctgtttctctg

SEQ ID NO: 4637229 - DNA, 25 bp, Homo sapien
gacagcactggccagcatagctctc

SEQ ID NO: 4637230 - DNA, 25 bp, Homo sapien
tcacagagttgtgaccttcctggat

SEQ ID NO: 4637231 - DNA, 25 bp, Homo sapien
agagttgtgaccttcctggattttg

SEQ ID NO: 4637232 - DNA, 25 bp, Homo sapien
tgactgtcacagtagatacgggcat

SEQ ID NO: 4637233 - DNA, 25 bp, Homo sapien
gactgtcacagtagatacgggcatg

SEQ ID NO: 4637234 - DNA, 25 bp, Homo sapien
tgatggccttgagggtttggttttg

SEQ ID NO: 4637235 - DNA, 25 bp, Homo sapien
gctgtgctggaaggaccaagatgat

SEQ ID NO: 4637236 - DNA, 25 bp, Homo sapien
ttggtacaaggtgggttcaactgac

SEQ ID NO: 4637237 - DNA, 25 bp, Homo sapien
caagatgatccaagaccactggtca

SEQ ID NO: 4637238 - DNA, 25 bp, Homo sapien
aatatctggcacttcactggtgcta

SEQ ID NO: 4637239 - DNA, 25 bp, Homo sapien
caaggcctacatagtccaaagtgac

SEQ ID NO: 4637240 - DNA, 25 bp, Homo sapien
aagtgacatcactcaaatatctggc

SEQ ID NO: 4637241 - DNA, 25 bp, Homo sapien
tagtcggagtcttgcctaggtttcc

SEQ ID NO: 4637242 - DNA, 25 bp, Homo sapien
tgaggcatcttctaccacaagggag

SEQ ID NO: 4637243 - DNA, 25 bp, Homo sapien
caggaaccagtgggtgctgcttctt

SEQ ID NO: 4637244 - DNA, 25 bp, Homo sapien
gaagtgaggcatcttctaccacaag

SEQ ID NO: 4637245 - DNA, 25 bp, Homo sapien
tcttctaccacaagggaggctttgc

SEQ ID NO: 4637246 - DNA, 25 bp, Homo sapien
ggaacctgatgtacagctggtgcct

SEQ ID NO: 4637247 - DNA, 25 bp, Homo sapien
tggaacctgatgtacagctggtgcc

SEQ ID NO: 4637248 - DNA, 25 bp, Homo sapien
gaacctgatgtacagctggtgcctg

SEQ ID NO: 4637249 - DNA, 25 bp, Homo sapien
tgatatccacctggggcctggacat

SEQ ID NO: 4637250 - DNA, 25 bp, Homo sapien
ctgaggtgtgatatccacctggggc

SEQ ID NO: 4637251 - DNA, 25 bp, Homo sapien
tgtgatatccacctggggcctggac

SEQ ID NO: 4637252 - DNA, 25 bp, Homo sapien
ggtgtgatatccacctggggcctgg

SEQ ID NO: 4637253 - DNA, 25 bp, Homo sapien
gacggatattcagtaggggcctgag

SEQ ID NO: 4637254 - DNA, 25 bp, Homo sapien
tattcagtaggggcctgagtgtcca

SEQ ID NO: 4637255 - DNA, 25 bp, Homo sapien
acggatattcagtaggggcctgagt

SEQ ID NO: 4637256 - DNA, 25 bp, Homo sapien
tcagtaggggcctgagtgtccacct

SEQ ID NO: 4637257 - DNA, 25 bp, Homo sapien
ggcctcgtgtccaccttgggacaga

SEQ ID NO: 4637258 - DNA, 25 bp, Homo sapien
gtggcctcgtgtccaccttgggaca

SEQ ID NO: 4637259 - DNA, 25 bp, Homo sapien
tggcctcgtgtccaccttgggacag

SEQ ID NO: 4637260 - DNA, 25 bp, Homo sapien
ctaagaccatgtgttcacctggagc

SEQ ID NO: 4637261 - DNA, 25 bp, Homo sapien
gagcctgggtgaccatctgggttat

SEQ ID NO: 4637262 - DNA, 25 bp, Homo sapien
taagaccatgtgttcacctggagcc

SEQ ID NO: 4637263 - DNA, 25 bp, Homo sapien
tgaccatctgggttatgatgttcag

SEQ ID NO: 4637264 - DNA, 25 bp, Homo sapien
gcttgggtgttcatgtggggcctga

SEQ ID NO: 4637265 - DNA, 25 bp, Homo sapien
cttgggtgttcatgtggggcctgat

SEQ ID NO: 4637266 - DNA, 25 bp, Homo sapien
ctggggcttgggtgttcatgtgggg

SEQ ID NO: 4637267 - DNA, 25 bp, Homo sapien
gggcttgggtgttcatgtggggcct

SEQ ID NO: 4637268 - DNA, 25 bp, Homo sapien
ctgatatccacgagaggcttagtta

SEQ ID NO: 4637269 - DNA, 25 bp, Homo sapien
ggtgtacacctaaggcctgatctct

SEQ ID NO: 4637270 - DNA, 25 bp, Homo sapien
gcttagttatccacctatggccatc

SEQ ID NO: 4637271 - DNA, 25 bp, Homo sapien
gaggcccacctgaggtctggtgtac

SEQ ID NO: 4637272 - DNA, 25 bp, Homo sapien
ctagatgttcgcctggagcctggtg

SEQ ID NO: 4637273 - DNA, 25 bp, Homo sapien
gcggagaattggtgcctgggtctcc

SEQ ID NO: 4637274 - DNA, 25 bp, Homo sapien
aaaaaaaacgcgcagcggagaattg

SEQ ID NO: 4637275 - DNA, 25 bp, Homo sapien
cagcggagaattggtgcctgggtct

SEQ ID NO: 4637276 - DNA, 25 bp, Homo sapien
aacgcgcagcggagaattggtgcct

SEQ ID NO: 4637277 - DNA, 25 bp, Homo sapien
caacggacaaaagtgtcttcccatt

SEQ ID NO: 4637278 - DNA, 25 bp, Homo sapien
tagcccgttcgcttggcagtgaggt

SEQ ID NO: 4637279 - DNA, 25 bp, Homo sapien
tctccttagcccgttcgcttggcag

SEQ ID NO: 4637280 - DNA, 25 bp, Homo sapien
gcttcgggaccgcttgcggttacca

SEQ ID NO: 4637281 - DNA, 25 bp, Homo sapien
ccgcttgcggttaccagaaagtgaa

SEQ ID NO: 4637282 - DNA, 25 bp, Homo sapien
gagcttcgggtgttggctgggctgc

SEQ ID NO: 4637283 - DNA, 25 bp, Homo sapien
ggaggagcttcgggtgttggctggg

SEQ ID NO: 4637284 - DNA, 25 bp, Homo sapien
ggagcttcgggtgttggctgggctg

SEQ ID NO: 4637285 - DNA, 25 bp, Homo sapien
cttcgggtgttggctgggctgcgcg

SEQ ID NO: 4637286 - DNA, 25 bp, Homo sapien
cccataacggacacagacatacagc

SEQ ID NO: 4637287 - DNA, 25 bp, Homo sapien
aagcaaagttatggataaataatcg

SEQ ID NO: 4637288 - DNA, 25 bp, Homo sapien
tgggtgttgagttactaagaagtat

SEQ ID NO: 4637289 - DNA, 25 bp, Homo sapien
atttgctcttgggtgttgagttact

SEQ ID NO: 4637290 - DNA, 25 bp, Homo sapien
tcaatatgactgactatagatattt

SEQ ID NO: 4637291 - DNA, 25 bp, Homo sapien
tcccagtgtctaagacctgcaaaag

SEQ ID NO: 4637292 - DNA, 25 bp, Homo sapien
gaggccattattgcttcccagggtt

SEQ ID NO: 4637293 - DNA, 25 bp, Homo sapien
taattgatacctttacatgaggcca

SEQ ID NO: 4637294 - DNA, 25 bp, Homo sapien
tagttgcaacaaaccatatagccca

SEQ ID NO: 4637295 - DNA, 25 bp, Homo sapien
aatatctaaatcaaaccttactggg

SEQ ID NO: 4637296 - DNA, 25 bp, Homo sapien
tgggttttactttggatgcactagt

SEQ ID NO: 4637297 - DNA, 25 bp, Homo sapien
tttcaccactgatctataatactag

SEQ ID NO: 4637298 - DNA, 25 bp, Homo sapien
tactgtagtctacctattccatttc

SEQ ID NO: 4637299 - DNA, 25 bp, Homo sapien
tctcaaaagtacctaaaaggaggca

SEQ ID NO: 4637300 - DNA, 25 bp, Homo sapien
cactgcacagaatagtcatggagat

SEQ ID NO: 4637301 - DNA, 25 bp, Homo sapien
tgaatagagctaccgacatttgctt

SEQ ID NO: 4637302 - DNA, 25 bp, Homo sapien
taaagtgtgtgacgctttctgtcag

SEQ ID NO: 4637303 - DNA, 25 bp, Homo sapien
ccatttttagcagaatggtggcaac

SEQ ID NO: 4637304 - DNA, 25 bp, Homo sapien
catttttagcagaatggtggcaact

SEQ ID NO: 4637305 - DNA, 25 bp, Homo sapien
tttttagcagaatggtggcaactgc

SEQ ID NO: 4637306 - DNA, 25 bp, Homo sapien
tttagcagaatggtggcaactgcca

SEQ ID NO: 4637307 - DNA, 25 bp, Homo sapien
gtcattttattggacacaaatgcta

SEQ ID NO: 4637308 - DNA, 25 bp, Homo sapien
ttactctatcaatctgttaggaaaa

SEQ ID NO: 4637309 - DNA, 25 bp, Homo sapien
gcattgattctgcttagcaaattaa

SEQ ID NO: 4637310 - DNA, 25 bp, Homo sapien
actatagaatatgatagtgattgca

SEQ ID NO: 4637311 - DNA, 25 bp, Homo sapien
aatacctaaggttactgtgatcatc

SEQ ID NO: 4637312 - DNA, 25 bp, Homo sapien
tatggagaattaagaaatacctaag

SEQ ID NO: 4637313 - DNA, 25 bp, Homo sapien
tcatcacttaggagttttgaatcaa

SEQ ID NO: 4637314 - DNA, 25 bp, Homo sapien
taaaaattcaacctatgactcctgt

SEQ ID NO: 4637315 - DNA, 25 bp, Homo sapien
tgaggaaactggaatgaagtagtgc

SEQ ID NO: 4637316 - DNA, 25 bp, Homo sapien
gaggaaactggaatgaagtagtgct

SEQ ID NO: 4637317 - DNA, 25 bp, Homo sapien
aggaaactggaatgaagtagtgcta

SEQ ID NO: 4637318 - DNA, 25 bp, Homo sapien
taaagtctgccaactagttccttca

SEQ ID NO: 4637319 - DNA, 25 bp, Homo sapien
ttacctttaattactctctagctct

SEQ ID NO: 4637320 - DNA, 25 bp, Homo sapien
tacctttaattactctctagctctt

SEQ ID NO: 4637321 - DNA, 25 bp, Homo sapien
atgttaaagtctgccaactagttcc

SEQ ID NO: 4637322 - DNA, 25 bp, Homo sapien
tgttcttttaagagtgagtcagagg

SEQ ID NO: 4637323 - DNA, 25 bp, Homo sapien
agaggaggcaatgtgaccagggagc

SEQ ID NO: 4637324 - DNA, 25 bp, Homo sapien
gcaatgtgaccagggagcagagatt

SEQ ID NO: 4637325 - DNA, 25 bp, Homo sapien
gagggagacttgacacacagaagag

SEQ ID NO: 4637326 - DNA, 25 bp, Homo sapien
tgaagaggtgattaacaggataagg

SEQ ID NO: 4637327 - DNA, 25 bp, Homo sapien
taatgcatgtattatgtggcatgcg

SEQ ID NO: 4637328 - DNA, 25 bp, Homo sapien
tcttgtataaagagggcaactttca

SEQ ID NO: 4637329 - DNA, 25 bp, Homo sapien
ggcatgcgagattctttaaggaagg

SEQ ID NO: 4637330 - DNA, 25 bp, Homo sapien
gcttcatgggtggactgcctgttta

SEQ ID NO: 4637331 - DNA, 25 bp, Homo sapien
tagttgtaacagagcctaatggcac

SEQ ID NO: 4637332 - DNA, 25 bp, Homo sapien
aaagcatgtccggttctggtggctc

SEQ ID NO: 4637333 - DNA, 25 bp, Homo sapien
ggtcagcaagctatagcttcatggg

SEQ ID NO: 4637334 - DNA, 25 bp, Homo sapien
ttggatcagtcatagagtgcaatag

SEQ ID NO: 4637335 - DNA, 25 bp, Homo sapien
cttgaaaataaggacaatatggcca

SEQ ID NO: 4637336 - DNA, 25 bp, Homo sapien
acttgaaaataaggacaatatggcc

SEQ ID NO: 4637337 - DNA, 25 bp, Homo sapien
tttggatcagtcatagagtgcaata

SEQ ID NO: 4637338 - DNA, 25 bp, Homo sapien
aggagatcttagagacaaaaaaggg

SEQ ID NO: 4637339 - DNA, 25 bp, Homo sapien
agagacatgcaagaagaggttgcat

SEQ ID NO: 4637340 - DNA, 25 bp, Homo sapien
cagagacatgcaagaagaggttgca

SEQ ID NO: 4637341 - DNA, 25 bp, Homo sapien
tggagtgcagtggcacaatcttggc

SEQ ID NO: 4637342 - DNA, 25 bp, Homo sapien
ggttttatcgtgttagccagtatag

SEQ ID NO: 4637343 - DNA, 25 bp, Homo sapien
tcactgcaacctcagcctcccagat

SEQ ID NO: 4637344 - DNA, 25 bp, Homo sapien
gaatctcaccttgtcacccaggttg

SEQ ID NO: 4637345 - DNA, 25 bp, Homo sapien
tccccttatctaataacactgagca

SEQ ID NO: 4637346 - DNA, 25 bp, Homo sapien
cttatctaataacactgagcatctt

SEQ ID NO: 4637347 - DNA, 25 bp, Homo sapien
cccttatctaataacactgagcatc

SEQ ID NO: 4637348 - DNA, 25 bp, Homo sapien
ttccccttatctaataacactgagc

SEQ ID NO: 4637349 - DNA, 25 bp, Homo sapien
aggttgtcatcctatgcaaacatca

SEQ ID NO: 4637350 - DNA, 25 bp, Homo sapien
gattccaggcactaacaaacctgta

SEQ ID NO: 4637351 - DNA, 25 bp, Homo sapien
gcgtgcaatgttggttgaactgaaa

SEQ ID NO: 4637352 - DNA, 25 bp, Homo sapien
tatctaatacttagagcgtgcaatg

SEQ ID NO: 4637353 - DNA, 25 bp, Homo sapien
gctttacttgcagttaatcatatca

SEQ ID NO: 4637354 - DNA, 25 bp, Homo sapien
cagttaatcatatcaggccgtctac

SEQ ID NO: 4637355 - DNA, 25 bp, Homo sapien
gcaagaagatctgtacaatgataag

SEQ ID NO: 4637356 - DNA, 25 bp, Homo sapien
gtctaccatacccagttgtgtcagc

SEQ ID NO: 4637357 - DNA, 25 bp, Homo sapien
cagtatagtcctcttcatttagcaa

SEQ ID NO: 4637358 - DNA, 25 bp, Homo sapien
tgcataagtcagatagcaatccttc

SEQ ID NO: 4637359 - DNA, 25 bp, Homo sapien
gaggcacatcacgttctttgaatgc

SEQ ID NO: 4637360 - DNA, 25 bp, Homo sapien
cagtctgtttgcctaagccattcca

SEQ ID NO: 4637361 - DNA, 25 bp, Homo sapien
tctccttaggtttagcagtaaagac

SEQ ID NO: 4637362 - DNA, 25 bp, Homo sapien
tcatctccttaggtttagcagtaaa

SEQ ID NO: 4637363 - DNA, 25 bp, Homo sapien
catctccttaggtttagcagtaaag

SEQ ID NO: 4637364 - DNA, 25 bp, Homo sapien
ctcatctccttaggtttagcagtaa

SEQ ID NO: 4637365 - DNA, 25 bp, Homo sapien
tcactgggcaacagtatctatcctc

SEQ ID NO: 4637366 - DNA, 25 bp, Homo sapien
acttttataacgtttctagtcacat

SEQ ID NO: 4637367 - DNA, 25 bp, Homo sapien
ttctctcctggggtaaagcgcttga

SEQ ID NO: 4637368 - DNA, 25 bp, Homo sapien
tgccttagccttagtaacggcaatg

SEQ ID NO: 4637369 - DNA, 25 bp, Homo sapien
atacaaacatagtctctaaaagcaa

SEQ ID NO: 4637370 - DNA, 25 bp, Homo sapien
ggtaaatcacccatttccttgttca

SEQ ID NO: 4637371 - DNA, 25 bp, Homo sapien
aaattaggtgaccatttgtgctttc

SEQ ID NO: 4637372 - DNA, 25 bp, Homo sapien
tccttgttcatcaagatcaggtgaa

SEQ ID NO: 4637373 - DNA, 25 bp, Homo sapien
tgaatgagtttccaatagtcagtac

SEQ ID NO: 4637374 - DNA, 25 bp, Homo sapien
tacaagaaatacaggcacaaagtgc

SEQ ID NO: 4637375 - DNA, 25 bp, Homo sapien
taggttactgggtgctttaaggcaa

SEQ ID NO: 4637376 - DNA, 25 bp, Homo sapien
catatacctgttgtgtttagtctac

SEQ ID NO: 4637377 - DNA, 25 bp, Homo sapien
cagcataatcatgtatccataagtg

SEQ ID NO: 4637378 - DNA, 25 bp, Homo sapien
gaaatcatatcacaacagcataatc

SEQ ID NO: 4637379 - DNA, 25 bp, Homo sapien
tgaactgacattttgctgcaatatt

SEQ ID NO: 4637380 - DNA, 25 bp, Homo sapien
gtaagtcatctcactgtattctaaa

SEQ ID NO: 4637381 - DNA, 25 bp, Homo sapien
tagttagaactaagacatgcaccac

SEQ ID NO: 4637382 - DNA, 25 bp, Homo sapien
aagaataggttcttgccacccgaga

SEQ ID NO: 4637383 - DNA, 25 bp, Homo sapien
tacccagggctgcaggaaaagttgt

SEQ ID NO: 4637384 - DNA, 25 bp, Homo sapien
tggattatcggctcaagtacttaga

SEQ ID NO: 4637385 - DNA, 25 bp, Homo sapien
taaacttgcaacttgttaaatatag

SEQ ID NO: 4637386 - DNA, 25 bp, Homo sapien
acttgcaacttgttaaatatagtat

SEQ ID NO: 4637387 - DNA, 25 bp, Homo sapien
cataaacttgcaacttgttaaatat

SEQ ID NO: 4637388 - DNA, 25 bp, Homo sapien
ttcataaacttgcaacttgttaaat

SEQ ID NO: 4637389 - DNA, 25 bp, Homo sapien
tcggcagatgggatgagatttccct

SEQ ID NO: 4637390 - DNA, 25 bp, Homo sapien
ggtacatacaggatacatctctgtt

SEQ ID NO: 4637391 - DNA, 25 bp, Homo sapien
acatctctgtttcggcagatgggat

SEQ ID NO: 4637392 - DNA, 25 bp, Homo sapien
tcattggcaaggtacatacaggata

SEQ ID NO: 4637393 - DNA, 25 bp, Homo sapien
aaatagccgtgatatggaatctgcc

SEQ ID NO: 4637394 - DNA, 25 bp, Homo sapien
ggaatctgcctaaatgctcatctaa

SEQ ID NO: 4637395 - DNA, 25 bp, Homo sapien
gcaatgagctatcaccttatcccag

SEQ ID NO: 4637396 - DNA, 25 bp, Homo sapien
tgcaaactatgtattcaacaaggtt

SEQ ID NO: 4637397 - DNA, 25 bp, Homo sapien
ctgagtgttcgaaatgggccaaaga

SEQ ID NO: 4637398 - DNA, 25 bp, Homo sapien
gattttcttaatgctcatcagcgaa

SEQ ID NO: 4637399 - DNA, 25 bp, Homo sapien
taatgctcatcagcgaaggggtgat

SEQ ID NO: 4637400 - DNA, 25 bp, Homo sapien
tttcttaatgctcatcagcgaaggg

SEQ ID NO: 4637401 - DNA, 25 bp, Homo sapien
ttaatgctcatcagcgaaggggtga

SEQ ID NO: 4637402 - DNA, 25 bp, Homo sapien
ttttctggatggcaagagagatgga

SEQ ID NO: 4637403 - DNA, 25 bp, Homo sapien
tctggatggcaagagagatggaccc

SEQ ID NO: 4637404 - DNA, 25 bp, Homo sapien
ttaaaaccagcaagaccagttgctc

SEQ ID NO: 4637405 - DNA, 25 bp, Homo sapien
aaaaccagcaagaccagttgctctg

SEQ ID NO: 4637406 - DNA, 25 bp, Homo sapien
aaatgcttttgctggcaatgatttc

SEQ ID NO: 4637407 - DNA, 25 bp, Homo sapien
cttttgctggcaatgatttctcctt

SEQ ID NO: 4637408 - DNA, 25 bp, Homo sapien
ggccattgttagagaaacaggtcca

SEQ ID NO: 4637409 - DNA, 25 bp, Homo sapien
tgcttttgctggcaatgatttctcc

SEQ ID NO: 4637410 - DNA, 25 bp, Homo sapien
tttggagtctgtagtagcatagttc

SEQ ID NO: 4637411 - DNA, 25 bp, Homo sapien
tttttcttgcgtcttatttggagtc

SEQ ID NO: 4637412 - DNA, 25 bp, Homo sapien
gagtctgtagtagcatagttcttaa

SEQ ID NO: 4637413 - DNA, 25 bp, Homo sapien
cgtcttatttggagtctgtagtagc

SEQ ID NO: 4637414 - DNA, 25 bp, Homo sapien
ggaagttttgcagttatccatcaag

SEQ ID NO: 4637415 - DNA, 25 bp, Homo sapien
aagagagctttgatgactctcctaa

SEQ ID NO: 4637416 - DNA, 25 bp, Homo sapien
gataaatggtatacccaagagagct

SEQ ID NO: 4637417 - DNA, 25 bp, Homo sapien
tattcacaacagcttaaattggaag

SEQ ID NO: 4637418 - DNA, 25 bp, Homo sapien
gtaactacctattattttcctctgc

SEQ ID NO: 4637419 - DNA, 25 bp, Homo sapien
gggtgacaggcaagactatatctca

SEQ ID NO: 4637420 - DNA, 25 bp, Homo sapien
tcttgaggctcctaactttatcagg

SEQ ID NO: 4637421 - DNA, 25 bp, Homo sapien
tatcaggtgaattttaagacatctg

SEQ ID NO: 4637422 - DNA, 25 bp, Homo sapien
cagattgtttcaaaaagctctacaa

SEQ ID NO: 4637423 - DNA, 25 bp, Homo sapien
tgtggcttagttttagcaaatagaa

SEQ ID NO: 4637424 - DNA, 25 bp, Homo sapien
ttaccacccatgaatcttaacagat

SEQ ID NO: 4637425 - DNA, 25 bp, Homo sapien
cactagaaacaataagtcctataga

SEQ ID NO: 4637426 - DNA, 25 bp, Homo sapien
gcagggaagtcccttaattcagtaa

SEQ ID NO: 4637427 - DNA, 25 bp, Homo sapien
tgttctaatcgcatattgcaaggcc

SEQ ID NO: 4637428 - DNA, 25 bp, Homo sapien
tctatgtttatagtctgcaacggaa

SEQ ID NO: 4637429 - DNA, 25 bp, Homo sapien
cttacgaggtactattttccagatg

SEQ ID NO: 4637430 - DNA, 25 bp, Homo sapien
aattttcaattggtctcatgcattt

SEQ ID NO: 4637431 - DNA, 25 bp, Homo sapien
tctggaagcgtgtttgttcacaggc

SEQ ID NO: 4637432 - DNA, 25 bp, Homo sapien
tgcatcttgcaaatagaaaggcact

SEQ ID NO: 4637433 - DNA, 25 bp, Homo sapien
caaatagaaaggcactagtttcaca

SEQ ID NO: 4637434 - DNA, 25 bp, Homo sapien
ttctttcaaggtctggcatccagct

SEQ ID NO: 4637435 - DNA, 25 bp, Homo sapien
aaacacaccgacttctctcaaaatg

SEQ ID NO: 4637436 - DNA, 25 bp, Homo sapien
ttcctcccattataaaacacaccga

SEQ ID NO: 4637437 - DNA, 25 bp, Homo sapien
gccaaaatacctgctttaatcttcc

SEQ ID NO: 4637438 - DNA, 25 bp, Homo sapien
tgatagcaagatcctgaaatagttg

SEQ ID NO: 4637439 - DNA, 25 bp, Homo sapien
ccttaagtccatatagagagaatct

SEQ ID NO: 4637440 - DNA, 25 bp, Homo sapien
actagatcttcacctaggccccttg

SEQ ID NO: 4637441 - DNA, 25 bp, Homo sapien
ttagcaagagttcccctacttttga

SEQ ID NO: 4637442 - DNA, 25 bp, Homo sapien
gtagaaaatagaacatcgtcatttt

SEQ ID NO: 4637443 - DNA, 25 bp, Homo sapien
atagaacatcgtcattttcaggagc

SEQ ID NO: 4637444 - DNA, 25 bp, Homo sapien
tcattttcaggagcaaggaagtaac

SEQ ID NO: 4637445 - DNA, 25 bp, Homo sapien
agaaaatagaacatcgtcattttca

SEQ ID NO: 4637446 - DNA, 25 bp, Homo sapien
gagacttgccagtcgaaaaacttaa

SEQ ID NO: 4637447 - DNA, 25 bp, Homo sapien
gccagtcgaaaaacttaagatctca

SEQ ID NO: 4637448 - DNA, 25 bp, Homo sapien
tcaaagagatgagacttgccagtcg

SEQ ID NO: 4637449 - DNA, 25 bp, Homo sapien
gatgagacttgccagtcgaaaaact

SEQ ID NO: 4637450 - DNA, 25 bp, Homo sapien
gaacatggtttatccagaaatagtg

SEQ ID NO: 4637451 - DNA, 25 bp, Homo sapien
gctatcgtagaacatggtttatcca

SEQ ID NO: 4637452 - DNA, 25 bp, Homo sapien
gactccaagctatcaccagttatgt

SEQ ID NO: 4637453 - DNA, 25 bp, Homo sapien
accagttatgtgctatcgtagaaca

SEQ ID NO: 4637454 - DNA, 25 bp, Homo sapien
gatggcacttctccgaatgactgtt

SEQ ID NO: 4637455 - DNA, 25 bp, Homo sapien
acttctccgaatgactgttgatttt

SEQ ID NO: 4637456 - DNA, 25 bp, Homo sapien
cttctccgaatgactgttgattttc

SEQ ID NO: 4637457 - DNA, 25 bp, Homo sapien
atgatggcacttctccgaatgactg

SEQ ID NO: 4637458 - DNA, 25 bp, Homo sapien
atgaaaaagagagccaggaactgcc

SEQ ID NO: 4637459 - DNA, 25 bp, Homo sapien
gaaaaagagagccaggaactgccaa

SEQ ID NO: 4637460 - DNA, 25 bp, Homo sapien
atatgaaaaagagagccaggaactg

SEQ ID NO: 4637461 - DNA, 25 bp, Homo sapien
gaatatgaaaaagagagccaggaac

SEQ ID NO: 4637462 - DNA, 25 bp, Homo sapien
cacccatgtggtggacataagaccc

SEQ ID NO: 4637463 - DNA, 25 bp, Homo sapien
tggacttctaatgatctcatcaccc

SEQ ID NO: 4637464 - DNA, 25 bp, Homo sapien
tggataagcagttcttaaccggtaa

SEQ ID NO: 4637465 - DNA, 25 bp, Homo sapien
gcattaattcgacaagcattttgga

SEQ ID NO: 4637466 - DNA, 25 bp, Homo sapien
cttgtgatgatgtagagaggtttaa

SEQ ID NO: 4637467 - DNA, 25 bp, Homo sapien
taaagaagcgaattaggggaggcca

SEQ ID NO: 4637468 - DNA, 25 bp, Homo sapien
ttgggagtccaatcacttgaagtca

SEQ ID NO: 4637469 - DNA, 25 bp, Homo sapien
tgtagagaggtttaaagaagcgaat

SEQ ID NO: 4637470 - DNA, 25 bp, Homo sapien
gtaaaatagtgatcatagtaacacc

SEQ ID NO: 4637471 - DNA, 25 bp, Homo sapien
aaaatagtgatcatagtaacaccca

SEQ ID NO: 4637472 - DNA, 25 bp, Homo sapien
taaaatagtgatcatagtaacaccc

SEQ ID NO: 4637473 - DNA, 25 bp, Homo sapien
aaatagtgatcatagtaacacccat

SEQ ID NO: 4637474 - DNA, 25 bp, Homo sapien
aatctcctttggactccagagggtg

SEQ ID NO: 4637475 - DNA, 25 bp, Homo sapien
caggaataacattgggaataagcaa

SEQ ID NO: 4637476 - DNA, 25 bp, Homo sapien
tgcaggaataacattgggaataagc

SEQ ID NO: 4637477 - DNA, 25 bp, Homo sapien
ctgcaggaataacattgggaataag

SEQ ID NO: 4637478 - DNA, 25 bp, Homo sapien
tttcctgaacatgattgaggtagat

SEQ ID NO: 4637479 - DNA, 25 bp, Homo sapien
ctgaacatgattgaggtagatgact

SEQ ID NO: 4637480 - DNA, 25 bp, Homo sapien
tcctgaacatgattgaggtagatga

SEQ ID NO: 4637481 - DNA, 25 bp, Homo sapien
catttcctgaacatgattgaggtag

SEQ ID NO: 4637482 - DNA, 25 bp, Homo sapien
tagaagtaccttgaaatactgggtc

SEQ ID NO: 4637483 - DNA, 25 bp, Homo sapien
aatttgggcttctagctagcctcag

SEQ ID NO: 4637484 - DNA, 25 bp, Homo sapien
tttgggcttctagctagcctcagtt

SEQ ID NO: 4637485 - DNA, 25 bp, Homo sapien
caaatttgggcttctagctagcctc

SEQ ID NO: 4637486 - DNA, 25 bp, Homo sapien
ttgggcttctagctagcctcagttc

SEQ ID NO: 4637487 - DNA, 25 bp, Homo sapien
ttcaagaccgcaagggttagcacca

SEQ ID NO: 4637488 - DNA, 25 bp, Homo sapien
ttttcaagaccgcaagggttagcac

SEQ ID NO: 4637489 - DNA, 25 bp, Homo sapien
tttttcaagaccgcaagggttagca

SEQ ID NO: 4637490 - DNA, 25 bp, Homo sapien
tttcaagaccgcaagggttagcacc

SEQ ID NO: 4637491 - DNA, 25 bp, Homo sapien
gtataatggggccatttgacaaagc

SEQ ID NO: 4637492 - DNA, 25 bp, Homo sapien
ctgctgctgcaacctagtataatgg

SEQ ID NO: 4637493 - DNA, 25 bp, Homo sapien
ctctctgctgctgcaacctagtata

SEQ ID NO: 4637494 - DNA, 25 bp, Homo sapien
catttgacaaagcaagtgaggtccc

SEQ ID NO: 4637495 - DNA, 25 bp, Homo sapien
gaactgactaatcacagaaggcact

SEQ ID NO: 4637496 - DNA, 25 bp, Homo sapien
caaggccctggtgaactgactaatc

SEQ ID NO: 4637497 - DNA, 25 bp, Homo sapien
ggccctggtgaactgactaatcaca

SEQ ID NO: 4637498 - DNA, 25 bp, Homo sapien
ggtgaactgactaatcacagaaggc

SEQ ID NO: 4637499 - DNA, 25 bp, Homo sapien
taatcctagatgtctcaagcttgcc

SEQ ID NO: 4637500 - DNA, 25 bp, Homo sapien
ttttttaatcctagatgtctcaagc

SEQ ID NO: 4637501 - DNA, 25 bp, Homo sapien
tcctagatgtctcaagcttgccttc

SEQ ID NO: 4637502 - DNA, 25 bp, Homo sapien
tagatgtctcaagcttgccttccat

SEQ ID NO: 4637503 - DNA, 25 bp, Homo sapien
ctttgaacgaggtacaacatccact

SEQ ID NO: 4637504 - DNA, 25 bp, Homo sapien
tgggccctgcaaatcatgtagacag

SEQ ID NO: 4637505 - DNA, 25 bp, Homo sapien
ccacttcattttgcgctgggccctg

SEQ ID NO: 4637506 - DNA, 25 bp, Homo sapien
tcatacttggcctaatgctctcctg

SEQ ID NO: 4637507 - DNA, 25 bp, Homo sapien
catatttatgggcatgtgagcttaa

SEQ ID NO: 4637508 - DNA, 25 bp, Homo sapien
aattctaatatgcttcagtagcctg

SEQ ID NO: 4637509 - DNA, 25 bp, Homo sapien
tctgatgtggcagtactaattggtg

SEQ ID NO: 4637510 - DNA, 25 bp, Homo sapien
taattgaaggcacatcatatgtctg

SEQ ID NO: 4637511 - DNA, 25 bp, Homo sapien
tatctttacatcaagagagcctgtg

SEQ ID NO: 4637512 - DNA, 25 bp, Homo sapien
gccaggccttgtaaagatcgtgaca

SEQ ID NO: 4637513 - DNA, 25 bp, Homo sapien
tgtttggatcttgttcaccccgctt

SEQ ID NO: 4637514 - DNA, 25 bp, Homo sapien
gacagattgcacatggttaaaggtc

SEQ ID NO: 4637515 - DNA, 25 bp, Homo sapien
aagtgtcctcttacagtcagttacc

SEQ ID NO: 4637516 - DNA, 25 bp, Homo sapien
cctctggttgcttaaactcaaagac

SEQ ID NO: 4637517 - DNA, 25 bp, Homo sapien
ccatgtctactgaggtgtgaattac

SEQ ID NO: 4637518 - DNA, 25 bp, Homo sapien
tttacataaaagagcgtgtcacttc

SEQ ID NO: 4637519 - DNA, 25 bp, Homo sapien
aatttggtgaagagtgagctcagtc

SEQ ID NO: 4637520 - DNA, 25 bp, Homo sapien
tgtggaaacacaaagacgacaatgt

SEQ ID NO: 4637521 - DNA, 25 bp, Homo sapien
cacaagcaggtaatattctctccaa

SEQ ID NO: 4637522 - DNA, 25 bp, Homo sapien
gcttgagcaattccaaaggatccca

SEQ ID NO: 4637523 - DNA, 25 bp, Homo sapien
gaaaatattgtagtggcttccctcc

SEQ ID NO: 4637524 - DNA, 25 bp, Homo sapien
tgtagtcaactacacacaagctgag

SEQ ID NO: 4637525 - DNA, 25 bp, Homo sapien
taagcaggccaagagattttcacca

SEQ ID NO: 4637526 - DNA, 25 bp, Homo sapien
tatcaggctgtataactcatcatgc

SEQ ID NO: 4637527 - DNA, 25 bp, Homo sapien
ggctcaaactatgctggtatcaatg

SEQ ID NO: 4637528 - DNA, 25 bp, Homo sapien
gaataaccctttcagattacaggca

SEQ ID NO: 4637529 - DNA, 25 bp, Homo sapien
tcagcagactggcaaaacataagat

SEQ ID NO: 4637530 - DNA, 25 bp, Homo sapien
gattaatcaccataaaatagtcccc

SEQ ID NO: 4637531 - DNA, 25 bp, Homo sapien
taatagaaatcagggactagttacc

SEQ ID NO: 4637532 - DNA, 25 bp, Homo sapien
tctccttagtagaacagataacctc

SEQ ID NO: 4637533 - DNA, 25 bp, Homo sapien
ttgtctgagagctatgattttaagc

SEQ ID NO: 4637534 - DNA, 25 bp, Homo sapien
aaattgcttctaaatgtcccagttt

SEQ ID NO: 4637535 - DNA, 25 bp, Homo sapien
gctaacaatgactctaatctgccat

SEQ ID NO: 4637536 - DNA, 25 bp, Homo sapien
gaatctccacacacaattctgtctt

SEQ ID NO: 4637537 - DNA, 25 bp, Homo sapien
tttccaaataggagaggcatgctaa

SEQ ID NO: 4637538 - DNA, 25 bp, Homo sapien
gaggcatgctaacaatgactctaat

SEQ ID NO: 4637539 - DNA, 25 bp, Homo sapien
tataacttgaagtctcttaaaacta

SEQ ID NO: 4637540 - DNA, 25 bp, Homo sapien
aatagggtgtcctttactatttatg

SEQ ID NO: 4637541 - DNA, 25 bp, Homo sapien
gttttaagtctgatccatcttctaa

SEQ ID NO: 4637542 - DNA, 25 bp, Homo sapien
gatggtgagaaagaatgatccagtt

SEQ ID NO: 4637543 - DNA, 25 bp, Homo sapien
taaaggaacatatacccttccagta

SEQ ID NO: 4637544 - DNA, 25 bp, Homo sapien
taatgacttaaaggaacatataccc

SEQ ID NO: 4637545 - DNA, 25 bp, Homo sapien
agtccagcttaatgacttaaaggaa

SEQ ID NO: 4637546 - DNA, 25 bp, Homo sapien
cagcttaatgacttaaaggaacata

SEQ ID NO: 4637547 - DNA, 25 bp, Homo sapien
gcttctcagctgaatcaatggtgct

SEQ ID NO: 4637548 - DNA, 25 bp, Homo sapien
tttactgagagtttggagtccagag

SEQ ID NO: 4637549 - DNA, 25 bp, Homo sapien
cagaagttttactgagagtttggag

SEQ ID NO: 4637550 - DNA, 25 bp, Homo sapien
gtccagagtttctgcctaacggcag

SEQ ID NO: 4637551 - DNA, 25 bp, Homo sapien
taacactttgagacaaccaatacac

SEQ ID NO: 4637552 - DNA, 25 bp, Homo sapien
ggatttaacctacatacctctgaac

SEQ ID NO: 4637553 - DNA, 25 bp, Homo sapien
tgatatttgattgccggatttaacc

SEQ ID NO: 4637554 - DNA, 25 bp, Homo sapien
gcaccattgcataacttacagtaag

SEQ ID NO: 4637555 - DNA, 25 bp, Homo sapien
tccctggaagctaacatattgatgc

SEQ ID NO: 4637556 - DNA, 25 bp, Homo sapien
gctccctggaagctaacatattgat

SEQ ID NO: 4637557 - DNA, 25 bp, Homo sapien
tttttgagttgaccactccttaggc

SEQ ID NO: 4637558 - DNA, 25 bp, Homo sapien
ttttgagttgaccactccttaggca

SEQ ID NO: 4637559 - DNA, 25 bp, Homo sapien
ggctatagcaggcaaaaacggcagg

SEQ ID NO: 4637560 - DNA, 25 bp, Homo sapien
cctccataaggcagatgtgctgagc

SEQ ID NO: 4637561 - DNA, 25 bp, Homo sapien
tatatgactgcttttccagaaggca

SEQ ID NO: 4637562 - DNA, 25 bp, Homo sapien
tatacctatgagagctctgtcccag

SEQ ID NO: 4637563 - DNA, 25 bp, Homo sapien
ccagcggacccacgtcagagaagat

SEQ ID NO: 4637564 - DNA, 25 bp, Homo sapien
aggagaccagcggacccacgtcaga

SEQ ID NO: 4637565 - DNA, 25 bp, Homo sapien
ggagctctttgtcccgcaggagacc

SEQ ID NO: 4637566 - DNA, 25 bp, Homo sapien
tgcagacgaggacacgagccccaca

SEQ ID NO: 4637567 - DNA, 25 bp, Homo sapien
cctctgtctagtgaggatcacggtc

SEQ ID NO: 4637568 - DNA, 25 bp, Homo sapien
gatccagcaatgccccaatcagatt

SEQ ID NO: 4637569 - DNA, 25 bp, Homo sapien
tagtgaggatcacggtctgcagaga

SEQ ID NO: 4637570 - DNA, 25 bp, Homo sapien
cagcaatgccccaatcagattgttt

SEQ ID NO: 4637571 - DNA, 25 bp, Homo sapien
ccgtgccaccgccaagggcataagg

SEQ ID NO: 4637572 - DNA, 25 bp, Homo sapien
tcctcttgctgactgtatcgtggtg

SEQ ID NO: 4637573 - DNA, 25 bp, Homo sapien
cccggcttcctcttgctgactgtat

SEQ ID NO: 4637574 - DNA, 25 bp, Homo sapien
agcaccgtgccaccgccaagggcat

SEQ ID NO: 4637575 - DNA, 25 bp, Homo sapien
aggagaccagcggacccacgtcaga

SEQ ID NO: 4637576 - DNA, 25 bp, Homo sapien
ccagcggacccacgtcagagaagat

SEQ ID NO: 4637577 - DNA, 25 bp, Homo sapien
ggagctctttgtcccgcaggagacc

SEQ ID NO: 4637578 - DNA, 25 bp, Homo sapien
tgcagacgaggacacgagccccaca

SEQ ID NO: 4637579 - DNA, 25 bp, Homo sapien
cagcaatgccccaatcagattgttt

SEQ ID NO: 4637580 - DNA, 25 bp, Homo sapien
gatccagcaatgccccaatcagatt

SEQ ID NO: 4637581 - DNA, 25 bp, Homo sapien
cctctgtctagtgaggatcacggtc

SEQ ID NO: 4637582 - DNA, 25 bp, Homo sapien
tagtgaggatcacggtctgcagaga

SEQ ID NO: 4637583 - DNA, 25 bp, Homo sapien
tgagtagctgctccgaccacagcca

SEQ ID NO: 4637584 - DNA, 25 bp, Homo sapien
gagtccttgcaggaactctgcgggc

SEQ ID NO: 4637585 - DNA, 25 bp, Homo sapien
cttcttgttggtgtctgagtttgag

SEQ ID NO: 4637586 - DNA, 25 bp, Homo sapien
gtccttgcaggaactctgcgggctg

SEQ ID NO: 4637587 - DNA, 25 bp, Homo sapien
gaggagccccggtgtggagtgcagg

SEQ ID NO: 4637588 - DNA, 25 bp, Homo sapien
cctaggggagctcccgccatcagga

SEQ ID NO: 4637589 - DNA, 25 bp, Homo sapien
tgcagggttcgtttggaccacggct

SEQ ID NO: 4637590 - DNA, 25 bp, Homo sapien
cgccatcaggatggccgggcatcag

SEQ ID NO: 4637591 - DNA, 25 bp, Homo sapien
tgtgcctccttagatcctgcgtttg

SEQ ID NO: 4637592 - DNA, 25 bp, Homo sapien
gtgcctccttagatcctgcgtttga

SEQ ID NO: 4637593 - DNA, 25 bp, Homo sapien
gactcactgtgcagtctgccacatc

SEQ ID NO: 4637594 - DNA, 25 bp, Homo sapien
tggcactaataggattctttgcccc

SEQ ID NO: 4637595 - DNA, 25 bp, Homo sapien
actttacccgactcactgtgcagtc

SEQ ID NO: 4637596 - DNA, 25 bp, Homo sapien
ccccttgccaatcttgtaaagaaag

SEQ ID NO: 4637597 - DNA, 25 bp, Homo sapien
acggtaggcggctgtgcaatttcgt

SEQ ID NO: 4637598 - DNA, 25 bp, Homo sapien
tgtgcaatttcgtctggagtccgca

SEQ ID NO: 4637599 - DNA, 25 bp, Homo sapien
gcggctgtgcaatttcgtctggagt

SEQ ID NO: 4637600 - DNA, 25 bp, Homo sapien
taggcggctgtgcaatttcgtctgg

SEQ ID NO: 4637601 - DNA, 25 bp, Homo sapien
tgacaacaaagccattgcatggctc

SEQ ID NO: 4637602 - DNA, 25 bp, Homo sapien
acaacaaagccattgcatggctcca

SEQ ID NO: 4637603 - DNA, 25 bp, Homo sapien
ggtgacaacaaagccattgcatggc

SEQ ID NO: 4637604 - DNA, 25 bp, Homo sapien
tggtgacaacaaagccattgcatgg

SEQ ID NO: 4637605 - DNA, 25 bp, Homo sapien
ccacttcggatccagaacaggccta

SEQ ID NO: 4637606 - DNA, 25 bp, Homo sapien
cgtttctgcagatgcccgcatcatg

SEQ ID NO: 4637607 - DNA, 25 bp, Homo sapien
ggagagactcaggtgggatctgctg

SEQ ID NO: 4637608 - DNA, 25 bp, Homo sapien
cttcggatccagaacaggcctagga

SEQ ID NO: 4637609 - DNA, 25 bp, Homo sapien
cacaaagcctctggtgacggtggag

SEQ ID NO: 4637610 - DNA, 25 bp, Homo sapien
cggtggagcaaaggaatagatggtg

SEQ ID NO: 4637611 - DNA, 25 bp, Homo sapien
tggagcaaaggaatagatggtgaat

SEQ ID NO: 4637612 - DNA, 25 bp, Homo sapien
aagcctctggtgacggtggagcaaa

SEQ ID NO: 4637613 - DNA, 25 bp, Homo sapien
ttggtgacaagcgtccagactgacg

SEQ ID NO: 4637614 - DNA, 25 bp, Homo sapien
aatgctggtgctctccgccagagga

SEQ ID NO: 4637615 - DNA, 25 bp, Homo sapien
cacagagatgcgtttgaggaaaagc

SEQ ID NO: 4637616 - DNA, 25 bp, Homo sapien
gaaagaaggttccacccagagcagt

SEQ ID NO: 4637617 - DNA, 25 bp, Homo sapien
gggaactgtgcttataggaccatct

SEQ ID NO: 4637618 - DNA, 25 bp, Homo sapien
aacagagacagatacggccgtggag

SEQ ID NO: 4637619 - DNA, 25 bp, Homo sapien
tgccagcccatgtctctaagtgctg

SEQ ID NO: 4637620 - DNA, 25 bp, Homo sapien
gagactccaggtgacggcatgctct

SEQ ID NO: 4637621 - DNA, 25 bp, Homo sapien
ttaatgcaatcagtacaggtgccag

SEQ ID NO: 4637622 - DNA, 25 bp, Homo sapien
gactcgattggaattggtcccacaa

SEQ ID NO: 4637623 - DNA, 25 bp, Homo sapien
gaatgcgacgggtgaacacagacag

SEQ ID NO: 4637624 - DNA, 25 bp, Homo sapien
gccttggccaattgagaccccttga

SEQ ID NO: 4637625 - DNA, 25 bp, Homo sapien
gtgaagtaatgcgatttcggctcct

SEQ ID NO: 4637626 - DNA, 25 bp, Homo sapien
ggtgggagtgaagtaatgcgatttc

SEQ ID NO: 4637627 - DNA, 25 bp, Homo sapien
gtaatgcgatttcggctccttgtaa

SEQ ID NO: 4637628 - DNA, 25 bp, Homo sapien
gaagtaatgcgatttcggctccttg

SEQ ID NO: 4637629 - DNA, 25 bp, Homo sapien
gtgcacacagcatgccaggctagtt

SEQ ID NO: 4637630 - DNA, 25 bp, Homo sapien
ctggagcatggtgctgcaatctcgg

SEQ ID NO: 4637631 - DNA, 25 bp, Homo sapien
ggtgcacacagcatgccaggctagt

SEQ ID NO: 4637632 - DNA, 25 bp, Homo sapien
agtgttgctctatagtccaggctgg

SEQ ID NO: 4637633 - DNA, 25 bp, Homo sapien
gaaaagaagtaaggtggccaggcag

SEQ ID NO: 4637634 - DNA, 25 bp, Homo sapien
aaagaagtaaggtggccaggcaggc

SEQ ID NO: 4637635 - DNA, 25 bp, Homo sapien
aagaagtaaggtggccaggcaggca

SEQ ID NO: 4637636 - DNA, 25 bp, Homo sapien
aaaagaagtaaggtggccaggcagg

SEQ ID NO: 4637637 - DNA, 25 bp, Homo sapien
tgtcccttgaaaccatccagggctc

SEQ ID NO: 4637638 - DNA, 25 bp, Homo sapien
cacatcaggctttgggatagagaga

SEQ ID NO: 4637639 - DNA, 25 bp, Homo sapien
catcctcccggtatgtcccttgaaa

SEQ ID NO: 4637640 - DNA, 25 bp, Homo sapien
tgggcaccatcctcccggtatgtcc

SEQ ID NO: 4637641 - DNA, 25 bp, Homo sapien
acttttctccatgtgtcttaggcca

SEQ ID NO: 4637642 - DNA, 25 bp, Homo sapien
tgggttctaaacagcagtgccttcc

SEQ ID NO: 4637643 - DNA, 25 bp, Homo sapien
gaccttgcagaagagattccccaac

SEQ ID NO: 4637644 - DNA, 25 bp, Homo sapien
cacaactcttacatgggaccttgca

SEQ ID NO: 4637645 - DNA, 25 bp, Homo sapien
gactggccgacatgcaaaaaatcgc

SEQ ID NO: 4637646 - DNA, 25 bp, Homo sapien
ctggccgacatgcaaaaaatcgcat

SEQ ID NO: 4637647 - DNA, 25 bp, Homo sapien
agactggccgacatgcaaaaaatcg

SEQ ID NO: 4637648 - DNA, 25 bp, Homo sapien
tgaaaacgatggacaaccggccacg

SEQ ID NO: 4637649 - DNA, 25 bp, Homo sapien
agaagagccgtgcaggggtacaacc

SEQ ID NO: 4637650 - DNA, 25 bp, Homo sapien
cagagaagagccgtgcaggggtaca

SEQ ID NO: 4637651 - DNA, 25 bp, Homo sapien
gccgtgcaggggtacaaccatcttc

SEQ ID NO: 4637652 - DNA, 25 bp, Homo sapien
aagagccgtgcaggggtacaaccat

SEQ ID NO: 4637653 - DNA, 25 bp, Homo sapien
taaggggaggggtgcgaaacgcatg

SEQ ID NO: 4637654 - DNA, 25 bp, Homo sapien
cacaggcataaggggaggggtgcga

SEQ ID NO: 4637655 - DNA, 25 bp, Homo sapien
cttgccaccgccacaggcataaggg

SEQ ID NO: 4637656 - DNA, 25 bp, Homo sapien
caggcataaggggaggggtgcgaaa

SEQ ID NO: 4637657 - DNA, 25 bp, Homo sapien
tgtcgcggatctccagaaagtgtct

SEQ ID NO: 4637658 - DNA, 25 bp, Homo sapien
tcatgtcgcggatctccagaaagtg

SEQ ID NO: 4637659 - DNA, 25 bp, Homo sapien
catgtcgcggatctccagaaagtgt

SEQ ID NO: 4637660 - DNA, 25 bp, Homo sapien
tcgcggatctccagaaagtgtctcc

SEQ ID NO: 4637661 - DNA, 25 bp, Homo sapien
tggccacgtggtccctcgtaccaat

SEQ ID NO: 4637662 - DNA, 25 bp, Homo sapien
cgtaccaatcgatcgaatttctagt

SEQ ID NO: 4637663 - DNA, 25 bp, Homo sapien
tcccgggcggcctggtcattggcca

SEQ ID NO: 4637664 - DNA, 25 bp, Homo sapien
ggtccctcgtaccaatcgatcgaat

SEQ ID NO: 4637665 - DNA, 25 bp, Homo sapien
gtgcccctagacgaatgaggaggat

SEQ ID NO: 4637666 - DNA, 25 bp, Homo sapien
tcgggtgcccctagacgaatgagga

SEQ ID NO: 4637667 - DNA, 25 bp, Homo sapien
gattcgggtgcccctagacgaatga

SEQ ID NO: 4637668 - DNA, 25 bp, Homo sapien
tgcccctagacgaatgaggaggatg

SEQ ID NO: 4637669 - DNA, 25 bp, Homo sapien
ctcgctttggagccgcagcggccaa

SEQ ID NO: 4637670 - DNA, 25 bp, Homo sapien
gctttggagccgcagcggccaacag

SEQ ID NO: 4637671 - DNA, 25 bp, Homo sapien
gccaacaggagtgggcaaaggaccc

SEQ ID NO: 4637672 - DNA, 25 bp, Homo sapien
agccgcagcggccaacaggagtggg

SEQ ID NO: 4637673 - DNA, 25 bp, Homo sapien
tctctcactcgttttgccggcttgg

SEQ ID NO: 4637674 - DNA, 25 bp, Homo sapien
ggtcagactggaggtgtcctgaact

SEQ ID NO: 4637675 - DNA, 25 bp, Homo sapien
tagaaccagagcataggttctgacc

SEQ ID NO: 4637676 - DNA, 25 bp, Homo sapien
ttttgccggcttggaggtcagactg

SEQ ID NO: 4637677 - DNA, 25 bp, Homo sapien
tgggaggaagttgttccagatagca

SEQ ID NO: 4637678 - DNA, 25 bp, Homo sapien
ctgggaggaagttgttccagatagc

SEQ ID NO: 4637679 - DNA, 25 bp, Homo sapien
cgtctgtggtattctcggctgtagc

SEQ ID NO: 4637680 - DNA, 25 bp, Homo sapien
atccatggcaaaccgtctgtggtat

SEQ ID NO: 4637681 - DNA, 25 bp, Homo sapien
gatccatggcaaaccgtctgtggta

SEQ ID NO: 4637682 - DNA, 25 bp, Homo sapien
gtctgtggtattctcggctgtagcc

SEQ ID NO: 4637683 - DNA, 25 bp, Homo sapien
cctgcactgcctcttaattctgctt

SEQ ID NO: 4637684 - DNA, 25 bp, Homo sapien
ctgcactgcctcttaattctgcttt

SEQ ID NO: 4637685 - DNA, 25 bp, Homo sapien
gtcttcttttaccctgcatgaaaga

SEQ ID NO: 4637686 - DNA, 25 bp, Homo sapien
catgaaagatgaaagacggtagctc

SEQ ID NO: 4637687 - DNA, 25 bp, Homo sapien
tgcatgaaagatgaaagacggtagc

SEQ ID NO: 4637688 - DNA, 25 bp, Homo sapien
tcttcttttaccctgcatgaaagat

SEQ ID NO: 4637689 - DNA, 25 bp, Homo sapien
gtatcccctggtactccacacccat

SEQ ID NO: 4637690 - DNA, 25 bp, Homo sapien
gtgtccaacacccatacaggggtta

SEQ ID NO: 4637691 - DNA, 25 bp, Homo sapien
cccatacaggggttatactcacagg

SEQ ID NO: 4637692 - DNA, 25 bp, Homo sapien
gtcttccccaacactgtgtccaaca

SEQ ID NO: 4637693 - DNA, 25 bp, Homo sapien
caggggttatactcacaggatggca

SEQ ID NO: 4637694 - DNA, 25 bp, Homo sapien
ctgacgatcgtaaagggctttaata

SEQ ID NO: 4637695 - DNA, 25 bp, Homo sapien
ctcagccttgcccatctccacgggc

SEQ ID NO: 4637696 - DNA, 25 bp, Homo sapien
cagccttgcccatctccacgggcat

SEQ ID NO: 4637697 - DNA, 25 bp, Homo sapien
tcagccttgcccatctccacgggca

SEQ ID NO: 4637698 - DNA, 25 bp, Homo sapien
ccctcagccttgcccatctccacgg

SEQ ID NO: 4637699 - DNA, 25 bp, Homo sapien
agaagcacaactgcgtcccgaaaca

SEQ ID NO: 4637700 - DNA, 25 bp, Homo sapien
gcacaactgcgtcccgaaacaagga

SEQ ID NO: 4637701 - DNA, 25 bp, Homo sapien
aactgcgtcccgaaacaaggagcca

SEQ ID NO: 4637702 - DNA, 25 bp, Homo sapien
tcacagaagcacaactgcgtcccga

SEQ ID NO: 4637703 - DNA, 25 bp, Homo sapien
ttaacaaaacctcaagtctggatag

SEQ ID NO: 4637704 - DNA, 25 bp, Homo sapien
cactgaagccttataatgttatcca

SEQ ID NO: 4637705 - DNA, 25 bp, Homo sapien
tatatgatggtggtgcttctgaaag

SEQ ID NO: 4637706 - DNA, 25 bp, Homo sapien
aattatatcataaccattggacctc

SEQ ID NO: 4637707 - DNA, 25 bp, Homo sapien
tggaatactccacttggtaaccagc

SEQ ID NO: 4637708 - DNA, 25 bp, Homo sapien
ggaatactccacttggtaaccagca

SEQ ID NO: 4637709 - DNA, 25 bp, Homo sapien
ctggaatactccacttggtaaccag

SEQ ID NO: 4637710 - DNA, 25 bp, Homo sapien
gaatactccacttggtaaccagcat

SEQ ID NO: 4637711 - DNA, 25 bp, Homo sapien
cagtgctagggtaacaggaaggatc

SEQ ID NO: 4637712 - DNA, 25 bp, Homo sapien
aggaaggatcgggtgggctttcagg

SEQ ID NO: 4637713 - DNA, 25 bp, Homo sapien
ttaggaagtcagtgctagggtaaca

SEQ ID NO: 4637714 - DNA, 25 bp, Homo sapien
gaagtcagtgctagggtaacaggaa

SEQ ID NO: 4637715 - DNA, 25 bp, Homo sapien
gataaggcactaccttcggaacacc

SEQ ID NO: 4637716 - DNA, 25 bp, Homo sapien
cactgtaataccaagatcaatgaca

SEQ ID NO: 4637717 - DNA, 25 bp, Homo sapien
caaattgatgaaacttgggcagcga

SEQ ID NO: 4637718 - DNA, 25 bp, Homo sapien
tattactgtcagattatgacactgt

SEQ ID NO: 4637719 - DNA, 25 bp, Homo sapien
tccagttatgggcaattgctgacaa

SEQ ID NO: 4637720 - DNA, 25 bp, Homo sapien
ggccaacttgttctatctcccacag

SEQ ID NO: 4637721 - DNA, 25 bp, Homo sapien
ggtactcgacagtttggccaacttg

SEQ ID NO: 4637722 - DNA, 25 bp, Homo sapien
cccaggtgtggagacaggtactcga

SEQ ID NO: 4637723 - DNA, 25 bp, Homo sapien
gccaacagcgtaggcctaaaagcaa

SEQ ID NO: 4637724 - DNA, 25 bp, Homo sapien
cccagccaggagggactccctgagc

SEQ ID NO: 4637725 - DNA, 25 bp, Homo sapien
ccagccaggagggactccctgagcc

SEQ ID NO: 4637726 - DNA, 25 bp, Homo sapien
ccaggagggactccctgagccccac

SEQ ID NO: 4637727 - DNA, 25 bp, Homo sapien
agccaggagggactccctgagcccc

SEQ ID NO: 4637728 - DNA, 25 bp, Homo sapien
ggacggggacatcgcggtggggcca

SEQ ID NO: 4637729 - DNA, 25 bp, Homo sapien
gccctggacgctgggccagactgcc

SEQ ID NO: 4637730 - DNA, 25 bp, Homo sapien
ccgggtctctccagatcgcattagc

SEQ ID NO: 4637731 - DNA, 25 bp, Homo sapien
gtggggcgagggctcagtgcggcac

SEQ ID NO: 4637732 - DNA, 25 bp, Homo sapien
gcaccgaccgggtctctccagatcg

SEQ ID NO: 4637733 - DNA, 25 bp, Homo sapien
taggatacaagtttccaggatcttt

SEQ ID NO: 4637734 - DNA, 25 bp, Homo sapien
gataaatcacccctaggaacagaat

SEQ ID NO: 4637735 - DNA, 25 bp, Homo sapien
tggttgctacaataataggccaagc

SEQ ID NO: 4637736 - DNA, 25 bp, Homo sapien
attaggatacaagtttccaggatct

SEQ ID NO: 4637737 - DNA, 25 bp, Homo sapien
tccatgccctatgcatgtgtagccc

SEQ ID NO: 4637738 - DNA, 25 bp, Homo sapien
cctccatgccctatgcatgtgtagc

SEQ ID NO: 4637739 - DNA, 25 bp, Homo sapien
ctccatgccctatgcatgtgtagcc

SEQ ID NO: 4637740 - DNA, 25 bp, Homo sapien
tctgacacgaggtccctcccactcc

SEQ ID NO: 4637741 - DNA, 25 bp, Homo sapien
acaaagacccctcctctgacacgag

SEQ ID NO: 4637742 - DNA, 25 bp, Homo sapien
accacccagtccacgatgggcactg

SEQ ID NO: 4637743 - DNA, 25 bp, Homo sapien
aaccacccagtccacgatgggcact

SEQ ID NO: 4637744 - DNA, 25 bp, Homo sapien
gacagggagattgagggcgggagag

SEQ ID NO: 4637745 - DNA, 25 bp, Homo sapien
cctctggaaccacagacagggagat

SEQ ID NO: 4637746 - DNA, 25 bp, Homo sapien
agggcgggagaggcatctcccaaca

SEQ ID NO: 4637747 - DNA, 25 bp, Homo sapien
gcgggagaggcatctcccaacagct

SEQ ID NO: 4637748 - DNA, 25 bp, Homo sapien
gctctccagtggacccatttatctc

SEQ ID NO: 4637749 - DNA, 25 bp, Homo sapien
tgtgcttatctgcaagtctggggta

SEQ ID NO: 4637750 - DNA, 25 bp, Homo sapien
tagcccttggcttctgtaacaggca

SEQ ID NO: 4637751 - DNA, 25 bp, Homo sapien
cctctgttagcccttggcttctgta

SEQ ID NO: 4637752 - DNA, 25 bp, Homo sapien
tgaagcaagcccagtcatataacag

SEQ ID NO: 4637753 - DNA, 25 bp, Homo sapien
agcaagcccagtcatataacagggt

SEQ ID NO: 4637754 - DNA, 25 bp, Homo sapien
gaagcaagcccagtcatataacagg

SEQ ID NO: 4637755 - DNA, 25 bp, Homo sapien
aagcccagtcatataacagggtgca

SEQ ID NO: 4637756 - DNA, 25 bp, Homo sapien
tccagatgtgaacggatcagtagaa

SEQ ID NO: 4637757 - DNA, 25 bp, Homo sapien
ctctccagatgtgaacggatcagta

SEQ ID NO: 4637758 - DNA, 25 bp, Homo sapien
tctccagatgtgaacggatcagtag

SEQ ID NO: 4637759 - DNA, 25 bp, Homo sapien
ctccagatgtgaacggatcagtaga

SEQ ID NO: 4637760 - DNA, 25 bp, Homo sapien
atacaaccacagcacatttaggtac

SEQ ID NO: 4637761 - DNA, 25 bp, Homo sapien
taaatacaaccacagcacatttagg

SEQ ID NO: 4637762 - DNA, 25 bp, Homo sapien
tgtaaatacaaccacagcacattta

SEQ ID NO: 4637763 - DNA, 25 bp, Homo sapien
aatacaaccacagcacatttaggta

SEQ ID NO: 4637764 - DNA, 25 bp, Homo sapien
tacttattggaaagcgaaagtacac

SEQ ID NO: 4637765 - DNA, 25 bp, Homo sapien
tgccgaaacctctttatctctgaag

SEQ ID NO: 4637766 - DNA, 25 bp, Homo sapien
atctctgaagcccactctttaagac

SEQ ID NO: 4637767 - DNA, 25 bp, Homo sapien
gctcctcgccctgtccctgccgaaa

SEQ ID NO: 4637768 - DNA, 25 bp, Homo sapien
gaggcccacataaaaacaagcttta

SEQ ID NO: 4637769 - DNA, 25 bp, Homo sapien
gcacaggaggcccacataaaaacaa

SEQ ID NO: 4637770 - DNA, 25 bp, Homo sapien
gctttatttggccaaattaactcac

SEQ ID NO: 4637771 - DNA, 25 bp, Homo sapien
tggtcccatcctacatccccaccag

SEQ ID NO: 4637772 - DNA, 25 bp, Homo sapien
tccctcgggttgacaggcaattcca

SEQ ID NO: 4637773 - DNA, 25 bp, Homo sapien
cgtgtcctcgtctgcagtgtgttca

SEQ ID NO: 4637774 - DNA, 25 bp, Homo sapien
tgggtccgctggtctcctgcgggac

SEQ ID NO: 4637775 - DNA, 25 bp, Homo sapien
gacgtgggtccgctggtctcctgcg

SEQ ID NO: 4637776 - DNA, 25 bp, Homo sapien
cctgtggggctcgtgtcctcgtctg

SEQ ID NO: 4637777 - DNA, 25 bp, Homo sapien
gaaaaggtcaataagcccaggtgaa

SEQ ID NO: 4637778 - DNA, 25 bp, Homo sapien
caaaatcggatctgaacgggagtcc

SEQ ID NO: 4637779 - DNA, 25 bp, Homo sapien
taggccttgagacctacgggatcat

SEQ ID NO: 4637780 - DNA, 25 bp, Homo sapien
gaccatagatcccagcaattgcagt

SEQ ID NO: 4637781 - DNA, 25 bp, Homo sapien
taactccacttgatactaaaggaag

SEQ ID NO: 4637782 - DNA, 25 bp, Homo sapien
aagctgagcttccttgctttaatca

SEQ ID NO: 4637783 - DNA, 25 bp, Homo sapien
tcctagtgagtattataaatcatag

SEQ ID NO: 4637784 - DNA, 25 bp, Homo sapien
gaaatatgaatacatccaatagatg

SEQ ID NO: 4637785 - DNA, 25 bp, Homo sapien
acataatgttcgctagtcttatcca

SEQ ID NO: 4637786 - DNA, 25 bp, Homo sapien
cgctagtcttatccatgattctgca

SEQ ID NO: 4637787 - DNA, 25 bp, Homo sapien
tatgggtaaggacagacagtattaa

SEQ ID NO: 4637788 - DNA, 25 bp, Homo sapien
caaatttgtttagctcctgcatatg

SEQ ID NO: 4637789 - DNA, 25 bp, Homo sapien
agtcctcagtgacctacaaagagac

SEQ ID NO: 4637790 - DNA, 25 bp, Homo sapien
cataaagcaagtcctcagtgaccta

SEQ ID NO: 4637791 - DNA, 25 bp, Homo sapien
aagcaagtcctcagtgacctacaaa

SEQ ID NO: 4637792 - DNA, 25 bp, Homo sapien
aagtcctcagtgacctacaaagaga

SEQ ID NO: 4637793 - DNA, 25 bp, Homo sapien
ttagactcatgaccaaattgaagtt

SEQ ID NO: 4637794 - DNA, 25 bp, Homo sapien
tcagctgtccattagcatctcttgt

SEQ ID NO: 4637795 - DNA, 25 bp, Homo sapien
ggcttgagaaaatctccagatttgc

SEQ ID NO: 4637796 - DNA, 25 bp, Homo sapien
gcccctaagtgtttctcaatctgtg

SEQ ID NO: 4637797 - DNA, 25 bp, Homo sapien
gggcttacattaggtgaacacccag

SEQ ID NO: 4637798 - DNA, 25 bp, Homo sapien
caggatatactcaccacttgcttgg

SEQ ID NO: 4637799 - DNA, 25 bp, Homo sapien
agttgacctcagctcctatattggg

SEQ ID NO: 4637800 - DNA, 25 bp, Homo sapien
taatgcagcaaagggatgagggtaa

SEQ ID NO: 4637801 - DNA, 25 bp, Homo sapien
tgcagcaaagggatgagggtaagaa

SEQ ID NO: 4637802 - DNA, 25 bp, Homo sapien
cagcaaagggatgagggtaagaatg

SEQ ID NO: 4637803 - DNA, 25 bp, Homo sapien
gttaatgcagcaaagggatgagggt

SEQ ID NO: 4637804 - DNA, 25 bp, Homo sapien
tttgaagaaacctgatacacattgc

SEQ ID NO: 4637805 - DNA, 25 bp, Homo sapien
tgcttttagctcttacaatcgaggg

SEQ ID NO: 4637806 - DNA, 25 bp, Homo sapien
taaataagggtggattgcaatatgc

SEQ ID NO: 4637807 - DNA, 25 bp, Homo sapien
ttttttcatacagccttaagcagat

SEQ ID NO: 4637808 - DNA, 25 bp, Homo sapien
caatgaaaacttattcagcaaagct

SEQ ID NO: 4637809 - DNA, 25 bp, Homo sapien
gaccatctcgacaatgaaaacttat

SEQ ID NO: 4637810 - DNA, 25 bp, Homo sapien
tctcgacaatgaaaacttattcagc

SEQ ID NO: 4637811 - DNA, 25 bp, Homo sapien
gtgaagaccatctcgacaatgaaaa

SEQ ID NO: 4637812 - DNA, 25 bp, Homo sapien
tgttaaatctccttgatattggaga

SEQ ID NO: 4637813 - DNA, 25 bp, Homo sapien
ttaaatctccttgatattggagaac

SEQ ID NO: 4637814 - DNA, 25 bp, Homo sapien
aaatctccttgatattggagaactc

SEQ ID NO: 4637815 - DNA, 25 bp, Homo sapien
atctccttgatattggagaactcat

SEQ ID NO: 4637816 - DNA, 25 bp, Homo sapien
gttgagcaacgaataagcactggat

SEQ ID NO: 4637817 - DNA, 25 bp, Homo sapien
gcaacgaataagcactggatgagtt

SEQ ID NO: 4637818 - DNA, 25 bp, Homo sapien
ttagttgagcaacgaataagcactg

SEQ ID NO: 4637819 - DNA, 25 bp, Homo sapien
acgaataagcactggatgagttttc

SEQ ID NO: 4637820 - DNA, 25 bp, Homo sapien
ctggaagatggaaaggatcgttcgc

SEQ ID NO: 4637821 - DNA, 25 bp, Homo sapien
tcgttcgctgtttggagaatagagc

SEQ ID NO: 4637822 - DNA, 25 bp, Homo sapien
gaaaggatcgttcgctgtttggaga

SEQ ID NO: 4637823 - DNA, 25 bp, Homo sapien
gatggaaaggatcgttcgctgtttg

SEQ ID NO: 4637824 - DNA, 25 bp, Homo sapien
tgaatcataggacaccacgaccaag

SEQ ID NO: 4637825 - DNA, 25 bp, Homo sapien
catagagcggacttcgggagttgcc

SEQ ID NO: 4637826 - DNA, 25 bp, Homo sapien
tgtgctagaggataaatagagccct

SEQ ID NO: 4637827 - DNA, 25 bp, Homo sapien
ctggatctttgcacacggcttggga

SEQ ID NO: 4637828 - DNA, 25 bp, Homo sapien
agcttttttgtcagccttgctttgg

SEQ ID NO: 4637829 - DNA, 25 bp, Homo sapien
gatctccaaggtctaaggcctccag

SEQ ID NO: 4637830 - DNA, 25 bp, Homo sapien
cttccaatggtcagtgcagtttggg

SEQ ID NO: 4637831 - DNA, 25 bp, Homo sapien
tggtcagtgcagtttggggcagctt

SEQ ID NO: 4637832 - DNA, 25 bp, Homo sapien
cctagaaacctgcagctgagagttg

SEQ ID NO: 4637833 - DNA, 25 bp, Homo sapien
gctattactcactgatttctaagaa

SEQ ID NO: 4637834 - DNA, 25 bp, Homo sapien
cagccaaactattcctctcctagaa

SEQ ID NO: 4637835 - DNA, 25 bp, Homo sapien
gatattacgaagttgtgtttggagg

SEQ ID NO: 4637836 - DNA, 25 bp, Homo sapien
cagtacttcagagacccatgtgacc

SEQ ID NO: 4637837 - DNA, 25 bp, Homo sapien
acagaagccgtcagtgaagaacaca

SEQ ID NO: 4637838 - DNA, 25 bp, Homo sapien
aaggccatgttagaggaagctgtac

SEQ ID NO: 4637839 - DNA, 25 bp, Homo sapien
gttcccactaaaggcaaaagactga

SEQ ID NO: 4637840 - DNA, 25 bp, Homo sapien
tcatgtttgtggactttgaaggtac

SEQ ID NO: 4637841 - DNA, 25 bp, Homo sapien
gaggagtttcctgaaaaatgatgac

SEQ ID NO: 4637842 - DNA, 25 bp, Homo sapien
ttcctgaaaaatgatgacctcatca

SEQ ID NO: 4637843 - DNA, 25 bp, Homo sapien
gatgacctcatcatgtttgtggact

SEQ ID NO: 4637844 - DNA, 25 bp, Homo sapien
cattgactttggctggagtggtttc

SEQ ID NO: 4637845 - DNA, 25 bp, Homo sapien
gccgtccagggtgggaacctatcat

SEQ ID NO: 4637846 - DNA, 25 bp, Homo sapien
tgcagcgacaaatgacactgtcatc

SEQ ID NO: 4637847 - DNA, 25 bp, Homo sapien
gagtggtttcatctcccaccaaatg

SEQ ID NO: 4637848 - DNA, 25 bp, Homo sapien
tttatgtgaccctcttgggtctcct

SEQ ID NO: 4637849 - DNA, 25 bp, Homo sapien
tctttatgtgaccctcttgggtctc

SEQ ID NO: 4637850 - DNA, 25 bp, Homo sapien
tatgtgaccctcttgggtctccttc

SEQ ID NO: 4637851 - DNA, 25 bp, Homo sapien
atgtgaccctcttgggtctccttcc

SEQ ID NO: 4637852 - DNA, 25 bp, Homo sapien
tgtgccgtgtctcaagcctccagca

SEQ ID NO: 4637853 - DNA, 25 bp, Homo sapien
cgcctctgtgccgtgtctcaagcct

SEQ ID NO: 4637854 - DNA, 25 bp, Homo sapien
agccgcgctgcaatcgcaatctcca

SEQ ID NO: 4637855 - DNA, 25 bp, Homo sapien
gcgctgcaatcgcaatctccactgc

SEQ ID NO: 4637856 - DNA, 25 bp, Homo sapien
actgttccaaagaagcggaagagca

SEQ ID NO: 4637857 - DNA, 25 bp, Homo sapien
tgtgactgttccaaagaagcggaag

SEQ ID NO: 4637858 - DNA, 25 bp, Homo sapien
gaagcggaagagcattttaagtttc

SEQ ID NO: 4637859 - DNA, 25 bp, Homo sapien
aaattactgcaagaatgaaaggagt

SEQ ID NO: 4637860 - DNA, 25 bp, Homo sapien
ccaagccagacgcagtgacttatgc

SEQ ID NO: 4637861 - DNA, 25 bp, Homo sapien
tacccacttcgagattcacaacagg

SEQ ID NO: 4637862 - DNA, 25 bp, Homo sapien
cacagtctgtggaatacaaggaacc

SEQ ID NO: 4637863 - DNA, 25 bp, Homo sapien
aaatgggaaagtgcatcatgtaccc

SEQ ID NO: 4637864 - DNA, 25 bp, Homo sapien
gtttcaagctttaacagcagggtca

SEQ ID NO: 4637865 - DNA, 25 bp, Homo sapien
tcatcggagaaaaagccagtcactg

SEQ ID NO: 4637866 - DNA, 25 bp, Homo sapien
aacagggccggtgtcaatgtaagca

SEQ ID NO: 4637867 - DNA, 25 bp, Homo sapien
aaagctttaacctggtgctgcggcc

SEQ ID NO: 4637868 - DNA, 25 bp, Homo sapien
tgaactcaaaactctaggtaaatct

SEQ ID NO: 4637869 - DNA, 25 bp, Homo sapien
gtaaaatacactttctctgcacaca

SEQ ID NO: 4637870 - DNA, 25 bp, Homo sapien
ttggatttagggagcatcaagttcc

SEQ ID NO: 4637871 - DNA, 25 bp, Homo sapien
gatttagggagcatcaagttccttg

SEQ ID NO: 4637872 - DNA, 25 bp, Homo sapien
ggtactgtttggtcattgccctcta

SEQ ID NO: 4637873 - DNA, 25 bp, Homo sapien
ctgtttggtcattgccctctaaaga

SEQ ID NO: 4637874 - DNA, 25 bp, Homo sapien
ttgccctctaaagaatgatggcttc

SEQ ID NO: 4637875 - DNA, 25 bp, Homo sapien
tctgctggtactgtttggtcattgc

SEQ ID NO: 4637876 - DNA, 25 bp, Homo sapien
catcctgttctctgcggactcatct

SEQ ID NO: 4637877 - DNA, 25 bp, Homo sapien
tgttctctgcggactcatcttcaac

SEQ ID NO: 4637878 - DNA, 25 bp, Homo sapien
tcaacagactcatcttcaacggact

SEQ ID NO: 4637879 - DNA, 25 bp, Homo sapien
acagactcatcttcaacggactcct

SEQ ID NO: 4637880 - DNA, 25 bp, Homo sapien
agtactacccaattacagaatgtta

SEQ ID NO: 4637881 - DNA, 25 bp, Homo sapien
cccagtactacccaattacagaatg

SEQ ID NO: 4637882 - DNA, 25 bp, Homo sapien
ccagtactacccaattacagaatgt

SEQ ID NO: 4637883 - DNA, 25 bp, Homo sapien
cacccagtactacccaattacagaa

SEQ ID NO: 4637884 - DNA, 25 bp, Homo sapien
gagagcttttccaccggctggataa

SEQ ID NO: 4637885 - DNA, 25 bp, Homo sapien
agagcttttccaccggctggataat

SEQ ID NO: 4637886 - DNA, 25 bp, Homo sapien
agagtggaaactgcaacttgtgcca

SEQ ID NO: 4637887 - DNA, 25 bp, Homo sapien
cctcatcttcaatgggcagagtgga

SEQ ID NO: 4637888 - DNA, 25 bp, Homo sapien
cgtggactcgagagctgacattagg

SEQ ID NO: 4637889 - DNA, 25 bp, Homo sapien
accatcctgctctccaaggactcct

SEQ ID NO: 4637890 - DNA, 25 bp, Homo sapien
tatctactgcccagtcctaccaaac

SEQ ID NO: 4637891 - DNA, 25 bp, Homo sapien
ctactgcccagtcctaccaaactac

SEQ ID NO: 4637892 - DNA, 25 bp, Homo sapien
tactgcccagtcctaccaaactaca

SEQ ID NO: 4637893 - DNA, 25 bp, Homo sapien
tctactgcccagtcctaccaaacta

SEQ ID NO: 4637894 - DNA, 25 bp, Homo sapien
ctgaaaatcataaaattgtaagttc

SEQ ID NO: 4637895 - DNA, 25 bp, Homo sapien
ggtctactcattacaactgaaaatc

SEQ ID NO: 4637896 - DNA, 25 bp, Homo sapien
gaaaaaggtctactcattacaactg

SEQ ID NO: 4637897 - DNA, 25 bp, Homo sapien
ctactattcacgaaaaaggtctact

SEQ ID NO: 4637898 - DNA, 25 bp, Homo sapien
caaactaccctacgttgagtggctt

SEQ ID NO: 4637899 - DNA, 25 bp, Homo sapien
taggtctattaaggctaaagtcaag

SEQ ID NO: 4637900 - DNA, 25 bp, Homo sapien
gtggcttaatacaccacaaatctac

SEQ ID NO: 4637901 - DNA, 25 bp, Homo sapien
aaatctactacctaacaggtctggg

SEQ ID NO: 4637902 - DNA, 25 bp, Homo sapien
cctcagcgcctctagtagctaagac

SEQ ID NO: 4637903 - DNA, 25 bp, Homo sapien
ggcaccatggcacgatcacaacaca

SEQ ID NO: 4637904 - DNA, 25 bp, Homo sapien
gctggggcaccatggcacgatcaca

SEQ ID NO: 4637905 - DNA, 25 bp, Homo sapien
tcctaggtcaagaaatcgtcctgcc

SEQ ID NO: 4637906 - DNA, 25 bp, Homo sapien
cacagaggcttccacggttttgatt

SEQ ID NO: 4637907 - DNA, 25 bp, Homo sapien
tacatcgagtgaatgcacatcaggc

SEQ ID NO: 4637908 - DNA, 25 bp, Homo sapien
taacacagaaaattgagggcccaga

SEQ ID NO: 4637909 - DNA, 25 bp, Homo sapien
tcataccaggccaatgagggacagc

SEQ ID NO: 4637910 - DNA, 25 bp, Homo sapien
agcattgtcccaggacttcctcggc

SEQ ID NO: 4637911 - DNA, 25 bp, Homo sapien
cggggtggggcgtggagcgtcaccg

SEQ ID NO: 4637912 - DNA, 25 bp, Homo sapien
gtcaccggttgccaagccagcactg

SEQ ID NO: 4637913 - DNA, 25 bp, Homo sapien
caggcatctgtctctagcgttgcca

SEQ ID NO: 4637914 - DNA, 25 bp, Homo sapien
tgtctctagcgttgccactacttgg

SEQ ID NO: 4637915 - DNA, 25 bp, Homo sapien
gctcccctggatggcgtcaggtttg

SEQ ID NO: 4637916 - DNA, 25 bp, Homo sapien
ctgctgtgcggactgcctgacttgg

SEQ ID NO: 4637917 - DNA, 25 bp, Homo sapien
ctgtgcggactgcctgacttgggcg

SEQ ID NO: 4637918 - DNA, 25 bp, Homo sapien
gactgcctgacttgggcgcccaggc

SEQ ID NO: 4637919 - DNA, 25 bp, Homo sapien
tgcggactgcctgacttgggcgccc

SEQ ID NO: 4637920 - DNA, 25 bp, Homo sapien
gatggtaccgagcagcaggttttca

SEQ ID NO: 4637921 - DNA, 25 bp, Homo sapien
ctcccacttgagaggttgctctgac

SEQ ID NO: 4637922 - DNA, 25 bp, Homo sapien
gtaaccgggatggtaccgagcagca

SEQ ID NO: 4637923 - DNA, 25 bp, Homo sapien
cgccgggactggctcttcgtggtaa

SEQ ID NO: 4637924 - DNA, 25 bp, Homo sapien
tccacacggatgaaacagcggctgc

SEQ ID NO: 4637925 - DNA, 25 bp, Homo sapien
gtccacacggatgaaacagcggctg

SEQ ID NO: 4637926 - DNA, 25 bp, Homo sapien
ccacacggatgaaacagcggctgct

SEQ ID NO: 4637927 - DNA, 25 bp, Homo sapien
tggacatctttctggatcctgggcc

SEQ ID NO: 4637928 - DNA, 25 bp, Homo sapien
atcctgggccctggcgctgggcact

SEQ ID NO: 4637929 - DNA, 25 bp, Homo sapien
tggcctcaaggtccgctcctcttgg

SEQ ID NO: 4637930 - DNA, 25 bp, Homo sapien
caaggtccgctcctcttggacatct

SEQ ID NO: 4637931 - DNA, 25 bp, Homo sapien
ctcagggccgcagagcgcacagccc

SEQ ID NO: 4637932 - DNA, 25 bp, Homo sapien
tcagggccgcagagcgcacagccca

SEQ ID NO: 4637933 - DNA, 25 bp, Homo sapien
cagggccgcagagcgcacagcccac

SEQ ID NO: 4637934 - DNA, 25 bp, Homo sapien
agtgccacacgcgcggtttgcagct

SEQ ID NO: 4637935 - DNA, 25 bp, Homo sapien
gccacacgcgcggtttgcagctgca

SEQ ID NO: 4637936 - DNA, 25 bp, Homo sapien
gccagtgccacacgcgcggtttgca

SEQ ID NO: 4637937 - DNA, 25 bp, Homo sapien
cacacgcgcggtttgcagctgcaga

SEQ ID NO: 4637938 - DNA, 25 bp, Homo sapien
gatggaggcagagtcaggggctgct

SEQ ID NO: 4637939 - DNA, 25 bp, Homo sapien
cagagtcaggggctgctccttcccc

SEQ ID NO: 4637940 - DNA, 25 bp, Homo sapien
tgctccttcccccacccgccctcac

SEQ ID NO: 4637941 - DNA, 25 bp, Homo sapien
tggagagggatggaggcagagtcag

SEQ ID NO: 4637942 - DNA, 25 bp, Homo sapien
cggattggctgaacgctgaggctct

SEQ ID NO: 4637943 - DNA, 25 bp, Homo sapien
cggccacctgagtggcttcgcggat

SEQ ID NO: 4637944 - DNA, 25 bp, Homo sapien
tcgccggttctcctgggatcgcccg

SEQ ID NO: 4637945 - DNA, 25 bp, Homo sapien
gcgtgcgccgatgggctcgccggtt

SEQ ID NO: 4637946 - DNA, 25 bp, Homo sapien
ggctcccagaagacgctccctggcg

SEQ ID NO: 4637947 - DNA, 25 bp, Homo sapien
cacggcagttgctgccgggctccca

SEQ ID NO: 4637948 - DNA, 25 bp, Homo sapien
acggcagttgctgccgggctcccag

SEQ ID NO: 4637949 - DNA, 25 bp, Homo sapien
gctcccagaagacgctccctggcgg

SEQ ID NO: 4637950 - DNA, 25 bp, Homo sapien
ccttcagcagcgacactcgcagcct

SEQ ID NO: 4637951 - DNA, 25 bp, Homo sapien
ttcagcagcgacactcgcagcctcc

SEQ ID NO: 4637952 - DNA, 25 bp, Homo sapien
agcagcgacactcgcagcctccgac

SEQ ID NO: 4637953 - DNA, 25 bp, Homo sapien
tccacaatccgcgatccagcccggt

SEQ ID NO: 4637954 - DNA, 25 bp, Homo sapien
ccaccggctcttgagcgagggcagc

SEQ ID NO: 4637955 - DNA, 25 bp, Homo sapien
caaccaccggctcttgagcgagggc

SEQ ID NO: 4637956 - DNA, 25 bp, Homo sapien
cccaaccaccggctcttgagcgagg

SEQ ID NO: 4637957 - DNA, 25 bp, Homo sapien
aaccaccggctcttgagcgagggca

SEQ ID NO: 4637958 - DNA, 25 bp, Homo sapien
tgcggctcccgaagccgaataactt

SEQ ID NO: 4637959 - DNA, 25 bp, Homo sapien
ctgcggctcccgaagccgaataact

SEQ ID NO: 4637960 - DNA, 25 bp, Homo sapien
gcggctcccgaagccgaataacttc

SEQ ID NO: 4637961 - DNA, 25 bp, Homo sapien
ggctcccgaagccgaataacttcat

SEQ ID NO: 4637962 - DNA, 25 bp, Homo sapien
cgtgtagacgtggtctatggagccc

SEQ ID NO: 4637963 - DNA, 25 bp, Homo sapien
tgtagacgtggtctatggagccctg

SEQ ID NO: 4637964 - DNA, 25 bp, Homo sapien
acgtggtctatggagccctgggccg

SEQ ID NO: 4637965 - DNA, 25 bp, Homo sapien
tccgcggcgtcgcctttgacagctg

SEQ ID NO: 4637966 - DNA, 25 bp, Homo sapien
ttataggatccattctatgggttct

SEQ ID NO: 4637967 - DNA, 25 bp, Homo sapien
cacaaatattgtggatagaaaactg

SEQ ID NO: 4637968 - DNA, 25 bp, Homo sapien
taaaacatcctcacaaatattgtgg

SEQ ID NO: 4637969 - DNA, 25 bp, Homo sapien
tttataggatccattctatgggttc

SEQ ID NO: 4637970 - DNA, 25 bp, Homo sapien
tatgagagtaagaggattttttaag

SEQ ID NO: 4637971 - DNA, 25 bp, Homo sapien
atgagagtaagaggattttttaaga

SEQ ID NO: 4637972 - DNA, 25 bp, Homo sapien
ctatgagagtaagaggattttttaa

SEQ ID NO: 4637973 - DNA, 25 bp, Homo sapien
tgagagtaagaggattttttaagaa

SEQ ID NO: 4637974 - DNA, 25 bp, Homo sapien
gtgaccacttgcacatggccactgg

SEQ ID NO: 4637975 - DNA, 25 bp, Homo sapien
tctttgtcacagacatcaatctggc

SEQ ID NO: 4637976 - DNA, 25 bp, Homo sapien
tgtatcaaaggcgttctgttttctt

SEQ ID NO: 4637977 - DNA, 25 bp, Homo sapien
tcacagacatcaatctggcattttc

SEQ ID NO: 4637978 - DNA, 25 bp, Homo sapien
tgcttcaatatgtgcaccatgggaa

SEQ ID NO: 4637979 - DNA, 25 bp, Homo sapien
ttcaatatgtgcaccatgggaaagc

SEQ ID NO: 4637980 - DNA, 25 bp, Homo sapien
aatatgtgcaccatgggaaagcagt

SEQ ID NO: 4637981 - DNA, 25 bp, Homo sapien
tgtccagtgcttcaatatgtgcacc

SEQ ID NO: 4637982 - DNA, 25 bp, Homo sapien
cagcaacagcaacatgtccctttat

SEQ ID NO: 4637983 - DNA, 25 bp, Homo sapien
agcaacagcaacatgtccctttatt

SEQ ID NO: 4637984 - DNA, 25 bp, Homo sapien
gcagcaacagcaacatgtcccttta

SEQ ID NO: 4637985 - DNA, 25 bp, Homo sapien
gaaaagagtaagagatagtgtcatt

SEQ ID NO: 4637986 - DNA, 25 bp, Homo sapien
gagtaagagatagtgtcatttatta

SEQ ID NO: 4637987 - DNA, 25 bp, Homo sapien
ttatcagttggagatgtggccaaaa

SEQ ID NO: 4637988 - DNA, 25 bp, Homo sapien
ccacatggctaattcctttatcagt

SEQ ID NO: 4637989 - DNA, 25 bp, Homo sapien
gtctcagcctatcaacggcatgtga

SEQ ID NO: 4637990 - DNA, 25 bp, Homo sapien
acggcatgtgaacttgctttccttt

SEQ ID NO: 4637991 - DNA, 25 bp, Homo sapien
tatcaacggcatgtgaacttgcttt

SEQ ID NO: 4637992 - DNA, 25 bp, Homo sapien
tcagcctatcaacggcatgtgaact

SEQ ID NO: 4637993 - DNA, 25 bp, Homo sapien
catgtactagcttgggtctataagc

SEQ ID NO: 4637994 - DNA, 25 bp, Homo sapien
tactagcttgggtctataagcatct

SEQ ID NO: 4637995 - DNA, 25 bp, Homo sapien
tttgcatgtactagcttgggtctat

SEQ ID NO: 4637996 - DNA, 25 bp, Homo sapien
gcttgggtctataagcatctagggt

SEQ ID NO: 4637997 - DNA, 25 bp, Homo sapien
cacacatgtcttgagcgaagacatc

SEQ ID NO: 4637998 - DNA, 25 bp, Homo sapien
cttgagcgaagacatcaatattttg

SEQ ID NO: 4637999 - DNA, 25 bp, Homo sapien
caatacctggtgagtcatagtatac

SEQ ID NO: 4638000 - DNA, 25 bp, Homo sapien
cctggtgagtcatagtatacagcaa

SEQ ID NO: 4638001 - DNA, 25 bp, Homo sapien
aatttgtgtgccatccctaggcagt

SEQ ID NO: 4638002 - DNA, 25 bp, Homo sapien
aatatgtgctgttgaaataagtaca

SEQ ID NO: 4638003 - DNA, 25 bp, Homo sapien
ggcagtagccatgcttatctgctct

SEQ ID NO: 4638004 - DNA, 25 bp, Homo sapien
aaaatatgtgctgttgaaataagta

SEQ ID NO: 4638005 - DNA, 25 bp, Homo sapien
taagtatcttctttttatgttccaa

SEQ ID NO: 4638006 - DNA, 25 bp, Homo sapien
atgttccaaaatttgttgttgaatt

SEQ ID NO: 4638007 - DNA, 25 bp, Homo sapien
ctgatttctcctttttaagtatctt

SEQ ID NO: 4638008 - DNA, 25 bp, Homo sapien
ttatgttccaaaatttgttgttgaa

SEQ ID NO: 4638009 - DNA, 25 bp, Homo sapien
tcttatcaagagtaggaccaccaag

SEQ ID NO: 4638010 - DNA, 25 bp, Homo sapien
cttatcaagagtaggaccaccaaga

SEQ ID NO: 4638011 - DNA, 25 bp, Homo sapien
ttcttatcaagagtaggaccaccaa

SEQ ID NO: 4638012 - DNA, 25 bp, Homo sapien
tttcttatcaagagtaggaccacca

SEQ ID NO: 4638013 - DNA, 25 bp, Homo sapien
gcagattcatcagaacttccaacat

SEQ ID NO: 4638014 - DNA, 25 bp, Homo sapien
ctgactgcagattcatcagaacttc

SEQ ID NO: 4638015 - DNA, 25 bp, Homo sapien
tgactgcagattcatcagaacttcc

SEQ ID NO: 4638016 - DNA, 25 bp, Homo sapien
actgcagattcatcagaacttccaa

SEQ ID NO: 4638017 - DNA, 25 bp, Homo sapien
gaacatattaggatgtctagcccag

SEQ ID NO: 4638018 - DNA, 25 bp, Homo sapien
caggctgatggtcaaactgtaggcc

SEQ ID NO: 4638019 - DNA, 25 bp, Homo sapien
tcagacctataccttgatccaaggg

SEQ ID NO: 4638020 - DNA, 25 bp, Homo sapien
ggatcatgaggcaattaatcagctc

SEQ ID NO: 4638021 - DNA, 25 bp, Homo sapien
tctttgtcatccgatgcaggcaatg

SEQ ID NO: 4638022 - DNA, 25 bp, Homo sapien
tttcctttttcatgcgaagatccag

SEQ ID NO: 4638023 - DNA, 25 bp, Homo sapien
ttttcatgcgaagatccaggtaaag

SEQ ID NO: 4638024 - DNA, 25 bp, Homo sapien
ctttttcatgcgaagatccaggtaa

SEQ ID NO: 4638025 - DNA, 25 bp, Homo sapien
cctttttcatgcgaagatccaggta

SEQ ID NO: 4638026 - DNA, 25 bp, Homo sapien
aaggaaggatgttttgcaggaggcc

SEQ ID NO: 4638027 - DNA, 25 bp, Homo sapien
caaggaaggatgttttgcaggaggc

SEQ ID NO: 4638028 - DNA, 25 bp, Homo sapien
ttcaaggaaggatgttttgcaggag

SEQ ID NO: 4638029 - DNA, 25 bp, Homo sapien
cttcaaggaaggatgttttgcagga

SEQ ID NO: 4638030 - DNA, 25 bp, Homo sapien
tctttgtactgctcctttcacagca

SEQ ID NO: 4638031 - DNA, 25 bp, Homo sapien
tcaatgtctgtacattctttctttg

SEQ ID NO: 4638032 - DNA, 25 bp, Homo sapien
gctctcaatgtctgtacattctttc

SEQ ID NO: 4638033 - DNA, 25 bp, Homo sapien
caggatcttctacttcagtgctagg

SEQ ID NO: 4638034 - DNA, 25 bp, Homo sapien
tcaaatgaactaagaacagttagat

SEQ ID NO: 4638035 - DNA, 25 bp, Homo sapien
caaatgaactaagaacagttagata

SEQ ID NO: 4638036 - DNA, 25 bp, Homo sapien
tagttcaaatgaactaagaacagtt

SEQ ID NO: 4638037 - DNA, 25 bp, Homo sapien
gttcaaatgaactaagaacagttag

SEQ ID NO: 4638038 - DNA, 25 bp, Homo sapien
cctctgaagccactggtaaggcttg

SEQ ID NO: 4638039 - DNA, 25 bp, Homo sapien
tctttcatgcctttcttgctcttcc

SEQ ID NO: 4638040 - DNA, 25 bp, Homo sapien
tctgaagccactggtaaggcttgtt

SEQ ID NO: 4638041 - DNA, 25 bp, Homo sapien
ctgtggttgcttcttttcacttctt

SEQ ID NO: 4638042 - DNA, 25 bp, Homo sapien
cagcagcagaagatgtactatcaca

SEQ ID NO: 4638043 - DNA, 25 bp, Homo sapien
ttgttgggttaatctgccagcagca

SEQ ID NO: 4638044 - DNA, 25 bp, Homo sapien
aaattgctgaggatacgttttccca

SEQ ID NO: 4638045 - DNA, 25 bp, Homo sapien
tgaggatacgttttcccaatctttc

SEQ ID NO: 4638046 - DNA, 25 bp, Homo sapien
tcaagttgttttgcttcaacttctt

SEQ ID NO: 4638047 - DNA, 25 bp, Homo sapien
gaacgtcatctagttgctgtacaag

SEQ ID NO: 4638048 - DNA, 25 bp, Homo sapien
catctagttgctgtacaagccacgc

SEQ ID NO: 4638049 - DNA, 25 bp, Homo sapien
tctagttgctgtacaagccacgcat

SEQ ID NO: 4638050 - DNA, 25 bp, Homo sapien
gtcatctagttgctgtacaagccac

SEQ ID NO: 4638051 - DNA, 25 bp, Homo sapien
ctccttctgttttctctctctcata

SEQ ID NO: 4638052 - DNA, 25 bp, Homo sapien
actccttctgttttctctctctcat

SEQ ID NO: 4638053 - DNA, 25 bp, Homo sapien
tactccttctgttttctctctctca

SEQ ID NO: 4638054 - DNA, 25 bp, Homo sapien
aatatttatcttccttgatacttac

SEQ ID NO: 4638055 - DNA, 25 bp, Homo sapien
gtttgaaaatatttatcttccttga

SEQ ID NO: 4638056 - DNA, 25 bp, Homo sapien
taaattgtctttctagaagtttgaa

SEQ ID NO: 4638057 - DNA, 25 bp, Homo sapien
ttaaattgtctttctagaagtttga

SEQ ID NO: 4638058 - DNA, 25 bp, Homo sapien
tatttcctagaaatgaggcatgttt

SEQ ID NO: 4638059 - DNA, 25 bp, Homo sapien
gttaaagcaaggtattacaagacac

SEQ ID NO: 4638060 - DNA, 25 bp, Homo sapien
gccccttgcaaacatgaatctactt

SEQ ID NO: 4638061 - DNA, 25 bp, Homo sapien
ttctaagccgatatagtaaacacat

SEQ ID NO: 4638062 - DNA, 25 bp, Homo sapien
atttttttacgctgtcagccacttc

SEQ ID NO: 4638063 - DNA, 25 bp, Homo sapien
tcgttaatttttttacgctgtcagc

SEQ ID NO: 4638064 - DNA, 25 bp, Homo sapien
ttttacgctgtcagccacttcttgt

SEQ ID NO: 4638065 - DNA, 25 bp, Homo sapien
ttaatttttttacgctgtcagccac

SEQ ID NO: 4638066 - DNA, 25 bp, Homo sapien
atttcttatttgaggcctgtgtctc

SEQ ID NO: 4638067 - DNA, 25 bp, Homo sapien
aatgtgacaacgtgatataccttcc

SEQ ID NO: 4638068 - DNA, 25 bp, Homo sapien
tgtgacaacgtgatataccttccag

SEQ ID NO: 4638069 - DNA, 25 bp, Homo sapien
taatttcttatttgaggcctgtgtc

SEQ ID NO: 4638070 - DNA, 25 bp, Homo sapien
caactgatgaacgaatggaaaacca

SEQ ID NO: 4638071 - DNA, 25 bp, Homo sapien
tagacggtggttgcctacaacaggg

SEQ ID NO: 4638072 - DNA, 25 bp, Homo sapien
gcttcagtaagtagagatctccctt

SEQ ID NO: 4638073 - DNA, 25 bp, Homo sapien
caaatgtcttaatccaggtagtccc

SEQ ID NO: 4638074 - DNA, 25 bp, Homo sapien
cttcagtgatgatattaactcaaaa

SEQ ID NO: 4638075 - DNA, 25 bp, Homo sapien
tatacttcagtgatgatattaactc

SEQ ID NO: 4638076 - DNA, 25 bp, Homo sapien
tcttattcgattcacattatacttc

SEQ ID NO: 4638077 - DNA, 25 bp, Homo sapien
tttctttcttattcgattcacatta

SEQ ID NO: 4638078 - DNA, 25 bp, Homo sapien
tcttaatcagaatatccattttcag

SEQ ID NO: 4638079 - DNA, 25 bp, Homo sapien
aatcaaagtcttcatttccaaatac

SEQ ID NO: 4638080 - DNA, 25 bp, Homo sapien
catatttattgtcatttccaggagt

SEQ ID NO: 4638081 - DNA, 25 bp, Homo sapien
tgtttttaagtctccatggcaatca

SEQ ID NO: 4638082 - DNA, 25 bp, Homo sapien
tgcactgccttttcatctagctcca

SEQ ID NO: 4638083 - DNA, 25 bp, Homo sapien
aagataaagcttccttctctgccgt

SEQ ID NO: 4638084 - DNA, 25 bp, Homo sapien
ctgccttttcatctagctccaattt

SEQ ID NO: 4638085 - DNA, 25 bp, Homo sapien
taaagcttccttctctgccgtaaga

SEQ ID NO: 4638086 - DNA, 25 bp, Homo sapien
ttttatttagtgaagccatattatc

SEQ ID NO: 4638087 - DNA, 25 bp, Homo sapien
ttcatttctgagaatttacattcca

SEQ ID NO: 4638088 - DNA, 25 bp, Homo sapien
ttctaattcggttgtaacctcttca

SEQ ID NO: 4638089 - DNA, 25 bp, Homo sapien
ttcctttttatttagtgaagccata

SEQ ID NO: 4638090 - DNA, 25 bp, Homo sapien
gtcatgtaactaaccacagtctagg

SEQ ID NO: 4638091 - DNA, 25 bp, Homo sapien
atggtcatgtaactaaccacagtct

SEQ ID NO: 4638092 - DNA, 25 bp, Homo sapien
atgcataagtcaacagaattcagta

SEQ ID NO: 4638093 - DNA, 25 bp, Homo sapien
catgtaactaaccacagtctaggag

SEQ ID NO: 4638094 - DNA, 25 bp, Homo sapien
tctaaattaaggtggtacctgtgta

SEQ ID NO: 4638095 - DNA, 25 bp, Homo sapien
ccatggtatgtatggaacattccaa

SEQ ID NO: 4638096 - DNA, 25 bp, Homo sapien
tagagtacagtggaacccatcacac

SEQ ID NO: 4638097 - DNA, 25 bp, Homo sapien
ccaagagaatattgagggatgccaa

SEQ ID NO: 4638098 - DNA, 25 bp, Homo sapien
cacagaaggctgagtcccctgggtg

SEQ ID NO: 4638099 - DNA, 25 bp, Homo sapien
gggccacagaaggctgagtcccctg

SEQ ID NO: 4638100 - DNA, 25 bp, Homo sapien
ccctgggtggtaatcctggctgctg

SEQ ID NO: 4638101 - DNA, 25 bp, Homo sapien
tcccctgggtggtaatcctggctgc

SEQ ID NO: 4638102 - DNA, 25 bp, Homo sapien
tactgacaagctgctccgagtgagc

SEQ ID NO: 4638103 - DNA, 25 bp, Homo sapien
acaggccccgggtactgacaagctg

SEQ ID NO: 4638104 - DNA, 25 bp, Homo sapien
cccgggtactgacaagctgctccga

SEQ ID NO: 4638105 - DNA, 25 bp, Homo sapien
caagctgctccgagtgagcttgtct

SEQ ID NO: 4638106 - DNA, 25 bp, Homo sapien
atcagttattctgccctggaggtag

SEQ ID NO: 4638107 - DNA, 25 bp, Homo sapien
gccctggaggtagggccccagtgcc

SEQ ID NO: 4638108 - DNA, 25 bp, Homo sapien
ctgccaatcggggtaaatcagttat

SEQ ID NO: 4638109 - DNA, 25 bp, Homo sapien
aaatcagttattctgccctggaggt

SEQ ID NO: 4638110 - DNA, 25 bp, Homo sapien
aacatagaatcctcctcaagagggc

SEQ ID NO: 4638111 - DNA, 25 bp, Homo sapien
catagaatcctcctcaagagggcct

SEQ ID NO: 4638112 - DNA, 25 bp, Homo sapien
gaacatagaatcctcctcaagaggg

SEQ ID NO: 4638113 - DNA, 25 bp, Homo sapien
tagaatcctcctcaagagggcctgt

SEQ ID NO: 4638114 - DNA, 25 bp, Homo sapien
ctgtggtgaagtggatgggctggtc

SEQ ID NO: 4638115 - DNA, 25 bp, Homo sapien
ggatgggctggtccagctccaaggc

SEQ ID NO: 4638116 - DNA, 25 bp, Homo sapien
agtggatgggctggtccagctccaa

SEQ ID NO: 4638117 - DNA, 25 bp, Homo sapien
aagtggatgggctggtccagctcca

SEQ ID NO: 4638118 - DNA, 25 bp, Homo sapien
tccaggttctgcctgggatgattgg

SEQ ID NO: 4638119 - DNA, 25 bp, Homo sapien
ggtccaggttctgcctgggatgatt

SEQ ID NO: 4638120 - DNA, 25 bp, Homo sapien
tgggtccaggttctgcctgggatga

SEQ ID NO: 4638121 - DNA, 25 bp, Homo sapien
ccaggttctgcctgggatgattggc

SEQ ID NO: 4638122 - DNA, 25 bp, Homo sapien
caaaaccatccttgtgctaccacgg

SEQ ID NO: 4638123 - DNA, 25 bp, Homo sapien
ggcatgatttagttcatgtttgcta

SEQ ID NO: 4638124 - DNA, 25 bp, Homo sapien
aaagtcccaatggtagtttaggcat

SEQ ID NO: 4638125 - DNA, 25 bp, Homo sapien
taccacggatagctggcactagctc

SEQ ID NO: 4638126 - DNA, 25 bp, Homo sapien
gaggccaagcctcttgagaaacttc

SEQ ID NO: 4638127 - DNA, 25 bp, Homo sapien
caacagctcacaccctcagtatgga

SEQ ID NO: 4638128 - DNA, 25 bp, Homo sapien
gaaagaggtaccacaccctgttaga

SEQ ID NO: 4638129 - DNA, 25 bp, Homo sapien
gagaaacttccactatggcagtgca

SEQ ID NO: 4638130 - DNA, 25 bp, Homo sapien
ccacttttgactgggccattggaca

SEQ ID NO: 4638131 - DNA, 25 bp, Homo sapien
attggacaccactgggccatcccag

SEQ ID NO: 4638132 - DNA, 25 bp, Homo sapien
ttttgactgggccattggacaccac

SEQ ID NO: 4638133 - DNA, 25 bp, Homo sapien
ttgttctttcagaatctctgagcaa

SEQ ID NO: 4638134 - DNA, 25 bp, Homo sapien
catggagagcttgggctgcaccaag

SEQ ID NO: 4638135 - DNA, 25 bp, Homo sapien
tgggagtagagggagcgcagggctg

SEQ ID NO: 4638136 - DNA, 25 bp, Homo sapien
cgcagggctggcagggatgctccag

SEQ ID NO: 4638137 - DNA, 25 bp, Homo sapien
ctgcaggatctgagaaagtccagtc

SEQ ID NO: 4638138 - DNA, 25 bp, Homo sapien
tcccatcccaagaccggattttctg

SEQ ID NO: 4638139 - DNA, 25 bp, Homo sapien
caccgtcccatcccaagaccggatt

SEQ ID NO: 4638140 - DNA, 25 bp, Homo sapien
atcccaagaccggattttctgagtc

SEQ ID NO: 4638141 - DNA, 25 bp, Homo sapien
cagcaccgtcccatcccaagaccgg

SEQ ID NO: 4638142 - DNA, 25 bp, Homo sapien
cctggttggctgatgtggtcactcc

SEQ ID NO: 4638143 - DNA, 25 bp, Homo sapien
ccctggttggctgatgtggtcactc

SEQ ID NO: 4638144 - DNA, 25 bp, Homo sapien
accctggttggctgatgtggtcact

SEQ ID NO: 4638145 - DNA, 25 bp, Homo sapien
tcaggtggggtgggctccaggtgca

SEQ ID NO: 4638146 - DNA, 25 bp, Homo sapien
caggtggggtgggctccaggtgcac

SEQ ID NO: 4638147 - DNA, 25 bp, Homo sapien
gaggctatcccactgaccagcccat

SEQ ID NO: 4638148 - DNA, 25 bp, Homo sapien
agaggctatcccactgaccagccca

SEQ ID NO: 4638149 - DNA, 25 bp, Homo sapien
cacagaggctatcccactgaccagc

SEQ ID NO: 4638150 - DNA, 25 bp, Homo sapien
cagaggctatcccactgaccagccc

SEQ ID NO: 4638151 - DNA, 25 bp, Homo sapien
tagttcaaatgaactaagaacagtt

SEQ ID NO: 4638152 - DNA, 25 bp, Homo sapien
caaatgaactaagaacagttagata

SEQ ID NO: 4638153 - DNA, 25 bp, Homo sapien
gttcaaatgaactaagaacagttag

SEQ ID NO: 4638154 - DNA, 25 bp, Homo sapien
tcaaatgaactaagaacagttagat

SEQ ID NO: 4638155 - DNA, 25 bp, Homo sapien
ggtaaggcttgttctgttgacaaat

SEQ ID NO: 4638156 - DNA, 25 bp, Homo sapien
cactggtaaggcttgttctgttgac

SEQ ID NO: 4638157 - DNA, 25 bp, Homo sapien
gccactggtaaggcttgttctgttg

SEQ ID NO: 4638158 - DNA, 25 bp, Homo sapien
ctgaagccactggtaaggcttgttc

SEQ ID NO: 4638159 - DNA, 25 bp, Homo sapien
tgaggatacgttttcccaatctttc

SEQ ID NO: 4638160 - DNA, 25 bp, Homo sapien
cagcagcagaagatgtactatcaca

SEQ ID NO: 4638161 - DNA, 25 bp, Homo sapien
ttgttgggttaatctgccagcagca

SEQ ID NO: 4638162 - DNA, 25 bp, Homo sapien
aaattgctgaggatacgttttccca

SEQ ID NO: 4638163 - DNA, 25 bp, Homo sapien
tcaagttgttttgcttcaacttctt

SEQ ID NO: 4638164 - DNA, 25 bp, Homo sapien
gaacgtcatctagttgctgtacaag

SEQ ID NO: 4638165 - DNA, 25 bp, Homo sapien
catctagttgctgtacaagccacgc

SEQ ID NO: 4638166 - DNA, 25 bp, Homo sapien
tctagttgctgtacaagccacgcat

SEQ ID NO: 4638167 - DNA, 25 bp, Homo sapien
gtcatctagttgctgtacaagccac

SEQ ID NO: 4638168 - DNA, 25 bp, Homo sapien
tcgttaatttttttacgctgtcagc

SEQ ID NO: 4638169 - DNA, 25 bp, Homo sapien
atttttttacgctgtcagccacttc

SEQ ID NO: 4638170 - DNA, 25 bp, Homo sapien
ttttacgctgtcagccacttcttgt

SEQ ID NO: 4638171 - DNA, 25 bp, Homo sapien
ttaatttttttacgctgtcagccac

SEQ ID NO: 4638172 - DNA, 25 bp, Homo sapien
atttcttatttgaggcctgtgtctc

SEQ ID NO: 4638173 - DNA, 25 bp, Homo sapien
aatgtgacaacgtgatataccttcc

SEQ ID NO: 4638174 - DNA, 25 bp, Homo sapien
tgtgacaacgtgatataccttccag

SEQ ID NO: 4638175 - DNA, 25 bp, Homo sapien
taatttcttatttgaggcctgtgtc

SEQ ID NO: 4638176 - DNA, 25 bp, Homo sapien
tccaagggtacatattgtaagagaa

SEQ ID NO: 4638177 - DNA, 25 bp, Homo sapien
tttccaagggtacatattgtaagag

SEQ ID NO: 4638178 - DNA, 25 bp, Homo sapien
ttttccaagggtacatattgtaaga

SEQ ID NO: 4638179 - DNA, 25 bp, Homo sapien
caagggtacatattgtaagagaaaa

SEQ ID NO: 4638180 - DNA, 25 bp, Homo sapien
tagacggtggttgcctacaacaggg

SEQ ID NO: 4638181 - DNA, 25 bp, Homo sapien
caactgatgaacgaatggaaaacca

SEQ ID NO: 4638182 - DNA, 25 bp, Homo sapien
gcttcagtaagtagagatctccctt

SEQ ID NO: 4638183 - DNA, 25 bp, Homo sapien
caaatgtcttaatccaggtagtccc

SEQ ID NO: 4638184 - DNA, 25 bp, Homo sapien
cttcagtgatgatattaactcaaaa

SEQ ID NO: 4638185 - DNA, 25 bp, Homo sapien
tatacttcagtgatgatattaactc

SEQ ID NO: 4638186 - DNA, 25 bp, Homo sapien
tcttattcgattcacattatacttc

SEQ ID NO: 4638187 - DNA, 25 bp, Homo sapien
tttctttcttattcgattcacatta

SEQ ID NO: 4638188 - DNA, 25 bp, Homo sapien
tcttaatcagaatatccattttcag

SEQ ID NO: 4638189 - DNA, 25 bp, Homo sapien
aatcaaagtcttcatttccaaatac

SEQ ID NO: 4638190 - DNA, 25 bp, Homo sapien
catatttattgtcatttccaggagt

SEQ ID NO: 4638191 - DNA, 25 bp, Homo sapien
tgtttttaagtctccatggcaatca

SEQ ID NO: 4638192 - DNA, 25 bp, Homo sapien
tgcactgccttttcatctagctcca

SEQ ID NO: 4638193 - DNA, 25 bp, Homo sapien
aagataaagcttccttctctgccgt

SEQ ID NO: 4638194 - DNA, 25 bp, Homo sapien
taaagcttccttctctgccgtaaga

SEQ ID NO: 4638195 - DNA, 25 bp, Homo sapien
ctgccttttcatctagctccaattt

SEQ ID NO: 4638196 - DNA, 25 bp, Homo sapien
ttttatttagtgaagccatattatc

SEQ ID NO: 4638197 - DNA, 25 bp, Homo sapien
ttctaattcggttgtaacctcttca

SEQ ID NO: 4638198 - DNA, 25 bp, Homo sapien
ttcatttctgagaatttacattcca

SEQ ID NO: 4638199 - DNA, 25 bp, Homo sapien
ttcctttttatttagtgaagccata

SEQ ID NO: 4638200 - DNA, 25 bp, Homo sapien
ggagcttcatgctgatcactgctat

SEQ ID NO: 4638201 - DNA, 25 bp, Homo sapien
gcttgaaataggaattcttatgggt

SEQ ID NO: 4638202 - DNA, 25 bp, Homo sapien
ataggaattcttatgggtgtttggg

SEQ ID NO: 4638203 - DNA, 25 bp, Homo sapien
gactctgggtctcgccttgtaggaa

SEQ ID NO: 4638204 - DNA, 25 bp, Homo sapien
ttctgatgattaacaatggtaagca

SEQ ID NO: 4638205 - DNA, 25 bp, Homo sapien
cgtttgctgtatccatagtttgtga

SEQ ID NO: 4638206 - DNA, 25 bp, Homo sapien
tcttccattctctacgctgtctgtt

SEQ ID NO: 4638207 - DNA, 25 bp, Homo sapien
cagaggatgtactcttatgtaagaa

SEQ ID NO: 4638208 - DNA, 25 bp, Homo sapien
tctaaattaaggtggtacctgtgta

SEQ ID NO: 4638209 - DNA, 25 bp, Homo sapien
ccatggtatgtatggaacattccaa

SEQ ID NO: 4638210 - DNA, 25 bp, Homo sapien
tagagtacagtggaacccatcacac

SEQ ID NO: 4638211 - DNA, 25 bp, Homo sapien
ccaagagaatattgagggatgccaa

SEQ ID NO: 4638212 - DNA, 25 bp, Homo sapien
ttctctttgtttctctagttatttg

SEQ ID NO: 4638213 - DNA, 25 bp, Homo sapien
tctctttgtttctctagttatttgt

SEQ ID NO: 4638214 - DNA, 25 bp, Homo sapien
ctctttgtttctctagttatttgtt

SEQ ID NO: 4638215 - DNA, 25 bp, Homo sapien
gtaagtagacgggagcaagtgttca

SEQ ID NO: 4638216 - DNA, 25 bp, Homo sapien
tatagagaagtaagtagacgggagc

SEQ ID NO: 4638217 - DNA, 25 bp, Homo sapien
gtggattatagagaagtaagtagac

SEQ ID NO: 4638218 - DNA, 25 bp, Homo sapien
gattatagagaagtaagtagacggg

SEQ ID NO: 4638219 - DNA, 25 bp, Homo sapien
tcatggatgcggcagcggttgttct

SEQ ID NO: 4638220 - DNA, 25 bp, Homo sapien
tggggaccagtgagcacgtgctggg

SEQ ID NO: 4638221 - DNA, 25 bp, Homo sapien
ctaagaaaaatcactcattccatgg

SEQ ID NO: 4638222 - DNA, 25 bp, Homo sapien
agtgagcacgtgctggggagggctc

SEQ ID NO: 4638223 - DNA, 25 bp, Homo sapien
agagccactcagacaccacagtgtg

SEQ ID NO: 4638224 - DNA, 25 bp, Homo sapien
ggtgacacaacccaccacaatggga

SEQ ID NO: 4638225 - DNA, 25 bp, Homo sapien
gggctcagcaacagtgacattgtgg

SEQ ID NO: 4638226 - DNA, 25 bp, Homo sapien
agaaaacggtccttcacgcagagcc

SEQ ID NO: 4638227 - DNA, 25 bp, Homo sapien
tactgacaagctgctccgagtgagc

SEQ ID NO: 4638228 - DNA, 25 bp, Homo sapien
ccaaattctaactctggccagggcc

SEQ ID NO: 4638229 - DNA, 25 bp, Homo sapien
acaggccccgggtactgacaagctg

SEQ ID NO: 4638230 - DNA, 25 bp, Homo sapien
caagctgctccgagtgagcttgtct

SEQ ID NO: 4638231 - DNA, 25 bp, Homo sapien
aacatagaatcctcctcaagagggc

SEQ ID NO: 4638232 - DNA, 25 bp, Homo sapien
tagaatcctcctcaagagggcctgt

SEQ ID NO: 4638233 - DNA, 25 bp, Homo sapien
gaacatagaatcctcctcaagaggg

SEQ ID NO: 4638234 - DNA, 25 bp, Homo sapien
catagaatcctcctcaagagggcct

SEQ ID NO: 4638235 - DNA, 25 bp, Homo sapien
ctgtggtgaagtggatgggctggtc

SEQ ID NO: 4638236 - DNA, 25 bp, Homo sapien
ggatgggctggtccagctccaaggc

SEQ ID NO: 4638237 - DNA, 25 bp, Homo sapien
agtggatgggctggtccagctccaa

SEQ ID NO: 4638238 - DNA, 25 bp, Homo sapien
aagtggatgggctggtccagctcca

SEQ ID NO: 4638239 - DNA, 25 bp, Homo sapien
cgactttggtaagaacttgcttgtg

SEQ ID NO: 4638240 - DNA, 25 bp, Homo sapien
ctgtcctccgcgactttggtaagaa

SEQ ID NO: 4638241 - DNA, 25 bp, Homo sapien
cctccgcgactttggtaagaacttg

SEQ ID NO: 4638242 - DNA, 25 bp, Homo sapien
tccgcgactttggtaagaacttgct

SEQ ID NO: 4638243 - DNA, 25 bp, Homo sapien
caaaaccatccttgtgctaccacgg

SEQ ID NO: 4638244 - DNA, 25 bp, Homo sapien
ggcatgatttagttcatgtttgcta

SEQ ID NO: 4638245 - DNA, 25 bp, Homo sapien
aaagtcccaatggtagtttaggcat

SEQ ID NO: 4638246 - DNA, 25 bp, Homo sapien
taccacggatagctggcactagctc

SEQ ID NO: 4638247 - DNA, 25 bp, Homo sapien
ccaccaccaccaacctcccgtccat

SEQ ID NO: 4638248 - DNA, 25 bp, Homo sapien
tccaccaccaccaacctcccgtcca

SEQ ID NO: 4638249 - DNA, 25 bp, Homo sapien
accagggtcccactgacaagggtct

SEQ ID NO: 4638250 - DNA, 25 bp, Homo sapien
aactgactagttcactgaccaggcc

SEQ ID NO: 4638251 - DNA, 25 bp, Homo sapien
tgactaggcaccactgaacaggcat

SEQ ID NO: 4638252 - DNA, 25 bp, Homo sapien
cactgatgaggacatgccctgctga

SEQ ID NO: 4638253 - DNA, 25 bp, Homo sapien
ccacttttgactgggccattggaca

SEQ ID NO: 4638254 - DNA, 25 bp, Homo sapien
ttttgactgggccattggacaccac

SEQ ID NO: 4638255 - DNA, 25 bp, Homo sapien
attggacaccactgggccatcccag

SEQ ID NO: 4638256 - DNA, 25 bp, Homo sapien
ttgttctttcagaatctctgagcaa

SEQ ID NO: 4638257 - DNA, 25 bp, Homo sapien
agcctggaccgagacctgcccagtg

SEQ ID NO: 4638258 - DNA, 25 bp, Homo sapien
acatcacccgaccagggtccagaga

SEQ ID NO: 4638259 - DNA, 25 bp, Homo sapien
ctgacacttgaaaagcgggacctgg

SEQ ID NO: 4638260 - DNA, 25 bp, Homo sapien
ctgcccagtgcacactgagagtgca

SEQ ID NO: 4638261 - DNA, 25 bp, Homo sapien
tcccatcccaagaccggattttctg

SEQ ID NO: 4638262 - DNA, 25 bp, Homo sapien
caccgtcccatcccaagaccggatt

SEQ ID NO: 4638263 - DNA, 25 bp, Homo sapien
atcccaagaccggattttctgagtc

SEQ ID NO: 4638264 - DNA, 25 bp, Homo sapien
cagcaccgtcccatcccaagaccgg

SEQ ID NO: 4638265 - DNA, 25 bp, Homo sapien
cctggttggctgatgtggtcactcc

SEQ ID NO: 4638266 - DNA, 25 bp, Homo sapien
gaggctatcccactgaccagcccat

SEQ ID NO: 4638267 - DNA, 25 bp, Homo sapien
cccagtagtgccctggcactggtgg

SEQ ID NO: 4638268 - DNA, 25 bp, Homo sapien
gggctcaggccctatgacccaacgg

SEQ ID NO: 4638269 - DNA, 25 bp, Homo sapien
ccaaaccacaatagcagttctgggt

SEQ ID NO: 4638270 - DNA, 25 bp, Homo sapien
cttgctactcccagatttcttctgg

SEQ ID NO: 4638271 - DNA, 25 bp, Homo sapien
tggtcattaagcactttgagccatt

SEQ ID NO: 4638272 - DNA, 25 bp, Homo sapien
gctactcccagatttcttctggtca

SEQ ID NO: 4638273 - DNA, 25 bp, Homo sapien
tcttgctactcccagatttcttctg

SEQ ID NO: 4638274 - DNA, 25 bp, Homo sapien
cccaggtaaggacagtgtgctaccc

SEQ ID NO: 4638275 - DNA, 25 bp, Homo sapien
gtcccccaggtaaggacagtgtgct

SEQ ID NO: 4638276 - DNA, 25 bp, Homo sapien
tatgcatcacgaactctgatctgga

SEQ ID NO: 4638277 - DNA, 25 bp, Homo sapien
agtgggtgagtgctatgcatcacga

SEQ ID NO: 4638278 - DNA, 25 bp, Homo sapien
ggactcccttgtagagcacctgaga

SEQ ID NO: 4638279 - DNA, 25 bp, Homo sapien
tgcggtgcctacgttagcatctgtg

SEQ ID NO: 4638280 - DNA, 25 bp, Homo sapien
taggatgcatgatgggctcccactg

SEQ ID NO: 4638281 - DNA, 25 bp, Homo sapien
tgtgcctaggatgcatgatgggctc

SEQ ID NO: 4638282 - DNA, 25 bp, Homo sapien
aaaagaggtttcattctgcagaaag

SEQ ID NO: 4638283 - DNA, 25 bp, Homo sapien
tctgaagccaggaaggggtaccaaa

SEQ ID NO: 4638284 - DNA, 25 bp, Homo sapien
ctggatggaaaagaggtttcattct

SEQ ID NO: 4638285 - DNA, 25 bp, Homo sapien
gtttggcttctttctgaagccagga

SEQ ID NO: 4638286 - DNA, 25 bp, Homo sapien
ccagcctaatctcagaatggacaaa

SEQ ID NO: 4638287 - DNA, 25 bp, Homo sapien
aaaaggctcactgccctaacagcaa

SEQ ID NO: 4638288 - DNA, 25 bp, Homo sapien
tgccctaacagcaaccaccaaacag

SEQ ID NO: 4638289 - DNA, 25 bp, Homo sapien
atggacaaaaggctcactgccctaa

SEQ ID NO: 4638290 - DNA, 25 bp, Homo sapien
ccagaacatgacacgtttctctgaa

SEQ ID NO: 4638291 - DNA, 25 bp, Homo sapien
ttagccctcccagaacatgacacgt

SEQ ID NO: 4638292 - DNA, 25 bp, Homo sapien
acctcttgctgttttcctttatggt

SEQ ID NO: 4638293 - DNA, 25 bp, Homo sapien
ctgaatgtggctgatgtccagggcc

SEQ ID NO: 4638294 - DNA, 25 bp, Homo sapien
tgtgatcctccagccccataggcct

SEQ ID NO: 4638295 - DNA, 25 bp, Homo sapien
ctgccctgtgatcctccagccccat

SEQ ID NO: 4638296 - DNA, 25 bp, Homo sapien
gatcctccagccccataggccttac

SEQ ID NO: 4638297 - DNA, 25 bp, Homo sapien
gccctgtgatcctccagccccatag

SEQ ID NO: 4638298 - DNA, 25 bp, Homo sapien
gggacctcccaattcccatggaagc

SEQ ID NO: 4638299 - DNA, 25 bp, Homo sapien
aattcccatggaagcccccacagct

SEQ ID NO: 4638300 - DNA, 25 bp, Homo sapien
tggaagcccccacagctctggattg

SEQ ID NO: 4638301 - DNA, 25 bp, Homo sapien
catggaagcccccacagctctggat

SEQ ID NO: 4638302 - DNA, 25 bp, Homo sapien
cagggcttagcccagtgggtgttca

SEQ ID NO: 4638303 - DNA, 25 bp, Homo sapien
cgttatatgcagatatgggtgccct

SEQ ID NO: 4638304 - DNA, 25 bp, Homo sapien
cagaaattcaggaccacgttatatg

SEQ ID NO: 4638305 - DNA, 25 bp, Homo sapien
caggaccacgttatatgcagatatg

SEQ ID NO: 4638306 - DNA, 25 bp, Homo sapien
cagatctgctggtgctgttacacta

SEQ ID NO: 4638307 - DNA, 25 bp, Homo sapien
tctgctggtgctgttacactatgag

SEQ ID NO: 4638308 - DNA, 25 bp, Homo sapien
ctggtgctgttacactatgagggca

SEQ ID NO: 4638309 - DNA, 25 bp, Homo sapien
tgctgttacactatgagggcactga

SEQ ID NO: 4638310 - DNA, 25 bp, Homo sapien
ctcaggagtgaggtagtacaggaag

SEQ ID NO: 4638311 - DNA, 25 bp, Homo sapien
tcaggagtgaggtagtacaggaagt

SEQ ID NO: 4638312 - DNA, 25 bp, Homo sapien
taaagttgtgcaccaggtcgcaggc

SEQ ID NO: 4638313 - DNA, 25 bp, Homo sapien
aaagttgtgcaccaggtcgcaggcc

SEQ ID NO: 4638314 - DNA, 25 bp, Homo sapien
ctaaagttgtgcaccaggtcgcagg

SEQ ID NO: 4638315 - DNA, 25 bp, Homo sapien
cacaaacgcatcactgaagtcgaaa

SEQ ID NO: 4638316 - DNA, 25 bp, Homo sapien
gcacaaacgcatcactgaagtcgaa

SEQ ID NO: 4638317 - DNA, 25 bp, Homo sapien
agcacaaacgcatcactgaagtcga

SEQ ID NO: 4638318 - DNA, 25 bp, Homo sapien
caaacgcatcactgaagtcgaaaat

SEQ ID NO: 4638319 - DNA, 25 bp, Homo sapien
gaattaagatcccggagaagcccac

SEQ ID NO: 4638320 - DNA, 25 bp, Homo sapien
cctgaattaagatcccggagaagcc

SEQ ID NO: 4638321 - DNA, 25 bp, Homo sapien
ctcctgaattaagatcccggagaag

SEQ ID NO: 4638322 - DNA, 25 bp, Homo sapien
ctgaattaagatcccggagaagccc

SEQ ID NO: 4638323 - DNA, 25 bp, Homo sapien
aaaatatatatgactgtcccttcct

SEQ ID NO: 4638324 - DNA, 25 bp, Homo sapien
gacaagaaccctgaacacagtagct

SEQ ID NO: 4638325 - DNA, 25 bp, Homo sapien
atatgactgtcccttcctttatcca

SEQ ID NO: 4638326 - DNA, 25 bp, Homo sapien
tggagacaagaaccctgaacacagt

SEQ ID NO: 4638327 - DNA, 25 bp, Homo sapien
ccatgtatatgtccttgtctgacaa

SEQ ID NO: 4638328 - DNA, 25 bp, Homo sapien
gaccacgattggcactcatgaagat

SEQ ID NO: 4638329 - DNA, 25 bp, Homo sapien
ccagcctccatgtatatgtccttgt

SEQ ID NO: 4638330 - DNA, 25 bp, Homo sapien
gtctgacaactcctccttattttca

SEQ ID NO: 4638331 - DNA, 25 bp, Homo sapien
gcccatgcattgagtccctcaggag

SEQ ID NO: 4638332 - DNA, 25 bp, Homo sapien
cattgagtccctcaggagaatggga

SEQ ID NO: 4638333 - DNA, 25 bp, Homo sapien
ccatgcattgagtccctcaggagaa

SEQ ID NO: 4638334 - DNA, 25 bp, Homo sapien
tgcattgagtccctcaggagaatgg

SEQ ID NO: 4638335 - DNA, 25 bp, Homo sapien
tggcagcaaggcaggcttgggtctc

SEQ ID NO: 4638336 - DNA, 25 bp, Homo sapien
aagtggcagcaaggcaggcttgggt

SEQ ID NO: 4638337 - DNA, 25 bp, Homo sapien
gtggcagcaaggcaggcttgggtct

SEQ ID NO: 4638338 - DNA, 25 bp, Homo sapien
ctaagtggcagcaaggcaggcttgg

SEQ ID NO: 4638339 - DNA, 25 bp, Homo sapien
tgaggggtaccaggatccagtagag

SEQ ID NO: 4638340 - DNA, 25 bp, Homo sapien
cagaattgccgtccctcagaactct

SEQ ID NO: 4638341 - DNA, 25 bp, Homo sapien
cagcactcccagtgtctgggtgtct

SEQ ID NO: 4638342 - DNA, 25 bp, Homo sapien
gtcttcagaattgccgtccctcaga

SEQ ID NO: 4638343 - DNA, 25 bp, Homo sapien
aactcttgcaccacgaggtggcagc

SEQ ID NO: 4638344 - DNA, 25 bp, Homo sapien
aggaggtgtggtctcgacaccaaat

SEQ ID NO: 4638345 - DNA, 25 bp, Homo sapien
agcagcctcgtggagtaaaagaaat

SEQ ID NO: 4638346 - DNA, 25 bp, Homo sapien
tctcgacaccaaatgcctgctgggt

SEQ ID NO: 4638347 - DNA, 25 bp, Homo sapien
tgtcactaattctccaagcagcctc

SEQ ID NO: 4638348 - DNA, 25 bp, Homo sapien
tgactccatgggatagacgataagg

SEQ ID NO: 4638349 - DNA, 25 bp, Homo sapien
taaggcgagtgaaagtcttaagaac

SEQ ID NO: 4638350 - DNA, 25 bp, Homo sapien
ggcgagtgaaagtcttaagaacaaa

SEQ ID NO: 4638351 - DNA, 25 bp, Homo sapien
gatagacgataaggtgggaatcaga

SEQ ID NO: 4638352 - DNA, 25 bp, Homo sapien
gccaggtacctctgagagacagcac

SEQ ID NO: 4638353 - DNA, 25 bp, Homo sapien
tgtacagtttcagtcacccagtaac

SEQ ID NO: 4638354 - DNA, 25 bp, Homo sapien
ccctgacagcgcttccagcaatggg

SEQ ID NO: 4638355 - DNA, 25 bp, Homo sapien
gggccagacatctcatgatcaaagt

SEQ ID NO: 4638356 - DNA, 25 bp, Homo sapien
tccacgatgagatatgtgtgaagac

SEQ ID NO: 4638357 - DNA, 25 bp, Homo sapien
cctggggtttatctggcaaaggcat

SEQ ID NO: 4638358 - DNA, 25 bp, Homo sapien
cagtgccatgcctaacacaagatgg

SEQ ID NO: 4638359 - DNA, 25 bp, Homo sapien
cacgatgagatatgtgtgaagacag

SEQ ID NO: 4638360 - DNA, 25 bp, Homo sapien
gaaagacattaccagccacttcgag

SEQ ID NO: 4638361 - DNA, 25 bp, Homo sapien
gtcccaactgttgcaatggagctgg

SEQ ID NO: 4638362 - DNA, 25 bp, Homo sapien
gactataggcgccaatcatcatgcc

SEQ ID NO: 4638363 - DNA, 25 bp, Homo sapien
actagctgaggtttctataggcaca

SEQ ID NO: 4638364 - DNA, 25 bp, Homo sapien
gtttctacagtcaggtgatcaggaa

SEQ ID NO: 4638365 - DNA, 25 bp, Homo sapien
tctgggtaagtctcttgctctcctt

SEQ ID NO: 4638366 - DNA, 25 bp, Homo sapien
tgcagcacaggtgaacagttcttct

SEQ ID NO: 4638367 - DNA, 25 bp, Homo sapien
tcttttgtgcccaagaggacacaat

SEQ ID NO: 4638368 - DNA, 25 bp, Homo sapien
ctcctaggacaagcctgtgggcacc

SEQ ID NO: 4638369 - DNA, 25 bp, Homo sapien
tcaggcagcagggttttttccccac

SEQ ID NO: 4638370 - DNA, 25 bp, Homo sapien
cttggcaggactgagacaccgggct

SEQ ID NO: 4638371 - DNA, 25 bp, Homo sapien
cctgggcatggagggaaccagtccc

SEQ ID NO: 4638372 - DNA, 25 bp, Homo sapien
tccccttgctttggttccttggcag

SEQ ID NO: 4638373 - DNA, 25 bp, Homo sapien
gacacagagccaccacgcgcggtag

SEQ ID NO: 4638374 - DNA, 25 bp, Homo sapien
cagtctttcacctagatacattttc

SEQ ID NO: 4638375 - DNA, 25 bp, Homo sapien
ctcaacaggctgtattttcagacta

SEQ ID NO: 4638376 - DNA, 25 bp, Homo sapien
gctatgatgtagttgatcttcagca

SEQ ID NO: 4638377 - DNA, 25 bp, Homo sapien
ttccagtctttcacctagatacatt

SEQ ID NO: 4638378 - DNA, 25 bp, Homo sapien
gatcgcccatgtaatgtttaacttg

SEQ ID NO: 4638379 - DNA, 25 bp, Homo sapien
tcttgatcgcccatgtaatgtttaa

SEQ ID NO: 4638380 - DNA, 25 bp, Homo sapien
cttgatcgcccatgtaatgtttaac

SEQ ID NO: 4638381 - DNA, 25 bp, Homo sapien
gcccatgtaatgtttaacttgtata

SEQ ID NO: 4638382 - DNA, 25 bp, Homo sapien
tggacgacacttccattgacacgga

SEQ ID NO: 4638383 - DNA, 25 bp, Homo sapien
ccatatagacagtgatctggacgac

SEQ ID NO: 4638384 - DNA, 25 bp, Homo sapien
cagtgatctggacgacacttccatt

SEQ ID NO: 4638385 - DNA, 25 bp, Homo sapien
tagacagtgatctggacgacacttc

SEQ ID NO: 4638386 - DNA, 25 bp, Homo sapien
tccacgatatgtatgcactattttt

SEQ ID NO: 4638387 - DNA, 25 bp, Homo sapien
ttccacgatatgtatgcactatttt

SEQ ID NO: 4638388 - DNA, 25 bp, Homo sapien
ttcctctttcttatacagctcaatt

SEQ ID NO: 4638389 - DNA, 25 bp, Homo sapien
aacagaactgtttctactcctgtag

SEQ ID NO: 4638390 - DNA, 25 bp, Homo sapien
gaaacagaactgtttctactcctgt

SEQ ID NO: 4638391 - DNA, 25 bp, Homo sapien
cagaactgtttctactcctgtagac

SEQ ID NO: 4638392 - DNA, 25 bp, Homo sapien
gaatgcccagtaaggctgaaatttt

SEQ ID NO: 4638393 - DNA, 25 bp, Homo sapien
ttttgcttccagaatgcccagtaag

SEQ ID NO: 4638394 - DNA, 25 bp, Homo sapien
ttccagaatgcccagtaaggctgaa

SEQ ID NO: 4638395 - DNA, 25 bp, Homo sapien
ttgcttccagaatgcccagtaaggc

SEQ ID NO: 4638396 - DNA, 25 bp, Homo sapien
gactgaggcctcctccaaagggaga

SEQ ID NO: 4638397 - DNA, 25 bp, Homo sapien
ataaatgcgcatcctgaagagagct

SEQ ID NO: 4638398 - DNA, 25 bp, Homo sapien
agggagaaataaatgcgcatcctga

SEQ ID NO: 4638399 - DNA, 25 bp, Homo sapien
agccagatgtgcctttcagtccttg

SEQ ID NO: 4638400 - DNA, 25 bp, Homo sapien
ctcacagggttgttctgaagattag

SEQ ID NO: 4638401 - DNA, 25 bp, Homo sapien
tcacagggttgttctgaagattaga

SEQ ID NO: 4638402 - DNA, 25 bp, Homo sapien
gtttagacaggctacaacgtcttgg

SEQ ID NO: 4638403 - DNA, 25 bp, Homo sapien
taacctcccaagtttagacaggcta

SEQ ID NO: 4638404 - DNA, 25 bp, Homo sapien
ccaagtttagacaggctacaacgtc

SEQ ID NO: 4638405 - DNA, 25 bp, Homo sapien
aacacctaataaagagagcatcatg

SEQ ID NO: 4638406 - DNA, 25 bp, Homo sapien
ctcttgttggtagtaaatggttgcc

SEQ ID NO: 4638407 - DNA, 25 bp, Homo sapien
tcttgttggtagtaaatggttgcca

SEQ ID NO: 4638408 - DNA, 25 bp, Homo sapien
tacagacgactgagagagtgatcac

SEQ ID NO: 4638409 - DNA, 25 bp, Homo sapien
tagtagcagtaaagagaggtgaccc

SEQ ID NO: 4638410 - DNA, 25 bp, Homo sapien
tacagttcccacgtgagaaagcaca

SEQ ID NO: 4638411 - DNA, 25 bp, Homo sapien
tcatactcagggatgccaacgatgt

SEQ ID NO: 4638412 - DNA, 25 bp, Homo sapien
ggttagagtgatgcaatccaaatag

SEQ ID NO: 4638413 - DNA, 25 bp, Homo sapien
gatgcaatccaaatagatggctttc

SEQ ID NO: 4638414 - DNA, 25 bp, Homo sapien
gagtgatgcaatccaaatagatggc

SEQ ID NO: 4638415 - DNA, 25 bp, Homo sapien
aatccaaatagatggctttcttctg

SEQ ID NO: 4638416 - DNA, 25 bp, Homo sapien
cccaattgcccactatgttaccagg

SEQ ID NO: 4638417 - DNA, 25 bp, Homo sapien
gatagcaacgctacccacagtgcaa

SEQ ID NO: 4638418 - DNA, 25 bp, Homo sapien
ggctcttggtaagtaatctggacat

SEQ ID NO: 4638419 - DNA, 25 bp, Homo sapien
tctcggcaaccaaaacaatcaatga

SEQ ID NO: 4638420 - DNA, 25 bp, Homo sapien
taggcccatgccgaaggcctggccg

SEQ ID NO: 4638421 - DNA, 25 bp, Homo sapien
gatgagcgccctgcgtgtatcccat

SEQ ID NO: 4638422 - DNA, 25 bp, Homo sapien
aggcctggccgctctgatgagcgcc

SEQ ID NO: 4638423 - DNA, 25 bp, Homo sapien
ggtcgtatatctgtaggcccatgcc

SEQ ID NO: 4638424 - DNA, 25 bp, Homo sapien
agggagcgccgtgggccactgggcc

SEQ ID NO: 4638425 - DNA, 25 bp, Homo sapien
gccggagcccgagggagcgccgtgg

SEQ ID NO: 4638426 - DNA, 25 bp, Homo sapien
gagcccgagggagcgccgtgggcca

SEQ ID NO: 4638427 - DNA, 25 bp, Homo sapien
tagtaagggagatattcaggggccg

SEQ ID NO: 4638428 - DNA, 25 bp, Homo sapien
acccaaacacccagaggggagatca

SEQ ID NO: 4638429 - DNA, 25 bp, Homo sapien
caaacacccagaggggagatcatgt

SEQ ID NO: 4638430 - DNA, 25 bp, Homo sapien
acacccagaggggagatcatgtgtg

SEQ ID NO: 4638431 - DNA, 25 bp, Homo sapien
ccaaacacccagaggggagatcatg

SEQ ID NO: 4638432 - DNA, 25 bp, Homo sapien
gttgagactgagaggatgacgagca

SEQ ID NO: 4638433 - DNA, 25 bp, Homo sapien
tgagactgagaggatgacgagcaga

SEQ ID NO: 4638434 - DNA, 25 bp, Homo sapien
cagttgagactgagaggatgacgag

SEQ ID NO: 4638435 - DNA, 25 bp, Homo sapien
agcagttgagactgagaggatgacg

SEQ ID NO: 4638436 - DNA, 25 bp, Homo sapien
gaaagaagtagtcaaggccaggtaa

SEQ ID NO: 4638437 - DNA, 25 bp, Homo sapien
cataacaagtgtactgaacatggcc

SEQ ID NO: 4638438 - DNA, 25 bp, Homo sapien
taagagatccctgctgtacgatgcc

SEQ ID NO: 4638439 - DNA, 25 bp, Homo sapien
gaccaaggcacagtgtaaacagcga

SEQ ID NO: 4638440 - DNA, 25 bp, Homo sapien
tgctgatcggtgaaatagccagtat

SEQ ID NO: 4638441 - DNA, 25 bp, Homo sapien
ccagataagatttgaatgggaacac

SEQ ID NO: 4638442 - DNA, 25 bp, Homo sapien
cagaaccaaattgactggctagagt

SEQ ID NO: 4638443 - DNA, 25 bp, Homo sapien
ggaacatcgaaacctaattcaagga

SEQ ID NO: 4638444 - DNA, 25 bp, Homo sapien
ctgataacggattctttcactgtta

SEQ ID NO: 4638445 - DNA, 25 bp, Homo sapien
tcttctcttacaataagaagaccag

SEQ ID NO: 4638446 - DNA, 25 bp, Homo sapien
ggatattctgcctcactatcagttt

SEQ ID NO: 4638447 - DNA, 25 bp, Homo sapien
cctatgttctgataacggattcttt

SEQ ID NO: 4638448 - DNA, 25 bp, Homo sapien
tgacccagagtgtaaaggtcttgag

SEQ ID NO: 4638449 - DNA, 25 bp, Homo sapien
cagccatcttggaactgacccagag

SEQ ID NO: 4638450 - DNA, 25 bp, Homo sapien
tcagtattacctgaatacaagcctt

SEQ ID NO: 4638451 - DNA, 25 bp, Homo sapien
aaggtcttgaggattctcttcatca

SEQ ID NO: 4638452 - DNA, 25 bp, Homo sapien
tttctggagctttaaaaggaatcat

SEQ ID NO: 4638453 - DNA, 25 bp, Homo sapien
atttctggagctttaaaaggaatca

SEQ ID NO: 4638454 - DNA, 25 bp, Homo sapien
catattaattgcagagtagggcttc

SEQ ID NO: 4638455 - DNA, 25 bp, Homo sapien
gaaggatggattatgggtttttcaa

SEQ ID NO: 4638456 - DNA, 25 bp, Homo sapien
gtttttcaatttgcatcaggcatat

SEQ ID NO: 4638457 - DNA, 25 bp, Homo sapien
caacagagaaggatggattatgggt

SEQ ID NO: 4638458 - DNA, 25 bp, Homo sapien
tggtccttacagatctaaatttcta

SEQ ID NO: 4638459 - DNA, 25 bp, Homo sapien
gatggtccttacagatctaaatttc

SEQ ID NO: 4638460 - DNA, 25 bp, Homo sapien
atggtccttacagatctaaatttct

SEQ ID NO: 4638461 - DNA, 25 bp, Homo sapien
attccattaaaggtcgtcttcttgg

SEQ ID NO: 4638462 - DNA, 25 bp, Homo sapien
cagcgtccatcaaatattccattaa

SEQ ID NO: 4638463 - DNA, 25 bp, Homo sapien
ttcagcgtccatcaaatattccatt

SEQ ID NO: 4638464 - DNA, 25 bp, Homo sapien
aatattccattaaaggtcgtcttct

SEQ ID NO: 4638465 - DNA, 25 bp, Homo sapien
acagaaagattgtaagaggtcagca

SEQ ID NO: 4638466 - DNA, 25 bp, Homo sapien
cagaaagattgtaagaggtcagcaa

SEQ ID NO: 4638467 - DNA, 25 bp, Homo sapien
aaatattactcacagaatcagtagc

SEQ ID NO: 4638468 - DNA, 25 bp, Homo sapien
tattactcacagaatcagtagcatt

SEQ ID NO: 4638469 - DNA, 25 bp, Homo sapien
ttactcacagaatcagtagcattca

SEQ ID NO: 4638470 - DNA, 25 bp, Homo sapien
aatattactcacagaatcagtagca

SEQ ID NO: 4638471 - DNA, 25 bp, Homo sapien
catcggaaaaagctccaaaatgggc

SEQ ID NO: 4638472 - DNA, 25 bp, Homo sapien
taagccatcggaaaaagctccaaaa

SEQ ID NO: 4638473 - DNA, 25 bp, Homo sapien
taaaataagccatcggaaaaagctc

SEQ ID NO: 4638474 - DNA, 25 bp, Homo sapien
ggtgacacttctggcagctctaggc

SEQ ID NO: 4638475 - DNA, 25 bp, Homo sapien
ttgccagatcgctaatcagttttgt

SEQ ID NO: 4638476 - DNA, 25 bp, Homo sapien
gtttgccagatcgctaatcagtttt

SEQ ID NO: 4638477 - DNA, 25 bp, Homo sapien
cagcacaatatttacacagatcatt

SEQ ID NO: 4638478 - DNA, 25 bp, Homo sapien
agcacaatatttacacagatcatta

SEQ ID NO: 4638479 - DNA, 25 bp, Homo sapien
tctgcggtttgttagcagcaatgac

SEQ ID NO: 4638480 - DNA, 25 bp, Homo sapien
tctgtttgcattctgcggtttgtta

SEQ ID NO: 4638481 - DNA, 25 bp, Homo sapien
gcattctgcggtttgttagcagcaa

SEQ ID NO: 4638482 - DNA, 25 bp, Homo sapien
ttgcattctgcggtttgttagcagc

SEQ ID NO: 4638483 - DNA, 25 bp, Homo sapien
tgtttccaagttcaacgtcctgcag

SEQ ID NO: 4638484 - DNA, 25 bp, Homo sapien
ctctacttctctggtcgctaagcaa

SEQ ID NO: 4638485 - DNA, 25 bp, Homo sapien
cttctctggtcgctaagcaactgac

SEQ ID NO: 4638486 - DNA, 25 bp, Homo sapien
ttccaagttcaacgtcctgcagcaa

SEQ ID NO: 4638487 - DNA, 25 bp, Homo sapien
gctgttaacccttggagcctcggag

SEQ ID NO: 4638488 - DNA, 25 bp, Homo sapien
acaagacattccagccccatgaggg

SEQ ID NO: 4638489 - DNA, 25 bp, Homo sapien
tgttagggaaataggcaccgcccac

SEQ ID NO: 4638490 - DNA, 25 bp, Homo sapien
caggagggtgcatcctctgagagct

SEQ ID NO: 4638491 - DNA, 25 bp, Homo sapien
aggacagcagttggatcctgtccct

SEQ ID NO: 4638492 - DNA, 25 bp, Homo sapien
ggacagcagttggatcctgtccctc

SEQ ID NO: 4638493 - DNA, 25 bp, Homo sapien
gagaaacttgatgatcaggctctga

SEQ ID NO: 4638494 - DNA, 25 bp, Homo sapien
ctgataatgaatccagagggcaatg

SEQ ID NO: 4638495 - DNA, 25 bp, Homo sapien
gaaagcacatgtttgagagggctgt

SEQ ID NO: 4638496 - DNA, 25 bp, Homo sapien
caaagcgccgatgagctgttctgga

SEQ ID NO: 4638497 - DNA, 25 bp, Homo sapien
gagctcgggccactgtatcaggtcc

SEQ ID NO: 4638498 - DNA, 25 bp, Homo sapien
agctcgggccactgtatcaggtcca

SEQ ID NO: 4638499 - DNA, 25 bp, Homo sapien
aaatatgatgcgaggaagatgagag

SEQ ID NO: 4638500 - DNA, 25 bp, Homo sapien
aagatccaggaaatatgatgcgagg

SEQ ID NO: 4638501 - DNA, 25 bp, Homo sapien
cagctgtgagttgaagagccgatgg

SEQ ID NO: 4638502 - DNA, 25 bp, Homo sapien
aagagccgatgggcagcaggcagac

SEQ ID NO: 4638503 - DNA, 25 bp, Homo sapien
tcagctgtgagttgaagagccgatg

SEQ ID NO: 4638504 - DNA, 25 bp, Homo sapien
ctgtgagttgaagagccgatgggca

SEQ ID NO: 4638505 - DNA, 25 bp, Homo sapien
ggtgttcttgtctttccgctctgtc

SEQ ID NO: 4638506 - DNA, 25 bp, Homo sapien
gggagccagtggagggtcacctcgc

SEQ ID NO: 4638507 - DNA, 25 bp, Homo sapien
gccagtggagggtcacctcgccctg

SEQ ID NO: 4638508 - DNA, 25 bp, Homo sapien
ggttggatgggagccagtggagggt

SEQ ID NO: 4638509 - DNA, 25 bp, Homo sapien
acatgccccacagtgcccactcttt

SEQ ID NO: 4638510 - DNA, 25 bp, Homo sapien
cactctttcagctggggcaatgctc

SEQ ID NO: 4638511 - DNA, 25 bp, Homo sapien
tccagccttcttttcttgacctgaa

SEQ ID NO: 4638512 - DNA, 25 bp, Homo sapien
tcctctaggccattcacttcctcca

SEQ ID NO: 4638513 - DNA, 25 bp, Homo sapien
gaagaccaccggcagtggaccacag

SEQ ID NO: 4638514 - DNA, 25 bp, Homo sapien
tgttgggaggaccagcggtagagca

SEQ ID NO: 4638515 - DNA, 25 bp, Homo sapien
aggagagagctgaagaccaccggca

SEQ ID NO: 4638516 - DNA, 25 bp, Homo sapien
agctgaagaccaccggcagtggacc

SEQ ID NO: 4638517 - DNA, 25 bp, Homo sapien
cttggttcaagtggcaccagccaaa

SEQ ID NO: 4638518 - DNA, 25 bp, Homo sapien
gacttggttcaagtggcaccagcca

SEQ ID NO: 4638519 - DNA, 25 bp, Homo sapien
tctggacttggttcaagtggcacca

SEQ ID NO: 4638520 - DNA, 25 bp, Homo sapien
tgcatctggacttggttcaagtggc

SEQ ID NO: 4638521 - DNA, 25 bp, Homo sapien
gagccccatgccccgatccagctgt

SEQ ID NO: 4638522 - DNA, 25 bp, Homo sapien
cgagccccatgccccgatccagctg

SEQ ID NO: 4638523 - DNA, 25 bp, Homo sapien
tgcctgccccattgtttgagaccca

SEQ ID NO: 4638524 - DNA, 25 bp, Homo sapien
gccccattgtttgagacccagtcag

SEQ ID NO: 4638525 - DNA, 25 bp, Homo sapien
cccattgtttgagacccagtcaggc

SEQ ID NO: 4638526 - DNA, 25 bp, Homo sapien
aactgcctgccccattgtttgagac

SEQ ID NO: 4638527 - DNA, 25 bp, Homo sapien
gcaatggtccttatcttgtccacaa

SEQ ID NO: 4638528 - DNA, 25 bp, Homo sapien
caatggtccttatcttgtccacaat

SEQ ID NO: 4638529 - DNA, 25 bp, Homo sapien
aatggtccttatcttgtccacaatt

SEQ ID NO: 4638530 - DNA, 25 bp, Homo sapien
cagtatgctatatactgtcaccaga

SEQ ID NO: 4638531 - DNA, 25 bp, Homo sapien
tgagtgagaatcacaactgcctttc

SEQ ID NO: 4638532 - DNA, 25 bp, Homo sapien
gcctggttgacacgacttttaagga

SEQ ID NO: 4638533 - DNA, 25 bp, Homo sapien
tagagtcttatcaacttagggagga

SEQ ID NO: 4638534 - DNA, 25 bp, Homo sapien
tcactgataggtaagatgaagtccc

SEQ ID NO: 4638535 - DNA, 25 bp, Homo sapien
ggtctttgccatgcagatgggcaaa

SEQ ID NO: 4638536 - DNA, 25 bp, Homo sapien
gcacaccttttttgtcaggttggtg

SEQ ID NO: 4638537 - DNA, 25 bp, Homo sapien
ccttggcacaccttttttgtcaggt

SEQ ID NO: 4638538 - DNA, 25 bp, Homo sapien
ggtggagcataacgatttgaggcac

SEQ ID NO: 4638539 - DNA, 25 bp, Homo sapien
cataacgatttgaggcactgcgaca

SEQ ID NO: 4638540 - DNA, 25 bp, Homo sapien
gaggcactgcgacaatgcagaatgg

SEQ ID NO: 4638541 - DNA, 25 bp, Homo sapien
ttaaagagcgggtggagcataacga

SEQ ID NO: 4638542 - DNA, 25 bp, Homo sapien
tgactctaaggatcctgaacacatg

SEQ ID NO: 4638543 - DNA, 25 bp, Homo sapien
actctaaggatcctgaacacatgat

SEQ ID NO: 4638544 - DNA, 25 bp, Homo sapien
tatgactctaaggatcctgaacaca

SEQ ID NO: 4638545 - DNA, 25 bp, Homo sapien
ttatgactctaaggatcctgaacac

SEQ ID NO: 4638546 - DNA, 25 bp, Homo sapien
ggaaatgctgttatcacaggattca

SEQ ID NO: 4638547 - DNA, 25 bp, Homo sapien
tattgagtctgcataggaaatgctg

SEQ ID NO: 4638548 - DNA, 25 bp, Homo sapien
ttacgttctgtacatgcaaacttcc

SEQ ID NO: 4638549 - DNA, 25 bp, Homo sapien
caatgtcgaattcctgcatagagaa

SEQ ID NO: 4638550 - DNA, 25 bp, Homo sapien
cattgagactaattttgtgacttgt

SEQ ID NO: 4638551 - DNA, 25 bp, Homo sapien
aagtttatcgagtttaatattatgc

SEQ ID NO: 4638552 - DNA, 25 bp, Homo sapien
gacttgtgaattatttaggaatatg

SEQ ID NO: 4638553 - DNA, 25 bp, Homo sapien
tatgaaaatttgtcacggcttgatc

SEQ ID NO: 4638554 - DNA, 25 bp, Homo sapien
tgtaagctctgctaggtgcagtggc

SEQ ID NO: 4638555 - DNA, 25 bp, Homo sapien
ctgtaagctctgctaggtgcagtgg

SEQ ID NO: 4638556 - DNA, 25 bp, Homo sapien
actgtaagctctgctaggtgcagtg

SEQ ID NO: 4638557 - DNA, 25 bp, Homo sapien
tgttggtctcttccccatgaggctg

SEQ ID NO: 4638558 - DNA, 25 bp, Homo sapien
tgaggctgtcttccctacatgtgtc

SEQ ID NO: 4638559 - DNA, 25 bp, Homo sapien
tggagaaccctgtaagaaggcagaa

SEQ ID NO: 4638560 - DNA, 25 bp, Homo sapien
tatcctcactgagcgccagttccag

SEQ ID NO: 4638561 - DNA, 25 bp, Homo sapien
tgcgtgtagggtgaaggtgcccgct

SEQ ID NO: 4638562 - DNA, 25 bp, Homo sapien
atgcgtgtagggtgaaggtgcccgc

SEQ ID NO: 4638563 - DNA, 25 bp, Homo sapien
gcgtgtagggtgaaggtgcccgctg

SEQ ID NO: 4638564 - DNA, 25 bp, Homo sapien
gcgctcatcagagcggccaggcctt

SEQ ID NO: 4638565 - DNA, 25 bp, Homo sapien
acgcagggcgctcatcagagcggcc

SEQ ID NO: 4638566 - DNA, 25 bp, Homo sapien
gatacacgcagggcgctcatcagag

SEQ ID NO: 4638567 - DNA, 25 bp, Homo sapien
ggcgctcatcagagcggccaggcct

SEQ ID NO: 4638568 - DNA, 25 bp, Homo sapien
cattctcactaagattatgatgtgc

SEQ ID NO: 4638569 - DNA, 25 bp, Homo sapien
tatgatgtgctttctcacgtgggaa

SEQ ID NO: 4638570 - DNA, 25 bp, Homo sapien
acataatattgcgtgtacacttggg

SEQ ID NO: 4638571 - DNA, 25 bp, Homo sapien
gcgtgtacacttgggaggatgtcct

SEQ ID NO: 4638572 - DNA, 25 bp, Homo sapien
gaacacgagttgtagttccttggca

SEQ ID NO: 4638573 - DNA, 25 bp, Homo sapien
catatatgatcattgcctgcctgac

SEQ ID NO: 4638574 - DNA, 25 bp, Homo sapien
gagaacagattgctgagcttagccc

SEQ ID NO: 4638575 - DNA, 25 bp, Homo sapien
cattagaaattgataaccagcccag

SEQ ID NO: 4638576 - DNA, 25 bp, Homo sapien
gagtacttgtcacggatgtccaccc

SEQ ID NO: 4638577 - DNA, 25 bp, Homo sapien
agttctcacacttgtcgattcccaa

SEQ ID NO: 4638578 - DNA, 25 bp, Homo sapien
ataggtccacgggatcatgccgtag

SEQ ID NO: 4638579 - DNA, 25 bp, Homo sapien
gtgccagttctacacggaagccgtt

SEQ ID NO: 4638580 - DNA, 25 bp, Homo sapien
tccactcatgaatgtttgtccttgt

SEQ ID NO: 4638581 - DNA, 25 bp, Homo sapien
gactccactcatgaatgtttgtcct

SEQ ID NO: 4638582 - DNA, 25 bp, Homo sapien
tggactccactcatgaatgtttgtc

SEQ ID NO: 4638583 - DNA, 25 bp, Homo sapien
ctccactcatgaatgtttgtccttg

SEQ ID NO: 4638584 - DNA, 25 bp, Homo sapien
gagttatgtgtgccctaaggcacat

SEQ ID NO: 4638585 - DNA, 25 bp, Homo sapien
ggagcaggacagaggtttttccact

SEQ ID NO: 4638586 - DNA, 25 bp, Homo sapien
aatgactgataacgtaaaggctttc

SEQ ID NO: 4638587 - DNA, 25 bp, Homo sapien
tgtggaccagaatttggagcaggac

SEQ ID NO: 4638588 - DNA, 25 bp, Homo sapien
cagtagtactactcctgtgtggacc

SEQ ID NO: 4638589 - DNA, 25 bp, Homo sapien
tcactattgtgaatcttaagatggc

SEQ ID NO: 4638590 - DNA, 25 bp, Homo sapien
tattgtgaatcttaagatggctttt

SEQ ID NO: 4638591 - DNA, 25 bp, Homo sapien
actattgtgaatcttaagatggctt

SEQ ID NO: 4638592 - DNA, 25 bp, Homo sapien
ctcactattgtgaatcttaagatgg

SEQ ID NO: 4638593 - DNA, 25 bp, Homo sapien
ctgaggggagatgcttctgcagggc

SEQ ID NO: 4638594 - DNA, 25 bp, Homo sapien
cctgaggggagatgcttctgcaggg

SEQ ID NO: 4638595 - DNA, 25 bp, Homo sapien
tcctgaggggagatgcttctgcagg

SEQ ID NO: 4638596 - DNA, 25 bp, Homo sapien
gagagcaccgacacgatgctggtct

SEQ ID NO: 4638597 - DNA, 25 bp, Homo sapien
gctggtcttccacgcattcctggaa

SEQ ID NO: 4638598 - DNA, 25 bp, Homo sapien
cgacacgatgctggtcttccacgca

SEQ ID NO: 4638599 - DNA, 25 bp, Homo sapien
tggaaaggagagcaccgacacgatg

SEQ ID NO: 4638600 - DNA, 25 bp, Homo sapien
cacgcagttgtgttcatctcgttcg

SEQ ID NO: 4638601 - DNA, 25 bp, Homo sapien
cacacacgcagttgtgttcatctcg

SEQ ID NO: 4638602 - DNA, 25 bp, Homo sapien
tctcacacacgcagttgtgttcatc

SEQ ID NO: 4638603 - DNA, 25 bp, Homo sapien
agttgtgttcatctcgttcgttttc

SEQ ID NO: 4638604 - DNA, 25 bp, Homo sapien
ggaatgacgctacgaaaagcacccc

SEQ ID NO: 4638605 - DNA, 25 bp, Homo sapien
gctgtctcgcgcatggtctggccgc

SEQ ID NO: 4638606 - DNA, 25 bp, Homo sapien
cagggaggagccaacaaaggaatga

SEQ ID NO: 4638607 - DNA, 25 bp, Homo sapien
gggcgcactctacaactttcagggc

SEQ ID NO: 4638608 - DNA, 25 bp, Homo sapien
acccgtgtgtatccgtgggtgtgtc

SEQ ID NO: 4638609 - DNA, 25 bp, Homo sapien
tgtgtctgcgcgcatgcacccgtgt

SEQ ID NO: 4638610 - DNA, 25 bp, Homo sapien
gggaggtctccctttgagctatctg

SEQ ID NO: 4638611 - DNA, 25 bp, Homo sapien
tcttgatggattgaggaagcagagg

SEQ ID NO: 4638612 - DNA, 25 bp, Homo sapien
ctgagcagagcctccctctccaagg

SEQ ID NO: 4638613 - DNA, 25 bp, Homo sapien
tgagcagagcctccctctccaaggc

SEQ ID NO: 4638614 - DNA, 25 bp, Homo sapien
agcagagcctccctctccaaggctc

SEQ ID NO: 4638615 - DNA, 25 bp, Homo sapien
cagagcctccctctccaaggctctg

SEQ ID NO: 4638616 - DNA, 25 bp, Homo sapien
atcccacctcttccgactcgcggca

SEQ ID NO: 4638617 - DNA, 25 bp, Homo sapien
tccgactcgcggcagccccacccaa

SEQ ID NO: 4638618 - DNA, 25 bp, Homo sapien
agatccgccactgcagcaccgccag

SEQ ID NO: 4638619 - DNA, 25 bp, Homo sapien
ctcctcctgaagatccgccactgca

SEQ ID NO: 4638620 - DNA, 25 bp, Homo sapien
tttaaacttctcatatggtgctgca

SEQ ID NO: 4638621 - DNA, 25 bp, Homo sapien
gattttaatgtccagacactgaaga

SEQ ID NO: 4638622 - DNA, 25 bp, Homo sapien
tatggtgctgcatgcccaagatttt

SEQ ID NO: 4638623 - DNA, 25 bp, Homo sapien
cccaagattttaatgtccagacact

SEQ ID NO: 4638624 - DNA, 25 bp, Homo sapien
gatgttctcaggcacacgcttctaa

SEQ ID NO: 4638625 - DNA, 25 bp, Homo sapien
ggtaagtacctgttccccatctgta

SEQ ID NO: 4638626 - DNA, 25 bp, Homo sapien
cagtagtgtaaaggccaatgtcagg

SEQ ID NO: 4638627 - DNA, 25 bp, Homo sapien
aacattggagactcttctagtggcc

SEQ ID NO: 4638628 - DNA, 25 bp, Homo sapien
ttcacagtagcacagacataaaatg

SEQ ID NO: 4638629 - DNA, 25 bp, Homo sapien
tagatattgacgtagagagtggaat

SEQ ID NO: 4638630 - DNA, 25 bp, Homo sapien
caatgtatcagaaagataactgtac

SEQ ID NO: 4638631 - DNA, 25 bp, Homo sapien
actcataagcgggtgctaaaagatg

SEQ ID NO: 4638632 - DNA, 25 bp, Homo sapien
tgtgcagaggacagacaataaagcg

SEQ ID NO: 4638633 - DNA, 25 bp, Homo sapien
caagatgccttggagtgtcagatag

SEQ ID NO: 4638634 - DNA, 25 bp, Homo sapien
tgacattcaccgagtgcgtacccag

SEQ ID NO: 4638635 - DNA, 25 bp, Homo sapien
ccggtaaccgagaggcatgtaatgc

SEQ ID NO: 4638636 - DNA, 25 bp, Homo sapien
tgccagaagctgtagtgtcacaggc

SEQ ID NO: 4638637 - DNA, 25 bp, Homo sapien
agtgtgtgaactcagcagatgtttg

SEQ ID NO: 4638638 - DNA, 25 bp, Homo sapien
gcagatgtttgtgatgcacctacct

SEQ ID NO: 4638639 - DNA, 25 bp, Homo sapien
tgtgtgccagaagctgtagtgtcac

SEQ ID NO: 4638640 - DNA, 25 bp, Homo sapien
gggttggtggcagcaaactcaatta

SEQ ID NO: 4638641 - DNA, 25 bp, Homo sapien
agcagcaggactggaattcttgctg

SEQ ID NO: 4638642 - DNA, 25 bp, Homo sapien
aaactcaattatgggtgtctcctgc

SEQ ID NO: 4638643 - DNA, 25 bp, Homo sapien
gctgttggggttggtggcagcaaac

SEQ ID NO: 4638644 - DNA, 25 bp, Homo sapien
cagccatgtaagtgacccgtttaga

SEQ ID NO: 4638645 - DNA, 25 bp, Homo sapien
tgtcttgggacaaactaccacgttg

SEQ ID NO: 4638646 - DNA, 25 bp, Homo sapien
tattctaggacctccaaggctaggc

SEQ ID NO: 4638647 - DNA, 25 bp, Homo sapien
tccaataggatgcagcagaagtcgt

SEQ ID NO: 4638648 - DNA, 25 bp, Homo sapien
gagcctcccgctctggacggttcgc

SEQ ID NO: 4638649 - DNA, 25 bp, Homo sapien
ggaccctgctctccgggcgggttgc

SEQ ID NO: 4638650 - DNA, 25 bp, Homo sapien
ggttgcgccgcggtctctggcacct

SEQ ID NO: 4638651 - DNA, 25 bp, Homo sapien
cttgttggcagcgtcgccgttgcag

SEQ ID NO: 4638652 - DNA, 25 bp, Homo sapien
cactcactggtagttgaagactgta

SEQ ID NO: 4638653 - DNA, 25 bp, Homo sapien
ggatggactgtcctgtatatgcgta

SEQ ID NO: 4638654 - DNA, 25 bp, Homo sapien
gatatggcccatcctagagaacttc

SEQ ID NO: 4638655 - DNA, 25 bp, Homo sapien
tattttgtggacgaagatatggccc

SEQ ID NO: 4638656 - DNA, 25 bp, Homo sapien
ctgcggccaagccaggcggtctgct

SEQ ID NO: 4638657 - DNA, 25 bp, Homo sapien
ccggtggctgcggacggcccctgga

SEQ ID NO: 4638658 - DNA, 25 bp, Homo sapien
ccgggcctggatgtcgccgtggctg

SEQ ID NO: 4638659 - DNA, 25 bp, Homo sapien
caggaaccgaccctcagccccatcc

SEQ ID NO: 4638660 - DNA, 25 bp, Homo sapien
cagatgtccgtgtggctgcggccaa

SEQ ID NO: 4638661 - DNA, 25 bp, Homo sapien
cagagggcccttggctagaggtgtc

SEQ ID NO: 4638662 - DNA, 25 bp, Homo sapien
ggcccttggctagaggtgtcgagct

SEQ ID NO: 4638663 - DNA, 25 bp, Homo sapien
cacatctcggaacgagggccagatg

SEQ ID NO: 4638664 - DNA, 25 bp, Homo sapien
gcacaggagcgagaactgagaagcc

SEQ ID NO: 4638665 - DNA, 25 bp, Homo sapien
accccacacggggtgactgctgagg

SEQ ID NO: 4638666 - DNA, 25 bp, Homo sapien
gagcgagaactgagaagccgccgct

SEQ ID NO: 4638667 - DNA, 25 bp, Homo sapien
ggcccataccaacggccccgatctc

SEQ ID NO: 4638668 - DNA, 25 bp, Homo sapien
gtcagcatcgcagaactagggccag

SEQ ID NO: 4638669 - DNA, 25 bp, Homo sapien
tcgctcgcgctgtcagcatcgcaga

SEQ ID NO: 4638670 - DNA, 25 bp, Homo sapien
gcctcgagcgcaagcattccagcag

SEQ ID NO: 4638671 - DNA, 25 bp, Homo sapien
gggtccctcaggcctcgagcgcaag

SEQ ID NO: 4638672 - DNA, 25 bp, Homo sapien
tagcaaaggcagagcgcccttcgca

SEQ ID NO: 4638673 - DNA, 25 bp, Homo sapien
agcaaaggcagagcgcccttcgcaa

SEQ ID NO: 4638674 - DNA, 25 bp, Homo sapien
tcccatgtcacgtgtaacggcccca

SEQ ID NO: 4638675 - DNA, 25 bp, Homo sapien
atgtcacgtgtaacggccccagtgg

SEQ ID NO: 4638676 - DNA, 25 bp, Homo sapien
ccatgtcacgtgtaacggccccagt

SEQ ID NO: 4638677 - DNA, 25 bp, Homo sapien
tgtcacgtgtaacggccccagtggt

SEQ ID NO: 4638678 - DNA, 25 bp, Homo sapien
tgcagggcattagacccgcgcccag

SEQ ID NO: 4638679 - DNA, 25 bp, Homo sapien
cagggcattagacccgcgcccagga

SEQ ID NO: 4638680 - DNA, 25 bp, Homo sapien
tgaccacctgcagggcattagaccc

SEQ ID NO: 4638681 - DNA, 25 bp, Homo sapien
aatgaccacctgcagggcattagac

SEQ ID NO: 4638682 - DNA, 25 bp, Homo sapien
ctggtggtacgcagccctggagtgc

SEQ ID NO: 4638683 - DNA, 25 bp, Homo sapien
gggttaacatgacagtggctggtgg

SEQ ID NO: 4638684 - DNA, 25 bp, Homo sapien
tgggaaggggttaacatgacagtgg

SEQ ID NO: 4638685 - DNA, 25 bp, Homo sapien
gttaacatgacagtggctggtggta

SEQ ID NO: 4638686 - DNA, 25 bp, Homo sapien
gaaaatggacggtcccaggctgtcc

SEQ ID NO: 4638687 - DNA, 25 bp, Homo sapien
ggcagccagccgcataactgtatag

SEQ ID NO: 4638688 - DNA, 25 bp, Homo sapien
agtgaacaacaggtcggtggcagcc

SEQ ID NO: 4638689 - DNA, 25 bp, Homo sapien
tgtccagcagattgggctccaggcc

SEQ ID NO: 4638690 - DNA, 25 bp, Homo sapien
ccgcccttcatgtacatggcgatgg

SEQ ID NO: 4638691 - DNA, 25 bp, Homo sapien
cttcatgtacatggcgatggtcacc

SEQ ID NO: 4638692 - DNA, 25 bp, Homo sapien
catgtacatggcgatggtcacctgg

SEQ ID NO: 4638693 - DNA, 25 bp, Homo sapien
gcccttcatgtacatggcgatggtc

SEQ ID NO: 4638694 - DNA, 25 bp, Homo sapien
catttgaggactctgtttataaccc

SEQ ID NO: 4638695 - DNA, 25 bp, Homo sapien
tgaggccggactgactgaagaagaa

SEQ ID NO: 4638696 - DNA, 25 bp, Homo sapien
gggaccgctcagcagcgatctgatt

SEQ ID NO: 4638697 - DNA, 25 bp, Homo sapien
tatcatggcacagacgatgctgagg

SEQ ID NO: 4638698 - DNA, 25 bp, Homo sapien
ctgcacacaaccgaccgtaggtggt

SEQ ID NO: 4638699 - DNA, 25 bp, Homo sapien
cacacaaccgaccgtaggtggtcca

SEQ ID NO: 4638700 - DNA, 25 bp, Homo sapien
gcacacaaccgaccgtaggtggtcc

SEQ ID NO: 4638701 - DNA, 25 bp, Homo sapien
tgcacacaaccgaccgtaggtggtc

SEQ ID NO: 4638702 - DNA, 25 bp, Homo sapien
tgtgaccaacagcagttccgtgtag

SEQ ID NO: 4638703 - DNA, 25 bp, Homo sapien
gccagcataggtgggccggatccct

SEQ ID NO: 4638704 - DNA, 25 bp, Homo sapien
ccaacagcagttccgtgtaggtgct

SEQ ID NO: 4638705 - DNA, 25 bp, Homo sapien
taggtgggccggatccctttgccca

SEQ ID NO: 4638706 - DNA, 25 bp, Homo sapien
ggcctaggagcttcctgttaagtgt

SEQ ID NO: 4638707 - DNA, 25 bp, Homo sapien
taagtgtggccgttccgctctgtct

SEQ ID NO: 4638708 - DNA, 25 bp, Homo sapien
ttcctgttaagtgtggccgttccgc

SEQ ID NO: 4638709 - DNA, 25 bp, Homo sapien
agaggcctaggagcttcctgttaag

SEQ ID NO: 4638710 - DNA, 25 bp, Homo sapien
tgctaactcttgttgcgttggcggg

SEQ ID NO: 4638711 - DNA, 25 bp, Homo sapien
ctgagtggtgggcgccacagaaagt

SEQ ID NO: 4638712 - DNA, 25 bp, Homo sapien
gagtggtgggcgccacagaaagttc

SEQ ID NO: 4638713 - DNA, 25 bp, Homo sapien
tgagtggtgggcgccacagaaagtt

SEQ ID NO: 4638714 - DNA, 25 bp, Homo sapien
agtggtgggcgccacagaaagttcc

SEQ ID NO: 4638715 - DNA, 25 bp, Homo sapien
tgtttaaactatcgcaaggtcagaa

SEQ ID NO: 4638716 - DNA, 25 bp, Homo sapien
tagcaaaagctgaaatggtctatga

SEQ ID NO: 4638717 - DNA, 25 bp, Homo sapien
gaaaaatgctgacaacgttcagttg

SEQ ID NO: 4638718 - DNA, 25 bp, Homo sapien
tgtctggtagtaatgtcacctctga

SEQ ID NO: 4638719 - DNA, 25 bp, Homo sapien
agcctatattaagacatactcactg

SEQ ID NO: 4638720 - DNA, 25 bp, Homo sapien
gatatctgagtgagtacaaccattt

SEQ ID NO: 4638721 - DNA, 25 bp, Homo sapien
tgtagatatctgagtgagtacaacc

SEQ ID NO: 4638722 - DNA, 25 bp, Homo sapien
ttatatcactgttggcaatgccttt

SEQ ID NO: 4638723 - DNA, 25 bp, Homo sapien
acaatcttccacctgtccctgactg

SEQ ID NO: 4638724 - DNA, 25 bp, Homo sapien
aacaatcttccacctgtccctgact

SEQ ID NO: 4638725 - DNA, 25 bp, Homo sapien
tttctttccactgaactgggacctg

SEQ ID NO: 4638726 - DNA, 25 bp, Homo sapien
gggccaacgcctgggcagcttcttc

SEQ ID NO: 4638727 - DNA, 25 bp, Homo sapien
tgggacctgcctgttgaactcatgg

SEQ ID NO: 4638728 - DNA, 25 bp, Homo sapien
tgttgaactcatggcgcttcctctc

SEQ ID NO: 4638729 - DNA, 25 bp, Homo sapien
ggagggcctcgccctctttgcggca

SEQ ID NO: 4638730 - DNA, 25 bp, Homo sapien
agggcctcgccctctttgcggcact

SEQ ID NO: 4638731 - DNA, 25 bp, Homo sapien
tgaggagggcctcgccctctttgcg

SEQ ID NO: 4638732 - DNA, 25 bp, Homo sapien
ctcgccctctttgcggcactccaac

SEQ ID NO: 4638733 - DNA, 25 bp, Homo sapien
taaggcagtgttcgttgtgctttgc

SEQ ID NO: 4638734 - DNA, 25 bp, Homo sapien
tcaaagttcttaaggcagtgttcgt

SEQ ID NO: 4638735 - DNA, 25 bp, Homo sapien
gcaggagcaggtcattaagagtcac

SEQ ID NO: 4638736 - DNA, 25 bp, Homo sapien
catcgttggtttggtccgcgagccg

SEQ ID NO: 4638737 - DNA, 25 bp, Homo sapien
ctgctgggtgctgagagaggcacac

SEQ ID NO: 4638738 - DNA, 25 bp, Homo sapien
tctgctgggtgctgagagaggcaca

SEQ ID NO: 4638739 - DNA, 25 bp, Homo sapien
aatctgctgggtgctgagagaggca

SEQ ID NO: 4638740 - DNA, 25 bp, Homo sapien
atctgctgggtgctgagagaggcac

SEQ ID NO: 4638741 - DNA, 25 bp, Homo sapien
ctgttacctgttcttcaaattcatt

SEQ ID NO: 4638742 - DNA, 25 bp, Homo sapien
ctgttcttcaaattcattcagggga

SEQ ID NO: 4638743 - DNA, 25 bp, Homo sapien
tacctgttcttcaaattcattcagg

SEQ ID NO: 4638744 - DNA, 25 bp, Homo sapien
gttcttcaaattcattcaggggagg

SEQ ID NO: 4638745 - DNA, 25 bp, Homo sapien
tggcatctaatagcagttgctgagg

SEQ ID NO: 4638746 - DNA, 25 bp, Homo sapien
ggcatctaatagcagttgctgaggg

SEQ ID NO: 4638747 - DNA, 25 bp, Homo sapien
cttggcatctaatagcagttgctga

SEQ ID NO: 4638748 - DNA, 25 bp, Homo sapien
tgcttggcatctaatagcagttgct

SEQ ID NO: 4638749 - DNA, 25 bp, Homo sapien
taccagatttaacagatccttgaat

SEQ ID NO: 4638750 - DNA, 25 bp, Homo sapien
gatttaacagatccttgaatttact

SEQ ID NO: 4638751 - DNA, 25 bp, Homo sapien
tacttttaccagatttaacagatcc

SEQ ID NO: 4638752 - DNA, 25 bp, Homo sapien
gatctacttttaccagatttaacag

SEQ ID NO: 4638753 - DNA, 25 bp, Homo sapien
gaagagcagcctgtttcagatcagc

SEQ ID NO: 4638754 - DNA, 25 bp, Homo sapien
tcccagcactgatcattgtggtggt

SEQ ID NO: 4638755 - DNA, 25 bp, Homo sapien
tgtggtggtgaacataaccatcact

SEQ ID NO: 4638756 - DNA, 25 bp, Homo sapien
catcactattgtggtcatcaccaag

SEQ ID NO: 4638757 - DNA, 25 bp, Homo sapien
gggcctcatgttgttctatcgcctg

SEQ ID NO: 4638758 - DNA, 25 bp, Homo sapien
tcactacatactctgcaagacagcc

SEQ ID NO: 4638759 - DNA, 25 bp, Homo sapien
ggttttcattctgcacgaaacaagc

SEQ ID NO: 4638760 - DNA, 25 bp, Homo sapien
aacaagcaggtccactcagaaagcc

SEQ ID NO: 4638761 - DNA, 25 bp, Homo sapien
tgcgccacatctgcatagtgaatgt

SEQ ID NO: 4638762 - DNA, 25 bp, Homo sapien
caagaaccagacttcctatatgcgc

SEQ ID NO: 4638763 - DNA, 25 bp, Homo sapien
gacttcctatatgcgccacatctgc

SEQ ID NO: 4638764 - DNA, 25 bp, Homo sapien
gcatagtgaatgttgctgcctccct

SEQ ID NO: 4638765 - DNA, 25 bp, Homo sapien
tcttggccagtggaacctggttcac

SEQ ID NO: 4638766 - DNA, 25 bp, Homo sapien
cttggccagtggaacctggttcact

SEQ ID NO: 4638767 - DNA, 25 bp, Homo sapien
ccagtggaacctggttcactgtgcc

SEQ ID NO: 4638768 - DNA, 25 bp, Homo sapien
tggccagtggaacctggttcactgt

SEQ ID NO: 4638769 - DNA, 25 bp, Homo sapien
tcccaactgctactgtcctgatttc

SEQ ID NO: 4638770 - DNA, 25 bp, Homo sapien
gagttttccttcctcgttcattgca

SEQ ID NO: 4638771 - DNA, 25 bp, Homo sapien
cctcgttcattgcaagatagaattc

SEQ ID NO: 4638772 - DNA, 25 bp, Homo sapien
cctttgattgccacaatcccaactg

SEQ ID NO: 4638773 - DNA, 25 bp, Homo sapien
gaagttacaatcttcattgcattcc

SEQ ID NO: 4638774 - DNA, 25 bp, Homo sapien
ctccgttgtttgtccatttagctgc

SEQ ID NO: 4638775 - DNA, 25 bp, Homo sapien
catttcccctccgttgtttgtccat

SEQ ID NO: 4638776 - DNA, 25 bp, Homo sapien
tttgtccatttagctgctgcatatg

SEQ ID NO: 4638777 - DNA, 25 bp, Homo sapien
gccataggaagaaagtgggctgttt

SEQ ID NO: 4638778 - DNA, 25 bp, Homo sapien
taagttattgccataggaagaaagt

SEQ ID NO: 4638779 - DNA, 25 bp, Homo sapien
tatgcaattaagttattgccatagg

SEQ ID NO: 4638780 - DNA, 25 bp, Homo sapien
cataggaagaaagtgggctgttttt

SEQ ID NO: 4638781 - DNA, 25 bp, Homo sapien
acagtccacttaaagaaatctccct

SEQ ID NO: 4638782 - DNA, 25 bp, Homo sapien
aaatgtctctttaatgcagtgcctt

SEQ ID NO: 4638783 - DNA, 25 bp, Homo sapien
atgtctctttaatgcagtgccttaa

SEQ ID NO: 4638784 - DNA, 25 bp, Homo sapien
gtctctttaatgcagtgccttaaaa

SEQ ID NO: 4638785 - DNA, 25 bp, Homo sapien
aatgtctctttaatgcagtgcctta

SEQ ID NO: 4638786 - DNA, 25 bp, Homo sapien
ctgatgtatcaattttgcttactgg

SEQ ID NO: 4638787 - DNA, 25 bp, Homo sapien
aattgcagacattgtcatattaatg

SEQ ID NO: 4638788 - DNA, 25 bp, Homo sapien
cagacattgtcatattaatgcaacc

SEQ ID NO: 4638789 - DNA, 25 bp, Homo sapien
attttgattggccagtgatcgccca

SEQ ID NO: 4638790 - DNA, 25 bp, Homo sapien
tgatctgtatagaagtggaataaag

SEQ ID NO: 4638791 - DNA, 25 bp, Homo sapien
atgatctgtatagaagtggaataaa

SEQ ID NO: 4638792 - DNA, 25 bp, Homo sapien
catgatctgtatagaagtggaataa

SEQ ID NO: 4638793 - DNA, 25 bp, Homo sapien
acccagtcagtgcccttcagttaaa

SEQ ID NO: 4638794 - DNA, 25 bp, Homo sapien
ttgggacaagtacagtaaccctcgc

SEQ ID NO: 4638795 - DNA, 25 bp, Homo sapien
gactcagttcctgcggggaacttca

SEQ ID NO: 4638796 - DNA, 25 bp, Homo sapien
tcgcccgtcaagacgggccagggct

SEQ ID NO: 4638797 - DNA, 25 bp, Homo sapien
ctccgcgcacagtggtggccaccgc

SEQ ID NO: 4638798 - DNA, 25 bp, Homo sapien
tggccaccgcgactggtgctgaagt

SEQ ID NO: 4638799 - DNA, 25 bp, Homo sapien
cacagtggtggccaccgcgactggt

SEQ ID NO: 4638800 - DNA, 25 bp, Homo sapien
ggtggccaccgcgactggtgctgaa

SEQ ID NO: 4638801 - DNA, 25 bp, Homo sapien
gaggcaaggcacggatggactttac

SEQ ID NO: 4638802 - DNA, 25 bp, Homo sapien
acgcgatggagtcggagccgctggc

SEQ ID NO: 4638803 - DNA, 25 bp, Homo sapien
ggaagaggacgcgatggagtcggag

SEQ ID NO: 4638804 - DNA, 25 bp, Homo sapien
aggacgcgatggagtcggagccgct

SEQ ID NO: 4638805 - DNA, 25 bp, Homo sapien
ctggtaggagggagtttgggatcga

SEQ ID NO: 4638806 - DNA, 25 bp, Homo sapien
ggtaggagggagtttgggatcgaga

SEQ ID NO: 4638807 - DNA, 25 bp, Homo sapien
tggtaggagggagtttgggatcgag

SEQ ID NO: 4638808 - DNA, 25 bp, Homo sapien
gtaggagggagtttgggatcgagat

SEQ ID NO: 4638809 - DNA, 25 bp, Homo sapien
caatgggtggattcgggtccagatt

SEQ ID NO: 4638810 - DNA, 25 bp, Homo sapien
ttaatcgctcctctccgggggcggc

SEQ ID NO: 4638811 - DNA, 25 bp, Homo sapien
tcaagagcaacatggaggtctgcac

SEQ ID NO: 4638812 - DNA, 25 bp, Homo sapien
tcaggaaccgccctgtgatgtcaga

SEQ ID NO: 4638813 - DNA, 25 bp, Homo sapien
tctccaggtgctcgtatgcgactgc

SEQ ID NO: 4638814 - DNA, 25 bp, Homo sapien
gtctcagggcagtcttaagagctcc

SEQ ID NO: 4638815 - DNA, 25 bp, Homo sapien
tggcgatcagggcacatagaatctc

SEQ ID NO: 4638816 - DNA, 25 bp, Homo sapien
tcctaatcctctattcttggagatc

SEQ ID NO: 4638817 - DNA, 25 bp, Homo sapien
tgaggacataggtggtggagtctct

SEQ ID NO: 4638818 - DNA, 25 bp, Homo sapien
ggagtctctcctaatcctctattct

SEQ ID NO: 4638819 - DNA, 25 bp, Homo sapien
tgccattcgcgtatgggaagaacag

SEQ ID NO: 4638820 - DNA, 25 bp, Homo sapien
ttaataccccttgacacacaaacag

SEQ ID NO: 4638821 - DNA, 25 bp, Homo sapien
gcaaagatttattaataccccttga

SEQ ID NO: 4638822 - DNA, 25 bp, Homo sapien
ccccttgacacacaaacaggaagtg

SEQ ID NO: 4638823 - DNA, 25 bp, Homo sapien
ggaagtgagaaaatgggcaactgac

SEQ ID NO: 4638824 - DNA, 25 bp, Homo sapien
ggtcacacggctttcaagtgccaga

SEQ ID NO: 4638825 - DNA, 25 bp, Homo sapien
tgtgaatttctagacctccatagca

SEQ ID NO: 4638826 - DNA, 25 bp, Homo sapien
caagcccaactatacaggtcagatc

SEQ ID NO: 4638827 - DNA, 25 bp, Homo sapien
gctttactgggctaaaccttcacca

SEQ ID NO: 4638828 - DNA, 25 bp, Homo sapien
agtaaacagagcactccaccaggta

SEQ ID NO: 4638829 - DNA, 25 bp, Homo sapien
aagcctctacttcggtctcttggta

SEQ ID NO: 4638830 - DNA, 25 bp, Homo sapien
actgaagcctctacttcggtctctt

SEQ ID NO: 4638831 - DNA, 25 bp, Homo sapien
tgaagcctctacttcggtctcttgg

SEQ ID NO: 4638832 - DNA, 25 bp, Homo sapien
gaagcctctacttcggtctcttggt

SEQ ID NO: 4638833 - DNA, 25 bp, Homo sapien
ccttgctctgtatggtagaagtcaa

SEQ ID NO: 4638834 - DNA, 25 bp, Homo sapien
cacacattgcttctcaagaggtgag

SEQ ID NO: 4638835 - DNA, 25 bp, Homo sapien
cttgcttgatccatagaaaatgcca

SEQ ID NO: 4638836 - DNA, 25 bp, Homo sapien
caaacaataaggagtgtcagcaaga

SEQ ID NO: 4638837 - DNA, 25 bp, Homo sapien
ctgagatcaagttcttggcagggct

SEQ ID NO: 4638838 - DNA, 25 bp, Homo sapien
gcccacagtgtcctataatggacat

SEQ ID NO: 4638839 - DNA, 25 bp, Homo sapien
ttcatatggcatatcccctgtgtta

SEQ ID NO: 4638840 - DNA, 25 bp, Homo sapien
tattgtcttcatctcctagggctgc

SEQ ID NO: 4638841 - DNA, 25 bp, Homo sapien
tatgagcctggatcgcttgtctgcc

SEQ ID NO: 4638842 - DNA, 25 bp, Homo sapien
tgtgcctccatactgcagctggcgt

SEQ ID NO: 4638843 - DNA, 25 bp, Homo sapien
cagcacacagcgagattgaaggcac

SEQ ID NO: 4638844 - DNA, 25 bp, Homo sapien
caaaagcctctatggccagtggcgc

SEQ ID NO: 4638845 - DNA, 25 bp, Homo sapien
tgtgtcccgataccagtaccttcca

SEQ ID NO: 4638846 - DNA, 25 bp, Homo sapien
cgcgtgtgtcccgataccagtacct

SEQ ID NO: 4638847 - DNA, 25 bp, Homo sapien
tttggaggcctccccgcgtgtgtcc

SEQ ID NO: 4638848 - DNA, 25 bp, Homo sapien
cgtgtgtcccgataccagtaccttc

SEQ ID NO: 4638849 - DNA, 25 bp, Homo sapien
caacacgagacctatcggggtcaac

SEQ ID NO: 4638850 - DNA, 25 bp, Homo sapien
ggtcggaggaggctcttgtcgcgct

SEQ ID NO: 4638851 - DNA, 25 bp, Homo sapien
aggaggctcttgtcgcgctcttagc

SEQ ID NO: 4638852 - DNA, 25 bp, Homo sapien
gacctatcggggtcaacacgaacca

SEQ ID NO: 4638853 - DNA, 25 bp, Homo sapien
tgctagcaaagcattcgctccccat

SEQ ID NO: 4638854 - DNA, 25 bp, Homo sapien
ctgctagcaaagcattcgctcccca

SEQ ID NO: 4638855 - DNA, 25 bp, Homo sapien
ccgctgtgcaccagcgtcgagttcc

SEQ ID NO: 4638856 - DNA, 25 bp, Homo sapien
gtgcaccagcgtcgagttccaggat

SEQ ID NO: 4638857 - DNA, 25 bp, Homo sapien
cgctgtgcaccagcgtcgagttcca

SEQ ID NO: 4638858 - DNA, 25 bp, Homo sapien
ggcggccgatgttacgtattgcact

SEQ ID NO: 4638859 - DNA, 25 bp, Homo sapien
ctggcggccgatgttacgtattgca

SEQ ID NO: 4638860 - DNA, 25 bp, Homo sapien
cgatgttacgtattgcacttgttct

SEQ ID NO: 4638861 - DNA, 25 bp, Homo sapien
cggccgatgttacgtattgcacttg

SEQ ID NO: 4638862 - DNA, 25 bp, Homo sapien
gccatttgcgccgttgtcgggctcc

SEQ ID NO: 4638863 - DNA, 25 bp, Homo sapien
ccatttgcgccgttgtcgggctcca

SEQ ID NO: 4638864 - DNA, 25 bp, Homo sapien
atggactactgccatttgcgccgtt

SEQ ID NO: 4638865 - DNA, 25 bp, Homo sapien
ctactgccatttgcgccgttgtcgg

SEQ ID NO: 4638866 - DNA, 25 bp, Homo sapien
cgcttgcgcggctctggaaagcccg

SEQ ID NO: 4638867 - DNA, 25 bp, Homo sapien
tttctaagtccgcttgcgcggctct

SEQ ID NO: 4638868 - DNA, 25 bp, Homo sapien
tccgcttgcgcggctctggaaagcc

SEQ ID NO: 4638869 - DNA, 25 bp, Homo sapien
ctaagtccgcttgcgcggctctgga

SEQ ID NO: 4638870 - DNA, 25 bp, Homo sapien
cctggcctccatgactagttaggga

SEQ ID NO: 4638871 - DNA, 25 bp, Homo sapien
tgcagggtgcctcctatgaccaatc

SEQ ID NO: 4638872 - DNA, 25 bp, Homo sapien
tgccccacgcaaaactgtagccatg

SEQ ID NO: 4638873 - DNA, 25 bp, Homo sapien
ggagtgctgtatgcaactgtgcccc

SEQ ID NO: 4638874 - DNA, 25 bp, Homo sapien
aaaagaaaacgatgtgattgaccac

SEQ ID NO: 4638875 - DNA, 25 bp, Homo sapien
tatttgtaggttgaagcatccttgc

SEQ ID NO: 4638876 - DNA, 25 bp, Homo sapien
cgatgttaaccgtgggtttatcata

SEQ ID NO: 4638877 - DNA, 25 bp, Homo sapien
aaagtggtgaaagtaaatatccttg

SEQ ID NO: 4638878 - DNA, 25 bp, Homo sapien
tgtgttggtaacatgaaaaatcctc

SEQ ID NO: 4638879 - DNA, 25 bp, Homo sapien
tctttgtgttggtaacatgaaaaat

SEQ ID NO: 4638880 - DNA, 25 bp, Homo sapien
gtgttggtaacatgaaaaatcctct

SEQ ID NO: 4638881 - DNA, 25 bp, Homo sapien
tttgtgttggtaacatgaaaaatcc

SEQ ID NO: 4638882 - DNA, 25 bp, Homo sapien
tagcagaaactgtgatcactcaaaa

SEQ ID NO: 4638883 - DNA, 25 bp, Homo sapien
atgaaatgttaagtaatggcaaatt

SEQ ID NO: 4638884 - DNA, 25 bp, Homo sapien
actgtgatcactcaaaaggtctcaa

SEQ ID NO: 4638885 - DNA, 25 bp, Homo sapien
tattcaagatttcatcaccctgtca

SEQ ID NO: 4638886 - DNA, 25 bp, Homo sapien
gattgtccctttcaactgcagaaaa

SEQ ID NO: 4638887 - DNA, 25 bp, Homo sapien
tttcagatccgggattgtccctttc

SEQ ID NO: 4638888 - DNA, 25 bp, Homo sapien
ttcagatccgggattgtccctttca

SEQ ID NO: 4638889 - DNA, 25 bp, Homo sapien
gtccatcatacatcgagaaggcaca

SEQ ID NO: 4638890 - DNA, 25 bp, Homo sapien
gaacagtccatcatacatcgagaag

SEQ ID NO: 4638891 - DNA, 25 bp, Homo sapien
gaaggcacagtcacaagcgatccct

SEQ ID NO: 4638892 - DNA, 25 bp, Homo sapien
tatttgagcagaacagtccatcata

SEQ ID NO: 4638893 - DNA, 25 bp, Homo sapien
gataatcctgataacaaactacttc

SEQ ID NO: 4638894 - DNA, 25 bp, Homo sapien
tttataacagatcaatggttcctga

SEQ ID NO: 4638895 - DNA, 25 bp, Homo sapien
tatacgcctctaacaacggatatgt

SEQ ID NO: 4638896 - DNA, 25 bp, Homo sapien
ttagagctaaatgtctgagtggtcc

SEQ ID NO: 4638897 - DNA, 25 bp, Homo sapien
tacagatcgcttacaataattttcc

SEQ ID NO: 4638898 - DNA, 25 bp, Homo sapien
tggtatcaatttctaatttaaagct

SEQ ID NO: 4638899 - DNA, 25 bp, Homo sapien
gaaaggagtgagcttgacaaccacc

SEQ ID NO: 4638900 - DNA, 25 bp, Homo sapien
ttttccctcagtgcatagaaaggag

SEQ ID NO: 4638901 - DNA, 25 bp, Homo sapien
tctccatggtgtcaagacaccatct

SEQ ID NO: 4638902 - DNA, 25 bp, Homo sapien
tggcaccacccactggtgtcaaggg

SEQ ID NO: 4638903 - DNA, 25 bp, Homo sapien
gagctttgaagcctcgcctgcatca

SEQ ID NO: 4638904 - DNA, 25 bp, Homo sapien
accccaggtgtctttgaggatctcc

SEQ ID NO: 4638905 - DNA, 25 bp, Homo sapien
cctttgccggtctccaagccctcct

SEQ ID NO: 4638906 - DNA, 25 bp, Homo sapien
acttgaaatggtccatcttttcctt

SEQ ID NO: 4638907 - DNA, 25 bp, Homo sapien
ttcctttgccggtctccaagccctc

SEQ ID NO: 4638908 - DNA, 25 bp, Homo sapien
atcttttcctttgccggtctccaag

SEQ ID NO: 4638909 - DNA, 25 bp, Homo sapien
aagctttgatgcattcttgacattt

SEQ ID NO: 4638910 - DNA, 25 bp, Homo sapien
taaaagctttgatgcattcttgaca

SEQ ID NO: 4638911 - DNA, 25 bp, Homo sapien
agctttgatgcattcttgacatttg

SEQ ID NO: 4638912 - DNA, 25 bp, Homo sapien
ccttaaaagctttgatgcattcttg

SEQ ID NO: 4638913 - DNA, 25 bp, Homo sapien
ataaggtttgaggaacagtaaaatg

SEQ ID NO: 4638914 - DNA, 25 bp, Homo sapien
tttttcacaatggtatggtttctct

SEQ ID NO: 4638915 - DNA, 25 bp, Homo sapien
gccacatttttcacaatggtatggt

SEQ ID NO: 4638916 - DNA, 25 bp, Homo sapien
aggtttgaggaacagtaaaatgctt

SEQ ID NO: 4638917 - DNA, 25 bp, Homo sapien
cactcagttttgaggatagtttaaa

SEQ ID NO: 4638918 - DNA, 25 bp, Homo sapien
tgtaggattccactccactatgagt

SEQ ID NO: 4638919 - DNA, 25 bp, Homo sapien
ttcactcagttttgaggatagttta

SEQ ID NO: 4638920 - DNA, 25 bp, Homo sapien
atgttcactcagttttgaggatagt

SEQ ID NO: 4638921 - DNA, 25 bp, Homo sapien
atgaccaaggagttgaccagtgaaa

SEQ ID NO: 4638922 - DNA, 25 bp, Homo sapien
tctaaagactgaacctctaaattgt

SEQ ID NO: 4638923 - DNA, 25 bp, Homo sapien
gaccagtgaaacctctaaagactga

SEQ ID NO: 4638924 - DNA, 25 bp, Homo sapien
caaggagttgaccagtgaaacctct

SEQ ID NO: 4638925 - DNA, 25 bp, Homo sapien
taactatacttagaaatgaatgtaa

SEQ ID NO: 4638926 - DNA, 25 bp, Homo sapien
aactatacttagaaatgaatgtaac

SEQ ID NO: 4638927 - DNA, 25 bp, Homo sapien
gctttgacgcctacggtggaaagga

SEQ ID NO: 4638928 - DNA, 25 bp, Homo sapien
tcacataaaagctcaagagaagcaa

SEQ ID NO: 4638929 - DNA, 25 bp, Homo sapien
gaatgtgcaggttcatctcacagag

SEQ ID NO: 4638930 - DNA, 25 bp, Homo sapien
gagcactttgcggtcaatggtagaa

SEQ ID NO: 4638931 - DNA, 25 bp, Homo sapien
taaaagctcaagagaagcaacctga

SEQ ID NO: 4638932 - DNA, 25 bp, Homo sapien
gtgtgttcatctcatagagttgaac

SEQ ID NO: 4638933 - DNA, 25 bp, Homo sapien
cagaagcattatgacaaacttattt

SEQ ID NO: 4638934 - DNA, 25 bp, Homo sapien
tgtgttcatctcatagagttgaacc

SEQ ID NO: 4638935 - DNA, 25 bp, Homo sapien
gcattatgacaaacttatttgtgat

SEQ ID NO: 4638936 - DNA, 25 bp, Homo sapien
ctgataaatttcattgtgatgtgtg

SEQ ID NO: 4638937 - DNA, 25 bp, Homo sapien
tgtagaatctacaactggacctgtg

SEQ ID NO: 4638938 - DNA, 25 bp, Homo sapien
catgtcacagagatgaacgtttctt

SEQ ID NO: 4638939 - DNA, 25 bp, Homo sapien
ttctttgagatgtggtcattcagct

SEQ ID NO: 4638940 - DNA, 25 bp, Homo sapien
gataataactcaatcctctatgtct

SEQ ID NO: 4638941 - DNA, 25 bp, Homo sapien
gaaaaatttagagtatgactccagg

SEQ ID NO: 4638942 - DNA, 25 bp, Homo sapien
tatgtctttgacaagaaggagaagg

SEQ ID NO: 4638943 - DNA, 25 bp, Homo sapien
gagagagggactttgtattgatcaa

SEQ ID NO: 4638944 - DNA, 25 bp, Homo sapien
ctcaagtaacggagttgaacatgtc

SEQ ID NO: 4638945 - DNA, 25 bp, Homo sapien
catagatttgagaatttcgtcggaa

SEQ ID NO: 4638946 - DNA, 25 bp, Homo sapien
tgtggtgaatgaggaaacatcttcc

SEQ ID NO: 4638947 - DNA, 25 bp, Homo sapien
tatgtgtgtacccaactaatagagt

SEQ ID NO: 4638948 - DNA, 25 bp, Homo sapien
ttgtgctatgagacctacagtgaaa

SEQ ID NO: 4638949 - DNA, 25 bp, Homo sapien
gtatttacaagtgggtatttggaca

SEQ ID NO: 4638950 - DNA, 25 bp, Homo sapien
ttgttgtgctatgagacctacagtg

SEQ ID NO: 4638951 - DNA, 25 bp, Homo sapien
tagtatttacaagtgggtatttgga

SEQ ID NO: 4638952 - DNA, 25 bp, Homo sapien
atggagcagttttgacaaactcttt

SEQ ID NO: 4638953 - DNA, 25 bp, Homo sapien
cagttttgaaagactcttttactag

SEQ ID NO: 4638954 - DNA, 25 bp, Homo sapien
agtgttttgagaccaacattggaaa

SEQ ID NO: 4638955 - DNA, 25 bp, Homo sapien
gagaccaacattggaaacgggaata

SEQ ID NO: 4638956 - DNA, 25 bp, Homo sapien
aatgtgtgccctcagataggactcc

SEQ ID NO: 4638957 - DNA, 25 bp, Homo sapien
tttgtccctcacacaggattacaga

SEQ ID NO: 4638958 - DNA, 25 bp, Homo sapien
cactgctacgagtttctgaatggaa

SEQ ID NO: 4638959 - DNA, 25 bp, Homo sapien
tcactaaagcaaggagactacatct

SEQ ID NO: 4638960 - DNA, 25 bp, Homo sapien
cctataatgctcagatcacaacggg

SEQ ID NO: 4638961 - DNA, 25 bp, Homo sapien
cataagttatgtccgtttggctagt

SEQ ID NO: 4638962 - DNA, 25 bp, Homo sapien
tggctagtgacatggccagggttcc

SEQ ID NO: 4638963 - DNA, 25 bp, Homo sapien
ccagggttcctgagtacaaaattgt

SEQ ID NO: 4638964 - DNA, 25 bp, Homo sapien
caacgtagagtttcagtcccatttg

SEQ ID NO: 4638965 - DNA, 25 bp, Homo sapien
catgtagaacacaaccaacgtagag

SEQ ID NO: 4638966 - DNA, 25 bp, Homo sapien
tccaggtctctgtaacatgtagaac

SEQ ID NO: 4638967 - DNA, 25 bp, Homo sapien
gatgatcatactgtctctgtccagg

SEQ ID NO: 4638968 - DNA, 25 bp, Homo sapien
tatgaagaatgaaacgcatcatcct

SEQ ID NO: 4638969 - DNA, 25 bp, Homo sapien
ttccataagttatccccaagcctgg

SEQ ID NO: 4638970 - DNA, 25 bp, Homo sapien
cctaatcccaatgagaataatgtct

SEQ ID NO: 4638971 - DNA, 25 bp, Homo sapien
gactagtaggtgtttctcaactctc

SEQ ID NO: 4638972 - DNA, 25 bp, Homo sapien
tggtaagtgaaatacatcattcaaa

SEQ ID NO: 4638973 - DNA, 25 bp, Homo sapien
ctggtaagtgaaatacatcattcaa

SEQ ID NO: 4638974 - DNA, 25 bp, Homo sapien
ggtaagtgaaatacatcattcaaac

SEQ ID NO: 4638975 - DNA, 25 bp, Homo sapien
aaatcacattgttttaaggatttat

SEQ ID NO: 4638976 - DNA, 25 bp, Homo sapien
tttaaggatttatctttttgcctca

SEQ ID NO: 4638977 - DNA, 25 bp, Homo sapien
ttaaggatttatctttttgcctcat

SEQ ID NO: 4638978 - DNA, 25 bp, Homo sapien
cacattgttttaaggatttatcttt

SEQ ID NO: 4638979 - DNA, 25 bp, Homo sapien
tgagcccatggtagaggctgcaggg

SEQ ID NO: 4638980 - DNA, 25 bp, Homo sapien
ctgagcccatggtagaggctgcagg

SEQ ID NO: 4638981 - DNA, 25 bp, Homo sapien
gcagtgcaggctcgccaccactggg

SEQ ID NO: 4638982 - DNA, 25 bp, Homo sapien
taggcaacagagcatgcgcaactca

SEQ ID NO: 4638983 - DNA, 25 bp, Homo sapien
agcatgcgcaactcagcagaccggg

SEQ ID NO: 4638984 - DNA, 25 bp, Homo sapien
tggcagtgcaggctcgccaccactg

SEQ ID NO: 4638985 - DNA, 25 bp, Homo sapien
ctgagatccccatggtgaatcacgt

SEQ ID NO: 4638986 - DNA, 25 bp, Homo sapien
gatccccatggtgaatcacgtaaga

SEQ ID NO: 4638987 - DNA, 25 bp, Homo sapien
aggtccattgtcgtcttcttcatca

SEQ ID NO: 4638988 - DNA, 25 bp, Homo sapien
ttcaggtccattgtcgtcttcttca

SEQ ID NO: 4638989 - DNA, 25 bp, Homo sapien
cagcccccactctgaaggggcgatc

SEQ ID NO: 4638990 - DNA, 25 bp, Homo sapien
ccagcccccactctgaaggggcgat

SEQ ID NO: 4638991 - DNA, 25 bp, Homo sapien
ctgcagccccggctcaggcacggtc

SEQ ID NO: 4638992 - DNA, 25 bp, Homo sapien
ccccggctcaggcacggtctggtac

SEQ ID NO: 4638993 - DNA, 25 bp, Homo sapien
acagccgccccgctgcccgccactc

SEQ ID NO: 4638994 - DNA, 25 bp, Homo sapien
caggacagccgccccgctgcccgcc

SEQ ID NO: 4638995 - DNA, 25 bp, Homo sapien
ctcggggcccaggacagccgccccg

SEQ ID NO: 4638996 - DNA, 25 bp, Homo sapien
aggacagccgccccgctgcccgcca

SEQ ID NO: 4638997 - DNA, 25 bp, Homo sapien
ggacgtcaacctggcgttttctatc

SEQ ID NO: 4638998 - DNA, 25 bp, Homo sapien
catcaaggacgtcaacctggcgttt

SEQ ID NO: 4638999 - DNA, 25 bp, Homo sapien
caaggacgtcaacctggcgttttct

SEQ ID NO: 4639000 - DNA, 25 bp, Homo sapien
caacctggcgttttctatctaccag

SEQ ID NO: 4639001 - DNA, 25 bp, Homo sapien
tctcctgctgaaagaactggctaca

SEQ ID NO: 4639002 - DNA, 25 bp, Homo sapien
aaatccatctcctgctgaaagaact

SEQ ID NO: 4639003 - DNA, 25 bp, Homo sapien
tccatctcctgctgaaagaactggc

SEQ ID NO: 4639004 - DNA, 25 bp, Homo sapien
gctgaaagaactggctacaatttac

SEQ ID NO: 4639005 - DNA, 25 bp, Homo sapien
caagttctcactataaacagcataa

SEQ ID NO: 4639006 - DNA, 25 bp, Homo sapien
aaacagcataatggacagctgtgtt

SEQ ID NO: 4639007 - DNA, 25 bp, Homo sapien
ccactgacaagttctcactataaac

SEQ ID NO: 4639008 - DNA, 25 bp, Homo sapien
tggatcagcaccagaatctatgaga

SEQ ID NO: 4639009 - DNA, 25 bp, Homo sapien
ttgttcatcacttcgatgtctgcac

SEQ ID NO: 4639010 - DNA, 25 bp, Homo sapien
tgttcatcacttcgatgtctgcacc

SEQ ID NO: 4639011 - DNA, 25 bp, Homo sapien
cttgttcatcacttcgatgtctgca

SEQ ID NO: 4639012 - DNA, 25 bp, Homo sapien
gattccaaatgccaatgtcaggcac

SEQ ID NO: 4639013 - DNA, 25 bp, Homo sapien
cgttgcaatcattccacacgtatct

SEQ ID NO: 4639014 - DNA, 25 bp, Homo sapien
aacgttgcaatcattccacacgtat

SEQ ID NO: 4639015 - DNA, 25 bp, Homo sapien
ttgcaatcattccacacgtatcttc

SEQ ID NO: 4639016 - DNA, 25 bp, Homo sapien
taacgttgcaatcattccacacgta

SEQ ID NO: 4639017 - DNA, 25 bp, Homo sapien
accatgctggtcttctcaacgttgt

SEQ ID NO: 4639018 - DNA, 25 bp, Homo sapien
gggaccatgctggtcttctcaacgt

SEQ ID NO: 4639019 - DNA, 25 bp, Homo sapien
atgctggtcttctcaacgttgtttc

SEQ ID NO: 4639020 - DNA, 25 bp, Homo sapien
tggtcttctcaacgttgtttcaatt

SEQ ID NO: 4639021 - DNA, 25 bp, Homo sapien
cgagcgggttgcccaactaaattct

SEQ ID NO: 4639022 - DNA, 25 bp, Homo sapien
gtagcaccaccaagtgtagtttact

SEQ ID NO: 4639023 - DNA, 25 bp, Homo sapien
atagttcttttgtgatcaacactcc

SEQ ID NO: 4639024 - DNA, 25 bp, Homo sapien
cctataatctcatggtagcaccacc

SEQ ID NO: 4639025 - DNA, 25 bp, Homo sapien
cagaactcattgtacttaatcttcc

SEQ ID NO: 4639026 - DNA, 25 bp, Homo sapien
gaactcattgtacttaatcttcccc

SEQ ID NO: 4639027 - DNA, 25 bp, Homo sapien
gaactcagaactcattgtacttaat

SEQ ID NO: 4639028 - DNA, 25 bp, Homo sapien
actcagaactcattgtacttaatct

SEQ ID NO: 4639029 - DNA, 25 bp, Homo sapien
gttaacactccagcaaggcaaattt

SEQ ID NO: 4639030 - DNA, 25 bp, Homo sapien
ataactttttggtgccacaaagaag

SEQ ID NO: 4639031 - DNA, 25 bp, Homo sapien
aagttaacactccagcaaggcaaat

SEQ ID NO: 4639032 - DNA, 25 bp, Homo sapien
gagttagcactccaacaacaagtta

SEQ ID NO: 4639033 - DNA, 25 bp, Homo sapien
gactcttcaatctttccagatattg

SEQ ID NO: 4639034 - DNA, 25 bp, Homo sapien
cacaggccttgtaattttcctaggt

SEQ ID NO: 4639035 - DNA, 25 bp, Homo sapien
tccccaaacattgaacttcgtcaga

SEQ ID NO: 4639036 - DNA, 25 bp, Homo sapien
cccatgtggtctttgtaggtctttc

SEQ ID NO: 4639037 - DNA, 25 bp, Homo sapien
tcacacagcgccaagaagagcatct

SEQ ID NO: 4639038 - DNA, 25 bp, Homo sapien
cacacagcgccaagaagagcatcta

SEQ ID NO: 4639039 - DNA, 25 bp, Homo sapien
ttcaagaagataagtaaagcagtag

SEQ ID NO: 4639040 - DNA, 25 bp, Homo sapien
gctctttcacaagaaagaattgcat

SEQ ID NO: 4639041 - DNA, 25 bp, Homo sapien
agatctttcatacattgccggtggg

SEQ ID NO: 4639042 - DNA, 25 bp, Homo sapien
gagatctacttcttcctatattggt

SEQ ID NO: 4639043 - DNA, 25 bp, Homo sapien
acattttgtacattcagagagtgag

SEQ ID NO: 4639044 - DNA, 25 bp, Homo sapien
gctatccagtaaagttataagttga

SEQ ID NO: 4639045 - DNA, 25 bp, Homo sapien
taagcgcatgaagaaaaagcctaac

SEQ ID NO: 4639046 - DNA, 25 bp, Homo sapien
aaaaatgacaaatggttgggtgcgg

SEQ ID NO: 4639047 - DNA, 25 bp, Homo sapien
catcacaagccatcaagaaaacgca

SEQ ID NO: 4639048 - DNA, 25 bp, Homo sapien
aaataaattttacagctcaacagta

SEQ ID NO: 4639049 - DNA, 25 bp, Homo sapien
gtgctgtggtggttcgctccatcta

SEQ ID NO: 4639050 - DNA, 25 bp, Homo sapien
gctccatctatcaacctgtaatcta

SEQ ID NO: 4639051 - DNA, 25 bp, Homo sapien
caacccctgacaggcctctgtgtgt

SEQ ID NO: 4639052 - DNA, 25 bp, Homo sapien
taatgagtagaaatgacttatttac

SEQ ID NO: 4639053 - DNA, 25 bp, Homo sapien
ggtatacattcttgagctctgttct

SEQ ID NO: 4639054 - DNA, 25 bp, Homo sapien
tctgatggtatacattcttgagctc

SEQ ID NO: 4639055 - DNA, 25 bp, Homo sapien
gacatctgatggtatacattcttga

SEQ ID NO: 4639056 - DNA, 25 bp, Homo sapien
aagttggagacatctgatggtatac

SEQ ID NO: 4639057 - DNA, 25 bp, Homo sapien
gctttataacccacctacgattgac

SEQ ID NO: 4639058 - DNA, 25 bp, Homo sapien
gagctttataacccacctacgattg

SEQ ID NO: 4639059 - DNA, 25 bp, Homo sapien
ataacccacctacgattgacttttg

SEQ ID NO: 4639060 - DNA, 25 bp, Homo sapien
ctttataacccacctacgattgact

SEQ ID NO: 4639061 - DNA, 25 bp, Homo sapien
ttgtgctatgagacctacagtgaaa

SEQ ID NO: 4639062 - DNA, 25 bp, Homo sapien
gtatttacaagtgggtatttggaca

SEQ ID NO: 4639063 - DNA, 25 bp, Homo sapien
ttgttgtgctatgagacctacagtg

SEQ ID NO: 4639064 - DNA, 25 bp, Homo sapien
tagtatttacaagtgggtatttgga

SEQ ID NO: 4639065 - DNA, 25 bp, Homo sapien
cttcacataagatgtagacagaagt

SEQ ID NO: 4639066 - DNA, 25 bp, Homo sapien
gtgcattcagctcacgaagttgaac

SEQ ID NO: 4639067 - DNA, 25 bp, Homo sapien
gagctgtttgcagcctatggtggaa

SEQ ID NO: 4639068 - DNA, 25 bp, Homo sapien
aaaaccttctttatgatgtgtgcat

SEQ ID NO: 4639069 - DNA, 25 bp, Homo sapien
ctcttgttgtagaatatgctagtgg

SEQ ID NO: 4639070 - DNA, 25 bp, Homo sapien
cacttggaacactttgaggcctata

SEQ ID NO: 4639071 - DNA, 25 bp, Homo sapien
ctgcaagtggatattaggtacccct

SEQ ID NO: 4639072 - DNA, 25 bp, Homo sapien
gagtggaacataccttatcatagag

SEQ ID NO: 4639073 - DNA, 25 bp, Homo sapien
gaattctgagaaacttctttgtgat

SEQ ID NO: 4639074 - DNA, 25 bp, Homo sapien
agggtgatggtcaataatgaaatat

SEQ ID NO: 4639075 - DNA, 25 bp, Homo sapien
ggtgatggtcaataatgaaatatct

SEQ ID NO: 4639076 - DNA, 25 bp, Homo sapien
gggtgatggtcaataatgaaatatc

SEQ ID NO: 4639077 - DNA, 25 bp, Homo sapien
gagggtgatggtcaataatgaaata

SEQ ID NO: 4639078 - DNA, 25 bp, Homo sapien
ctgcaagtggacactgggagcgatt

SEQ ID NO: 4639079 - DNA, 25 bp, Homo sapien
ttcttttgaaggatctgcatgtgga

SEQ ID NO: 4639080 - DNA, 25 bp, Homo sapien
atatttggatcggtttggggcctgt

SEQ ID NO: 4639081 - DNA, 25 bp, Homo sapien
cactgggagcgatttgaggcctatg

SEQ ID NO: 4639082 - DNA, 25 bp, Homo sapien
tatcaaccggatgctgtccatgtat

SEQ ID NO: 4639083 - DNA, 25 bp, Homo sapien
tctttcctgaagtctatggtagctg

SEQ ID NO: 4639084 - DNA, 25 bp, Homo sapien
catttttgtcattggctcgatgtgt

SEQ ID NO: 4639085 - DNA, 25 bp, Homo sapien
tttctctagagcatatcaaccggat

SEQ ID NO: 4639086 - DNA, 25 bp, Homo sapien
agagcctctaacagtcttcctttcc

SEQ ID NO: 4639087 - DNA, 25 bp, Homo sapien
tgcctctaacattcaaaagagcctc

SEQ ID NO: 4639088 - DNA, 25 bp, Homo sapien
gctgacatccttcttgacatttgca

SEQ ID NO: 4639089 - DNA, 25 bp, Homo sapien
tagatccacttgtactgcaggcctc

SEQ ID NO: 4639090 - DNA, 25 bp, Homo sapien
ttctgcctcacatagatacctgagg

SEQ ID NO: 4639091 - DNA, 25 bp, Homo sapien
ctccaaaataaagtggcttgtactg

SEQ ID NO: 4639092 - DNA, 25 bp, Homo sapien
gccgctggctccataggaaaattct

SEQ ID NO: 4639093 - DNA, 25 bp, Homo sapien
aaagtggcttgtactgtatttctcc

SEQ ID NO: 4639094 - DNA, 25 bp, Homo sapien
gtggcatacatgcaatttccatgga

SEQ ID NO: 4639095 - DNA, 25 bp, Homo sapien
gcctgttcattaattggtcccttgg

SEQ ID NO: 4639096 - DNA, 25 bp, Homo sapien
aaactgagaaggcaacgtggcatac

SEQ ID NO: 4639097 - DNA, 25 bp, Homo sapien
gagtaggatgctgaaaatgtgagta

SEQ ID NO: 4639098 - DNA, 25 bp, Homo sapien
ggcagacagcttaattcagatcaat

SEQ ID NO: 4639099 - DNA, 25 bp, Homo sapien
caaatctctgattattggaccaaac

SEQ ID NO: 4639100 - DNA, 25 bp, Homo sapien
tgctggccaacaatatcaggttctt

SEQ ID NO: 4639101 - DNA, 25 bp, Homo sapien
gggagccgcttaagatcataaataa

SEQ ID NO: 4639102 - DNA, 25 bp, Homo sapien
aagcactgtaatatggcttttggaa

SEQ ID NO: 4639103 - DNA, 25 bp, Homo sapien
agcactgtaatatggcttttggaaa

SEQ ID NO: 4639104 - DNA, 25 bp, Homo sapien
gcactgtaatatggcttttggaaat

SEQ ID NO: 4639105 - DNA, 25 bp, Homo sapien
cactgtaatatggcttttggaaata

SEQ ID NO: 4639106 - DNA, 25 bp, Homo sapien
taaaattctgcccattttggtgaag

SEQ ID NO: 4639107 - DNA, 25 bp, Homo sapien
taggcttcactattagtcttcagct

SEQ ID NO: 4639108 - DNA, 25 bp, Homo sapien
tgtgtgtggcacataaggagagctt

SEQ ID NO: 4639109 - DNA, 25 bp, Homo sapien
catggtggcaagctactctaatccc

SEQ ID NO: 4639110 - DNA, 25 bp, Homo sapien
gaactctttaatcatcccatataga

SEQ ID NO: 4639111 - DNA, 25 bp, Homo sapien
cagaactctttaatcatcccatata

SEQ ID NO: 4639112 - DNA, 25 bp, Homo sapien
ccagaactctttaatcatcccatat

SEQ ID NO: 4639113 - DNA, 25 bp, Homo sapien
agaactctttaatcatcccatatag

SEQ ID NO: 4639114 - DNA, 25 bp, Homo sapien
aaatcacattgttttaaggatttat

SEQ ID NO: 4639115 - DNA, 25 bp, Homo sapien
ttaaggatttatctttttgcctcat

SEQ ID NO: 4639116 - DNA, 25 bp, Homo sapien
tttaaggatttatctttttgcctca

SEQ ID NO: 4639117 - DNA, 25 bp, Homo sapien
cacattgttttaaggatttatcttt

SEQ ID NO: 4639118 - DNA, 25 bp, Homo sapien
aggcctcaggatcccttcctcgttg

SEQ ID NO: 4639119 - DNA, 25 bp, Homo sapien
caggcctcaggatcccttcctcgtt

SEQ ID NO: 4639120 - DNA, 25 bp, Homo sapien
taggcaacagagcatgcgcaactca

SEQ ID NO: 4639121 - DNA, 25 bp, Homo sapien
gcagtgcaggctcgccaccactggg

SEQ ID NO: 4639122 - DNA, 25 bp, Homo sapien
agcatgcgcaactcagcagaccggg

SEQ ID NO: 4639123 - DNA, 25 bp, Homo sapien
tggcagtgcaggctcgccaccactg

SEQ ID NO: 4639124 - DNA, 25 bp, Homo sapien
gatccccatggtgaatcacgtaaga

SEQ ID NO: 4639125 - DNA, 25 bp, Homo sapien
ctgagatccccatggtgaatcacgt

SEQ ID NO: 4639126 - DNA, 25 bp, Homo sapien
aggtccattgtcgtcttcttcatca

SEQ ID NO: 4639127 - DNA, 25 bp, Homo sapien
ttcaggtccattgtcgtcttcttca

SEQ ID NO: 4639128 - DNA, 25 bp, Homo sapien
ccccggctcaggcacggtctggtac

SEQ ID NO: 4639129 - DNA, 25 bp, Homo sapien
ccagcccccactctgaaggggcgat

SEQ ID NO: 4639130 - DNA, 25 bp, Homo sapien
cagcccccactctgaaggggcgatc

SEQ ID NO: 4639131 - DNA, 25 bp, Homo sapien
ctgcagccccggctcaggcacggtc

SEQ ID NO: 4639132 - DNA, 25 bp, Homo sapien
acagccgccccgctgcccgccactc

SEQ ID NO: 4639133 - DNA, 25 bp, Homo sapien
caggacagccgccccgctgcccgcc

SEQ ID NO: 4639134 - DNA, 25 bp, Homo sapien
ctcggggcccaggacagccgccccg

SEQ ID NO: 4639135 - DNA, 25 bp, Homo sapien
aggacagccgccccgctgcccgcca

SEQ ID NO: 4639136 - DNA, 25 bp, Homo sapien
ggacgtcaacctggcgttttctatc

SEQ ID NO: 4639137 - DNA, 25 bp, Homo sapien
catcaaggacgtcaacctggcgttt

SEQ ID NO: 4639138 - DNA, 25 bp, Homo sapien
caaggacgtcaacctggcgttttct

SEQ ID NO: 4639139 - DNA, 25 bp, Homo sapien
caacctggcgttttctatctaccag

SEQ ID NO: 4639140 - DNA, 25 bp, Homo sapien
tctcctgctgaaagaactggctaca

SEQ ID NO: 4639141 - DNA, 25 bp, Homo sapien
aaatccatctcctgctgaaagaact

SEQ ID NO: 4639142 - DNA, 25 bp, Homo sapien
tccatctcctgctgaaagaactggc

SEQ ID NO: 4639143 - DNA, 25 bp, Homo sapien
gctgaaagaactggctacaatttac

SEQ ID NO: 4639144 - DNA, 25 bp, Homo sapien
atatttggatcagcaccagaatcta

SEQ ID NO: 4639145 - DNA, 25 bp, Homo sapien
tacacatctacaatatttggatcag

SEQ ID NO: 4639146 - DNA, 25 bp, Homo sapien
tttggatcagcaccagaatctatga

SEQ ID NO: 4639147 - DNA, 25 bp, Homo sapien
ggatcagcaccagaatctatgagaa

SEQ ID NO: 4639148 - DNA, 25 bp, Homo sapien
gattccaaatgccaatgtcaggcac

SEQ ID NO: 4639149 - DNA, 25 bp, Homo sapien
accatgctggtcttctcaacgttgt

SEQ ID NO: 4639150 - DNA, 25 bp, Homo sapien
gggaccatgctggtcttctcaacgt

SEQ ID NO: 4639151 - DNA, 25 bp, Homo sapien
atgctggtcttctcaacgttgtttc

SEQ ID NO: 4639152 - DNA, 25 bp, Homo sapien
tggtcttctcaacgttgtttcaatt

SEQ ID NO: 4639153 - DNA, 25 bp, Homo sapien
gactcttcaatctttccagatattg

SEQ ID NO: 4639154 - DNA, 25 bp, Homo sapien
tccccaaacattgaacttcgtcaga

SEQ ID NO: 4639155 - DNA, 25 bp, Homo sapien
cacaggccttgtaattttcctaggt

SEQ ID NO: 4639156 - DNA, 25 bp, Homo sapien
cccatgtggtctttgtaggtctttc

SEQ ID NO: 4639157 - DNA, 25 bp, Homo sapien
cacacagcgccaagaagagcatcta

SEQ ID NO: 4639158 - DNA, 25 bp, Homo sapien
ttcaagaagataagtaaagcagtag

SEQ ID NO: 4639159 - DNA, 25 bp, Homo sapien
tcacacagcgccaagaagagcatct

SEQ ID NO: 4639160 - DNA, 25 bp, Homo sapien
gctctttcacaagaaagaattgcat

SEQ ID NO: 4639161 - DNA, 25 bp, Homo sapien
tgtagtacacgaagcttttttttca

SEQ ID NO: 4639162 - DNA, 25 bp, Homo sapien
ccaagtcaataattagaatggtaga

SEQ ID NO: 4639163 - DNA, 25 bp, Homo sapien
gcaattatgccttgcagcacttatt

SEQ ID NO: 4639164 - DNA, 25 bp, Homo sapien
gatttacatgcaattatgccttgca

SEQ ID NO: 4639165 - DNA, 25 bp, Homo sapien
tattccaagtcaataattagaatgg

SEQ ID NO: 4639166 - DNA, 25 bp, Homo sapien
aaaaatgacaaatggttgggtgcgg

SEQ ID NO: 4639167 - DNA, 25 bp, Homo sapien
taagcgcatgaagaaaaagcctaac

SEQ ID NO: 4639168 - DNA, 25 bp, Homo sapien
catcacaagccatcaagaaaacgca

SEQ ID NO: 4639169 - DNA, 25 bp, Homo sapien
aaataaattttacagctcaacagta

SEQ ID NO: 4639170 - DNA, 25 bp, Homo sapien
gatatcttctcccaatttaacttgt

SEQ ID NO: 4639171 - DNA, 25 bp, Homo sapien
gtagttaacgcttatttagtcttgc

SEQ ID NO: 4639172 - DNA, 25 bp, Homo sapien
ggacctaaacattgcagatatcttc

SEQ ID NO: 4639173 - DNA, 25 bp, Homo sapien
tctttctcttaatggtgacttcgtt

SEQ ID NO: 4639174 - DNA, 25 bp, Homo sapien
tatcactgatggacatttttgttgg

SEQ ID NO: 4639175 - DNA, 25 bp, Homo sapien
ggtttccagcttcatttgtgtccct

SEQ ID NO: 4639176 - DNA, 25 bp, Homo sapien
gcttcatttgtgtccctacaaagga

SEQ ID NO: 4639177 - DNA, 25 bp, Homo sapien
tcactgatggacatttttgttggtt

SEQ ID NO: 4639178 - DNA, 25 bp, Homo sapien
cacagaatgctaattttccccagac

SEQ ID NO: 4639179 - DNA, 25 bp, Homo sapien
attcaagtttgcatcccattttggg

SEQ ID NO: 4639180 - DNA, 25 bp, Homo sapien
taatgcgaggccagaaattgttgac

SEQ ID NO: 4639181 - DNA, 25 bp, Homo sapien
gcagttgaatccctggcatttttca

SEQ ID NO: 4639182 - DNA, 25 bp, Homo sapien
aagtagactctcatggtcttgggca

SEQ ID NO: 4639183 - DNA, 25 bp, Homo sapien
cccattccatataggagaattggac

SEQ ID NO: 4639184 - DNA, 25 bp, Homo sapien
gaagaagtagactctcatggtcttg

SEQ ID NO: 4639185 - DNA, 25 bp, Homo sapien
gtggaagaagtagactctcatggtc

SEQ ID NO: 4639186 - DNA, 25 bp, Homo sapien
aatgttctgctttagattttcccag

SEQ ID NO: 4639187 - DNA, 25 bp, Homo sapien
taatgtggacatgtttcactcaaat

SEQ ID NO: 4639188 - DNA, 25 bp, Homo sapien
tcattcatagtacaaagcaacactt

SEQ ID NO: 4639189 - DNA, 25 bp, Homo sapien
tgcctaaggcttaccagaagcttta

SEQ ID NO: 4639190 - DNA, 25 bp, Homo sapien
gcaaagagacaattcaatccaatgt

SEQ ID NO: 4639191 - DNA, 25 bp, Homo sapien
aatccaatgtgccaagctggtcccc

SEQ ID NO: 4639192 - DNA, 25 bp, Homo sapien
tctgtgtacatgagtatctgatggt

SEQ ID NO: 4639193 - DNA, 25 bp, Homo sapien
tacatggcaagccatctgcttaatc

SEQ ID NO: 4639194 - DNA, 25 bp, Homo sapien
cagaaagtgaagcagagtcaaccag

SEQ ID NO: 4639195 - DNA, 25 bp, Homo sapien
ttccagaattccaagcatacagatc

SEQ ID NO: 4639196 - DNA, 25 bp, Homo sapien
tgtgagccacaattgccccatttgg

SEQ ID NO: 4639197 - DNA, 25 bp, Homo sapien
aactaaaagttccatctagatgatg

SEQ ID NO: 4639198 - DNA, 25 bp, Homo sapien
agagaagatggcatgactttcagat

SEQ ID NO: 4639199 - DNA, 25 bp, Homo sapien
gaagatggcatgactttcagatgaa

SEQ ID NO: 4639200 - DNA, 25 bp, Homo sapien
gagaagatggcatgactttcagatg

SEQ ID NO: 4639201 - DNA, 25 bp, Homo sapien
gatggcatgactttcagatgaatct

SEQ ID NO: 4639202 - DNA, 25 bp, Homo sapien
tttcatcacagccattttggtgaaa

SEQ ID NO: 4639203 - DNA, 25 bp, Homo sapien
tcatcacagccattttggtgaaaaa

SEQ ID NO: 4639204 - DNA, 25 bp, Homo sapien
tatatggcagtgttaaatttttatt

SEQ ID NO: 4639205 - DNA, 25 bp, Homo sapien
attatatggcagtgttaaattttta

SEQ ID NO: 4639206 - DNA, 25 bp, Homo sapien
gaaaccatgtgctcataaatcttca

SEQ ID NO: 4639207 - DNA, 25 bp, Homo sapien
cagctcctgtagaatgcattttggg

SEQ ID NO: 4639208 - DNA, 25 bp, Homo sapien
tgtgataccatctcaccccagtcta

SEQ ID NO: 4639209 - DNA, 25 bp, Homo sapien
tacacaccatccaatgctatgcagc

SEQ ID NO: 4639210 - DNA, 25 bp, Homo sapien
gcttggcacctcaactatagcacac

SEQ ID NO: 4639211 - DNA, 25 bp, Homo sapien
tttaataggaggactcttctcagca

SEQ ID NO: 4639212 - DNA, 25 bp, Homo sapien
cagcattttttgtatggcacatgta

SEQ ID NO: 4639213 - DNA, 25 bp, Homo sapien
tagaagctatttttcgcttggcacc

SEQ ID NO: 4639214 - DNA, 25 bp, Homo sapien
tatgatgactcatatcatggaatca

SEQ ID NO: 4639215 - DNA, 25 bp, Homo sapien
cattgtagtcgttaagagtatttac

SEQ ID NO: 4639216 - DNA, 25 bp, Homo sapien
tctctagaacttttacgtcttctaa

SEQ ID NO: 4639217 - DNA, 25 bp, Homo sapien
acattgttatgtaaagatctctaga

SEQ ID NO: 4639218 - DNA, 25 bp, Homo sapien
cagggtaatgggtccacagggtaat

SEQ ID NO: 4639219 - DNA, 25 bp, Homo sapien
agatctccttttgttgggtccccag

SEQ ID NO: 4639220 - DNA, 25 bp, Homo sapien
aatggaaccatgtagccttaccctg

SEQ ID NO: 4639221 - DNA, 25 bp, Homo sapien
aatgggatgccctatgagcttgtag

SEQ ID NO: 4639222 - DNA, 25 bp, Homo sapien
caaagcctattgtagtttcatgcaa

SEQ ID NO: 4639223 - DNA, 25 bp, Homo sapien
ttcaaagcctattgtagtttcatgc

SEQ ID NO: 4639224 - DNA, 25 bp, Homo sapien
cttttgcctggaggtatccagtttt

SEQ ID NO: 4639225 - DNA, 25 bp, Homo sapien
gaggtatccagttttttcagaacca

SEQ ID NO: 4639226 - DNA, 25 bp, Homo sapien
tataactctccaagaatgtacagaa

SEQ ID NO: 4639227 - DNA, 25 bp, Homo sapien
agtactttatggcttatctcttggc

SEQ ID NO: 4639228 - DNA, 25 bp, Homo sapien
atactactattgctagattgtgcag

SEQ ID NO: 4639229 - DNA, 25 bp, Homo sapien
tgcctattttgaactgggttactgt

SEQ ID NO: 4639230 - DNA, 25 bp, Homo sapien
gatttgttcgtagcaggtttattca

SEQ ID NO: 4639231 - DNA, 25 bp, Homo sapien
tatgtacttaaactcaagaaaagtg

SEQ ID NO: 4639232 - DNA, 25 bp, Homo sapien
cattgtagtttaagatggcataacc

SEQ ID NO: 4639233 - DNA, 25 bp, Homo sapien
gagaaggcagacagctactcagcag

SEQ ID NO: 4639234 - DNA, 25 bp, Homo sapien
tccagcaatcacaagaggtctttat

SEQ ID NO: 4639235 - DNA, 25 bp, Homo sapien
ttatggttgtgagccccggcctctg

SEQ ID NO: 4639236 - DNA, 25 bp, Homo sapien
tgcaatgatgcagtcgtagctaact

SEQ ID NO: 4639237 - DNA, 25 bp, Homo sapien
gggaggtaagagagtcagaattgaa

SEQ ID NO: 4639238 - DNA, 25 bp, Homo sapien
gttgaagatgagtccgcagagaaca

SEQ ID NO: 4639239 - DNA, 25 bp, Homo sapien
tgaagatgagtccgcagagaacagg

SEQ ID NO: 4639240 - DNA, 25 bp, Homo sapien
agatgagtccgcagagaacaggatg

SEQ ID NO: 4639241 - DNA, 25 bp, Homo sapien
aagatgagtccgcagagaacaggat

SEQ ID NO: 4639242 - DNA, 25 bp, Homo sapien
tttagagggcaatgaccaaacagta

SEQ ID NO: 4639243 - DNA, 25 bp, Homo sapien
tgaccaaacagtaccagcagaaatt

SEQ ID NO: 4639244 - DNA, 25 bp, Homo sapien
cagcagaaattgaagtaccagcaga

SEQ ID NO: 4639245 - DNA, 25 bp, Homo sapien
ttctttagagggcaatgaccaaaca

SEQ ID NO: 4639246 - DNA, 25 bp, Homo sapien
ctccagtaggatgagcctgtttacc

SEQ ID NO: 4639247 - DNA, 25 bp, Homo sapien
acagatgagcatggtacttgaagca

SEQ ID NO: 4639248 - DNA, 25 bp, Homo sapien
gcaggcagattacgttacttggatt

SEQ ID NO: 4639249 - DNA, 25 bp, Homo sapien
gtttaccttgtgactgcctaacaga

SEQ ID NO: 4639250 - DNA, 25 bp, Homo sapien
ctctggttttaaagtcagagcacat

SEQ ID NO: 4639251 - DNA, 25 bp, Homo sapien
gggtctctggttttaaagtcagagc

SEQ ID NO: 4639252 - DNA, 25 bp, Homo sapien
tggaccttacttgaagggtctctgg

SEQ ID NO: 4639253 - DNA, 25 bp, Homo sapien
cgtggaccttacttgaagggtctct

SEQ ID NO: 4639254 - DNA, 25 bp, Homo sapien
tatccagcaggttatagatgacggg

SEQ ID NO: 4639255 - DNA, 25 bp, Homo sapien
tataggatgtccaaatgaggttgag

SEQ ID NO: 4639256 - DNA, 25 bp, Homo sapien
ggattccgttcctgctgatgagtac

SEQ ID NO: 4639257 - DNA, 25 bp, Homo sapien
gacttgaagggtaataggtgccaga

SEQ ID NO: 4639258 - DNA, 25 bp, Homo sapien
gtcagagtgatgtcatccaggtaaa

SEQ ID NO: 4639259 - DNA, 25 bp, Homo sapien
tttctgtcagagtgatgtcatccag

SEQ ID NO: 4639260 - DNA, 25 bp, Homo sapien
gtgatgtcatccaggtaaattcccc

SEQ ID NO: 4639261 - DNA, 25 bp, Homo sapien
ggtttctgtcagagtgatgtcatcc

SEQ ID NO: 4639262 - DNA, 25 bp, Homo sapien
aaaccgcatccctctgaattgtaga

SEQ ID NO: 4639263 - DNA, 25 bp, Homo sapien
tctgccatgggggtataaagttaac

SEQ ID NO: 4639264 - DNA, 25 bp, Homo sapien
aacccaaaaccgcatccctctgaat

SEQ ID NO: 4639265 - DNA, 25 bp, Homo sapien
ccaaaaccgcatccctctgaattgt

SEQ ID NO: 4639266 - DNA, 25 bp, Homo sapien
ctggagatatgtgcaacttggaggt

SEQ ID NO: 4639267 - DNA, 25 bp, Homo sapien
ttggaggtagtgaacaccaaacttg

SEQ ID NO: 4639268 - DNA, 25 bp, Homo sapien
ggtagtgaacaccaaacttgaggac

SEQ ID NO: 4639269 - DNA, 25 bp, Homo sapien
gatatgtgcaacttggaggtagtga

SEQ ID NO: 4639270 - DNA, 25 bp, Homo sapien
ccaccctggacggcctgtcccagat

SEQ ID NO: 4639271 - DNA, 25 bp, Homo sapien
tcccaccctggacggcctgtcccag

SEQ ID NO: 4639272 - DNA, 25 bp, Homo sapien
ttcccaccctggacggcctgtccca

SEQ ID NO: 4639273 - DNA, 25 bp, Homo sapien
accctggacggcctgtcccagatga

SEQ ID NO: 4639274 - DNA, 25 bp, Homo sapien
ctttagtgggaacttcagtctggct

SEQ ID NO: 4639275 - DNA, 25 bp, Homo sapien
cttggagaatgaggccttgggggct

SEQ ID NO: 4639276 - DNA, 25 bp, Homo sapien
tgcctttagtgggaacttcagtctg

SEQ ID NO: 4639277 - DNA, 25 bp, Homo sapien
tcttttgcctttagtgggaacttca

SEQ ID NO: 4639278 - DNA, 25 bp, Homo sapien
caagggtttgggtcacatgggtctc

SEQ ID NO: 4639279 - DNA, 25 bp, Homo sapien
gggtctctgaagtactgtggccagt

SEQ ID NO: 4639280 - DNA, 25 bp, Homo sapien
tgggtctctgaagtactgtggccag

SEQ ID NO: 4639281 - DNA, 25 bp, Homo sapien
gcaagggtttgggtcacatgggtct

SEQ ID NO: 4639282 - DNA, 25 bp, Homo sapien
caggacgctgccgtgcaactgcatg

SEQ ID NO: 4639283 - DNA, 25 bp, Homo sapien
gctgccgtgcaactgcatggcctga

SEQ ID NO: 4639284 - DNA, 25 bp, Homo sapien
cctgacagcgctcccatttagaaga

SEQ ID NO: 4639285 - DNA, 25 bp, Homo sapien
gacgctgccgtgcaactgcatggcc

SEQ ID NO: 4639286 - DNA, 25 bp, Homo sapien
caatgatggagaaggtcaagaagat

SEQ ID NO: 4639287 - DNA, 25 bp, Homo sapien
ctttgggaaaggatggcaatgatgg

SEQ ID NO: 4639288 - DNA, 25 bp, Homo sapien
tttgggaaaggatggcaatgatgga

SEQ ID NO: 4639289 - DNA, 25 bp, Homo sapien
atggagaaggtcaagaagatcacac

SEQ ID NO: 4639290 - DNA, 25 bp, Homo sapien
ggtctggccaatgccaacaggcagg

SEQ ID NO: 4639291 - DNA, 25 bp, Homo sapien
cattggaaggtaaggcctgcatgga

SEQ ID NO: 4639292 - DNA, 25 bp, Homo sapien
tgtggtctggccaatgccaacaggc

SEQ ID NO: 4639293 - DNA, 25 bp, Homo sapien
gctgctgtggtctggccaatgccaa

SEQ ID NO: 4639294 - DNA, 25 bp, Homo sapien
agctgggttggagtgacagctggct

SEQ ID NO: 4639295 - DNA, 25 bp, Homo sapien
aagcattcccgacaggaatctccag

SEQ ID NO: 4639296 - DNA, 25 bp, Homo sapien
gcagctccgcaacccctgctggcgt

SEQ ID NO: 4639297 - DNA, 25 bp, Homo sapien
gctgtcctatcccaagcattcccga

SEQ ID NO: 4639298 - DNA, 25 bp, Homo sapien
aaaactgtgcatgcgttttctgttt

SEQ ID NO: 4639299 - DNA, 25 bp, Homo sapien
gaaaaactgtgcatgcgttttctgt

SEQ ID NO: 4639300 - DNA, 25 bp, Homo sapien
gagaaaaactgtgcatgcgttttct

SEQ ID NO: 4639301 - DNA, 25 bp, Homo sapien
aaaaactgtgcatgcgttttctgtt

SEQ ID NO: 4639302 - DNA, 25 bp, Homo sapien
gaaggatgccggtgactattgaagc

SEQ ID NO: 4639303 - DNA, 25 bp, Homo sapien
tgaaggatgccggtgactattgaag

SEQ ID NO: 4639304 - DNA, 25 bp, Homo sapien
ggagatacatgagcctgttcccacc

SEQ ID NO: 4639305 - DNA, 25 bp, Homo sapien
ggtggcatggttaggagatacatga

SEQ ID NO: 4639306 - DNA, 25 bp, Homo sapien
aaaggccaccagtgtccatgacagg

SEQ ID NO: 4639307 - DNA, 25 bp, Homo sapien
accagtgtccatgacaggtccctct

SEQ ID NO: 4639308 - DNA, 25 bp, Homo sapien
ctgtaaactttgaaatgaagttgaa

SEQ ID NO: 4639309 - DNA, 25 bp, Homo sapien
tgtccatgacaggtccctctgcaca

SEQ ID NO: 4639310 - DNA, 25 bp, Homo sapien
cttaaatgattttatacacacccat

SEQ ID NO: 4639311 - DNA, 25 bp, Homo sapien
tgattttatacacacccattttccc

SEQ ID NO: 4639312 - DNA, 25 bp, Homo sapien
ctgggattattcttaaatgatttta

SEQ ID NO: 4639313 - DNA, 25 bp, Homo sapien
ttcttaaatgattttatacacaccc

SEQ ID NO: 4639314 - DNA, 25 bp, Homo sapien
taaagttttcagaaccagttgtctg

SEQ ID NO: 4639315 - DNA, 25 bp, Homo sapien
tccaacatttgtgtgaggatggctt

SEQ ID NO: 4639316 - DNA, 25 bp, Homo sapien
aaacagatgcctgttccaacatttg

SEQ ID NO: 4639317 - DNA, 25 bp, Homo sapien
gaaccagttgtctggcgaacaaaca

SEQ ID NO: 4639318 - DNA, 25 bp, Homo sapien
gcaacactgtctctgtagtaattgt

SEQ ID NO: 4639319 - DNA, 25 bp, Homo sapien
tgtcacccagaatgcagctctattc

SEQ ID NO: 4639320 - DNA, 25 bp, Homo sapien
gacttcccgcaacactgtctctgta

SEQ ID NO: 4639321 - DNA, 25 bp, Homo sapien
gcctctcaggcttccgcatgtcacc

SEQ ID NO: 4639322 - DNA, 25 bp, Homo sapien
ttctctggcatttctagctcttggg

SEQ ID NO: 4639323 - DNA, 25 bp, Homo sapien
caactctgttagttctctggcattt

SEQ ID NO: 4639324 - DNA, 25 bp, Homo sapien
tgccacacatgcatgagaacgacaa

SEQ ID NO: 4639325 - DNA, 25 bp, Homo sapien
catgcatgagaacgacaactctgtt

SEQ ID NO: 4639326 - DNA, 25 bp, Homo sapien
aaacctggctgctggtatgatgtga

SEQ ID NO: 4639327 - DNA, 25 bp, Homo sapien
gtatgatgtgaagtagtgactgctt

SEQ ID NO: 4639328 - DNA, 25 bp, Homo sapien
tggtatgatgtgaagtagtgactgc

SEQ ID NO: 4639329 - DNA, 25 bp, Homo sapien
tcctttgtagaaacctggctgctgg

SEQ ID NO: 4639330 - DNA, 25 bp, Homo sapien
gttcccagaccatgcacgtgatggc

SEQ ID NO: 4639331 - DNA, 25 bp, Homo sapien
cgtgatggcatatggagggcttccc

SEQ ID NO: 4639332 - DNA, 25 bp, Homo sapien
tgtaagtcaccacaacccaagagga

SEQ ID NO: 4639333 - DNA, 25 bp, Homo sapien
gagattccctcatgcagatgttccc

SEQ ID NO: 4639334 - DNA, 25 bp, Homo sapien
gtgagtagtggcctctatgttctcc

SEQ ID NO: 4639335 - DNA, 25 bp, Homo sapien
tgtttggtaaaacaggtgagtagtg

SEQ ID NO: 4639336 - DNA, 25 bp, Homo sapien
tgagttctccaatatcaaggagatt

SEQ ID NO: 4639337 - DNA, 25 bp, Homo sapien
tagtcaacatccctgggttcatcca

SEQ ID NO: 4639338 - DNA, 25 bp, Homo sapien
gttccatatcgtatttgccatcctc

SEQ ID NO: 4639339 - DNA, 25 bp, Homo sapien
tgacagcagacagtagtgttccttg

SEQ ID NO: 4639340 - DNA, 25 bp, Homo sapien
gtgttccttgtgttccatatcgtat

SEQ ID NO: 4639341 - DNA, 25 bp, Homo sapien
tgtcttccaggtgagttttgcagtg

SEQ ID NO: 4639342 - DNA, 25 bp, Homo sapien
tagtcggagtcttgcctaggtttcc

SEQ ID NO: 4639343 - DNA, 25 bp, Homo sapien
aatatctggcacttcactggtgcta

SEQ ID NO: 4639344 - DNA, 25 bp, Homo sapien
caaggcctacatagtccaaagtgac

SEQ ID NO: 4639345 - DNA, 25 bp, Homo sapien
aagtgacatcactcaaatatctggc

SEQ ID NO: 4639346 - DNA, 25 bp, Homo sapien
accccacaaccgtccctggtgtgtg

SEQ ID NO: 4639347 - DNA, 25 bp, Homo sapien
ccacaaccgtccctggtgtgtgatg

SEQ ID NO: 4639348 - DNA, 25 bp, Homo sapien
cccacaaccgtccctggtgtgtgat

SEQ ID NO: 4639349 - DNA, 25 bp, Homo sapien
taacatactctagtcttgtcttgaa

SEQ ID NO: 4639350 - DNA, 25 bp, Homo sapien
cattatcagaatggtagtgatagcc

SEQ ID NO: 4639351 - DNA, 25 bp, Homo sapien
taggacagctaattccattatcaga

SEQ ID NO: 4639352 - DNA, 25 bp, Homo sapien
taggtcatcaggtatgtaggacagc

SEQ ID NO: 4639353 - DNA, 25 bp, Homo sapien
cacctgggcctagtatccacttggg

SEQ ID NO: 4639354 - DNA, 25 bp, Homo sapien
gggcctcatatccatctggaacatc

SEQ ID NO: 4639355 - DNA, 25 bp, Homo sapien
gcctcatatccatctggaacatcat

SEQ ID NO: 4639356 - DNA, 25 bp, Homo sapien
tgcccctgagatctgggtccacctg

SEQ ID NO: 4639357 - DNA, 25 bp, Homo sapien
ttaggtgattaaggactggcgttcc

SEQ ID NO: 4639358 - DNA, 25 bp, Homo sapien
taggtgattaaggactggcgttcct

SEQ ID NO: 4639359 - DNA, 25 bp, Homo sapien
tgattaaggactggcgttcctctgg

SEQ ID NO: 4639360 - DNA, 25 bp, Homo sapien
ggtgattaaggactggcgttcctct

SEQ ID NO: 4639361 - DNA, 25 bp, Homo sapien
gtcctgatgtccatcttgatcctga

SEQ ID NO: 4639362 - DNA, 25 bp, Homo sapien
cagctggggcctagatacccactgg

SEQ ID NO: 4639363 - DNA, 25 bp, Homo sapien
cctgagtgtccacattgggcctgat

SEQ ID NO: 4639364 - DNA, 25 bp, Homo sapien
ttgatgtccacctgtcaccagatgt

SEQ ID NO: 4639365 - DNA, 25 bp, Homo sapien
tggtgcctgaagttcatctatgcct

SEQ ID NO: 4639366 - DNA, 25 bp, Homo sapien
gcctgaagttcatctatgcctggtg

SEQ ID NO: 4639367 - DNA, 25 bp, Homo sapien
agctggtgcctgaagttcatctatg

SEQ ID NO: 4639368 - DNA, 25 bp, Homo sapien
aagttcatctatgcctggtgtctcc

SEQ ID NO: 4639369 - DNA, 25 bp, Homo sapien
ggcctcgtgtccaccttgggacaga

SEQ ID NO: 4639370 - DNA, 25 bp, Homo sapien
tggcctcgtgtccaccttgggacag

SEQ ID NO: 4639371 - DNA, 25 bp, Homo sapien
gtggcctcgtgtccaccttgggaca

SEQ ID NO: 4639372 - DNA, 25 bp, Homo sapien
aaaaaactgcgccgcccagaagtgg

SEQ ID NO: 4639373 - DNA, 25 bp, Homo sapien
tcgaaaccagggtgagcttcgggcc

SEQ ID NO: 4639374 - DNA, 25 bp, Homo sapien
tagtggtacctcaaggcgggcagaa

SEQ ID NO: 4639375 - DNA, 25 bp, Homo sapien
ggagaccctagcgtccctggctcga

SEQ ID NO: 4639376 - DNA, 25 bp, Homo sapien
agcccttgcgctgggcccaggtgac

SEQ ID NO: 4639377 - DNA, 25 bp, Homo sapien
tgtcctcacatcagcgcttgcgctg

SEQ ID NO: 4639378 - DNA, 25 bp, Homo sapien
ttcgagaccagggtgcgcttcaggc

SEQ ID NO: 4639379 - DNA, 25 bp, Homo sapien
ccaacggacaaaagtgtcttcccat

SEQ ID NO: 4639380 - DNA, 25 bp, Homo sapien
cagacccggagagcattgccagggc

SEQ ID NO: 4639381 - DNA, 25 bp, Homo sapien
ctggagaccctggttcaagccacgg

SEQ ID NO: 4639382 - DNA, 25 bp, Homo sapien
tacagcgaagcggagcatgttctcc

SEQ ID NO: 4639383 - DNA, 25 bp, Homo sapien
tactcggagccgcatcaatggtgaa

SEQ ID NO: 4639384 - DNA, 25 bp, Homo sapien
tacgcctcgggccactagtgttagc

SEQ ID NO: 4639385 - DNA, 25 bp, Homo sapien
tagcccgttcgcttggcactgaggt

SEQ ID NO: 4639386 - DNA, 25 bp, Homo sapien
cggtaccagaaagcgaacaaatggt

SEQ ID NO: 4639387 - DNA, 25 bp, Homo sapien
gcttcgggaccgcttgcggtaccag

SEQ ID NO: 4639388 - DNA, 25 bp, Homo sapien
ggccacaaggcgtgctgtcgcctgc

SEQ ID NO: 4639389 - DNA, 25 bp, Homo sapien
cgtagtgggcgacgatgagacggac

SEQ ID NO: 4639390 - DNA, 25 bp, Homo sapien
gcctgcaaaggcactgacccacgag

SEQ ID NO: 4639391 - DNA, 25 bp, Homo sapien
gggctccggcatctcgacgcggctt

SEQ ID NO: 4639392 - DNA, 25 bp, Homo sapien
ggagcggtcgtctggatctagccta

SEQ ID NO: 4639393 - DNA, 25 bp, Homo sapien
agagacggtagtgggcacacagaca

SEQ ID NO: 4639394 - DNA, 25 bp, Homo sapien
gggaacatgtgtcccaaggcgcacg

SEQ ID NO: 4639395 - DNA, 25 bp, Homo sapien
gaagaaaggccgacgtgcaagaaac

SEQ ID NO: 4639396 - DNA, 25 bp, Homo sapien
agggcagggcaagaggcgtgagaag

SEQ ID NO: 4639397 - DNA, 25 bp, Homo sapien
agggcaagaggcgtgagaagcatct

SEQ ID NO: 4639398 - DNA, 25 bp, Homo sapien
gcaagaggcgtgagaagcatcttct

SEQ ID NO: 4639399 - DNA, 25 bp, Homo sapien
atcttctggaaggtctgcgggcacc

SEQ ID NO: 4639400 - DNA, 25 bp, Homo sapien
tctgtggtggacttctatactgcct

SEQ ID NO: 4639401 - DNA, 25 bp, Homo sapien
ttcacccagccccaagatgaggtgg

SEQ ID NO: 4639402 - DNA, 25 bp, Homo sapien
ggtcacaggcattcaagaggtttca

SEQ ID NO: 4639403 - DNA, 25 bp, Homo sapien
tgtgggccgcaatcttggaacaaat

SEQ ID NO: 4639404 - DNA, 25 bp, Homo sapien
gtcattttattggacacaaatgcta

SEQ ID NO: 4639405 - DNA, 25 bp, Homo sapien
tacctggactaaatctattctaaca

SEQ ID NO: 4639406 - DNA, 25 bp, Homo sapien
tataccaaccgaatagttttgtgtg

SEQ ID NO: 4639407 - DNA, 25 bp, Homo sapien
gtgaacactcaagtaataatcaggg

SEQ ID NO: 4639408 - DNA, 25 bp, Homo sapien
ggactgatcttacttccttggtagg

SEQ ID NO: 4639409 - DNA, 25 bp, Homo sapien
ccttggtaggtggtcttacttcatc

SEQ ID NO: 4639410 - DNA, 25 bp, Homo sapien
cagtcaagaatgctgctcaaaaatt

SEQ ID NO: 4639411 - DNA, 25 bp, Homo sapien
gagcagaatttcatgtacagttcat

SEQ ID NO: 4639412 - DNA, 25 bp, Homo sapien
tgagtcatcatggtgccacggcatt

SEQ ID NO: 4639413 - DNA, 25 bp, Homo sapien
gaatggattctctctagggacctca

SEQ ID NO: 4639414 - DNA, 25 bp, Homo sapien
ataatgagtttgttgccgggcgcag

SEQ ID NO: 4639415 - DNA, 25 bp, Homo sapien
atatgagagggaggagtaccactgc

SEQ ID NO: 4639416 - DNA, 25 bp, Homo sapien
aaagcatgtccggttctggtggctc

SEQ ID NO: 4639417 - DNA, 25 bp, Homo sapien
gcttcatgggtggactgcctgttta

SEQ ID NO: 4639418 - DNA, 25 bp, Homo sapien
tagttgtaacagagcctaatggcac

SEQ ID NO: 4639419 - DNA, 25 bp, Homo sapien
ggtcagcaagctatagcttcatggg

SEQ ID NO: 4639420 - DNA, 25 bp, Homo sapien
aaagattttgttcaggcacttagaa

SEQ ID NO: 4639421 - DNA, 25 bp, Homo sapien
tcagagaaactatctttcaagatgt

SEQ ID NO: 4639422 - DNA, 25 bp, Homo sapien
attagaagataatgaagcaacatct

SEQ ID NO: 4639423 - DNA, 25 bp, Homo sapien
taaacattgtcagctgggaattgta

SEQ ID NO: 4639424 - DNA, 25 bp, Homo sapien
ttggatcagtcatagagcgcaatag

SEQ ID NO: 4639425 - DNA, 25 bp, Homo sapien
gtgtcctataagtacccaaatacgc

SEQ ID NO: 4639426 - DNA, 25 bp, Homo sapien
tttcatcttaaggagctttcgggcc

SEQ ID NO: 4639427 - DNA, 25 bp, Homo sapien
tcctgagactctgccaaaggtgttt

SEQ ID NO: 4639428 - DNA, 25 bp, Homo sapien
ctgaatccaatggctaggaaaaaat

SEQ ID NO: 4639429 - DNA, 25 bp, Homo sapien
aatatagatctagcaagtttgaagt

SEQ ID NO: 4639430 - DNA, 25 bp, Homo sapien
gaagataaagaattgttgacgtaaa

SEQ ID NO: 4639431 - DNA, 25 bp, Homo sapien
cagagacatgcaagaagaggttaca

SEQ ID NO: 4639432 - DNA, 25 bp, Homo sapien
aacagctcaagctatactttggtcc

SEQ ID NO: 4639433 - DNA, 25 bp, Homo sapien
gcaacagctcaagctatactttggt

SEQ ID NO: 4639434 - DNA, 25 bp, Homo sapien
gctcaagctatactttggtcccttt

SEQ ID NO: 4639435 - DNA, 25 bp, Homo sapien
ccaccctatgaagcaacagctcaag

SEQ ID NO: 4639436 - DNA, 25 bp, Homo sapien
gcgcccagccgctactgcattgatt

SEQ ID NO: 4639437 - DNA, 25 bp, Homo sapien
cgcgcccagccgctactgcattgat

SEQ ID NO: 4639438 - DNA, 25 bp, Homo sapien
cgcccagccgctactgcattgattc

SEQ ID NO: 4639439 - DNA, 25 bp, Homo sapien
cccagccagttgttctattttacac

SEQ ID NO: 4639440 - DNA, 25 bp, Homo sapien
tacactctcacaagaaatagacacg

SEQ ID NO: 4639441 - DNA, 25 bp, Homo sapien
tggtagtctttccagtttcgatgca

SEQ ID NO: 4639442 - DNA, 25 bp, Homo sapien
agacacgacttctagtttccccaca

SEQ ID NO: 4639443 - DNA, 25 bp, Homo sapien
cttcctctcagagattaatatgcaa

SEQ ID NO: 4639444 - DNA, 25 bp, Homo sapien
tctaccaacagataacattcttcct

SEQ ID NO: 4639445 - DNA, 25 bp, Homo sapien
taaacgtgtcaaaaatgtggtttca

SEQ ID NO: 4639446 - DNA, 25 bp, Homo sapien
tcagaggcaaacctgtataatttct

SEQ ID NO: 4639447 - DNA, 25 bp, Homo sapien
caatgataagtaacacatggctccc

SEQ ID NO: 4639448 - DNA, 25 bp, Homo sapien
ctagataatgaagtagtcctaaaat

SEQ ID NO: 4639449 - DNA, 25 bp, Homo sapien
tatggtatcacaatactctgagcaa

SEQ ID NO: 4639450 - DNA, 25 bp, Homo sapien
ggctaacatattcctaacacttata

SEQ ID NO: 4639451 - DNA, 25 bp, Homo sapien
agctagctaccacatttggtgtact

SEQ ID NO: 4639452 - DNA, 25 bp, Homo sapien
gagctagctaccacatttggtgtac

SEQ ID NO: 4639453 - DNA, 25 bp, Homo sapien
tgagctagctaccacatttggtgta

SEQ ID NO: 4639454 - DNA, 25 bp, Homo sapien
tcatctccttaggtttagcagtaaa

SEQ ID NO: 4639455 - DNA, 25 bp, Homo sapien
tctccttaggtttagcagtaaagac

SEQ ID NO: 4639456 - DNA, 25 bp, Homo sapien
catctccttaggtttagcagtaaag

SEQ ID NO: 4639457 - DNA, 25 bp, Homo sapien
ctcatctccttaggtttagcagtaa

SEQ ID NO: 4639458 - DNA, 25 bp, Homo sapien
ttctctcctggggtaaaacgcttga

SEQ ID NO: 4639459 - DNA, 25 bp, Homo sapien
acttttataacgtttcttgtcacat

SEQ ID NO: 4639460 - DNA, 25 bp, Homo sapien
gttttcactgggcaacagtatcctc

SEQ ID NO: 4639461 - DNA, 25 bp, Homo sapien
gaaacaaagttcaatgaatccatac

SEQ ID NO: 4639462 - DNA, 25 bp, Homo sapien
ggctaagcgtgctggtatttacaca

SEQ ID NO: 4639463 - DNA, 25 bp, Homo sapien
gtatttacacacatattacttcttg

SEQ ID NO: 4639464 - DNA, 25 bp, Homo sapien
agacctttgtcggatagttgacaag

SEQ ID NO: 4639465 - DNA, 25 bp, Homo sapien
gattcaagacctgggaatgatagaa

SEQ ID NO: 4639466 - DNA, 25 bp, Homo sapien
gagtttgattcaagacctgggaatg

SEQ ID NO: 4639467 - DNA, 25 bp, Homo sapien
gtttgattcaagacctgggaatgat

SEQ ID NO: 4639468 - DNA, 25 bp, Homo sapien
tggttgataattggttgagtttgat

SEQ ID NO: 4639469 - DNA, 25 bp, Homo sapien
aatatataatagtgtagaagacaac

SEQ ID NO: 4639470 - DNA, 25 bp, Homo sapien
tgtgtttgcagtatgtgtaatagag

SEQ ID NO: 4639471 - DNA, 25 bp, Homo sapien
tataatagtgtagaagacaacaaga

SEQ ID NO: 4639472 - DNA, 25 bp, Homo sapien
tgcagtatgtgtaatagagttaaat

SEQ ID NO: 4639473 - DNA, 25 bp, Homo sapien
gatgtgtttaacaaatctcttatac

SEQ ID NO: 4639474 - DNA, 25 bp, Homo sapien
catgcattaggctaagatatatggt

SEQ ID NO: 4639475 - DNA, 25 bp, Homo sapien
catctatccttcaatatttaggcct

SEQ ID NO: 4639476 - DNA, 25 bp, Homo sapien
gcctaaaaagtaatctccattatct

SEQ ID NO: 4639477 - DNA, 25 bp, Homo sapien
tatgtaaagatatacccaatagcta

SEQ ID NO: 4639478 - DNA, 25 bp, Homo sapien
gatttggcaggtaactagattaaca

SEQ ID NO: 4639479 - DNA, 25 bp, Homo sapien
aatatctacccatgcacatcattca

SEQ ID NO: 4639480 - DNA, 25 bp, Homo sapien
ccagagaacacagcagggttatgaa

SEQ ID NO: 4639481 - DNA, 25 bp, Homo sapien
gatcctaaatcctaggtcatatcta

SEQ ID NO: 4639482 - DNA, 25 bp, Homo sapien
caaggatcctaaatcctaggtcata

SEQ ID NO: 4639483 - DNA, 25 bp, Homo sapien
ggatcctaaatcctaggtcatatct

SEQ ID NO: 4639484 - DNA, 25 bp, Homo sapien
tagcaaggatcctaaatcctaggtc

SEQ ID NO: 4639485 - DNA, 25 bp, Homo sapien
tcggcagatgggatgagatttccct

SEQ ID NO: 4639486 - DNA, 25 bp, Homo sapien
ggtacatacaggatacatctctgtt

SEQ ID NO: 4639487 - DNA, 25 bp, Homo sapien
acatctctgtttcggcagatgggat

SEQ ID NO: 4639488 - DNA, 25 bp, Homo sapien
tcattggcaaggtacatacaggata

SEQ ID NO: 4639489 - DNA, 25 bp, Homo sapien
tggaaacgataatgtggagaaagag

SEQ ID NO: 4639490 - DNA, 25 bp, Homo sapien
gacaaaatataacaaatggaaacga

SEQ ID NO: 4639491 - DNA, 25 bp, Homo sapien
ccagggatattgaagcatcattcaa

SEQ ID NO: 4639492 - DNA, 25 bp, Homo sapien
acaaatggaaacgataatgtggaga

SEQ ID NO: 4639493 - DNA, 25 bp, Homo sapien
tccatcaagtgggataactgttatc

SEQ ID NO: 4639494 - DNA, 25 bp, Homo sapien
gagacaaaggcaataactaaggaaa

SEQ ID NO: 4639495 - DNA, 25 bp, Homo sapien
gttatccataaagaagtagcaggtg

SEQ ID NO: 4639496 - DNA, 25 bp, Homo sapien
tacatcctaggagagggaatacttt

SEQ ID NO: 4639497 - DNA, 25 bp, Homo sapien
ttaaaaccagcaagaccagttgctc

SEQ ID NO: 4639498 - DNA, 25 bp, Homo sapien
tctggatggcaagagagatggaccc

SEQ ID NO: 4639499 - DNA, 25 bp, Homo sapien
gattttcttaatgctcatcagcgaa

SEQ ID NO: 4639500 - DNA, 25 bp, Homo sapien
tttcttaatgctcatcagcgaaggg

SEQ ID NO: 4639501 - DNA, 25 bp, Homo sapien
acatcatattaaacatgaatttcaa

SEQ ID NO: 4639502 - DNA, 25 bp, Homo sapien
taatttgcttatcaagtaatttaca

SEQ ID NO: 4639503 - DNA, 25 bp, Homo sapien
tattaaacatgaatttcaaccagca

SEQ ID NO: 4639504 - DNA, 25 bp, Homo sapien
gcttatcaagtaatttacatcatat

SEQ ID NO: 4639505 - DNA, 25 bp, Homo sapien
atagctcattgtgtagctcaccgca

SEQ ID NO: 4639506 - DNA, 25 bp, Homo sapien
accatagctcattgtgtagctcacc

SEQ ID NO: 4639507 - DNA, 25 bp, Homo sapien
tagctcattgtgtagctcaccgcaa

SEQ ID NO: 4639508 - DNA, 25 bp, Homo sapien
catagctcattgtgtagctcaccgc

SEQ ID NO: 4639509 - DNA, 25 bp, Homo sapien
ttcgacaactagactccagcgagtg

SEQ ID NO: 4639510 - DNA, 25 bp, Homo sapien
tccctctgcaggactagaccttaga

SEQ ID NO: 4639511 - DNA, 25 bp, Homo sapien
cgagtgttcctggttggcaatgctt

SEQ ID NO: 4639512 - DNA, 25 bp, Homo sapien
ccttagactaggagttcatctctga

SEQ ID NO: 4639513 - DNA, 25 bp, Homo sapien
gcggtcgcctgcagttccaactact

SEQ ID NO: 4639514 - DNA, 25 bp, Homo sapien
gtggcggtcgcctgcagttccaact

SEQ ID NO: 4639515 - DNA, 25 bp, Homo sapien
gctaagtgtggtggcggtcgcctgc

SEQ ID NO: 4639516 - DNA, 25 bp, Homo sapien
ggtcgcctgcagttccaactactcg

SEQ ID NO: 4639517 - DNA, 25 bp, Homo sapien
tgtggcttagttttagcaaatagaa

SEQ ID NO: 4639518 - DNA, 25 bp, Homo sapien
cagattgtttcaaaaagctctacaa

SEQ ID NO: 4639519 - DNA, 25 bp, Homo sapien
ttaccacccatgaatcttaacagat

SEQ ID NO: 4639520 - DNA, 25 bp, Homo sapien
cactagaaacaataagtcctataga

SEQ ID NO: 4639521 - DNA, 25 bp, Homo sapien
tgtttatgagcattgaaactccatc

SEQ ID NO: 4639522 - DNA, 25 bp, Homo sapien
taaactaattgaggcctaccaaaga

SEQ ID NO: 4639523 - DNA, 25 bp, Homo sapien
ttactgcactatcaaattggaaagg

SEQ ID NO: 4639524 - DNA, 25 bp, Homo sapien
taaatgacgtttgaagaaggaaatg

SEQ ID NO: 4639525 - DNA, 25 bp, Homo sapien
agaaaactggttgttaattagcaca

SEQ ID NO: 4639526 - DNA, 25 bp, Homo sapien
ttctaaaaaggctctctcaattgct

SEQ ID NO: 4639527 - DNA, 25 bp, Homo sapien
ggatcatatcacagctctttcattg

SEQ ID NO: 4639528 - DNA, 25 bp, Homo sapien
tgattctgattgaacaccataagtg

SEQ ID NO: 4639529 - DNA, 25 bp, Homo sapien
tacttacctacagaccttatttaca

SEQ ID NO: 4639530 - DNA, 25 bp, Homo sapien
aatcagggtcacatattgcatttat

SEQ ID NO: 4639531 - DNA, 25 bp, Homo sapien
gagtacagttactcacattaggaaa

SEQ ID NO: 4639532 - DNA, 25 bp, Homo sapien
taacaccatatctaagagtacagtt

SEQ ID NO: 4639533 - DNA, 25 bp, Homo sapien
tcactcctaatgagacagggctctt

SEQ ID NO: 4639534 - DNA, 25 bp, Homo sapien
tgtaatgtaagcaagattctttccc

SEQ ID NO: 4639535 - DNA, 25 bp, Homo sapien
ggagtacaattacaaatctccagga

SEQ ID NO: 4639536 - DNA, 25 bp, Homo sapien
agaccctcactcctaatgagacagg

SEQ ID NO: 4639537 - DNA, 25 bp, Homo sapien
cttctccgaatgactgttgattttc

SEQ ID NO: 4639538 - DNA, 25 bp, Homo sapien
gatggcacttctccgaatgactgtt

SEQ ID NO: 4639539 - DNA, 25 bp, Homo sapien
acttctccgaatgactgttgatttt

SEQ ID NO: 4639540 - DNA, 25 bp, Homo sapien
atgatggcacttctccgaatgactg

SEQ ID NO: 4639541 - DNA, 25 bp, Homo sapien
catggtgtccctaacaatttgttga

SEQ ID NO: 4639542 - DNA, 25 bp, Homo sapien
tatgaaaaagagagccaggaattgc

SEQ ID NO: 4639543 - DNA, 25 bp, Homo sapien
caggaggaagacacctacacacatt

SEQ ID NO: 4639544 - DNA, 25 bp, Homo sapien
caaaagttgatacacatgactgagg

SEQ ID NO: 4639545 - DNA, 25 bp, Homo sapien
gaaggcagacacctagaattccatc

SEQ ID NO: 4639546 - DNA, 25 bp, Homo sapien
cattgtacgctgacctaatagaaga

SEQ ID NO: 4639547 - DNA, 25 bp, Homo sapien
tccatcctagaattaagacgtgaca

SEQ ID NO: 4639548 - DNA, 25 bp, Homo sapien
ggaaatttcataccaaacaaggctg

SEQ ID NO: 4639549 - DNA, 25 bp, Homo sapien
aacatatggatctacttcactaaag

SEQ ID NO: 4639550 - DNA, 25 bp, Homo sapien
gatcagatagccagttaaaccagaa

SEQ ID NO: 4639551 - DNA, 25 bp, Homo sapien
caaaatttttaagtagtcacattga

SEQ ID NO: 4639552 - DNA, 25 bp, Homo sapien
gcaagaatgaacaaaaacatattga

SEQ ID NO: 4639553 - DNA, 25 bp, Homo sapien
tggtgggaatgaaaattagttcgac

SEQ ID NO: 4639554 - DNA, 25 bp, Homo sapien
ggaatgaaaattagttcgaccattg

SEQ ID NO: 4639555 - DNA, 25 bp, Homo sapien
tggaagacagtgtggagattcctca

SEQ ID NO: 4639556 - DNA, 25 bp, Homo sapien
gacagtgtggagattcctcatggat

SEQ ID NO: 4639557 - DNA, 25 bp, Homo sapien
aatctcctttggactccagagggtg

SEQ ID NO: 4639558 - DNA, 25 bp, Homo sapien
tgcaggaataacattgggaataagc

SEQ ID NO: 4639559 - DNA, 25 bp, Homo sapien
caggaataacattgggaataagcaa

SEQ ID NO: 4639560 - DNA, 25 bp, Homo sapien
ctgcaggaataacattgggaataag

SEQ ID NO: 4639561 - DNA, 25 bp, Homo sapien
tcctgaacatgattgaggtggatga

SEQ ID NO: 4639562 - DNA, 25 bp, Homo sapien
tttcctgaacatgattgaggtggat

SEQ ID NO: 4639563 - DNA, 25 bp, Homo sapien
catttcctgaacatgattgaggtgg

SEQ ID NO: 4639564 - DNA, 25 bp, Homo sapien
ctgaacatgattgaggtggatgact

SEQ ID NO: 4639565 - DNA, 25 bp, Homo sapien
aatgtggcacgaaagagaaaagctg

SEQ ID NO: 4639566 - DNA, 25 bp, Homo sapien
aaatgctgggtcagaaaatgtggca

SEQ ID NO: 4639567 - DNA, 25 bp, Homo sapien
ctgggtcagaaaatgtggcacgaaa

SEQ ID NO: 4639568 - DNA, 25 bp, Homo sapien
ttgaaatgctgggtcagaaaatgtg

SEQ ID NO: 4639569 - DNA, 25 bp, Homo sapien
ttcctccctcttgtaatagtctttg

SEQ ID NO: 4639570 - DNA, 25 bp, Homo sapien
ccctcttgtaatagtctttgtgtat

SEQ ID NO: 4639571 - DNA, 25 bp, Homo sapien
ctcttgtaatagtctttgtgtatta

SEQ ID NO: 4639572 - DNA, 25 bp, Homo sapien
cttgtaatagtctttgtgtattaga

SEQ ID NO: 4639573 - DNA, 25 bp, Homo sapien
tatgttacagttctgtaagacagaa

SEQ ID NO: 4639574 - DNA, 25 bp, Homo sapien
gaacacatacctcttatcacacata

SEQ ID NO: 4639575 - DNA, 25 bp, Homo sapien
tgcattttctcttattagactcctg

SEQ ID NO: 4639576 - DNA, 25 bp, Homo sapien
aaattgagctatctcttgttgagga

SEQ ID NO: 4639577 - DNA, 25 bp, Homo sapien
gctttttcaagaccgcaagggtcag

SEQ ID NO: 4639578 - DNA, 25 bp, Homo sapien
ttttcaagaccgcaagggtcagcac

SEQ ID NO: 4639579 - DNA, 25 bp, Homo sapien
ttcaagaccgcaagggtcagcacca

SEQ ID NO: 4639580 - DNA, 25 bp, Homo sapien
ctgctttttcaagaccgcaagggtc

SEQ ID NO: 4639581 - DNA, 25 bp, Homo sapien
gtataatggggccatttgacaaagc

SEQ ID NO: 4639582 - DNA, 25 bp, Homo sapien
ctgctgctgcaacctagtataatgg

SEQ ID NO: 4639583 - DNA, 25 bp, Homo sapien
ctctctgctgctgcaacctagtata

SEQ ID NO: 4639584 - DNA, 25 bp, Homo sapien
catttgacaaagcaagtgaggtccc

SEQ ID NO: 4639585 - DNA, 25 bp, Homo sapien
gaactgactaatcacagaaggcact

SEQ ID NO: 4639586 - DNA, 25 bp, Homo sapien
caaggccctggtgaactgactaatc

SEQ ID NO: 4639587 - DNA, 25 bp, Homo sapien
ggccctggtgaactgactaatcaca

SEQ ID NO: 4639588 - DNA, 25 bp, Homo sapien
ggtgaactgactaatcacagaaggc

SEQ ID NO: 4639589 - DNA, 25 bp, Homo sapien
tgatctctcagtggggatgtctcct

SEQ ID NO: 4639590 - DNA, 25 bp, Homo sapien
tctggtctgtacttgccagccagct

SEQ ID NO: 4639591 - DNA, 25 bp, Homo sapien
ttaaaaggacaggtgatctctcagt

SEQ ID NO: 4639592 - DNA, 25 bp, Homo sapien
gtggggatgtctcctttgctttctt

SEQ ID NO: 4639593 - DNA, 25 bp, Homo sapien
tttctccgctaaggtggtgacagcg

SEQ ID NO: 4639594 - DNA, 25 bp, Homo sapien
tgatccttctttttctccgctaagg

SEQ ID NO: 4639595 - DNA, 25 bp, Homo sapien
ccgctaaggtggtgacagcgttaac

SEQ ID NO: 4639596 - DNA, 25 bp, Homo sapien
cagctgatccttctttttctccgct

SEQ ID NO: 4639597 - DNA, 25 bp, Homo sapien
aacgggccaggatgacaatggcggc

SEQ ID NO: 4639598 - DNA, 25 bp, Homo sapien
ggcggctttgtggaatagaaaggcg

SEQ ID NO: 4639599 - DNA, 25 bp, Homo sapien
cacccggtctgggaggtgtgcccaa

SEQ ID NO: 4639600 - DNA, 25 bp, Homo sapien
ggctttgtggaatagaaaggcggga

SEQ ID NO: 4639601 - DNA, 25 bp, Homo sapien
cagcagataaacaagcgcctctgcc

SEQ ID NO: 4639602 - DNA, 25 bp, Homo sapien
tacagagtaaaacaaattggtcagg

SEQ ID NO: 4639603 - DNA, 25 bp, Homo sapien
tttaggcataaggacaatgcttttc

SEQ ID NO: 4639604 - DNA, 25 bp, Homo sapien
cagaggtagatgagaggtaagctcc

SEQ ID NO: 4639605 - DNA, 25 bp, Homo sapien
tatctgaatatacactcaggtctag

SEQ ID NO: 4639606 - DNA, 25 bp, Homo sapien
tatagtcaccgtgtcatttgctcct

SEQ ID NO: 4639607 - DNA, 25 bp, Homo sapien
ccaattcgatgctagtagtaactcc

SEQ ID NO: 4639608 - DNA, 25 bp, Homo sapien
cacaggctatagacagatacttttc

SEQ ID NO: 4639609 - DNA, 25 bp, Homo sapien
aaacattgccaattggctccttgca

SEQ ID NO: 4639610 - DNA, 25 bp, Homo sapien
aatttggtgaagagtgagctcagtc

SEQ ID NO: 4639611 - DNA, 25 bp, Homo sapien
tgtggaaacacaaagacgacaatgt

SEQ ID NO: 4639612 - DNA, 25 bp, Homo sapien
gcttgagcaattccaaaggatccca

SEQ ID NO: 4639613 - DNA, 25 bp, Homo sapien
cacaagcaggtaatattctctccaa

SEQ ID NO: 4639614 - DNA, 25 bp, Homo sapien
tgtagtcaactacacacaagctgag

SEQ ID NO: 4639615 - DNA, 25 bp, Homo sapien
taagcaggccaagagattttcacca

SEQ ID NO: 4639616 - DNA, 25 bp, Homo sapien
gaaaatattgtagtggcttccctcc

SEQ ID NO: 4639617 - DNA, 25 bp, Homo sapien
tatcaggctgtataactcatcatgc

SEQ ID NO: 4639618 - DNA, 25 bp, Homo sapien
gagacttctagagaggtatgcagac

SEQ ID NO: 4639619 - DNA, 25 bp, Homo sapien
tgtcattagatactcccttgcccag

SEQ ID NO: 4639620 - DNA, 25 bp, Homo sapien
tcattaggcataggcaaatcagaga

SEQ ID NO: 4639621 - DNA, 25 bp, Homo sapien
cacgaactcaggtaatcattaggca

SEQ ID NO: 4639622 - DNA, 25 bp, Homo sapien
actatgctggtatcaatgtataacc

SEQ ID NO: 4639623 - DNA, 25 bp, Homo sapien
ctatgctggtatcaatgtataacca

SEQ ID NO: 4639624 - DNA, 25 bp, Homo sapien
tatgctggtatcaatgtataaccaa

SEQ ID NO: 4639625 - DNA, 25 bp, Homo sapien
aactatgctggtatcaatgtataac

SEQ ID NO: 4639626 - DNA, 25 bp, Homo sapien
ggattgcttggttccccagtaggag

SEQ ID NO: 4639627 - DNA, 25 bp, Homo sapien
tagaggcagtttatccctatctgac

SEQ ID NO: 4639628 - DNA, 25 bp, Homo sapien
tatctgacattctagggacttaaag

SEQ ID NO: 4639629 - DNA, 25 bp, Homo sapien
tatgccccactgctcactaaatcag

SEQ ID NO: 4639630 - DNA, 25 bp, Homo sapien
tttcctagtaaatacctgaggtaca

SEQ ID NO: 4639631 - DNA, 25 bp, Homo sapien
gcaaggcatccctagtttcttcttt

SEQ ID NO: 4639632 - DNA, 25 bp, Homo sapien
ctgaggtacatgagggagaggagaa

SEQ ID NO: 4639633 - DNA, 25 bp, Homo sapien
gggagcaaggcatccctagtttctt

SEQ ID NO: 4639634 - DNA, 25 bp, Homo sapien
ctattagttcaatccattctgttct

SEQ ID NO: 4639635 - DNA, 25 bp, Homo sapien
tctattagttcaatccattctgttc

SEQ ID NO: 4639636 - DNA, 25 bp, Homo sapien
tttctattagttcaatccattctgt

SEQ ID NO: 4639637 - DNA, 25 bp, Homo sapien
tattagttcaatccattctgttctc

SEQ ID NO: 4639638 - DNA, 25 bp, Homo sapien
cacccaatgcccaattcactgagag

SEQ ID NO: 4639639 - DNA, 25 bp, Homo sapien
gatggtgggtgttgtaaagatacta

SEQ ID NO: 4639640 - DNA, 25 bp, Homo sapien
aaacaaattccagactcaggtgcct

SEQ ID NO: 4639641 - DNA, 25 bp, Homo sapien
ctttcaggaaataaagtgggcaagg

SEQ ID NO: 4639642 - DNA, 25 bp, Homo sapien
gtttaagaccggatgtagtatgcct

SEQ ID NO: 4639643 - DNA, 25 bp, Homo sapien
tgttccttgcgtacaacagcctttg

SEQ ID NO: 4639644 - DNA, 25 bp, Homo sapien
tcctaggtagtgtacagcagcctgt

SEQ ID NO: 4639645 - DNA, 25 bp, Homo sapien
tattaaaggccatattgcccactga

SEQ ID NO: 4639646 - DNA, 25 bp, Homo sapien
tttttgagttgaccactccttaggc

SEQ ID NO: 4639647 - DNA, 25 bp, Homo sapien
ttttgagttgaccactccttaggca

SEQ ID NO: 4639648 - DNA, 25 bp, Homo sapien
gctccctggaagctaacatattgat

SEQ ID NO: 4639649 - DNA, 25 bp, Homo sapien
tccctggaagctaacatattgatgc

SEQ ID NO: 4639650 - DNA, 25 bp, Homo sapien
accgatctgacctgtatagttgggc

SEQ ID NO: 4639651 - DNA, 25 bp, Homo sapien
taccaagagaccgaagtagaggctt

SEQ ID NO: 4639652 - DNA, 25 bp, Homo sapien
tctggagccagacctatgtagatct

SEQ ID NO: 4639653 - DNA, 25 bp, Homo sapien
tgagatctgtgacaaatccctgtgg

SEQ ID NO: 4639654 - DNA, 25 bp, Homo sapien
tgttcttcccatacgcgaatggcag

SEQ ID NO: 4639655 - DNA, 25 bp, Homo sapien
ctctgttcttcccatacgcgaatgg

SEQ ID NO: 4639656 - DNA, 25 bp, Homo sapien
cttcccatacgcgaatggcaggcat

SEQ ID NO: 4639657 - DNA, 25 bp, Homo sapien
cctgagaccgccctttgacctcatt

SEQ ID NO: 4639658 - DNA, 25 bp, Homo sapien
tctatgtgccctgatcgccagtgga

SEQ ID NO: 4639659 - DNA, 25 bp, Homo sapien
tctgacatcacagggcggttcctga

SEQ ID NO: 4639660 - DNA, 25 bp, Homo sapien
gggatcagggactctaatctggaaa

SEQ ID NO: 4639661 - DNA, 25 bp, Homo sapien
cagcgtcagggatcagtagtagaga

SEQ ID NO: 4639662 - DNA, 25 bp, Homo sapien
tgcccgttttctgctgccgctggag

SEQ ID NO: 4639663 - DNA, 25 bp, Homo sapien
tttctgctgccgctggagagaatct

SEQ ID NO: 4639664 - DNA, 25 bp, Homo sapien
ctgctgccgctggagagaatctctg

SEQ ID NO: 4639665 - DNA, 25 bp, Homo sapien
ccgttttctgctgccgctggagaga

SEQ ID NO: 4639666 - DNA, 25 bp, Homo sapien
tcctcttccagtctagtgctttttt

SEQ ID NO: 4639667 - DNA, 25 bp, Homo sapien
tccagatctcgatcccaaactccct

SEQ ID NO: 4639668 - DNA, 25 bp, Homo sapien
tccagtctagtgcttttttccagat

SEQ ID NO: 4639669 - DNA, 25 bp, Homo sapien
agaatctggacccgaatccacccat

SEQ ID NO: 4639670 - DNA, 25 bp, Homo sapien
agttccccgcaggaactgagtcaga

SEQ ID NO: 4639671 - DNA, 25 bp, Homo sapien
tcttgacgggcgagggttactgtac

SEQ ID NO: 4639672 - DNA, 25 bp, Homo sapien
acttcagcaccagtcgcggtggcca

SEQ ID NO: 4639673 - DNA, 25 bp, Homo sapien
cgacgcgtgcgcaggtaaagtccat

SEQ ID NO: 4639674 - DNA, 25 bp, Homo sapien
gaaaaggacactacaaggatgacag

SEQ ID NO: 4639675 - DNA, 25 bp, Homo sapien
ttgaccaacctctcactaggccaag

SEQ ID NO: 4639676 - DNA, 25 bp, Homo sapien
gaaacatacatccactagactgaaa

SEQ ID NO: 4639677 - DNA, 25 bp, Homo sapien
aatccaagaccagatagcttagtgg

SEQ ID NO: 4639678 - DNA, 25 bp, Homo sapien
aaagtcactggtaactatacagtca

SEQ ID NO: 4639679 - DNA, 25 bp, Homo sapien
aaaagtgtacagaacacaccacgga

SEQ ID NO: 4639680 - DNA, 25 bp, Homo sapien
tagacttgagtatccacggttctgg

SEQ ID NO: 4639681 - DNA, 25 bp, Homo sapien
ccctctatatggttcaggatagact

SEQ ID NO: 4639682 - DNA, 25 bp, Homo sapien
atgaatttcatatagcactcaaagc

SEQ ID NO: 4639683 - DNA, 25 bp, Homo sapien
tacaccgtggtgttagaattgaggg

SEQ ID NO: 4639684 - DNA, 25 bp, Homo sapien
gacaaagtgctgtcgtaacagagaa

SEQ ID NO: 4639685 - DNA, 25 bp, Homo sapien
gaattgagggttccagaatcaatgg

SEQ ID NO: 4639686 - DNA, 25 bp, Homo sapien
gaaagtaccaccttagacaaagtgc

SEQ ID NO: 4639687 - DNA, 25 bp, Homo sapien
tgttacatcctgtcaaaatgatgag

SEQ ID NO: 4639688 - DNA, 25 bp, Homo sapien
gatgagaagacagatcatcctttag

SEQ ID NO: 4639689 - DNA, 25 bp, Homo sapien
tttgttttgttacatcctgtcaaaa

SEQ ID NO: 4639690 - DNA, 25 bp, Homo sapien
agaagacagatcatcctttagggaa

SEQ ID NO: 4639691 - DNA, 25 bp, Homo sapien
cctctaaataatatacttacagtgc

SEQ ID NO: 4639692 - DNA, 25 bp, Homo sapien
ctctaaataatatacttacagtgct

SEQ ID NO: 4639693 - DNA, 25 bp, Homo sapien
tcctctaaataatatacttacagtg

SEQ ID NO: 4639694 - DNA, 25 bp, Homo sapien
tcagttttaagtaatatcccttgac

SEQ ID NO: 4639695 - DNA, 25 bp, Homo sapien
taaattaaagcaacacatgtgcatg

SEQ ID NO: 4639696 - DNA, 25 bp, Homo sapien
catacaccattgactaaaggaaacc

SEQ ID NO: 4639697 - DNA, 25 bp, Homo sapien
tatgctattctcttgaactgtaaat

SEQ ID NO: 4639698 - DNA, 25 bp, Homo sapien
caaacagtgcccttcgaatctgttg

SEQ ID NO: 4639699 - DNA, 25 bp, Homo sapien
tcccagttatttgcgatatttctcc

SEQ ID NO: 4639700 - DNA, 25 bp, Homo sapien
tacacattatcaataaggtcaaggc

SEQ ID NO: 4639701 - DNA, 25 bp, Homo sapien
tgatagtggccatcacaagttacac

SEQ ID NO: 4639702 - DNA, 25 bp, Homo sapien
gagggcctctccgtgggtgccgctg

SEQ ID NO: 4639703 - DNA, 25 bp, Homo sapien
acagcccagcagtagggtgaagagg

SEQ ID NO: 4639704 - DNA, 25 bp, Homo sapien
tgaagagggcctctccgtgggtgcc

SEQ ID NO: 4639705 - DNA, 25 bp, Homo sapien
caacaggtctgataaagcagaggag

SEQ ID NO: 4639706 - DNA, 25 bp, Homo sapien
gtttgcagactcatctgagggctta

SEQ ID NO: 4639707 - DNA, 25 bp, Homo sapien
aatgttgacacaatgattgtttgca

SEQ ID NO: 4639708 - DNA, 25 bp, Homo sapien
tgagggcttaggcagatctggacct

SEQ ID NO: 4639709 - DNA, 25 bp, Homo sapien
gatctggacctgttgatactgaagt

SEQ ID NO: 4639710 - DNA, 25 bp, Homo sapien
tgtgctccgtgttctcccacaatag

SEQ ID NO: 4639711 - DNA, 25 bp, Homo sapien
cctgcctgatgtcagttatggacta

SEQ ID NO: 4639712 - DNA, 25 bp, Homo sapien
tgtagcttagctagagacccgctgc

SEQ ID NO: 4639713 - DNA, 25 bp, Homo sapien
gggtcccctgcctcttagagctgct

SEQ ID NO: 4639714 - DNA, 25 bp, Homo sapien
tatgcgggaaaactccagcctggtg

SEQ ID NO: 4639715 - DNA, 25 bp, Homo sapien
caaggacagatgtgactaacttcag

SEQ ID NO: 4639716 - DNA, 25 bp, Homo sapien
aagaagctgaccaccgagttacaga

SEQ ID NO: 4639717 - DNA, 25 bp, Homo sapien
cagattcatgggaaagacatcagga

SEQ ID NO: 4639718 - DNA, 25 bp, Homo sapien
gtcttgagtagttcttcataacagc

SEQ ID NO: 4639719 - DNA, 25 bp, Homo sapien
tgcccagccatgtcaaactatgagt

SEQ ID NO: 4639720 - DNA, 25 bp, Homo sapien
aattggtaccacagacatagggtgc

SEQ ID NO: 4639721 - DNA, 25 bp, Homo sapien
taggagtggttttctccacgctgtt

SEQ ID NO: 4639722 - DNA, 25 bp, Homo sapien
tcccaggaatttgatgtcagatgca

SEQ ID NO: 4639723 - DNA, 25 bp, Homo sapien
ctgtacttcccaggaatttgatgtc

SEQ ID NO: 4639724 - DNA, 25 bp, Homo sapien
gtcagatgcattttctattatttcc

SEQ ID NO: 4639725 - DNA, 25 bp, Homo sapien
cagatgcattttctattatttccat

SEQ ID NO: 4639726 - DNA, 25 bp, Homo sapien
ttgagcatgaaagttcaagactgta

SEQ ID NO: 4639727 - DNA, 25 bp, Homo sapien
gagcatgaaagttcaagactgtagt

SEQ ID NO: 4639728 - DNA, 25 bp, Homo sapien
tgagcatgaaagttcaagactgtag

SEQ ID NO: 4639729 - DNA, 25 bp, Homo sapien
gcatgaaagttcaagactgtagtga

SEQ ID NO: 4639730 - DNA, 25 bp, Homo sapien
tcacgttgcccctaaaggcgtctct

SEQ ID NO: 4639731 - DNA, 25 bp, Homo sapien
gttgcccctaaaggcgtctctgtta

SEQ ID NO: 4639732 - DNA, 25 bp, Homo sapien
tcttgacctcacgttgcccctaaag

SEQ ID NO: 4639733 - DNA, 25 bp, Homo sapien
tctgttattatattcatgactttcc

SEQ ID NO: 4639734 - DNA, 25 bp, Homo sapien
tttatgacaggatagtagcatctgg

SEQ ID NO: 4639735 - DNA, 25 bp, Homo sapien
taatttatgacaggatagtagcatc

SEQ ID NO: 4639736 - DNA, 25 bp, Homo sapien
tatgacaggatagtagcatctggtg

SEQ ID NO: 4639737 - DNA, 25 bp, Homo sapien
ctaatttatgacaggatagtagcat

SEQ ID NO: 4639738 - DNA, 25 bp, Homo sapien
caacatggcgaaaaatacaaaaaat

SEQ ID NO: 4639739 - DNA, 25 bp, Homo sapien
tatccgggtgtggtagcgggtgcct

SEQ ID NO: 4639740 - DNA, 25 bp, Homo sapien
agccaaaacggtgccactgccctct

SEQ ID NO: 4639741 - DNA, 25 bp, Homo sapien
gtgagccaaaacggtgccactgccc

SEQ ID NO: 4639742 - DNA, 25 bp, Homo sapien
gagttttccttcctcgttcattgca

SEQ ID NO: 4639743 - DNA, 25 bp, Homo sapien
cctcgttcattgcaagatagaattc

SEQ ID NO: 4639744 - DNA, 25 bp, Homo sapien
ctttgattgccacaatccgaactgc

SEQ ID NO: 4639745 - DNA, 25 bp, Homo sapien
acccctttgattgccacaatccgaa

SEQ ID NO: 4639746 - DNA, 25 bp, Homo sapien
cattatataattagcctgttccagg

SEQ ID NO: 4639747 - DNA, 25 bp, Homo sapien
tcagattgagcaggcctaatgtggt

SEQ ID NO: 4639748 - DNA, 25 bp, Homo sapien
gctccttagaggtcagctaattcaa

SEQ ID NO: 4639749 - DNA, 25 bp, Homo sapien
tcaattaaacgaagagtaagcagca

SEQ ID NO: 4639750 - DNA, 25 bp, Homo sapien
cattgtgtgtccatttagctgctgc

SEQ ID NO: 4639751 - DNA, 25 bp, Homo sapien
caacaaacatttcccctccattgtg

SEQ ID NO: 4639752 - DNA, 25 bp, Homo sapien
gctgctgcatatgtgttgtaatggt

SEQ ID NO: 4639753 - DNA, 25 bp, Homo sapien
tgtaatggttttccagaattagttc

SEQ ID NO: 4639754 - DNA, 25 bp, Homo sapien
ttaagttattgccataggaagaaag

SEQ ID NO: 4639755 - DNA, 25 bp, Homo sapien
taagttattgccataggaagaaagt

SEQ ID NO: 4639756 - DNA, 25 bp, Homo sapien
cataggaagaaagtgggctgttttt

SEQ ID NO: 4639757 - DNA, 25 bp, Homo sapien
tgccataggaagaaagtgggctgtt

SEQ ID NO: 4639758 - DNA, 25 bp, Homo sapien
caaatctaacatactcttaagggta

SEQ ID NO: 4639759 - DNA, 25 bp, Homo sapien
ctaacatcatgattgtacaaccagt

SEQ ID NO: 4639760 - DNA, 25 bp, Homo sapien
taggtataagcatgttctaatcctg

SEQ ID NO: 4639761 - DNA, 25 bp, Homo sapien
acagtccacttaaagaaatctccct

SEQ ID NO: 4639762 - DNA, 25 bp, Homo sapien
tagacttagtctcggtcacagaggg

SEQ ID NO: 4639763 - DNA, 25 bp, Homo sapien
tgatacttttctacctatgcattca

SEQ ID NO: 4639764 - DNA, 25 bp, Homo sapien
aaaatatgatacttttctacctatg

SEQ ID NO: 4639765 - DNA, 25 bp, Homo sapien
tgtgctagacttagtctcggtcaca

SEQ ID NO: 4639766 - DNA, 25 bp, Homo sapien
aaagaagtaaggtggccaggcaggc

SEQ ID NO: 4639767 - DNA, 25 bp, Homo sapien
gaaaagaagtaaggtggccaggcag

SEQ ID NO: 4639768 - DNA, 25 bp, Homo sapien
aagaagtaaggtggccaggcaggca

SEQ ID NO: 4639769 - DNA, 25 bp, Homo sapien
gggatagagagacctgtttataaga

SEQ ID NO: 4639770 - DNA, 25 bp, Homo sapien
acttttctccatgtgtcttaggcca

SEQ ID NO: 4639771 - DNA, 25 bp, Homo sapien
tgggttctaaacagcagtgccttcc

SEQ ID NO: 4639772 - DNA, 25 bp, Homo sapien
gaccttgcagaagagattccccaac

SEQ ID NO: 4639773 - DNA, 25 bp, Homo sapien
cacaactcttacatgggaccttgca

SEQ ID NO: 4639774 - DNA, 25 bp, Homo sapien
gggacctcacagattccccatccct

SEQ ID NO: 4639775 - DNA, 25 bp, Homo sapien
ctcagggacctcacagattccccat

SEQ ID NO: 4639776 - DNA, 25 bp, Homo sapien
tgattccaggatctatagaacttca

SEQ ID NO: 4639777 - DNA, 25 bp, Homo sapien
gattccaggatctatagaacttcat

SEQ ID NO: 4639778 - DNA, 25 bp, Homo sapien
gaaacgcccttggatcccatggcaa

SEQ ID NO: 4639779 - DNA, 25 bp, Homo sapien
cttctgtacccagaatctctaggtc

SEQ ID NO: 4639780 - DNA, 25 bp, Homo sapien
agaggtacctcccattggcgcctga

SEQ ID NO: 4639781 - DNA, 25 bp, Homo sapien
ctaggtctggaggtcccaactccac

SEQ ID NO: 4639782 - DNA, 25 bp, Homo sapien
attaagccttcatagaggcgtgcgc

SEQ ID NO: 4639783 - DNA, 25 bp, Homo sapien
caaagaagactctgcgggagacaga

SEQ ID NO: 4639784 - DNA, 25 bp, Homo sapien
tgcgggagacagaacattaagcctt

SEQ ID NO: 4639785 - DNA, 25 bp, Homo sapien
ttcatagaggcgtgcgctggacagc

SEQ ID NO: 4639786 - DNA, 25 bp, Homo sapien
gcaaggaagacaccgatactcaaag

SEQ ID NO: 4639787 - DNA, 25 bp, Homo sapien
aagacaccgatactcaaagtcacag

SEQ ID NO: 4639788 - DNA, 25 bp, Homo sapien
ttccatcgggctccaattctgcact

SEQ ID NO: 4639789 - DNA, 25 bp, Homo sapien
aacattgcaaggaagacaccgatac

SEQ ID NO: 4639790 - DNA, 25 bp, Homo sapien
tcagtgctggctgaacggggggtag

SEQ ID NO: 4639791 - DNA, 25 bp, Homo sapien
ctgaagtggtggagggttgatctca

SEQ ID NO: 4639792 - DNA, 25 bp, Homo sapien
taggagagcaccaggaacaacacac

SEQ ID NO: 4639793 - DNA, 25 bp, Homo sapien
gctgaacggggggtaggagagcacc

SEQ ID NO: 4639794 - DNA, 25 bp, Homo sapien
gccttgataacaggccacctgtact

SEQ ID NO: 4639795 - DNA, 25 bp, Homo sapien
ccaatggtcagccttgataacaggc

SEQ ID NO: 4639796 - DNA, 25 bp, Homo sapien
gtcagccttgataacaggccacctg

SEQ ID NO: 4639797 - DNA, 25 bp, Homo sapien
aatggtcagccttgataacaggcca

SEQ ID NO: 4639798 - DNA, 25 bp, Homo sapien
ctggccgacatgcaaaaaatcgcat

SEQ ID NO: 4639799 - DNA, 25 bp, Homo sapien
gactggccgacatgcaaaaaatcgc

SEQ ID NO: 4639800 - DNA, 25 bp, Homo sapien
agactggccgacatgcaaaaaatcg

SEQ ID NO: 4639801 - DNA, 25 bp, Homo sapien
tgaaaacgatggacaaccggccacg

SEQ ID NO: 4639802 - DNA, 25 bp, Homo sapien
gccgtgcaggggtacaaccatcttc

SEQ ID NO: 4639803 - DNA, 25 bp, Homo sapien
cagagaagagccgtgcaggggtaca

SEQ ID NO: 4639804 - DNA, 25 bp, Homo sapien
agaagagccgtgcaggggtacaacc

SEQ ID NO: 4639805 - DNA, 25 bp, Homo sapien
aagagccgtgcaggggtacaaccat

SEQ ID NO: 4639806 - DNA, 25 bp, Homo sapien
ttacagaaccttgccaggcataagg

SEQ ID NO: 4639807 - DNA, 25 bp, Homo sapien
ataaggggaggggtgcgaaacgcat

SEQ ID NO: 4639808 - DNA, 25 bp, Homo sapien
cagaaccttgccaggcataagggga

SEQ ID NO: 4639809 - DNA, 25 bp, Homo sapien
taaggggaggggtgcgaaacgcatg

SEQ ID NO: 4639810 - DNA, 25 bp, Homo sapien
cgtaccaatcgatcgaatttctagt

SEQ ID NO: 4639811 - DNA, 25 bp, Homo sapien
tggccacgtggtccctcgtaccaat

SEQ ID NO: 4639812 - DNA, 25 bp, Homo sapien
tcccgggcggcctggtcattggcca

SEQ ID NO: 4639813 - DNA, 25 bp, Homo sapien
ggtccctcgtaccaatcgatcgaat

SEQ ID NO: 4639814 - DNA, 25 bp, Homo sapien
gctttggagccgcagcggccaacag

SEQ ID NO: 4639815 - DNA, 25 bp, Homo sapien
gccaacaggagtgggcaaaggaccc

SEQ ID NO: 4639816 - DNA, 25 bp, Homo sapien
ccagtgcctgagtgataggggaaat

SEQ ID NO: 4639817 - DNA, 25 bp, Homo sapien
aggaccctgccagtgcctgagtgat

SEQ ID NO: 4639818 - DNA, 25 bp, Homo sapien
tgggaggaagttgttccagatagca

SEQ ID NO: 4639819 - DNA, 25 bp, Homo sapien
ctgggaggaagttgttccagatagc

SEQ ID NO: 4639820 - DNA, 25 bp, Homo sapien
ctcagccttgcccatctccacgggc

SEQ ID NO: 4639821 - DNA, 25 bp, Homo sapien
tcagccttgcccatctccacgggca

SEQ ID NO: 4639822 - DNA, 25 bp, Homo sapien
cagccttgcccatctccacgggcat

SEQ ID NO: 4639823 - DNA, 25 bp, Homo sapien
ccctcagccttgcccatctccacgg

SEQ ID NO: 4639824 - DNA, 25 bp, Homo sapien
agaagcacaactgcgtcccgaaaca

SEQ ID NO: 4639825 - DNA, 25 bp, Homo sapien
aactgcgtcccgaaacaaggagcca

SEQ ID NO: 4639826 - DNA, 25 bp, Homo sapien
gcacaactgcgtcccgaaacaagga

SEQ ID NO: 4639827 - DNA, 25 bp, Homo sapien
tcacagaagcacaactgcgtcccga

SEQ ID NO: 4639828 - DNA, 25 bp, Homo sapien
tttggtgttgcttcttccacatcat

SEQ ID NO: 4639829 - DNA, 25 bp, Homo sapien
cttgtgagcagatcagatttggtgt

SEQ ID NO: 4639830 - DNA, 25 bp, Homo sapien
acatcccctttcacagactcggata

SEQ ID NO: 4639831 - DNA, 25 bp, Homo sapien
cacagactcggatagatcccctcat

SEQ ID NO: 4639832 - DNA, 25 bp, Homo sapien
tggaatactccacttggtaaccagc

SEQ ID NO: 4639833 - DNA, 25 bp, Homo sapien
ggaatactccacttggtaaccagca

SEQ ID NO: 4639834 - DNA, 25 bp, Homo sapien
ctggaatactccacttggtaaccag

SEQ ID NO: 4639835 - DNA, 25 bp, Homo sapien
gaatactccacttggtaaccagcat

SEQ ID NO: 4639836 - DNA, 25 bp, Homo sapien
ctcctcctcctctgccttggctaat

SEQ ID NO: 4639837 - DNA, 25 bp, Homo sapien
ctcctcctctgccttggctaatggg

SEQ ID NO: 4639838 - DNA, 25 bp, Homo sapien
tcctcctcctctgccttggctaatg

SEQ ID NO: 4639839 - DNA, 25 bp, Homo sapien
tcctcctcctcctctgccttggcta

SEQ ID NO: 4639840 - DNA, 25 bp, Homo sapien
cagcgctagggtaacaggaaggatc

SEQ ID NO: 4639841 - DNA, 25 bp, Homo sapien
aggaaggatcgggtgggctttcagg

SEQ ID NO: 4639842 - DNA, 25 bp, Homo sapien
gaagtcagcgctagggtaacaggaa

SEQ ID NO: 4639843 - DNA, 25 bp, Homo sapien
ttaggaagtcagcgctagggtaaca

SEQ ID NO: 4639844 - DNA, 25 bp, Homo sapien
gataaggcactaccttcggaacacc

SEQ ID NO: 4639845 - DNA, 25 bp, Homo sapien
aacttgggcagcgattatctggtgt

SEQ ID NO: 4639846 - DNA, 25 bp, Homo sapien
tgctgtgcgccatcaatctcagagc

SEQ ID NO: 4639847 - DNA, 25 bp, Homo sapien
ggcagcgattatctggtgtcaaaaa

SEQ ID NO: 4639848 - DNA, 25 bp, Homo sapien
tgtgctgtgcgccatcaatctcaga

SEQ ID NO: 4639849 - DNA, 25 bp, Homo sapien
cagcctagtctctttgataactgaa

SEQ ID NO: 4639850 - DNA, 25 bp, Homo sapien
ttccagaggtaaatccagcctagtc

SEQ ID NO: 4639851 - DNA, 25 bp, Homo sapien
ttgtgcccaacactcggactctcag

SEQ ID NO: 4639852 - DNA, 25 bp, Homo sapien
tagcccgactcttgaacttgtgccc

SEQ ID NO: 4639853 - DNA, 25 bp, Homo sapien
ggccaacttgttctatctcccacag

SEQ ID NO: 4639854 - DNA, 25 bp, Homo sapien
ggtactcgacagtttggccaacttg

SEQ ID NO: 4639855 - DNA, 25 bp, Homo sapien
gccaacagcgtaggcctaaaagcaa

SEQ ID NO: 4639856 - DNA, 25 bp, Homo sapien
cccaggtgtggagacaggtactcga

SEQ ID NO: 4639857 - DNA, 25 bp, Homo sapien
ggacggggacatcgcggtggggcca

SEQ ID NO: 4639858 - DNA, 25 bp, Homo sapien
ccgggtctctccagatcgcattagc

SEQ ID NO: 4639859 - DNA, 25 bp, Homo sapien
gccctggacgctgggccagactgcc

SEQ ID NO: 4639860 - DNA, 25 bp, Homo sapien
cattctgcgattactgtcaggggac

SEQ ID NO: 4639861 - DNA, 25 bp, Homo sapien
gggaccatccatcagcgccgccctg

SEQ ID NO: 4639862 - DNA, 25 bp, Homo sapien
gataaatcacccctaggaacagaat

SEQ ID NO: 4639863 - DNA, 25 bp, Homo sapien
attaggatacaagtttccaggatct

SEQ ID NO: 4639864 - DNA, 25 bp, Homo sapien
taggatacaagtttccaggatcttt

SEQ ID NO: 4639865 - DNA, 25 bp, Homo sapien
ctggttgctacaataataggccaag

SEQ ID NO: 4639866 - DNA, 25 bp, Homo sapien
gatccgggaccgcggcccttgcttg

SEQ ID NO: 4639867 - DNA, 25 bp, Homo sapien
tgcttcatgaaaaatcggctggtct

SEQ ID NO: 4639868 - DNA, 25 bp, Homo sapien
gggaccgcggcccttgcttgcttca

SEQ ID NO: 4639869 - DNA, 25 bp, Homo sapien
tggtctccaaactcgcgaaggaaaa

SEQ ID NO: 4639870 - DNA, 25 bp, Homo sapien
tgaagcaagcccagtcatataacag

SEQ ID NO: 4639871 - DNA, 25 bp, Homo sapien
gaagcaagcccagtcatataacagg

SEQ ID NO: 4639872 - DNA, 25 bp, Homo sapien
agcaagcccagtcatataacagggt

SEQ ID NO: 4639873 - DNA, 25 bp, Homo sapien
aagcccagtcatataacagggtgca

SEQ ID NO: 4639874 - DNA, 25 bp, Homo sapien
gagttataaataaactctccagatg

SEQ ID NO: 4639875 - DNA, 25 bp, Homo sapien
gaactagatgtaaacatgactccaa

SEQ ID NO: 4639876 - DNA, 25 bp, Homo sapien
aacagagagttatagagggagttat

SEQ ID NO: 4639877 - DNA, 25 bp, Homo sapien
aatacaaccacagcacatttaggta

SEQ ID NO: 4639878 - DNA, 25 bp, Homo sapien
tgccccatcctagactcaggatgct

SEQ ID NO: 4639879 - DNA, 25 bp, Homo sapien
aaagcagaagtgcactggggcggtg

SEQ ID NO: 4639880 - DNA, 25 bp, Homo sapien
gattccaggtgccttgctccagtcc

SEQ ID NO: 4639881 - DNA, 25 bp, Homo sapien
aggatgctctcccacgctactaacc

SEQ ID NO: 4639882 - DNA, 25 bp, Homo sapien
cggactctgcgtcgggtttcctcac

SEQ ID NO: 4639883 - DNA, 25 bp, Homo sapien
cttctccggactctgcgtcgggttt

SEQ ID NO: 4639884 - DNA, 25 bp, Homo sapien
tctccggactctgcgtcgggtttcc

SEQ ID NO: 4639885 - DNA, 25 bp, Homo sapien
caccaacaccgtccagagaggcctg

SEQ ID NO: 4639886 - DNA, 25 bp, Homo sapien
tgttgaagacattgggcgtcagcga

SEQ ID NO: 4639887 - DNA, 25 bp, Homo sapien
cagcgagaggcattgaggcacttga

SEQ ID NO: 4639888 - DNA, 25 bp, Homo sapien
ggacagggcagacgccggcggccag

SEQ ID NO: 4639889 - DNA, 25 bp, Homo sapien
acattgggcgtcagcgagaggcatt

SEQ ID NO: 4639890 - DNA, 25 bp, Homo sapien
aacacagttccaaatgatctatgga

SEQ ID NO: 4639891 - DNA, 25 bp, Homo sapien
caaaatataggaaatacagctaagg

SEQ ID NO: 4639892 - DNA, 25 bp, Homo sapien
caataacttacacttgtatctcaag

SEQ ID NO: 4639893 - DNA, 25 bp, Homo sapien
ggctgtggtgggaaagaaatttata

SEQ ID NO: 4639894 - DNA, 25 bp, Homo sapien
ttccattaaggcaggacccacaaag

SEQ ID NO: 4639895 - DNA, 25 bp, Homo sapien
tactgccaaacctaggtatgcacag

SEQ ID NO: 4639896 - DNA, 25 bp, Homo sapien
ccccatgaattttgcttaggcactt

SEQ ID NO: 4639897 - DNA, 25 bp, Homo sapien
tatgcacagacagaacactcccagc

SEQ ID NO: 4639898 - DNA, 25 bp, Homo sapien
gaaatatgaatacatccaatagatg

SEQ ID NO: 4639899 - DNA, 25 bp, Homo sapien
taactccacttgatactaaaggaag

SEQ ID NO: 4639900 - DNA, 25 bp, Homo sapien
tcctagtgagtattataaatcatag

SEQ ID NO: 4639901 - DNA, 25 bp, Homo sapien
aagctgagcttccttgctttaatca

SEQ ID NO: 4639902 - DNA, 25 bp, Homo sapien
tacctcttaagtgtaatgatttcct

SEQ ID NO: 4639903 - DNA, 25 bp, Homo sapien
caataaatgtggaggtgcagatacc

SEQ ID NO: 4639904 - DNA, 25 bp, Homo sapien
tagtgggatcactagatcatacggt

SEQ ID NO: 4639905 - DNA, 25 bp, Homo sapien
caccaacagtgtatggtagtctaat

SEQ ID NO: 4639906 - DNA, 25 bp, Homo sapien
tcctccagtacaattagcaatgtag

SEQ ID NO: 4639907 - DNA, 25 bp, Homo sapien
tcttaaatggttttcattaggctaa

SEQ ID NO: 4639908 - DNA, 25 bp, Homo sapien
tgtcagcagcaccgctttccttctg

SEQ ID NO: 4639909 - DNA, 25 bp, Homo sapien
gactctaaaggagaatacatgttct

SEQ ID NO: 4639910 - DNA, 25 bp, Homo sapien
ttagactcatgaccaaattgaagtt

SEQ ID NO: 4639911 - DNA, 25 bp, Homo sapien
ccttatggaatttatttgtggtgaa

SEQ ID NO: 4639912 - DNA, 25 bp, Homo sapien
ggcaccaggcctaagcaactgtaga

SEQ ID NO: 4639913 - DNA, 25 bp, Homo sapien
caccaggcctaagcaactgtagaga

SEQ ID NO: 4639914 - DNA, 25 bp, Homo sapien
caggcctaagcaactgtagagaagc

SEQ ID NO: 4639915 - DNA, 25 bp, Homo sapien
cacccccctgacaagccccggtatg

SEQ ID NO: 4639916 - DNA, 25 bp, Homo sapien
tctgagatacatgtacagaacgtgg

SEQ ID NO: 4639917 - DNA, 25 bp, Homo sapien
tcattgttcaactcaaaagaaaaac

SEQ ID NO: 4639918 - DNA, 25 bp, Homo sapien
cctagcctcccacccccctgacaag

SEQ ID NO: 4639919 - DNA, 25 bp, Homo sapien
ccttcaagcaaaatgggtacacgca

SEQ ID NO: 4639920 - DNA, 25 bp, Homo sapien
aagcatacttgcacacaccttcaag

SEQ ID NO: 4639921 - DNA, 25 bp, Homo sapien
tggcccaataatttaacttcgtaca

SEQ ID NO: 4639922 - DNA, 25 bp, Homo sapien
tactatgcaggtgttaagaatgagg

SEQ ID NO: 4639923 - DNA, 25 bp, Homo sapien
cagcaaaagttgtacaggtgacttc

SEQ ID NO: 4639924 - DNA, 25 bp, Homo sapien
cagtggccatcgttagagtgttgaa

SEQ ID NO: 4639925 - DNA, 25 bp, Homo sapien
ttaaaccaagactggagacacaggt

SEQ ID NO: 4639926 - DNA, 25 bp, Homo sapien
ggaaaacaaagtagtgcacacggta

SEQ ID NO: 4639927 - DNA, 25 bp, Homo sapien
tttatgccagtagaaatatattggc

SEQ ID NO: 4639928 - DNA, 25 bp, Homo sapien
gcaataattagtacagaagagctga

SEQ ID NO: 4639929 - DNA, 25 bp, Homo sapien
tttttactagcttcatagtttcagg

SEQ ID NO: 4639930 - DNA, 25 bp, Homo sapien
gatttgtctgcgatctctattctgt

SEQ ID NO: 4639931 - DNA, 25 bp, Homo sapien
cgagattctgaactgggtccccttt

SEQ ID NO: 4639932 - DNA, 25 bp, Homo sapien
cttctctggggccagattctgagct

SEQ ID NO: 4639933 - DNA, 25 bp, Homo sapien
tggggccagattctgagctctccat

SEQ ID NO: 4639934 - DNA, 25 bp, Homo sapien
tctctggggccagattctgagctct

SEQ ID NO: 4639935 - DNA, 25 bp, Homo sapien
cagtgacggactcaggttctcacca

SEQ ID NO: 4639936 - DNA, 25 bp, Homo sapien
gagagcgtttaagatctgagccgtc

SEQ ID NO: 4639937 - DNA, 25 bp, Homo sapien
tcaggcgatctagaccacgatgaaa

SEQ ID NO: 4639938 - DNA, 25 bp, Homo sapien
taatctgacctgtgaaaaacactgt

SEQ ID NO: 4639939 - DNA, 25 bp, Homo sapien
tcatttccggtaatcttcagagggt

SEQ ID NO: 4639940 - DNA, 25 bp, Homo sapien
aaaccatacagggatagggtaggag

SEQ ID NO: 4639941 - DNA, 25 bp, Homo sapien
atagggtaggagatgccatttggat

SEQ ID NO: 4639942 - DNA, 25 bp, Homo sapien
cctaggttaaaccatacagggatag

SEQ ID NO: 4639943 - DNA, 25 bp, Homo sapien
ctctgggaaaccagagtttccctag

SEQ ID NO: 4639944 - DNA, 25 bp, Homo sapien
ccccttcagtgagccagtgtttctg

SEQ ID NO: 4639945 - DNA, 25 bp, Homo sapien
tgccctccagctttcaaagtgctct

SEQ ID NO: 4639946 - DNA, 25 bp, Homo sapien
tgttccttagctgccccttcagtga

SEQ ID NO: 4639947 - DNA, 25 bp, Homo sapien
gctctgagtcatcacttacacagtg

SEQ ID NO: 4639948 - DNA, 25 bp, Homo sapien
gtgtggccctctgtattataaaatg

SEQ ID NO: 4639949 - DNA, 25 bp, Homo sapien
ggtgtggccctctgtattataaaat

SEQ ID NO: 4639950 - DNA, 25 bp, Homo sapien
gtggccctctgtattataaaatgtt

SEQ ID NO: 4639951 - DNA, 25 bp, Homo sapien
tgtggccctctgtattataaaatgt

SEQ ID NO: 4639952 - DNA, 25 bp, Homo sapien
aagagaaaagtctgccacccttcac

SEQ ID NO: 4639953 - DNA, 25 bp, Homo sapien
tctccgcatctgaccttatactcca

SEQ ID NO: 4639954 - DNA, 25 bp, Homo sapien
tatctccgcatctgaccttatactc

SEQ ID NO: 4639955 - DNA, 25 bp, Homo sapien
ccgcatctgaccttatactccacat

SEQ ID NO: 4639956 - DNA, 25 bp, Homo sapien
ttatctccgcatctgaccttatact

SEQ ID NO: 4639957 - DNA, 25 bp, Homo sapien
ccaaggactcccatttcagagtgaa

SEQ ID NO: 4639958 - DNA, 25 bp, Homo sapien
caatggcccacaaggctctaggtaa

SEQ ID NO: 4639959 - DNA, 25 bp, Homo sapien
gagttagcctagtcatgcctttcaa

SEQ ID NO: 4639960 - DNA, 25 bp, Homo sapien
tcaaaggtcaacacagactagcaac

SEQ ID NO: 4639961 - DNA, 25 bp, Homo sapien
tagttaacactgcagcgggatctga

SEQ ID NO: 4639962 - DNA, 25 bp, Homo sapien
tccgtgtacaactggactcctgcgt

SEQ ID NO: 4639963 - DNA, 25 bp, Homo sapien
gcttgccaagatcgctgaaggcctc

SEQ ID NO: 4639964 - DNA, 25 bp, Homo sapien
ttcgcctccgtgtacaactggactc

SEQ ID NO: 4639965 - DNA, 25 bp, Homo sapien
tcccaggtcgaaaaccctcatactg

SEQ ID NO: 4639966 - DNA, 25 bp, Homo sapien
ccaggtcgaaaaccctcatactgaa

SEQ ID NO: 4639967 - DNA, 25 bp, Homo sapien
gtcgaaaaccctcatactgaactct

SEQ ID NO: 4639968 - DNA, 25 bp, Homo sapien
aggtcgaaaaccctcatactgaact

SEQ ID NO: 4639969 - DNA, 25 bp, Homo sapien
ctccaccctacagaaaatatgattg

SEQ ID NO: 4639970 - DNA, 25 bp, Homo sapien
acagcctgtaaagtttaatctcggc

SEQ ID NO: 4639971 - DNA, 25 bp, Homo sapien
aaagtttaatctcggcaataggcaa

SEQ ID NO: 4639972 - DNA, 25 bp, Homo sapien
ctcggcaataggcaagttattgtaa

SEQ ID NO: 4639973 - DNA, 25 bp, Homo sapien
tgtaaagtttaatctcggcaatagg

SEQ ID NO: 4639974 - DNA, 25 bp, Homo sapien
ttagattctagtttaacatactgga

SEQ ID NO: 4639975 - DNA, 25 bp, Homo sapien
tttagattctagtttaacatactgg

SEQ ID NO: 4639976 - DNA, 25 bp, Homo sapien
tagattctagtttaacatactggat

SEQ ID NO: 4639977 - DNA, 25 bp, Homo sapien
gacagactgtattgccaagaaacca

SEQ ID NO: 4639978 - DNA, 25 bp, Homo sapien
gccactgacagactgtattgccaag

SEQ ID NO: 4639979 - DNA, 25 bp, Homo sapien
ttatgccactgacagactgtattgc

SEQ ID NO: 4639980 - DNA, 25 bp, Homo sapien
actgtattgccaagaaaccagttcc

SEQ ID NO: 4639981 - DNA, 25 bp, Homo sapien
ctgtaaaagaaatcgtccaagatag

SEQ ID NO: 4639982 - DNA, 25 bp, Homo sapien
taaaagaaatcgtccaagatagtta

SEQ ID NO: 4639983 - DNA, 25 bp, Homo sapien
tgtaaaagaaatcgtccaagatagt

SEQ ID NO: 4639984 - DNA, 25 bp, Homo sapien
acattcaggatatatttctcaaacc

SEQ ID NO: 4639985 - DNA, 25 bp, Homo sapien
taataacccacattcaggatatatt

SEQ ID NO: 4639986 - DNA, 25 bp, Homo sapien
tcaacttaaagtctcatgtacataa

SEQ ID NO: 4639987 - DNA, 25 bp, Homo sapien
agtctcatgtacataataacccaca

SEQ ID NO: 4639988 - DNA, 25 bp, Homo sapien
ggatgtacgaagattaaaagcaaag

SEQ ID NO: 4639989 - DNA, 25 bp, Homo sapien
tctaatcccacaccctactgaaaag

SEQ ID NO: 4639990 - DNA, 25 bp, Homo sapien
tcctctaatcccacaccctactgaa

SEQ ID NO: 4639991 - DNA, 25 bp, Homo sapien
cctactgaaaaggatgtacgaagat

SEQ ID NO: 4639992 - DNA, 25 bp, Homo sapien
aaaaatacagttgcaatgtttagga

SEQ ID NO: 4639993 - DNA, 25 bp, Homo sapien
ttccatctgctcattattctgcttt

SEQ ID NO: 4639994 - DNA, 25 bp, Homo sapien
ctttcctgagagtgatttcagagga

SEQ ID NO: 4639995 - DNA, 25 bp, Homo sapien
acagttgcaatgtttaggaaattaa

SEQ ID NO: 4639996 - DNA, 25 bp, Homo sapien
ttcaattctatgtgacacaataaat

SEQ ID NO: 4639997 - DNA, 25 bp, Homo sapien
aataggaataatattagcaagagaa

SEQ ID NO: 4639998 - DNA, 25 bp, Homo sapien
tggtaagccaaactaacaagggtga

SEQ ID NO: 4639999 - DNA, 25 bp, Homo sapien
gacacaataaattaccaaagtgaat

SEQ ID NO: 4640000 - DNA, 25 bp, Homo sapien
ttttatggatttatccagatcaagg

SEQ ID NO: 4640001 - DNA, 25 bp, Homo sapien
ttatggatttatccagatcaaggac

SEQ ID NO: 4640002 - DNA, 25 bp, Homo sapien
tttatggatttatccagatcaagga

SEQ ID NO: 4640003 - DNA, 25 bp, Homo sapien
tatggatttatccagatcaaggaca

SEQ ID NO: 4640004 - DNA, 25 bp, Homo sapien
atatggacatttataaatatgagaa

SEQ ID NO: 4640005 - DNA, 25 bp, Homo sapien
tatgagaatatatagatatacagac

SEQ ID NO: 4640006 - DNA, 25 bp, Homo sapien
ttccttttctcaaacaatatggaca

SEQ ID NO: 4640007 - DNA, 25 bp, Homo sapien
gaggcccacattttagaggtatttc

SEQ ID NO: 4640008 - DNA, 25 bp, Homo sapien
agaagatcgaagagggatttactgg

SEQ ID NO: 4640009 - DNA, 25 bp, Homo sapien
gatcgaagagggatttactggactg

SEQ ID NO: 4640010 - DNA, 25 bp, Homo sapien
tcgaagagggatttactggactgaa

SEQ ID NO: 4640011 - DNA, 25 bp, Homo sapien
cccagatccttttactcagatgcat

SEQ ID NO: 4640012 - DNA, 25 bp, Homo sapien
tcatgtgagttcatgggcatgctca

SEQ ID NO: 4640013 - DNA, 25 bp, Homo sapien
tgagttcatgggcatgctcatcact

SEQ ID NO: 4640014 - DNA, 25 bp, Homo sapien
atgtgagttcatgggcatgctcatc

SEQ ID NO: 4640015 - DNA, 25 bp, Homo sapien
gtgagttcatgggcatgctcatcac

SEQ ID NO: 4640016 - DNA, 25 bp, Homo sapien
tcttcaaatctggccacttccaagg

SEQ ID NO: 4640017 - DNA, 25 bp, Homo sapien
gttcgaatcacagcatcttcaaatc

SEQ ID NO: 4640018 - DNA, 25 bp, Homo sapien
cttccaaggcagaattaaacattcc

SEQ ID NO: 4640019 - DNA, 25 bp, Homo sapien
agttcgaatcacagcatcttcaaat

SEQ ID NO: 4640020 - DNA, 25 bp, Homo sapien
tcttgatctgcccccttatcccact

SEQ ID NO: 4640021 - DNA, 25 bp, Homo sapien
gatggaaacaggataccaagttcac

SEQ ID NO: 4640022 - DNA, 25 bp, Homo sapien
ggatggaaacaggataccaagttca

SEQ ID NO: 4640023 - DNA, 25 bp, Homo sapien
ggaaacaggataccaagttcacatg

SEQ ID NO: 4640024 - DNA, 25 bp, Homo sapien
aaacaggataccaagttcacatgaa

SEQ ID NO: 4640025 - DNA, 25 bp, Homo sapien
tgtctttagtctgacaccatgggtg

SEQ ID NO: 4640026 - DNA, 25 bp, Homo sapien
tgagcctgagttggcccgtggtcca

SEQ ID NO: 4640027 - DNA, 25 bp, Homo sapien
tctttagtctgacaccatgggtgag

SEQ ID NO: 4640028 - DNA, 25 bp, Homo sapien
tttgtctttagtctgacaccatggg

SEQ ID NO: 4640029 - DNA, 25 bp, Homo sapien
aattatagaaaagtgtctgtgtgac

SEQ ID NO: 4640030 - DNA, 25 bp, Homo sapien
atagaaaagtgtctgtgtgactccc

SEQ ID NO: 4640031 - DNA, 25 bp, Homo sapien
agaaaagtgtctgtgtgactccctg

SEQ ID NO: 4640032 - DNA, 25 bp, Homo sapien
ttatagaaaagtgtctgtgtgactc

SEQ ID NO: 4640033 - DNA, 25 bp, Homo sapien
taattttttggatatcgcaccacaa

SEQ ID NO: 4640034 - DNA, 25 bp, Homo sapien
tgtaaacataaacaaggaggactgc

SEQ ID NO: 4640035 - DNA, 25 bp, Homo sapien
catagggggaaagcctcttgacatt

SEQ ID NO: 4640036 - DNA, 25 bp, Homo sapien
tgaaaggggaacctacagactggaa

SEQ ID NO: 4640037 - DNA, 25 bp, Homo sapien
ttttccactaagattgagtacaaga

SEQ ID NO: 4640038 - DNA, 25 bp, Homo sapien
ccactaagattgagtacaagatagg

SEQ ID NO: 4640039 - DNA, 25 bp, Homo sapien
aagcatttaacaaagtttagcaaca

SEQ ID NO: 4640040 - DNA, 25 bp, Homo sapien
gtctaatcatagttagtggggaaca

SEQ ID NO: 4640041 - DNA, 25 bp, Homo sapien
aagttgaacattcgctttcatagag

SEQ ID NO: 4640042 - DNA, 25 bp, Homo sapien
gatagctttgaggttttcgttagaa

SEQ ID NO: 4640043 - DNA, 25 bp, Homo sapien
gcgcattgaggcctaaggtgaaaaa

SEQ ID NO: 4640044 - DNA, 25 bp, Homo sapien
tgatgtgtgtactgaactcacagag

SEQ ID NO: 4640045 - DNA, 25 bp, Homo sapien
aaactacacagaagcattctgagaa

SEQ ID NO: 4640046 - DNA, 25 bp, Homo sapien
gaatctgcaagtggacatttggagt

SEQ ID NO: 4640047 - DNA, 25 bp, Homo sapien
agtggacatttggagtgctttgagg

SEQ ID NO: 4640048 - DNA, 25 bp, Homo sapien
ggagtgctttgaggcctatggtgga

SEQ ID NO: 4640049 - DNA, 25 bp, Homo sapien
tttggagtgctttgaggcctatggt

SEQ ID NO: 4640050 - DNA, 25 bp, Homo sapien
tcacagagttgaaactttcttttga

SEQ ID NO: 4640051 - DNA, 25 bp, Homo sapien
catctcacagagttgaaactttctt

SEQ ID NO: 4640052 - DNA, 25 bp, Homo sapien
gtgcgttcatctcacagagttgaaa

SEQ ID NO: 4640053 - DNA, 25 bp, Homo sapien
gttcatctcacagagttgaaacttt

SEQ ID NO: 4640054 - DNA, 25 bp, Homo sapien
cacttcgaggccttcggtggaaaag

SEQ ID NO: 4640055 - DNA, 25 bp, Homo sapien
ggagcacttcgaggccttcggtgga

SEQ ID NO: 4640056 - DNA, 25 bp, Homo sapien
ttggagcacttcgaggccttcggtg

SEQ ID NO: 4640057 - DNA, 25 bp, Homo sapien
gagcacttcgaggccttcggtggaa

SEQ ID NO: 4640058 - DNA, 25 bp, Homo sapien
ttcgtagaatctgcaagcggacatt

SEQ ID NO: 4640059 - DNA, 25 bp, Homo sapien
ttttcgtagaatctgcaagcggaca

SEQ ID NO: 4640060 - DNA, 25 bp, Homo sapien
cgtagaatctgcaagcggacatttg

SEQ ID NO: 4640061 - DNA, 25 bp, Homo sapien
cttttcgtagaatctgcaagcggac

SEQ ID NO: 4640062 - DNA, 25 bp, Homo sapien
tagacagaagccttctgagaaactc

SEQ ID NO: 4640063 - DNA, 25 bp, Homo sapien
agtggaaacggaaatatcttcacat

SEQ ID NO: 4640064 - DNA, 25 bp, Homo sapien
cagaagccttctgagaaactccttt

SEQ ID NO: 4640065 - DNA, 25 bp, Homo sapien
gacagaagccttctgagaaactcct

SEQ ID NO: 4640066 - DNA, 25 bp, Homo sapien
gtggcatacatgcaatttccatgga

SEQ ID NO: 4640067 - DNA, 25 bp, Homo sapien
gcctgttcattaattggtcccttgg

SEQ ID NO: 4640068 - DNA, 25 bp, Homo sapien
aaactgagaaggcaacgtggcatac

SEQ ID NO: 4640069 - DNA, 25 bp, Homo sapien
gagtaggatgctgaaaatgtgagta

SEQ ID NO: 4640070 - DNA, 25 bp, Homo sapien
aatagactttcagaaggaagggcct

SEQ ID NO: 4640071 - DNA, 25 bp, Homo sapien
aagggccttccataacaaggaatgc

SEQ ID NO: 4640072 - DNA, 25 bp, Homo sapien
tcaggaatccagtcataggcaaatc

SEQ ID NO: 4640073 - DNA, 25 bp, Homo sapien
gaccctttgacagcacagggaaaga

SEQ ID NO: 4640074 - DNA, 25 bp, Homo sapien
tgccaaccctgcagagggctagcaa

SEQ ID NO: 4640075 - DNA, 25 bp, Homo sapien
taaatgtggtagtggcctgccaacc

SEQ ID NO: 4640076 - DNA, 25 bp, Homo sapien
aatcttcagggagtctgctgccggt

SEQ ID NO: 4640077 - DNA, 25 bp, Homo sapien
ggtgtggaacataccctaggagcca

SEQ ID NO: 4640078 - DNA, 25 bp, Homo sapien
tggaggaacagtgcctttgtcacac

SEQ ID NO: 4640079 - DNA, 25 bp, Homo sapien
actgaagctcataattcatcatgag

SEQ ID NO: 4640080 - DNA, 25 bp, Homo sapien
tgtcacacctaccagaatatactca

SEQ ID NO: 4640081 - DNA, 25 bp, Homo sapien
tgaagctcataattcatcatgagat

SEQ ID NO: 4640082 - DNA, 25 bp, Homo sapien
cactggtatgaaatcagggagcaag

SEQ ID NO: 4640083 - DNA, 25 bp, Homo sapien
tacctcgtttggcttaaagtcactg

SEQ ID NO: 4640084 - DNA, 25 bp, Homo sapien
tgtataactgcatgactaacccctg

SEQ ID NO: 4640085 - DNA, 25 bp, Homo sapien
tggttatcacactcttctctgggta

SEQ ID NO: 4640086 - DNA, 25 bp, Homo sapien
cccagttggaggaaagggatacact

SEQ ID NO: 4640087 - DNA, 25 bp, Homo sapien
tccagaagcatttagatggtagtca

SEQ ID NO: 4640088 - DNA, 25 bp, Homo sapien
tggctcctggcactgtagagaaaga

SEQ ID NO: 4640089 - DNA, 25 bp, Homo sapien
tcattgattgtagggcatctctggg

SEQ ID NO: 4640090 - DNA, 25 bp, Homo sapien
tcctccctaagttgataagactcta

SEQ ID NO: 4640091 - DNA, 25 bp, Homo sapien
aattctggcaccattctgaaaggca

SEQ ID NO: 4640092 - DNA, 25 bp, Homo sapien
taaaagtcgtgtcaaccaggcacgg

SEQ ID NO: 4640093 - DNA, 25 bp, Homo sapien
gaaaggcagttgtgattctcactca

SEQ ID NO: 4640094 - DNA, 25 bp, Homo sapien
cacttgaaccaagtccagatgcact

SEQ ID NO: 4640095 - DNA, 25 bp, Homo sapien
ttgaaccaagtccagatgcactgcc

SEQ ID NO: 4640096 - DNA, 25 bp, Homo sapien
ggctggtgccacttgaaccaagtcc

SEQ ID NO: 4640097 - DNA, 25 bp, Homo sapien
gtgccacttgaaccaagtccagatg

SEQ ID NO: 4640098 - DNA, 25 bp, Homo sapien
gagccaaagagaggtcactagggct

SEQ ID NO: 4640099 - DNA, 25 bp, Homo sapien
agccaaagagaggtcactagggctg

SEQ ID NO: 4640100 - DNA, 25 bp, Homo sapien
ccaaagagaggtcactagggctgga

SEQ ID NO: 4640101 - DNA, 25 bp, Homo sapien
gccaaagagaggtcactagggctgg

SEQ ID NO: 4640102 - DNA, 25 bp, Homo sapien
cgcctgtgcccagatgcttgaacca

SEQ ID NO: 4640103 - DNA, 25 bp, Homo sapien
cagatgcttgaaccatgttttgtcc

SEQ ID NO: 4640104 - DNA, 25 bp, Homo sapien
gcttgaaccatgttttgtccttcag

SEQ ID NO: 4640105 - DNA, 25 bp, Homo sapien
gcccagatgcttgaaccatgttttg

SEQ ID NO: 4640106 - DNA, 25 bp, Homo sapien
tctgggacctcagaggcgagtgggt

SEQ ID NO: 4640107 - DNA, 25 bp, Homo sapien
gaggtcgaggggggacagctgcccc

SEQ ID NO: 4640108 - DNA, 25 bp, Homo sapien
ggcaacaggtggaagatgcttttct

SEQ ID NO: 4640109 - DNA, 25 bp, Homo sapien
gcccaggcaacaggtggaagatgct

SEQ ID NO: 4640110 - DNA, 25 bp, Homo sapien
gaccattttggagccacgggtggac

SEQ ID NO: 4640111 - DNA, 25 bp, Homo sapien
gatctttgctatcacggaccaggag

SEQ ID NO: 4640112 - DNA, 25 bp, Homo sapien
tatttcctggatctttgctatcacg

SEQ ID NO: 4640113 - DNA, 25 bp, Homo sapien
agaccattttggagccacgggtgga

SEQ ID NO: 4640114 - DNA, 25 bp, Homo sapien
acatatgtgctcatgaacttggcca

SEQ ID NO: 4640115 - DNA, 25 bp, Homo sapien
tatgtgctcatgaacttggccagga

SEQ ID NO: 4640116 - DNA, 25 bp, Homo sapien
atgtgctcatgaacttggccaggaa

SEQ ID NO: 4640117 - DNA, 25 bp, Homo sapien
catgacatatgtgctcatgaacttg

SEQ ID NO: 4640118 - DNA, 25 bp, Homo sapien
agattgcaccactgtgacaaagcaa

SEQ ID NO: 4640119 - DNA, 25 bp, Homo sapien
ctccagaggctgagatgcaagaatc

SEQ ID NO: 4640120 - DNA, 25 bp, Homo sapien
ttgcaccactgtgacaaagcaagac

SEQ ID NO: 4640121 - DNA, 25 bp, Homo sapien
actccagaggctgagatgcaagaat

SEQ ID NO: 4640122 - DNA, 25 bp, Homo sapien
aaaaatactggatgagcataggcca

SEQ ID NO: 4640123 - DNA, 25 bp, Homo sapien
gatccaggataagatacaacaggag

SEQ ID NO: 4640124 - DNA, 25 bp, Homo sapien
tacaacaggagaggacaggaacaga

SEQ ID NO: 4640125 - DNA, 25 bp, Homo sapien
cctatcaagcagcagatcaagccat

SEQ ID NO: 4640126 - DNA, 25 bp, Homo sapien
gctggattggtgcagaagtggaggt

SEQ ID NO: 4640127 - DNA, 25 bp, Homo sapien
ccagccaaggggtgatatgtggata

SEQ ID NO: 4640128 - DNA, 25 bp, Homo sapien
agtacctgaataggctggacagctg

SEQ ID NO: 4640129 - DNA, 25 bp, Homo sapien
gtaaagtacctgaataggctggaca

SEQ ID NO: 4640130 - DNA, 25 bp, Homo sapien
taccctcagtctagagccactgttc

SEQ ID NO: 4640131 - DNA, 25 bp, Homo sapien
tagagccactgttcccttcagccct

SEQ ID NO: 4640132 - DNA, 25 bp, Homo sapien
tgtgctatcctctccctctgcagag

SEQ ID NO: 4640133 - DNA, 25 bp, Homo sapien
cagtctagagccactgttcccttca

SEQ ID NO: 4640134 - DNA, 25 bp, Homo sapien
tcaggcggcattcccaagctgctgc

SEQ ID NO: 4640135 - DNA, 25 bp, Homo sapien
tgccaggaacccctccctacacaca

SEQ ID NO: 4640136 - DNA, 25 bp, Homo sapien
acagtggggccctaactgtcttgcc

SEQ ID NO: 4640137 - DNA, 25 bp, Homo sapien
tgcttcttgcccatccctcacggct

SEQ ID NO: 4640138 - DNA, 25 bp, Homo sapien
caagttgacaccaaggtagctccca

SEQ ID NO: 4640139 - DNA, 25 bp, Homo sapien
agccaaaacccaagttgacaccaag

SEQ ID NO: 4640140 - DNA, 25 bp, Homo sapien
actcccatggtgactccgaagccaa

SEQ ID NO: 4640141 - DNA, 25 bp, Homo sapien
tgggccacggaaccaaggccgaata

SEQ ID NO: 4640142 - DNA, 25 bp, Homo sapien
acacggcccagtgcacagttagtga

SEQ ID NO: 4640143 - DNA, 25 bp, Homo sapien
cagaggcggacacccgggcaggacg

SEQ ID NO: 4640144 - DNA, 25 bp, Homo sapien
ccagaggcggacacccgggcaggac

SEQ ID NO: 4640145 - DNA, 25 bp, Homo sapien
aggaagccccgccacaatgtcatgt

SEQ ID NO: 4640146 - DNA, 25 bp, Homo sapien
tcaggaagccccgccacaatgtcat

SEQ ID NO: 4640147 - DNA, 25 bp, Homo sapien
gaagccccgccacaatgtcatgtga

SEQ ID NO: 4640148 - DNA, 25 bp, Homo sapien
aagccccgccacaatgtcatgtgat

SEQ ID NO: 4640149 - DNA, 25 bp, Homo sapien
agttcttgtcctgtctatccggagg

SEQ ID NO: 4640150 - DNA, 25 bp, Homo sapien
tgtctatccggagggactccctgct

SEQ ID NO: 4640151 - DNA, 25 bp, Homo sapien
tcttgtcctgtctatccggagggac

SEQ ID NO: 4640152 - DNA, 25 bp, Homo sapien
tgtcctgtctatccggagggactcc

SEQ ID NO: 4640153 - DNA, 25 bp, Homo sapien
tgggcccctccccaagccacaggac

SEQ ID NO: 4640154 - DNA, 25 bp, Homo sapien
ctgggcccctccccaagccacagga

SEQ ID NO: 4640155 - DNA, 25 bp, Homo sapien
ttcatgccatggtacaccctgatga

SEQ ID NO: 4640156 - DNA, 25 bp, Homo sapien
gatgcctatcaccagtgcgtgtgtt

SEQ ID NO: 4640157 - DNA, 25 bp, Homo sapien
cctatcaccagtgcgtgtgttcctg

SEQ ID NO: 4640158 - DNA, 25 bp, Homo sapien
ctgtgttcatgccatggtacaccct

SEQ ID NO: 4640159 - DNA, 25 bp, Homo sapien
tggtggagccaatgaagaccaggta

SEQ ID NO: 4640160 - DNA, 25 bp, Homo sapien
cagaagtggtgccaccactggcacc

SEQ ID NO: 4640161 - DNA, 25 bp, Homo sapien
tgccacagagtcctccaatttcagg

SEQ ID NO: 4640162 - DNA, 25 bp, Homo sapien
tgatgccacctagagaggcacccag

SEQ ID NO: 4640163 - DNA, 25 bp, Homo sapien
tgagatcccatcttgggcaatacgg

SEQ ID NO: 4640164 - DNA, 25 bp, Homo sapien
agatcccatcttgggcaatacggtt

SEQ ID NO: 4640165 - DNA, 25 bp, Homo sapien
catgagatcccatcttgggcaatac

SEQ ID NO: 4640166 - DNA, 25 bp, Homo sapien
gagatcccatcttgggcaatacggt

SEQ ID NO: 4640167 - DNA, 25 bp, Homo sapien
catggattcatgtaagggtggggca

SEQ ID NO: 4640168 - DNA, 25 bp, Homo sapien
ggcagggtggactgaagatctgttg

SEQ ID NO: 4640169 - DNA, 25 bp, Homo sapien
actgaagatctgttggcagggctca

SEQ ID NO: 4640170 - DNA, 25 bp, Homo sapien
tggactgaagatctgttggcagggc

SEQ ID NO: 4640171 - DNA, 25 bp, Homo sapien
ctggagcccttggagccctaagagg

SEQ ID NO: 4640172 - DNA, 25 bp, Homo sapien
ggagccctaagaggcctcttcctgt

SEQ ID NO: 4640173 - DNA, 25 bp, Homo sapien
ttcctgtgtcttcatgtgttcgaag

SEQ ID NO: 4640174 - DNA, 25 bp, Homo sapien
ttcatgtgttcgaaggatttccctc

SEQ ID NO: 4640175 - DNA, 25 bp, Homo sapien
aataagtgataattgatattccaaa

SEQ ID NO: 4640176 - DNA, 25 bp, Homo sapien
tactttgctttgaattcaaattgtt

SEQ ID NO: 4640177 - DNA, 25 bp, Homo sapien
aagtgataattgatattccaaaaat

SEQ ID NO: 4640178 - DNA, 25 bp, Homo sapien
caataagtgataattgatattccaa

SEQ ID NO: 4640179 - DNA, 25 bp, Homo sapien
tgaaagatgaagtcgttataaagct

SEQ ID NO: 4640180 - DNA, 25 bp, Homo sapien
tggctggttgaaagatgaagtcgtt

SEQ ID NO: 4640181 - DNA, 25 bp, Homo sapien
taaaccaaatgcagtgctggctgct

SEQ ID NO: 4640182 - DNA, 25 bp, Homo sapien
gaagtcgttataaagctggatttta

SEQ ID NO: 4640183 - DNA, 25 bp, Homo sapien
ttagagcctgcatcgtggttccaag

SEQ ID NO: 4640184 - DNA, 25 bp, Homo sapien
atcatctcatgtgccttagatctta

SEQ ID NO: 4640185 - DNA, 25 bp, Homo sapien
tgtagctcagtttccataggcaact

SEQ ID NO: 4640186 - DNA, 25 bp, Homo sapien
tccacccaaacgcacatctgtatgg

SEQ ID NO: 4640187 - DNA, 25 bp, Homo sapien
caagctaatataaatgtgcacatgc

SEQ ID NO: 4640188 - DNA, 25 bp, Homo sapien
ttgacagactctttctatagctatg

SEQ ID NO: 4640189 - DNA, 25 bp, Homo sapien
cttgtgcacctgatgtagtatagca

SEQ ID NO: 4640190 - DNA, 25 bp, Homo sapien
aacagaagtagggaaagtgctagct

SEQ ID NO: 4640191 - DNA, 25 bp, Homo sapien
gcacagtgcccagttggtttaatgt

SEQ ID NO: 4640192 - DNA, 25 bp, Homo sapien
atgtccaatgcttgactgtaaggga

SEQ ID NO: 4640193 - DNA, 25 bp, Homo sapien
tgtattgctggcaaggcttgctgca

SEQ ID NO: 4640194 - DNA, 25 bp, Homo sapien
taattgaaagtattctgtattgctg

SEQ ID NO: 4640195 - DNA, 25 bp, Homo sapien
gcaaggcttgctgcaggacgttgaa

SEQ ID NO: 4640196 - DNA, 25 bp, Homo sapien
aagtattctgtattgctggcaaggc

SEQ ID NO: 4640197 - DNA, 25 bp, Homo sapien
tttctggagctttaaaaggaatcat

SEQ ID NO: 4640198 - DNA, 25 bp, Homo sapien
atttctggagctttaaaaggaatca

SEQ ID NO: 4640199 - DNA, 25 bp, Homo sapien
catattaattgcagagtagggcttc

SEQ ID NO: 4640200 - DNA, 25 bp, Homo sapien
gtttttcaatttgcatcaggcatat

SEQ ID NO: 4640201 - DNA, 25 bp, Homo sapien
caacagagaaggatggattatgggt

SEQ ID NO: 4640202 - DNA, 25 bp, Homo sapien
gaaggatggattatgggtttttcaa

SEQ ID NO: 4640203 - DNA, 25 bp, Homo sapien
acagaaagattgtaagaggtcagca

SEQ ID NO: 4640204 - DNA, 25 bp, Homo sapien
cagaaagattgtaagaggtcagcaa

SEQ ID NO: 4640205 - DNA, 25 bp, Homo sapien
aaatattactcacagaatcagtagc

SEQ ID NO: 4640206 - DNA, 25 bp, Homo sapien
tattactcacagaatcagtagcatt

SEQ ID NO: 4640207 - DNA, 25 bp, Homo sapien
ttactcacagaatcagtagcattca

SEQ ID NO: 4640208 - DNA, 25 bp, Homo sapien
aatattactcacagaatcagtagca

SEQ ID NO: 4640209 - DNA, 25 bp, Homo sapien
tgcttactgcagtttgcgatgtaga

SEQ ID NO: 4640210 - DNA, 25 bp, Homo sapien
tagagtccatgacatgtgaacccat

SEQ ID NO: 4640211 - DNA, 25 bp, Homo sapien
gcgatgtagagtccatgacatgtga

SEQ ID NO: 4640212 - DNA, 25 bp, Homo sapien
cagtttgcgatgtagagtccatgac

SEQ ID NO: 4640213 - DNA, 25 bp, Homo sapien
taagccatcggaaaaagctccaaaa

SEQ ID NO: 4640214 - DNA, 25 bp, Homo sapien
taaaataagccatcggaaaaagctc

SEQ ID NO: 4640215 - DNA, 25 bp, Homo sapien
atcggaaaaagctccaaaatgggca

SEQ ID NO: 4640216 - DNA, 25 bp, Homo sapien
gccatcggaaaaagctccaaaatgg

SEQ ID NO: 4640217 - DNA, 25 bp, Homo sapien
ttgccagatcgctaatcagttttgt

SEQ ID NO: 4640218 - DNA, 25 bp, Homo sapien
gtttgccagatcgctaatcagtttt

SEQ ID NO: 4640219 - DNA, 25 bp, Homo sapien
cagcacaatatttacacagatcatt

SEQ ID NO: 4640220 - DNA, 25 bp, Homo sapien
agcacaatatttacacagatcatta

SEQ ID NO: 4640221 - DNA, 25 bp, Homo sapien
ttgcattctgcggtttgttagcagc

SEQ ID NO: 4640222 - DNA, 25 bp, Homo sapien
tctgtttgcattctgcggtttgtta

SEQ ID NO: 4640223 - DNA, 25 bp, Homo sapien
tctgcggtttgttagcagcaatgac

SEQ ID NO: 4640224 - DNA, 25 bp, Homo sapien
gcattctgcggtttgttagcagcaa

SEQ ID NO: 4640225 - DNA, 25 bp, Homo sapien
cttctctggtcgctaagcaactgac

SEQ ID NO: 4640226 - DNA, 25 bp, Homo sapien
ctctacttctctggtcgctaagcaa

SEQ ID NO: 4640227 - DNA, 25 bp, Homo sapien
ttccaagttcaacgtcctgcagcaa

SEQ ID NO: 4640228 - DNA, 25 bp, Homo sapien
tgtttccaagttcaacgtcctgcag

SEQ ID NO: 4640229 - DNA, 25 bp, Homo sapien
cagtttgctgcaggctatgaatgac

SEQ ID NO: 4640230 - DNA, 25 bp, Homo sapien
tatatgagaaatgtggagatacgcc

SEQ ID NO: 4640231 - DNA, 25 bp, Homo sapien
gaacaaggtgaatcagtccaatggg

SEQ ID NO: 4640232 - DNA, 25 bp, Homo sapien
taccatttgataggtaacagcaggg

SEQ ID NO: 4640233 - DNA, 25 bp, Homo sapien
acaagacattccagccccatgaggg

SEQ ID NO: 4640234 - DNA, 25 bp, Homo sapien
gctgttaacccttggagcctcggag

SEQ ID NO: 4640235 - DNA, 25 bp, Homo sapien
caggagggtgcatcctctgagagct

SEQ ID NO: 4640236 - DNA, 25 bp, Homo sapien
tgttagggaaataggcaccgcccac

SEQ ID NO: 4640237 - DNA, 25 bp, Homo sapien
aggacagcagttggatcctgtccct

SEQ ID NO: 4640238 - DNA, 25 bp, Homo sapien
ggacagcagttggatcctgtccctc

SEQ ID NO: 4640239 - DNA, 25 bp, Homo sapien
gaccccatgggtcacattgtccatt

SEQ ID NO: 4640240 - DNA, 25 bp, Homo sapien
tggtccgtgatagcaaagatccagg

SEQ ID NO: 4640241 - DNA, 25 bp, Homo sapien
gggtcacattgtccattccttgcct

SEQ ID NO: 4640242 - DNA, 25 bp, Homo sapien
cacatatgtcatgatggtgagtggg

SEQ ID NO: 4640243 - DNA, 25 bp, Homo sapien
tcatttttgacagaacctggcgcat

SEQ ID NO: 4640244 - DNA, 25 bp, Homo sapien
ctggtgcattttgctgaccccttca

SEQ ID NO: 4640245 - DNA, 25 bp, Homo sapien
cacagcctggtgcattttgctgacc

SEQ ID NO: 4640246 - DNA, 25 bp, Homo sapien
agcctggtgcattttgctgacccct

SEQ ID NO: 4640247 - DNA, 25 bp, Homo sapien
gtagagttcagactccctaatgtgg

SEQ ID NO: 4640248 - DNA, 25 bp, Homo sapien
ctctgcccatctcatgccacctcca

SEQ ID NO: 4640249 - DNA, 25 bp, Homo sapien
cagactccctaatgtgggccatgag

SEQ ID NO: 4640250 - DNA, 25 bp, Homo sapien
tgctgaaaccctccacttggcccat

SEQ ID NO: 4640251 - DNA, 25 bp, Homo sapien
agcttgactgtgctcttgtggccat

SEQ ID NO: 4640252 - DNA, 25 bp, Homo sapien
tcttgtggccattggcactgccatc

SEQ ID NO: 4640253 - DNA, 25 bp, Homo sapien
tgtggctcaggctgccaccacttct

SEQ ID NO: 4640254 - DNA, 25 bp, Homo sapien
tcagcttgactgtgctcttgtggcc

SEQ ID NO: 4640255 - DNA, 25 bp, Homo sapien
gagggcatcgctgagctgccccgct

SEQ ID NO: 4640256 - DNA, 25 bp, Homo sapien
ctgagggcatcgctgagctgccccg

SEQ ID NO: 4640257 - DNA, 25 bp, Homo sapien
catcgctgagctgccccgctccctt

SEQ ID NO: 4640258 - DNA, 25 bp, Homo sapien
ggcatcgctgagctgccccgctccc

SEQ ID NO: 4640259 - DNA, 25 bp, Homo sapien
ctctgaggtcccagaagaaaagcat

SEQ ID NO: 4640260 - DNA, 25 bp, Homo sapien
gcatcttccacctgttgcctgggct

SEQ ID NO: 4640261 - DNA, 25 bp, Homo sapien
aaaagcatcttccacctgttgcctg

SEQ ID NO: 4640262 - DNA, 25 bp, Homo sapien
ctgaggtcccagaagaaaagcatct

SEQ ID NO: 4640263 - DNA, 25 bp, Homo sapien
gaaatgagttttcagggcctcatcc

SEQ ID NO: 4640264 - DNA, 25 bp, Homo sapien
ggttaaaggtatagcacgcaaatat

SEQ ID NO: 4640265 - DNA, 25 bp, Homo sapien
cagcttaagttagcagcaagagaac

SEQ ID NO: 4640266 - DNA, 25 bp, Homo sapien
cacgcaaatatgaggctggagccac

SEQ ID NO: 4640267 - DNA, 25 bp, Homo sapien
tgttgggaggaccagcggtagagca

SEQ ID NO: 4640268 - DNA, 25 bp, Homo sapien
gctggagtcattcctcccacgcagt

SEQ ID NO: 4640269 - DNA, 25 bp, Homo sapien
aggagagagctgaagaccaccggca

SEQ ID NO: 4640270 - DNA, 25 bp, Homo sapien
gctgccggcttgctggagtcattcc

SEQ ID NO: 4640271 - DNA, 25 bp, Homo sapien
cttggttcaagtggcaccagccaaa

SEQ ID NO: 4640272 - DNA, 25 bp, Homo sapien
tctggacttggttcaagtggcacca

SEQ ID NO: 4640273 - DNA, 25 bp, Homo sapien
gggatgttattttgggcagtgcatc

SEQ ID NO: 4640274 - DNA, 25 bp, Homo sapien
tgcatctggacttggttcaagtggc

SEQ ID NO: 4640275 - DNA, 25 bp, Homo sapien
gagccccatgccccgatccagctgt

SEQ ID NO: 4640276 - DNA, 25 bp, Homo sapien
cgagccccatgccccgatccagctg

SEQ ID NO: 4640277 - DNA, 25 bp, Homo sapien
tgcctgccccattgtttgagaccca

SEQ ID NO: 4640278 - DNA, 25 bp, Homo sapien
cccattgtttgagacccagtcaggc

SEQ ID NO: 4640279 - DNA, 25 bp, Homo sapien
gccccattgtttgagacccagtcag

SEQ ID NO: 4640280 - DNA, 25 bp, Homo sapien
aactgcctgccccattgtttgagac

SEQ ID NO: 4640281 - DNA, 25 bp, Homo sapien
ctcagtgtctgcagaccagaaacaa

SEQ ID NO: 4640282 - DNA, 25 bp, Homo sapien
gaaacaactcccttgtgtctcagca

SEQ ID NO: 4640283 - DNA, 25 bp, Homo sapien
caactcccttgtgtctcagcactgg

SEQ ID NO: 4640284 - DNA, 25 bp, Homo sapien
cacgccacatagcaagtgtcctcag

SEQ ID NO: 4640285 - DNA, 25 bp, Homo sapien
gcaatggtccttatcttgtccacaa

SEQ ID NO: 4640286 - DNA, 25 bp, Homo sapien
caatggtccttatcttgtccacaat

SEQ ID NO: 4640287 - DNA, 25 bp, Homo sapien
aatggtccttatcttgtccacaatt

SEQ ID NO: 4640288 - DNA, 25 bp, Homo sapien
tgagtgagaatcacaactgcctttc

SEQ ID NO: 4640289 - DNA, 25 bp, Homo sapien
cagtatgctatatactgtcaccaga

SEQ ID NO: 4640290 - DNA, 25 bp, Homo sapien
gcctggttgacacgacttttaagga

SEQ ID NO: 4640291 - DNA, 25 bp, Homo sapien
tagagtcttatcaacttagggagga

SEQ ID NO: 4640292 - DNA, 25 bp, Homo sapien
ggtctttgccatgcagatgggcaaa

SEQ ID NO: 4640293 - DNA, 25 bp, Homo sapien
cttggcacaccttttttgtcaggtt

SEQ ID NO: 4640294 - DNA, 25 bp, Homo sapien
gcacaccttttttgtcaggttggtg

SEQ ID NO: 4640295 - DNA, 25 bp, Homo sapien
tggcacaccttttttgtcaggttgg

SEQ ID NO: 4640296 - DNA, 25 bp, Homo sapien
gaggcactgcgacaatgcagaatgg

SEQ ID NO: 4640297 - DNA, 25 bp, Homo sapien
ggtggagcataacgatttgaggcac

SEQ ID NO: 4640298 - DNA, 25 bp, Homo sapien
cataacgatttgaggcactgcgaca

SEQ ID NO: 4640299 - DNA, 25 bp, Homo sapien
ttaaagagcgggtggagcataacga

SEQ ID NO: 4640300 - DNA, 25 bp, Homo sapien
tgcagcattggccgagtgaatgaat

SEQ ID NO: 4640301 - DNA, 25 bp, Homo sapien
gcagcattggccgagtgaatgaatt

SEQ ID NO: 4640302 - DNA, 25 bp, Homo sapien
cttatgcagcattggccgagtgaat

SEQ ID NO: 4640303 - DNA, 25 bp, Homo sapien
tatgcagcattggccgagtgaatga

SEQ ID NO: 4640304 - DNA, 25 bp, Homo sapien
ctggtgttggatatggtagtgttag

SEQ ID NO: 4640305 - DNA, 25 bp, Homo sapien
tgatttcccagaacggctttggtct

SEQ ID NO: 4640306 - DNA, 25 bp, Homo sapien
ccatggcaacagattctgatttccc

SEQ ID NO: 4640307 - DNA, 25 bp, Homo sapien
cagattctgatttcccagaacggct

SEQ ID NO: 4640308 - DNA, 25 bp, Homo sapien
caggagcggacagcctggtgtccag

SEQ ID NO: 4640309 - DNA, 25 bp, Homo sapien
gatgctcactgcgaccccacatgtg

SEQ ID NO: 4640310 - DNA, 25 bp, Homo sapien
cactgtgcactgatgctcactgcga

SEQ ID NO: 4640311 - DNA, 25 bp, Homo sapien
atgctcactgcgaccccacatgtgg

SEQ ID NO: 4640312 - DNA, 25 bp, Homo sapien
tgtgcactgatgctcactgcgaccc

SEQ ID NO: 4640313 - DNA, 25 bp, Homo sapien
tggagtctatcataaggcctgtgag

SEQ ID NO: 4640314 - DNA, 25 bp, Homo sapien
ggccctgcgtgctgtaggcatttaa

SEQ ID NO: 4640315 - DNA, 25 bp, Homo sapien
gggctgatggccctgcgtgctgtag

SEQ ID NO: 4640316 - DNA, 25 bp, Homo sapien
tttctcatagccgttgggctgatgg

SEQ ID NO: 4640317 - DNA, 25 bp, Homo sapien
aaaatctggcctacaagtgaacatg

SEQ ID NO: 4640318 - DNA, 25 bp, Homo sapien
aaaaatctggcctacaagtgaacat

SEQ ID NO: 4640319 - DNA, 25 bp, Homo sapien
tgatgcccaaacatgctccagcaat

SEQ ID NO: 4640320 - DNA, 25 bp, Homo sapien
catgcatccctaagcagggccggta

SEQ ID NO: 4640321 - DNA, 25 bp, Homo sapien
tgaattctcctccatgcctaaccga

SEQ ID NO: 4640322 - DNA, 25 bp, Homo sapien
ctctggaaaatgtgaagggtcatgc

SEQ ID NO: 4640323 - DNA, 25 bp, Homo sapien
gcctaaccgagtgaagcaagtatat

SEQ ID NO: 4640324 - DNA, 25 bp, Homo sapien
ctgaagagacagggatgactccttc

SEQ ID NO: 4640325 - DNA, 25 bp, Homo sapien
tgaagagacagggatgactccttcc

SEQ ID NO: 4640326 - DNA, 25 bp, Homo sapien
tctcatgagtcgcaaagctttcttc

SEQ ID NO: 4640327 - DNA, 25 bp, Homo sapien
aaacatcattctcatgagtcgcaaa

SEQ ID NO: 4640328 - DNA, 25 bp, Homo sapien
aaattgagaatgacgctggttactt

SEQ ID NO: 4640329 - DNA, 25 bp, Homo sapien
gaatgacgctggttactttccttcc

SEQ ID NO: 4640330 - DNA, 25 bp, Homo sapien
tagttaagcctgtaaactgctgcaa

SEQ ID NO: 4640331 - DNA, 25 bp, Homo sapien
aacgaggtactgtgtggcttcataa

SEQ ID NO: 4640332 - DNA, 25 bp, Homo sapien
tgtaatctgatatctgcgggtggat

SEQ ID NO: 4640333 - DNA, 25 bp, Homo sapien
cagtgactttaagccaaacgaggta

SEQ ID NO: 4640334 - DNA, 25 bp, Homo sapien
cttagctggcagcacaagtgaggag

SEQ ID NO: 4640335 - DNA, 25 bp, Homo sapien
taggtgtgacaaaggcactgttcct

SEQ ID NO: 4640336 - DNA, 25 bp, Homo sapien
cgtgctagtgagttctgagatctgg

SEQ ID NO: 4640337 - DNA, 25 bp, Homo sapien
cctgggaaaggcatatgatatggtt

SEQ ID NO: 4640338 - DNA, 25 bp, Homo sapien
gaagatttgctagccctctgcaggg

SEQ ID NO: 4640339 - DNA, 25 bp, Homo sapien
cccattgtgggaaggccaagagaac

SEQ ID NO: 4640340 - DNA, 25 bp, Homo sapien
tactggtgagtttccaccggcagca

SEQ ID NO: 4640341 - DNA, 25 bp, Homo sapien
gagcctgggattctagtactggtga

SEQ ID NO: 4640342 - DNA, 25 bp, Homo sapien
tgaggctctcccagtaataaacaaa

SEQ ID NO: 4640343 - DNA, 25 bp, Homo sapien
tgagtcacccttacattatgaactg

SEQ ID NO: 4640344 - DNA, 25 bp, Homo sapien
tatgaactgactgttaattaacaca

SEQ ID NO: 4640345 - DNA, 25 bp, Homo sapien
tgtgggtggcacactatgtcttttg

SEQ ID NO: 4640346 - DNA, 25 bp, Homo sapien
taactccttgctgcctagttttttc

SEQ ID NO: 4640347 - DNA, 25 bp, Homo sapien
gcctagttttttcatgtccactgtg

SEQ ID NO: 4640348 - DNA, 25 bp, Homo sapien
tgtccactgtgtaactactagtctt

SEQ ID NO: 4640349 - DNA, 25 bp, Homo sapien
actgtgtaactactagtcttaatgg

SEQ ID NO: 4640350 - DNA, 25 bp, Homo sapien
cagttaagaatttgggtcatctctg

SEQ ID NO: 4640351 - DNA, 25 bp, Homo sapien
taacagtatttatgaggcagttaag

SEQ ID NO: 4640352 - DNA, 25 bp, Homo sapien
tgactttaataaaagcctagggcaa

SEQ ID NO: 4640353 - DNA, 25 bp, Homo sapien
agcctagggcaaaactttcaatata

SEQ ID NO: 4640354 - DNA, 25 bp, Homo sapien
cctacatgtctgctactttgtatta

SEQ ID NO: 4640355 - DNA, 25 bp, Homo sapien
tgaggttgacaacatgatcttaaag

SEQ ID NO: 4640356 - DNA, 25 bp, Homo sapien
cttgtggtgcgatatccaaaaaatt

SEQ ID NO: 4640357 - DNA, 25 bp, Homo sapien
taacatagctaccatctcacatagt

SEQ ID NO: 4640358 - DNA, 25 bp, Homo sapien
tggccacacccagtaacagttctgt

SEQ ID NO: 4640359 - DNA, 25 bp, Homo sapien
gctgtgattcgaactgtcagtggga

SEQ ID NO: 4640360 - DNA, 25 bp, Homo sapien
gatctcccagtcttatgcagtgtgc

SEQ ID NO: 4640361 - DNA, 25 bp, Homo sapien
gcttgacttctagccagtgtgacga

SEQ ID NO: 4640362 - DNA, 25 bp, Homo sapien
tctggccagggacttagatgtacag

SEQ ID NO: 4640363 - DNA, 25 bp, Homo sapien
acaagcggagtgtcaagtctggaga

SEQ ID NO: 4640364 - DNA, 25 bp, Homo sapien
tggaagctgggtcagtaggatctcc

SEQ ID NO: 4640365 - DNA, 25 bp, Homo sapien
tcggctgggtatcatgcagacaagc

SEQ ID NO: 4640366 - DNA, 25 bp, Homo sapien
gcttctgtgcctttcatttggactc

SEQ ID NO: 4640367 - DNA, 25 bp, Homo sapien
tggactcctgggtagatgcatgtga

SEQ ID NO: 4640368 - DNA, 25 bp, Homo sapien
tatcacatagtgcaggaatccctga

SEQ ID NO: 4640369 - DNA, 25 bp, Homo sapien
tccctgactttctttgggtccctgc

SEQ ID NO: 4640370 - DNA, 25 bp, Homo sapien
tcttggtctactttgtgggctgtga

SEQ ID NO: 4640371 - DNA, 25 bp, Homo sapien
tgtatcactgggattctcccaccag

SEQ ID NO: 4640372 - DNA, 25 bp, Homo sapien
tgccataggatttgtagttgcttgt

SEQ ID NO: 4640373 - DNA, 25 bp, Homo sapien
gcagtcctcctgtttaggtttagtc

SEQ ID NO: 4640374 - DNA, 25 bp, Homo sapien
gtcacatatacccacagctcagagg

SEQ ID NO: 4640375 - DNA, 25 bp, Homo sapien
tgcatgccacacagggtcagatggg

SEQ ID NO: 4640376 - DNA, 25 bp, Homo sapien
tggctgaacacgacacctggcgtgg

SEQ ID NO: 4640377 - DNA, 25 bp, Homo sapien
cctaaagtgtaggagatggctgaac

SEQ ID NO: 4640378 - DNA, 25 bp, Homo sapien
atggagcccttactaagcataaagt

SEQ ID NO: 4640379 - DNA, 25 bp, Homo sapien
tggagcccttactaagcataaagta

SEQ ID NO: 4640380 - DNA, 25 bp, Homo sapien
caagtcatcatttcatctaagtgaa

SEQ ID NO: 4640381 - DNA, 25 bp, Homo sapien
ttcatctcatatcatctcattacaa

SEQ ID NO: 4640382 - DNA, 25 bp, Homo sapien
ttcatctcatcccattccatcatta

SEQ ID NO: 4640383 - DNA, 25 bp, Homo sapien
catctttcatctcataatttcatcc

SEQ ID NO: 4640384 - DNA, 25 bp, Homo sapien
caactcattgcatctcagctcattt

SEQ ID NO: 4640385 - DNA, 25 bp, Homo sapien
tcattgcatctcagctcatttccat

SEQ ID NO: 4640386 - DNA, 25 bp, Homo sapien
actcattgcatctcagctcatttcc

SEQ ID NO: 4640387 - DNA, 25 bp, Homo sapien
ttcaactcattgcatctcagctcat

SEQ ID NO: 4640388 - DNA, 25 bp, Homo sapien
atctcatctcatttcgattttattt

SEQ ID NO: 4640389 - DNA, 25 bp, Homo sapien
catctcatcatctcaacccttttca

SEQ ID NO: 4640390 - DNA, 25 bp, Homo sapien
tcatcatctcaacccttttcatctt

SEQ ID NO: 4640391 - DNA, 25 bp, Homo sapien
catctcatctcgtatcttatctcat

SEQ ID NO: 4640392 - DNA, 25 bp, Homo sapien
tcatcattttatttcatcatctcat

SEQ ID NO: 4640393 - DNA, 25 bp, Homo sapien
atcattttatttcatcatctcatca

SEQ ID NO: 4640394 - DNA, 25 bp, Homo sapien
ctcatcacatctcatcatttcatca

SEQ ID NO: 4640395 - DNA, 25 bp, Homo sapien
tttcatcattttatttcatcatctc

SEQ ID NO: 4640396 - DNA, 25 bp, Homo sapien
atttcatctcatcccattccatcat

SEQ ID NO: 4640397 - DNA, 25 bp, Homo sapien
atctcatcccattccatcattacat

SEQ ID NO: 4640398 - DNA, 25 bp, Homo sapien
actcattgcatctcagctcatcatt

SEQ ID NO: 4640399 - DNA, 25 bp, Homo sapien
ttcatctcatcccattccatcatta

SEQ ID NO: 4640400 - DNA, 25 bp, Homo sapien
catctcatcatctcaacccttttca

SEQ ID NO: 4640401 - DNA, 25 bp, Homo sapien
catctcatctcgtatcttatctcat

SEQ ID NO: 4640402 - DNA, 25 bp, Homo sapien
actcattgcatctcagctcatcatt

SEQ ID NO: 4640403 - DNA, 25 bp, Homo sapien
tcatcatctcaacccttttcatctt

SEQ ID NO: 4640404 - DNA, 25 bp, Homo sapien
tcattatttcatgtcatctcatctc

SEQ ID NO: 4640405 - DNA, 25 bp, Homo sapien
atttcatctcatctcgtatcttatc

SEQ ID NO: 4640406 - DNA, 25 bp, Homo sapien
catctcatctcgtatcttatctcat

SEQ ID NO: 4640407 - DNA, 25 bp, Homo sapien
ttcatctcatctcgtatcttatctc

SEQ ID NO: 4640408 - DNA, 25 bp, Homo sapien
tcatctcatttcatctcatcatttc

SEQ ID NO: 4640409 - DNA, 25 bp, Homo sapien
tcattcatctcatttcatctcatca

SEQ ID NO: 4640410 - DNA, 25 bp, Homo sapien
ttcatctcatttcatctcatcattt

SEQ ID NO: 4640411 - DNA, 25 bp, Homo sapien
cattcatctcatttcatctcatcat

SEQ ID NO: 4640412 - DNA, 25 bp, Homo sapien
gaaaatctcatcagattaaggaaca

SEQ ID NO: 4640413 - DNA, 25 bp, Homo sapien
acagaagcatggtatattcgattcc

SEQ ID NO: 4640414 - DNA, 25 bp, Homo sapien
aatctcatcagattaaggaacacaa

SEQ ID NO: 4640415 - DNA, 25 bp, Homo sapien
atcacagaagcatggtatattcgat

SEQ ID NO: 4640416 - DNA, 25 bp, Homo sapien
ccaggacaattaggtgagagaaaga

SEQ ID NO: 4640417 - DNA, 25 bp, Homo sapien
gccaggacaattaggtgagagaaag

SEQ ID NO: 4640418 - DNA, 25 bp, Homo sapien
ggaaaaagcatgttgtattagagca

SEQ ID NO: 4640419 - DNA, 25 bp, Homo sapien
ctaagagtgtttaaagtgcatattc

SEQ ID NO: 4640420 - DNA, 25 bp, Homo sapien
catgttgtattagagcatattcaac

SEQ ID NO: 4640421 - DNA, 25 bp, Homo sapien
taatgtctaccataaacaatgactc

SEQ ID NO: 4640422 - DNA, 25 bp, Homo sapien
tactaagtgctaggttctgcattac

SEQ ID NO: 4640423 - DNA, 25 bp, Homo sapien
taacagacatggtctcagacaataa

SEQ ID NO: 4640424 - DNA, 25 bp, Homo sapien
gatgttgttaatatttgccagtgag

SEQ ID NO: 4640425 - DNA, 25 bp, Homo sapien
taacattataataacgcacttgatg

SEQ ID NO: 4640426 - DNA, 25 bp, Homo sapien
cctatccctttatatgcataagaaa

SEQ ID NO: 4640427 - DNA, 25 bp, Homo sapien
cagaagtcatatgtaagtagcaggt

SEQ ID NO: 4640428 - DNA, 25 bp, Homo sapien
gcaagccgtaattcatgacatggga

SEQ ID NO: 4640429 - DNA, 25 bp, Homo sapien
aaatgttcaataatagagctccaat

SEQ ID NO: 4640430 - DNA, 25 bp, Homo sapien
aagacaatcatgttggggtccggta

SEQ ID NO: 4640431 - DNA, 25 bp, Homo sapien
ggtccggtaggagtcaccccatcgc

SEQ ID NO: 4640432 - DNA, 25 bp, Homo sapien
atcaaccaaagggaggaggcctctc

SEQ ID NO: 4640433 - DNA, 25 bp, Homo sapien
aggagtcaccccatcgcattcatca

SEQ ID NO: 4640434 - DNA, 25 bp, Homo sapien
ttctttatctttagcataactgagc

SEQ ID NO: 4640435 - DNA, 25 bp, Homo sapien
tttatctttagcataactgagctgc

SEQ ID NO: 4640436 - DNA, 25 bp, Homo sapien
tataccggacatagcattttccaac

SEQ ID NO: 4640437 - DNA, 25 bp, Homo sapien
acatctatagttataccggacatag

SEQ ID NO: 4640438 - DNA, 25 bp, Homo sapien
tcctaggtagtgtacagcagcctgt

SEQ ID NO: 4640439 - DNA, 25 bp, Homo sapien
gtttaagaccggatgtagtatgcct

SEQ ID NO: 4640440 - DNA, 25 bp, Homo sapien
tgttccttgcgtacaacagcctttg

SEQ ID NO: 4640441 - DNA, 25 bp, Homo sapien
tattaaaggccatattgcccactga

SEQ ID NO: 4640442 - DNA, 25 bp, Homo sapien
taacactttgagacaaccaatacac

SEQ ID NO: 4640443 - DNA, 25 bp, Homo sapien
ggatttaacctacatacctctgaac

SEQ ID NO: 4640444 - DNA, 25 bp, Homo sapien
tgatatttgattgccggatttaacc

SEQ ID NO: 4640445 - DNA, 25 bp, Homo sapien
gcaccattgcataacttacagtaag

SEQ ID NO: 4640446 - DNA, 25 bp, Homo sapien
ttttgagttgaccactccttaggca

SEQ ID NO: 4640447 - DNA, 25 bp, Homo sapien
gctccctggaagctaacatattgat

SEQ ID NO: 4640448 - DNA, 25 bp, Homo sapien
tccctggaagctaacatattgatgc

SEQ ID NO: 4640449 - DNA, 25 bp, Homo sapien
tttttgagttgaccactccttaggc

SEQ ID NO: 4640450 - DNA, 25 bp, Homo sapien
gtgacgggagaaaccgctcgcgcct

SEQ ID NO: 4640451 - DNA, 25 bp, Homo sapien
agacaaccatgggaaccactgtgac

SEQ ID NO: 4640452 - DNA, 25 bp, Homo sapien
aggtgaggccggatcctcagagccc

SEQ ID NO: 4640453 - DNA, 25 bp, Homo sapien
ccatgggaaccactgtgacgggaga

SEQ ID NO: 4640454 - DNA, 25 bp, Homo sapien
caggccgccatgcgacaaaccgctt

SEQ ID NO: 4640455 - DNA, 25 bp, Homo sapien
aggccgccatgcgacaaaccgcttt

SEQ ID NO: 4640456 - DNA, 25 bp, Homo sapien
tcttgttctcggctgcagtgtactc

SEQ ID NO: 4640457 - DNA, 25 bp, Homo sapien
ttctcggctgcagtgtactcatctt

SEQ ID NO: 4640458 - DNA, 25 bp, Homo sapien
tgttctcggctgcagtgtactcatc

SEQ ID NO: 4640459 - DNA, 25 bp, Homo sapien
tctcctgtgggacaaagagttcctc

SEQ ID NO: 4640460 - DNA, 25 bp, Homo sapien
cagagggaggagagagtagaggcca

SEQ ID NO: 4640461 - DNA, 25 bp, Homo sapien
tgagaaacaggggaggcagagccag

SEQ ID NO: 4640462 - DNA, 25 bp, Homo sapien
ctgagaaacaggggaggcagagcca

SEQ ID NO: 4640463 - DNA, 25 bp, Homo sapien
gagccagagggaggagagagtagag

SEQ ID NO: 4640464 - DNA, 25 bp, Homo sapien
gatcatgacacggatctccaggaag

SEQ ID NO: 4640465 - DNA, 25 bp, Homo sapien
atcttttttgaaggcatttggccag

SEQ ID NO: 4640466 - DNA, 25 bp, Homo sapien
ttaagcagaaacacgtttggagaga

SEQ ID NO: 4640467 - DNA, 25 bp, Homo sapien
tgcccaattaagcagaaacacgttt

SEQ ID NO: 4640468 - DNA, 25 bp, Homo sapien
gacagataggctgcgtcccctttaa

SEQ ID NO: 4640469 - DNA, 25 bp, Homo sapien
catgcgcattggctgagccgactcg

SEQ ID NO: 4640470 - DNA, 25 bp, Homo sapien
tgcagcacacaatgatcccataggt

SEQ ID NO: 4640471 - DNA, 25 bp, Homo sapien
cataggtctcaaggcctagcgtcag

SEQ ID NO: 4640472 - DNA, 25 bp, Homo sapien
taggatgggctcacaaaaactggtg

SEQ ID NO: 4640473 - DNA, 25 bp, Homo sapien
cagcagttggtgtgaatgcgtctca

SEQ ID NO: 4640474 - DNA, 25 bp, Homo sapien
cataattctcaaggcctagagtcag

SEQ ID NO: 4640475 - DNA, 25 bp, Homo sapien
aagaggaaaacaggcgaatccgagg

SEQ ID NO: 4640476 - DNA, 25 bp, Homo sapien
gggattcttctcctcgtctgcagtg

SEQ ID NO: 4640477 - DNA, 25 bp, Homo sapien
gtatcgtggtgtggcttcatttctc

SEQ ID NO: 4640478 - DNA, 25 bp, Homo sapien
tctcagagaagagccgtgaaaagac

SEQ ID NO: 4640479 - DNA, 25 bp, Homo sapien
tcatttctcagagaagagccgtgaa

SEQ ID NO: 4640480 - DNA, 25 bp, Homo sapien
tgtatcgtggtgtggcttcatttct

SEQ ID NO: 4640481 - DNA, 25 bp, Homo sapien
ggagctcctggcttccattcgtgtc

SEQ ID NO: 4640482 - DNA, 25 bp, Homo sapien
gagacatttcttcgagatccgtgtc

SEQ ID NO: 4640483 - DNA, 25 bp, Homo sapien
cttgattgggcaggtcgcatgacct

SEQ ID NO: 4640484 - DNA, 25 bp, Homo sapien
aatgcctctcgctgacgcccaatgt

SEQ ID NO: 4640485 - DNA, 25 bp, Homo sapien
ccttatgaccctggcagtggaacgg

SEQ ID NO: 4640486 - DNA, 25 bp, Homo sapien
aacggtgatatatcccgcctggccg

SEQ ID NO: 4640487 - DNA, 25 bp, Homo sapien
ccctggcagtggaacggtgatatat

SEQ ID NO: 4640488 - DNA, 25 bp, Homo sapien
cagtggaacggtgatatatcccgcc

SEQ ID NO: 4640489 - DNA, 25 bp, Homo sapien
agtccctgtcactggaatgctggcc

SEQ ID NO: 4640490 - DNA, 25 bp, Homo sapien
tctggacaagccacccttttggaac

SEQ ID NO: 4640491 - DNA, 25 bp, Homo sapien
aacagtccctgtcactggaatgctg

SEQ ID NO: 4640492 - DNA, 25 bp, Homo sapien
cctgtcactggaatgctggcctctc

SEQ ID NO: 4640493 - DNA, 25 bp, Homo sapien
gatgcttgtatcttttcacggctct

SEQ ID NO: 4640494 - DNA, 25 bp, Homo sapien
acgaggacacgagccccacaggagc

SEQ ID NO: 4640495 - DNA, 25 bp, Homo sapien
ccagcggacccacgtcagagaagat

SEQ ID NO: 4640496 - DNA, 25 bp, Homo sapien
aggagctctttgtcccgccggagac

SEQ ID NO: 4640497 - DNA, 25 bp, Homo sapien
tgtcaatccttttcgccgacgcggt

SEQ ID NO: 4640498 - DNA, 25 bp, Homo sapien
cgtgtgtgtccttggccgaatgtgc

SEQ ID NO: 4640499 - DNA, 25 bp, Homo sapien
tgcaccacaaagctgtttctcgcat

SEQ ID NO: 4640500 - DNA, 25 bp, Homo sapien
cccacgtgaggagattcttcggtcc

SEQ ID NO: 4640501 - DNA, 25 bp, Homo sapien
taagcagttaccctctcagacaact

SEQ ID NO: 4640502 - DNA, 25 bp, Homo sapien
tccttcctccgcatgaaaacccatg

SEQ ID NO: 4640503 - DNA, 25 bp, Homo sapien
tccgcatgaaaacccatggcttaca

SEQ ID NO: 4640504 - DNA, 25 bp, Homo sapien
agccttaagcagttaccctctcaga

SEQ ID NO: 4640505 - DNA, 25 bp, Homo sapien
actctctgtttggaggcactggtgg

SEQ ID NO: 4640506 - DNA, 25 bp, Homo sapien
tatttacagatttacgtttgaggga

SEQ ID NO: 4640507 - DNA, 25 bp, Homo sapien
cagatttacgtttgagggaaatata

SEQ ID NO: 4640508 - DNA, 25 bp, Homo sapien
gaggcactggtggctctactgacag

SEQ ID NO: 4640509 - DNA, 25 bp, Homo sapien
aagaagaaggaggaggaacggcttg

SEQ ID NO: 4640510 - DNA, 25 bp, Homo sapien
gaaggaggaggaacggcttggagtc

SEQ ID NO: 4640511 - DNA, 25 bp, Homo sapien
aagaaggaggaggaacggcttggag

SEQ ID NO: 4640512 - DNA, 25 bp, Homo sapien
gaagaaggaggaggaacggcttgga

SEQ ID NO: 4640513 - DNA, 25 bp, Homo sapien
agcctctgggcctcgtgggctctct

SEQ ID NO: 4640514 - DNA, 25 bp, Homo sapien
ctctccgctccgacgcctgttcggg

SEQ ID NO: 4640515 - DNA, 25 bp, Homo sapien
cggctggcgactctgctcggcctcc

SEQ ID NO: 4640516 - DNA, 25 bp, Homo sapien
ggctggcgactctgctcggcctccg

SEQ ID NO: 4640517 - DNA, 25 bp, Homo sapien
atgaagcaagcaagggccgcggtcc

SEQ ID NO: 4640518 - DNA, 25 bp, Homo sapien
tgaattttccttcgcgagtttggag

SEQ ID NO: 4640519 - DNA, 25 bp, Homo sapien
ggagaccagccgatttttcatgaag

SEQ ID NO: 4640520 - DNA, 25 bp, Homo sapien
gcggtcccggatcctgcaacatata

SEQ ID NO: 4640521 - DNA, 25 bp, Homo sapien
tgcgtgctggggtaggatgcctgcc

SEQ ID NO: 4640522 - DNA, 25 bp, Homo sapien
ttgcgtgctggggtaggatgcctgc

SEQ ID NO: 4640523 - DNA, 25 bp, Homo sapien
ggtaggatgcctgcctcttcggatt

SEQ ID NO: 4640524 - DNA, 25 bp, Homo sapien
gctggggtaggatgcctgcctcttc

SEQ ID NO: 4640525 - DNA, 25 bp, Homo sapien
cgcatacactctccttaatgggctt

SEQ ID NO: 4640526 - DNA, 25 bp, Homo sapien
gcgcatacactctccttaatgggct

SEQ ID NO: 4640527 - DNA, 25 bp, Homo sapien
tagcactggcctcccgcacctgggt

SEQ ID NO: 4640528 - DNA, 25 bp, Homo sapien
ctctcttcgctagcactggcctccc

SEQ ID NO: 4640529 - DNA, 25 bp, Homo sapien
ggcctcccgcacctgggtctgcagt

SEQ ID NO: 4640530 - DNA, 25 bp, Homo sapien
cctgggtctgcagtccctccgccat

SEQ ID NO: 4640531 - DNA, 25 bp, Homo sapien
gagtcattggaaccaggaacacctg

SEQ ID NO: 4640532 - DNA, 25 bp, Homo sapien
ggcattttctacaagaccccaagag

SEQ ID NO: 4640533 - DNA, 25 bp, Homo sapien
tccatcctggtcgtttattcccggc

SEQ ID NO: 4640534 - DNA, 25 bp, Homo sapien
taggcaggcccaattatccagatcc

SEQ ID NO: 4640535 - DNA, 25 bp, Homo sapien
gctgctgcacctttaacgctttctg

SEQ ID NO: 4640536 - DNA, 25 bp, Homo sapien
ctgctgcacctttaacgctttctgg

SEQ ID NO: 4640537 - DNA, 25 bp, Homo sapien
ttcaacagcagcgaaagccgtgtga

SEQ ID NO: 4640538 - DNA, 25 bp, Homo sapien
cttcaacagcagcgaaagccgtgtg

SEQ ID NO: 4640539 - DNA, 25 bp, Homo sapien
acagcagcgaaagccgtgtgaactc

SEQ ID NO: 4640540 - DNA, 25 bp, Homo sapien
caacagcagcgaaagccgtgtgaac

SEQ ID NO: 4640541 - DNA, 25 bp, Homo sapien
ctccccaatgtttttctctcctgag

SEQ ID NO: 4640542 - DNA, 25 bp, Homo sapien
cattttggcccacctgcaacccctg

SEQ ID NO: 4640543 - DNA, 25 bp, Homo sapien
ttttggcccacctgcaacccctgtc

SEQ ID NO: 4640544 - DNA, 25 bp, Homo sapien
tctcctgagcctctgctcttcgctt

SEQ ID NO: 4640545 - DNA, 25 bp, Homo sapien
ctgtggcacgaccattgtcaaaatg

SEQ ID NO: 4640546 - DNA, 25 bp, Homo sapien
tttgggagatctttgaccaccacct

SEQ ID NO: 4640547 - DNA, 25 bp, Homo sapien
ggtctttgggagatctttgaccacc

SEQ ID NO: 4640548 - DNA, 25 bp, Homo sapien
gagatctttgaccaccacctctgct

SEQ ID NO: 4640549 - DNA, 25 bp, Homo sapien
gagtatttagtattccaaggcccca

SEQ ID NO: 4640550 - DNA, 25 bp, Homo sapien
gagagtatttagtattccaaggccc

SEQ ID NO: 4640551 - DNA, 25 bp, Homo sapien
tgagagtatttagtattccaaggcc

SEQ ID NO: 4640552 - DNA, 25 bp, Homo sapien
tatttagtattccaaggccccacca

SEQ ID NO: 4640553 - DNA, 25 bp, Homo sapien
ttctaagcacgcagaaatgtcctct

SEQ ID NO: 4640554 - DNA, 25 bp, Homo sapien
tctgagcttctaagcacgcagaaat

SEQ ID NO: 4640555 - DNA, 25 bp, Homo sapien
ctgcgaggcttctgagcttctaagc

SEQ ID NO: 4640556 - DNA, 25 bp, Homo sapien
ggcttctgagcttctaagcacgcag

SEQ ID NO: 4640557 - DNA, 25 bp, Homo sapien
taagtgccctgtcacaccgagtgga

SEQ ID NO: 4640558 - DNA, 25 bp, Homo sapien
tgccctgtcacaccgagtggaagta

SEQ ID NO: 4640559 - DNA, 25 bp, Homo sapien
cctgtcacaccgagtggaagtagtt

SEQ ID NO: 4640560 - DNA, 25 bp, Homo sapien
agtgccctgtcacaccgagtggaag

SEQ ID NO: 4640561 - DNA, 25 bp, Homo sapien
tgggtggggccaattcaagcccttc

SEQ ID NO: 4640562 - DNA, 25 bp, Homo sapien
tccatatcagatgacttcctcagct

SEQ ID NO: 4640563 - DNA, 25 bp, Homo sapien
ttcctcagctcaagtcctagctctg

SEQ ID NO: 4640564 - DNA, 25 bp, Homo sapien
ctgccactgtggtagggacataata

SEQ ID NO: 4640565 - DNA, 25 bp, Homo sapien
aatgtacgccaaaatagttctgctg

SEQ ID NO: 4640566 - DNA, 25 bp, Homo sapien
taatgtacgccaaaatagttctgct

SEQ ID NO: 4640567 - DNA, 25 bp, Homo sapien
ttaatgtacgccaaaatagttctgc

SEQ ID NO: 4640568 - DNA, 25 bp, Homo sapien
cagactctacgccaaatgcttttat

SEQ ID NO: 4640569 - DNA, 25 bp, Homo sapien
tgtgccagactctacgccaaatgct

SEQ ID NO: 4640570 - DNA, 25 bp, Homo sapien
gagtggggattcaaacacctgtctg

SEQ ID NO: 4640571 - DNA, 25 bp, Homo sapien
tggcagagtggggattcaaacacct

SEQ ID NO: 4640572 - DNA, 25 bp, Homo sapien
ccatcagagagtactacctggtgca

SEQ ID NO: 4640573 - DNA, 25 bp, Homo sapien
tataggccctaaggatccagagatg

SEQ ID NO: 4640574 - DNA, 25 bp, Homo sapien
cagtctagtgggaaatagagttcac

SEQ ID NO: 4640575 - DNA, 25 bp, Homo sapien
agttgaataaggcaggaacgacctc

SEQ ID NO: 4640576 - DNA, 25 bp, Homo sapien
gcaggaagaattcagggtagacagt

SEQ ID NO: 4640577 - DNA, 25 bp, Homo sapien
cctgaagcacccttctcccatactt

SEQ ID NO: 4640578 - DNA, 25 bp, Homo sapien
ctgaagcacccttctcccatacttg

SEQ ID NO: 4640579 - DNA, 25 bp, Homo sapien
caggaagaattcagggtagacagtg

SEQ ID NO: 4640580 - DNA, 25 bp, Homo sapien
cctgtggctccttgtttcgggacgc

SEQ ID NO: 4640581 - DNA, 25 bp, Homo sapien
ggctcctgttctgggacgtctgctt

SEQ ID NO: 4640582 - DNA, 25 bp, Homo sapien
ccttgtttcgggacgcagttgtgct

SEQ ID NO: 4640583 - DNA, 25 bp, Homo sapien
tgaccccgcggctcctgttctggga

SEQ ID NO: 4640584 - DNA, 25 bp, Homo sapien
ttggtgggcctagagcgctagggac

SEQ ID NO: 4640585 - DNA, 25 bp, Homo sapien
agcgctagggactggcacgcaccag

SEQ ID NO: 4640586 - DNA, 25 bp, Homo sapien
ggcgggccttggctgggcgtccgcg

SEQ ID NO: 4640587 - DNA, 25 bp, Homo sapien
cctagagcgctagggactggcacgc

SEQ ID NO: 4640588 - DNA, 25 bp, Homo sapien
tggctccttttggaactcgggtctc

SEQ ID NO: 4640589 - DNA, 25 bp, Homo sapien
acagcatgccctgtggctccttttg

SEQ ID NO: 4640590 - DNA, 25 bp, Homo sapien
cacacagcatgccctgtggctcctt

SEQ ID NO: 4640591 - DNA, 25 bp, Homo sapien
cacagcatgccctgtggctcctttt

SEQ ID NO: 4640592 - DNA, 25 bp, Homo sapien
ccagtgggatcagctttgatgggat

SEQ ID NO: 4640593 - DNA, 25 bp, Homo sapien
ccctgaacgggcatgttggtcccag

SEQ ID NO: 4640594 - DNA, 25 bp, Homo sapien
ttgatgggatgcacacagactgacc

SEQ ID NO: 4640595 - DNA, 25 bp, Homo sapien
gagcagcaaggacggagacacttag

SEQ ID NO: 4640596 - DNA, 25 bp, Homo sapien
tacctttcctagtctggaagtcagc

SEQ ID NO: 4640597 - DNA, 25 bp, Homo sapien
gctaccgctacctttcctagtctgg

SEQ ID NO: 4640598 - DNA, 25 bp, Homo sapien
tgtgaaaaatgtcgagttgtaaatc

SEQ ID NO: 4640599 - DNA, 25 bp, Homo sapien
taaatcactttctgctaccgctacc

SEQ ID NO: 4640600 - DNA, 25 bp, Homo sapien
tgggaacgaagggctagagcgtgag

SEQ ID NO: 4640601 - DNA, 25 bp, Homo sapien
ctgggaacgaagggctagagcgtga

SEQ ID NO: 4640602 - DNA, 25 bp, Homo sapien
gtcctcctgttcccccgcatttgta

SEQ ID NO: 4640603 - DNA, 25 bp, Homo sapien
tcctcctgttcccccgcatttgtag

SEQ ID NO: 4640604 - DNA, 25 bp, Homo sapien
cctccaagacccatagactcgaagt

SEQ ID NO: 4640605 - DNA, 25 bp, Homo sapien
ttggggagagatcctataaccctgg

SEQ ID NO: 4640606 - DNA, 25 bp, Homo sapien
tgctctagctcttgggttggtggtc

SEQ ID NO: 4640607 - DNA, 25 bp, Homo sapien
gctcttgggttggtggtccctccaa

SEQ ID NO: 4640608 - DNA, 25 bp, Homo sapien
catctgctcctacataccccaggca

SEQ ID NO: 4640609 - DNA, 25 bp, Homo sapien
ggcatttgccacatgctggtcctct

SEQ ID NO: 4640610 - DNA, 25 bp, Homo sapien
ctctctttcctgacaggcgggccat

SEQ ID NO: 4640611 - DNA, 25 bp, Homo sapien
tgctcctacataccccaggcatttg

SEQ ID NO: 4640612 - DNA, 25 bp, Homo sapien
gatccaagggcgtttcgggtcagct

SEQ ID NO: 4640613 - DNA, 25 bp, Homo sapien
cgttgccatgggatccaagggcgtt

SEQ ID NO: 4640614 - DNA, 25 bp, Homo sapien
tcagataattgtttcggtaactggg

SEQ ID NO: 4640615 - DNA, 25 bp, Homo sapien
tgggacctccagacctagagattct

SEQ ID NO: 4640616 - DNA, 25 bp, Homo sapien
cagcgccgtaaaggtattggttggg

SEQ ID NO: 4640617 - DNA, 25 bp, Homo sapien
gcagcgccgtaaaggtattggttgg

SEQ ID NO: 4640618 - DNA, 25 bp, Homo sapien
cagtcttcctttaagaaaagagaca

SEQ ID NO: 4640619 - DNA, 25 bp, Homo sapien
tgagagtagcctgcccaaatggcaa

SEQ ID NO: 4640620 - DNA, 25 bp, Homo sapien
cgcatgcctatagtcaaagctaata

SEQ ID NO: 4640621 - DNA, 25 bp, Homo sapien
tgcccggccaatagaggttttcaaa

SEQ ID NO: 4640622 - DNA, 25 bp, Homo sapien
attattagcctgttgactttcaatt

SEQ ID NO: 4640623 - DNA, 25 bp, Homo sapien
gtctcatcactgtaatcttcacctt

SEQ ID NO: 4640624 - DNA, 25 bp, Homo sapien
tggattctcgctcttggctcttgtg

SEQ ID NO: 4640625 - DNA, 25 bp, Homo sapien
agtgagattcactaaggcttacaga

SEQ ID NO: 4640626 - DNA, 25 bp, Homo sapien
tgcacccggcctatcactgcatttt

SEQ ID NO: 4640627 - DNA, 25 bp, Homo sapien
agaaaaggtagaaccctagatagat

SEQ ID NO: 4640628 - DNA, 25 bp, Homo sapien
aaagacagagattataatatccttg

SEQ ID NO: 4640629 - DNA, 25 bp, Homo sapien
tgtggctgtgcaggtgcaacttgtg

SEQ ID NO: 4640630 - DNA, 25 bp, Homo sapien
tgtgcaggtgcaacttgtgtggccc

SEQ ID NO: 4640631 - DNA, 25 bp, Homo sapien
tgtgtcctggacgagccgcgttgtg

SEQ ID NO: 4640632 - DNA, 25 bp, Homo sapien
tgggtgtgtgactttgcgtgtgtgt

SEQ ID NO: 4640633 - DNA, 25 bp, Homo sapien
cctggtactcttcctagggcttgac

SEQ ID NO: 4640634 - DNA, 25 bp, Homo sapien
gaggcaggtccaaactgcacatttg

SEQ ID NO: 4640635 - DNA, 25 bp, Homo sapien
caatgctcttgttgtagagtaccaa

SEQ ID NO: 4640636 - DNA, 25 bp, Homo sapien
aggtccccagtacaagtatttgtga

SEQ ID NO: 4640637 - DNA, 25 bp, Homo sapien
cagaagggcagtcaaatctaaagct

SEQ ID NO: 4640638 - DNA, 25 bp, Homo sapien
tccagaagggcagtcaaatctaaag

SEQ ID NO: 4640639 - DNA, 25 bp, Homo sapien
ccagaagggcagtcaaatctaaagc

SEQ ID NO: 4640640 - DNA, 25 bp, Homo sapien
tagttaagtttgcataagatctccg

SEQ ID NO: 4640641 - DNA, 25 bp, Homo sapien
tattagttaagtttgcataagatct

SEQ ID NO: 4640642 - DNA, 25 bp, Homo sapien
cacctgtacctcacaataattttta

SEQ ID NO: 4640643 - DNA, 25 bp, Homo sapien
taagtttgcataagatctccgatgc

SEQ ID NO: 4640644 - DNA, 25 bp, Homo sapien
tgtgtcgatgctgccataggaacac

SEQ ID NO: 4640645 - DNA, 25 bp, Homo sapien
tgaagctgtgtcgatgctgccatag

SEQ ID NO: 4640646 - DNA, 25 bp, Homo sapien
aagctgtgtcgatgctgccatagga

SEQ ID NO: 4640647 - DNA, 25 bp, Homo sapien
gtcgatgctgccataggaacaccac

SEQ ID NO: 4640648 - DNA, 25 bp, Homo sapien
cagtatctgctgtgatttgttactg

SEQ ID NO: 4640649 - DNA, 25 bp, Homo sapien
tgttgcacaaacctacttttttggc

SEQ ID NO: 4640650 - DNA, 25 bp, Homo sapien
catttgcaaaaggttgttggataac

SEQ ID NO: 4640651 - DNA, 25 bp, Homo sapien
tatggtgtgattaaaccgatctgac

SEQ ID NO: 4640652 - DNA, 25 bp, Homo sapien
tctttacattgcttagagaacgtta

SEQ ID NO: 4640653 - DNA, 25 bp, Homo sapien
tctggtcacaatattatcactgtac

SEQ ID NO: 4640654 - DNA, 25 bp, Homo sapien
tatcagtagattattggaaactgca

SEQ ID NO: 4640655 - DNA, 25 bp, Homo sapien
cataggccaattgatacaacaagat

SEQ ID NO: 4640656 - DNA, 25 bp, Homo sapien
caagatataagttcctactgcatat

SEQ ID NO: 4640657 - DNA, 25 bp, Homo sapien
gaaggcattttcatcgtgggggacc

SEQ ID NO: 4640658 - DNA, 25 bp, Homo sapien
gcattttcatcgtgggggacccagg

SEQ ID NO: 4640659 - DNA, 25 bp, Homo sapien
aggcattttcatcgtgggggaccca

SEQ ID NO: 4640660 - DNA, 25 bp, Homo sapien
gggaaggcattttcatcgtggggga

SEQ ID NO: 4640661 - DNA, 25 bp, Homo sapien
ttcctcaaacctcaactgcccctca

SEQ ID NO: 4640662 - DNA, 25 bp, Homo sapien
gcctgaagcgcaccctggtctcgaa

SEQ ID NO: 4640663 - DNA, 25 bp, Homo sapien
aaacctcaactgcccctcatgggat

SEQ ID NO: 4640664 - DNA, 25 bp, Homo sapien
acccctagcggcctgaagcgcaccc

SEQ ID NO: 4640665 - DNA, 25 bp, Homo sapien
gtacccctagcaggccgaggcgcac

SEQ ID NO: 4640666 - DNA, 25 bp, Homo sapien
tcgagccagggataccagggtccct

SEQ ID NO: 4640667 - DNA, 25 bp, Homo sapien
gggcgcagcgcaagcgctgatgtga

SEQ ID NO: 4640668 - DNA, 25 bp, Homo sapien
ggccgaggcgcacgctgggctcgag

SEQ ID NO: 4640669 - DNA, 25 bp, Homo sapien
acgcacaccctgggttcgaaactgg

SEQ ID NO: 4640670 - DNA, 25 bp, Homo sapien
gacgcacaccctgggttcgaaactg

SEQ ID NO: 4640671 - DNA, 25 bp, Homo sapien
gcacaccctgggttcgaaactggga

SEQ ID NO: 4640672 - DNA, 25 bp, Homo sapien
cgcacaccctgggttcgaaactggg

SEQ ID NO: 4640673 - DNA, 25 bp, Homo sapien
aggtccagcgcaaggcctgatggga

SEQ ID NO: 4640674 - DNA, 25 bp, Homo sapien
gggtcgccagtgtccgcgaggtcca

SEQ ID NO: 4640675 - DNA, 25 bp, Homo sapien
tcgccagtgtccgcgaggtccagcg

SEQ ID NO: 4640676 - DNA, 25 bp, Homo sapien
cgaggtccagcgcaaggcctgatgg

SEQ ID NO: 4640677 - DNA, 25 bp, Homo sapien
ccaagtggacatcaggttccaggtt

SEQ ID NO: 4640678 - DNA, 25 bp, Homo sapien
gattgacacacaggtaccaggtgga

SEQ ID NO: 4640679 - DNA, 25 bp, Homo sapien
tggttgggttacttatagcataggt

SEQ ID NO: 4640680 - DNA, 25 bp, Homo sapien
caggtggttgggttacttatagcat

SEQ ID NO: 4640681 - DNA, 25 bp, Homo sapien
ggttacttatagcataggtggccat

SEQ ID NO: 4640682 - DNA, 25 bp, Homo sapien
aggtgtctgcctagtcctcaagtgg

SEQ ID NO: 4640683 - DNA, 25 bp, Homo sapien
cccaggtgtctgcctagtcctcaag

SEQ ID NO: 4640684 - DNA, 25 bp, Homo sapien
caggtgtctgcctagtcctcaagtg

SEQ ID NO: 4640685 - DNA, 25 bp, Homo sapien
ccaggtgtctgcctagtcctcaagt

SEQ ID NO: 4640686 - DNA, 25 bp, Homo sapien
ccacatagaccgtggtgtcaatctg

SEQ ID NO: 4640687 - DNA, 25 bp, Homo sapien
tccacatagaccgtggtgtcaatct

SEQ ID NO: 4640688 - DNA, 25 bp, Homo sapien
cacatagaccgtggtgtcaatctgg

SEQ ID NO: 4640689 - DNA, 25 bp, Homo sapien
gggttgaatgtccaactgtggccag

SEQ ID NO: 4640690 - DNA, 25 bp, Homo sapien
ggtatttacatagggcctgatgtcc

SEQ ID NO: 4640691 - DNA, 25 bp, Homo sapien
cccgggtatttacatagggcctgat

SEQ ID NO: 4640692 - DNA, 25 bp, Homo sapien
ctgagacccgggtatttacataggg

SEQ ID NO: 4640693 - DNA, 25 bp, Homo sapien
tggtatccagctgggtcctaatgac

SEQ ID NO: 4640694 - DNA, 25 bp, Homo sapien
cctgatgtccacctggggcatggtg

SEQ ID NO: 4640695 - DNA, 25 bp, Homo sapien
tgatgtccacctggggcatggtgtt

SEQ ID NO: 4640696 - DNA, 25 bp, Homo sapien
gatgtccacctggggcatggtgttc

SEQ ID NO: 4640697 - DNA, 25 bp, Homo sapien
tgtccacctggggcatggtgttcac

SEQ ID NO: 4640698 - DNA, 25 bp, Homo sapien
atgtccaccttgggtctgatgacta

SEQ ID NO: 4640699 - DNA, 25 bp, Homo sapien
gggactggatgtccaccttgggtct

SEQ ID NO: 4640700 - DNA, 25 bp, Homo sapien
tggatgtccaccttgggtctgatga

SEQ ID NO: 4640701 - DNA, 25 bp, Homo sapien
gactggatgtccaccttgggtctga

SEQ ID NO: 4640702 - DNA, 25 bp, Homo sapien
ccacttaaggcctgatgtgtgcctg

SEQ ID NO: 4640703 - DNA, 25 bp, Homo sapien
tgggaactggatatcaacctggggc

SEQ ID NO: 4640704 - DNA, 25 bp, Homo sapien
gtgtccacttaaggcctgatgtgtg

SEQ ID NO: 4640705 - DNA, 25 bp, Homo sapien
gaactggatatcaacctggggcctg

SEQ ID NO: 4640706 - DNA, 25 bp, Homo sapien
ccgaatgtccccctcagggtgaatt

SEQ ID NO: 4640707 - DNA, 25 bp, Homo sapien
gggccgaatgtccccctcagggtga

SEQ ID NO: 4640708 - DNA, 25 bp, Homo sapien
atgtccccctcagggtgaattccac

SEQ ID NO: 4640709 - DNA, 25 bp, Homo sapien
ctggggccgaatgtccccctcaggg

SEQ ID NO: 4640710 - DNA, 25 bp, Homo sapien
tgacctgtgggttaatgtccacctg

SEQ ID NO: 4640711 - DNA, 25 bp, Homo sapien
gcttctttaaagttccatcccctca

SEQ ID NO: 4640712 - DNA, 25 bp, Homo sapien
ggaccaggtatcaacctggggactg

SEQ ID NO: 4640713 - DNA, 25 bp, Homo sapien
caggtatcaacctggggactgtggt

SEQ ID NO: 4640714 - DNA, 25 bp, Homo sapien
gtgcctgtgtctcaatgagctccag

SEQ ID NO: 4640715 - DNA, 25 bp, Homo sapien
gatgtggccctggtgggatcactgg

SEQ ID NO: 4640716 - DNA, 25 bp, Homo sapien
catgtgcctgtgtctcaatgagctc

SEQ ID NO: 4640717 - DNA, 25 bp, Homo sapien
ggagcttcctctagctccagtgctg

SEQ ID NO: 4640718 - DNA, 25 bp, Homo sapien
cactgggctggtcctgtgcagtccc

SEQ ID NO: 4640719 - DNA, 25 bp, Homo sapien
tgctgtccctggaaggggctctgcc

SEQ ID NO: 4640720 - DNA, 25 bp, Homo sapien
gaggtgccatgaagtcaggcagctt

SEQ ID NO: 4640721 - DNA, 25 bp, Homo sapien
agctccagccacactttcagctcca

SEQ ID NO: 4640722 - DNA, 25 bp, Homo sapien
gctccagccacactttcagctccag

SEQ ID NO: 4640723 - DNA, 25 bp, Homo sapien
ctctctgccacctctagctccagcc

SEQ ID NO: 4640724 - DNA, 25 bp, Homo sapien
cccctctctgccacctctagctcca

SEQ ID NO: 4640725 - DNA, 25 bp, Homo sapien
tgctggctggagctgtgctggtcac

SEQ ID NO: 4640726 - DNA, 25 bp, Homo sapien
ctgggagcagtgtgggagctgctgg

SEQ ID NO: 4640727 - DNA, 25 bp, Homo sapien
ggagctgctggctggagctgtgctg

SEQ ID NO: 4640728 - DNA, 25 bp, Homo sapien
agctgctggctggagctgtgctggt

SEQ ID NO: 4640729 - DNA, 25 bp, Homo sapien
ctccatagcttccactgtgcccagg

SEQ ID NO: 4640730 - DNA, 25 bp, Homo sapien
aggaggatggcagttaggcagctca

SEQ ID NO: 4640731 - DNA, 25 bp, Homo sapien
ggaggatggcagttaggcagctcat

SEQ ID NO: 4640732 - DNA, 25 bp, Homo sapien
gaggaggatggcagttaggcagctc

SEQ ID NO: 4640733 - DNA, 25 bp, Homo sapien
agcagcacccccggcttcagcaccc

SEQ ID NO: 4640734 - DNA, 25 bp, Homo sapien
ccccggcttcagcacccctgggcca

SEQ ID NO: 4640735 - DNA, 25 bp, Homo sapien
cagcacccccggcttcagcacccct

SEQ ID NO: 4640736 - DNA, 25 bp, Homo sapien
gcacccccggcttcagcacccctgg

SEQ ID NO: 4640737 - DNA, 25 bp, Homo sapien
acttgcactgcgtctggcttatctg

SEQ ID NO: 4640738 - DNA, 25 bp, Homo sapien
ttgacagttttatttgttagcttca

SEQ ID NO: 4640739 - DNA, 25 bp, Homo sapien
gtcttgaccggccacttgcactgcg

SEQ ID NO: 4640740 - DNA, 25 bp, Homo sapien
tctgcctcattctggttgacagttt

SEQ ID NO: 4640741 - DNA, 25 bp, Homo sapien
tttaagttcaaatttgtcttgtctc

SEQ ID NO: 4640742 - DNA, 25 bp, Homo sapien
tctaaaaagacaactgcttttctta

SEQ ID NO: 4640743 - DNA, 25 bp, Homo sapien
tgcttttcttattcttttaagttca

SEQ ID NO: 4640744 - DNA, 25 bp, Homo sapien
aaagacaactgcttttcttattctt

SEQ ID NO: 4640745 - DNA, 25 bp, Homo sapien
cctgtgttctgggcgagaggataca

SEQ ID NO: 4640746 - DNA, 25 bp, Homo sapien
cagaggttgaacagtttgcagggtt

SEQ ID NO: 4640747 - DNA, 25 bp, Homo sapien
agacttgcagaatggttttgaggaa

SEQ ID NO: 4640748 - DNA, 25 bp, Homo sapien
tgaacagtttgcagggttcggaaga

SEQ ID NO: 4640749 - DNA, 25 bp, Homo sapien
gggcgttgctataaggatatctaaa

SEQ ID NO: 4640750 - DNA, 25 bp, Homo sapien
tagagaagacctctgggttccgaac

SEQ ID NO: 4640751 - DNA, 25 bp, Homo sapien
ccagacaccaggagtaaggagggta

SEQ ID NO: 4640752 - DNA, 25 bp, Homo sapien
gcgccatcatctcttcgaatgacct

SEQ ID NO: 4640753 - DNA, 25 bp, Homo sapien
taaggagggtagttgatgatttccc

SEQ ID NO: 4640754 - DNA, 25 bp, Homo sapien
ggtcactgtactaatgtctaatttc

SEQ ID NO: 4640755 - DNA, 25 bp, Homo sapien
gaggtcactgtactaatgtctaatt

SEQ ID NO: 4640756 - DNA, 25 bp, Homo sapien
aggtcactgtactaatgtctaattt

SEQ ID NO: 4640757 - DNA, 25 bp, Homo sapien
acaggcacggacccctgctgcaggg

SEQ ID NO: 4640758 - DNA, 25 bp, Homo sapien
tgcaggggctgtttataggcacgac

SEQ ID NO: 4640759 - DNA, 25 bp, Homo sapien
cccctgctgcgaggctgtttatagg

SEQ ID NO: 4640760 - DNA, 25 bp, Homo sapien
atgaccccctgctgcgaggctgttt

SEQ ID NO: 4640761 - DNA, 25 bp, Homo sapien
agatctgtggcaattcttttgacat

SEQ ID NO: 4640762 - DNA, 25 bp, Homo sapien
ttcttttgacatgaggttgggcatt

SEQ ID NO: 4640763 - DNA, 25 bp, Homo sapien
gctggagatctgtggcaattctttt

SEQ ID NO: 4640764 - DNA, 25 bp, Homo sapien
ggagatctgtggcaattcttttgac

SEQ ID NO: 4640765 - DNA, 25 bp, Homo sapien
ggctctgatatctatgagtcgtcgg

SEQ ID NO: 4640766 - DNA, 25 bp, Homo sapien
gctctgatatctatgagtcgtcggc

SEQ ID NO: 4640767 - DNA, 25 bp, Homo sapien
ctctgatatctatgagtcgtcggcc

SEQ ID NO: 4640768 - DNA, 25 bp, Homo sapien
atgaaagtttaaggtggcctttatg

SEQ ID NO: 4640769 - DNA, 25 bp, Homo sapien
ttatgcgaagacttaacagcaaggt

SEQ ID NO: 4640770 - DNA, 25 bp, Homo sapien
gagctaatttaacttcaggacttta

SEQ ID NO: 4640771 - DNA, 25 bp, Homo sapien
ggcctttatgtttgattggtatact

SEQ ID NO: 4640772 - DNA, 25 bp, Homo sapien
gatagcatctaaggttgcaaatagc

SEQ ID NO: 4640773 - DNA, 25 bp, Homo sapien
taagttgagggagcttcataatcat

SEQ ID NO: 4640774 - DNA, 25 bp, Homo sapien
gccagaatgatagcatctaaggttg

SEQ ID NO: 4640775 - DNA, 25 bp, Homo sapien
tgcaaatagcacattgtaagttgag

SEQ ID NO: 4640776 - DNA, 25 bp, Homo sapien
gaagtggaggcgaagtaaacactcc

SEQ ID NO: 4640777 - DNA, 25 bp, Homo sapien
agaagtggaggcgaagtaaacactc

SEQ ID NO: 4640778 - DNA, 25 bp, Homo sapien
gaggaacagaagtggaggcgaagta

SEQ ID NO: 4640779 - DNA, 25 bp, Homo sapien
aacagaagtggaggcgaagtaaaca

SEQ ID NO: 4640780 - DNA, 25 bp, Homo sapien
gaagccggctctccgcatcacggct

SEQ ID NO: 4640781 - DNA, 25 bp, Homo sapien
ccaggaagggcggtccggcctccat

SEQ ID NO: 4640782 - DNA, 25 bp, Homo sapien
caggaagggcggtccggcctccatc

SEQ ID NO: 4640783 - DNA, 25 bp, Homo sapien
aggccacgaagccggctctccgcat

SEQ ID NO: 4640784 - DNA, 25 bp, Homo sapien
ggttccagcccatatccctatcaaa

SEQ ID NO: 4640785 - DNA, 25 bp, Homo sapien
cttgatctcttaatgagtaaatgga

SEQ ID NO: 4640786 - DNA, 25 bp, Homo sapien
tctcatttaatcgtcacagtcttct

SEQ ID NO: 4640787 - DNA, 25 bp, Homo sapien
aacggaggttcaaagatacttgatc

SEQ ID NO: 4640788 - DNA, 25 bp, Homo sapien
agactcctcgagagggttctcaagg

SEQ ID NO: 4640789 - DNA, 25 bp, Homo sapien
tgaggccagactcctcgagagggtt

SEQ ID NO: 4640790 - DNA, 25 bp, Homo sapien
ggccagactcctcgagagggttctc

SEQ ID NO: 4640791 - DNA, 25 bp, Homo sapien
tcatgaggccagactcctcgagagg

SEQ ID NO: 4640792 - DNA, 25 bp, Homo sapien
ttcacagagtaaaaatctcacattc

SEQ ID NO: 4640793 - DNA, 25 bp, Homo sapien
ctcctcacaggaaattcacagagta

SEQ ID NO: 4640794 - DNA, 25 bp, Homo sapien
aatctcacattcattcaggatatac

SEQ ID NO: 4640795 - DNA, 25 bp, Homo sapien
cactcctcacaggaaattcacagag

SEQ ID NO: 4640796 - DNA, 25 bp, Homo sapien
caacatatcaagctgggtttcttca

SEQ ID NO: 4640797 - DNA, 25 bp, Homo sapien
tttttctcttcttatctttgctctt

SEQ ID NO: 4640798 - DNA, 25 bp, Homo sapien
acatatcaagctgggtttcttcatc

SEQ ID NO: 4640799 - DNA, 25 bp, Homo sapien
ttctcttcttatctttgctcttttt

SEQ ID NO: 4640800 - DNA, 25 bp, Homo sapien
aatctccggctattaagcagtctaa

SEQ ID NO: 4640801 - DNA, 25 bp, Homo sapien
tgtatcagaatctccggctattaag

SEQ ID NO: 4640802 - DNA, 25 bp, Homo sapien
acaactgtaggcaatatttaatcac

SEQ ID NO: 4640803 - DNA, 25 bp, Homo sapien
tttacaactgtaggcaatatttaat

SEQ ID NO: 4640804 - DNA, 25 bp, Homo sapien
attatagcaatcaagagaaatatac

SEQ ID NO: 4640805 - DNA, 25 bp, Homo sapien
gcaatcaagagaaatataccaaaag

SEQ ID NO: 4640806 - DNA, 25 bp, Homo sapien
agacattaagattcgaaagaaagaa

SEQ ID NO: 4640807 - DNA, 25 bp, Homo sapien
gacattaagattcgaaagaaagaag

SEQ ID NO: 4640808 - DNA, 25 bp, Homo sapien
tatctcagggatgtaaagttagttt

SEQ ID NO: 4640809 - DNA, 25 bp, Homo sapien
tgcaatacagattagattctacaga

SEQ ID NO: 4640810 - DNA, 25 bp, Homo sapien
caaattaccaatatgaagagactgc

SEQ ID NO: 4640811 - DNA, 25 bp, Homo sapien
tgaatacccctgtactaaaagatca

SEQ ID NO: 4640812 - DNA, 25 bp, Homo sapien
gaataaaaggcaacccagagaatgg

SEQ ID NO: 4640813 - DNA, 25 bp, Homo sapien
aactgggcaaaggatatatacggac

SEQ ID NO: 4640814 - DNA, 25 bp, Homo sapien
gatggaaaaagcttcacgacaatga

SEQ ID NO: 4640815 - DNA, 25 bp, Homo sapien
tttgtgcatcaagaaccactgtcag

SEQ ID NO: 4640816 - DNA, 25 bp, Homo sapien
gctttgacacagagttctttgttat

SEQ ID NO: 4640817 - DNA, 25 bp, Homo sapien
atatcctttactcgctttctctcag

SEQ ID NO: 4640818 - DNA, 25 bp, Homo sapien
tctcacatatcctttactcgctttc

SEQ ID NO: 4640819 - DNA, 25 bp, Homo sapien
ttagctttgacacagagttctttgt

SEQ ID NO: 4640820 - DNA, 25 bp, Homo sapien
agctcccagggtaaaaagaccattg

SEQ ID NO: 4640821 - DNA, 25 bp, Homo sapien
taaaatctacacttgtggcaggatc

SEQ ID NO: 4640822 - DNA, 25 bp, Homo sapien
gcaggatcttccgttccagacacaa

SEQ ID NO: 4640823 - DNA, 25 bp, Homo sapien
gagtttggcctaagtgaatgaatgt

SEQ ID NO: 4640824 - DNA, 25 bp, Homo sapien
gtttgagactagttagagtttggcc

SEQ ID NO: 4640825 - DNA, 25 bp, Homo sapien
gaattagataatttgacagccataa

SEQ ID NO: 4640826 - DNA, 25 bp, Homo sapien
tttgacagccataaactgctctgga

SEQ ID NO: 4640827 - DNA, 25 bp, Homo sapien
ctggaattagataatttgacagcca

SEQ ID NO: 4640828 - DNA, 25 bp, Homo sapien
cataaactgctctggaggactaggg

SEQ ID NO: 4640829 - DNA, 25 bp, Homo sapien
tattcttttggtcgttatgatgctg

SEQ ID NO: 4640830 - DNA, 25 bp, Homo sapien
aagaatcattctatacttctgcaca

SEQ ID NO: 4640831 - DNA, 25 bp, Homo sapien
tctgctggtttcaacaatattcctt

SEQ ID NO: 4640832 - DNA, 25 bp, Homo sapien
tatcatgttgatgtaaccaattact

SEQ ID NO: 4640833 - DNA, 25 bp, Homo sapien
caagaatctcctcggatgccagaat

SEQ ID NO: 4640834 - DNA, 25 bp, Homo sapien
cctcggatgccagaattgactttta

SEQ ID NO: 4640835 - DNA, 25 bp, Homo sapien
gatgccagaattgacttttactccc

SEQ ID NO: 4640836 - DNA, 25 bp, Homo sapien
gaattgacttttactcccttataca

SEQ ID NO: 4640837 - DNA, 25 bp, Homo sapien
gggtcttcagtgctatgaattctat

SEQ ID NO: 4640838 - DNA, 25 bp, Homo sapien
ccctacttatcactttcaaagaaag

SEQ ID NO: 4640839 - DNA, 25 bp, Homo sapien
gagtaagaactcactgcctattaag

SEQ ID NO: 4640840 - DNA, 25 bp, Homo sapien
caagatacatatgaagagtaagaac

SEQ ID NO: 4640841 - DNA, 25 bp, Homo sapien
gttcccattgttctcttggtccaat

SEQ ID NO: 4640842 - DNA, 25 bp, Homo sapien
tggttcccattgttctcttggtcca

SEQ ID NO: 4640843 - DNA, 25 bp, Homo sapien
gactggttcccattgttctcttggt

SEQ ID NO: 4640844 - DNA, 25 bp, Homo sapien
actggttcccattgttctcttggtc

SEQ ID NO: 4640845 - DNA, 25 bp, Homo sapien
gactttgtgttaaactgacaggaag

SEQ ID NO: 4640846 - DNA, 25 bp, Homo sapien
ctttgtgttaaactgacaggaagtt

SEQ ID NO: 4640847 - DNA, 25 bp, Homo sapien
acagactttgtgttaaactgacagg

SEQ ID NO: 4640848 - DNA, 25 bp, Homo sapien
actttgtgttaaactgacaggaagt

SEQ ID NO: 4640849 - DNA, 25 bp, Homo sapien
aaatcaacgtagtgtttcctgaacg

SEQ ID NO: 4640850 - DNA, 25 bp, Homo sapien
gggttgcaacacattagcaggtaat

SEQ ID NO: 4640851 - DNA, 25 bp, Homo sapien
taactagtaggatcatctcaaaggg

SEQ ID NO: 4640852 - DNA, 25 bp, Homo sapien
tcaagatgcataacacacggataag

SEQ ID NO: 4640853 - DNA, 25 bp, Homo sapien
caatgtgcagaggtaggctttttca

SEQ ID NO: 4640854 - DNA, 25 bp, Homo sapien
taatttcttccctcaagggtagctc

SEQ ID NO: 4640855 - DNA, 25 bp, Homo sapien
gacttgcattgaatatcagaacaca

SEQ ID NO: 4640856 - DNA, 25 bp, Homo sapien
gctcaaaagttgaccatggcctccc

SEQ ID NO: 4640857 - DNA, 25 bp, Homo sapien
tatacagagacaagtacacggtggt

SEQ ID NO: 4640858 - DNA, 25 bp, Homo sapien
tcattctcattactggatggccatc

SEQ ID NO: 4640859 - DNA, 25 bp, Homo sapien
acacggtggtaaatgtatagctcaa

SEQ ID NO: 4640860 - DNA, 25 bp, Homo sapien
tagcttccagatgccctatcatgtg

SEQ ID NO: 4640861 - DNA, 25 bp, Homo sapien
aaagctcttacagaatggacactga

SEQ ID NO: 4640862 - DNA, 25 bp, Homo sapien
tacagaatggacactgatataatct

SEQ ID NO: 4640863 - DNA, 25 bp, Homo sapien
gctcttacagaatggacactgatat

SEQ ID NO: 4640864 - DNA, 25 bp, Homo sapien
taaggaacaagaaagctcttacaga

SEQ ID NO: 4640865 - DNA, 25 bp, Homo sapien
gaggaaaggaggtatggtcggtgtc

SEQ ID NO: 4640866 - DNA, 25 bp, Homo sapien
aggtatggtcggtgtcttctctcca

SEQ ID NO: 4640867 - DNA, 25 bp, Homo sapien
aaaggaggtatggtcggtgtcttct

SEQ ID NO: 4640868 - DNA, 25 bp, Homo sapien
aggaggtatggtcggtgtcttctct

SEQ ID NO: 4640869 - DNA, 25 bp, Homo sapien
cagttggagtgtgctttgggctgtc

SEQ ID NO: 4640870 - DNA, 25 bp, Homo sapien
tccagttggagtgtgctttgggctg

SEQ ID NO: 4640871 - DNA, 25 bp, Homo sapien
ttggagtgtgctttgggctgtccac

SEQ ID NO: 4640872 - DNA, 25 bp, Homo sapien
agttggagtgtgctttgggctgtcc

SEQ ID NO: 4640873 - DNA, 25 bp, Homo sapien
gcccctcccatacgatagtgggcag

SEQ ID NO: 4640874 - DNA, 25 bp, Homo sapien
gggcagaccccatgacttttactag

SEQ ID NO: 4640875 - DNA, 25 bp, Homo sapien
tcttcaaagcgcattaagtaggtgt

SEQ ID NO: 4640876 - DNA, 25 bp, Homo sapien
taagtaggtgtaatcctcgcccctc

SEQ ID NO: 4640877 - DNA, 25 bp, Homo sapien
cttgcagttagggacaggagccaac

SEQ ID NO: 4640878 - DNA, 25 bp, Homo sapien
gcatgtgtttttcacgggcccctag

SEQ ID NO: 4640879 - DNA, 25 bp, Homo sapien
cctagcgtgctcatgcgggattaag

SEQ ID NO: 4640880 - DNA, 25 bp, Homo sapien
tgaacgtgaccacaggtagggagct

SEQ ID NO: 4640881 - DNA, 25 bp, Homo sapien
gacgcttaaaatatgcctctggaga

SEQ ID NO: 4640882 - DNA, 25 bp, Homo sapien
tggagattatccactacccctaagg

SEQ ID NO: 4640883 - DNA, 25 bp, Homo sapien
cccattctggtgtagggtagctcaa

SEQ ID NO: 4640884 - DNA, 25 bp, Homo sapien
cgctagtactcaccaaaccttggag

SEQ ID NO: 4640885 - DNA, 25 bp, Homo sapien
aatcagggctatttggacaggtacc

SEQ ID NO: 4640886 - DNA, 25 bp, Homo sapien
gaatggtgcggttaaggagaaatcc

SEQ ID NO: 4640887 - DNA, 25 bp, Homo sapien
acaagatcgatgtggtaggaaacct

SEQ ID NO: 4640888 - DNA, 25 bp, Homo sapien
tccagttgcatggaggtcctttgtc

SEQ ID NO: 4640889 - DNA, 25 bp, Homo sapien
gaaaagcgccgtcgaacagttgtca

SEQ ID NO: 4640890 - DNA, 25 bp, Homo sapien
caatgaatggtttgctacagaatgc

SEQ ID NO: 4640891 - DNA, 25 bp, Homo sapien
taattagcatagaagaagcactcag

SEQ ID NO: 4640892 - DNA, 25 bp, Homo sapien
gatgaaatcacccttcgttgatgga

SEQ ID NO: 4640893 - DNA, 25 bp, Homo sapien
gggaaaactccttgtaagttgatgc

SEQ ID NO: 4640894 - DNA, 25 bp, Homo sapien
gatgggaaccatctagtttcaggaa

SEQ ID NO: 4640895 - DNA, 25 bp, Homo sapien
tgcatgagtgccacctcctgtcaga

SEQ ID NO: 4640896 - DNA, 25 bp, Homo sapien
agtgagcattactgcatgagtgcca

SEQ ID NO: 4640897 - DNA, 25 bp, Homo sapien
tccagatgggaaccatctagtttca

SEQ ID NO: 4640898 - DNA, 25 bp, Homo sapien
gatcctcttgatggctgtacatcca

SEQ ID NO: 4640899 - DNA, 25 bp, Homo sapien
catctagggtgttgcttcaaactgc

SEQ ID NO: 4640900 - DNA, 25 bp, Homo sapien
aaactgctgcttatttgtccatgag

SEQ ID NO: 4640901 - DNA, 25 bp, Homo sapien
gagtgcatccatgatattttgccct

SEQ ID NO: 4640902 - DNA, 25 bp, Homo sapien
ggtgatctcgattcttaccacgtcc

SEQ ID NO: 4640903 - DNA, 25 bp, Homo sapien
tctcccagatcagtcatgatggatg

SEQ ID NO: 4640904 - DNA, 25 bp, Homo sapien
tactcagtctcccatacattgcttc

SEQ ID NO: 4640905 - DNA, 25 bp, Homo sapien
gcaagtatctactgatctctggtga

SEQ ID NO: 4640906 - DNA, 25 bp, Homo sapien
gcctgaagccctattcactagacat

SEQ ID NO: 4640907 - DNA, 25 bp, Homo sapien
tgtgttgctgaaacattttggttca

SEQ ID NO: 4640908 - DNA, 25 bp, Homo sapien
aaagtatgtttgtggcctgaggtcc

SEQ ID NO: 4640909 - DNA, 25 bp, Homo sapien
cccatgtagaggtattaaataatcc

SEQ ID NO: 4640910 - DNA, 25 bp, Homo sapien
cccaggtggattctcatgatggaca

SEQ ID NO: 4640911 - DNA, 25 bp, Homo sapien
catgatggacactttataagcttct

SEQ ID NO: 4640912 - DNA, 25 bp, Homo sapien
ggattctcatgatggacactttata

SEQ ID NO: 4640913 - DNA, 25 bp, Homo sapien
ggtatttgatctgttgtgtaggtcc

SEQ ID NO: 4640914 - DNA, 25 bp, Homo sapien
taataatatgggagtatacttaacc

SEQ ID NO: 4640915 - DNA, 25 bp, Homo sapien
ttgactcaggatttgaaactaggtc

SEQ ID NO: 4640916 - DNA, 25 bp, Homo sapien
tcctcatattaaagatgttgaacca

SEQ ID NO: 4640917 - DNA, 25 bp, Homo sapien
tgagataggcattactctcctcata

SEQ ID NO: 4640918 - DNA, 25 bp, Homo sapien
ctttcccctgaatagacttggcacc

SEQ ID NO: 4640919 - DNA, 25 bp, Homo sapien
aggttcacttatttcccttatccag

SEQ ID NO: 4640920 - DNA, 25 bp, Homo sapien
ccctgaatagacttggcaccattat

SEQ ID NO: 4640921 - DNA, 25 bp, Homo sapien
tccgtagaattgtagggaacaaagc

SEQ ID NO: 4640922 - DNA, 25 bp, Homo sapien
cagaacaggtaaacatatatgtggc

SEQ ID NO: 4640923 - DNA, 25 bp, Homo sapien
gaaggcaccgggaaacattctgagg

SEQ ID NO: 4640924 - DNA, 25 bp, Homo sapien
gaagggccataacacgtggttctaa

SEQ ID NO: 4640925 - DNA, 25 bp, Homo sapien
tgagatactacattgggcaaaccat

SEQ ID NO: 4640926 - DNA, 25 bp, Homo sapien
taatggagatgtgtccacaaaagac

SEQ ID NO: 4640927 - DNA, 25 bp, Homo sapien
ccaaatgttgattaggataggaagc

SEQ ID NO: 4640928 - DNA, 25 bp, Homo sapien
tcctgtagtcccacaccaaatgttg

SEQ ID NO: 4640929 - DNA, 25 bp, Homo sapien
tcttgtaaaatggagcctacagctg

SEQ ID NO: 4640930 - DNA, 25 bp, Homo sapien
ttgtaagaatgaaacgagacagtgc

SEQ ID NO: 4640931 - DNA, 25 bp, Homo sapien
tccatttgggaatgcgttgaaaaca

SEQ ID NO: 4640932 - DNA, 25 bp, Homo sapien
taagcaaggatgtcaccgtgaaaaa

SEQ ID NO: 4640933 - DNA, 25 bp, Homo sapien
caacaagagattcactcagtagggc

SEQ ID NO: 4640934 - DNA, 25 bp, Homo sapien
gatgggataagtaggaaagctctct

SEQ ID NO: 4640935 - DNA, 25 bp, Homo sapien
tgcaataaactgtgttcccctggaa

SEQ ID NO: 4640936 - DNA, 25 bp, Homo sapien
cctttgatcatataatgagccatgc

SEQ ID NO: 4640937 - DNA, 25 bp, Homo sapien
catatgcaatgactcttctggaagc

SEQ ID NO: 4640938 - DNA, 25 bp, Homo sapien
ccagcaacagttaccattataaatt

SEQ ID NO: 4640939 - DNA, 25 bp, Homo sapien
ttctgaagggaaaacttattatcta

SEQ ID NO: 4640940 - DNA, 25 bp, Homo sapien
tattatctatccctccttgtagacg

SEQ ID NO: 4640941 - DNA, 25 bp, Homo sapien
tgtagacgttttacacgttatccaa

SEQ ID NO: 4640942 - DNA, 25 bp, Homo sapien
tagttgatgcttatctgatatggaa

SEQ ID NO: 4640943 - DNA, 25 bp, Homo sapien
catgaacccatttgggtggtctctt

SEQ ID NO: 4640944 - DNA, 25 bp, Homo sapien
tatctgatatggaaggactctgaat

SEQ ID NO: 4640945 - DNA, 25 bp, Homo sapien
ggctcatgaacccatttgggtggtc

SEQ ID NO: 4640946 - DNA, 25 bp, Homo sapien
tgactactagatgcaggtgcaccaa

SEQ ID NO: 4640947 - DNA, 25 bp, Homo sapien
tgtgtgattcaagctaacccctcga

SEQ ID NO: 4640948 - DNA, 25 bp, Homo sapien
tattaccgagcttggctgaacattg

SEQ ID NO: 4640949 - DNA, 25 bp, Homo sapien
gctttaaaactactaatgctgggct

SEQ ID NO: 4640950 - DNA, 25 bp, Homo sapien
gctttacatacagtgggaaaataaa

SEQ ID NO: 4640951 - DNA, 25 bp, Homo sapien
ataatatggaaaatgttaaaggcaa

SEQ ID NO: 4640952 - DNA, 25 bp, Homo sapien
ataaataatatggaaaatgttaaag

SEQ ID NO: 4640953 - DNA, 25 bp, Homo sapien
cagtgggaaaataaataatatggaa

SEQ ID NO: 4640954 - DNA, 25 bp, Homo sapien
aacactcgacttgaagaatgtcccg

SEQ ID NO: 4640955 - DNA, 25 bp, Homo sapien
ctgtccaagagagcagggcagaagt

SEQ ID NO: 4640956 - DNA, 25 bp, Homo sapien
gattacccagatctgcatcgttcag

SEQ ID NO: 4640957 - DNA, 25 bp, Homo sapien
tatggcctcatcatggaagtcacac

SEQ ID NO: 4640958 - DNA, 25 bp, Homo sapien
tggtttggtcatatgaaggcttggt

SEQ ID NO: 4640959 - DNA, 25 bp, Homo sapien
gacaggagatgggtattctggcttg

SEQ ID NO: 4640960 - DNA, 25 bp, Homo sapien
agatggctcaatcccttggctggaa

SEQ ID NO: 4640961 - DNA, 25 bp, Homo sapien
ggactcacatgaggtcacagttaca

SEQ ID NO: 4640962 - DNA, 25 bp, Homo sapien
attgtatacttaccatatgccagac

SEQ ID NO: 4640963 - DNA, 25 bp, Homo sapien
cagtccttggatcttatatacagtg

SEQ ID NO: 4640964 - DNA, 25 bp, Homo sapien
ccagacttgttctaggttcttggaa

SEQ ID NO: 4640965 - DNA, 25 bp, Homo sapien
taccatatgccagacttgttctagg

SEQ ID NO: 4640966 - DNA, 25 bp, Homo sapien
ttatcctgggctaattggtagagac

SEQ ID NO: 4640967 - DNA, 25 bp, Homo sapien
gactagatcttgaaagccatacctt

SEQ ID NO: 4640968 - DNA, 25 bp, Homo sapien
tctttttatcaatgactagatcttg

SEQ ID NO: 4640969 - DNA, 25 bp, Homo sapien
atttatcctgggctaattggtagag

SEQ ID NO: 4640970 - DNA, 25 bp, Homo sapien
cagaccctatggtgtgggacgttca

SEQ ID NO: 4640971 - DNA, 25 bp, Homo sapien
taatggcagtagcatccacttgggt

SEQ ID NO: 4640972 - DNA, 25 bp, Homo sapien
tgggaatgcgtatgcctcacagatg

SEQ ID NO: 4640973 - DNA, 25 bp, Homo sapien
tacctattaaggtgcagtgccagat

SEQ ID NO: 4640974 - DNA, 25 bp, Homo sapien
tcacggtgctttaaagtactttggc

SEQ ID NO: 4640975 - DNA, 25 bp, Homo sapien
cacagctgtgggagctcacggtgct

SEQ ID NO: 4640976 - DNA, 25 bp, Homo sapien
gctaatctgctgagtcgtctgaaaa

SEQ ID NO: 4640977 - DNA, 25 bp, Homo sapien
cagaggtctttagttcactggaaca

SEQ ID NO: 4640978 - DNA, 25 bp, Homo sapien
ttctacttgaccaaacacatacaaa

SEQ ID NO: 4640979 - DNA, 25 bp, Homo sapien
gtttattctacttgaccaaacacat

SEQ ID NO: 4640980 - DNA, 25 bp, Homo sapien
tattctacttgaccaaacacataca

SEQ ID NO: 4640981 - DNA, 25 bp, Homo sapien
agtttattctacttgaccaaacaca

SEQ ID NO: 4640982 - DNA, 25 bp, Homo sapien
tcttaaagtgtgtgcagatgctcca

SEQ ID NO: 4640983 - DNA, 25 bp, Homo sapien
taggtcctgacttccgagccaaggt

SEQ ID NO: 4640984 - DNA, 25 bp, Homo sapien
tctgggctgctaactacacttggag

SEQ ID NO: 4640985 - DNA, 25 bp, Homo sapien
aatgtgcacgtgaattacctggacc

SEQ ID NO: 4640986 - DNA, 25 bp, Homo sapien
atcccctgcaacctgggagccagtg

SEQ ID NO: 4640987 - DNA, 25 bp, Homo sapien
ggagccagtgcatgcaatgctccag

SEQ ID NO: 4640988 - DNA, 25 bp, Homo sapien
agccacatggcctccttcaatcgga

SEQ ID NO: 4640989 - DNA, 25 bp, Homo sapien
ggagctgctgacatcccctgcaacc

SEQ ID NO: 4640990 - DNA, 25 bp, Homo sapien
tgcatggtccatgaacacatatttc

SEQ ID NO: 4640991 - DNA, 25 bp, Homo sapien
tcaccaattggaagactaatagaca

SEQ ID NO: 4640992 - DNA, 25 bp, Homo sapien
gcccaatggcattaaattctatgta

SEQ ID NO: 4640993 - DNA, 25 bp, Homo sapien
tcaaccgtttttctaggtgcactca

SEQ ID NO: 4640994 - DNA, 25 bp, Homo sapien
acttgcactgcgtctggcttatctg

SEQ ID NO: 4640995 - DNA, 25 bp, Homo sapien
ttgacagttttatttgttagcttca

SEQ ID NO: 4640996 - DNA, 25 bp, Homo sapien
gtcttgaccggccacttgcactgcg

SEQ ID NO: 4640997 - DNA, 25 bp, Homo sapien
tctgcctcattctggttgacagttt

SEQ ID NO: 4640998 - DNA, 25 bp, Homo sapien
gtgatatccttgacttcacagcaga

SEQ ID NO: 4640999 - DNA, 25 bp, Homo sapien
gggactgccctctaaagtctcttca

SEQ ID NO: 4641000 - DNA, 25 bp, Homo sapien
catggctaccttgtcgtttagactc

SEQ ID NO: 4641001 - DNA, 25 bp, Homo sapien
tatccctgactgtatgagatccctc

SEQ ID NO: 4641002 - DNA, 25 bp, Homo sapien
aaagacaactgcttttcttattctt

SEQ ID NO: 4641003 - DNA, 25 bp, Homo sapien
tttaagttcaaatttgtcttgtctc

SEQ ID NO: 4641004 - DNA, 25 bp, Homo sapien
tctaaaaagacaactgcttttctta

SEQ ID NO: 4641005 - DNA, 25 bp, Homo sapien
tgcttttcttattcttttaagttca

SEQ ID NO: 4641006 - DNA, 25 bp, Homo sapien
cctgtgttctgggcgagaggataca

SEQ ID NO: 4641007 - DNA, 25 bp, Homo sapien
taaggagggtagttgatgatttccc

SEQ ID NO: 4641008 - DNA, 25 bp, Homo sapien
gcgccatcatctcttcgaatgacct

SEQ ID NO: 4641009 - DNA, 25 bp, Homo sapien
ccagacaccaggagtaaggagggta

SEQ ID NO: 4641010 - DNA, 25 bp, Homo sapien
tagagaagacctctgggttccgaac

SEQ ID NO: 4641011 - DNA, 25 bp, Homo sapien
ggtcactgtactaatgtctaatttc

SEQ ID NO: 4641012 - DNA, 25 bp, Homo sapien
gaggtcactgtactaatgtctaatt

SEQ ID NO: 4641013 - DNA, 25 bp, Homo sapien
aggtcactgtactaatgtctaattt

SEQ ID NO: 4641014 - DNA, 25 bp, Homo sapien
aactgctcgtgctaaggtcaccgta

SEQ ID NO: 4641015 - DNA, 25 bp, Homo sapien
gggatcagctcttcaacataggaat

SEQ ID NO: 4641016 - DNA, 25 bp, Homo sapien
tggtttagggtccacccatatggct

SEQ ID NO: 4641017 - DNA, 25 bp, Homo sapien
tggacacctgccatattggtttagg

SEQ ID NO: 4641018 - DNA, 25 bp, Homo sapien
agatctgtggcaattcttttgacat

SEQ ID NO: 4641019 - DNA, 25 bp, Homo sapien
ttcttttgacatgaggttgggcatt

SEQ ID NO: 4641020 - DNA, 25 bp, Homo sapien
gctggagatctgtggcaattctttt

SEQ ID NO: 4641021 - DNA, 25 bp, Homo sapien
ggagatctgtggcaattcttttgac

SEQ ID NO: 4641022 - DNA, 25 bp, Homo sapien
ggtcacagattccagtgactagaac

SEQ ID NO: 4641023 - DNA, 25 bp, Homo sapien
ttatagacacatgcaattagattgg

SEQ ID NO: 4641024 - DNA, 25 bp, Homo sapien
tgttctgtagccatatcaccttctg

SEQ ID NO: 4641025 - DNA, 25 bp, Homo sapien
gacacatgcaattagattggctccc

SEQ ID NO: 4641026 - DNA, 25 bp, Homo sapien
tgaaagctattgaaattcccacatg

SEQ ID NO: 4641027 - DNA, 25 bp, Homo sapien
gatgcttgtggtccaaaaatgcaga

SEQ ID NO: 4641028 - DNA, 25 bp, Homo sapien
tattttgatccctccatgttctggc

SEQ ID NO: 4641029 - DNA, 25 bp, Homo sapien
tggcatcagagagaaccggatttga

SEQ ID NO: 4641030 - DNA, 25 bp, Homo sapien
gctcctctggccgttgctgaaccaa

SEQ ID NO: 4641031 - DNA, 25 bp, Homo sapien
ccactgcgttggagctcgcacaatt

SEQ ID NO: 4641032 - DNA, 25 bp, Homo sapien
tgaagaccagaagacgcccaaaggt

SEQ ID NO: 4641033 - DNA, 25 bp, Homo sapien
ggagctcgcacaatttgagcccaat

SEQ ID NO: 4641034 - DNA, 25 bp, Homo sapien
gaagtggaggcgaagtaaacactcc

SEQ ID NO: 4641035 - DNA, 25 bp, Homo sapien
agaagtggaggcgaagtaaacactc

SEQ ID NO: 4641036 - DNA, 25 bp, Homo sapien
gaggaacagaagtggaggcgaagta

SEQ ID NO: 4641037 - DNA, 25 bp, Homo sapien
aacagaagtggaggcgaagtaaaca

SEQ ID NO: 4641038 - DNA, 25 bp, Homo sapien
caggaagggcggtccggcctccatc

SEQ ID NO: 4641039 - DNA, 25 bp, Homo sapien
ccaggaagggcggtccggcctccat

SEQ ID NO: 4641040 - DNA, 25 bp, Homo sapien
gaagccggctctccgcatcacggct

SEQ ID NO: 4641041 - DNA, 25 bp, Homo sapien
aggccacgaagccggctctccgcat

SEQ ID NO: 4641042 - DNA, 25 bp, Homo sapien
tcatgaggccagactcctcgagagg

SEQ ID NO: 4641043 - DNA, 25 bp, Homo sapien
tgaggccagactcctcgagagggtt

SEQ ID NO: 4641044 - DNA, 25 bp, Homo sapien
ggccagactcctcgagagggttctc

SEQ ID NO: 4641045 - DNA, 25 bp, Homo sapien
agactcctcgagagggttctcaagg

SEQ ID NO: 4641046 - DNA, 25 bp, Homo sapien
aatctcacattcattcaggatatac

SEQ ID NO: 4641047 - DNA, 25 bp, Homo sapien
cactcctcacaggaaattcacagag

SEQ ID NO: 4641048 - DNA, 25 bp, Homo sapien
ctcctcacaggaaattcacagagta

SEQ ID NO: 4641049 - DNA, 25 bp, Homo sapien
ttcacagagtaaaaatctcacattc

SEQ ID NO: 4641050 - DNA, 25 bp, Homo sapien
tttttctcttcttatctttgctctt

SEQ ID NO: 4641051 - DNA, 25 bp, Homo sapien
acatatcaagctgggtttcttcatc

SEQ ID NO: 4641052 - DNA, 25 bp, Homo sapien
ttctcttcttatctttgctcttttt

SEQ ID NO: 4641053 - DNA, 25 bp, Homo sapien
caacatatcaagctgggtttcttca

SEQ ID NO: 4641054 - DNA, 25 bp, Homo sapien
caaattaccaatatgaagagactgc

SEQ ID NO: 4641055 - DNA, 25 bp, Homo sapien
tatctcagggatgtaaagttagttt

SEQ ID NO: 4641056 - DNA, 25 bp, Homo sapien
tgaatacccctgtactaaaagatca

SEQ ID NO: 4641057 - DNA, 25 bp, Homo sapien
tgcaatacagattagattctacaga

SEQ ID NO: 4641058 - DNA, 25 bp, Homo sapien
ccaaaaaagagcctgcatcaccaag

SEQ ID NO: 4641059 - DNA, 25 bp, Homo sapien
gcctgcatcaccaagtcaatcctaa

SEQ ID NO: 4641060 - DNA, 25 bp, Homo sapien
aaagagcctgcatcaccaagtcaat

SEQ ID NO: 4641061 - DNA, 25 bp, Homo sapien
agagcctgcatcaccaagtcaatcc

SEQ ID NO: 4641062 - DNA, 25 bp, Homo sapien
tgcctcccagttagaataactaata

SEQ ID NO: 4641063 - DNA, 25 bp, Homo sapien
gtgcctcccagttagaataactaat

SEQ ID NO: 4641064 - DNA, 25 bp, Homo sapien
gagaacggtctctctcatgatagac

SEQ ID NO: 4641065 - DNA, 25 bp, Homo sapien
acaaagtgatatatggagaacggtc

SEQ ID NO: 4641066 - DNA, 25 bp, Homo sapien
caaaaggcaacatatgaaggtacaa

SEQ ID NO: 4641067 - DNA, 25 bp, Homo sapien
tacacaatagcaacatacagccagg

SEQ ID NO: 4641068 - DNA, 25 bp, Homo sapien
agctcccagggtaaaaagaccattg

SEQ ID NO: 4641069 - DNA, 25 bp, Homo sapien
tttgacagccataaactgctctgga

SEQ ID NO: 4641070 - DNA, 25 bp, Homo sapien
ctggaatcagataatttgacagcca

SEQ ID NO: 4641071 - DNA, 25 bp, Homo sapien
ggaatcagataatttgacagccata

SEQ ID NO: 4641072 - DNA, 25 bp, Homo sapien
cataaactgctctggaggactaggg

SEQ ID NO: 4641073 - DNA, 25 bp, Homo sapien
cctcggatgccagaattgactttta

SEQ ID NO: 4641074 - DNA, 25 bp, Homo sapien
caagaatctcctcggatgccagaat

SEQ ID NO: 4641075 - DNA, 25 bp, Homo sapien
gatgccagaattgacttttactccc

SEQ ID NO: 4641076 - DNA, 25 bp, Homo sapien
gaattgacttttactcccttataca

SEQ ID NO: 4641077 - DNA, 25 bp, Homo sapien
tcaaaacaggacatgtgtatgtgtg

SEQ ID NO: 4641078 - DNA, 25 bp, Homo sapien
aattccagactggacatattccaag

SEQ ID NO: 4641079 - DNA, 25 bp, Homo sapien
caaaagatgcatgtggctgagtggt

SEQ ID NO: 4641080 - DNA, 25 bp, Homo sapien
gggtgtgtacatatctaaaattcca

SEQ ID NO: 4641081 - DNA, 25 bp, Homo sapien
gttcccattgttctcttggtccaat

SEQ ID NO: 4641082 - DNA, 25 bp, Homo sapien
tggttcccattgttctcttggtcca

SEQ ID NO: 4641083 - DNA, 25 bp, Homo sapien
gactggttcccattgttctcttggt

SEQ ID NO: 4641084 - DNA, 25 bp, Homo sapien
actggttcccattgttctcttggtc

SEQ ID NO: 4641085 - DNA, 25 bp, Homo sapien
aatgtattgtactattgcatcctac

SEQ ID NO: 4641086 - DNA, 25 bp, Homo sapien
tattattgactgctacagactttgt

SEQ ID NO: 4641087 - DNA, 25 bp, Homo sapien
tatcgggcactaagggtatacagaa

SEQ ID NO: 4641088 - DNA, 25 bp, Homo sapien
ttgtgggcaaaagtactaaagctat

SEQ ID NO: 4641089 - DNA, 25 bp, Homo sapien
caaattgtcacaacttggtattagc

SEQ ID NO: 4641090 - DNA, 25 bp, Homo sapien
attgtcacaacttggtattagctag

SEQ ID NO: 4641091 - DNA, 25 bp, Homo sapien
ttgtcacaacttggtattagctagc

SEQ ID NO: 4641092 - DNA, 25 bp, Homo sapien
aattgtcacaacttggtattagcta

SEQ ID NO: 4641093 - DNA, 25 bp, Homo sapien
taaagtgaaaagcatcaaagcatga

SEQ ID NO: 4641094 - DNA, 25 bp, Homo sapien
tacagtaacaactggagatcaggaa

SEQ ID NO: 4641095 - DNA, 25 bp, Homo sapien
tagaatgttcgagctggagaaacca

SEQ ID NO: 4641096 - DNA, 25 bp, Homo sapien
tgataagttttatcacataggtccc

SEQ ID NO: 4641097 - DNA, 25 bp, Homo sapien
tatacagagacaagtacacggtggt

SEQ ID NO: 4641098 - DNA, 25 bp, Homo sapien
tcattctcattactggatggccatc

SEQ ID NO: 4641099 - DNA, 25 bp, Homo sapien
acacggtggtaaatgtatagctcaa

SEQ ID NO: 4641100 - DNA, 25 bp, Homo sapien
tagcttccagatgccctatcatgtg

SEQ ID NO: 4641101 - DNA, 25 bp, Homo sapien
ttggagtgtgctttgggctgtccac

SEQ ID NO: 4641102 - DNA, 25 bp, Homo sapien
tccagttggagtgtgctttgggctg

SEQ ID NO: 4641103 - DNA, 25 bp, Homo sapien
cagttggagtgtgctttgggctgtc

SEQ ID NO: 4641104 - DNA, 25 bp, Homo sapien
agttggagtgtgctttgggctgtcc

SEQ ID NO: 4641105 - DNA, 25 bp, Homo sapien
tggagattatccactacccctaagg

SEQ ID NO: 4641106 - DNA, 25 bp, Homo sapien
gacgcttaaaatatgcctctggaga

SEQ ID NO: 4641107 - DNA, 25 bp, Homo sapien
cccattctggtgtagggtagctcaa

SEQ ID NO: 4641108 - DNA, 25 bp, Homo sapien
cgctagtactcaccaaaccttggag

SEQ ID NO: 4641109 - DNA, 25 bp, Homo sapien
catagcggccctgtgtcagaaatta

SEQ ID NO: 4641110 - DNA, 25 bp, Homo sapien
tcctctaattggctaaagggaccat

SEQ ID NO: 4641111 - DNA, 25 bp, Homo sapien
tcagtatccagctggccatagcggc

SEQ ID NO: 4641112 - DNA, 25 bp, Homo sapien
tcctgctctgctacaaacggttagg

SEQ ID NO: 4641113 - DNA, 25 bp, Homo sapien
gatgggaaccatctagtttcaggaa

SEQ ID NO: 4641114 - DNA, 25 bp, Homo sapien
tgcatgagtgccacctcctgtcaga

SEQ ID NO: 4641115 - DNA, 25 bp, Homo sapien
agtgagcattactgcatgagtgcca

SEQ ID NO: 4641116 - DNA, 25 bp, Homo sapien
tccagatgggaaccatctagtttca

SEQ ID NO: 4641117 - DNA, 25 bp, Homo sapien
tagacccgttgtcagttttaggcac

SEQ ID NO: 4641118 - DNA, 25 bp, Homo sapien
tcactgggttttgttagaaggatcc

SEQ ID NO: 4641119 - DNA, 25 bp, Homo sapien
cagatgtaccactaatcactgggtt

SEQ ID NO: 4641120 - DNA, 25 bp, Homo sapien
tagccaaattgatatcagtagacag

SEQ ID NO: 4641121 - DNA, 25 bp, Homo sapien
tcctatcacagtgaatactgctgca

SEQ ID NO: 4641122 - DNA, 25 bp, Homo sapien
attttgcccttgattccctcagcaa

SEQ ID NO: 4641123 - DNA, 25 bp, Homo sapien
cagtgaatactgctgcacaggcacc

SEQ ID NO: 4641124 - DNA, 25 bp, Homo sapien
gattccctcagcaatgaacactcag

SEQ ID NO: 4641125 - DNA, 25 bp, Homo sapien
taggtaaaatcaatgcagcttcaaa

SEQ ID NO: 4641126 - DNA, 25 bp, Homo sapien
cagtggtttcccatatagcttattt

SEQ ID NO: 4641127 - DNA, 25 bp, Homo sapien
ttgacagtggtttcccatatagctt

SEQ ID NO: 4641128 - DNA, 25 bp, Homo sapien
ctaggtaaaatcaatgcagcttcaa

SEQ ID NO: 4641129 - DNA, 25 bp, Homo sapien
gttgagaatattgtcccctgtgggc

SEQ ID NO: 4641130 - DNA, 25 bp, Homo sapien
caaaggacctgttctgatatgtaag

SEQ ID NO: 4641131 - DNA, 25 bp, Homo sapien
ggaggctggttttactctgacaaca

SEQ ID NO: 4641132 - DNA, 25 bp, Homo sapien
aagggtccctgataaaccagttgag

SEQ ID NO: 4641133 - DNA, 25 bp, Homo sapien
cagagtcatatagaatcctgagtga

SEQ ID NO: 4641134 - DNA, 25 bp, Homo sapien
taataatatgggagtatatttaacc

SEQ ID NO: 4641135 - DNA, 25 bp, Homo sapien
cctgagtgatacgtagggtatttaa

SEQ ID NO: 4641136 - DNA, 25 bp, Homo sapien
tttctagaaattgagaactcagagt

SEQ ID NO: 4641137 - DNA, 25 bp, Homo sapien
aatttttgagcacggtataaggtag

SEQ ID NO: 4641138 - DNA, 25 bp, Homo sapien
tatgtctttgtcaactacaagaaat

SEQ ID NO: 4641139 - DNA, 25 bp, Homo sapien
tcttctagagtcattgcagtttcaa

SEQ ID NO: 4641140 - DNA, 25 bp, Homo sapien
taatttttgagcacggtataaggta

SEQ ID NO: 4641141 - DNA, 25 bp, Homo sapien
cagaacaggtaaacatatatgtggc

SEQ ID NO: 4641142 - DNA, 25 bp, Homo sapien
gaaggcaccgggaaacattctgagg

SEQ ID NO: 4641143 - DNA, 25 bp, Homo sapien
gaagggccataacacgtggttctaa

SEQ ID NO: 4641144 - DNA, 25 bp, Homo sapien
tgagatactacattgggcaaaccat

SEQ ID NO: 4641145 - DNA, 25 bp, Homo sapien
taatggagatgtgtccacaaaagac

SEQ ID NO: 4641146 - DNA, 25 bp, Homo sapien
ccaaatgttgattaggataggaagc

SEQ ID NO: 4641147 - DNA, 25 bp, Homo sapien
tcctgtagtcccacaccaaatgttg

SEQ ID NO: 4641148 - DNA, 25 bp, Homo sapien
tcttgtaaaatggagcctacagctg

SEQ ID NO: 4641149 - DNA, 25 bp, Homo sapien
cacattgctgcatgaccgtgctaac

SEQ ID NO: 4641150 - DNA, 25 bp, Homo sapien
agacacattgctgcatgaccgtgct

SEQ ID NO: 4641151 - DNA, 25 bp, Homo sapien
gcatgaccgtgctaacatacctaac

SEQ ID NO: 4641152 - DNA, 25 bp, Homo sapien
tgctgcatgaccgtgctaacatacc

SEQ ID NO: 4641153 - DNA, 25 bp, Homo sapien
tagttgatgcttatctgatatggaa

SEQ ID NO: 4641154 - DNA, 25 bp, Homo sapien
ggctcatgaacccatttgggtggtc

SEQ ID NO: 4641155 - DNA, 25 bp, Homo sapien
catgaacccatttgggtggtctctt

SEQ ID NO: 4641156 - DNA, 25 bp, Homo sapien
tatctgatatggaaggactctgaat

SEQ ID NO: 4641157 - DNA, 25 bp, Homo sapien
agatggctcaatcccttggctggaa

SEQ ID NO: 4641158 - DNA, 25 bp, Homo sapien
tggtttggtcatatgaaggcttggt

SEQ ID NO: 4641159 - DNA, 25 bp, Homo sapien
gacaggagatgggtattctggcttg

SEQ ID NO: 4641160 - DNA, 25 bp, Homo sapien
ggactcacatgaggtcacagttaca

SEQ ID NO: 4641161 - DNA, 25 bp, Homo sapien
tggcttgccacagcccttcgtagat

SEQ ID NO: 4641162 - DNA, 25 bp, Homo sapien
tctgcacctactccgaaattttagc

SEQ ID NO: 4641163 - DNA, 25 bp, Homo sapien
actggtctaaggcatgtgaaatggc

SEQ ID NO: 4641164 - DNA, 25 bp, Homo sapien
cagcttggctttttccggtgttttg

SEQ ID NO: 4641165 - DNA, 25 bp, Homo sapien
aaaatcgagatacatagggataatg

SEQ ID NO: 4641166 - DNA, 25 bp, Homo sapien
aaatcgagatacatagggataatgg

SEQ ID NO: 4641167 - DNA, 25 bp, Homo sapien
ggcttttttgctgtggtctgtgcat

SEQ ID NO: 4641168 - DNA, 25 bp, Homo sapien
agctgctccggcatagactttcaca

SEQ ID NO: 4641169 - DNA, 25 bp, Homo sapien
tccatgctgctagctaaggctgagg

SEQ ID NO: 4641170 - DNA, 25 bp, Homo sapien
ttgtgtgcgtactcacactcatgca

SEQ ID NO: 4641171 - DNA, 25 bp, Homo sapien
catctatgtacaagggtactcactg

SEQ ID NO: 4641172 - DNA, 25 bp, Homo sapien
taacacatgaagaggtggccaacct

SEQ ID NO: 4641173 - DNA, 25 bp, Homo sapien
tctatgacatgtaaaaaggttttcc

SEQ ID NO: 4641174 - DNA, 25 bp, Homo sapien
gacataactttttggtcaggcaatt

SEQ ID NO: 4641175 - DNA, 25 bp, Homo sapien
aaacttctttcgcaggctcacaaca

SEQ ID NO: 4641176 - DNA, 25 bp, Homo sapien
cacacaaacttctttcgcaggctca

SEQ ID NO: 4641177 - DNA, 25 bp, Homo sapien
cacaaacttctttcgcaggctcaca

SEQ ID NO: 4641178 - DNA, 25 bp, Homo sapien
ttctttcgcaggctcacaacatagt

SEQ ID NO: 4641179 - DNA, 25 bp, Homo sapien
gcaatacataattcggacaggctga

SEQ ID NO: 4641180 - DNA, 25 bp, Homo sapien
caggctgaaagtaccattgtaacca

SEQ ID NO: 4641181 - DNA, 25 bp, Homo sapien
tggctaaaaagtcccagcaggtttc

SEQ ID NO: 4641182 - DNA, 25 bp, Homo sapien
catgctgtgctgtagatctcaacaa

SEQ ID NO: 4641183 - DNA, 25 bp, Homo sapien
tattgcaatcagcaaatggatttac

SEQ ID NO: 4641184 - DNA, 25 bp, Homo sapien
attgcaatcagcaaatggatttact

SEQ ID NO: 4641185 - DNA, 25 bp, Homo sapien
tgctgggctctaaggactgtgctca

SEQ ID NO: 4641186 - DNA, 25 bp, Homo sapien
tgtcgcagcctgtaaggacagaact

SEQ ID NO: 4641187 - DNA, 25 bp, Homo sapien
gagaagctacatttactggacatgg

SEQ ID NO: 4641188 - DNA, 25 bp, Homo sapien
taggaaagctgtcttagcacaacca

SEQ ID NO: 4641189 - DNA, 25 bp, Homo sapien
aaagttcttggaataagtttgagct

SEQ ID NO: 4641190 - DNA, 25 bp, Homo sapien
tgaaaagttcttggaataagtttga

SEQ ID NO: 4641191 - DNA, 25 bp, Homo sapien
atcccctgcaacctgggagccagtg

SEQ ID NO: 4641192 - DNA, 25 bp, Homo sapien
ggagccagtgcatgcaatgctccag

SEQ ID NO: 4641193 - DNA, 25 bp, Homo sapien
agccacatggcctccttcaatcgga

SEQ ID NO: 4641194 - DNA, 25 bp, Homo sapien
ggagctgctgacatcccctgcaacc

SEQ ID NO: 4641195 - DNA, 25 bp, Homo sapien
tttcttggggttgattttgcaggaa

SEQ ID NO: 4641196 - DNA, 25 bp, Homo sapien
gatttcttggggttgattttgcagg

SEQ ID NO: 4641197 - DNA, 25 bp, Homo sapien
ggatttcttggggttgattttgcag

SEQ ID NO: 4641198 - DNA, 25 bp, Homo sapien
atttcttggggttgattttgcagga

SEQ ID NO: 4641199 - DNA, 25 bp, Homo sapien
gcctcgcgaggggtgcctcctcccc

SEQ ID NO: 4641200 - DNA, 25 bp, Homo sapien
ctataggagtgggagtggaggtggt

SEQ ID NO: 4641201 - DNA, 25 bp, Homo sapien
taggagtgggagtggaggtggtggc

SEQ ID NO: 4641202 - DNA, 25 bp, Homo sapien
tataggagtgggagtggaggtggtg

SEQ ID NO: 4641203 - DNA, 25 bp, Homo sapien
ggagtgggagtggaggtggtggcca

SEQ ID NO: 4641204 - DNA, 25 bp, Homo sapien
acgcggggctgtcgcaacgactggc

SEQ ID NO: 4641205 - DNA, 25 bp, Homo sapien
aagagacgaggaggccgggacgcgg

SEQ ID NO: 4641206 - DNA, 25 bp, Homo sapien
ctggggtgaaggtccaagagacgag

SEQ ID NO: 4641207 - DNA, 25 bp, Homo sapien
tggccctctgcgaaccctcaggcca

SEQ ID NO: 4641208 - DNA, 25 bp, Homo sapien
tcacgcctgactagagcactctgct

SEQ ID NO: 4641209 - DNA, 25 bp, Homo sapien
ttgatacagctctccacttcgtcgc

SEQ ID NO: 4641210 - DNA, 25 bp, Homo sapien
gatcctggtagcgtgaaacttgccc

SEQ ID NO: 4641211 - DNA, 25 bp, Homo sapien
tgtgcgttttcttgcaagcctctgc

SEQ ID NO: 4641212 - DNA, 25 bp, Homo sapien
aatattgagggatgccaaggtttgg

SEQ ID NO: 4641213 - DNA, 25 bp, Homo sapien
tcatggatgcggcagcggttgttct

SEQ ID NO: 4641214 - DNA, 25 bp, Homo sapien
gttggggaccagtgatcacgtgctg

SEQ ID NO: 4641215 - DNA, 25 bp, Homo sapien
ctcatggatgcggcagcggttgttc

SEQ ID NO: 4641216 - DNA, 25 bp, Homo sapien
ggaccagtgatcacgtgctggggag

SEQ ID NO: 4641217 - DNA, 25 bp, Homo sapien
agagccactcagacaccacagtgtg

SEQ ID NO: 4641218 - DNA, 25 bp, Homo sapien
cctagaaaacggtccttcacacaga

SEQ ID NO: 4641219 - DNA, 25 bp, Homo sapien
ggtgacacaacccaccacaatggga

SEQ ID NO: 4641220 - DNA, 25 bp, Homo sapien
ggctcagcaacagtgacattgtggg

SEQ ID NO: 4641221 - DNA, 25 bp, Homo sapien
tactgacaagctgctccgagtgagc

SEQ ID NO: 4641222 - DNA, 25 bp, Homo sapien
cacaggccccgggtactgacaagct

SEQ ID NO: 4641223 - DNA, 25 bp, Homo sapien
cccgggtactgacaagctgctccga

SEQ ID NO: 4641224 - DNA, 25 bp, Homo sapien
caagctgctccgagtgagcttgtct

SEQ ID NO: 4641225 - DNA, 25 bp, Homo sapien
caaggccaagttggctcaaagagca

SEQ ID NO: 4641226 - DNA, 25 bp, Homo sapien
ttggctcaaagagcaaccagccacc

SEQ ID NO: 4641227 - DNA, 25 bp, Homo sapien
ctgaggcttgtgcatgccaggcaag

SEQ ID NO: 4641228 - DNA, 25 bp, Homo sapien
tgcatgccaggcaaggccaagttgg

SEQ ID NO: 4641229 - DNA, 25 bp, Homo sapien
gagcccaaaggcagcgcaaaccctg

SEQ ID NO: 4641230 - DNA, 25 bp, Homo sapien
tgcatggattggagcccaaaggcag

SEQ ID NO: 4641231 - DNA, 25 bp, Homo sapien
tgatgcatggattggagcccaaagg

SEQ ID NO: 4641232 - DNA, 25 bp, Homo sapien
tagaatcctcctcaagagggcctgt

SEQ ID NO: 4641233 - DNA, 25 bp, Homo sapien
ccactcctaaagtttgagtgtcacc

SEQ ID NO: 4641234 - DNA, 25 bp, Homo sapien
gaagctgttgatctcgctctcccac

SEQ ID NO: 4641235 - DNA, 25 bp, Homo sapien
gccgagtgccctgttgttcatcttc

SEQ ID NO: 4641236 - DNA, 25 bp, Homo sapien
agttgagccgagtgccctgttgttc

SEQ ID NO: 4641237 - DNA, 25 bp, Homo sapien
ggatgggctggtccagctccaaggc

SEQ ID NO: 4641238 - DNA, 25 bp, Homo sapien
ctgtggtgaagtggatgggctggtc

SEQ ID NO: 4641239 - DNA, 25 bp, Homo sapien
agtggatgggctggtccagctccaa

SEQ ID NO: 4641240 - DNA, 25 bp, Homo sapien
aagtggatgggctggtccagctcca

SEQ ID NO: 4641241 - DNA, 25 bp, Homo sapien
agctcactgacagtgttgaaggcat

SEQ ID NO: 4641242 - DNA, 25 bp, Homo sapien
gggatgattggcaaagagctcactg

SEQ ID NO: 4641243 - DNA, 25 bp, Homo sapien
agagctcactgacagtgttgaaggc

SEQ ID NO: 4641244 - DNA, 25 bp, Homo sapien
ctgggatgattggcaaagagctcac

SEQ ID NO: 4641245 - DNA, 25 bp, Homo sapien
gcttgtgtatgtggatgatgttcag

SEQ ID NO: 4641246 - DNA, 25 bp, Homo sapien
cagcactaataggtccatgactggg

SEQ ID NO: 4641247 - DNA, 25 bp, Homo sapien
tgagacagcactaataggtccatga

SEQ ID NO: 4641248 - DNA, 25 bp, Homo sapien
ttcaggatgttggtctggtgtccct

SEQ ID NO: 4641249 - DNA, 25 bp, Homo sapien
tgccctccgcgactttggtaagaac

SEQ ID NO: 4641250 - DNA, 25 bp, Homo sapien
aagtggtgaatttccactgaagtgg

SEQ ID NO: 4641251 - DNA, 25 bp, Homo sapien
gaagtggtgaaagaattcctgttcc

SEQ ID NO: 4641252 - DNA, 25 bp, Homo sapien
atgttgcctgccctccgcgactttg

SEQ ID NO: 4641253 - DNA, 25 bp, Homo sapien
gtcattcaacattatcaattcctgg

SEQ ID NO: 4641254 - DNA, 25 bp, Homo sapien
tcaacattatcaattcctggatgat

SEQ ID NO: 4641255 - DNA, 25 bp, Homo sapien
ttatcaattcctggatgatttttga

SEQ ID NO: 4641256 - DNA, 25 bp, Homo sapien
cattatcaattcctggatgattttt

SEQ ID NO: 4641257 - DNA, 25 bp, Homo sapien
ttgtccacttttgactgggccactg

SEQ ID NO: 4641258 - DNA, 25 bp, Homo sapien
ggccactggacaccactgggccatc

SEQ ID NO: 4641259 - DNA, 25 bp, Homo sapien
gtccacttttgactgggccactgga

SEQ ID NO: 4641260 - DNA, 25 bp, Homo sapien
ttgttctttcagaatctctgagcaa

SEQ ID NO: 4641261 - DNA, 25 bp, Homo sapien
ctgcaggatctgagaaagtccagtc

SEQ ID NO: 4641262 - DNA, 25 bp, Homo sapien
tgggagtagagggagcgcagggctg

SEQ ID NO: 4641263 - DNA, 25 bp, Homo sapien
cgcagggctggcagggatgctccag

SEQ ID NO: 4641264 - DNA, 25 bp, Homo sapien
catggagagcttgggctgcaccaag

SEQ ID NO: 4641265 - DNA, 25 bp, Homo sapien
tgggcagcaccattccatcccaaga

SEQ ID NO: 4641266 - DNA, 25 bp, Homo sapien
accattccatcccaagaccggattt

SEQ ID NO: 4641267 - DNA, 25 bp, Homo sapien
tccatcccaagaccggattttctga

SEQ ID NO: 4641268 - DNA, 25 bp, Homo sapien
cattccatcccaagaccggattttc

SEQ ID NO: 4641269 - DNA, 25 bp, Homo sapien
cctggttggctgatgtggtcactcc

SEQ ID NO: 4641270 - DNA, 25 bp, Homo sapien
accctggttggctgatgtggtcact

SEQ ID NO: 4641271 - DNA, 25 bp, Homo sapien
ccctggttggctgatgtggtcactc

SEQ ID NO: 4641272 - DNA, 25 bp, Homo sapien
cccagtagtgccctggcactggtgg

SEQ ID NO: 4641273 - DNA, 25 bp, Homo sapien
ccaaaccacaatagcagttctgggt

SEQ ID NO: 4641274 - DNA, 25 bp, Homo sapien
gggctcaggccctatgacccaacgg

SEQ ID NO: 4641275 - DNA, 25 bp, Homo sapien
aaaccacctcagggagaattctggg

SEQ ID NO: 4641276 - DNA, 25 bp, Homo sapien
gctgctcccagatttcttctggtca

SEQ ID NO: 4641277 - DNA, 25 bp, Homo sapien
ctggtcattaagcactttgagccat

SEQ ID NO: 4641278 - DNA, 25 bp, Homo sapien
ctgtgcagccgatctgatatttttg

SEQ ID NO: 4641279 - DNA, 25 bp, Homo sapien
ccatttttctgtgcagccgatctga

SEQ ID NO: 4641280 - DNA, 25 bp, Homo sapien
gactcccttgtagagcacctgagac

SEQ ID NO: 4641281 - DNA, 25 bp, Homo sapien
gggactcccttgtagagcacctgag

SEQ ID NO: 4641282 - DNA, 25 bp, Homo sapien
ctcccttgtagagcacctgagacct

SEQ ID NO: 4641283 - DNA, 25 bp, Homo sapien
aaatgggactcccttgtagagcacc

SEQ ID NO: 4641284 - DNA, 25 bp, Homo sapien
tgcctaggatgcatgatgggctccc

SEQ ID NO: 4641285 - DNA, 25 bp, Homo sapien
tctgtgcctaggatgcatgatgggc

SEQ ID NO: 4641286 - DNA, 25 bp, Homo sapien
taggatgcatgatgggctcccactg

SEQ ID NO: 4641287 - DNA, 25 bp, Homo sapien
tgcggtgcctacgttagcatctgtg

SEQ ID NO: 4641288 - DNA, 25 bp, Homo sapien
cagcagtgcttctggatggaaaaga

SEQ ID NO: 4641289 - DNA, 25 bp, Homo sapien
cagtgcttctggatggaaaagaggt

SEQ ID NO: 4641290 - DNA, 25 bp, Homo sapien
agtgcttctggatggaaaagaggtt

SEQ ID NO: 4641291 - DNA, 25 bp, Homo sapien
tctgaagccaggaaggggtaccaaa

SEQ ID NO: 4641292 - DNA, 25 bp, Homo sapien
ccagaacatgacacgtttctctgaa

SEQ ID NO: 4641293 - DNA, 25 bp, Homo sapien
ttagccctcccagaacatgacacgt

SEQ ID NO: 4641294 - DNA, 25 bp, Homo sapien
acctcttgctgttttcctttatggt

SEQ ID NO: 4641295 - DNA, 25 bp, Homo sapien
ctgaatgtggctgatgtccagggcc

SEQ ID NO: 4641296 - DNA, 25 bp, Homo sapien
tgtgatcctccagccccataggcct

SEQ ID NO: 4641297 - DNA, 25 bp, Homo sapien
ctgccctgtgatcctccagccccat

SEQ ID NO: 4641298 - DNA, 25 bp, Homo sapien
gatcctccagccccataggccttac

SEQ ID NO: 4641299 - DNA, 25 bp, Homo sapien
gccctgtgatcctccagccccatag

SEQ ID NO: 4641300 - DNA, 25 bp, Homo sapien
catggaagcccccacagctctggat

SEQ ID NO: 4641301 - DNA, 25 bp, Homo sapien
gggacctcccaattcccatggaagc

SEQ ID NO: 4641302 - DNA, 25 bp, Homo sapien
tggaagcccccacagctctggattg

SEQ ID NO: 4641303 - DNA, 25 bp, Homo sapien
aattcccatggaagcccccacagct

SEQ ID NO: 4641304 - DNA, 25 bp, Homo sapien
gcacggtgaggttggagagaggaag

SEQ ID NO: 4641305 - DNA, 25 bp, Homo sapien
agagaggaagcatctccataacaca

SEQ ID NO: 4641306 - DNA, 25 bp, Homo sapien
ggagagaggaagcatctccataaca

SEQ ID NO: 4641307 - DNA, 25 bp, Homo sapien
ctgcacggtgaggttggagagagga

SEQ ID NO: 4641308 - DNA, 25 bp, Homo sapien
tctgctggtgctgttacactatgag

SEQ ID NO: 4641309 - DNA, 25 bp, Homo sapien
ctggtgctgttacactatgagggca

SEQ ID NO: 4641310 - DNA, 25 bp, Homo sapien
cagatctgctggtgctgttacacta

SEQ ID NO: 4641311 - DNA, 25 bp, Homo sapien
tgctgttacactatgagggcactga

SEQ ID NO: 4641312 - DNA, 25 bp, Homo sapien
ctcaggagtgaggtagtacaggaag

SEQ ID NO: 4641313 - DNA, 25 bp, Homo sapien
tcaggagtgaggtagtacaggaagt

SEQ ID NO: 4641314 - DNA, 25 bp, Homo sapien
taaagttgtgcaccaggtcgcaggc

SEQ ID NO: 4641315 - DNA, 25 bp, Homo sapien
aaagttgtgcaccaggtcgcaggcc

SEQ ID NO: 4641316 - DNA, 25 bp, Homo sapien
ctaaagttgtgcaccaggtcgcagg

SEQ ID NO: 4641317 - DNA, 25 bp, Homo sapien
cacaaacgcatcactgaagtcgaaa

SEQ ID NO: 4641318 - DNA, 25 bp, Homo sapien
agcacaaacgcatcactgaagtcga

SEQ ID NO: 4641319 - DNA, 25 bp, Homo sapien
gcacaaacgcatcactgaagtcgaa

SEQ ID NO: 4641320 - DNA, 25 bp, Homo sapien
caaacgcatcactgaagtcgaaaat

SEQ ID NO: 4641321 - DNA, 25 bp, Homo sapien
ctgaattaagatcccggagaagccc

SEQ ID NO: 4641322 - DNA, 25 bp, Homo sapien
cctgaattaagatcccggagaagcc

SEQ ID NO: 4641323 - DNA, 25 bp, Homo sapien
gaattaagatcccggagaagcccac

SEQ ID NO: 4641324 - DNA, 25 bp, Homo sapien
ctcctgaattaagatcccggagaag

SEQ ID NO: 4641325 - DNA, 25 bp, Homo sapien
acagtagctctgagggcacctgagt

SEQ ID NO: 4641326 - DNA, 25 bp, Homo sapien
gagacaagaaccctgaacacagtag

SEQ ID NO: 4641327 - DNA, 25 bp, Homo sapien
acaagaaccctgaacacagtagctc

SEQ ID NO: 4641328 - DNA, 25 bp, Homo sapien
tggagacaagaaccctgaacacagt

SEQ ID NO: 4641329 - DNA, 25 bp, Homo sapien
tagtccacaccaggaccacgattgg

SEQ ID NO: 4641330 - DNA, 25 bp, Homo sapien
ccacgattggcactcatgaagatgc

SEQ ID NO: 4641331 - DNA, 25 bp, Homo sapien
tggatggagagacccctgctcccac

SEQ ID NO: 4641332 - DNA, 25 bp, Homo sapien
ccatgtatatgtccttgtctgacaa

SEQ ID NO: 4641333 - DNA, 25 bp, Homo sapien
cattgagtccctcaggagaatggga

SEQ ID NO: 4641334 - DNA, 25 bp, Homo sapien
gcccatgcattgagtccctcaggag

SEQ ID NO: 4641335 - DNA, 25 bp, Homo sapien
tgcattgagtccctcaggagaatgg

SEQ ID NO: 4641336 - DNA, 25 bp, Homo sapien
ccatgcattgagtccctcaggagaa

SEQ ID NO: 4641337 - DNA, 25 bp, Homo sapien
tggcagcaaggcaggcttgggtctc

SEQ ID NO: 4641338 - DNA, 25 bp, Homo sapien
ctaagtggcagcaaggcaggcttgg

SEQ ID NO: 4641339 - DNA, 25 bp, Homo sapien
aagtggcagcaaggcaggcttgggt

SEQ ID NO: 4641340 - DNA, 25 bp, Homo sapien
gtggcagcaaggcaggcttgggtct

SEQ ID NO: 4641341 - DNA, 25 bp, Homo sapien
tgaggggtaccaggatccagtagag

SEQ ID NO: 4641342 - DNA, 25 bp, Homo sapien
gtcttcagaattgccgtccctcaga

SEQ ID NO: 4641343 - DNA, 25 bp, Homo sapien
cagaattgccgtccctcagaactct

SEQ ID NO: 4641344 - DNA, 25 bp, Homo sapien
cagcactcccagtgtctgggtgtct

SEQ ID NO: 4641345 - DNA, 25 bp, Homo sapien
aactcttgcaccacgaggtggcagc

SEQ ID NO: 4641346 - DNA, 25 bp, Homo sapien
taatgtctcagcaagttggtgggtg

SEQ ID NO: 4641347 - DNA, 25 bp, Homo sapien
tccacctggagcagagctaatgaga

SEQ ID NO: 4641348 - DNA, 25 bp, Homo sapien
gcttcttttcctgctaggctaaaac

SEQ ID NO: 4641349 - DNA, 25 bp, Homo sapien
aaacagcagaactgacagagacatc

SEQ ID NO: 4641350 - DNA, 25 bp, Homo sapien
taaggcgagtgaaagtcttaagaac

SEQ ID NO: 4641351 - DNA, 25 bp, Homo sapien
tgactccatgggatagacgataagg

SEQ ID NO: 4641352 - DNA, 25 bp, Homo sapien
ggcgagtgaaagtcttaagaacaaa

SEQ ID NO: 4641353 - DNA, 25 bp, Homo sapien
gatagacgataaggtgggaatcaga

SEQ ID NO: 4641354 - DNA, 25 bp, Homo sapien
gttagactaacagcaacatctccca

SEQ ID NO: 4641355 - DNA, 25 bp, Homo sapien
cctggtgctcatgcctgatgaagga

SEQ ID NO: 4641356 - DNA, 25 bp, Homo sapien
tggtacaggttagactaacagcaac

SEQ ID NO: 4641357 - DNA, 25 bp, Homo sapien
tcccaggtagacagttctataaagt

SEQ ID NO: 4641358 - DNA, 25 bp, Homo sapien
gtttctacagtcaggtgatcaggaa

SEQ ID NO: 4641359 - DNA, 25 bp, Homo sapien
tgcagcacaggtgaacagttcttct

SEQ ID NO: 4641360 - DNA, 25 bp, Homo sapien
tcttttgtgcccaagaggacacaat

SEQ ID NO: 4641361 - DNA, 25 bp, Homo sapien
ctcctaggacaagcctgtgggcacc

SEQ ID NO: 4641362 - DNA, 25 bp, Homo sapien
tctgggtaagtctcttgctctcctt

SEQ ID NO: 4641363 - DNA, 25 bp, Homo sapien
gactgcattatggtcacattatgtg

SEQ ID NO: 4641364 - DNA, 25 bp, Homo sapien
cattttggtctaatgtggccaatgc

SEQ ID NO: 4641365 - DNA, 25 bp, Homo sapien
ttttcgttggtcacaatttgactgc

SEQ ID NO: 4641366 - DNA, 25 bp, Homo sapien
tttggggtacctgttatgactttca

SEQ ID NO: 4641367 - DNA, 25 bp, Homo sapien
catcaaagtggaaaaacctctgtcc

SEQ ID NO: 4641368 - DNA, 25 bp, Homo sapien
ctgcatgaaattggaaaagtcccgt

SEQ ID NO: 4641369 - DNA, 25 bp, Homo sapien
tgcatgaaattggaaaagtcccgtt

SEQ ID NO: 4641370 - DNA, 25 bp, Homo sapien
tcaggcagcagggttttttccccac

SEQ ID NO: 4641371 - DNA, 25 bp, Homo sapien
cttggcaggactgagacaccgggct

SEQ ID NO: 4641372 - DNA, 25 bp, Homo sapien
cctgggcatggagggaaccagtccc

SEQ ID NO: 4641373 - DNA, 25 bp, Homo sapien
tccccttgctttggttccttggcag

SEQ ID NO: 4641374 - DNA, 25 bp, Homo sapien
ttctctccaaggattcagcagcagt

SEQ ID NO: 4641375 - DNA, 25 bp, Homo sapien
tcctttttctctccaaggattcagc

SEQ ID NO: 4641376 - DNA, 25 bp, Homo sapien
tctggaaatttatcctttttctctc

SEQ ID NO: 4641377 - DNA, 25 bp, Homo sapien
tttttctctccaaggattcagcagc

SEQ ID NO: 4641378 - DNA, 25 bp, Homo sapien
ggcgttcctcggtctccgtctccgc

SEQ ID NO: 4641379 - DNA, 25 bp, Homo sapien
gcccgcctggcgaactggagcacag

SEQ ID NO: 4641380 - DNA, 25 bp, Homo sapien
ggccccagcggcgttcctcggtctc

SEQ ID NO: 4641381 - DNA, 25 bp, Homo sapien
cgcccgcctggcgaactggagcaca

SEQ ID NO: 4641382 - DNA, 25 bp, Homo sapien
agccactgcggcctgcggcttccag

SEQ ID NO: 4641383 - DNA, 25 bp, Homo sapien
gacacagagccaccacgcacggtag

SEQ ID NO: 4641384 - DNA, 25 bp, Homo sapien
gtaaaggagcgagcagaagcctcag

SEQ ID NO: 4641385 - DNA, 25 bp, Homo sapien
tcccgccagccacgaagccactgcg

SEQ ID NO: 4641386 - DNA, 25 bp, Homo sapien
ttagatacattttctcaacgggctg

SEQ ID NO: 4641387 - DNA, 25 bp, Homo sapien
ctcaacgggctgtattttcagacta

SEQ ID NO: 4641388 - DNA, 25 bp, Homo sapien
gctatgatgtagttgatcttcagca

SEQ ID NO: 4641389 - DNA, 25 bp, Homo sapien
ttccagtctttcacttagatacatt

SEQ ID NO: 4641390 - DNA, 25 bp, Homo sapien
gacacttccattgacacagaaagac

SEQ ID NO: 4641391 - DNA, 25 bp, Homo sapien
aatgaatgaatattgtcatcttaaa

SEQ ID NO: 4641392 - DNA, 25 bp, Homo sapien
agacaatgatctggacgacacttcc

SEQ ID NO: 4641393 - DNA, 25 bp, Homo sapien
aatttctgagtgcttcaaaaacagc

SEQ ID NO: 4641394 - DNA, 25 bp, Homo sapien
cactcttgagagtatgagtcaacag

SEQ ID NO: 4641395 - DNA, 25 bp, Homo sapien
ctcttgagagtatgagtcaacagaa

SEQ ID NO: 4641396 - DNA, 25 bp, Homo sapien
accactcttgagagtatgagtcaac

SEQ ID NO: 4641397 - DNA, 25 bp, Homo sapien
cttgagagtatgagtcaacagaagt

SEQ ID NO: 4641398 - DNA, 25 bp, Homo sapien
tgcttccagaatgcccagtaaagct

SEQ ID NO: 4641399 - DNA, 25 bp, Homo sapien
ttttgcttccagaatgcccagtaaa

SEQ ID NO: 4641400 - DNA, 25 bp, Homo sapien
ttatcatcagcataacatattttgc

SEQ ID NO: 4641401 - DNA, 25 bp, Homo sapien
ttccagaatgcccagtaaagctgaa

SEQ ID NO: 4641402 - DNA, 25 bp, Homo sapien
aattggccattgtgagacactctga

SEQ ID NO: 4641403 - DNA, 25 bp, Homo sapien
aaattggccattgtgagacactctg

SEQ ID NO: 4641404 - DNA, 25 bp, Homo sapien
attggccattgtgagacactctgag

SEQ ID NO: 4641405 - DNA, 25 bp, Homo sapien
tataccctcacttgtcaaccattct

SEQ ID NO: 4641406 - DNA, 25 bp, Homo sapien
aatgtttaatataccctcacttgtc

SEQ ID NO: 4641407 - DNA, 25 bp, Homo sapien
agtaaatgtttaatataccctcact

SEQ ID NO: 4641408 - DNA, 25 bp, Homo sapien
tttaatataccctcacttgtcaacc

SEQ ID NO: 4641409 - DNA, 25 bp, Homo sapien
ggttagagtgatgcaatccaaatag

SEQ ID NO: 4641410 - DNA, 25 bp, Homo sapien
gagtgatgcaatccaaatagatggc

SEQ ID NO: 4641411 - DNA, 25 bp, Homo sapien
aatccaaatagatggctttcttctg

SEQ ID NO: 4641412 - DNA, 25 bp, Homo sapien
gatgcaatccaaatagatggctttc

SEQ ID NO: 4641413 - DNA, 25 bp, Homo sapien
tgatgagcgccctgtgtgtatccca

SEQ ID NO: 4641414 - DNA, 25 bp, Homo sapien
ggtcgtatatctgtgggcccatgcc

SEQ ID NO: 4641415 - DNA, 25 bp, Homo sapien
tggccgctctgatgagcgccctgtg

SEQ ID NO: 4641416 - DNA, 25 bp, Homo sapien
tatctgtgggcccatgccgaaggcc

SEQ ID NO: 4641417 - DNA, 25 bp, Homo sapien
agggagcgccgtgggccactgggct

SEQ ID NO: 4641418 - DNA, 25 bp, Homo sapien
cgccgtgggccactgggcttcccca

SEQ ID NO: 4641419 - DNA, 25 bp, Homo sapien
agcgccgtgggccactgggcttccc

SEQ ID NO: 4641420 - DNA, 25 bp, Homo sapien
cggagcccgagggagcgccgtgggc

SEQ ID NO: 4641421 - DNA, 25 bp, Homo sapien
ggaaacacttgccatgcttagaaaa

SEQ ID NO: 4641422 - DNA, 25 bp, Homo sapien
gagcagttgagactgagaggatgac

SEQ ID NO: 4641423 - DNA, 25 bp, Homo sapien
agagcagttgagactgagaggatga

SEQ ID NO: 4641424 - DNA, 25 bp, Homo sapien
aaacacttgccatgcttagaaaata

SEQ ID NO: 4641425 - DNA, 25 bp, Homo sapien
catcaatgtcaagcattcgtttcct

SEQ ID NO: 4641426 - DNA, 25 bp, Homo sapien
ctggatgctcataagaggtctgatt

SEQ ID NO: 4641427 - DNA, 25 bp, Homo sapien
gctcataagaggtctgattttttaa

SEQ ID NO: 4641428 - DNA, 25 bp, Homo sapien
aatgtcaagcattcgtttcctgagc

SEQ ID NO: 4641429 - DNA, 25 bp, Homo sapien
tgtaactcctggtgaattggaaagc

SEQ ID NO: 4641430 - DNA, 25 bp, Homo sapien
cataaaaatgtgtattacaagcaaa

SEQ ID NO: 4641431 - DNA, 25 bp, Homo sapien
cagttgtggttttcaggaccttgta

SEQ ID NO: 4641432 - DNA, 25 bp, Homo sapien
ttatctattaaaggatgtaacacag

SEQ ID NO: 4641433 - DNA, 25 bp, Homo sapien
tgctgatcggtgaaatagccagtat

SEQ ID NO: 4641434 - DNA, 25 bp, Homo sapien
ccagataagatttgaatgggaacac

SEQ ID NO: 4641435 - DNA, 25 bp, Homo sapien
cagaaccaaattgactggctagagt

SEQ ID NO: 4641436 - DNA, 25 bp, Homo sapien
ggaacatcgaaacctaattcaagga

SEQ ID NO: 4641437 - DNA, 25 bp, Homo sapien
tcttctcttacaataagaagaccag

SEQ ID NO: 4641438 - DNA, 25 bp, Homo sapien
ctgataacggattctttcactgtta

SEQ ID NO: 4641439 - DNA, 25 bp, Homo sapien
cctatgttctgataacggattcttt

SEQ ID NO: 4641440 - DNA, 25 bp, Homo sapien
ggatattctgcctcactatcagttt

SEQ ID NO: 4641441 - DNA, 25 bp, Homo sapien
cagccatcttggaactgacccagag

SEQ ID NO: 4641442 - DNA, 25 bp, Homo sapien
tgacccagagtgtaaaggtcttgag

SEQ ID NO: 4641443 - DNA, 25 bp, Homo sapien
aaggtcttgaggattctcttcatca

SEQ ID NO: 4641444 - DNA, 25 bp, Homo sapien
tcagtattacctgaatacaagcctt

SEQ ID NO: 4641445 - DNA, 25 bp, Homo sapien
aaggtaatgagcagtcaagtttaaa

SEQ ID NO: 4641446 - DNA, 25 bp, Homo sapien
aggtaatgagcagtcaagtttaaaa

SEQ ID NO: 4641447 - DNA, 25 bp, Homo sapien
taaggtaatgagcagtcaagtttaa

SEQ ID NO: 4641448 - DNA, 25 bp, Homo sapien
ttaaggtaatgagcagtcaagttta

SEQ ID NO: 4641449 - DNA, 25 bp, Homo sapien
attccattaaaggtcgtcttcttgg

SEQ ID NO: 4641450 - DNA, 25 bp, Homo sapien
cagcgtccatcaaatattccattaa

SEQ ID NO: 4641451 - DNA, 25 bp, Homo sapien
ttcagcgtccatcaaatattccatt

SEQ ID NO: 4641452 - DNA, 25 bp, Homo sapien
aatattccattaaaggtcgtcttct

SEQ ID NO: 4641453 - DNA, 25 bp, Homo sapien
acagaaagattgtaagaggtcagca

SEQ ID NO: 4641454 - DNA, 25 bp, Homo sapien
cagaaagattgtaagaggtcagcaa

SEQ ID NO: 4641455 - DNA, 25 bp, Homo sapien
ttactcacagaatcagtagcattca

SEQ ID NO: 4641456 - DNA, 25 bp, Homo sapien
aaatattactcacagaatcagtagc

SEQ ID NO: 4641457 - DNA, 25 bp, Homo sapien
aatattactcacagaatcagtagca

SEQ ID NO: 4641458 - DNA, 25 bp, Homo sapien
tattactcacagaatcagtagcatt

SEQ ID NO: 4641459 - DNA, 25 bp, Homo sapien
ggtgacacttctggcagctctaggc

SEQ ID NO: 4641460 - DNA, 25 bp, Homo sapien
taagccatcggaaaaagctccaaaa

SEQ ID NO: 4641461 - DNA, 25 bp, Homo sapien
taaaataagccatcggaaaaagctc

SEQ ID NO: 4641462 - DNA, 25 bp, Homo sapien
atcggaaaaagctccaaaatgggca

SEQ ID NO: 4641463 - DNA, 25 bp, Homo sapien
gccatcggaaaaagctccaaaatgg

SEQ ID NO: 4641464 - DNA, 25 bp, Homo sapien
cagcacaatatttacacagatcatt

SEQ ID NO: 4641465 - DNA, 25 bp, Homo sapien
ttgccagatcgctaatcagttttgt

SEQ ID NO: 4641466 - DNA, 25 bp, Homo sapien
gtttgccagatcgctaatcagtttt

SEQ ID NO: 4641467 - DNA, 25 bp, Homo sapien
agcacaatatttacacagatcatta

SEQ ID NO: 4641468 - DNA, 25 bp, Homo sapien
taggccattttgcttgagatgatcg

SEQ ID NO: 4641469 - DNA, 25 bp, Homo sapien
ggccattttgcttgagatgatcgac

SEQ ID NO: 4641470 - DNA, 25 bp, Homo sapien
aggccattttgcttgagatgatcga

SEQ ID NO: 4641471 - DNA, 25 bp, Homo sapien
tgtttccaagttcaacgtcctgcag

SEQ ID NO: 4641472 - DNA, 25 bp, Homo sapien
ctctacttctctggtcgctaagcaa

SEQ ID NO: 4641473 - DNA, 25 bp, Homo sapien
cttctctggtcgctaagcaactgac

SEQ ID NO: 4641474 - DNA, 25 bp, Homo sapien
ttccaagttcaacgtcctgcagcaa

SEQ ID NO: 4641475 - DNA, 25 bp, Homo sapien
acaagacattccagccccatgaggg

SEQ ID NO: 4641476 - DNA, 25 bp, Homo sapien
gctgttaacccttggagcctcggag

SEQ ID NO: 4641477 - DNA, 25 bp, Homo sapien
caggagggtgcatcctctgagagct

SEQ ID NO: 4641478 - DNA, 25 bp, Homo sapien
tgttagggaaataggcaccgcccac

SEQ ID NO: 4641479 - DNA, 25 bp, Homo sapien
gagctcgggccactgtatcaggtcc

SEQ ID NO: 4641480 - DNA, 25 bp, Homo sapien
agctcgggccactgtatcaggtcca

SEQ ID NO: 4641481 - DNA, 25 bp, Homo sapien
aaatatgatgcgaggaagatgagag

SEQ ID NO: 4641482 - DNA, 25 bp, Homo sapien
aagatccaggaaatatgatgcgagg

SEQ ID NO: 4641483 - DNA, 25 bp, Homo sapien
aagagccgatgggcagcaggcagac

SEQ ID NO: 4641484 - DNA, 25 bp, Homo sapien
tcagctgtgagttgaagagccgatg

SEQ ID NO: 4641485 - DNA, 25 bp, Homo sapien
ctgtgagttgaagagccgatgggca

SEQ ID NO: 4641486 - DNA, 25 bp, Homo sapien
cagctgtgagttgaagagccgatgg

SEQ ID NO: 4641487 - DNA, 25 bp, Homo sapien
gggagccagtggagggtcacctcgc

SEQ ID NO: 4641488 - DNA, 25 bp, Homo sapien
ggtgttcttgtctttccgctctgtc

SEQ ID NO: 4641489 - DNA, 25 bp, Homo sapien
gccagtggagggtcacctcgccctg

SEQ ID NO: 4641490 - DNA, 25 bp, Homo sapien
ggttggatgggagccagtggagggt

SEQ ID NO: 4641491 - DNA, 25 bp, Homo sapien
acatgccccacagtgcccactcttt

SEQ ID NO: 4641492 - DNA, 25 bp, Homo sapien
cactctttcagctggggcaatgctc

SEQ ID NO: 4641493 - DNA, 25 bp, Homo sapien
tccagccttcttttcttgacctgaa

SEQ ID NO: 4641494 - DNA, 25 bp, Homo sapien
tcctctaggccattcacttcctcca

SEQ ID NO: 4641495 - DNA, 25 bp, Homo sapien
gaaatgagttttcagggcctcatcc

SEQ ID NO: 4641496 - DNA, 25 bp, Homo sapien
ggttaaaggtatagcacgcaaatat

SEQ ID NO: 4641497 - DNA, 25 bp, Homo sapien
cagcttaagttagcagcaagagaac

SEQ ID NO: 4641498 - DNA, 25 bp, Homo sapien
cacgcaaatatgaggctggagccac

SEQ ID NO: 4641499 - DNA, 25 bp, Homo sapien
tgttgggaggaccagcggtagagca

SEQ ID NO: 4641500 - DNA, 25 bp, Homo sapien
gctggagtcattcctcccacgcagt

SEQ ID NO: 4641501 - DNA, 25 bp, Homo sapien
aggagagagctgaagaccaccggca

SEQ ID NO: 4641502 - DNA, 25 bp, Homo sapien
gctgccggcttgctggagtcattcc

SEQ ID NO: 4641503 - DNA, 25 bp, Homo sapien
tctggacttggttcaagtggcacca

SEQ ID NO: 4641504 - DNA, 25 bp, Homo sapien
cttggttcaagtggcaccagccaaa

SEQ ID NO: 4641505 - DNA, 25 bp, Homo sapien
gggatgttattttgggcagtgcatc

SEQ ID NO: 4641506 - DNA, 25 bp, Homo sapien
tgcatctggacttggttcaagtggc

SEQ ID NO: 4641507 - DNA, 25 bp, Homo sapien
gagccccatgccccgatccagctgt

SEQ ID NO: 4641508 - DNA, 25 bp, Homo sapien
cgagccccatgccccgatccagctg

SEQ ID NO: 4641509 - DNA, 25 bp, Homo sapien
tgcctgccccattgtttgagaccca

SEQ ID NO: 4641510 - DNA, 25 bp, Homo sapien
gccccattgtttgagacccagtcag

SEQ ID NO: 4641511 - DNA, 25 bp, Homo sapien
cccattgtttgagacccagtcaggc

SEQ ID NO: 4641512 - DNA, 25 bp, Homo sapien
aactgcctgccccattgtttgagac

SEQ ID NO: 4641513 - DNA, 25 bp, Homo sapien
aatggtccttatcttgtccacaatt

SEQ ID NO: 4641514 - DNA, 25 bp, Homo sapien
gcaatggtccttatcttgtccacaa

SEQ ID NO: 4641515 - DNA, 25 bp, Homo sapien
caatggtccttatcttgtccacaat

SEQ ID NO: 4641516 - DNA, 25 bp, Homo sapien
cagtatgctatatactgtcaccaga

SEQ ID NO: 4641517 - DNA, 25 bp, Homo sapien
tgagtgagaatcacaactgcctttc

SEQ ID NO: 4641518 - DNA, 25 bp, Homo sapien
gcctggttgacacgacttttaagga

SEQ ID NO: 4641519 - DNA, 25 bp, Homo sapien
tagagtcttatcaacttagggagga

SEQ ID NO: 4641520 - DNA, 25 bp, Homo sapien
tcactgataggtaagatgaagtccc

SEQ ID NO: 4641521 - DNA, 25 bp, Homo sapien
ggtctttgccatgcagatgggcaaa

SEQ ID NO: 4641522 - DNA, 25 bp, Homo sapien
ccttggcacaccttttttgtcaggt

SEQ ID NO: 4641523 - DNA, 25 bp, Homo sapien
gcacaccttttttgtcaggttggtg

SEQ ID NO: 4641524 - DNA, 25 bp, Homo sapien
gaggcactgcgacaatgcagaatgg

SEQ ID NO: 4641525 - DNA, 25 bp, Homo sapien
cataacgatttgaggcactgcgaca

SEQ ID NO: 4641526 - DNA, 25 bp, Homo sapien
ggtggagcataacgatttgaggcac

SEQ ID NO: 4641527 - DNA, 25 bp, Homo sapien
ttaaagagcgggtggagcataacga

SEQ ID NO: 4641528 - DNA, 25 bp, Homo sapien
actctaaggatcctgaacacatgat

SEQ ID NO: 4641529 - DNA, 25 bp, Homo sapien
tatgactctaaggatcctgaacaca

SEQ ID NO: 4641530 - DNA, 25 bp, Homo sapien
ttatgactctaaggatcctgaacac

SEQ ID NO: 4641531 - DNA, 25 bp, Homo sapien
tgactctaaggatcctgaacacatg

SEQ ID NO: 4641532 - DNA, 25 bp, Homo sapien
tctttaggttggggcttcctgtagc

SEQ ID NO: 4641533 - DNA, 25 bp, Homo sapien
agcagagaaagtttctttaggttgg

SEQ ID NO: 4641534 - DNA, 25 bp, Homo sapien
ctgaagcagagaaagtttctttagg

SEQ ID NO: 4641535 - DNA, 25 bp, Homo sapien
gggcttcctgtagccccgagctgag

SEQ ID NO: 4641536 - DNA, 25 bp, Homo sapien
tctgcttctaccagctgtaaactac

SEQ ID NO: 4641537 - DNA, 25 bp, Homo sapien
taattcacttctatctgcttctacc

SEQ ID NO: 4641538 - DNA, 25 bp, Homo sapien
tattttctttgctaattcacttcta

SEQ ID NO: 4641539 - DNA, 25 bp, Homo sapien
tatctgcttctaccagctgtaaact

SEQ ID NO: 4641540 - DNA, 25 bp, Homo sapien
ctggtgttggatatggtagtgttag

SEQ ID NO: 4641541 - DNA, 25 bp, Homo sapien
tgatttcccagaacggctttggtct

SEQ ID NO: 4641542 - DNA, 25 bp, Homo sapien
ccatggcaacagattctgatttccc

SEQ ID NO: 4641543 - DNA, 25 bp, Homo sapien
cagattctgatttcccagaacggct

SEQ ID NO: 4641544 - DNA, 25 bp, Homo sapien
caggagcggacagcctggtgtccag

SEQ ID NO: 4641545 - DNA, 25 bp, Homo sapien
ggccctgcgtgctgtaggcatttaa

SEQ ID NO: 4641546 - DNA, 25 bp, Homo sapien
tggagtctatcataaggcctgtgag

SEQ ID NO: 4641547 - DNA, 25 bp, Homo sapien
gggctgatggccctgcgtgctgtag

SEQ ID NO: 4641548 - DNA, 25 bp, Homo sapien
tttctcatagccgttgggctgatgg

SEQ ID NO: 4641549 - DNA, 25 bp, Homo sapien
tgatgcccaaacatgctccagcaat

SEQ ID NO: 4641550 - DNA, 25 bp, Homo sapien
aggaggaaaccaccaggatcccagg

SEQ ID NO: 4641551 - DNA, 25 bp, Homo sapien
agctttcttttttcatggccctcag

SEQ ID NO: 4641552 - DNA, 25 bp, Homo sapien
gtgagctgaactgaaacgtgagaaa

SEQ ID NO: 4641553 - DNA, 25 bp, Homo sapien
gacacaaacaaagtgaggccagatg

SEQ ID NO: 4641554 - DNA, 25 bp, Homo sapien
ctgggccagggaaatgcatatttgg

SEQ ID NO: 4641555 - DNA, 25 bp, Homo sapien
attctgatgtagagatagggaagaa

SEQ ID NO: 4641556 - DNA, 25 bp, Homo sapien
ccagggaaatgcatatttgggagaa

SEQ ID NO: 4641557 - DNA, 25 bp, Homo sapien
tctgatgtagagatagggaagaacc

SEQ ID NO: 4641558 - DNA, 25 bp, Homo sapien
ctgggttgtggaggaaggcatggcc

SEQ ID NO: 4641559 - DNA, 25 bp, Homo sapien
acctcacgatgagaggaagcaatgg

SEQ ID NO: 4641560 - DNA, 25 bp, Homo sapien
caccattggcagtctgctgcaggga

SEQ ID NO: 4641561 - DNA, 25 bp, Homo sapien
cagggacctcacgatgagaggaagc

SEQ ID NO: 4641562 - DNA, 25 bp, Homo sapien
ctgaagagacagggatgactccttc

SEQ ID NO: 4641563 - DNA, 25 bp, Homo sapien
tgaagagacagggatgactccttcc

SEQ ID NO: 4641564 - DNA, 25 bp, Homo sapien
tctcatgagtcgcaaagctttcttc

SEQ ID NO: 4641565 - DNA, 25 bp, Homo sapien
aaacatcattctcatgagtcgcaaa

SEQ ID NO: 4641566 - DNA, 25 bp, Homo sapien
aaattgagaatgacgctggttactt

SEQ ID NO: 4641567 - DNA, 25 bp, Homo sapien
gaatgacgctggttactttccttcc

SEQ ID NO: 4641568 - DNA, 25 bp, Homo sapien
taacatgcagggattaatagcagtg

SEQ ID NO: 4641569 - DNA, 25 bp, Homo sapien
aaagatcttctacacaatggattgg

SEQ ID NO: 4641570 - DNA, 25 bp, Homo sapien
tagcagtgaattgcaaactcaactc

SEQ ID NO: 4641571 - DNA, 25 bp, Homo sapien
aataagtgtacatcccattaaggga

SEQ ID NO: 4641572 - DNA, 25 bp, Homo sapien
gaagatttgctagccctctgcaggg

SEQ ID NO: 4641573 - DNA, 25 bp, Homo sapien
cccattgtgggaaggccaagagaac

SEQ ID NO: 4641574 - DNA, 25 bp, Homo sapien
tactggtgagtttccaccggcagca

SEQ ID NO: 4641575 - DNA, 25 bp, Homo sapien
gagcctgggattctagtactggtga

SEQ ID NO: 4641576 - DNA, 25 bp, Homo sapien
cagtaactagtttgacaagagagac

SEQ ID NO: 4641577 - DNA, 25 bp, Homo sapien
caagagagactagcacactgatccc

SEQ ID NO: 4641578 - DNA, 25 bp, Homo sapien
agaactaggccaagagcagatagga

SEQ ID NO: 4641579 - DNA, 25 bp, Homo sapien
gatttgtggaaacttgaacctctta

SEQ ID NO: 4641580 - DNA, 25 bp, Homo sapien
ctccaatattttcctgtaggtttca

SEQ ID NO: 4641581 - DNA, 25 bp, Homo sapien
tccaatattttcctgtaggtttcaa

SEQ ID NO: 4641582 - DNA, 25 bp, Homo sapien
gcaccaatgtttccctgattgacaa

SEQ ID NO: 4641583 - DNA, 25 bp, Homo sapien
actttgggtaacaatgctctgcaca

SEQ ID NO: 4641584 - DNA, 25 bp, Homo sapien
gtatgatacgcttagaaaattctgc

SEQ ID NO: 4641585 - DNA, 25 bp, Homo sapien
ccagtaaatgatccagggaagcaaa

SEQ ID NO: 4641586 - DNA, 25 bp, Homo sapien
aaatgttcagctctgtgagatgaat

SEQ ID NO: 4641587 - DNA, 25 bp, Homo sapien
gctgctcaatcaaaagaaatgttca

SEQ ID NO: 4641588 - DNA, 25 bp, Homo sapien
gctcaatcaaaagaaatgttcagct

SEQ ID NO: 4641589 - DNA, 25 bp, Homo sapien
tcaaagctgctcaatcaaaagaaat

SEQ ID NO: 4641590 - DNA, 25 bp, Homo sapien
taacagtatttatgaggcagttaag

SEQ ID NO: 4641591 - DNA, 25 bp, Homo sapien
cagttaagaatttgggtcatctctg

SEQ ID NO: 4641592 - DNA, 25 bp, Homo sapien
tgactttaataaaagcctagggcaa

SEQ ID NO: 4641593 - DNA, 25 bp, Homo sapien
agcctagggcaaaactttcaatata

SEQ ID NO: 4641594 - DNA, 25 bp, Homo sapien
gtcaggaatgtggaccacgggccaa

SEQ ID NO: 4641595 - DNA, 25 bp, Homo sapien
tgggatattttggaatggaacacca

SEQ ID NO: 4641596 - DNA, 25 bp, Homo sapien
caaggactctctgtataaggtactg

SEQ ID NO: 4641597 - DNA, 25 bp, Homo sapien
ggctcgcccatggtgtcagactaaa

SEQ ID NO: 4641598 - DNA, 25 bp, Homo sapien
tgggtatcatgcagacaagcggagt

SEQ ID NO: 4641599 - DNA, 25 bp, Homo sapien
tggaagctgggtcagtaggatctcc

SEQ ID NO: 4641600 - DNA, 25 bp, Homo sapien
caggcacgcaggagtccagttgtac

SEQ ID NO: 4641601 - DNA, 25 bp, Homo sapien
cagttgtacacggaggcgaaacact

SEQ ID NO: 4641602 - DNA, 25 bp, Homo sapien
tggagcccttactaagcataaagta

SEQ ID NO: 4641603 - DNA, 25 bp, Homo sapien
atggagcccttactaagcataaagt

SEQ ID NO: 4641604 - DNA, 25 bp, Homo sapien
tcttttcaattttgtcatttcgtct

SEQ ID NO: 4641605 - DNA, 25 bp, Homo sapien
atctttcatctcataatttcatcca

SEQ ID NO: 4641606 - DNA, 25 bp, Homo sapien
ttcaattttgtcatttcgtctcatc

SEQ ID NO: 4641607 - DNA, 25 bp, Homo sapien
ttcatctcatatcatctcattacaa

SEQ ID NO: 4641608 - DNA, 25 bp, Homo sapien
catttcactatttcatttcatctca

SEQ ID NO: 4641609 - DNA, 25 bp, Homo sapien
atttcaatttcatttcactatttca

SEQ ID NO: 4641610 - DNA, 25 bp, Homo sapien
tcaatttcatttcactatttcattt

SEQ ID NO: 4641611 - DNA, 25 bp, Homo sapien
caatttcatttcactatttcatttc

SEQ ID NO: 4641612 - DNA, 25 bp, Homo sapien
ctcatctcattccatcattacatct

SEQ ID NO: 4641613 - DNA, 25 bp, Homo sapien
actcattgcatctcagctcatcatt

SEQ ID NO: 4641614 - DNA, 25 bp, Homo sapien
atatcatcattttatctcatctatc

SEQ ID NO: 4641615 - DNA, 25 bp, Homo sapien
tcatctcatctcattccatcattac

SEQ ID NO: 4641616 - DNA, 25 bp, Homo sapien
ctcatcattgcatctcatcatttca

SEQ ID NO: 4641617 - DNA, 25 bp, Homo sapien
ttcatctcatcattgcatctcatca

SEQ ID NO: 4641618 - DNA, 25 bp, Homo sapien
atctcatcattgcatctcatcattt

SEQ ID NO: 4641619 - DNA, 25 bp, Homo sapien
catcattgcatctcatcatttcatc

SEQ ID NO: 4641620 - DNA, 25 bp, Homo sapien
catttcagctcatttcatgtcacat

SEQ ID NO: 4641621 - DNA, 25 bp, Homo sapien
caattttatttcgttatttcatctc

SEQ ID NO: 4641622 - DNA, 25 bp, Homo sapien
catttcaatatcatcaattcatcat

SEQ ID NO: 4641623 - DNA, 25 bp, Homo sapien
tttcagctcatttcatgtcacatct

SEQ ID NO: 4641624 - DNA, 25 bp, Homo sapien
gaaaatctcatcagattaaggaaca

SEQ ID NO: 4641625 - DNA, 25 bp, Homo sapien
acagaagcatggtatattcgattcc

SEQ ID NO: 4641626 - DNA, 25 bp, Homo sapien
aatctcatcagattaaggaacacaa

SEQ ID NO: 4641627 - DNA, 25 bp, Homo sapien
atcacagaagcatggtatattcgat

SEQ ID NO: 4641628 - DNA, 25 bp, Homo sapien
ccaggacaattaggtgagagaaaga

SEQ ID NO: 4641629 - DNA, 25 bp, Homo sapien
gccaggacaattaggtgagagaaag

SEQ ID NO: 4641630 - DNA, 25 bp, Homo sapien
ggaaaaagcatgttgtattagagca

SEQ ID NO: 4641631 - DNA, 25 bp, Homo sapien
ctaagagtgtttaaagtgcatattc

SEQ ID NO: 4641632 - DNA, 25 bp, Homo sapien
taatgtctaccataaacaatgactc

SEQ ID NO: 4641633 - DNA, 25 bp, Homo sapien
catgttgtattagagcatattcaac

SEQ ID NO: 4641634 - DNA, 25 bp, Homo sapien
aagccaaagtagaatagacataaaa

SEQ ID NO: 4641635 - DNA, 25 bp, Homo sapien
taagccaaagtagaatagacataaa

SEQ ID NO: 4641636 - DNA, 25 bp, Homo sapien
aaactaagccaaagtagaatagaca

SEQ ID NO: 4641637 - DNA, 25 bp, Homo sapien
actaagccaaagtagaatagacata

SEQ ID NO: 4641638 - DNA, 25 bp, Homo sapien
tgttagaagctgtgcatgaatgcca

SEQ ID NO: 4641639 - DNA, 25 bp, Homo sapien
aacaagcgggaggaaagtcgtatct

SEQ ID NO: 4641640 - DNA, 25 bp, Homo sapien
tactcaaaaagactagcatacctga

SEQ ID NO: 4641641 - DNA, 25 bp, Homo sapien
ccttgcatctgtcttggaactcaca

SEQ ID NO: 4641642 - DNA, 25 bp, Homo sapien
tttttatcagcatcaacagggtagc

SEQ ID NO: 4641643 - DNA, 25 bp, Homo sapien
tcagaggactcttgacagggtagca

SEQ ID NO: 4641644 - DNA, 25 bp, Homo sapien
tcttttcagggtatcacagggcgtc

SEQ ID NO: 4641645 - DNA, 25 bp, Homo sapien
taattaagcaactactatgtctggg

SEQ ID NO: 4641646 - DNA, 25 bp, Homo sapien
ttacatggcaattaacaccatgctt

SEQ ID NO: 4641647 - DNA, 25 bp, Homo sapien
tacatggcaattaacaccatgcttc

SEQ ID NO: 4641648 - DNA, 25 bp, Homo sapien
tttacatggcaattaacaccatgct

SEQ ID NO: 4641649 - DNA, 25 bp, Homo sapien
gcagaaactaatcgagtccctatat

SEQ ID NO: 4641650 - DNA, 25 bp, Homo sapien
taatcgagtccctatattagggata

SEQ ID NO: 4641651 - DNA, 25 bp, Homo sapien
aactaatcgagtccctatattaggg

SEQ ID NO: 4641652 - DNA, 25 bp, Homo sapien
tagcagaaactaatcgagtccctat

SEQ ID NO: 4641653 - DNA, 25 bp, Homo sapien
gggcagctaaggaacactgtgtaag

SEQ ID NO: 4641654 - DNA, 25 bp, Homo sapien
tgaagaatctagtgtccattgccac

SEQ ID NO: 4641655 - DNA, 25 bp, Homo sapien
gagacaaagatgttctgtgatgtgg

SEQ ID NO: 4641656 - DNA, 25 bp, Homo sapien
tcacagcaggaagatttcaaccaat

SEQ ID NO: 4641657 - DNA, 25 bp, Homo sapien
tcatagaccccatcactataggctg

SEQ ID NO: 4641658 - DNA, 25 bp, Homo sapien
ctcatagaccccatcactataggct

SEQ ID NO: 4641659 - DNA, 25 bp, Homo sapien
ctcatctgcctgaattacctcatag

SEQ ID NO: 4641660 - DNA, 25 bp, Homo sapien
gcctgaattacctcatagaccccat

SEQ ID NO: 4641661 - DNA, 25 bp, Homo sapien
tagatttaaacctgtgagcgaatcc

SEQ ID NO: 4641662 - DNA, 25 bp, Homo sapien
gagcgaatcctactcaaaacctgat

SEQ ID NO: 4641663 - DNA, 25 bp, Homo sapien
tgtgtagatctttgcctctctgtgg

SEQ ID NO: 4641664 - DNA, 25 bp, Homo sapien
tggacttagacttcccacaagcctt

SEQ ID NO: 4641665 - DNA, 25 bp, Homo sapien
tacccagctccattagtagcgtttt

SEQ ID NO: 4641666 - DNA, 25 bp, Homo sapien
tggctcagatcttaaacgctctcct

SEQ ID NO: 4641667 - DNA, 25 bp, Homo sapien
gattaccggaaatgaactgaccata

SEQ ID NO: 4641668 - DNA, 25 bp, Homo sapien
caccctcatgccctggtaattaaag

SEQ ID NO: 4641669 - DNA, 25 bp, Homo sapien
gagaacctgagtccgtcactgtcca

SEQ ID NO: 4641670 - DNA, 25 bp, Homo sapien
aacctgagtccgtcactgtccacgg

SEQ ID NO: 4641671 - DNA, 25 bp, Homo sapien
gaacctgagtccgtcactgtccacg

SEQ ID NO: 4641672 - DNA, 25 bp, Homo sapien
gtgagaacctgagtccgtcactgtc

SEQ ID NO: 4641673 - DNA, 25 bp, Homo sapien
agagtcgtatttggccctttccaga

SEQ ID NO: 4641674 - DNA, 25 bp, Homo sapien
ggctgctattgttgtccacacggaa

SEQ ID NO: 4641675 - DNA, 25 bp, Homo sapien
ttagctgttgtttcattaagagtcg

SEQ ID NO: 4641676 - DNA, 25 bp, Homo sapien
gagcatcagacctatatttagctgt

SEQ ID NO: 4641677 - DNA, 25 bp, Homo sapien
cattttaattaatcgggcttttatg

SEQ ID NO: 4641678 - DNA, 25 bp, Homo sapien
aatcgggcttttatgcaagatgtta

SEQ ID NO: 4641679 - DNA, 25 bp, Homo sapien
cagtagcagcacagttttattaaga

SEQ ID NO: 4641680 - DNA, 25 bp, Homo sapien
tattaagatccctgaatctctcaca

SEQ ID NO: 4641681 - DNA, 25 bp, Homo sapien
tctctgttgaaaaactttgaataaa

SEQ ID NO: 4641682 - DNA, 25 bp, Homo sapien
cttgtctaattactcttgataggac

SEQ ID NO: 4641683 - DNA, 25 bp, Homo sapien
tgcttaggcctggtgccatggcaca

SEQ ID NO: 4641684 - DNA, 25 bp, Homo sapien
gatgtcctcctttccgatttgaatg

SEQ ID NO: 4641685 - DNA, 25 bp, Homo sapien
tgcaaataggaacaatttgatgtcc

SEQ ID NO: 4641686 - DNA, 25 bp, Homo sapien
taatttgaagtctgaagtattccat

SEQ ID NO: 4641687 - DNA, 25 bp, Homo sapien
tactaatttgaagtctgaagtattc

SEQ ID NO: 4641688 - DNA, 25 bp, Homo sapien
ctaatttgaagtctgaagtattcca

SEQ ID NO: 4641689 - DNA, 25 bp, Homo sapien
catactaatttgaagtctgaagtat

SEQ ID NO: 4641690 - DNA, 25 bp, Homo sapien
accccgggcctgcttttggtctgca

SEQ ID NO: 4641691 - DNA, 25 bp, Homo sapien
tagcttcagttattagccaccgaca

SEQ ID NO: 4641692 - DNA, 25 bp, Homo sapien
tcctggatgtccaaactcaacatgt

SEQ ID NO: 4641693 - DNA, 25 bp, Homo sapien
cagagcttcaaaggtggcatttggc

SEQ ID NO: 4641694 - DNA, 25 bp, Homo sapien
ctggcggtggttcaaggtatgacat

SEQ ID NO: 4641695 - DNA, 25 bp, Homo sapien
tcatagccatctggcggtggttcaa

SEQ ID NO: 4641696 - DNA, 25 bp, Homo sapien
gcattatatggtgacacagtatttg

SEQ ID NO: 4641697 - DNA, 25 bp, Homo sapien
gagaaagcattatatggtgacacag

SEQ ID NO: 4641698 - DNA, 25 bp, Homo sapien
tctgctgtgaagtgaatcgtgtctt

SEQ ID NO: 4641699 - DNA, 25 bp, Homo sapien
catctgctgtgaagtgaatcgtgtc

SEQ ID NO: 4641700 - DNA, 25 bp, Homo sapien
ccccatctgctgtgaagtgaatcgt

SEQ ID NO: 4641701 - DNA, 25 bp, Homo sapien
cccatctgctgtgaagtgaatcgtg

SEQ ID NO: 4641702 - DNA, 25 bp, Homo sapien
gctcccccgctatggcggctttttg

SEQ ID NO: 4641703 - DNA, 25 bp, Homo sapien
ccccgctgccacgactttttgccgc

SEQ ID NO: 4641704 - DNA, 25 bp, Homo sapien
tttttgctcccccgctatggcggct

SEQ ID NO: 4641705 - DNA, 25 bp, Homo sapien
cgctgccacgactttttgccgcccg

SEQ ID NO: 4641706 - DNA, 25 bp, Homo sapien
cgcggcggctttttcacccccactg

SEQ ID NO: 4641707 - DNA, 25 bp, Homo sapien
ccactgccgtggctttttgtcgccg

SEQ ID NO: 4641708 - DNA, 25 bp, Homo sapien
actgccgtggctttttgtcgccgcg

SEQ ID NO: 4641709 - DNA, 25 bp, Homo sapien
cgcggctttttgctcccctaccgcg

SEQ ID NO: 4641710 - DNA, 25 bp, Homo sapien
tcaccactggatttgtgtttgctcc

SEQ ID NO: 4641711 - DNA, 25 bp, Homo sapien
gagaactcgagtgtgtatctttcac

SEQ ID NO: 4641712 - DNA, 25 bp, Homo sapien
gccagtcacctctaaaccgtattgt

SEQ ID NO: 4641713 - DNA, 25 bp, Homo sapien
cgtattgttccaagacaacaaagag

SEQ ID NO: 4641714 - DNA, 25 bp, Homo sapien
tacgtagctattccaagtgctcagg

SEQ ID NO: 4641715 - DNA, 25 bp, Homo sapien
taattgccgtacatggtgacacaaa

SEQ ID NO: 4641716 - DNA, 25 bp, Homo sapien
cctctggtcctaaaggtaagtagca

SEQ ID NO: 4641717 - DNA, 25 bp, Homo sapien
tctagacagtaaacactacgtagct

SEQ ID NO: 4641718 - DNA, 25 bp, Homo sapien
aagtgataaatgtagacagatggga

SEQ ID NO: 4641719 - DNA, 25 bp, Homo sapien
tattgtgagcataagctctggagag

SEQ ID NO: 4641720 - DNA, 25 bp, Homo sapien
ggtctcctcttatgagttctgtgag

SEQ ID NO: 4641721 - DNA, 25 bp, Homo sapien
ggagtaactactgggatggaatgtc

SEQ ID NO: 4641722 - DNA, 25 bp, Homo sapien
gtagaaagatccaggcatgcagaaa

SEQ ID NO: 4641723 - DNA, 25 bp, Homo sapien
acaatctcttcacctgctaccacca

SEQ ID NO: 4641724 - DNA, 25 bp, Homo sapien
ctttaaaggaatcagcacaatctct

SEQ ID NO: 4641725 - DNA, 25 bp, Homo sapien
tgctaccaccacaaacacaggtaga

SEQ ID NO: 4641726 - DNA, 25 bp, Homo sapien
ctgagaaaaagccatttttctcttc

SEQ ID NO: 4641727 - DNA, 25 bp, Homo sapien
tgagaaaaagccatttttctcttca

SEQ ID NO: 4641728 - DNA, 25 bp, Homo sapien
gagaaaaagccatttttctcttcat

SEQ ID NO: 4641729 - DNA, 25 bp, Homo sapien
agttatcctcaaccaagaagaccgg

SEQ ID NO: 4641730 - DNA, 25 bp, Homo sapien
agacagaattctacggctacatccc

SEQ ID NO: 4641731 - DNA, 25 bp, Homo sapien
gagcagcatccaggtattgacactc

SEQ ID NO: 4641732 - DNA, 25 bp, Homo sapien
aatgtcaacagtccccgaaaacaca

SEQ ID NO: 4641733 - DNA, 25 bp, Homo sapien
cacatcctacaaaggaagaaaatga

SEQ ID NO: 4641734 - DNA, 25 bp, Homo sapien
aacacatcctacaaaggaagaaaat

SEQ ID NO: 4641735 - DNA, 25 bp, Homo sapien
caaaacacatcctacaaaggaagaa

SEQ ID NO: 4641736 - DNA, 25 bp, Homo sapien
catcctacaaaggaagaaaatgaaa

SEQ ID NO: 4641737 - DNA, 25 bp, Homo sapien
gctccagacaggtgacccggtctgg

SEQ ID NO: 4641738 - DNA, 25 bp, Homo sapien
ctgggtgcttcatactccatggctt

SEQ ID NO: 4641739 - DNA, 25 bp, Homo sapien
gggtgcttcatactccatggctttt

SEQ ID NO: 4641740 - DNA, 25 bp, Homo sapien
gtgcttcatactccatggctttttc

SEQ ID NO: 4641741 - DNA, 25 bp, Homo sapien
tcagcctttggatgtctcatctatg

SEQ ID NO: 4641742 - DNA, 25 bp, Homo sapien
atgtcttctcctaagtctatttgaa

SEQ ID NO: 4641743 - DNA, 25 bp, Homo sapien
tatctgatgttgtcttaggtgtgag

SEQ ID NO: 4641744 - DNA, 25 bp, Homo sapien
tctgatgttgtcttaggtgtgagaa

SEQ ID NO: 4641745 - DNA, 25 bp, Homo sapien
aattatctgatgttgtcttaggtgt

SEQ ID NO: 4641746 - DNA, 25 bp, Homo sapien
ctgatgttgtcttaggtgtgagaac

SEQ ID NO: 4641747 - DNA, 25 bp, Homo sapien
ccatgtatagtaagacctgaagact

SEQ ID NO: 4641748 - DNA, 25 bp, Homo sapien
ctcccatgtatagtaagacctgaag

SEQ ID NO: 4641749 - DNA, 25 bp, Homo sapien
ttctcccatgtatagtaagacctga

SEQ ID NO: 4641750 - DNA, 25 bp, Homo sapien
aattctcccatgtatagtaagacct

SEQ ID NO: 4641751 - DNA, 25 bp, Homo sapien
cttgaagattgtttaaaggctttgt

SEQ ID NO: 4641752 - DNA, 25 bp, Homo sapien
aaaggctttgtcacattcttcacac

SEQ ID NO: 4641753 - DNA, 25 bp, Homo sapien
ttaaaggctttgtcacattcttcac

SEQ ID NO: 4641754 - DNA, 25 bp, Homo sapien
gtttaaaggctttgtcacattcttc

SEQ ID NO: 4641755 - DNA, 25 bp, Homo sapien
gtaggttgtatctccagtataaatt

SEQ ID NO: 4641756 - DNA, 25 bp, Homo sapien
tgtaggttgtatctccagtataaat

SEQ ID NO: 4641757 - DNA, 25 bp, Homo sapien
tttgtaggttgtatctccagtataa

SEQ ID NO: 4641758 - DNA, 25 bp, Homo sapien
atttgtaggttgtatctccagtata

SEQ ID NO: 4641759 - DNA, 25 bp, Homo sapien
caaagactgcttacaagctttgcca

SEQ ID NO: 4641760 - DNA, 25 bp, Homo sapien
cagtatgaactatcatgtttagtaa

SEQ ID NO: 4641761 - DNA, 25 bp, Homo sapien
tatgaactatcatgtttagtaaagc

SEQ ID NO: 4641762 - DNA, 25 bp, Homo sapien
taaaagctttgatgcattcttgaca

SEQ ID NO: 4641763 - DNA, 25 bp, Homo sapien
agctttgatgcattcttgacatttg

SEQ ID NO: 4641764 - DNA, 25 bp, Homo sapien
taaggtttgaggaacagtaaaatgc

SEQ ID NO: 4641765 - DNA, 25 bp, Homo sapien
ttatatatagtaagatttgaagacc

SEQ ID NO: 4641766 - DNA, 25 bp, Homo sapien
ttcttatatatagtaagatttgaag

SEQ ID NO: 4641767 - DNA, 25 bp, Homo sapien
tttttcacaatggtatggtttctct

SEQ ID NO: 4641768 - DNA, 25 bp, Homo sapien
atttctggattcctctccattatga

SEQ ID NO: 4641769 - DNA, 25 bp, Homo sapien
gaggcctgaagactgcttaaaaagc

SEQ ID NO: 4641770 - DNA, 25 bp, Homo sapien
gaggaatagtaaaagcctttgccac

SEQ ID NO: 4641771 - DNA, 25 bp, Homo sapien
tcttcagtacgaattgtctgatgta

SEQ ID NO: 4641772 - DNA, 25 bp, Homo sapien
atgtcaagtaaacttgagcaacaaa

SEQ ID NO: 4641773 - DNA, 25 bp, Homo sapien
gaactctcttatgtcaagtaaactt

SEQ ID NO: 4641774 - DNA, 25 bp, Homo sapien
tcataagtttagtaaggctaaagga

SEQ ID NO: 4641775 - DNA, 25 bp, Homo sapien
actctcttatgtcaagtaaacttga

SEQ ID NO: 4641776 - DNA, 25 bp, Homo sapien
gttccacattgctgtgacaatgctg

SEQ ID NO: 4641777 - DNA, 25 bp, Homo sapien
tacaaccatcagatactcatgtaca

SEQ ID NO: 4641778 - DNA, 25 bp, Homo sapien
gagcctggcccaactttactcttta

SEQ ID NO: 4641779 - DNA, 25 bp, Homo sapien
tgaaggcaatgtttcatcttgtatt

SEQ ID NO: 4641780 - DNA, 25 bp, Homo sapien
gaatagtttcaacccaagaggcgaa

SEQ ID NO: 4641781 - DNA, 25 bp, Homo sapien
gttccacgtcttattatattaggca

SEQ ID NO: 4641782 - DNA, 25 bp, Homo sapien
ggaatgtttctagcacataagtgtt

SEQ ID NO: 4641783 - DNA, 25 bp, Homo sapien
tattaggcaatatcctttcatgtaa

SEQ ID NO: 4641784 - DNA, 25 bp, Homo sapien
aagcagtagccttgacctgtggcct

SEQ ID NO: 4641785 - DNA, 25 bp, Homo sapien
catacagaagagtgcccgaatcata

SEQ ID NO: 4641786 - DNA, 25 bp, Homo sapien
tatttttggctgttatcccacggcc

SEQ ID NO: 4641787 - DNA, 25 bp, Homo sapien
tagatgaactgtagcacaccaggct

SEQ ID NO: 4641788 - DNA, 25 bp, Homo sapien
tgggatattttggaatggaacacca

SEQ ID NO: 4641789 - DNA, 25 bp, Homo sapien
caaggactctctgtataaggtactg

SEQ ID NO: 4641790 - DNA, 25 bp, Homo sapien
ggctcgcccatggtgtcagactaaa

SEQ ID NO: 4641791 - DNA, 25 bp, Homo sapien
gtcaggaatgtggaccacgggccaa

SEQ ID NO: 4641792 - DNA, 25 bp, Homo sapien
caggcacgcaggagtccagttgtac

SEQ ID NO: 4641793 - DNA, 25 bp, Homo sapien
tgggtatcatgcagacaagcggagt

SEQ ID NO: 4641794 - DNA, 25 bp, Homo sapien
tggaagctgggtcagtaggatctcc

SEQ ID NO: 4641795 - DNA, 25 bp, Homo sapien
cagttgtacacggaggcgaaacact

SEQ ID NO: 4641796 - DNA, 25 bp, Homo sapien
aggtctatgcagagcagaacgcagc

SEQ ID NO: 4641797 - DNA, 25 bp, Homo sapien
ggcagtgccccaaggtctatgcaga

SEQ ID NO: 4641798 - DNA, 25 bp, Homo sapien
cccaaggtctatgcagagcagaacg

SEQ ID NO: 4641799 - DNA, 25 bp, Homo sapien
tgccccaaggtctatgcagagcaga

SEQ ID NO: 4641800 - DNA, 25 bp, Homo sapien
agccagtgggccgcaggctctagct

SEQ ID NO: 4641801 - DNA, 25 bp, Homo sapien
gccagtgggccgcaggctctagctc

SEQ ID NO: 4641802 - DNA, 25 bp, Homo sapien
gcagcgaggtgagccgtggtgttgc

SEQ ID NO: 4641803 - DNA, 25 bp, Homo sapien
catggtctgtgcaaggcatggccag

SEQ ID NO: 4641804 - DNA, 25 bp, Homo sapien
attacaggagtaatctggccaagta

SEQ ID NO: 4641805 - DNA, 25 bp, Homo sapien
tcatggcgagaacaagggtatggct

SEQ ID NO: 4641806 - DNA, 25 bp, Homo sapien
aaggccatggtagggccaaggccaa

SEQ ID NO: 4641807 - DNA, 25 bp, Homo sapien
cagggccagggcagggacatggcag

SEQ ID NO: 4641808 - DNA, 25 bp, Homo sapien
gtccagaagcagggaagaaccaggg

SEQ ID NO: 4641809 - DNA, 25 bp, Homo sapien
ggccagggcagggacatggcagggc

SEQ ID NO: 4641810 - DNA, 25 bp, Homo sapien
tccagaagcagggaagaaccagggc

SEQ ID NO: 4641811 - DNA, 25 bp, Homo sapien
atttggaaaggtcattagatactga

SEQ ID NO: 4641812 - DNA, 25 bp, Homo sapien
cattagatactgatacattcttacg

SEQ ID NO: 4641813 - DNA, 25 bp, Homo sapien
actgatacattcttacgtttataca

SEQ ID NO: 4641814 - DNA, 25 bp, Homo sapien
gaaaggtcattagatactgatacat

SEQ ID NO: 4641815 - DNA, 25 bp, Homo sapien
gaaatgaaatggataggatgccctc

SEQ ID NO: 4641816 - DNA, 25 bp, Homo sapien
tgaaatgaaatggataggatgccct

SEQ ID NO: 4641817 - DNA, 25 bp, Homo sapien
aaatgaaatggataggatgccctca

SEQ ID NO: 4641818 - DNA, 25 bp, Homo sapien
catgaaatgaaatggataggatgcc

SEQ ID NO: 4641819 - DNA, 25 bp, Homo sapien
catctcatctcgtatcttatctcat

SEQ ID NO: 4641820 - DNA, 25 bp, Homo sapien
ttatctcatctatcattttatctca

SEQ ID NO: 4641821 - DNA, 25 bp, Homo sapien
tcatcatctcaacccttttcatctt

SEQ ID NO: 4641822 - DNA, 25 bp, Homo sapien
catttcatctctcatttcgatttta

SEQ ID NO: 4641823 - DNA, 25 bp, Homo sapien
tctcattacatttcatctaatttca

SEQ ID NO: 4641824 - DNA, 25 bp, Homo sapien
ttcatctcatctcgtatcttatctc

SEQ ID NO: 4641825 - DNA, 25 bp, Homo sapien
catctcatctcgtatcttatctcat

SEQ ID NO: 4641826 - DNA, 25 bp, Homo sapien
caactcttttcatcttatctcatca

SEQ ID NO: 4641827 - DNA, 25 bp, Homo sapien
ctcatttcaactcattgcatctcag

SEQ ID NO: 4641828 - DNA, 25 bp, Homo sapien
tcatctcatttcaactcattgcatc

SEQ ID NO: 4641829 - DNA, 25 bp, Homo sapien
atttcaactcattgcatctcagctc

SEQ ID NO: 4641830 - DNA, 25 bp, Homo sapien
tttcatctcatttcaactcattgca

SEQ ID NO: 4641831 - DNA, 25 bp, Homo sapien
tatcatcattttatctcatctatca

SEQ ID NO: 4641832 - DNA, 25 bp, Homo sapien
tcattacatctcatctcatcttatc

SEQ ID NO: 4641833 - DNA, 25 bp, Homo sapien
catctcatctcgtatcttatctcat

SEQ ID NO: 4641834 - DNA, 25 bp, Homo sapien
tacatctcatttcctctcatcatta

SEQ ID NO: 4641835 - DNA, 25 bp, Homo sapien
ccaggacaattaggtgagagaaaga

SEQ ID NO: 4641836 - DNA, 25 bp, Homo sapien
gccaggacaattaggtgagagaaag

SEQ ID NO: 4641837 - DNA, 25 bp, Homo sapien
aataaattgactcttcttggtactg

SEQ ID NO: 4641838 - DNA, 25 bp, Homo sapien
gactcttcttggtactgactcgggt

SEQ ID NO: 4641839 - DNA, 25 bp, Homo sapien
tcttggtactgactcgggttttata

SEQ ID NO: 4641840 - DNA, 25 bp, Homo sapien
tactgactcgggttttatagaagaa

SEQ ID NO: 4641841 - DNA, 25 bp, Homo sapien
ggaaaaagcatgttgtattagagca

SEQ ID NO: 4641842 - DNA, 25 bp, Homo sapien
ctaagagtgtttaaagtgcatattc

SEQ ID NO: 4641843 - DNA, 25 bp, Homo sapien
catgttgtattagagcatattcaac

SEQ ID NO: 4641844 - DNA, 25 bp, Homo sapien
taatgtctaccataaacaatgactc

SEQ ID NO: 4641845 - DNA, 25 bp, Homo sapien
aacaagcgggaggaaagtcgtatct

SEQ ID NO: 4641846 - DNA, 25 bp, Homo sapien
tactcaaaaagactagcatacctga

SEQ ID NO: 4641847 - DNA, 25 bp, Homo sapien
ccttgcatctgtcttggaactcaca

SEQ ID NO: 4641848 - DNA, 25 bp, Homo sapien
tgttagaagctgtgcatgaatgcca

SEQ ID NO: 4641849 - DNA, 25 bp, Homo sapien
taattaagcaactactatgtctggg

SEQ ID NO: 4641850 - DNA, 25 bp, Homo sapien
tttttatcagcatcaacagggtagc

SEQ ID NO: 4641851 - DNA, 25 bp, Homo sapien
tcagaggactcttgacagggtagca

SEQ ID NO: 4641852 - DNA, 25 bp, Homo sapien
tcttttcagggtatcacagggcgtc

SEQ ID NO: 4641853 - DNA, 25 bp, Homo sapien
ttacatggcaattaacaccatgctt

SEQ ID NO: 4641854 - DNA, 25 bp, Homo sapien
tacatggcaattaacaccatgcttc

SEQ ID NO: 4641855 - DNA, 25 bp, Homo sapien
tttacatggcaattaacaccatgct

SEQ ID NO: 4641856 - DNA, 25 bp, Homo sapien
gcagaaactaatcgagtccctatat

SEQ ID NO: 4641857 - DNA, 25 bp, Homo sapien
taatcgagtccctatattagggata

SEQ ID NO: 4641858 - DNA, 25 bp, Homo sapien
aactaatcgagtccctatattaggg

SEQ ID NO: 4641859 - DNA, 25 bp, Homo sapien
tagcagaaactaatcgagtccctat

SEQ ID NO: 4641860 - DNA, 25 bp, Homo sapien
gtcacagcaggaagatttcaaccaa

SEQ ID NO: 4641861 - DNA, 25 bp, Homo sapien
tcagaaaaatggacttagacttccc

SEQ ID NO: 4641862 - DNA, 25 bp, Homo sapien
gagcgaatcctactcaaaacctgat

SEQ ID NO: 4641863 - DNA, 25 bp, Homo sapien
gaagaatctagtgtccattgccaca

SEQ ID NO: 4641864 - DNA, 25 bp, Homo sapien
aaagaatttggaaagtaggtgtgtg

SEQ ID NO: 4641865 - DNA, 25 bp, Homo sapien
ttttcatacaggaggaaagaatttg

SEQ ID NO: 4641866 - DNA, 25 bp, Homo sapien
cagccttaagtttttttcatacagg

SEQ ID NO: 4641867 - DNA, 25 bp, Homo sapien
caggaggaaagaatttggaaagtag

SEQ ID NO: 4641868 - DNA, 25 bp, Homo sapien
gagaacctgagtccgtcactgtcca

SEQ ID NO: 4641869 - DNA, 25 bp, Homo sapien
aacctgagtccgtcactgtccacgg

SEQ ID NO: 4641870 - DNA, 25 bp, Homo sapien
gtgagaacctgagtccgtcactgtc

SEQ ID NO: 4641871 - DNA, 25 bp, Homo sapien
gaacctgagtccgtcactgtccacg

SEQ ID NO: 4641872 - DNA, 25 bp, Homo sapien
gcaactgggataacaaggtattaac

SEQ ID NO: 4641873 - DNA, 25 bp, Homo sapien
tacgacaaaacaatgtaacagggtg

SEQ ID NO: 4641874 - DNA, 25 bp, Homo sapien
aaatgtttaatggccctgggaactg

SEQ ID NO: 4641875 - DNA, 25 bp, Homo sapien
tcatggacgttttgtgaggttaaac

SEQ ID NO: 4641876 - DNA, 25 bp, Homo sapien
cttgtctaattactcttgataggac

SEQ ID NO: 4641877 - DNA, 25 bp, Homo sapien
gatgtcctcctttccgatttgaatg

SEQ ID NO: 4641878 - DNA, 25 bp, Homo sapien
tgcttaggcctggtgccatggcaca

SEQ ID NO: 4641879 - DNA, 25 bp, Homo sapien
tgcaaataggaacaatttgatgtcc

SEQ ID NO: 4641880 - DNA, 25 bp, Homo sapien
gcaatgtcctgaaggatctccccta

SEQ ID NO: 4641881 - DNA, 25 bp, Homo sapien
taggttgcttttgagtagtactgtc

SEQ ID NO: 4641882 - DNA, 25 bp, Homo sapien
taaaaaatccgttggctgagatatg

SEQ ID NO: 4641883 - DNA, 25 bp, Homo sapien
tgaggtctggtagcatgatacatcc

SEQ ID NO: 4641884 - DNA, 25 bp, Homo sapien
accccgggcctgcttttggtctgca

SEQ ID NO: 4641885 - DNA, 25 bp, Homo sapien
tagcttcagttattagccaccgaca

SEQ ID NO: 4641886 - DNA, 25 bp, Homo sapien
tcctggatgtccaaactcaacatgt

SEQ ID NO: 4641887 - DNA, 25 bp, Homo sapien
cagagcttcaaaggtggcatttggc

SEQ ID NO: 4641888 - DNA, 25 bp, Homo sapien
ctggcggtggttcaaggtatgacat

SEQ ID NO: 4641889 - DNA, 25 bp, Homo sapien
gagaaagcattatatggtgacacag

SEQ ID NO: 4641890 - DNA, 25 bp, Homo sapien
tcatagccatctggcggtggttcaa

SEQ ID NO: 4641891 - DNA, 25 bp, Homo sapien
gcattatatggtgacacagtatttg

SEQ ID NO: 4641892 - DNA, 25 bp, Homo sapien
ccccatctgctgtgaagtgaatggt

SEQ ID NO: 4641893 - DNA, 25 bp, Homo sapien
caattgtagtctcatgctttgatca

SEQ ID NO: 4641894 - DNA, 25 bp, Homo sapien
tctgagttttatgaggcctttagta

SEQ ID NO: 4641895 - DNA, 25 bp, Homo sapien
ctagttttctgtgcaattctatcat

SEQ ID NO: 4641896 - DNA, 25 bp, Homo sapien
ccagtgcttgtgatacaagcacatt

SEQ ID NO: 4641897 - DNA, 25 bp, Homo sapien
caagctgaccagaaatcatagaggg

SEQ ID NO: 4641898 - DNA, 25 bp, Homo sapien
gattatactatctggtgtggcgtta

SEQ ID NO: 4641899 - DNA, 25 bp, Homo sapien
cctttggagctttgcaacaagcagt

SEQ ID NO: 4641900 - DNA, 25 bp, Homo sapien
gcaagcagcctagatgaacacacag

SEQ ID NO: 4641901 - DNA, 25 bp, Homo sapien
caagatgaaacgaattatggagatg

SEQ ID NO: 4641902 - DNA, 25 bp, Homo sapien
tctaatcagagaagggaatcccctc

SEQ ID NO: 4641903 - DNA, 25 bp, Homo sapien
tctgtacctccaggatattcagtaa

SEQ ID NO: 4641904 - DNA, 25 bp, Homo sapien
tagggacggctgcacaatgttatga

SEQ ID NO: 4641905 - DNA, 25 bp, Homo sapien
gaggagaggcgctgcgttcctttgg

SEQ ID NO: 4641906 - DNA, 25 bp, Homo sapien
cacagctggcagtctagttctactc

SEQ ID NO: 4641907 - DNA, 25 bp, Homo sapien
ggtagccgaagaatgccctttagtg

SEQ ID NO: 4641908 - DNA, 25 bp, Homo sapien
tacagcagaggccttagatgagtgg

SEQ ID NO: 4641909 - DNA, 25 bp, Homo sapien
tgctgccagactgccattaagtgtt

SEQ ID NO: 4641910 - DNA, 25 bp, Homo sapien
agccctatacagagagacattcggt

SEQ ID NO: 4641911 - DNA, 25 bp, Homo sapien
catagccaaggctgatcagcatagg

SEQ ID NO: 4641912 - DNA, 25 bp, Homo sapien
caaccatgccttgtcttccagcttg

SEQ ID NO: 4641913 - DNA, 25 bp, Homo sapien
gatgctcaaatatgtgctaacagtc

SEQ ID NO: 4641914 - DNA, 25 bp, Homo sapien
gaatttacacagtttgcttcattgt

SEQ ID NO: 4641915 - DNA, 25 bp, Homo sapien
tatttccagctttaattttcttgag

SEQ ID NO: 4641916 - DNA, 25 bp, Homo sapien
ttagaaacggttgcctctgctgttc

SEQ ID NO: 4641917 - DNA, 25 bp, Homo sapien
tgaagagtggctggaacttagaaac

SEQ ID NO: 4641918 - DNA, 25 bp, Homo sapien
cagaatcctctttgccctatcaagg

SEQ ID NO: 4641919 - DNA, 25 bp, Homo sapien
gattccatgacctcccaaggattga

SEQ ID NO: 4641920 - DNA, 25 bp, Homo sapien
gagtcatatctacagcctagcacag

SEQ ID NO: 4641921 - DNA, 25 bp, Homo sapien
tacactaggctcctaaggactgtgg

SEQ ID NO: 4641922 - DNA, 25 bp, Homo sapien
tagtggctgtactacgctctgtgga

SEQ ID NO: 4641923 - DNA, 25 bp, Homo sapien
tagttgggtcattctcgacatcagc

SEQ ID NO: 4641924 - DNA, 25 bp, Homo sapien
ctgggagagggaccattatctggct

SEQ ID NO: 4641925 - DNA, 25 bp, Homo sapien
tcctctggaagtggtcagatacccc

SEQ ID NO: 4641926 - DNA, 25 bp, Homo sapien
tgcttactgggagattggctcaaat

SEQ ID NO: 4641927 - DNA, 25 bp, Homo sapien
tacaatatctcctcttacacctctg

SEQ ID NO: 4641928 - DNA, 25 bp, Homo sapien
tttatcatccaaactttctctgaat

SEQ ID NO: 4641929 - DNA, 25 bp, Homo sapien
ggttcgtgggtgcaatacaatatct

SEQ ID NO: 4641930 - DNA, 25 bp, Homo sapien
gtgatccatcctcctcgcctcctaa

SEQ ID NO: 4641931 - DNA, 25 bp, Homo sapien
tggtgatccatcctcctcgcctcct

SEQ ID NO: 4641932 - DNA, 25 bp, Homo sapien
acctggtgatccatcctcctcgcct

SEQ ID NO: 4641933 - DNA, 25 bp, Homo sapien
gacctggtgatccatcctcctcgcc

SEQ ID NO: 4641934 - DNA, 25 bp, Homo sapien
gggatactacaaattgatgttgtag

SEQ ID NO: 4641935 - DNA, 25 bp, Homo sapien
ttccatagttaaattttggcaggga

SEQ ID NO: 4641936 - DNA, 25 bp, Homo sapien
tgtagtatcaattggcagggatact

SEQ ID NO: 4641937 - DNA, 25 bp, Homo sapien
gatgttgtagtatcaattggcaggg

SEQ ID NO: 4641938 - DNA, 25 bp, Homo sapien
gcattaattcatttcagtgttaact

SEQ ID NO: 4641939 - DNA, 25 bp, Homo sapien
atggcttctcaaccgtctcccaaag

SEQ ID NO: 4641940 - DNA, 25 bp, Homo sapien
gagtcatggcttctcaaccgtctcc

SEQ ID NO: 4641941 - DNA, 25 bp, Homo sapien
attttaaaatgagtcatggcttctc

SEQ ID NO: 4641942 - DNA, 25 bp, Homo sapien
ggcagaaggtgaaaggcatgtctca

SEQ ID NO: 4641943 - DNA, 25 bp, Homo sapien
tggcagaaggtgaaaggcatgtctc

SEQ ID NO: 4641944 - DNA, 25 bp, Homo sapien
gcagaaggtgaaaggcatgtctcac

SEQ ID NO: 4641945 - DNA, 25 bp, Homo sapien
atggcagaaggtgaaaggcatgtct

SEQ ID NO: 4641946 - DNA, 25 bp, Homo sapien
taaaacgtggagtatctttcactaa

SEQ ID NO: 4641947 - DNA, 25 bp, Homo sapien
aacgtggagtatctttcactaacct

SEQ ID NO: 4641948 - DNA, 25 bp, Homo sapien
gtaaaacgtggagtatctttcacta

SEQ ID NO: 4641949 - DNA, 25 bp, Homo sapien
gcttccaagatggtacctcaaaagc

SEQ ID NO: 4641950 - DNA, 25 bp, Homo sapien
tgtgtcctcctgaggggatgaacac

SEQ ID NO: 4641951 - DNA, 25 bp, Homo sapien
tgccaggaagtttgtgtctagtgag

SEQ ID NO: 4641952 - DNA, 25 bp, Homo sapien
aaaagctgtgtcctcctgaggggat

SEQ ID NO: 4641953 - DNA, 25 bp, Homo sapien
gaagcatattccaaaatccataggc

SEQ ID NO: 4641954 - DNA, 25 bp, Homo sapien
tacacgtaagtaaaaggcatgaaac

SEQ ID NO: 4641955 - DNA, 25 bp, Homo sapien
gaaataccatgctactggcaaagcc

SEQ ID NO: 4641956 - DNA, 25 bp, Homo sapien
gtggtgcaccaatctctctaaaaga

SEQ ID NO: 4641957 - DNA, 25 bp, Homo sapien
agctgtaaccaaccctactctggtt

SEQ ID NO: 4641958 - DNA, 25 bp, Homo sapien
ttcacatcacgaaataataatcttc

SEQ ID NO: 4641959 - DNA, 25 bp, Homo sapien
cacagatcattctttactcaattaa

SEQ ID NO: 4641960 - DNA, 25 bp, Homo sapien
tactctggttctgggggctgcctaa

SEQ ID NO: 4641961 - DNA, 25 bp, Homo sapien
tacattaatggttcccaggagtgga

SEQ ID NO: 4641962 - DNA, 25 bp, Homo sapien
cctgtaacctatgaggccagctcag

SEQ ID NO: 4641963 - DNA, 25 bp, Homo sapien
actacagtggtttttgggcggtgat

SEQ ID NO: 4641964 - DNA, 25 bp, Homo sapien
taacagtatgtagcctcaatgagag

SEQ ID NO: 4641965 - DNA, 25 bp, Homo sapien
gaaccgctgggaccaacacgccgta

SEQ ID NO: 4641966 - DNA, 25 bp, Homo sapien
acgtccctacctcagctgaaccgct

SEQ ID NO: 4641967 - DNA, 25 bp, Homo sapien
acgccgtaccgcagccgcgcacgcc

SEQ ID NO: 4641968 - DNA, 25 bp, Homo sapien
cgtccctacctcagctgaaccgctg

SEQ ID NO: 4641969 - DNA, 25 bp, Homo sapien
tcttggcgccgaggccagacttttc

SEQ ID NO: 4641970 - DNA, 25 bp, Homo sapien
aattcaggacaatcctcctccgcag

SEQ ID NO: 4641971 - DNA, 25 bp, Homo sapien
tgataattgtgactgggatcttggc

SEQ ID NO: 4641972 - DNA, 25 bp, Homo sapien
tcaggacaatcctcctccgcaggat

SEQ ID NO: 4641973 - DNA, 25 bp, Homo sapien
tgaaatacattgttttggacaagaa

SEQ ID NO: 4641974 - DNA, 25 bp, Homo sapien
actagatcttcctacaactaggaag

SEQ ID NO: 4641975 - DNA, 25 bp, Homo sapien
ataactagatcttcctacaactagg

SEQ ID NO: 4641976 - DNA, 25 bp, Homo sapien
tatagtatggaagagagagacttag

SEQ ID NO: 4641977 - DNA, 25 bp, Homo sapien
tatgaagtatagtatggaagagaga

SEQ ID NO: 4641978 - DNA, 25 bp, Homo sapien
atatagttcagaagtgttgtcttcc

SEQ ID NO: 4641979 - DNA, 25 bp, Homo sapien
taaaatgaccgctactcttttacta

SEQ ID NO: 4641980 - DNA, 25 bp, Homo sapien
gaccgctactcttttactatgttgc

SEQ ID NO: 4641981 - DNA, 25 bp, Homo sapien
tgaccgctactcttttactatgttg

SEQ ID NO: 4641982 - DNA, 25 bp, Homo sapien
aaatgaccgctactcttttactatg

SEQ ID NO: 4641983 - DNA, 25 bp, Homo sapien
ctagaataaataacaaacagcactc

SEQ ID NO: 4641984 - DNA, 25 bp, Homo sapien
accttggctgacagctaaggatttc

SEQ ID NO: 4641985 - DNA, 25 bp, Homo sapien
ccgtttctaagttccagccactctt

SEQ ID NO: 4641986 - DNA, 25 bp, Homo sapien
aacagcagaggcaaccgtttctaag

SEQ ID NO: 4641987 - DNA, 25 bp, Homo sapien
ttggctgacagctaaggatttctcc

SEQ ID NO: 4641988 - DNA, 25 bp, Homo sapien
aatgaagcaaactgtgtaaattcag

SEQ ID NO: 4641989 - DNA, 25 bp, Homo sapien
atgaagcaaactgtgtaaattcagt

SEQ ID NO: 4641990 - DNA, 25 bp, Homo sapien
caatgaagcaaactgtgtaaattca

SEQ ID NO: 4641991 - DNA, 25 bp, Homo sapien
tgaagcaaactgtgtaaattcagtt

SEQ ID NO: 4641992 - DNA, 25 bp, Homo sapien
ggaaactttatctgaccaagtatct

SEQ ID NO: 4641993 - DNA, 25 bp, Homo sapien
tatttgagtgctactatgtgttggg

SEQ ID NO: 4641994 - DNA, 25 bp, Homo sapien
tgggtaactcttctagggtctatgg

SEQ ID NO: 4641995 - DNA, 25 bp, Homo sapien
tctagggtctatggtagactagtga

SEQ ID NO: 4641996 - DNA, 25 bp, Homo sapien
tttgcatcaaattctcaatagctct

SEQ ID NO: 4641997 - DNA, 25 bp, Homo sapien
ttttgcatcaaattctcaatagctc

SEQ ID NO: 4641998 - DNA, 25 bp, Homo sapien
tatatcacagaactatattctggtt

SEQ ID NO: 4641999 - DNA, 25 bp, Homo sapien
agatattcctctaatacatctattt

SEQ ID NO: 4642000 - DNA, 25 bp, Homo sapien
atactaacaaaagctttaatactca

SEQ ID NO: 4642001 - DNA, 25 bp, Homo sapien
ggttattaataatctcacttcttac

SEQ ID NO: 4642002 - DNA, 25 bp, Homo sapien
cttgtatatcacaatagtgagatga

SEQ ID NO: 4642003 - DNA, 25 bp, Homo sapien
cttacttgtatatcacaatagtgag

SEQ ID NO: 4642004 - DNA, 25 bp, Homo sapien
ccagcccttacttgtatatcacaat

SEQ ID NO: 4642005 - DNA, 25 bp, Homo sapien
ggattatggggtgcgccacaacgcc

SEQ ID NO: 4642006 - DNA, 25 bp, Homo sapien
tacctagaagatgtagctaacatca

SEQ ID NO: 4642007 - DNA, 25 bp, Homo sapien
tgctgatatgaagtggtctggatag

SEQ ID NO: 4642008 - DNA, 25 bp, Homo sapien
tatagaagctgtagtaaactaccta

SEQ ID NO: 4642009 - DNA, 25 bp, Homo sapien
gatagatgatcaaacaagccacaat

SEQ ID NO: 4642010 - DNA, 25 bp, Homo sapien
taaatatcactccctaattcagcat

SEQ ID NO: 4642011 - DNA, 25 bp, Homo sapien
aatatcactccctaattcagcatca

SEQ ID NO: 4642012 - DNA, 25 bp, Homo sapien
aaatatcactccctaattcagcatc

SEQ ID NO: 4642013 - DNA, 25 bp, Homo sapien
tatcactccctaattcagcatcaac

SEQ ID NO: 4642014 - DNA, 25 bp, Homo sapien
ccatattttgaatccacaatagtta

SEQ ID NO: 4642015 - DNA, 25 bp, Homo sapien
tttgaatccacaatagttatgatac

SEQ ID NO: 4642016 - DNA, 25 bp, Homo sapien
attttgaatccacaatagttatgat

SEQ ID NO: 4642017 - DNA, 25 bp, Homo sapien
taatccatattttgaatccacaata

SEQ ID NO: 4642018 - DNA, 25 bp, Homo sapien
tatgctcagattgggaacgggtcag

SEQ ID NO: 4642019 - DNA, 25 bp, Homo sapien
tccatatgctcagattgggaacggg

SEQ ID NO: 4642020 - DNA, 25 bp, Homo sapien
gaacgggtcagtgggtgggatgatt

SEQ ID NO: 4642021 - DNA, 25 bp, Homo sapien
ctttgggccctatccatatgctcag

SEQ ID NO: 4642022 - DNA, 25 bp, Homo sapien
tagcttcattgataaggccatcagg

SEQ ID NO: 4642023 - DNA, 25 bp, Homo sapien
ctagtagcttcattgataaggccat

SEQ ID NO: 4642024 - DNA, 25 bp, Homo sapien
cattgataaggccatcaggtttctc

SEQ ID NO: 4642025 - DNA, 25 bp, Homo sapien
gcttcattgataaggccatcaggtt

SEQ ID NO: 4642026 - DNA, 25 bp, Homo sapien
aatgatatctgccaaagcaacttgc

SEQ ID NO: 4642027 - DNA, 25 bp, Homo sapien
tttattaatgagaatgatatctgcc

SEQ ID NO: 4642028 - DNA, 25 bp, Homo sapien
tctggaaccaagtctgttttattaa

SEQ ID NO: 4642029 - DNA, 25 bp, Homo sapien
tgtcgttcttaatttctttacatct

SEQ ID NO: 4642030 - DNA, 25 bp, Homo sapien
cagggcaacaatcagagtaaaaaat

SEQ ID NO: 4642031 - DNA, 25 bp, Homo sapien
ctacagggcaacaatcagagtaaaa

SEQ ID NO: 4642032 - DNA, 25 bp, Homo sapien
ttctgtgtatacaatatggatctgt

SEQ ID NO: 4642033 - DNA, 25 bp, Homo sapien
caatatggatctgtaggcacttaac

SEQ ID NO: 4642034 - DNA, 25 bp, Homo sapien
caatatatgtgattccctaacgttc

SEQ ID NO: 4642035 - DNA, 25 bp, Homo sapien
atgtgattccctaacgttcttgaag

SEQ ID NO: 4642036 - DNA, 25 bp, Homo sapien
aacaatatatgtgattccctaacgt

SEQ ID NO: 4642037 - DNA, 25 bp, Homo sapien
atatgtgattccctaacgttcttga

SEQ ID NO: 4642038 - DNA, 25 bp, Homo sapien
taataatagctaccgaatgtctctc

SEQ ID NO: 4642039 - DNA, 25 bp, Homo sapien
tggcaaataatctcctaatgagcct

SEQ ID NO: 4642040 - DNA, 25 bp, Homo sapien
gagccatcacgctcaaagcattgta

SEQ ID NO: 4642041 - DNA, 25 bp, Homo sapien
ggcttttattagttcaggtcttaca

SEQ ID NO: 4642042 - DNA, 25 bp, Homo sapien
ttctaagatttgtcctagtccattt

SEQ ID NO: 4642043 - DNA, 25 bp, Homo sapien
tctaagatttgtcctagtccattta

SEQ ID NO: 4642044 - DNA, 25 bp, Homo sapien
ctaagatttgtcctagtccatttat

SEQ ID NO: 4642045 - DNA, 25 bp, Homo sapien
gagttaccctctcgagtgtttggaa

SEQ ID NO: 4642046 - DNA, 25 bp, Homo sapien
tctcgagtgtttggaagtcttttct

SEQ ID NO: 4642047 - DNA, 25 bp, Homo sapien
ttaagattcctcaatatacttcaga

SEQ ID NO: 4642048 - DNA, 25 bp, Homo sapien
atttctgtactgagttaccctctcg

SEQ ID NO: 4642049 - DNA, 25 bp, Homo sapien
cctgttgctgagtctatcagctgct

SEQ ID NO: 4642050 - DNA, 25 bp, Homo sapien
ttgctgagtctatcagctgctgagc

SEQ ID NO: 4642051 - DNA, 25 bp, Homo sapien
gaatttctcaagtagagactgagtg

SEQ ID NO: 4642052 - DNA, 25 bp, Homo sapien
gagactgagtggaactagactgcca

SEQ ID NO: 4642053 - DNA, 25 bp, Homo sapien
ggcattcttctgctacctctgccag

SEQ ID NO: 4642054 - DNA, 25 bp, Homo sapien
ctacctctgccagcagatgagtggc

SEQ ID NO: 4642055 - DNA, 25 bp, Homo sapien
ctgctacctctgccagcagatgagt

SEQ ID NO: 4642056 - DNA, 25 bp, Homo sapien
gggcattcttctgctacctctgcca

SEQ ID NO: 4642057 - DNA, 25 bp, Homo sapien
tgaagtttccctccaagtttgtcat

SEQ ID NO: 4642058 - DNA, 25 bp, Homo sapien
gaaaagtgtaagcttccagatgaaa

SEQ ID NO: 4642059 - DNA, 25 bp, Homo sapien
gacagtgtccttgagaatacatgcc

SEQ ID NO: 4642060 - DNA, 25 bp, Homo sapien
cattcaaggcatacgactagaaaac

SEQ ID NO: 4642061 - DNA, 25 bp, Homo sapien
tatcttaggactgaccaactgtgcc

SEQ ID NO: 4642062 - DNA, 25 bp, Homo sapien
tactcgtggcaacaatactgtgtta

SEQ ID NO: 4642063 - DNA, 25 bp, Homo sapien
tcaacagtctatcacatactcgtac

SEQ ID NO: 4642064 - DNA, 25 bp, Homo sapien
gacaaattcccatcttattactcca

SEQ ID NO: 4642065 - DNA, 25 bp, Homo sapien
aattcatagaagtgggcaaatggtg

SEQ ID NO: 4642066 - DNA, 25 bp, Homo sapien
gaaaactaacgtgagcagttggaaa

SEQ ID NO: 4642067 - DNA, 25 bp, Homo sapien
gcaaatggtgtaagatttgaatcac

SEQ ID NO: 4642068 - DNA, 25 bp, Homo sapien
caagcagcttattactcaaaagatg

SEQ ID NO: 4642069 - DNA, 25 bp, Homo sapien
atctaatacattagagagatcaact

SEQ ID NO: 4642070 - DNA, 25 bp, Homo sapien
caaaggcatgaagatctaatacatt

SEQ ID NO: 4642071 - DNA, 25 bp, Homo sapien
cagagagactatcaaaggcatgaag

SEQ ID NO: 4642072 - DNA, 25 bp, Homo sapien
gatctaatacattagagagatcaac

SEQ ID NO: 4642073 - DNA, 25 bp, Homo sapien
aattaggtattgatgggacgtattt

SEQ ID NO: 4642074 - DNA, 25 bp, Homo sapien
ttaggtattgatgggacgtatttca

SEQ ID NO: 4642075 - DNA, 25 bp, Homo sapien
acaaaattcaacaacccgtcatgct

SEQ ID NO: 4642076 - DNA, 25 bp, Homo sapien
tgacaaaattcaacaacccgtcatg

SEQ ID NO: 4642077 - DNA, 25 bp, Homo sapien
cagatcaatgagacagaaagtcaac

SEQ ID NO: 4642078 - DNA, 25 bp, Homo sapien
gatcaatgagacagaaagtcaacaa

SEQ ID NO: 4642079 - DNA, 25 bp, Homo sapien
acagatcaatgagacagaaagtcaa

SEQ ID NO: 4642080 - DNA, 25 bp, Homo sapien
tcaatgagacagaaagtcaacaagg

SEQ ID NO: 4642081 - DNA, 25 bp, Homo sapien
gaaacgcagctcctcaccagcaacg

SEQ ID NO: 4642082 - DNA, 25 bp, Homo sapien
ccaaaggaacgcagcgcctctcctc

SEQ ID NO: 4642083 - DNA, 25 bp, Homo sapien
ctctcctcctccaaagaaacgcagc

SEQ ID NO: 4642084 - DNA, 25 bp, Homo sapien
tccaaaggaacgcagcgcctctcct

SEQ ID NO: 4642085 - DNA, 25 bp, Homo sapien
cagcagtggcttgaaaggatataac

SEQ ID NO: 4642086 - DNA, 25 bp, Homo sapien
tattcgcttaatggaggaacagtca

SEQ ID NO: 4642087 - DNA, 25 bp, Homo sapien
gaaggaggaataactgccctgcctg

SEQ ID NO: 4642088 - DNA, 25 bp, Homo sapien
actggatacctgaagctgacatgag

SEQ ID NO: 4642089 - DNA, 25 bp, Homo sapien
ctagtattgcttagagttccttaac

SEQ ID NO: 4642090 - DNA, 25 bp, Homo sapien
taccattccaacaggtttaatacaa

SEQ ID NO: 4642091 - DNA, 25 bp, Homo sapien
taatgctggcacctaaagaaagttg

SEQ ID NO: 4642092 - DNA, 25 bp, Homo sapien
tctcctgcttcctaatatgaaaata

SEQ ID NO: 4642093 - DNA, 25 bp, Homo sapien
tcaaggtgaggttgtgttcctggca

SEQ ID NO: 4642094 - DNA, 25 bp, Homo sapien
cctggcacatgctgaagttttttct

SEQ ID NO: 4642095 - DNA, 25 bp, Homo sapien
ctgatcaaggtgaggttgtgttcct

SEQ ID NO: 4642096 - DNA, 25 bp, Homo sapien
gtgttcctggcacatgctgaagttt

SEQ ID NO: 4642097 - DNA, 25 bp, Homo sapien
gaaggaagattaggcacactgctca

SEQ ID NO: 4642098 - DNA, 25 bp, Homo sapien
tgcttaacagaaacgcaggtacagt

SEQ ID NO: 4642099 - DNA, 25 bp, Homo sapien
gaaaggtgccacaaacatagtagca

SEQ ID NO: 4642100 - DNA, 25 bp, Homo sapien
gaagttatcctaaagctctacgatc

SEQ ID NO: 4642101 - DNA, 25 bp, Homo sapien
cttctcatttttaaacatccatatt

SEQ ID NO: 4642102 - DNA, 25 bp, Homo sapien
ttctcatttttaaacatccatattg

SEQ ID NO: 4642103 - DNA, 25 bp, Homo sapien
tttaattccgctctgatcttctttc

SEQ ID NO: 4642104 - DNA, 25 bp, Homo sapien
ctcaagagaatcgctaaagtattaa

SEQ ID NO: 4642105 - DNA, 25 bp, Homo sapien
aagagaatcgctaaagtattaaaga

SEQ ID NO: 4642106 - DNA, 25 bp, Homo sapien
gagaatcgctaaagtattaaagacc

SEQ ID NO: 4642107 - DNA, 25 bp, Homo sapien
tcaagagaatcgctaaagtattaaa

SEQ ID NO: 4642108 - DNA, 25 bp, Homo sapien
gcacatctttgcataacttcctaga

SEQ ID NO: 4642109 - DNA, 25 bp, Homo sapien
tgaataagcatgtgccaagaggaga

SEQ ID NO: 4642110 - DNA, 25 bp, Homo sapien
tggctttagtaagggtgacatcatc

SEQ ID NO: 4642111 - DNA, 25 bp, Homo sapien
gaagcttaacatttcctctaacagg

SEQ ID NO: 4642112 - DNA, 25 bp, Homo sapien
aatcaagggaaataataataattct

SEQ ID NO: 4642113 - DNA, 25 bp, Homo sapien
tgtaaatcaagggaaataataataa

SEQ ID NO: 4642114 - DNA, 25 bp, Homo sapien
ctgtaaatcaagggaaataataata

SEQ ID NO: 4642115 - DNA, 25 bp, Homo sapien
atcaagggaaataataataattctt

SEQ ID NO: 4642116 - DNA, 25 bp, Homo sapien
cttcaaatgtgattgtaacaatact

SEQ ID NO: 4642117 - DNA, 25 bp, Homo sapien
ttgcatttcctggtacttcaaatgt

SEQ ID NO: 4642118 - DNA, 25 bp, Homo sapien
gaataaacatattaagatgttcttc

SEQ ID NO: 4642119 - DNA, 25 bp, Homo sapien
tattaagatgttcttcctttgcatt

SEQ ID NO: 4642120 - DNA, 25 bp, Homo sapien
cagccttatgacctccatgcagtga

SEQ ID NO: 4642121 - DNA, 25 bp, Homo sapien
ttatgacctccatgcagtgattgtc

SEQ ID NO: 4642122 - DNA, 25 bp, Homo sapien
tctcacattcttttcccacagaaga

SEQ ID NO: 4642123 - DNA, 25 bp, Homo sapien
ttcagccttatgacctccatgcagt

SEQ ID NO: 4642124 - DNA, 25 bp, Homo sapien
tatgagctcaatttatctgaatatg

SEQ ID NO: 4642125 - DNA, 25 bp, Homo sapien
tctggatatgagctcaatttatctg

SEQ ID NO: 4642126 - DNA, 25 bp, Homo sapien
ggatatgagctcaatttatctgaat

SEQ ID NO: 4642127 - DNA, 25 bp, Homo sapien
tttatctggatatgagctcaattta

SEQ ID NO: 4642128 - DNA, 25 bp, Homo sapien
atagagctcatggacaccctggaca

SEQ ID NO: 4642129 - DNA, 25 bp, Homo sapien
cacttgttgtgatttgtctttgatt

SEQ ID NO: 4642130 - DNA, 25 bp, Homo sapien
cctccagatcatagagctcatggac

SEQ ID NO: 4642131 - DNA, 25 bp, Homo sapien
caatcgatttgttctctcagtgtca

SEQ ID NO: 4642132 - DNA, 25 bp, Homo sapien
tccaggtcagtacatcaaagtcaca

SEQ ID NO: 4642133 - DNA, 25 bp, Homo sapien
gatgaaacattgaccacaagcttat

SEQ ID NO: 4642134 - DNA, 25 bp, Homo sapien
gacacagttcacctatcaattccag

SEQ ID NO: 4642135 - DNA, 25 bp, Homo sapien
tcacattggtccttggattaaccac

SEQ ID NO: 4642136 - DNA, 25 bp, Homo sapien
cacagtagctataaacagctgttta

SEQ ID NO: 4642137 - DNA, 25 bp, Homo sapien
ctgtttctgtcacagtagctataaa

SEQ ID NO: 4642138 - DNA, 25 bp, Homo sapien
ctgtcacagtagctataaacagctg

SEQ ID NO: 4642139 - DNA, 25 bp, Homo sapien
tagctataaacagctgtttaaggat

SEQ ID NO: 4642140 - DNA, 25 bp, Homo sapien
atccttttgataagaaatgcctcta

SEQ ID NO: 4642141 - DNA, 25 bp, Homo sapien
tattatccaatccttttgataagaa

SEQ ID NO: 4642142 - DNA, 25 bp, Homo sapien
ccaatccttttgataagaaatgcct

SEQ ID NO: 4642143 - DNA, 25 bp, Homo sapien
ccttttgataagaaatgcctctagt

SEQ ID NO: 4642144 - DNA, 25 bp, Homo sapien
tcagtatatgtaaactccaaagcca

SEQ ID NO: 4642145 - DNA, 25 bp, Homo sapien
tatattggaattcgtaactaaagta

SEQ ID NO: 4642146 - DNA, 25 bp, Homo sapien
taatcattatatctctgcaatcagc

SEQ ID NO: 4642147 - DNA, 25 bp, Homo sapien
actttcatgttcagtatatgtaaac

SEQ ID NO: 4642148 - DNA, 25 bp, Homo sapien
tcatgtcataaaatggtgacactta

SEQ ID NO: 4642149 - DNA, 25 bp, Homo sapien
catgtcataaaatggtgacacttac

SEQ ID NO: 4642150 - DNA, 25 bp, Homo sapien
acagtcataaccttttatttcatgt

SEQ ID NO: 4642151 - DNA, 25 bp, Homo sapien
cataaccttttatttcatgtcataa

SEQ ID NO: 4642152 - DNA, 25 bp, Homo sapien
gctcagagactaaagtagcactaca

SEQ ID NO: 4642153 - DNA, 25 bp, Homo sapien
taagtaagatactatgccacggtat

SEQ ID NO: 4642154 - DNA, 25 bp, Homo sapien
tgcccttgatagtcacatagtgtct

SEQ ID NO: 4642155 - DNA, 25 bp, Homo sapien
ggcaatatgacagcacaactgttca

SEQ ID NO: 4642156 - DNA, 25 bp, Homo sapien
aggtgcttcagtcgcaggggatgtg

SEQ ID NO: 4642157 - DNA, 25 bp, Homo sapien
cgtcttccccatcggagtcccggag

SEQ ID NO: 4642158 - DNA, 25 bp, Homo sapien
tcctctcccaggacatcgattttac

SEQ ID NO: 4642159 - DNA, 25 bp, Homo sapien
gccccggctggagcgactgctctag

SEQ ID NO: 4642160 - DNA, 25 bp, Homo sapien
cccggctggagcgactgctctagga

SEQ ID NO: 4642161 - DNA, 25 bp, Homo sapien
cagccccggctggagcgactgctct

SEQ ID NO: 4642162 - DNA, 25 bp, Homo sapien
cgggcatcttcagaggccgccgcag

SEQ ID NO: 4642163 - DNA, 25 bp, Homo sapien
aatgaaggcgcagatgccgctgagc

SEQ ID NO: 4642164 - DNA, 25 bp, Homo sapien
ctaatgaaggcgcagatgccgctga

SEQ ID NO: 4642165 - DNA, 25 bp, Homo sapien
ggctttgccggctgccgggcatctt

SEQ ID NO: 4642166 - DNA, 25 bp, Homo sapien
ccggagaaagctgccattgtcgaac

SEQ ID NO: 4642167 - DNA, 25 bp, Homo sapien
gccggagaaagctgccattgtcgaa

SEQ ID NO: 4642168 - DNA, 25 bp, Homo sapien
tgcaacaggcttgatggtcgctgga

SEQ ID NO: 4642169 - DNA, 25 bp, Homo sapien
ggatgcaacaggcttgatggtcgct

SEQ ID NO: 4642170 - DNA, 25 bp, Homo sapien
gcggcggcggacacttgcagcaaag

SEQ ID NO: 4642171 - DNA, 25 bp, Homo sapien
ggcggcggacacttgcagcaaaggg

SEQ ID NO: 4642172 - DNA, 25 bp, Homo sapien
agatgcacacgcccagtatgggccg

SEQ ID NO: 4642173 - DNA, 25 bp, Homo sapien
cacctggctctaggagggccctgcg

SEQ ID NO: 4642174 - DNA, 25 bp, Homo sapien
tttttagaggaacgtaatccagctg

SEQ ID NO: 4642175 - DNA, 25 bp, Homo sapien
gtatgggccgcgcaaggtggagtga

SEQ ID NO: 4642176 - DNA, 25 bp, Homo sapien
ccaggaaatgcgcaaatcgggacag

SEQ ID NO: 4642177 - DNA, 25 bp, Homo sapien
ccccaggaaatgcgcaaatcgggac

SEQ ID NO: 4642178 - DNA, 25 bp, Homo sapien
cccaggaaatgcgcaaatcgggaca

SEQ ID NO: 4642179 - DNA, 25 bp, Homo sapien
caggaaatgcgcaaatcgggacagc

SEQ ID NO: 4642180 - DNA, 25 bp, Homo sapien
aacatccctatcaggaagacacaga

SEQ ID NO: 4642181 - DNA, 25 bp, Homo sapien
taaagatggcacgtcagacacacag

SEQ ID NO: 4642182 - DNA, 25 bp, Homo sapien
gaagcattttgcactagacttagga

SEQ ID NO: 4642183 - DNA, 25 bp, Homo sapien
gaacatgtttggcatcggaggctgt

SEQ ID NO: 4642184 - DNA, 25 bp, Homo sapien
taaaatggattacttctgctatcta

SEQ ID NO: 4642185 - DNA, 25 bp, Homo sapien
aatggattacttctgctatctataa

SEQ ID NO: 4642186 - DNA, 25 bp, Homo sapien
aaatggattacttctgctatctata

SEQ ID NO: 4642187 - DNA, 25 bp, Homo sapien
ggattacttctgctatctataataa

SEQ ID NO: 4642188 - DNA, 25 bp, Homo sapien
tatcagcgttattagcggccaggac

SEQ ID NO: 4642189 - DNA, 25 bp, Homo sapien
tttctcaagaagacgatcccgaggg

SEQ ID NO: 4642190 - DNA, 25 bp, Homo sapien
gacccttgaccatggactcttcgtg

SEQ ID NO: 4642191 - DNA, 25 bp, Homo sapien
ttacagaagcccgagatctgggagg

SEQ ID NO: 4642192 - DNA, 25 bp, Homo sapien
tctttcggcgcgtctgggtctcggg

SEQ ID NO: 4642193 - DNA, 25 bp, Homo sapien
gagaaaagcgcttcctggcaccggg

SEQ ID NO: 4642194 - DNA, 25 bp, Homo sapien
cgcgcgagtctttcggcgcgtctgg

SEQ ID NO: 4642195 - DNA, 25 bp, Homo sapien
gggcggtgggacagaggccaggagg

SEQ ID NO: 4642196 - DNA, 25 bp, Homo sapien
gaaggcggctgggattagaaggtgg

SEQ ID NO: 4642197 - DNA, 25 bp, Homo sapien
cggtaccgccggcacctacgtcgag

SEQ ID NO: 4642198 - DNA, 25 bp, Homo sapien
ccggcacctacgtcgaggggtgcct

SEQ ID NO: 4642199 - DNA, 25 bp, Homo sapien
tgggattagaaggtggcttcgggcc

SEQ ID NO: 4642200 - DNA, 25 bp, Homo sapien
cccagcttcctgggcaagtttcacg

SEQ ID NO: 4642201 - DNA, 25 bp, Homo sapien
actcctatagtcccgaacctgctgg

SEQ ID NO: 4642202 - DNA, 25 bp, Homo sapien
agagggccagtcgttgcgacagccc

SEQ ID NO: 4642203 - DNA, 25 bp, Homo sapien
gctggcctgagggttcgcagagggc

SEQ ID NO: 4642204 - DNA, 25 bp, Homo sapien
tagtcccgaacctgctggcctgagg

SEQ ID NO: 4642205 - DNA, 25 bp, Homo sapien
ccatgggctgatccagcgcagcatt

SEQ ID NO: 4642206 - DNA, 25 bp, Homo sapien
aacctgaaggtaacggctgcatctg

SEQ ID NO: 4642207 - DNA, 25 bp, Homo sapien
gtctgtatccggactccacaacctg

SEQ ID NO: 4642208 - DNA, 25 bp, Homo sapien
tgcatctgccttgatcatcattgta

SEQ ID NO: 4642209 - DNA, 25 bp, Homo sapien
tgtccgaaagcagcccgggatccga

SEQ ID NO: 4642210 - DNA, 25 bp, Homo sapien
gaagaaaattcagatctgccgacga

SEQ ID NO: 4642211 - DNA, 25 bp, Homo sapien
aaattcagatctgccgacgaccgca

SEQ ID NO: 4642212 - DNA, 25 bp, Homo sapien
tttactattcgacaggtgtccgaaa

SEQ ID NO: 4642213 - DNA, 25 bp, Homo sapien
ccaggatcgtgggaacaatatccct

SEQ ID NO: 4642214 - DNA, 25 bp, Homo sapien
cgatattgggagtgacatcaacctc

SEQ ID NO: 4642215 - DNA, 25 bp, Homo sapien
gccatgtatgtagtcatatcacccc

SEQ ID NO: 4642216 - DNA, 25 bp, Homo sapien
ggtgtatacttcctccgatattggg

SEQ ID NO: 4642217 - DNA, 25 bp, Homo sapien
cagcccctctaagccttctggctct

SEQ ID NO: 4642218 - DNA, 25 bp, Homo sapien
tccgtggactcacagcctctttacc

SEQ ID NO: 4642219 - DNA, 25 bp, Homo sapien
cctctcccacgctgcaattagaagg

SEQ ID NO: 4642220 - DNA, 25 bp, Homo sapien
cccctcccacgctgcattaaaaaca

SEQ ID NO: 4642221 - DNA, 25 bp, Homo sapien
aggctcaataaaggctggtagaatt

SEQ ID NO: 4642222 - DNA, 25 bp, Homo sapien
ctcaataaaggctggtagaattaag

SEQ ID NO: 4642223 - DNA, 25 bp, Homo sapien
caggctcaataaaggctggtagaat

SEQ ID NO: 4642224 - DNA, 25 bp, Homo sapien
gctcaataaaggctggtagaattaa

SEQ ID NO: 4642225 - DNA, 25 bp, Homo sapien
cacactgcattataaaggaccatct

SEQ ID NO: 4642226 - DNA, 25 bp, Homo sapien
tgcattataaaggaccatctcctgt

SEQ ID NO: 4642227 - DNA, 25 bp, Homo sapien
tattgcagcacagatcacactgcat

SEQ ID NO: 4642228 - DNA, 25 bp, Homo sapien
tctattgcagcacagatcacactgc

SEQ ID NO: 4642229 - DNA, 25 bp, Homo sapien
catttctgtacagcttcccatgtgc

SEQ ID NO: 4642230 - DNA, 25 bp, Homo sapien
tcatttctgtacagcttcccatgtg

SEQ ID NO: 4642231 - DNA, 25 bp, Homo sapien
ccactcatttctgtacagcttccca

SEQ ID NO: 4642232 - DNA, 25 bp, Homo sapien
ccccactcatttctgtacagcttcc

SEQ ID NO: 4642233 - DNA, 25 bp, Homo sapien
aacacctcgttttgaacttctagct

SEQ ID NO: 4642234 - DNA, 25 bp, Homo sapien
gaggaggccatgtgatgatgggggc

SEQ ID NO: 4642235 - DNA, 25 bp, Homo sapien
aagaatagagggaacgcagaggcac

SEQ ID NO: 4642236 - DNA, 25 bp, Homo sapien
aaaggcatggagcagattcttccta

SEQ ID NO: 4642237 - DNA, 25 bp, Homo sapien
ttcttcctctgctgccctcatacat

SEQ ID NO: 4642238 - DNA, 25 bp, Homo sapien
ctgggctgctttgccaactcttctt

SEQ ID NO: 4642239 - DNA, 25 bp, Homo sapien
tgtttctgggctgctttgccaactc

SEQ ID NO: 4642240 - DNA, 25 bp, Homo sapien
tcactcctcctcttcatgtgtttct

SEQ ID NO: 4642241 - DNA, 25 bp, Homo sapien
tctgcattcatgcaagcccgagcgg

SEQ ID NO: 4642242 - DNA, 25 bp, Homo sapien
catcgggtccttcctgattaaagtg

SEQ ID NO: 4642243 - DNA, 25 bp, Homo sapien
tgactcctagatgagacaagtgact

SEQ ID NO: 4642244 - DNA, 25 bp, Homo sapien
caaagacgctttctccttagggatc

SEQ ID NO: 4642245 - DNA, 25 bp, Homo sapien
tggaaggctcaatatatgctaacat

SEQ ID NO: 4642246 - DNA, 25 bp, Homo sapien
ttctgttggaatcaggggagcgtgt

SEQ ID NO: 4642247 - DNA, 25 bp, Homo sapien
aatcaggggagcgtgttcttctata

SEQ ID NO: 4642248 - DNA, 25 bp, Homo sapien
tgttcttctataatcccctggctga

SEQ ID NO: 4642249 - DNA, 25 bp, Homo sapien
gtgttcttctataatcccctggctg

SEQ ID NO: 4642250 - DNA, 25 bp, Homo sapien
accactgtcagacttcaatccaaca

SEQ ID NO: 4642251 - DNA, 25 bp, Homo sapien
ttgttgaagggaatcaccactgtca

SEQ ID NO: 4642252 - DNA, 25 bp, Homo sapien
tttgttgaagggaatcaccactgtc

SEQ ID NO: 4642253 - DNA, 25 bp, Homo sapien
ttcaatccaacaggacccactcgag

SEQ ID NO: 4642254 - DNA, 25 bp, Homo sapien
agggggctgaaaccttttgccatca

SEQ ID NO: 4642255 - DNA, 25 bp, Homo sapien
catcagcgaacagcctcagccaaaa

SEQ ID NO: 4642256 - DNA, 25 bp, Homo sapien
ccttttgccatcagcgaacagcctc

SEQ ID NO: 4642257 - DNA, 25 bp, Homo sapien
gagggggctgaaaccttttgccatc

SEQ ID NO: 4642258 - DNA, 25 bp, Homo sapien
cgctcggctgactctctcggcagag

SEQ ID NO: 4642259 - DNA, 25 bp, Homo sapien
ggctgactctctcggcagagattgc

SEQ ID NO: 4642260 - DNA, 25 bp, Homo sapien
tccgcgcggccgctcggctgactct

SEQ ID NO: 4642261 - DNA, 25 bp, Homo sapien
ggccgctcggctgactctctcggca

SEQ ID NO: 4642262 - DNA, 25 bp, Homo sapien
ggccgctggtcctcgtagggcgcgg

SEQ ID NO: 4642263 - DNA, 25 bp, Homo sapien
cgccggccggccgctggtcctcgta

SEQ ID NO: 4642264 - DNA, 25 bp, Homo sapien
gccggccgctggtcctcgtagggcg

SEQ ID NO: 4642265 - DNA, 25 bp, Homo sapien
ccgctggtcctcgtagggcgcggtg

SEQ ID NO: 4642266 - DNA, 25 bp, Homo sapien
tggataaagttgggcaggtagttgc

SEQ ID NO: 4642267 - DNA, 25 bp, Homo sapien
ggataaagttgggcaggtagttgcg

SEQ ID NO: 4642268 - DNA, 25 bp, Homo sapien
ctggataaagttgggcaggtagttg

SEQ ID NO: 4642269 - DNA, 25 bp, Homo sapien
gcaggtcgatggacgacagcacgct

SEQ ID NO: 4642270 - DNA, 25 bp, Homo sapien
tcgcgcaggtcgatggacgacagca

SEQ ID NO: 4642271 - DNA, 25 bp, Homo sapien
agccctgacggtcgcgcaggtcgat

SEQ ID NO: 4642272 - DNA, 25 bp, Homo sapien
ggtgcagccctgacggtcgcgcagg

SEQ ID NO: 4642273 - DNA, 25 bp, Homo sapien
ctgcaccacgatctcgatggccgtc

SEQ ID NO: 4642274 - DNA, 25 bp, Homo sapien
tggccgtcctgctaaagtacctgcc

SEQ ID NO: 4642275 - DNA, 25 bp, Homo sapien
cacgatctcgatggccgtcctgcta

SEQ ID NO: 4642276 - DNA, 25 bp, Homo sapien
tctcgatggccgtcctgctaaagta

SEQ ID NO: 4642277 - DNA, 25 bp, Homo sapien
aatagaacccagtgtccggggtgca

SEQ ID NO: 4642278 - DNA, 25 bp, Homo sapien
agaacccagtgtccggggtgcaccg

SEQ ID NO: 4642279 - DNA, 25 bp, Homo sapien
tagaacccagtgtccggggtgcacc

SEQ ID NO: 4642280 - DNA, 25 bp, Homo sapien
ctaatagaacccagtgtccggggtg

SEQ ID NO: 4642281 - DNA, 25 bp, Homo sapien
tatccctcttgtagatgtccttgag

SEQ ID NO: 4642282 - DNA, 25 bp, Homo sapien
cttgtagatgtccttgagatgctgc

SEQ ID NO: 4642283 - DNA, 25 bp, Homo sapien
ttaggtatccctcttgtagatgtcc

SEQ ID NO: 4642284 - DNA, 25 bp, Homo sapien
agatgtccttgagatgctgctggac

SEQ ID NO: 4642285 - DNA, 25 bp, Homo sapien
ctgctgaagtccatggtagtgacag

SEQ ID NO: 4642286 - DNA, 25 bp, Homo sapien
tagtgacaggtacatgtctgcatcc

SEQ ID NO: 4642287 - DNA, 25 bp, Homo sapien
ctgcatcttctttgattgtccccat

SEQ ID NO: 4642288 - DNA, 25 bp, Homo sapien
taagaagctgctgaagtccatggta

SEQ ID NO: 4642289 - DNA, 25 bp, Homo sapien
gagaccgcaggtgtcgacaagatgc

SEQ ID NO: 4642290 - DNA, 25 bp, Homo sapien
ggtgtcgacaagatgccattctgtc

SEQ ID NO: 4642291 - DNA, 25 bp, Homo sapien
tgccattctgtccaataatcagtcg

SEQ ID NO: 4642292 - DNA, 25 bp, Homo sapien
ccgcaggtgtcgacaagatgccatt

SEQ ID NO: 4642293 - DNA, 25 bp, Homo sapien
ctccattggcaacattaaacttcac

SEQ ID NO: 4642294 - DNA, 25 bp, Homo sapien
acttcactccaaactctccccctgg

SEQ ID NO: 4642295 - DNA, 25 bp, Homo sapien
cattggcaacattaaacttcactcc

SEQ ID NO: 4642296 - DNA, 25 bp, Homo sapien
ttcactccaaactctccccctggtc

SEQ ID NO: 4642297 - DNA, 25 bp, Homo sapien
ggagatcaggacatatagcatattc

SEQ ID NO: 4642298 - DNA, 25 bp, Homo sapien
tcttgtcttcctagtcgagataggt

SEQ ID NO: 4642299 - DNA, 25 bp, Homo sapien
gcatattcctcaatcgttttgctga

SEQ ID NO: 4642300 - DNA, 25 bp, Homo sapien
tcttcctagtcgagataggtcgatt

SEQ ID NO: 4642301 - DNA, 25 bp, Homo sapien
aagatagatatccactgggtccact

SEQ ID NO: 4642302 - DNA, 25 bp, Homo sapien
aaggaggttaagatagatatccact

SEQ ID NO: 4642303 - DNA, 25 bp, Homo sapien
gaaggaggttaagatagatatccac

SEQ ID NO: 4642304 - DNA, 25 bp, Homo sapien
ccaggggaacacagtttattgcaga

SEQ ID NO: 4642305 - DNA, 25 bp, Homo sapien
aacacagtttattgcagaattggct

SEQ ID NO: 4642306 - DNA, 25 bp, Homo sapien
gggaacacagtttattgcagaattg

SEQ ID NO: 4642307 - DNA, 25 bp, Homo sapien
caggggaacacagtttattgcagaa

SEQ ID NO: 4642308 - DNA, 25 bp, Homo sapien
tgctggttggcatactcctcccaaa

SEQ ID NO: 4642309 - DNA, 25 bp, Homo sapien
agggccatgctggttggcatactcc

SEQ ID NO: 4642310 - DNA, 25 bp, Homo sapien
aagaagccattttggcctaggatca

SEQ ID NO: 4642311 - DNA, 25 bp, Homo sapien
ccagggagtcagaagggctcacaaa

SEQ ID NO: 4642312 - DNA, 25 bp, Homo sapien
gaaatttctaagcaaggcctctggt

SEQ ID NO: 4642313 - DNA, 25 bp, Homo sapien
aatttctaagcaaggcctctggttt

SEQ ID NO: 4642314 - DNA, 25 bp, Homo sapien
aaatttctaagcaaggcctctggtt

SEQ ID NO: 4642315 - DNA, 25 bp, Homo sapien
gatatggaggcagaatttagggtga

SEQ ID NO: 4642316 - DNA, 25 bp, Homo sapien
gaactgttacactcgtaattgaggc

SEQ ID NO: 4642317 - DNA, 25 bp, Homo sapien
aggcagaatttagggtgagaactgt

SEQ ID NO: 4642318 - DNA, 25 bp, Homo sapien
gtaattgaggccctgaatggaaatg

SEQ ID NO: 4642319 - DNA, 25 bp, Homo sapien
gatcatgactgtcagtctcttcatg

SEQ ID NO: 4642320 - DNA, 25 bp, Homo sapien
tttctgtacactaggcaaattctga

SEQ ID NO: 4642321 - DNA, 25 bp, Homo sapien
tcttcatgtacctcaataacttgtg

SEQ ID NO: 4642322 - DNA, 25 bp, Homo sapien
gtgacccttcaactaatgcttcata

SEQ ID NO: 4642323 - DNA, 25 bp, Homo sapien
tgaatccccttgactgtagtcaggt

SEQ ID NO: 4642324 - DNA, 25 bp, Homo sapien
atttctgtgtccatgttccagggga

SEQ ID NO: 4642325 - DNA, 25 bp, Homo sapien
gtgtccatgttccaggggattcctc

SEQ ID NO: 4642326 - DNA, 25 bp, Homo sapien
tccccttgactgtagtcaggtgtcc

SEQ ID NO: 4642327 - DNA, 25 bp, Homo sapien
caagaaatctgggtggccgcataga

SEQ ID NO: 4642328 - DNA, 25 bp, Homo sapien
ccaagaaatctgggtggccgcatag

SEQ ID NO: 4642329 - DNA, 25 bp, Homo sapien
cctccaaggtctagcatcagatccc

SEQ ID NO: 4642330 - DNA, 25 bp, Homo sapien
caccctcaatgcagcagggtgttaa

SEQ ID NO: 4642331 - DNA, 25 bp, Homo sapien
acaccctcaatgcagcagggtgtta

SEQ ID NO: 4642332 - DNA, 25 bp, Homo sapien
agaaggagccatcacaggcgcagaa

SEQ ID NO: 4642333 - DNA, 25 bp, Homo sapien
gccagtcaagtcgtcctgccaaaca

SEQ ID NO: 4642334 - DNA, 25 bp, Homo sapien
gctcagagggcattcagaaggagcc

SEQ ID NO: 4642335 - DNA, 25 bp, Homo sapien
cagcaggccgcagcaaggtgagaaa

SEQ ID NO: 4642336 - DNA, 25 bp, Homo sapien
aacttcatctcccaacacctcctta

SEQ ID NO: 4642337 - DNA, 25 bp, Homo sapien
ttaccctctgaacttcatctcccaa

SEQ ID NO: 4642338 - DNA, 25 bp, Homo sapien
ctctgaacttcatctcccaacacct

SEQ ID NO: 4642339 - DNA, 25 bp, Homo sapien
acttcatctcccaacacctccttac

SEQ ID NO: 4642340 - DNA, 25 bp, Homo sapien
tgtctcccgacgaacatctgaaggt

SEQ ID NO: 4642341 - DNA, 25 bp, Homo sapien
gacagtttaccatgtgcctccgtat

SEQ ID NO: 4642342 - DNA, 25 bp, Homo sapien
tataggctctaaggtaccacatctg

SEQ ID NO: 4642343 - DNA, 25 bp, Homo sapien
tctaactggcatgcattgtgagcga

SEQ ID NO: 4642344 - DNA, 25 bp, Homo sapien
aagtgcttttgatagtaaagtcagc

SEQ ID NO: 4642345 - DNA, 25 bp, Homo sapien
atgaggaattgggatttaggaagat

SEQ ID NO: 4642346 - DNA, 25 bp, Homo sapien
gtccaagttcagagtagaaaattta

SEQ ID NO: 4642347 - DNA, 25 bp, Homo sapien
tttaaacacaagaaagacatctcac

SEQ ID NO: 4642348 - DNA, 25 bp, Homo sapien
gccaacatgattaaggcacaatctt

SEQ ID NO: 4642349 - DNA, 25 bp, Homo sapien
gctaggatgccaacatgattaaggc

SEQ ID NO: 4642350 - DNA, 25 bp, Homo sapien
catgattaaggcacaatcttgtcct

SEQ ID NO: 4642351 - DNA, 25 bp, Homo sapien
gcacaatcttgtcctgaagggcctt

SEQ ID NO: 4642352 - DNA, 25 bp, Homo sapien
gaagcacagagcagagtgttctcca

SEQ ID NO: 4642353 - DNA, 25 bp, Homo sapien
tactgtagaccactagaagactcca

SEQ ID NO: 4642354 - DNA, 25 bp, Homo sapien
taacctggtactgtaactggagcag

SEQ ID NO: 4642355 - DNA, 25 bp, Homo sapien
acttctaggaacaactgggtctgcc

SEQ ID NO: 4642356 - DNA, 25 bp, Homo sapien
acctgattccggaaaagttgatgga

SEQ ID NO: 4642357 - DNA, 25 bp, Homo sapien
ccggaaaagttgatggatgccttta

SEQ ID NO: 4642358 - DNA, 25 bp, Homo sapien
tggctgcaagcctccaaatcagaaa

SEQ ID NO: 4642359 - DNA, 25 bp, Homo sapien
tcagaaacggtatccagagaaacct

SEQ ID NO: 4642360 - DNA, 25 bp, Homo sapien
gtaccctatcaatgcaaaattctca

SEQ ID NO: 4642361 - DNA, 25 bp, Homo sapien
aataatattttgcagagtggacctc

SEQ ID NO: 4642362 - DNA, 25 bp, Homo sapien
ggtttcacacctttggctaactagc

SEQ ID NO: 4642363 - DNA, 25 bp, Homo sapien
caccaagccaagatcacaattttaa

SEQ ID NO: 4642364 - DNA, 25 bp, Homo sapien
tgtgagttgaaagctctctgaccat

SEQ ID NO: 4642365 - DNA, 25 bp, Homo sapien
gcctgtgtgagttgaaagctctctg

SEQ ID NO: 4642366 - DNA, 25 bp, Homo sapien
gtgtgagttgaaagctctctgacca

SEQ ID NO: 4642367 - DNA, 25 bp, Homo sapien
gaactgacattgaacattggtgctg

SEQ ID NO: 4642368 - DNA, 25 bp, Homo sapien
tatgagagtctaccatgtgagcatg

SEQ ID NO: 4642369 - DNA, 25 bp, Homo sapien
gacaaactgtacacaaatgacaatg

SEQ ID NO: 4642370 - DNA, 25 bp, Homo sapien
tgtgagcatgctgactatactggtc

SEQ ID NO: 4642371 - DNA, 25 bp, Homo sapien
tcaggcagagtagaatctactgtcc

SEQ ID NO: 4642372 - DNA, 25 bp, Homo sapien
ctggtgtagcaggaagtagactaca

SEQ ID NO: 4642373 - DNA, 25 bp, Homo sapien
ttccctaaggacaattctggtgtag

SEQ ID NO: 4642374 - DNA, 25 bp, Homo sapien
ctgtcctcaagttccctaaggacaa

SEQ ID NO: 4642375 - DNA, 25 bp, Homo sapien
gaaaacaagcaagcctgctggtggt

SEQ ID NO: 4642376 - DNA, 25 bp, Homo sapien
gtaggaatggaagactccagggctt

SEQ ID NO: 4642377 - DNA, 25 bp, Homo sapien
ccagggcttctgagcttggaactgc

SEQ ID NO: 4642378 - DNA, 25 bp, Homo sapien
ggtgagcagtccctttaggtcaaaa

SEQ ID NO: 4642379 - DNA, 25 bp, Homo sapien
ctaagagaagggcagggagctttta

SEQ ID NO: 4642380 - DNA, 25 bp, Homo sapien
tactaagagaagggcagggagcttt

SEQ ID NO: 4642381 - DNA, 25 bp, Homo sapien
ctactaagagaagggcagggagctt

SEQ ID NO: 4642382 - DNA, 25 bp, Homo sapien
aagagaagggcagggagcttttact

SEQ ID NO: 4642383 - DNA, 25 bp, Homo sapien
tccattccgtgtaggggctcttggt

SEQ ID NO: 4642384 - DNA, 25 bp, Homo sapien
tgaggcaagggccatgttggtctgc

SEQ ID NO: 4642385 - DNA, 25 bp, Homo sapien
caagggccatgttggtctgcgtggt

SEQ ID NO: 4642386 - DNA, 25 bp, Homo sapien
tgttggtctgcgtggttccattccg

SEQ ID NO: 4642387 - DNA, 25 bp, Homo sapien
ggccacagggacctcactgtctgtc

SEQ ID NO: 4642388 - DNA, 25 bp, Homo sapien
ggattctgtttcagcaaggccacag

SEQ ID NO: 4642389 - DNA, 25 bp, Homo sapien
tcatattggattctgtttcagcaag

SEQ ID NO: 4642390 - DNA, 25 bp, Homo sapien
agggacctcactgtctgtcccatgt

SEQ ID NO: 4642391 - DNA, 25 bp, Homo sapien
cacagacattggcctgaagagtttc

SEQ ID NO: 4642392 - DNA, 25 bp, Homo sapien
aagagtttcatcttccccagagcta

SEQ ID NO: 4642393 - DNA, 25 bp, Homo sapien
acagacattggcctgaagagtttca

SEQ ID NO: 4642394 - DNA, 25 bp, Homo sapien
gtttcatcttccccagagctagcaa

SEQ ID NO: 4642395 - DNA, 25 bp, Homo sapien
gaaggctgattgctgacagctcgca

SEQ ID NO: 4642396 - DNA, 25 bp, Homo sapien
tactaggaaggctgattgctgacag

SEQ ID NO: 4642397 - DNA, 25 bp, Homo sapien
gattgctgacagctcgcagatgtgg

SEQ ID NO: 4642398 - DNA, 25 bp, Homo sapien
gctcgcagatgtggcccctgttctc

SEQ ID NO: 4642399 - DNA, 25 bp, Homo sapien
gtccatcagatttgagaagaatctc

SEQ ID NO: 4642400 - DNA, 25 bp, Homo sapien
gattgcaacgtcctgagtccatcag

SEQ ID NO: 4642401 - DNA, 25 bp, Homo sapien
ttgagaagaatctccatccagctgg

SEQ ID NO: 4642402 - DNA, 25 bp, Homo sapien
gctctcttccccacacagattgcaa

SEQ ID NO: 4642403 - DNA, 25 bp, Homo sapien
gaaccagagattggaactatcagac

SEQ ID NO: 4642404 - DNA, 25 bp, Homo sapien
acttaaagatgttccaatagagacg

SEQ ID NO: 4642405 - DNA, 25 bp, Homo sapien
cacagtatcggagaagaagaattcc

SEQ ID NO: 4642406 - DNA, 25 bp, Homo sapien
ggctcatcagcagattggacacagc

SEQ ID NO: 4642407 - DNA, 25 bp, Homo sapien
cagtatcaagatttctccttgccat

SEQ ID NO: 4642408 - DNA, 25 bp, Homo sapien
tcagcttcagtatcaagatttctcc

SEQ ID NO: 4642409 - DNA, 25 bp, Homo sapien
tggagtcagcttcagtatcaagatt

SEQ ID NO: 4642410 - DNA, 25 bp, Homo sapien
gcttcagtatcaagatttctccttg

SEQ ID NO: 4642411 - DNA, 25 bp, Homo sapien
aaagtgtgtaaaatgggataccatc

SEQ ID NO: 4642412 - DNA, 25 bp, Homo sapien
ggcacaagcatgcaattgtcagagg

SEQ ID NO: 4642413 - DNA, 25 bp, Homo sapien
agaaacctcaatggacaatggaatg

SEQ ID NO: 4642414 - DNA, 25 bp, Homo sapien
aaatatcatgcagctttcgacccag

SEQ ID NO: 4642415 - DNA, 25 bp, Homo sapien
cttcgaactccagctggattacatt

SEQ ID NO: 4642416 - DNA, 25 bp, Homo sapien
cgaactccagctggattacattacc

SEQ ID NO: 4642417 - DNA, 25 bp, Homo sapien
cagctggattacattacctagagat

SEQ ID NO: 4642418 - DNA, 25 bp, Homo sapien
agctggattacattacctagagata

SEQ ID NO: 4642419 - DNA, 25 bp, Homo sapien
ctgctttcagaaattgttcttggtt

SEQ ID NO: 4642420 - DNA, 25 bp, Homo sapien
tttcagaaattgttcttggttattc

SEQ ID NO: 4642421 - DNA, 25 bp, Homo sapien
gctttcagaaattgttcttggttat

SEQ ID NO: 4642422 - DNA, 25 bp, Homo sapien
tcagaaattgttcttggttattcat

SEQ ID NO: 4642423 - DNA, 25 bp, Homo sapien
gccaaatttggcccagtgatctcgg

SEQ ID NO: 4642424 - DNA, 25 bp, Homo sapien
ctgcaatagtagtggcggccaaatt

SEQ ID NO: 4642425 - DNA, 25 bp, Homo sapien
gatctcggacaatttcctccacact

SEQ ID NO: 4642426 - DNA, 25 bp, Homo sapien
tctgcttccgggcagcaataatgga

SEQ ID NO: 4642427 - DNA, 25 bp, Homo sapien
gactcaaagcgatctcactaggcca

SEQ ID NO: 4642428 - DNA, 25 bp, Homo sapien
aattatcatgtaagctcttggccac

SEQ ID NO: 4642429 - DNA, 25 bp, Homo sapien
gacgttttggaacagcttcatgcaa

SEQ ID NO: 4642430 - DNA, 25 bp, Homo sapien
cactaggccagaggttgtcaatcat

SEQ ID NO: 4642431 - DNA, 25 bp, Homo sapien
taatatgtcgtcttgggatccaacc

SEQ ID NO: 4642432 - DNA, 25 bp, Homo sapien
aaaactatccgtcttcgccacgctg

SEQ ID NO: 4642433 - DNA, 25 bp, Homo sapien
caaactgctggccaatgaaggattt

SEQ ID NO: 4642434 - DNA, 25 bp, Homo sapien
cacagggtccacgtattcaaaacta

SEQ ID NO: 4642435 - DNA, 25 bp, Homo sapien
tgttatgtgccaggattttataagt

SEQ ID NO: 4642436 - DNA, 25 bp, Homo sapien
taattctcccaaacgcttatatgag

SEQ ID NO: 4642437 - DNA, 25 bp, Homo sapien
ttcaagcctgcacacccaaccattg

SEQ ID NO: 4642438 - DNA, 25 bp, Homo sapien
gagacagccacaattattattccta

SEQ ID NO: 4642439 - DNA, 25 bp, Homo sapien
gctgccaggatacttaatgccaaat

SEQ ID NO: 4642440 - DNA, 25 bp, Homo sapien
tcccttttcgatatggctgccagga

SEQ ID NO: 4642441 - DNA, 25 bp, Homo sapien
gtttttgccgccacaagtcttgaag

SEQ ID NO: 4642442 - DNA, 25 bp, Homo sapien
ggttcagcccaagtggatcctcatg

SEQ ID NO: 4642443 - DNA, 25 bp, Homo sapien
tattacagtaagacggattgcccac

SEQ ID NO: 4642444 - DNA, 25 bp, Homo sapien
gattgcccacattaaggttacccca

SEQ ID NO: 4642445 - DNA, 25 bp, Homo sapien
tgtaaagatctagcagctcactggg

SEQ ID NO: 4642446 - DNA, 25 bp, Homo sapien
tttttggcctgaccaccagagtggg

SEQ ID NO: 4642447 - DNA, 25 bp, Homo sapien
catccgagaaaatgatccttaggcc

SEQ ID NO: 4642448 - DNA, 25 bp, Homo sapien
tctgcgtacagtctgagggtggccc

SEQ ID NO: 4642449 - DNA, 25 bp, Homo sapien
gatccctctcgtagctctctgcgta

SEQ ID NO: 4642450 - DNA, 25 bp, Homo sapien
gaagatgagccgtgatgcatccgag

SEQ ID NO: 4642451 - DNA, 25 bp, Homo sapien
cccatggagctctctaaatttgcca

SEQ ID NO: 4642452 - DNA, 25 bp, Homo sapien
tttgccaggagctgcgagacacact

SEQ ID NO: 4642453 - DNA, 25 bp, Homo sapien
ggcccatggagctctctaaatttgc

SEQ ID NO: 4642454 - DNA, 25 bp, Homo sapien
ctctaaatttgccaggagctgcgag

SEQ ID NO: 4642455 - DNA, 25 bp, Homo sapien
caagatcagcaatggaatctctgca

SEQ ID NO: 4642456 - DNA, 25 bp, Homo sapien
agatcagcaatggaatctctgcaga

SEQ ID NO: 4642457 - DNA, 25 bp, Homo sapien
gaacaagatcagcaatggaatctct

SEQ ID NO: 4642458 - DNA, 25 bp, Homo sapien
ctgttgaattggaacaagatcagca

SEQ ID NO: 4642459 - DNA, 25 bp, Homo sapien
tgggttagagtgggtaaaacatcaa

SEQ ID NO: 4642460 - DNA, 25 bp, Homo sapien
ttgggttagagtgggtaaaacatca

SEQ ID NO: 4642461 - DNA, 25 bp, Homo sapien
ttgttccttaactactccacccaca

SEQ ID NO: 4642462 - DNA, 25 bp, Homo sapien
tattgttccttaactactccaccca

SEQ ID NO: 4642463 - DNA, 25 bp, Homo sapien
caaacaaatacttaaattcctcaat

SEQ ID NO: 4642464 - DNA, 25 bp, Homo sapien
gccataacaggaaaagggcgtagca

SEQ ID NO: 4642465 - DNA, 25 bp, Homo sapien
actgactgaatggacatctcctccc

SEQ ID NO: 4642466 - DNA, 25 bp, Homo sapien
tcattggccaaaaggatcccgaaaa

SEQ ID NO: 4642467 - DNA, 25 bp, Homo sapien
aaatataattctaagccccaaactg

SEQ ID NO: 4642468 - DNA, 25 bp, Homo sapien
caaggatcttggcacatttgtctgg

SEQ ID NO: 4642469 - DNA, 25 bp, Homo sapien
tggaaataaggatcccaaaggtcat

SEQ ID NO: 4642470 - DNA, 25 bp, Homo sapien
gagacaatgtcagtcctgctaagca

SEQ ID NO: 4642471 - DNA, 25 bp, Homo sapien
ggccaggcacccctataaatgcatc

SEQ ID NO: 4642472 - DNA, 25 bp, Homo sapien
tagagcagggattgttaagccagga

SEQ ID NO: 4642473 - DNA, 25 bp, Homo sapien
gctgcctctttggttagtctcctgg

SEQ ID NO: 4642474 - DNA, 25 bp, Homo sapien
ttcaagtttacaccctagagcaggg

SEQ ID NO: 4642475 - DNA, 25 bp, Homo sapien
cagaggcagactgtaatagaccaga

SEQ ID NO: 4642476 - DNA, 25 bp, Homo sapien
ccacgatcagtgttctcagtcctca

SEQ ID NO: 4642477 - DNA, 25 bp, Homo sapien
gacttcggaagccacgatcagtgtt

SEQ ID NO: 4642478 - DNA, 25 bp, Homo sapien
ttctccaaaagacttcggaagccac

SEQ ID NO: 4642479 - DNA, 25 bp, Homo sapien
gaagccacgatcagtgttctcagtc

SEQ ID NO: 4642480 - DNA, 25 bp, Homo sapien
cagtgggtcccctccggccagttct

SEQ ID NO: 4642481 - DNA, 25 bp, Homo sapien
gccagttctctcatgaatctgggat

SEQ ID NO: 4642482 - DNA, 25 bp, Homo sapien
tctcatgaatctgggatattttcag

SEQ ID NO: 4642483 - DNA, 25 bp, Homo sapien
ttttcagtgcgatggctatgagagg

SEQ ID NO: 4642484 - DNA, 25 bp, Homo sapien
agtgactgtgccgttcccaaggaag

SEQ ID NO: 4642485 - DNA, 25 bp, Homo sapien
gaaggcatcagtgaagcatctcccg

SEQ ID NO: 4642486 - DNA, 25 bp, Homo sapien
cacaaacaggtagcaagaaggcatc

SEQ ID NO: 4642487 - DNA, 25 bp, Homo sapien
tccgcaaatggcagggtgagtgact

SEQ ID NO: 4642488 - DNA, 25 bp, Homo sapien
gactacagcaataacgcattgctta

SEQ ID NO: 4642489 - DNA, 25 bp, Homo sapien
caataacgcattgcttaacagtcaa

SEQ ID NO: 4642490 - DNA, 25 bp, Homo sapien
cttgactacagcaataacgcattgc

SEQ ID NO: 4642491 - DNA, 25 bp, Homo sapien
cagcaataacgcattgcttaacagt

SEQ ID NO: 4642492 - DNA, 25 bp, Homo sapien
taccttactgggaatgtttccttgc

SEQ ID NO: 4642493 - DNA, 25 bp, Homo sapien
cactaaatgtcctagcaagtttctg

SEQ ID NO: 4642494 - DNA, 25 bp, Homo sapien
ttttattggccactaaatgtcctag

SEQ ID NO: 4642495 - DNA, 25 bp, Homo sapien
tagcaagtttctgacagaagcacag

SEQ ID NO: 4642496 - DNA, 25 bp, Homo sapien
catgtctcttgccataatagtgaaa

SEQ ID NO: 4642497 - DNA, 25 bp, Homo sapien
tacatgtctcttgccataatagtga

SEQ ID NO: 4642498 - DNA, 25 bp, Homo sapien
ctgttccatttaatacatgtctctt

SEQ ID NO: 4642499 - DNA, 25 bp, Homo sapien
gttccatttaatacatgtctcttgc

SEQ ID NO: 4642500 - DNA, 25 bp, Homo sapien
caaagggccaaaggctgatttactg

SEQ ID NO: 4642501 - DNA, 25 bp, Homo sapien
caaaggctgatttactggcagttac

SEQ ID NO: 4642502 - DNA, 25 bp, Homo sapien
gggaagctccttaagacatgtgtct

SEQ ID NO: 4642503 - DNA, 25 bp, Homo sapien
tatttccaaaggcacaccgtttctc

SEQ ID NO: 4642504 - DNA, 25 bp, Homo sapien
aagctctgctgcttcggataatctc

SEQ ID NO: 4642505 - DNA, 25 bp, Homo sapien
gagctatttcttctagtaaggactc

SEQ ID NO: 4642506 - DNA, 25 bp, Homo sapien
tcttctagtaaggactccagctggt

SEQ ID NO: 4642507 - DNA, 25 bp, Homo sapien
gcttcggataatctcttgctgtttg

SEQ ID NO: 4642508 - DNA, 25 bp, Homo sapien
tctccaaattctacaaggttccatg

SEQ ID NO: 4642509 - DNA, 25 bp, Homo sapien
gaggcattgctctagctcacctaca

SEQ ID NO: 4642510 - DNA, 25 bp, Homo sapien
catattaggtgcagataggcatgga

SEQ ID NO: 4642511 - DNA, 25 bp, Homo sapien
gaccctccatgcaaaatcttaccag

SEQ ID NO: 4642512 - DNA, 25 bp, Homo sapien
gaaattctccctggtggtctgagca

SEQ ID NO: 4642513 - DNA, 25 bp, Homo sapien
tatttgaatccttggcattgagggc

SEQ ID NO: 4642514 - DNA, 25 bp, Homo sapien
cactcatggttgtccaatagggaag

SEQ ID NO: 4642515 - DNA, 25 bp, Homo sapien
tgacttgaacaaggaccatcattgg

SEQ ID NO: 4642516 - DNA, 25 bp, Homo sapien
ctccatcattgctgaatgcatagat

SEQ ID NO: 4642517 - DNA, 25 bp, Homo sapien
tctccatcattgctgaatgcataga

SEQ ID NO: 4642518 - DNA, 25 bp, Homo sapien
tccatcattgctgaatgcatagatt

SEQ ID NO: 4642519 - DNA, 25 bp, Homo sapien
gaatagcttggcataacccactggg

SEQ ID NO: 4642520 - DNA, 25 bp, Homo sapien
taaacactccctgtaggcactggaa

SEQ ID NO: 4642521 - DNA, 25 bp, Homo sapien
tttgcactcaaaatggatacccagg

SEQ ID NO: 4642522 - DNA, 25 bp, Homo sapien
ttatagagagtccatagccggcctg

SEQ ID NO: 4642523 - DNA, 25 bp, Homo sapien
gaagaacaaaacagctacacgaagc

SEQ ID NO: 4642524 - DNA, 25 bp, Homo sapien
gggaacagctgagtgtcccacccaa

SEQ ID NO: 4642525 - DNA, 25 bp, Homo sapien
agagaccagcgccttttaatcaaag

SEQ ID NO: 4642526 - DNA, 25 bp, Homo sapien
ttaatcaaaggagggctgtacgttc

SEQ ID NO: 4642527 - DNA, 25 bp, Homo sapien
tcttcaaagggcgtaagccaagagg

SEQ ID NO: 4642528 - DNA, 25 bp, Homo sapien
catgggctgacggactaagggcctc

SEQ ID NO: 4642529 - DNA, 25 bp, Homo sapien
tgacaggatgcagttcctcatgggc

SEQ ID NO: 4642530 - DNA, 25 bp, Homo sapien
gatttgattgcaagctcacgtggtc

SEQ ID NO: 4642531 - DNA, 25 bp, Homo sapien
tattctttcctatagatcagcagca

SEQ ID NO: 4642532 - DNA, 25 bp, Homo sapien
taaagggaacttacctacactgcaa

SEQ ID NO: 4642533 - DNA, 25 bp, Homo sapien
catattggaccatgtgaaaagtgaa

SEQ ID NO: 4642534 - DNA, 25 bp, Homo sapien
cacgagaaactgtacatagttcagt

SEQ ID NO: 4642535 - DNA, 25 bp, Homo sapien
tctataggatgcagtacatgaacct

SEQ ID NO: 4642536 - DNA, 25 bp, Homo sapien
cattgtctaccgcactggttggtgt

SEQ ID NO: 4642537 - DNA, 25 bp, Homo sapien
cacgtgtcccaaggtaactctttcg

SEQ ID NO: 4642538 - DNA, 25 bp, Homo sapien
ctctttcgggaaagtgaaattgctt

SEQ ID NO: 4642539 - DNA, 25 bp, Homo sapien
ccaaaggatcaaaggacccaaagag

SEQ ID NO: 4642540 - DNA, 25 bp, Homo sapien
caaaggatcaaaggacccaaagaga

SEQ ID NO: 4642541 - DNA, 25 bp, Homo sapien
tcagagcttcgctcctccccgtcca

SEQ ID NO: 4642542 - DNA, 25 bp, Homo sapien
tggatgaagtcaccgcctctgacct

SEQ ID NO: 4642543 - DNA, 25 bp, Homo sapien
tgaagtcaccgcctctgaccttggg

SEQ ID NO: 4642544 - DNA, 25 bp, Homo sapien
ggaatatttcctgttgccaacaaag

SEQ ID NO: 4642545 - DNA, 25 bp, Homo sapien
tgttgccaacaaagcctgcttggtg

SEQ ID NO: 4642546 - DNA, 25 bp, Homo sapien
tgcagcctgcaatgctttctgggtt

SEQ ID NO: 4642547 - DNA, 25 bp, Homo sapien
ctgccagtctctaacaccactcctg

SEQ ID NO: 4642548 - DNA, 25 bp, Homo sapien
gccagtctctaacaccactcctgac

SEQ ID NO: 4642549 - DNA, 25 bp, Homo sapien
aagcctgcatgcgaactccctgcag

SEQ ID NO: 4642550 - DNA, 25 bp, Homo sapien
gaccagccctgatgcgatggaaatg

SEQ ID NO: 4642551 - DNA, 25 bp, Homo sapien
tggcatcatgcacacaggacaaagc

SEQ ID NO: 4642552 - DNA, 25 bp, Homo sapien
aagagcacatttttcactggcatca

SEQ ID NO: 4642553 - DNA, 25 bp, Homo sapien
gaagtgtgctcccatggtttgaaga

SEQ ID NO: 4642554 - DNA, 25 bp, Homo sapien
tacagggctattttcagagcactcc

SEQ ID NO: 4642555 - DNA, 25 bp, Homo sapien
cataccgcagtcttccaaaagggtc

SEQ ID NO: 4642556 - DNA, 25 bp, Homo sapien
tttaggtggtgctattggatggaac

SEQ ID NO: 4642557 - DNA, 25 bp, Homo sapien
gttaatcactacagggctattttca

SEQ ID NO: 4642558 - DNA, 25 bp, Homo sapien
cacagaggccagcatagtattgagg

SEQ ID NO: 4642559 - DNA, 25 bp, Homo sapien
ctggttgggctgtaagacagagcca

SEQ ID NO: 4642560 - DNA, 25 bp, Homo sapien
ctgacagaggggacgcctggggagg

SEQ ID NO: 4642561 - DNA, 25 bp, Homo sapien
gttgggctgtaagacagagccagaa

SEQ ID NO: 4642562 - DNA, 25 bp, Homo sapien
tgggctgtaagacagagccagaaaa

SEQ ID NO: 4642563 - DNA, 25 bp, Homo sapien
cggtcttgttggaaatcacagtgga

SEQ ID NO: 4642564 - DNA, 25 bp, Homo sapien
caagagttgaggctctggagcaaat

SEQ ID NO: 4642565 - DNA, 25 bp, Homo sapien
cccagtgagtcattgcggtcttgtt

SEQ ID NO: 4642566 - DNA, 25 bp, Homo sapien
tggagcaaattcagggcccagtgag

SEQ ID NO: 4642567 - DNA, 25 bp, Homo sapien
caagctgtgcattacaggtggctgc

SEQ ID NO: 4642568 - DNA, 25 bp, Homo sapien
catgctataaatggcatgcctagac

SEQ ID NO: 4642569 - DNA, 25 bp, Homo sapien
tgcctagacccaagagaccacttat

SEQ ID NO: 4642570 - DNA, 25 bp, Homo sapien
aagttgccgtcaaacctagaggaat

SEQ ID NO: 4642571 - DNA, 25 bp, Homo sapien
tgatgagaagcactatggccttcat

SEQ ID NO: 4642572 - DNA, 25 bp, Homo sapien
gcctgatgagaagcactatggcctt

SEQ ID NO: 4642573 - DNA, 25 bp, Homo sapien
ttcagcctgatgagaagcactatgg

SEQ ID NO: 4642574 - DNA, 25 bp, Homo sapien
ccttcagcctgatgagaagcactat

SEQ ID NO: 4642575 - DNA, 25 bp, Homo sapien
cttctgggttctcgtcggtgatgta

SEQ ID NO: 4642576 - DNA, 25 bp, Homo sapien
atcctccgtgaggcgggctgcaatg

SEQ ID NO: 4642577 - DNA, 25 bp, Homo sapien
gctgcaatgtgctcctgccagctgg

SEQ ID NO: 4642578 - DNA, 25 bp, Homo sapien
gcaatgtgctcctgccagctggccg

SEQ ID NO: 4642579 - DNA, 25 bp, Homo sapien
tcctccgtgaggcgggctgcaatgt

SEQ ID NO: 4642580 - DNA, 25 bp, Homo sapien
gggcactgtaatccttgggatccca

SEQ ID NO: 4642581 - DNA, 25 bp, Homo sapien
actgtaatccttgggatcccaggga

SEQ ID NO: 4642582 - DNA, 25 bp, Homo sapien
ctagcgggcactgtaatccttggga

SEQ ID NO: 4642583 - DNA, 25 bp, Homo sapien
ccaaggggctgcacagcatcgtgtg

SEQ ID NO: 4642584 - DNA, 25 bp, Homo sapien
ccaagttgtttccatagatttcgtt

SEQ ID NO: 4642585 - DNA, 25 bp, Homo sapien
gacacccaagttgtttccatagatt

SEQ ID NO: 4642586 - DNA, 25 bp, Homo sapien
tgccaagacacccaagttgtttcca

SEQ ID NO: 4642587 - DNA, 25 bp, Homo sapien
gccaagacacccaagttgtttccat

SEQ ID NO: 4642588 - DNA, 25 bp, Homo sapien
ttcagtgtcctcaggatacagcaca

SEQ ID NO: 4642589 - DNA, 25 bp, Homo sapien
tgtcctcaggatacagcacacagaa

SEQ ID NO: 4642590 - DNA, 25 bp, Homo sapien
cagtgtcctcaggatacagcacaca

SEQ ID NO: 4642591 - DNA, 25 bp, Homo sapien
tcctcaggatacagcacacagaaca

SEQ ID NO: 4642592 - DNA, 25 bp, Homo sapien
gtcataagcagtggcaaaaccaacc

SEQ ID NO: 4642593 - DNA, 25 bp, Homo sapien
catcccaaggagcatctttcaccaa

SEQ ID NO: 4642594 - DNA, 25 bp, Homo sapien
caagaagtcataagcagtggcaaaa

SEQ ID NO: 4642595 - DNA, 25 bp, Homo sapien
ccagggagtgagcaagcgggacctc

SEQ ID NO: 4642596 - DNA, 25 bp, Homo sapien
gtcagtactaggcttcctgtgagca

SEQ ID NO: 4642597 - DNA, 25 bp, Homo sapien
ttgattcgtcagtactaggcttcct

SEQ ID NO: 4642598 - DNA, 25 bp, Homo sapien
tggtgtagcttccatacacaactct

SEQ ID NO: 4642599 - DNA, 25 bp, Homo sapien
gtagcttccatacacaactctttca

SEQ ID NO: 4642600 - DNA, 25 bp, Homo sapien
ctggcaggatggttctatacataaa

SEQ ID NO: 4642601 - DNA, 25 bp, Homo sapien
ggttctatacataaatgcaaagtgt

SEQ ID NO: 4642602 - DNA, 25 bp, Homo sapien
tgttgtttaagccacggatggccaa

SEQ ID NO: 4642603 - DNA, 25 bp, Homo sapien
caggatggttctatacataaatgca

SEQ ID NO: 4642604 - DNA, 25 bp, Homo sapien
gttaccactgctgttacgcatgata

SEQ ID NO: 4642605 - DNA, 25 bp, Homo sapien
ccactgctgttacgcatgataaatt

SEQ ID NO: 4642606 - DNA, 25 bp, Homo sapien
taccactgctgttacgcatgataaa

SEQ ID NO: 4642607 - DNA, 25 bp, Homo sapien
actgctgttacgcatgataaattta

SEQ ID NO: 4642608 - DNA, 25 bp, Homo sapien
gtgcaccggcgctgccctttggaca

SEQ ID NO: 4642609 - DNA, 25 bp, Homo sapien
tgcaccggcgctgccctttggacag

SEQ ID NO: 4642610 - DNA, 25 bp, Homo sapien
aactgatttcaagctggcatcatac

SEQ ID NO: 4642611 - DNA, 25 bp, Homo sapien
caaagtctggaggaggaactgattt

SEQ ID NO: 4642612 - DNA, 25 bp, Homo sapien
aggaactgatttcaagctggcatca

SEQ ID NO: 4642613 - DNA, 25 bp, Homo sapien
tcaaaataatgcagcgtaggggtgc

SEQ ID NO: 4642614 - DNA, 25 bp, Homo sapien
tcaataacgaaaggcacacaactgg

SEQ ID NO: 4642615 - DNA, 25 bp, Homo sapien
tcacatattgcatgtccccccggtt

SEQ ID NO: 4642616 - DNA, 25 bp, Homo sapien
tggcctgtacagagcctcaataacg

SEQ ID NO: 4642617 - DNA, 25 bp, Homo sapien
tgatcataatgttcatgccctgtcc

SEQ ID NO: 4642618 - DNA, 25 bp, Homo sapien
tgtgacttgacccttccagggagaa

SEQ ID NO: 4642619 - DNA, 25 bp, Homo sapien
ctgtgacttgacccttccagggaga

SEQ ID NO: 4642620 - DNA, 25 bp, Homo sapien
cagattcctctgaacattcttcagg

SEQ ID NO: 4642621 - DNA, 25 bp, Homo sapien
tggatgtaggaggatcagattcctc

SEQ ID NO: 4642622 - DNA, 25 bp, Homo sapien
gatgtaggaggatcagattcctctg

SEQ ID NO: 4642623 - DNA, 25 bp, Homo sapien
ctgtggatgtaggaggatcagattc

SEQ ID NO: 4642624 - DNA, 25 bp, Homo sapien
tctcccaggtgtatttggtctacaa

SEQ ID NO: 4642625 - DNA, 25 bp, Homo sapien
tcctctcccaggtgtatttggtcta

SEQ ID NO: 4642626 - DNA, 25 bp, Homo sapien
caggtgtatttggtctacaaggaga

SEQ ID NO: 4642627 - DNA, 25 bp, Homo sapien
cccaggtgtatttggtctacaagga

SEQ ID NO: 4642628 - DNA, 25 bp, Homo sapien
tgatgaaagccccatggacaccatc

SEQ ID NO: 4642629 - DNA, 25 bp, Homo sapien
tgaaagccccatggacaccatctac

SEQ ID NO: 4642630 - DNA, 25 bp, Homo sapien
gatgaaagccccatggacaccatct

SEQ ID NO: 4642631 - DNA, 25 bp, Homo sapien
ctgatgaaagccccatggacaccat

SEQ ID NO: 4642632 - DNA, 25 bp, Homo sapien
caggtacattgcgtaggcatgttct

SEQ ID NO: 4642633 - DNA, 25 bp, Homo sapien
attgcgtaggcatgttctctggtgg

SEQ ID NO: 4642634 - DNA, 25 bp, Homo sapien
gtccacaggtacattgcgtaggcat

SEQ ID NO: 4642635 - DNA, 25 bp, Homo sapien
tgctgagagtctctgtggatggtga

SEQ ID NO: 4642636 - DNA, 25 bp, Homo sapien
aatgctgctcttgatggctgaattc

SEQ ID NO: 4642637 - DNA, 25 bp, Homo sapien
tcagcaatgacctgtgcaaaggcag

SEQ ID NO: 4642638 - DNA, 25 bp, Homo sapien
caatgctgctcttgatggctgaatt

SEQ ID NO: 4642639 - DNA, 25 bp, Homo sapien
gatcagcaatgacctgtgcaaaggc

SEQ ID NO: 4642640 - DNA, 25 bp, Homo sapien
gcaggttctgttccacaatagcagc

SEQ ID NO: 4642641 - DNA, 25 bp, Homo sapien
ccacaatagcagcatagtccttcac

SEQ ID NO: 4642642 - DNA, 25 bp, Homo sapien
atgctgcaggttctgttccacaata

SEQ ID NO: 4642643 - DNA, 25 bp, Homo sapien
cttaaaatgctgcaggttctgttcc

SEQ ID NO: 4642644 - DNA, 25 bp, Homo sapien
cctgtcgatggcctcttcagcctgt

SEQ ID NO: 4642645 - DNA, 25 bp, Homo sapien
ttacggcaaaaatcctgtcgatggc

SEQ ID NO: 4642646 - DNA, 25 bp, Homo sapien
cgatggcctcttcagcctgtctctt

SEQ ID NO: 4642647 - DNA, 25 bp, Homo sapien
ctgtgttacggcaaaaatcctgtcg

SEQ ID NO: 4642648 - DNA, 25 bp, Homo sapien
acagatttatagcattcgcctgccc

SEQ ID NO: 4642649 - DNA, 25 bp, Homo sapien
cacagatttatagcattcgcctgcc

SEQ ID NO: 4642650 - DNA, 25 bp, Homo sapien
gatttatagcattcgcctgcccttc

SEQ ID NO: 4642651 - DNA, 25 bp, Homo sapien
cagatttatagcattcgcctgccct

SEQ ID NO: 4642652 - DNA, 25 bp, Homo sapien
tcatcttcatttatgggtagttctt

SEQ ID NO: 4642653 - DNA, 25 bp, Homo sapien
tcaagccccatttttatgtttctca

SEQ ID NO: 4642654 - DNA, 25 bp, Homo sapien
gcctgaatctgagctttctgtctaa

SEQ ID NO: 4642655 - DNA, 25 bp, Homo sapien
tatatctgcaaaatctaagaggttt

SEQ ID NO: 4642656 - DNA, 25 bp, Homo sapien
gcattcggggctttcaactttggta

SEQ ID NO: 4642657 - DNA, 25 bp, Homo sapien
ctggtggacagaagcgcctgcaggc

SEQ ID NO: 4642658 - DNA, 25 bp, Homo sapien
tctgtgagcattcggggctttcaac

SEQ ID NO: 4642659 - DNA, 25 bp, Homo sapien
cctgcaggcagtaattcttgttcca

SEQ ID NO: 4642660 - DNA, 25 bp, Homo sapien
ggcaagaaccgcaggtgcacacaca

SEQ ID NO: 4642661 - DNA, 25 bp, Homo sapien
aagaaccgcaggtgcacacacaacc

SEQ ID NO: 4642662 - DNA, 25 bp, Homo sapien
aaccgcaggtgcacacacaacctgg

SEQ ID NO: 4642663 - DNA, 25 bp, Homo sapien
gcacacacaacctggctgggtccag

SEQ ID NO: 4642664 - DNA, 25 bp, Homo sapien
tggtgccctatgaagaggagcagcc

SEQ ID NO: 4642665 - DNA, 25 bp, Homo sapien
gaaagattgcaggtggtgccctatg

SEQ ID NO: 4642666 - DNA, 25 bp, Homo sapien
ggtggtgccctatgaagaggagcag

SEQ ID NO: 4642667 - DNA, 25 bp, Homo sapien
cagtgaaagattgcaggtggtgccc

SEQ ID NO: 4642668 - DNA, 25 bp, Homo sapien
aagcgattgcttgtagtattattgc

SEQ ID NO: 4642669 - DNA, 25 bp, Homo sapien
gggagacattgctcgctctcctgtc

SEQ ID NO: 4642670 - DNA, 25 bp, Homo sapien
gttgctgaatgaggtgcggttacca

SEQ ID NO: 4642671 - DNA, 25 bp, Homo sapien
gcggttaccagcgtcccctgtagtc

SEQ ID NO: 4642672 - DNA, 25 bp, Homo sapien
taaaaaatgagagccagtgtgttcc

SEQ ID NO: 4642673 - DNA, 25 bp, Homo sapien
acttgtctcatattcctgctcacag

SEQ ID NO: 4642674 - DNA, 25 bp, Homo sapien
gagccagtgtgttccacttgtctca

SEQ ID NO: 4642675 - DNA, 25 bp, Homo sapien
tccacttgtctcatattcctgctca

SEQ ID NO: 4642676 - DNA, 25 bp, Homo sapien
gatctcactgaaggtgaaaccagga

SEQ ID NO: 4642677 - DNA, 25 bp, Homo sapien
caggaaagtacttcactcagaggtg

SEQ ID NO: 4642678 - DNA, 25 bp, Homo sapien
tcagcttccaaaagagtcgtaggcc

SEQ ID NO: 4642679 - DNA, 25 bp, Homo sapien
ccgggtcttagctacagaggcgaaa

SEQ ID NO: 4642680 - DNA, 25 bp, Homo sapien
gagaggtgggagaatgaggaataag

SEQ ID NO: 4642681 - DNA, 25 bp, Homo sapien
accaggccaatgtcaagaagtggag

SEQ ID NO: 4642682 - DNA, 25 bp, Homo sapien
gaagaaccaggccaatgtcaagaag

SEQ ID NO: 4642683 - DNA, 25 bp, Homo sapien
tgaggaataaggtgtgggaaaaggc

SEQ ID NO: 4642684 - DNA, 25 bp, Homo sapien
tcttcgttagaagcaattcgtggcc

SEQ ID NO: 4642685 - DNA, 25 bp, Homo sapien
cagtgaaatttgacccgtggctaga

SEQ ID NO: 4642686 - DNA, 25 bp, Homo sapien
gaaagcaagactctagggtcgggat

SEQ ID NO: 4642687 - DNA, 25 bp, Homo sapien
catatacaacgaagagacgtccgga

SEQ ID NO: 4642688 - DNA, 25 bp, Homo sapien
tatttaaggttaatctacgcagaga

SEQ ID NO: 4642689 - DNA, 25 bp, Homo sapien
tttaaggttaatctacgcagagaga

SEQ ID NO: 4642690 - DNA, 25 bp, Homo sapien
tttatttaaggttaatctacgcaga

SEQ ID NO: 4642691 - DNA, 25 bp, Homo sapien
taaggttaatctacgcagagagaca

SEQ ID NO: 4642692 - DNA, 25 bp, Homo sapien
ctggagatgccatcctgctttcttc
